United States Patent Application Publication US 2005/0244851 A1 - sequence listing, part 103

SEQ ID NO: 4015417 - DNA, 25 bp, Homo sapien
atccctaagccacttgtatggaaag

SEQ ID NO: 4015418 - DNA, 25 bp, Homo sapien
cctaagccacttgtatggaaagaaa

SEQ ID NO: 4015419 - DNA, 25 bp, Homo sapien
tcatccaaataagtcaactactcta

SEQ ID NO: 4015420 - DNA, 25 bp, Homo sapien
aagtcaactactctaccccatccct

SEQ ID NO: 4015421 - DNA, 25 bp, Homo sapien
ctcaggtactcgcatgggcatgtca

SEQ ID NO: 4015422 - DNA, 25 bp, Homo sapien
tcctcaggtactcgcatgggcatgt

SEQ ID NO: 4015423 - DNA, 25 bp, Homo sapien
aggtactcgcatgggcatgtcactg

SEQ ID NO: 4015424 - DNA, 25 bp, Homo sapien
cttcctcaggtactcgcatgggcat

SEQ ID NO: 4015425 - DNA, 25 bp, Homo sapien
ctgtggggtcaggacaatagagagc

SEQ ID NO: 4015426 - DNA, 25 bp, Homo sapien
gggtcaggacaatagagagcttcac

SEQ ID NO: 4015427 - DNA, 25 bp, Homo sapien
ggtcaggacaatagagagcttcacc

SEQ ID NO: 4015428 - DNA, 25 bp, Homo sapien
tggggtcaggacaatagagagcttc

SEQ ID NO: 4015429 - DNA, 25 bp, Homo sapien
ttgcagaatgagaacaggggctcat

SEQ ID NO: 4015430 - DNA, 25 bp, Homo sapien
cagaatgagaacaggggctcatgat

SEQ ID NO: 4015431 - DNA, 25 bp, Homo sapien
agaacaggggctcatgatgagtgcc

SEQ ID NO: 4015432 - DNA, 25 bp, Homo sapien
acaggggctcatgatgagtgccaac

SEQ ID NO: 4015433 - DNA, 25 bp, Homo sapien
gttgaatgagtggaaaaacaaggtg

SEQ ID NO: 4015434 - DNA, 25 bp, Homo sapien
ttgaatgagtggaaaaacaaggtga

SEQ ID NO: 4015435 - DNA, 25 bp, Homo sapien
gtgtgaaacaggaacaatagtttca

SEQ ID NO: 4015436 - DNA, 25 bp, Homo sapien
tgtgaaacaggaacaatagtttcat

SEQ ID NO: 4015437 - DNA, 25 bp, Homo sapien
tgaaacaggaacaatagtttcattc

SEQ ID NO: 4015438 - DNA, 25 bp, Homo sapien
tgtgtgaaacaggaacaatagtttc

SEQ ID NO: 4015439 - DNA, 25 bp, Homo sapien
ccaggtgaccttagagtgtaagtac

SEQ ID NO: 4015440 - DNA, 25 bp, Homo sapien
tgaggccatagtgcaaccaggtgac

SEQ ID NO: 4015441 - DNA, 25 bp, Homo sapien
tgtaagtacacatgatcgccagcta

SEQ ID NO: 4015442 - DNA, 25 bp, Homo sapien
caagactgggtagttctggcctgga

SEQ ID NO: 4015443 - DNA, 25 bp, Homo sapien
tgaggtagctggaggatcattgttc

SEQ ID NO: 4015444 - DNA, 25 bp, Homo sapien
agccccgtgaggtagctggaggatc

SEQ ID NO: 4015445 - DNA, 25 bp, Homo sapien
gaggtagctggaggatcattgttcc

SEQ ID NO: 4015446 - DNA, 25 bp, Homo sapien
cccgtgaggtagctggaggatcatt

SEQ ID NO: 4015447 - DNA, 25 bp, Homo sapien
tcttgctttggtgggccacattttc

SEQ ID NO: 4015448 - DNA, 25 bp, Homo sapien
gccctcaagtttcttgctttggtgg

SEQ ID NO: 4015449 - DNA, 25 bp, Homo sapien
tttcttgctttggtgggccacattt

SEQ ID NO: 4015450 - DNA, 25 bp, Homo sapien
caagtttcttgctttggtgggccac

SEQ ID NO: 4015451 - DNA, 25 bp, Homo sapien
tatgaagacctgacacactatgcta

SEQ ID NO: 4015452 - DNA, 25 bp, Homo sapien
caggatgccggagagctgtgacttc

SEQ ID NO: 4015453 - DNA, 25 bp, Homo sapien
gtgccctgggcccaaactatgaaga

SEQ ID NO: 4015454 - DNA, 25 bp, Homo sapien
tatgctaaaagtccaacgctgggtg

SEQ ID NO: 4015455 - DNA, 25 bp, Homo sapien
gttagtcacggtgcagtcattccca

SEQ ID NO: 4015456 - DNA, 25 bp, Homo sapien
tctcggaatgatgaagcactctgtc

SEQ ID NO: 4015457 - DNA, 25 bp, Homo sapien
tgtctcaagtccaagaatgcctcct

SEQ ID NO: 4015458 - DNA, 25 bp, Homo sapien
gatatgaccaaagtaaccacctgcc

SEQ ID NO: 4015459 - DNA, 25 bp, Homo sapien
cattgtcaaatgtggcgatactgca

SEQ ID NO: 4015460 - DNA, 25 bp, Homo sapien
tcaagtgaggtgacattagatctca

SEQ ID NO: 4015461 - DNA, 25 bp, Homo sapien
tactgcatgggagggcactgtcaag

SEQ ID NO: 4015462 - DNA, 25 bp, Homo sapien
aatttataaaagtctgctggccctg

SEQ ID NO: 4015463 - DNA, 25 bp, Homo sapien
ctgatctcgtgatctccgcgcctcg

SEQ ID NO: 4015464 - DNA, 25 bp, Homo sapien
accacatccagctaattttttgtat

SEQ ID NO: 4015465 - DNA, 25 bp, Homo sapien
actacaagtgctgccaccacatcca

SEQ ID NO: 4015466 - DNA, 25 bp, Homo sapien
cgtgcccagcctaatttttgcattt

SEQ ID NO: 4015467 - DNA, 25 bp, Homo sapien
ttcacttggatgtaatgcttcacgc

SEQ ID NO: 4015468 - DNA, 25 bp, Homo sapien
gacattatgtaaccatctcaagaag

SEQ ID NO: 4015469 - DNA, 25 bp, Homo sapien
tagtgtatggttggcgtattctgtg

SEQ ID NO: 4015470 - DNA, 25 bp, Homo sapien
cagattcagttgactaaagcacctc

SEQ ID NO: 4015471 - DNA, 25 bp, Homo sapien
caattataataaggctgggcgctgt

SEQ ID NO: 4015472 - DNA, 25 bp, Homo sapien
tctctcttgaaggagagagcaaaag

SEQ ID NO: 4015473 - DNA, 25 bp, Homo sapien
atgggatgaggtctctcttgaagga

SEQ ID NO: 4015474 - DNA, 25 bp, Homo sapien
aaattagctgagtgccgtggcttgc

SEQ ID NO: 4015475 - DNA, 25 bp, Homo sapien
tcatttcaagctctgaaaagatatt

SEQ ID NO: 4015476 - DNA, 25 bp, Homo sapien
agttaatgggtttttgtgcctgaag

SEQ ID NO: 4015477 - DNA, 25 bp, Homo sapien
gttaatgggtttttgtgcctgaaga

SEQ ID NO: 4015478 - DNA, 25 bp, Homo sapien
tggcatgatcctggctcactgcaac

SEQ ID NO: 4015479 - DNA, 25 bp, Homo sapien
aatggcatgatcctggctcactgca

SEQ ID NO: 4015480 - DNA, 25 bp, Homo sapien
tttttttaatgaggcggagtctcgc

SEQ ID NO: 4015481 - DNA, 25 bp, Homo sapien
gcaatggcatgatcctggctcactg

SEQ ID NO: 4015482 - DNA, 25 bp, Homo sapien
gaaggtagaatgaggcatgttgaca

SEQ ID NO: 4015483 - DNA, 25 bp, Homo sapien
tccttgctcaacaggaagggtccat

SEQ ID NO: 4015484 - DNA, 25 bp, Homo sapien
cattcagtcggactgggtggcttag

SEQ ID NO: 4015485 - DNA, 25 bp, Homo sapien
acatctcaactatcacagcagccgg

SEQ ID NO: 4015486 - DNA, 25 bp, Homo sapien
gaccctaggttgttgctacccgata

SEQ ID NO: 4015487 - DNA, 25 bp, Homo sapien
cactgtggcatcaccctgaattctt

SEQ ID NO: 4015488 - DNA, 25 bp, Homo sapien
cctacaactatcttggtaaatggct

SEQ ID NO: 4015489 - DNA, 25 bp, Homo sapien
gacagctaatcacaaacaacctgcg

SEQ ID NO: 4015490 - DNA, 25 bp, Homo sapien
tcatcccaagaccattaccatcctg

SEQ ID NO: 4015491 - DNA, 25 bp, Homo sapien
ttgaagcttcgtctgtatttctggc

SEQ ID NO: 4015492 - DNA, 25 bp, Homo sapien
agaccattaccatcctgcgccccat

SEQ ID NO: 4015493 - DNA, 25 bp, Homo sapien
gtgaatggtgggtaacaattgaagc

SEQ ID NO: 4015494 - DNA, 25 bp, Homo sapien
taatattaaactgggctgatgagag

SEQ ID NO: 4015495 - DNA, 25 bp, Homo sapien
gttactgcggatcaaaattagactc

SEQ ID NO: 4015496 - DNA, 25 bp, Homo sapien
gaattgtaaacctggtggtccgaga

SEQ ID NO: 4015497 - DNA, 25 bp, Homo sapien
ttcaaccacagaaataccgggcagt

SEQ ID NO: 4015498 - DNA, 25 bp, Homo sapien
ccaatctggtgaaactctatgtctc

SEQ ID NO: 4015499 - DNA, 25 bp, Homo sapien
tctcctcacctttgacaatgtactt

SEQ ID NO: 4015500 - DNA, 25 bp, Homo sapien
tataagaaccagtgataatcacacc

SEQ ID NO: 4015501 - DNA, 25 bp, Homo sapien
caatgtactttatgagatccacctc

SEQ ID NO: 4015502 - DNA, 25 bp, Homo sapien
cctgcctgcaaaacatggctcttca

SEQ ID NO: 4015503 - DNA, 25 bp, Homo sapien
ctgcctgcaaaacatggctcttcac

SEQ ID NO: 4015504 - DNA, 25 bp, Homo sapien
tgcctgcaaaacatggctcttcacc

SEQ ID NO: 4015505 - DNA, 25 bp, Homo sapien
gagcatcagaaggtctaggtggccc

SEQ ID NO: 4015506 - DNA, 25 bp, Homo sapien
cccagggcctggtatgtggtgatcg

SEQ ID NO: 4015507 - DNA, 25 bp, Homo sapien
ggtgatcgctcagggcccattttct

SEQ ID NO: 4015508 - DNA, 25 bp, Homo sapien
tagattgttacaaaggtcagaggct

SEQ ID NO: 4015509 - DNA, 25 bp, Homo sapien
cactgagggcccttggactaaatcc

SEQ ID NO: 4015510 - DNA, 25 bp, Homo sapien
aagccactgagggcccttggactaa

SEQ ID NO: 4015511 - DNA, 25 bp, Homo sapien
gccactgagggcccttggactaaat

SEQ ID NO: 4015512 - DNA, 25 bp, Homo sapien
actgagggcccttggactaaatcca

SEQ ID NO: 4015513 - DNA, 25 bp, Homo sapien
caaggcatccacattctaggaaaga

SEQ ID NO: 4015514 - DNA, 25 bp, Homo sapien
gactccagagtctagatttataacc

SEQ ID NO: 4015515 - DNA, 25 bp, Homo sapien
taaccactatgttacggctgccagt

SEQ ID NO: 4015516 - DNA, 25 bp, Homo sapien
ccagatgccattctaggttctaggg

SEQ ID NO: 4015517 - DNA, 25 bp, Homo sapien
ggtttatactgaatagcgcaatgtg

SEQ ID NO: 4015518 - DNA, 25 bp, Homo sapien
cacatgaatgttgagagcaggttta

SEQ ID NO: 4015519 - DNA, 25 bp, Homo sapien
gaatagcgcaatgtgaaaaaacccc

SEQ ID NO: 4015520 - DNA, 25 bp, Homo sapien
tgtccactcaaagacttgcacatga

SEQ ID NO: 4015521 - DNA, 25 bp, Homo sapien
ttaatgcctgcatccacggcctcac

SEQ ID NO: 4015522 - DNA, 25 bp, Homo sapien
cttaatgcctgcatccacggcctca

SEQ ID NO: 4015523 - DNA, 25 bp, Homo sapien
tcatgctgtttacatgaacgtaaag

SEQ ID NO: 4015524 - DNA, 25 bp, Homo sapien
catgctgtttacatgaacgtaaagc

SEQ ID NO: 4015525 - DNA, 25 bp, Homo sapien
gctgtttacatgaacgtaaagcttc

SEQ ID NO: 4015526 - DNA, 25 bp, Homo sapien
tgctgtttacatgaacgtaaagctt

SEQ ID NO: 4015527 - DNA, 25 bp, Homo sapien
gcctaaaggaactgtctttacatac

SEQ ID NO: 4015528 - DNA, 25 bp, Homo sapien
tttgccatccttgcgattatctcag

SEQ ID NO: 4015529 - DNA, 25 bp, Homo sapien
taaggtctttgttctacagtaatga

SEQ ID NO: 4015530 - DNA, 25 bp, Homo sapien
tctggatttaccagcttgcccaact

SEQ ID NO: 4015531 - DNA, 25 bp, Homo sapien
gatgcgggatgtttgcttcaagtac

SEQ ID NO: 4015532 - DNA, 25 bp, Homo sapien
aagcagttgccaaacaaacagaact

SEQ ID NO: 4015533 - DNA, 25 bp, Homo sapien
gatcttgttctatcgggtttaaagc

SEQ ID NO: 4015534 - DNA, 25 bp, Homo sapien
cttctgatcttgttctatcgggttt

SEQ ID NO: 4015535 - DNA, 25 bp, Homo sapien
ttctatcgggtttaaagcagttgcc

SEQ ID NO: 4015536 - DNA, 25 bp, Homo sapien
tcacatgttacgaagcagttttttc

SEQ ID NO: 4015537 - DNA, 25 bp, Homo sapien
tggacttcacatgttacgaagcagt

SEQ ID NO: 4015538 - DNA, 25 bp, Homo sapien
ctggacttcacatgttacgaagcag

SEQ ID NO: 4015539 - DNA, 25 bp, Homo sapien
catgttacgaagcagttttttcatg

SEQ ID NO: 4015540 - DNA, 25 bp, Homo sapien
tgatattttctcctggtaacaattc

SEQ ID NO: 4015541 - DNA, 25 bp, Homo sapien
cagcaagtagattgatattttctcc

SEQ ID NO: 4015542 - DNA, 25 bp, Homo sapien
cctccagcaagtagattgatatttt

SEQ ID NO: 4015543 - DNA, 25 bp, Homo sapien
atattttctcctggtaacaattcta

SEQ ID NO: 4015544 - DNA, 25 bp, Homo sapien
tccaccatacactgccgaaattctg

SEQ ID NO: 4015545 - DNA, 25 bp, Homo sapien
caatccaccatacactgccgaaatt

SEQ ID NO: 4015546 - DNA, 25 bp, Homo sapien
tacactgccgaaattctgtctatac

SEQ ID NO: 4015547 - DNA, 25 bp, Homo sapien
attctgtctataccaactttgactg

SEQ ID NO: 4015548 - DNA, 25 bp, Homo sapien
gaggtccaattagtccttctatcaa

SEQ ID NO: 4015549 - DNA, 25 bp, Homo sapien
cacatgctcagtgaagcaattacac

SEQ ID NO: 4015550 - DNA, 25 bp, Homo sapien
acagcacatgctcagtgaagcaatt

SEQ ID NO: 4015551 - DNA, 25 bp, Homo sapien
tctgttttatgtgctgcctgggtca

SEQ ID NO: 4015552 - DNA, 25 bp, Homo sapien
ttataactggaaacagaaagcctta

SEQ ID NO: 4015553 - DNA, 25 bp, Homo sapien
tataactggaaacagaaagccttac

SEQ ID NO: 4015554 - DNA, 25 bp, Homo sapien
tgttttataactggaaacagaaagc

SEQ ID NO: 4015555 - DNA, 25 bp, Homo sapien
ggaagtgctactggtactctttttc

SEQ ID NO: 4015556 - DNA, 25 bp, Homo sapien
agtgctactggtactctttttcaag

SEQ ID NO: 4015557 - DNA, 25 bp, Homo sapien
tactggtactctttttcaagtcatg

SEQ ID NO: 4015558 - DNA, 25 bp, Homo sapien
gctactggtactctttttcaagtca

SEQ ID NO: 4015559 - DNA, 25 bp, Homo sapien
ataatttataacctcaggggaagag

SEQ ID NO: 4015560 - DNA, 25 bp, Homo sapien
ggaagagtcagtcggtttggacagc

SEQ ID NO: 4015561 - DNA, 25 bp, Homo sapien
agagtcagtcggtttggacagcaca

SEQ ID NO: 4015562 - DNA, 25 bp, Homo sapien
taacctcaggggaagagtcagtcgg

SEQ ID NO: 4015563 - DNA, 25 bp, Homo sapien
agatcatcagtacgaaatatattac

SEQ ID NO: 4015564 - DNA, 25 bp, Homo sapien
aaaacatgataagatcatcagtacg

SEQ ID NO: 4015565 - DNA, 25 bp, Homo sapien
cctaaaaacatgataagatcatcag

SEQ ID NO: 4015566 - DNA, 25 bp, Homo sapien
gataagatcatcagtacgaaatata

SEQ ID NO: 4015567 - DNA, 25 bp, Homo sapien
ttcagacaatgtttcaggctggcac

SEQ ID NO: 4015568 - DNA, 25 bp, Homo sapien
cattcagacaatgtttcaggctggc

SEQ ID NO: 4015569 - DNA, 25 bp, Homo sapien
cagacaatgtttcaggctggcactc

SEQ ID NO: 4015570 - DNA, 25 bp, Homo sapien
caatgtttcaggctggcactcttac

SEQ ID NO: 4015571 - DNA, 25 bp, Homo sapien
cagcactggctaaggtgagcaccga

SEQ ID NO: 4015572 - DNA, 25 bp, Homo sapien
acaggtgttcctggtactccacaga

SEQ ID NO: 4015573 - DNA, 25 bp, Homo sapien
tgagcaccgatttgtcaaagctgga

SEQ ID NO: 4015574 - DNA, 25 bp, Homo sapien
gatgcagcaatcaacacctgtcatg

SEQ ID NO: 4015575 - DNA, 25 bp, Homo sapien
tgttgagccactgagttaatccaca

SEQ ID NO: 4015576 - DNA, 25 bp, Homo sapien
ttttccaacaatagatgatgaccag

SEQ ID NO: 4015577 - DNA, 25 bp, Homo sapien
atagcttcaggacaatgaagttcac

SEQ ID NO: 4015578 - DNA, 25 bp, Homo sapien
gatgatgaccagacagcaattccct

SEQ ID NO: 4015579 - DNA, 25 bp, Homo sapien
tcaaagccatgtctcactgtcactg

SEQ ID NO: 4015580 - DNA, 25 bp, Homo sapien
ggagagtcgaatccgcgttagccag

SEQ ID NO: 4015581 - DNA, 25 bp, Homo sapien
aggctggcctgccaacaatcctacc

SEQ ID NO: 4015582 - DNA, 25 bp, Homo sapien
atcctaccctcatgatggagagtcg

SEQ ID NO: 4015583 - DNA, 25 bp, Homo sapien
tctgcacatactgccagctgtgacc

SEQ ID NO: 4015584 - DNA, 25 bp, Homo sapien
ctgccagctgtgaccattaaactgc

SEQ ID NO: 4015585 - DNA, 25 bp, Homo sapien
taaaccaaatacacaagtctattgt

SEQ ID NO: 4015586 - DNA, 25 bp, Homo sapien
ggatgtctcacctatatataaacca

SEQ ID NO: 4015587 - DNA, 25 bp, Homo sapien
taacatcctgatcagggtttaatgt

SEQ ID NO: 4015588 - DNA, 25 bp, Homo sapien
agaagaagaacaagtctaagttggt

SEQ ID NO: 4015589 - DNA, 25 bp, Homo sapien
tgtctgcagttgtccactgactaac

SEQ ID NO: 4015590 - DNA, 25 bp, Homo sapien
ctgactaacatcctgatcagggttt

SEQ ID NO: 4015591 - DNA, 25 bp, Homo sapien
acagtgaattgtgcagcttcccata

SEQ ID NO: 4015592 - DNA, 25 bp, Homo sapien
gcatctgtcttcaggagattgcgtg

SEQ ID NO: 4015593 - DNA, 25 bp, Homo sapien
cccagtggggttctcagcttagaaa

SEQ ID NO: 4015594 - DNA, 25 bp, Homo sapien
agattgcgtggaattgttgactggt

SEQ ID NO: 4015595 - DNA, 25 bp, Homo sapien
taatgacatcacatcagttaactgt

SEQ ID NO: 4015596 - DNA, 25 bp, Homo sapien
gattagggtaaacggctcatgccag

SEQ ID NO: 4015597 - DNA, 25 bp, Homo sapien
gaatgttacttgatactctgccacc

SEQ ID NO: 4015598 - DNA, 25 bp, Homo sapien
tatgaaattgagaagcattatgtcc

SEQ ID NO: 4015599 - DNA, 25 bp, Homo sapien
tgtgacttcttaatgctaaagaaat

SEQ ID NO: 4015600 - DNA, 25 bp, Homo sapien
ctcatgtgacttcttaatgctaaag

SEQ ID NO: 4015601 - DNA, 25 bp, Homo sapien
cttggtgctttactcatgtgacttc

SEQ ID NO: 4015602 - DNA, 25 bp, Homo sapien
acttggtgctttactcatgtgactt

SEQ ID NO: 4015603 - DNA, 25 bp, Homo sapien
agttttccaaatgcttgtcgaatac

SEQ ID NO: 4015604 - DNA, 25 bp, Homo sapien
cagttttccaaatgcttgtcgaata

SEQ ID NO: 4015605 - DNA, 25 bp, Homo sapien
ctagttggacacggcaaacatcaac

SEQ ID NO: 4015606 - DNA, 25 bp, Homo sapien
agttggacacggcaaacatcaacac

SEQ ID NO: 4015607 - DNA, 25 bp, Homo sapien
ttggacacggcaaacatcaacacat

SEQ ID NO: 4015608 - DNA, 25 bp, Homo sapien
gttggacacggcaaacatcaacaca

SEQ ID NO: 4015609 - DNA, 25 bp, Homo sapien
gcatgcctgcagacagatattcaca

SEQ ID NO: 4015610 - DNA, 25 bp, Homo sapien
gaaaagagctcgattcatgaccatc

SEQ ID NO: 4015611 - DNA, 25 bp, Homo sapien
gagctcgattcatgaccatctccca

SEQ ID NO: 4015612 - DNA, 25 bp, Homo sapien
atgaccatctcccattaccaaagac

SEQ ID NO: 4015613 - DNA, 25 bp, Homo sapien
aggtcaggaaaagagctcgattcat

SEQ ID NO: 4015614 - DNA, 25 bp, Homo sapien
ctaaaaggcctttgcaaaatttatg

SEQ ID NO: 4015615 - DNA, 25 bp, Homo sapien
tccaaagcccaagtcattaacagtt

SEQ ID NO: 4015616 - DNA, 25 bp, Homo sapien
aaagcctagtcttcttacattggtt

SEQ ID NO: 4015617 - DNA, 25 bp, Homo sapien
aaatatacagttgactgtacattaa

SEQ ID NO: 4015618 - DNA, 25 bp, Homo sapien
aatatacagttgactgtacattaaa

SEQ ID NO: 4015619 - DNA, 25 bp, Homo sapien
ttaatttgtatgtctccattgacta

SEQ ID NO: 4015620 - DNA, 25 bp, Homo sapien
gtatgtctccattgactaatgatgt

SEQ ID NO: 4015621 - DNA, 25 bp, Homo sapien
taatttgtatgtctccattgactaa

SEQ ID NO: 4015622 - DNA, 25 bp, Homo sapien
tttgtatgtctccattgactaatga

SEQ ID NO: 4015623 - DNA, 25 bp, Homo sapien
tatctttcttaagtaacattcccag

SEQ ID NO: 4015624 - DNA, 25 bp, Homo sapien
ctcgtgtcctggttatctttcttaa

SEQ ID NO: 4015625 - DNA, 25 bp, Homo sapien
tcttaagtaacattcccagaagatt

SEQ ID NO: 4015626 - DNA, 25 bp, Homo sapien
aacattcccagaagatttaatataa

SEQ ID NO: 4015627 - DNA, 25 bp, Homo sapien
tcacagctccatcaaacaaagaagg

SEQ ID NO: 4015628 - DNA, 25 bp, Homo sapien
gctccatcaaacaaagaaggagagg

SEQ ID NO: 4015629 - DNA, 25 bp, Homo sapien
agttacagtgccaatcacagctcca

SEQ ID NO: 4015630 - DNA, 25 bp, Homo sapien
gttacagtgccaatcacagctccat

SEQ ID NO: 4015631 - DNA, 25 bp, Homo sapien
attcttactcagaagtgcaaagaca

SEQ ID NO: 4015632 - DNA, 25 bp, Homo sapien
aagacagttggagatagcgcccaca

SEQ ID NO: 4015633 - DNA, 25 bp, Homo sapien
tgaacagccaggtcactgtgcacaa

SEQ ID NO: 4015634 - DNA, 25 bp, Homo sapien
gtgtagagcacagcatactgaatgg

SEQ ID NO: 4015635 - DNA, 25 bp, Homo sapien
cctgtatgaatgttcctagggaaaa

SEQ ID NO: 4015636 - DNA, 25 bp, Homo sapien
taaggaatattcaacctgtatgaat

SEQ ID NO: 4015637 - DNA, 25 bp, Homo sapien
tcaacctgtatgaatgttcctaggg

SEQ ID NO: 4015638 - DNA, 25 bp, Homo sapien
tattcaacctgtatgaatgttccta

SEQ ID NO: 4015639 - DNA, 25 bp, Homo sapien
acaaagtcattacaattaaagactc

SEQ ID NO: 4015640 - DNA, 25 bp, Homo sapien
ttttggcatttccaattgtagtcaa

SEQ ID NO: 4015641 - DNA, 25 bp, Homo sapien
ccctattagtgagtttttggcattt

SEQ ID NO: 4015642 - DNA, 25 bp, Homo sapien
tccaattgtagtcaaatttaactac

SEQ ID NO: 4015643 - DNA, 25 bp, Homo sapien
catttccaattgtagtcaaatttaa

SEQ ID NO: 4015644 - DNA, 25 bp, Homo sapien
gtttagggcacaagtcatttctccc

SEQ ID NO: 4015645 - DNA, 25 bp, Homo sapien
tagggcacaagtcatttctcccaat

SEQ ID NO: 4015646 - DNA, 25 bp, Homo sapien
ttctcccaatattaacttataggca

SEQ ID NO: 4015647 - DNA, 25 bp, Homo sapien
aatattaacttataggcagtctcca

SEQ ID NO: 4015648 - DNA, 25 bp, Homo sapien
ccaggaaagtctgtggtggatttga

SEQ ID NO: 4015649 - DNA, 25 bp, Homo sapien
aagacatatgcaaacagcagtttaa

SEQ ID NO: 4015650 - DNA, 25 bp, Homo sapien
tcaatttcacttatatagcctgggg

SEQ ID NO: 4015651 - DNA, 25 bp, Homo sapien
cactatattctaaatcaaacatttc

SEQ ID NO: 4015652 - DNA, 25 bp, Homo sapien
gatgatggcagtttcgtatttatct

SEQ ID NO: 4015653 - DNA, 25 bp, Homo sapien
taacgcaagaatagtagtttagatg

SEQ ID NO: 4015654 - DNA, 25 bp, Homo sapien
ctctttttctttatgataacgcaag

SEQ ID NO: 4015655 - DNA, 25 bp, Homo sapien
tgatggcagtttcgtatttatctgt

SEQ ID NO: 4015656 - DNA, 25 bp, Homo sapien
catgggcattttttcacattagcaa

SEQ ID NO: 4015657 - DNA, 25 bp, Homo sapien
gagatgaaaggatagcaaagaggcc

SEQ ID NO: 4015658 - DNA, 25 bp, Homo sapien
tttagacacctaaataggacacacg

SEQ ID NO: 4015659 - DNA, 25 bp, Homo sapien
gcctagatgaaaccagatgggccat

SEQ ID NO: 4015660 - DNA, 25 bp, Homo sapien
catacccagacaaagcccttaattt

SEQ ID NO: 4015661 - DNA, 25 bp, Homo sapien
ctgggcttaatcgatcctcctccat

SEQ ID NO: 4015662 - DNA, 25 bp, Homo sapien
ttacatatccatttaagggcctgaa

SEQ ID NO: 4015663 - DNA, 25 bp, Homo sapien
cattgcccaagctgtgccagaattc

SEQ ID NO: 4015664 - DNA, 25 bp, Homo sapien
caatgtatagtcatgctaggatcca

SEQ ID NO: 4015665 - DNA, 25 bp, Homo sapien
aaaaacacctggtttgcagccgtca

SEQ ID NO: 4015666 - DNA, 25 bp, Homo sapien
taggatccaagctgccgagcaaaac

SEQ ID NO: 4015667 - DNA, 25 bp, Homo sapien
ggtaccacaagtctggcaattctcc

SEQ ID NO: 4015668 - DNA, 25 bp, Homo sapien
gcccgaattgggctgaggctttccc

SEQ ID NO: 4015669 - DNA, 25 bp, Homo sapien
gagggcccgaattgggctgaggctt

SEQ ID NO: 4015670 - DNA, 25 bp, Homo sapien
tcagtaattggagggcccgaattgg

SEQ ID NO: 4015671 - DNA, 25 bp, Homo sapien
tatgcctcagtaattggagggcccg

SEQ ID NO: 4015672 - DNA, 25 bp, Homo sapien
gaggagggacgtcttcatccactga

SEQ ID NO: 4015673 - DNA, 25 bp, Homo sapien
gagaagcgcagccagctttggtaat

SEQ ID NO: 4015674 - DNA, 25 bp, Homo sapien
cagtactaaatacccggagaagcgc

SEQ ID NO: 4015675 - DNA, 25 bp, Homo sapien
ctttggtaatgacactgatggagga

SEQ ID NO: 4015676 - DNA, 25 bp, Homo sapien
aaactgaccaagtagaggcgtagaa

SEQ ID NO: 4015677 - DNA, 25 bp, Homo sapien
ctgaccaagtagaggcgtagaaaat

SEQ ID NO: 4015678 - DNA, 25 bp, Homo sapien
aactgaccaagtagaggcgtagaaa

SEQ ID NO: 4015679 - DNA, 25 bp, Homo sapien
gaaactgaccaagtagaggcgtaga

SEQ ID NO: 4015680 - DNA, 25 bp, Homo sapien
taacttgggtaagtcctgtctgtac

SEQ ID NO: 4015681 - DNA, 25 bp, Homo sapien
aaataactggtataggctgcaagac

SEQ ID NO: 4015682 - DNA, 25 bp, Homo sapien
aatggtattgatagatggtcactgg

SEQ ID NO: 4015683 - DNA, 25 bp, Homo sapien
tccacttcagggtattgccactgca

SEQ ID NO: 4015684 - DNA, 25 bp, Homo sapien
gagcgaaggtttctgagtatgatct

SEQ ID NO: 4015685 - DNA, 25 bp, Homo sapien
cgtgagcgaaggtttctgagtatga

SEQ ID NO: 4015686 - DNA, 25 bp, Homo sapien
ctgctgcgtgagcgaaggtttctga

SEQ ID NO: 4015687 - DNA, 25 bp, Homo sapien
ctgcgtgagcgaaggtttctgagta

SEQ ID NO: 4015688 - DNA, 25 bp, Homo sapien
tgatggaaacaaagagagagggggc

SEQ ID NO: 4015689 - DNA, 25 bp, Homo sapien
tggaaacaaagagagagggggccaa

SEQ ID NO: 4015690 - DNA, 25 bp, Homo sapien
aaacaaagagagagggggccaatca

SEQ ID NO: 4015691 - DNA, 25 bp, Homo sapien
gaaacaaagagagagggggccaatc

SEQ ID NO: 4015692 - DNA, 25 bp, Homo sapien
tgatctgaacagcggaatgaggaac

SEQ ID NO: 4015693 - DNA, 25 bp, Homo sapien
cccatgatctgaacagcggaatgag

SEQ ID NO: 4015694 - DNA, 25 bp, Homo sapien
ctcaccccatgatctgaacagcgga

SEQ ID NO: 4015695 - DNA, 25 bp, Homo sapien
ctgaacagcggaatgaggaactcac

SEQ ID NO: 4015696 - DNA, 25 bp, Homo sapien
gagggtaacatcgagccaccaaaag

SEQ ID NO: 4015697 - DNA, 25 bp, Homo sapien
tcgagccaccaaaagaatgcactta

SEQ ID NO: 4015698 - DNA, 25 bp, Homo sapien
aatatgagggtaacatcgagccacc

SEQ ID NO: 4015699 - DNA, 25 bp, Homo sapien
caccaaaagaatgcacttaacacat

SEQ ID NO: 4015700 - DNA, 25 bp, Homo sapien
tctacacaggcacagactatcaatg

SEQ ID NO: 4015701 - DNA, 25 bp, Homo sapien
tattttgcaatagccaatgttataa

SEQ ID NO: 4015702 - DNA, 25 bp, Homo sapien
gtaactggtaaatctaggtgaagca

SEQ ID NO: 4015703 - DNA, 25 bp, Homo sapien
cacagactatcaatgctaaaaatca

SEQ ID NO: 4015704 - DNA, 25 bp, Homo sapien
ttgcagatgagctaaatttgctaaa

SEQ ID NO: 4015705 - DNA, 25 bp, Homo sapien
ctttgtaggtggcacataagtagag

SEQ ID NO: 4015706 - DNA, 25 bp, Homo sapien
gtgctttgtaggtggcacataagta

SEQ ID NO: 4015707 - DNA, 25 bp, Homo sapien
tgctttgtaggtggcacataagtag

SEQ ID NO: 4015708 - DNA, 25 bp, Homo sapien
tgtctcaactcctgaagcaatttgc

SEQ ID NO: 4015709 - DNA, 25 bp, Homo sapien
catgtacagcagccaagatatccaa

SEQ ID NO: 4015710 - DNA, 25 bp, Homo sapien
gtacagcagccaagatatccaattg

SEQ ID NO: 4015711 - DNA, 25 bp, Homo sapien
atcatgtacagcagccaagatatcc

SEQ ID NO: 4015712 - DNA, 25 bp, Homo sapien
acagcagccaagatatccaattgtt

SEQ ID NO: 4015713 - DNA, 25 bp, Homo sapien
tcgttttcccgggtgatcctctgaa

SEQ ID NO: 4015714 - DNA, 25 bp, Homo sapien
ttacagtagccaatcttcggtctcg

SEQ ID NO: 4015715 - DNA, 25 bp, Homo sapien
gactcatcacaataagacattgatc

SEQ ID NO: 4015716 - DNA, 25 bp, Homo sapien
agccaatcttcggtctcggtcgttt

SEQ ID NO: 4015717 - DNA, 25 bp, Homo sapien
cagtccactggtcaataaaagctca

SEQ ID NO: 4015718 - DNA, 25 bp, Homo sapien
tatcatctaggtatcccactggagg

SEQ ID NO: 4015719 - DNA, 25 bp, Homo sapien
caagaaatgaataaccctaggccaa

SEQ ID NO: 4015720 - DNA, 25 bp, Homo sapien
catgcaggtaaagagcccgggtgta

SEQ ID NO: 4015721 - DNA, 25 bp, Homo sapien
aaaactagatttttgctgggcgagg

SEQ ID NO: 4015722 - DNA, 25 bp, Homo sapien
tagtatattaacgatgcctttaaaa

SEQ ID NO: 4015723 - DNA, 25 bp, Homo sapien
tactattagtatattaacgatgcct

SEQ ID NO: 4015724 - DNA, 25 bp, Homo sapien
gaaatcacactagcgcattccagcc

SEQ ID NO: 4015725 - DNA, 25 bp, Homo sapien
acattgttaaccctcagctcttgcc

SEQ ID NO: 4015726 - DNA, 25 bp, Homo sapien
tcagggctggtcacattgttaaccc

SEQ ID NO: 4015727 - DNA, 25 bp, Homo sapien
tccgaccataagtattttccccaga

SEQ ID NO: 4015728 - DNA, 25 bp, Homo sapien
ctcatgtctttggtggctaaagcac

SEQ ID NO: 4015729 - DNA, 25 bp, Homo sapien
tatcatcgtgcctttgccgagacac

SEQ ID NO: 4015730 - DNA, 25 bp, Homo sapien
cattctgtatgtcagcgtggactct

SEQ ID NO: 4015731 - DNA, 25 bp, Homo sapien
cgtggactctggtatcatcgtgcct

SEQ ID NO: 4015732 - DNA, 25 bp, Homo sapien
gacaccacagctgaatttgaaggtt

SEQ ID NO: 4015733 - DNA, 25 bp, Homo sapien
ttaaattacctgggtcggctgatgc

SEQ ID NO: 4015734 - DNA, 25 bp, Homo sapien
taaattacctgggtcggctgatgca

SEQ ID NO: 4015735 - DNA, 25 bp, Homo sapien
cacatgacttgataataagaataat

SEQ ID NO: 4015736 - DNA, 25 bp, Homo sapien
ctcctcacatgacttgataataaga

SEQ ID NO: 4015737 - DNA, 25 bp, Homo sapien
tctcctcacatgacttgataataag

SEQ ID NO: 4015738 - DNA, 25 bp, Homo sapien
aaacagagctgagttacaagacttc

SEQ ID NO: 4015739 - DNA, 25 bp, Homo sapien
aagtgtgtcctcatctaagtatctg

SEQ ID NO: 4015740 - DNA, 25 bp, Homo sapien
ccctctatggtgtaaaagtgacagc

SEQ ID NO: 4015741 - DNA, 25 bp, Homo sapien
tattagtaaacaagtagggtacagc

SEQ ID NO: 4015742 - DNA, 25 bp, Homo sapien
caaaaatcgcctttgtgatgttgtg

SEQ ID NO: 4015743 - DNA, 25 bp, Homo sapien
ggtttattaagggattttgctctca

SEQ ID NO: 4015744 - DNA, 25 bp, Homo sapien
gtttattaagggattttgctctcat

SEQ ID NO: 4015745 - DNA, 25 bp, Homo sapien
cagtggtgcaatccgagctcaagca

SEQ ID NO: 4015746 - DNA, 25 bp, Homo sapien
ggactggactccctcttactctgca

SEQ ID NO: 4015747 - DNA, 25 bp, Homo sapien
tgcccacagatccagcaactcaggt

SEQ ID NO: 4015748 - DNA, 25 bp, Homo sapien
caactagtattagaagcaagggtca

SEQ ID NO: 4015749 - DNA, 25 bp, Homo sapien
cacaatttgctgaaattttccttag

SEQ ID NO: 4015750 - DNA, 25 bp, Homo sapien
gaaatctgtggaacagaactggcaa

SEQ ID NO: 4015751 - DNA, 25 bp, Homo sapien
taaattctatttgactctagttcca

SEQ ID NO: 4015752 - DNA, 25 bp, Homo sapien
tgctgaaattttccttagtgtactt

SEQ ID NO: 4015753 - DNA, 25 bp, Homo sapien
caacgctgtttatcgaacaatattt

SEQ ID NO: 4015754 - DNA, 25 bp, Homo sapien
cagtttccggacaattataatacaa

SEQ ID NO: 4015755 - DNA, 25 bp, Homo sapien
caagtcaacgctgtttatcgaacaa

SEQ ID NO: 4015756 - DNA, 25 bp, Homo sapien
ttttacgactaaacatctcaattct

SEQ ID NO: 4015757 - DNA, 25 bp, Homo sapien
gaatagttggtgccgttggtgccgc

SEQ ID NO: 4015758 - DNA, 25 bp, Homo sapien
atagttggtgccgttggtgccgccg

SEQ ID NO: 4015759 - DNA, 25 bp, Homo sapien
aatagttggtgccgttggtgccgcc

SEQ ID NO: 4015760 - DNA, 25 bp, Homo sapien
tgaaggggaggcgacgtctcttcca

SEQ ID NO: 4015761 - DNA, 25 bp, Homo sapien
agagaagcgcgagtcgccacccgaa

SEQ ID NO: 4015762 - DNA, 25 bp, Homo sapien
ttccccgacacgatatggccaagcg

SEQ ID NO: 4015763 - DNA, 25 bp, Homo sapien
cccgcagcacaggacgaggaggcgg

SEQ ID NO: 4015764 - DNA, 25 bp, Homo sapien
ctgggagcgagaggcggggtcggcc

SEQ ID NO: 4015765 - DNA, 25 bp, Homo sapien
tttgacctccctgcccataaaagct

SEQ ID NO: 4015766 - DNA, 25 bp, Homo sapien
cacctggaaactatactaatgctca

SEQ ID NO: 4015767 - DNA, 25 bp, Homo sapien
ggcaaatgaagatcgtttacccaga

SEQ ID NO: 4015768 - DNA, 25 bp, Homo sapien
gcacagcacctgaccataggaagca

SEQ ID NO: 4015769 - DNA, 25 bp, Homo sapien
tggagagagcatagaggaagtggcg

SEQ ID NO: 4015770 - DNA, 25 bp, Homo sapien
tggcggcagcttcaccagttccagg

SEQ ID NO: 4015771 - DNA, 25 bp, Homo sapien
gaagtggcggcagcttcaccagttc

SEQ ID NO: 4015772 - DNA, 25 bp, Homo sapien
agagagcatagaggaagtggcggca

SEQ ID NO: 4015773 - DNA, 25 bp, Homo sapien
tccactgatagacagcctccaccat

SEQ ID NO: 4015774 - DNA, 25 bp, Homo sapien
atccactgatagacagcctccacca

SEQ ID NO: 4015775 - DNA, 25 bp, Homo sapien
ggtgaaatacctcgcggacatgtct

SEQ ID NO: 4015776 - DNA, 25 bp, Homo sapien
aatttgccgacaccccaagtcgagg

SEQ ID NO: 4015777 - DNA, 25 bp, Homo sapien
caagtcgagggtaagcaggagaacc

SEQ ID NO: 4015778 - DNA, 25 bp, Homo sapien
aaagttccttcgcagggactgagcc

SEQ ID NO: 4015779 - DNA, 25 bp, Homo sapien
cagtgatggaagaatccctggtgac

SEQ ID NO: 4015780 - DNA, 25 bp, Homo sapien
gaagcaaacgccagagaagtcaagc

SEQ ID NO: 4015781 - DNA, 25 bp, Homo sapien
ggcttgcaccggtccagatgctgct

SEQ ID NO: 4015782 - DNA, 25 bp, Homo sapien
gcccctacacggtaccaggtgaaga

SEQ ID NO: 4015783 - DNA, 25 bp, Homo sapien
accaatctgcgtgcatacacatgcc

SEQ ID NO: 4015784 - DNA, 25 bp, Homo sapien
tctgcgtgcatacacatgccctgtc

SEQ ID NO: 4015785 - DNA, 25 bp, Homo sapien
taccaatctgcgtgcatacacatgc

SEQ ID NO: 4015786 - DNA, 25 bp, Homo sapien
aatctgcgtgcatacacatgccctg

SEQ ID NO: 4015787 - DNA, 25 bp, Homo sapien
catgtcgttacataccaggcgggca

SEQ ID NO: 4015788 - DNA, 25 bp, Homo sapien
ccatgggatgaacctgagaattgcc

SEQ ID NO: 4015789 - DNA, 25 bp, Homo sapien
ttcaccaaccagtcagcaatcggag

SEQ ID NO: 4015790 - DNA, 25 bp, Homo sapien
tacctaggcgagagggagactgaac

SEQ ID NO: 4015791 - DNA, 25 bp, Homo sapien
gacggtccaggaacgcaaaaatgta

SEQ ID NO: 4015792 - DNA, 25 bp, Homo sapien
acggtccaggaacgcaaaaatgtag

SEQ ID NO: 4015793 - DNA, 25 bp, Homo sapien
gatgcccgagctcatgatggcgacc

SEQ ID NO: 4015794 - DNA, 25 bp, Homo sapien
ccgagctcatgatggcgaccacgat

SEQ ID NO: 4015795 - DNA, 25 bp, Homo sapien
tcatgatggcgaccacgatgacggc

SEQ ID NO: 4015796 - DNA, 25 bp, Homo sapien
gagtggcaggctacgagcttggctg

SEQ ID NO: 4015797 - DNA, 25 bp, Homo sapien
agccgagcgaggattgtgcgcgccg

SEQ ID NO: 4015798 - DNA, 25 bp, Homo sapien
ccgagcgaggattgtgcgcgccgct

SEQ ID NO: 4015799 - DNA, 25 bp, Homo sapien
cgagcgaggattgtgcgcgccgctc

SEQ ID NO: 4015800 - DNA, 25 bp, Homo sapien
gcagccgagcgaggattgtgcgcgc

SEQ ID NO: 4015801 - DNA, 25 bp, Homo sapien
gaattctgaacaatagccgtggtgg

SEQ ID NO: 4015802 - DNA, 25 bp, Homo sapien
gcggaggtcgcacagatactaactt

SEQ ID NO: 4015803 - DNA, 25 bp, Homo sapien
tgtcgtgctgggacctctagctgca

SEQ ID NO: 4015804 - DNA, 25 bp, Homo sapien
aatgccacggcttgtcattctggac

SEQ ID NO: 4015805 - DNA, 25 bp, Homo sapien
tcccagggctggccgaatgcctggc

SEQ ID NO: 4015806 - DNA, 25 bp, Homo sapien
gctggcgggtggaggaccctgagct

SEQ ID NO: 4015807 - DNA, 25 bp, Homo sapien
gagctgctggtgttgccgtcactgc

SEQ ID NO: 4015808 - DNA, 25 bp, Homo sapien
gtcactgccgaactgtgctcccagg

SEQ ID NO: 4015809 - DNA, 25 bp, Homo sapien
cattttctctcggagtgtttctggt

SEQ ID NO: 4015810 - DNA, 25 bp, Homo sapien
tgtcattttctctcggagtgtttct

SEQ ID NO: 4015811 - DNA, 25 bp, Homo sapien
tttctctcggagtgtttctggtttc

SEQ ID NO: 4015812 - DNA, 25 bp, Homo sapien
ttctctcggagtgtttctggtttca

SEQ ID NO: 4015813 - DNA, 25 bp, Homo sapien
tagtggcctggaaggacgcccagac

SEQ ID NO: 4015814 - DNA, 25 bp, Homo sapien
cttgtgccctcattagtggcctgga

SEQ ID NO: 4015815 - DNA, 25 bp, Homo sapien
ttgtgccctcattagtggcctggaa

SEQ ID NO: 4015816 - DNA, 25 bp, Homo sapien
gaagtgggcgatagttgttcaccat

SEQ ID NO: 4015817 - DNA, 25 bp, Homo sapien
gttgaagtgggcgatagttgttcac

SEQ ID NO: 4015818 - DNA, 25 bp, Homo sapien
tgggcgatagttgttcaccatcatc

SEQ ID NO: 4015819 - DNA, 25 bp, Homo sapien
ggcgatagttgttcaccatcatctt

SEQ ID NO: 4015820 - DNA, 25 bp, Homo sapien
aacaggagagtacgaaatgcagaga

SEQ ID NO: 4015821 - DNA, 25 bp, Homo sapien
acaggagagtacgaaatgcagagag

SEQ ID NO: 4015822 - DNA, 25 bp, Homo sapien
aaaacaggagagtacgaaatgcaga

SEQ ID NO: 4015823 - DNA, 25 bp, Homo sapien
aaacaggagagtacgaaatgcagag

SEQ ID NO: 4015824 - DNA, 25 bp, Homo sapien
caacgggctccttctggatgatcca

SEQ ID NO: 4015825 - DNA, 25 bp, Homo sapien
tggcttggggccacttcaacgggct

SEQ ID NO: 4015826 - DNA, 25 bp, Homo sapien
gatgatccaggtgaccgactcggtc

SEQ ID NO: 4015827 - DNA, 25 bp, Homo sapien
tctggatgatccaggtgaccgactc

SEQ ID NO: 4015828 - DNA, 25 bp, Homo sapien
ctgagagaccgagaagcacaggccg

SEQ ID NO: 4015829 - DNA, 25 bp, Homo sapien
agaccgagaagcacaggccgtatca

SEQ ID NO: 4015830 - DNA, 25 bp, Homo sapien
ccgagaagcacaggccgtatcagtc

SEQ ID NO: 4015831 - DNA, 25 bp, Homo sapien
agagaccgagaagcacaggccgtat

SEQ ID NO: 4015832 - DNA, 25 bp, Homo sapien
ctgtaatgggcttccatcagtgcct

SEQ ID NO: 4015833 - DNA, 25 bp, Homo sapien
gctgtaatgggcttccatcagtgcc

SEQ ID NO: 4015834 - DNA, 25 bp, Homo sapien
tttccccaggtgtacgacaggcagt

SEQ ID NO: 4015835 - DNA, 25 bp, Homo sapien
agtttccccaggtgtacgacaggca

SEQ ID NO: 4015836 - DNA, 25 bp, Homo sapien
acaaggcagccaattccccggtagc

SEQ ID NO: 4015837 - DNA, 25 bp, Homo sapien
cctggatcccctggacctggtgggc

SEQ ID NO: 4015838 - DNA, 25 bp, Homo sapien
ctggatcccctggacctggtgggct

SEQ ID NO: 4015839 - DNA, 25 bp, Homo sapien
cacaaggcagccaattccccggtag

SEQ ID NO: 4015840 - DNA, 25 bp, Homo sapien
atggtgagagggtcaaaggcgaagc

SEQ ID NO: 4015841 - DNA, 25 bp, Homo sapien
caaaacttctggctatggtgagagg

SEQ ID NO: 4015842 - DNA, 25 bp, Homo sapien
gctatggtgagagggtcaaaggcga

SEQ ID NO: 4015843 - DNA, 25 bp, Homo sapien
tgccaaaacttctggctatggtgag

SEQ ID NO: 4015844 - DNA, 25 bp, Homo sapien
cctgtggtttgcctagaaaattctg

SEQ ID NO: 4015845 - DNA, 25 bp, Homo sapien
ccgggcatcattcctcccctgtggt

SEQ ID NO: 4015846 - DNA, 25 bp, Homo sapien
gggatgagcccagagatcagcatca

SEQ ID NO: 4015847 - DNA, 25 bp, Homo sapien
gctcagtccgcggtggcacttcctc

SEQ ID NO: 4015848 - DNA, 25 bp, Homo sapien
cagaaccgtggccttgtgaagtttc

SEQ ID NO: 4015849 - DNA, 25 bp, Homo sapien
cagcccgcaccattgttaacacagg

SEQ ID NO: 4015850 - DNA, 25 bp, Homo sapien
agcatcaaggcgaaggccacgtaca

SEQ ID NO: 4015851 - DNA, 25 bp, Homo sapien
tccttgaaccgcgaggaagggcttg

SEQ ID NO: 4015852 - DNA, 25 bp, Homo sapien
gcttggggtcggacagggacgttca

SEQ ID NO: 4015853 - DNA, 25 bp, Homo sapien
cggagagccgcggtttgggcaggtt

SEQ ID NO: 4015854 - DNA, 25 bp, Homo sapien
agccgcggtttgggcaggtttctct

SEQ ID NO: 4015855 - DNA, 25 bp, Homo sapien
gggacgttcaaggagatgctgggtg

SEQ ID NO: 4015856 - DNA, 25 bp, Homo sapien
cctctgcagcatctgatgatgggcc

SEQ ID NO: 4015857 - DNA, 25 bp, Homo sapien
tctgcagcatctgatgatgggcccc

SEQ ID NO: 4015858 - DNA, 25 bp, Homo sapien
ttccagcaagatgtccaccagcctc

SEQ ID NO: 4015859 - DNA, 25 bp, Homo sapien
agcctctgcagcatctgatgatggg

SEQ ID NO: 4015860 - DNA, 25 bp, Homo sapien
tgcgtggcagacacacaaggggtta

SEQ ID NO: 4015861 - DNA, 25 bp, Homo sapien
ctgcgtggcagacacacaaggggtt

SEQ ID NO: 4015862 - DNA, 25 bp, Homo sapien
gcgtggcagacacacaaggggttag

SEQ ID NO: 4015863 - DNA, 25 bp, Homo sapien
cacagaattccagtgaactaaatgc

SEQ ID NO: 4015864 - DNA, 25 bp, Homo sapien
cagaattccagtgaactaaatgcag

SEQ ID NO: 4015865 - DNA, 25 bp, Homo sapien
cccacgacagcttccttgtaatttt

SEQ ID NO: 4015866 - DNA, 25 bp, Homo sapien
gacagcttccttgtaattttggtat

SEQ ID NO: 4015867 - DNA, 25 bp, Homo sapien
gagcccccctcattcactgctcccc

SEQ ID NO: 4015868 - DNA, 25 bp, Homo sapien
tctgcggggtacacgtggccgtcca

SEQ ID NO: 4015869 - DNA, 25 bp, Homo sapien
ccagtggaagtgaaattgcttcagt

SEQ ID NO: 4015870 - DNA, 25 bp, Homo sapien
acgtggccgtccactgtgtgctctg

SEQ ID NO: 4015871 - DNA, 25 bp, Homo sapien
ctgtgtctcactggctctatgatac

SEQ ID NO: 4015872 - DNA, 25 bp, Homo sapien
agggacttgcttgaaacggcggcca

SEQ ID NO: 4015873 - DNA, 25 bp, Homo sapien
caaatgaggagggaagcgaaacgtt

SEQ ID NO: 4015874 - DNA, 25 bp, Homo sapien
aacccaaaaaggctactgtgtctca

SEQ ID NO: 4015875 - DNA, 25 bp, Homo sapien
ggtgcggtggccgatggataactcg

SEQ ID NO: 4015876 - DNA, 25 bp, Homo sapien
aaaggaagtctgggccgctgcgttt

SEQ ID NO: 4015877 - DNA, 25 bp, Homo sapien
ccgatggataactcgggctgggctg

SEQ ID NO: 4015878 - DNA, 25 bp, Homo sapien
ctgcgttttcgggaacagcaggtgc

SEQ ID NO: 4015879 - DNA, 25 bp, Homo sapien
ctggtggcagttcggtgaagaggca

SEQ ID NO: 4015880 - DNA, 25 bp, Homo sapien
ggtggcagttcggtgaagaggcacc

SEQ ID NO: 4015881 - DNA, 25 bp, Homo sapien
cagttcggtgaagaggcacccggaa

SEQ ID NO: 4015882 - DNA, 25 bp, Homo sapien
tggcagttcggtgaagaggcacccg

SEQ ID NO: 4015883 - DNA, 25 bp, Homo sapien
aaaactggaaagccgtgtttcgctg

SEQ ID NO: 4015884 - DNA, 25 bp, Homo sapien
ggaaagccgtgtttcgctgctcttc

SEQ ID NO: 4015885 - DNA, 25 bp, Homo sapien
agaccgcccaccagcaaaatgccaa

SEQ ID NO: 4015886 - DNA, 25 bp, Homo sapien
gcaaaatgccaagcgtatttcttta

SEQ ID NO: 4015887 - DNA, 25 bp, Homo sapien
tcaaataacacgatgccgcaaggga

SEQ ID NO: 4015888 - DNA, 25 bp, Homo sapien
gaaggcttaaaattagtacaagaga

SEQ ID NO: 4015889 - DNA, 25 bp, Homo sapien
caggcacgggttgtttgaaggctta

SEQ ID NO: 4015890 - DNA, 25 bp, Homo sapien
caagggaccggtctgcttccggtgc

SEQ ID NO: 4015891 - DNA, 25 bp, Homo sapien
gaaacaaataccacgagtctcaagg

SEQ ID NO: 4015892 - DNA, 25 bp, Homo sapien
taagacctgcacgtaaggatgtcga

SEQ ID NO: 4015893 - DNA, 25 bp, Homo sapien
tcttaagaacatgtccatgagaagg

SEQ ID NO: 4015894 - DNA, 25 bp, Homo sapien
agatccgcagttccccgaaacaaat

SEQ ID NO: 4015895 - DNA, 25 bp, Homo sapien
cctgttttttctgcagaggtgctca

SEQ ID NO: 4015896 - DNA, 25 bp, Homo sapien
tttctctggccttgtccattctgag

SEQ ID NO: 4015897 - DNA, 25 bp, Homo sapien
ctgttttttctgcagaggtgctcat

SEQ ID NO: 4015898 - DNA, 25 bp, Homo sapien
tgaggtttctctggccttgtccatt

SEQ ID NO: 4015899 - DNA, 25 bp, Homo sapien
actccaatgttgatggtaaagatag

SEQ ID NO: 4015900 - DNA, 25 bp, Homo sapien
aaagtaggccgattgcttgaaacca

SEQ ID NO: 4015901 - DNA, 25 bp, Homo sapien
ccaaagtaggccgattgcttgaaac

SEQ ID NO: 4015902 - DNA, 25 bp, Homo sapien
caatgttgatggtaaagatagagct

SEQ ID NO: 4015903 - DNA, 25 bp, Homo sapien
gagctgctagcctctgatgcctgct

SEQ ID NO: 4015904 - DNA, 25 bp, Homo sapien
caacgtgacgataccctatctctca

SEQ ID NO: 4015905 - DNA, 25 bp, Homo sapien
tccaaaagacttgagcgtagaaagc

SEQ ID NO: 4015906 - DNA, 25 bp, Homo sapien
gaaagctaatgaacttaggccgggc

SEQ ID NO: 4015907 - DNA, 25 bp, Homo sapien
ggaaatatgccattttatgcactcc

SEQ ID NO: 4015908 - DNA, 25 bp, Homo sapien
gccattttatgcactcctgctgctt

SEQ ID NO: 4015909 - DNA, 25 bp, Homo sapien
tccttttgtgacagagttgctttgt

SEQ ID NO: 4015910 - DNA, 25 bp, Homo sapien
agttgctttgtctgttacactgatc

SEQ ID NO: 4015911 - DNA, 25 bp, Homo sapien
tacttgtgggtaccccagctgcggt

SEQ ID NO: 4015912 - DNA, 25 bp, Homo sapien
tatagaaacacgtagccagcaactt

SEQ ID NO: 4015913 - DNA, 25 bp, Homo sapien
taaatatccgggttaaacactgctc

SEQ ID NO: 4015914 - DNA, 25 bp, Homo sapien
gggcagggccatcaatacatctaaa

SEQ ID NO: 4015915 - DNA, 25 bp, Homo sapien
gtcgagaggtaaccctgtcaaagtc

SEQ ID NO: 4015916 - DNA, 25 bp, Homo sapien
caggatgcacgaaaggaatgactcc

SEQ ID NO: 4015917 - DNA, 25 bp, Homo sapien
ggttaactgcacgaccctgtcaaag

SEQ ID NO: 4015918 - DNA, 25 bp, Homo sapien
ctggcaccattcgtctccgggaaga

SEQ ID NO: 4015919 - DNA, 25 bp, Homo sapien
gaggctgcagttaccgccttcggaa

SEQ ID NO: 4015920 - DNA, 25 bp, Homo sapien
agtgatctcctcagccctcaaaaaa

SEQ ID NO: 4015921 - DNA, 25 bp, Homo sapien
gccttcggaagtgatctcctcagcc

SEQ ID NO: 4015922 - DNA, 25 bp, Homo sapien
aaccacctccgccatttactagagg

SEQ ID NO: 4015923 - DNA, 25 bp, Homo sapien
ggcagcggcgttccgcggccggaag

SEQ ID NO: 4015924 - DNA, 25 bp, Homo sapien
gcggccgctcgtaagtgctccggat

SEQ ID NO: 4015925 - DNA, 25 bp, Homo sapien
gcgacgcggccgctcgtaagtgctc

SEQ ID NO: 4015926 - DNA, 25 bp, Homo sapien
ctcgtaagtgctccggatggaaact

SEQ ID NO: 4015927 - DNA, 25 bp, Homo sapien
cccccgatgagactgctggcgggct

SEQ ID NO: 4015928 - DNA, 25 bp, Homo sapien
gctggatgggcaaggcggccgcgat

SEQ ID NO: 4015929 - DNA, 25 bp, Homo sapien
ggccgcgatggctcgagctcgggcg

SEQ ID NO: 4015930 - DNA, 25 bp, Homo sapien
gcggtgatccgagcgagcggccgcg

SEQ ID NO: 4015931 - DNA, 25 bp, Homo sapien
cgctcacccgctccctgtacgtgaa

SEQ ID NO: 4015932 - DNA, 25 bp, Homo sapien
ctcacccgctccctgtacgtgaaca

SEQ ID NO: 4015933 - DNA, 25 bp, Homo sapien
tcacccgctccctgtacgtgaacat

SEQ ID NO: 4015934 - DNA, 25 bp, Homo sapien
gctcacccgctccctgtacgtgaac

SEQ ID NO: 4015935 - DNA, 25 bp, Homo sapien
gggcccggctattgtgcgggacggc

SEQ ID NO: 4015936 - DNA, 25 bp, Homo sapien
aaggagaaccaccaggtacgggctg

SEQ ID NO: 4015937 - DNA, 25 bp, Homo sapien
cccggctattgtgcgggacggctcc

SEQ ID NO: 4015938 - DNA, 25 bp, Homo sapien
gctattgtgcgggacggctccgcga

SEQ ID NO: 4015939 - DNA, 25 bp, Homo sapien
tgtggaggcagactggagtcaggca

SEQ ID NO: 4015940 - DNA, 25 bp, Homo sapien
gtggaggcagactggagtcaggcat

SEQ ID NO: 4015941 - DNA, 25 bp, Homo sapien
ctgtggaggcagactggagtcaggc

SEQ ID NO: 4015942 - DNA, 25 bp, Homo sapien
cctgtggaggcagactggagtcagg

SEQ ID NO: 4015943 - DNA, 25 bp, Homo sapien
gatgcctagacctacagtttggttt

SEQ ID NO: 4015944 - DNA, 25 bp, Homo sapien
tggctggatgcctagacctacagtt

SEQ ID NO: 4015945 - DNA, 25 bp, Homo sapien
tggatgcctagacctacagtttggt

SEQ ID NO: 4015946 - DNA, 25 bp, Homo sapien
gctggatgcctagacctacagtttg

SEQ ID NO: 4015947 - DNA, 25 bp, Homo sapien
ttcagagttaccttgatcaaggaac

SEQ ID NO: 4015948 - DNA, 25 bp, Homo sapien
gaaattatgcgaatcactccaggct

SEQ ID NO: 4015949 - DNA, 25 bp, Homo sapien
ccttgatcaaggaacacagatcttc

SEQ ID NO: 4015950 - DNA, 25 bp, Homo sapien
gagaaatcgggctggctatttatcc

SEQ ID NO: 4015951 - DNA, 25 bp, Homo sapien
gtatttgaaattcgcctcccctcag

SEQ ID NO: 4015952 - DNA, 25 bp, Homo sapien
tcagcatcagtatttgaaattcgcc

SEQ ID NO: 4015953 - DNA, 25 bp, Homo sapien
tcagtatttgaaattcgcctcccct

SEQ ID NO: 4015954 - DNA, 25 bp, Homo sapien
tggcaagtcagcatcagtatttgaa

SEQ ID NO: 4015955 - DNA, 25 bp, Homo sapien
aaactgttttctagggtctgaggag

SEQ ID NO: 4015956 - DNA, 25 bp, Homo sapien
cttgggcaccgtgttgcatgcatct

SEQ ID NO: 4015957 - DNA, 25 bp, Homo sapien
tctgtaccttatgattgtttccaga

SEQ ID NO: 4015958 - DNA, 25 bp, Homo sapien
gcagcaaacattctgtaccttatga

SEQ ID NO: 4015959 - DNA, 25 bp, Homo sapien
taatccagactggaaaacccacaga

SEQ ID NO: 4015960 - DNA, 25 bp, Homo sapien
tggaaaacccacagacttcttgatt

SEQ ID NO: 4015961 - DNA, 25 bp, Homo sapien
ctttctgaaactatgatatggcagc

SEQ ID NO: 4015962 - DNA, 25 bp, Homo sapien
tttgaagaaatctatgccactgagc

SEQ ID NO: 4015963 - DNA, 25 bp, Homo sapien
tgaatggcagaatacggggttccag

SEQ ID NO: 4015964 - DNA, 25 bp, Homo sapien
tgcctgaacttgctggaccgctgtg

SEQ ID NO: 4015965 - DNA, 25 bp, Homo sapien
gatcagcccctgactttgttaaaag

SEQ ID NO: 4015966 - DNA, 25 bp, Homo sapien
aaagatatcagaagtgtcttggagc

SEQ ID NO: 4015967 - DNA, 25 bp, Homo sapien
ttcctgtgtcctgttgggcaaccgc

SEQ ID NO: 4015968 - DNA, 25 bp, Homo sapien
cagctctctgtattgcactcactag

SEQ ID NO: 4015969 - DNA, 25 bp, Homo sapien
gggcaaccgcatgatagaactttaa

SEQ ID NO: 4015970 - DNA, 25 bp, Homo sapien
catcaggttggaaggtcctgggttc

SEQ ID NO: 4015971 - DNA, 25 bp, Homo sapien
catgtaagctgtagatgctggagct

SEQ ID NO: 4015972 - DNA, 25 bp, Homo sapien
taactttactagaggaggtctctag

SEQ ID NO: 4015973 - DNA, 25 bp, Homo sapien
taccagcacaccactagatgtataa

SEQ ID NO: 4015974 - DNA, 25 bp, Homo sapien
aattgaccatgatgggagtatttac

SEQ ID NO: 4015975 - DNA, 25 bp, Homo sapien
aaaaatgaggttccatgctgcctcc

SEQ ID NO: 4015976 - DNA, 25 bp, Homo sapien
tctgggcacataggatcaggaaagt

SEQ ID NO: 4015977 - DNA, 25 bp, Homo sapien
cattttcatgcatataccgtataca

SEQ ID NO: 4015978 - DNA, 25 bp, Homo sapien
ttttataaagaatacaccttaggca

SEQ ID NO: 4015979 - DNA, 25 bp, Homo sapien
actgacatctagagtccgttgtggc

SEQ ID NO: 4015980 - DNA, 25 bp, Homo sapien
cctggtgctgttatttggcacaaca

SEQ ID NO: 4015981 - DNA, 25 bp, Homo sapien
aaaatcagtattacaaacgtgcttg

SEQ ID NO: 4015982 - DNA, 25 bp, Homo sapien
gtaaagtagatgtgttgcccacatc

SEQ ID NO: 4015983 - DNA, 25 bp, Homo sapien
cattaacactgccatagctcctgga

SEQ ID NO: 4015984 - DNA, 25 bp, Homo sapien
ttttaagacctgatgatatatgttc

SEQ ID NO: 4015985 - DNA, 25 bp, Homo sapien
ctgacatccttctttgtagccagtt

SEQ ID NO: 4015986 - DNA, 25 bp, Homo sapien
gactattagttatagtttccttaca

SEQ ID NO: 4015987 - DNA, 25 bp, Homo sapien
gttttcataagtgttgttatctttc

SEQ ID NO: 4015988 - DNA, 25 bp, Homo sapien
tggcctttcatagttggaaagtact

SEQ ID NO: 4015989 - DNA, 25 bp, Homo sapien
ctatggcctttcatagttggaaagt

SEQ ID NO: 4015990 - DNA, 25 bp, Homo sapien
ctttcatagttggaaagtactcttc

SEQ ID NO: 4015991 - DNA, 25 bp, Homo sapien
aactgccaaggaacatgcaaaccac

SEQ ID NO: 4015992 - DNA, 25 bp, Homo sapien
gtaaccaatgaagccaactgccaag

SEQ ID NO: 4015993 - DNA, 25 bp, Homo sapien
gaacatgcaaaccactgggccatct

SEQ ID NO: 4015994 - DNA, 25 bp, Homo sapien
ggttatgtaaccaatgaagccaact

SEQ ID NO: 4015995 - DNA, 25 bp, Homo sapien
agcttattttgtgctcgctttggca

SEQ ID NO: 4015996 - DNA, 25 bp, Homo sapien
tcttggctgctgtttaagaggaaaa

SEQ ID NO: 4015997 - DNA, 25 bp, Homo sapien
tatttcagtctcctgatgcatttgc

SEQ ID NO: 4015998 - DNA, 25 bp, Homo sapien
tgagctatctcatcatgcatcatgg

SEQ ID NO: 4015999 - DNA, 25 bp, Homo sapien
tccacatgtctcttatggtatagtt

SEQ ID NO: 4016000 - DNA, 25 bp, Homo sapien
gtttccacatgtctcttatggtata

SEQ ID NO: 4016001 - DNA, 25 bp, Homo sapien
caatttcctgaaaaatacgccgagc

SEQ ID NO: 4016002 - DNA, 25 bp, Homo sapien
tcctgaaaaatacgccgagcactct

SEQ ID NO: 4016003 - DNA, 25 bp, Homo sapien
tgtttcttagagggttggattttga

SEQ ID NO: 4016004 - DNA, 25 bp, Homo sapien
cttttgtgagtcttcttttatttct

SEQ ID NO: 4016005 - DNA, 25 bp, Homo sapien
ttgtgagtcttcttttatttctttg

SEQ ID NO: 4016006 - DNA, 25 bp, Homo sapien
tgtgagtcttcttttatttctttgt

SEQ ID NO: 4016007 - DNA, 25 bp, Homo sapien
ggagaggagtatgaaggccacgcac

SEQ ID NO: 4016008 - DNA, 25 bp, Homo sapien
gcacacaccggtcacatagacagag

SEQ ID NO: 4016009 - DNA, 25 bp, Homo sapien
tttggagaggagtatgaaggccacg

SEQ ID NO: 4016010 - DNA, 25 bp, Homo sapien
tgtcaggaagctccgcagttccttg

SEQ ID NO: 4016011 - DNA, 25 bp, Homo sapien
gaagcacattgactattaaagccta

SEQ ID NO: 4016012 - DNA, 25 bp, Homo sapien
tgtaaagtatccttcacactgcgtt

SEQ ID NO: 4016013 - DNA, 25 bp, Homo sapien
gtaatagttaaagccagttcatcag

SEQ ID NO: 4016014 - DNA, 25 bp, Homo sapien
aggtgaaacgtgaacttactctgct

SEQ ID NO: 4016015 - DNA, 25 bp, Homo sapien
tcactgcgtgcttgaaagacaggca

SEQ ID NO: 4016016 - DNA, 25 bp, Homo sapien
gaaagaacctgggaaggccatacat

SEQ ID NO: 4016017 - DNA, 25 bp, Homo sapien
ccatacattgaggagcgcagtgctc

SEQ ID NO: 4016018 - DNA, 25 bp, Homo sapien
tacacatagctgaagagtcccatct

SEQ ID NO: 4016019 - DNA, 25 bp, Homo sapien
cacactggggaatgctattccacag

SEQ ID NO: 4016020 - DNA, 25 bp, Homo sapien
tctttgagggcctccctcactgtga

SEQ ID NO: 4016021 - DNA, 25 bp, Homo sapien
tgcactgtcatttgaagtcactctg

SEQ ID NO: 4016022 - DNA, 25 bp, Homo sapien
tttagctctcgcttccggcacactg

SEQ ID NO: 4016023 - DNA, 25 bp, Homo sapien
gcatgttggttgctcagaagggcat

SEQ ID NO: 4016024 - DNA, 25 bp, Homo sapien
catccggttgcggagaaggtacact

SEQ ID NO: 4016025 - DNA, 25 bp, Homo sapien
ggtacactttatggtgacggcctca

SEQ ID NO: 4016026 - DNA, 25 bp, Homo sapien
ccgtagcgaaaccacaggcatgttg

SEQ ID NO: 4016027 - DNA, 25 bp, Homo sapien
gtaccacggttgtgtgacagagaga

SEQ ID NO: 4016028 - DNA, 25 bp, Homo sapien
aggtaccacggttgtgtgacagaga

SEQ ID NO: 4016029 - DNA, 25 bp, Homo sapien
taggtaccacggttgtgtgacagag

SEQ ID NO: 4016030 - DNA, 25 bp, Homo sapien
ctaggtaccacggttgtgtgacaga

SEQ ID NO: 4016031 - DNA, 25 bp, Homo sapien
ttgccccaactcctcctgttttctg

SEQ ID NO: 4016032 - DNA, 25 bp, Homo sapien
gccccaactcctcctgttttctgac

SEQ ID NO: 4016033 - DNA, 25 bp, Homo sapien
tgccccaactcctcctgttttctga

SEQ ID NO: 4016034 - DNA, 25 bp, Homo sapien
tcacatgatgtctgttcactggagg

SEQ ID NO: 4016035 - DNA, 25 bp, Homo sapien
gtcacatgatgtctgttcactggag

SEQ ID NO: 4016036 - DNA, 25 bp, Homo sapien
agagtgctgtgttcagtgtggtaac

SEQ ID NO: 4016037 - DNA, 25 bp, Homo sapien
tccccagagtgctgtgttcagtgtg

SEQ ID NO: 4016038 - DNA, 25 bp, Homo sapien
ccccagagtgctgtgttcagtgtgg

SEQ ID NO: 4016039 - DNA, 25 bp, Homo sapien
ccagagtgctgtgttcagtgtggta

SEQ ID NO: 4016040 - DNA, 25 bp, Homo sapien
gatggagcctatgagcagcagcgat

SEQ ID NO: 4016041 - DNA, 25 bp, Homo sapien
ctgtgtccccagacgaacgttgctg

SEQ ID NO: 4016042 - DNA, 25 bp, Homo sapien
tgctttgtgggagttgagatcgcca

SEQ ID NO: 4016043 - DNA, 25 bp, Homo sapien
cagcagcgatgtttgtgctttgtgg

SEQ ID NO: 4016044 - DNA, 25 bp, Homo sapien
tttgcagatggcgagcgatgttgct

SEQ ID NO: 4016045 - DNA, 25 bp, Homo sapien
gatggcgagcgatgttgcttctgct

SEQ ID NO: 4016046 - DNA, 25 bp, Homo sapien
tgttgcttctgctcgcagtccccat

SEQ ID NO: 4016047 - DNA, 25 bp, Homo sapien
aaaatagaatgagattggtttgcag

SEQ ID NO: 4016048 - DNA, 25 bp, Homo sapien
tctgtgtatgccggggcgggttggg

SEQ ID NO: 4016049 - DNA, 25 bp, Homo sapien
ttctgtgtatgccggggcgggttgg

SEQ ID NO: 4016050 - DNA, 25 bp, Homo sapien
ctgtgtatgccggggcgggttgggg

SEQ ID NO: 4016051 - DNA, 25 bp, Homo sapien
tattggtttggcttcaggagtaccc

SEQ ID NO: 4016052 - DNA, 25 bp, Homo sapien
gcaggtcacactccaattatgatgg

SEQ ID NO: 4016053 - DNA, 25 bp, Homo sapien
cacaattacgtgaagggaggaccct

SEQ ID NO: 4016054 - DNA, 25 bp, Homo sapien
gaattcatataaagctcccctagca

SEQ ID NO: 4016055 - DNA, 25 bp, Homo sapien
gaaagctatcgacctccaaatcatc

SEQ ID NO: 4016056 - DNA, 25 bp, Homo sapien
tgctaaaaaagtgacccaaagtgcc

SEQ ID NO: 4016057 - DNA, 25 bp, Homo sapien
ggtatggcccatagagaaagctatc

SEQ ID NO: 4016058 - DNA, 25 bp, Homo sapien
gggatccttgcctgactgatttcct

SEQ ID NO: 4016059 - DNA, 25 bp, Homo sapien
agcaaggcgtctgtttcagtaacct

SEQ ID NO: 4016060 - DNA, 25 bp, Homo sapien
tagaggggcccgagcaaagagcaca

SEQ ID NO: 4016061 - DNA, 25 bp, Homo sapien
aacctctctgtagggttaatagagg

SEQ ID NO: 4016062 - DNA, 25 bp, Homo sapien
ccgagcaaagagcacaagaagccac

SEQ ID NO: 4016063 - DNA, 25 bp, Homo sapien
ccttgtgctgttggatggagactcc

SEQ ID NO: 4016064 - DNA, 25 bp, Homo sapien
tctttgatgattgaccctgatgccc

SEQ ID NO: 4016065 - DNA, 25 bp, Homo sapien
tctgctcagtgagacctgtaggctc

SEQ ID NO: 4016066 - DNA, 25 bp, Homo sapien
taaggcaggacggtttatccattgc

SEQ ID NO: 4016067 - DNA, 25 bp, Homo sapien
tcccacgtgtggacggatgacctgt

SEQ ID NO: 4016068 - DNA, 25 bp, Homo sapien
tgtcccctgggcacttagctagtac

SEQ ID NO: 4016069 - DNA, 25 bp, Homo sapien
gagtcctggcctatctgaattcccg

SEQ ID NO: 4016070 - DNA, 25 bp, Homo sapien
gaattcccggaatgttgccttcacc

SEQ ID NO: 4016071 - DNA, 25 bp, Homo sapien
cccaggcgtttctggagaggatcag

SEQ ID NO: 4016072 - DNA, 25 bp, Homo sapien
tatcagctatgacaacgccaccaag

SEQ ID NO: 4016073 - DNA, 25 bp, Homo sapien
tgatattctcgtccttgtccaccaa

SEQ ID NO: 4016074 - DNA, 25 bp, Homo sapien
cagctggacatggtctatgacatca

SEQ ID NO: 4016075 - DNA, 25 bp, Homo sapien
ggccttggagccctttcccaagatg

SEQ ID NO: 4016076 - DNA, 25 bp, Homo sapien
ggagccctttcccaagatgtgatct

SEQ ID NO: 4016077 - DNA, 25 bp, Homo sapien
gccctttcccaagatgtgatctaag

SEQ ID NO: 4016078 - DNA, 25 bp, Homo sapien
cttggagccctttcccaagatgtga

SEQ ID NO: 4016079 - DNA, 25 bp, Homo sapien
gaagagcattccattgtgtatccac

SEQ ID NO: 4016080 - DNA, 25 bp, Homo sapien
tgaatgagtgcttggtttccaccag

SEQ ID NO: 4016081 - DNA, 25 bp, Homo sapien
tggtaccaaccattctaaggctctg

SEQ ID NO: 4016082 - DNA, 25 bp, Homo sapien
aatatgtcaatatcgctctgagagg

SEQ ID NO: 4016083 - DNA, 25 bp, Homo sapien
aatccactctcctgcgagtcaggct

SEQ ID NO: 4016084 - DNA, 25 bp, Homo sapien
tttctgccagtcttggattatcctg

SEQ ID NO: 4016085 - DNA, 25 bp, Homo sapien
tggattatcctggacaagaaaaagc

SEQ ID NO: 4016086 - DNA, 25 bp, Homo sapien
cacactgccgacttcatgtagcttt

SEQ ID NO: 4016087 - DNA, 25 bp, Homo sapien
tggcatcttgcaacagggaacttga

SEQ ID NO: 4016088 - DNA, 25 bp, Homo sapien
ggaatcggcatgacaactcaccagc

SEQ ID NO: 4016089 - DNA, 25 bp, Homo sapien
ggacctgccatactggcaagggttt

SEQ ID NO: 4016090 - DNA, 25 bp, Homo sapien
ttgcaacagggaacttgagatgctg

SEQ ID NO: 4016091 - DNA, 25 bp, Homo sapien
tccccggagggtagccaatatcatc

SEQ ID NO: 4016092 - DNA, 25 bp, Homo sapien
ccgactgactccatgtatataagtg

SEQ ID NO: 4016093 - DNA, 25 bp, Homo sapien
tggcagtctggtagtccaaccaggt

SEQ ID NO: 4016094 - DNA, 25 bp, Homo sapien
caggtgatgcttcctgtccccggag

SEQ ID NO: 4016095 - DNA, 25 bp, Homo sapien
ttatctagtctgatttttttcaaca

SEQ ID NO: 4016096 - DNA, 25 bp, Homo sapien
tgatttttttcaacagcatcctgtt

SEQ ID NO: 4016097 - DNA, 25 bp, Homo sapien
atctagtctgatttttttcaacagc

SEQ ID NO: 4016098 - DNA, 25 bp, Homo sapien
ttttttcaacagcatcctgttgtac

SEQ ID NO: 4016099 - DNA, 25 bp, Homo sapien
ggtcttcacactgatgcaggtttgt

SEQ ID NO: 4016100 - DNA, 25 bp, Homo sapien
gacaggcctttctggtcttcacact

SEQ ID NO: 4016101 - DNA, 25 bp, Homo sapien
gtcatctggctctgtggacaggcct

SEQ ID NO: 4016102 - DNA, 25 bp, Homo sapien
actgatgcaggtttgttagtttttt

SEQ ID NO: 4016103 - DNA, 25 bp, Homo sapien
cagaggactaggcaatggatgctgc

SEQ ID NO: 4016104 - DNA, 25 bp, Homo sapien
ggcagaggactaggcaatggatgct

SEQ ID NO: 4016105 - DNA, 25 bp, Homo sapien
aggactaggcaatggatgctgctga

SEQ ID NO: 4016106 - DNA, 25 bp, Homo sapien
ggtgggcagaggactaggcaatgga

SEQ ID NO: 4016107 - DNA, 25 bp, Homo sapien
tgcaaatgactgtctcaggactcct

SEQ ID NO: 4016108 - DNA, 25 bp, Homo sapien
ctgggtgtcagctgagtccatcagc

SEQ ID NO: 4016109 - DNA, 25 bp, Homo sapien
ggcactgccccgtagttaatgactg

SEQ ID NO: 4016110 - DNA, 25 bp, Homo sapien
agccagtgagtagcccctgattgca

SEQ ID NO: 4016111 - DNA, 25 bp, Homo sapien
gctatcgatgtacctccttgcccca

SEQ ID NO: 4016112 - DNA, 25 bp, Homo sapien
tcgatgtacctccttgccccaggtg

SEQ ID NO: 4016113 - DNA, 25 bp, Homo sapien
tatcgatgtacctccttgccccagg

SEQ ID NO: 4016114 - DNA, 25 bp, Homo sapien
atgtacctccttgccccaggtgtga

SEQ ID NO: 4016115 - DNA, 25 bp, Homo sapien
tatttctgttaacactatagaaaga

SEQ ID NO: 4016116 - DNA, 25 bp, Homo sapien
taagaaccttcagggctctttgaag

SEQ ID NO: 4016117 - DNA, 25 bp, Homo sapien
aaaattgtattctgaattgggcatt

SEQ ID NO: 4016118 - DNA, 25 bp, Homo sapien
tagactgagcggataaatctctaaa

SEQ ID NO: 4016119 - DNA, 25 bp, Homo sapien
agtgcaaaggaccagtggggaattt

SEQ ID NO: 4016120 - DNA, 25 bp, Homo sapien
ttcaaatgtaacagctgtgagtgca

SEQ ID NO: 4016121 - DNA, 25 bp, Homo sapien
aggaccagtggggaatttgtcctgt

SEQ ID NO: 4016122 - DNA, 25 bp, Homo sapien
taacagctgtgagtgcaaaggacca

SEQ ID NO: 4016123 - DNA, 25 bp, Homo sapien
ccgttgtggttatgagttcttagga

SEQ ID NO: 4016124 - DNA, 25 bp, Homo sapien
gttatgagttcttaggatgcaaagt

SEQ ID NO: 4016125 - DNA, 25 bp, Homo sapien
tgtggttatgagttcttaggatgca

SEQ ID NO: 4016126 - DNA, 25 bp, Homo sapien
cttgccgttgtggttatgagttctt

SEQ ID NO: 4016127 - DNA, 25 bp, Homo sapien
tccattaggctagctttcgtaggct

SEQ ID NO: 4016128 - DNA, 25 bp, Homo sapien
tatgcaaataggacgagtggaacac

SEQ ID NO: 4016129 - DNA, 25 bp, Homo sapien
tatgatgtcaccagggttcccaacg

SEQ ID NO: 4016130 - DNA, 25 bp, Homo sapien
caacgtagcagccaaccgtggtcat

SEQ ID NO: 4016131 - DNA, 25 bp, Homo sapien
catatatagaaagagctgcacaaaa

SEQ ID NO: 4016132 - DNA, 25 bp, Homo sapien
atcatcatggtgttgctgagctctg

SEQ ID NO: 4016133 - DNA, 25 bp, Homo sapien
cagatcaaccaacagttgagagggt

SEQ ID NO: 4016134 - DNA, 25 bp, Homo sapien
aaaagcaaccagtggagtctccaaa

SEQ ID NO: 4016135 - DNA, 25 bp, Homo sapien
gctgacaaggcacaacccgtaatga

SEQ ID NO: 4016136 - DNA, 25 bp, Homo sapien
gccaggcctaatgaggttaccccag

SEQ ID NO: 4016137 - DNA, 25 bp, Homo sapien
caaatgagtagaaaagtgcagccca

SEQ ID NO: 4016138 - DNA, 25 bp, Homo sapien
ttgttccaagcaactccagatgggt

SEQ ID NO: 4016139 - DNA, 25 bp, Homo sapien
tttggcatcacaagcatcacttaga

SEQ ID NO: 4016140 - DNA, 25 bp, Homo sapien
acccttagcatctggtgacatgagg

SEQ ID NO: 4016141 - DNA, 25 bp, Homo sapien
gacatgaggtatctgccattggccc

SEQ ID NO: 4016142 - DNA, 25 bp, Homo sapien
ctcttgtgtcaaggcataagtatga

SEQ ID NO: 4016143 - DNA, 25 bp, Homo sapien
ttgctcatataatgaagctttctga

SEQ ID NO: 4016144 - DNA, 25 bp, Homo sapien
ctagggcttgttgggtatgaatttc

SEQ ID NO: 4016145 - DNA, 25 bp, Homo sapien
gaaactcccttagcatttatggtgg

SEQ ID NO: 4016146 - DNA, 25 bp, Homo sapien
aatggtttcagaaaaccaggcaagg

SEQ ID NO: 4016147 - DNA, 25 bp, Homo sapien
ttttattatggtaaaatacacaaca

SEQ ID NO: 4016148 - DNA, 25 bp, Homo sapien
tattatggtaaaatacacaacataa

SEQ ID NO: 4016149 - DNA, 25 bp, Homo sapien
tttattatggtaaaatacacaacat

SEQ ID NO: 4016150 - DNA, 25 bp, Homo sapien
ttattatggtaaaatacacaacata

SEQ ID NO: 4016151 - DNA, 25 bp, Homo sapien
ttttgaagtgcacggttcagtggta

SEQ ID NO: 4016152 - DNA, 25 bp, Homo sapien
tgaagtgcacggttcagtggtataa

SEQ ID NO: 4016153 - DNA, 25 bp, Homo sapien
attttgaagtgcacggttcagtggt

SEQ ID NO: 4016154 - DNA, 25 bp, Homo sapien
gaagtgcacggttcagtggtataaa

SEQ ID NO: 4016155 - DNA, 25 bp, Homo sapien
caccatccatatccacaagtcttca

SEQ ID NO: 4016156 - DNA, 25 bp, Homo sapien
tcaccaccatccatatccacaagtc

SEQ ID NO: 4016157 - DNA, 25 bp, Homo sapien
accaccatccatatccacaagtctt

SEQ ID NO: 4016158 - DNA, 25 bp, Homo sapien
accatccatatccacaagtcttcat

SEQ ID NO: 4016159 - DNA, 25 bp, Homo sapien
gtctctctaattttgacaactctat

SEQ ID NO: 4016160 - DNA, 25 bp, Homo sapien
ctgtctctctaattttgacaactct

SEQ ID NO: 4016161 - DNA, 25 bp, Homo sapien
tttgacaactctatgggcttccttt

SEQ ID NO: 4016162 - DNA, 25 bp, Homo sapien
actctatgggcttcctttaagtaga

SEQ ID NO: 4016163 - DNA, 25 bp, Homo sapien
ggatttagctggctcatcactatcc

SEQ ID NO: 4016164 - DNA, 25 bp, Homo sapien
tgattgcagcaaaaaagttaaccac

SEQ ID NO: 4016165 - DNA, 25 bp, Homo sapien
ggcaggcaaatcttcaggggattta

SEQ ID NO: 4016166 - DNA, 25 bp, Homo sapien
tgtgattgcagcaaaaaagttaacc

SEQ ID NO: 4016167 - DNA, 25 bp, Homo sapien
aaatggtccatggagagcaacatcg

SEQ ID NO: 4016168 - DNA, 25 bp, Homo sapien
tccatggagagcaacatcgcagaat

SEQ ID NO: 4016169 - DNA, 25 bp, Homo sapien
ggtccatggagagcaacatcgcaga

SEQ ID NO: 4016170 - DNA, 25 bp, Homo sapien
tggtccatggagagcaacatcgcag

SEQ ID NO: 4016171 - DNA, 25 bp, Homo sapien
ggtatatgtgcagccagttaaccaa

SEQ ID NO: 4016172 - DNA, 25 bp, Homo sapien
tatgtgcagccagttaaccaaaaga

SEQ ID NO: 4016173 - DNA, 25 bp, Homo sapien
gcagccagttaaccaaaagatctag

SEQ ID NO: 4016174 - DNA, 25 bp, Homo sapien
tgtgcagccagttaaccaaaagatc

SEQ ID NO: 4016175 - DNA, 25 bp, Homo sapien
tcttgccaaaaagcttccaatataa

SEQ ID NO: 4016176 - DNA, 25 bp, Homo sapien
tttagctcttgccaaaaagcttcca

SEQ ID NO: 4016177 - DNA, 25 bp, Homo sapien
ttccaatataatttccagcagcctg

SEQ ID NO: 4016178 - DNA, 25 bp, Homo sapien
tccaatataatttccagcagcctgc

SEQ ID NO: 4016179 - DNA, 25 bp, Homo sapien
taagcatcaaaatcaacccagggcc

SEQ ID NO: 4016180 - DNA, 25 bp, Homo sapien
ttcaccaatgtagggaaaagttcta

SEQ ID NO: 4016181 - DNA, 25 bp, Homo sapien
aatggatcccaaacctagctaagca

SEQ ID NO: 4016182 - DNA, 25 bp, Homo sapien
tactatctcataactatctcatggg

SEQ ID NO: 4016183 - DNA, 25 bp, Homo sapien
gatgagcagcactagctgtttccac

SEQ ID NO: 4016184 - DNA, 25 bp, Homo sapien
agatgagcagcactagctgtttcca

SEQ ID NO: 4016185 - DNA, 25 bp, Homo sapien
aaagatgagcagcactagctgtttc

SEQ ID NO: 4016186 - DNA, 25 bp, Homo sapien
aagatgagcagcactagctgtttcc

SEQ ID NO: 4016187 - DNA, 25 bp, Homo sapien
ctttgattatgataaacttcatctc

SEQ ID NO: 4016188 - DNA, 25 bp, Homo sapien
cctttgattatgataaacttcatct

SEQ ID NO: 4016189 - DNA, 25 bp, Homo sapien
ccactttcattaataaactgctaac

SEQ ID NO: 4016190 - DNA, 25 bp, Homo sapien
acttcatctccactttcattaataa

SEQ ID NO: 4016191 - DNA, 25 bp, Homo sapien
cttcaataccctgccgggatgcatt

SEQ ID NO: 4016192 - DNA, 25 bp, Homo sapien
acaatccttccgtggaatctgtccc

SEQ ID NO: 4016193 - DNA, 25 bp, Homo sapien
aatccttccgtggaatctgtcccac

SEQ ID NO: 4016194 - DNA, 25 bp, Homo sapien
atcttcaataccctgccgggatgca

SEQ ID NO: 4016195 - DNA, 25 bp, Homo sapien
cttgaattgtactcctgtaagtccc

SEQ ID NO: 4016196 - DNA, 25 bp, Homo sapien
gataatttgaatcatagggtaggtt

SEQ ID NO: 4016197 - DNA, 25 bp, Homo sapien
cctgtaagtcccacatgttgttggg

SEQ ID NO: 4016198 - DNA, 25 bp, Homo sapien
gtactcctgtaagtcccacatgttg

SEQ ID NO: 4016199 - DNA, 25 bp, Homo sapien
cagagaggtgcaactccaagggagc

SEQ ID NO: 4016200 - DNA, 25 bp, Homo sapien
aagagtacatatacagttggccaga

SEQ ID NO: 4016201 - DNA, 25 bp, Homo sapien
aatgttccttaagtatataccagag

SEQ ID NO: 4016202 - DNA, 25 bp, Homo sapien
ggagcactgcaccagtgagcccaag

SEQ ID NO: 4016203 - DNA, 25 bp, Homo sapien
gaatttcatgcctcaaggttggaaa

SEQ ID NO: 4016204 - DNA, 25 bp, Homo sapien
ccttagtaagttatgaacgtaacat

SEQ ID NO: 4016205 - DNA, 25 bp, Homo sapien
aaaatatacactaatccttagtaag

SEQ ID NO: 4016206 - DNA, 25 bp, Homo sapien
agaatttcatgcctcaaggttggaa

SEQ ID NO: 4016207 - DNA, 25 bp, Homo sapien
tacttgaggctattatggatgctgc

SEQ ID NO: 4016208 - DNA, 25 bp, Homo sapien
gacaagcagcaagagcggaaatcct

SEQ ID NO: 4016209 - DNA, 25 bp, Homo sapien
taacatcagtcgcacttggtcatgg

SEQ ID NO: 4016210 - DNA, 25 bp, Homo sapien
ggtactaactcaatctcagccggtc

SEQ ID NO: 4016211 - DNA, 25 bp, Homo sapien
tccaccagtattggcatgagaaacc

SEQ ID NO: 4016212 - DNA, 25 bp, Homo sapien
tttccaccagtattggcatgagaaa

SEQ ID NO: 4016213 - DNA, 25 bp, Homo sapien
caccagtattggcatgagaaaccac

SEQ ID NO: 4016214 - DNA, 25 bp, Homo sapien
ttccaccagtattggcatgagaaac

SEQ ID NO: 4016215 - DNA, 25 bp, Homo sapien
taagcttctgttaactctgatatca

SEQ ID NO: 4016216 - DNA, 25 bp, Homo sapien
taacaaataatcaacagacagaggg

SEQ ID NO: 4016217 - DNA, 25 bp, Homo sapien
tagcttctgagaaagtctataacaa

SEQ ID NO: 4016218 - DNA, 25 bp, Homo sapien
tcaacagacagagggaactagaaat

SEQ ID NO: 4016219 - DNA, 25 bp, Homo sapien
aaaaatgcaatgtaagactcaagct

SEQ ID NO: 4016220 - DNA, 25 bp, Homo sapien
tcatatggcatgacacaaacacacc

SEQ ID NO: 4016221 - DNA, 25 bp, Homo sapien
gggagaatctgcatacgaactttga

SEQ ID NO: 4016222 - DNA, 25 bp, Homo sapien
tgtaatgtttcctcaagtggataca

SEQ ID NO: 4016223 - DNA, 25 bp, Homo sapien
tatcttgctattatttgcaaggctc

SEQ ID NO: 4016224 - DNA, 25 bp, Homo sapien
cttgctattatttgcaaggctctgt

SEQ ID NO: 4016225 - DNA, 25 bp, Homo sapien
tcttgctattatttgcaaggctctg

SEQ ID NO: 4016226 - DNA, 25 bp, Homo sapien
atatcttgctattatttgcaaggct

SEQ ID NO: 4016227 - DNA, 25 bp, Homo sapien
gaaaagttcagagtatgagcatcaa

SEQ ID NO: 4016228 - DNA, 25 bp, Homo sapien
cagagtatgagcatcaaaacaaaac

SEQ ID NO: 4016229 - DNA, 25 bp, Homo sapien
gttcagagtatgagcatcaaaacaa

SEQ ID NO: 4016230 - DNA, 25 bp, Homo sapien
aagaaaagttcagagtatgagcatc

SEQ ID NO: 4016231 - DNA, 25 bp, Homo sapien
aaagacacacactaccctgcctagt

SEQ ID NO: 4016232 - DNA, 25 bp, Homo sapien
ccctgcctagttctactttaagcct

SEQ ID NO: 4016233 - DNA, 25 bp, Homo sapien
cactaccctgcctagttctacttta

SEQ ID NO: 4016234 - DNA, 25 bp, Homo sapien
aagacacacactaccctgcctagtt

SEQ ID NO: 4016235 - DNA, 25 bp, Homo sapien
tctgaaacatctacatcgccttcct

SEQ ID NO: 4016236 - DNA, 25 bp, Homo sapien
cagaatctgaaacatctacatcgcc

SEQ ID NO: 4016237 - DNA, 25 bp, Homo sapien
tcagaatctgaaacatctacatcgc

SEQ ID NO: 4016238 - DNA, 25 bp, Homo sapien
gaatctgaaacatctacatcgcctt

SEQ ID NO: 4016239 - DNA, 25 bp, Homo sapien
tttccataatccaaagttagcccaa

SEQ ID NO: 4016240 - DNA, 25 bp, Homo sapien
tgatctagacaatgaatggctatac

SEQ ID NO: 4016241 - DNA, 25 bp, Homo sapien
tagcccaatgattaattaaatgcac

SEQ ID NO: 4016242 - DNA, 25 bp, Homo sapien
tgacctagacaatgaacagctataa

SEQ ID NO: 4016243 - DNA, 25 bp, Homo sapien
gaagcaatcatgctgagacacggtc

SEQ ID NO: 4016244 - DNA, 25 bp, Homo sapien
caaaatgggaagcaatcatgctgag

SEQ ID NO: 4016245 - DNA, 25 bp, Homo sapien
gcacaaaatgggaagcaatcatgct

SEQ ID NO: 4016246 - DNA, 25 bp, Homo sapien
aatgggaagcaatcatgctgagaca

SEQ ID NO: 4016247 - DNA, 25 bp, Homo sapien
gacttctattcaaccaaggcaatct

SEQ ID NO: 4016248 - DNA, 25 bp, Homo sapien
ctgtttgacttctattcaaccaagg

SEQ ID NO: 4016249 - DNA, 25 bp, Homo sapien
ccaaatactcttccactactgtttg

SEQ ID NO: 4016250 - DNA, 25 bp, Homo sapien
tccactactgtttgacttctattca

SEQ ID NO: 4016251 - DNA, 25 bp, Homo sapien
tctagcagccagttgatgatctggt

SEQ ID NO: 4016252 - DNA, 25 bp, Homo sapien
gaagaacggaattctagcagccagt

SEQ ID NO: 4016253 - DNA, 25 bp, Homo sapien
gcagccagttgatgatctggtcatc

SEQ ID NO: 4016254 - DNA, 25 bp, Homo sapien
cggaattctagcagccagttgatga

SEQ ID NO: 4016255 - DNA, 25 bp, Homo sapien
tacagctatcttatatcaatcattt

SEQ ID NO: 4016256 - DNA, 25 bp, Homo sapien
acagctatcttatatcaatcattta

SEQ ID NO: 4016257 - DNA, 25 bp, Homo sapien
aaaggaagcattagagcagggtttc

SEQ ID NO: 4016258 - DNA, 25 bp, Homo sapien
caaactatgtctgtataaagtggca

SEQ ID NO: 4016259 - DNA, 25 bp, Homo sapien
tgagaaccaccagattaaagtaagg

SEQ ID NO: 4016260 - DNA, 25 bp, Homo sapien
cactcttggttatgggaggctgccc

SEQ ID NO: 4016261 - DNA, 25 bp, Homo sapien
ctttatgtctggatctaacagctgg

SEQ ID NO: 4016262 - DNA, 25 bp, Homo sapien
tatgtctggatctaacagctggttc

SEQ ID NO: 4016263 - DNA, 25 bp, Homo sapien
acaactcaaagtcatttgtttcacc

SEQ ID NO: 4016264 - DNA, 25 bp, Homo sapien
cagctggttcttcaacaactcaaag

SEQ ID NO: 4016265 - DNA, 25 bp, Homo sapien
gatactcctgcgaattctcaaaaag

SEQ ID NO: 4016266 - DNA, 25 bp, Homo sapien
tcatgttagtgcagccagagggctt

SEQ ID NO: 4016267 - DNA, 25 bp, Homo sapien
gccagctctaatgatctaattcagg

SEQ ID NO: 4016268 - DNA, 25 bp, Homo sapien
caaaaatccctattcagagaaccgg

SEQ ID NO: 4016269 - DNA, 25 bp, Homo sapien
attctctaatgcacgcatatttgaa

SEQ ID NO: 4016270 - DNA, 25 bp, Homo sapien
caagccaagctgtttctcatttcac

SEQ ID NO: 4016271 - DNA, 25 bp, Homo sapien
ccaagctgtttctcatttcacttac

SEQ ID NO: 4016272 - DNA, 25 bp, Homo sapien
ctcttcaaacaagccaagctgtttc

SEQ ID NO: 4016273 - DNA, 25 bp, Homo sapien
ctgctcttcaaacaagccaagctgt

SEQ ID NO: 4016274 - DNA, 25 bp, Homo sapien
caaatctctacgtggctggattttt

SEQ ID NO: 4016275 - DNA, 25 bp, Homo sapien
tcactctattggaaatactcttttc

SEQ ID NO: 4016276 - DNA, 25 bp, Homo sapien
tgttcactctattggaaatactctt

SEQ ID NO: 4016277 - DNA, 25 bp, Homo sapien
cttttcccaaatctctacgtggctg

SEQ ID NO: 4016278 - DNA, 25 bp, Homo sapien
gatttttgtcttcattcaagtagaa

SEQ ID NO: 4016279 - DNA, 25 bp, Homo sapien
tagatttttgtcttcattcaagtag

SEQ ID NO: 4016280 - DNA, 25 bp, Homo sapien
cctagatttttgtcttcattcaagt

SEQ ID NO: 4016281 - DNA, 25 bp, Homo sapien
ccggcctagatttttgtcttcattc

SEQ ID NO: 4016282 - DNA, 25 bp, Homo sapien
tttggtcccagacgcgcagaaggaa

SEQ ID NO: 4016283 - DNA, 25 bp, Homo sapien
ccatgagtgacaacgttcggctgat

SEQ ID NO: 4016284 - DNA, 25 bp, Homo sapien
ccaggcctgggaaatcacgaagaga

SEQ ID NO: 4016285 - DNA, 25 bp, Homo sapien
tctgtgaacgtgagatgaccctcga

SEQ ID NO: 4016286 - DNA, 25 bp, Homo sapien
cgacaaacaacgtgtgaagcagcgg

SEQ ID NO: 4016287 - DNA, 25 bp, Homo sapien
tctcccgacaaacaacgtgtgaagc

SEQ ID NO: 4016288 - DNA, 25 bp, Homo sapien
tcccgacaaacaacgtgtgaagcag

SEQ ID NO: 4016289 - DNA, 25 bp, Homo sapien
cgcatctcccgacaaacaacgtgtg

SEQ ID NO: 4016290 - DNA, 25 bp, Homo sapien
gccagcgcaaccttcagacaatcag

SEQ ID NO: 4016291 - DNA, 25 bp, Homo sapien
tcggcgggctagagcgccgctaaaa

SEQ ID NO: 4016292 - DNA, 25 bp, Homo sapien
ggagggcgtatgctctcggcgggct

SEQ ID NO: 4016293 - DNA, 25 bp, Homo sapien
ctgtcccggaagttgcgcgtgccag

SEQ ID NO: 4016294 - DNA, 25 bp, Homo sapien
gcgcgagtgtaaggagagacgggaa

SEQ ID NO: 4016295 - DNA, 25 bp, Homo sapien
gcgtgagtgcgcgagtgtaaggaga

SEQ ID NO: 4016296 - DNA, 25 bp, Homo sapien
tgagtgcgcgagtgtaaggagagac

SEQ ID NO: 4016297 - DNA, 25 bp, Homo sapien
ccagcgtgagtgcgcgagtgtaagg

SEQ ID NO: 4016298 - DNA, 25 bp, Homo sapien
cccagagcctcaaggctgtgatgat

SEQ ID NO: 4016299 - DNA, 25 bp, Homo sapien
ccagagcctcaaggctgtgatgatg

SEQ ID NO: 4016300 - DNA, 25 bp, Homo sapien
ctccggggttcaagcaattctccta

SEQ ID NO: 4016301 - DNA, 25 bp, Homo sapien
ttttattctctcgagacagagtctt

SEQ ID NO: 4016302 - DNA, 25 bp, Homo sapien
tgctctgttgctcaggctggactgc

SEQ ID NO: 4016303 - DNA, 25 bp, Homo sapien
ctgcaatggcgtgatcttggctcac

SEQ ID NO: 4016304 - DNA, 25 bp, Homo sapien
gagtttgtgttcctgtagtagcata

SEQ ID NO: 4016305 - DNA, 25 bp, Homo sapien
aaaaccagccggacatgctggcgtg

SEQ ID NO: 4016306 - DNA, 25 bp, Homo sapien
gagagatatgctgtctcaaaggaaa

SEQ ID NO: 4016307 - DNA, 25 bp, Homo sapien
tcaaggctaaagtgagctgattgag

SEQ ID NO: 4016308 - DNA, 25 bp, Homo sapien
tgttacactcgagctgaggaggccg

SEQ ID NO: 4016309 - DNA, 25 bp, Homo sapien
attctttgttagtttttggagtgtg

SEQ ID NO: 4016310 - DNA, 25 bp, Homo sapien
gttcgggtaatgatggttccacgtc

SEQ ID NO: 4016311 - DNA, 25 bp, Homo sapien
ttcgggtaatgatggttccacgtca

SEQ ID NO: 4016312 - DNA, 25 bp, Homo sapien
tcttgggtttgcgtgacggttccac

SEQ ID NO: 4016313 - DNA, 25 bp, Homo sapien
tgcgtgacggttccacgtcaccgac

SEQ ID NO: 4016314 - DNA, 25 bp, Homo sapien
cttgggtttgcgtgacggttccaca

SEQ ID NO: 4016315 - DNA, 25 bp, Homo sapien
tgcgtgacggttccacatcaccgac

SEQ ID NO: 4016316 - DNA, 25 bp, Homo sapien
tcttgggtttgcgtgacggttccac

SEQ ID NO: 4016317 - DNA, 25 bp, Homo sapien
tgcgtgacggttccacgtcaccgac

SEQ ID NO: 4016318 - DNA, 25 bp, Homo sapien
gggtttgcgtggtttttctgcctca

SEQ ID NO: 4016319 - DNA, 25 bp, Homo sapien
gtggttccatctcagccgccctctg

SEQ ID NO: 4016320 - DNA, 25 bp, Homo sapien
atcatcggctgagggtggaagcggc

SEQ ID NO: 4016321 - DNA, 25 bp, Homo sapien
cccgcagacgctcggcaggtgtctt

SEQ ID NO: 4016322 - DNA, 25 bp, Homo sapien
agctgagggtggaaggggagtgagc

SEQ ID NO: 4016323 - DNA, 25 bp, Homo sapien
tgagggtggagctgagggtggaagg

SEQ ID NO: 4016324 - DNA, 25 bp, Homo sapien
gagggtggaaggggagtgagctgac

SEQ ID NO: 4016325 - DNA, 25 bp, Homo sapien
ctgagggtggaaggggagtgagctg

SEQ ID NO: 4016326 - DNA, 25 bp, Homo sapien
gattatcatccgctgagggtggaag

SEQ ID NO: 4016327 - DNA, 25 bp, Homo sapien
gctcggaaggtgtcttgagattatc

SEQ ID NO: 4016328 - DNA, 25 bp, Homo sapien
ctcggaaggtgtcttgagattatca

SEQ ID NO: 4016329 - DNA, 25 bp, Homo sapien
tatcatccgctgagggtggaagcgg

SEQ ID NO: 4016330 - DNA, 25 bp, Homo sapien
tgagctgacgctcggaaggtgtctt

SEQ ID NO: 4016331 - DNA, 25 bp, Homo sapien
aggggagtgagctgacgctcggaag

SEQ ID NO: 4016332 - DNA, 25 bp, Homo sapien
ggagtgagctgacgctcggaaggtg

SEQ ID NO: 4016333 - DNA, 25 bp, Homo sapien
gaaggggagtgagctgacgctcgga

SEQ ID NO: 4016334 - DNA, 25 bp, Homo sapien
cggcaggtgtcttgatattatcatc

SEQ ID NO: 4016335 - DNA, 25 bp, Homo sapien
gcaggtgtcttgatattatcatctg

SEQ ID NO: 4016336 - DNA, 25 bp, Homo sapien
ctgctgagggtggagctgagggtgg

SEQ ID NO: 4016337 - DNA, 25 bp, Homo sapien
gagggtggaaggggagtgagctgac

SEQ ID NO: 4016338 - DNA, 25 bp, Homo sapien
gctcggaaggtgtcttgagattatc

SEQ ID NO: 4016339 - DNA, 25 bp, Homo sapien
atcatccgctgagggtggaagcggc

SEQ ID NO: 4016340 - DNA, 25 bp, Homo sapien
ctcggaaggtgtcttgagattatca

SEQ ID NO: 4016341 - DNA, 25 bp, Homo sapien
attatcatccgctgagggtggaagc

SEQ ID NO: 4016342 - DNA, 25 bp, Homo sapien
tgagctgacgctcggaaggtgtctt

SEQ ID NO: 4016343 - DNA, 25 bp, Homo sapien
ggagtgagctgacgctcggaaggtg

SEQ ID NO: 4016344 - DNA, 25 bp, Homo sapien
aggggagtgagctgacgctcggaag

SEQ ID NO: 4016345 - DNA, 25 bp, Homo sapien
gaaggggagtgagctgacgctcgga

SEQ ID NO: 4016346 - DNA, 25 bp, Homo sapien
cccccgcagacgctcggcaggtgtc

SEQ ID NO: 4016347 - DNA, 25 bp, Homo sapien
ctgagggtggaagcggcccccgcag

SEQ ID NO: 4016348 - DNA, 25 bp, Homo sapien
cccgcagacgctcggcaggtgtctt

SEQ ID NO: 4016349 - DNA, 25 bp, Homo sapien
tgagctgacgctcggaaggtgtctt

SEQ ID NO: 4016350 - DNA, 25 bp, Homo sapien
aaggggagtgagctgacgctcggaa

SEQ ID NO: 4016351 - DNA, 25 bp, Homo sapien
gggtggaaggggagtgagctgacgc

SEQ ID NO: 4016352 - DNA, 25 bp, Homo sapien
tggaaggggagtgagctgacgctcg

SEQ ID NO: 4016353 - DNA, 25 bp, Homo sapien
gaaggggagtgagctgacgctcgga

SEQ ID NO: 4016354 - DNA, 25 bp, Homo sapien
ctgagggtggaagcggcccccgcag

SEQ ID NO: 4016355 - DNA, 25 bp, Homo sapien
agacgctccccgcagacgctcggca

SEQ ID NO: 4016356 - DNA, 25 bp, Homo sapien
cccgcagacgctcggcaggtgtctt

SEQ ID NO: 4016357 - DNA, 25 bp, Homo sapien
cgctgagggtggaagcggcccccgc

SEQ ID NO: 4016358 - DNA, 25 bp, Homo sapien
ctgagggtggaagcggcccccgcag

SEQ ID NO: 4016359 - DNA, 25 bp, Homo sapien
cccgcagacgctcggcaggtgtctt

SEQ ID NO: 4016360 - DNA, 25 bp, Homo sapien
cgctgagggtggaagcggcccccgc

SEQ ID NO: 4016361 - DNA, 25 bp, Homo sapien
cccccgcagacgctcggcaggtgtc

SEQ ID NO: 4016362 - DNA, 25 bp, Homo sapien
gaaggggagtgagctgacgctcgga

SEQ ID NO: 4016363 - DNA, 25 bp, Homo sapien
ctgagggtggaagcggcccccgcag

SEQ ID NO: 4016364 - DNA, 25 bp, Homo sapien
cgctgagggtggaagcggcccccgc

SEQ ID NO: 4016365 - DNA, 25 bp, Homo sapien
tgagctgacgctcggaaggtgtctt

SEQ ID NO: 4016366 - DNA, 25 bp, Homo sapien
tgagctgacgctcggaaggtgtctt

SEQ ID NO: 4016367 - DNA, 25 bp, Homo sapien
ctgagggtggaagcggcccccgcag

SEQ ID NO: 4016368 - DNA, 25 bp, Homo sapien
cccgcagacgctcggcaggtgtctt

SEQ ID NO: 4016369 - DNA, 25 bp, Homo sapien
aaggggagtgagctgacgctcggaa

SEQ ID NO: 4016370 - DNA, 25 bp, Homo sapien
aaggggagtgagctgacgctcggaa

SEQ ID NO: 4016371 - DNA, 25 bp, Homo sapien
ggtggaaggggagtgagctgacgct

SEQ ID NO: 4016372 - DNA, 25 bp, Homo sapien
ctgagggtggagctgagggtggaag

SEQ ID NO: 4016373 - DNA, 25 bp, Homo sapien
ggaaggggagtgagctgacgctcgg

SEQ ID NO: 4016374 - DNA, 25 bp, Homo sapien
tggaagcggaatccgcagacgctca

SEQ ID NO: 4016375 - DNA, 25 bp, Homo sapien
ggctgatggtggaagcggaatccgc

SEQ ID NO: 4016376 - DNA, 25 bp, Homo sapien
tcagcaggtatcttgatattatcat

SEQ ID NO: 4016377 - DNA, 25 bp, Homo sapien
tggtggaagcggaatccgcagacgc

SEQ ID NO: 4016378 - DNA, 25 bp, Homo sapien
ctcggaaggtgtcttgagattatca

SEQ ID NO: 4016379 - DNA, 25 bp, Homo sapien
gctcggaaggtgtcttgagattatc

SEQ ID NO: 4016380 - DNA, 25 bp, Homo sapien
aaggggagtgagctgacgctcggaa

SEQ ID NO: 4016381 - DNA, 25 bp, Homo sapien
ggtggaaggggagtgagctgacgct

SEQ ID NO: 4016382 - DNA, 25 bp, Homo sapien
ggaaggcaggtgtcttgatgttatc

SEQ ID NO: 4016383 - DNA, 25 bp, Homo sapien
agggtggaaggcaggtgtcttgatg

SEQ ID NO: 4016384 - DNA, 25 bp, Homo sapien
aaggcaggtgtcttgatgttatcat

SEQ ID NO: 4016385 - DNA, 25 bp, Homo sapien
gtggaaggcaggtgtcttgatgtta

SEQ ID NO: 4016386 - DNA, 25 bp, Homo sapien
tgagggtggaaggggagtgagctga

SEQ ID NO: 4016387 - DNA, 25 bp, Homo sapien
gagggtggaaggggagtgagctgac

SEQ ID NO: 4016388 - DNA, 25 bp, Homo sapien
ctgagggtggaaggggagtgagctg

SEQ ID NO: 4016389 - DNA, 25 bp, Homo sapien
gtcttgagattatcatccgctgagg

SEQ ID NO: 4016390 - DNA, 25 bp, Homo sapien
gtgtcttgagattatcatccgctga

SEQ ID NO: 4016391 - DNA, 25 bp, Homo sapien
atcatccgctgagggtggaagcggc

SEQ ID NO: 4016392 - DNA, 25 bp, Homo sapien
attatcatccgctgagggtggaagc

SEQ ID NO: 4016393 - DNA, 25 bp, Homo sapien
ggagtgagctgacgctcggaaggtg

SEQ ID NO: 4016394 - DNA, 25 bp, Homo sapien
aggggagtgagctgacgctcggaag

SEQ ID NO: 4016395 - DNA, 25 bp, Homo sapien
tgagctgacgctcggaaggtgtctt

SEQ ID NO: 4016396 - DNA, 25 bp, Homo sapien
gaaggggagtgagctgacgctcgga

SEQ ID NO: 4016397 - DNA, 25 bp, Homo sapien
caggtgtcttgatattatcatctgc

SEQ ID NO: 4016398 - DNA, 25 bp, Homo sapien
ccccgcagacgctcggcaggtgtct

SEQ ID NO: 4016399 - DNA, 25 bp, Homo sapien
cccgcagacgctcggcaggtgtctt

SEQ ID NO: 4016400 - DNA, 25 bp, Homo sapien
tgtcttgatattatcatctgctgag

SEQ ID NO: 4016401 - DNA, 25 bp, Homo sapien
tgagctgacgctcggaaggtgtctt

SEQ ID NO: 4016402 - DNA, 25 bp, Homo sapien
ctgagggtggaagcggcccccgcag

SEQ ID NO: 4016403 - DNA, 25 bp, Homo sapien
aaggggagtgagctgacgctcggaa

SEQ ID NO: 4016404 - DNA, 25 bp, Homo sapien
cccgcagacgctcggcaggtgtctt

SEQ ID NO: 4016405 - DNA, 25 bp, Homo sapien
ggagtgagctgacgctcggaaggtg

SEQ ID NO: 4016406 - DNA, 25 bp, Homo sapien
aggggagtgagctgacgctcggaag

SEQ ID NO: 4016407 - DNA, 25 bp, Homo sapien
gaaggggagtgagctgacgctcgga

SEQ ID NO: 4016408 - DNA, 25 bp, Homo sapien
tgagctgacgctcggaaggtgtctt

SEQ ID NO: 4016409 - DNA, 25 bp, Homo sapien
ccccgcagacgctcagcaggtgtct

SEQ ID NO: 4016410 - DNA, 25 bp, Homo sapien
cgctcagcaggtgtcttgatattat

SEQ ID NO: 4016411 - DNA, 25 bp, Homo sapien
cccgcagacgctcagcaggtgtctt

SEQ ID NO: 4016412 - DNA, 25 bp, Homo sapien
tcagcaggtgtcttgatattatcat

SEQ ID NO: 4016413 - DNA, 25 bp, Homo sapien
tgagctgacgctcggaaggtgtctt

SEQ ID NO: 4016414 - DNA, 25 bp, Homo sapien
ctgagggtggaagcggcccccgcag

SEQ ID NO: 4016415 - DNA, 25 bp, Homo sapien
gaaggggagtgagctgacgctcgga

SEQ ID NO: 4016416 - DNA, 25 bp, Homo sapien
cgctgagggtggaagcggcccccgc

SEQ ID NO: 4016417 - DNA, 25 bp, Homo sapien
gctcggcaggtgtcttgatattatc

SEQ ID NO: 4016418 - DNA, 25 bp, Homo sapien
cttgatattatcatctgctgagggt

SEQ ID NO: 4016419 - DNA, 25 bp, Homo sapien
tgatattatcatctgctgagggtgg

SEQ ID NO: 4016420 - DNA, 25 bp, Homo sapien
atattatcatctgctgagggtggag

SEQ ID NO: 4016421 - DNA, 25 bp, Homo sapien
gctcggaaggtgtcttgagattatc

SEQ ID NO: 4016422 - DNA, 25 bp, Homo sapien
aaggggagtgagctgacgctcggaa

SEQ ID NO: 4016423 - DNA, 25 bp, Homo sapien
ggtggaaggggagtgagctgacgct

SEQ ID NO: 4016424 - DNA, 25 bp, Homo sapien
ctcggaaggtgtcttgagattatca

SEQ ID NO: 4016425 - DNA, 25 bp, Homo sapien
ggagcagacactcggcacgtgtctt

SEQ ID NO: 4016426 - DNA, 25 bp, Homo sapien
gatggagcagacactcggcacgtgt

SEQ ID NO: 4016427 - DNA, 25 bp, Homo sapien
gggatggagcagacactcggcacgt

SEQ ID NO: 4016428 - DNA, 25 bp, Homo sapien
aggggatggagcagacactcggcac

SEQ ID NO: 4016429 - DNA, 25 bp, Homo sapien
actcgggaggtgtcttgagattatc

SEQ ID NO: 4016430 - DNA, 25 bp, Homo sapien
ctcgggaggtgtcttgagattatca

SEQ ID NO: 4016431 - DNA, 25 bp, Homo sapien
gagggtggaaggggagtgagcacac

SEQ ID NO: 4016432 - DNA, 25 bp, Homo sapien
agattatcatccgctgagggtggaa

SEQ ID NO: 4016433 - DNA, 25 bp, Homo sapien
tgagcagacactcgggaggtgtctt

SEQ ID NO: 4016434 - DNA, 25 bp, Homo sapien
attatcatccgctgagggtggaagg

SEQ ID NO: 4016435 - DNA, 25 bp, Homo sapien
actcgggaggtgtcttgagattatc

SEQ ID NO: 4016436 - DNA, 25 bp, Homo sapien
gggagtgagcagacactcgggaggt

SEQ ID NO: 4016437 - DNA, 25 bp, Homo sapien
aaggtacagaggccacacaagaacc

SEQ ID NO: 4016438 - DNA, 25 bp, Homo sapien
taggactcggcagcttttgaaggta

SEQ ID NO: 4016439 - DNA, 25 bp, Homo sapien
aggtacagaggccacacaagaacca

SEQ ID NO: 4016440 - DNA, 25 bp, Homo sapien
aatcataggactcggcagcttttga

SEQ ID NO: 4016441 - DNA, 25 bp, Homo sapien
gatgaaggtgtttttgcgcaacacg

SEQ ID NO: 4016442 - DNA, 25 bp, Homo sapien
ttttgcgcaacacggttaccaacag

SEQ ID NO: 4016443 - DNA, 25 bp, Homo sapien
cgcaacacggttaccaacagggatg

SEQ ID NO: 4016444 - DNA, 25 bp, Homo sapien
gtgtttttgcgcaacacggttacca

SEQ ID NO: 4016445 - DNA, 25 bp, Homo sapien
atgtatccatgtcctgacctggcag

SEQ ID NO: 4016446 - DNA, 25 bp, Homo sapien
aatgtatccatgtcctgacctggca

SEQ ID NO: 4016447 - DNA, 25 bp, Homo sapien
aaaatgtatccatgtcctgacctgg

SEQ ID NO: 4016448 - DNA, 25 bp, Homo sapien
aaatgtatccatgtcctgacctggc

SEQ ID NO: 4016449 - DNA, 25 bp, Homo sapien
ccagttgcaaagagcctttcttgca

SEQ ID NO: 4016450 - DNA, 25 bp, Homo sapien
aaagagcctttcttgcagaaggggg

SEQ ID NO: 4016451 - DNA, 25 bp, Homo sapien
ttgcaaagagcctttcttgcagaag

SEQ ID NO: 4016452 - DNA, 25 bp, Homo sapien
gcaaagagcctttcttgcagaaggg

SEQ ID NO: 4016453 - DNA, 25 bp, Homo sapien
tgttgagagagtctaagggccgtgg

SEQ ID NO: 4016454 - DNA, 25 bp, Homo sapien
gaatgttgagagagtctaagggccg

SEQ ID NO: 4016455 - DNA, 25 bp, Homo sapien
aatgttgagagagtctaagggccgt

SEQ ID NO: 4016456 - DNA, 25 bp, Homo sapien
tgagagagtctaagggccgtggcat

SEQ ID NO: 4016457 - DNA, 25 bp, Homo sapien
ctgcaactgcagggaggaagctcct

SEQ ID NO: 4016458 - DNA, 25 bp, Homo sapien
tgcaactgcagggaggaagctcctt

SEQ ID NO: 4016459 - DNA, 25 bp, Homo sapien
ctcttgcgcacgttgaaacattttc

SEQ ID NO: 4016460 - DNA, 25 bp, Homo sapien
tcgccgccgcaactcttgcgcacgt

SEQ ID NO: 4016461 - DNA, 25 bp, Homo sapien
tctgctcgccgccgcaactcttgcg

SEQ ID NO: 4016462 - DNA, 25 bp, Homo sapien
tttgcatttgtggtagtcctctgct

SEQ ID NO: 4016463 - DNA, 25 bp, Homo sapien
gaagagtacagtctgagccggtcac

SEQ ID NO: 4016464 - DNA, 25 bp, Homo sapien
caactgtacccttacacaatctatc

SEQ ID NO: 4016465 - DNA, 25 bp, Homo sapien
aatctatctctacctagaaaacgta

SEQ ID NO: 4016466 - DNA, 25 bp, Homo sapien
gaaaacgtatttcagatggctagaa

SEQ ID NO: 4016467 - DNA, 25 bp, Homo sapien
tttcctaaggatgacaacaactcac

SEQ ID NO: 4016468 - DNA, 25 bp, Homo sapien
tcctaaggatgacaacaactcaccc

SEQ ID NO: 4016469 - DNA, 25 bp, Homo sapien
ctaaggatgacaacaactcacccca

SEQ ID NO: 4016470 - DNA, 25 bp, Homo sapien
taaggatgacaacaactcaccccac

SEQ ID NO: 4016471 - DNA, 25 bp, Homo sapien
ctctccttttctgcatgctcacatt

SEQ ID NO: 4016472 - DNA, 25 bp, Homo sapien
tccttttctgcatgctcacattctt

SEQ ID NO: 4016473 - DNA, 25 bp, Homo sapien
catgctcacattctttcacgcttag

SEQ ID NO: 4016474 - DNA, 25 bp, Homo sapien
ttctgcatgctcacattctttcacg

SEQ ID NO: 4016475 - DNA, 25 bp, Homo sapien
ccttccagaataaccccgcagttca

SEQ ID NO: 4016476 - DNA, 25 bp, Homo sapien
aaacccaggacgaaagtcagcctcg

SEQ ID NO: 4016477 - DNA, 25 bp, Homo sapien
gaaacccaggacgaaagtcagcctc

SEQ ID NO: 4016478 - DNA, 25 bp, Homo sapien
ccgacgacttcaattgcagcttgta

SEQ ID NO: 4016479 - DNA, 25 bp, Homo sapien
gactgagcctgcaccgacgacttca

SEQ ID NO: 4016480 - DNA, 25 bp, Homo sapien
cttcaattgcagcttgtatggagga

SEQ ID NO: 4016481 - DNA, 25 bp, Homo sapien
gagcctgcaccgacgacttcaattg

SEQ ID NO: 4016482 - DNA, 25 bp, Homo sapien
gcgagactctatcgcaaaattaaaa

SEQ ID NO: 4016483 - DNA, 25 bp, Homo sapien
gaaaggaaaaccaatgccagtacta

SEQ ID NO: 4016484 - DNA, 25 bp, Homo sapien
caactcctcttcctccgaaaaaatg

SEQ ID NO: 4016485 - DNA, 25 bp, Homo sapien
accaatgccagtactagcaactcct

SEQ ID NO: 4016486 - DNA, 25 bp, Homo sapien
caacagtatttgtgtcaaggcacat

SEQ ID NO: 4016487 - DNA, 25 bp, Homo sapien
acaacagtatttgtgtcaaggcaca

SEQ ID NO: 4016488 - DNA, 25 bp, Homo sapien
cgtagagtaatgacgtctttcagga

SEQ ID NO: 4016489 - DNA, 25 bp, Homo sapien
taacttttgtttccacatgtctccg

SEQ ID NO: 4016490 - DNA, 25 bp, Homo sapien
tggttgattttcgttgtcaccttcc

SEQ ID NO: 4016491 - DNA, 25 bp, Homo sapien
agagtaatgacgtctttcaggacaa

SEQ ID NO: 4016492 - DNA, 25 bp, Homo sapien
tcttttctttgtgtgcatacaaatg

SEQ ID NO: 4016493 - DNA, 25 bp, Homo sapien
tctttgtgtgcatacaaatggacct

SEQ ID NO: 4016494 - DNA, 25 bp, Homo sapien
tttgtgtgcatacaaatggacctca

SEQ ID NO: 4016495 - DNA, 25 bp, Homo sapien
tttctttgtgtgcatacaaatggac

SEQ ID NO: 4016496 - DNA, 25 bp, Homo sapien
aaactcatttccacactatgcggat

SEQ ID NO: 4016497 - DNA, 25 bp, Homo sapien
cacactatgcggattccaacagagc

SEQ ID NO: 4016498 - DNA, 25 bp, Homo sapien
tatgcggattccaacagagccatac

SEQ ID NO: 4016499 - DNA, 25 bp, Homo sapien
tcatttccacactatgcggattcca

SEQ ID NO: 4016500 - DNA, 25 bp, Homo sapien
tacggcggttggacctccaggctct

SEQ ID NO: 4016501 - DNA, 25 bp, Homo sapien
ctgtctacggcggttggacctccag

SEQ ID NO: 4016502 - DNA, 25 bp, Homo sapien
tctacggcggttggacctccaggct

SEQ ID NO: 4016503 - DNA, 25 bp, Homo sapien
cggcggttggacctccaggctctct

SEQ ID NO: 4016504 - DNA, 25 bp, Homo sapien
agaagatagtcttcaggagagacac

SEQ ID NO: 4016505 - DNA, 25 bp, Homo sapien
ttcgagaccagaagatagtcttcag

SEQ ID NO: 4016506 - DNA, 25 bp, Homo sapien
gaccagaagatagtcttcaggagag

SEQ ID NO: 4016507 - DNA, 25 bp, Homo sapien
ccagaagatagtcttcaggagagac

SEQ ID NO: 4016508 - DNA, 25 bp, Homo sapien
ggcagtgccaaatgacgtgtaatta

SEQ ID NO: 4016509 - DNA, 25 bp, Homo sapien
gaatggcaagacaaaatgtagagct

SEQ ID NO: 4016510 - DNA, 25 bp, Homo sapien
cattgttcagaaggaggttcagccc

SEQ ID NO: 4016511 - DNA, 25 bp, Homo sapien
gacaaattatggcacaacttagcag

SEQ ID NO: 4016512 - DNA, 25 bp, Homo sapien
ggtaaactatccagagggtaatgac

SEQ ID NO: 4016513 - DNA, 25 bp, Homo sapien
acaactttataacttgtcggaaatg

SEQ ID NO: 4016514 - DNA, 25 bp, Homo sapien
gtcggaaatgcaataatgacatgta

SEQ ID NO: 4016515 - DNA, 25 bp, Homo sapien
tatccagagggtaatgacaacttta

SEQ ID NO: 4016516 - DNA, 25 bp, Homo sapien
tttcactcagaaagaatcatcctta

SEQ ID NO: 4016517 - DNA, 25 bp, Homo sapien
cactcatgggtaagacaagctaagt

SEQ ID NO: 4016518 - DNA, 25 bp, Homo sapien
cacatgcagcccgtcactcatgggt

SEQ ID NO: 4016519 - DNA, 25 bp, Homo sapien
aaattgatgtataacattggatgca

SEQ ID NO: 4016520 - DNA, 25 bp, Homo sapien
tatatatcacatggtaaaagaatcc

SEQ ID NO: 4016521 - DNA, 25 bp, Homo sapien
gccacgtgatacagcccagtaaaaa

SEQ ID NO: 4016522 - DNA, 25 bp, Homo sapien
gcctgagctgtgtaatttcatgcca

SEQ ID NO: 4016523 - DNA, 25 bp, Homo sapien
taatttcatgccacgtgatacagcc

SEQ ID NO: 4016524 - DNA, 25 bp, Homo sapien
gctgtgtaatttcatgccacgtgat

SEQ ID NO: 4016525 - DNA, 25 bp, Homo sapien
attccagtaggagcccaaagaggag

SEQ ID NO: 4016526 - DNA, 25 bp, Homo sapien
ggctgataaattccagtaggagccc

SEQ ID NO: 4016527 - DNA, 25 bp, Homo sapien
gataaattccagtaggagcccaaag

SEQ ID NO: 4016528 - DNA, 25 bp, Homo sapien
taaattccagtaggagcccaaagag

SEQ ID NO: 4016529 - DNA, 25 bp, Homo sapien
cagaggtggaggtggcttagggcag

SEQ ID NO: 4016530 - DNA, 25 bp, Homo sapien
tggaggtggcttagggcagggggga

SEQ ID NO: 4016531 - DNA, 25 bp, Homo sapien
tgaggcggccaggacagaggtggag

SEQ ID NO: 4016532 - DNA, 25 bp, Homo sapien
ctgaggcggccaggacagaggtgga

SEQ ID NO: 4016533 - DNA, 25 bp, Homo sapien
ataaaaaacaaatgatggcaggatg

SEQ ID NO: 4016534 - DNA, 25 bp, Homo sapien
aaaaaacaaatgatggcaggatggc

SEQ ID NO: 4016535 - DNA, 25 bp, Homo sapien
taaaaaacaaatgatggcaggatgg

SEQ ID NO: 4016536 - DNA, 25 bp, Homo sapien
gaaaccgagtgatgacgtccttatc

SEQ ID NO: 4016537 - DNA, 25 bp, Homo sapien
taacatccgaaaccgagtgatgacg

SEQ ID NO: 4016538 - DNA, 25 bp, Homo sapien
acattttaacatccgaaaccgagtg

SEQ ID NO: 4016539 - DNA, 25 bp, Homo sapien
gagtgatgacgtccttatctatatc

SEQ ID NO: 4016540 - DNA, 25 bp, Homo sapien
tctgaacccaaatgagggggagaaa

SEQ ID NO: 4016541 - DNA, 25 bp, Homo sapien
attctgaacccaaatgagggggaga

SEQ ID NO: 4016542 - DNA, 25 bp, Homo sapien
ttctgaacccaaatgagggggagaa

SEQ ID NO: 4016543 - DNA, 25 bp, Homo sapien
aattctgaacccaaatgagggggag

SEQ ID NO: 4016544 - DNA, 25 bp, Homo sapien
aagttcatcagcttctctcctaagg

SEQ ID NO: 4016545 - DNA, 25 bp, Homo sapien
cttggcagcatcatgtgtgatgggt

SEQ ID NO: 4016546 - DNA, 25 bp, Homo sapien
tctcagggacgtccaaggaatctgt

SEQ ID NO: 4016547 - DNA, 25 bp, Homo sapien
tctcctaaggtatttgcccacaata

SEQ ID NO: 4016548 - DNA, 25 bp, Homo sapien
cctgccctagatttggctgggcatg

SEQ ID NO: 4016549 - DNA, 25 bp, Homo sapien
tttttatatgctgcagccatgttcc

SEQ ID NO: 4016550 - DNA, 25 bp, Homo sapien
ttaacaaaagtatggaattcaattc

SEQ ID NO: 4016551 - DNA, 25 bp, Homo sapien
gttcctgccctagatttggctgggc

SEQ ID NO: 4016552 - DNA, 25 bp, Homo sapien
aggcccttggtcactgaaggcagtg

SEQ ID NO: 4016553 - DNA, 25 bp, Homo sapien
cccaagggcatccttcgttccagag

SEQ ID NO: 4016554 - DNA, 25 bp, Homo sapien
agggcatccttcgttccagagctgg

SEQ ID NO: 4016555 - DNA, 25 bp, Homo sapien
ggcccttggtcactgaaggcagtga

SEQ ID NO: 4016556 - DNA, 25 bp, Homo sapien
gatgctgagttatccactggagcat

SEQ ID NO: 4016557 - DNA, 25 bp, Homo sapien
gggatgctgagttatccactggagc

SEQ ID NO: 4016558 - DNA, 25 bp, Homo sapien
ctgggatgctgagttatccactgga

SEQ ID NO: 4016559 - DNA, 25 bp, Homo sapien
gggacagctgagtggtaggactcct

SEQ ID NO: 4016560 - DNA, 25 bp, Homo sapien
gattttgtgcggctctgggacaaac

SEQ ID NO: 4016561 - DNA, 25 bp, Homo sapien
gaagtctactccgtttaatcatgct

SEQ ID NO: 4016562 - DNA, 25 bp, Homo sapien
tgatgattttgtgcggctctgggac

SEQ ID NO: 4016563 - DNA, 25 bp, Homo sapien
ctccgtttaatcatgctggtgatga

SEQ ID NO: 4016564 - DNA, 25 bp, Homo sapien
agcaaatctgcggtgacttagtcct

SEQ ID NO: 4016565 - DNA, 25 bp, Homo sapien
tctgcggtgacttagtcctcctgtc

SEQ ID NO: 4016566 - DNA, 25 bp, Homo sapien
cggtgacttagtcctcctgtcattt

SEQ ID NO: 4016567 - DNA, 25 bp, Homo sapien
gataaagcaaatctgcggtgactta

SEQ ID NO: 4016568 - DNA, 25 bp, Homo sapien
aaacagggtaaaactatgcatattc

SEQ ID NO: 4016569 - DNA, 25 bp, Homo sapien
tttaaacagggtaaaactatgcata

SEQ ID NO: 4016570 - DNA, 25 bp, Homo sapien
tttacttggaccgggtgcagcggct

SEQ ID NO: 4016571 - DNA, 25 bp, Homo sapien
ttttacttggaccgggtgcagcggc

SEQ ID NO: 4016572 - DNA, 25 bp, Homo sapien
catcaccggctatgagatgtgtggc

SEQ ID NO: 4016573 - DNA, 25 bp, Homo sapien
cctaagccacttgtatggaaagaaa

SEQ ID NO: 4016574 - DNA, 25 bp, Homo sapien
tcacctttttaagtgtcgttgggca

SEQ ID NO: 4016575 - DNA, 25 bp, Homo sapien
ctttaggttaccatgccagcaatga

SEQ ID NO: 4016576 - DNA, 25 bp, Homo sapien
aggtactcgcatgggcatgtcactg

SEQ ID NO: 4016577 - DNA, 25 bp, Homo sapien
tcctcaggtactcgcatgggcatgt

SEQ ID NO: 4016578 - DNA, 25 bp, Homo sapien
ctcaggtactcgcatgggcatgtca

SEQ ID NO: 4016579 - DNA, 25 bp, Homo sapien
cttcctcaggtactcgcatgggcat

SEQ ID NO: 4016580 - DNA, 25 bp, Homo sapien
ctgtggggtcaggacaatagagagc

SEQ ID NO: 4016581 - DNA, 25 bp, Homo sapien
gggtcaggacaatagagagcttcac

SEQ ID NO: 4016582 - DNA, 25 bp, Homo sapien
ggtcaggacaatagagagcttcacc

SEQ ID NO: 4016583 - DNA, 25 bp, Homo sapien
tggggtcaggacaatagagagcttc

SEQ ID NO: 4016584 - DNA, 25 bp, Homo sapien
ttgcagaatgagaacaggggctcat

SEQ ID NO: 4016585 - DNA, 25 bp, Homo sapien
agaacaggggctcatgatgagtgcc

SEQ ID NO: 4016586 - DNA, 25 bp, Homo sapien
acaggggctcatgatgagtgccaac

SEQ ID NO: 4016587 - DNA, 25 bp, Homo sapien
cagaatgagaacaggggctcatgat

SEQ ID NO: 4016588 - DNA, 25 bp, Homo sapien
gttgaatgagtggaaaaacaaggtg

SEQ ID NO: 4016589 - DNA, 25 bp, Homo sapien
ttgaatgagtggaaaaacaaggtga

SEQ ID NO: 4016590 - DNA, 25 bp, Homo sapien
gtgtgaaacaggaacaatagtttca

SEQ ID NO: 4016591 - DNA, 25 bp, Homo sapien
tgtgaaacaggaacaatagtttcat

SEQ ID NO: 4016592 - DNA, 25 bp, Homo sapien
tgaaacaggaacaatagtttcattc

SEQ ID NO: 4016593 - DNA, 25 bp, Homo sapien
tgtgtgaaacaggaacaatagtttc

SEQ ID NO: 4016594 - DNA, 25 bp, Homo sapien
caagactgggtagttctggcctgga

SEQ ID NO: 4016595 - DNA, 25 bp, Homo sapien
ccaggtgaccttagagtgtaagtac

SEQ ID NO: 4016596 - DNA, 25 bp, Homo sapien
tgaggccatagtgcaaccaggtgac

SEQ ID NO: 4016597 - DNA, 25 bp, Homo sapien
tgtaagtacacatgatcgccagcta

SEQ ID NO: 4016598 - DNA, 25 bp, Homo sapien
tgaggtagctggaggatcattgttc

SEQ ID NO: 4016599 - DNA, 25 bp, Homo sapien
gaggtagctggaggatcattgttcc

SEQ ID NO: 4016600 - DNA, 25 bp, Homo sapien
agccccgtgaggtagctggaggatc

SEQ ID NO: 4016601 - DNA, 25 bp, Homo sapien
cccgtgaggtagctggaggatcatt

SEQ ID NO: 4016602 - DNA, 25 bp, Homo sapien
tcttgctttggtgggccacattttc

SEQ ID NO: 4016603 - DNA, 25 bp, Homo sapien
gccctcaagtttcttgctttggtgg

SEQ ID NO: 4016604 - DNA, 25 bp, Homo sapien
tttcttgctttggtgggccacattt

SEQ ID NO: 4016605 - DNA, 25 bp, Homo sapien
caagtttcttgctttggtgggccac

SEQ ID NO: 4016606 - DNA, 25 bp, Homo sapien
tatgaagacctgacacactatgcta

SEQ ID NO: 4016607 - DNA, 25 bp, Homo sapien
caggatgccggagagctgtgacttc

SEQ ID NO: 4016608 - DNA, 25 bp, Homo sapien
gtgccctgggcccaaactatgaaga

SEQ ID NO: 4016609 - DNA, 25 bp, Homo sapien
tatgctaaaagtccaacgctgggtg

SEQ ID NO: 4016610 - DNA, 25 bp, Homo sapien
gttagtcacggtgcagtcattccca

SEQ ID NO: 4016611 - DNA, 25 bp, Homo sapien
tctcggaatgatgaagcactctgtc

SEQ ID NO: 4016612 - DNA, 25 bp, Homo sapien
tgtctcaagtccaagaatgcctcct

SEQ ID NO: 4016613 - DNA, 25 bp, Homo sapien
gatatgaccaaagtaaccacctgcc

SEQ ID NO: 4016614 - DNA, 25 bp, Homo sapien
cattgtcaaatgtggcgatactgca

SEQ ID NO: 4016615 - DNA, 25 bp, Homo sapien
tccagtgtcaaaatcctaaatcaag

SEQ ID NO: 4016616 - DNA, 25 bp, Homo sapien
gatactgcatgggagggcactgtca

SEQ ID NO: 4016617 - DNA, 25 bp, Homo sapien
gaatgtatctctcatcttgtagagg

SEQ ID NO: 4016618 - DNA, 25 bp, Homo sapien
ggtgacaaaggtagaatctatccaa

SEQ ID NO: 4016619 - DNA, 25 bp, Homo sapien
ggccctgatatgatgctgtcagtca

SEQ ID NO: 4016620 - DNA, 25 bp, Homo sapien
catgattctgattactgtcttaaaa

SEQ ID NO: 4016621 - DNA, 25 bp, Homo sapien
aatttataaaagtctgctggccctg

SEQ ID NO: 4016622 - DNA, 25 bp, Homo sapien
cagattcagttgactaaagcacctc

SEQ ID NO: 4016623 - DNA, 25 bp, Homo sapien
gacattatgtaaccatctcaagaag

SEQ ID NO: 4016624 - DNA, 25 bp, Homo sapien
ttcacttggatgtaatgcttcacgc

SEQ ID NO: 4016625 - DNA, 25 bp, Homo sapien
tagtgtatggttggcgtattctgtg

SEQ ID NO: 4016626 - DNA, 25 bp, Homo sapien
aactgaatgggatgaggtctctctt

SEQ ID NO: 4016627 - DNA, 25 bp, Homo sapien
gactcacgctggaggatctctcgag

SEQ ID NO: 4016628 - DNA, 25 bp, Homo sapien
tctctcttgaaggagagagcaaaag

SEQ ID NO: 4016629 - DNA, 25 bp, Homo sapien
caattataataaggctgggcgctgt

SEQ ID NO: 4016630 - DNA, 25 bp, Homo sapien
gtgtagatcgtctctttaataaaga

SEQ ID NO: 4016631 - DNA, 25 bp, Homo sapien
taataaagagatcatctggaactgc

SEQ ID NO: 4016632 - DNA, 25 bp, Homo sapien
aaatggagacttaacatgaactatg

SEQ ID NO: 4016633 - DNA, 25 bp, Homo sapien
taactcatacatcattgctacaaac

SEQ ID NO: 4016634 - DNA, 25 bp, Homo sapien
ttaaatcactgctaatgcaattaaa

SEQ ID NO: 4016635 - DNA, 25 bp, Homo sapien
taaatcactgctaatgcaattaaaa

SEQ ID NO: 4016636 - DNA, 25 bp, Homo sapien
aaaattaaatcactgctaatgcaat

SEQ ID NO: 4016637 - DNA, 25 bp, Homo sapien
aattaaatcactgctaatgcaatta

SEQ ID NO: 4016638 - DNA, 25 bp, Homo sapien
aatggcatgatcctggctcactgca

SEQ ID NO: 4016639 - DNA, 25 bp, Homo sapien
tttttttaatgaggcggagtctcgc

SEQ ID NO: 4016640 - DNA, 25 bp, Homo sapien
gcaatggcatgatcctggctcactg

SEQ ID NO: 4016641 - DNA, 25 bp, Homo sapien
tggcatgatcctggctcactgcaac

SEQ ID NO: 4016642 - DNA, 25 bp, Homo sapien
gaaggtagaatgaggcatgttgaca

SEQ ID NO: 4016643 - DNA, 25 bp, Homo sapien
cagtcggattgggtggcttagaatt

SEQ ID NO: 4016644 - DNA, 25 bp, Homo sapien
acatctcaactatcacagcagccgg

SEQ ID NO: 4016645 - DNA, 25 bp, Homo sapien
tcaacaggaagggtccattcagtcg

SEQ ID NO: 4016646 - DNA, 25 bp, Homo sapien
gaccctaggttgttgctacccgata

SEQ ID NO: 4016647 - DNA, 25 bp, Homo sapien
gagctgcccactgcaacatattttc

SEQ ID NO: 4016648 - DNA, 25 bp, Homo sapien
gccgcagtgggcaatgatcatgtca

SEQ ID NO: 4016649 - DNA, 25 bp, Homo sapien
gacagctaatcacaaacaacctgcg

SEQ ID NO: 4016650 - DNA, 25 bp, Homo sapien
taatattaaactgggctgatgagag

SEQ ID NO: 4016651 - DNA, 25 bp, Homo sapien
gaattgtaaacctggtggtccgaga

SEQ ID NO: 4016652 - DNA, 25 bp, Homo sapien
gttactgcggatcaaaattagactc

SEQ ID NO: 4016653 - DNA, 25 bp, Homo sapien
ttcaaccacagaaataccgggcagt

SEQ ID NO: 4016654 - DNA, 25 bp, Homo sapien
tataagaaccagtgataatcacacc

SEQ ID NO: 4016655 - DNA, 25 bp, Homo sapien
ccaatctggtgaaactctatgtctc

SEQ ID NO: 4016656 - DNA, 25 bp, Homo sapien
tctcctcacctttgacaatgtactt

SEQ ID NO: 4016657 - DNA, 25 bp, Homo sapien
caatgtactttatgagatccacctc

SEQ ID NO: 4016658 - DNA, 25 bp, Homo sapien
ctgcctgcaaaacatggctcttcac

SEQ ID NO: 4016659 - DNA, 25 bp, Homo sapien
tgcctgcaaaacatggctcttcacc

SEQ ID NO: 4016660 - DNA, 25 bp, Homo sapien
cctgcctgcaaaacatggctcttca

SEQ ID NO: 4016661 - DNA, 25 bp, Homo sapien
gggctacctccagtaatcctatttg

SEQ ID NO: 4016662 - DNA, 25 bp, Homo sapien
tagtgcgtctcgcttgactagaagc

SEQ ID NO: 4016663 - DNA, 25 bp, Homo sapien
tgaaagcaagagaccctacctgcct

SEQ ID NO: 4016664 - DNA, 25 bp, Homo sapien
tcttgtttctgtcccagtagttagg

SEQ ID NO: 4016665 - DNA, 25 bp, Homo sapien
gagcatcagaaggtctaggtggccc

SEQ ID NO: 4016666 - DNA, 25 bp, Homo sapien
cccagggcctggtatgtggtgatcg

SEQ ID NO: 4016667 - DNA, 25 bp, Homo sapien
ggtgatcgctcagggcccattttct

SEQ ID NO: 4016668 - DNA, 25 bp, Homo sapien
tagattgttacaaaggtcagaggct

SEQ ID NO: 4016669 - DNA, 25 bp, Homo sapien
cactgagggcccttggactaaatcc

SEQ ID NO: 4016670 - DNA, 25 bp, Homo sapien
gccactgagggcccttggactaaat

SEQ ID NO: 4016671 - DNA, 25 bp, Homo sapien
actgagggcccttggactaaatcca

SEQ ID NO: 4016672 - DNA, 25 bp, Homo sapien
aagccactgagggcccttggactaa

SEQ ID NO: 4016673 - DNA, 25 bp, Homo sapien
taaattcctaacaacgtatctccag

SEQ ID NO: 4016674 - DNA, 25 bp, Homo sapien
ctccagaaagtataggcacaacagc

SEQ ID NO: 4016675 - DNA, 25 bp, Homo sapien
gcaagcaacctctgattttagtatt

SEQ ID NO: 4016676 - DNA, 25 bp, Homo sapien
tgtaattaagtgctccgggaggcca

SEQ ID NO: 4016677 - DNA, 25 bp, Homo sapien
gtccagctaaaatcagggtccagct

SEQ ID NO: 4016678 - DNA, 25 bp, Homo sapien
tctctaaaaacaaggtccagctaaa

SEQ ID NO: 4016679 - DNA, 25 bp, Homo sapien
gcctctaccattccaagtagtctct

SEQ ID NO: 4016680 - DNA, 25 bp, Homo sapien
ttccagtcattgagtgccccttgag

SEQ ID NO: 4016681 - DNA, 25 bp, Homo sapien
cttccagtcattgagtgccccttga

SEQ ID NO: 4016682 - DNA, 25 bp, Homo sapien
tccagtcattgagtgccccttgagg

SEQ ID NO: 4016683 - DNA, 25 bp, Homo sapien
cttcaggtggtggtaagagctttga

SEQ ID NO: 4016684 - DNA, 25 bp, Homo sapien
atgacttcaggtggtggtaagagct

SEQ ID NO: 4016685 - DNA, 25 bp, Homo sapien
tcaggtggtggtaagagctttgaaa

SEQ ID NO: 4016686 - DNA, 25 bp, Homo sapien
gacttcaggtggtggtaagagcttt

SEQ ID NO: 4016687 - DNA, 25 bp, Homo sapien
gcatgccaccatacctgggttaatt

SEQ ID NO: 4016688 - DNA, 25 bp, Homo sapien
tgcatgccaccatacctgggttaat

SEQ ID NO: 4016689 - DNA, 25 bp, Homo sapien
gtgcatgccaccatacctgggttaa

SEQ ID NO: 4016690 - DNA, 25 bp, Homo sapien
atgccaccatacctgggttaatttt

SEQ ID NO: 4016691 - DNA, 25 bp, Homo sapien
gaaaataattcgcattgaattcagc

SEQ ID NO: 4016692 - DNA, 25 bp, Homo sapien
tttcttctggacattgagaacaatc

SEQ ID NO: 4016693 - DNA, 25 bp, Homo sapien
ttgagctagaaaataattcgcattg

SEQ ID NO: 4016694 - DNA, 25 bp, Homo sapien
cttctggacattgagaacaatccaa

SEQ ID NO: 4016695 - DNA, 25 bp, Homo sapien
cactcaagagaaacgcaaatatatg

SEQ ID NO: 4016696 - DNA, 25 bp, Homo sapien
taagccacgtgacccaacaaggtgc

SEQ ID NO: 4016697 - DNA, 25 bp, Homo sapien
cccaacaaggtgcattcactcaaga

SEQ ID NO: 4016698 - DNA, 25 bp, Homo sapien
aacaaggtgcattcactcaagagaa

SEQ ID NO: 4016699 - DNA, 25 bp, Homo sapien
cttaatgcctgcatccacggcctca

SEQ ID NO: 4016700 - DNA, 25 bp, Homo sapien
ttaatgcctgcatccacggcctcac

SEQ ID NO: 4016701 - DNA, 25 bp, Homo sapien
catgctgtttacatgaacgtaaagc

SEQ ID NO: 4016702 - DNA, 25 bp, Homo sapien
gctgtttacatgaacgtaaagcttc

SEQ ID NO: 4016703 - DNA, 25 bp, Homo sapien
tcatgctgtttacatgaacgtaaag

SEQ ID NO: 4016704 - DNA, 25 bp, Homo sapien
tgctgtttacatgaacgtaaagctt

SEQ ID NO: 4016705 - DNA, 25 bp, Homo sapien
gatgcgggatgtttgcttcaagtac

SEQ ID NO: 4016706 - DNA, 25 bp, Homo sapien
ttctatcgggtttaaagcagttgcc

SEQ ID NO: 4016707 - DNA, 25 bp, Homo sapien
aagcagttgccaaacaaacagaact

SEQ ID NO: 4016708 - DNA, 25 bp, Homo sapien
cttctgatcttgttctatcgggttt

SEQ ID NO: 4016709 - DNA, 25 bp, Homo sapien
gatcttgttctatcgggtttaaagc

SEQ ID NO: 4016710 - DNA, 25 bp, Homo sapien
ctggacttcacatgttacgaagcag

SEQ ID NO: 4016711 - DNA, 25 bp, Homo sapien
tggacttcacatgttacgaagcagt

SEQ ID NO: 4016712 - DNA, 25 bp, Homo sapien
tcacatgttacgaagcagttttttc

SEQ ID NO: 4016713 - DNA, 25 bp, Homo sapien
catgttacgaagcagttttttcatg

SEQ ID NO: 4016714 - DNA, 25 bp, Homo sapien
tgatattttctcctggtaacaattc

SEQ ID NO: 4016715 - DNA, 25 bp, Homo sapien
cagcaagtagattgatattttctcc

SEQ ID NO: 4016716 - DNA, 25 bp, Homo sapien
cctccagcaagtagattgatatttt

SEQ ID NO: 4016717 - DNA, 25 bp, Homo sapien
atattttctcctggtaacaattcta

SEQ ID NO: 4016718 - DNA, 25 bp, Homo sapien
gaggtccaattagtccttctatcaa

SEQ ID NO: 4016719 - DNA, 25 bp, Homo sapien
acagcacatgctcagtgaagcaatt

SEQ ID NO: 4016720 - DNA, 25 bp, Homo sapien
cacatgctcagtgaagcaattacac

SEQ ID NO: 4016721 - DNA, 25 bp, Homo sapien
tctgttttatgtgctgcctgggtca

SEQ ID NO: 4016722 - DNA, 25 bp, Homo sapien
ggaagtgctactggtactctttttc

SEQ ID NO: 4016723 - DNA, 25 bp, Homo sapien
agtgctactggtactctttttcaag

SEQ ID NO: 4016724 - DNA, 25 bp, Homo sapien
tactggtactctttttcaagtcatg

SEQ ID NO: 4016725 - DNA, 25 bp, Homo sapien
gctactggtactctttttcaagtca

SEQ ID NO: 4016726 - DNA, 25 bp, Homo sapien
ataatttataacctcaggggaagag

SEQ ID NO: 4016727 - DNA, 25 bp, Homo sapien
taacctcaggggaagagtcagtcgg

SEQ ID NO: 4016728 - DNA, 25 bp, Homo sapien
ggaagagtcagtcggtttggacagc

SEQ ID NO: 4016729 - DNA, 25 bp, Homo sapien
agagtcagtcggtttggacagcaca

SEQ ID NO: 4016730 - DNA, 25 bp, Homo sapien
cattcagacaatgtttcaggctggc

SEQ ID NO: 4016731 - DNA, 25 bp, Homo sapien
cagacaatgtttcaggctggcactc

SEQ ID NO: 4016732 - DNA, 25 bp, Homo sapien
caatgtttcaggctggcactcttac

SEQ ID NO: 4016733 - DNA, 25 bp, Homo sapien
ttcagacaatgtttcaggctggcac

SEQ ID NO: 4016734 - DNA, 25 bp, Homo sapien
cagcactggctaaggtgagcaccga

SEQ ID NO: 4016735 - DNA, 25 bp, Homo sapien
acaggtgttcctggtactccacaga

SEQ ID NO: 4016736 - DNA, 25 bp, Homo sapien
tgagcaccgatttgtcaaagctgga

SEQ ID NO: 4016737 - DNA, 25 bp, Homo sapien
gatgcagcaatcaacacctgtcatg

SEQ ID NO: 4016738 - DNA, 25 bp, Homo sapien
tgttgagccactgagttaatccaca

SEQ ID NO: 4016739 - DNA, 25 bp, Homo sapien
ttttccaacaatagatgatgaccag

SEQ ID NO: 4016740 - DNA, 25 bp, Homo sapien
atagcttcaggacaatgaagttcac

SEQ ID NO: 4016741 - DNA, 25 bp, Homo sapien
gatgatgaccagacagcaattccct

SEQ ID NO: 4016742 - DNA, 25 bp, Homo sapien
tcaaagccatgtctcactgtcactg

SEQ ID NO: 4016743 - DNA, 25 bp, Homo sapien
ggagagtcgaatccgcgttagccag

SEQ ID NO: 4016744 - DNA, 25 bp, Homo sapien
atcctaccctcatgatggagagtcg

SEQ ID NO: 4016745 - DNA, 25 bp, Homo sapien
aggctggcctgccaacaatcctacc

SEQ ID NO: 4016746 - DNA, 25 bp, Homo sapien
agaagaagaacaagtctaagttggt

SEQ ID NO: 4016747 - DNA, 25 bp, Homo sapien
taacatcctgatcagggtttaatgt

SEQ ID NO: 4016748 - DNA, 25 bp, Homo sapien
tgtctgcagttgtccactgactaac

SEQ ID NO: 4016749 - DNA, 25 bp, Homo sapien
ctgactaacatcctgatcagggttt

SEQ ID NO: 4016750 - DNA, 25 bp, Homo sapien
acagtgaattgtgcagcttcccata

SEQ ID NO: 4016751 - DNA, 25 bp, Homo sapien
agattgcgtggaattgttgactggt

SEQ ID NO: 4016752 - DNA, 25 bp, Homo sapien
gcatctgtcttcaggagattgcgtg

SEQ ID NO: 4016753 - DNA, 25 bp, Homo sapien
cccagtggggttctcagcttagaaa

SEQ ID NO: 4016754 - DNA, 25 bp, Homo sapien
cttggtgctttactcatgtgacttc

SEQ ID NO: 4016755 - DNA, 25 bp, Homo sapien
ctcatgtgacttcttaatgctaaag

SEQ ID NO: 4016756 - DNA, 25 bp, Homo sapien
acttggtgctttactcatgtgactt

SEQ ID NO: 4016757 - DNA, 25 bp, Homo sapien
tgtgacttcttaatgctaaagaaat

SEQ ID NO: 4016758 - DNA, 25 bp, Homo sapien
cagttttccaaatgcttgtcgaata

SEQ ID NO: 4016759 - DNA, 25 bp, Homo sapien
agttttccaaatgcttgtcgaatac

SEQ ID NO: 4016760 - DNA, 25 bp, Homo sapien
gcatgcctgcagacagatattcaca

SEQ ID NO: 4016761 - DNA, 25 bp, Homo sapien
tccaaagcccaagtcattaacagtt

SEQ ID NO: 4016762 - DNA, 25 bp, Homo sapien
ctaaaaggcctttgcaaaatttatg

SEQ ID NO: 4016763 - DNA, 25 bp, Homo sapien
atgtttctttgtggccgtagttaca

SEQ ID NO: 4016764 - DNA, 25 bp, Homo sapien
ctcgtgtcctggttatctttcttaa

SEQ ID NO: 4016765 - DNA, 25 bp, Homo sapien
cgtagttacagtgccaatcacagct

SEQ ID NO: 4016766 - DNA, 25 bp, Homo sapien
tgtggccgtagttacagtgccaatc

SEQ ID NO: 4016767 - DNA, 25 bp, Homo sapien
attcttactcagaagtgcaaagaca

SEQ ID NO: 4016768 - DNA, 25 bp, Homo sapien
tgaacagccaggtcactgtgcacaa

SEQ ID NO: 4016769 - DNA, 25 bp, Homo sapien
gtgtagagcacagcatactgaatgg

SEQ ID NO: 4016770 - DNA, 25 bp, Homo sapien
aagacagttggagatagcgcccaca

SEQ ID NO: 4016771 - DNA, 25 bp, Homo sapien
gtttagggcacaagtcatttctccc

SEQ ID NO: 4016772 - DNA, 25 bp, Homo sapien
aatattaacttataggcagtctcca

SEQ ID NO: 4016773 - DNA, 25 bp, Homo sapien
tgtctacattgaacacatgattctt

SEQ ID NO: 4016774 - DNA, 25 bp, Homo sapien
ttttgcattgtctacattgaacaca

SEQ ID NO: 4016775 - DNA, 25 bp, Homo sapien
ccaggaaagtctgtggtggatttga

SEQ ID NO: 4016776 - DNA, 25 bp, Homo sapien
aagacatatgcaaacagcagtttaa

SEQ ID NO: 4016777 - DNA, 25 bp, Homo sapien
tcaatttcacttatatagcctgggg

SEQ ID NO: 4016778 - DNA, 25 bp, Homo sapien
cactatattctaaatcaaacatttc

SEQ ID NO: 4016779 - DNA, 25 bp, Homo sapien
gatgatggcagtttcgtatttatct

SEQ ID NO: 4016780 - DNA, 25 bp, Homo sapien
tgatggcagtttcgtatttatctgt

SEQ ID NO: 4016781 - DNA, 25 bp, Homo sapien
taacgcaagaatagtagtttagatg

SEQ ID NO: 4016782 - DNA, 25 bp, Homo sapien
ctctttttctttatgataacgcaag

SEQ ID NO: 4016783 - DNA, 25 bp, Homo sapien
catacccagacaaagcccttaattt

SEQ ID NO: 4016784 - DNA, 25 bp, Homo sapien
ctgggcttaatcgatcctcctccat

SEQ ID NO: 4016785 - DNA, 25 bp, Homo sapien
ttacatatccatttaagggcctgaa

SEQ ID NO: 4016786 - DNA, 25 bp, Homo sapien
cattgcccaagctgtgccagaattc

SEQ ID NO: 4016787 - DNA, 25 bp, Homo sapien
caatgtatagtcatgctaggatcca

SEQ ID NO: 4016788 - DNA, 25 bp, Homo sapien
aaaaacacctggtttgcagccgtca

SEQ ID NO: 4016789 - DNA, 25 bp, Homo sapien
taggatccaagctgccgagcaaaac

SEQ ID NO: 4016790 - DNA, 25 bp, Homo sapien
ggtaccacaagtctggcaattctcc

SEQ ID NO: 4016791 - DNA, 25 bp, Homo sapien
attgggctgaggctttccccagtgc

SEQ ID NO: 4016792 - DNA, 25 bp, Homo sapien
ccgaattgggctgaggctttcccca

SEQ ID NO: 4016793 - DNA, 25 bp, Homo sapien
gaattgggctgaggctttccccagt

SEQ ID NO: 4016794 - DNA, 25 bp, Homo sapien
tgaggctttccccagtgctcctcac

SEQ ID NO: 4016795 - DNA, 25 bp, Homo sapien
gaggagggacgtcttcatccactga

SEQ ID NO: 4016796 - DNA, 25 bp, Homo sapien
gagaagcgcagccagctttggtaat

SEQ ID NO: 4016797 - DNA, 25 bp, Homo sapien
cagtactaaatacccggagaagcgc

SEQ ID NO: 4016798 - DNA, 25 bp, Homo sapien
ctttggtaatgacactgatggagga

SEQ ID NO: 4016799 - DNA, 25 bp, Homo sapien
ctgaccaagtagaggcgtagaaaat

SEQ ID NO: 4016800 - DNA, 25 bp, Homo sapien
aaactgaccaagtagaggcgtagaa

SEQ ID NO: 4016801 - DNA, 25 bp, Homo sapien
aactgaccaagtagaggcgtagaaa

SEQ ID NO: 4016802 - DNA, 25 bp, Homo sapien
gaaactgaccaagtagaggcgtaga

SEQ ID NO: 4016803 - DNA, 25 bp, Homo sapien
aaataactggtataggctgcaagac

SEQ ID NO: 4016804 - DNA, 25 bp, Homo sapien
aatggtattgatagatggtcactgg

SEQ ID NO: 4016805 - DNA, 25 bp, Homo sapien
tccacttcagggtattgccactgca

SEQ ID NO: 4016806 - DNA, 25 bp, Homo sapien
taacttgggtaagtcctgtctgtac

SEQ ID NO: 4016807 - DNA, 25 bp, Homo sapien
ctgcgtgagcgaaggtttctgagta

SEQ ID NO: 4016808 - DNA, 25 bp, Homo sapien
ctgctgcgtgagcgaaggtttctga

SEQ ID NO: 4016809 - DNA, 25 bp, Homo sapien
cgtgagcgaaggtttctgagtatga

SEQ ID NO: 4016810 - DNA, 25 bp, Homo sapien
gagcgaaggtttctgagtatgatct

SEQ ID NO: 4016811 - DNA, 25 bp, Homo sapien
tggaaacaaagagagagggggccaa

SEQ ID NO: 4016812 - DNA, 25 bp, Homo sapien
tgatggaaacaaagagagagggggc

SEQ ID NO: 4016813 - DNA, 25 bp, Homo sapien
aaacaaagagagagggggccaatca

SEQ ID NO: 4016814 - DNA, 25 bp, Homo sapien
gaaacaaagagagagggggccaatc

SEQ ID NO: 4016815 - DNA, 25 bp, Homo sapien
tgatctgaacagcggaatgaggaac

SEQ ID NO: 4016816 - DNA, 25 bp, Homo sapien
cccatgatctgaacagcggaatgag

SEQ ID NO: 4016817 - DNA, 25 bp, Homo sapien
ctcaccccatgatctgaacagcgga

SEQ ID NO: 4016818 - DNA, 25 bp, Homo sapien
ctgaacagcggaatgaggaactcac

SEQ ID NO: 4016819 - DNA, 25 bp, Homo sapien
gagggtaacatcgagccaccaaaag

SEQ ID NO: 4016820 - DNA, 25 bp, Homo sapien
aatatgagggtaacatcgagccacc

SEQ ID NO: 4016821 - DNA, 25 bp, Homo sapien
caccaaaagaatgcacttaacacat

SEQ ID NO: 4016822 - DNA, 25 bp, Homo sapien
tcgagccaccaaaagaatgcactta

SEQ ID NO: 4016823 - DNA, 25 bp, Homo sapien
ttgcagatgagctaaatttgctaaa

SEQ ID NO: 4016824 - DNA, 25 bp, Homo sapien
ctttgtaggtggcacataagtagag

SEQ ID NO: 4016825 - DNA, 25 bp, Homo sapien
tgctttgtaggtggcacataagtag

SEQ ID NO: 4016826 - DNA, 25 bp, Homo sapien
gtgctttgtaggtggcacataagta

SEQ ID NO: 4016827 - DNA, 25 bp, Homo sapien
tgtctcaactcctgaagcaatttgc

SEQ ID NO: 4016828 - DNA, 25 bp, Homo sapien
gtacagcagccaagatatccaattg

SEQ ID NO: 4016829 - DNA, 25 bp, Homo sapien
catgtacagcagccaagatatccaa

SEQ ID NO: 4016830 - DNA, 25 bp, Homo sapien
atcatgtacagcagccaagatatcc

SEQ ID NO: 4016831 - DNA, 25 bp, Homo sapien
acagcagccaagatatccaattgtt

SEQ ID NO: 4016832 - DNA, 25 bp, Homo sapien
cagtagccaatcttcggtctcggtc

SEQ ID NO: 4016833 - DNA, 25 bp, Homo sapien
gactcatcacaataagacatcgatc

SEQ ID NO: 4016834 - DNA, 25 bp, Homo sapien
agccaatcttcggtctcggtcgttt

SEQ ID NO: 4016835 - DNA, 25 bp, Homo sapien
ttacagtagccaatcttcggtctcg

SEQ ID NO: 4016836 - DNA, 25 bp, Homo sapien
caagaaatgaataaccctaggccaa

SEQ ID NO: 4016837 - DNA, 25 bp, Homo sapien
tatcatctaggtatcccactggagg

SEQ ID NO: 4016838 - DNA, 25 bp, Homo sapien
catgcaggtaaagagcccgggtgta

SEQ ID NO: 4016839 - DNA, 25 bp, Homo sapien
cagtccactggtcaataaaagctca

SEQ ID NO: 4016840 - DNA, 25 bp, Homo sapien
tagtatattaacgatgcctttaaaa

SEQ ID NO: 4016841 - DNA, 25 bp, Homo sapien
tactattagtatattaacgatgcct

SEQ ID NO: 4016842 - DNA, 25 bp, Homo sapien
aaaactagatttttgctgggcgagg

SEQ ID NO: 4016843 - DNA, 25 bp, Homo sapien
gaaatcacactagcgcattccagcc

SEQ ID NO: 4016844 - DNA, 25 bp, Homo sapien
acattgttaaccctcagctcttgcc

SEQ ID NO: 4016845 - DNA, 25 bp, Homo sapien
ctcatgtctttggtggctaaagcac

SEQ ID NO: 4016846 - DNA, 25 bp, Homo sapien
tcagggctggtcacattgttaaccc

SEQ ID NO: 4016847 - DNA, 25 bp, Homo sapien
tccgaccataagtattttccccaga

SEQ ID NO: 4016848 - DNA, 25 bp, Homo sapien
tatcatcgtgcctttgccgagacac

SEQ ID NO: 4016849 - DNA, 25 bp, Homo sapien
cattctgtatgtcagcgtggactct

SEQ ID NO: 4016850 - DNA, 25 bp, Homo sapien
cgtggactctggtatcatcgtgcct

SEQ ID NO: 4016851 - DNA, 25 bp, Homo sapien
gacaccacagctgaatttgaaggtt

SEQ ID NO: 4016852 - DNA, 25 bp, Homo sapien
aagtgtgtcctcatctaagtatctg

SEQ ID NO: 4016853 - DNA, 25 bp, Homo sapien
ccctctatggtgtaaaagtgacagc

SEQ ID NO: 4016854 - DNA, 25 bp, Homo sapien
aaacagagctgagttacaagacttc

SEQ ID NO: 4016855 - DNA, 25 bp, Homo sapien
tattagtaaacaagtagggtacagc

SEQ ID NO: 4016856 - DNA, 25 bp, Homo sapien
ctcaaaaatcgcctttgtgatgttg

SEQ ID NO: 4016857 - DNA, 25 bp, Homo sapien
tagttgaactatggtcccattaggg

SEQ ID NO: 4016858 - DNA, 25 bp, Homo sapien
aaatatcattcatgagttaggtgcc

SEQ ID NO: 4016859 - DNA, 25 bp, Homo sapien
cccattagggttcatacattaaagc

SEQ ID NO: 4016860 - DNA, 25 bp, Homo sapien
gacactctgtgccttacaggataaa

SEQ ID NO: 4016861 - DNA, 25 bp, Homo sapien
gtttattaagggattttgctctcat

SEQ ID NO: 4016862 - DNA, 25 bp, Homo sapien
ggtttattaagggattttgctctca

SEQ ID NO: 4016863 - DNA, 25 bp, Homo sapien
tatgcatcagttttgcaatactgaa

SEQ ID NO: 4016864 - DNA, 25 bp, Homo sapien
gaaccattccatgtcaaaattgtaa

SEQ ID NO: 4016865 - DNA, 25 bp, Homo sapien
tccatttatgggtgatttgtttcct

SEQ ID NO: 4016866 - DNA, 25 bp, Homo sapien
tacctaagtattaagtgtctataat

SEQ ID NO: 4016867 - DNA, 25 bp, Homo sapien
taatccatgagtatggtcgcacacc

SEQ ID NO: 4016868 - DNA, 25 bp, Homo sapien
tacccttggctcgttctaatctgaa

SEQ ID NO: 4016869 - DNA, 25 bp, Homo sapien
taaggttagccacatgggcatgcaa

SEQ ID NO: 4016870 - DNA, 25 bp, Homo sapien
ggcatgcaaccatggaaccccagta

SEQ ID NO: 4016871 - DNA, 25 bp, Homo sapien
cagtggtgcaatccgagctcaagca

SEQ ID NO: 4016872 - DNA, 25 bp, Homo sapien
ggactggactccctcttactctgca

SEQ ID NO: 4016873 - DNA, 25 bp, Homo sapien
tgcccacagatccagcaactcaggt

SEQ ID NO: 4016874 - DNA, 25 bp, Homo sapien
caactagtattagaagcaagggtca

SEQ ID NO: 4016875 - DNA, 25 bp, Homo sapien
cacaatttgctgaaattttccttag

SEQ ID NO: 4016876 - DNA, 25 bp, Homo sapien
gaaatctgtggaacagaactggcaa

SEQ ID NO: 4016877 - DNA, 25 bp, Homo sapien
tgctgaaattttccttagtgtactt

SEQ ID NO: 4016878 - DNA, 25 bp, Homo sapien
taaattctatttgactctagttcca

SEQ ID NO: 4016879 - DNA, 25 bp, Homo sapien
agtcagctggccctagcacgtggct

SEQ ID NO: 4016880 - DNA, 25 bp, Homo sapien
taagtggtacaagacaagtcaacgc

SEQ ID NO: 4016881 - DNA, 25 bp, Homo sapien
ctgtaggactatttgggaagggcac

SEQ ID NO: 4016882 - DNA, 25 bp, Homo sapien
gcacgtggctgcgactcttctctat

SEQ ID NO: 4016883 - DNA, 25 bp, Homo sapien
cagcgtgtttaagaagttgtaccca

SEQ ID NO: 4016884 - DNA, 25 bp, Homo sapien
cctattctggtggagtaaccctgga

SEQ ID NO: 4016885 - DNA, 25 bp, Homo sapien
taacagtaatctttataggctggcc

SEQ ID NO: 4016886 - DNA, 25 bp, Homo sapien
caacgggtgtggactatcaggaaat

SEQ ID NO: 4016887 - DNA, 25 bp, Homo sapien
tcggaattcttactgagagccacag

SEQ ID NO: 4016888 - DNA, 25 bp, Homo sapien
tagagataccttactgagcacccct

SEQ ID NO: 4016889 - DNA, 25 bp, Homo sapien
ccaaggttaaggataagcgcctgag

SEQ ID NO: 4016890 - DNA, 25 bp, Homo sapien
gcacgcaaaatatacgaaagctggg

SEQ ID NO: 4016891 - DNA, 25 bp, Homo sapien
aagatttcagtcaactgccaccatg

SEQ ID NO: 4016892 - DNA, 25 bp, Homo sapien
gaatcaatcaatataacttaacaca

SEQ ID NO: 4016893 - DNA, 25 bp, Homo sapien
agaataagaccaatctgttcacctc

SEQ ID NO: 4016894 - DNA, 25 bp, Homo sapien
catggaaaaagtatatgtgaccaaa

SEQ ID NO: 4016895 - DNA, 25 bp, Homo sapien
aaaagccttgtgatgattccccgag

SEQ ID NO: 4016896 - DNA, 25 bp, Homo sapien
ggttaacactcgctgaggaccggag

SEQ ID NO: 4016897 - DNA, 25 bp, Homo sapien
gaggcccctgtttcacggagctaaa

SEQ ID NO: 4016898 - DNA, 25 bp, Homo sapien
tattgtgcatacgaagtcatcccag

SEQ ID NO: 4016899 - DNA, 25 bp, Homo sapien
tgatgagaatacattgaaacactgg

SEQ ID NO: 4016900 - DNA, 25 bp, Homo sapien
cttacaaggtatggtaataagcaga

SEQ ID NO: 4016901 - DNA, 25 bp, Homo sapien
ttgtaccagaaacaaaacatgatga

SEQ ID NO: 4016902 - DNA, 25 bp, Homo sapien
ccaagaatcgataggatgcagggct

SEQ ID NO: 4016903 - DNA, 25 bp, Homo sapien
tacatgactataccttgaatttcga

SEQ ID NO: 4016904 - DNA, 25 bp, Homo sapien
cctaggctagtgatatgcagtacat

SEQ ID NO: 4016905 - DNA, 25 bp, Homo sapien
tgcactgctgtagatactaaacact

SEQ ID NO: 4016906 - DNA, 25 bp, Homo sapien
taaacactgtaaacataggctacgc

SEQ ID NO: 4016907 - DNA, 25 bp, Homo sapien
gctcttgcttggttcattacacata

SEQ ID NO: 4016908 - DNA, 25 bp, Homo sapien
gcctgaagccacactactctatttg

SEQ ID NO: 4016909 - DNA, 25 bp, Homo sapien
tgaacagctaccctcttaccagtgt

SEQ ID NO: 4016910 - DNA, 25 bp, Homo sapien
tttgccattgtaataccgaaacagg

SEQ ID NO: 4016911 - DNA, 25 bp, Homo sapien
gccatctcctagttaattttcacaa

SEQ ID NO: 4016912 - DNA, 25 bp, Homo sapien
agcaccagccatctcctagttaatt

SEQ ID NO: 4016913 - DNA, 25 bp, Homo sapien
ttcacaacagctattatagtaattg

SEQ ID NO: 4016914 - DNA, 25 bp, Homo sapien
agtaattgctggcttagaatgtcct

SEQ ID NO: 4016915 - DNA, 25 bp, Homo sapien
gagagagctgaacgttctctcagcc

SEQ ID NO: 4016916 - DNA, 25 bp, Homo sapien
tgacaaaataagttcgcctgcttga

SEQ ID NO: 4016917 - DNA, 25 bp, Homo sapien
gatgagttgtaatactgatgcacac

SEQ ID NO: 4016918 - DNA, 25 bp, Homo sapien
gcagcaaacacatgaaagtcagaag

SEQ ID NO: 4016919 - DNA, 25 bp, Homo sapien
tattggtggcgtttaagatgaaagc

SEQ ID NO: 4016920 - DNA, 25 bp, Homo sapien
aaattaaggctaagtggctatcggg

SEQ ID NO: 4016921 - DNA, 25 bp, Homo sapien
ggtaaatagtgccagattactattg

SEQ ID NO: 4016922 - DNA, 25 bp, Homo sapien
taattattgagtatagaagcatcag

SEQ ID NO: 4016923 - DNA, 25 bp, Homo sapien
cctatcaatcatatcctatattccc

SEQ ID NO: 4016924 - DNA, 25 bp, Homo sapien
catttcctatcaatcatatcctata

SEQ ID NO: 4016925 - DNA, 25 bp, Homo sapien
ttcctatcaatcatatcctatattc

SEQ ID NO: 4016926 - DNA, 25 bp, Homo sapien
tacatttcctatcaatcatatccta

SEQ ID NO: 4016927 - DNA, 25 bp, Homo sapien
tctctcccttatctgttactatcct

SEQ ID NO: 4016928 - DNA, 25 bp, Homo sapien
gtctctcccttatctgttactatcc

SEQ ID NO: 4016929 - DNA, 25 bp, Homo sapien
tgtctctcccttatctgttactatc

SEQ ID NO: 4016930 - DNA, 25 bp, Homo sapien
ctctcccttatctgttactatcctg

SEQ ID NO: 4016931 - DNA, 25 bp, Homo sapien
aaaaagaattctaatgtgaataact

SEQ ID NO: 4016932 - DNA, 25 bp, Homo sapien
gaattctaatgtgaataactagcca

SEQ ID NO: 4016933 - DNA, 25 bp, Homo sapien
aaagaattctaatgtgaataactag

SEQ ID NO: 4016934 - DNA, 25 bp, Homo sapien
ttctaatgtgaataactagccaaag

SEQ ID NO: 4016935 - DNA, 25 bp, Homo sapien
taattatagtacttgaagtttacca

SEQ ID NO: 4016936 - DNA, 25 bp, Homo sapien
atattggatttctctacggcatttt

SEQ ID NO: 4016937 - DNA, 25 bp, Homo sapien
tcagacattctgatattggatttct

SEQ ID NO: 4016938 - DNA, 25 bp, Homo sapien
cagacattctgatattggatttctc

SEQ ID NO: 4016939 - DNA, 25 bp, Homo sapien
cagacagtccttgataagtacagca

SEQ ID NO: 4016940 - DNA, 25 bp, Homo sapien
gaattggtgagtctacagacagtcc

SEQ ID NO: 4016941 - DNA, 25 bp, Homo sapien
aaataagatttgtgaggcctgcaag

SEQ ID NO: 4016942 - DNA, 25 bp, Homo sapien
cacaaaacttgggtgtctgcaagat

SEQ ID NO: 4016943 - DNA, 25 bp, Homo sapien
cagttgggctttaccctcttcaact

SEQ ID NO: 4016944 - DNA, 25 bp, Homo sapien
ggctttaccctcttcaacttgggca

SEQ ID NO: 4016945 - DNA, 25 bp, Homo sapien
cctcttcaacttgggcacaatcttc

SEQ ID NO: 4016946 - DNA, 25 bp, Homo sapien
ttgataccagttgggctttaccctc

SEQ ID NO: 4016947 - DNA, 25 bp, Homo sapien
gaggaagagctttcattgtcttgct

SEQ ID NO: 4016948 - DNA, 25 bp, Homo sapien
aagagctttcattgtcttgcttcac

SEQ ID NO: 4016949 - DNA, 25 bp, Homo sapien
ggaagagctttcattgtcttgcttc

SEQ ID NO: 4016950 - DNA, 25 bp, Homo sapien
ggaggaagagctttcattgtcttgc

SEQ ID NO: 4016951 - DNA, 25 bp, Homo sapien
attatccagtatggagaaggggccc

SEQ ID NO: 4016952 - DNA, 25 bp, Homo sapien
agatggatattggtctccttgcagg

SEQ ID NO: 4016953 - DNA, 25 bp, Homo sapien
ggttcttcttcttatatccatgcca

SEQ ID NO: 4016954 - DNA, 25 bp, Homo sapien
tctgtgaatcatcacgtcacaatta

SEQ ID NO: 4016955 - DNA, 25 bp, Homo sapien
tcctacactaatagtatggttcttc

SEQ ID NO: 4016956 - DNA, 25 bp, Homo sapien
tatcatcactgcttgtgaaagattc

SEQ ID NO: 4016957 - DNA, 25 bp, Homo sapien
tttgccagctcaattttctttggtg

SEQ ID NO: 4016958 - DNA, 25 bp, Homo sapien
tgaaagattcatcttttgccagctc

SEQ ID NO: 4016959 - DNA, 25 bp, Homo sapien
tgccagctcaattttctttggtgtg

SEQ ID NO: 4016960 - DNA, 25 bp, Homo sapien
ctcggtaaaccttgatttgtagcac

SEQ ID NO: 4016961 - DNA, 25 bp, Homo sapien
tatcctaacacattggcatggccaa

SEQ ID NO: 4016962 - DNA, 25 bp, Homo sapien
ccaatagtgatatgttgcaaaagct

SEQ ID NO: 4016963 - DNA, 25 bp, Homo sapien
gctgtaaaaattctcgaagagtata

SEQ ID NO: 4016964 - DNA, 25 bp, Homo sapien
ctccttcctcttcaccttctgccat

SEQ ID NO: 4016965 - DNA, 25 bp, Homo sapien
cctccccagccatgcttcctgtaca

SEQ ID NO: 4016966 - DNA, 25 bp, Homo sapien
ctccccagccatgcttcctgtacag

SEQ ID NO: 4016967 - DNA, 25 bp, Homo sapien
gcccccttcctgatgaggtgggtga

SEQ ID NO: 4016968 - DNA, 25 bp, Homo sapien
tggagtttcccgtcgttggctgcag

SEQ ID NO: 4016969 - DNA, 25 bp, Homo sapien
agtttcccgtcgttggctgcagccc

SEQ ID NO: 4016970 - DNA, 25 bp, Homo sapien
tgggtgatctggaggtagggtccat

SEQ ID NO: 4016971 - DNA, 25 bp, Homo sapien
tacagatgttttgaccttgttgctg

SEQ ID NO: 4016972 - DNA, 25 bp, Homo sapien
tgtacagatgttttgaccttgttgc

SEQ ID NO: 4016973 - DNA, 25 bp, Homo sapien
gatgaggcctaatcccaggctaccc

SEQ ID NO: 4016974 - DNA, 25 bp, Homo sapien
tgatgatgaggcctaatcccaggct

SEQ ID NO: 4016975 - DNA, 25 bp, Homo sapien
ttcctctaaagcaaatgtccttgcc

SEQ ID NO: 4016976 - DNA, 25 bp, Homo sapien
ctctaaagcaaatgtccttgcccat

SEQ ID NO: 4016977 - DNA, 25 bp, Homo sapien
ctggaggggttcatggccctttcct

SEQ ID NO: 4016978 - DNA, 25 bp, Homo sapien
tcctctaaagcaaatgtccttgccc

SEQ ID NO: 4016979 - DNA, 25 bp, Homo sapien
accttcccccaaaccacagatgctc

SEQ ID NO: 4016980 - DNA, 25 bp, Homo sapien
ccttcccccaaaccacagatgctct

SEQ ID NO: 4016981 - DNA, 25 bp, Homo sapien
cctcaccttcccccaaaccacagat

SEQ ID NO: 4016982 - DNA, 25 bp, Homo sapien
tcaccttcccccaaaccacagatgc

SEQ ID NO: 4016983 - DNA, 25 bp, Homo sapien
gagagaagacttctcacactatggc

SEQ ID NO: 4016984 - DNA, 25 bp, Homo sapien
gaagacttctcacactatggcagcc

SEQ ID NO: 4016985 - DNA, 25 bp, Homo sapien
ttctcacactatggcagccatccat

SEQ ID NO: 4016986 - DNA, 25 bp, Homo sapien
tgcttcattttggagagaagacttc

SEQ ID NO: 4016987 - DNA, 25 bp, Homo sapien
ttgtttttgtgggaggccttctgca

SEQ ID NO: 4016988 - DNA, 25 bp, Homo sapien
cttctgcatggtcccgggaggtcag

SEQ ID NO: 4016989 - DNA, 25 bp, Homo sapien
gcccgggagggcctcccggagcaga

SEQ ID NO: 4016990 - DNA, 25 bp, Homo sapien
gctggagtcagtcccaatgccaaca

SEQ ID NO: 4016991 - DNA, 25 bp, Homo sapien
caaaacgtggcgtgggcattgcaca

SEQ ID NO: 4016992 - DNA, 25 bp, Homo sapien
gaccctgcaaaacgtggcgtgggca

SEQ ID NO: 4016993 - DNA, 25 bp, Homo sapien
gccgccactgcccagaaattgggcg

SEQ ID NO: 4016994 - DNA, 25 bp, Homo sapien
gtgaggtcgccgcaaggcttcccgt

SEQ ID NO: 4016995 - DNA, 25 bp, Homo sapien
tctgcacctacaacgtctgacgaag

SEQ ID NO: 4016996 - DNA, 25 bp, Homo sapien
catcaacaatcttattagtgggcag

SEQ ID NO: 4016997 - DNA, 25 bp, Homo sapien
gcagcctgtgcccagtcatcaacat

SEQ ID NO: 4016998 - DNA, 25 bp, Homo sapien
agaacgtgagctccccaagagcggg

SEQ ID NO: 4016999 - DNA, 25 bp, Homo sapien
gattttgggcaacatacctcagagg

SEQ ID NO: 4017000 - DNA, 25 bp, Homo sapien
ggagccataggcagttatcttaaaa

SEQ ID NO: 4017001 - DNA, 25 bp, Homo sapien
gatccttagctatagtcttttcggg

SEQ ID NO: 4017002 - DNA, 25 bp, Homo sapien
tctgttcagcttactagcagcatga

SEQ ID NO: 4017003 - DNA, 25 bp, Homo sapien
gggaaaactccctctagccagtcag

SEQ ID NO: 4017004 - DNA, 25 bp, Homo sapien
aggtccagtgcatacagggctgatg

SEQ ID NO: 4017005 - DNA, 25 bp, Homo sapien
cagtcagcactctaacccaggatta

SEQ ID NO: 4017006 - DNA, 25 bp, Homo sapien
cgtactcttgcagaccagacattga

SEQ ID NO: 4017007 - DNA, 25 bp, Homo sapien
tatggtgcaatcatttgtcaaactt

SEQ ID NO: 4017008 - DNA, 25 bp, Homo sapien
aaagatagacaactgtccgcagttg

SEQ ID NO: 4017009 - DNA, 25 bp, Homo sapien
tagcaggaaatcgtatcttgtaaac

SEQ ID NO: 4017010 - DNA, 25 bp, Homo sapien
cattgtttttagagtgtgtgcattc

SEQ ID NO: 4017011 - DNA, 25 bp, Homo sapien
tctgttgatttagaggaaaggccct

SEQ ID NO: 4017012 - DNA, 25 bp, Homo sapien
tgcctaaagctttgatatccccact

SEQ ID NO: 4017013 - DNA, 25 bp, Homo sapien
gttctagatgaccaaaacactattg

SEQ ID NO: 4017014 - DNA, 25 bp, Homo sapien
gactactagccacaagttactctga

SEQ ID NO: 4017015 - DNA, 25 bp, Homo sapien
aaacaaattgttaatacaactgtat

SEQ ID NO: 4017016 - DNA, 25 bp, Homo sapien
aacaaattgttaatacaactgtata

SEQ ID NO: 4017017 - DNA, 25 bp, Homo sapien
acaaattgttaatacaactgtataa

SEQ ID NO: 4017018 - DNA, 25 bp, Homo sapien
catgtgggccttggacttaagacca

SEQ ID NO: 4017019 - DNA, 25 bp, Homo sapien
gttttacaaatcagccccagttcca

SEQ ID NO: 4017020 - DNA, 25 bp, Homo sapien
tatcagcagagcactcgtctttgac

SEQ ID NO: 4017021 - DNA, 25 bp, Homo sapien
aatcgaggcctcagacttttccaaa

SEQ ID NO: 4017022 - DNA, 25 bp, Homo sapien
ttccattgatctccttagaatttcc

SEQ ID NO: 4017023 - DNA, 25 bp, Homo sapien
ccatggactccagatcctttactac

SEQ ID NO: 4017024 - DNA, 25 bp, Homo sapien
ggactccagatcctttactactgaa

SEQ ID NO: 4017025 - DNA, 25 bp, Homo sapien
ccattgatctccttagaatttcccc

SEQ ID NO: 4017026 - DNA, 25 bp, Homo sapien
tccggaggcctcttcaagcttgtgg

SEQ ID NO: 4017027 - DNA, 25 bp, Homo sapien
tgggttctctgctgtcttgaagcca

SEQ ID NO: 4017028 - DNA, 25 bp, Homo sapien
tgtacagagaggaccaggacgatgc

SEQ ID NO: 4017029 - DNA, 25 bp, Homo sapien
tatcctgagtgaactctccggaggc

SEQ ID NO: 4017030 - DNA, 25 bp, Homo sapien
aaaataacttgtcccgcttgcatga

SEQ ID NO: 4017031 - DNA, 25 bp, Homo sapien
tctgtaactagcaactggtgaatct

SEQ ID NO: 4017032 - DNA, 25 bp, Homo sapien
ccagtgtggctgatctaaagggaat

SEQ ID NO: 4017033 - DNA, 25 bp, Homo sapien
gacttcagatctaggactcctgctg

SEQ ID NO: 4017034 - DNA, 25 bp, Homo sapien
tcatggggccaatttcacgttctgg

SEQ ID NO: 4017035 - DNA, 25 bp, Homo sapien
tgtaaggaaaagtttggtactgctg

SEQ ID NO: 4017036 - DNA, 25 bp, Homo sapien
gctggaatagagttgctaagttgta

SEQ ID NO: 4017037 - DNA, 25 bp, Homo sapien
catgtgactagcctgggactttgct

SEQ ID NO: 4017038 - DNA, 25 bp, Homo sapien
tcaccccagaatctagccatgcagt

SEQ ID NO: 4017039 - DNA, 25 bp, Homo sapien
aagcattgccacattatcctggtgc

SEQ ID NO: 4017040 - DNA, 25 bp, Homo sapien
cattaagagctgttaatcactggct

SEQ ID NO: 4017041 - DNA, 25 bp, Homo sapien
gtctctgccattagagtctcccagg

SEQ ID NO: 4017042 - DNA, 25 bp, Homo sapien
tagctgctcacttagacacgggttt

SEQ ID NO: 4017043 - DNA, 25 bp, Homo sapien
taaccagctaggcagtgaaccatgc

SEQ ID NO: 4017044 - DNA, 25 bp, Homo sapien
gaactgctcagacaggtgcgcaata

SEQ ID NO: 4017045 - DNA, 25 bp, Homo sapien
gattgtacctcctgaccgacggaaa

SEQ ID NO: 4017046 - DNA, 25 bp, Homo sapien
ccacgccatcgaaatgactggagcc

SEQ ID NO: 4017047 - DNA, 25 bp, Homo sapien
tcgaacccacgccatcgaaatgact

SEQ ID NO: 4017048 - DNA, 25 bp, Homo sapien
gaacccacgccatcgaaatgactgg

SEQ ID NO: 4017049 - DNA, 25 bp, Homo sapien
aacccacgccatcgaaatgactgga

SEQ ID NO: 4017050 - DNA, 25 bp, Homo sapien
cagccacccgagtcccgctcgctgt

SEQ ID NO: 4017051 - DNA, 25 bp, Homo sapien
cttcctggatcgagcgcccgcactc

SEQ ID NO: 4017052 - DNA, 25 bp, Homo sapien
cacatcccgggatcgtcccaacggc

SEQ ID NO: 4017053 - DNA, 25 bp, Homo sapien
ctcgctgtcgcctgcacgcgagtcc

SEQ ID NO: 4017054 - DNA, 25 bp, Homo sapien
ctgtaacaggtgataaaggcttggg

SEQ ID NO: 4017055 - DNA, 25 bp, Homo sapien
tgttgcctagacttctgagctgtat

SEQ ID NO: 4017056 - DNA, 25 bp, Homo sapien
tagctattactacaggcgcatggca

SEQ ID NO: 4017057 - DNA, 25 bp, Homo sapien
gataacatcccacgtgccaaaacat

SEQ ID NO: 4017058 - DNA, 25 bp, Homo sapien
tctatagctgtctcttagggcagta

SEQ ID NO: 4017059 - DNA, 25 bp, Homo sapien
ccaacataccgttttgtgtgtggtt

SEQ ID NO: 4017060 - DNA, 25 bp, Homo sapien
accagcagagactctatagctgtct

SEQ ID NO: 4017061 - DNA, 25 bp, Homo sapien
cttgaagaagcagcctaatgaacca

SEQ ID NO: 4017062 - DNA, 25 bp, Homo sapien
atgcctgcccattttgtggttctat

SEQ ID NO: 4017063 - DNA, 25 bp, Homo sapien
catgcctgcccattttgtggttcta

SEQ ID NO: 4017064 - DNA, 25 bp, Homo sapien
taattctagtagtctccccatggcc

SEQ ID NO: 4017065 - DNA, 25 bp, Homo sapien
ttaagcatgctttctacggtgggct

SEQ ID NO: 4017066 - DNA, 25 bp, Homo sapien
ttttacacgtaaggacagcggcttg

SEQ ID NO: 4017067 - DNA, 25 bp, Homo sapien
taatttacagcaggacgctttcagc

SEQ ID NO: 4017068 - DNA, 25 bp, Homo sapien
tagtcagtgcactcaccctttgagg

SEQ ID NO: 4017069 - DNA, 25 bp, Homo sapien
tgtgtgaacagatggagagccagcc

SEQ ID NO: 4017070 - DNA, 25 bp, Homo sapien
caagcgttagttccaaagttcagtg

SEQ ID NO: 4017071 - DNA, 25 bp, Homo sapien
gcctggatacagagctaagcaaatg

SEQ ID NO: 4017072 - DNA, 25 bp, Homo sapien
tcaaaacctagtttgggctgggtgc

SEQ ID NO: 4017073 - DNA, 25 bp, Homo sapien
aaacctagtttgggctgggtgcagt

SEQ ID NO: 4017074 - DNA, 25 bp, Homo sapien
acctagtttgggctgggtgcagtgg

SEQ ID NO: 4017075 - DNA, 25 bp, Homo sapien
caaaacctagtttgggctgggtgca

SEQ ID NO: 4017076 - DNA, 25 bp, Homo sapien
cagagaagtggcctgcgttacagat

SEQ ID NO: 4017077 - DNA, 25 bp, Homo sapien
tgtttctagtctctaaggtgaccct

SEQ ID NO: 4017078 - DNA, 25 bp, Homo sapien
tgaccctttaacctactcaagatgg

SEQ ID NO: 4017079 - DNA, 25 bp, Homo sapien
catattttctgtgtggatttgtgcc

SEQ ID NO: 4017080 - DNA, 25 bp, Homo sapien
gaatgttccgttaaaggtcactgca

SEQ ID NO: 4017081 - DNA, 25 bp, Homo sapien
gtttatgatatagggacaggcacac

SEQ ID NO: 4017082 - DNA, 25 bp, Homo sapien
tcaggccaggtttgagagcattttc

SEQ ID NO: 4017083 - DNA, 25 bp, Homo sapien
ttacagaaagatatggtctcaggcc

SEQ ID NO: 4017084 - DNA, 25 bp, Homo sapien
ggcatcccgctgctgagaccttgta

SEQ ID NO: 4017085 - DNA, 25 bp, Homo sapien
catcccgctgctgagaccttgtagg

SEQ ID NO: 4017086 - DNA, 25 bp, Homo sapien
gcatcccgctgctgagaccttgtag

SEQ ID NO: 4017087 - DNA, 25 bp, Homo sapien
aggcatcccgctgctgagaccttgt

SEQ ID NO: 4017088 - DNA, 25 bp, Homo sapien
aatcctacgtccactgaagaacggt

SEQ ID NO: 4017089 - DNA, 25 bp, Homo sapien
tacgtccactgaagaacggtagaac

SEQ ID NO: 4017090 - DNA, 25 bp, Homo sapien
tgaagaacggtagaacccactagcc

SEQ ID NO: 4017091 - DNA, 25 bp, Homo sapien
aagaacggtagaacccactagccat

SEQ ID NO: 4017092 - DNA, 25 bp, Homo sapien
tgtagtcacatccaagacgtaagag

SEQ ID NO: 4017093 - DNA, 25 bp, Homo sapien
caggagacaccatggccctaactgt

SEQ ID NO: 4017094 - DNA, 25 bp, Homo sapien
ggacacctgcctgacattagttgtt

SEQ ID NO: 4017095 - DNA, 25 bp, Homo sapien
acatgggtctgggtctccacaagct

SEQ ID NO: 4017096 - DNA, 25 bp, Homo sapien
tatgcggtactgtcctaggtatctg

SEQ ID NO: 4017097 - DNA, 25 bp, Homo sapien
tcagttctgttcagtaggtatgcgg

SEQ ID NO: 4017098 - DNA, 25 bp, Homo sapien
ccttgtcagatgtcaggtcctggac

SEQ ID NO: 4017099 - DNA, 25 bp, Homo sapien
tgagcaactctgatccagccaggct

SEQ ID NO: 4017100 - DNA, 25 bp, Homo sapien
aagataccactaaaatagctgcccc

SEQ ID NO: 4017101 - DNA, 25 bp, Homo sapien
tttaataggaaagctcttgcactgc

SEQ ID NO: 4017102 - DNA, 25 bp, Homo sapien
ctggacctgactgccacccctcaga

SEQ ID NO: 4017103 - DNA, 25 bp, Homo sapien
agaggtgaccacttttattactact

SEQ ID NO: 4017104 - DNA, 25 bp, Homo sapien
cttagattgtcgcttcacctgcttg

SEQ ID NO: 4017105 - DNA, 25 bp, Homo sapien
taccatgcagaaatatgttcaagcc

SEQ ID NO: 4017106 - DNA, 25 bp, Homo sapien
tattttacggcatcctgtttcatgg

SEQ ID NO: 4017107 - DNA, 25 bp, Homo sapien
ttgctaagtccgatgcacgcctgca

SEQ ID NO: 4017108 - DNA, 25 bp, Homo sapien
aagagtgtggagaagatctcagtaa

SEQ ID NO: 4017109 - DNA, 25 bp, Homo sapien
gaagatctcagtaaacaggaggtgg

SEQ ID NO: 4017110 - DNA, 25 bp, Homo sapien
tctcagtaaacaggaggtggataaa

SEQ ID NO: 4017111 - DNA, 25 bp, Homo sapien
ctcaagagtgtggagaagatctcag

SEQ ID NO: 4017112 - DNA, 25 bp, Homo sapien
tcagccagtcgcagggtcagcttaa

SEQ ID NO: 4017113 - DNA, 25 bp, Homo sapien
gaggaactgaccatctcatgacctg

SEQ ID NO: 4017114 - DNA, 25 bp, Homo sapien
tagggcctcgacttgcttcagacga

SEQ ID NO: 4017115 - DNA, 25 bp, Homo sapien
catgacctgtggcattgcacggtgc

SEQ ID NO: 4017116 - DNA, 25 bp, Homo sapien
caaagtatagcaggagaagaatccc

SEQ ID NO: 4017117 - DNA, 25 bp, Homo sapien
ccatgataattcaacaagatagctg

SEQ ID NO: 4017118 - DNA, 25 bp, Homo sapien
gagacatacaaagaccattggaaca

SEQ ID NO: 4017119 - DNA, 25 bp, Homo sapien
gaagcctccgtatgattaagcctgt

SEQ ID NO: 4017120 - DNA, 25 bp, Homo sapien
tattcacctatcctaaaggctagag

SEQ ID NO: 4017121 - DNA, 25 bp, Homo sapien
ggaatggtaagaactctgcaagagc

SEQ ID NO: 4017122 - DNA, 25 bp, Homo sapien
tcatcgttttgagaagttgcgcaag

SEQ ID NO: 4017123 - DNA, 25 bp, Homo sapien
gaactgaagtctaatcagcgcgcca

SEQ ID NO: 4017124 - DNA, 25 bp, Homo sapien
gaggagagtgatcggtattttgttc

SEQ ID NO: 4017125 - DNA, 25 bp, Homo sapien
aggagagtgatcggtattttgttct

SEQ ID NO: 4017126 - DNA, 25 bp, Homo sapien
gagagtgatcggtattttgttctct

SEQ ID NO: 4017127 - DNA, 25 bp, Homo sapien
ggagagtgatcggtattttgttctc

SEQ ID NO: 4017128 - DNA, 25 bp, Homo sapien
gagaggctttctatgtgattccggc

SEQ ID NO: 4017129 - DNA, 25 bp, Homo sapien
gaacatacagagagtctggcaccag

SEQ ID NO: 4017130 - DNA, 25 bp, Homo sapien
cttcgtgcagaagggagatgcccct

SEQ ID NO: 4017131 - DNA, 25 bp, Homo sapien
cacaaatggatgctctgactgcaac

SEQ ID NO: 4017132 - DNA, 25 bp, Homo sapien
tcagcgaacacatgatcatacacga

SEQ ID NO: 4017133 - DNA, 25 bp, Homo sapien
cttctcagcgaacacatgatcatac

SEQ ID NO: 4017134 - DNA, 25 bp, Homo sapien
ttctcagcgaacacatgatcataca

SEQ ID NO: 4017135 - DNA, 25 bp, Homo sapien
ctcagcgaacacatgatcatacacg

SEQ ID NO: 4017136 - DNA, 25 bp, Homo sapien
ggcagctttttacccgcacctagaa

SEQ ID NO: 4017137 - DNA, 25 bp, Homo sapien
caacctagttggtctgctacctggc

SEQ ID NO: 4017138 - DNA, 25 bp, Homo sapien
tctgccgttccgttagactgaaagc

SEQ ID NO: 4017139 - DNA, 25 bp, Homo sapien
gagacccaccaaatgaaccacctgg

SEQ ID NO: 4017140 - DNA, 25 bp, Homo sapien
aaatggtactttcaatctactggaa

SEQ ID NO: 4017141 - DNA, 25 bp, Homo sapien
tcttaaaatggtactttcaatctac

SEQ ID NO: 4017142 - DNA, 25 bp, Homo sapien
tttcaatctactggaaatcagaatg

SEQ ID NO: 4017143 - DNA, 25 bp, Homo sapien
ggtactttcaatctactggaaatca

SEQ ID NO: 4017144 - DNA, 25 bp, Homo sapien
caggcattcaatcgtttcagtcagg

SEQ ID NO: 4017145 - DNA, 25 bp, Homo sapien
aggtgatcaatgttggtttgcaggc

SEQ ID NO: 4017146 - DNA, 25 bp, Homo sapien
tccacttggctctggaggtgatcaa

SEQ ID NO: 4017147 - DNA, 25 bp, Homo sapien
tgcaaagctgggtgccggtttctcc

SEQ ID NO: 4017148 - DNA, 25 bp, Homo sapien
gctgtgaggccttgctgtcagcaac

SEQ ID NO: 4017149 - DNA, 25 bp, Homo sapien
ccagttcccttgctgtgacgtctaa

SEQ ID NO: 4017150 - DNA, 25 bp, Homo sapien
gcatgttgttcgttcatctgccgta

SEQ ID NO: 4017151 - DNA, 25 bp, Homo sapien
gaagttccacttgcttcgtcagata

SEQ ID NO: 4017152 - DNA, 25 bp, Homo sapien
tgggtaacctacagcaagcacattt

SEQ ID NO: 4017153 - DNA, 25 bp, Homo sapien
caactttagacctttatgggccaga

SEQ ID NO: 4017154 - DNA, 25 bp, Homo sapien
ctaacaagctttgctaacgggcctt

SEQ ID NO: 4017155 - DNA, 25 bp, Homo sapien
gagactggactatgtcaccccaaag

SEQ ID NO: 4017156 - DNA, 25 bp, Homo sapien
tcactgtgacctccgccctgcaggt

SEQ ID NO: 4017157 - DNA, 25 bp, Homo sapien
gctcactgtgacctccgccctgcag

SEQ ID NO: 4017158 - DNA, 25 bp, Homo sapien
actgtgacctccgccctgcaggttc

SEQ ID NO: 4017159 - DNA, 25 bp, Homo sapien
tgacctccgccctgcaggttcaagg

SEQ ID NO: 4017160 - DNA, 25 bp, Homo sapien
gtaatgtcttcccaagctcagcagc

SEQ ID NO: 4017161 - DNA, 25 bp, Homo sapien
tccgatccagtaatgtcttcccaag

SEQ ID NO: 4017162 - DNA, 25 bp, Homo sapien
ccaactctgtgttccgatccagtaa

SEQ ID NO: 4017163 - DNA, 25 bp, Homo sapien
gctgaacagagtcctccaactctgt

SEQ ID NO: 4017164 - DNA, 25 bp, Homo sapien
caaataaggcttaatggctatccac

SEQ ID NO: 4017165 - DNA, 25 bp, Homo sapien
cagcctagggcccaatttagaaagg

SEQ ID NO: 4017166 - DNA, 25 bp, Homo sapien
caagcagccagtatgatagaagcat

SEQ ID NO: 4017167 - DNA, 25 bp, Homo sapien
tattctacaacctgacaagcagcca

SEQ ID NO: 4017168 - DNA, 25 bp, Homo sapien
gaaagagataccaaggacagcactc

SEQ ID NO: 4017169 - DNA, 25 bp, Homo sapien
cagtaaaacaaagcaccagcctggc

SEQ ID NO: 4017170 - DNA, 25 bp, Homo sapien
tcagaaacctgaagtctcgatctcc

SEQ ID NO: 4017171 - DNA, 25 bp, Homo sapien
gccaaaagctggcagtaagcccaag

SEQ ID NO: 4017172 - DNA, 25 bp, Homo sapien
tcctggtggtcgtaccacggctcgt

SEQ ID NO: 4017173 - DNA, 25 bp, Homo sapien
ggtcctggtggtcgtaccacggctc

SEQ ID NO: 4017174 - DNA, 25 bp, Homo sapien
ggtggtcgtaccacggctcgtcctc

SEQ ID NO: 4017175 - DNA, 25 bp, Homo sapien
tggtggtcgtaccacggctcgtcct

SEQ ID NO: 4017176 - DNA, 25 bp, Homo sapien
actcctctaccaggttttccgccag

SEQ ID NO: 4017177 - DNA, 25 bp, Homo sapien
ctcggctgggtcttctaggggcagc

SEQ ID NO: 4017178 - DNA, 25 bp, Homo sapien
gcctcagccgctgccccgggctctt

SEQ ID NO: 4017179 - DNA, 25 bp, Homo sapien
gtcttctaggggcagcggcccccgc

SEQ ID NO: 4017180 - DNA, 25 bp, Homo sapien
gccgccgtcccgcctcagccgctgc

SEQ ID NO: 4017181 - DNA, 25 bp, Homo sapien
gccggctgcctcgactcgcctcgcg

SEQ ID NO: 4017182 - DNA, 25 bp, Homo sapien
ccgaccggccggctgcctcgactcg

SEQ ID NO: 4017183 - DNA, 25 bp, Homo sapien
cgccgccgcccagactccgctgcgc

SEQ ID NO: 4017184 - DNA, 25 bp, Homo sapien
gccgcccagactccgctgcgccgcc

SEQ ID NO: 4017185 - DNA, 25 bp, Homo sapien
ccgagcggcagggacttcgtccaat

SEQ ID NO: 4017186 - DNA, 25 bp, Homo sapien
tgatctgcgctgtgaggctcctagg

SEQ ID NO: 4017187 - DNA, 25 bp, Homo sapien
ggcccaacgtggcactttggcagaa

SEQ ID NO: 4017188 - DNA, 25 bp, Homo sapien
gccaatggtgggtccggaataaaca

SEQ ID NO: 4017189 - DNA, 25 bp, Homo sapien
cgtctgtggacaggcaacgcaggcc

SEQ ID NO: 4017190 - DNA, 25 bp, Homo sapien
agggtgccggaagcctgaggtccgc

SEQ ID NO: 4017191 - DNA, 25 bp, Homo sapien
ggagtccttcgtgccggcgggaagc

SEQ ID NO: 4017192 - DNA, 25 bp, Homo sapien
gggcctaggactccggcctctgaga

SEQ ID NO: 4017193 - DNA, 25 bp, Homo sapien
tatctgccattgtaattgggatgac

SEQ ID NO: 4017194 - DNA, 25 bp, Homo sapien
atctgccattgtaattgggatgaca

SEQ ID NO: 4017195 - DNA, 25 bp, Homo sapien
tcaactctcagaaagcttatggcct

SEQ ID NO: 4017196 - DNA, 25 bp, Homo sapien
tattcttatgtttcggacaggctgg

SEQ ID NO: 4017197 - DNA, 25 bp, Homo sapien
gcttcttgttttagcacgcctgaaa

SEQ ID NO: 4017198 - DNA, 25 bp, Homo sapien
tgtgcctggccacgaagttcagacc

SEQ ID NO: 4017199 - DNA, 25 bp, Homo sapien
gaggcccaaggattactcaagcaag

SEQ ID NO: 4017200 - DNA, 25 bp, Homo sapien
gatctacaaagttaaagcgaggccc

SEQ ID NO: 4017201 - DNA, 25 bp, Homo sapien
gaaatttggcagtgtagaccgaact

SEQ ID NO: 4017202 - DNA, 25 bp, Homo sapien
ttttgataattctaggaccctgcca

SEQ ID NO: 4017203 - DNA, 25 bp, Homo sapien
ccctgtgtgctgttgttggaaggca

SEQ ID NO: 4017204 - DNA, 25 bp, Homo sapien
taccttgggttagaccctggctctg

SEQ ID NO: 4017205 - DNA, 25 bp, Homo sapien
gaaggcagtctagcacaagattgaa

SEQ ID NO: 4017206 - DNA, 25 bp, Homo sapien
ttggtgtaaacaggccatcaacctt

SEQ ID NO: 4017207 - DNA, 25 bp, Homo sapien
ctaataacatggaaattttgcccca

SEQ ID NO: 4017208 - DNA, 25 bp, Homo sapien
tttctatggcctgatctctaataac

SEQ ID NO: 4017209 - DNA, 25 bp, Homo sapien
gctgttgccatcgtcattgctttcc

SEQ ID NO: 4017210 - DNA, 25 bp, Homo sapien
catttccaggctgttgccatcgtca

SEQ ID NO: 4017211 - DNA, 25 bp, Homo sapien
atgtatcacgtgaggcgtttcaaac

SEQ ID NO: 4017212 - DNA, 25 bp, Homo sapien
ctgggatgtatcacgtgaggcgttt

SEQ ID NO: 4017213 - DNA, 25 bp, Homo sapien
gggatgtatcacgtgaggcgtttca

SEQ ID NO: 4017214 - DNA, 25 bp, Homo sapien
gatgtatcacgtgaggcgtttcaaa

SEQ ID NO: 4017215 - DNA, 25 bp, Homo sapien
ggttaccatcagtctacattttgtc

SEQ ID NO: 4017216 - DNA, 25 bp, Homo sapien
cttttgggcatatatccaggagcgg

SEQ ID NO: 4017217 - DNA, 25 bp, Homo sapien
tatattcatggagttgagcaaccag

SEQ ID NO: 4017218 - DNA, 25 bp, Homo sapien
cacattttgcgatactgacagacca

SEQ ID NO: 4017219 - DNA, 25 bp, Homo sapien
actaatactcgagttgtaatagttc

SEQ ID NO: 4017220 - DNA, 25 bp, Homo sapien
tattaatatatgtttgatgcaatct

SEQ ID NO: 4017221 - DNA, 25 bp, Homo sapien
ttagtttactaatactcgagttgta

SEQ ID NO: 4017222 - DNA, 25 bp, Homo sapien
tatgtttgatgcaatctgttatcag

SEQ ID NO: 4017223 - DNA, 25 bp, Homo sapien
tgctacaatgaacaggagagtgtat

SEQ ID NO: 4017224 - DNA, 25 bp, Homo sapien
caggcaactgtcgagctactttcta

SEQ ID NO: 4017225 - DNA, 25 bp, Homo sapien
caagtggtagttctgtgttaggtag

SEQ ID NO: 4017226 - DNA, 25 bp, Homo sapien
tgcctttctagtattccccagtgtc

SEQ ID NO: 4017227 - DNA, 25 bp, Homo sapien
ttgcttaggcttgctttgctatttg

SEQ ID NO: 4017228 - DNA, 25 bp, Homo sapien
ggctactgtaaataggatcgcattc

SEQ ID NO: 4017229 - DNA, 25 bp, Homo sapien
tgtcaccaaagacagatagtttgac

SEQ ID NO: 4017230 - DNA, 25 bp, Homo sapien
tctctttgcttaggcttgctttgct

SEQ ID NO: 4017231 - DNA, 25 bp, Homo sapien
acttccttctttcatctcttgatgg

SEQ ID NO: 4017232 - DNA, 25 bp, Homo sapien
tccttctttcatctcttgatggaca

SEQ ID NO: 4017233 - DNA, 25 bp, Homo sapien
tctttcatctcttgatggacatttg

SEQ ID NO: 4017234 - DNA, 25 bp, Homo sapien
cttctttcatctcttgatggacatt

SEQ ID NO: 4017235 - DNA, 25 bp, Homo sapien
ggccaggctcgtctcccaactactg

SEQ ID NO: 4017236 - DNA, 25 bp, Homo sapien
aggctcgtctcccaactactgacct

SEQ ID NO: 4017237 - DNA, 25 bp, Homo sapien
gctcgtctcccaactactgacctca

SEQ ID NO: 4017238 - DNA, 25 bp, Homo sapien
ccaggctcgtctcccaactactgac

SEQ ID NO: 4017239 - DNA, 25 bp, Homo sapien
agaggcacattctttattagttctg

SEQ ID NO: 4017240 - DNA, 25 bp, Homo sapien
gcacattctttattagttctgtcaa

SEQ ID NO: 4017241 - DNA, 25 bp, Homo sapien
cgcccggccagacagaggcacattc

SEQ ID NO: 4017242 - DNA, 25 bp, Homo sapien
aaaacatttatgctgcaaaacctct

SEQ ID NO: 4017243 - DNA, 25 bp, Homo sapien
cttaggcatgaatcccagttttacc

SEQ ID NO: 4017244 - DNA, 25 bp, Homo sapien
tctcactcatgggattgtcatggga

SEQ ID NO: 4017245 - DNA, 25 bp, Homo sapien
cgttcactgcataggcctgtaagag

SEQ ID NO: 4017246 - DNA, 25 bp, Homo sapien
ggttaatgtaaccagcagactgaag

SEQ ID NO: 4017247 - DNA, 25 bp, Homo sapien
tagtgaaggattaactgactgactt

SEQ ID NO: 4017248 - DNA, 25 bp, Homo sapien
tgtttgctttggtaggaaactgcca

SEQ ID NO: 4017249 - DNA, 25 bp, Homo sapien
ggtttgggcccatctaataggtgtg

SEQ ID NO: 4017250 - DNA, 25 bp, Homo sapien
ccagattgcatagggccttgcagcc

SEQ ID NO: 4017251 - DNA, 25 bp, Homo sapien
tcagatcctgcttttgctaatagtt

SEQ ID NO: 4017252 - DNA, 25 bp, Homo sapien
tcctgcactctttgttggagactat

SEQ ID NO: 4017253 - DNA, 25 bp, Homo sapien
ttcattgaccatgccttttgtgctg

SEQ ID NO: 4017254 - DNA, 25 bp, Homo sapien
tctttcctaattgtattgcctctgc

SEQ ID NO: 4017255 - DNA, 25 bp, Homo sapien
tatctacgaacatggactatctttc

SEQ ID NO: 4017256 - DNA, 25 bp, Homo sapien
ttcttatctacgaacatggactatc

SEQ ID NO: 4017257 - DNA, 25 bp, Homo sapien
tgaagttgggtgtgtcagtcttctg

SEQ ID NO: 4017258 - DNA, 25 bp, Homo sapien
ataacttatggggattttgacaggg

SEQ ID NO: 4017259 - DNA, 25 bp, Homo sapien
gtgcccggccactttatatgttgaa

SEQ ID NO: 4017260 - DNA, 25 bp, Homo sapien
cccggccactttatatgttgaagtt

SEQ ID NO: 4017261 - DNA, 25 bp, Homo sapien
ttgaagtttgtgtcatgtcatgaca

SEQ ID NO: 4017262 - DNA, 25 bp, Homo sapien
tgttgaagtttgtgtcatgtcatga

SEQ ID NO: 4017263 - DNA, 25 bp, Homo sapien
gggtgctgtgtaacgaatagactga

SEQ ID NO: 4017264 - DNA, 25 bp, Homo sapien
tggggtgctgtgtaacgaatagact

SEQ ID NO: 4017265 - DNA, 25 bp, Homo sapien
cttggggtgctgtgtaacgaataga

SEQ ID NO: 4017266 - DNA, 25 bp, Homo sapien
gtgctgtgtaacgaatagactgaaa

SEQ ID NO: 4017267 - DNA, 25 bp, Homo sapien
ctgttgattagtgacatgagttaca

SEQ ID NO: 4017268 - DNA, 25 bp, Homo sapien
gtgacatgagttacagcacaattga

SEQ ID NO: 4017269 - DNA, 25 bp, Homo sapien
gaagtcacatggaagaacctgttga

SEQ ID NO: 4017270 - DNA, 25 bp, Homo sapien
agaagtcacatggaagaacctgttg

SEQ ID NO: 4017271 - DNA, 25 bp, Homo sapien
ggtgaagtcgaaaagtcaatcaggg

SEQ ID NO: 4017272 - DNA, 25 bp, Homo sapien
gatgtatgtgcttttaatcctatac

SEQ ID NO: 4017273 - DNA, 25 bp, Homo sapien
actctatgtactaatatttactcag

SEQ ID NO: 4017274 - DNA, 25 bp, Homo sapien
tgacatttgttatatgagtactcta

SEQ ID NO: 4017275 - DNA, 25 bp, Homo sapien
ccagcaggggtccagatgctgtact

SEQ ID NO: 4017276 - DNA, 25 bp, Homo sapien
aaagaactattatgtatcatgtaaa

SEQ ID NO: 4017277 - DNA, 25 bp, Homo sapien
taaaaattatcatgtgtgccagcag

SEQ ID NO: 4017278 - DNA, 25 bp, Homo sapien
gatgctgtactttgggaaagaccac

SEQ ID NO: 4017279 - DNA, 25 bp, Homo sapien
caattcagactgaggagaaaataaa

SEQ ID NO: 4017280 - DNA, 25 bp, Homo sapien
gatgctaggtgctattacagatgta

SEQ ID NO: 4017281 - DNA, 25 bp, Homo sapien
tgcccactggcttagcatacaattc

SEQ ID NO: 4017282 - DNA, 25 bp, Homo sapien
tacagatgtaagtgtgggctgttga

SEQ ID NO: 4017283 - DNA, 25 bp, Homo sapien
tagcagggagtctgtgcaagcacag

SEQ ID NO: 4017284 - DNA, 25 bp, Homo sapien
catgaggttgtaggacatgattgga

SEQ ID NO: 4017285 - DNA, 25 bp, Homo sapien
tcatagtagcagggagtctgtgcaa

SEQ ID NO: 4017286 - DNA, 25 bp, Homo sapien
cacagagaggcatgaggttgtagga

SEQ ID NO: 4017287 - DNA, 25 bp, Homo sapien
gagcttgagaagtgtagacctgatc

SEQ ID NO: 4017288 - DNA, 25 bp, Homo sapien
tagagcttgagaagtgtagacctga

SEQ ID NO: 4017289 - DNA, 25 bp, Homo sapien
tagtagagcttgagaagtgtagacc

SEQ ID NO: 4017290 - DNA, 25 bp, Homo sapien
ttagtagtagagcttgagaagtgta

SEQ ID NO: 4017291 - DNA, 25 bp, Homo sapien
taaaaggaaaggagcattataatta

SEQ ID NO: 4017292 - DNA, 25 bp, Homo sapien
ctaaaaggaaaggagcattataatt

SEQ ID NO: 4017293 - DNA, 25 bp, Homo sapien
gaagggatgttagctggattgcaaa

SEQ ID NO: 4017294 - DNA, 25 bp, Homo sapien
aaataaaagattaccctgaagtgtg

SEQ ID NO: 4017295 - DNA, 25 bp, Homo sapien
tgcaaagaacagttagaaggctaac

SEQ ID NO: 4017296 - DNA, 25 bp, Homo sapien
tggttccactggttaatattgtgca

SEQ ID NO: 4017297 - DNA, 25 bp, Homo sapien
ggtggccccacatagctaatgctaa

SEQ ID NO: 4017298 - DNA, 25 bp, Homo sapien
taacagttggcatttggtggcccca

SEQ ID NO: 4017299 - DNA, 25 bp, Homo sapien
aaagtgtccaactgaagtccacagg

SEQ ID NO: 4017300 - DNA, 25 bp, Homo sapien
tattggctcagctatagacacgttg

SEQ ID NO: 4017301 - DNA, 25 bp, Homo sapien
caatgactgactcgtccccggtctt

SEQ ID NO: 4017302 - DNA, 25 bp, Homo sapien
tcccaatgactgactcgtccccggt

SEQ ID NO: 4017303 - DNA, 25 bp, Homo sapien
tgactgactcgtccccggtcttgca

SEQ ID NO: 4017304 - DNA, 25 bp, Homo sapien
ctcccaatgactgactcgtccccgg

SEQ ID NO: 4017305 - DNA, 25 bp, Homo sapien
tgtgtagtggcccaagggggggtca

SEQ ID NO: 4017306 - DNA, 25 bp, Homo sapien
tgcacaccagccttgcaggctcagt

SEQ ID NO: 4017307 - DNA, 25 bp, Homo sapien
ttgtctgctcttgccgggtgcagct

SEQ ID NO: 4017308 - DNA, 25 bp, Homo sapien
ggctcagtgagtagaccatccttgt

SEQ ID NO: 4017309 - DNA, 25 bp, Homo sapien
ggcaccaggaagcataagtgacatg

SEQ ID NO: 4017310 - DNA, 25 bp, Homo sapien
gggcaccaggaagcataagtgacat

SEQ ID NO: 4017311 - DNA, 25 bp, Homo sapien
ccaggaagcataagtgacatgcacc

SEQ ID NO: 4017312 - DNA, 25 bp, Homo sapien
caccaggaagcataagtgacatgca

SEQ ID NO: 4017313 - DNA, 25 bp, Homo sapien
tttcgtcaggcaaccaccaacggca

SEQ ID NO: 4017314 - DNA, 25 bp, Homo sapien
cttacaataggagcttctcgtacgg

SEQ ID NO: 4017315 - DNA, 25 bp, Homo sapien
gaaaaccccagccatgtcaccgact

SEQ ID NO: 4017316 - DNA, 25 bp, Homo sapien
cccagccatgtcaccgacttacaat

SEQ ID NO: 4017317 - DNA, 25 bp, Homo sapien
acgcggcgggtgcagatgtggactc

SEQ ID NO: 4017318 - DNA, 25 bp, Homo sapien
ccccacgagcttggagtgccattca

SEQ ID NO: 4017319 - DNA, 25 bp, Homo sapien
ccccgtctgtctccaaggcggagga

SEQ ID NO: 4017320 - DNA, 25 bp, Homo sapien
ggcaaattgaccaaaacgctcaggg

SEQ ID NO: 4017321 - DNA, 25 bp, Homo sapien
cccctgcaggggagcaacgcagtgg

SEQ ID NO: 4017322 - DNA, 25 bp, Homo sapien
gcaggggagcaacgcagtggggaag

SEQ ID NO: 4017323 - DNA, 25 bp, Homo sapien
tgcaggggagcaacgcagtggggaa

SEQ ID NO: 4017324 - DNA, 25 bp, Homo sapien
cctgcaggggagcaacgcagtgggg

SEQ ID NO: 4017325 - DNA, 25 bp, Homo sapien
tattgaaaaagcgatgtacccacag

SEQ ID NO: 4017326 - DNA, 25 bp, Homo sapien
tacagagaagcgcagcaatgagcca

SEQ ID NO: 4017327 - DNA, 25 bp, Homo sapien
aaaatgccgggcaccgagttgacgg

SEQ ID NO: 4017328 - DNA, 25 bp, Homo sapien
aaggttctcattcccctagtcaggg

SEQ ID NO: 4017329 - DNA, 25 bp, Homo sapien
tcacatctgtagatgcagctactca

SEQ ID NO: 4017330 - DNA, 25 bp, Homo sapien
aggatcaattgagctccggaggtcg

SEQ ID NO: 4017331 - DNA, 25 bp, Homo sapien
gctcacatctgtagatgcagctact

SEQ ID NO: 4017332 - DNA, 25 bp, Homo sapien
ggaggatcaattgagctccggaggt

SEQ ID NO: 4017333 - DNA, 25 bp, Homo sapien
cttgcagtgtaactttctggcccct

SEQ ID NO: 4017334 - DNA, 25 bp, Homo sapien
ttacttgcagtgtaactttctggcc

SEQ ID NO: 4017335 - DNA, 25 bp, Homo sapien
gcagtgtaactttctggccccttcc

SEQ ID NO: 4017336 - DNA, 25 bp, Homo sapien
cacatgtatttggtaagcttttgtt

SEQ ID NO: 4017337 - DNA, 25 bp, Homo sapien
tagtgtagatcccaaatatttagcg

SEQ ID NO: 4017338 - DNA, 25 bp, Homo sapien
taccagctgggacttgggtccaacg

SEQ ID NO: 4017339 - DNA, 25 bp, Homo sapien
cccaccgtcatgaagctggcacttt

SEQ ID NO: 4017340 - DNA, 25 bp, Homo sapien
taaaacggtgatactggaatgcttc

SEQ ID NO: 4017341 - DNA, 25 bp, Homo sapien
cgatttgtgccccactagaggagcc

SEQ ID NO: 4017342 - DNA, 25 bp, Homo sapien
aattctcccggaatggtgccaagcg

SEQ ID NO: 4017343 - DNA, 25 bp, Homo sapien
cccgggatataagcgtgatggtcac

SEQ ID NO: 4017344 - DNA, 25 bp, Homo sapien
cctttagggaatgagctgagctatc

SEQ ID NO: 4017345 - DNA, 25 bp, Homo sapien
cagattcccaatctgggtgaacaaa

SEQ ID NO: 4017346 - DNA, 25 bp, Homo sapien
ccagattcccaatctgggtgaacaa

SEQ ID NO: 4017347 - DNA, 25 bp, Homo sapien
agattcccaatctgggtgaacaaag

SEQ ID NO: 4017348 - DNA, 25 bp, Homo sapien
tccagattcccaatctgggtgaaca

SEQ ID NO: 4017349 - DNA, 25 bp, Homo sapien
ttggagagcagcagtgagatcccag

SEQ ID NO: 4017350 - DNA, 25 bp, Homo sapien
tggagagcagcagtgagatcccagg

SEQ ID NO: 4017351 - DNA, 25 bp, Homo sapien
ggaccacttctgaaagttgcaccag

SEQ ID NO: 4017352 - DNA, 25 bp, Homo sapien
tgggaccacttctgaaagttgcacc

SEQ ID NO: 4017353 - DNA, 25 bp, Homo sapien
ctgggaccacttctgaaagttgcac

SEQ ID NO: 4017354 - DNA, 25 bp, Homo sapien
accacttctgaaagttgcaccagcc

SEQ ID NO: 4017355 - DNA, 25 bp, Homo sapien
agtcacgaagcatggacgaggctga

SEQ ID NO: 4017356 - DNA, 25 bp, Homo sapien
ctgagtcacgaagcatggacgaggc

SEQ ID NO: 4017357 - DNA, 25 bp, Homo sapien
cacgaagcatggacgaggctgagct

SEQ ID NO: 4017358 - DNA, 25 bp, Homo sapien
tgagtcacgaagcatggacgaggct

SEQ ID NO: 4017359 - DNA, 25 bp, Homo sapien
gccatagccaactcgcccctcaccc

SEQ ID NO: 4017360 - DNA, 25 bp, Homo sapien
gttaaacaggccatagccaactcgc

SEQ ID NO: 4017361 - DNA, 25 bp, Homo sapien
ccatagccaactcgcccctcaccca

SEQ ID NO: 4017362 - DNA, 25 bp, Homo sapien
ggagttaaacaggccatagccaact

SEQ ID NO: 4017363 - DNA, 25 bp, Homo sapien
gaataatatcctcgccaggaccagg

SEQ ID NO: 4017364 - DNA, 25 bp, Homo sapien
tttctagcctaaaacctgagcctgg

SEQ ID NO: 4017365 - DNA, 25 bp, Homo sapien
gacaggcacgcaggttgagattctt

SEQ ID NO: 4017366 - DNA, 25 bp, Homo sapien
gagattcttgaccaaaagcagcctt

SEQ ID NO: 4017367 - DNA, 25 bp, Homo sapien
ggattttgtggatgttcgatgcaga

SEQ ID NO: 4017368 - DNA, 25 bp, Homo sapien
tttctctaaagggtgcctgctcccc

SEQ ID NO: 4017369 - DNA, 25 bp, Homo sapien
gttcgatgcagattatttctctaaa

SEQ ID NO: 4017370 - DNA, 25 bp, Homo sapien
tatttctctaaagggtgcctgctcc

SEQ ID NO: 4017371 - DNA, 25 bp, Homo sapien
tagaatctgcagtcgaacggaagcc

SEQ ID NO: 4017372 - DNA, 25 bp, Homo sapien
actgcagtggtgcaagtgaagccct

SEQ ID NO: 4017373 - DNA, 25 bp, Homo sapien
tgtgtctcccacgactgttgaaagg

SEQ ID NO: 4017374 - DNA, 25 bp, Homo sapien
ttgctacataaaacgagggtcccgc

SEQ ID NO: 4017375 - DNA, 25 bp, Homo sapien
gtgtagcagaagacgagctggtact

SEQ ID NO: 4017376 - DNA, 25 bp, Homo sapien
gtagcagaagacgagctggtactta

SEQ ID NO: 4017377 - DNA, 25 bp, Homo sapien
gatggtgtagcagaagacgagctgg

SEQ ID NO: 4017378 - DNA, 25 bp, Homo sapien
tggtgtagcagaagacgagctggta

SEQ ID NO: 4017379 - DNA, 25 bp, Homo sapien
atgccttttcctaatcctttactat

SEQ ID NO: 4017380 - DNA, 25 bp, Homo sapien
ttttcctaatcctttactatcactg

SEQ ID NO: 4017381 - DNA, 25 bp, Homo sapien
aagagaggacaccttgaaccagacg

SEQ ID NO: 4017382 - DNA, 25 bp, Homo sapien
agagaggacaccttgaaccagacgc

SEQ ID NO: 4017383 - DNA, 25 bp, Homo sapien
tgattgcagcaaaaaagttaaccac

SEQ ID NO: 4017384 - DNA, 25 bp, Homo sapien
ggatttagctggctcatcactatcc

SEQ ID NO: 4017385 - DNA, 25 bp, Homo sapien
ggcaggcaaatcttcaggggattta

SEQ ID NO: 4017386 - DNA, 25 bp, Homo sapien
tgtgattgcagcaaaaaagttaacc

SEQ ID NO: 4017387 - DNA, 25 bp, Homo sapien
tctttcaggtttccgctcaaaagct

SEQ ID NO: 4017388 - DNA, 25 bp, Homo sapien
aggtttccgctcaaaagctgcttgt

SEQ ID NO: 4017389 - DNA, 25 bp, Homo sapien
ttctttcaggtttccgctcaaaagc

SEQ ID NO: 4017390 - DNA, 25 bp, Homo sapien
ttcaggtttccgctcaaaagctgct

SEQ ID NO: 4017391 - DNA, 25 bp, Homo sapien
ccgaatcctggttattaaggtatat

SEQ ID NO: 4017392 - DNA, 25 bp, Homo sapien
ggtatatgtgcagccagttaaccaa

SEQ ID NO: 4017393 - DNA, 25 bp, Homo sapien
gcagccagttaaccaaaagatctag

SEQ ID NO: 4017394 - DNA, 25 bp, Homo sapien
gaatgcctttgttcccgaatcctgg

SEQ ID NO: 4017395 - DNA, 25 bp, Homo sapien
tttagctcttgccaaaaagcttcca

SEQ ID NO: 4017396 - DNA, 25 bp, Homo sapien
ttccaatataatttccagcagcctg

SEQ ID NO: 4017397 - DNA, 25 bp, Homo sapien
tccaatataatttccagcagcctgc

SEQ ID NO: 4017398 - DNA, 25 bp, Homo sapien
tcttgccaaaaagcttccaatataa

SEQ ID NO: 4017399 - DNA, 25 bp, Homo sapien
ctctggacacactgaactcaaccat

SEQ ID NO: 4017400 - DNA, 25 bp, Homo sapien
gtctctggacacactgaactcaacc

SEQ ID NO: 4017401 - DNA, 25 bp, Homo sapien
cttccggtctctggacacactgaac

SEQ ID NO: 4017402 - DNA, 25 bp, Homo sapien
cggtctctggacacactgaactcaa

SEQ ID NO: 4017403 - DNA, 25 bp, Homo sapien
gcgctgttctaaagctaggcacgcc

SEQ ID NO: 4017404 - DNA, 25 bp, Homo sapien
ctgttctaaagctaggcacgcccat

SEQ ID NO: 4017405 - DNA, 25 bp, Homo sapien
aatagcgctgttctaaagctaggca

SEQ ID NO: 4017406 - DNA, 25 bp, Homo sapien
caacttctcctaaatagcgctgttc

SEQ ID NO: 4017407 - DNA, 25 bp, Homo sapien
cgggttagcagtggccttgtgagcg

SEQ ID NO: 4017408 - DNA, 25 bp, Homo sapien
ccttgtgagcgtgaggagctgccgc

SEQ ID NO: 4017409 - DNA, 25 bp, Homo sapien
gttagcagtggccttgtgagcgtga

SEQ ID NO: 4017410 - DNA, 25 bp, Homo sapien
cgggaggcgggttagcagtggcctt

SEQ ID NO: 4017411 - DNA, 25 bp, Homo sapien
cggcgcttggccatgtcgtgtcggg

SEQ ID NO: 4017412 - DNA, 25 bp, Homo sapien
aatgactggcaacccaggtgggtga

SEQ ID NO: 4017413 - DNA, 25 bp, Homo sapien
ggaaggtaatgagccgcagagcccc

SEQ ID NO: 4017414 - DNA, 25 bp, Homo sapien
ggttcgggcggcgactcgcgcttct

SEQ ID NO: 4017415 - DNA, 25 bp, Homo sapien
ctgaccccgagttgggagatcctga

SEQ ID NO: 4017416 - DNA, 25 bp, Homo sapien
tgttgatgggatcgacctactctgg

SEQ ID NO: 4017417 - DNA, 25 bp, Homo sapien
caaggccggttactctggtgaatcg

SEQ ID NO: 4017418 - DNA, 25 bp, Homo sapien
gacacttgagtgaactctgggcacc

SEQ ID NO: 4017419 - DNA, 25 bp, Homo sapien
cctactctggtcttgggcgatggaa

SEQ ID NO: 4017420 - DNA, 25 bp, Homo sapien
aagaatggactgcaaggctacattt

SEQ ID NO: 4017421 - DNA, 25 bp, Homo sapien
tttagtcaggcgataccatccccag

SEQ ID NO: 4017422 - DNA, 25 bp, Homo sapien
tacatttagtcaggcgataccatcc

SEQ ID NO: 4017423 - DNA, 25 bp, Homo sapien
gcaaggctacatttagtcaggcgat

SEQ ID NO: 4017424 - DNA, 25 bp, Homo sapien
taacttggtaagacattgcccgtcc

SEQ ID NO: 4017425 - DNA, 25 bp, Homo sapien
tcatgtgaggagaacactggaccag

SEQ ID NO: 4017426 - DNA, 25 bp, Homo sapien
ttgactgattaaccgtctccatggg

SEQ ID NO: 4017427 - DNA, 25 bp, Homo sapien
cctgggacaggagactttcaatgct

SEQ ID NO: 4017428 - DNA, 25 bp, Homo sapien
tggtgaaaatctttgtgcctgtagc

SEQ ID NO: 4017429 - DNA, 25 bp, Homo sapien
tgtaagtagagcctaatttcccagc

SEQ ID NO: 4017430 - DNA, 25 bp, Homo sapien
cacaagtggaatgaattcaaaggct

SEQ ID NO: 4017431 - DNA, 25 bp, Homo sapien
gctaaacagcgactctaaagtagtt

SEQ ID NO: 4017432 - DNA, 25 bp, Homo sapien
tgctttattttgggtatgtagttta

SEQ ID NO: 4017433 - DNA, 25 bp, Homo sapien
tttacagtttttgatatgctttatt

SEQ ID NO: 4017434 - DNA, 25 bp, Homo sapien
cagtttttgatatgctttattttgg

SEQ ID NO: 4017435 - DNA, 25 bp, Homo sapien
tatgctttattttgggtatgtagtt

SEQ ID NO: 4017436 - DNA, 25 bp, Homo sapien
cccagcctaaaatgatggttttctg

SEQ ID NO: 4017437 - DNA, 25 bp, Homo sapien
cagcctaaaatgatggttttctgat

SEQ ID NO: 4017438 - DNA, 25 bp, Homo sapien
acccagcctaaaatgatggttttct

SEQ ID NO: 4017439 - DNA, 25 bp, Homo sapien
gcctaaaatgatggttttctgattc

SEQ ID NO: 4017440 - DNA, 25 bp, Homo sapien
tagggtgagttcctcattccgctgt

SEQ ID NO: 4017441 - DNA, 25 bp, Homo sapien
taagcttgtaatgaccagcctgcag

SEQ ID NO: 4017442 - DNA, 25 bp, Homo sapien
tgtggatacaccagaattgctttgc

SEQ ID NO: 4017443 - DNA, 25 bp, Homo sapien
tcttttggtggctcgatgttaccct

SEQ ID NO: 4017444 - DNA, 25 bp, Homo sapien
cccacttttattatggacgttctga

SEQ ID NO: 4017445 - DNA, 25 bp, Homo sapien
taattagaaacaaatggcccatctg

SEQ ID NO: 4017446 - DNA, 25 bp, Homo sapien
gacgttctgaagcacataaaaatag

SEQ ID NO: 4017447 - DNA, 25 bp, Homo sapien
catttctgccagaattacacctctc

SEQ ID NO: 4017448 - DNA, 25 bp, Homo sapien
cccctattaccagtatcatacagga

SEQ ID NO: 4017449 - DNA, 25 bp, Homo sapien
tgtattctatggactttaacatgtg

SEQ ID NO: 4017450 - DNA, 25 bp, Homo sapien
tcttttatgttctacccactccttc

SEQ ID NO: 4017451 - DNA, 25 bp, Homo sapien
tgtgtaatgacatgtttcccctatt

SEQ ID NO: 4017452 - DNA, 25 bp, Homo sapien
tgcccagccggagtttggaatattt

SEQ ID NO: 4017453 - DNA, 25 bp, Homo sapien
attttcataacacttactggtgagc

SEQ ID NO: 4017454 - DNA, 25 bp, Homo sapien
tcataacacttactggtgagcatcc

SEQ ID NO: 4017455 - DNA, 25 bp, Homo sapien
ccatgcccagccggagtttggaata

SEQ ID NO: 4017456 - DNA, 25 bp, Homo sapien
ggcactgtaactatggccacaaaga

SEQ ID NO: 4017457 - DNA, 25 bp, Homo sapien
ccaggacacgaggtaacagatatta

SEQ ID NO: 4017458 - DNA, 25 bp, Homo sapien
gatgaaaagataatctatgctttgt

SEQ ID NO: 4017459 - DNA, 25 bp, Homo sapien
ttatctttagtagcctcagttcttc

SEQ ID NO: 4017460 - DNA, 25 bp, Homo sapien
ttaaaactccaagctatcacttcac

SEQ ID NO: 4017461 - DNA, 25 bp, Homo sapien
aattaaaactccaagctatcacttc

SEQ ID NO: 4017462 - DNA, 25 bp, Homo sapien
taaaactccaagctatcacttcaca

SEQ ID NO: 4017463 - DNA, 25 bp, Homo sapien
aaattaaaactccaagctatcactt

SEQ ID NO: 4017464 - DNA, 25 bp, Homo sapien
ccatgttaggtaggctgggttcggt

SEQ ID NO: 4017465 - DNA, 25 bp, Homo sapien
aaacaaaatttgccatgttaggtag

SEQ ID NO: 4017466 - DNA, 25 bp, Homo sapien
acaaaatttgccatgttaggtaggc

SEQ ID NO: 4017467 - DNA, 25 bp, Homo sapien
aaaatttgccatgttaggtaggctg

SEQ ID NO: 4017468 - DNA, 25 bp, Homo sapien
taagtaccttgcagctgtattgctc

SEQ ID NO: 4017469 - DNA, 25 bp, Homo sapien
tggagaccacagtttctaacagact

SEQ ID NO: 4017470 - DNA, 25 bp, Homo sapien
ccgcatcgctattggacctctgaga

SEQ ID NO: 4017471 - DNA, 25 bp, Homo sapien
tacttgaagcaaacatcccgcatcg

SEQ ID NO: 4017472 - DNA, 25 bp, Homo sapien
tgtgcttgcctcttgtgagtagaag

SEQ ID NO: 4017473 - DNA, 25 bp, Homo sapien
tatattgcagtcttggacttaagac

SEQ ID NO: 4017474 - DNA, 25 bp, Homo sapien
caggcattaaggtatactgtgtacc

SEQ ID NO: 4017475 - DNA, 25 bp, Homo sapien
gcaatcaatctgaagtagccaaact

SEQ ID NO: 4017476 - DNA, 25 bp, Homo sapien
gcatgatatttttacggttcaccca

SEQ ID NO: 4017477 - DNA, 25 bp, Homo sapien
cacattgcgctattcagtataaacc

SEQ ID NO: 4017478 - DNA, 25 bp, Homo sapien
gcccctgtcagcagttactgatttg

SEQ ID NO: 4017479 - DNA, 25 bp, Homo sapien
tgtgtgaccaccaatacgatcgaga

SEQ ID NO: 4017480 - DNA, 25 bp, Homo sapien
gagacgcactaaacagtaaagggac

SEQ ID NO: 4017481 - DNA, 25 bp, Homo sapien
tttcatggagcttctagtcaagcga

SEQ ID NO: 4017482 - DNA, 25 bp, Homo sapien
ggtctagtggcgaaggaggcaggta

SEQ ID NO: 4017483 - DNA, 25 bp, Homo sapien
gaaaatgggccctgagcgatcacca

SEQ ID NO: 4017484 - DNA, 25 bp, Homo sapien
tcgaactcctgtctcacgtgtctgt

SEQ ID NO: 4017485 - DNA, 25 bp, Homo sapien
agagacatagagtttcaccagattg

SEQ ID NO: 4017486 - DNA, 25 bp, Homo sapien
agaggcctgacagtgtgatcttggc

SEQ ID NO: 4017487 - DNA, 25 bp, Homo sapien
gaactcctgtctcacgtgtctgtgt

SEQ ID NO: 4017488 - DNA, 25 bp, Homo sapien
cctataaggcagaacgtaagacggt

SEQ ID NO: 4017489 - DNA, 25 bp, Homo sapien
tagggagctatataatagaggctgc

SEQ ID NO: 4017490 - DNA, 25 bp, Homo sapien
taggaagcaaagtctatagggagct

SEQ ID NO: 4017491 - DNA, 25 bp, Homo sapien
gattcatggcagattctaaagcaca

SEQ ID NO: 4017492 - DNA, 25 bp, Homo sapien
caggttggagtgtaggagggcgatc

SEQ ID NO: 4017493 - DNA, 25 bp, Homo sapien
ttggagtgtaggagggcgatctcag

SEQ ID NO: 4017494 - DNA, 25 bp, Homo sapien
tcactgtaacatcaacctcccaggc

SEQ ID NO: 4017495 - DNA, 25 bp, Homo sapien
cactgtaacatcaacctcccaggct

SEQ ID NO: 4017496 - DNA, 25 bp, Homo sapien
tggaattcctgaggtcaagctgtct

SEQ ID NO: 4017497 - DNA, 25 bp, Homo sapien
tctggaattcctgaggtcaagctgt

SEQ ID NO: 4017498 - DNA, 25 bp, Homo sapien
cacctggcctgaaacccagatttta

SEQ ID NO: 4017499 - DNA, 25 bp, Homo sapien
attcctgaggtcaagctgtctgccc

SEQ ID NO: 4017500 - DNA, 25 bp, Homo sapien
gagcttcctttgcactagcatctga

SEQ ID NO: 4017501 - DNA, 25 bp, Homo sapien
tcataaaagtgttgatcctcacacc

SEQ ID NO: 4017502 - DNA, 25 bp, Homo sapien
acctctttatagtcttgcacctagc

SEQ ID NO: 4017503 - DNA, 25 bp, Homo sapien
gaagtattgataagtgctcagctaa

SEQ ID NO: 4017504 - DNA, 25 bp, Homo sapien
gtgcagtagcatgatagttacagga

SEQ ID NO: 4017505 - DNA, 25 bp, Homo sapien
cagggtgatgccacagtgtgaagtg

SEQ ID NO: 4017506 - DNA, 25 bp, Homo sapien
cagtagcatgatagttacaggaaag

SEQ ID NO: 4017507 - DNA, 25 bp, Homo sapien
agtagcatgatagttacaggaaagg

SEQ ID NO: 4017508 - DNA, 25 bp, Homo sapien
ggctccagctgaaagaaagcccgtg

SEQ ID NO: 4017509 - DNA, 25 bp, Homo sapien
agctgaaagaaagcccgtgcagtca

SEQ ID NO: 4017510 - DNA, 25 bp, Homo sapien
cgtgcagtcatatcacgcgtaaaca

SEQ ID NO: 4017511 - DNA, 25 bp, Homo sapien
aaagcccgtgcagtcatatcacgcg

SEQ ID NO: 4017512 - DNA, 25 bp, Homo sapien
ttatttatttaagacagagtttcgc

SEQ ID NO: 4017513 - DNA, 25 bp, Homo sapien
atgctgtgatagtttgtttgtttgt

SEQ ID NO: 4017514 - DNA, 25 bp, Homo sapien
tatttatttaagacagagtttcgct

SEQ ID NO: 4017515 - DNA, 25 bp, Homo sapien
gccaaatgcaacatcaaaatcttca

SEQ ID NO: 4017516 - DNA, 25 bp, Homo sapien
aaatgtagccaaatgcaacatcaaa

SEQ ID NO: 4017517 - DNA, 25 bp, Homo sapien
tgtagccaaatgcaacatcaaaatc

SEQ ID NO: 4017518 - DNA, 25 bp, Homo sapien
tagccaaatgcaacatcaaaatctt

SEQ ID NO: 4017519 - DNA, 25 bp, Homo sapien
aggcgcaagccacggcactcagcta

SEQ ID NO: 4017520 - DNA, 25 bp, Homo sapien
ggacaggcgcaagccacggcactca

SEQ ID NO: 4017521 - DNA, 25 bp, Homo sapien
gaggacaggcgcaagccacggcact

SEQ ID NO: 4017522 - DNA, 25 bp, Homo sapien
tgggaggacaggcgcaagccacggc

SEQ ID NO: 4017523 - DNA, 25 bp, Homo sapien
taaacacacacaaactctcaagtgg

SEQ ID NO: 4017524 - DNA, 25 bp, Homo sapien
aagtggcctaattccctctcaccaa

SEQ ID NO: 4017525 - DNA, 25 bp, Homo sapien
tctcaccaaaccaatcacaatacag

SEQ ID NO: 4017526 - DNA, 25 bp, Homo sapien
gatataaattgtgaatgatgcatga

SEQ ID NO: 4017527 - DNA, 25 bp, Homo sapien
gtagtactcataattaccttgggta

SEQ ID NO: 4017528 - DNA, 25 bp, Homo sapien
agtgataccacagcttccgtgaagt

SEQ ID NO: 4017529 - DNA, 25 bp, Homo sapien
gcccagccgcaagtacttttacaca

SEQ ID NO: 4017530 - DNA, 25 bp, Homo sapien
gaaatttctgtactatggtcccagt

SEQ ID NO: 4017531 - DNA, 25 bp, Homo sapien
aacttcttgagatggttacataatg

SEQ ID NO: 4017532 - DNA, 25 bp, Homo sapien
catgtttatcttaacgtataacgat

SEQ ID NO: 4017533 - DNA, 25 bp, Homo sapien
tacaagcgtgaagcattacatccaa

SEQ ID NO: 4017534 - DNA, 25 bp, Homo sapien
taatgtctaaatctgctggtgtaga

SEQ ID NO: 4017535 - DNA, 25 bp, Homo sapien
gatgaaacttcccagttcacaagga

SEQ ID NO: 4017536 - DNA, 25 bp, Homo sapien
agcatcatatcagggccagcagact

SEQ ID NO: 4017537 - DNA, 25 bp, Homo sapien
tttaagacagtaatcagaatcatga

SEQ ID NO: 4017538 - DNA, 25 bp, Homo sapien
caaggaaatttacttatgtgcagca

SEQ ID NO: 4017539 - DNA, 25 bp, Homo sapien
ggtgcccagccattcgtgacatgtt

SEQ ID NO: 4017540 - DNA, 25 bp, Homo sapien
tgaattgaatcgacacaggaagagt

SEQ ID NO: 4017541 - DNA, 25 bp, Homo sapien
cattctttagactccccaagggatg

SEQ ID NO: 4017542 - DNA, 25 bp, Homo sapien
tgcagtatcgccacatttgacaatg

SEQ ID NO: 4017543 - DNA, 25 bp, Homo sapien
tttctaaaacatgcggacatatggg

SEQ ID NO: 4017544 - DNA, 25 bp, Homo sapien
tcagacacagttagaggtttccaag

SEQ ID NO: 4017545 - DNA, 25 bp, Homo sapien
gctctgggaggacatagtattcatt

SEQ ID NO: 4017546 - DNA, 25 bp, Homo sapien
tgagttacataagagaggagtcctg

SEQ ID NO: 4017547 - DNA, 25 bp, Homo sapien
gttcctgtcccatgaccagggccag

SEQ ID NO: 4017548 - DNA, 25 bp, Homo sapien
aaatggtgaagctctctattgtcct

SEQ ID NO: 4017549 - DNA, 25 bp, Homo sapien
gaagctctctattgtcctgacccca

SEQ ID NO: 4017550 - DNA, 25 bp, Homo sapien
ctaataggttggcactcatcatgag

SEQ ID NO: 4017551 - DNA, 25 bp, Homo sapien
tattatcttgccaagtttaggctgg

SEQ ID NO: 4017552 - DNA, 25 bp, Homo sapien
tcattgctggcatggtaacctaaag

SEQ ID NO: 4017553 - DNA, 25 bp, Homo sapien
gaaaaccactatcttctgtcagaaa

SEQ ID NO: 4017554 - DNA, 25 bp, Homo sapien
ttctttccatacaagtggcttaggg

SEQ ID NO: 4017555 - DNA, 25 bp, Homo sapien
gcaacctgagatggtatagccacct

SEQ ID NO: 4017556 - DNA, 25 bp, Homo sapien
caccagttcgtgttctgacggcagg

SEQ ID NO: 4017557 - DNA, 25 bp, Homo sapien
caggccctgggttcaatgctctaca

SEQ ID NO: 4017558 - DNA, 25 bp, Homo sapien
tgcattatgaagctacctggctaac

SEQ ID NO: 4017559 - DNA, 25 bp, Homo sapien
tccactttcaagtggcccaggagag

SEQ ID NO: 4017560 - DNA, 25 bp, Homo sapien
tcccatgggtacatccactttcaag

SEQ ID NO: 4017561 - DNA, 25 bp, Homo sapien
gacaggaggactaagtcaccgcaga

SEQ ID NO: 4017562 - DNA, 25 bp, Homo sapien
caggagagaacctgaaatactcggt

SEQ ID NO: 4017563 - DNA, 25 bp, Homo sapien
ggtacacgggtgctcaacagattgc

SEQ ID NO: 4017564 - DNA, 25 bp, Homo sapien
tctggaacgaaggatgcccttggga

SEQ ID NO: 4017565 - DNA, 25 bp, Homo sapien
tgggctgcacgaataacctccattg

SEQ ID NO: 4017566 - DNA, 25 bp, Homo sapien
tgaccaagggccttccaaggtgcca

SEQ ID NO: 4017567 - DNA, 25 bp, Homo sapien
taagatgatatagataaggacgtca

SEQ ID NO: 4017568 - DNA, 25 bp, Homo sapien
cacacacacaggcagtaagatgata

SEQ ID NO: 4017569 - DNA, 25 bp, Homo sapien
tcagtcatgaaagtcaacttggttt

SEQ ID NO: 4017570 - DNA, 25 bp, Homo sapien
cactcggtttcggatgttaaaatgt

SEQ ID NO: 4017571 - DNA, 25 bp, Homo sapien
actgtccattgtgaggcaccaccgg

SEQ ID NO: 4017572 - DNA, 25 bp, Homo sapien
aatcaggtttgtgaaggttccagag

SEQ ID NO: 4017573 - DNA, 25 bp, Homo sapien
tcattggaatgatgcgggcgctact

SEQ ID NO: 4017574 - DNA, 25 bp, Homo sapien
ttggcattgtccattgtgaggcact

SEQ ID NO: 4017575 - DNA, 25 bp, Homo sapien
tagctcagattacaacgcctggcta

SEQ ID NO: 4017576 - DNA, 25 bp, Homo sapien
caaccccctttcaagatctacatta

SEQ ID NO: 4017577 - DNA, 25 bp, Homo sapien
taactttggaaagtacatacaccag

SEQ ID NO: 4017578 - DNA, 25 bp, Homo sapien
tttggaaagtacatacaccagcata

SEQ ID NO: 4017579 - DNA, 25 bp, Homo sapien
tactaactttggaaagtacatacac

SEQ ID NO: 4017580 - DNA, 25 bp, Homo sapien
gtcttacccatgagtgacgggctgc

SEQ ID NO: 4017581 - DNA, 25 bp, Homo sapien
cccaggacagttttgaatgcagttc

SEQ ID NO: 4017582 - DNA, 25 bp, Homo sapien
taagataattactttatacttagct

SEQ ID NO: 4017583 - DNA, 25 bp, Homo sapien
tatacttagcttgtcttacccatga

SEQ ID NO: 4017584 - DNA, 25 bp, Homo sapien
atgggaaccagctgaaaaatgagac

SEQ ID NO: 4017585 - DNA, 25 bp, Homo sapien
aatgagactgctagaagggccggat

SEQ ID NO: 4017586 - DNA, 25 bp, Homo sapien
cggatggctgatgcttaaagagcac

SEQ ID NO: 4017587 - DNA, 25 bp, Homo sapien
gccggatggctgatgcttaaagagc

SEQ ID NO: 4017588 - DNA, 25 bp, Homo sapien
tatgccacttagtcctgaacagaga

SEQ ID NO: 4017589 - DNA, 25 bp, Homo sapien
gataattacacgtcatttggcactg

SEQ ID NO: 4017590 - DNA, 25 bp, Homo sapien
ttttctcaccccgaagacgagtctc

SEQ ID NO: 4017591 - DNA, 25 bp, Homo sapien
ttggcactgcctttcaagatatgta

SEQ ID NO: 4017592 - DNA, 25 bp, Homo sapien
catctaaccgtgttgaagtgtacag

SEQ ID NO: 4017593 - DNA, 25 bp, Homo sapien
taattaccatctaaccgtgttgaag

SEQ ID NO: 4017594 - DNA, 25 bp, Homo sapien
gatgataattaccatctaaccgtgt

SEQ ID NO: 4017595 - DNA, 25 bp, Homo sapien
taccatctaaccgtgttgaagtgta

SEQ ID NO: 4017596 - DNA, 25 bp, Homo sapien
cacaagcttttcctgctgggttcaa

SEQ ID NO: 4017597 - DNA, 25 bp, Homo sapien
caccgtgccagcctcatgtcattct

SEQ ID NO: 4017598 - DNA, 25 bp, Homo sapien
cccagcttcaaacggttctctgcct

SEQ ID NO: 4017599 - DNA, 25 bp, Homo sapien
cgtgccagcctcatgtcattcttgt

SEQ ID NO: 4017600 - DNA, 25 bp, Homo sapien
ggtgacaacgaaaatcaaccatcat

SEQ ID NO: 4017601 - DNA, 25 bp, Homo sapien
gctaaaatccgtaagaggaaggtga

SEQ ID NO: 4017602 - DNA, 25 bp, Homo sapien
taagaggaaggtgacaacgaaaatc

SEQ ID NO: 4017603 - DNA, 25 bp, Homo sapien
accatcatgacaaaatcaatggaaa

SEQ ID NO: 4017604 - DNA, 25 bp, Homo sapien
tgacatgatccgcacacctcggcct

SEQ ID NO: 4017605 - DNA, 25 bp, Homo sapien
tcctgacatgatccgcacacctcgg

SEQ ID NO: 4017606 - DNA, 25 bp, Homo sapien
aactcctgacatgatccgcacacct

SEQ ID NO: 4017607 - DNA, 25 bp, Homo sapien
actcctgacatgatccgcacacctc

SEQ ID NO: 4017608 - DNA, 25 bp, Homo sapien
ggttccaaatgcgaggctgactttc

SEQ ID NO: 4017609 - DNA, 25 bp, Homo sapien
tcttcacctcatgtctgtttactgc

SEQ ID NO: 4017610 - DNA, 25 bp, Homo sapien
tactgccatgttagcaatttgatgt

SEQ ID NO: 4017611 - DNA, 25 bp, Homo sapien
gaccctcaatccacttgttttccat

SEQ ID NO: 4017612 - DNA, 25 bp, Homo sapien
accacacactccttgtttgaggcca

SEQ ID NO: 4017613 - DNA, 25 bp, Homo sapien
gcttctttagcgtggggacaggacc

SEQ ID NO: 4017614 - DNA, 25 bp, Homo sapien
gacaggaccctgctcccattgcatt

SEQ ID NO: 4017615 - DNA, 25 bp, Homo sapien
tccagacagcatgtgctgaaggatg

SEQ ID NO: 4017616 - DNA, 25 bp, Homo sapien
tcaattctcccttcggttgtgagaa

SEQ ID NO: 4017617 - DNA, 25 bp, Homo sapien
tgtcaattctcccttcggttgtgag

SEQ ID NO: 4017618 - DNA, 25 bp, Homo sapien
ggtgtcaattctcccttcggttgtg

SEQ ID NO: 4017619 - DNA, 25 bp, Homo sapien
caattctcccttcggttgtgagaat

SEQ ID NO: 4017620 - DNA, 25 bp, Homo sapien
aaactaagcgtgaaagaatgtgagc

SEQ ID NO: 4017621 - DNA, 25 bp, Homo sapien
gtgagcatgcagaaaaggagaggca

SEQ ID NO: 4017622 - DNA, 25 bp, Homo sapien
ggaaactaagcgtgaaagaatgtga

SEQ ID NO: 4017623 - DNA, 25 bp, Homo sapien
gaaactaagcgtgaaagaatgtgag

SEQ ID NO: 4017624 - DNA, 25 bp, Homo sapien
tacagctttatgataaaagatgctc

SEQ ID NO: 4017625 - DNA, 25 bp, Homo sapien
aatacagcaacagtttggatcagac

SEQ ID NO: 4017626 - DNA, 25 bp, Homo sapien
gagaatacagctttatgataaaaga

SEQ ID NO: 4017627 - DNA, 25 bp, Homo sapien
caatacagcaacagtttggatcaga

SEQ ID NO: 4017628 - DNA, 25 bp, Homo sapien
gcggcgagcagaggactaccacaaa

SEQ ID NO: 4017629 - DNA, 25 bp, Homo sapien
gagcagaggactaccacaaatgcaa

SEQ ID NO: 4017630 - DNA, 25 bp, Homo sapien
ggcgagcagaggactaccacaaatg

SEQ ID NO: 4017631 - DNA, 25 bp, Homo sapien
cgagcagaggactaccacaaatgca

SEQ ID NO: 4017632 - DNA, 25 bp, Homo sapien
tcagcggatgataatctcaagacac

SEQ ID NO: 4017633 - DNA, 25 bp, Homo sapien
cttccgagcgtcagctcactcccct

SEQ ID NO: 4017634 - DNA, 25 bp, Homo sapien
ttccgagcgtcagctcactcccctt

SEQ ID NO: 4017635 - DNA, 25 bp, Homo sapien
ctcagcggatgataatctcaagaca

SEQ ID NO: 4017636 - DNA, 25 bp, Homo sapien
cctcagcggatgataatctcaagac

SEQ ID NO: 4017637 - DNA, 25 bp, Homo sapien
ctcagcggatgataatctcaagaca

SEQ ID NO: 4017638 - DNA, 25 bp, Homo sapien
cctcagcggatgataatctcaagac

SEQ ID NO: 4017639 - DNA, 25 bp, Homo sapien
tgctgagcgtctgcggattccgctt

SEQ ID NO: 4017640 - DNA, 25 bp, Homo sapien
ctgctgagcgtctgcggattccgct

SEQ ID NO: 4017641 - DNA, 25 bp, Homo sapien
gcgtctgcggattccgcttccacca

SEQ ID NO: 4017642 - DNA, 25 bp, Homo sapien
agcgtctgcggattccgcttccacc

SEQ ID NO: 4017643 - DNA, 25 bp, Homo sapien
cttccgagcgtcagctcactcccct

SEQ ID NO: 4017644 - DNA, 25 bp, Homo sapien
ttccgagcgtcagctcactcccctt

SEQ ID NO: 4017645 - DNA, 25 bp, Homo sapien
cttccgagcgtcagctcactcccct

SEQ ID NO: 4017646 - DNA, 25 bp, Homo sapien
ttccgagcgtcagctcactcccctt

SEQ ID NO: 4017647 - DNA, 25 bp, Homo sapien
cttccgagcgtcagctcactcccct

SEQ ID NO: 4017648 - DNA, 25 bp, Homo sapien
ttccgagcgtcagctcactcccctt

SEQ ID NO: 4017649 - DNA, 25 bp, Homo sapien
aaaaccacgcaaacccaagaggcag

SEQ ID NO: 4017650 - DNA, 25 bp, Homo sapien
gaaccatcatcacccgaacccaaga

SEQ ID NO: 4017651 - DNA, 25 bp, Homo sapien
tgagatggaaccacctcccgaaccc

SEQ ID NO: 4017652 - DNA, 25 bp, Homo sapien
gaggcggagggtcggtgatgtggaa

SEQ ID NO: 4017653 - DNA, 25 bp, Homo sapien
tgacgtggaaccgtcacgcaaaccc

SEQ ID NO: 4017654 - DNA, 25 bp, Homo sapien
gtggaaccgtcacgcaaacccaaga

SEQ ID NO: 4017655 - DNA, 25 bp, Homo sapien
gtcggtgacgtggaaccgtcacgca

SEQ ID NO: 4017656 - DNA, 25 bp, Homo sapien
ccgtcacgcaaacccaagaggcgga

SEQ ID NO: 4017657 - DNA, 25 bp, Homo sapien
tgattgacgcactgccaggagtagc

SEQ ID NO: 4017658 - DNA, 25 bp, Homo sapien
aggacgctctgattgacgcactgcc

SEQ ID NO: 4017659 - DNA, 25 bp, Homo sapien
tctgattgacgcactgccaggagta

SEQ ID NO: 4017660 - DNA, 25 bp, Homo sapien
cgctctgattgacgcactgccagga

SEQ ID NO: 4017661 - DNA, 25 bp, Homo sapien
tcctgccccagttgagtcttgagat

SEQ ID NO: 4017662 - DNA, 25 bp, Homo sapien
agttcatgggaaacgaatcctgcca

SEQ ID NO: 4017663 - DNA, 25 bp, Homo sapien
cacctagatagcaacccatgggaga

SEQ ID NO: 4017664 - DNA, 25 bp, Homo sapien
gagtgctgcatgtccctaagagagg

SEQ ID NO: 4017665 - DNA, 25 bp, Homo sapien
tttaataagtgggtctttgctgccc

SEQ ID NO: 4017666 - DNA, 25 bp, Homo sapien
cccggccgaggattgttaaacatca

SEQ ID NO: 4017667 - DNA, 25 bp, Homo sapien
ccggccgaggattgttaaacatcat

SEQ ID NO: 4017668 - DNA, 25 bp, Homo sapien
taaacatcatttaataagtgggtct

SEQ ID NO: 4017669 - DNA, 25 bp, Homo sapien
gttatgagttcttaggatgcaaagt

SEQ ID NO: 4017670 - DNA, 25 bp, Homo sapien
ccgttgtggttatgagttcttagga

SEQ ID NO: 4017671 - DNA, 25 bp, Homo sapien
tgtggttatgagttcttaggatgca

SEQ ID NO: 4017672 - DNA, 25 bp, Homo sapien
cttgccgttgtggttatgagttctt

SEQ ID NO: 4017673 - DNA, 25 bp, Homo sapien
gacataggtgagctacagatggaaa

SEQ ID NO: 4017674 - DNA, 25 bp, Homo sapien
tcttcagagagattgtgatgtgctg

SEQ ID NO: 4017675 - DNA, 25 bp, Homo sapien
caatttatacattcagtccttcaca

SEQ ID NO: 4017676 - DNA, 25 bp, Homo sapien
tcttttacctaaatgtgacagcaaa

SEQ ID NO: 4017677 - DNA, 25 bp, Homo sapien
caacctatggacatgtgcttggcat

SEQ ID NO: 4017678 - DNA, 25 bp, Homo sapien
tcaacctatggacatgtgcttggca

SEQ ID NO: 4017679 - DNA, 25 bp, Homo sapien
tggcctcttcccttgtatcagggaa

SEQ ID NO: 4017680 - DNA, 25 bp, Homo sapien
gcttgccgatagtcaactccaggtg

SEQ ID NO: 4017681 - DNA, 25 bp, Homo sapien
ttcccttgtatcagggaatggactg

SEQ ID NO: 4017682 - DNA, 25 bp, Homo sapien
gactgagagcctgcttgccgatagt

SEQ ID NO: 4017683 - DNA, 25 bp, Homo sapien
gaatgtctaacgcatgtgtggccat

SEQ ID NO: 4017684 - DNA, 25 bp, Homo sapien
ggcattgacaaacgccaattgaatt

SEQ ID NO: 4017685 - DNA, 25 bp, Homo sapien
cgccaattgaattagctgaacgtga

SEQ ID NO: 4017686 - DNA, 25 bp, Homo sapien
tagctgaacgtgaatgtctaacgca

SEQ ID NO: 4017687 - DNA, 25 bp, Homo sapien
gggcgaaccttcagtgtgggtgggc

SEQ ID NO: 4017688 - DNA, 25 bp, Homo sapien
catagattttgtgggagcttcctct

SEQ ID NO: 4017689 - DNA, 25 bp, Homo sapien
tgtctgtggcatggggcgaaccttc

SEQ ID NO: 4017690 - DNA, 25 bp, Homo sapien
gtatcctcaatgtacagtagtgtct

SEQ ID NO: 4017691 - DNA, 25 bp, Homo sapien
agacatattggcatttggccggctg

SEQ ID NO: 4017692 - DNA, 25 bp, Homo sapien
catttggccggctgtgggtaattga

SEQ ID NO: 4017693 - DNA, 25 bp, Homo sapien
gcatttggccggctgtgggtaattg

SEQ ID NO: 4017694 - DNA, 25 bp, Homo sapien
catattggcatttggccggctgtgg

SEQ ID NO: 4017695 - DNA, 25 bp, Homo sapien
gctacttcttaacacctccattgcc

SEQ ID NO: 4017696 - DNA, 25 bp, Homo sapien
agcattgtatacacattaccttttc

SEQ ID NO: 4017697 - DNA, 25 bp, Homo sapien
ccttcttaacgcctcactcttgtct

SEQ ID NO: 4017698 - DNA, 25 bp, Homo sapien
taacacctccattgccttcttaacg

SEQ ID NO: 4017699 - DNA, 25 bp, Homo sapien
ttcgagcctgttcaatgtcgttcag

SEQ ID NO: 4017700 - DNA, 25 bp, Homo sapien
ttcaatgtcgttcagacccagatgt

SEQ ID NO: 4017701 - DNA, 25 bp, Homo sapien
cacctggttccttttcgagcctgtt

SEQ ID NO: 4017702 - DNA, 25 bp, Homo sapien
agatgtgtgagccattctctggtac

SEQ ID NO: 4017703 - DNA, 25 bp, Homo sapien
aatgccactttgagatggcagctgc

SEQ ID NO: 4017704 - DNA, 25 bp, Homo sapien
ccccaaacagggtgtacacgacaag

SEQ ID NO: 4017705 - DNA, 25 bp, Homo sapien
tgaatgccactttgagatggcagct

SEQ ID NO: 4017706 - DNA, 25 bp, Homo sapien
gggtgtacacgacaagcttttctcc

SEQ ID NO: 4017707 - DNA, 25 bp, Homo sapien
tcctgattttgtcctgggaactgca

SEQ ID NO: 4017708 - DNA, 25 bp, Homo sapien
agtcctctgtaatcaatgccagatg

SEQ ID NO: 4017709 - DNA, 25 bp, Homo sapien
atcaatgccagatgacagccattcc

SEQ ID NO: 4017710 - DNA, 25 bp, Homo sapien
ttcttccctgtccatgatcccagat

SEQ ID NO: 4017711 - DNA, 25 bp, Homo sapien
cttgaagatatggaagggggagctg

SEQ ID NO: 4017712 - DNA, 25 bp, Homo sapien
aggatggcatagcagcatgagagct

SEQ ID NO: 4017713 - DNA, 25 bp, Homo sapien
ggagctgaccaggtgcacttgaaag

SEQ ID NO: 4017714 - DNA, 25 bp, Homo sapien
cacttgaaaggatggcatagcagca

SEQ ID NO: 4017715 - DNA, 25 bp, Homo sapien
tggccatccgactcttggtggagag

SEQ ID NO: 4017716 - DNA, 25 bp, Homo sapien
gaaactcctggccatccgactcttg

SEQ ID NO: 4017717 - DNA, 25 bp, Homo sapien
tcctggccatccgactcttggtgga

SEQ ID NO: 4017718 - DNA, 25 bp, Homo sapien
agcaagaaactcctggccatccgac

SEQ ID NO: 4017719 - DNA, 25 bp, Homo sapien
gtttatgtgctagtaaaagccggca

SEQ ID NO: 4017720 - DNA, 25 bp, Homo sapien
tgtgtggttgaacgcaggctcagcc

SEQ ID NO: 4017721 - DNA, 25 bp, Homo sapien
taatttgcgctacattaagggaccc

SEQ ID NO: 4017722 - DNA, 25 bp, Homo sapien
caaaggttccgctcagtttatgtgc

SEQ ID NO: 4017723 - DNA, 25 bp, Homo sapien
agtacccgtacaccttactcactgg

SEQ ID NO: 4017724 - DNA, 25 bp, Homo sapien
tgagttccttaaagcatctagatcc

SEQ ID NO: 4017725 - DNA, 25 bp, Homo sapien
tctagatcccttttgcccaaggcct

SEQ ID NO: 4017726 - DNA, 25 bp, Homo sapien
tactcactgggcaccctgtacttct

SEQ ID NO: 4017727 - DNA, 25 bp, Homo sapien
tattgtcttcatttagatccagagt

SEQ ID NO: 4017728 - DNA, 25 bp, Homo sapien
gaagccaacatgatattgctccctg

SEQ ID NO: 4017729 - DNA, 25 bp, Homo sapien
tgtggatcttatttgcctaagcaaa

SEQ ID NO: 4017730 - DNA, 25 bp, Homo sapien
ttgctccctgaatacttgttggcgt

SEQ ID NO: 4017731 - DNA, 25 bp, Homo sapien
agacaggattttactgtgttgagca

SEQ ID NO: 4017732 - DNA, 25 bp, Homo sapien
gagtagccggcattacagggacatg

SEQ ID NO: 4017733 - DNA, 25 bp, Homo sapien
gattttactgtgttgagcaggctag

SEQ ID NO: 4017734 - DNA, 25 bp, Homo sapien
tttactgtgttgagcaggctagtct

SEQ ID NO: 4017735 - DNA, 25 bp, Homo sapien
tctggggctgaaaagtaatagatca

SEQ ID NO: 4017736 - DNA, 25 bp, Homo sapien
ctgaaaagtaatagatcaggcacac

SEQ ID NO: 4017737 - DNA, 25 bp, Homo sapien
tttctggggctgaaaagtaatagat

SEQ ID NO: 4017738 - DNA, 25 bp, Homo sapien
gggctgaaaagtaatagatcaggca

SEQ ID NO: 4017739 - DNA, 25 bp, Homo sapien
gaaatactgaagaggacatccgcca

SEQ ID NO: 4017740 - DNA, 25 bp, Homo sapien
aaatactgaagaggacatccgccat

SEQ ID NO: 4017741 - DNA, 25 bp, Homo sapien
tcttaatgagagtccgcttacctcc

SEQ ID NO: 4017742 - DNA, 25 bp, Homo sapien
aatgagagtccgcttacctccaaat

SEQ ID NO: 4017743 - DNA, 25 bp, Homo sapien
tgacttcttaatgagagtccgctta

SEQ ID NO: 4017744 - DNA, 25 bp, Homo sapien
gagtccgcttacctccaaatttgga

SEQ ID NO: 4017745 - DNA, 25 bp, Homo sapien
ccatagatgtgcgtagaatcatcca

SEQ ID NO: 4017746 - DNA, 25 bp, Homo sapien
tagaatcatccagatctacagagaa

SEQ ID NO: 4017747 - DNA, 25 bp, Homo sapien
caaacccatagatgtgcgtagaatc

SEQ ID NO: 4017748 - DNA, 25 bp, Homo sapien
tgtgcgtagaatcatccagatctac

SEQ ID NO: 4017749 - DNA, 25 bp, Homo sapien
tgtcactttgggctttagttggggc

SEQ ID NO: 4017750 - DNA, 25 bp, Homo sapien
ccggactggactcagctcagatgct

SEQ ID NO: 4017751 - DNA, 25 bp, Homo sapien
gaaacatgaattctgttgccggact

SEQ ID NO: 4017752 - DNA, 25 bp, Homo sapien
ttctgttgccggactggactcagct

SEQ ID NO: 4017753 - DNA, 25 bp, Homo sapien
gcagagataggactgagaaatccca

SEQ ID NO: 4017754 - DNA, 25 bp, Homo sapien
taggactgagaaatcccagtagaaa

SEQ ID NO: 4017755 - DNA, 25 bp, Homo sapien
gccttctttaggaccaaggattcac

SEQ ID NO: 4017756 - DNA, 25 bp, Homo sapien
agccttctttaggaccaaggattca

SEQ ID NO: 4017757 - DNA, 25 bp, Homo sapien
caggttgacaagtctttagctccag

SEQ ID NO: 4017758 - DNA, 25 bp, Homo sapien
tgacaagtctttagctccaggaata

SEQ ID NO: 4017759 - DNA, 25 bp, Homo sapien
gctccaggaatagatcttctatttg

SEQ ID NO: 4017760 - DNA, 25 bp, Homo sapien
tagctccaggaatagatcttctatt

SEQ ID NO: 4017761 - DNA, 25 bp, Homo sapien
ctttaggcaaaactggatccaggga

SEQ ID NO: 4017762 - DNA, 25 bp, Homo sapien
tgagggcctattgttagccagactg

SEQ ID NO: 4017763 - DNA, 25 bp, Homo sapien
tatatcagtcgaaatggcttaagcc

SEQ ID NO: 4017764 - DNA, 25 bp, Homo sapien
gatttgaaccgaggcagtctgcttc

SEQ ID NO: 4017765 - DNA, 25 bp, Homo sapien
tattgtgcaagtgaacaggcttagt

SEQ ID NO: 4017766 - DNA, 25 bp, Homo sapien
gtacaaaacaataaagatatctccc

SEQ ID NO: 4017767 - DNA, 25 bp, Homo sapien
caggcttagtatcatctttgccatt

SEQ ID NO: 4017768 - DNA, 25 bp, Homo sapien
gagagggtgcattactaggtcagcc

SEQ ID NO: 4017769 - DNA, 25 bp, Homo sapien
tgtgaacactcggacatggtgaatt

SEQ ID NO: 4017770 - DNA, 25 bp, Homo sapien
gcattgctgttgaaggacaactcag

SEQ ID NO: 4017771 - DNA, 25 bp, Homo sapien
cttgtgaacactcggacatggtgaa

SEQ ID NO: 4017772 - DNA, 25 bp, Homo sapien
gttgaaggacaactcagccgtgttc

SEQ ID NO: 4017773 - DNA, 25 bp, Homo sapien
cacaggagataagatgcgatggtgg

SEQ ID NO: 4017774 - DNA, 25 bp, Homo sapien
caggagataagatgcgatggtgggc

SEQ ID NO: 4017775 - DNA, 25 bp, Homo sapien
aagatgcgatggtgggcatgtcctt

SEQ ID NO: 4017776 - DNA, 25 bp, Homo sapien
gataagatgcgatggtgggcatgtc

SEQ ID NO: 4017777 - DNA, 25 bp, Homo sapien
catagattgtcacgtatctgtagac

SEQ ID NO: 4017778 - DNA, 25 bp, Homo sapien
tggtggaaagtcagcagtattctcc

SEQ ID NO: 4017779 - DNA, 25 bp, Homo sapien
tccacaattaccacatctacataga

SEQ ID NO: 4017780 - DNA, 25 bp, Homo sapien
gacgtcagtgtcacaaaagtcagag

SEQ ID NO: 4017781 - DNA, 25 bp, Homo sapien
ttcctttttcaccagtccaggccat

SEQ ID NO: 4017782 - DNA, 25 bp, Homo sapien
cttcctttttcaccagtccaggcca

SEQ ID NO: 4017783 - DNA, 25 bp, Homo sapien
ctgaaggtgccacggaagtcagctt

SEQ ID NO: 4017784 - DNA, 25 bp, Homo sapien
tgccacggaagtcagcttccctctt

SEQ ID NO: 4017785 - DNA, 25 bp, Homo sapien
ggtgccacggaagtcagcttccctc

SEQ ID NO: 4017786 - DNA, 25 bp, Homo sapien
gaaggtgccacggaagtcagcttcc

SEQ ID NO: 4017787 - DNA, 25 bp, Homo sapien
gccttgagctgggggtttttgcaag

SEQ ID NO: 4017788 - DNA, 25 bp, Homo sapien
ccttgagctgggggtttttgcaagt

SEQ ID NO: 4017789 - DNA, 25 bp, Homo sapien
cagggtgtgattatacccacatcgg

SEQ ID NO: 4017790 - DNA, 25 bp, Homo sapien
tacccacatcggcttctgtttcaga

SEQ ID NO: 4017791 - DNA, 25 bp, Homo sapien
tatgatcgcgcaaacacagggtgtg

SEQ ID NO: 4017792 - DNA, 25 bp, Homo sapien
tctggtaggctggagcccaattatg

SEQ ID NO: 4017793 - DNA, 25 bp, Homo sapien
agacagaacctgtacttgctggaga

SEQ ID NO: 4017794 - DNA, 25 bp, Homo sapien
cagagttgaacccagttggctactg

SEQ ID NO: 4017795 - DNA, 25 bp, Homo sapien
ggcatagacagaacctgtacttgct

SEQ ID NO: 4017796 - DNA, 25 bp, Homo sapien
gcatctgaaccagagttgaacccag

SEQ ID NO: 4017797 - DNA, 25 bp, Homo sapien
ggactcagccaggttgccagtccgg

SEQ ID NO: 4017798 - DNA, 25 bp, Homo sapien
cagccaggttgccagtccgggacat

SEQ ID NO: 4017799 - DNA, 25 bp, Homo sapien
ctgggactcagccaggttgccagtc

SEQ ID NO: 4017800 - DNA, 25 bp, Homo sapien
actcagccaggttgccagtccggga

SEQ ID NO: 4017801 - DNA, 25 bp, Homo sapien
tgtcccgagacaccaagctgatcgt

SEQ ID NO: 4017802 - DNA, 25 bp, Homo sapien
tcctgggcattaagagattcatcac

SEQ ID NO: 4017803 - DNA, 25 bp, Homo sapien
gattcatcacggacaagcacttcta

SEQ ID NO: 4017804 - DNA, 25 bp, Homo sapien
aaaggaaagggctctcaagggctct

SEQ ID NO: 4017805 - DNA, 25 bp, Homo sapien
tcaaagaagtctggagtcggacagt

SEQ ID NO: 4017806 - DNA, 25 bp, Homo sapien
cagctttcccatagattcaaggtgg

SEQ ID NO: 4017807 - DNA, 25 bp, Homo sapien
gactttcctggtgaaaatcgggaca

SEQ ID NO: 4017808 - DNA, 25 bp, Homo sapien
cagtccagggaatacgctcagcttt

SEQ ID NO: 4017809 - DNA, 25 bp, Homo sapien
cagcacctgccaatttccctggtgt

SEQ ID NO: 4017810 - DNA, 25 bp, Homo sapien
cagctaataaaatggctctctgagg

SEQ ID NO: 4017811 - DNA, 25 bp, Homo sapien
gcttccctgacaaccgagaattgca

SEQ ID NO: 4017812 - DNA, 25 bp, Homo sapien
gctgtgtcttagcttaccaacattt

SEQ ID NO: 4017813 - DNA, 25 bp, Homo sapien
atccatagcgagacagcagttgccc

SEQ ID NO: 4017814 - DNA, 25 bp, Homo sapien
ctactctgcaacagaatccatagcg

SEQ ID NO: 4017815 - DNA, 25 bp, Homo sapien
tctgcaacagaatccatagcgagac

SEQ ID NO: 4017816 - DNA, 25 bp, Homo sapien
caacagaatccatagcgagacagca

SEQ ID NO: 4017817 - DNA, 25 bp, Homo sapien
gattctgcagatgaaatatccccag

SEQ ID NO: 4017818 - DNA, 25 bp, Homo sapien
gatgcccatgatttggcaaggccca

SEQ ID NO: 4017819 - DNA, 25 bp, Homo sapien
tgagtctatctaggcttagcgggaa

SEQ ID NO: 4017820 - DNA, 25 bp, Homo sapien
catggcttaggatcggcagcaaact

SEQ ID NO: 4017821 - DNA, 25 bp, Homo sapien
gaggctcacgtccattttcccatca

SEQ ID NO: 4017822 - DNA, 25 bp, Homo sapien
ggagagaggctcacgtccattttcc

SEQ ID NO: 4017823 - DNA, 25 bp, Homo sapien
gagagaggctcacgtccattttccc

SEQ ID NO: 4017824 - DNA, 25 bp, Homo sapien
agagaggctcacgtccattttccca

SEQ ID NO: 4017825 - DNA, 25 bp, Homo sapien
gttcttttctttgagggcacattca

SEQ ID NO: 4017826 - DNA, 25 bp, Homo sapien
tcttttctttgagggcacattcatt

SEQ ID NO: 4017827 - DNA, 25 bp, Homo sapien
tttctttgagggcacattcattcat

SEQ ID NO: 4017828 - DNA, 25 bp, Homo sapien
ttttctttgagggcacattcattca

SEQ ID NO: 4017829 - DNA, 25 bp, Homo sapien
acacaggtatgacaattttggacac

SEQ ID NO: 4017830 - DNA, 25 bp, Homo sapien
gaggacctgtccaacaagaggctcc

SEQ ID NO: 4017831 - DNA, 25 bp, Homo sapien
atgctgcaactttccccatttcaac

SEQ ID NO: 4017832 - DNA, 25 bp, Homo sapien
agtgtctatggagaggacctgtcca

SEQ ID NO: 4017833 - DNA, 25 bp, Homo sapien
ttgggtaatttcagtgtctatggag

SEQ ID NO: 4017834 - DNA, 25 bp, Homo sapien
cctcattgatcactgtgtccttgca

SEQ ID NO: 4017835 - DNA, 25 bp, Homo sapien
tcattgatcactgtgtccttgcact

SEQ ID NO: 4017836 - DNA, 25 bp, Homo sapien
agaccccctcattgatcactgtgtc

SEQ ID NO: 4017837 - DNA, 25 bp, Homo sapien
cccctcattgatcactgtgtccttg

SEQ ID NO: 4017838 - DNA, 25 bp, Homo sapien
taagccactcatcagtctacaaaag

SEQ ID NO: 4017839 - DNA, 25 bp, Homo sapien
catcagtctacaaaagtcccctgtg

SEQ ID NO: 4017840 - DNA, 25 bp, Homo sapien
taacaaggtcacttgaggctcccct

SEQ ID NO: 4017841 - DNA, 25 bp, Homo sapien
actatcctcaccctgtttcttactt

SEQ ID NO: 4017842 - DNA, 25 bp, Homo sapien
catgaattgagtccatgtcattctg

SEQ ID NO: 4017843 - DNA, 25 bp, Homo sapien
ttctccatgaattgagtccatgtca

SEQ ID NO: 4017844 - DNA, 25 bp, Homo sapien
ccatgaattgagtccatgtcattct

SEQ ID NO: 4017845 - DNA, 25 bp, Homo sapien
attggtaacttgatactcttctcca

SEQ ID NO: 4017846 - DNA, 25 bp, Homo sapien
agcagctggagagactccggtatct

SEQ ID NO: 4017847 - DNA, 25 bp, Homo sapien
caagcccatttcccagcagagattt

SEQ ID NO: 4017848 - DNA, 25 bp, Homo sapien
gctggagagactccggtatcttcca

SEQ ID NO: 4017849 - DNA, 25 bp, Homo sapien
tcactatgtttgtcaatttttgaaa

SEQ ID NO: 4017850 - DNA, 25 bp, Homo sapien
catctctcccagaggtgcggctgca

SEQ ID NO: 4017851 - DNA, 25 bp, Homo sapien
tccatctctcccagaggtgcggctg

SEQ ID NO: 4017852 - DNA, 25 bp, Homo sapien
ttccatctctcccagaggtgcggct

SEQ ID NO: 4017853 - DNA, 25 bp, Homo sapien
tctctcccagaggtgcggctgcagc

SEQ ID NO: 4017854 - DNA, 25 bp, Homo sapien
tacacagctgccatctaaacctaga

SEQ ID NO: 4017855 - DNA, 25 bp, Homo sapien
gtgcaatttctacacagctgccatc

SEQ ID NO: 4017856 - DNA, 25 bp, Homo sapien
tgccatctaaacctagattcctggg

SEQ ID NO: 4017857 - DNA, 25 bp, Homo sapien
aaacctagattcctgggccagaggc

SEQ ID NO: 4017858 - DNA, 25 bp, Homo sapien
gacatagagacatacatgccgttgg

SEQ ID NO: 4017859 - DNA, 25 bp, Homo sapien
caccatcttatatgagtgcggttgg

SEQ ID NO: 4017860 - DNA, 25 bp, Homo sapien
aaaatggtgtcgatagagttcctca

SEQ ID NO: 4017861 - DNA, 25 bp, Homo sapien
caaattgccaaagtgtgacatagag

SEQ ID NO: 4017862 - DNA, 25 bp, Homo sapien
ccaatacggcttctgctctccggtt

SEQ ID NO: 4017863 - DNA, 25 bp, Homo sapien
gttttcattgccaaccactttcatt

SEQ ID NO: 4017864 - DNA, 25 bp, Homo sapien
aattcactcccccaatacggcttct

SEQ ID NO: 4017865 - DNA, 25 bp, Homo sapien
ttttcattgccaaccactttcattc

SEQ ID NO: 4017866 - DNA, 25 bp, Homo sapien
aaagtcattcatcaaggagccaccg

SEQ ID NO: 4017867 - DNA, 25 bp, Homo sapien
aggacttgccgcctcacgtaacgtg

SEQ ID NO: 4017868 - DNA, 25 bp, Homo sapien
taacgtgcacactgcttaataaaca

SEQ ID NO: 4017869 - DNA, 25 bp, Homo sapien
tcctgggaccagtgcaggacttgcc

SEQ ID NO: 4017870 - DNA, 25 bp, Homo sapien
taccagatgaccctcgtggagaagc

SEQ ID NO: 4017871 - DNA, 25 bp, Homo sapien
aagtattcagagagacgttgaccat

SEQ ID NO: 4017872 - DNA, 25 bp, Homo sapien
aaaagtattcagagagacgttgacc

SEQ ID NO: 4017873 - DNA, 25 bp, Homo sapien
aaagtattcagagagacgttgacca

SEQ ID NO: 4017874 - DNA, 25 bp, Homo sapien
tgagttatatggaggccacgcacaa

SEQ ID NO: 4017875 - DNA, 25 bp, Homo sapien
tgaaagttaaagacagcctgcacag

SEQ ID NO: 4017876 - DNA, 25 bp, Homo sapien
gatcaaaagctagggactgggaccc

SEQ ID NO: 4017877 - DNA, 25 bp, Homo sapien
caaaagtaggaaattcagcggcagc

SEQ ID NO: 4017878 - DNA, 25 bp, Homo sapien
taaatgagttactgaaaggcagccc

SEQ ID NO: 4017879 - DNA, 25 bp, Homo sapien
gaaatgtaacgtctgatgcccctct

SEQ ID NO: 4017880 - DNA, 25 bp, Homo sapien
gaaggccctccataaacgtttgcag

SEQ ID NO: 4017881 - DNA, 25 bp, Homo sapien
tctagatgtcaacgagaaacccagg

SEQ ID NO: 4017882 - DNA, 25 bp, Homo sapien
caaaccagacttgatgcttgtgctg

SEQ ID NO: 4017883 - DNA, 25 bp, Homo sapien
tgtcttgccaagatccgtcgagcgc

SEQ ID NO: 4017884 - DNA, 25 bp, Homo sapien
cgtccccggtgttcttacagacaga

SEQ ID NO: 4017885 - DNA, 25 bp, Homo sapien
gaagacttggatttgcgagcggaca

SEQ ID NO: 4017886 - DNA, 25 bp, Homo sapien
tggagccctctctactcaagctgtg

SEQ ID NO: 4017887 - DNA, 25 bp, Homo sapien
gagggccgaggctgacttctgcttc

SEQ ID NO: 4017888 - DNA, 25 bp, Homo sapien
gaacccaagctttgtctggagccct

SEQ ID NO: 4017889 - DNA, 25 bp, Homo sapien
tcaagctgtggtctgaagtcctgct

SEQ ID NO: 4017890 - DNA, 25 bp, Homo sapien
gaagaatctgctttgctgcgggagc

SEQ ID NO: 4017891 - DNA, 25 bp, Homo sapien
gaaagggatgactcctggcttgcca

SEQ ID NO: 4017892 - DNA, 25 bp, Homo sapien
tgttatcaaatggaccagagagcgg

SEQ ID NO: 4017893 - DNA, 25 bp, Homo sapien
tctggtttctttgcgagtgagcctg

SEQ ID NO: 4017894 - DNA, 25 bp, Homo sapien
ggttccgcaagctaccaaagcaaga

SEQ ID NO: 4017895 - DNA, 25 bp, Homo sapien
gcagagctgtgaattggcgaatccc

SEQ ID NO: 4017896 - DNA, 25 bp, Homo sapien
cagcttagcagacagggaccatgaa

SEQ ID NO: 4017897 - DNA, 25 bp, Homo sapien
gatgacaaactctgacgctggacac

SEQ ID NO: 4017898 - DNA, 25 bp, Homo sapien
cacggactcagagagcgacgccagg

SEQ ID NO: 4017899 - DNA, 25 bp, Homo sapien
cgccagggaggtgcgtctggaggaa

SEQ ID NO: 4017900 - DNA, 25 bp, Homo sapien
tccagtcatctccacggactcagag

SEQ ID NO: 4017901 - DNA, 25 bp, Homo sapien
agccggctcacccagtgttcacaca

SEQ ID NO: 4017902 - DNA, 25 bp, Homo sapien
gttgatgtcctcaccccgaggtcag

SEQ ID NO: 4017903 - DNA, 25 bp, Homo sapien
gcctgtccgaatatccccagttaag

SEQ ID NO: 4017904 - DNA, 25 bp, Homo sapien
ccctcatgaaggtgttacgagctga

SEQ ID NO: 4017905 - DNA, 25 bp, Homo sapien
gatgtaaggcagacttcctgacgca

SEQ ID NO: 4017906 - DNA, 25 bp, Homo sapien
tgaccatgacgggatggctgtccgc

SEQ ID NO: 4017907 - DNA, 25 bp, Homo sapien
ccagaggccgtccacagagttctta

SEQ ID NO: 4017908 - DNA, 25 bp, Homo sapien
catcgctgtcatcgaagcagtacca

SEQ ID NO: 4017909 - DNA, 25 bp, Homo sapien
ccaccgagctgttggctgaccatga

SEQ ID NO: 4017910 - DNA, 25 bp, Homo sapien
cattccaagtagatgcagttccagt

SEQ ID NO: 4017911 - DNA, 25 bp, Homo sapien
catgagctcatgaacgcaggaggac

SEQ ID NO: 4017912 - DNA, 25 bp, Homo sapien
cctggcagactgagaacacatgagc

SEQ ID NO: 4017913 - DNA, 25 bp, Homo sapien
ttgtcacaactcaagggagaggtgc

SEQ ID NO: 4017914 - DNA, 25 bp, Homo sapien
catggtagccaaattagtgaacagc

SEQ ID NO: 4017915 - DNA, 25 bp, Homo sapien
cacatcctgggtaatgggttccttg

SEQ ID NO: 4017916 - DNA, 25 bp, Homo sapien
tcttcctggctcactaacatggtag

SEQ ID NO: 4017917 - DNA, 25 bp, Homo sapien
aaagatgtgtctggcttctaaccca

SEQ ID NO: 4017918 - DNA, 25 bp, Homo sapien
tagacactcacacggataatcaaat

SEQ ID NO: 4017919 - DNA, 25 bp, Homo sapien
aataaagccctgaaatctgcctggc

SEQ ID NO: 4017920 - DNA, 25 bp, Homo sapien
tggctcccaaaaggctcaagcaggc

SEQ ID NO: 4017921 - DNA, 25 bp, Homo sapien
tcaagcaggcccttagcccaatgat

SEQ ID NO: 4017922 - DNA, 25 bp, Homo sapien
cagtgataagcccatggatgatggt

SEQ ID NO: 4017923 - DNA, 25 bp, Homo sapien
ggagcgcaggttaggtaaacaaaga

SEQ ID NO: 4017924 - DNA, 25 bp, Homo sapien
taaacaaagagcaaatcctcagttg

SEQ ID NO: 4017925 - DNA, 25 bp, Homo sapien
tctatctagcaaaaccgtaaatggg

SEQ ID NO: 4017926 - DNA, 25 bp, Homo sapien
tggaaactgccctcacagttggcac

SEQ ID NO: 4017927 - DNA, 25 bp, Homo sapien
ggcagagatccagaggatggaaact

SEQ ID NO: 4017928 - DNA, 25 bp, Homo sapien
cagaggatggaaactgccctcacag

SEQ ID NO: 4017929 - DNA, 25 bp, Homo sapien
aactgccctcacagttggcacactg

SEQ ID NO: 4017930 - DNA, 25 bp, Homo sapien
aaatgaggctctaaagtcaagtcac

SEQ ID NO: 4017931 - DNA, 25 bp, Homo sapien
cctgccacaagcaaacccgtctgaa

SEQ ID NO: 4017932 - DNA, 25 bp, Homo sapien
ctgccacaagcaaacccgtctgaag

SEQ ID NO: 4017933 - DNA, 25 bp, Homo sapien
catggtgccatggtgattgcacaca

SEQ ID NO: 4017934 - DNA, 25 bp, Homo sapien
tggtgccatggtgattgcacacagc

SEQ ID NO: 4017935 - DNA, 25 bp, Homo sapien
gtgccatggtgattgcacacagcat

SEQ ID NO: 4017936 - DNA, 25 bp, Homo sapien
ggtgccatggtgattgcacacagca

SEQ ID NO: 4017937 - DNA, 25 bp, Homo sapien
ccacgtgaggtgtcatgtccaggcc

SEQ ID NO: 4017938 - DNA, 25 bp, Homo sapien
tccacggggaccaatgcgatggcaa

SEQ ID NO: 4017939 - DNA, 25 bp, Homo sapien
cagggtccctcccgagtccataggg

SEQ ID NO: 4017940 - DNA, 25 bp, Homo sapien
tctgaagtttcatgcgcctgtctcc

SEQ ID NO: 4017941 - DNA, 25 bp, Homo sapien
gagtcgatgaagaggcatggccatg

SEQ ID NO: 4017942 - DNA, 25 bp, Homo sapien
ggagtcgatgaagaggcatggccat

SEQ ID NO: 4017943 - DNA, 25 bp, Homo sapien
aggagtcgatgaagaggcatggcca

SEQ ID NO: 4017944 - DNA, 25 bp, Homo sapien
agtcgatgaagaggcatggccatgc

SEQ ID NO: 4017945 - DNA, 25 bp, Homo sapien
atcagcagggggcataagaaacttg

SEQ ID NO: 4017946 - DNA, 25 bp, Homo sapien
gaaacttgtcacaacttgtttgttc

SEQ ID NO: 4017947 - DNA, 25 bp, Homo sapien
cagcagggggcataagaaacttgtc

SEQ ID NO: 4017948 - DNA, 25 bp, Homo sapien
gggcataagaaacttgtcacaactt

SEQ ID NO: 4017949 - DNA, 25 bp, Homo sapien
ataagcacatcaggcagagtccaga

SEQ ID NO: 4017950 - DNA, 25 bp, Homo sapien
tgcttacagtgtgggcaacgccagg

SEQ ID NO: 4017951 - DNA, 25 bp, Homo sapien
tctctttagatgtataataagcaca

SEQ ID NO: 4017952 - DNA, 25 bp, Homo sapien
ccagaggcttaacgtaatgcttccc

SEQ ID NO: 4017953 - DNA, 25 bp, Homo sapien
ctctttggtgtacagttggaaacac

SEQ ID NO: 4017954 - DNA, 25 bp, Homo sapien
tgatgacgctccctttgcagacgaa

SEQ ID NO: 4017955 - DNA, 25 bp, Homo sapien
ggtttgaggctgatgatgacgctcc

SEQ ID NO: 4017956 - DNA, 25 bp, Homo sapien
gcagacgaacactttctgcatcagg

SEQ ID NO: 4017957 - DNA, 25 bp, Homo sapien
ccttgtcccactcgactactaattt

SEQ ID NO: 4017958 - DNA, 25 bp, Homo sapien
ttcacatgagcagtgccacctggtc

SEQ ID NO: 4017959 - DNA, 25 bp, Homo sapien
acctggtccacaagattttaatgcc

SEQ ID NO: 4017960 - DNA, 25 bp, Homo sapien
cccactcgactactaatttcacatg

SEQ ID NO: 4017961 - DNA, 25 bp, Homo sapien
tgattttacttaatgtgattatgtc

SEQ ID NO: 4017962 - DNA, 25 bp, Homo sapien
gagagggaagccacatattattttc

SEQ ID NO: 4017963 - DNA, 25 bp, Homo sapien
tatagaaccagggaagtggagaggg

SEQ ID NO: 4017964 - DNA, 25 bp, Homo sapien
caaatgattttacttaatgtgatta

SEQ ID NO: 4017965 - DNA, 25 bp, Homo sapien
tgaccacacgcaagctgaatggaca

SEQ ID NO: 4017966 - DNA, 25 bp, Homo sapien
ccacacgcaagctgaatggacacac

SEQ ID NO: 4017967 - DNA, 25 bp, Homo sapien
acaacactgaccacacgcaagctga

SEQ ID NO: 4017968 - DNA, 25 bp, Homo sapien
acactgaccacacgcaagctgaatg

SEQ ID NO: 4017969 - DNA, 25 bp, Homo sapien
ctgaatgcaaaccgtgggcctcaag

SEQ ID NO: 4017970 - DNA, 25 bp, Homo sapien
aatgcaaaccgtgggcctcaagaaa

SEQ ID NO: 4017971 - DNA, 25 bp, Homo sapien
tgaatgcaaaccgtgggcctcaaga

SEQ ID NO: 4017972 - DNA, 25 bp, Homo sapien
gcaaaccgtgggcctcaagaaatac

SEQ ID NO: 4017973 - DNA, 25 bp, Homo sapien
aggtcccaagctattgtcttctcta

SEQ ID NO: 4017974 - DNA, 25 bp, Homo sapien
ccaagctattgtcttctctaagtgc

SEQ ID NO: 4017975 - DNA, 25 bp, Homo sapien
aagctattgtcttctctaagtgcag

SEQ ID NO: 4017976 - DNA, 25 bp, Homo sapien
cagaaggtcccaagctattgtcttc

SEQ ID NO: 4017977 - DNA, 25 bp, Homo sapien
gacagtctatgataatccaagccaa

SEQ ID NO: 4017978 - DNA, 25 bp, Homo sapien
caggctcggttacacaccaacagga

SEQ ID NO: 4017979 - DNA, 25 bp, Homo sapien
tgctcttgatgtgggagaatccatt

SEQ ID NO: 4017980 - DNA, 25 bp, Homo sapien
caatcttgtcgctgcctgctcttga

SEQ ID NO: 4017981 - DNA, 25 bp, Homo sapien
gtatgtatggaatactgttcggcca

SEQ ID NO: 4017982 - DNA, 25 bp, Homo sapien
aatgaagtggatccgttccaagatg

SEQ ID NO: 4017983 - DNA, 25 bp, Homo sapien
ggaatgaagtggatccgttccaaga

SEQ ID NO: 4017984 - DNA, 25 bp, Homo sapien
tatggaatactgttcggccattaaa

SEQ ID NO: 4017985 - DNA, 25 bp, Homo sapien
gcaaaaatgcagtcgctttcatgga

SEQ ID NO: 4017986 - DNA, 25 bp, Homo sapien
taaatatttcgggagtctcaaaggc

SEQ ID NO: 4017987 - DNA, 25 bp, Homo sapien
tctttgactgagaattccttcaggc

SEQ ID NO: 4017988 - DNA, 25 bp, Homo sapien
tatcacaaaaggaacgatggaaccc

SEQ ID NO: 4017989 - DNA, 25 bp, Homo sapien
gaggtacggccacaccaatcctcat

SEQ ID NO: 4017990 - DNA, 25 bp, Homo sapien
agtctggcgacagtcccagacagag

SEQ ID NO: 4017991 - DNA, 25 bp, Homo sapien
tagacactgcttcccgaagtctggc

SEQ ID NO: 4017992 - DNA, 25 bp, Homo sapien
cagtgagaacatttgccttgataca

SEQ ID NO: 4017993 - DNA, 25 bp, Homo sapien
tcttgtaaggttgtagcaatgactg

SEQ ID NO: 4017994 - DNA, 25 bp, Homo sapien
tgtagcaatgactgtattcaatccc

SEQ ID NO: 4017995 - DNA, 25 bp, Homo sapien
tcccattattaatcccattacctgt

SEQ ID NO: 4017996 - DNA, 25 bp, Homo sapien
tgactgtattcaatcccattattaa

SEQ ID NO: 4017997 - DNA, 25 bp, Homo sapien
tgcaaaggaaaggatcaaaagtgtt

SEQ ID NO: 4017998 - DNA, 25 bp, Homo sapien
ggcagaggaattggcaaagaaatgc

SEQ ID NO: 4017999 - DNA, 25 bp, Homo sapien
gtttctgacaatgaggacacgtcaa

SEQ ID NO: 4018000 - DNA, 25 bp, Homo sapien
gaaaggatcaaaagtgttgctctgt

SEQ ID NO: 4018001 - DNA, 25 bp, Homo sapien
ctgtattgcgcttgaaagagttctt

SEQ ID NO: 4018002 - DNA, 25 bp, Homo sapien
tcaggcatcatatcagtctctgatg

SEQ ID NO: 4018003 - DNA, 25 bp, Homo sapien
aaagatggtccctcaggcatcatat

SEQ ID NO: 4018004 - DNA, 25 bp, Homo sapien
aagagttcttgtacaaaagtgctac

SEQ ID NO: 4018005 - DNA, 25 bp, Homo sapien
tgggcatcatgttgggaatttcccc

SEQ ID NO: 4018006 - DNA, 25 bp, Homo sapien
atgaactcggtccaaaagccacagc

SEQ ID NO: 4018007 - DNA, 25 bp, Homo sapien
gaatggttgaggtcttcatgaactc

SEQ ID NO: 4018008 - DNA, 25 bp, Homo sapien
gaatttccccggtactgcagtgcat

SEQ ID NO: 4018009 - DNA, 25 bp, Homo sapien
gccatctcagaaacaggtacacaag

SEQ ID NO: 4018010 - DNA, 25 bp, Homo sapien
gaaaagctccggagtttcacttcca

SEQ ID NO: 4018011 - DNA, 25 bp, Homo sapien
tacagtgcttggtgcaaagggtaac

SEQ ID NO: 4018012 - DNA, 25 bp, Homo sapien
taatgtgaagccaagtctgagaacg

SEQ ID NO: 4018013 - DNA, 25 bp, Homo sapien
gggaggctcctttgtcataagtgca

SEQ ID NO: 4018014 - DNA, 25 bp, Homo sapien
tacactaaatggatgaattaaatcg

SEQ ID NO: 4018015 - DNA, 25 bp, Homo sapien
ccaagaatataatcgaactgtacac

SEQ ID NO: 4018016 - DNA, 25 bp, Homo sapien
agcttagtgttcatgtagggctgga

SEQ ID NO: 4018017 - DNA, 25 bp, Homo sapien
gaaatacccagactagatagagaca

SEQ ID NO: 4018018 - DNA, 25 bp, Homo sapien
tgtatggcatacttcgttcaaaaag

SEQ ID NO: 4018019 - DNA, 25 bp, Homo sapien
tcaagctgtacactaacgccatata

SEQ ID NO: 4018020 - DNA, 25 bp, Homo sapien
ttagaaactgcaaaatagtcgggca

SEQ ID NO: 4018021 - DNA, 25 bp, Homo sapien
tcaaaaagttgacattaggctgggc

SEQ ID NO: 4018022 - DNA, 25 bp, Homo sapien
ggaaaaatccatcaagccacgcaca

SEQ ID NO: 4018023 - DNA, 25 bp, Homo sapien
tatttttccaatcgtcaagagtgcc

SEQ ID NO: 4018024 - DNA, 25 bp, Homo sapien
gttcctttctacatgggtcaccaaa

SEQ ID NO: 4018025 - DNA, 25 bp, Homo sapien
tagtagcccctcattgtgacgagtg

SEQ ID NO: 4018026 - DNA, 25 bp, Homo sapien
taaatcctgtatacgaggcccgcca

SEQ ID NO: 4018027 - DNA, 25 bp, Homo sapien
gagtaatcacagtcctcaagtgagg

SEQ ID NO: 4018028 - DNA, 25 bp, Homo sapien
tactattatgtgaggcaactcatcc

SEQ ID NO: 4018029 - DNA, 25 bp, Homo sapien
aagcttaaagcccaagagtaatcac

SEQ ID NO: 4018030 - DNA, 25 bp, Homo sapien
tgtgccacgttcctctcagattaat

SEQ ID NO: 4018031 - DNA, 25 bp, Homo sapien
ctgtctttggttgtgccacgttcct

SEQ ID NO: 4018032 - DNA, 25 bp, Homo sapien
tttggttgtgccacgttcctctcag

SEQ ID NO: 4018033 - DNA, 25 bp, Homo sapien
tggttgtgccacgttcctctcagat

SEQ ID NO: 4018034 - DNA, 25 bp, Homo sapien
cagagattcgatgttgaataagaca

SEQ ID NO: 4018035 - DNA, 25 bp, Homo sapien
ggcacagagattcgatgttgaataa

SEQ ID NO: 4018036 - DNA, 25 bp, Homo sapien
gacataatcactgcacatgagggag

SEQ ID NO: 4018037 - DNA, 25 bp, Homo sapien
ataagacataatcactgcacatgag

SEQ ID NO: 4018038 - DNA, 25 bp, Homo sapien
cagttatcggtcaattcaggctttc

SEQ ID NO: 4018039 - DNA, 25 bp, Homo sapien
ccaatcctgctaccctttgagggaa

SEQ ID NO: 4018040 - DNA, 25 bp, Homo sapien
ctgatccttggaagaatgtatgaaa

SEQ ID NO: 4018041 - DNA, 25 bp, Homo sapien
ggcagttctttaatagctttccatt

SEQ ID NO: 4018042 - DNA, 25 bp, Homo sapien
ttttatcagtgacaggcaggcattc

SEQ ID NO: 4018043 - DNA, 25 bp, Homo sapien
ggaaagttgttgattttatcagtga

SEQ ID NO: 4018044 - DNA, 25 bp, Homo sapien
acaggcaggcattcagcaaacgtgg

SEQ ID NO: 4018045 - DNA, 25 bp, Homo sapien
gcaggcattcagcaaacgtggttac

SEQ ID NO: 4018046 - DNA, 25 bp, Homo sapien
tttctggaatgaaaggacgttcaac

SEQ ID NO: 4018047 - DNA, 25 bp, Homo sapien
aaaaagcaaaccatgatcatctcag

SEQ ID NO: 4018048 - DNA, 25 bp, Homo sapien
gaaaattgatcgtaacattaacaaa

SEQ ID NO: 4018049 - DNA, 25 bp, Homo sapien
ttaaagttgttaccttatacacaca

SEQ ID NO: 4018050 - DNA, 25 bp, Homo sapien
tggacgttttcctccctacataata

SEQ ID NO: 4018051 - DNA, 25 bp, Homo sapien
taacacatgcgacataatataacac

SEQ ID NO: 4018052 - DNA, 25 bp, Homo sapien
gcagttagtggaagatagtttgaca

SEQ ID NO: 4018053 - DNA, 25 bp, Homo sapien
gaaccctcatccattattggtgaga

SEQ ID NO: 4018054 - DNA, 25 bp, Homo sapien
tggagagagatccacatgtgttgat

SEQ ID NO: 4018055 - DNA, 25 bp, Homo sapien
gagagagatccacatgtgttgatat

SEQ ID NO: 4018056 - DNA, 25 bp, Homo sapien
ggagagagatccacatgtgttgata

SEQ ID NO: 4018057 - DNA, 25 bp, Homo sapien
caaaagcactggcatcaccagggag

SEQ ID NO: 4018058 - DNA, 25 bp, Homo sapien
gaaatccaaaccagcatagctcacg

SEQ ID NO: 4018059 - DNA, 25 bp, Homo sapien
caggatggtccttgagccaaaagca

SEQ ID NO: 4018060 - DNA, 25 bp, Homo sapien
caatttgccagagttacctaaccgg

SEQ ID NO: 4018061 - DNA, 25 bp, Homo sapien
tgctccgggtcaggcgagggctcgg

SEQ ID NO: 4018062 - DNA, 25 bp, Homo sapien
gtactcggcgaagagctcggtgttg

SEQ ID NO: 4018063 - DNA, 25 bp, Homo sapien
tgtgctgcggggtgtactccagggt

SEQ ID NO: 4018064 - DNA, 25 bp, Homo sapien
ccagcgccaggtactcggcgaagag

SEQ ID NO: 4018065 - DNA, 25 bp, Homo sapien
tgaggcactgcagcgtggcgttcat

SEQ ID NO: 4018066 - DNA, 25 bp, Homo sapien
ctgaggcactgcagcgtggcgttca

SEQ ID NO: 4018067 - DNA, 25 bp, Homo sapien
gcggagccccgccacgccgggcacc

SEQ ID NO: 4018068 - DNA, 25 bp, Homo sapien
gaagcacgtgttgccgtggttgcgg

SEQ ID NO: 4018069 - DNA, 25 bp, Homo sapien
cacgtgttgccgtggttgcggagcc

SEQ ID NO: 4018070 - DNA, 25 bp, Homo sapien
ttgcggagccccgccacgccgggca

SEQ ID NO: 4018071 - DNA, 25 bp, Homo sapien
cggcggcgcaagcgggcggcgcggg

SEQ ID NO: 4018072 - DNA, 25 bp, Homo sapien
gcggcgcaagcgggcggcgcgggag

SEQ ID NO: 4018073 - DNA, 25 bp, Homo sapien
ggcgcaagcgggcggcgcgggagag

SEQ ID NO: 4018074 - DNA, 25 bp, Homo sapien
ctcggcggcgcaagcgggcggcgcg

SEQ ID NO: 4018075 - DNA, 25 bp, Homo sapien
gagctaaggtgcgagagcgtggaca

SEQ ID NO: 4018076 - DNA, 25 bp, Homo sapien
tgagaacgcggctcatgaagctgcc

SEQ ID NO: 4018077 - DNA, 25 bp, Homo sapien
agctgcccaccgagcgtgcagagga

SEQ ID NO: 4018078 - DNA, 25 bp, Homo sapien
agcgtggacagcgtcttgagaacgc

SEQ ID NO: 4018079 - DNA, 25 bp, Homo sapien
tccgaaacagccgcttgctgaagga

SEQ ID NO: 4018080 - DNA, 25 bp, Homo sapien
gccgctccgaaacagccgcttgctg

SEQ ID NO: 4018081 - DNA, 25 bp, Homo sapien
cggccgctccgaaacagccgcttgc

SEQ ID NO: 4018082 - DNA, 25 bp, Homo sapien
cgctccgaaacagccgcttgctgaa

SEQ ID NO: 4018083 - DNA, 25 bp, Homo sapien
cggccccgccacggccgccgccgca

SEQ ID NO: 4018084 - DNA, 25 bp, Homo sapien
gcggccccgccacggccgccgccgc

SEQ ID NO: 4018085 - DNA, 25 bp, Homo sapien
ggccccgccacggccgccgccgcat

SEQ ID NO: 4018086 - DNA, 25 bp, Homo sapien
cgcggccccgccacggccgccgccg

SEQ ID NO: 4018087 - DNA, 25 bp, Homo sapien
aggccgtgagattcactcacttcag

SEQ ID NO: 4018088 - DNA, 25 bp, Homo sapien
gtttccatgggaggccgtgagattc

SEQ ID NO: 4018089 - DNA, 25 bp, Homo sapien
taaaacttgtacctgagaagactcc

SEQ ID NO: 4018090 - DNA, 25 bp, Homo sapien
taaaagacgcacagagtttccatgg

SEQ ID NO: 4018091 - DNA, 25 bp, Homo sapien
tggagggagtccgaggagcgaggct

SEQ ID NO: 4018092 - DNA, 25 bp, Homo sapien
gagcgaggctgcgtgggattactgc

SEQ ID NO: 4018093 - DNA, 25 bp, Homo sapien
ctgcgtgggattactgctggtgcta

SEQ ID NO: 4018094 - DNA, 25 bp, Homo sapien
ctgctgcctacagccggacgctggt

SEQ ID NO: 4018095 - DNA, 25 bp, Homo sapien
catctggacgggagtggaaggaagt

SEQ ID NO: 4018096 - DNA, 25 bp, Homo sapien
ggaatgcaggatggcagggcggcct

SEQ ID NO: 4018097 - DNA, 25 bp, Homo sapien
ccttggggtaagtgccgcagagacc

SEQ ID NO: 4018098 - DNA, 25 bp, Homo sapien
gcgttgtgaagtcgtggcccgctcc

SEQ ID NO: 4018099 - DNA, 25 bp, Homo sapien
cgaaaggtgagttcagccgggttgg

SEQ ID NO: 4018100 - DNA, 25 bp, Homo sapien
ctttggaaccgaaaggtgagttcag

SEQ ID NO: 4018101 - DNA, 25 bp, Homo sapien
tggaaccgaaaggtgagttcagccg

SEQ ID NO: 4018102 - DNA, 25 bp, Homo sapien
ccgaaaggtgagttcagccgggttg

SEQ ID NO: 4018103 - DNA, 25 bp, Homo sapien
gggttctgggcactggagcggatgc

SEQ ID NO: 4018104 - DNA, 25 bp, Homo sapien
gcactggagcggatgccgggcgcca

SEQ ID NO: 4018105 - DNA, 25 bp, Homo sapien
tgccgggcgccagggcgtcggacgc

SEQ ID NO: 4018106 - DNA, 25 bp, Homo sapien
tcggacgccgtcagcgcggtgggtg

SEQ ID NO: 4018107 - DNA, 25 bp, Homo sapien
ccgtggcccggagcacgaagccagt

SEQ ID NO: 4018108 - DNA, 25 bp, Homo sapien
cttttctccgcccagcgcctgttca

SEQ ID NO: 4018109 - DNA, 25 bp, Homo sapien
ctctcccgggtctacccacgccgtg

SEQ ID NO: 4018110 - DNA, 25 bp, Homo sapien
cagtcgagagccactcagagtccgg

SEQ ID NO: 4018111 - DNA, 25 bp, Homo sapien
ctctctttgggttgcagaaggctgg

SEQ ID NO: 4018112 - DNA, 25 bp, Homo sapien
gccttggacagtagacatttattta

SEQ ID NO: 4018113 - DNA, 25 bp, Homo sapien
tttggagactagaaagtctaagatc

SEQ ID NO: 4018114 - DNA, 25 bp, Homo sapien
cacaggcagactcggttctggtgag

SEQ ID NO: 4018115 - DNA, 25 bp, Homo sapien
acacagcagtgaaaagatagatgtc

SEQ ID NO: 4018116 - DNA, 25 bp, Homo sapien
cagtgaaaagatagatgtcttctct

SEQ ID NO: 4018117 - DNA, 25 bp, Homo sapien
tcttctacgtaccagggacacagca

SEQ ID NO: 4018118 - DNA, 25 bp, Homo sapien
cctcttctacgtaccagggacacag

SEQ ID NO: 4018119 - DNA, 25 bp, Homo sapien
ggacctcagcccatacatgaatgag

SEQ ID NO: 4018120 - DNA, 25 bp, Homo sapien
tagatgcagccaggtttattctgtg

SEQ ID NO: 4018121 - DNA, 25 bp, Homo sapien
ttgatagatgcagccaggtttattc

SEQ ID NO: 4018122 - DNA, 25 bp, Homo sapien
tgacctggcctgaggtccaattttc

SEQ ID NO: 4018123 - DNA, 25 bp, Homo sapien
ctgggggacaagttggggagcctga

SEQ ID NO: 4018124 - DNA, 25 bp, Homo sapien
gctgggggacaagttggggagcctg

SEQ ID NO: 4018125 - DNA, 25 bp, Homo sapien
tctggaggacagatcaaatgagtat

SEQ ID NO: 4018126 - DNA, 25 bp, Homo sapien
gtctgggctagtccttaatctttgg

SEQ ID NO: 4018127 - DNA, 25 bp, Homo sapien
caaatgagtataaaactaggatgtc

SEQ ID NO: 4018128 - DNA, 25 bp, Homo sapien
ttaccctaagtgcatgtaaggacaa

SEQ ID NO: 4018129 - DNA, 25 bp, Homo sapien
accagatgatagagagtggcgccat

SEQ ID NO: 4018130 - DNA, 25 bp, Homo sapien
ctcccccgatcccttggcaccagat

SEQ ID NO: 4018131 - DNA, 25 bp, Homo sapien
ccccgatcccttggcaccagatgat

SEQ ID NO: 4018132 - DNA, 25 bp, Homo sapien
caccagatgatagagagtggcgcca

SEQ ID NO: 4018133 - DNA, 25 bp, Homo sapien
cagctgtctatgctgcagaggcaat

SEQ ID NO: 4018134 - DNA, 25 bp, Homo sapien
tgcagtggtatgatagccgactgca

SEQ ID NO: 4018135 - DNA, 25 bp, Homo sapien
tgttcctctgaaggccccgcctgtg

SEQ ID NO: 4018136 - DNA, 25 bp, Homo sapien
ggacaggccttcaggcaaacccttg

SEQ ID NO: 4018137 - DNA, 25 bp, Homo sapien
tggtccgttactggccaagggctct

SEQ ID NO: 4018138 - DNA, 25 bp, Homo sapien
cgggcggctgaaactcactgagcag

SEQ ID NO: 4018139 - DNA, 25 bp, Homo sapien
gcttgtgtccttcaacagagaggcc

SEQ ID NO: 4018140 - DNA, 25 bp, Homo sapien
caagggctctgtagaatcacggtgc

SEQ ID NO: 4018141 - DNA, 25 bp, Homo sapien
acaactctttttgattatacaaatg

SEQ ID NO: 4018142 - DNA, 25 bp, Homo sapien
aattatctaaaaagtcttctctgat

SEQ ID NO: 4018143 - DNA, 25 bp, Homo sapien
ttccattttcaagatctgatccttt

SEQ ID NO: 4018144 - DNA, 25 bp, Homo sapien
gtcttctctgataaataatacatct

SEQ ID NO: 4018145 - DNA, 25 bp, Homo sapien
tctcgctctgctgttaatttttgta

SEQ ID NO: 4018146 - DNA, 25 bp, Homo sapien
gtctcgctctgctgttaatttttgt

SEQ ID NO: 4018147 - DNA, 25 bp, Homo sapien
accgtgaccagctgaaccaagtctt

SEQ ID NO: 4018148 - DNA, 25 bp, Homo sapien
aaagtaacttctgcccaatcttggg

SEQ ID NO: 4018149 - DNA, 25 bp, Homo sapien
tggtgagtcgcgaaacagcagccct

SEQ ID NO: 4018150 - DNA, 25 bp, Homo sapien
ctctcttggtggtccggtgtgtggt

SEQ ID NO: 4018151 - DNA, 25 bp, Homo sapien
cagggcatccatcacgttgatcaga

SEQ ID NO: 4018152 - DNA, 25 bp, Homo sapien
ttgctgacctgtctatagtcctcag

SEQ ID NO: 4018153 - DNA, 25 bp, Homo sapien
tcagtaattcacactccgcatggtg

SEQ ID NO: 4018154 - DNA, 25 bp, Homo sapien
tcaggcctggtcttcagtagcgtca

SEQ ID NO: 4018155 - DNA, 25 bp, Homo sapien
cttcccacagtgtcagaccagactg

SEQ ID NO: 4018156 - DNA, 25 bp, Homo sapien
cctgaatacgacacagagaagctgc

SEQ ID NO: 4018157 - DNA, 25 bp, Homo sapien
gccctgccaagtccctagatgtggg

SEQ ID NO: 4018158 - DNA, 25 bp, Homo sapien
cctcaataggccctttactcaccag

SEQ ID NO: 4018159 - DNA, 25 bp, Homo sapien
tgaagcgggaaacgaacatgagagc

SEQ ID NO: 4018160 - DNA, 25 bp, Homo sapien
ggtgatcaatatatcaatgctgcct

SEQ ID NO: 4018161 - DNA, 25 bp, Homo sapien
cacccatccggcagcatggataggg

SEQ ID NO: 4018162 - DNA, 25 bp, Homo sapien
catgagagcacctgatgtgtcgcag

SEQ ID NO: 4018163 - DNA, 25 bp, Homo sapien
tcaggtgtgcatgctttgccacaga

SEQ ID NO: 4018164 - DNA, 25 bp, Homo sapien
agcgggcccacagtctactaggaca

SEQ ID NO: 4018165 - DNA, 25 bp, Homo sapien
tccttgactaaagtggagctccagg

SEQ ID NO: 4018166 - DNA, 25 bp, Homo sapien
taaaaccgtgagctccacttgactg

SEQ ID NO: 4018167 - DNA, 25 bp, Homo sapien
tgctcagagtacacctgggcagtga

SEQ ID NO: 4018168 - DNA, 25 bp, Homo sapien
cccgagaggtgcgttaggctaaaga

SEQ ID NO: 4018169 - DNA, 25 bp, Homo sapien
cggtatgatggagaagagagcaccc

SEQ ID NO: 4018170 - DNA, 25 bp, Homo sapien
ggtcactgaggacgaagctctggct

SEQ ID NO: 4018171 - DNA, 25 bp, Homo sapien
gagctcattaaacactggttgggaa

SEQ ID NO: 4018172 - DNA, 25 bp, Homo sapien
tcagcccggtcttgctaagtcagaa

SEQ ID NO: 4018173 - DNA, 25 bp, Homo sapien
tacataagacgatgggtgcgagtgc

SEQ ID NO: 4018174 - DNA, 25 bp, Homo sapien
catagatgtctgagcttcagcccgg

SEQ ID NO: 4018175 - DNA, 25 bp, Homo sapien
atgcagcaggcaagagctgtccctc

SEQ ID NO: 4018176 - DNA, 25 bp, Homo sapien
ggatgagattcctggagggcaaagg

SEQ ID NO: 4018177 - DNA, 25 bp, Homo sapien
gaagacttgggatgagattcctgga

SEQ ID NO: 4018178 - DNA, 25 bp, Homo sapien
gatgcagcaggcaagagctgtccct

SEQ ID NO: 4018179 - DNA, 25 bp, Homo sapien
gctcagggatctgtaggatcgcatc

SEQ ID NO: 4018180 - DNA, 25 bp, Homo sapien
tcacagtaggtctgcattgtggctc

SEQ ID NO: 4018181 - DNA, 25 bp, Homo sapien
gcgatcgagcccagccagttgtcag

SEQ ID NO: 4018182 - DNA, 25 bp, Homo sapien
catgttgtccagctcgggcaattca

SEQ ID NO: 4018183 - DNA, 25 bp, Homo sapien
gtcacaaatggctcaagattcaggg

SEQ ID NO: 4018184 - DNA, 25 bp, Homo sapien
ggagggacatgatgtactgcccgat

SEQ ID NO: 4018185 - DNA, 25 bp, Homo sapien
ggaggaaatggcagctttccagcgt

SEQ ID NO: 4018186 - DNA, 25 bp, Homo sapien
cgtgcaatgccaactctaaggcaga

SEQ ID NO: 4018187 - DNA, 25 bp, Homo sapien
gacaaaattgctagacctcgggtga

SEQ ID NO: 4018188 - DNA, 25 bp, Homo sapien
ttagcctgacattgacacatacggg

SEQ ID NO: 4018189 - DNA, 25 bp, Homo sapien
ggcaaacggcagagagacaaaattg

SEQ ID NO: 4018190 - DNA, 25 bp, Homo sapien
gatgcttgttatggcagtaccctaa

SEQ ID NO: 4018191 - DNA, 25 bp, Homo sapien
ttttctcctatttcatctctttaca

SEQ ID NO: 4018192 - DNA, 25 bp, Homo sapien
cctatttcatctctttacaatgctc

SEQ ID NO: 4018193 - DNA, 25 bp, Homo sapien
ctcctatttcatctctttacaatgc

SEQ ID NO: 4018194 - DNA, 25 bp, Homo sapien
tctcctatttcatctctttacaatg

SEQ ID NO: 4018195 - DNA, 25 bp, Homo sapien
tccgtacagctcaggaggacagcag

SEQ ID NO: 4018196 - DNA, 25 bp, Homo sapien
taaaatcagatcattcagccgggca

SEQ ID NO: 4018197 - DNA, 25 bp, Homo sapien
cacagtgcaggtttctctcagggat

SEQ ID NO: 4018198 - DNA, 25 bp, Homo sapien
tatgcacgtaaagcagctggcgtcc

SEQ ID NO: 4018199 - DNA, 25 bp, Homo sapien
actaaaggcgggcagttcatctgtg

SEQ ID NO: 4018200 - DNA, 25 bp, Homo sapien
tctgtgagggtttctccgatgccag

SEQ ID NO: 4018201 - DNA, 25 bp, Homo sapien
gggtgagactaaaggcgggcagttc

SEQ ID NO: 4018202 - DNA, 25 bp, Homo sapien
ttctccgatgccagccgtattccag

SEQ ID NO: 4018203 - DNA, 25 bp, Homo sapien
gagctgaccgttggagcctccacca

SEQ ID NO: 4018204 - DNA, 25 bp, Homo sapien
aagaagaacatggccttccctggag

SEQ ID NO: 4018205 - DNA, 25 bp, Homo sapien
tggaggcactgtctttggttggagc

SEQ ID NO: 4018206 - DNA, 25 bp, Homo sapien
tgtgaagacgccacccagaaataca

SEQ ID NO: 4018207 - DNA, 25 bp, Homo sapien
tatctcgctgagattgtaacaggag

SEQ ID NO: 4018208 - DNA, 25 bp, Homo sapien
ctgcaggtccatgaaacaggaactg

SEQ ID NO: 4018209 - DNA, 25 bp, Homo sapien
ctggaagcccgccatacagaaggca

SEQ ID NO: 4018210 - DNA, 25 bp, Homo sapien
gaaggcaacgatttctctctccgca

SEQ ID NO: 4018211 - DNA, 25 bp, Homo sapien
gaggagaacctcagcactaacacgt

SEQ ID NO: 4018212 - DNA, 25 bp, Homo sapien
gccatttggagtggaaacatcttcc

SEQ ID NO: 4018213 - DNA, 25 bp, Homo sapien
tctcaactcatcagaactcagaggg

SEQ ID NO: 4018214 - DNA, 25 bp, Homo sapien
tccgtgttgttgtggaagccttccc

SEQ ID NO: 4018215 - DNA, 25 bp, Homo sapien
caaaaatctcgcttcttacttccaa

SEQ ID NO: 4018216 - DNA, 25 bp, Homo sapien
acacaaaaatctcgcttcttacttc

SEQ ID NO: 4018217 - DNA, 25 bp, Homo sapien
acaaaaatctcgcttcttacttcca

SEQ ID NO: 4018218 - DNA, 25 bp, Homo sapien
cacaaaaatctcgcttcttacttcc

SEQ ID NO: 4018219 - DNA, 25 bp, Homo sapien
gctgaactccgggagtgactccggc

SEQ ID NO: 4018220 - DNA, 25 bp, Homo sapien
tgactccggcggtcatgtaggaact

SEQ ID NO: 4018221 - DNA, 25 bp, Homo sapien
ggtcatgtaggaactgctgtctgca

SEQ ID NO: 4018222 - DNA, 25 bp, Homo sapien
cctgatgttggatccggttgcctga

SEQ ID NO: 4018223 - DNA, 25 bp, Homo sapien
catttaccaagtacccaggatgtcg

SEQ ID NO: 4018224 - DNA, 25 bp, Homo sapien
tagactctttgttcttgcctgcgaa

SEQ ID NO: 4018225 - DNA, 25 bp, Homo sapien
ggaatgaccatgtccaaccctgggc

SEQ ID NO: 4018226 - DNA, 25 bp, Homo sapien
caggatgtcgagtgtcttgtgctaa

SEQ ID NO: 4018227 - DNA, 25 bp, Homo sapien
gatgtatgcggtacacagaggcaga

SEQ ID NO: 4018228 - DNA, 25 bp, Homo sapien
ttctagagctctcggtgtcagaggc

SEQ ID NO: 4018229 - DNA, 25 bp, Homo sapien
tagagctctcggtgtcagaggcaag

SEQ ID NO: 4018230 - DNA, 25 bp, Homo sapien
gcgattagagaagcggctggccata

SEQ ID NO: 4018231 - DNA, 25 bp, Homo sapien
ccttgaacaagtaaattgcaaggga

SEQ ID NO: 4018232 - DNA, 25 bp, Homo sapien
gaaggcacagctttaaacaccaggc

SEQ ID NO: 4018233 - DNA, 25 bp, Homo sapien
caggctaagtaaagcctttaccttg

SEQ ID NO: 4018234 - DNA, 25 bp, Homo sapien
gacatcccaataaatctctacgtgc

SEQ ID NO: 4018235 - DNA, 25 bp, Homo sapien
tagaaggaacctcacgatcatgtcg

SEQ ID NO: 4018236 - DNA, 25 bp, Homo sapien
taactcagccatgtgatggcacccg

SEQ ID NO: 4018237 - DNA, 25 bp, Homo sapien
tgagcaattttacggatgggaatcc

SEQ ID NO: 4018238 - DNA, 25 bp, Homo sapien
ccttgcaggctttctagagggtggc

SEQ ID NO: 4018239 - DNA, 25 bp, Homo sapien
tcttcgaaataagcaacagctgttg

SEQ ID NO: 4018240 - DNA, 25 bp, Homo sapien
tgggcctgctggttaagccgagtca

SEQ ID NO: 4018241 - DNA, 25 bp, Homo sapien
tttgatgcgcaggaacacggaatcg

SEQ ID NO: 4018242 - DNA, 25 bp, Homo sapien
gttaagccgagtcagcgctgctcga

SEQ ID NO: 4018243 - DNA, 25 bp, Homo sapien
tcttcttgtctgtcaagatgctctc

SEQ ID NO: 4018244 - DNA, 25 bp, Homo sapien
tattcagcagggttatctttctgga

SEQ ID NO: 4018245 - DNA, 25 bp, Homo sapien
aaagtatttccattaaactggcata

SEQ ID NO: 4018246 - DNA, 25 bp, Homo sapien
gaatcagatagatacttcccagctg

SEQ ID NO: 4018247 - DNA, 25 bp, Homo sapien
ctgctgctcgaagtccccacaatgc

SEQ ID NO: 4018248 - DNA, 25 bp, Homo sapien
aagtccccacaatgccgcaaaagct

SEQ ID NO: 4018249 - DNA, 25 bp, Homo sapien
aatgccgcaaaagctctccacaggt

SEQ ID NO: 4018250 - DNA, 25 bp, Homo sapien
acaatgccgcaaaagctctccacag

SEQ ID NO: 4018251 - DNA, 25 bp, Homo sapien
tctttcgtatggactggagagtgct

SEQ ID NO: 4018252 - DNA, 25 bp, Homo sapien
ttctgaaaagccgtccaatcttcct

SEQ ID NO: 4018253 - DNA, 25 bp, Homo sapien
gaaaagccgtccaatcttcctggaa

SEQ ID NO: 4018254 - DNA, 25 bp, Homo sapien
aggaatgtggtccagtttgcacttc

SEQ ID NO: 4018255 - DNA, 25 bp, Homo sapien
tgtcaaccatgtcagagtcaccgtg

SEQ ID NO: 4018256 - DNA, 25 bp, Homo sapien
tgcagaaagagcaggtacacactgc

SEQ ID NO: 4018257 - DNA, 25 bp, Homo sapien
tagttcgagttaggccaacctgcac

SEQ ID NO: 4018258 - DNA, 25 bp, Homo sapien
tgaaccaccggttggccactatact

SEQ ID NO: 4018259 - DNA, 25 bp, Homo sapien
caaacagcttgttcacggagtggct

SEQ ID NO: 4018260 - DNA, 25 bp, Homo sapien
agctcctgcacacagtcaatcactt

SEQ ID NO: 4018261 - DNA, 25 bp, Homo sapien
tgacgcatctgtcaacggctgcaga

SEQ ID NO: 4018262 - DNA, 25 bp, Homo sapien
ctgcagacgccagaccaaacagctt

SEQ ID NO: 4018263 - DNA, 25 bp, Homo sapien
cttctcatctgtagtaaaatcactt

SEQ ID NO: 4018264 - DNA, 25 bp, Homo sapien
ggctttagaacagacaatgctgaga

SEQ ID NO: 4018265 - DNA, 25 bp, Homo sapien
aaatcacttaataacgatgtcagaa

SEQ ID NO: 4018266 - DNA, 25 bp, Homo sapien
gacaaagctgcattaggctttagaa

SEQ ID NO: 4018267 - DNA, 25 bp, Homo sapien
gtctaagtcatcagtgggatcatgg

SEQ ID NO: 4018268 - DNA, 25 bp, Homo sapien
gaaaattggtagcaaatatatggtc

SEQ ID NO: 4018269 - DNA, 25 bp, Homo sapien
ggtcatatttcagcaccccggatcc

SEQ ID NO: 4018270 - DNA, 25 bp, Homo sapien
tgagttgtaatcaatcgcaccacta

SEQ ID NO: 4018271 - DNA, 25 bp, Homo sapien
gacgtggccaagaccctggctaaca

SEQ ID NO: 4018272 - DNA, 25 bp, Homo sapien
accagctccgtgacttttaccagat

SEQ ID NO: 4018273 - DNA, 25 bp, Homo sapien
tgtcgccatacttcagctggtaggg

SEQ ID NO: 4018274 - DNA, 25 bp, Homo sapien
gggtttgtatggatcatacacagca

SEQ ID NO: 4018275 - DNA, 25 bp, Homo sapien
tgctctcttccatgtcgccatactt

SEQ ID NO: 4018276 - DNA, 25 bp, Homo sapien
tcagaaatgtaaaacgataatgaac

SEQ ID NO: 4018277 - DNA, 25 bp, Homo sapien
tgggaaagcaacaatcaagaggcgc

SEQ ID NO: 4018278 - DNA, 25 bp, Homo sapien
tgaaattaactgtgggaaagcaaca

SEQ ID NO: 4018279 - DNA, 25 bp, Homo sapien
caagaggcgctctactagaactttc

SEQ ID NO: 4018280 - DNA, 25 bp, Homo sapien
ggatggcaacacaggcaccttcgtt

SEQ ID NO: 4018281 - DNA, 25 bp, Homo sapien
cctggcccaaaatgctgtttctgaa

SEQ ID NO: 4018282 - DNA, 25 bp, Homo sapien
ccagactaaggtgcagtggtccaac

SEQ ID NO: 4018283 - DNA, 25 bp, Homo sapien
gaatcaaatgactccctcaccttgg

SEQ ID NO: 4018284 - DNA, 25 bp, Homo sapien
tgagcatgccaaaaacaccgatgag

SEQ ID NO: 4018285 - DNA, 25 bp, Homo sapien
cgatgagtcatcaggaatccgaaca

SEQ ID NO: 4018286 - DNA, 25 bp, Homo sapien
tccagatctgtctcaagggtggttc

SEQ ID NO: 4018287 - DNA, 25 bp, Homo sapien
gagtgagactcgtcccatggctgac

SEQ ID NO: 4018288 - DNA, 25 bp, Homo sapien
ctgccctctccacgccgttgctgag

SEQ ID NO: 4018289 - DNA, 25 bp, Homo sapien
ccttggcgaagtgggcggtggcgtc

SEQ ID NO: 4018290 - DNA, 25 bp, Homo sapien
ccagggtctgaatcagcagcaccat

SEQ ID NO: 4018291 - DNA, 25 bp, Homo sapien
tggcgtcgtagaactccagcagcct

SEQ ID NO: 4018292 - DNA, 25 bp, Homo sapien
taccacctcgtggggcttctggaaa

SEQ ID NO: 4018293 - DNA, 25 bp, Homo sapien
tgccggtccagggataggtcacttt

SEQ ID NO: 4018294 - DNA, 25 bp, Homo sapien
tagagtccggtaagctgccggtcca

SEQ ID NO: 4018295 - DNA, 25 bp, Homo sapien
cactggatttgtgtgtgccaagcac

SEQ ID NO: 4018296 - DNA, 25 bp, Homo sapien
caagcaaggcatcatagagtccggt

SEQ ID NO: 4018297 - DNA, 25 bp, Homo sapien
ttcagtaaacaccttcacaaacact

SEQ ID NO: 4018298 - DNA, 25 bp, Homo sapien
cttgtgacacttgtagtagtaggcc

SEQ ID NO: 4018299 - DNA, 25 bp, Homo sapien
tggggcatccggtcaatttcagtaa

SEQ ID NO: 4018300 - DNA, 25 bp, Homo sapien
cacttgtagtagtaggccaggagct

SEQ ID NO: 4018301 - DNA, 25 bp, Homo sapien
tctgagtagtctggtgtatcaacaa

SEQ ID NO: 4018302 - DNA, 25 bp, Homo sapien
tacaatctgtggactggctagggcc

SEQ ID NO: 4018303 - DNA, 25 bp, Homo sapien
gcttggcagaaatcacagctatgtc

SEQ ID NO: 4018304 - DNA, 25 bp, Homo sapien
cctgagaggtgaatgccgctacaat

SEQ ID NO: 4018305 - DNA, 25 bp, Homo sapien
cggcagcaagttgcattctggactt

SEQ ID NO: 4018306 - DNA, 25 bp, Homo sapien
ttcctgaagagattcggcagcaagt

SEQ ID NO: 4018307 - DNA, 25 bp, Homo sapien
ggcgctcaacgtgctccacttatct

SEQ ID NO: 4018308 - DNA, 25 bp, Homo sapien
aaatgtctcctcaatatcggcgctc

SEQ ID NO: 4018309 - DNA, 25 bp, Homo sapien
tttacaacaggagccaaaaggagcc

SEQ ID NO: 4018310 - DNA, 25 bp, Homo sapien
atttacaacaggagccaaaaggagc

SEQ ID NO: 4018311 - DNA, 25 bp, Homo sapien
tcacggagcactttgggcatgttct

SEQ ID NO: 4018312 - DNA, 25 bp, Homo sapien
tgcctcctgttttagggcttcaaca

SEQ ID NO: 4018313 - DNA, 25 bp, Homo sapien
ctgcatggattgagatgtgtcctgt

SEQ ID NO: 4018314 - DNA, 25 bp, Homo sapien
catggattgagatgtgtcctgttca

SEQ ID NO: 4018315 - DNA, 25 bp, Homo sapien
gtgtgatccacaatgccaagcctaa

SEQ ID NO: 4018316 - DNA, 25 bp, Homo sapien
tcaccccagttgaagccactatcat

SEQ ID NO: 4018317 - DNA, 25 bp, Homo sapien
gaaccatgttactctgctgcttaaa

SEQ ID NO: 4018318 - DNA, 25 bp, Homo sapien
tggacctcagcaatagcctcctgaa

SEQ ID NO: 4018319 - DNA, 25 bp, Homo sapien
tttgacactgggctcttgactctga

SEQ ID NO: 4018320 - DNA, 25 bp, Homo sapien
gaagagctactgcaataagatccac

SEQ ID NO: 4018321 - DNA, 25 bp, Homo sapien
tagtcctagcgactcgagaggcgag

SEQ ID NO: 4018322 - DNA, 25 bp, Homo sapien
tgaataaacacctcacagactcgtg

SEQ ID NO: 4018323 - DNA, 25 bp, Homo sapien
ttcacgtcgaagtcgtctgccagga

SEQ ID NO: 4018324 - DNA, 25 bp, Homo sapien
tggagccggccctgaaggccgcatt

SEQ ID NO: 4018325 - DNA, 25 bp, Homo sapien
accagggtggctgcgtggccatccg

SEQ ID NO: 4018326 - DNA, 25 bp, Homo sapien
gcattgatccactccttcacgtcga

SEQ ID NO: 4018327 - DNA, 25 bp, Homo sapien
agagcaccgaggctagcctccgagg

SEQ ID NO: 4018328 - DNA, 25 bp, Homo sapien
ttaagagttggctccgggcggcaac

SEQ ID NO: 4018329 - DNA, 25 bp, Homo sapien
gaggcgaaccccagaaacgccagga

SEQ ID NO: 4018330 - DNA, 25 bp, Homo sapien
tcaggcctggcgtccagaacttaag

SEQ ID NO: 4018331 - DNA, 25 bp, Homo sapien
cctgatcttaacaaagggtatggtc

SEQ ID NO: 4018332 - DNA, 25 bp, Homo sapien
tagaaattaaacctgactccccagc

SEQ ID NO: 4018333 - DNA, 25 bp, Homo sapien
cacttggttcactctagcgcaccta

SEQ ID NO: 4018334 - DNA, 25 bp, Homo sapien
gacttgcccaacatgctacatagat

SEQ ID NO: 4018335 - DNA, 25 bp, Homo sapien
gatttgtaccatatgagctcaggga

SEQ ID NO: 4018336 - DNA, 25 bp, Homo sapien
tggttcactctagcgcacagggctg

SEQ ID NO: 4018337 - DNA, 25 bp, Homo sapien
cacagggctgccagaattgaggcga

SEQ ID NO: 4018338 - DNA, 25 bp, Homo sapien
aggaaactatgagggaactgctacc

SEQ ID NO: 4018339 - DNA, 25 bp, Homo sapien
tactcttgacgctgggtaagcatct

SEQ ID NO: 4018340 - DNA, 25 bp, Homo sapien
tccctgacccaaagattaccactgt

SEQ ID NO: 4018341 - DNA, 25 bp, Homo sapien
caaacatcttggtgcatcgcttggc

SEQ ID NO: 4018342 - DNA, 25 bp, Homo sapien
gattaatattgtagtaggcaagcac

SEQ ID NO: 4018343 - DNA, 25 bp, Homo sapien
taagttcatggaagataataggaag

SEQ ID NO: 4018344 - DNA, 25 bp, Homo sapien
ataaggaaacatttttgcccagtct

SEQ ID NO: 4018345 - DNA, 25 bp, Homo sapien
ctgcagcaaaaggttaggacaaaac

SEQ ID NO: 4018346 - DNA, 25 bp, Homo sapien
aggaagagtaattaactgcagcaaa

SEQ ID NO: 4018347 - DNA, 25 bp, Homo sapien
tacagacgaagcaggaatcagggac

SEQ ID NO: 4018348 - DNA, 25 bp, Homo sapien
tcagggtagctggtcaacaactagc

SEQ ID NO: 4018349 - DNA, 25 bp, Homo sapien
gaaatacgatctggcgacagcaagg

SEQ ID NO: 4018350 - DNA, 25 bp, Homo sapien
cagtcacggaggtaggtcacgaaat

SEQ ID NO: 4018351 - DNA, 25 bp, Homo sapien
gactacgcaacagtaacagagccta

SEQ ID NO: 4018352 - DNA, 25 bp, Homo sapien
tgatgggtacctcttcaagactacg

SEQ ID NO: 4018353 - DNA, 25 bp, Homo sapien
gtgagttcacctcctaactataggg

SEQ ID NO: 4018354 - DNA, 25 bp, Homo sapien
taagcatagtagtaccactgggagt

SEQ ID NO: 4018355 - DNA, 25 bp, Homo sapien
gtgagatatggcctcaaaaaacaaa

SEQ ID NO: 4018356 - DNA, 25 bp, Homo sapien
aaaaagccacacagaatacaagcaa

SEQ ID NO: 4018357 - DNA, 25 bp, Homo sapien
agccacacagaatacaagcaagaaa

SEQ ID NO: 4018358 - DNA, 25 bp, Homo sapien
caagcaagaaagtacttttagatta

SEQ ID NO: 4018359 - DNA, 25 bp, Homo sapien
gtaattaagagctccaaacaagtct

SEQ ID NO: 4018360 - DNA, 25 bp, Homo sapien
gaagacagttccctttaggcctatc

SEQ ID NO: 4018361 - DNA, 25 bp, Homo sapien
caagcaggacttgtcaaacatacac

SEQ ID NO: 4018362 - DNA, 25 bp, Homo sapien
tctctgaggcagctaagcttctaca

SEQ ID NO: 4018363 - DNA, 25 bp, Homo sapien
gctaagctctcttcatgtctatctg

SEQ ID NO: 4018364 - DNA, 25 bp, Homo sapien
aagctctcttcatgtctatctgtac

SEQ ID NO: 4018365 - DNA, 25 bp, Homo sapien
taagctctcttcatgtctatctgta

SEQ ID NO: 4018366 - DNA, 25 bp, Homo sapien
actgctaagctctcttcatgtctat

SEQ ID NO: 4018367 - DNA, 25 bp, Homo sapien
ctgacatggtgtgtcacaaagagct

SEQ ID NO: 4018368 - DNA, 25 bp, Homo sapien
tgtggtcctcaggtctcatggcagc

SEQ ID NO: 4018369 - DNA, 25 bp, Homo sapien
cgcctgggaacagtgcaacaagcat

SEQ ID NO: 4018370 - DNA, 25 bp, Homo sapien
ttagaagatcttccagaacacacac

SEQ ID NO: 4018371 - DNA, 25 bp, Homo sapien
cagtggtgaaggacatgattggtcc

SEQ ID NO: 4018372 - DNA, 25 bp, Homo sapien
cacagagtggatgaatggaacgaac

SEQ ID NO: 4018373 - DNA, 25 bp, Homo sapien
tttaaggtccctgagaacagcagcc

SEQ ID NO: 4018374 - DNA, 25 bp, Homo sapien
caagtagatactctctgccccaaga

SEQ ID NO: 4018375 - DNA, 25 bp, Homo sapien
tgggagcaaccaagcctttcaaagg

SEQ ID NO: 4018376 - DNA, 25 bp, Homo sapien
gaataagtcagaggttgacacccag

SEQ ID NO: 4018377 - DNA, 25 bp, Homo sapien
gacgtcaggataggactcttggcac

SEQ ID NO: 4018378 - DNA, 25 bp, Homo sapien
gaaacaccgtgattagtcctgacta

SEQ ID NO: 4018379 - DNA, 25 bp, Homo sapien
tagacagcaaaagtaacgccagcct

SEQ ID NO: 4018380 - DNA, 25 bp, Homo sapien
ttaggctgcgcccaagacagccagg

SEQ ID NO: 4018381 - DNA, 25 bp, Homo sapien
gctgaaaggctgtccaccttggttg

SEQ ID NO: 4018382 - DNA, 25 bp, Homo sapien
gtctttcacttctcctacttcgctg

SEQ ID NO: 4018383 - DNA, 25 bp, Homo sapien
gcttgtaccgtaagcggataggttc

SEQ ID NO: 4018384 - DNA, 25 bp, Homo sapien
tttgtgtggattgtcaagcagcagc

SEQ ID NO: 4018385 - DNA, 25 bp, Homo sapien
tggaggcatcaaaggactgaatgca

SEQ ID NO: 4018386 - DNA, 25 bp, Homo sapien
gactgaatgcaggaagcttggagct

SEQ ID NO: 4018387 - DNA, 25 bp, Homo sapien
gtgtggattgtcaagcagcagcatc

SEQ ID NO: 4018388 - DNA, 25 bp, Homo sapien
ctatgggagcccaagcagacagact

SEQ ID NO: 4018389 - DNA, 25 bp, Homo sapien
gaacattgcccataggactaccgta

SEQ ID NO: 4018390 - DNA, 25 bp, Homo sapien
gcctgttaatcagtagggccccact

SEQ ID NO: 4018391 - DNA, 25 bp, Homo sapien
tcaataaccggcatctgagacgcag

SEQ ID NO: 4018392 - DNA, 25 bp, Homo sapien
gcacagccacttgaaacatgatatc

SEQ ID NO: 4018393 - DNA, 25 bp, Homo sapien
ttggcacagccacttgaaacatgat

SEQ ID NO: 4018394 - DNA, 25 bp, Homo sapien
ggcacagccacttgaaacatgatat

SEQ ID NO: 4018395 - DNA, 25 bp, Homo sapien
ctttggcacagccacttgaaacatg

SEQ ID NO: 4018396 - DNA, 25 bp, Homo sapien
tcatacacaatgagaggcggcaggc

SEQ ID NO: 4018397 - DNA, 25 bp, Homo sapien
gctcccgtctgggagaagtggagca

SEQ ID NO: 4018398 - DNA, 25 bp, Homo sapien
tcatcatggtcaagagcagcacctg

SEQ ID NO: 4018399 - DNA, 25 bp, Homo sapien
gaatccattccggtcatacacaatg

SEQ ID NO: 4018400 - DNA, 25 bp, Homo sapien
catctctggctgttaatggtataga

SEQ ID NO: 4018401 - DNA, 25 bp, Homo sapien
caactaagggcataaaaatggtata

SEQ ID NO: 4018402 - DNA, 25 bp, Homo sapien
agaaaatctatcaagacatgaagag

SEQ ID NO: 4018403 - DNA, 25 bp, Homo sapien
cagtacctctacttaatagtgcata

SEQ ID NO: 4018404 - DNA, 25 bp, Homo sapien
gacggtaggcaccttaattagccga

SEQ ID NO: 4018405 - DNA, 25 bp, Homo sapien
tctgtgctaaagagtccaggccctg

SEQ ID NO: 4018406 - DNA, 25 bp, Homo sapien
tctgcatactggtgtagagacggta

SEQ ID NO: 4018407 - DNA, 25 bp, Homo sapien
ggccctggaacagacgacctgagtt

SEQ ID NO: 4018408 - DNA, 25 bp, Homo sapien
ccccaaatagagacaaggctatgtc

SEQ ID NO: 4018409 - DNA, 25 bp, Homo sapien
tcccccccaaatagagacaaggcta

SEQ ID NO: 4018410 - DNA, 25 bp, Homo sapien
caaatagagacaaggctatgtcgcc

SEQ ID NO: 4018411 - DNA, 25 bp, Homo sapien
ccccccaaatagagacaaggctatg

SEQ ID NO: 4018412 - DNA, 25 bp, Homo sapien
tgggcttaacagactccaaagggac

SEQ ID NO: 4018413 - DNA, 25 bp, Homo sapien
aagggacaaacacttgagccagagg

SEQ ID NO: 4018414 - DNA, 25 bp, Homo sapien
ccaaagggacaaacacttgagccag

SEQ ID NO: 4018415 - DNA, 25 bp, Homo sapien
ggcttaacagactccaaagggacaa

SEQ ID NO: 4018416 - DNA, 25 bp, Homo sapien
tggggaaggagccaacgggccagcc

SEQ ID NO: 4018417 - DNA, 25 bp, Homo sapien
gaagatggggaaggagccaacgggc

SEQ ID NO: 4018418 - DNA, 25 bp, Homo sapien
gggaaggagccaacgggccagcctc

SEQ ID NO: 4018419 - DNA, 25 bp, Homo sapien
agatggggaaggagccaacgggcca

SEQ ID NO: 4018420 - DNA, 25 bp, Homo sapien
ctggagaggacttagtacctggtgg

SEQ ID NO: 4018421 - DNA, 25 bp, Homo sapien
aggacttagtacctggtggcacttc

SEQ ID NO: 4018422 - DNA, 25 bp, Homo sapien
gggacacttttctgcgaaacataat

SEQ ID NO: 4018423 - DNA, 25 bp, Homo sapien
tggggacacttttctgcgaaacata

SEQ ID NO: 4018424 - DNA, 25 bp, Homo sapien
tggagtgcaatcgaacagtctcggc

SEQ ID NO: 4018425 - DNA, 25 bp, Homo sapien
tgcctcccaggctcaagcgattctc

SEQ ID NO: 4018426 - DNA, 25 bp, Homo sapien
gcacctgccaccatgtccgactaat

SEQ ID NO: 4018427 - DNA, 25 bp, Homo sapien
tgcaacctctgcctcccaggctcaa

SEQ ID NO: 4018428 - DNA, 25 bp, Homo sapien
aggaacatgggcactttcaggctgt

SEQ ID NO: 4018429 - DNA, 25 bp, Homo sapien
cagaggcaaagggacaggatctatg

SEQ ID NO: 4018430 - DNA, 25 bp, Homo sapien
tcaaccttgtttttagggagtggca

SEQ ID NO: 4018431 - DNA, 25 bp, Homo sapien
ctgtttgggtgaaggtaagctgcac

SEQ ID NO: 4018432 - DNA, 25 bp, Homo sapien
tgtcttagagcaccattctctggcc

SEQ ID NO: 4018433 - DNA, 25 bp, Homo sapien
ggctgtcttagagcaccattctctg

SEQ ID NO: 4018434 - DNA, 25 bp, Homo sapien
aggaaccgcactcaggagccacact

SEQ ID NO: 4018435 - DNA, 25 bp, Homo sapien
tggcccttgtcccatgagaaggaac

SEQ ID NO: 4018436 - DNA, 25 bp, Homo sapien
ggctgtgctgagaggaggtccagca

SEQ ID NO: 4018437 - DNA, 25 bp, Homo sapien
tggctgtgctgagaggaggtccagc

SEQ ID NO: 4018438 - DNA, 25 bp, Homo sapien
ctggctgtgctgagaggaggtccag

SEQ ID NO: 4018439 - DNA, 25 bp, Homo sapien
ctgaacaccaccgcctggcagcgtg

SEQ ID NO: 4018440 - DNA, 25 bp, Homo sapien
gcctggcagcgtgctggaggaggga

SEQ ID NO: 4018441 - DNA, 25 bp, Homo sapien
acaccaccgcctggcagcgtgctgg

SEQ ID NO: 4018442 - DNA, 25 bp, Homo sapien
cctcacagcaattctgaccagaaac

SEQ ID NO: 4018443 - DNA, 25 bp, Homo sapien
gggacagtgcaggagcacctctctg

SEQ ID NO: 4018444 - DNA, 25 bp, Homo sapien
aataagaccagggtatgaatgacca

SEQ ID NO: 4018445 - DNA, 25 bp, Homo sapien
aggccatgatcccaccgggacagtg

SEQ ID NO: 4018446 - DNA, 25 bp, Homo sapien
ggcaagatcacatgcagctcctggg

SEQ ID NO: 4018447 - DNA, 25 bp, Homo sapien
cctgtaacaggagcatcactgattc

SEQ ID NO: 4018448 - DNA, 25 bp, Homo sapien
gcctgtaacaggagcatcactgatt

SEQ ID NO: 4018449 - DNA, 25 bp, Homo sapien
cagcaggcatgtgctccctgagggt

SEQ ID NO: 4018450 - DNA, 25 bp, Homo sapien
tgtgactcgtccatggccaatctgt

SEQ ID NO: 4018451 - DNA, 25 bp, Homo sapien
cagacacgtgttctccgagggtcca

SEQ ID NO: 4018452 - DNA, 25 bp, Homo sapien
gccaatctgtgactaatatgcaagg

SEQ ID NO: 4018453 - DNA, 25 bp, Homo sapien
caccacagtccccatctgcgcaggt

SEQ ID NO: 4018454 - DNA, 25 bp, Homo sapien
tccaagtcaatcagggggcaggtct

SEQ ID NO: 4018455 - DNA, 25 bp, Homo sapien
atctgcgcaggtccattgtccacct

SEQ ID NO: 4018456 - DNA, 25 bp, Homo sapien
cacctccaagtcaatcagggggcag

SEQ ID NO: 4018457 - DNA, 25 bp, Homo sapien
ggccctccatcacctgtttgtacag

SEQ ID NO: 4018458 - DNA, 25 bp, Homo sapien
ggtgacccggccctccatcacctgt

SEQ ID NO: 4018459 - DNA, 25 bp, Homo sapien
tgaggaggtcatttgcctggagaat

SEQ ID NO: 4018460 - DNA, 25 bp, Homo sapien
gtttgtacagcagaactccttgggt

SEQ ID NO: 4018461 - DNA, 25 bp, Homo sapien
tattctgaaatgtccagaggccggg

SEQ ID NO: 4018462 - DNA, 25 bp, Homo sapien
gagaaattttatcagggcaatctga

SEQ ID NO: 4018463 - DNA, 25 bp, Homo sapien
attttatcagggcaatctgaacact

SEQ ID NO: 4018464 - DNA, 25 bp, Homo sapien
gaaattttatcagggcaatctgaac

SEQ ID NO: 4018465 - DNA, 25 bp, Homo sapien
tcagtggtgtcactcgccaaccgga

SEQ ID NO: 4018466 - DNA, 25 bp, Homo sapien
ccaaccggaacagcgtgggccgcag

SEQ ID NO: 4018467 - DNA, 25 bp, Homo sapien
actcgccaaccggaacagcgtgggc

SEQ ID NO: 4018468 - DNA, 25 bp, Homo sapien
ggtgtcactcgccaaccggaacagc

SEQ ID NO: 4018469 - DNA, 25 bp, Homo sapien
gcctgcggtacatgctcagcatctc

SEQ ID NO: 4018470 - DNA, 25 bp, Homo sapien
ttcacatggcttcgcacttcctcca

SEQ ID NO: 4018471 - DNA, 25 bp, Homo sapien
ccaccgcactgaccctcttggacac

SEQ ID NO: 4018472 - DNA, 25 bp, Homo sapien
ctgccctggcctgcggtacatgctc

SEQ ID NO: 4018473 - DNA, 25 bp, Homo sapien
ggaaagagtcactattgagagagct

SEQ ID NO: 4018474 - DNA, 25 bp, Homo sapien
gaagcctgaacaagggatgggaaag

SEQ ID NO: 4018475 - DNA, 25 bp, Homo sapien
gagtcactattgagagagctcgctc

SEQ ID NO: 4018476 - DNA, 25 bp, Homo sapien
cactattgagagagctcgctcaggg

SEQ ID NO: 4018477 - DNA, 25 bp, Homo sapien
aaaagcagattcctaaacctggact

SEQ ID NO: 4018478 - DNA, 25 bp, Homo sapien
aaatgcagtttggggactggtgacc

SEQ ID NO: 4018479 - DNA, 25 bp, Homo sapien
ggggactggtgaccatgacctctgc

SEQ ID NO: 4018480 - DNA, 25 bp, Homo sapien
gggactggtgaccatgacctctgcc

SEQ ID NO: 4018481 - DNA, 25 bp, Homo sapien
caaattcttgattaaccggtttgca

SEQ ID NO: 4018482 - DNA, 25 bp, Homo sapien
aattcttgattaaccggtttgcagc

SEQ ID NO: 4018483 - DNA, 25 bp, Homo sapien
aaattcttgattaaccggtttgcag

SEQ ID NO: 4018484 - DNA, 25 bp, Homo sapien
tggttgctctttagaagccttgtca

SEQ ID NO: 4018485 - DNA, 25 bp, Homo sapien
gggtggttgctctttagaagccttg

SEQ ID NO: 4018486 - DNA, 25 bp, Homo sapien
ctgaaggtcctcggggtggttgctc

SEQ ID NO: 4018487 - DNA, 25 bp, Homo sapien
tgaaggtcctcggggtggttgctct

SEQ ID NO: 4018488 - DNA, 25 bp, Homo sapien
gacagtccccaacaacagagaattc

SEQ ID NO: 4018489 - DNA, 25 bp, Homo sapien
tggaccatgtgctttatgacacaac

SEQ ID NO: 4018490 - DNA, 25 bp, Homo sapien
tagagtgaggaatgctgtgaacatc

SEQ ID NO: 4018491 - DNA, 25 bp, Homo sapien
cagaccctggtgatcttgttcatcc

SEQ ID NO: 4018492 - DNA, 25 bp, Homo sapien
gaactagaccttgtgactgaccaag

SEQ ID NO: 4018493 - DNA, 25 bp, Homo sapien
gaacagtcatgaccaaaagcaccgc

SEQ ID NO: 4018494 - DNA, 25 bp, Homo sapien
gagtacgcagcgtgtagccttccaa

SEQ ID NO: 4018495 - DNA, 25 bp, Homo sapien
accgccagcactaggccaaagggct

SEQ ID NO: 4018496 - DNA, 25 bp, Homo sapien
aggcaccacagttatccctgggtct

SEQ ID NO: 4018497 - DNA, 25 bp, Homo sapien
caccacagttatccctgggtcttgg

SEQ ID NO: 4018498 - DNA, 25 bp, Homo sapien
cacagttatccctgggtcttggcca

SEQ ID NO: 4018499 - DNA, 25 bp, Homo sapien
acagttatccctgggtcttggccac

SEQ ID NO: 4018500 - DNA, 25 bp, Homo sapien
aaaatggatagggccgggctcactg

SEQ ID NO: 4018501 - DNA, 25 bp, Homo sapien
gccgggctcactggcactgagaaag

SEQ ID NO: 4018502 - DNA, 25 bp, Homo sapien
ggccgggctcactggcactgagaaa

SEQ ID NO: 4018503 - DNA, 25 bp, Homo sapien
gatggaaaatggatagggccgggct

SEQ ID NO: 4018504 - DNA, 25 bp, Homo sapien
taagattttatccactggtagttta

SEQ ID NO: 4018505 - DNA, 25 bp, Homo sapien
agattttatccactggtagtttagg

SEQ ID NO: 4018506 - DNA, 25 bp, Homo sapien
atccactggtagtttagggtcttgt

SEQ ID NO: 4018507 - DNA, 25 bp, Homo sapien
tatccactggtagtttagggtcttg

SEQ ID NO: 4018508 - DNA, 25 bp, Homo sapien
tgtgacagggaacaacagtccatcc

SEQ ID NO: 4018509 - DNA, 25 bp, Homo sapien
agaatccaagggaccatggtggccg

SEQ ID NO: 4018510 - DNA, 25 bp, Homo sapien
gagggtccctgatgaagctcctgaa

SEQ ID NO: 4018511 - DNA, 25 bp, Homo sapien
gccttcaaagacaacacccagtgta

SEQ ID NO: 4018512 - DNA, 25 bp, Homo sapien
catctgataagcgtctcgaatcttg

SEQ ID NO: 4018513 - DNA, 25 bp, Homo sapien
tcagcatctgataagcgtctcgaat

SEQ ID NO: 4018514 - DNA, 25 bp, Homo sapien
aagcgtctcgaatcttgatgtcttc

SEQ ID NO: 4018515 - DNA, 25 bp, Homo sapien
cttccggaaaccagactgtccaact

SEQ ID NO: 4018516 - DNA, 25 bp, Homo sapien
catgcaagagcctgggtcagagcct

SEQ ID NO: 4018517 - DNA, 25 bp, Homo sapien
ggattcaaggaattcatctcggcaa

SEQ ID NO: 4018518 - DNA, 25 bp, Homo sapien
tattcaagagacacactcgcagggt

SEQ ID NO: 4018519 - DNA, 25 bp, Homo sapien
tcagagcctgttctacaccactggg

SEQ ID NO: 4018520 - DNA, 25 bp, Homo sapien
ggacaacactttgatcagttcgttc

SEQ ID NO: 4018521 - DNA, 25 bp, Homo sapien
gaaacgaaatttggccacctcgctg

SEQ ID NO: 4018522 - DNA, 25 bp, Homo sapien
tggccacctcgctgtggaacttctc

SEQ ID NO: 4018523 - DNA, 25 bp, Homo sapien
tgatcagttcgttcaggaaacgaaa

SEQ ID NO: 4018524 - DNA, 25 bp, Homo sapien
taactgcctgaggtttatgcccagg

SEQ ID NO: 4018525 - DNA, 25 bp, Homo sapien
tagtgggccctgtgctagaactgcc

SEQ ID NO: 4018526 - DNA, 25 bp, Homo sapien
gagactgcgctggaaccaaggctaa

SEQ ID NO: 4018527 - DNA, 25 bp, Homo sapien
gctctctatagcacaaggacaggaa

SEQ ID NO: 4018528 - DNA, 25 bp, Homo sapien
ttccttctcttgcggagactggatc

SEQ ID NO: 4018529 - DNA, 25 bp, Homo sapien
ccagtagccagggcgcatgtgtggg

SEQ ID NO: 4018530 - DNA, 25 bp, Homo sapien
ctcttgcggagactggatcttgtgg

SEQ ID NO: 4018531 - DNA, 25 bp, Homo sapien
ccttctcttgcggagactggatctt

SEQ ID NO: 4018532 - DNA, 25 bp, Homo sapien
ggccctgtatggctgtgataaatac

SEQ ID NO: 4018533 - DNA, 25 bp, Homo sapien
aaatacctaggaaatgctagagcag

SEQ ID NO: 4018534 - DNA, 25 bp, Homo sapien
tcaaactggccaaatatgcgacacc

SEQ ID NO: 4018535 - DNA, 25 bp, Homo sapien
agtgcgatcaaactctgggttcaaa

SEQ ID NO: 4018536 - DNA, 25 bp, Homo sapien
tctggatagctgaccaatcctgttc

SEQ ID NO: 4018537 - DNA, 25 bp, Homo sapien
tagctgaccaatcctgttccgacat

SEQ ID NO: 4018538 - DNA, 25 bp, Homo sapien
aaattctggatagctgaccaatcct

SEQ ID NO: 4018539 - DNA, 25 bp, Homo sapien
gatagctgaccaatcctgttccgac

SEQ ID NO: 4018540 - DNA, 25 bp, Homo sapien
taaaatcctatctacccttgagtcc

SEQ ID NO: 4018541 - DNA, 25 bp, Homo sapien
cgtccccataaaacaaaagctgtct

SEQ ID NO: 4018542 - DNA, 25 bp, Homo sapien
tctgccccttctccgatagggatct

SEQ ID NO: 4018543 - DNA, 25 bp, Homo sapien
gagggtcaacggacaggtaatcacc

SEQ ID NO: 4018544 - DNA, 25 bp, Homo sapien
tgttgcttgagcaccaatgccagcc

SEQ ID NO: 4018545 - DNA, 25 bp, Homo sapien
cccaggggggtctgcggagctgtac

SEQ ID NO: 4018546 - DNA, 25 bp, Homo sapien
cggagctgtactgtggctctgacat

SEQ ID NO: 4018547 - DNA, 25 bp, Homo sapien
cagccccaggtagggtcggcccagg

SEQ ID NO: 4018548 - DNA, 25 bp, Homo sapien
tgattctctcaacaaccctaagaag

SEQ ID NO: 4018549 - DNA, 25 bp, Homo sapien
ttgtttgcagggacctgatcttggc

SEQ ID NO: 4018550 - DNA, 25 bp, Homo sapien
cagacccatgagcttttgccttcaa

SEQ ID NO: 4018551 - DNA, 25 bp, Homo sapien
taatagctagcgcttcttgggcact

SEQ ID NO: 4018552 - DNA, 25 bp, Homo sapien
aagactgcaacccacattcctgatg

SEQ ID NO: 4018553 - DNA, 25 bp, Homo sapien
ccagtggatttagcccagggatgcc

SEQ ID NO: 4018554 - DNA, 25 bp, Homo sapien
tgggtaggagtgatcccatcccact

SEQ ID NO: 4018555 - DNA, 25 bp, Homo sapien
ggaaacatggcagtatctggtgaca

SEQ ID NO: 4018556 - DNA, 25 bp, Homo sapien
acagctccagcgacgctgccgggcc

SEQ ID NO: 4018557 - DNA, 25 bp, Homo sapien
gccgactcggttcccgccacagccg

SEQ ID NO: 4018558 - DNA, 25 bp, Homo sapien
tgggccgactcggttcccgccacag

SEQ ID NO: 4018559 - DNA, 25 bp, Homo sapien
agccacagctccagcgacgctgccg

SEQ ID NO: 4018560 - DNA, 25 bp, Homo sapien
ctcttcagccgctgtagcgtcctgg

SEQ ID NO: 4018561 - DNA, 25 bp, Homo sapien
ttcagccgctgtagcgtcctggcgc

SEQ ID NO: 4018562 - DNA, 25 bp, Homo sapien
agccgctgtagcgtcctggcgctct

SEQ ID NO: 4018563 - DNA, 25 bp, Homo sapien
actgcctcttcagccgctgtagcgt

SEQ ID NO: 4018564 - DNA, 25 bp, Homo sapien
cacacagtacaccatcgatgtatta

SEQ ID NO: 4018565 - DNA, 25 bp, Homo sapien
caccatcgatgtattatttacttgc

SEQ ID NO: 4018566 - DNA, 25 bp, Homo sapien
tttcccaaaaaagtatgtcatgatt

SEQ ID NO: 4018567 - DNA, 25 bp, Homo sapien
cataattatgaaatgaatacgtgtt

SEQ ID NO: 4018568 - DNA, 25 bp, Homo sapien
atctcttgaagattctgaacatctg

SEQ ID NO: 4018569 - DNA, 25 bp, Homo sapien
tacatatttatctcttgaagattct

SEQ ID NO: 4018570 - DNA, 25 bp, Homo sapien
tatctcttgaagattctgaacatct

SEQ ID NO: 4018571 - DNA, 25 bp, Homo sapien
ttatctcttgaagattctgaacatc

SEQ ID NO: 4018572 - DNA, 25 bp, Homo sapien
gatctagtacgtctggaatgaggcc

SEQ ID NO: 4018573 - DNA, 25 bp, Homo sapien
aagatgtaaggtatagatgtcccac

SEQ ID NO: 4018574 - DNA, 25 bp, Homo sapien
gaatgaggccccagaatttgtcttt

SEQ ID NO: 4018575 - DNA, 25 bp, Homo sapien
tggtctggagaccacaacagaaagg

SEQ ID NO: 4018576 - DNA, 25 bp, Homo sapien
gcaacacaatgacagactaacacac

SEQ ID NO: 4018577 - DNA, 25 bp, Homo sapien
tataaatatgtatcagctgggtgtg

SEQ ID NO: 4018578 - DNA, 25 bp, Homo sapien
gaggctcagataggaagattgcttg

SEQ ID NO: 4018579 - DNA, 25 bp, Homo sapien
cagcctccgatatttctttacagca

SEQ ID NO: 4018580 - DNA, 25 bp, Homo sapien
agatttattgctctcttgcctaggc

SEQ ID NO: 4018581 - DNA, 25 bp, Homo sapien
agtacgataataaatcttatttaag

SEQ ID NO: 4018582 - DNA, 25 bp, Homo sapien
atttaagatttattgctctcttgcc

SEQ ID NO: 4018583 - DNA, 25 bp, Homo sapien
ttaagatttattgctctcttgccta

SEQ ID NO: 4018584 - DNA, 25 bp, Homo sapien
cacccatctacctgggaaactccta

SEQ ID NO: 4018585 - DNA, 25 bp, Homo sapien
ctactcttggtccagtcctgaacaa

SEQ ID NO: 4018586 - DNA, 25 bp, Homo sapien
cctactcttggtccagtcctgaaca

SEQ ID NO: 4018587 - DNA, 25 bp, Homo sapien
ccttccaacacccatctacctggga

SEQ ID NO: 4018588 - DNA, 25 bp, Homo sapien
cacgcctggctgacatttatatttt

SEQ ID NO: 4018589 - DNA, 25 bp, Homo sapien
tcatgatccacctgacttcacctcc

SEQ ID NO: 4018590 - DNA, 25 bp, Homo sapien
cctggctgacatttatattttttga

SEQ ID NO: 4018591 - DNA, 25 bp, Homo sapien
tcacctcccaaagtgctaggattac

SEQ ID NO: 4018592 - DNA, 25 bp, Homo sapien
tggtgatgtaggagaagagagatga

SEQ ID NO: 4018593 - DNA, 25 bp, Homo sapien
tgatgtaggagaagagagatgattt

SEQ ID NO: 4018594 - DNA, 25 bp, Homo sapien
ttaattggtgatgtaggagaagaga

SEQ ID NO: 4018595 - DNA, 25 bp, Homo sapien
gatgtaggagaagagagatgattta

SEQ ID NO: 4018596 - DNA, 25 bp, Homo sapien
cagggctagggcagctgttggccaa

SEQ ID NO: 4018597 - DNA, 25 bp, Homo sapien
tcagggctagggcagctgttggcca

SEQ ID NO: 4018598 - DNA, 25 bp, Homo sapien
ttcagggctagggcagctgttggcc

SEQ ID NO: 4018599 - DNA, 25 bp, Homo sapien
cttcagggctagggcagctgttggc

SEQ ID NO: 4018600 - DNA, 25 bp, Homo sapien
catgtgtgtctgacgttccggagca

SEQ ID NO: 4018601 - DNA, 25 bp, Homo sapien
ttttgcctcgtactataacctcgga

SEQ ID NO: 4018602 - DNA, 25 bp, Homo sapien
tacgagcattatctgacacctggga

SEQ ID NO: 4018603 - DNA, 25 bp, Homo sapien
tagggtctcccatagaggtcacaag

SEQ ID NO: 4018604 - DNA, 25 bp, Homo sapien
ggggttcatgtaccctgccaccatc

SEQ ID NO: 4018605 - DNA, 25 bp, Homo sapien
ctagaagcctggtaggggttcatgt

SEQ ID NO: 4018606 - DNA, 25 bp, Homo sapien
cctggtaggggttcatgtaccctgc

SEQ ID NO: 4018607 - DNA, 25 bp, Homo sapien
ggtaggggttcatgtaccctgccac

SEQ ID NO: 4018608 - DNA, 25 bp, Homo sapien
cgaggtggatttgaagagaaagcca

SEQ ID NO: 4018609 - DNA, 25 bp, Homo sapien
caagaagcatatctcatttcagaaa

SEQ ID NO: 4018610 - DNA, 25 bp, Homo sapien
gaaggacgaggtggatttgaagaga

SEQ ID NO: 4018611 - DNA, 25 bp, Homo sapien
cttataagtcatggaggaaggacga

SEQ ID NO: 4018612 - DNA, 25 bp, Homo sapien
ctggaaaaacggaacagatgacgtt

SEQ ID NO: 4018613 - DNA, 25 bp, Homo sapien
ggctgccccaaggttcaagaataaa

SEQ ID NO: 4018614 - DNA, 25 bp, Homo sapien
caaggttcaagaataaagggtagca

SEQ ID NO: 4018615 - DNA, 25 bp, Homo sapien
ggtagcataagacaagagtgcttac

SEQ ID NO: 4018616 - DNA, 25 bp, Homo sapien
gcttgtgtcacgtatcctttgctgc

SEQ ID NO: 4018617 - DNA, 25 bp, Homo sapien
agtctggtgtccagttcagccctgc

SEQ ID NO: 4018618 - DNA, 25 bp, Homo sapien
tttgctgctctgagtccttggggcc

SEQ ID NO: 4018619 - DNA, 25 bp, Homo sapien
cgttgagaaacccctggaacctcag

SEQ ID NO: 4018620 - DNA, 25 bp, Homo sapien
tcttagaagaggaacgttgggcaca

SEQ ID NO: 4018621 - DNA, 25 bp, Homo sapien
tgtgcatggagggaagaccgcacaa

SEQ ID NO: 4018622 - DNA, 25 bp, Homo sapien
cagtccaactggtgttcttagaaga

SEQ ID NO: 4018623 - DNA, 25 bp, Homo sapien
tgaggctggttaaagttaaaatcca

SEQ ID NO: 4018624 - DNA, 25 bp, Homo sapien
tgtaatgtgtgagaaaccagacccg

SEQ ID NO: 4018625 - DNA, 25 bp, Homo sapien
tcacaggttcttagggcgatctcca

SEQ ID NO: 4018626 - DNA, 25 bp, Homo sapien
caaaaacgtgcctgtggtggatcac

SEQ ID NO: 4018627 - DNA, 25 bp, Homo sapien
accagacccggagaatgcctttcca

SEQ ID NO: 4018628 - DNA, 25 bp, Homo sapien
ggccaacatcatctcagctacagga

SEQ ID NO: 4018629 - DNA, 25 bp, Homo sapien
aggccaacatcatctcagctacagg

SEQ ID NO: 4018630 - DNA, 25 bp, Homo sapien
aaggccaacatcatctcagctacag

SEQ ID NO: 4018631 - DNA, 25 bp, Homo sapien
ccaacatcatctcagctacaggagg

SEQ ID NO: 4018632 - DNA, 25 bp, Homo sapien
tattcactgtacctaacacaatgct

SEQ ID NO: 4018633 - DNA, 25 bp, Homo sapien
agtaggtactcaatagtgtctgttg

SEQ ID NO: 4018634 - DNA, 25 bp, Homo sapien
tctatattgtattcactgtacctaa

SEQ ID NO: 4018635 - DNA, 25 bp, Homo sapien
tattgtattcactgtacctaacaca

SEQ ID NO: 4018636 - DNA, 25 bp, Homo sapien
actcaatattgagctcagtgcctgc

SEQ ID NO: 4018637 - DNA, 25 bp, Homo sapien
tcaaaggatcaatgaggggctccag

SEQ ID NO: 4018638 - DNA, 25 bp, Homo sapien
tcatgtttcattcacctttgtatac

SEQ ID NO: 4018639 - DNA, 25 bp, Homo sapien
cacctttgtatactcaatattgagc

SEQ ID NO: 4018640 - DNA, 25 bp, Homo sapien
tgctgtccactgagggccatccgaa

SEQ ID NO: 4018641 - DNA, 25 bp, Homo sapien
ccgaaggagtttcatcacattactg

SEQ ID NO: 4018642 - DNA, 25 bp, Homo sapien
tccattcagcatatcctgagttaag

SEQ ID NO: 4018643 - DNA, 25 bp, Homo sapien
ttactgtacttggtgccttccagac

SEQ ID NO: 4018644 - DNA, 25 bp, Homo sapien
agccagtgaagggtcacttcttcac

SEQ ID NO: 4018645 - DNA, 25 bp, Homo sapien
gtgaagggtcacttcttcactggcc

SEQ ID NO: 4018646 - DNA, 25 bp, Homo sapien
tgaagggtcacttcttcactggcca

SEQ ID NO: 4018647 - DNA, 25 bp, Homo sapien
gcgaaagccagtgaagggtcacttc

SEQ ID NO: 4018648 - DNA, 25 bp, Homo sapien
acatccaccttctccgagatggcgt

SEQ ID NO: 4018649 - DNA, 25 bp, Homo sapien
ggcgagtccacaggtaagagtatac

SEQ ID NO: 4018650 - DNA, 25 bp, Homo sapien
agctgtgctcgacctactgcagggc

SEQ ID NO: 4018651 - DNA, 25 bp, Homo sapien
ccaagtcctgcaggcggcaaatgtg

SEQ ID NO: 4018652 - DNA, 25 bp, Homo sapien
gaggcagtcattgaatgcactaggg

SEQ ID NO: 4018653 - DNA, 25 bp, Homo sapien
gaaggaggcagtcattgaatgcact

SEQ ID NO: 4018654 - DNA, 25 bp, Homo sapien
cagtcattgaatgcactagggacag

SEQ ID NO: 4018655 - DNA, 25 bp, Homo sapien
gtcattgaatgcactagggacaggg

SEQ ID NO: 4018656 - DNA, 25 bp, Homo sapien
tctcattgctcaccagccgctggag

SEQ ID NO: 4018657 - DNA, 25 bp, Homo sapien
tcattgctcaccagccgctggaggt

SEQ ID NO: 4018658 - DNA, 25 bp, Homo sapien
ggctctcattgctcaccagccgctg

SEQ ID NO: 4018659 - DNA, 25 bp, Homo sapien
ctggctctcattgctcaccagccgc

SEQ ID NO: 4018660 - DNA, 25 bp, Homo sapien
gaatgacatatcaggtcccatgagc

SEQ ID NO: 4018661 - DNA, 25 bp, Homo sapien
gaaagtcccaagcaactcggagacg

SEQ ID NO: 4018662 - DNA, 25 bp, Homo sapien
ggctaggcaacaacaagcaatccac

SEQ ID NO: 4018663 - DNA, 25 bp, Homo sapien
gagccctccctttcgcaagctagaa

SEQ ID NO: 4018664 - DNA, 25 bp, Homo sapien
ctgtgtcaggttgaactgtgtgatc

SEQ ID NO: 4018665 - DNA, 25 bp, Homo sapien
caggttgaactgtgtgatcagctcc

SEQ ID NO: 4018666 - DNA, 25 bp, Homo sapien
gtgtgatcagctccggcagggtcct

SEQ ID NO: 4018667 - DNA, 25 bp, Homo sapien
tgacaggtgacctgtgtcaggttga

SEQ ID NO: 4018668 - DNA, 25 bp, Homo sapien
gggaagccgtcgctcttcatgatga

SEQ ID NO: 4018669 - DNA, 25 bp, Homo sapien
caaaacctgagccacagttggtgat

SEQ ID NO: 4018670 - DNA, 25 bp, Homo sapien
ccaacaaggaatcgggcaggaagcc

SEQ ID NO: 4018671 - DNA, 25 bp, Homo sapien
tattccagccatagaccaggtcctg

SEQ ID NO: 4018672 - DNA, 25 bp, Homo sapien
gcctgtggaccttgctcattaaaaa

SEQ ID NO: 4018673 - DNA, 25 bp, Homo sapien
gcttctaacatagccccagtcattc

SEQ ID NO: 4018674 - DNA, 25 bp, Homo sapien
agtcattctcgccttctggtgtttc

SEQ ID NO: 4018675 - DNA, 25 bp, Homo sapien
ctttctgagaccaaatcttggcttc

SEQ ID NO: 4018676 - DNA, 25 bp, Homo sapien
ggggcgtctggtggttccgcaaggc

SEQ ID NO: 4018677 - DNA, 25 bp, Homo sapien
cggggcgtctggtggttccgcaagg

SEQ ID NO: 4018678 - DNA, 25 bp, Homo sapien
ccggcgggggctctcatcaggcggg

SEQ ID NO: 4018679 - DNA, 25 bp, Homo sapien
tgggcatacagctccaaccgctgag

SEQ ID NO: 4018680 - DNA, 25 bp, Homo sapien
atacagctccaaccgctgagattgc

SEQ ID NO: 4018681 - DNA, 25 bp, Homo sapien
gggtaagcagctccggtcttcagca

SEQ ID NO: 4018682 - DNA, 25 bp, Homo sapien
acacatctcaaaatagtcttggggt

SEQ ID NO: 4018683 - DNA, 25 bp, Homo sapien
acacacatctcaaaatagtcttggg

SEQ ID NO: 4018684 - DNA, 25 bp, Homo sapien
aacacacatctcaaaatagtcttgg

SEQ ID NO: 4018685 - DNA, 25 bp, Homo sapien
gaacacacatctcaaaatagtcttg

SEQ ID NO: 4018686 - DNA, 25 bp, Homo sapien
ttgtacaaggcagtgcggaggccac

SEQ ID NO: 4018687 - DNA, 25 bp, Homo sapien
cagtgcggaggccacccaggtgcaa

SEQ ID NO: 4018688 - DNA, 25 bp, Homo sapien
caggcacaacgcgagtctgatctgt

SEQ ID NO: 4018689 - DNA, 25 bp, Homo sapien
tctagcctcaggatgaagctcccct

SEQ ID NO: 4018690 - DNA, 25 bp, Homo sapien
gcccacagccctaagtctccacaat

SEQ ID NO: 4018691 - DNA, 25 bp, Homo sapien
cacagccctaagtctccacaatgag

SEQ ID NO: 4018692 - DNA, 25 bp, Homo sapien
ccctaagtctccacaatgagctcat

SEQ ID NO: 4018693 - DNA, 25 bp, Homo sapien
cagccctaagtctccacaatgagct

SEQ ID NO: 4018694 - DNA, 25 bp, Homo sapien
tttttataagtgtctgcggcagcca

SEQ ID NO: 4018695 - DNA, 25 bp, Homo sapien
cagtaaagccttctggagcgtcctt

SEQ ID NO: 4018696 - DNA, 25 bp, Homo sapien
tatcctgtttcacttcccgcatggc

SEQ ID NO: 4018697 - DNA, 25 bp, Homo sapien
tgtatcccagcgtctacaacacctg

SEQ ID NO: 4018698 - DNA, 25 bp, Homo sapien
ggcctcggcctgtagcgtcacgtcc

SEQ ID NO: 4018699 - DNA, 25 bp, Homo sapien
ctgtagcgtcacgtccgccagggtt

SEQ ID NO: 4018700 - DNA, 25 bp, Homo sapien
gtagcgtcacgtccgccagggttac

SEQ ID NO: 4018701 - DNA, 25 bp, Homo sapien
ggcctgtagcgtcacgtccgccagg

SEQ ID NO: 4018702 - DNA, 25 bp, Homo sapien
ggctgggagcgaaccgcactcgcac

SEQ ID NO: 4018703 - DNA, 25 bp, Homo sapien
aggttggcctcgcgccgtcctacgg

SEQ ID NO: 4018704 - DNA, 25 bp, Homo sapien
accccggcatcagtgcccaggttgg

SEQ ID NO: 4018705 - DNA, 25 bp, Homo sapien
cgccgaaggcctctcgcgctgcagc

SEQ ID NO: 4018706 - DNA, 25 bp, Homo sapien
tttccggccgggctgtgagagatta

SEQ ID NO: 4018707 - DNA, 25 bp, Homo sapien
gcggtgggtgttgtacacaatcatc

SEQ ID NO: 4018708 - DNA, 25 bp, Homo sapien
tctgcgggagcggtgggtgttgtac

SEQ ID NO: 4018709 - DNA, 25 bp, Homo sapien
ctgctgcgggggccaatctcagcca

SEQ ID NO: 4018710 - DNA, 25 bp, Homo sapien
ggttcagaggttgtaaatctcccaa

SEQ ID NO: 4018711 - DNA, 25 bp, Homo sapien
tgtataagggactcgtccccgagga

SEQ ID NO: 4018712 - DNA, 25 bp, Homo sapien
caattattcaatgctagccaccgta

SEQ ID NO: 4018713 - DNA, 25 bp, Homo sapien
ttagcagtaaacacacccaaagatg

SEQ ID NO: 4018714 - DNA, 25 bp, Homo sapien
tttatggcagcagttgggtgccgca

SEQ ID NO: 4018715 - DNA, 25 bp, Homo sapien
atggaaatttatggcagcagttggg

SEQ ID NO: 4018716 - DNA, 25 bp, Homo sapien
tgccgcagagtggaggtgacaacta

SEQ ID NO: 4018717 - DNA, 25 bp, Homo sapien
ccgcagagtggaggtgacaactacc

SEQ ID NO: 4018718 - DNA, 25 bp, Homo sapien
ggtgggttagtaagccacatatttc

SEQ ID NO: 4018719 - DNA, 25 bp, Homo sapien
tttttcattctctcgcttcctcaat

SEQ ID NO: 4018720 - DNA, 25 bp, Homo sapien
ggttagtaagccacatatttctgtc

SEQ ID NO: 4018721 - DNA, 25 bp, Homo sapien
tcattctctcgcttcctcaatttga

SEQ ID NO: 4018722 - DNA, 25 bp, Homo sapien
cttttggtacctcatcaacgcttcc

SEQ ID NO: 4018723 - DNA, 25 bp, Homo sapien
tttggtacctcatcaacgcttcctt

SEQ ID NO: 4018724 - DNA, 25 bp, Homo sapien
cctcatcaacgcttcctttcctggg

SEQ ID NO: 4018725 - DNA, 25 bp, Homo sapien
tggtacctcatcaacgcttcctttc

SEQ ID NO: 4018726 - DNA, 25 bp, Homo sapien
cacacttgctgtggtgttcgttgag

SEQ ID NO: 4018727 - DNA, 25 bp, Homo sapien
ggtgttcgttgagcagcagagtatc

SEQ ID NO: 4018728 - DNA, 25 bp, Homo sapien
ctgctcagtcttgggcaaggagctc

SEQ ID NO: 4018729 - DNA, 25 bp, Homo sapien
agctgctcagtcttgggcaaggagc

SEQ ID NO: 4018730 - DNA, 25 bp, Homo sapien
gttggatgattgtctgcacccctca

SEQ ID NO: 4018731 - DNA, 25 bp, Homo sapien
gctggttggatgattgtctgcaccc

SEQ ID NO: 4018732 - DNA, 25 bp, Homo sapien
ggttggatgattgtctgcacccctc

SEQ ID NO: 4018733 - DNA, 25 bp, Homo sapien
tggttggatgattgtctgcacccct

SEQ ID NO: 4018734 - DNA, 25 bp, Homo sapien
cattttggattctaggctgtcaccc

SEQ ID NO: 4018735 - DNA, 25 bp, Homo sapien
tgtgttcgcccaagatgactattcc

SEQ ID NO: 4018736 - DNA, 25 bp, Homo sapien
catctgaccctagcaggttggccag

SEQ ID NO: 4018737 - DNA, 25 bp, Homo sapien
aagtgtcctttatcccaggttcaga

SEQ ID NO: 4018738 - DNA, 25 bp, Homo sapien
taagtagaacatcatctcgggtcag

SEQ ID NO: 4018739 - DNA, 25 bp, Homo sapien
gagagcagacatagcaccagaagcc

SEQ ID NO: 4018740 - DNA, 25 bp, Homo sapien
ttttcgatccgtgtctgggccacag

SEQ ID NO: 4018741 - DNA, 25 bp, Homo sapien
taaatgacaccttttcgtacggagc

SEQ ID NO: 4018742 - DNA, 25 bp, Homo sapien
gctggtttccggagagtgactgtaa

SEQ ID NO: 4018743 - DNA, 25 bp, Homo sapien
ccttactgtcagagggaccagatct

SEQ ID NO: 4018744 - DNA, 25 bp, Homo sapien
ccttggcagaagagcgtgaccctgt

SEQ ID NO: 4018745 - DNA, 25 bp, Homo sapien
gactgtaacagcgttgactcgaagc

SEQ ID NO: 4018746 - DNA, 25 bp, Homo sapien
tgccaggctgggtggttctactgct

SEQ ID NO: 4018747 - DNA, 25 bp, Homo sapien
gataaagtcatctccagttaggatc

SEQ ID NO: 4018748 - DNA, 25 bp, Homo sapien
ttcacacctgttgtcttggaagagg

SEQ ID NO: 4018749 - DNA, 25 bp, Homo sapien
ccttcgtaatagtgcctggcggcct

SEQ ID NO: 4018750 - DNA, 25 bp, Homo sapien
ggtaaaatgtacagctgccatggga

SEQ ID NO: 4018751 - DNA, 25 bp, Homo sapien
cactcaagtggcagtacagtcagac

SEQ ID NO: 4018752 - DNA, 25 bp, Homo sapien
taggcagacacaatcacagacgctt

SEQ ID NO: 4018753 - DNA, 25 bp, Homo sapien
tgaatgggctgtttcactgcaggcg

SEQ ID NO: 4018754 - DNA, 25 bp, Homo sapien
ttaaatacaagtccatcagaatcac

SEQ ID NO: 4018755 - DNA, 25 bp, Homo sapien
tcatctgagtcctctctcagcaaag

SEQ ID NO: 4018756 - DNA, 25 bp, Homo sapien
agacattcgtcactatcatctgagt

SEQ ID NO: 4018757 - DNA, 25 bp, Homo sapien
caagaatgccaaaatgtgtcctcac

SEQ ID NO: 4018758 - DNA, 25 bp, Homo sapien
gacagctgacaatcaagggagttct

SEQ ID NO: 4018759 - DNA, 25 bp, Homo sapien
ccttggctgagtaattgagggagac

SEQ ID NO: 4018760 - DNA, 25 bp, Homo sapien
gagaccaccaggcttatagtgtgtg

SEQ ID NO: 4018761 - DNA, 25 bp, Homo sapien
caaaagccccaggtaggtcctatca

SEQ ID NO: 4018762 - DNA, 25 bp, Homo sapien
tccttcttatctgcaatgtaatcta

SEQ ID NO: 4018763 - DNA, 25 bp, Homo sapien
cttgtggacacattaacttttcagc

SEQ ID NO: 4018764 - DNA, 25 bp, Homo sapien
taacttttcagcatctatatcagga

SEQ ID NO: 4018765 - DNA, 25 bp, Homo sapien
tgtaatctacaatttcttgtggaca

SEQ ID NO: 4018766 - DNA, 25 bp, Homo sapien
tcacgcagaaacagccatggaacct

SEQ ID NO: 4018767 - DNA, 25 bp, Homo sapien
tggttcgcgttacccgagctcagga

SEQ ID NO: 4018768 - DNA, 25 bp, Homo sapien
tctgggtgcgtctcttgtcctggca

SEQ ID NO: 4018769 - DNA, 25 bp, Homo sapien
ggaattttaactaggccctgctctg

SEQ ID NO: 4018770 - DNA, 25 bp, Homo sapien
taagcccaggtctttcataaaatga

SEQ ID NO: 4018771 - DNA, 25 bp, Homo sapien
gataatctccacttggtccaaactg

SEQ ID NO: 4018772 - DNA, 25 bp, Homo sapien
ggccatgataatctccacttggtcc

SEQ ID NO: 4018773 - DNA, 25 bp, Homo sapien
gtctaagcccaggtctttcataaaa

SEQ ID NO: 4018774 - DNA, 25 bp, Homo sapien
gtaaagaacacggtcctggatgccc

SEQ ID NO: 4018775 - DNA, 25 bp, Homo sapien
tgtcgctatactggcggcacaactg

SEQ ID NO: 4018776 - DNA, 25 bp, Homo sapien
tctctgggtcaatcttgtcatagag

SEQ ID NO: 4018777 - DNA, 25 bp, Homo sapien
tggatgccctctaacgtcaaaggag

SEQ ID NO: 4018778 - DNA, 25 bp, Homo sapien
ctagagcgacggcaggaaggaaaca

SEQ ID NO: 4018779 - DNA, 25 bp, Homo sapien
gccaactaggttgtcagcattgtcc

SEQ ID NO: 4018780 - DNA, 25 bp, Homo sapien
catgaggccaactaggttgtcagca

SEQ ID NO: 4018781 - DNA, 25 bp, Homo sapien
actaggttgtcagcattgtcctcag

SEQ ID NO: 4018782 - DNA, 25 bp, Homo sapien
acaactacccatgaggccaactagg

SEQ ID NO: 4018783 - DNA, 25 bp, Homo sapien
attcttatgcctctgcctcccaagt

SEQ ID NO: 4018784 - DNA, 25 bp, Homo sapien
aacttctgcctcccaggttcaagtg

SEQ ID NO: 4018785 - DNA, 25 bp, Homo sapien
tgcagtgttgtgaccttggctcacc

SEQ ID NO: 4018786 - DNA, 25 bp, Homo sapien
ttatgcctctgcctcccaagtagct

SEQ ID NO: 4018787 - DNA, 25 bp, Homo sapien
atcagaatcccggtactccactggg

SEQ ID NO: 4018788 - DNA, 25 bp, Homo sapien
gactggtccactctacacaggcagc

SEQ ID NO: 4018789 - DNA, 25 bp, Homo sapien
taaagagtgatgaccctctgggcta

SEQ ID NO: 4018790 - DNA, 25 bp, Homo sapien
tctctacaaactgccgactggtcca

SEQ ID NO: 4018791 - DNA, 25 bp, Homo sapien
tatcccagctagtcaagggactgag

SEQ ID NO: 4018792 - DNA, 25 bp, Homo sapien
gtatctgtaggctgatgcaataaca

SEQ ID NO: 4018793 - DNA, 25 bp, Homo sapien
gaaaagagctgagactgataattca

SEQ ID NO: 4018794 - DNA, 25 bp, Homo sapien
caaaagttgtcactcagtccttgag

SEQ ID NO: 4018795 - DNA, 25 bp, Homo sapien
tacccaggaaaactgccttagctcc

SEQ ID NO: 4018796 - DNA, 25 bp, Homo sapien
ctcgggagcccaccaacatttaagg

SEQ ID NO: 4018797 - DNA, 25 bp, Homo sapien
taacagaaaccaggagtgaagagtc

SEQ ID NO: 4018798 - DNA, 25 bp, Homo sapien
catttaagggttaggcacaccaggt

SEQ ID NO: 4018799 - DNA, 25 bp, Homo sapien
tgaatccattacactgtcagtgaac

SEQ ID NO: 4018800 - DNA, 25 bp, Homo sapien
acttttcaccttttgatacagccaa

SEQ ID NO: 4018801 - DNA, 25 bp, Homo sapien
caacagggcagtgcccaatgaatga

SEQ ID NO: 4018802 - DNA, 25 bp, Homo sapien
tgatacagccaacagggcagtgccc

SEQ ID NO: 4018803 - DNA, 25 bp, Homo sapien
gaatccgcttataggaagagcctgc

SEQ ID NO: 4018804 - DNA, 25 bp, Homo sapien
gcacatcccgtaaatactggtcgcg

SEQ ID NO: 4018805 - DNA, 25 bp, Homo sapien
caaatccttattggtcaaaggtcac

SEQ ID NO: 4018806 - DNA, 25 bp, Homo sapien
gtggacccgcgcaattcaaatcctt

SEQ ID NO: 4018807 - DNA, 25 bp, Homo sapien
gagccaggctaggagacttgtccaa

SEQ ID NO: 4018808 - DNA, 25 bp, Homo sapien
tccaaagtttcggtaagcggcagcc

SEQ ID NO: 4018809 - DNA, 25 bp, Homo sapien
tccgcaaggtagagaccaggatccc

SEQ ID NO: 4018810 - DNA, 25 bp, Homo sapien
gaccgctattttgagaccgtacgag

SEQ ID NO: 4018811 - DNA, 25 bp, Homo sapien
cttgccaagcggcagcaaagtcacc

SEQ ID NO: 4018812 - DNA, 25 bp, Homo sapien
ttgccaagcggcagcaaagtcacca

SEQ ID NO: 4018813 - DNA, 25 bp, Homo sapien
caagcggcagcaaagtcaccacgag

SEQ ID NO: 4018814 - DNA, 25 bp, Homo sapien
cggcagcaaagtcaccacgagtcac

SEQ ID NO: 4018815 - DNA, 25 bp, Homo sapien
cagcggcgcaaaggccgcgggcagg

SEQ ID NO: 4018816 - DNA, 25 bp, Homo sapien
cgcgagcactaaggccggctgcaaa

SEQ ID NO: 4018817 - DNA, 25 bp, Homo sapien
ggtccccgcggagcagagagcggtg

SEQ ID NO: 4018818 - DNA, 25 bp, Homo sapien
gcaaagtcccgagcctcgtctgggt

SEQ ID NO: 4018819 - DNA, 25 bp, Homo sapien
tcctttccggcggcgcgcaggcgac

SEQ ID NO: 4018820 - DNA, 25 bp, Homo sapien
gttcctttccggcggcgcgcaggcg

SEQ ID NO: 4018821 - DNA, 25 bp, Homo sapien
ttcctttccggcggcgcgcaggcga

SEQ ID NO: 4018822 - DNA, 25 bp, Homo sapien
ggttcctttccggcggcgcgcaggc

SEQ ID NO: 4018823 - DNA, 25 bp, Homo sapien
gtcgggcaccgccggcggtggcggc

SEQ ID NO: 4018824 - DNA, 25 bp, Homo sapien
ctgtcgggcaccgccggcggtggcg

SEQ ID NO: 4018825 - DNA, 25 bp, Homo sapien
tcgggcaccgccggcggtggcggcc

SEQ ID NO: 4018826 - DNA, 25 bp, Homo sapien
tgtcgggcaccgccggcggtggcgg

SEQ ID NO: 4018827 - DNA, 25 bp, Homo sapien
gagcccatccaggttcggggacgaa

SEQ ID NO: 4018828 - DNA, 25 bp, Homo sapien
gacgaacaactgcttggtgtcacaa

SEQ ID NO: 4018829 - DNA, 25 bp, Homo sapien
actgtgcagacgtcgccgtctttcc

SEQ ID NO: 4018830 - DNA, 25 bp, Homo sapien
ttggtgtcacaactaaactgtgcag

SEQ ID NO: 4018831 - DNA, 25 bp, Homo sapien
ttaagtgtcattcagatattctcct

SEQ ID NO: 4018832 - DNA, 25 bp, Homo sapien
gtctggacataaacaagcaatcatt

SEQ ID NO: 4018833 - DNA, 25 bp, Homo sapien
catccaagatcagtggtgctaccat

SEQ ID NO: 4018834 - DNA, 25 bp, Homo sapien
tactaagaggcccaatatatccaga

SEQ ID NO: 4018835 - DNA, 25 bp, Homo sapien
tgagagtctgtacccgaccatttca

SEQ ID NO: 4018836 - DNA, 25 bp, Homo sapien
caaaagaccaatgttggtcagagac

SEQ ID NO: 4018837 - DNA, 25 bp, Homo sapien
aggagggcagtacactgaccgagaa

SEQ ID NO: 4018838 - DNA, 25 bp, Homo sapien
gctgcacagtgatctttcacgtcac

SEQ ID NO: 4018839 - DNA, 25 bp, Homo sapien
tggaggaagacagtacagcatcaca

SEQ ID NO: 4018840 - DNA, 25 bp, Homo sapien
ggaggaagacagtacagcatcacac

SEQ ID NO: 4018841 - DNA, 25 bp, Homo sapien
ctggaggaagacagtacagcatcac

SEQ ID NO: 4018842 - DNA, 25 bp, Homo sapien
aacacagggcttcgcaacgactcac

SEQ ID NO: 4018843 - DNA, 25 bp, Homo sapien
cttagggttaatcacaatgagctga

SEQ ID NO: 4018844 - DNA, 25 bp, Homo sapien
acgactcactctctttggcacaggg

SEQ ID NO: 4018845 - DNA, 25 bp, Homo sapien
cacgctgagagtcgtcttagggtta

SEQ ID NO: 4018846 - DNA, 25 bp, Homo sapien
tcagaccagcccacaatagcctatt

SEQ ID NO: 4018847 - DNA, 25 bp, Homo sapien
catgtgcagggagtgctcaaattag

SEQ ID NO: 4018848 - DNA, 25 bp, Homo sapien
aaatgtgttaaagttctctcctggc

SEQ ID NO: 4018849 - DNA, 25 bp, Homo sapien
aaaacaatcttgtacatggtggctg

SEQ ID NO: 4018850 - DNA, 25 bp, Homo sapien
catttcagaataggctttgtgacag

SEQ ID NO: 4018851 - DNA, 25 bp, Homo sapien
catctttttcaggagttgaccagtt

SEQ ID NO: 4018852 - DNA, 25 bp, Homo sapien
ctttgtgacagactgaagcttggta

SEQ ID NO: 4018853 - DNA, 25 bp, Homo sapien
ttggtaagaatcatcaatgtgcatc

SEQ ID NO: 4018854 - DNA, 25 bp, Homo sapien
tattaggcttccagtcacccagtga

SEQ ID NO: 4018855 - DNA, 25 bp, Homo sapien
cttattcgaaggtagacagttggtc

SEQ ID NO: 4018856 - DNA, 25 bp, Homo sapien
cccagtgagcagagtgggccttgcc

SEQ ID NO: 4018857 - DNA, 25 bp, Homo sapien
tttggttctctaagccagtgggaca

SEQ ID NO: 4018858 - DNA, 25 bp, Homo sapien
cctcagcaaaagttagtatagtctc

SEQ ID NO: 4018859 - DNA, 25 bp, Homo sapien
cagcaaaagttagtatagtctcctc

SEQ ID NO: 4018860 - DNA, 25 bp, Homo sapien
ttcttgcatcccttggacctcagca

SEQ ID NO: 4018861 - DNA, 25 bp, Homo sapien
aaaagttagtatagtctcctcaggg

SEQ ID NO: 4018862 - DNA, 25 bp, Homo sapien
tatttccagacttcagtagtacttg

SEQ ID NO: 4018863 - DNA, 25 bp, Homo sapien
aactagcctcctctttgtcaggcca

SEQ ID NO: 4018864 - DNA, 25 bp, Homo sapien
tctacttgttgatcagaaagggtcc

SEQ ID NO: 4018865 - DNA, 25 bp, Homo sapien
gaaagggtcccactgctactaacta

SEQ ID NO: 4018866 - DNA, 25 bp, Homo sapien
cacacacgagattatacacatcagg

SEQ ID NO: 4018867 - DNA, 25 bp, Homo sapien
tccaaatttcccaaagctacacaca

SEQ ID NO: 4018868 - DNA, 25 bp, Homo sapien
cacatcaggcactggaactatctgt

SEQ ID NO: 4018869 - DNA, 25 bp, Homo sapien
caggcactggaactatctgtaatac

SEQ ID NO: 4018870 - DNA, 25 bp, Homo sapien
gggtgctcactatacaacttttctg

SEQ ID NO: 4018871 - DNA, 25 bp, Homo sapien
tctgttctgccttgcatggtcatag

SEQ ID NO: 4018872 - DNA, 25 bp, Homo sapien
taagctgcccatctacattatcagg

SEQ ID NO: 4018873 - DNA, 25 bp, Homo sapien
tgtgataaagcgaacaaagcaggat

SEQ ID NO: 4018874 - DNA, 25 bp, Homo sapien
gatacatggctctttacaaccggct

SEQ ID NO: 4018875 - DNA, 25 bp, Homo sapien
cacatctacggaacaggaacctgaa

SEQ ID NO: 4018876 - DNA, 25 bp, Homo sapien
tctgcgaagtgccaggtataaagtt

SEQ ID NO: 4018877 - DNA, 25 bp, Homo sapien
cttcgcaagcagttatgatacatgg

SEQ ID NO: 4018878 - DNA, 25 bp, Homo sapien
cagttctgttaaagtggcactcgag

SEQ ID NO: 4018879 - DNA, 25 bp, Homo sapien
caacagttctgttaaagtggcactc

SEQ ID NO: 4018880 - DNA, 25 bp, Homo sapien
atggcaacagttctgttaaagtggc

SEQ ID NO: 4018881 - DNA, 25 bp, Homo sapien
gttctgttaaagtggcactcgagtg

SEQ ID NO: 4018882 - DNA, 25 bp, Homo sapien
gcataagtatgcaaagtgatgaatt

SEQ ID NO: 4018883 - DNA, 25 bp, Homo sapien
ttatgcaaagcataagtatgcaaag

SEQ ID NO: 4018884 - DNA, 25 bp, Homo sapien
gcaaagcataagtatgcaaagtgat

SEQ ID NO: 4018885 - DNA, 25 bp, Homo sapien
aagcataagtatgcaaagtgatgaa

SEQ ID NO: 4018886 - DNA, 25 bp, Homo sapien
taggttgcctgggtttatgctatca

SEQ ID NO: 4018887 - DNA, 25 bp, Homo sapien
ctttaactctgaaaccaattgtagg

SEQ ID NO: 4018888 - DNA, 25 bp, Homo sapien
tgaaaccaattgtaggttgcctggg

SEQ ID NO: 4018889 - DNA, 25 bp, Homo sapien
tgggtttatgctatcagaagcagga

SEQ ID NO: 4018890 - DNA, 25 bp, Homo sapien
gtcattatcatcaggcgcaaccgta

SEQ ID NO: 4018891 - DNA, 25 bp, Homo sapien
ccctatgaaatggagccgtgaaagc

SEQ ID NO: 4018892 - DNA, 25 bp, Homo sapien
tttttgactcaaagggctccactgg

SEQ ID NO: 4018893 - DNA, 25 bp, Homo sapien
gaaaggcccgtctttgtatgctggc

SEQ ID NO: 4018894 - DNA, 25 bp, Homo sapien
tccttggacctgttaacaatcgaca

SEQ ID NO: 4018895 - DNA, 25 bp, Homo sapien
tgggcaactgccttcctagacaagt

SEQ ID NO: 4018896 - DNA, 25 bp, Homo sapien
gcccagcgggagagctgactttagt

SEQ ID NO: 4018897 - DNA, 25 bp, Homo sapien
tggttcacaatgatctgatgctggg

SEQ ID NO: 4018898 - DNA, 25 bp, Homo sapien
ttggtcagtttcctcattggaaagg

SEQ ID NO: 4018899 - DNA, 25 bp, Homo sapien
tcagtttcctcattggaaaggttta

SEQ ID NO: 4018900 - DNA, 25 bp, Homo sapien
tggtcagtttcctcattggaaaggt

SEQ ID NO: 4018901 - DNA, 25 bp, Homo sapien
tttggtcagtttcctcattggaaag

SEQ ID NO: 4018902 - DNA, 25 bp, Homo sapien
tctggcaattggacatgcttcgtgt

SEQ ID NO: 4018903 - DNA, 25 bp, Homo sapien
tttcctctggcaattggacatgctt

SEQ ID NO: 4018904 - DNA, 25 bp, Homo sapien
aatgacagcctccacggctactttc

SEQ ID NO: 4018905 - DNA, 25 bp, Homo sapien
ggacatgcttcgtgttgttctaaca

SEQ ID NO: 4018906 - DNA, 25 bp, Homo sapien
tgttcaaggtgctgactactaccgc

SEQ ID NO: 4018907 - DNA, 25 bp, Homo sapien
tagtcgccctggtgaaattaggtct

SEQ ID NO: 4018908 - DNA, 25 bp, Homo sapien
tgccttgtgcctccaaacttacagg

SEQ ID NO: 4018909 - DNA, 25 bp, Homo sapien
tctgtaaaggaactgtagtcgccct

SEQ ID NO: 4018910 - DNA, 25 bp, Homo sapien
tggaagttcagatttaagacttaaa

SEQ ID NO: 4018911 - DNA, 25 bp, Homo sapien
ttttcccagacaatctgagtgaatc

SEQ ID NO: 4018912 - DNA, 25 bp, Homo sapien
tactggtgatctagcaggatttttg

SEQ ID NO: 4018913 - DNA, 25 bp, Homo sapien
ctgagtgaatcagtgccaaagacac

SEQ ID NO: 4018914 - DNA, 25 bp, Homo sapien
aggactcaggcccaacatcaagtgt

SEQ ID NO: 4018915 - DNA, 25 bp, Homo sapien
caggcccaacatcaagtgtgataga

SEQ ID NO: 4018916 - DNA, 25 bp, Homo sapien
ccatctccagggttaaaggactcag

SEQ ID NO: 4018917 - DNA, 25 bp, Homo sapien
tgtataggtaatcctcctgggccat

SEQ ID NO: 4018918 - DNA, 25 bp, Homo sapien
cttgtcataaacacatattttattt

SEQ ID NO: 4018919 - DNA, 25 bp, Homo sapien
tgaggaggaaaaaaatgtatataac

SEQ ID NO: 4018920 - DNA, 25 bp, Homo sapien
ctgaggaggaaaaaaatgtatataa

SEQ ID NO: 4018921 - DNA, 25 bp, Homo sapien
tagctgcggtgagagatcctgctga

SEQ ID NO: 4018922 - DNA, 25 bp, Homo sapien
gcggtgagagatcctgctgagacaa

SEQ ID NO: 4018923 - DNA, 25 bp, Homo sapien
ttttagctgcggtgagagatcctgc

SEQ ID NO: 4018924 - DNA, 25 bp, Homo sapien
agtgttttagctgcggtgagagatc

SEQ ID NO: 4018925 - DNA, 25 bp, Homo sapien
ggcgggctagtgtcttgctgtattc

SEQ ID NO: 4018926 - DNA, 25 bp, Homo sapien
ctgaaggcgggctagtgtcttgctg

SEQ ID NO: 4018927 - DNA, 25 bp, Homo sapien
tcccttttcaagaatgctaatttct

SEQ ID NO: 4018928 - DNA, 25 bp, Homo sapien
tcttgctgtattcccttttcaagaa

SEQ ID NO: 4018929 - DNA, 25 bp, Homo sapien
cagtattctcacactatgttctctg

SEQ ID NO: 4018930 - DNA, 25 bp, Homo sapien
gaatcttctatttatccgttaatgg

SEQ ID NO: 4018931 - DNA, 25 bp, Homo sapien
ttaatggtccaggtatctctagtac

SEQ ID NO: 4018932 - DNA, 25 bp, Homo sapien
tccagatccttgaaggtagcaggaa

SEQ ID NO: 4018933 - DNA, 25 bp, Homo sapien
gaaagctaaacggaacctgcagaac

SEQ ID NO: 4018934 - DNA, 25 bp, Homo sapien
acattaacacacgaaaggacctgga

SEQ ID NO: 4018935 - DNA, 25 bp, Homo sapien
aagcaagggcacttccaaggccagg

SEQ ID NO: 4018936 - DNA, 25 bp, Homo sapien
tgcagtggcgggttcgtgtaatccc

SEQ ID NO: 4018937 - DNA, 25 bp, Homo sapien
gctgaggggcttcccgggaggctcg

SEQ ID NO: 4018938 - DNA, 25 bp, Homo sapien
ctgaggggcttcccgggaggctcgt

SEQ ID NO: 4018939 - DNA, 25 bp, Homo sapien
tgaggggcttcccgggaggctcgtc

SEQ ID NO: 4018940 - DNA, 25 bp, Homo sapien
agctgaggggcttcccgggaggctc

SEQ ID NO: 4018941 - DNA, 25 bp, Homo sapien
gacagaacgaaaagagcagccgtcg

SEQ ID NO: 4018942 - DNA, 25 bp, Homo sapien
ggagcccgggatcgcaccctcagtg

SEQ ID NO: 4018943 - DNA, 25 bp, Homo sapien
tcagtgcgcgatcagctgacccacg

SEQ ID NO: 4018944 - DNA, 25 bp, Homo sapien
gatcagctgacccacgcgggccaag

SEQ ID NO: 4018945 - DNA, 25 bp, Homo sapien
ggattatctagcgatgccccgtgta

SEQ ID NO: 4018946 - DNA, 25 bp, Homo sapien
gccttcgggaggataggacaagtcc

SEQ ID NO: 4018947 - DNA, 25 bp, Homo sapien
tctgagtacatcgagacggtgcgcg

SEQ ID NO: 4018948 - DNA, 25 bp, Homo sapien
tacgaattacagctcggacttcggg

SEQ ID NO: 4018949 - DNA, 25 bp, Homo sapien
gaatcagtttgtgggcacagagcct

SEQ ID NO: 4018950 - DNA, 25 bp, Homo sapien
agcattttgacctagggcctttggc

SEQ ID NO: 4018951 - DNA, 25 bp, Homo sapien
tgcttcctggcctagaaccattcag

SEQ ID NO: 4018952 - DNA, 25 bp, Homo sapien
tactagggctgttcttaccatctcc

SEQ ID NO: 4018953 - DNA, 25 bp, Homo sapien
taccgaggcgcccttatcaatagag

SEQ ID NO: 4018954 - DNA, 25 bp, Homo sapien
catccttaatagaatgattgcctgg

SEQ ID NO: 4018955 - DNA, 25 bp, Homo sapien
tgtctgaacccctactaactgtgag

SEQ ID NO: 4018956 - DNA, 25 bp, Homo sapien
gttcccatagcaccttaccgaggcg

SEQ ID NO: 4018957 - DNA, 25 bp, Homo sapien
ggttagcttccgcttactggtcaga

SEQ ID NO: 4018958 - DNA, 25 bp, Homo sapien
gttcagactgacaacagagtgggtc

SEQ ID NO: 4018959 - DNA, 25 bp, Homo sapien
gcaaaactgtttgggactcactgcc

SEQ ID NO: 4018960 - DNA, 25 bp, Homo sapien
tgtacagcctaatggatgtcctgct

SEQ ID NO: 4018961 - DNA, 25 bp, Homo sapien
taaagaagcctcaataaggagatgg

SEQ ID NO: 4018962 - DNA, 25 bp, Homo sapien
ggttgtcacaactgattgctggagg

SEQ ID NO: 4018963 - DNA, 25 bp, Homo sapien
caatgagaaccctgaacactgagtc

SEQ ID NO: 4018964 - DNA, 25 bp, Homo sapien
ttggctggcatctgaaagcttggat

SEQ ID NO: 4018965 - DNA, 25 bp, Homo sapien
aagacccttgaaataacagacccag

SEQ ID NO: 4018966 - DNA, 25 bp, Homo sapien
tgaagatctgttgcctcacagtgag

SEQ ID NO: 4018967 - DNA, 25 bp, Homo sapien
tcgatgtgccaccttcatacgctgt

SEQ ID NO: 4018968 - DNA, 25 bp, Homo sapien
ggccctgtctgcataggaccattgg

SEQ ID NO: 4018969 - DNA, 25 bp, Homo sapien
tcttccagaacaggtgggtgactca

SEQ ID NO: 4018970 - DNA, 25 bp, Homo sapien
gaacttggtgcgctgtgctgagact

SEQ ID NO: 4018971 - DNA, 25 bp, Homo sapien
tggactattcggacaagtacggcct

SEQ ID NO: 4018972 - DNA, 25 bp, Homo sapien
taggccttcagtaaatgggtcagtg

SEQ ID NO: 4018973 - DNA, 25 bp, Homo sapien
cctcagcaacggcagcgtgcagatc

SEQ ID NO: 4018974 - DNA, 25 bp, Homo sapien
tcagcaacggcagcgtgcagatcaa

SEQ ID NO: 4018975 - DNA, 25 bp, Homo sapien
gcaacggcagcgtgcagatcaactt

SEQ ID NO: 4018976 - DNA, 25 bp, Homo sapien
tgcacctcagcaacggcagcgtgca

SEQ ID NO: 4018977 - DNA, 25 bp, Homo sapien
gcctgggatccagcgaacatctctg

SEQ ID NO: 4018978 - DNA, 25 bp, Homo sapien
tacgcccgcactatggtggacaagc

SEQ ID NO: 4018979 - DNA, 25 bp, Homo sapien
tctcctggaggagtacggctgctgc

SEQ ID NO: 4018980 - DNA, 25 bp, Homo sapien
tacatgttcgggtgtgggttctaca

SEQ ID NO: 4018981 - DNA, 25 bp, Homo sapien
cagcacggagaccatctgtgtggca

SEQ ID NO: 4018982 - DNA, 25 bp, Homo sapien
agctcttcagtgagccagcacggag

SEQ ID NO: 4018983 - DNA, 25 bp, Homo sapien
tgagccagcacggagaccatctgtg

SEQ ID NO: 4018984 - DNA, 25 bp, Homo sapien
gctcttcagtgagccagcacggaga

SEQ ID NO: 4018985 - DNA, 25 bp, Homo sapien
gtgcctgtcgcacctcaactgggag

SEQ ID NO: 4018986 - DNA, 25 bp, Homo sapien
gacgaagccatcagggacttggccg

SEQ ID NO: 4018987 - DNA, 25 bp, Homo sapien
aagcggtttgtgaagtactggacga

SEQ ID NO: 4018988 - DNA, 25 bp, Homo sapien
ctctcagaggcgcagctcctcatgg

SEQ ID NO: 4018989 - DNA, 25 bp, Homo sapien
ctcacagcacggagcaggtctcgca

SEQ ID NO: 4018990 - DNA, 25 bp, Homo sapien
cttataggaccggaactttctcaga

SEQ ID NO: 4018991 - DNA, 25 bp, Homo sapien
agcaggtctcgcactgatgtcccct

SEQ ID NO: 4018992 - DNA, 25 bp, Homo sapien
cactgatgtccccttataggaccgg

SEQ ID NO: 4018993 - DNA, 25 bp, Homo sapien
tcgtgccagttgtcccggaccactg

SEQ ID NO: 4018994 - DNA, 25 bp, Homo sapien
tgtctgcagcggcatggagatgtgc

SEQ ID NO: 4018995 - DNA, 25 bp, Homo sapien
gcatggagatgtgctcgtgccagtt

SEQ ID NO: 4018996 - DNA, 25 bp, Homo sapien
tcctgctcggactccttctccagcc

SEQ ID NO: 4018997 - DNA, 25 bp, Homo sapien
ggaagaactggagttgcttggctct

SEQ ID NO: 4018998 - DNA, 25 bp, Homo sapien
ctgcggcagtgggctcaacatggct

SEQ ID NO: 4018999 - DNA, 25 bp, Homo sapien
atggctccaaccaggtcccgggcaa

SEQ ID NO: 4019000 - DNA, 25 bp, Homo sapien
tcaacatggctccaaccaggtcccg

SEQ ID NO: 4019001 - DNA, 25 bp, Homo sapien
gctgcggcagtgggctcaacatggc

SEQ ID NO: 4019002 - DNA, 25 bp, Homo sapien
ggatgtttgcctggcgataaagact

SEQ ID NO: 4019003 - DNA, 25 bp, Homo sapien
tgccaccagaaagcacgtagtagaa

SEQ ID NO: 4019004 - DNA, 25 bp, Homo sapien
ggcgataaagactgtctccaaaggg

SEQ ID NO: 4019005 - DNA, 25 bp, Homo sapien
cagaaagcacgtagtagaacacgca

SEQ ID NO: 4019006 - DNA, 25 bp, Homo sapien
tctggcttcaacttccgcccacaca

SEQ ID NO: 4019007 - DNA, 25 bp, Homo sapien
gtgactcaaaatccgtaattcaggg

SEQ ID NO: 4019008 - DNA, 25 bp, Homo sapien
caacttccgcccacacactgtgact

SEQ ID NO: 4019009 - DNA, 25 bp, Homo sapien
tctctcaactttaggagtgggggca

SEQ ID NO: 4019010 - DNA, 25 bp, Homo sapien
gctgaagctacagcggccagcaggc

SEQ ID NO: 4019011 - DNA, 25 bp, Homo sapien
atccagccttccgtgccggggatgc

SEQ ID NO: 4019012 - DNA, 25 bp, Homo sapien
agtggaggctgaagctacagcggcc

SEQ ID NO: 4019013 - DNA, 25 bp, Homo sapien
agaagctcgggcgccatccagcctt

SEQ ID NO: 4019014 - DNA, 25 bp, Homo sapien
ctggttgctgagggcggaaggcagg

SEQ ID NO: 4019015 - DNA, 25 bp, Homo sapien
tggttgctgagggcggaaggcaggg

SEQ ID NO: 4019016 - DNA, 25 bp, Homo sapien
ggccaggccagacatcagctgctgc

SEQ ID NO: 4019017 - DNA, 25 bp, Homo sapien
agctgctgcagcacgacctcgggct

SEQ ID NO: 4019018 - DNA, 25 bp, Homo sapien
tatgtgtaaagagtgcaggtgggcc

SEQ ID NO: 4019019 - DNA, 25 bp, Homo sapien
cagacccccgcgatccaggtccggg

SEQ ID NO: 4019020 - DNA, 25 bp, Homo sapien
aggccaaagcactcgcggaggagcc

SEQ ID NO: 4019021 - DNA, 25 bp, Homo sapien
ctccagggcaatgtagtggaactgg

SEQ ID NO: 4019022 - DNA, 25 bp, Homo sapien
ggtccccgctcggtgcagaagtagc

SEQ ID NO: 4019023 - DNA, 25 bp, Homo sapien
gcagttgaacttcccgccgaaccag

SEQ ID NO: 4019024 - DNA, 25 bp, Homo sapien
actgggaaggctgaggcccggaatt

SEQ ID NO: 4019025 - DNA, 25 bp, Homo sapien
tactgggaaggctgaggcccggaat

SEQ ID NO: 4019026 - DNA, 25 bp, Homo sapien
gctactgggaaggctgaggcccgga

SEQ ID NO: 4019027 - DNA, 25 bp, Homo sapien
tgggaaggctgaggcccggaattgc

SEQ ID NO: 4019028 - DNA, 25 bp, Homo sapien
cagcacgtccttgggattgaaggaa

SEQ ID NO: 4019029 - DNA, 25 bp, Homo sapien
aaatcttccccactacggtgagttg

SEQ ID NO: 4019030 - DNA, 25 bp, Homo sapien
aatcttccccactacggtgagttgc

SEQ ID NO: 4019031 - DNA, 25 bp, Homo sapien
ccagcacgtccttgggattgaagga

SEQ ID NO: 4019032 - DNA, 25 bp, Homo sapien
tgggggagaggagggtggtgactca

SEQ ID NO: 4019033 - DNA, 25 bp, Homo sapien
agaggagggtggtgactcagggagc

SEQ ID NO: 4019034 - DNA, 25 bp, Homo sapien
gggagaggagggtggtgactcaggg

SEQ ID NO: 4019035 - DNA, 25 bp, Homo sapien
gagaggagggtggtgactcagggag

SEQ ID NO: 4019036 - DNA, 25 bp, Homo sapien
tcgtcgagtggctgggcttgctttg

SEQ ID NO: 4019037 - DNA, 25 bp, Homo sapien
agggtcgtcgagtggctgggcttgc

SEQ ID NO: 4019038 - DNA, 25 bp, Homo sapien
atcctgggagatgtgagcaaagtct

SEQ ID NO: 4019039 - DNA, 25 bp, Homo sapien
cttcagggtcgtcgagtggctgggc

SEQ ID NO: 4019040 - DNA, 25 bp, Homo sapien
cccagtatctgtgactgagatggcc

SEQ ID NO: 4019041 - DNA, 25 bp, Homo sapien
ggcccagtatctgtgactgagatgg

SEQ ID NO: 4019042 - DNA, 25 bp, Homo sapien
agtatctgtgactgagatggcctca

SEQ ID NO: 4019043 - DNA, 25 bp, Homo sapien
cagtatctgtgactgagatggcctc

SEQ ID NO: 4019044 - DNA, 25 bp, Homo sapien
tctccccagatagacctgaggtcag

SEQ ID NO: 4019045 - DNA, 25 bp, Homo sapien
agcgttctccccagatagacctgag

SEQ ID NO: 4019046 - DNA, 25 bp, Homo sapien
gagagttgctgagtggtctcagaga

SEQ ID NO: 4019047 - DNA, 25 bp, Homo sapien
cccagatagacctgaggtcagggcg

SEQ ID NO: 4019048 - DNA, 25 bp, Homo sapien
cagccccaagtaagagtctggagtt

SEQ ID NO: 4019049 - DNA, 25 bp, Homo sapien
agtgaggctagctgccagcaggtct

SEQ ID NO: 4019050 - DNA, 25 bp, Homo sapien
gacagcagtgaggctagctgccagc

SEQ ID NO: 4019051 - DNA, 25 bp, Homo sapien
tcatcacaaagagaatccaccctcc

SEQ ID NO: 4019052 - DNA, 25 bp, Homo sapien
ctggatgcagctcggagtcccaaag

SEQ ID NO: 4019053 - DNA, 25 bp, Homo sapien
gtttctctcggctcaggctcaatag

SEQ ID NO: 4019054 - DNA, 25 bp, Homo sapien
tcccaaagtttctctcggctcaggc

SEQ ID NO: 4019055 - DNA, 25 bp, Homo sapien
tcggagtcccaaagtttctctcggc

SEQ ID NO: 4019056 - DNA, 25 bp, Homo sapien
tgattttggtccaaacctctcccag

SEQ ID NO: 4019057 - DNA, 25 bp, Homo sapien
gtgattttggtccaaacctctccca

SEQ ID NO: 4019058 - DNA, 25 bp, Homo sapien
ggagcacatgcttttatagtttttg

SEQ ID NO: 4019059 - DNA, 25 bp, Homo sapien
tagtgattttggtccaaacctctcc

SEQ ID NO: 4019060 - DNA, 25 bp, Homo sapien
ccccgagtgttattcttagcagccc

SEQ ID NO: 4019061 - DNA, 25 bp, Homo sapien
taacgtgtttctggcagtaacaaca

SEQ ID NO: 4019062 - DNA, 25 bp, Homo sapien
gaatataagcatgaatcacctgccc

SEQ ID NO: 4019063 - DNA, 25 bp, Homo sapien
tgtgtgaggtcaattgacccacccc

SEQ ID NO: 4019064 - DNA, 25 bp, Homo sapien
ccccactctctcccctcccagcact

SEQ ID NO: 4019065 - DNA, 25 bp, Homo sapien
ccactctctcccctcccagcactga

SEQ ID NO: 4019066 - DNA, 25 bp, Homo sapien
cactctctcccctcccagcactgac

SEQ ID NO: 4019067 - DNA, 25 bp, Homo sapien
cccactctctcccctcccagcactg

SEQ ID NO: 4019068 - DNA, 25 bp, Homo sapien
ggcctgggtattctctggaggtctt

SEQ ID NO: 4019069 - DNA, 25 bp, Homo sapien
gtggtgtgcaggactgggggtagct

SEQ ID NO: 4019070 - DNA, 25 bp, Homo sapien
gggcctgggtattctctggaggtct

SEQ ID NO: 4019071 - DNA, 25 bp, Homo sapien
caggactgggggtagctcgtggtgt

SEQ ID NO: 4019072 - DNA, 25 bp, Homo sapien
tctactcccaatttgagccagagga

SEQ ID NO: 4019073 - DNA, 25 bp, Homo sapien
tactcccaatttgagccagaggatc

SEQ ID NO: 4019074 - DNA, 25 bp, Homo sapien
catctactcccaatttgagccagag

SEQ ID NO: 4019075 - DNA, 25 bp, Homo sapien
cccaatttgagccagaggatctcac

SEQ ID NO: 4019076 - DNA, 25 bp, Homo sapien
tggagtgtcacctcatctgtggtgg

SEQ ID NO: 4019077 - DNA, 25 bp, Homo sapien
gtgctgggtgagccctctcgctctc

SEQ ID NO: 4019078 - DNA, 25 bp, Homo sapien
tgagacttggagtgtcacctcatct

SEQ ID NO: 4019079 - DNA, 25 bp, Homo sapien
cacactgcctgaggggtatctaaca

SEQ ID NO: 4019080 - DNA, 25 bp, Homo sapien
ctgtgtggaccagtgctttagagac

SEQ ID NO: 4019081 - DNA, 25 bp, Homo sapien
caccagggccactcctgtgtggacc

SEQ ID NO: 4019082 - DNA, 25 bp, Homo sapien
ttgctgaacagtgggggctacccag

SEQ ID NO: 4019083 - DNA, 25 bp, Homo sapien
agttgctgaacagtgggggctaccc

SEQ ID NO: 4019084 - DNA, 25 bp, Homo sapien
cgtatgagttgctgaacagtggggg

SEQ ID NO: 4019085 - DNA, 25 bp, Homo sapien
tgagttgctgaacagtgggggctac

SEQ ID NO: 4019086 - DNA, 25 bp, Homo sapien
gaggaaatgcagagtgtctcgagcc

SEQ ID NO: 4019087 - DNA, 25 bp, Homo sapien
ggtgtagacgcccatcacaggcacg

SEQ ID NO: 4019088 - DNA, 25 bp, Homo sapien
tgaggcaggcagtcggatgtggccc

SEQ ID NO: 4019089 - DNA, 25 bp, Homo sapien
tctcgagccagcgtgagatgcggca

SEQ ID NO: 4019090 - DNA, 25 bp, Homo sapien
ctggggagatgtggttggaagctct

SEQ ID NO: 4019091 - DNA, 25 bp, Homo sapien
gctggggagatgtggttggaagctc

SEQ ID NO: 4019092 - DNA, 25 bp, Homo sapien
ctgccgagaaaggtggctggggaga

SEQ ID NO: 4019093 - DNA, 25 bp, Homo sapien
gtggctggggagatgtggttggaag

SEQ ID NO: 4019094 - DNA, 25 bp, Homo sapien
taggtggtgttccagcgcagggctg

SEQ ID NO: 4019095 - DNA, 25 bp, Homo sapien
aggtgagccatccatggggggcgct

SEQ ID NO: 4019096 - DNA, 25 bp, Homo sapien
cggcggtaggtggtgttccagcgca

SEQ ID NO: 4019097 - DNA, 25 bp, Homo sapien
gcgctgagtagcggcggtaggtggt

SEQ ID NO: 4019098 - DNA, 25 bp, Homo sapien
gggaccctctgtggtcagtgtcatc

SEQ ID NO: 4019099 - DNA, 25 bp, Homo sapien
tgttcggccaatgtagaggcggggg

SEQ ID NO: 4019100 - DNA, 25 bp, Homo sapien
ctctgtggtcagtgtcatctgggtc

SEQ ID NO: 4019101 - DNA, 25 bp, Homo sapien
catctgggtctcccctgactcaggg

SEQ ID NO: 4019102 - DNA, 25 bp, Homo sapien
gcggcagggagaggcatgaaccagc

SEQ ID NO: 4019103 - DNA, 25 bp, Homo sapien
ctgcggcagggagaggcatgaacca

SEQ ID NO: 4019104 - DNA, 25 bp, Homo sapien
tgcggcagggagaggcatgaaccag

SEQ ID NO: 4019105 - DNA, 25 bp, Homo sapien
tgggtccccaagatgtacaggctgc

SEQ ID NO: 4019106 - DNA, 25 bp, Homo sapien
gggtccccaagatgtacaggctgcc

SEQ ID NO: 4019107 - DNA, 25 bp, Homo sapien
ttgggtccccaagatgtacaggctg

SEQ ID NO: 4019108 - DNA, 25 bp, Homo sapien
tctgtgacgtacattggtccttcga

SEQ ID NO: 4019109 - DNA, 25 bp, Homo sapien
tacattggtccttcgatgacgggat

SEQ ID NO: 4019110 - DNA, 25 bp, Homo sapien
tgtgacgtacattggtccttcgatg

SEQ ID NO: 4019111 - DNA, 25 bp, Homo sapien
gacgtacattggtccttcgatgacg

SEQ ID NO: 4019112 - DNA, 25 bp, Homo sapien
tctgcttgcttagtgcgtggagact

SEQ ID NO: 4019113 - DNA, 25 bp, Homo sapien
gcttagtgcgtggagacttccatcc

SEQ ID NO: 4019114 - DNA, 25 bp, Homo sapien
cttgcttagtgcgtggagacttcca

SEQ ID NO: 4019115 - DNA, 25 bp, Homo sapien
ctgtctgcttgcttagtgcgtggag

SEQ ID NO: 4019116 - DNA, 25 bp, Homo sapien
ctccttgagcaaacagggtgaggct

SEQ ID NO: 4019117 - DNA, 25 bp, Homo sapien
caggaggcctaacatccgggtggcc

SEQ ID NO: 4019118 - DNA, 25 bp, Homo sapien
agtccctccttgagcaaacagggtg

SEQ ID NO: 4019119 - DNA, 25 bp, Homo sapien
agccgcacccctacaaaggccacat

SEQ ID NO: 4019120 - DNA, 25 bp, Homo sapien
ccacggcctcgaccccctgaccgca

SEQ ID NO: 4019121 - DNA, 25 bp, Homo sapien
agcagcagcgccgcgaactggagct

SEQ ID NO: 4019122 - DNA, 25 bp, Homo sapien
agcagcgccgcgaactggagctgga

SEQ ID NO: 4019123 - DNA, 25 bp, Homo sapien
tcgaccccctgaccgcactcgccat

SEQ ID NO: 4019124 - DNA, 25 bp, Homo sapien
gctgcacggctggccaggtccctgg

SEQ ID NO: 4019125 - DNA, 25 bp, Homo sapien
agctgcacggctggccaggtccctg

SEQ ID NO: 4019126 - DNA, 25 bp, Homo sapien
gtccctgggtgcctccaagggagcg

SEQ ID NO: 4019127 - DNA, 25 bp, Homo sapien
aggtccctgggtgcctccaagggag

SEQ ID NO: 4019128 - DNA, 25 bp, Homo sapien
catcgtagcggaattcacttatcag

SEQ ID NO: 4019129 - DNA, 25 bp, Homo sapien
aacaggacattatgacagatgcttc

SEQ ID NO: 4019130 - DNA, 25 bp, Homo sapien
caggtccagggacaagtaacaggac

SEQ ID NO: 4019131 - DNA, 25 bp, Homo sapien
tttggcagaggttggccatcgtagc

SEQ ID NO: 4019132 - DNA, 25 bp, Homo sapien
cagcataggcatcctcaaaagagac

SEQ ID NO: 4019133 - DNA, 25 bp, Homo sapien
ggtacctcaaaaccagcataggcat

SEQ ID NO: 4019134 - DNA, 25 bp, Homo sapien
tgggcactaggggatggtacctcaa

SEQ ID NO: 4019135 - DNA, 25 bp, Homo sapien
cataggcatcctcaaaagagacact

SEQ ID NO: 4019136 - DNA, 25 bp, Homo sapien
tctcgtatcggttacaaaatataaa

SEQ ID NO: 4019137 - DNA, 25 bp, Homo sapien
atgacaggaatacatctcgtatcgg

SEQ ID NO: 4019138 - DNA, 25 bp, Homo sapien
caggaatacatctcgtatcggttac

SEQ ID NO: 4019139 - DNA, 25 bp, Homo sapien
tacatctcgtatcggttacaaaata

SEQ ID NO: 4019140 - DNA, 25 bp, Homo sapien
cattctttctagctcttccacaaac

SEQ ID NO: 4019141 - DNA, 25 bp, Homo sapien
ccctccattctttctagctcttcca

SEQ ID NO: 4019142 - DNA, 25 bp, Homo sapien
ttctagctcttccacaaaccctctg

SEQ ID NO: 4019143 - DNA, 25 bp, Homo sapien
tagctcttccacaaaccctctgcat

SEQ ID NO: 4019144 - DNA, 25 bp, Homo sapien
cgccgttggcaatctcttgttgtag

SEQ ID NO: 4019145 - DNA, 25 bp, Homo sapien
tcttgttgtaggagggagtaagtaa

SEQ ID NO: 4019146 - DNA, 25 bp, Homo sapien
tcatctgttctcgccgttggcaatc

SEQ ID NO: 4019147 - DNA, 25 bp, Homo sapien
tgttctcgccgttggcaatctcttg

SEQ ID NO: 4019148 - DNA, 25 bp, Homo sapien
gcaaaggcgccctccggcagaagaa

SEQ ID NO: 4019149 - DNA, 25 bp, Homo sapien
gaggagagcaccgtgcgcttcgccc

SEQ ID NO: 4019150 - DNA, 25 bp, Homo sapien
gaacgtgcatgaggtcaagaaccac

SEQ ID NO: 4019151 - DNA, 25 bp, Homo sapien
attcaccgcccgcttcttcaagcag

SEQ ID NO: 4019152 - DNA, 25 bp, Homo sapien
agagacctgtgagccaaactccact

SEQ ID NO: 4019153 - DNA, 25 bp, Homo sapien
tcctgcgggcttctctgtgaataaa

SEQ ID NO: 4019154 - DNA, 25 bp, Homo sapien
aatatggccccatgcacttcaggtt

SEQ ID NO: 4019155 - DNA, 25 bp, Homo sapien
caagtcaggctgcaagtttagaggt

SEQ ID NO: 4019156 - DNA, 25 bp, Homo sapien
ggtgttgtaaggatgctcagtgttc

SEQ ID NO: 4019157 - DNA, 25 bp, Homo sapien
aacagagaagggaagttcagtgtct

SEQ ID NO: 4019158 - DNA, 25 bp, Homo sapien
gaaatttttggtgttgtaaggatgc

SEQ ID NO: 4019159 - DNA, 25 bp, Homo sapien
ctattcctccttgtgaacagagaag

SEQ ID NO: 4019160 - DNA, 25 bp, Homo sapien
cttttaattgccatttgtcctgctt

SEQ ID NO: 4019161 - DNA, 25 bp, Homo sapien
tgtcctgcttgtttgtggtctcctg

SEQ ID NO: 4019162 - DNA, 25 bp, Homo sapien
ctcagcccacaagcagaaagttgcc

SEQ ID NO: 4019163 - DNA, 25 bp, Homo sapien
ccctcagcccacaagcagaaagttg

SEQ ID NO: 4019164 - DNA, 25 bp, Homo sapien
cctcgtggctgttgctatttttcac

SEQ ID NO: 4019165 - DNA, 25 bp, Homo sapien
cggagcacctcgtggctgttgctat

SEQ ID NO: 4019166 - DNA, 25 bp, Homo sapien
cgtggctgttgctatttttcacacc

SEQ ID NO: 4019167 - DNA, 25 bp, Homo sapien
ggagcacctcgtggctgttgctatt

SEQ ID NO: 4019168 - DNA, 25 bp, Homo sapien
ccaggaaggatctggtatacgggat

SEQ ID NO: 4019169 - DNA, 25 bp, Homo sapien
gaggaaggccccgtaagagtgtggc

SEQ ID NO: 4019170 - DNA, 25 bp, Homo sapien
aaggccccgtaagagtgtggcagaa

SEQ ID NO: 4019171 - DNA, 25 bp, Homo sapien
ggcaaccaggaaggatctggtatac

SEQ ID NO: 4019172 - DNA, 25 bp, Homo sapien
tgcttttccctgagtccatgtggct

SEQ ID NO: 4019173 - DNA, 25 bp, Homo sapien
tacatcaaggcctgagtggctttgc

SEQ ID NO: 4019174 - DNA, 25 bp, Homo sapien
aactggcagcgttcctgttacagca

SEQ ID NO: 4019175 - DNA, 25 bp, Homo sapien
ctggccaacttagcaggaagaactg

SEQ ID NO: 4019176 - DNA, 25 bp, Homo sapien
tgtttgcaatgggtcaaccatgtgc

SEQ ID NO: 4019177 - DNA, 25 bp, Homo sapien
gcagctgtgcgatttcagcttctct

SEQ ID NO: 4019178 - DNA, 25 bp, Homo sapien
ggtcaaccatgtgctttctggccat

SEQ ID NO: 4019179 - DNA, 25 bp, Homo sapien
ctttcttggcctgtgtttgcaatgg

SEQ ID NO: 4019180 - DNA, 25 bp, Homo sapien
agcgggtgtccaaggattgaatttc

SEQ ID NO: 4019181 - DNA, 25 bp, Homo sapien
cagcgggtgtccaaggattgaattt

SEQ ID NO: 4019182 - DNA, 25 bp, Homo sapien
gcgggtgtccaaggattgaatttcc

SEQ ID NO: 4019183 - DNA, 25 bp, Homo sapien
atctttggtgaaggccttcacactc

SEQ ID NO: 4019184 - DNA, 25 bp, Homo sapien
gagaaatctttggtgaaggccttca

SEQ ID NO: 4019185 - DNA, 25 bp, Homo sapien
gaaatctttggtgaaggccttcaca

SEQ ID NO: 4019186 - DNA, 25 bp, Homo sapien
ttgagagaaatctttggtgaaggcc

SEQ ID NO: 4019187 - DNA, 25 bp, Homo sapien
gccatggcatgaaggtttctgccag

SEQ ID NO: 4019188 - DNA, 25 bp, Homo sapien
ggcatgaaggtttctgccagcaata

SEQ ID NO: 4019189 - DNA, 25 bp, Homo sapien
tggacttggagccaataaattggcc

SEQ ID NO: 4019190 - DNA, 25 bp, Homo sapien
gagccaataaattggccatggcatg

SEQ ID NO: 4019191 - DNA, 25 bp, Homo sapien
tactgctagagtgtgggatccattg

SEQ ID NO: 4019192 - DNA, 25 bp, Homo sapien
tctccgtattgtcatggaaaaggcc

SEQ ID NO: 4019193 - DNA, 25 bp, Homo sapien
tgagctggcgaggaatgcactttgc

SEQ ID NO: 4019194 - DNA, 25 bp, Homo sapien
tgagtttggccttacgtctgtggaa

SEQ ID NO: 4019195 - DNA, 25 bp, Homo sapien
gtagcatctatattcaagtagtcca

SEQ ID NO: 4019196 - DNA, 25 bp, Homo sapien
gaatcttttgcctctgctataagcc

SEQ ID NO: 4019197 - DNA, 25 bp, Homo sapien
ttgcctctgctataagccacttgag

SEQ ID NO: 4019198 - DNA, 25 bp, Homo sapien
cctctgctataagccacttgagggt

SEQ ID NO: 4019199 - DNA, 25 bp, Homo sapien
tgaactcttgaaccagatggacctg

SEQ ID NO: 4019200 - DNA, 25 bp, Homo sapien
aggaggactttgatgccaggccaca

SEQ ID NO: 4019201 - DNA, 25 bp, Homo sapien
tcaccatggcaggaatctaggcggc

SEQ ID NO: 4019202 - DNA, 25 bp, Homo sapien
tctaggcggccgaaggacatttgtg

SEQ ID NO: 4019203 - DNA, 25 bp, Homo sapien
catctgtagagttcccataagtgct

SEQ ID NO: 4019204 - DNA, 25 bp, Homo sapien
tagcgacgggaaatttcacgaaggc

SEQ ID NO: 4019205 - DNA, 25 bp, Homo sapien
ccagtttgctgtagcaggcagctct

SEQ ID NO: 4019206 - DNA, 25 bp, Homo sapien
cagatgtgagcctggcccaagtatt

SEQ ID NO: 4019207 - DNA, 25 bp, Homo sapien
aggaagagtgaccagcatcaatggg

SEQ ID NO: 4019208 - DNA, 25 bp, Homo sapien
acacctgttatcctgccggcagtca

SEQ ID NO: 4019209 - DNA, 25 bp, Homo sapien
ccagtatcccagaggagccataggg

SEQ ID NO: 4019210 - DNA, 25 bp, Homo sapien
gagcatccctggtaggaaaggaaga

SEQ ID NO: 4019211 - DNA, 25 bp, Homo sapien
ttcagcataccccaatgcagccatc

SEQ ID NO: 4019212 - DNA, 25 bp, Homo sapien
ctttcattgcccaataatgaactgc

SEQ ID NO: 4019213 - DNA, 25 bp, Homo sapien
gcagctgaaactgtcctagctgaga

SEQ ID NO: 4019214 - DNA, 25 bp, Homo sapien
catcacccctagttctcttactttg

SEQ ID NO: 4019215 - DNA, 25 bp, Homo sapien
ggacaaggctccatccacgataaag

SEQ ID NO: 4019216 - DNA, 25 bp, Homo sapien
aacacacaggcggtgaccttggaca

SEQ ID NO: 4019217 - DNA, 25 bp, Homo sapien
cacgataaaggatgtgcttggttgc

SEQ ID NO: 4019218 - DNA, 25 bp, Homo sapien
tgcagcaagttcgtgaagcagaaac

SEQ ID NO: 4019219 - DNA, 25 bp, Homo sapien
gaccgtaatttctggagcctgcagg

SEQ ID NO: 4019220 - DNA, 25 bp, Homo sapien
atttcccagaagaccgtaatttctg

SEQ ID NO: 4019221 - DNA, 25 bp, Homo sapien
aggaccagcctcacaatttcccaga

SEQ ID NO: 4019222 - DNA, 25 bp, Homo sapien
gaccagcctcacaatttcccagaag

SEQ ID NO: 4019223 - DNA, 25 bp, Homo sapien
gtccagtgagatctgcaggtgagcc

SEQ ID NO: 4019224 - DNA, 25 bp, Homo sapien
tagcaccctcttcgtgtccagtgag

SEQ ID NO: 4019225 - DNA, 25 bp, Homo sapien
tccagtgagatctgcaggtgagcct

SEQ ID NO: 4019226 - DNA, 25 bp, Homo sapien
tgctgtcctttagcaccctcttcgt

SEQ ID NO: 4019227 - DNA, 25 bp, Homo sapien
gtccttctatacagaggatctttct

SEQ ID NO: 4019228 - DNA, 25 bp, Homo sapien
gtgtccttctatacagaggatcttt

SEQ ID NO: 4019229 - DNA, 25 bp, Homo sapien
cgtgtccttctatacagaggatctt

SEQ ID NO: 4019230 - DNA, 25 bp, Homo sapien
gcagacttgggtgtgctgagagctt

SEQ ID NO: 4019231 - DNA, 25 bp, Homo sapien
gagggtgctgtcaggaagctgggca

SEQ ID NO: 4019232 - DNA, 25 bp, Homo sapien
gtgctgtcaggaagctgggcatcca

SEQ ID NO: 4019233 - DNA, 25 bp, Homo sapien
gggtgctgtcaggaagctgggcatc

SEQ ID NO: 4019234 - DNA, 25 bp, Homo sapien
ctgtgacagagggtgctgtcaggaa

SEQ ID NO: 4019235 - DNA, 25 bp, Homo sapien
gctggcagcggctttgcaagttgaa

SEQ ID NO: 4019236 - DNA, 25 bp, Homo sapien
cagcggctttgcaagttgaataatc

SEQ ID NO: 4019237 - DNA, 25 bp, Homo sapien
cggctttgcaagttgaataatctta

SEQ ID NO: 4019238 - DNA, 25 bp, Homo sapien
ggcagcggctttgcaagttgaataa

SEQ ID NO: 4019239 - DNA, 25 bp, Homo sapien
gccatgaggattcccagactcatct

SEQ ID NO: 4019240 - DNA, 25 bp, Homo sapien
ggccatgaggattcccagactcatc

SEQ ID NO: 4019241 - DNA, 25 bp, Homo sapien
ccatgaggattcccagactcatctc

SEQ ID NO: 4019242 - DNA, 25 bp, Homo sapien
ggaattggaaggcaggatgccagaa

SEQ ID NO: 4019243 - DNA, 25 bp, Homo sapien
aaggcaggatgccagaaccccaggg

SEQ ID NO: 4019244 - DNA, 25 bp, Homo sapien
tggaaggcaggatgccagaacccca

SEQ ID NO: 4019245 - DNA, 25 bp, Homo sapien
gatggaattggaaggcaggatgcca

SEQ ID NO: 4019246 - DNA, 25 bp, Homo sapien
atgaagctgaccgttcctttcacaa

SEQ ID NO: 4019247 - DNA, 25 bp, Homo sapien
ctaatgaagctgaccgttcctttca

SEQ ID NO: 4019248 - DNA, 25 bp, Homo sapien
aagctgaccgttcctttcacaatca

SEQ ID NO: 4019249 - DNA, 25 bp, Homo sapien
gaagctgaccgttcctttcacaatc

SEQ ID NO: 4019250 - DNA, 25 bp, Homo sapien
gagacagtgagctttagatgggctg

SEQ ID NO: 4019251 - DNA, 25 bp, Homo sapien
gacagtgagctttagatgggctgtc

SEQ ID NO: 4019252 - DNA, 25 bp, Homo sapien
agacagtgagctttagatgggctgt

SEQ ID NO: 4019253 - DNA, 25 bp, Homo sapien
ctagggaaggaagggagatggccct

SEQ ID NO: 4019254 - DNA, 25 bp, Homo sapien
agggaaggaagggagatggccctgg

SEQ ID NO: 4019255 - DNA, 25 bp, Homo sapien
gaagggagatggccctggaactgac

SEQ ID NO: 4019256 - DNA, 25 bp, Homo sapien
ggaaggaagggagatggccctggaa

SEQ ID NO: 4019257 - DNA, 25 bp, Homo sapien
tattgtctgttcctcctcccctgac

SEQ ID NO: 4019258 - DNA, 25 bp, Homo sapien
tgctattgtctgttcctcctcccct

SEQ ID NO: 4019259 - DNA, 25 bp, Homo sapien
gctattgtctgttcctcctcccctg

SEQ ID NO: 4019260 - DNA, 25 bp, Homo sapien
ctattgtctgttcctcctcccctga

SEQ ID NO: 4019261 - DNA, 25 bp, Homo sapien
gaatgtggcttcacagggacttgga

SEQ ID NO: 4019262 - DNA, 25 bp, Homo sapien
tagcccgttgttggagaaatcccga

SEQ ID NO: 4019263 - DNA, 25 bp, Homo sapien
gacgaatccactgtcttagcccgtt

SEQ ID NO: 4019264 - DNA, 25 bp, Homo sapien
tgggctttcacgtcggcttctctgg

SEQ ID NO: 4019265 - DNA, 25 bp, Homo sapien
tgtacctatggaccccaatggcctg

SEQ ID NO: 4019266 - DNA, 25 bp, Homo sapien
ccctcaaccctgagtggaatgagac

SEQ ID NO: 4019267 - DNA, 25 bp, Homo sapien
caatggcctgtcagatccctacgta

SEQ ID NO: 4019268 - DNA, 25 bp, Homo sapien
gattcccgatcccaaaagtgagagc

SEQ ID NO: 4019269 - DNA, 25 bp, Homo sapien
gatttgaccagcaggaatgacttca

SEQ ID NO: 4019270 - DNA, 25 bp, Homo sapien
gactgtcagtagagatttgggattg

SEQ ID NO: 4019271 - DNA, 25 bp, Homo sapien
tttgggattgggatttgaccagcag

SEQ ID NO: 4019272 - DNA, 25 bp, Homo sapien
tgaaagaatcggacaaagacagaag

SEQ ID NO: 4019273 - DNA, 25 bp, Homo sapien
gatagatatcaagccacttgccaga

SEQ ID NO: 4019274 - DNA, 25 bp, Homo sapien
atatgtatgttgcaacgttcctcct

SEQ ID NO: 4019275 - DNA, 25 bp, Homo sapien
tggtatataaagcattcggttcaac

SEQ ID NO: 4019276 - DNA, 25 bp, Homo sapien
tccatgctgtgttcactgtctcaaa

SEQ ID NO: 4019277 - DNA, 25 bp, Homo sapien
taagttactgagccaggaggaaggc

SEQ ID NO: 4019278 - DNA, 25 bp, Homo sapien
aagttactgagccaggaggaaggcg

SEQ ID NO: 4019279 - DNA, 25 bp, Homo sapien
ttaagttactgagccaggaggaagg

SEQ ID NO: 4019280 - DNA, 25 bp, Homo sapien
catttatcccaagagcatttatcca

SEQ ID NO: 4019281 - DNA, 25 bp, Homo sapien
tatccgaagagtatttatcccaagg

SEQ ID NO: 4019282 - DNA, 25 bp, Homo sapien
ttatcccaagagcatttacccaaga

SEQ ID NO: 4019283 - DNA, 25 bp, Homo sapien
tatccaagagcatttatcccaaaag

SEQ ID NO: 4019284 - DNA, 25 bp, Homo sapien
tgttgctcaccatcgagaacgctga

SEQ ID NO: 4019285 - DNA, 25 bp, Homo sapien
cgctgatggaaatagagttcttgaa

SEQ ID NO: 4019286 - DNA, 25 bp, Homo sapien
tgtttcaggctgtatagactcttaa

SEQ ID NO: 4019287 - DNA, 25 bp, Homo sapien
gattctatgagctccccaatatcct

SEQ ID NO: 4019288 - DNA, 25 bp, Homo sapien
tctctgtctcagttcatacaaccac

SEQ ID NO: 4019289 - DNA, 25 bp, Homo sapien
tggcctctcaaagtcgttatccaaa

SEQ ID NO: 4019290 - DNA, 25 bp, Homo sapien
tcatcaccaggactctcattggcct

SEQ ID NO: 4019291 - DNA, 25 bp, Homo sapien
tcaaagtcgttatccaaaatggaat

SEQ ID NO: 4019292 - DNA, 25 bp, Homo sapien
gatttaaccaagaagacggctgcgg

SEQ ID NO: 4019293 - DNA, 25 bp, Homo sapien
gttattaaccacaatgacgacctgc

SEQ ID NO: 4019294 - DNA, 25 bp, Homo sapien
aaagggcaaccagcttgggtgctac

SEQ ID NO: 4019295 - DNA, 25 bp, Homo sapien
gaaaagggcatttggcaccactctc

SEQ ID NO: 4019296 - DNA, 25 bp, Homo sapien
caacttcgacaaagagttcaccaga

SEQ ID NO: 4019297 - DNA, 25 bp, Homo sapien
ggtgaatgcaaactccatcgttgag

SEQ ID NO: 4019298 - DNA, 25 bp, Homo sapien
tggcttctcttatactaacccagag

SEQ ID NO: 4019299 - DNA, 25 bp, Homo sapien
aaagagttcaccagacagcctgtgg

SEQ ID NO: 4019300 - DNA, 25 bp, Homo sapien
caaaactactgtgtctgataccaaa

SEQ ID NO: 4019301 - DNA, 25 bp, Homo sapien
tgtggaaagcttgtcttagagggct

SEQ ID NO: 4019302 - DNA, 25 bp, Homo sapien
tatgtatcaattctagtcttccagg

SEQ ID NO: 4019303 - DNA, 25 bp, Homo sapien
tcttccaggattcacggtgcacatg

SEQ ID NO: 4019304 - DNA, 25 bp, Homo sapien
ctttagaggggcccacttgagaact

SEQ ID NO: 4019305 - DNA, 25 bp, Homo sapien
gcctttagaggggcccacttgagaa

SEQ ID NO: 4019306 - DNA, 25 bp, Homo sapien
tttagaggggcccacttgagaactg

SEQ ID NO: 4019307 - DNA, 25 bp, Homo sapien
ttttctcttctaactgatgatgctc

SEQ ID NO: 4019308 - DNA, 25 bp, Homo sapien
tcttctaactgatgatgctccattc

SEQ ID NO: 4019309 - DNA, 25 bp, Homo sapien
tctccttgacttacacacatgtggg

SEQ ID NO: 4019310 - DNA, 25 bp, Homo sapien
tagtccatgtgtgcctggttttcat

SEQ ID NO: 4019311 - DNA, 25 bp, Homo sapien
tcacattttactgctgatcccatgg

SEQ ID NO: 4019312 - DNA, 25 bp, Homo sapien
tctccttcgtggtcacattttactg

SEQ ID NO: 4019313 - DNA, 25 bp, Homo sapien
tgccatgttgtcttctccttcgtgg

SEQ ID NO: 4019314 - DNA, 25 bp, Homo sapien
acattttactgctgatcccatggac

SEQ ID NO: 4019315 - DNA, 25 bp, Homo sapien
tgtctgcgcttctgttgtagagcta

SEQ ID NO: 4019316 - DNA, 25 bp, Homo sapien
caactatccttctgctaggctcctg

SEQ ID NO: 4019317 - DNA, 25 bp, Homo sapien
tcatctacctgagctcctgatcctt

SEQ ID NO: 4019318 - DNA, 25 bp, Homo sapien
taggctcctgggcaccatactctgc

SEQ ID NO: 4019319 - DNA, 25 bp, Homo sapien
tctgtccagctaaataacattcaaa

SEQ ID NO: 4019320 - DNA, 25 bp, Homo sapien
atttctgtccagctaaataacattc

SEQ ID NO: 4019321 - DNA, 25 bp, Homo sapien
ccgttatatttctgtccagctaaat

SEQ ID NO: 4019322 - DNA, 25 bp, Homo sapien
ctcccgttatatttctgtccagcta

SEQ ID NO: 4019323 - DNA, 25 bp, Homo sapien
agccagggcgctgactgtcctcggc

SEQ ID NO: 4019324 - DNA, 25 bp, Homo sapien
tgtcctcggctccagaaactttgcg

SEQ ID NO: 4019325 - DNA, 25 bp, Homo sapien
tgactgggcagagccgagccggctg

SEQ ID NO: 4019326 - DNA, 25 bp, Homo sapien
aaccgggtcgtgctgcagcgcccag

SEQ ID NO: 4019327 - DNA, 25 bp, Homo sapien
aggcgcatctcaaaccgagctggca

SEQ ID NO: 4019328 - DNA, 25 bp, Homo sapien
atctcaaaccgagctggcagctcca

SEQ ID NO: 4019329 - DNA, 25 bp, Homo sapien
tgcacggaccctcgtctttaccacg

SEQ ID NO: 4019330 - DNA, 25 bp, Homo sapien
gctccggagccatgccctgcacgga

SEQ ID NO: 4019331 - DNA, 25 bp, Homo sapien
gatgttgatcaccactgtaggagcc

SEQ ID NO: 4019332 - DNA, 25 bp, Homo sapien
gcctttgccgcttttagtttaatga

SEQ ID NO: 4019333 - DNA, 25 bp, Homo sapien
tgaggatgtgtgacagaggtatcca

SEQ ID NO: 4019334 - DNA, 25 bp, Homo sapien
ccagccgtccagagtaccatgaaga

SEQ ID NO: 4019335 - DNA, 25 bp, Homo sapien
tgacatcaaacatctcgctgaaaaa

SEQ ID NO: 4019336 - DNA, 25 bp, Homo sapien
atgacatcaaacatctcgctgaaaa

SEQ ID NO: 4019337 - DNA, 25 bp, Homo sapien
gatgacatcaaacatctcgctgaaa

SEQ ID NO: 4019338 - DNA, 25 bp, Homo sapien
ttctgtattcttcctccttgccact

SEQ ID NO: 4019339 - DNA, 25 bp, Homo sapien
tctcccagttcctttttctgtattc

SEQ ID NO: 4019340 - DNA, 25 bp, Homo sapien
tattcttcctccttgccactaaagc

SEQ ID NO: 4019341 - DNA, 25 bp, Homo sapien
cttctcccagttcctttttctgtat

SEQ ID NO: 4019342 - DNA, 25 bp, Homo sapien
ggttttgggcttggatgactctgta

SEQ ID NO: 4019343 - DNA, 25 bp, Homo sapien
taacatagacgatgcgaatctgcag

SEQ ID NO: 4019344 - DNA, 25 bp, Homo sapien
tagacgatgcgaatctgcagccagg

SEQ ID NO: 4019345 - DNA, 25 bp, Homo sapien
gatgactctgtaacatagacgatgc

SEQ ID NO: 4019346 - DNA, 25 bp, Homo sapien
gctgccctggaatacaataatactt

SEQ ID NO: 4019347 - DNA, 25 bp, Homo sapien
taaaattccctcaatatcctgggtg

SEQ ID NO: 4019348 - DNA, 25 bp, Homo sapien
tcacctgcacatttaggaagtggaa

SEQ ID NO: 4019349 - DNA, 25 bp, Homo sapien
ttgacatcatgcatagctgccctgg

SEQ ID NO: 4019350 - DNA, 25 bp, Homo sapien
cttgcaaagctcctagaatcatcat

SEQ ID NO: 4019351 - DNA, 25 bp, Homo sapien
cagcccagggcttgcaatagaagca

SEQ ID NO: 4019352 - DNA, 25 bp, Homo sapien
tcttttttggtccaatggtgcaaga

SEQ ID NO: 4019353 - DNA, 25 bp, Homo sapien
tggtgcaagatctgtgctctctcat

SEQ ID NO: 4019354 - DNA, 25 bp, Homo sapien
tatctcccaagatgaggtgggctgg

SEQ ID NO: 4019355 - DNA, 25 bp, Homo sapien
tttagccacttacaattttcagaca

SEQ ID NO: 4019356 - DNA, 25 bp, Homo sapien
agccacttacaattttcagacacca

SEQ ID NO: 4019357 - DNA, 25 bp, Homo sapien
aatttagccacttacaattttcaga

SEQ ID NO: 4019358 - DNA, 25 bp, Homo sapien
aacctgtgtttcaatttagccactt

SEQ ID NO: 4019359 - DNA, 25 bp, Homo sapien
tgccctcaagaaatccctcaacttg

SEQ ID NO: 4019360 - DNA, 25 bp, Homo sapien
tagtagtttgagtccaggtgcagtg

SEQ ID NO: 4019361 - DNA, 25 bp, Homo sapien
ccgtgaggtttaagatagtagtttg

SEQ ID NO: 4019362 - DNA, 25 bp, Homo sapien
tcaagaaatccctcaacttggcctc

SEQ ID NO: 4019363 - DNA, 25 bp, Homo sapien
ggatcaaggaagatggtcttaccat

SEQ ID NO: 4019364 - DNA, 25 bp, Homo sapien
caatgcacgaggttagggataccaa

SEQ ID NO: 4019365 - DNA, 25 bp, Homo sapien
tacagcctactgttcaccagaagta

SEQ ID NO: 4019366 - DNA, 25 bp, Homo sapien
tgcatattaagtggacccacatagt

SEQ ID NO: 4019367 - DNA, 25 bp, Homo sapien
tagatgctcagatctcccagttggg

SEQ ID NO: 4019368 - DNA, 25 bp, Homo sapien
tagcaaagagcccagacatagtact

SEQ ID NO: 4019369 - DNA, 25 bp, Homo sapien
ctagttaacaattctcggccaggcg

SEQ ID NO: 4019370 - DNA, 25 bp, Homo sapien
taatatccaccttcggaggagggtc

SEQ ID NO: 4019371 - DNA, 25 bp, Homo sapien
aaatgcctgaggttcgtcgtcttac

SEQ ID NO: 4019372 - DNA, 25 bp, Homo sapien
ccaaggaaatcgaggacgaggacac

SEQ ID NO: 4019373 - DNA, 25 bp, Homo sapien
cagctgcatgaccttatgaagcacc

SEQ ID NO: 4019374 - DNA, 25 bp, Homo sapien
ttatgaagcaccttcgttgtctggg

SEQ ID NO: 4019375 - DNA, 25 bp, Homo sapien
tcataacggtgatattgaaggcaga

SEQ ID NO: 4019376 - DNA, 25 bp, Homo sapien
ataacggtgatattgaaggcagatc

SEQ ID NO: 4019377 - DNA, 25 bp, Homo sapien
taacggtgatattgaaggcagatct

SEQ ID NO: 4019378 - DNA, 25 bp, Homo sapien
cataacggtgatattgaaggcagat

SEQ ID NO: 4019379 - DNA, 25 bp, Homo sapien
tgtaactctggtcatgtggcctctg

SEQ ID NO: 4019380 - DNA, 25 bp, Homo sapien
taactctggtcatgtggcctctggc

SEQ ID NO: 4019381 - DNA, 25 bp, Homo sapien
tgtggcctctggcaaagatgctatg

SEQ ID NO: 4019382 - DNA, 25 bp, Homo sapien
ctctggcaaagatgctatgagccat

SEQ ID NO: 4019383 - DNA, 25 bp, Homo sapien
gaatgtaataacgtccccatgccca

SEQ ID NO: 4019384 - DNA, 25 bp, Homo sapien
atgtaataacgtccccatgcccaaa

SEQ ID NO: 4019385 - DNA, 25 bp, Homo sapien
tgaatgtaataacgtccccatgccc

SEQ ID NO: 4019386 - DNA, 25 bp, Homo sapien
tctgaatgtaataacgtccccatgc

SEQ ID NO: 4019387 - DNA, 25 bp, Homo sapien
tacatgattgctagcttcagttcca

SEQ ID NO: 4019388 - DNA, 25 bp, Homo sapien
tgcaccggcatggtcttagactatg

SEQ ID NO: 4019389 - DNA, 25 bp, Homo sapien
tgcgcttaggaatggaatcgggacc

SEQ ID NO: 4019390 - DNA, 25 bp, Homo sapien
taatatttcggtgcattgagccacg

SEQ ID NO: 4019391 - DNA, 25 bp, Homo sapien
cacttgtcaagagtatagggtagcc

SEQ ID NO: 4019392 - DNA, 25 bp, Homo sapien
tgttgttatgcgatcagccctgtgc

SEQ ID NO: 4019393 - DNA, 25 bp, Homo sapien
tagggagcgcttgcatagcaaccat

SEQ ID NO: 4019394 - DNA, 25 bp, Homo sapien
ccagtttattggaagcagcagctag

SEQ ID NO: 4019395 - DNA, 25 bp, Homo sapien
tttgcagtggaaactgcacgcagcc

SEQ ID NO: 4019396 - DNA, 25 bp, Homo sapien
tacctggcttggaggtgtcgccgcc

SEQ ID NO: 4019397 - DNA, 25 bp, Homo sapien
cagtttccgcgctttggagtcacaa

SEQ ID NO: 4019398 - DNA, 25 bp, Homo sapien
cgcccgtgcaatccctgcttaagag

SEQ ID NO: 4019399 - DNA, 25 bp, Homo sapien
aggaggaggcgtgaggccgctcgtg

SEQ ID NO: 4019400 - DNA, 25 bp, Homo sapien
gaggaggcgtgaggccgctcgtgga

SEQ ID NO: 4019401 - DNA, 25 bp, Homo sapien
ggcgtgaggccgctcgtggactccg

SEQ ID NO: 4019402 - DNA, 25 bp, Homo sapien
aggccgctcgtggactccgggccta

SEQ ID NO: 4019403 - DNA, 25 bp, Homo sapien
tatgataccgtcacctttgatgggc

SEQ ID NO: 4019404 - DNA, 25 bp, Homo sapien
gagaagctgaaagctgccgactgcg

SEQ ID NO: 4019405 - DNA, 25 bp, Homo sapien
gaatcccttggcaccatgtcctgtg

SEQ ID NO: 4019406 - DNA, 25 bp, Homo sapien
tcttaacgtgtggactgaccgctac

SEQ ID NO: 4019407 - DNA, 25 bp, Homo sapien
gaaacgcttgggtcagaattccatg

SEQ ID NO: 4019408 - DNA, 25 bp, Homo sapien
taggacccttaaatcttgataagac

SEQ ID NO: 4019409 - DNA, 25 bp, Homo sapien
gagaaacttttctgcacaccgaccc

SEQ ID NO: 4019410 - DNA, 25 bp, Homo sapien
caaaacatccttcgttctgaaatta

SEQ ID NO: 4019411 - DNA, 25 bp, Homo sapien
ccacaaaagtagaagtgctagagcc

SEQ ID NO: 4019412 - DNA, 25 bp, Homo sapien
taacgtttagggactaggagagaca

SEQ ID NO: 4019413 - DNA, 25 bp, Homo sapien
ttaagtatccagtagaagttcctcc

SEQ ID NO: 4019414 - DNA, 25 bp, Homo sapien
cagactaaactaaagaatgacggtg

SEQ ID NO: 4019415 - DNA, 25 bp, Homo sapien
ttttacactaaggaacatgatgaca

SEQ ID NO: 4019416 - DNA, 25 bp, Homo sapien
gcattatccctgtatgacactgtgt

SEQ ID NO: 4019417 - DNA, 25 bp, Homo sapien
tgggtaatttgtgcccgtaacactg

SEQ ID NO: 4019418 - DNA, 25 bp, Homo sapien
taatatgtggcatcacttgcacact

SEQ ID NO: 4019419 - DNA, 25 bp, Homo sapien
ctttccagagaccattgatgcagct

SEQ ID NO: 4019420 - DNA, 25 bp, Homo sapien
cacaggtctatcataattgggttct

SEQ ID NO: 4019421 - DNA, 25 bp, Homo sapien
ggccattgaaagctgtaccttatca

SEQ ID NO: 4019422 - DNA, 25 bp, Homo sapien
agtagcagcattcctaagttgtggg

SEQ ID NO: 4019423 - DNA, 25 bp, Homo sapien
caaagtaaatagaggcgctaagcca

SEQ ID NO: 4019424 - DNA, 25 bp, Homo sapien
gagtcacgtggattgtacacattca

SEQ ID NO: 4019425 - DNA, 25 bp, Homo sapien
cccatcttaggagatttagagtcac

SEQ ID NO: 4019426 - DNA, 25 bp, Homo sapien
taatggaagcgaactctaatcaaga

SEQ ID NO: 4019427 - DNA, 25 bp, Homo sapien
caagaggccgcagagaagactatgt

SEQ ID NO: 4019428 - DNA, 25 bp, Homo sapien
ggaattctcccttcacaagaggccg

SEQ ID NO: 4019429 - DNA, 25 bp, Homo sapien
ggagactccgaagactgacaatact

SEQ ID NO: 4019430 - DNA, 25 bp, Homo sapien
tgggcaaagtcatagaagtcgaaac

SEQ ID NO: 4019431 - DNA, 25 bp, Homo sapien
ttttagtacgagctcaactggaggc

SEQ ID NO: 4019432 - DNA, 25 bp, Homo sapien
ggacatttgtgtttaagttagcatt

SEQ ID NO: 4019433 - DNA, 25 bp, Homo sapien
tgtctttgaagaagggaattgccaa

SEQ ID NO: 4019434 - DNA, 25 bp, Homo sapien
caatcataatcttaaattgtgtgtc

SEQ ID NO: 4019435 - DNA, 25 bp, Homo sapien
cctggagaaagtgtaccatgaagct

SEQ ID NO: 4019436 - DNA, 25 bp, Homo sapien
tggagaaagtgtaccatgaagctgc

SEQ ID NO: 4019437 - DNA, 25 bp, Homo sapien
ctggagaaagtgtaccatgaagctg

SEQ ID NO: 4019438 - DNA, 25 bp, Homo sapien
tgcagccttgtcgatcagcctgcag

SEQ ID NO: 4019439 - DNA, 25 bp, Homo sapien
ctgcagccttgtcgatcagcctgca

SEQ ID NO: 4019440 - DNA, 25 bp, Homo sapien
ttgagctctggccctatcatgtcca

SEQ ID NO: 4019441 - DNA, 25 bp, Homo sapien
attgagctctggccctatcatgtcc

SEQ ID NO: 4019442 - DNA, 25 bp, Homo sapien
gattgagctctggccctatcatgtc

SEQ ID NO: 4019443 - DNA, 25 bp, Homo sapien
tgagctctggccctatcatgtccat

SEQ ID NO: 4019444 - DNA, 25 bp, Homo sapien
acaatatgttattaaccatactcac

SEQ ID NO: 4019445 - DNA, 25 bp, Homo sapien
tatgttattaaccatactcaccatg

SEQ ID NO: 4019446 - DNA, 25 bp, Homo sapien
cttattcctccagtctaactgaatt

SEQ ID NO: 4019447 - DNA, 25 bp, Homo sapien
tcctccagtctaactgaatttttgt

SEQ ID NO: 4019448 - DNA, 25 bp, Homo sapien
cttcttaacctttatctggtatgtc

SEQ ID NO: 4019449 - DNA, 25 bp, Homo sapien
gaattatgtagcgatgaattctgag

SEQ ID NO: 4019450 - DNA, 25 bp, Homo sapien
ttttagtgcgcctgtcaaaggagga

SEQ ID NO: 4019451 - DNA, 25 bp, Homo sapien
tttgttatgtggatgaattatgtag

SEQ ID NO: 4019452 - DNA, 25 bp, Homo sapien
cagggccattagcagtgcaagcagg

SEQ ID NO: 4019453 - DNA, 25 bp, Homo sapien
tccatccagtggaatctacagggcc

SEQ ID NO: 4019454 - DNA, 25 bp, Homo sapien
tcaagtaattaatgcccagtgtggc

SEQ ID NO: 4019455 - DNA, 25 bp, Homo sapien
taagataattatatggctgggcacg

SEQ ID NO: 4019456 - DNA, 25 bp, Homo sapien
gcaatagaataactcctcgtcctgg

SEQ ID NO: 4019457 - DNA, 25 bp, Homo sapien
tgatctcagtgtgttcagaactgcc

SEQ ID NO: 4019458 - DNA, 25 bp, Homo sapien
gagtccccaagacacgctcaggtat

SEQ ID NO: 4019459 - DNA, 25 bp, Homo sapien
tctgcaaacgtgtaataagctggag

SEQ ID NO: 4019460 - DNA, 25 bp, Homo sapien
tgttagcatcaactacccggcatgg

SEQ ID NO: 4019461 - DNA, 25 bp, Homo sapien
gcagctgtaccctcctagatagtca

SEQ ID NO: 4019462 - DNA, 25 bp, Homo sapien
ggctgatacagcatgaccgcaggca

SEQ ID NO: 4019463 - DNA, 25 bp, Homo sapien
tttaagccgttagcagttatcctgc

SEQ ID NO: 4019464 - DNA, 25 bp, Homo sapien
gaaaacgtgtttgattgaggccagg

SEQ ID NO: 4019465 - DNA, 25 bp, Homo sapien
ggaagtgacgacagacagaagccag

SEQ ID NO: 4019466 - DNA, 25 bp, Homo sapien
acagaatcacgggatggttgcagcc

SEQ ID NO: 4019467 - DNA, 25 bp, Homo sapien
aagtaaggcacgaggctccacagaa

SEQ ID NO: 4019468 - DNA, 25 bp, Homo sapien
tatggtgacagccacaatttctccc

SEQ ID NO: 4019469 - DNA, 25 bp, Homo sapien
tggtgacagccacaatttctcccag

SEQ ID NO: 4019470 - DNA, 25 bp, Homo sapien
acaatttctcccagacagcttgggt

SEQ ID NO: 4019471 - DNA, 25 bp, Homo sapien
ttgctatggtgacagccacaatttc

SEQ ID NO: 4019472 - DNA, 25 bp, Homo sapien
tcccccactcccgccagcccccaca

SEQ ID NO: 4019473 - DNA, 25 bp, Homo sapien
ccccactcccgccagcccccacact

SEQ ID NO: 4019474 - DNA, 25 bp, Homo sapien
ttgcccgtttctctcacctccccca

SEQ ID NO: 4019475 - DNA, 25 bp, Homo sapien
cactcccgccagcccccacacttcc

SEQ ID NO: 4019476 - DNA, 25 bp, Homo sapien
agcaatgacgaagcacccgcctgct

SEQ ID NO: 4019477 - DNA, 25 bp, Homo sapien
atctggccgtgatcccagtctcctg

SEQ ID NO: 4019478 - DNA, 25 bp, Homo sapien
ccccaggccatcgtaattagcatct

SEQ ID NO: 4019479 - DNA, 25 bp, Homo sapien
tgctgacagggggtaccagcacccc

SEQ ID NO: 4019480 - DNA, 25 bp, Homo sapien
gatgcctgtaggtccactttgcaag

SEQ ID NO: 4019481 - DNA, 25 bp, Homo sapien
gggatgcctgtaggtccactttgca

SEQ ID NO: 4019482 - DNA, 25 bp, Homo sapien
cgagggatgcctgtaggtccacttt

SEQ ID NO: 4019483 - DNA, 25 bp, Homo sapien
gagggatgcctgtaggtccactttg

SEQ ID NO: 4019484 - DNA, 25 bp, Homo sapien
tggatgagatacctgctgaatgcag

SEQ ID NO: 4019485 - DNA, 25 bp, Homo sapien
tagtgaaaaccaggacctcttggac

SEQ ID NO: 4019486 - DNA, 25 bp, Homo sapien
atggcaacgcgatttcctgtcctgg

SEQ ID NO: 4019487 - DNA, 25 bp, Homo sapien
agagcccactggacatttctagtga

SEQ ID NO: 4019488 - DNA, 25 bp, Homo sapien
gagactacaagaatatttaacaaaa

SEQ ID NO: 4019489 - DNA, 25 bp, Homo sapien
caatatccagtattgatatgataaa

SEQ ID NO: 4019490 - DNA, 25 bp, Homo sapien
aaaaatagcatcttgtttaatgttg

SEQ ID NO: 4019491 - DNA, 25 bp, Homo sapien
ccagccttaggtgaattcttaatac

SEQ ID NO: 4019492 - DNA, 25 bp, Homo sapien
cattttcttccgcacccggagagca

SEQ ID NO: 4019493 - DNA, 25 bp, Homo sapien
taagatgggcgagctttccgtctcc

SEQ ID NO: 4019494 - DNA, 25 bp, Homo sapien
tctactccgattcgccttttctggg

SEQ ID NO: 4019495 - DNA, 25 bp, Homo sapien
cgataatcgtatatttctactccga

SEQ ID NO: 4019496 - DNA, 25 bp, Homo sapien
ttattcccctttttcttttgcatca

SEQ ID NO: 4019497 - DNA, 25 bp, Homo sapien
tattcccctttttcttttgcatcat

SEQ ID NO: 4019498 - DNA, 25 bp, Homo sapien
ggatcccactcatgcaattcatcaa

SEQ ID NO: 4019499 - DNA, 25 bp, Homo sapien
aaagaaatgactaggacagcaggag

SEQ ID NO: 4019500 - DNA, 25 bp, Homo sapien
tctccgtagctaaggtggatcccac

SEQ ID NO: 4019501 - DNA, 25 bp, Homo sapien
gcaggagtaaaaccccaaggcatta

SEQ ID NO: 4019502 - DNA, 25 bp, Homo sapien
gacttccctgggattgtagtgtgag

SEQ ID NO: 4019503 - DNA, 25 bp, Homo sapien
tgtgagtgagcttgttcagtcttac

SEQ ID NO: 4019504 - DNA, 25 bp, Homo sapien
gccgttgtttactgattttactctg

SEQ ID NO: 4019505 - DNA, 25 bp, Homo sapien
gctgctctcatatgctgtggctttc

SEQ ID NO: 4019506 - DNA, 25 bp, Homo sapien
caaggtatcttccaaagagtaataa

SEQ ID NO: 4019507 - DNA, 25 bp, Homo sapien
tgagtgatttcatgagcaaggtatc

SEQ ID NO: 4019508 - DNA, 25 bp, Homo sapien
cagtgccagtgccttttttgagtga

SEQ ID NO: 4019509 - DNA, 25 bp, Homo sapien
cactccttcatatcagtgccagtgc

SEQ ID NO: 4019510 - DNA, 25 bp, Homo sapien
taatcctcagtattgttctatcttg

SEQ ID NO: 4019511 - DNA, 25 bp, Homo sapien
tttgcatagatccagtcactttgtg

SEQ ID NO: 4019512 - DNA, 25 bp, Homo sapien
cactttgtgtatgcttggcaattcc

SEQ ID NO: 4019513 - DNA, 25 bp, Homo sapien
tatcttgttttgcatagatccagtc

SEQ ID NO: 4019514 - DNA, 25 bp, Homo sapien
caatggagagtcaaaaagtggaggc

SEQ ID NO: 4019515 - DNA, 25 bp, Homo sapien
tcagtgcagtactataggccagatg

SEQ ID NO: 4019516 - DNA, 25 bp, Homo sapien
tgagctgcctagtagtaacacaggg

SEQ ID NO: 4019517 - DNA, 25 bp, Homo sapien
tccggttcagtgcagaataatgagc

SEQ ID NO: 4019518 - DNA, 25 bp, Homo sapien
cacagttagggatctcagggagcat

SEQ ID NO: 4019519 - DNA, 25 bp, Homo sapien
cagggagcatctgcgttaattcaag

SEQ ID NO: 4019520 - DNA, 25 bp, Homo sapien
tggaaccaacgaaattgagtagaaa

SEQ ID NO: 4019521 - DNA, 25 bp, Homo sapien
ttaattcaagctagaaaggacagct

SEQ ID NO: 4019522 - DNA, 25 bp, Homo sapien
tgagtctactttgtcagccgcagag

SEQ ID NO: 4019523 - DNA, 25 bp, Homo sapien
gctgataccctgatagtgaatgaag

SEQ ID NO: 4019524 - DNA, 25 bp, Homo sapien
gccgcagagtatcccagcattgaag

SEQ ID NO: 4019525 - DNA, 25 bp, Homo sapien
cattgaagaagcacccgaggtgagc

SEQ ID NO: 4019526 - DNA, 25 bp, Homo sapien
ggctacagagtgagaccccttctca

SEQ ID NO: 4019527 - DNA, 25 bp, Homo sapien
gctacagagtgagaccccttctcaa

SEQ ID NO: 4019528 - DNA, 25 bp, Homo sapien
acttacctgtattataaaactcagc

SEQ ID NO: 4019529 - DNA, 25 bp, Homo sapien
aacttacctgtattataaaactcag

SEQ ID NO: 4019530 - DNA, 25 bp, Homo sapien
actcagcagattagagatggctaaa

SEQ ID NO: 4019531 - DNA, 25 bp, Homo sapien
tattaaatggtggtttatcacagtg

SEQ ID NO: 4019532 - DNA, 25 bp, Homo sapien
tgtttacctgcaaaaaggatcttgc

SEQ ID NO: 4019533 - DNA, 25 bp, Homo sapien
taccattgtgatcctaaggttccag

SEQ ID NO: 4019534 - DNA, 25 bp, Homo sapien
cattcttgagagtaggacaaaagca

SEQ ID NO: 4019535 - DNA, 25 bp, Homo sapien
gcctaatctccgtgctcaagtgcct

SEQ ID NO: 4019536 - DNA, 25 bp, Homo sapien
gctctgcattagacccataagcaaa

SEQ ID NO: 4019537 - DNA, 25 bp, Homo sapien
cattagacccataagcaaattactt

SEQ ID NO: 4019538 - DNA, 25 bp, Homo sapien
tggctctgcattagacccataagca

SEQ ID NO: 4019539 - DNA, 25 bp, Homo sapien
ttgttttgccatacaggcttagttt

SEQ ID NO: 4019540 - DNA, 25 bp, Homo sapien
ggacactggcctaagaatttcatag

SEQ ID NO: 4019541 - DNA, 25 bp, Homo sapien
gttagtaacagatcaatggcttgag

SEQ ID NO: 4019542 - DNA, 25 bp, Homo sapien
cataggtcttacagctgttagtaac

SEQ ID NO: 4019543 - DNA, 25 bp, Homo sapien
ttcagtagactgtgtcaggaccaca

SEQ ID NO: 4019544 - DNA, 25 bp, Homo sapien
tgttacaaagcgagaaacgccacac

SEQ ID NO: 4019545 - DNA, 25 bp, Homo sapien
gatgttctctccgtctcatcggcag

SEQ ID NO: 4019546 - DNA, 25 bp, Homo sapien
tcagatcatgctccaacttgccagg

SEQ ID NO: 4019547 - DNA, 25 bp, Homo sapien
aggacgggccctgcactttgaatag

SEQ ID NO: 4019548 - DNA, 25 bp, Homo sapien
gagatagtatgctagatttcccatc

SEQ ID NO: 4019549 - DNA, 25 bp, Homo sapien
taaatctcaccctttatgtaggaaa

SEQ ID NO: 4019550 - DNA, 25 bp, Homo sapien
aatgttgggagagatagtatgctag

SEQ ID NO: 4019551 - DNA, 25 bp, Homo sapien
tggtcaaggcaaacgttacataaag

SEQ ID NO: 4019552 - DNA, 25 bp, Homo sapien
gaaacccaggtctcatccataggcc

SEQ ID NO: 4019553 - DNA, 25 bp, Homo sapien
cttgagaaacaggactgatccgggc

SEQ ID NO: 4019554 - DNA, 25 bp, Homo sapien
gatccgggctaacatcatgggcttt

SEQ ID NO: 4019555 - DNA, 25 bp, Homo sapien
taggccagccctcctttgagcggag

SEQ ID NO: 4019556 - DNA, 25 bp, Homo sapien
tggaacacagggtgcgatcatggct

SEQ ID NO: 4019557 - DNA, 25 bp, Homo sapien
gaagattgctgcaaacaataggaga

SEQ ID NO: 4019558 - DNA, 25 bp, Homo sapien
gacaagctcaggcatcacgatggga

SEQ ID NO: 4019559 - DNA, 25 bp, Homo sapien
gatgaacacatgctatatgctgggc

SEQ ID NO: 4019560 - DNA, 25 bp, Homo sapien
atggagacacctgaccgtggacagc

SEQ ID NO: 4019561 - DNA, 25 bp, Homo sapien
tccacaatttacctccaagaattat

SEQ ID NO: 4019562 - DNA, 25 bp, Homo sapien
acactccacaatttacctccaagaa

SEQ ID NO: 4019563 - DNA, 25 bp, Homo sapien
cacacacactccacaatttacctcc

SEQ ID NO: 4019564 - DNA, 25 bp, Homo sapien
cacaatttacctccaagaattatga

SEQ ID NO: 4019565 - DNA, 25 bp, Homo sapien
cattccgacaatccaacgaggcggc

SEQ ID NO: 4019566 - DNA, 25 bp, Homo sapien
gcggcatgggtcacatccagtttga

SEQ ID NO: 4019567 - DNA, 25 bp, Homo sapien
taatgttcggtccttatcaagtagc

SEQ ID NO: 4019568 - DNA, 25 bp, Homo sapien
cataagaatgaacgtccaggtagca

SEQ ID NO: 4019569 - DNA, 25 bp, Homo sapien
tatgcgcgtttcagcaggaatactc

SEQ ID NO: 4019570 - DNA, 25 bp, Homo sapien
tctgcaaagaaagaggttcgcctgc

SEQ ID NO: 4019571 - DNA, 25 bp, Homo sapien
caggttctccttgggccgtgcagaa

SEQ ID NO: 4019572 - DNA, 25 bp, Homo sapien
gctgtaggtgctgcccgcattaaca

SEQ ID NO: 4019573 - DNA, 25 bp, Homo sapien
agatgctgcgatgcggttctgaaac

SEQ ID NO: 4019574 - DNA, 25 bp, Homo sapien
gcacgtctttgctggctgagtctga

SEQ ID NO: 4019575 - DNA, 25 bp, Homo sapien
tgtctatatccagcaggatgcggcc

SEQ ID NO: 4019576 - DNA, 25 bp, Homo sapien
cagtgctctcggtatcattgtctat

SEQ ID NO: 4019577 - DNA, 25 bp, Homo sapien
gctgggaagtttcagggtcagccca

SEQ ID NO: 4019578 - DNA, 25 bp, Homo sapien
tcagctcttagaagccaagtgaagc

SEQ ID NO: 4019579 - DNA, 25 bp, Homo sapien
catggtatcaatgaggggtaacccc

SEQ ID NO: 4019580 - DNA, 25 bp, Homo sapien
caaaaacacgaggagacatggtatc

SEQ ID NO: 4019581 - DNA, 25 bp, Homo sapien
ccaagacctctaatgcatgagatga

SEQ ID NO: 4019582 - DNA, 25 bp, Homo sapien
ccagtgtgacaaccgaaagtgtctc

SEQ ID NO: 4019583 - DNA, 25 bp, Homo sapien
gtaggtgtcacccaacagatgccag

SEQ ID NO: 4019584 - DNA, 25 bp, Homo sapien
agaggtctctcctccagactgctgg

SEQ ID NO: 4019585 - DNA, 25 bp, Homo sapien
tgtctgtctaatacacctcgaatgc

SEQ ID NO: 4019586 - DNA, 25 bp, Homo sapien
tccttcagcaagatggcaaacatat

SEQ ID NO: 4019587 - DNA, 25 bp, Homo sapien
aaatgtctccagatgctgccgagtg

SEQ ID NO: 4019588 - DNA, 25 bp, Homo sapien
tgctgactgacatcactgaggcaga

SEQ ID NO: 4019589 - DNA, 25 bp, Homo sapien
gctttgctgcgttagaggtagccat

SEQ ID NO: 4019590 - DNA, 25 bp, Homo sapien
acttgctgtggtgcaaaatgacatc

SEQ ID NO: 4019591 - DNA, 25 bp, Homo sapien
tgctgcgttagaggtagccatggca

SEQ ID NO: 4019592 - DNA, 25 bp, Homo sapien
agctgctttcccctacttgctgtgg

SEQ ID NO: 4019593 - DNA, 25 bp, Homo sapien
ggtttcctatgcaccacaactcaga

SEQ ID NO: 4019594 - DNA, 25 bp, Homo sapien
tgccaaagtgtcaaagagttcaggt

SEQ ID NO: 4019595 - DNA, 25 bp, Homo sapien
acagttactcctgggttgtccctca

SEQ ID NO: 4019596 - DNA, 25 bp, Homo sapien
tgagatctatttactccctgggaca

SEQ ID NO: 4019597 - DNA, 25 bp, Homo sapien
ggtgttgccacacctgcctataatc

SEQ ID NO: 4019598 - DNA, 25 bp, Homo sapien
ttttctagggctattagagactctg

SEQ ID NO: 4019599 - DNA, 25 bp, Homo sapien
tcaggaactgatgatttctcgtcag

SEQ ID NO: 4019600 - DNA, 25 bp, Homo sapien
tctgagtcaactattcaggagtgat

SEQ ID NO: 4019601 - DNA, 25 bp, Homo sapien
ccaatctcagttcttactgaatatg

SEQ ID NO: 4019602 - DNA, 25 bp, Homo sapien
ctcagttcttactgaatatggcagg

SEQ ID NO: 4019603 - DNA, 25 bp, Homo sapien
aatattccaatctcagttcttactg

SEQ ID NO: 4019604 - DNA, 25 bp, Homo sapien
taaatattccaatctcagttcttac

SEQ ID NO: 4019605 - DNA, 25 bp, Homo sapien
tgatgccagaatgccggcatcctcc

SEQ ID NO: 4019606 - DNA, 25 bp, Homo sapien
aaaatgatgccagaatgccggcatc

SEQ ID NO: 4019607 - DNA, 25 bp, Homo sapien
ctctctagagtcacaattaacagga

SEQ ID NO: 4019608 - DNA, 25 bp, Homo sapien
gctctctagagtcacaattaacagg

SEQ ID NO: 4019609 - DNA, 25 bp, Homo sapien
tcctcgaatttgaagcactgcagct

SEQ ID NO: 4019610 - DNA, 25 bp, Homo sapien
ctattggctgtcagggcacacggtc

SEQ ID NO: 4019611 - DNA, 25 bp, Homo sapien
catatgcaaaacacggctaagcagg

SEQ ID NO: 4019612 - DNA, 25 bp, Homo sapien
ggccattacagaccttagtcctgga

SEQ ID NO: 4019613 - DNA, 25 bp, Homo sapien
tgccattaggtagcccactaaaacc

SEQ ID NO: 4019614 - DNA, 25 bp, Homo sapien
gaaagcccagaggtgtatttcagct

SEQ ID NO: 4019615 - DNA, 25 bp, Homo sapien
agaatcagttaaccgtcaccctttg

SEQ ID NO: 4019616 - DNA, 25 bp, Homo sapien
cccttctggagcattcaatttggca

SEQ ID NO: 4019617 - DNA, 25 bp, Homo sapien
tagagcagacgaggaaatacgggca

SEQ ID NO: 4019618 - DNA, 25 bp, Homo sapien
gccacaggatctttggtcacgacta

SEQ ID NO: 4019619 - DNA, 25 bp, Homo sapien
taatgacaaaaactggctgcaggac

SEQ ID NO: 4019620 - DNA, 25 bp, Homo sapien
tgtttccaactttgtgggccacagg

SEQ ID NO: 4019621 - DNA, 25 bp, Homo sapien
ttactatcttggaagctgttggtgc

SEQ ID NO: 4019622 - DNA, 25 bp, Homo sapien
tactatcttggaagctgttggtgct

SEQ ID NO: 4019623 - DNA, 25 bp, Homo sapien
gttactatcttggaagctgttggtg

SEQ ID NO: 4019624 - DNA, 25 bp, Homo sapien
ctgttactatcttggaagctgttgg

SEQ ID NO: 4019625 - DNA, 25 bp, Homo sapien
cacgctgggccggttccttggcttt

SEQ ID NO: 4019626 - DNA, 25 bp, Homo sapien
tctcggtctcggtaaggttccagca

SEQ ID NO: 4019627 - DNA, 25 bp, Homo sapien
ttggctttggtactggtctcggtct

SEQ ID NO: 4019628 - DNA, 25 bp, Homo sapien
tggtactggtctcggtctcggtaag

SEQ ID NO: 4019629 - DNA, 25 bp, Homo sapien
cagtttcagggttaccccctgccag

SEQ ID NO: 4019630 - DNA, 25 bp, Homo sapien
cagggttaccccctgccagggtctg

SEQ ID NO: 4019631 - DNA, 25 bp, Homo sapien
gatggctgctcaagtccatgctcac

SEQ ID NO: 4019632 - DNA, 25 bp, Homo sapien
tgtgagatggctgctcaagtccatg

SEQ ID NO: 4019633 - DNA, 25 bp, Homo sapien
gggtgtgagatggctgctcaagtcc

SEQ ID NO: 4019634 - DNA, 25 bp, Homo sapien
agatggctgctcaagtccatgctca

SEQ ID NO: 4019635 - DNA, 25 bp, Homo sapien
agggccctggctattgggtttggtg

SEQ ID NO: 4019636 - DNA, 25 bp, Homo sapien
caatgccatggggttgggagggccc

SEQ ID NO: 4019637 - DNA, 25 bp, Homo sapien
cctggctattgggtttggtgtgcat

SEQ ID NO: 4019638 - DNA, 25 bp, Homo sapien
ggccctggctattgggtttggtgtg

SEQ ID NO: 4019639 - DNA, 25 bp, Homo sapien
ggtgattgggagcttggattggaga

SEQ ID NO: 4019640 - DNA, 25 bp, Homo sapien
gacaagctgctggagtacctccggg

SEQ ID NO: 4019641 - DNA, 25 bp, Homo sapien
cgtggcctgcgtagggggctgcggc

SEQ ID NO: 4019642 - DNA, 25 bp, Homo sapien
tggagacaagctgctggagtacctc

SEQ ID NO: 4019643 - DNA, 25 bp, Homo sapien
ggcttcgggtgggtggctttggtga

SEQ ID NO: 4019644 - DNA, 25 bp, Homo sapien
ctgagatgttcctgaagaactctgg

SEQ ID NO: 4019645 - DNA, 25 bp, Homo sapien
agatgttcctgaagaactctggccc

SEQ ID NO: 4019646 - DNA, 25 bp, Homo sapien
gcttcgggtgggtggctttggtgac

SEQ ID NO: 4019647 - DNA, 25 bp, Homo sapien
ggtgagacctgaatggtaagaagaa

SEQ ID NO: 4019648 - DNA, 25 bp, Homo sapien
ttaaccaagagacgacatgatctgc

SEQ ID NO: 4019649 - DNA, 25 bp, Homo sapien
gaaaccatgtgaagatatgggacag

SEQ ID NO: 4019650 - DNA, 25 bp, Homo sapien
tgagaagttcgcatggaagccactg

SEQ ID NO: 4019651 - DNA, 25 bp, Homo sapien
agttttaaagcaattcccctggctg

SEQ ID NO: 4019652 - DNA, 25 bp, Homo sapien
caattccgaagcaaaagtgcctccc

SEQ ID NO: 4019653 - DNA, 25 bp, Homo sapien
taagctttgtcacgcctaaggaaaa

SEQ ID NO: 4019654 - DNA, 25 bp, Homo sapien
tagtctccaaacagagcgagggctt

SEQ ID NO: 4019655 - DNA, 25 bp, Homo sapien
ctgattttggccagatgctatctga

SEQ ID NO: 4019656 - DNA, 25 bp, Homo sapien
ctgcagcattgtgaggttggcccat

SEQ ID NO: 4019657 - DNA, 25 bp, Homo sapien
tcggcgcagtgtatgcgggctgggc

SEQ ID NO: 4019658 - DNA, 25 bp, Homo sapien
ggccagatgctatctgactgttgtt

SEQ ID NO: 4019659 - DNA, 25 bp, Homo sapien
caagttagacgtcagacaatcccag

SEQ ID NO: 4019660 - DNA, 25 bp, Homo sapien
accaatgcggagttttcagttctac

SEQ ID NO: 4019661 - DNA, 25 bp, Homo sapien
tgagattcgttgcatcagactggac

SEQ ID NO: 4019662 - DNA, 25 bp, Homo sapien
tactgcgtttggacttaaattgggc

SEQ ID NO: 4019663 - DNA, 25 bp, Homo sapien
atgcactactatagtcccagttggg

SEQ ID NO: 4019664 - DNA, 25 bp, Homo sapien
ggcatggggatgcactactatagtc

SEQ ID NO: 4019665 - DNA, 25 bp, Homo sapien
tgggagattaaaaggctgtagtgag

SEQ ID NO: 4019666 - DNA, 25 bp, Homo sapien
gggatgcactactatagtcccagtt

SEQ ID NO: 4019667 - DNA, 25 bp, Homo sapien
ctggagcagttctttgggcatggat

SEQ ID NO: 4019668 - DNA, 25 bp, Homo sapien
aggccaccacctgcaagaaggctgg

SEQ ID NO: 4019669 - DNA, 25 bp, Homo sapien
catggatgccgtgctcaaaggccac

SEQ ID NO: 4019670 - DNA, 25 bp, Homo sapien
taaatctgttcactccatgctggag

SEQ ID NO: 4019671 - DNA, 25 bp, Homo sapien
atttagagtgccaccccgccggtgg

SEQ ID NO: 4019672 - DNA, 25 bp, Homo sapien
tatgtgctttctatttagagtgcca

SEQ ID NO: 4019673 - DNA, 25 bp, Homo sapien
tgctccagtatgcccgcggaagagg

SEQ ID NO: 4019674 - DNA, 25 bp, Homo sapien
tgggcctggaagtccataagcttca

SEQ ID NO: 4019675 - DNA, 25 bp, Homo sapien
acagtcaacacaccatgcgagcaga

SEQ ID NO: 4019676 - DNA, 25 bp, Homo sapien
aacagtcaacacaccatgcgagcag

SEQ ID NO: 4019677 - DNA, 25 bp, Homo sapien
tgaagcggcaaggaccagactaatg

SEQ ID NO: 4019678 - DNA, 25 bp, Homo sapien
tactgagacagaagcccatcggtcc

SEQ ID NO: 4019679 - DNA, 25 bp, Homo sapien
aataggcaggcctcatcttgaatga

SEQ ID NO: 4019680 - DNA, 25 bp, Homo sapien
gatcaatttgggtgtgagcagctaa

SEQ ID NO: 4019681 - DNA, 25 bp, Homo sapien
caagttaagctggaatacacgtgga

SEQ ID NO: 4019682 - DNA, 25 bp, Homo sapien
tgagcgataccagataccacgggtc

SEQ ID NO: 4019683 - DNA, 25 bp, Homo sapien
tagtgcttggaatgacctacagcag

SEQ ID NO: 4019684 - DNA, 25 bp, Homo sapien
catcagtcatgggtggatggcgacc

SEQ ID NO: 4019685 - DNA, 25 bp, Homo sapien
ttccatcaccgccatgctagcaggc

SEQ ID NO: 4019686 - DNA, 25 bp, Homo sapien
cagggtccccgagtcagagtcgttt

SEQ ID NO: 4019687 - DNA, 25 bp, Homo sapien
ccagtgtggaatgagtgattagaac

SEQ ID NO: 4019688 - DNA, 25 bp, Homo sapien
gagaggtacaaatgcttctgataca

SEQ ID NO: 4019689 - DNA, 25 bp, Homo sapien
caggcactcacatcgcaagaatggt

SEQ ID NO: 4019690 - DNA, 25 bp, Homo sapien
tctaagacacccctcattggaacgg

SEQ ID NO: 4019691 - DNA, 25 bp, Homo sapien
tcaaagtggaagctccaggcactca

SEQ ID NO: 4019692 - DNA, 25 bp, Homo sapien
gaatggtccatcaaaccagtgggaa

SEQ ID NO: 4019693 - DNA, 25 bp, Homo sapien
acatggacggatgtggctgctgcca

SEQ ID NO: 4019694 - DNA, 25 bp, Homo sapien
tcactgcaaccacatggacggatgt

SEQ ID NO: 4019695 - DNA, 25 bp, Homo sapien
gatgggttcaatcactgcaaccaca

SEQ ID NO: 4019696 - DNA, 25 bp, Homo sapien
accagtcggcatgctgaatgatggg

SEQ ID NO: 4019697 - DNA, 25 bp, Homo sapien
tgagagtcagaacaccacaaaagca

SEQ ID NO: 4019698 - DNA, 25 bp, Homo sapien
tacaacaacccgttatgaggcctac

SEQ ID NO: 4019699 - DNA, 25 bp, Homo sapien
ggttcccaagctcaatcccaggtct

SEQ ID NO: 4019700 - DNA, 25 bp, Homo sapien
tgcaaaaggcctgacactttctggc

SEQ ID NO: 4019701 - DNA, 25 bp, Homo sapien
catttctggcccataacaagttagg

SEQ ID NO: 4019702 - DNA, 25 bp, Homo sapien
ggagtcattttattcacatcgctgg

SEQ ID NO: 4019703 - DNA, 25 bp, Homo sapien
gttagggcctaacacaatcgcaatg

SEQ ID NO: 4019704 - DNA, 25 bp, Homo sapien
gctggtctgagcaagctttgcaagg

SEQ ID NO: 4019705 - DNA, 25 bp, Homo sapien
taacatactggatgatttggactcc

SEQ ID NO: 4019706 - DNA, 25 bp, Homo sapien
agccaacttacgtattaatgtcagg

SEQ ID NO: 4019707 - DNA, 25 bp, Homo sapien
tcaggcatgatactgatgcttcaaa

SEQ ID NO: 4019708 - DNA, 25 bp, Homo sapien
agccccaagttactctccaaagtga

SEQ ID NO: 4019709 - DNA, 25 bp, Homo sapien
ctgacatgttctccacaagtcttga

SEQ ID NO: 4019710 - DNA, 25 bp, Homo sapien
gacatgttctccacaagtcttgaag

SEQ ID NO: 4019711 - DNA, 25 bp, Homo sapien
ttgtggtggcaacttctgacatgtt

SEQ ID NO: 4019712 - DNA, 25 bp, Homo sapien
aaattttgtggtggcaacttctgac

SEQ ID NO: 4019713 - DNA, 25 bp, Homo sapien
attaaaagtcatcaaaggttcaggc

SEQ ID NO: 4019714 - DNA, 25 bp, Homo sapien
gttcaggcaattcccgtaaatagga

SEQ ID NO: 4019715 - DNA, 25 bp, Homo sapien
caggcaattcccgtaaataggattt

SEQ ID NO: 4019716 - DNA, 25 bp, Homo sapien
aaagtcatcaaaggttcaggcaatt

SEQ ID NO: 4019717 - DNA, 25 bp, Homo sapien
cttgagggtgacttgatttgcagac

SEQ ID NO: 4019718 - DNA, 25 bp, Homo sapien
cgccttgagggtgacttgatttgca

SEQ ID NO: 4019719 - DNA, 25 bp, Homo sapien
cttgatttgcagacactctttggcg

SEQ ID NO: 4019720 - DNA, 25 bp, Homo sapien
tttgcagacactctttggcgctcac

SEQ ID NO: 4019721 - DNA, 25 bp, Homo sapien
atccaggtgagaagtagaacagtcc

SEQ ID NO: 4019722 - DNA, 25 bp, Homo sapien
gagaagtagaacagtccaaagcagc

SEQ ID NO: 4019723 - DNA, 25 bp, Homo sapien
agcatgggggtctgaatagaactca

SEQ ID NO: 4019724 - DNA, 25 bp, Homo sapien
acagtccaaagcagctttcagcttc

SEQ ID NO: 4019725 - DNA, 25 bp, Homo sapien
tcatggtgacaaaagcttgaaagcc

SEQ ID NO: 4019726 - DNA, 25 bp, Homo sapien
tgttctacacaaaacggacaatggc

SEQ ID NO: 4019727 - DNA, 25 bp, Homo sapien
aggtatcatagggaacagggttgca

SEQ ID NO: 4019728 - DNA, 25 bp, Homo sapien
gtgcacaggatcacgaagctcccct

SEQ ID NO: 4019729 - DNA, 25 bp, Homo sapien
cttcaatgggcagcgcaatctcgcg

SEQ ID NO: 4019730 - DNA, 25 bp, Homo sapien
ggcttcaatgggcagcgcaatctcg

SEQ ID NO: 4019731 - DNA, 25 bp, Homo sapien
cacaggcttcaatgggcagcgcaat

SEQ ID NO: 4019732 - DNA, 25 bp, Homo sapien
aatgggcagcgcaatctcgcgcccg

SEQ ID NO: 4019733 - DNA, 25 bp, Homo sapien
tgagcgtacctagatggcaccaact

SEQ ID NO: 4019734 - DNA, 25 bp, Homo sapien
ccagaggagtcggataggtagcaca

SEQ ID NO: 4019735 - DNA, 25 bp, Homo sapien
caaagggaaccgatgcttaggaggc

SEQ ID NO: 4019736 - DNA, 25 bp, Homo sapien
taaatgctggcacaattcaagaggc

SEQ ID NO: 4019737 - DNA, 25 bp, Homo sapien
atgcttttctatggtaatctgcttg

SEQ ID NO: 4019738 - DNA, 25 bp, Homo sapien
cttttctatggtaatctgcttgggc

SEQ ID NO: 4019739 - DNA, 25 bp, Homo sapien
tgggctcgcatttcggggagggtct

SEQ ID NO: 4019740 - DNA, 25 bp, Homo sapien
tttctatggtaatctgcttgggctt

SEQ ID NO: 4019741 - DNA, 25 bp, Homo sapien
gaatttgccatactccccttctttg

SEQ ID NO: 4019742 - DNA, 25 bp, Homo sapien
cataaagttgtacatgtctgctgca

SEQ ID NO: 4019743 - DNA, 25 bp, Homo sapien
cgtaacaaagaatttgccatactcc

SEQ ID NO: 4019744 - DNA, 25 bp, Homo sapien
taaagttgtacatgtctgctgcaag

SEQ ID NO: 4019745 - DNA, 25 bp, Homo sapien
cttggtgaccaaggtgtctgaagcc

SEQ ID NO: 4019746 - DNA, 25 bp, Homo sapien
tgtgaagggcctcccatttatgaca

SEQ ID NO: 4019747 - DNA, 25 bp, Homo sapien
agattcctgaagaactgtactctca

SEQ ID NO: 4019748 - DNA, 25 bp, Homo sapien
gaaaaagtcggaatgctaagcatca

SEQ ID NO: 4019749 - DNA, 25 bp, Homo sapien
gtaacttacatttgaactttcatcc

SEQ ID NO: 4019750 - DNA, 25 bp, Homo sapien
aataatatagtcttagagaagaaga

SEQ ID NO: 4019751 - DNA, 25 bp, Homo sapien
atacatttatcaaggaattctcata

SEQ ID NO: 4019752 - DNA, 25 bp, Homo sapien
catccctcatttgcaaaaaccgaaa

SEQ ID NO: 4019753 - DNA, 25 bp, Homo sapien
gcccctgaaagttggttcctgagga

SEQ ID NO: 4019754 - DNA, 25 bp, Homo sapien
tgaggatttgtgagcttggttccac

SEQ ID NO: 4019755 - DNA, 25 bp, Homo sapien
tctatttttgatggaagcccctgaa

SEQ ID NO: 4019756 - DNA, 25 bp, Homo sapien
catctcttcctttagagtatctatt

SEQ ID NO: 4019757 - DNA, 25 bp, Homo sapien
cagtctaacaccaatcttgcaagct

SEQ ID NO: 4019758 - DNA, 25 bp, Homo sapien
tctaacaccaatcttgcaagctgct

SEQ ID NO: 4019759 - DNA, 25 bp, Homo sapien
gtctaacaccaatcttgcaagctgc

SEQ ID NO: 4019760 - DNA, 25 bp, Homo sapien
aacaccaatcttgcaagctgcttcc

SEQ ID NO: 4019761 - DNA, 25 bp, Homo sapien
aagacttcgtgctgggagagctcga

SEQ ID NO: 4019762 - DNA, 25 bp, Homo sapien
tccttctcaacaaagacttcgtgct

SEQ ID NO: 4019763 - DNA, 25 bp, Homo sapien
tcagctatgccgtacagagggtcca

SEQ ID NO: 4019764 - DNA, 25 bp, Homo sapien
ctatgccgtacagagggtccacgat

SEQ ID NO: 4019765 - DNA, 25 bp, Homo sapien
aggagagagtcttccagctgagtcg

SEQ ID NO: 4019766 - DNA, 25 bp, Homo sapien
gctgagtcgatgcttcttgcatatt

SEQ ID NO: 4019767 - DNA, 25 bp, Homo sapien
tcttccagctgagtcgatgcttctt

SEQ ID NO: 4019768 - DNA, 25 bp, Homo sapien
gagagtcttccagctgagtcgatgc

SEQ ID NO: 4019769 - DNA, 25 bp, Homo sapien
gcacccagtctaaactggctcttaa

SEQ ID NO: 4019770 - DNA, 25 bp, Homo sapien
ggctcttaatttggctatcattcta

SEQ ID NO: 4019771 - DNA, 25 bp, Homo sapien
acttctagctaaagagccagttttt

SEQ ID NO: 4019772 - DNA, 25 bp, Homo sapien
ctaaaaacttctagctaaagagcca

SEQ ID NO: 4019773 - DNA, 25 bp, Homo sapien
gaaatgggctaggaggcacttcact

SEQ ID NO: 4019774 - DNA, 25 bp, Homo sapien
catatgcactggcttgtactggaca

SEQ ID NO: 4019775 - DNA, 25 bp, Homo sapien
tacaagtgggctggttataacgtca

SEQ ID NO: 4019776 - DNA, 25 bp, Homo sapien
catgtaatttcacctgcccagcaga

SEQ ID NO: 4019777 - DNA, 25 bp, Homo sapien
tacaaggagactattcccagctgcc

SEQ ID NO: 4019778 - DNA, 25 bp, Homo sapien
tcctccacagggagggcttcgtgct

SEQ ID NO: 4019779 - DNA, 25 bp, Homo sapien
aaactctgcttaacatatgggctca

SEQ ID NO: 4019780 - DNA, 25 bp, Homo sapien
gcttcgtgcttcctagaggtgaaca

SEQ ID NO: 4019781 - DNA, 25 bp, Homo sapien
gaagcatgttatgaggcctttggga

SEQ ID NO: 4019782 - DNA, 25 bp, Homo sapien
ctcctgtgttttctagagccctgga

SEQ ID NO: 4019783 - DNA, 25 bp, Homo sapien
ttcccatgcaggaagcatgttatga

SEQ ID NO: 4019784 - DNA, 25 bp, Homo sapien
tggcactttcgtttgacgttggaaa

SEQ ID NO: 4019785 - DNA, 25 bp, Homo sapien
agtgcaaagtgtaggcatcctcaaa

SEQ ID NO: 4019786 - DNA, 25 bp, Homo sapien
cttcccaagtgcaaagtgtaggcat

SEQ ID NO: 4019787 - DNA, 25 bp, Homo sapien
cattgttgtggtaactcctcttccc

SEQ ID NO: 4019788 - DNA, 25 bp, Homo sapien
gaaatgagggccaagcactttgccc

SEQ ID NO: 4019789 - DNA, 25 bp, Homo sapien
agggccaagcactttgccccagctg

SEQ ID NO: 4019790 - DNA, 25 bp, Homo sapien
tgagggccaagcactttgccccagc

SEQ ID NO: 4019791 - DNA, 25 bp, Homo sapien
aatgagggccaagcactttgcccca

SEQ ID NO: 4019792 - DNA, 25 bp, Homo sapien
taatgttgcaatgggccgggatcgt

SEQ ID NO: 4019793 - DNA, 25 bp, Homo sapien
ccagcctgcataaaagggtggatgg

SEQ ID NO: 4019794 - DNA, 25 bp, Homo sapien
tcaggtcttgcattaaggccaaggt

SEQ ID NO: 4019795 - DNA, 25 bp, Homo sapien
tagctcaggaggtgactacaacagt

SEQ ID NO: 4019796 - DNA, 25 bp, Homo sapien
gaatggtggcatattgaccgcaccg

SEQ ID NO: 4019797 - DNA, 25 bp, Homo sapien
accaagcgcttatgggaatggtggc

SEQ ID NO: 4019798 - DNA, 25 bp, Homo sapien
gctggccctggaaacatgccaccaa

SEQ ID NO: 4019799 - DNA, 25 bp, Homo sapien
gcaccgtgtccaggcgtctctcaat

SEQ ID NO: 4019800 - DNA, 25 bp, Homo sapien
cagcgtttcttcagatccaagccca

SEQ ID NO: 4019801 - DNA, 25 bp, Homo sapien
cattttacgcatcgagatggtctgt

SEQ ID NO: 4019802 - DNA, 25 bp, Homo sapien
caaaagggcagcgtttcttcagatc

SEQ ID NO: 4019803 - DNA, 25 bp, Homo sapien
cgcatcgagatggtctgtgcctctt

SEQ ID NO: 4019804 - DNA, 25 bp, Homo sapien
ctgtaatagatcttcactaaggact

SEQ ID NO: 4019805 - DNA, 25 bp, Homo sapien
aatagatcttcactaaggacttctg

SEQ ID NO: 4019806 - DNA, 25 bp, Homo sapien
tagatcttcactaaggacttctgtt

SEQ ID NO: 4019807 - DNA, 25 bp, Homo sapien
gatcttcactaaggacttctgtttt

SEQ ID NO: 4019808 - DNA, 25 bp, Homo sapien
tcgtaattctcaaagcagcagtgct

SEQ ID NO: 4019809 - DNA, 25 bp, Homo sapien
caaccctgcagtgtggctaatagga

SEQ ID NO: 4019810 - DNA, 25 bp, Homo sapien
ccttgacctggtgtggcaatgtcca

SEQ ID NO: 4019811 - DNA, 25 bp, Homo sapien
tttactagtcactcaagcaaggctg

SEQ ID NO: 4019812 - DNA, 25 bp, Homo sapien
ttagtaactcttgcaggatgtggtg

SEQ ID NO: 4019813 - DNA, 25 bp, Homo sapien
tagtaactcttgcaggatgtggtgc

SEQ ID NO: 4019814 - DNA, 25 bp, Homo sapien
ccaaaatgaacaggggtggctgcct

SEQ ID NO: 4019815 - DNA, 25 bp, Homo sapien
ttcagtccaaatgcggaggcacagc

SEQ ID NO: 4019816 - DNA, 25 bp, Homo sapien
tcgacattctgcctcataggcaagc

SEQ ID NO: 4019817 - DNA, 25 bp, Homo sapien
ataattcagtccaaatgcggaggca

SEQ ID NO: 4019818 - DNA, 25 bp, Homo sapien
caggacagactagaagggtagcagc

SEQ ID NO: 4019819 - DNA, 25 bp, Homo sapien
aaggttcaggtagcaacagctggca

SEQ ID NO: 4019820 - DNA, 25 bp, Homo sapien
ttcacaactggctttacgctgcggc

SEQ ID NO: 4019821 - DNA, 25 bp, Homo sapien
gggtccctgtgtcctaggccataaa

SEQ ID NO: 4019822 - DNA, 25 bp, Homo sapien
gaaactcagggacagagtacgtgga

SEQ ID NO: 4019823 - DNA, 25 bp, Homo sapien
acaacaccgtgtgggatggcaccaa

SEQ ID NO: 4019824 - DNA, 25 bp, Homo sapien
caagtataaaccatccatccgagga

SEQ ID NO: 4019825 - DNA, 25 bp, Homo sapien
tacgtggagagttagtaaaccctgc

SEQ ID NO: 4019826 - DNA, 25 bp, Homo sapien
tatgaaggtacaatgaggtcagctc

SEQ ID NO: 4019827 - DNA, 25 bp, Homo sapien
tgtgtttttcctcaccaaaagagaa

SEQ ID NO: 4019828 - DNA, 25 bp, Homo sapien
tgaagggacctgttgaacattcagg

SEQ ID NO: 4019829 - DNA, 25 bp, Homo sapien
ctgccttgagggactggctggacaa

SEQ ID NO: 4019830 - DNA, 25 bp, Homo sapien
gcatgcagtactttccacaataagc

SEQ ID NO: 4019831 - DNA, 25 bp, Homo sapien
cacgggcctcactatgttaatcagg

SEQ ID NO: 4019832 - DNA, 25 bp, Homo sapien
tgggagtcgcatgtcccacctacag

SEQ ID NO: 4019833 - DNA, 25 bp, Homo sapien
cctaacaactgggatacaggtggga

SEQ ID NO: 4019834 - DNA, 25 bp, Homo sapien
aatcccatgacagaacacatttctg

SEQ ID NO: 4019835 - DNA, 25 bp, Homo sapien
aaaactgaattaactaatcgccaag

SEQ ID NO: 4019836 - DNA, 25 bp, Homo sapien
ggaaaggctcccatctagaaaaagc

SEQ ID NO: 4019837 - DNA, 25 bp, Homo sapien
gaaagccaattcttgagggaaagta

SEQ ID NO: 4019838 - DNA, 25 bp, Homo sapien
tgtaactaagcattgcttggacaac

SEQ ID NO: 4019839 - DNA, 25 bp, Homo sapien
acaactggcaggctttcttgagctg

SEQ ID NO: 4019840 - DNA, 25 bp, Homo sapien
aaataacatttctctagagagcagc

SEQ ID NO: 4019841 - DNA, 25 bp, Homo sapien
tcccagcatgggaactgtaactaag

SEQ ID NO: 4019842 - DNA, 25 bp, Homo sapien
aatcttggggtttttgtccatgcgc

SEQ ID NO: 4019843 - DNA, 25 bp, Homo sapien
gatgtctgtgaagtccataagatta

SEQ ID NO: 4019844 - DNA, 25 bp, Homo sapien
tccatgcgcttgaggatgtctgtga

SEQ ID NO: 4019845 - DNA, 25 bp, Homo sapien
catgtggacggcttttcttgaatct

SEQ ID NO: 4019846 - DNA, 25 bp, Homo sapien
atttccccaaagtaccgctggccat

SEQ ID NO: 4019847 - DNA, 25 bp, Homo sapien
tatttccccaaagtaccgctggcca

SEQ ID NO: 4019848 - DNA, 25 bp, Homo sapien
tgtatttccccaaagtaccgctggc

SEQ ID NO: 4019849 - DNA, 25 bp, Homo sapien
tggctagaactgaagagcagctctc

SEQ ID NO: 4019850 - DNA, 25 bp, Homo sapien
tgtgacccctgcttatgtgattgtg

SEQ ID NO: 4019851 - DNA, 25 bp, Homo sapien
agcagctctcccctttgaatgaaca

SEQ ID NO: 4019852 - DNA, 25 bp, Homo sapien
caccatggcaacaagtggctagaac

SEQ ID NO: 4019853 - DNA, 25 bp, Homo sapien
cattttactggcctcgccctctagg

SEQ ID NO: 4019854 - DNA, 25 bp, Homo sapien
tcacatggcccaaagcactgattca

SEQ ID NO: 4019855 - DNA, 25 bp, Homo sapien
tcagctgcatatagtgtccccgtag

SEQ ID NO: 4019856 - DNA, 25 bp, Homo sapien
tcagacctccaagggaaacttcagt

SEQ ID NO: 4019857 - DNA, 25 bp, Homo sapien
tggttagccagctgcttcatgcggt

SEQ ID NO: 4019858 - DNA, 25 bp, Homo sapien
ggttagccagctgcttcatgcggtt

SEQ ID NO: 4019859 - DNA, 25 bp, Homo sapien
actacatcgcttcccggcccaaacg

SEQ ID NO: 4019860 - DNA, 25 bp, Homo sapien
agctactacatcgcttcccggccca

SEQ ID NO: 4019861 - DNA, 25 bp, Homo sapien
agcctggcagctactacatcgcttc

SEQ ID NO: 4019862 - DNA, 25 bp, Homo sapien
ctactacatcgcttcccggcccaaa

SEQ ID NO: 4019863 - DNA, 25 bp, Homo sapien
taatatccagtctccgggtttccaa

SEQ ID NO: 4019864 - DNA, 25 bp, Homo sapien
taggtctcagaagccatcaccagtt

SEQ ID NO: 4019865 - DNA, 25 bp, Homo sapien
tcacagacttcagtaggccccgtgt

SEQ ID NO: 4019866 - DNA, 25 bp, Homo sapien
ggccccgtgtacctgagcttcaatg

SEQ ID NO: 4019867 - DNA, 25 bp, Homo sapien
ccatgtactcatcgtggaacacgga

SEQ ID NO: 4019868 - DNA, 25 bp, Homo sapien
gccttcagtggccaactggaaactt

SEQ ID NO: 4019869 - DNA, 25 bp, Homo sapien
tgaaattatgtcacaaaaacccatg

SEQ ID NO: 4019870 - DNA, 25 bp, Homo sapien
catgatgggtaccacccgaatggag

SEQ ID NO: 4019871 - DNA, 25 bp, Homo sapien
tctgttgtaattgatgccaataact

SEQ ID NO: 4019872 - DNA, 25 bp, Homo sapien
tgatgcttcctacgtatctctgagg

SEQ ID NO: 4019873 - DNA, 25 bp, Homo sapien
gccaataacttgtagtttgctgcca

SEQ ID NO: 4019874 - DNA, 25 bp, Homo sapien
aatagctgccggtcctgcaaccgat

SEQ ID NO: 4019875 - DNA, 25 bp, Homo sapien
gccatggaaagtgatttacccaaaa

SEQ ID NO: 4019876 - DNA, 25 bp, Homo sapien
actgccatggaaagtgatttaccca

SEQ ID NO: 4019877 - DNA, 25 bp, Homo sapien
tgatgttcttcagtggtactgtttg

SEQ ID NO: 4019878 - DNA, 25 bp, Homo sapien
attggggcaaacaaagtttagccat

SEQ ID NO: 4019879 - DNA, 25 bp, Homo sapien
gctccactctttcctagcgaggtga

SEQ ID NO: 4019880 - DNA, 25 bp, Homo sapien
tctttcctagcgaggtgaccttggg

SEQ ID NO: 4019881 - DNA, 25 bp, Homo sapien
tcagctccactctttcctagcgagg

SEQ ID NO: 4019882 - DNA, 25 bp, Homo sapien
catgattgattaaaaggggtatggg

SEQ ID NO: 4019883 - DNA, 25 bp, Homo sapien
ggcacgaacactcagcacacattag

SEQ ID NO: 4019884 - DNA, 25 bp, Homo sapien
aaacttgtcatctgcaactttgcaa

SEQ ID NO: 4019885 - DNA, 25 bp, Homo sapien
ccttgaataccggactcggaatggc

SEQ ID NO: 4019886 - DNA, 25 bp, Homo sapien
taattcacgagtccgctgtgaggac

SEQ ID NO: 4019887 - DNA, 25 bp, Homo sapien
ggtgcccagtcaaactcaacatatt

SEQ ID NO: 4019888 - DNA, 25 bp, Homo sapien
tgacgatcatttgaaagttgacctc

SEQ ID NO: 4019889 - DNA, 25 bp, Homo sapien
ttaattattgacacggagtatcact

SEQ ID NO: 4019890 - DNA, 25 bp, Homo sapien
tacttatttaattattgacacggag

SEQ ID NO: 4019891 - DNA, 25 bp, Homo sapien
taagcttatccacgtggcgttttgg

SEQ ID NO: 4019892 - DNA, 25 bp, Homo sapien
ggactgtctcaaagctccagcaaag

SEQ ID NO: 4019893 - DNA, 25 bp, Homo sapien
tcatggcaaagtctgaaggaaactg

SEQ ID NO: 4019894 - DNA, 25 bp, Homo sapien
ctcgtggtacctgcttggacctgga

SEQ ID NO: 4019895 - DNA, 25 bp, Homo sapien
tactaggacctttatatactgtggc

SEQ ID NO: 4019896 - DNA, 25 bp, Homo sapien
gagttaaaactcactaccctgctga

SEQ ID NO: 4019897 - DNA, 25 bp, Homo sapien
tcaatactcgaatggcatcaggcct

SEQ ID NO: 4019898 - DNA, 25 bp, Homo sapien
ggatactctgtgtggtgaccttcaa

SEQ ID NO: 4019899 - DNA, 25 bp, Homo sapien
agacagattctctatcacccaacct

SEQ ID NO: 4019900 - DNA, 25 bp, Homo sapien
catgccttagcttttcaagtagctg

SEQ ID NO: 4019901 - DNA, 25 bp, Homo sapien
acagattctctatcacccaacctgg

SEQ ID NO: 4019902 - DNA, 25 bp, Homo sapien
ttctcatgccttagcttttcaagta

SEQ ID NO: 4019903 - DNA, 25 bp, Homo sapien
tttagcaggtcatgtcagcagagac

SEQ ID NO: 4019904 - DNA, 25 bp, Homo sapien
tcactctagggatgaagagatgcca

SEQ ID NO: 4019905 - DNA, 25 bp, Homo sapien
acattcaagacggagatggcagcat

SEQ ID NO: 4019906 - DNA, 25 bp, Homo sapien
gattgccccgcctatgagttcaagt

SEQ ID NO: 4019907 - DNA, 25 bp, Homo sapien
tcagctacaatctaacctttttaaa

SEQ ID NO: 4019908 - DNA, 25 bp, Homo sapien
cacgctcagctacaatctaaccttt

SEQ ID NO: 4019909 - DNA, 25 bp, Homo sapien
cgctcagctacaatctaaccttttt

SEQ ID NO: 4019910 - DNA, 25 bp, Homo sapien
accacgctcagctacaatctaacct

SEQ ID NO: 4019911 - DNA, 25 bp, Homo sapien
tactgctggcaacgtaaggataagg

SEQ ID NO: 4019912 - DNA, 25 bp, Homo sapien
gaccagcaggtagagacgcattttg

SEQ ID NO: 4019913 - DNA, 25 bp, Homo sapien
catcaaatataggtagggctgactc

SEQ ID NO: 4019914 - DNA, 25 bp, Homo sapien
ttcagagttcccctagaaaaggcag

SEQ ID NO: 4019915 - DNA, 25 bp, Homo sapien
tgctaccatgcacttaaaggactcc

SEQ ID NO: 4019916 - DNA, 25 bp, Homo sapien
atttcttgctaccatgcacttaaag

SEQ ID NO: 4019917 - DNA, 25 bp, Homo sapien
taccatgcacttaaaggactcccaa

SEQ ID NO: 4019918 - DNA, 25 bp, Homo sapien
cacttaaaggactcccaacagcggg

SEQ ID NO: 4019919 - DNA, 25 bp, Homo sapien
agaagcatcgggtgtagtcctcgca

SEQ ID NO: 4019920 - DNA, 25 bp, Homo sapien
gctcggcacagcgttagggacagaa

SEQ ID NO: 4019921 - DNA, 25 bp, Homo sapien
tcatcggagttttagcacagggcag

SEQ ID NO: 4019922 - DNA, 25 bp, Homo sapien
tcaacccggaaagtctgacaatgct

SEQ ID NO: 4019923 - DNA, 25 bp, Homo sapien
agtcaggtcggccacctgctgatga

SEQ ID NO: 4019924 - DNA, 25 bp, Homo sapien
caggtcggccacctgctgatgaggt

SEQ ID NO: 4019925 - DNA, 25 bp, Homo sapien
tcggccacctgctgatgaggttgaa

SEQ ID NO: 4019926 - DNA, 25 bp, Homo sapien
cacctgctgatgaggttgaactgct

SEQ ID NO: 4019927 - DNA, 25 bp, Homo sapien
gacggctcctacatggttcacagct

SEQ ID NO: 4019928 - DNA, 25 bp, Homo sapien
tggcaggtagggctacacccagacg

SEQ ID NO: 4019929 - DNA, 25 bp, Homo sapien
tagggctacacccagacggctccta

SEQ ID NO: 4019930 - DNA, 25 bp, Homo sapien
ccagacggctcctacatggttcaca

SEQ ID NO: 4019931 - DNA, 25 bp, Homo sapien
gaaacaggcagaacatattagctat

SEQ ID NO: 4019932 - DNA, 25 bp, Homo sapien
ccagcccttggtacctcaggttcag

SEQ ID NO: 4019933 - DNA, 25 bp, Homo sapien
caaattccaagtcacgtggttttcg

SEQ ID NO: 4019934 - DNA, 25 bp, Homo sapien
tctcatgtattttaagggtcccctc

SEQ ID NO: 4019935 - DNA, 25 bp, Homo sapien
caattactgttaggacacaggcagg

SEQ ID NO: 4019936 - DNA, 25 bp, Homo sapien
ggagtgccaggcaatctccccagtg

SEQ ID NO: 4019937 - DNA, 25 bp, Homo sapien
ctgcgaagcaaagcccagggttgtc

SEQ ID NO: 4019938 - DNA, 25 bp, Homo sapien
ggaaacatcactacccttgctagaa

SEQ ID NO: 4019939 - DNA, 25 bp, Homo sapien
taaaattgaatgacactgagcccgg

SEQ ID NO: 4019940 - DNA, 25 bp, Homo sapien
gccattgatgctgctacctggtagc

SEQ ID NO: 4019941 - DNA, 25 bp, Homo sapien
tgatcgctgctacatggcttcctat

SEQ ID NO: 4019942 - DNA, 25 bp, Homo sapien
tgagcccggactgaatgtaacaact

SEQ ID NO: 4019943 - DNA, 25 bp, Homo sapien
tgttccgccctgagttaattatagc

SEQ ID NO: 4019944 - DNA, 25 bp, Homo sapien
taaaatttcgcgaccagcaagcaga

SEQ ID NO: 4019945 - DNA, 25 bp, Homo sapien
tgccctttgcccgaacgctgaggat

SEQ ID NO: 4019946 - DNA, 25 bp, Homo sapien
agaaaccgggcgacttctccagaca

SEQ ID NO: 4019947 - DNA, 25 bp, Homo sapien
tcaatgagcgactcggaagaggagc

SEQ ID NO: 4019948 - DNA, 25 bp, Homo sapien
tgctgttccacctcgagctgcgacg

SEQ ID NO: 4019949 - DNA, 25 bp, Homo sapien
tgcgcggcacctgcgaagatgcttc

SEQ ID NO: 4019950 - DNA, 25 bp, Homo sapien
gggaatcctctatcacctcctgctg

SEQ ID NO: 4019951 - DNA, 25 bp, Homo sapien
gaacaacatggccttcctatgggtg

SEQ ID NO: 4019952 - DNA, 25 bp, Homo sapien
aaagagatgtctggtattccgtggg

SEQ ID NO: 4019953 - DNA, 25 bp, Homo sapien
tgtcatcagtggtgcagagtgccct

SEQ ID NO: 4019954 - DNA, 25 bp, Homo sapien
gcttccaacaacattagggcctggc

SEQ ID NO: 4019955 - DNA, 25 bp, Homo sapien
gcctttccggcatcctgatgacatc

SEQ ID NO: 4019956 - DNA, 25 bp, Homo sapien
gagtaaggtcgagattgtgatctga

SEQ ID NO: 4019957 - DNA, 25 bp, Homo sapien
caaagccaagtttttcctcacggct

SEQ ID NO: 4019958 - DNA, 25 bp, Homo sapien
tctcccctttagcaggtcacaaggt

SEQ ID NO: 4019959 - DNA, 25 bp, Homo sapien
tactggctgttttaacctatttcac

SEQ ID NO: 4019960 - DNA, 25 bp, Homo sapien
ttcacccaaaaaataatgctcgtca

SEQ ID NO: 4019961 - DNA, 25 bp, Homo sapien
gatttcctgaccctcctaatggagc

SEQ ID NO: 4019962 - DNA, 25 bp, Homo sapien
ggagctcaagctgccttttttgttg

SEQ ID NO: 4019963 - DNA, 25 bp, Homo sapien
ccttcctgaggtgggatactccata

SEQ ID NO: 4019964 - DNA, 25 bp, Homo sapien
cgctggttctcttggttaatgggcc

SEQ ID NO: 4019965 - DNA, 25 bp, Homo sapien
tattagcgaaacttgggaattgaca

SEQ ID NO: 4019966 - DNA, 25 bp, Homo sapien
ggctggcggcaagaagactgtcaat

SEQ ID NO: 4019967 - DNA, 25 bp, Homo sapien
ctgctaagagaaaacccggtgggat

SEQ ID NO: 4019968 - DNA, 25 bp, Homo sapien
tacccagcagggacaaacgaagtct

SEQ ID NO: 4019969 - DNA, 25 bp, Homo sapien
taagagtgctagcaggtggattccc

SEQ ID NO: 4019970 - DNA, 25 bp, Homo sapien
tgtacattatccacacaagggcacg

SEQ ID NO: 4019971 - DNA, 25 bp, Homo sapien
tcacgtggagactatgcctgggacc

SEQ ID NO: 4019972 - DNA, 25 bp, Homo sapien
cattcacagaataggtcgggcggta

SEQ ID NO: 4019973 - DNA, 25 bp, Homo sapien
ttaaaagccgcctctgccaaagtca

SEQ ID NO: 4019974 - DNA, 25 bp, Homo sapien
acagtacaggtcacacaagagggcc

SEQ ID NO: 4019975 - DNA, 25 bp, Homo sapien
tatggcaccaagcagattttccaga

SEQ ID NO: 4019976 - DNA, 25 bp, Homo sapien
tagaggaaaactcgccagtcgcggt

SEQ ID NO: 4019977 - DNA, 25 bp, Homo sapien
aattactccttgtgctcctacctgg

SEQ ID NO: 4019978 - DNA, 25 bp, Homo sapien
gccgggagagacgttttattagcaa

SEQ ID NO: 4019979 - DNA, 25 bp, Homo sapien
aattaggtgggtccgtggtggtgtg

SEQ ID NO: 4019980 - DNA, 25 bp, Homo sapien
ttaggtgggtccgtggtggtgtgtg

SEQ ID NO: 4019981 - DNA, 25 bp, Homo sapien
caaggcaggggaactgcttgaaccc

SEQ ID NO: 4019982 - DNA, 25 bp, Homo sapien
gccaaggcaggggaactgcttgaac

SEQ ID NO: 4019983 - DNA, 25 bp, Homo sapien
gattttgcttactatatagcaggga

SEQ ID NO: 4019984 - DNA, 25 bp, Homo sapien
gatgacaaaactacatggatgataa

SEQ ID NO: 4019985 - DNA, 25 bp, Homo sapien
taaagcagtggtagcaaattcttag

SEQ ID NO: 4019986 - DNA, 25 bp, Homo sapien
catgctcagcttgttgcctaattag

SEQ ID NO: 4019987 - DNA, 25 bp, Homo sapien
atgatctcgtctcactgcaacctcc

SEQ ID NO: 4019988 - DNA, 25 bp, Homo sapien
atggagtcttgctcattgtccaggc

SEQ ID NO: 4019989 - DNA, 25 bp, Homo sapien
tggagtgcagtagcatgatctcgtc

SEQ ID NO: 4019990 - DNA, 25 bp, Homo sapien
gcttctaaaaagtatgactaagaaa

SEQ ID NO: 4019991 - DNA, 25 bp, Homo sapien
tccacctgtatgcctgtcagtcaga

SEQ ID NO: 4019992 - DNA, 25 bp, Homo sapien
atccacctgtatgcctgtcagtcag

SEQ ID NO: 4019993 - DNA, 25 bp, Homo sapien
aataaatctcacttgccaccagtcg

SEQ ID NO: 4019994 - DNA, 25 bp, Homo sapien
taatctgtcgaaggcttatgccgag

SEQ ID NO: 4019995 - DNA, 25 bp, Homo sapien
cagtggtcgcacatgttcctcttcc

SEQ ID NO: 4019996 - DNA, 25 bp, Homo sapien
cagtcgcctgtggttggacctctgc

SEQ ID NO: 4019997 - DNA, 25 bp, Homo sapien
ccctgtgattcgcatgttcgtggac

SEQ ID NO: 4019998 - DNA, 25 bp, Homo sapien
ggatgcaactgatgacttaatgccg

SEQ ID NO: 4019999 - DNA, 25 bp, Homo sapien
tggacctgggtttgtagctgatgcc

SEQ ID NO: 4020000 - DNA, 25 bp, Homo sapien
gaccctggagaagcttcacccagaa

SEQ ID NO: 4020001 - DNA, 25 bp, Homo sapien
gcaaatgactccttctattgtcaga

SEQ ID NO: 4020002 - DNA, 25 bp, Homo sapien
tgcaaatgactccttctattgtcag

SEQ ID NO: 4020003 - DNA, 25 bp, Homo sapien
caaatgactccttctattgtcagaa

SEQ ID NO: 4020004 - DNA, 25 bp, Homo sapien
aatgactccttctattgtcagaatt

SEQ ID NO: 4020005 - DNA, 25 bp, Homo sapien
caaagcaagcctaggtgggacatac

SEQ ID NO: 4020006 - DNA, 25 bp, Homo sapien
tactcagacattcctttagccaggg

SEQ ID NO: 4020007 - DNA, 25 bp, Homo sapien
tatgattctgggcaacttagcgcaa

SEQ ID NO: 4020008 - DNA, 25 bp, Homo sapien
taagggaataaacgccactgactcc

SEQ ID NO: 4020009 - DNA, 25 bp, Homo sapien
tctggtgggcaccaaaatttgagga

SEQ ID NO: 4020010 - DNA, 25 bp, Homo sapien
tccggtgggcgctgaaatgagaact

SEQ ID NO: 4020011 - DNA, 25 bp, Homo sapien
tccttgtggtgggtcatccggcaca

SEQ ID NO: 4020012 - DNA, 25 bp, Homo sapien
catgaacttcccgatgtttggtaag

SEQ ID NO: 4020013 - DNA, 25 bp, Homo sapien
ggcctctgatgcacaacggctttcc

SEQ ID NO: 4020014 - DNA, 25 bp, Homo sapien
cacaaaaggcctctgatgcacaacg

SEQ ID NO: 4020015 - DNA, 25 bp, Homo sapien
tatttgagaagtctgtagggtctct

SEQ ID NO: 4020016 - DNA, 25 bp, Homo sapien
ccatatttgagaagtctgtagggtc

SEQ ID NO: 4020017 - DNA, 25 bp, Homo sapien
ggctttccctgtctaattccttgaa

SEQ ID NO: 4020018 - DNA, 25 bp, Homo sapien
agacatcggctttccctgtctaatt

SEQ ID NO: 4020019 - DNA, 25 bp, Homo sapien
gcgatatttgctggggtcggtactc

SEQ ID NO: 4020020 - DNA, 25 bp, Homo sapien
ctgagatgcattcccttttgcgata

SEQ ID NO: 4020021 - DNA, 25 bp, Homo sapien
taatgccctatgctgttccatgtcc

SEQ ID NO: 4020022 - DNA, 25 bp, Homo sapien
ccatgtccttatatactatctgtgt

SEQ ID NO: 4020023 - DNA, 25 bp, Homo sapien
gccctatgctgttccatgtccttat

SEQ ID NO: 4020024 - DNA, 25 bp, Homo sapien
ctattaatgccctatgctgttccat

SEQ ID NO: 4020025 - DNA, 25 bp, Homo sapien
tgatccgcttgctctccatacactt

SEQ ID NO: 4020026 - DNA, 25 bp, Homo sapien
taacctcagatcctgtgactcttcc

SEQ ID NO: 4020027 - DNA, 25 bp, Homo sapien
cttgcaaggcttgatccgcttgctc

SEQ ID NO: 4020028 - DNA, 25 bp, Homo sapien
ttttatacaagtctgatattaacca

SEQ ID NO: 4020029 - DNA, 25 bp, Homo sapien
tgcacaatttcctcctcgctcattc

SEQ ID NO: 4020030 - DNA, 25 bp, Homo sapien
tcttgcacaatttcctcctcgctca

SEQ ID NO: 4020031 - DNA, 25 bp, Homo sapien
ggctctgcagtagacctggaggtcc

SEQ ID NO: 4020032 - DNA, 25 bp, Homo sapien
gctctgcagtagacctggaggtccc

SEQ ID NO: 4020033 - DNA, 25 bp, Homo sapien
caagagtcttctattactgcctcct

SEQ ID NO: 4020034 - DNA, 25 bp, Homo sapien
aggttcccagcctgtaggttcctgg

SEQ ID NO: 4020035 - DNA, 25 bp, Homo sapien
gcagatgcccgagagttaatcaggg

SEQ ID NO: 4020036 - DNA, 25 bp, Homo sapien
tagaacgcgcaggactctagcacgt

SEQ ID NO: 4020037 - DNA, 25 bp, Homo sapien
ctcacggaggatatcaagaaaagtc

SEQ ID NO: 4020038 - DNA, 25 bp, Homo sapien
tcttccgatgacaggcttgaagcgc

SEQ ID NO: 4020039 - DNA, 25 bp, Homo sapien
tgaagcgcttcataaaaccgagtct

SEQ ID NO: 4020040 - DNA, 25 bp, Homo sapien
aagccgcactctcgaagctgttcag

SEQ ID NO: 4020041 - DNA, 25 bp, Homo sapien
tgagagtacttcagtgatgtggcca

SEQ ID NO: 4020042 - DNA, 25 bp, Homo sapien
agagtacttcagtgatgtggccaca

SEQ ID NO: 4020043 - DNA, 25 bp, Homo sapien
gagagtacttcagtgatgtggccac

SEQ ID NO: 4020044 - DNA, 25 bp, Homo sapien
gagtacttcagtgatgtggccacac

SEQ ID NO: 4020045 - DNA, 25 bp, Homo sapien
tttatcagtggacggagcacgggct

SEQ ID NO: 4020046 - DNA, 25 bp, Homo sapien
cagacttgcggataaattcgatgcc

SEQ ID NO: 4020047 - DNA, 25 bp, Homo sapien
caccaagctgatgtgttccttagca

SEQ ID NO: 4020048 - DNA, 25 bp, Homo sapien
tgtcctcaaagaaggcgcagggttc

SEQ ID NO: 4020049 - DNA, 25 bp, Homo sapien
cattcagccacagcaccatacactt

SEQ ID NO: 4020050 - DNA, 25 bp, Homo sapien
ctggggttctaaggaagccacattc

SEQ ID NO: 4020051 - DNA, 25 bp, Homo sapien
ctttcgatagcttttctggagactt

SEQ ID NO: 4020052 - DNA, 25 bp, Homo sapien
tacacttggctatttcggggacagg

SEQ ID NO: 4020053 - DNA, 25 bp, Homo sapien
cataaaagcgagactctttgagaat

SEQ ID NO: 4020054 - DNA, 25 bp, Homo sapien
tgtttcataaaagcgagactctttg

SEQ ID NO: 4020055 - DNA, 25 bp, Homo sapien
agcgagactctttgagaattgccag

SEQ ID NO: 4020056 - DNA, 25 bp, Homo sapien
gaagtgtttcataaaagcgagactc

SEQ ID NO: 4020057 - DNA, 25 bp, Homo sapien
tttcatcttctaaaccccactgctg

SEQ ID NO: 4020058 - DNA, 25 bp, Homo sapien
gaggaatgcagacctagagtccatg

SEQ ID NO: 4020059 - DNA, 25 bp, Homo sapien
gggacctgaatagcatgaactgact

SEQ ID NO: 4020060 - DNA, 25 bp, Homo sapien
tagttgcttcgtaggatacttctct

SEQ ID NO: 4020061 - DNA, 25 bp, Homo sapien
ttatcttgttagatgtagacactgc

SEQ ID NO: 4020062 - DNA, 25 bp, Homo sapien
tctctgttccaaccgggttatcttg

SEQ ID NO: 4020063 - DNA, 25 bp, Homo sapien
ccgggttatcttgttagatgtagac

SEQ ID NO: 4020064 - DNA, 25 bp, Homo sapien
tccaaccgggttatcttgttagatg

SEQ ID NO: 4020065 - DNA, 25 bp, Homo sapien
ctacagtaaaataaacatatttcat

SEQ ID NO: 4020066 - DNA, 25 bp, Homo sapien
ctccttcctgaaatcccggtagagg

SEQ ID NO: 4020067 - DNA, 25 bp, Homo sapien
ccagggagaccacgttcccaacatt

SEQ ID NO: 4020068 - DNA, 25 bp, Homo sapien
ccctttgggcaggaatctgatgcac

SEQ ID NO: 4020069 - DNA, 25 bp, Homo sapien
aaagcctctggccacgtggacatct

SEQ ID NO: 4020070 - DNA, 25 bp, Homo sapien
aaggatgagcaatcacagatgaggc

SEQ ID NO: 4020071 - DNA, 25 bp, Homo sapien
cttcaaaggatgagcaatcacagat

SEQ ID NO: 4020072 - DNA, 25 bp, Homo sapien
caaaggatgagcaatcacagatgag

SEQ ID NO: 4020073 - DNA, 25 bp, Homo sapien
gatgagcaatcacagatgaggcaga

SEQ ID NO: 4020074 - DNA, 25 bp, Homo sapien
gatctagggtattccattcatcagc

SEQ ID NO: 4020075 - DNA, 25 bp, Homo sapien
tcacttcctgatctagggtattcca

SEQ ID NO: 4020076 - DNA, 25 bp, Homo sapien
gaagccgtgtggttgtcacttcctg

SEQ ID NO: 4020077 - DNA, 25 bp, Homo sapien
gtggttgtcacttcctgatctaggg

SEQ ID NO: 4020078 - DNA, 25 bp, Homo sapien
ccaagtggggagtgcttctcccggt

SEQ ID NO: 4020079 - DNA, 25 bp, Homo sapien
gctttcggttcagctgttcctggtg

SEQ ID NO: 4020080 - DNA, 25 bp, Homo sapien
ttctcccggtgcacgggactgctga

SEQ ID NO: 4020081 - DNA, 25 bp, Homo sapien
tgggttgggtctccacctgctctgg

SEQ ID NO: 4020082 - DNA, 25 bp, Homo sapien
tatccctgaccaatacagcaacctg

SEQ ID NO: 4020083 - DNA, 25 bp, Homo sapien
aacctgctgatagatctctacacaa

SEQ ID NO: 4020084 - DNA, 25 bp, Homo sapien
tgcaagtctgatgcaaggtgaaacc

SEQ ID NO: 4020085 - DNA, 25 bp, Homo sapien
ggtgaaaccgcaaatcttgcaaatg

SEQ ID NO: 4020086 - DNA, 25 bp, Homo sapien
ttctctgaagagcacgtctttctgc

SEQ ID NO: 4020087 - DNA, 25 bp, Homo sapien
cacgtctttctgcaatacatccctg

SEQ ID NO: 4020088 - DNA, 25 bp, Homo sapien
ctgcccacatgcctttcccattccc

SEQ ID NO: 4020089 - DNA, 25 bp, Homo sapien
gaagagcacgtctttctgcaataca

SEQ ID NO: 4020090 - DNA, 25 bp, Homo sapien
gagctatccgatccttccagaatgg

SEQ ID NO: 4020091 - DNA, 25 bp, Homo sapien
ccaagcctgaatcttctcgggtaaa

SEQ ID NO: 4020092 - DNA, 25 bp, Homo sapien
aagcatttgcggaaggtctcagagc

SEQ ID NO: 4020093 - DNA, 25 bp, Homo sapien
tctttctccaaatgcactaccaggg

SEQ ID NO: 4020094 - DNA, 25 bp, Homo sapien
tccaaacaagatgtgaccgcgcaat

SEQ ID NO: 4020095 - DNA, 25 bp, Homo sapien
taatcaaatctatgccaggcccttg

SEQ ID NO: 4020096 - DNA, 25 bp, Homo sapien
cctcttagtgcaaagtcggaaaccg

SEQ ID NO: 4020097 - DNA, 25 bp, Homo sapien
aacttcacgtctagctcaaggtggg

SEQ ID NO: 4020098 - DNA, 25 bp, Homo sapien
cacgacggccccgaccgtcctgagg

SEQ ID NO: 4020099 - DNA, 25 bp, Homo sapien
gggccgccggattccgagagcggcg

SEQ ID NO: 4020100 - DNA, 25 bp, Homo sapien
cgagagcggcgccgggctctttcgg

SEQ ID NO: 4020101 - DNA, 25 bp, Homo sapien
gcgccgggctctttcgggcccacga

SEQ ID NO: 4020102 - DNA, 25 bp, Homo sapien
ctgccgccgaggaaaggccgcaaaa

SEQ ID NO: 4020103 - DNA, 25 bp, Homo sapien
tgccgccgaggaaaggccgcaaaaa

SEQ ID NO: 4020104 - DNA, 25 bp, Homo sapien
cgccgaggaaaggccgcaaaaactg

SEQ ID NO: 4020105 - DNA, 25 bp, Homo sapien
ccgcttcaggcggagaatctaggcg

SEQ ID NO: 4020106 - DNA, 25 bp, Homo sapien
cggaagtatctgtgcgtggccccag

SEQ ID NO: 4020107 - DNA, 25 bp, Homo sapien
actcctgtgtctggcggagggacac

SEQ ID NO: 4020108 - DNA, 25 bp, Homo sapien
gatctgttccttgtacctggtccag

SEQ ID NO: 4020109 - DNA, 25 bp, Homo sapien
aatgctgtcctttatggaagaaatt

SEQ ID NO: 4020110 - DNA, 25 bp, Homo sapien
gaagaaattgcaaaatagggcaagg

SEQ ID NO: 4020111 - DNA, 25 bp, Homo sapien
cattttaccccacaaaggatagctt

SEQ ID NO: 4020112 - DNA, 25 bp, Homo sapien
atgcacattttaccccacaaaggat

SEQ ID NO: 4020113 - DNA, 25 bp, Homo sapien
agcccctgctcccagctgcttgtca

SEQ ID NO: 4020114 - DNA, 25 bp, Homo sapien
agctgcttgtcagggaaaagtgcat

SEQ ID NO: 4020115 - DNA, 25 bp, Homo sapien
tcccagctgcttgtcagggaaaagt

SEQ ID NO: 4020116 - DNA, 25 bp, Homo sapien
tgctcccagctgcttgtcagggaaa

SEQ ID NO: 4020117 - DNA, 25 bp, Homo sapien
tttttatctgtcttgataagaccca

SEQ ID NO: 4020118 - DNA, 25 bp, Homo sapien
ctttttatctgtcttgataagaccc

SEQ ID NO: 4020119 - DNA, 25 bp, Homo sapien
ttttatctgtcttgataagacccat

SEQ ID NO: 4020120 - DNA, 25 bp, Homo sapien
aagcagcaacacgaggatggatgta

SEQ ID NO: 4020121 - DNA, 25 bp, Homo sapien
ctgctcaggagtttcagtgaccaca

SEQ ID NO: 4020122 - DNA, 25 bp, Homo sapien
agaaagcagcaacacgaggatggat

SEQ ID NO: 4020123 - DNA, 25 bp, Homo sapien
ttactgctcaggagtttcagtgacc

SEQ ID NO: 4020124 - DNA, 25 bp, Homo sapien
ggtggccctagaactgacacacagt

SEQ ID NO: 4020125 - DNA, 25 bp, Homo sapien
cccataggacggttctgctgtctgc

SEQ ID NO: 4020126 - DNA, 25 bp, Homo sapien
gggcacagccctcccataggacggt

SEQ ID NO: 4020127 - DNA, 25 bp, Homo sapien
gaacggatctatagcacagcctcca

SEQ ID NO: 4020128 - DNA, 25 bp, Homo sapien
cctgtccgtgcttttgatgagctca

SEQ ID NO: 4020129 - DNA, 25 bp, Homo sapien
tgtccgtgcttttgatgagctcact

SEQ ID NO: 4020130 - DNA, 25 bp, Homo sapien
tcctgtccgtgcttttgatgagctc

SEQ ID NO: 4020131 - DNA, 25 bp, Homo sapien
ttcctgtccgtgcttttgatgagct

SEQ ID NO: 4020132 - DNA, 25 bp, Homo sapien
tctttcagtggagaaacttccatca

SEQ ID NO: 4020133 - DNA, 25 bp, Homo sapien
catccgctggtagagtccaatccat

SEQ ID NO: 4020134 - DNA, 25 bp, Homo sapien
tgtttgtgtatttgatcttgaagca

SEQ ID NO: 4020135 - DNA, 25 bp, Homo sapien
gctggtgaatctgcatccgctggta

SEQ ID NO: 4020136 - DNA, 25 bp, Homo sapien
gtagggcagtagcagggaagacacc

SEQ ID NO: 4020137 - DNA, 25 bp, Homo sapien
tgagatggtgtgagaggaaaagagg

SEQ ID NO: 4020138 - DNA, 25 bp, Homo sapien
caggggagctgagacatattttgca

SEQ ID NO: 4020139 - DNA, 25 bp, Homo sapien
tttttggagggtagggcagtagcag

SEQ ID NO: 4020140 - DNA, 25 bp, Homo sapien
ctcaattaaaatggtccctcggtgt

SEQ ID NO: 4020141 - DNA, 25 bp, Homo sapien
caacttcgtagctctagtcccaagc

SEQ ID NO: 4020142 - DNA, 25 bp, Homo sapien
tctcaattaaaatggtccctcggtg

SEQ ID NO: 4020143 - DNA, 25 bp, Homo sapien
agctctagtcccaagcagttatttg

SEQ ID NO: 4020144 - DNA, 25 bp, Homo sapien
ttcccaatcatgttccaggactgag

SEQ ID NO: 4020145 - DNA, 25 bp, Homo sapien
taggcactcaatgcattcagggttg

SEQ ID NO: 4020146 - DNA, 25 bp, Homo sapien
tcagggttgtagtagggtccccatg

SEQ ID NO: 4020147 - DNA, 25 bp, Homo sapien
ggcaagagacacaacattaggcact

SEQ ID NO: 4020148 - DNA, 25 bp, Homo sapien
gctggatgcagatcaaactcctcat

SEQ ID NO: 4020149 - DNA, 25 bp, Homo sapien
agctggatgcagatcaaactcctca

SEQ ID NO: 4020150 - DNA, 25 bp, Homo sapien
taatcaaggctgctgactgactcct

SEQ ID NO: 4020151 - DNA, 25 bp, Homo sapien
tgcatgaagagtagattagccaaga

SEQ ID NO: 4020152 - DNA, 25 bp, Homo sapien
caaatatgcttacatgaagttgcaa

SEQ ID NO: 4020153 - DNA, 25 bp, Homo sapien
tgcgtgcatgcatgctagtctatgc

SEQ ID NO: 4020154 - DNA, 25 bp, Homo sapien
tcaaggcagactcctgctaaatttt

SEQ ID NO: 4020155 - DNA, 25 bp, Homo sapien
tccatttgttggctattcacgcagc

SEQ ID NO: 4020156 - DNA, 25 bp, Homo sapien
cagagtttggtcttgtgagtcctga

SEQ ID NO: 4020157 - DNA, 25 bp, Homo sapien
gtaggcactctgaatactttttgga

SEQ ID NO: 4020158 - DNA, 25 bp, Homo sapien
actgaaattacatgcaaactcaggt

SEQ ID NO: 4020159 - DNA, 25 bp, Homo sapien
gagatgagaagttcatcgtgtgctt

SEQ ID NO: 4020160 - DNA, 25 bp, Homo sapien
tgaaattacatgcaaactcaggtga

SEQ ID NO: 4020161 - DNA, 25 bp, Homo sapien
catcgtgtgcttgcagctgtctact

SEQ ID NO: 4020162 - DNA, 25 bp, Homo sapien
tgaagatcggcctataagtctctgt

SEQ ID NO: 4020163 - DNA, 25 bp, Homo sapien
gtgaagatcggcctataagtctctg

SEQ ID NO: 4020164 - DNA, 25 bp, Homo sapien
gtgtgaagatcggcctataagtctc

SEQ ID NO: 4020165 - DNA, 25 bp, Homo sapien
ctgtgtgaagatcggcctataagtc

SEQ ID NO: 4020166 - DNA, 25 bp, Homo sapien
atgtttctggagcttacaggtgagc

SEQ ID NO: 4020167 - DNA, 25 bp, Homo sapien
ttctggagcttacaggtgagcgcag

SEQ ID NO: 4020168 - DNA, 25 bp, Homo sapien
gctcattagtgatgctgctcttcat

SEQ ID NO: 4020169 - DNA, 25 bp, Homo sapien
tgctgctcattagtgatgctgctct

SEQ ID NO: 4020170 - DNA, 25 bp, Homo sapien
gacccttagtgctcctctctggtgg

SEQ ID NO: 4020171 - DNA, 25 bp, Homo sapien
tccaaattccaggtcagatccggca

SEQ ID NO: 4020172 - DNA, 25 bp, Homo sapien
gcaggatctggagagttgaccctta

SEQ ID NO: 4020173 - DNA, 25 bp, Homo sapien
cctttgctaggagacttgacactgt

SEQ ID NO: 4020174 - DNA, 25 bp, Homo sapien
gggtaacccagctaatgagaatcct

SEQ ID NO: 4020175 - DNA, 25 bp, Homo sapien
ggtcaagtgagagcatgttttaaac

SEQ ID NO: 4020176 - DNA, 25 bp, Homo sapien
aatgtaacttctggcaagtttacgg

SEQ ID NO: 4020177 - DNA, 25 bp, Homo sapien
ttgcggaaagagcagaggtagaatc

SEQ ID NO: 4020178 - DNA, 25 bp, Homo sapien
ttcttctgctaatgcctttaagatg

SEQ ID NO: 4020179 - DNA, 25 bp, Homo sapien
tccctaaggaaaccaagatctcttg

SEQ ID NO: 4020180 - DNA, 25 bp, Homo sapien
cctcttgtataacaaggatcctgca

SEQ ID NO: 4020181 - DNA, 25 bp, Homo sapien
ctcttgggttggagagactaacctc

SEQ ID NO: 4020182 - DNA, 25 bp, Homo sapien
ctacactctgcttgttgctagccct

SEQ ID NO: 4020183 - DNA, 25 bp, Homo sapien
cagcccacatttgagttgggtttag

SEQ ID NO: 4020184 - DNA, 25 bp, Homo sapien
ctgcttgttgctagccctggagaag

SEQ ID NO: 4020185 - DNA, 25 bp, Homo sapien
cacatttgagttgggtttaggacgt

SEQ ID NO: 4020186 - DNA, 25 bp, Homo sapien
cagtcatctggtggaagtagttgtt

SEQ ID NO: 4020187 - DNA, 25 bp, Homo sapien
gggcctctaatagatttcagtcatc

SEQ ID NO: 4020188 - DNA, 25 bp, Homo sapien
agttgttgatctcccattacatttc

SEQ ID NO: 4020189 - DNA, 25 bp, Homo sapien
ggcctctaatagatttcagtcatct

SEQ ID NO: 4020190 - DNA, 25 bp, Homo sapien
cctgtcttccacccgaagagattag

SEQ ID NO: 4020191 - DNA, 25 bp, Homo sapien
cccgaagagattaggccctgtctta

SEQ ID NO: 4020192 - DNA, 25 bp, Homo sapien
agagattaggccctgtcttatgctt

SEQ ID NO: 4020193 - DNA, 25 bp, Homo sapien
ttccacccgaagagattaggccctg

SEQ ID NO: 4020194 - DNA, 25 bp, Homo sapien
aaggcagctcctcctggtcccaaat

SEQ ID NO: 4020195 - DNA, 25 bp, Homo sapien
tcaaggcagctcctcctggtcccaa

SEQ ID NO: 4020196 - DNA, 25 bp, Homo sapien
aggcagctcctcctggtcccaaata

SEQ ID NO: 4020197 - DNA, 25 bp, Homo sapien
ggcagctcctcctggtcccaaatac

SEQ ID NO: 4020198 - DNA, 25 bp, Homo sapien
cttgaggacttggagttgaggccaa

SEQ ID NO: 4020199 - DNA, 25 bp, Homo sapien
gacttggagttgaggccaaaatatt

SEQ ID NO: 4020200 - DNA, 25 bp, Homo sapien
ggccaatcagagtggattcttgagg

SEQ ID NO: 4020201 - DNA, 25 bp, Homo sapien
tggattgggccaatcagagtggatt

SEQ ID NO: 4020202 - DNA, 25 bp, Homo sapien
ctctgttaccaagcagtaactgagg

SEQ ID NO: 4020203 - DNA, 25 bp, Homo sapien
cattgtattgtagaaggccaaactc

SEQ ID NO: 4020204 - DNA, 25 bp, Homo sapien
agcagtaactgaggctcttgtcccc

SEQ ID NO: 4020205 - DNA, 25 bp, Homo sapien
tcttgtccccttcccattgtgggga

SEQ ID NO: 4020206 - DNA, 25 bp, Homo sapien
caattattgcaggtctcatgtgtaa

SEQ ID NO: 4020207 - DNA, 25 bp, Homo sapien
catgtgtaaagcattgcagagctga

SEQ ID NO: 4020208 - DNA, 25 bp, Homo sapien
tacttgattgtcgagtcacagacgc

SEQ ID NO: 4020209 - DNA, 25 bp, Homo sapien
tctttaatcctgagagggttctgtc

SEQ ID NO: 4020210 - DNA, 25 bp, Homo sapien
cctttgctacatacagtggggcttg

SEQ ID NO: 4020211 - DNA, 25 bp, Homo sapien
cttggaagagctatactgggaggat

SEQ ID NO: 4020212 - DNA, 25 bp, Homo sapien
agctatactgggaggatacagaatc

SEQ ID NO: 4020213 - DNA, 25 bp, Homo sapien
catgcaatctcaggtcctttgctac

SEQ ID NO: 4020214 - DNA, 25 bp, Homo sapien
tctgcctttcatgacaatccaaatt

SEQ ID NO: 4020215 - DNA, 25 bp, Homo sapien
ccatctctggccagtcccacttctg

SEQ ID NO: 4020216 - DNA, 25 bp, Homo sapien
cccccaacacacttagaaggagctg

SEQ ID NO: 4020217 - DNA, 25 bp, Homo sapien
ctttcatgacaatccaaatttggtg

SEQ ID NO: 4020218 - DNA, 25 bp, Homo sapien
tagtctccaccctatgggaccagtg

SEQ ID NO: 4020219 - DNA, 25 bp, Homo sapien
ccaggagtttattaatagtctccac

SEQ ID NO: 4020220 - DNA, 25 bp, Homo sapien
gggaccagtggagatcagatgcatt

SEQ ID NO: 4020221 - DNA, 25 bp, Homo sapien
tattaatagtctccaccctatggga

SEQ ID NO: 4020222 - DNA, 25 bp, Homo sapien
gctcacataatctcaaaggcagcac

SEQ ID NO: 4020223 - DNA, 25 bp, Homo sapien
ggatgctcacataatctcaaaggca

SEQ ID NO: 4020224 - DNA, 25 bp, Homo sapien
cagacaccagttactgaactcagag

SEQ ID NO: 4020225 - DNA, 25 bp, Homo sapien
gctggcagtcagacaccagttactg

SEQ ID NO: 4020226 - DNA, 25 bp, Homo sapien
gcagatgtcgcctgactgtagctca

SEQ ID NO: 4020227 - DNA, 25 bp, Homo sapien
cctttggccggtttcgatgagcaga

SEQ ID NO: 4020228 - DNA, 25 bp, Homo sapien
taccaaccgtatccgagtgagagct

SEQ ID NO: 4020229 - DNA, 25 bp, Homo sapien
tcatttccataccagcagctcgtgc

SEQ ID NO: 4020230 - DNA, 25 bp, Homo sapien
aattttgtcccgtctcctgtatgcc

SEQ ID NO: 4020231 - DNA, 25 bp, Homo sapien
cattgtattgctggcatgtagctcc

SEQ ID NO: 4020232 - DNA, 25 bp, Homo sapien
caaacaagtaaagatgtacggcaga

SEQ ID NO: 4020233 - DNA, 25 bp, Homo sapien
cagtcagagccttttgaaattccaa

SEQ ID NO: 4020234 - DNA, 25 bp, Homo sapien
tctgtttgatgacagctgtccaagt

SEQ ID NO: 4020235 - DNA, 25 bp, Homo sapien
tttgatgacagctgtccaagtgtaa

SEQ ID NO: 4020236 - DNA, 25 bp, Homo sapien
acgtctgtttgatgacagctgtcca

SEQ ID NO: 4020237 - DNA, 25 bp, Homo sapien
cccctctgcgctgttctgctgcaga

SEQ ID NO: 4020238 - DNA, 25 bp, Homo sapien
tcagcaagcaatggatcagacagct

SEQ ID NO: 4020239 - DNA, 25 bp, Homo sapien
agctgaaccgttgatttaattggca

SEQ ID NO: 4020240 - DNA, 25 bp, Homo sapien
ttaaatcggatatctgcaccggcac

SEQ ID NO: 4020241 - DNA, 25 bp, Homo sapien
gcatgaaataacgaagccatctgtt

SEQ ID NO: 4020242 - DNA, 25 bp, Homo sapien
ttacttggctgatattccatctgaa

SEQ ID NO: 4020243 - DNA, 25 bp, Homo sapien
catctgaaatgtataagtgatgatt

SEQ ID NO: 4020244 - DNA, 25 bp, Homo sapien
tctgaaatgtataagtgatgattgt

SEQ ID NO: 4020245 - DNA, 25 bp, Homo sapien
tacttggctgatattccatctgaaa

SEQ ID NO: 4020246 - DNA, 25 bp, Homo sapien
tggaaatcttgaagactcctgttca

SEQ ID NO: 4020247 - DNA, 25 bp, Homo sapien
aatttaagttcaggcaaaactctgt

SEQ ID NO: 4020248 - DNA, 25 bp, Homo sapien
ttaagttcaggcaaaactctgtttg

SEQ ID NO: 4020249 - DNA, 25 bp, Homo sapien
ctcctgttcaggtgaaaatttaagt

SEQ ID NO: 4020250 - DNA, 25 bp, Homo sapien
gcagcctggtccacttaggcagagg

SEQ ID NO: 4020251 - DNA, 25 bp, Homo sapien
ttgtgcaacatctggaagctttctg

SEQ ID NO: 4020252 - DNA, 25 bp, Homo sapien
cacttaggcagaggaagtccctctc

SEQ ID NO: 4020253 - DNA, 25 bp, Homo sapien
ctgctattgtgcaacatctggaagc

SEQ ID NO: 4020254 - DNA, 25 bp, Homo sapien
cagaagcaactctctagctctccag

SEQ ID NO: 4020255 - DNA, 25 bp, Homo sapien
aaaggtgtccatgagaaatgtgacc

SEQ ID NO: 4020256 - DNA, 25 bp, Homo sapien
cctgagatctgaggtgaaatcagct

SEQ ID NO: 4020257 - DNA, 25 bp, Homo sapien
aataactacattgtctgcagaaagg

SEQ ID NO: 4020258 - DNA, 25 bp, Homo sapien
tctgttcacagtgctaataactaca

SEQ ID NO: 4020259 - DNA, 25 bp, Homo sapien
tgttcagtccaatagaagctcttac

SEQ ID NO: 4020260 - DNA, 25 bp, Homo sapien
caatagaagctcttacactgctgcg

SEQ ID NO: 4020261 - DNA, 25 bp, Homo sapien
tgcgttgatacccttgttgaaccag

SEQ ID NO: 4020262 - DNA, 25 bp, Homo sapien
tacactgctgcgttgatacccttgt

SEQ ID NO: 4020263 - DNA, 25 bp, Homo sapien
cagtgaagaggtgaagaggacgtgg

SEQ ID NO: 4020264 - DNA, 25 bp, Homo sapien
tgaagaggacgtgggaatgtcagag

SEQ ID NO: 4020265 - DNA, 25 bp, Homo sapien
ggaatgtcagaggtgtcagagcctt

SEQ ID NO: 4020266 - DNA, 25 bp, Homo sapien
agaggtgtcagagccttccagatcc

SEQ ID NO: 4020267 - DNA, 25 bp, Homo sapien
gcttccccaaagtgttgaatctccc

SEQ ID NO: 4020268 - DNA, 25 bp, Homo sapien
tttctctgtactcatgttcctcaac

SEQ ID NO: 4020269 - DNA, 25 bp, Homo sapien
tctgtactcatgttcctcaaccttg

SEQ ID NO: 4020270 - DNA, 25 bp, Homo sapien
tgtactcatgttcctcaaccttgct

SEQ ID NO: 4020271 - DNA, 25 bp, Homo sapien
gtgctgaacagccaagcagcaacat

SEQ ID NO: 4020272 - DNA, 25 bp, Homo sapien
ttattgcaagttctgtgtatcctct

SEQ ID NO: 4020273 - DNA, 25 bp, Homo sapien
tattgaaccttgaaggagatacctt

SEQ ID NO: 4020274 - DNA, 25 bp, Homo sapien
gaatgatgaacctcttttattgaac

SEQ ID NO: 4020275 - DNA, 25 bp, Homo sapien
aggtgtgagaatggagctcctggtc

SEQ ID NO: 4020276 - DNA, 25 bp, Homo sapien
gatgagcgaggccagaaagagaggt

SEQ ID NO: 4020277 - DNA, 25 bp, Homo sapien
gtgtgagaatggagctcctggtcat

SEQ ID NO: 4020278 - DNA, 25 bp, Homo sapien
tgggctgagatgagcgaggccagaa

SEQ ID NO: 4020279 - DNA, 25 bp, Homo sapien
tcgggtcagctaggcagttcttatc

SEQ ID NO: 4020280 - DNA, 25 bp, Homo sapien
tgttatccagcaggcttgcttgggc

SEQ ID NO: 4020281 - DNA, 25 bp, Homo sapien
ggaccatatgccctttgttatccag

SEQ ID NO: 4020282 - DNA, 25 bp, Homo sapien
tatttagtctatgattcgggtcagc

SEQ ID NO: 4020283 - DNA, 25 bp, Homo sapien
cacccaagaggttcgatggagatgt

SEQ ID NO: 4020284 - DNA, 25 bp, Homo sapien
gcccactattgggactcgatgccca

SEQ ID NO: 4020285 - DNA, 25 bp, Homo sapien
cccactattgggactcgatgcccag

SEQ ID NO: 4020286 - DNA, 25 bp, Homo sapien
caagaggttcgatggagatgttcaa

SEQ ID NO: 4020287 - DNA, 25 bp, Homo sapien
tctgaatgagggattttaaaccctg

SEQ ID NO: 4020288 - DNA, 25 bp, Homo sapien
taaaccctgaagcagctcttaagta

SEQ ID NO: 4020289 - DNA, 25 bp, Homo sapien
gaaccggattccagaatttggtcta

SEQ ID NO: 4020290 - DNA, 25 bp, Homo sapien
cagagaataatcagaaccggattcc

SEQ ID NO: 4020291 - DNA, 25 bp, Homo sapien
gtaggaatggatgccacttgccccg

SEQ ID NO: 4020292 - DNA, 25 bp, Homo sapien
gaggtaactgcagccagaattctcc

SEQ ID NO: 4020293 - DNA, 25 bp, Homo sapien
ttgccccgggtaagttcagagacat

SEQ ID NO: 4020294 - DNA, 25 bp, Homo sapien
agagacatttaggatgccaggagcc

SEQ ID NO: 4020295 - DNA, 25 bp, Homo sapien
ctgctagtggtaagagcatcactta

SEQ ID NO: 4020296 - DNA, 25 bp, Homo sapien
tgctggtgaacagtgtcatcattga

SEQ ID NO: 4020297 - DNA, 25 bp, Homo sapien
caggtttctggtatcctaatttcct

SEQ ID NO: 4020298 - DNA, 25 bp, Homo sapien
ttccatagttactccacacccaccc

SEQ ID NO: 4020299 - DNA, 25 bp, Homo sapien
gctccttgacataaaatccccagtg

SEQ ID NO: 4020300 - DNA, 25 bp, Homo sapien
catataatcttttatggagatgctc

SEQ ID NO: 4020301 - DNA, 25 bp, Homo sapien
gcttctgcagacttcttttcccata

SEQ ID NO: 4020302 - DNA, 25 bp, Homo sapien
caacaagatgagttgctgtggatgg

SEQ ID NO: 4020303 - DNA, 25 bp, Homo sapien
tcttgagaggctgttgagtagttgt

SEQ ID NO: 4020304 - DNA, 25 bp, Homo sapien
atgaaagcccgtcagcgtatttatg

SEQ ID NO: 4020305 - DNA, 25 bp, Homo sapien
ccgtcagcgtatttatgcacagaca

SEQ ID NO: 4020306 - DNA, 25 bp, Homo sapien
ggcccagttgaccatcacactgaaa

SEQ ID NO: 4020307 - DNA, 25 bp, Homo sapien
catctgttggattacacctgacatt

SEQ ID NO: 4020308 - DNA, 25 bp, Homo sapien
gtgacatctgttggattacacctga

SEQ ID NO: 4020309 - DNA, 25 bp, Homo sapien
gacattctgcaaagtgtgtatgtgg

SEQ ID NO: 4020310 - DNA, 25 bp, Homo sapien
ctgttggattacacctgacattctg

SEQ ID NO: 4020311 - DNA, 25 bp, Homo sapien
acaataccgggccagggcatatgga

SEQ ID NO: 4020312 - DNA, 25 bp, Homo sapien
gttgatttctcagacaataccgggc

SEQ ID NO: 4020313 - DNA, 25 bp, Homo sapien
gatttctcagacaataccgggccag

SEQ ID NO: 4020314 - DNA, 25 bp, Homo sapien
ccagggcatatggatacagtgtcac

SEQ ID NO: 4020315 - DNA, 25 bp, Homo sapien
gattcaggttccatcctggtgcctg

SEQ ID NO: 4020316 - DNA, 25 bp, Homo sapien
cgtgtagttaggttccacgctacca

SEQ ID NO: 4020317 - DNA, 25 bp, Homo sapien
tcctcttttgatgacgtgtagttag

SEQ ID NO: 4020318 - DNA, 25 bp, Homo sapien
gcagaaagcatggagtagattcagg

SEQ ID NO: 4020319 - DNA, 25 bp, Homo sapien
caggtatggagtttgtaccctccgc

SEQ ID NO: 4020320 - DNA, 25 bp, Homo sapien
gcctttccagagcattaaatgagag

SEQ ID NO: 4020321 - DNA, 25 bp, Homo sapien
gataagaggaccgagcttccagcct

SEQ ID NO: 4020322 - DNA, 25 bp, Homo sapien
tctggtggctcatacacaggcagca

SEQ ID NO: 4020323 - DNA, 25 bp, Homo sapien
attggggtagacacattgcaaaacc

SEQ ID NO: 4020324 - DNA, 25 bp, Homo sapien
ggagcagtttaatcacattgctgta

SEQ ID NO: 4020325 - DNA, 25 bp, Homo sapien
caattgctttagtcacagtaactgg

SEQ ID NO: 4020326 - DNA, 25 bp, Homo sapien
cataaggggttgactagagatggtc

SEQ ID NO: 4020327 - DNA, 25 bp, Homo sapien
tagtctccacttgtgagcatcttgg

SEQ ID NO: 4020328 - DNA, 25 bp, Homo sapien
gctaactggatttgttagtctccac

SEQ ID NO: 4020329 - DNA, 25 bp, Homo sapien
tgtgcacaagcccacactggacgtt

SEQ ID NO: 4020330 - DNA, 25 bp, Homo sapien
aagtcctctgtttgctggtaggtcc

SEQ ID NO: 4020331 - DNA, 25 bp, Homo sapien
tctgaggagcgatgacactgttcat

SEQ ID NO: 4020332 - DNA, 25 bp, Homo sapien
tcatgactatatgccactcctgttt

SEQ ID NO: 4020333 - DNA, 25 bp, Homo sapien
gctgtcatcatgactatatgccact

SEQ ID NO: 4020334 - DNA, 25 bp, Homo sapien
tcatcatgactatatgccactcctg

SEQ ID NO: 4020335 - DNA, 25 bp, Homo sapien
caaagtgaattggatgggtgatgtc

SEQ ID NO: 4020336 - DNA, 25 bp, Homo sapien
agtcaaagtgaattggatgggtgat

SEQ ID NO: 4020337 - DNA, 25 bp, Homo sapien
aattggatgggtgatgtcttaagct

SEQ ID NO: 4020338 - DNA, 25 bp, Homo sapien
tggatgggtgatgtcttaagctgat

SEQ ID NO: 4020339 - DNA, 25 bp, Homo sapien
ggccctgtgctagtttctgccccat

SEQ ID NO: 4020340 - DNA, 25 bp, Homo sapien
cggccctgtgctagtttctgcccca

SEQ ID NO: 4020341 - DNA, 25 bp, Homo sapien
ccggccctgtgctagtttctgcccc

SEQ ID NO: 4020342 - DNA, 25 bp, Homo sapien
gtcacatatccaagggtggatttca

SEQ ID NO: 4020343 - DNA, 25 bp, Homo sapien
gcttcataacttccgttgtcacata

SEQ ID NO: 4020344 - DNA, 25 bp, Homo sapien
tccgttgtcacatatccaagggtgg

SEQ ID NO: 4020345 - DNA, 25 bp, Homo sapien
tatgaatgcttcataacttccgttg

SEQ ID NO: 4020346 - DNA, 25 bp, Homo sapien
aatggcttgtcttcagcaccgttgg

SEQ ID NO: 4020347 - DNA, 25 bp, Homo sapien
aggcaaagctgagcttttgcttttg

SEQ ID NO: 4020348 - DNA, 25 bp, Homo sapien
catgtggcagtccagaactcgcaac

SEQ ID NO: 4020349 - DNA, 25 bp, Homo sapien
ctttggtttgtctccatgcagggca

SEQ ID NO: 4020350 - DNA, 25 bp, Homo sapien
tcttactagagcaaactcaacaatc

SEQ ID NO: 4020351 - DNA, 25 bp, Homo sapien
ctcagatgcccaagcatggatgttt

SEQ ID NO: 4020352 - DNA, 25 bp, Homo sapien
gaggtctccactgcctctcagatgc

SEQ ID NO: 4020353 - DNA, 25 bp, Homo sapien
cagacaattcgtagttggagtctta

SEQ ID NO: 4020354 - DNA, 25 bp, Homo sapien
agtacagtgtggctcttgaaaagct

SEQ ID NO: 4020355 - DNA, 25 bp, Homo sapien
tttctcagtacttgtgagcccagcc

SEQ ID NO: 4020356 - DNA, 25 bp, Homo sapien
tgaaaagctcaaagctcagagtatg

SEQ ID NO: 4020357 - DNA, 25 bp, Homo sapien
tcagagtatgaactacttgaggcac

SEQ ID NO: 4020358 - DNA, 25 bp, Homo sapien
gcatgtgaacgtgtatgcctgcata

SEQ ID NO: 4020359 - DNA, 25 bp, Homo sapien
catgtgaacgtgtatgcctgcatag

SEQ ID NO: 4020360 - DNA, 25 bp, Homo sapien
tgtgaacgtgtatgcctgcatagta

SEQ ID NO: 4020361 - DNA, 25 bp, Homo sapien
gtgcatgtgaacgtgtatgcctgca

SEQ ID NO: 4020362 - DNA, 25 bp, Homo sapien
caaaggtactcctgttcagtgggcc

SEQ ID NO: 4020363 - DNA, 25 bp, Homo sapien
ttgtcaagacccaatcgccaggagc

SEQ ID NO: 4020364 - DNA, 25 bp, Homo sapien
tgttatgaaaatgcggagacgccgc

SEQ ID NO: 4020365 - DNA, 25 bp, Homo sapien
gacgccgctgggaagccaattctaa

SEQ ID NO: 4020366 - DNA, 25 bp, Homo sapien
cagcactgactctcaggtttggtaa

SEQ ID NO: 4020367 - DNA, 25 bp, Homo sapien
gcactgactctcaggtttggtaaag

SEQ ID NO: 4020368 - DNA, 25 bp, Homo sapien
tcttcagcactgactctcaggtttg

SEQ ID NO: 4020369 - DNA, 25 bp, Homo sapien
gtcttcagcactgactctcaggttt

SEQ ID NO: 4020370 - DNA, 25 bp, Homo sapien
gtgatgctctgaaatcttagccgtc

SEQ ID NO: 4020371 - DNA, 25 bp, Homo sapien
tgctcagcaggtggtaccaggcagg

SEQ ID NO: 4020372 - DNA, 25 bp, Homo sapien
ccgtctccttgagagatgtgtgctc

SEQ ID NO: 4020373 - DNA, 25 bp, Homo sapien
gtttgcctgtcacaatagttttcca

SEQ ID NO: 4020374 - DNA, 25 bp, Homo sapien
tgtaatgttacaagtctaatgcaag

SEQ ID NO: 4020375 - DNA, 25 bp, Homo sapien
caaaggtggctatgacgtcgagaga

SEQ ID NO: 4020376 - DNA, 25 bp, Homo sapien
ggaatcaaaggtggctatgacgtcg

SEQ ID NO: 4020377 - DNA, 25 bp, Homo sapien
aagtctaatgcaagcctgggaatca

SEQ ID NO: 4020378 - DNA, 25 bp, Homo sapien
aatgcactcttcacccactgtccct

SEQ ID NO: 4020379 - DNA, 25 bp, Homo sapien
taatgccccagctcatagcatggca

SEQ ID NO: 4020380 - DNA, 25 bp, Homo sapien
cttcagaatcttgatgggccaattg

SEQ ID NO: 4020381 - DNA, 25 bp, Homo sapien
ggccaattgactggcagcagtctgc

SEQ ID NO: 4020382 - DNA, 25 bp, Homo sapien
ttgactggaactgccgtgagctggt

SEQ ID NO: 4020383 - DNA, 25 bp, Homo sapien
ggtatcagcgctttctggacttggc

SEQ ID NO: 4020384 - DNA, 25 bp, Homo sapien
gacttggcagaggtttaaagtaggc

SEQ ID NO: 4020385 - DNA, 25 bp, Homo sapien
cttggcagaggtttaaagtaggctc

SEQ ID NO: 4020386 - DNA, 25 bp, Homo sapien
ccttcgcacatccatctcaggacta

SEQ ID NO: 4020387 - DNA, 25 bp, Homo sapien
ggccagccttcgcacatccatctca

SEQ ID NO: 4020388 - DNA, 25 bp, Homo sapien
tcatgctagggttggtgcaaaggcc

SEQ ID NO: 4020389 - DNA, 25 bp, Homo sapien
tagggttggtgcaaaggccagcctt

SEQ ID NO: 4020390 - DNA, 25 bp, Homo sapien
tcagaaagctaaagcattcccagaa

SEQ ID NO: 4020391 - DNA, 25 bp, Homo sapien
aagcattcccagaagctgcaaggaa

SEQ ID NO: 4020392 - DNA, 25 bp, Homo sapien
ccagaagctgcaaggaagtttatgc

SEQ ID NO: 4020393 - DNA, 25 bp, Homo sapien
gaaagctaaagcattcccagaagct

SEQ ID NO: 4020394 - DNA, 25 bp, Homo sapien
cggggtctccaaggttattcctgct

SEQ ID NO: 4020395 - DNA, 25 bp, Homo sapien
cagagactccggggtctccaaggtt

SEQ ID NO: 4020396 - DNA, 25 bp, Homo sapien
tacagagactccggggtctccaagg

SEQ ID NO: 4020397 - DNA, 25 bp, Homo sapien
ttacagagactccggggtctccaag

SEQ ID NO: 4020398 - DNA, 25 bp, Homo sapien
gacggcatgttgcaagtggctgtca

SEQ ID NO: 4020399 - DNA, 25 bp, Homo sapien
gattccagggaggacggcatgttgc

SEQ ID NO: 4020400 - DNA, 25 bp, Homo sapien
ttccagggaggacggcatgttgcaa

SEQ ID NO: 4020401 - DNA, 25 bp, Homo sapien
ggcatgttgcaagtggctgtcatca

SEQ ID NO: 4020402 - DNA, 25 bp, Homo sapien
cagaatctctatttcacgggcctct

SEQ ID NO: 4020403 - DNA, 25 bp, Homo sapien
cggaatggttacagtcagaatctct

SEQ ID NO: 4020404 - DNA, 25 bp, Homo sapien
cgggcctctccaagtcttatattca

SEQ ID NO: 4020405 - DNA, 25 bp, Homo sapien
tgtactgggaacttgcagcggaatg

SEQ ID NO: 4020406 - DNA, 25 bp, Homo sapien
tattttgcttggtttccatttttgc

SEQ ID NO: 4020407 - DNA, 25 bp, Homo sapien
tttgcttggtttccatttttgcatc

SEQ ID NO: 4020408 - DNA, 25 bp, Homo sapien
ttgcttggtttccatttttgcatct

SEQ ID NO: 4020409 - DNA, 25 bp, Homo sapien
tggtttccatttttgcatctctcaa

SEQ ID NO: 4020410 - DNA, 25 bp, Homo sapien
ttggctgtgggcactcagaaagccc

SEQ ID NO: 4020411 - DNA, 25 bp, Homo sapien
ttcaggcttgcagactacagtgagc

SEQ ID NO: 4020412 - DNA, 25 bp, Homo sapien
gcaagttcagtctagctggtagcac

SEQ ID NO: 4020413 - DNA, 25 bp, Homo sapien
cctgtcaccgggtattaggaactga

SEQ ID NO: 4020414 - DNA, 25 bp, Homo sapien
ctgggacttcagctgggcaaactta

SEQ ID NO: 4020415 - DNA, 25 bp, Homo sapien
gcatcacgtactctaggttcaaggg

SEQ ID NO: 4020416 - DNA, 25 bp, Homo sapien
caggaacccttggagagatctttac

SEQ ID NO: 4020417 - DNA, 25 bp, Homo sapien
tcagctgccaggtagaacacttaca

SEQ ID NO: 4020418 - DNA, 25 bp, Homo sapien
ctgtttctgccctaagacttagtag

SEQ ID NO: 4020419 - DNA, 25 bp, Homo sapien
catctgcagaaacttaaccagtctc

SEQ ID NO: 4020420 - DNA, 25 bp, Homo sapien
aaaatgtctgagaatggctctcagc

SEQ ID NO: 4020421 - DNA, 25 bp, Homo sapien
ggtcccagggccatgtaaaaatgtc

SEQ ID NO: 4020422 - DNA, 25 bp, Homo sapien
tcatcttgcttaagcaacacgtagg

SEQ ID NO: 4020423 - DNA, 25 bp, Homo sapien
ctccattagggtgctttgattgcaa

SEQ ID NO: 4020424 - DNA, 25 bp, Homo sapien
tgcttaagcaacacgtaggaatttc

SEQ ID NO: 4020425 - DNA, 25 bp, Homo sapien
ctctgactccattagggtgctttga

SEQ ID NO: 4020426 - DNA, 25 bp, Homo sapien
tgccaaagggactaacaatgtgagc

SEQ ID NO: 4020427 - DNA, 25 bp, Homo sapien
cagctctcttgggaggaatgccaaa

SEQ ID NO: 4020428 - DNA, 25 bp, Homo sapien
tgcattctctttcgggactagggct

SEQ ID NO: 4020429 - DNA, 25 bp, Homo sapien
taacctggaaaattcccgtgacagc

SEQ ID NO: 4020430 - DNA, 25 bp, Homo sapien
ctgctgtggtaggaatgggcacttt

SEQ ID NO: 4020431 - DNA, 25 bp, Homo sapien
gcactttgggatactttacgttgta

SEQ ID NO: 4020432 - DNA, 25 bp, Homo sapien
cttgggacatgagcattctcgaatt

SEQ ID NO: 4020433 - DNA, 25 bp, Homo sapien
gaattaccagaatcgatgcagccca

SEQ ID NO: 4020434 - DNA, 25 bp, Homo sapien
ttctaccagccatggagtccttgtt

SEQ ID NO: 4020435 - DNA, 25 bp, Homo sapien
gccatggagtccttgttctctgtgc

SEQ ID NO: 4020436 - DNA, 25 bp, Homo sapien
tttcaatggaattgtttccccaaca

SEQ ID NO: 4020437 - DNA, 25 bp, Homo sapien
atggaattgtttccccaacaagctg

SEQ ID NO: 4020438 - DNA, 25 bp, Homo sapien
ttttatttctttgcaggaacaaggc

SEQ ID NO: 4020439 - DNA, 25 bp, Homo sapien
tctgccaggcccatggctttcatgc

SEQ ID NO: 4020440 - DNA, 25 bp, Homo sapien
gcccatggctttcatgcacttaggg

SEQ ID NO: 4020441 - DNA, 25 bp, Homo sapien
cacttaggggatgcatttttatttc

SEQ ID NO: 4020442 - DNA, 25 bp, Homo sapien
ttacaacatgagcagggatttgcag

SEQ ID NO: 4020443 - DNA, 25 bp, Homo sapien
ccaaaatgcccaagatgtcaaggca

SEQ ID NO: 4020444 - DNA, 25 bp, Homo sapien
catggttcagaagggatttacaaca

SEQ ID NO: 4020445 - DNA, 25 bp, Homo sapien
caaggcaaagcataactgaacatgg

SEQ ID NO: 4020446 - DNA, 25 bp, Homo sapien
cgacccctcttcatgtataaattcc

SEQ ID NO: 4020447 - DNA, 25 bp, Homo sapien
ctttgcaatgtgatggggccgtgca

SEQ ID NO: 4020448 - DNA, 25 bp, Homo sapien
tgcactcgacccctcttcatgtata

SEQ ID NO: 4020449 - DNA, 25 bp, Homo sapien
tcttgaaatgcactcgacccctctt

SEQ ID NO: 4020450 - DNA, 25 bp, Homo sapien
ctcgctgtaggggtcactttaactg

SEQ ID NO: 4020451 - DNA, 25 bp, Homo sapien
taactgttggaactgatacatcagg

SEQ ID NO: 4020452 - DNA, 25 bp, Homo sapien
actgttggaactgatacatcaggaa

SEQ ID NO: 4020453 - DNA, 25 bp, Homo sapien
tgtaggggtcactttaactgttgga

SEQ ID NO: 4020454 - DNA, 25 bp, Homo sapien
ctaaatgcgttatatggagtatctc

SEQ ID NO: 4020455 - DNA, 25 bp, Homo sapien
taggaatccactaagatggcatgat

SEQ ID NO: 4020456 - DNA, 25 bp, Homo sapien
gctggaaaacaatagagctggctgt

SEQ ID NO: 4020457 - DNA, 25 bp, Homo sapien
gagagccttcatataccatatcatg

SEQ ID NO: 4020458 - DNA, 25 bp, Homo sapien
agactttgcctggtattcccaccca

SEQ ID NO: 4020459 - DNA, 25 bp, Homo sapien
tggctgtgccatgccaagcatcaag

SEQ ID NO: 4020460 - DNA, 25 bp, Homo sapien
gtgtggctgtgccatgccaagcatc

SEQ ID NO: 4020461 - DNA, 25 bp, Homo sapien
ctcccttggaagactttgcctggta

SEQ ID NO: 4020462 - DNA, 25 bp, Homo sapien
gctctattgcttgccactggattcc

SEQ ID NO: 4020463 - DNA, 25 bp, Homo sapien
tgaagcaacctgaggtgctctattg

SEQ ID NO: 4020464 - DNA, 25 bp, Homo sapien
tcttcttcataggtaccatgagctc

SEQ ID NO: 4020465 - DNA, 25 bp, Homo sapien
tcttacagatattggccagcagctg

SEQ ID NO: 4020466 - DNA, 25 bp, Homo sapien
tgcctggaatatgttgtagggccct

SEQ ID NO: 4020467 - DNA, 25 bp, Homo sapien
ctgctctctgcatagcttggtggca

SEQ ID NO: 4020468 - DNA, 25 bp, Homo sapien
tacttaatgtttgatggtcgtggtg

SEQ ID NO: 4020469 - DNA, 25 bp, Homo sapien
cagggagatagtcttgcaacatacc

SEQ ID NO: 4020470 - DNA, 25 bp, Homo sapien
ccagctacggctgtattctccatat

SEQ ID NO: 4020471 - DNA, 25 bp, Homo sapien
ggcatggtcaccatctcctgtggtt

SEQ ID NO: 4020472 - DNA, 25 bp, Homo sapien
catgtatcgagttccacaaagccag

SEQ ID NO: 4020473 - DNA, 25 bp, Homo sapien
tgcttggcatggtcaccatctcctg

SEQ ID NO: 4020474 - DNA, 25 bp, Homo sapien
gctgctgaaggacggcgagagagac

SEQ ID NO: 4020475 - DNA, 25 bp, Homo sapien
cagtggccctcatttacaccaacag

SEQ ID NO: 4020476 - DNA, 25 bp, Homo sapien
atgcacccccggctgctgaaggacg

SEQ ID NO: 4020477 - DNA, 25 bp, Homo sapien
gagagagacgaactgctggttccat

SEQ ID NO: 4020478 - DNA, 25 bp, Homo sapien
cctgtgggtgccacgttgaaggcaa

SEQ ID NO: 4020479 - DNA, 25 bp, Homo sapien
tctctgcttcatagtggactgccac

SEQ ID NO: 4020480 - DNA, 25 bp, Homo sapien
gccccttggcgaaactttgaggcta

SEQ ID NO: 4020481 - DNA, 25 bp, Homo sapien
cttgattgagggtgaagcgatgcca

SEQ ID NO: 4020482 - DNA, 25 bp, Homo sapien
gaaccgtgttttaatagctgctgat

SEQ ID NO: 4020483 - DNA, 25 bp, Homo sapien
taagtactctaccaagatgctgtgg

SEQ ID NO: 4020484 - DNA, 25 bp, Homo sapien
tgatctataacacaccagaaccgtg

SEQ ID NO: 4020485 - DNA, 25 bp, Homo sapien
tcatgtgtccatcaaagtgcaatcc

SEQ ID NO: 4020486 - DNA, 25 bp, Homo sapien
cttgccatatgcaggaagatatagg

SEQ ID NO: 4020487 - DNA, 25 bp, Homo sapien
caggaagatataggtcagccagcac

SEQ ID NO: 4020488 - DNA, 25 bp, Homo sapien
agccagcactttttgaaactacaac

SEQ ID NO: 4020489 - DNA, 25 bp, Homo sapien
aacttctccaatgatttcaacttga

SEQ ID NO: 4020490 - DNA, 25 bp, Homo sapien
actgtcccttgtgataactttggag

SEQ ID NO: 4020491 - DNA, 25 bp, Homo sapien
tgtcccttgtgataactttggaggc

SEQ ID NO: 4020492 - DNA, 25 bp, Homo sapien
gtcccttgtgataactttggaggca

SEQ ID NO: 4020493 - DNA, 25 bp, Homo sapien
aggcaggccacatgtctgattaact

SEQ ID NO: 4020494 - DNA, 25 bp, Homo sapien
cgtcctgcaagtggatgctgccagt

SEQ ID NO: 4020495 - DNA, 25 bp, Homo sapien
tcttcaagccttctaacaaacgata

SEQ ID NO: 4020496 - DNA, 25 bp, Homo sapien
caaacagtgatatgaatgtccaggg

SEQ ID NO: 4020497 - DNA, 25 bp, Homo sapien
aaaaacatcatattcccgtcctgca

SEQ ID NO: 4020498 - DNA, 25 bp, Homo sapien
gagctgctgggtttattgaagcatc

SEQ ID NO: 4020499 - DNA, 25 bp, Homo sapien
ggagagctgctgggtttattgaagc

SEQ ID NO: 4020500 - DNA, 25 bp, Homo sapien
acccatgagggactgtttcctggtc

SEQ ID NO: 4020501 - DNA, 25 bp, Homo sapien
cccatgagggactgtttcctggtca

SEQ ID NO: 4020502 - DNA, 25 bp, Homo sapien
caaatttgtctttctataccacaag

SEQ ID NO: 4020503 - DNA, 25 bp, Homo sapien
aacttttcacaagccatctctgact

SEQ ID NO: 4020504 - DNA, 25 bp, Homo sapien
aaatttgtctttctataccacaagg

SEQ ID NO: 4020505 - DNA, 25 bp, Homo sapien
caagccatctctgactttcaggaag

SEQ ID NO: 4020506 - DNA, 25 bp, Homo sapien
tgataaaaaatagtattccaaactg

SEQ ID NO: 4020507 - DNA, 25 bp, Homo sapien
tccacatttttataaaacttgataa

SEQ ID NO: 4020508 - DNA, 25 bp, Homo sapien
tgtacagtcaccagaagtacacagt

SEQ ID NO: 4020509 - DNA, 25 bp, Homo sapien
aaatagtattccaaactgtacagtc

SEQ ID NO: 4020510 - DNA, 25 bp, Homo sapien
gcctttttagtcttgggctctggct

SEQ ID NO: 4020511 - DNA, 25 bp, Homo sapien
ttcaccttggctttatctcccttag

SEQ ID NO: 4020512 - DNA, 25 bp, Homo sapien
tgcaggggcctttttagtcttgggc

SEQ ID NO: 4020513 - DNA, 25 bp, Homo sapien
tttagcagacaacctcgcggatctt

SEQ ID NO: 4020514 - DNA, 25 bp, Homo sapien
tggcggcgacggcagcaggacgtag

SEQ ID NO: 4020515 - DNA, 25 bp, Homo sapien
ggtggcggcgacggcagcaggacgt

SEQ ID NO: 4020516 - DNA, 25 bp, Homo sapien
gcggcgacggcagcaggacgtaggt

SEQ ID NO: 4020517 - DNA, 25 bp, Homo sapien
cggcgacggcagcaggacgtaggtg

SEQ ID NO: 4020518 - DNA, 25 bp, Homo sapien
gacgcgggatgcagtggcgcgcggg

SEQ ID NO: 4020519 - DNA, 25 bp, Homo sapien
ctggacgcgggatgcagtggcgcgc

SEQ ID NO: 4020520 - DNA, 25 bp, Homo sapien
cgcgggatgcagtggcgcgcgggct

SEQ ID NO: 4020521 - DNA, 25 bp, Homo sapien
tcggtctgggggtcgttctcgcctc

SEQ ID NO: 4020522 - DNA, 25 bp, Homo sapien
gattgctttttctccaggatcttcc

SEQ ID NO: 4020523 - DNA, 25 bp, Homo sapien
ctctgattgctttttctccaggatc

SEQ ID NO: 4020524 - DNA, 25 bp, Homo sapien
tgctctcaggctctgacatccatag

SEQ ID NO: 4020525 - DNA, 25 bp, Homo sapien
tctcaggctctgacatccataggtt

SEQ ID NO: 4020526 - DNA, 25 bp, Homo sapien
gaagtcataagtattacccttaaca

SEQ ID NO: 4020527 - DNA, 25 bp, Homo sapien
cccttaacatagttgtcactgtcat

SEQ ID NO: 4020528 - DNA, 25 bp, Homo sapien
agttgtgttatggaagtcataagta

SEQ ID NO: 4020529 - DNA, 25 bp, Homo sapien
gggtgttcatcacattaacctcagg

SEQ ID NO: 4020530 - DNA, 25 bp, Homo sapien
ttgagaacaattggtccgaaaacca

SEQ ID NO: 4020531 - DNA, 25 bp, Homo sapien
aaaccattggtgcaagaggaatggc

SEQ ID NO: 4020532 - DNA, 25 bp, Homo sapien
gaagtaggtggttcagtgtcagaac

SEQ ID NO: 4020533 - DNA, 25 bp, Homo sapien
gtggttcagtgtcagaaccagtggc

SEQ ID NO: 4020534 - DNA, 25 bp, Homo sapien
tggtaattacccccatcagggtcca

SEQ ID NO: 4020535 - DNA, 25 bp, Homo sapien
ccagagtttcaagagagtctctgag

SEQ ID NO: 4020536 - DNA, 25 bp, Homo sapien
aagaactgggtactggagtgggaca

SEQ ID NO: 4020537 - DNA, 25 bp, Homo sapien
gtactggagtgggacagcaccaggt

SEQ ID NO: 4020538 - DNA, 25 bp, Homo sapien
ctttgaccacagaaaggtgttttcg

SEQ ID NO: 4020539 - DNA, 25 bp, Homo sapien
cagagaatcttgactccttgctacc

SEQ ID NO: 4020540 - DNA, 25 bp, Homo sapien
ggtgttttcgcttctcttcagcaga

SEQ ID NO: 4020541 - DNA, 25 bp, Homo sapien
gactccttgctacctctttactggc

SEQ ID NO: 4020542 - DNA, 25 bp, Homo sapien
gacacttagctgtgacagggactgg

SEQ ID NO: 4020543 - DNA, 25 bp, Homo sapien
cagggactgggactgtttctcagca

SEQ ID NO: 4020544 - DNA, 25 bp, Homo sapien
tctgcaatctctcattcaggtggga

SEQ ID NO: 4020545 - DNA, 25 bp, Homo sapien
gttctcccagacaccatactgaggc

SEQ ID NO: 4020546 - DNA, 25 bp, Homo sapien
gaatttcaagtaccaccctgcgatc

SEQ ID NO: 4020547 - DNA, 25 bp, Homo sapien
caagtaccaccctgcgatcggttgg

SEQ ID NO: 4020548 - DNA, 25 bp, Homo sapien
atttcaagtaccaccctgcgatcgg

SEQ ID NO: 4020549 - DNA, 25 bp, Homo sapien
tttcaagtaccaccctgcgatcggt

SEQ ID NO: 4020550 - DNA, 25 bp, Homo sapien
gcccgatgcctgcatccttgcctac

SEQ ID NO: 4020551 - DNA, 25 bp, Homo sapien
ggcccgatgcctgcatccttgccta

SEQ ID NO: 4020552 - DNA, 25 bp, Homo sapien
tggcccgatgcctgcatccttgcct

SEQ ID NO: 4020553 - DNA, 25 bp, Homo sapien
cctctatttcggaatcatcttcatt

SEQ ID NO: 4020554 - DNA, 25 bp, Homo sapien
ctctatttcggaatcatcttcattg

SEQ ID NO: 4020555 - DNA, 25 bp, Homo sapien
tctatttcggaatcatcttcattgc

SEQ ID NO: 4020556 - DNA, 25 bp, Homo sapien
tcctctatttcggaatcatcttcat

SEQ ID NO: 4020557 - DNA, 25 bp, Homo sapien
gcaccactttggtgcctgcatattc

SEQ ID NO: 4020558 - DNA, 25 bp, Homo sapien
cttcagtggaatgcacgagctcatg

SEQ ID NO: 4020559 - DNA, 25 bp, Homo sapien
tctattttagtctacgtacttccca

SEQ ID NO: 4020560 - DNA, 25 bp, Homo sapien
gggaggcacgaaaattgtttacatg

SEQ ID NO: 4020561 - DNA, 25 bp, Homo sapien
gcaccaaagttggagaagaacttta

SEQ ID NO: 4020562 - DNA, 25 bp, Homo sapien
ctggcaccaaagttggagaagaact

SEQ ID NO: 4020563 - DNA, 25 bp, Homo sapien
caaagttggagaagaactttatcac

SEQ ID NO: 4020564 - DNA, 25 bp, Homo sapien
ccaaagttggagaagaactttatca

SEQ ID NO: 4020565 - DNA, 25 bp, Homo sapien
tgctgctgatgccaagacactctgg

SEQ ID NO: 4020566 - DNA, 25 bp, Homo sapien
ctcttgtaacccagagctggatcta

SEQ ID NO: 4020567 - DNA, 25 bp, Homo sapien
ggctcatacattgctctcatgctgc

SEQ ID NO: 4020568 - DNA, 25 bp, Homo sapien
gacactctggtatcctgtgctgagc

SEQ ID NO: 4020569 - DNA, 25 bp, Homo sapien
agcggctgtagaaattaggagtccg

SEQ ID NO: 4020570 - DNA, 25 bp, Homo sapien
tgaggaatctaagtccaaggcagac

SEQ ID NO: 4020571 - DNA, 25 bp, Homo sapien
gaaaagtgctgttttaggactgaag

SEQ ID NO: 4020572 - DNA, 25 bp, Homo sapien
ctgtagaaattaggagtccgtgggt

SEQ ID NO: 4020573 - DNA, 25 bp, Homo sapien
tagcatataactaagtgcatcatcg

SEQ ID NO: 4020574 - DNA, 25 bp, Homo sapien
tcatgttagcatataactaagtgca

SEQ ID NO: 4020575 - DNA, 25 bp, Homo sapien
gcatcatcgcatttggaacactcac

SEQ ID NO: 4020576 - DNA, 25 bp, Homo sapien
taactaagtgcatcatcgcatttgg

SEQ ID NO: 4020577 - DNA, 25 bp, Homo sapien
caactggaagcatatgacttgggcc

SEQ ID NO: 4020578 - DNA, 25 bp, Homo sapien
ctccgatgggcccttcacatctatg

SEQ ID NO: 4020579 - DNA, 25 bp, Homo sapien
gggtctcaaattggagccaactgga

SEQ ID NO: 4020580 - DNA, 25 bp, Homo sapien
gaagtagcctttccctatctttgga

SEQ ID NO: 4020581 - DNA, 25 bp, Homo sapien
gactttctaattttatctcctgcct

SEQ ID NO: 4020582 - DNA, 25 bp, Homo sapien
ctgcctgctttcctgtaactaccat

SEQ ID NO: 4020583 - DNA, 25 bp, Homo sapien
ctggccactctgactttctaatttt

SEQ ID NO: 4020584 - DNA, 25 bp, Homo sapien
taattttatctcctgcctgctttcc

SEQ ID NO: 4020585 - DNA, 25 bp, Homo sapien
aacagtaggctctcattgtttgtgg

SEQ ID NO: 4020586 - DNA, 25 bp, Homo sapien
ttccacggctgaatgaatctctaac

SEQ ID NO: 4020587 - DNA, 25 bp, Homo sapien
gaaaaatgagaacggaacagtaggc

SEQ ID NO: 4020588 - DNA, 25 bp, Homo sapien
tgagagcccaagcaattatgccaga

SEQ ID NO: 4020589 - DNA, 25 bp, Homo sapien
cttcaagttttgattgatctttcat

SEQ ID NO: 4020590 - DNA, 25 bp, Homo sapien
tcaagttttgattgatctttcatta

SEQ ID NO: 4020591 - DNA, 25 bp, Homo sapien
ttcaagttttgattgatctttcatt

SEQ ID NO: 4020592 - DNA, 25 bp, Homo sapien
caagttttgattgatctttcattac

SEQ ID NO: 4020593 - DNA, 25 bp, Homo sapien
gaatgaatggatacctggtgaaagc

SEQ ID NO: 4020594 - DNA, 25 bp, Homo sapien
tttcccataccagctcttagaatct

SEQ ID NO: 4020595 - DNA, 25 bp, Homo sapien
agcaggttttgtgttagtctctttc

SEQ ID NO: 4020596 - DNA, 25 bp, Homo sapien
acagcaggttttgtgttagtctctt

SEQ ID NO: 4020597 - DNA, 25 bp, Homo sapien
cctctgacagcacatagaatcacag

SEQ ID NO: 4020598 - DNA, 25 bp, Homo sapien
ttccaaggctttcatgcagaacatg

SEQ ID NO: 4020599 - DNA, 25 bp, Homo sapien
ccacctcgttgttcagggatatttt

SEQ ID NO: 4020600 - DNA, 25 bp, Homo sapien
ttctctgctatcactaagtgaaaaa

SEQ ID NO: 4020601 - DNA, 25 bp, Homo sapien
ctccagaccacctcgttgttcaggg

SEQ ID NO: 4020602 - DNA, 25 bp, Homo sapien
aaagcatccagggtccttcctagag

SEQ ID NO: 4020603 - DNA, 25 bp, Homo sapien
atggctgacagacgttgaggatgat

SEQ ID NO: 4020604 - DNA, 25 bp, Homo sapien
cacgttggcccagattacccaaggt

SEQ ID NO: 4020605 - DNA, 25 bp, Homo sapien
cattgagctgttgtccacgttggcc

SEQ ID NO: 4020606 - DNA, 25 bp, Homo sapien
tgcttcttgccgttccaaggtgtta

SEQ ID NO: 4020607 - DNA, 25 bp, Homo sapien
tgtggcccaattttcacgtccttgg

SEQ ID NO: 4020608 - DNA, 25 bp, Homo sapien
gatttcatgatactctagatatacc

SEQ ID NO: 4020609 - DNA, 25 bp, Homo sapien
acgtccttgggcattgatttcatga

SEQ ID NO: 4020610 - DNA, 25 bp, Homo sapien
ggggtctagctttccttctacctca

SEQ ID NO: 4020611 - DNA, 25 bp, Homo sapien
gtctagctttccttctacctcacca

SEQ ID NO: 4020612 - DNA, 25 bp, Homo sapien
tctagctttccttctacctcaccag

SEQ ID NO: 4020613 - DNA, 25 bp, Homo sapien
gggtctagctttccttctacctcac

SEQ ID NO: 4020614 - DNA, 25 bp, Homo sapien
actgaagtaaagtgcaaccaagcca

SEQ ID NO: 4020615 - DNA, 25 bp, Homo sapien
agtaaagtgcaaccaagccatatat

SEQ ID NO: 4020616 - DNA, 25 bp, Homo sapien
tgaagtaaagtgcaaccaagccata

SEQ ID NO: 4020617 - DNA, 25 bp, Homo sapien
taaagtgcaaccaagccatatatat

SEQ ID NO: 4020618 - DNA, 25 bp, Homo sapien
gatgtcactaagatacctgccccag

SEQ ID NO: 4020619 - DNA, 25 bp, Homo sapien
aggatgtcactaagatacctgcccc

SEQ ID NO: 4020620 - DNA, 25 bp, Homo sapien
actaagatacctgccccaggcaagc

SEQ ID NO: 4020621 - DNA, 25 bp, Homo sapien
gtcactaagatacctgccccaggca

SEQ ID NO: 4020622 - DNA, 25 bp, Homo sapien
tctactcccttgctaaaggctagag

SEQ ID NO: 4020623 - DNA, 25 bp, Homo sapien
gtctactcccttgctaaaggctaga

SEQ ID NO: 4020624 - DNA, 25 bp, Homo sapien
tactcccttgctaaaggctagagct

SEQ ID NO: 4020625 - DNA, 25 bp, Homo sapien
ctactcccttgctaaaggctagagc

SEQ ID NO: 4020626 - DNA, 25 bp, Homo sapien
tgtcccttgggcaacatgaggctct

SEQ ID NO: 4020627 - DNA, 25 bp, Homo sapien
cctatctactctctcatgtgtcaca

SEQ ID NO: 4020628 - DNA, 25 bp, Homo sapien
cccactgctgtaaggaaatgtctct

SEQ ID NO: 4020629 - DNA, 25 bp, Homo sapien
tcctccaagcactcaaaaggtggtc

SEQ ID NO: 4020630 - DNA, 25 bp, Homo sapien
ctcccgctaaatgaaaaccgtgttg

SEQ ID NO: 4020631 - DNA, 25 bp, Homo sapien
accgtgttgttataaagcttaatgc

SEQ ID NO: 4020632 - DNA, 25 bp, Homo sapien
attaaactgtcatttctcccgctaa

SEQ ID NO: 4020633 - DNA, 25 bp, Homo sapien
aatgcaacctgattaatgagtttcg

SEQ ID NO: 4020634 - DNA, 25 bp, Homo sapien
caaaccatgctcttcaggtggcctt

SEQ ID NO: 4020635 - DNA, 25 bp, Homo sapien
ttggaaaccgcctttctagagtcag

SEQ ID NO: 4020636 - DNA, 25 bp, Homo sapien
accgcctttctagagtcagttccaa

SEQ ID NO: 4020637 - DNA, 25 bp, Homo sapien
tctagagtcagttccaaaccatgct

SEQ ID NO: 4020638 - DNA, 25 bp, Homo sapien
tggtaaagaccatctgacgtccagc

SEQ ID NO: 4020639 - DNA, 25 bp, Homo sapien
ccctgtgagatactgagtcgaaaca

SEQ ID NO: 4020640 - DNA, 25 bp, Homo sapien
tctacagacaggtcatcagctccct

SEQ ID NO: 4020641 - DNA, 25 bp, Homo sapien
agcctgtcttcgtgagggtgaagga

SEQ ID NO: 4020642 - DNA, 25 bp, Homo sapien
ctttccatcacaaagtgactcctcg

SEQ ID NO: 4020643 - DNA, 25 bp, Homo sapien
cacaaagtgactcctcgccgtgacg

SEQ ID NO: 4020644 - DNA, 25 bp, Homo sapien
catcacaaagtgactcctcgccgtg

SEQ ID NO: 4020645 - DNA, 25 bp, Homo sapien
ctgtgacattgagaactgtgttctt

SEQ ID NO: 4020646 - DNA, 25 bp, Homo sapien
gggcttcatctgcatgggagagcta

SEQ ID NO: 4020647 - DNA, 25 bp, Homo sapien
ggggaacaatgacctctccttgcat

SEQ ID NO: 4020648 - DNA, 25 bp, Homo sapien
gctaagccggggaacaatgacctct

SEQ ID NO: 4020649 - DNA, 25 bp, Homo sapien
atagggcttcatctgcatgggagag

SEQ ID NO: 4020650 - DNA, 25 bp, Homo sapien
tgtcttgcaagtgcttccttcccac

SEQ ID NO: 4020651 - DNA, 25 bp, Homo sapien
ttttgtcttgcaagtgcttccttcc

SEQ ID NO: 4020652 - DNA, 25 bp, Homo sapien
tgttttgtcttgcaagtgcttcctt

SEQ ID NO: 4020653 - DNA, 25 bp, Homo sapien
caatgttttgtcttgcaagtgcttc

SEQ ID NO: 4020654 - DNA, 25 bp, Homo sapien
gccgtgttccatcgatctctgcaaa

SEQ ID NO: 4020655 - DNA, 25 bp, Homo sapien
tctctgcaaatattctgctgtttac

SEQ ID NO: 4020656 - DNA, 25 bp, Homo sapien
taatctgtaggagtaattggattcc

SEQ ID NO: 4020657 - DNA, 25 bp, Homo sapien
gataatctttgtgtaatctgtagga

SEQ ID NO: 4020658 - DNA, 25 bp, Homo sapien
gtgattgtgtgcgtaatgttttcct

SEQ ID NO: 4020659 - DNA, 25 bp, Homo sapien
attgtgtgcgtaatgttttcctgcc

SEQ ID NO: 4020660 - DNA, 25 bp, Homo sapien
gattgtgtgcgtaatgttttcctgc

SEQ ID NO: 4020661 - DNA, 25 bp, Homo sapien
ctgtgattgtgtgcgtaatgttttc

SEQ ID NO: 4020662 - DNA, 25 bp, Homo sapien
gatcagatgcaactgctttcaggtc

SEQ ID NO: 4020663 - DNA, 25 bp, Homo sapien
gctttcaggtctggctttgggatct

SEQ ID NO: 4020664 - DNA, 25 bp, Homo sapien
gagatcagatgcaactgctttcagg

SEQ ID NO: 4020665 - DNA, 25 bp, Homo sapien
ctggagatcagatgcaactgctttc

SEQ ID NO: 4020666 - DNA, 25 bp, Homo sapien
gctctcagaaccgctcagactatca

SEQ ID NO: 4020667 - DNA, 25 bp, Homo sapien
atcattttatatgggctctccaaac

SEQ ID NO: 4020668 - DNA, 25 bp, Homo sapien
tcagaaccgctcagactatcacatt

SEQ ID NO: 4020669 - DNA, 25 bp, Homo sapien
tatcattttatatgggctctccaaa

SEQ ID NO: 4020670 - DNA, 25 bp, Homo sapien
tccattccgtgaattctgtaaatct

SEQ ID NO: 4020671 - DNA, 25 bp, Homo sapien
ctgatccattccgtgaattctgtaa

SEQ ID NO: 4020672 - DNA, 25 bp, Homo sapien
tctctgatccattccgtgaattctg

SEQ ID NO: 4020673 - DNA, 25 bp, Homo sapien
tgtttctctgatccattccgtgaat

SEQ ID NO: 4020674 - DNA, 25 bp, Homo sapien
gattttccttctgcatccggctgtt

SEQ ID NO: 4020675 - DNA, 25 bp, Homo sapien
ttccttctgcatccggctgtttctc

SEQ ID NO: 4020676 - DNA, 25 bp, Homo sapien
taactgtgattttccttctgcatcc

SEQ ID NO: 4020677 - DNA, 25 bp, Homo sapien
tgtgattttccttctgcatccggct

SEQ ID NO: 4020678 - DNA, 25 bp, Homo sapien
ggttgatgcttcttctcctatgcca

SEQ ID NO: 4020679 - DNA, 25 bp, Homo sapien
catgaagacgtctttgactccacca

SEQ ID NO: 4020680 - DNA, 25 bp, Homo sapien
gtttcttgtgctcaggcttccctcc

SEQ ID NO: 4020681 - DNA, 25 bp, Homo sapien
tccccatgagagcaggcttttatgc

SEQ ID NO: 4020682 - DNA, 25 bp, Homo sapien
aaatgttatctggcttgatatgcca

SEQ ID NO: 4020683 - DNA, 25 bp, Homo sapien
tcctgcagccgctttcacaggagcg

SEQ ID NO: 4020684 - DNA, 25 bp, Homo sapien
gttctaattgaatagattgaacaca

SEQ ID NO: 4020685 - DNA, 25 bp, Homo sapien
tcacaggagcgataaattggaaatg

SEQ ID NO: 4020686 - DNA, 25 bp, Homo sapien
ttcgtgaacttcaatcagacccatg

SEQ ID NO: 4020687 - DNA, 25 bp, Homo sapien
tagaattcgtgaacttcaatcagac

SEQ ID NO: 4020688 - DNA, 25 bp, Homo sapien
gccgtggaataatacttcacacttc

SEQ ID NO: 4020689 - DNA, 25 bp, Homo sapien
ttgctttgatatgtgccgtggaata

SEQ ID NO: 4020690 - DNA, 25 bp, Homo sapien
tgtacgaatgtaagtcaaggagtca

SEQ ID NO: 4020691 - DNA, 25 bp, Homo sapien
caaggagtcacacaagtctgtctct

SEQ ID NO: 4020692 - DNA, 25 bp, Homo sapien
tctgacagtatgtgagcctctatgt

SEQ ID NO: 4020693 - DNA, 25 bp, Homo sapien
gcctctatgtaggtgtaaagcatat

SEQ ID NO: 4020694 - DNA, 25 bp, Homo sapien
tcctgtcaggcatgggtgaatggct

SEQ ID NO: 4020695 - DNA, 25 bp, Homo sapien
gtgttcttctcctgtcaggcatggg

SEQ ID NO: 4020696 - DNA, 25 bp, Homo sapien
ggtaaattagtgccctgtgttcttc

SEQ ID NO: 4020697 - DNA, 25 bp, Homo sapien
aatggctaagctccttccttttctg

SEQ ID NO: 4020698 - DNA, 25 bp, Homo sapien
ggtcccacccctgaagcagtagtct

SEQ ID NO: 4020699 - DNA, 25 bp, Homo sapien
actttcctatcatcgtccgcattgg

SEQ ID NO: 4020700 - DNA, 25 bp, Homo sapien
ttagtgaagattcgcctccacctga

SEQ ID NO: 4020701 - DNA, 25 bp, Homo sapien
acctttggtccaaatagctttctca

SEQ ID NO: 4020702 - DNA, 25 bp, Homo sapien
cagattcccaggctccttgtctctt

SEQ ID NO: 4020703 - DNA, 25 bp, Homo sapien
cagcatcttcagattcccaggctcc

SEQ ID NO: 4020704 - DNA, 25 bp, Homo sapien
gcatcttcagattcccaggctcctt

SEQ ID NO: 4020705 - DNA, 25 bp, Homo sapien
caggctccttgtctcttttgtagac

SEQ ID NO: 4020706 - DNA, 25 bp, Homo sapien
aatgcagaatagtgttctgccaccc

SEQ ID NO: 4020707 - DNA, 25 bp, Homo sapien
aatacatcggagaatgcagaatagt

SEQ ID NO: 4020708 - DNA, 25 bp, Homo sapien
ctacaaatacatcggagaatgcaga

SEQ ID NO: 4020709 - DNA, 25 bp, Homo sapien
gaatgcagaatagtgttctgccacc

SEQ ID NO: 4020710 - DNA, 25 bp, Homo sapien
gcagctgctgattgcttgtgtctgg

SEQ ID NO: 4020711 - DNA, 25 bp, Homo sapien
gaaatacttcccactgatgaccact

SEQ ID NO: 4020712 - DNA, 25 bp, Homo sapien
tgcagatgcagattcatgcgcaggt

SEQ ID NO: 4020713 - DNA, 25 bp, Homo sapien
tctggttttatctgccacctgtcct

SEQ ID NO: 4020714 - DNA, 25 bp, Homo sapien
aatgaatcctcacatcaaaagcaag

SEQ ID NO: 4020715 - DNA, 25 bp, Homo sapien
gtagggttttccgggcatccagatg

SEQ ID NO: 4020716 - DNA, 25 bp, Homo sapien
ggttttccgggcatccagatgaaga

SEQ ID NO: 4020717 - DNA, 25 bp, Homo sapien
aaacacactcttgctttcaatatgg

SEQ ID NO: 4020718 - DNA, 25 bp, Homo sapien
caagccccagcaaataatttcctag

SEQ ID NO: 4020719 - DNA, 25 bp, Homo sapien
gacttgaagtgtcctcactgtcaga

SEQ ID NO: 4020720 - DNA, 25 bp, Homo sapien
tgagccacaatacccgtggaggctg

SEQ ID NO: 4020721 - DNA, 25 bp, Homo sapien
gggtagagcccgtgctggttcccaa

SEQ ID NO: 4020722 - DNA, 25 bp, Homo sapien
ggctctgagagcaactgaacctttc

SEQ ID NO: 4020723 - DNA, 25 bp, Homo sapien
tgcttgtcaagaagcttcggattag

SEQ ID NO: 4020724 - DNA, 25 bp, Homo sapien
gtaaaatcaacccttgcaacttcca

SEQ ID NO: 4020725 - DNA, 25 bp, Homo sapien
cttgtaaaatcaacccttgcaactt

SEQ ID NO: 4020726 - DNA, 25 bp, Homo sapien
gaagcttcggattagaaagctagtt

SEQ ID NO: 4020727 - DNA, 25 bp, Homo sapien
tcctgagtcaacagagcaatggtgt

SEQ ID NO: 4020728 - DNA, 25 bp, Homo sapien
taagtgctactccactgcttagcgc

SEQ ID NO: 4020729 - DNA, 25 bp, Homo sapien
aatggtgtgtatctggactgaagag

SEQ ID NO: 4020730 - DNA, 25 bp, Homo sapien
tcccctctgaaaccaataagtgcta

SEQ ID NO: 4020731 - DNA, 25 bp, Homo sapien
tgccgaacattttgatccatccatc

SEQ ID NO: 4020732 - DNA, 25 bp, Homo sapien
caggacatacagagacaactgccga

SEQ ID NO: 4020733 - DNA, 25 bp, Homo sapien
tgaagtcttcatccatagttgtctg

SEQ ID NO: 4020734 - DNA, 25 bp, Homo sapien
catccatagttgtctgagcaggaca

SEQ ID NO: 4020735 - DNA, 25 bp, Homo sapien
tgcaatggtatgtcacctctttcca

SEQ ID NO: 4020736 - DNA, 25 bp, Homo sapien
ggctgccaaccaacctctttgacga

SEQ ID NO: 4020737 - DNA, 25 bp, Homo sapien
tcccactttgcaggatggatgtaaa

SEQ ID NO: 4020738 - DNA, 25 bp, Homo sapien
ggttagagtcaataaaatcaggtgg

SEQ ID NO: 4020739 - DNA, 25 bp, Homo sapien
tcacgtggatttactgtcctgatcc

SEQ ID NO: 4020740 - DNA, 25 bp, Homo sapien
atataaagcaaaactcgagccaaca

SEQ ID NO: 4020741 - DNA, 25 bp, Homo sapien
cgagccaacatcttatggaaaggtg

SEQ ID NO: 4020742 - DNA, 25 bp, Homo sapien
ggatttactgtcctgatcctgggtc

SEQ ID NO: 4020743 - DNA, 25 bp, Homo sapien
gcaataagggtatcctgaagaagcc

SEQ ID NO: 4020744 - DNA, 25 bp, Homo sapien
ggatagttcaccctagccaagttga

SEQ ID NO: 4020745 - DNA, 25 bp, Homo sapien
cacatagttctagtcttcgagtcag

SEQ ID NO: 4020746 - DNA, 25 bp, Homo sapien
tgctggaacccaaaaacattagccg

SEQ ID NO: 4020747 - DNA, 25 bp, Homo sapien
ctctggctgtagtttcagaagtggg

SEQ ID NO: 4020748 - DNA, 25 bp, Homo sapien
cagttgagttaacttgactataaga

SEQ ID NO: 4020749 - DNA, 25 bp, Homo sapien
acttccagagtccagttgagttaac

SEQ ID NO: 4020750 - DNA, 25 bp, Homo sapien
gttaacttgactataagactcattt

SEQ ID NO: 4020751 - DNA, 25 bp, Homo sapien
tgggaaggatgttactagatggacc

SEQ ID NO: 4020752 - DNA, 25 bp, Homo sapien
aggaagcagccagtcgagccacaga

SEQ ID NO: 4020753 - DNA, 25 bp, Homo sapien
taacaaagtctgcatggtagctatg

SEQ ID NO: 4020754 - DNA, 25 bp, Homo sapien
gaccgagctgatcagtagaagtttg

SEQ ID NO: 4020755 - DNA, 25 bp, Homo sapien
gatgtcaggaagagacgagccttgc

SEQ ID NO: 4020756 - DNA, 25 bp, Homo sapien
tttcctgggctgtggattacactgg

SEQ ID NO: 4020757 - DNA, 25 bp, Homo sapien
tgctcaaaagtggtgcttccctcag

SEQ ID NO: 4020758 - DNA, 25 bp, Homo sapien
gatctggcgccagagtgtttccacc

SEQ ID NO: 4020759 - DNA, 25 bp, Homo sapien
tcctggaatgtcacaacactgctgg

SEQ ID NO: 4020760 - DNA, 25 bp, Homo sapien
tacactctccagaagcctccatagg

SEQ ID NO: 4020761 - DNA, 25 bp, Homo sapien
catgagtatgaacaggaggctccgg

SEQ ID NO: 4020762 - DNA, 25 bp, Homo sapien
gcatctcgtgcttcagggtgagtcc

SEQ ID NO: 4020763 - DNA, 25 bp, Homo sapien
aacttaattggacccttgcctctca

SEQ ID NO: 4020764 - DNA, 25 bp, Homo sapien
caatggtgaaaagcacacagctctt

SEQ ID NO: 4020765 - DNA, 25 bp, Homo sapien
caggactgtaccacacagtttaaca

SEQ ID NO: 4020766 - DNA, 25 bp, Homo sapien
cacagctctttgaaaacaggactgt

SEQ ID NO: 4020767 - DNA, 25 bp, Homo sapien
caattcttagttgtggatttctgca

SEQ ID NO: 4020768 - DNA, 25 bp, Homo sapien
gcatccggaagtaatctgaggtcat

SEQ ID NO: 4020769 - DNA, 25 bp, Homo sapien
tttctgcatccggaagtaatctgag

SEQ ID NO: 4020770 - DNA, 25 bp, Homo sapien
gtggatttctgcatccggaagtaat

SEQ ID NO: 4020771 - DNA, 25 bp, Homo sapien
aaagggtgataggtccttctccctg

SEQ ID NO: 4020772 - DNA, 25 bp, Homo sapien
attccctgatatcctgatgctgctg

SEQ ID NO: 4020773 - DNA, 25 bp, Homo sapien
agctgaaagggtgataggtccttct

SEQ ID NO: 4020774 - DNA, 25 bp, Homo sapien
gatgctgctgcccatactatgcagc

SEQ ID NO: 4020775 - DNA, 25 bp, Homo sapien
gggagcttgggaaataggccccatc

SEQ ID NO: 4020776 - DNA, 25 bp, Homo sapien
gttcctcttctcaactagtccattt

SEQ ID NO: 4020777 - DNA, 25 bp, Homo sapien
tcccgatagaattgagccatctttt

SEQ ID NO: 4020778 - DNA, 25 bp, Homo sapien
cctgtgctgaaaggttaatctgttc

SEQ ID NO: 4020779 - DNA, 25 bp, Homo sapien
cttcagaaactcaggtgtcttccat

SEQ ID NO: 4020780 - DNA, 25 bp, Homo sapien
cagagtatgtggatgtttacatgga

SEQ ID NO: 4020781 - DNA, 25 bp, Homo sapien
ggtgtcttccatattgtagcttttt

SEQ ID NO: 4020782 - DNA, 25 bp, Homo sapien
tcctctaggtcctttggaatcctcc

SEQ ID NO: 4020783 - DNA, 25 bp, Homo sapien
tcatggatcctgttgaggagcaaat

SEQ ID NO: 4020784 - DNA, 25 bp, Homo sapien
catggatcctgttgaggagcaaatc

SEQ ID NO: 4020785 - DNA, 25 bp, Homo sapien
tacatccggatgactcgaagcaaat

SEQ ID NO: 4020786 - DNA, 25 bp, Homo sapien
cttcaccagtatatgatagctgcat

SEQ ID NO: 4020787 - DNA, 25 bp, Homo sapien
caccgatgacgcagaaaggcttcat

SEQ ID NO: 4020788 - DNA, 25 bp, Homo sapien
ggatgaacttctggttgcttgggtt

SEQ ID NO: 4020789 - DNA, 25 bp, Homo sapien
tccattttgatctcccgctcaatgc

SEQ ID NO: 4020790 - DNA, 25 bp, Homo sapien
ctatctcaaggtgaatgccaatttc

SEQ ID NO: 4020791 - DNA, 25 bp, Homo sapien
aatccattttgatctcccgctcaat

SEQ ID NO: 4020792 - DNA, 25 bp, Homo sapien
tatctcaaggtgaatgccaatttct

SEQ ID NO: 4020793 - DNA, 25 bp, Homo sapien
ccatcagggagctcaagattctgaa

SEQ ID NO: 4020794 - DNA, 25 bp, Homo sapien
tcttgacaatgcaagggagagttgc

SEQ ID NO: 4020795 - DNA, 25 bp, Homo sapien
ctcattatcaggcattctgcagagg

SEQ ID NO: 4020796 - DNA, 25 bp, Homo sapien
ttgcttctggcgatggtgagctccc

SEQ ID NO: 4020797 - DNA, 25 bp, Homo sapien
tctggccctgagagccgaagaatcc

SEQ ID NO: 4020798 - DNA, 25 bp, Homo sapien
tgatttccacgaagcagttgccttt

SEQ ID NO: 4020799 - DNA, 25 bp, Homo sapien
gagaacagcaagacgaaccacacgt

SEQ ID NO: 4020800 - DNA, 25 bp, Homo sapien
tgcaagcaacagtacgggcatccgg

SEQ ID NO: 4020801 - DNA, 25 bp, Homo sapien
gcaagcagctcattaaacaggccct

SEQ ID NO: 4020802 - DNA, 25 bp, Homo sapien
gatgtaagggcttcgattgtctgca

SEQ ID NO: 4020803 - DNA, 25 bp, Homo sapien
cctgtgatgtaagggcttcgattgt

SEQ ID NO: 4020804 - DNA, 25 bp, Homo sapien
atcaccctgtgatgtaagggcttcg

SEQ ID NO: 4020805 - DNA, 25 bp, Homo sapien
tgatgtaagggcttcgattgtctgc

SEQ ID NO: 4020806 - DNA, 25 bp, Homo sapien
tgccacattgatcggtctgggctgc

SEQ ID NO: 4020807 - DNA, 25 bp, Homo sapien
tgcatgtgccacattgatcggtctg

SEQ ID NO: 4020808 - DNA, 25 bp, Homo sapien
cattgatcggtctgggctgctgaga

SEQ ID NO: 4020809 - DNA, 25 bp, Homo sapien
caagcaataaattgcatgtgccaca

SEQ ID NO: 4020810 - DNA, 25 bp, Homo sapien
ctatgccattcgtgtcccagcccca

SEQ ID NO: 4020811 - DNA, 25 bp, Homo sapien
tttgtctatgccattcgtgtcccag

SEQ ID NO: 4020812 - DNA, 25 bp, Homo sapien
tgtctatgccattcgtgtcccagcc

SEQ ID NO: 4020813 - DNA, 25 bp, Homo sapien
ctttgtctatgccattcgtgtccca

SEQ ID NO: 4020814 - DNA, 25 bp, Homo sapien
tccaccacagtaattaagtacatga

SEQ ID NO: 4020815 - DNA, 25 bp, Homo sapien
gaaagtcctgaaggtgtagcggata

SEQ ID NO: 4020816 - DNA, 25 bp, Homo sapien
gagctaatgacacaagggtgtgtgc

SEQ ID NO: 4020817 - DNA, 25 bp, Homo sapien
tgtagcggatatgagtgtttctcca

SEQ ID NO: 4020818 - DNA, 25 bp, Homo sapien
tcaggagatggatcggcaatacggg

SEQ ID NO: 4020819 - DNA, 25 bp, Homo sapien
gaacggcctcatagatagcctgcaa

SEQ ID NO: 4020820 - DNA, 25 bp, Homo sapien
cgggttgggcaacacttccagggca

SEQ ID NO: 4020821 - DNA, 25 bp, Homo sapien
agcctccaaacgctgtcccttgcca

SEQ ID NO: 4020822 - DNA, 25 bp, Homo sapien
tttctgattcgttatccccagatgc

SEQ ID NO: 4020823 - DNA, 25 bp, Homo sapien
ttcagtgcagaagtgaatcctttct

SEQ ID NO: 4020824 - DNA, 25 bp, Homo sapien
ggtatccagtagacatcaaatccat

SEQ ID NO: 4020825 - DNA, 25 bp, Homo sapien
tctactacacaaccaaaaacacctg

SEQ ID NO: 4020826 - DNA, 25 bp, Homo sapien
ggaagaaagtttcagtgtatgtatt

SEQ ID NO: 4020827 - DNA, 25 bp, Homo sapien
gaaagtttcagtgtatgtattttcc

SEQ ID NO: 4020828 - DNA, 25 bp, Homo sapien
cagtgtatgtattttcccatctatt

SEQ ID NO: 4020829 - DNA, 25 bp, Homo sapien
ctgggaagaaagtttcagtgtatgt

SEQ ID NO: 4020830 - DNA, 25 bp, Homo sapien
cgcctctttgcccagggagccccat

SEQ ID NO: 4020831 - DNA, 25 bp, Homo sapien
ccacacatttgggtaacaatttaca

SEQ ID NO: 4020832 - DNA, 25 bp, Homo sapien
cagtctggtttgacataagcttggc

SEQ ID NO: 4020833 - DNA, 25 bp, Homo sapien
taagcttggcaagggctttggtcac

SEQ ID NO: 4020834 - DNA, 25 bp, Homo sapien
ttacaattggcattgtcctggtccc

SEQ ID NO: 4020835 - DNA, 25 bp, Homo sapien
gaatattaatattcttctcctccaa

SEQ ID NO: 4020836 - DNA, 25 bp, Homo sapien
tcaagatttgtagcctgctgcagta

SEQ ID NO: 4020837 - DNA, 25 bp, Homo sapien
tagcctgctgcagtatgaatattaa

SEQ ID NO: 4020838 - DNA, 25 bp, Homo sapien
aatattaatattcttctcctccaag

SEQ ID NO: 4020839 - DNA, 25 bp, Homo sapien
gacgtttgacttctcagattttgct

SEQ ID NO: 4020840 - DNA, 25 bp, Homo sapien
gattttgctactgtttttggtgctt

SEQ ID NO: 4020841 - DNA, 25 bp, Homo sapien
tttgacttctcagattttgctactg

SEQ ID NO: 4020842 - DNA, 25 bp, Homo sapien
cttgacgtttgacttctcagatttt

SEQ ID NO: 4020843 - DNA, 25 bp, Homo sapien
tcctgatcatacaaaggcttcctgg

SEQ ID NO: 4020844 - DNA, 25 bp, Homo sapien
ttctcttcctgatcatacaaaggct

SEQ ID NO: 4020845 - DNA, 25 bp, Homo sapien
tttttcagctgtcacactcgggata

SEQ ID NO: 4020846 - DNA, 25 bp, Homo sapien
cactcgggatatccactgccaactt

SEQ ID NO: 4020847 - DNA, 25 bp, Homo sapien
tgtcacactcgggatatccactgcc

SEQ ID NO: 4020848 - DNA, 25 bp, Homo sapien
tatccactgccaacttcacgggcat

SEQ ID NO: 4020849 - DNA, 25 bp, Homo sapien
gtcagcacctggatcacaagcccac

SEQ ID NO: 4020850 - DNA, 25 bp, Homo sapien
aagtcagcacctggatcacaagccc

SEQ ID NO: 4020851 - DNA, 25 bp, Homo sapien
agtcagcacctggatcacaagccca

SEQ ID NO: 4020852 - DNA, 25 bp, Homo sapien
tcaagtcagcacctggatcacaagc

SEQ ID NO: 4020853 - DNA, 25 bp, Homo sapien
tctccactgtgagggtgtcaccaag

SEQ ID NO: 4020854 - DNA, 25 bp, Homo sapien
tgatcttgggacctggatgaaacca

SEQ ID NO: 4020855 - DNA, 25 bp, Homo sapien
ctgcttgaaacagcgagttgatctt

SEQ ID NO: 4020856 - DNA, 25 bp, Homo sapien
cactgtgagggtgtcaccaagatct

SEQ ID NO: 4020857 - DNA, 25 bp, Homo sapien
ttcagtggaggaactacaaaaagct

SEQ ID NO: 4020858 - DNA, 25 bp, Homo sapien
tttgtgggtgagtcacagggtagct

SEQ ID NO: 4020859 - DNA, 25 bp, Homo sapien
gcttcagtggaggaactacaaaaag

SEQ ID NO: 4020860 - DNA, 25 bp, Homo sapien
tgtgggtgagtcacagggtagctgt

SEQ ID NO: 4020861 - DNA, 25 bp, Homo sapien
cagggctcttcacgtcgggggttgg

SEQ ID NO: 4020862 - DNA, 25 bp, Homo sapien
tccagcagggctcttcacgtcgggg

SEQ ID NO: 4020863 - DNA, 25 bp, Homo sapien
cagcagggctcttcacgtcgggggt

SEQ ID NO: 4020864 - DNA, 25 bp, Homo sapien
ctccagcagggctcttcacgtcggg

SEQ ID NO: 4020865 - DNA, 25 bp, Homo sapien
gcagctggaaagggccgggcaaggt

SEQ ID NO: 4020866 - DNA, 25 bp, Homo sapien
cagctggaaagggccgggcaaggtg

SEQ ID NO: 4020867 - DNA, 25 bp, Homo sapien
gatggccccggtgtctatcctggca

SEQ ID NO: 4020868 - DNA, 25 bp, Homo sapien
ggccccggtgtctatcctggcacct

SEQ ID NO: 4020869 - DNA, 25 bp, Homo sapien
gagaagggcaggtgagaaatggcag

SEQ ID NO: 4020870 - DNA, 25 bp, Homo sapien
ctggataccaggtggtgggggcgga

SEQ ID NO: 4020871 - DNA, 25 bp, Homo sapien
gaggagaagggcaggtgagaaatgg

SEQ ID NO: 4020872 - DNA, 25 bp, Homo sapien
gaagggcaggtgagaaatggcaggg

SEQ ID NO: 4020873 - DNA, 25 bp, Homo sapien
gaaacagccttactcagagcagcag

SEQ ID NO: 4020874 - DNA, 25 bp, Homo sapien
gccccgggaaacagccttactcaga

SEQ ID NO: 4020875 - DNA, 25 bp, Homo sapien
cccctgatgaccagggttggctcgg

SEQ ID NO: 4020876 - DNA, 25 bp, Homo sapien
cccaaggaagactggcccctgatga

SEQ ID NO: 4020877 - DNA, 25 bp, Homo sapien
gaagattgtagagagcataagtgca

SEQ ID NO: 4020878 - DNA, 25 bp, Homo sapien
gaagaccgtcatgagaaatccaatc

SEQ ID NO: 4020879 - DNA, 25 bp, Homo sapien
tgcagtaacattggacacctgaaga

SEQ ID NO: 4020880 - DNA, 25 bp, Homo sapien
cataagtgcatgcatgaagaccgtc

SEQ ID NO: 4020881 - DNA, 25 bp, Homo sapien
aagaagtataagtgaccaggcaaag

SEQ ID NO: 4020882 - DNA, 25 bp, Homo sapien
tcaagaagtataagtgaccaggcaa

SEQ ID NO: 4020883 - DNA, 25 bp, Homo sapien
caagaagtataagtgaccaggcaaa

SEQ ID NO: 4020884 - DNA, 25 bp, Homo sapien
ctgctggatggtgaacgcttcttca

SEQ ID NO: 4020885 - DNA, 25 bp, Homo sapien
tgctggatggtgaacgcttcttcat

SEQ ID NO: 4020886 - DNA, 25 bp, Homo sapien
gctgcgtcttagctccaatgagcag

SEQ ID NO: 4020887 - DNA, 25 bp, Homo sapien
gctccaatgagcaggtgctcttgca

SEQ ID NO: 4020888 - DNA, 25 bp, Homo sapien
gacagtgactacgatggcaggacaa

SEQ ID NO: 4020889 - DNA, 25 bp, Homo sapien
tctggagcattttgtgagcaccgtc

SEQ ID NO: 4020890 - DNA, 25 bp, Homo sapien
gacattgaagtgagtctgcccacaa

SEQ ID NO: 4020891 - DNA, 25 bp, Homo sapien
gaagacatccactaggtaccagaag

SEQ ID NO: 4020892 - DNA, 25 bp, Homo sapien
cgcccacctccgcctcccatagtgt

SEQ ID NO: 4020893 - DNA, 25 bp, Homo sapien
caccaccaagcccggctaacttttg

SEQ ID NO: 4020894 - DNA, 25 bp, Homo sapien
cccatagtgttgggattacaggcat

SEQ ID NO: 4020895 - DNA, 25 bp, Homo sapien
ggaattacagacacacaccaccaag

SEQ ID NO: 4020896 - DNA, 25 bp, Homo sapien
atatggaaattgctgtggcttggct

SEQ ID NO: 4020897 - DNA, 25 bp, Homo sapien
gggagaggctaagggggccatatgc

SEQ ID NO: 4020898 - DNA, 25 bp, Homo sapien
ggctaagggggccatatgcacacat

SEQ ID NO: 4020899 - DNA, 25 bp, Homo sapien
taagggggccatatgcacacatgtg

SEQ ID NO: 4020900 - DNA, 25 bp, Homo sapien
agggggccatatgcacacatgtggc

SEQ ID NO: 4020901 - DNA, 25 bp, Homo sapien
cctgggttaatgtagcccagtttgc

SEQ ID NO: 4020902 - DNA, 25 bp, Homo sapien
tgggttaatgtagcccagtttgctc

SEQ ID NO: 4020903 - DNA, 25 bp, Homo sapien
gttaatgtagcccagtttgctcctc

SEQ ID NO: 4020904 - DNA, 25 bp, Homo sapien
ccctgggttaatgtagcccagtttg

SEQ ID NO: 4020905 - DNA, 25 bp, Homo sapien
taagccagccatatgcacacgtgtg

SEQ ID NO: 4020906 - DNA, 25 bp, Homo sapien
gacatttaaccaccttctttggaga

SEQ ID NO: 4020907 - DNA, 25 bp, Homo sapien
gagtacgtggttcttcaacaggttc

SEQ ID NO: 4020908 - DNA, 25 bp, Homo sapien
catttctgacagtgccagtcactgg

SEQ ID NO: 4020909 - DNA, 25 bp, Homo sapien
ccgctgcaaactttggcctctgcag

SEQ ID NO: 4020910 - DNA, 25 bp, Homo sapien
ttaaattgtgtctgccgtgggcaac

SEQ ID NO: 4020911 - DNA, 25 bp, Homo sapien
tctctgaaaaaggataacgaggtgg

SEQ ID NO: 4020912 - DNA, 25 bp, Homo sapien
cccggcatccgctggacggaagaga

SEQ ID NO: 4020913 - DNA, 25 bp, Homo sapien
catgtcatacaccagatccccagaa

SEQ ID NO: 4020914 - DNA, 25 bp, Homo sapien
gcagatacctcttcgacatagcaat

SEQ ID NO: 4020915 - DNA, 25 bp, Homo sapien
gtacccagtaactactgttctactc

SEQ ID NO: 4020916 - DNA, 25 bp, Homo sapien
gtcatacaccagatccccagaattt

SEQ ID NO: 4020917 - DNA, 25 bp, Homo sapien
atagcaaagcgacccagaggtgaat

SEQ ID NO: 4020918 - DNA, 25 bp, Homo sapien
gaatagcaaagcgacccagaggtga

SEQ ID NO: 4020919 - DNA, 25 bp, Homo sapien
tcacgaatagcaaagcgacccagag

SEQ ID NO: 4020920 - DNA, 25 bp, Homo sapien
tatcacgaatagcaaagcgacccag

SEQ ID NO: 4020921 - DNA, 25 bp, Homo sapien
ctaggaaccatatcaacgatggcag

SEQ ID NO: 4020922 - DNA, 25 bp, Homo sapien
caagaatttagggccgtcttccaga

SEQ ID NO: 4020923 - DNA, 25 bp, Homo sapien
agaatttagggccgtcttccagatt

SEQ ID NO: 4020924 - DNA, 25 bp, Homo sapien
cgatggcagcatcaccagatttcaa

SEQ ID NO: 4020925 - DNA, 25 bp, Homo sapien
aggggcatagtccacacttatttgg

SEQ ID NO: 4020926 - DNA, 25 bp, Homo sapien
agtacaggggcatagtccacactta

SEQ ID NO: 4020927 - DNA, 25 bp, Homo sapien
caggcaatatgagccgtgtggcagt

SEQ ID NO: 4020928 - DNA, 25 bp, Homo sapien
tggcagtccagtacaggggcatagt

SEQ ID NO: 4020929 - DNA, 25 bp, Homo sapien
gccagctgcttccatttgtgggttt

SEQ ID NO: 4020930 - DNA, 25 bp, Homo sapien
gggaagccagctgcttccatttgtg

SEQ ID NO: 4020931 - DNA, 25 bp, Homo sapien
cagctgcttccatttgtgggttttc

SEQ ID NO: 4020932 - DNA, 25 bp, Homo sapien
aagccagctgcttccatttgtgggt

SEQ ID NO: 4020933 - DNA, 25 bp, Homo sapien
catcgttgctatgacgaatctcctt

SEQ ID NO: 4020934 - DNA, 25 bp, Homo sapien
gttgctatgacgaatctccttgacg

SEQ ID NO: 4020935 - DNA, 25 bp, Homo sapien
gctatgacgaatctccttgacggac

SEQ ID NO: 4020936 - DNA, 25 bp, Homo sapien
tcgttgctatgacgaatctccttga

SEQ ID NO: 4020937 - DNA, 25 bp, Homo sapien
tgcttttcaacacaatttacttcag

SEQ ID NO: 4020938 - DNA, 25 bp, Homo sapien
gcttttcaacacaatttacttcagt

SEQ ID NO: 4020939 - DNA, 25 bp, Homo sapien
gtcaattagacaagttggtggtagg

SEQ ID NO: 4020940 - DNA, 25 bp, Homo sapien
ttgtcaattagacaagttggtggta

SEQ ID NO: 4020941 - DNA, 25 bp, Homo sapien
cttgtcaattagacaagttggtggt

SEQ ID NO: 4020942 - DNA, 25 bp, Homo sapien
ggcatattagcacttgactccagca

SEQ ID NO: 4020943 - DNA, 25 bp, Homo sapien
gaaccaaggcatattagcacttgac

SEQ ID NO: 4020944 - DNA, 25 bp, Homo sapien
atattagcacttgactccagcatgt

SEQ ID NO: 4020945 - DNA, 25 bp, Homo sapien
accaaggcatattagcacttgactc

SEQ ID NO: 4020946 - DNA, 25 bp, Homo sapien
tcttctggccatagggtggctcggt

SEQ ID NO: 4020947 - DNA, 25 bp, Homo sapien
ttgtatctcttctggccatagggtg

SEQ ID NO: 4020948 - DNA, 25 bp, Homo sapien
catagggtggctcggtggaatccat

SEQ ID NO: 4020949 - DNA, 25 bp, Homo sapien
ttccttgtatctcttctggccatag

SEQ ID NO: 4020950 - DNA, 25 bp, Homo sapien
ctatctaagtcccaggcatacttga

SEQ ID NO: 4020951 - DNA, 25 bp, Homo sapien
tttcagtctatctaagtcccaggca

SEQ ID NO: 4020952 - DNA, 25 bp, Homo sapien
ctcagctttcagtctatctaagtcc

SEQ ID NO: 4020953 - DNA, 25 bp, Homo sapien
gatagtcacgtagcactggctggtc

SEQ ID NO: 4020954 - DNA, 25 bp, Homo sapien
cagtggaggttgacttgcctgaatc

SEQ ID NO: 4020955 - DNA, 25 bp, Homo sapien
gcagtggaggttgacttgcctgaat

SEQ ID NO: 4020956 - DNA, 25 bp, Homo sapien
gggcagtggaggttgacttgcctga

SEQ ID NO: 4020957 - DNA, 25 bp, Homo sapien
agtggaggttgacttgcctgaatct

SEQ ID NO: 4020958 - DNA, 25 bp, Homo sapien
gcattcccacagcacttactgcctc

SEQ ID NO: 4020959 - DNA, 25 bp, Homo sapien
tctttcgcagcgttcatcatgccca

SEQ ID NO: 4020960 - DNA, 25 bp, Homo sapien
tctctctttcgcagcgttcatcatg

SEQ ID NO: 4020961 - DNA, 25 bp, Homo sapien
ttactgcctctctctttcgcagcgt

SEQ ID NO: 4020962 - DNA, 25 bp, Homo sapien
taaaatgcaatccagtgaccttgac

SEQ ID NO: 4020963 - DNA, 25 bp, Homo sapien
tctagaactcctgaggtgcaagccg

SEQ ID NO: 4020964 - DNA, 25 bp, Homo sapien
tcctccattagttagtgtattcgtc

SEQ ID NO: 4020965 - DNA, 25 bp, Homo sapien
ttttcgagcgatgtaaatatagcac

SEQ ID NO: 4020966 - DNA, 25 bp, Homo sapien
tgcagctctgcaaatgtgatcccat

SEQ ID NO: 4020967 - DNA, 25 bp, Homo sapien
catttctggtaatgcactgggagag

SEQ ID NO: 4020968 - DNA, 25 bp, Homo sapien
tacttgctgagtacccatttgactg

SEQ ID NO: 4020969 - DNA, 25 bp, Homo sapien
taacaacggctccatatactggctg

SEQ ID NO: 4020970 - DNA, 25 bp, Homo sapien
tttctcccttatgaagagtcccacg

SEQ ID NO: 4020971 - DNA, 25 bp, Homo sapien
ccgatgctgctactcacaaaccagg

SEQ ID NO: 4020972 - DNA, 25 bp, Homo sapien
tgaagagtcccacgtggagattccc

SEQ ID NO: 4020973 - DNA, 25 bp, Homo sapien
atccatgttgagcttccgatgctgc

SEQ ID NO: 4020974 - DNA, 25 bp, Homo sapien
taggtcctccatccacttgggtgac

SEQ ID NO: 4020975 - DNA, 25 bp, Homo sapien
ccgactcatatcctccacgttgctg

SEQ ID NO: 4020976 - DNA, 25 bp, Homo sapien
ctccacgttgctgcgctggcataaa

SEQ ID NO: 4020977 - DNA, 25 bp, Homo sapien
acacagtgctgagaggcgtctaggt

SEQ ID NO: 4020978 - DNA, 25 bp, Homo sapien
gacattgttgcagcgagccactgag

SEQ ID NO: 4020979 - DNA, 25 bp, Homo sapien
aagaagacctgaagttggacctcgg

SEQ ID NO: 4020980 - DNA, 25 bp, Homo sapien
actgagctcttctacgagggcagga

SEQ ID NO: 4020981 - DNA, 25 bp, Homo sapien
ttctgcccaacagagaagactgctg

SEQ ID NO: 4020982 - DNA, 25 bp, Homo sapien
cacagatgaggaatggtcccagacc

SEQ ID NO: 4020983 - DNA, 25 bp, Homo sapien
ttaatgagtccctaagtggcagtcc

SEQ ID NO: 4020984 - DNA, 25 bp, Homo sapien
tggtacccgctgacacatgtggagg

SEQ ID NO: 4020985 - DNA, 25 bp, Homo sapien
tccaggaaggtagatggagtccgcc

SEQ ID NO: 4020986 - DNA, 25 bp, Homo sapien
gacgccacagcctgaatactggaga

SEQ ID NO: 4020987 - DNA, 25 bp, Homo sapien
agagtccgtagagacctgcgcagga

SEQ ID NO: 4020988 - DNA, 25 bp, Homo sapien
ggagcaggctcccaagtgaagaaac

SEQ ID NO: 4020989 - DNA, 25 bp, Homo sapien
cctgcagagaagtgcgaaggtcttg

SEQ ID NO: 4020990 - DNA, 25 bp, Homo sapien
tcacaggaagaatttacaccagatg

SEQ ID NO: 4020991 - DNA, 25 bp, Homo sapien
aggggtcacagccctgctgcagcag

SEQ ID NO: 4020992 - DNA, 25 bp, Homo sapien
gtcacagccctgctgcagcagtggg

SEQ ID NO: 4020993 - DNA, 25 bp, Homo sapien
gcagcagtgggggcatccaggggtc

SEQ ID NO: 4020994 - DNA, 25 bp, Homo sapien
gggtcacagccctgctgcagcagtg

SEQ ID NO: 4020995 - DNA, 25 bp, Homo sapien
ggtgactcgcgtggaacctgaaaca

SEQ ID NO: 4020996 - DNA, 25 bp, Homo sapien
gggctgtggcgatcaggccactcaa

SEQ ID NO: 4020997 - DNA, 25 bp, Homo sapien
cattaagacgaaagaggtgactcgc

SEQ ID NO: 4020998 - DNA, 25 bp, Homo sapien
gctgtggacggtgaacattaagacg

SEQ ID NO: 4020999 - DNA, 25 bp, Homo sapien
tggaccgcagggactttttgttcga

SEQ ID NO: 4021000 - DNA, 25 bp, Homo sapien
ctttttgttcgatttcaagacacca

SEQ ID NO: 4021001 - DNA, 25 bp, Homo sapien
tgcctggaccgcagggactttttgt

SEQ ID NO: 4021002 - DNA, 25 bp, Homo sapien
atttcaagacaccagactccctctc

SEQ ID NO: 4021003 - DNA, 25 bp, Homo sapien
ccctcccatgagctcctcagggccc

SEQ ID NO: 4021004 - DNA, 25 bp, Homo sapien
agcccctcccatgagctcctcaggg

SEQ ID NO: 4021005 - DNA, 25 bp, Homo sapien
cctggcaccaggccccacgtcctgc

SEQ ID NO: 4021006 - DNA, 25 bp, Homo sapien
tcagggccctgtctccaagggcttc

SEQ ID NO: 4021007 - DNA, 25 bp, Homo sapien
gcagggtaagtgcatcctgatccca

SEQ ID NO: 4021008 - DNA, 25 bp, Homo sapien
ggcagcgcggttcagcattcgactg

SEQ ID NO: 4021009 - DNA, 25 bp, Homo sapien
ttcagcattcgactggaagtacttg

SEQ ID NO: 4021010 - DNA, 25 bp, Homo sapien
gatcccacaggtttcgcagctttga

SEQ ID NO: 4021011 - DNA, 25 bp, Homo sapien
ggtgcccaaggatacaggtgtacga

SEQ ID NO: 4021012 - DNA, 25 bp, Homo sapien
catcgtgttatcttctgggccccag

SEQ ID NO: 4021013 - DNA, 25 bp, Homo sapien
catgaacgcagtgacagaagccgag

SEQ ID NO: 4021014 - DNA, 25 bp, Homo sapien
tacgaggcccgtaagagcaattgca

SEQ ID NO: 4021015 - DNA, 25 bp, Homo sapien
cagcagggaggcgtcctgacacgtc

SEQ ID NO: 4021016 - DNA, 25 bp, Homo sapien
ctgacacgtcctgggagatggcctc

SEQ ID NO: 4021017 - DNA, 25 bp, Homo sapien
cagtgcgtccctgcggggcacagca

SEQ ID NO: 4021018 - DNA, 25 bp, Homo sapien
ctcttgtgggaggatgcgccagcag

SEQ ID NO: 4021019 - DNA, 25 bp, Homo sapien
cccagtgatgagctcccgtgccctg

SEQ ID NO: 4021020 - DNA, 25 bp, Homo sapien
cagtgatgagctcccgtgccctgcc

SEQ ID NO: 4021021 - DNA, 25 bp, Homo sapien
ggcccagtgatgagctcccgtgccc

SEQ ID NO: 4021022 - DNA, 25 bp, Homo sapien
agggcccagtgatgagctcccgtgc

SEQ ID NO: 4021023 - DNA, 25 bp, Homo sapien
acgtctcccggatgtattgctccat

SEQ ID NO: 4021024 - DNA, 25 bp, Homo sapien
tattgcagatcttcaccgcgtcggg

SEQ ID NO: 4021025 - DNA, 25 bp, Homo sapien
gtacgtctcccggatgtattgctcc

SEQ ID NO: 4021026 - DNA, 25 bp, Homo sapien
tgacagatattgcagatcttcaccg

SEQ ID NO: 4021027 - DNA, 25 bp, Homo sapien
ggaggggtgtgcttgcgtaatctgg

SEQ ID NO: 4021028 - DNA, 25 bp, Homo sapien
gtaatctgggctcacagtgcgttcg

SEQ ID NO: 4021029 - DNA, 25 bp, Homo sapien
aggggtgtgcttgcgtaatctgggc

SEQ ID NO: 4021030 - DNA, 25 bp, Homo sapien
gggtgtgcttgcgtaatctgggctc

SEQ ID NO: 4021031 - DNA, 25 bp, Homo sapien
cagccgctgcgggaacagtggaggg

SEQ ID NO: 4021032 - DNA, 25 bp, Homo sapien
ggcagggcagaagcgtggggttggg

SEQ ID NO: 4021033 - DNA, 25 bp, Homo sapien
aggcagggcagaagcgtggggttgg

SEQ ID NO: 4021034 - DNA, 25 bp, Homo sapien
ggtgcttgtgccctgcaccgcagct

SEQ ID NO: 4021035 - DNA, 25 bp, Homo sapien
cctgcaccgcagctgttgctggtgc

SEQ ID NO: 4021036 - DNA, 25 bp, Homo sapien
tgccctgcaccgcagctgttgctgg

SEQ ID NO: 4021037 - DNA, 25 bp, Homo sapien
tgcttgtgccctgcaccgcagctgt

SEQ ID NO: 4021038 - DNA, 25 bp, Homo sapien
gggcaagtcaaaccataaagctggg

SEQ ID NO: 4021039 - DNA, 25 bp, Homo sapien
tccagacaccaagggcagacaaagg

SEQ ID NO: 4021040 - DNA, 25 bp, Homo sapien
agggcagacaaagggcaagtcaaac

SEQ ID NO: 4021041 - DNA, 25 bp, Homo sapien
gggcctctcctatccaccaccgccc

SEQ ID NO: 4021042 - DNA, 25 bp, Homo sapien
tgcctttaagttgatcaaccaggtt

SEQ ID NO: 4021043 - DNA, 25 bp, Homo sapien
tatgtttgtggaagacgcaaagccg

SEQ ID NO: 4021044 - DNA, 25 bp, Homo sapien
agccacttgttttgaacaaacttct

SEQ ID NO: 4021045 - DNA, 25 bp, Homo sapien
gcaaagccggtttctgagtcaataa

SEQ ID NO: 4021046 - DNA, 25 bp, Homo sapien
gttccagatgggtagacagtgacat

SEQ ID NO: 4021047 - DNA, 25 bp, Homo sapien
tgcagttgccactgctaatgacgga

SEQ ID NO: 4021048 - DNA, 25 bp, Homo sapien
ggtagacagtgacatctccctgcaa

SEQ ID NO: 4021049 - DNA, 25 bp, Homo sapien
tgctaatgacggagacagaactttc

SEQ ID NO: 4021050 - DNA, 25 bp, Homo sapien
ttctaaacaaatccagttcattctc

SEQ ID NO: 4021051 - DNA, 25 bp, Homo sapien
attctctgcaaaatccgtagccatt

SEQ ID NO: 4021052 - DNA, 25 bp, Homo sapien
gcaaaatccgtagccattttggaaa

SEQ ID NO: 4021053 - DNA, 25 bp, Homo sapien
tctgcaaaatccgtagccattttgg

SEQ ID NO: 4021054 - DNA, 25 bp, Homo sapien
gtcctccaacttatctacggtggca

SEQ ID NO: 4021055 - DNA, 25 bp, Homo sapien
caacgcataaatgggtctcccatca

SEQ ID NO: 4021056 - DNA, 25 bp, Homo sapien
tatctcaatatacaaggactccaag

SEQ ID NO: 4021057 - DNA, 25 bp, Homo sapien
tcatcttccgtgactcctctcttta

SEQ ID NO: 4021058 - DNA, 25 bp, Homo sapien
gccaccatccaggtccatcagtctg

SEQ ID NO: 4021059 - DNA, 25 bp, Homo sapien
acccacactattgccgggggctcag

SEQ ID NO: 4021060 - DNA, 25 bp, Homo sapien
aggggccaccatccaggtccatcag

SEQ ID NO: 4021061 - DNA, 25 bp, Homo sapien
gaggagggggcacccacactattgc

SEQ ID NO: 4021062 - DNA, 25 bp, Homo sapien
gaaatgttctcttctgcccccggtg

SEQ ID NO: 4021063 - DNA, 25 bp, Homo sapien
tgctggcgtgggagccgagctgttc

SEQ ID NO: 4021064 - DNA, 25 bp, Homo sapien
atgttctcttctgcccccggtgctg

SEQ ID NO: 4021065 - DNA, 25 bp, Homo sapien
gggagccgagctgttccgtacctgc

SEQ ID NO: 4021066 - DNA, 25 bp, Homo sapien
tcagggtcatgtccacgatctccat

SEQ ID NO: 4021067 - DNA, 25 bp, Homo sapien
gttctctccgctatcgccctctttc

SEQ ID NO: 4021068 - DNA, 25 bp, Homo sapien
gcatcagggtcatgtccacgatctc

SEQ ID NO: 4021069 - DNA, 25 bp, Homo sapien
cagccactgcttgggcgctcccgtt

SEQ ID NO: 4021070 - DNA, 25 bp, Homo sapien
taattccaggtatgatattcaggga

SEQ ID NO: 4021071 - DNA, 25 bp, Homo sapien
gcggttttggtgagagaataattcc

SEQ ID NO: 4021072 - DNA, 25 bp, Homo sapien
cagacactctcccaatctgagcaag

SEQ ID NO: 4021073 - DNA, 25 bp, Homo sapien
agaaagcagaaagctgaagggacca

SEQ ID NO: 4021074 - DNA, 25 bp, Homo sapien
tgctagcacagcactgaggacaggg

SEQ ID NO: 4021075 - DNA, 25 bp, Homo sapien
tgacaaaccgtcctctccatcggtg

SEQ ID NO: 4021076 - DNA, 25 bp, Homo sapien
gggaaaaagattctctggaccttca

SEQ ID NO: 4021077 - DNA, 25 bp, Homo sapien
gagaactgccatgggcacttccaag

SEQ ID NO: 4021078 - DNA, 25 bp, Homo sapien
gccagaaaggatcgctgcttctctt

SEQ ID NO: 4021079 - DNA, 25 bp, Homo sapien
tctcagcagaccctcagcaaccaat

SEQ ID NO: 4021080 - DNA, 25 bp, Homo sapien
agcaaccaatgcagaggcgagccag

SEQ ID NO: 4021081 - DNA, 25 bp, Homo sapien
cagaggcgagccagaaaggatcgct

SEQ ID NO: 4021082 - DNA, 25 bp, Homo sapien
aagatgtgtggtacaagtggtgacc

SEQ ID NO: 4021083 - DNA, 25 bp, Homo sapien
tcagctgacactcaagacgtatccg

SEQ ID NO: 4021084 - DNA, 25 bp, Homo sapien
tgtggtacaagtggtgaccatgctt

SEQ ID NO: 4021085 - DNA, 25 bp, Homo sapien
cgtccacgaaccgaggaagatgtgt

SEQ ID NO: 4021086 - DNA, 25 bp, Homo sapien
caaaaatcagctgtccacctatgtg

SEQ ID NO: 4021087 - DNA, 25 bp, Homo sapien
tggagcatgcttttggagccaagaa

SEQ ID NO: 4021088 - DNA, 25 bp, Homo sapien
tatcgattcattctcttatggagca

SEQ ID NO: 4021089 - DNA, 25 bp, Homo sapien
tgtgtgggtctgttatctagctctc

SEQ ID NO: 4021090 - DNA, 25 bp, Homo sapien
gccacaattgggtttagcacgttaa

SEQ ID NO: 4021091 - DNA, 25 bp, Homo sapien
tgtcgtaccatcctttgtaaacact

SEQ ID NO: 4021092 - DNA, 25 bp, Homo sapien
tattaatactaaatcaaccctgcaa

SEQ ID NO: 4021093 - DNA, 25 bp, Homo sapien
taacgtctacgctcatgaggagtct

SEQ ID NO: 4021094 - DNA, 25 bp, Homo sapien
ggtttcccctgtgccatggcctaga

SEQ ID NO: 4021095 - DNA, 25 bp, Homo sapien
gagatggaagcactcgtcaacggcc

SEQ ID NO: 4021096 - DNA, 25 bp, Homo sapien
tcaacggccagtgactgatcaatca

SEQ ID NO: 4021097 - DNA, 25 bp, Homo sapien
tcccactatcgcttgtggcagaaga

SEQ ID NO: 4021098 - DNA, 25 bp, Homo sapien
taggatttgatgctaactccaggca

SEQ ID NO: 4021099 - DNA, 25 bp, Homo sapien
ggaatgcccagttgttatctagaga

SEQ ID NO: 4021100 - DNA, 25 bp, Homo sapien
aagtagagagggcacggaaactcca

SEQ ID NO: 4021101 - DNA, 25 bp, Homo sapien
taaacacacagaggcgttgagacgg

SEQ ID NO: 4021102 - DNA, 25 bp, Homo sapien
gaagacaagcgttcttatgcacatt

SEQ ID NO: 4021103 - DNA, 25 bp, Homo sapien
caggctgaagacaagcgttcttatg

SEQ ID NO: 4021104 - DNA, 25 bp, Homo sapien
ggctgaagacaagcgttcttatgca

SEQ ID NO: 4021105 - DNA, 25 bp, Homo sapien
gacaagcgttcttatgcacatttct

SEQ ID NO: 4021106 - DNA, 25 bp, Homo sapien
gtccctgatcaacacagcaccagag

SEQ ID NO: 4021107 - DNA, 25 bp, Homo sapien
ctgatcaacacagcaccagagcgcc

SEQ ID NO: 4021108 - DNA, 25 bp, Homo sapien
tccctgatcaacacagcaccagagc

SEQ ID NO: 4021109 - DNA, 25 bp, Homo sapien
tcactggtccctgatcaacacagca

SEQ ID NO: 4021110 - DNA, 25 bp, Homo sapien
gtagcagtgcctctgcaagcgcttc

SEQ ID NO: 4021111 - DNA, 25 bp, Homo sapien
ggaagcgccggtggacatcagtcat

SEQ ID NO: 4021112 - DNA, 25 bp, Homo sapien
agcgcttcacgtcccattcctctag

SEQ ID NO: 4021113 - DNA, 25 bp, Homo sapien
cattcctctagcacgccatgggtca

SEQ ID NO: 4021114 - DNA, 25 bp, Homo sapien
ccattctccttgtgctgccctgcat

SEQ ID NO: 4021115 - DNA, 25 bp, Homo sapien
cgcccattctccttgtgctgccctg

SEQ ID NO: 4021116 - DNA, 25 bp, Homo sapien
gacgcccattctccttgtgctgccc

SEQ ID NO: 4021117 - DNA, 25 bp, Homo sapien
gcccattctccttgtgctgccctgc

SEQ ID NO: 4021118 - DNA, 25 bp, Homo sapien
cattactgagagaactactagtaaa

SEQ ID NO: 4021119 - DNA, 25 bp, Homo sapien
ctttatttcctatcactagggccat

SEQ ID NO: 4021120 - DNA, 25 bp, Homo sapien
agcctgtcatcaactttatttccta

SEQ ID NO: 4021121 - DNA, 25 bp, Homo sapien
ttaaacctcaaatccagcctgtcat

SEQ ID NO: 4021122 - DNA, 25 bp, Homo sapien
caaatccagcctgtcatcaacttta

SEQ ID NO: 4021123 - DNA, 25 bp, Homo sapien
gagaatggtgggattagcatagaca

SEQ ID NO: 4021124 - DNA, 25 bp, Homo sapien
tattatgtcccttgtctctatgaga

SEQ ID NO: 4021125 - DNA, 25 bp, Homo sapien
tatgagaagagactgtagggagaat

SEQ ID NO: 4021126 - DNA, 25 bp, Homo sapien
gcatagacatgtattacctacttaa

SEQ ID NO: 4021127 - DNA, 25 bp, Homo sapien
agaaactccgtacacaaaacagagg

SEQ ID NO: 4021128 - DNA, 25 bp, Homo sapien
ggtggtcggcaaaggctgtattttc

SEQ ID NO: 4021129 - DNA, 25 bp, Homo sapien
taagcggctgcggacttgtacaaag

SEQ ID NO: 4021130 - DNA, 25 bp, Homo sapien
gattttaaacgcatctggcctcggg

SEQ ID NO: 4021131 - DNA, 25 bp, Homo sapien
ggacatcccagtccgctgttttctg

SEQ ID NO: 4021132 - DNA, 25 bp, Homo sapien
agatttttagatgtctgcgtgtgtg

SEQ ID NO: 4021133 - DNA, 25 bp, Homo sapien
tgtgtgttgcgggaggacatcccag

SEQ ID NO: 4021134 - DNA, 25 bp, Homo sapien
tgttttctgcggcccctgtctgggc

SEQ ID NO: 4021135 - DNA, 25 bp, Homo sapien
cccaggccgcgctagcggatacggt

SEQ ID NO: 4021136 - DNA, 25 bp, Homo sapien
agggagcccaagcgcatcccaggcc

SEQ ID NO: 4021137 - DNA, 25 bp, Homo sapien
ggagcccaagcgcatcccaggccgc

SEQ ID NO: 4021138 - DNA, 25 bp, Homo sapien
ccgcgctagcggatacggtcgcaag

SEQ ID NO: 4021139 - DNA, 25 bp, Homo sapien
ctcagcctcccaaagtgttgagatt

SEQ ID NO: 4021140 - DNA, 25 bp, Homo sapien
gcctcagcctcccaaagtgttgaga

SEQ ID NO: 4021141 - DNA, 25 bp, Homo sapien
cacccgccaccaatgcctggataat

SEQ ID NO: 4021142 - DNA, 25 bp, Homo sapien
caaataatctgcctgcctcagcctc

SEQ ID NO: 4021143 - DNA, 25 bp, Homo sapien
caacctgtacaaggtgcacatcagt

SEQ ID NO: 4021144 - DNA, 25 bp, Homo sapien
gacctgcaaaccaagaagtaagcat

SEQ ID NO: 4021145 - DNA, 25 bp, Homo sapien
taagcattacatcaacctgtacaag

SEQ ID NO: 4021146 - DNA, 25 bp, Homo sapien
tctagcttgtttttgacctgcaaac

SEQ ID NO: 4021147 - DNA, 25 bp, Homo sapien
ctatccaatgtgcttcgggtaaaca

SEQ ID NO: 4021148 - DNA, 25 bp, Homo sapien
ggaaggagcttgtctggaaggctga

SEQ ID NO: 4021149 - DNA, 25 bp, Homo sapien
acaggaaggagcttgtctggaaggc

SEQ ID NO: 4021150 - DNA, 25 bp, Homo sapien
aatgtgcttcgggtaaacaggaagg

SEQ ID NO: 4021151 - DNA, 25 bp, Homo sapien
tcaaggagagggggatttcagcagg

SEQ ID NO: 4021152 - DNA, 25 bp, Homo sapien
cttcaaggagagggggatttcagca

SEQ ID NO: 4021153 - DNA, 25 bp, Homo sapien
ttcaaggagagggggatttcagcag

SEQ ID NO: 4021154 - DNA, 25 bp, Homo sapien
tactagttactgattgaagggctgt

SEQ ID NO: 4021155 - DNA, 25 bp, Homo sapien
gcgtgggcgttttattccgagacca

SEQ ID NO: 4021156 - DNA, 25 bp, Homo sapien
cggcaagacacccagcgaggtgctg

SEQ ID NO: 4021157 - DNA, 25 bp, Homo sapien
gatccactgcagagttctccgctgg

SEQ ID NO: 4021158 - DNA, 25 bp, Homo sapien
ttgcgaaggtatcgcccgggcacgc

SEQ ID NO: 4021159 - DNA, 25 bp, Homo sapien
gcccgcgcgcggatcgggttgcgaa

SEQ ID NO: 4021160 - DNA, 25 bp, Homo sapien
ttgggcgcccggacggcgaatggag

SEQ ID NO: 4021161 - DNA, 25 bp, Homo sapien
gctgagggcgttcgggaagggctcg

SEQ ID NO: 4021162 - DNA, 25 bp, Homo sapien
ttccgtccttgccgccgaacggcag

SEQ ID NO: 4021163 - DNA, 25 bp, Homo sapien
cgcgactctcggtgcgcgcggagca

SEQ ID NO: 4021164 - DNA, 25 bp, Homo sapien
ctggcagtgagacctccgccgggac

SEQ ID NO: 4021165 - DNA, 25 bp, Homo sapien
ggagcagcgcccggttccgtccttg

SEQ ID NO: 4021166 - DNA, 25 bp, Homo sapien
ggtctgcgctaaagccagcctgggt

SEQ ID NO: 4021167 - DNA, 25 bp, Homo sapien
gactgactcattctctctttaggtg

SEQ ID NO: 4021168 - DNA, 25 bp, Homo sapien
ctgggtgctgtaacctctcggccga

SEQ ID NO: 4021169 - DNA, 25 bp, Homo sapien
gcttaagaaatctgaggtctgcgct

SEQ ID NO: 4021170 - DNA, 25 bp, Homo sapien
aggggtcagcggctccaaagcccca

SEQ ID NO: 4021171 - DNA, 25 bp, Homo sapien
caggccagtttctgtcgtggagttt

SEQ ID NO: 4021172 - DNA, 25 bp, Homo sapien
tgtccctggattcctctccacatgc

SEQ ID NO: 4021173 - DNA, 25 bp, Homo sapien
cagtttctgtcgtggagtttcaggg

SEQ ID NO: 4021174 - DNA, 25 bp, Homo sapien
gtttattgtacacatgctatgcctg

SEQ ID NO: 4021175 - DNA, 25 bp, Homo sapien
tcagagggaggcaaacaatgcattt

SEQ ID NO: 4021176 - DNA, 25 bp, Homo sapien
gaggtggctatttcacatctgatgg

SEQ ID NO: 4021177 - DNA, 25 bp, Homo sapien
ggaggaatatgtcttttgtgaacca

SEQ ID NO: 4021178 - DNA, 25 bp, Homo sapien
tgaaaacattttgcagtcaaagcta

SEQ ID NO: 4021179 - DNA, 25 bp, Homo sapien
aagtcacagggagggcccgcattag

SEQ ID NO: 4021180 - DNA, 25 bp, Homo sapien
tagtgataagtactgggacagacat

SEQ ID NO: 4021181 - DNA, 25 bp, Homo sapien
caaagctatctttgctatctgcatc

SEQ ID NO: 4021182 - DNA, 25 bp, Homo sapien
tgggctcggaagcaaacaaacgtgg

SEQ ID NO: 4021183 - DNA, 25 bp, Homo sapien
tcatcttattgggttcagcctgcag

SEQ ID NO: 4021184 - DNA, 25 bp, Homo sapien
tagacagttgggataacagcctacc

SEQ ID NO: 4021185 - DNA, 25 bp, Homo sapien
caaacgtgggttctgattctagctc

SEQ ID NO: 4021186 - DNA, 25 bp, Homo sapien
ctctcctgaaatgtagcacccacac

SEQ ID NO: 4021187 - DNA, 25 bp, Homo sapien
ctcctgaaatgtagcacccacacat

SEQ ID NO: 4021188 - DNA, 25 bp, Homo sapien
tctcctgaaatgtagcacccacaca

SEQ ID NO: 4021189 - DNA, 25 bp, Homo sapien
gaagctcagaaagcgtaagtgacct

SEQ ID NO: 4021190 - DNA, 25 bp, Homo sapien
ggaaccagccaagtgcccgtatgta

SEQ ID NO: 4021191 - DNA, 25 bp, Homo sapien
tgaacttaggtcacagcctgcatgc

SEQ ID NO: 4021192 - DNA, 25 bp, Homo sapien
cattagccttcaagggacggcagga

SEQ ID NO: 4021193 - DNA, 25 bp, Homo sapien
catgtgctgggttcccgaaatccca

SEQ ID NO: 4021194 - DNA, 25 bp, Homo sapien
aagacacagaccctaccctcaggga

SEQ ID NO: 4021195 - DNA, 25 bp, Homo sapien
gagcttgtatttggtgcccaggaca

SEQ ID NO: 4021196 - DNA, 25 bp, Homo sapien
tcttgtagagatgtttgagacggct

SEQ ID NO: 4021197 - DNA, 25 bp, Homo sapien
gcggccttgggaaatcgatgagaaa

SEQ ID NO: 4021198 - DNA, 25 bp, Homo sapien
tggaggcagaatcccggctgtcaag

SEQ ID NO: 4021199 - DNA, 25 bp, Homo sapien
acttcagggagggtggtcattgcct

SEQ ID NO: 4021200 - DNA, 25 bp, Homo sapien
taacagagcttccttaggttgatgc

SEQ ID NO: 4021201 - DNA, 25 bp, Homo sapien
cattgcagcccatcctccgcctgtg

SEQ ID NO: 4021202 - DNA, 25 bp, Homo sapien
atccaaatgtctccgtcccacaggt

SEQ ID NO: 4021203 - DNA, 25 bp, Homo sapien
agatccaaatgtctccgtcccacag

SEQ ID NO: 4021204 - DNA, 25 bp, Homo sapien
tggaagatccaaatgtctccgtccc

SEQ ID NO: 4021205 - DNA, 25 bp, Homo sapien
gttttcatttgtgtgttgtgggcac

SEQ ID NO: 4021206 - DNA, 25 bp, Homo sapien
tgctgctgttttcatttgtgtgttg

SEQ ID NO: 4021207 - DNA, 25 bp, Homo sapien
tgctactgctgctgttttcatttgt

SEQ ID NO: 4021208 - DNA, 25 bp, Homo sapien
actgctgctgttttcatttgtgtgt

SEQ ID NO: 4021209 - DNA, 25 bp, Homo sapien
tgtggtgtgcacatctgggtcctcc

SEQ ID NO: 4021210 - DNA, 25 bp, Homo sapien
gtgtgcacatctgggtcctccagca

SEQ ID NO: 4021211 - DNA, 25 bp, Homo sapien
ctgtggtgtgcacatctgggtcctc

SEQ ID NO: 4021212 - DNA, 25 bp, Homo sapien
tggtgtgcacatctgggtcctccag

SEQ ID NO: 4021213 - DNA, 25 bp, Homo sapien
tggtaccttccttgccgtctctttc

SEQ ID NO: 4021214 - DNA, 25 bp, Homo sapien
gtgtggattctcaccccaggcctct

SEQ ID NO: 4021215 - DNA, 25 bp, Homo sapien
tctgctgagtgaccgtaagctcggc

SEQ ID NO: 4021216 - DNA, 25 bp, Homo sapien
cagagtgacaggtcttatgacagcc

SEQ ID NO: 4021217 - DNA, 25 bp, Homo sapien
tgtcacagtgggagggctcggagga

SEQ ID NO: 4021218 - DNA, 25 bp, Homo sapien
cagccctggttttctgctgggacca

SEQ ID NO: 4021219 - DNA, 25 bp, Homo sapien
gaggactgtgcccaagtcacaattg

SEQ ID NO: 4021220 - DNA, 25 bp, Homo sapien
aagaagattcatgcagtgaggctgg

SEQ ID NO: 4021221 - DNA, 25 bp, Homo sapien
cctttgctaatctaacaagagaggg

SEQ ID NO: 4021222 - DNA, 25 bp, Homo sapien
caagagagggtattgtagtgcaaag

SEQ ID NO: 4021223 - DNA, 25 bp, Homo sapien
tgaccaccagttgagggcttcctgc

SEQ ID NO: 4021224 - DNA, 25 bp, Homo sapien
gatgctgatgtaaatggcataattt

SEQ ID NO: 4021225 - DNA, 25 bp, Homo sapien
ttcactatataactaggtgtgaaat

SEQ ID NO: 4021226 - DNA, 25 bp, Homo sapien
tcactatataactaggtgtgaaatt

SEQ ID NO: 4021227 - DNA, 25 bp, Homo sapien
tttcactatataactaggtgtgaaa

SEQ ID NO: 4021228 - DNA, 25 bp, Homo sapien
ttttcactatataactaggtgtgaa

SEQ ID NO: 4021229 - DNA, 25 bp, Homo sapien
tgggagtcagcatgccgcgtggctg

SEQ ID NO: 4021230 - DNA, 25 bp, Homo sapien
ccgtgggagtcagcatgccgcgtgg

SEQ ID NO: 4021231 - DNA, 25 bp, Homo sapien
aggcccgtgggagtcagcatgccgc

SEQ ID NO: 4021232 - DNA, 25 bp, Homo sapien
gcccgtgggagtcagcatgccgcgt

SEQ ID NO: 4021233 - DNA, 25 bp, Homo sapien
cagctgtgaggatgacggctaccca

SEQ ID NO: 4021234 - DNA, 25 bp, Homo sapien
tgtgaagacacctgcagcctttggt

SEQ ID NO: 4021235 - DNA, 25 bp, Homo sapien
tagaggacccactcttggatgcagg

SEQ ID NO: 4021236 - DNA, 25 bp, Homo sapien
tctgactggtcacactactaagggt

SEQ ID NO: 4021237 - DNA, 25 bp, Homo sapien
gagtcatccgtctgacagatgaaat

SEQ ID NO: 4021238 - DNA, 25 bp, Homo sapien
gggcagagtcatccgtctgacagat

SEQ ID NO: 4021239 - DNA, 25 bp, Homo sapien
catccgtctgacagatgaaatgaag

SEQ ID NO: 4021240 - DNA, 25 bp, Homo sapien
tccgtctgacagatgaaatgaaggc

SEQ ID NO: 4021241 - DNA, 25 bp, Homo sapien
ctgggattactaagctgtaaggagg

SEQ ID NO: 4021242 - DNA, 25 bp, Homo sapien
tggaagtcattatgctgttcaccat

SEQ ID NO: 4021243 - DNA, 25 bp, Homo sapien
taatagctcttgagatcccggatcc

SEQ ID NO: 4021244 - DNA, 25 bp, Homo sapien
tgttcaccatatgctgggcacatgg

SEQ ID NO: 4021245 - DNA, 25 bp, Homo sapien
tggttttccactaaagctttggcta

SEQ ID NO: 4021246 - DNA, 25 bp, Homo sapien
tcatggaaacgcttgcaaaattgcc

SEQ ID NO: 4021247 - DNA, 25 bp, Homo sapien
taggcatgctgatgcagatgtgcca

SEQ ID NO: 4021248 - DNA, 25 bp, Homo sapien
caggactataaggtgagtgcctaat

SEQ ID NO: 4021249 - DNA, 25 bp, Homo sapien
tcaaaaaataaataagtacactcca

SEQ ID NO: 4021250 - DNA, 25 bp, Homo sapien
ccaggagatcctgccgagatggcta

SEQ ID NO: 4021251 - DNA, 25 bp, Homo sapien
ctgcaaggaatcaccagccaggctg

SEQ ID NO: 4021252 - DNA, 25 bp, Homo sapien
tctgcaaggtgtatcccacaaggcc

SEQ ID NO: 4021253 - DNA, 25 bp, Homo sapien
gcacaccgatccctattctgcaagg

SEQ ID NO: 4021254 - DNA, 25 bp, Homo sapien
tggggtctgccgagcaccaggcagg

SEQ ID NO: 4021255 - DNA, 25 bp, Homo sapien
gtggggtctgccgagcaccaggcag

SEQ ID NO: 4021256 - DNA, 25 bp, Homo sapien
cagtggggtctgccgagcaccaggc

SEQ ID NO: 4021257 - DNA, 25 bp, Homo sapien
cacagtggggtctgccgagcaccag

SEQ ID NO: 4021258 - DNA, 25 bp, Homo sapien
ctgggagggaggggacgcccacagg

SEQ ID NO: 4021259 - DNA, 25 bp, Homo sapien
gtggctgggagggaggggacgccca

SEQ ID NO: 4021260 - DNA, 25 bp, Homo sapien
caggcggtggctgggagggagggga

SEQ ID NO: 4021261 - DNA, 25 bp, Homo sapien
ggctgggagggaggggacgcccaca

SEQ ID NO: 4021262 - DNA, 25 bp, Homo sapien
cacttgttccagttgacctcgtggg

SEQ ID NO: 4021263 - DNA, 25 bp, Homo sapien
gcttccggatgcagccgagggactc

SEQ ID NO: 4021264 - DNA, 25 bp, Homo sapien
ccaccacgggtgtagagaagagcga

SEQ ID NO: 4021265 - DNA, 25 bp, Homo sapien
tacagtccaaggtgggctcatagaa

SEQ ID NO: 4021266 - DNA, 25 bp, Homo sapien
cacccagccgcctccacaccctgct

SEQ ID NO: 4021267 - DNA, 25 bp, Homo sapien
gtgcacccagccgcctccacaccct

SEQ ID NO: 4021268 - DNA, 25 bp, Homo sapien
tgagtgcacccagccgcctccacac

SEQ ID NO: 4021269 - DNA, 25 bp, Homo sapien
gcacccagccgcctccacaccctgc

SEQ ID NO: 4021270 - DNA, 25 bp, Homo sapien
atcatacccttgcatacaggaaggt

SEQ ID NO: 4021271 - DNA, 25 bp, Homo sapien
tggagcaactccagcacggcgacgg

SEQ ID NO: 4021272 - DNA, 25 bp, Homo sapien
cgatgaagcagacactctcacagtc

SEQ ID NO: 4021273 - DNA, 25 bp, Homo sapien
gaaggttcaggtggccatccacgac

SEQ ID NO: 4021274 - DNA, 25 bp, Homo sapien
gctccacgccatgtgcagagttcca

SEQ ID NO: 4021275 - DNA, 25 bp, Homo sapien
gctgtggcaaaactcacgggagcgt

SEQ ID NO: 4021276 - DNA, 25 bp, Homo sapien
tctgatgtagctgtaactgaggcct

SEQ ID NO: 4021277 - DNA, 25 bp, Homo sapien
gaaccaggacgtggtgtccgctctg

SEQ ID NO: 4021278 - DNA, 25 bp, Homo sapien
gcagctccgaaactctctgtgaacc

SEQ ID NO: 4021279 - DNA, 25 bp, Homo sapien
gggagatgttggcagctccgaaact

SEQ ID NO: 4021280 - DNA, 25 bp, Homo sapien
aatgagcatctcacagagcggccac

SEQ ID NO: 4021281 - DNA, 25 bp, Homo sapien
tgctgccacccgaggaagttgagac

SEQ ID NO: 4021282 - DNA, 25 bp, Homo sapien
gagaaggccgctgctgatgacagac

SEQ ID NO: 4021283 - DNA, 25 bp, Homo sapien
aagtcaagccccttttgtgccagtg

SEQ ID NO: 4021284 - DNA, 25 bp, Homo sapien
gcgcctggccgctcagctgctcttg

SEQ ID NO: 4021285 - DNA, 25 bp, Homo sapien
cgcctggccgctcagctgctcttgg

SEQ ID NO: 4021286 - DNA, 25 bp, Homo sapien
tgcgcctggccgctcagctgctctt

SEQ ID NO: 4021287 - DNA, 25 bp, Homo sapien
gctgcagcggtgtcttcaagagctg

SEQ ID NO: 4021288 - DNA, 25 bp, Homo sapien
tctgggtgccctcggcgtcggtctc

SEQ ID NO: 4021289 - DNA, 25 bp, Homo sapien
ggccaaatttgagtcctggagcgct

SEQ ID NO: 4021290 - DNA, 25 bp, Homo sapien
atcttcagctccgggcccaaggctg

SEQ ID NO: 4021291 - DNA, 25 bp, Homo sapien
ggctgtgagaaggaggtgcctgccc

SEQ ID NO: 4021292 - DNA, 25 bp, Homo sapien
gggctgtgagaaggaggtgcctgcc

SEQ ID NO: 4021293 - DNA, 25 bp, Homo sapien
ctccaggggtctggcctgggggtct

SEQ ID NO: 4021294 - DNA, 25 bp, Homo sapien
ggtctggcctgggggtcttctctct

SEQ ID NO: 4021295 - DNA, 25 bp, Homo sapien
tggaagacccctccaggggtctggc

SEQ ID NO: 4021296 - DNA, 25 bp, Homo sapien
aagacccctccaggggtctggcctg

SEQ ID NO: 4021297 - DNA, 25 bp, Homo sapien
tgtctttcagccgcacggagtgcag

SEQ ID NO: 4021298 - DNA, 25 bp, Homo sapien
ctctgtctttcagccgcacggagtg

SEQ ID NO: 4021299 - DNA, 25 bp, Homo sapien
tctctgtctttcagccgcacggagt

SEQ ID NO: 4021300 - DNA, 25 bp, Homo sapien
ctttcagccgcacggagtgcaggag

SEQ ID NO: 4021301 - DNA, 25 bp, Homo sapien
ccatggctaccaggcgcgcagtgtt

SEQ ID NO: 4021302 - DNA, 25 bp, Homo sapien
gcagtgttgccaccgacctccagca

SEQ ID NO: 4021303 - DNA, 25 bp, Homo sapien
cccatggctaccaggcgcgcagtgt

SEQ ID NO: 4021304 - DNA, 25 bp, Homo sapien
caggcgcgcagtgttgccaccgacc

SEQ ID NO: 4021305 - DNA, 25 bp, Homo sapien
gacgagtggagtggcctcccctgac

SEQ ID NO: 4021306 - DNA, 25 bp, Homo sapien
ggcgggttgagtgccctgagcagcc

SEQ ID NO: 4021307 - DNA, 25 bp, Homo sapien
ccacgctggtgacgggggacgagtg

SEQ ID NO: 4021308 - DNA, 25 bp, Homo sapien
tctgtggggagctcgggatcctcca

SEQ ID NO: 4021309 - DNA, 25 bp, Homo sapien
tgtcaatcccaaaacaacccgtggc

SEQ ID NO: 4021310 - DNA, 25 bp, Homo sapien
tatcagcttggtgaacgtatcaggg

SEQ ID NO: 4021311 - DNA, 25 bp, Homo sapien
cattgttagctcttccagaggagcg

SEQ ID NO: 4021312 - DNA, 25 bp, Homo sapien
aaggcagcagtcaggtcttcgggac

SEQ ID NO: 4021313 - DNA, 25 bp, Homo sapien
ctcccctgaccaatgcacaggccac

SEQ ID NO: 4021314 - DNA, 25 bp, Homo sapien
acccaggaaaggcatgctccagcac

SEQ ID NO: 4021315 - DNA, 25 bp, Homo sapien
cacacccaggaaaggcatgctccag

SEQ ID NO: 4021316 - DNA, 25 bp, Homo sapien
gaagatcagaggcagcccgacagag

SEQ ID NO: 4021317 - DNA, 25 bp, Homo sapien
ccctcatcagcaggtagttggtgtg

SEQ ID NO: 4021318 - DNA, 25 bp, Homo sapien
agttgaccacaatgctgtcgttggg

SEQ ID NO: 4021319 - DNA, 25 bp, Homo sapien
tgaggttgcgggtgctgacgatgcc

SEQ ID NO: 4021320 - DNA, 25 bp, Homo sapien
gggaggcttgcgcaggtttcacctc

SEQ ID NO: 4021321 - DNA, 25 bp, Homo sapien
ggaatgactccgtgcagatggtgct

SEQ ID NO: 4021322 - DNA, 25 bp, Homo sapien
cattgagctgtctaccacgatgatc

SEQ ID NO: 4021323 - DNA, 25 bp, Homo sapien
gccgtccagtgaaaaggccaccatg

SEQ ID NO: 4021324 - DNA, 25 bp, Homo sapien
tctttgaaagagaaacgatcaggct

SEQ ID NO: 4021325 - DNA, 25 bp, Homo sapien
gatagctggtaggacattggcacga

SEQ ID NO: 4021326 - DNA, 25 bp, Homo sapien
tggttgacccggcgccggttgacca

SEQ ID NO: 4021327 - DNA, 25 bp, Homo sapien
tgtactcccgatagaggcggaaagt

SEQ ID NO: 4021328 - DNA, 25 bp, Homo sapien
catgaaggccttcacaagaacgtgg

SEQ ID NO: 4021329 - DNA, 25 bp, Homo sapien
cagcgtgctctggatcaggttctga

SEQ ID NO: 4021330 - DNA, 25 bp, Homo sapien
gactggtaggacttcatctgactgt

SEQ ID NO: 4021331 - DNA, 25 bp, Homo sapien
ctggaatgactggtaggacttcatc

SEQ ID NO: 4021332 - DNA, 25 bp, Homo sapien
tggtaggacttcatctgactgtctg

SEQ ID NO: 4021333 - DNA, 25 bp, Homo sapien
ctctttcctggtttgatctttttca

SEQ ID NO: 4021334 - DNA, 25 bp, Homo sapien
atctttttcatccccaattgccaaa

SEQ ID NO: 4021335 - DNA, 25 bp, Homo sapien
ttttcatccccaattgccaaaactc

SEQ ID NO: 4021336 - DNA, 25 bp, Homo sapien
tcatccccaattgccaaaactcggt

SEQ ID NO: 4021337 - DNA, 25 bp, Homo sapien
gaaacataacagcatgtcagtgaaa

SEQ ID NO: 4021338 - DNA, 25 bp, Homo sapien
tggctcaagatggccatttattggc

SEQ ID NO: 4021339 - DNA, 25 bp, Homo sapien
aaacagctcctcactaagcaagcgg

SEQ ID NO: 4021340 - DNA, 25 bp, Homo sapien
tcctcactaagcaagcggatgctgg

SEQ ID NO: 4021341 - DNA, 25 bp, Homo sapien
ctctaaatggttcatgggctctcct

SEQ ID NO: 4021342 - DNA, 25 bp, Homo sapien
ctgcaatagtaaattcctcttataa

SEQ ID NO: 4021343 - DNA, 25 bp, Homo sapien
gaatgctcaggatcacaatcagtat

SEQ ID NO: 4021344 - DNA, 25 bp, Homo sapien
gatgggtgttaagcccccacacctg

SEQ ID NO: 4021345 - DNA, 25 bp, Homo sapien
gaagcctgaaggaccaatgggagaa

SEQ ID NO: 4021346 - DNA, 25 bp, Homo sapien
aatcctggccctggtacttacaagc

SEQ ID NO: 4021347 - DNA, 25 bp, Homo sapien
taaatgcccggcagggtgctaggtc

SEQ ID NO: 4021348 - DNA, 25 bp, Homo sapien
tcacccatgagaggagagacaggag

SEQ ID NO: 4021349 - DNA, 25 bp, Homo sapien
tctgggatttcaaggttagaattcc

SEQ ID NO: 4021350 - DNA, 25 bp, Homo sapien
ctgggatttcaaggttagaattcct

SEQ ID NO: 4021351 - DNA, 25 bp, Homo sapien
acctcttcgattcatgaaatctcca

SEQ ID NO: 4021352 - DNA, 25 bp, Homo sapien
ctttgggtcatcatagtcacctctt

SEQ ID NO: 4021353 - DNA, 25 bp, Homo sapien
tatcctggtacacctcggccaggca

SEQ ID NO: 4021354 - DNA, 25 bp, Homo sapien
ctttatcctggtacacctcggccag

SEQ ID NO: 4021355 - DNA, 25 bp, Homo sapien
gagttacttatatgcctgttgcaca

SEQ ID NO: 4021356 - DNA, 25 bp, Homo sapien
caactgcagcttttacgaatgaagg

SEQ ID NO: 4021357 - DNA, 25 bp, Homo sapien
cataggtaaccgagaacactgagtc

SEQ ID NO: 4021358 - DNA, 25 bp, Homo sapien
gccttggccgaccttgaagcatgag

SEQ ID NO: 4021359 - DNA, 25 bp, Homo sapien
gccaggtgacaaatgggcccttcac

SEQ ID NO: 4021360 - DNA, 25 bp, Homo sapien
caaacgtggcatgcaaaatgtcccg

SEQ ID NO: 4021361 - DNA, 25 bp, Homo sapien
tagcgagctcttcgtccaacggaat

SEQ ID NO: 4021362 - DNA, 25 bp, Homo sapien
ccaacggaatgagatgttttatcca

SEQ ID NO: 4021363 - DNA, 25 bp, Homo sapien
tgcatagaccaggtgacacgaagcc

SEQ ID NO: 4021364 - DNA, 25 bp, Homo sapien
ctggcaatgcggcacagcacaagca

SEQ ID NO: 4021365 - DNA, 25 bp, Homo sapien
acgaagccgcgtcatccgctgcagg

SEQ ID NO: 4021366 - DNA, 25 bp, Homo sapien
cagggcactctggtcggcttcatca

SEQ ID NO: 4021367 - DNA, 25 bp, Homo sapien
tcggtccagcgagggctctcggtcc

SEQ ID NO: 4021368 - DNA, 25 bp, Homo sapien
cggtttcggtccagcgagggctctc

SEQ ID NO: 4021369 - DNA, 25 bp, Homo sapien
cagccgcttccgcttctggcttttc

SEQ ID NO: 4021370 - DNA, 25 bp, Homo sapien
ttcagccgcttccgcttctggcttt

SEQ ID NO: 4021371 - DNA, 25 bp, Homo sapien
gcacagagctcggagcctactcttg

SEQ ID NO: 4021372 - DNA, 25 bp, Homo sapien
acagagctcggagcctactcttgct

SEQ ID NO: 4021373 - DNA, 25 bp, Homo sapien
gagctcggagcctactcttgcttcc

SEQ ID NO: 4021374 - DNA, 25 bp, Homo sapien
gccagcacagagctcggagcctact

SEQ ID NO: 4021375 - DNA, 25 bp, Homo sapien
agaaatgtctggagcctcactgtga

SEQ ID NO: 4021376 - DNA, 25 bp, Homo sapien
gggcattgggcgcttggacagaaat

SEQ ID NO: 4021377 - DNA, 25 bp, Homo sapien
tgagtccattctctgcggcagtgtt

SEQ ID NO: 4021378 - DNA, 25 bp, Homo sapien
cactgaggggcattgggcgcttgga

SEQ ID NO: 4021379 - DNA, 25 bp, Homo sapien
caatacaaacggaagccagtatttg

SEQ ID NO: 4021380 - DNA, 25 bp, Homo sapien
cttcaatacaaacggaagccagtat

SEQ ID NO: 4021381 - DNA, 25 bp, Homo sapien
caaacggaagccagtatttgtgtct

SEQ ID NO: 4021382 - DNA, 25 bp, Homo sapien
atacaaacggaagccagtatttgtg

SEQ ID NO: 4021383 - DNA, 25 bp, Homo sapien
tccgtagaagctggaatcgagccct

SEQ ID NO: 4021384 - DNA, 25 bp, Homo sapien
tagctggtccagatccagttgcgct

SEQ ID NO: 4021385 - DNA, 25 bp, Homo sapien
cagttgcgcttgaggtgtccgtaga

SEQ ID NO: 4021386 - DNA, 25 bp, Homo sapien
ttttggcctggttgatgatgtagct

SEQ ID NO: 4021387 - DNA, 25 bp, Homo sapien
gtactccagcatggcgcacttgcgc

SEQ ID NO: 4021388 - DNA, 25 bp, Homo sapien
gtgcttgtccatggcgctctcctgc

SEQ ID NO: 4021389 - DNA, 25 bp, Homo sapien
gctgctgttcttcctgacgcgcggg

SEQ ID NO: 4021390 - DNA, 25 bp, Homo sapien
cgcacttgcgctccaggttgtgctt

SEQ ID NO: 4021391 - DNA, 25 bp, Homo sapien
acatagaggcgcctctcgaagggcc

SEQ ID NO: 4021392 - DNA, 25 bp, Homo sapien
ccaggttgtaatgtgggtcgcagat

SEQ ID NO: 4021393 - DNA, 25 bp, Homo sapien
cacatcctgcattgagttcaggaca

SEQ ID NO: 4021394 - DNA, 25 bp, Homo sapien
gacgcactgcaggtcaaaccagtag

SEQ ID NO: 4021395 - DNA, 25 bp, Homo sapien
caaactgtagcagccccatgtagca

SEQ ID NO: 4021396 - DNA, 25 bp, Homo sapien
tgggaccaaactgtagcagccccat

SEQ ID NO: 4021397 - DNA, 25 bp, Homo sapien
ttttccgtgggaccaaactgtagca

SEQ ID NO: 4021398 - DNA, 25 bp, Homo sapien
gtagcagccccatgtagcacagcct

SEQ ID NO: 4021399 - DNA, 25 bp, Homo sapien
gagaaagcggatcagcgtgtgcttc

SEQ ID NO: 4021400 - DNA, 25 bp, Homo sapien
tcttcagcgggtcgttcagaaattc

SEQ ID NO: 4021401 - DNA, 25 bp, Homo sapien
acagaagctgctgccgaatgggcct

SEQ ID NO: 4021402 - DNA, 25 bp, Homo sapien
gatcagcgtgtgcttcttcagcggg

SEQ ID NO: 4021403 - DNA, 25 bp, Homo sapien
tgacttgcacaatctggatgaagat

SEQ ID NO: 4021404 - DNA, 25 bp, Homo sapien
gatgtagcgcatccacgaggcatcg

SEQ ID NO: 4021405 - DNA, 25 bp, Homo sapien
aggaggatgtcgctgacgagagccc

SEQ ID NO: 4021406 - DNA, 25 bp, Homo sapien
gccaaagccgaagtccctgtggact

SEQ ID NO: 4021407 - DNA, 25 bp, Homo sapien
gaagcttggcttctccacggtgttg

SEQ ID NO: 4021408 - DNA, 25 bp, Homo sapien
tgcccgtagatgaggtaccacagaa

SEQ ID NO: 4021409 - DNA, 25 bp, Homo sapien
tgtctccgtggcaagctccacttca

SEQ ID NO: 4021410 - DNA, 25 bp, Homo sapien
tatcgttctccgttcactgatgaag

SEQ ID NO: 4021411 - DNA, 25 bp, Homo sapien
tcctagagaacgccccagtccggga

SEQ ID NO: 4021412 - DNA, 25 bp, Homo sapien
aatcctagagaacgccccagtccgg

SEQ ID NO: 4021413 - DNA, 25 bp, Homo sapien
gaaatcctagagaacgccccagtcc

SEQ ID NO: 4021414 - DNA, 25 bp, Homo sapien
agaaatcctagagaacgccccagtc

SEQ ID NO: 4021415 - DNA, 25 bp, Homo sapien
gcaaatgctgtctagttgcatgcac

SEQ ID NO: 4021416 - DNA, 25 bp, Homo sapien
tcgagtgcaaatgctgtctagttgc

SEQ ID NO: 4021417 - DNA, 25 bp, Homo sapien
gtctagttgcatgcactcatgctgc

SEQ ID NO: 4021418 - DNA, 25 bp, Homo sapien
gcccctggtccattcgagtgcaaat

SEQ ID NO: 4021419 - DNA, 25 bp, Homo sapien
gataatttctaagcggggttatgcc

SEQ ID NO: 4021420 - DNA, 25 bp, Homo sapien
tacaatggggtgataatttctaagc

SEQ ID NO: 4021421 - DNA, 25 bp, Homo sapien
tccgtccactttctgatctagagga

SEQ ID NO: 4021422 - DNA, 25 bp, Homo sapien
tttcatccgtccactttctgatcta

SEQ ID NO: 4021423 - DNA, 25 bp, Homo sapien
tctggtccatggacgggtgcaccac

SEQ ID NO: 4021424 - DNA, 25 bp, Homo sapien
gatggcacttctcactagagggtcg

SEQ ID NO: 4021425 - DNA, 25 bp, Homo sapien
tgcttgaattggagatccggaagcg

SEQ ID NO: 4021426 - DNA, 25 bp, Homo sapien
gaagcggacctgctcgatggcactt

SEQ ID NO: 4021427 - DNA, 25 bp, Homo sapien
ttcattaatctacccttgctgagag

SEQ ID NO: 4021428 - DNA, 25 bp, Homo sapien
cccactatctgagaatttcccagtt

SEQ ID NO: 4021429 - DNA, 25 bp, Homo sapien
ctggagggctgctccgtgccccctt

SEQ ID NO: 4021430 - DNA, 25 bp, Homo sapien
ctatctgagaatttcccagttgctt

SEQ ID NO: 4021431 - DNA, 25 bp, Homo sapien
caagcggacaatggacttcttgcag

SEQ ID NO: 4021432 - DNA, 25 bp, Homo sapien
tgccatcttgaatgacagtggtccg

SEQ ID NO: 4021433 - DNA, 25 bp, Homo sapien
ctcagacaggttccgcaccaagcgg

SEQ ID NO: 4021434 - DNA, 25 bp, Homo sapien
tacaatcgcaagagaccttcctcag

SEQ ID NO: 4021435 - DNA, 25 bp, Homo sapien
ttcctgcttctcctgatccatgatc

SEQ ID NO: 4021436 - DNA, 25 bp, Homo sapien
cctgcttctcctgatccatgatcat

SEQ ID NO: 4021437 - DNA, 25 bp, Homo sapien
gcttctcctgatccatgatcatctt

SEQ ID NO: 4021438 - DNA, 25 bp, Homo sapien
tgcttctcctgatccatgatcatct

SEQ ID NO: 4021439 - DNA, 25 bp, Homo sapien
ggtgacagcttctatgatcagattc

SEQ ID NO: 4021440 - DNA, 25 bp, Homo sapien
tgtggtttgtcttggcctgagctgt

SEQ ID NO: 4021441 - DNA, 25 bp, Homo sapien
cagattcctgcgtttcagcagtcgg

SEQ ID NO: 4021442 - DNA, 25 bp, Homo sapien
cgattaagcgaagattggtgacagc

SEQ ID NO: 4021443 - DNA, 25 bp, Homo sapien
cactgttgctgtccgcacagtggga

SEQ ID NO: 4021444 - DNA, 25 bp, Homo sapien
cctcgatcacagctatgtcaccact

SEQ ID NO: 4021445 - DNA, 25 bp, Homo sapien
gctgctggtatctaagaggctgtcc

SEQ ID NO: 4021446 - DNA, 25 bp, Homo sapien
agtgggagacaaaggacacgttggg

SEQ ID NO: 4021447 - DNA, 25 bp, Homo sapien
gcaaacaaaacacgtgccacgaaga

SEQ ID NO: 4021448 - DNA, 25 bp, Homo sapien
cccatgatgatgtggtacaagtgac

SEQ ID NO: 4021449 - DNA, 25 bp, Homo sapien
aagcagccaggagataccacaggac

SEQ ID NO: 4021450 - DNA, 25 bp, Homo sapien
cattaggatggcaccaagggcaacc

SEQ ID NO: 4021451 - DNA, 25 bp, Homo sapien
gctgggtcttgggccggaggtttgc

SEQ ID NO: 4021452 - DNA, 25 bp, Homo sapien
agaggctcttgtgtctttctgggac

SEQ ID NO: 4021453 - DNA, 25 bp, Homo sapien
cagaggctcttgtgtctttctggga

SEQ ID NO: 4021454 - DNA, 25 bp, Homo sapien
cttgggccggaggtttgcagaggct

SEQ ID NO: 4021455 - DNA, 25 bp, Homo sapien
agaagcgactcctcctgcatagacg

SEQ ID NO: 4021456 - DNA, 25 bp, Homo sapien
ccaggctcacggtggtcaagagctc

SEQ ID NO: 4021457 - DNA, 25 bp, Homo sapien
aaatgtacttggtggttcgctgccg

SEQ ID NO: 4021458 - DNA, 25 bp, Homo sapien
tggtactgccggcttaggtcgctct

SEQ ID NO: 4021459 - DNA, 25 bp, Homo sapien
cacattcatagccactcggatttca

SEQ ID NO: 4021460 - DNA, 25 bp, Homo sapien
tgaagaagtcggcacagcattcttg

SEQ ID NO: 4021461 - DNA, 25 bp, Homo sapien
gaaattcctttcgtgcctctgcgct

SEQ ID NO: 4021462 - DNA, 25 bp, Homo sapien
gccactcggatttcagcttgggaaa

SEQ ID NO: 4021463 - DNA, 25 bp, Homo sapien
tcttgactcaaattctcgggatcca

SEQ ID NO: 4021464 - DNA, 25 bp, Homo sapien
ggcaaagcgcttcttgactcaaatt

SEQ ID NO: 4021465 - DNA, 25 bp, Homo sapien
tatccaagctggcatgggaacaaga

SEQ ID NO: 4021466 - DNA, 25 bp, Homo sapien
aagctggcatgggaacaagacttac

SEQ ID NO: 4021467 - DNA, 25 bp, Homo sapien
tcgtaggtctgtgtgagcatatccc

SEQ ID NO: 4021468 - DNA, 25 bp, Homo sapien
cattccgtttaaattccttcagcag

SEQ ID NO: 4021469 - DNA, 25 bp, Homo sapien
gagcatatcccgctcgaacacaatg

SEQ ID NO: 4021470 - DNA, 25 bp, Homo sapien
ttgaggcaccgaaccatgacgtcgg

SEQ ID NO: 4021471 - DNA, 25 bp, Homo sapien
tggcaacacaagcacgggtttgcca

SEQ ID NO: 4021472 - DNA, 25 bp, Homo sapien
gtttgccagcaatgagtgaaagcag

SEQ ID NO: 4021473 - DNA, 25 bp, Homo sapien
cacgggtttgccagcaatgagtgaa

SEQ ID NO: 4021474 - DNA, 25 bp, Homo sapien
cacaagcacgggtttgccagcaatg

SEQ ID NO: 4021475 - DNA, 25 bp, Homo sapien
acacaacacatttccccgctgaggg

SEQ ID NO: 4021476 - DNA, 25 bp, Homo sapien
cacaacacatttccccgctgaggga

SEQ ID NO: 4021477 - DNA, 25 bp, Homo sapien
aacacaacacatttccccgctgagg

SEQ ID NO: 4021478 - DNA, 25 bp, Homo sapien
caacacatttccccgctgagggagg

SEQ ID NO: 4021479 - DNA, 25 bp, Homo sapien
gagaggtgggcaacagtatgggcaa

SEQ ID NO: 4021480 - DNA, 25 bp, Homo sapien
aggtgggcaacagtatgggcaaaga

SEQ ID NO: 4021481 - DNA, 25 bp, Homo sapien
agaggtgggcaacagtatgggcaaa

SEQ ID NO: 4021482 - DNA, 25 bp, Homo sapien
cagagaggtgggcaacagtatgggc

SEQ ID NO: 4021483 - DNA, 25 bp, Homo sapien
tgtcttacaaggtccacattcaggg

SEQ ID NO: 4021484 - DNA, 25 bp, Homo sapien
aagagacaccaccttggctagcccg

SEQ ID NO: 4021485 - DNA, 25 bp, Homo sapien
tcagggtggatctcttgcaagcgaa

SEQ ID NO: 4021486 - DNA, 25 bp, Homo sapien
cggcgttcagcatatactggtacag

SEQ ID NO: 4021487 - DNA, 25 bp, Homo sapien
ccatgaggatgtcgtatttgctcct

SEQ ID NO: 4021488 - DNA, 25 bp, Homo sapien
catgaccgaaagcttctccatgagg

SEQ ID NO: 4021489 - DNA, 25 bp, Homo sapien
tcccagcgtctctatgtggttagtc

SEQ ID NO: 4021490 - DNA, 25 bp, Homo sapien
tccgtgtgctcagcatgaccgaaag

SEQ ID NO: 4021491 - DNA, 25 bp, Homo sapien
cacatgggactgcattgtaatcagc

SEQ ID NO: 4021492 - DNA, 25 bp, Homo sapien
tttctgtgatagtgcagcttcccag

SEQ ID NO: 4021493 - DNA, 25 bp, Homo sapien
gggctccagtgggtaatcggatcac

SEQ ID NO: 4021494 - DNA, 25 bp, Homo sapien
tgtccacatgaaaccggttcagtag

SEQ ID NO: 4021495 - DNA, 25 bp, Homo sapien
ttccaggatgcagtaggagaagtcg

SEQ ID NO: 4021496 - DNA, 25 bp, Homo sapien
cagtggtgtgaaggtctcgctggag

SEQ ID NO: 4021497 - DNA, 25 bp, Homo sapien
tggaccggcctagccgttccaggat

SEQ ID NO: 4021498 - DNA, 25 bp, Homo sapien
tcgggcagcttcaggtcgggatccc

SEQ ID NO: 4021499 - DNA, 25 bp, Homo sapien
tgggaggcaacgatgatcagtttct

SEQ ID NO: 4021500 - DNA, 25 bp, Homo sapien
ggaggcaacgatgatcagtttcttc

SEQ ID NO: 4021501 - DNA, 25 bp, Homo sapien
ctgggaggcaacgatgatcagtttc

SEQ ID NO: 4021502 - DNA, 25 bp, Homo sapien
gaggcaacgatgatcagtttcttcc

SEQ ID NO: 4021503 - DNA, 25 bp, Homo sapien
caggacatcctcagtgcgcagaatg

SEQ ID NO: 4021504 - DNA, 25 bp, Homo sapien
catcgctgatgatggagactccacc

SEQ ID NO: 4021505 - DNA, 25 bp, Homo sapien
gaagactcatttctgtgctgacacc

SEQ ID NO: 4021506 - DNA, 25 bp, Homo sapien
tgaacggtgcaatcagtggacctgc

SEQ ID NO: 4021507 - DNA, 25 bp, Homo sapien
gaactgagagacatagcggtgaaca

SEQ ID NO: 4021508 - DNA, 25 bp, Homo sapien
ttctagaagccggctttgtgccagg

SEQ ID NO: 4021509 - DNA, 25 bp, Homo sapien
gcggtgaacaagaaggatagagtcc

SEQ ID NO: 4021510 - DNA, 25 bp, Homo sapien
gcctttgagcaacgtataatctagt

SEQ ID NO: 4021511 - DNA, 25 bp, Homo sapien
tccgagatgagagtagacagggaag

SEQ ID NO: 4021512 - DNA, 25 bp, Homo sapien
tcctccgagatgagagtagacaggg

SEQ ID NO: 4021513 - DNA, 25 bp, Homo sapien
ctcctccgagatgagagtagacagg

SEQ ID NO: 4021514 - DNA, 25 bp, Homo sapien
cctccgagatgagagtagacaggga

SEQ ID NO: 4021515 - DNA, 25 bp, Homo sapien
tattctctaagatcatatgaatggg

SEQ ID NO: 4021516 - DNA, 25 bp, Homo sapien
ggcatgagccctggatgccatcctt

SEQ ID NO: 4021517 - DNA, 25 bp, Homo sapien
tctccttaaagtagcggcatgagcc

SEQ ID NO: 4021518 - DNA, 25 bp, Homo sapien
aggcttccaccattgtacagcgagg

SEQ ID NO: 4021519 - DNA, 25 bp, Homo sapien
catagaagctgatgcccgggtgcgt

SEQ ID NO: 4021520 - DNA, 25 bp, Homo sapien
gctcccgaggctcctcatagaagct

SEQ ID NO: 4021521 - DNA, 25 bp, Homo sapien
agggcccgccagagaaactcctgcg

SEQ ID NO: 4021522 - DNA, 25 bp, Homo sapien
ccagagcgacttcgtccaacaacga

SEQ ID NO: 4021523 - DNA, 25 bp, Homo sapien
tgctacttcagtcggcggcgcccgg

SEQ ID NO: 4021524 - DNA, 25 bp, Homo sapien
gcgcaacgcaccgccaagggccttg

SEQ ID NO: 4021525 - DNA, 25 bp, Homo sapien
gcaacgcaccgccaagggccttggt

SEQ ID NO: 4021526 - DNA, 25 bp, Homo sapien
caacgcaccgccaagggccttggtc

SEQ ID NO: 4021527 - DNA, 25 bp, Homo sapien
gtgtggccaggttctcacacctgga

SEQ ID NO: 4021528 - DNA, 25 bp, Homo sapien
tgtgtggccaggttctcacacctgg

SEQ ID NO: 4021529 - DNA, 25 bp, Homo sapien
agtgtgtggccaggttctcacacct

SEQ ID NO: 4021530 - DNA, 25 bp, Homo sapien
gtgtgtggccaggttctcacacctg

SEQ ID NO: 4021531 - DNA, 25 bp, Homo sapien
tcttgtcacgtagctctggtcctct

SEQ ID NO: 4021532 - DNA, 25 bp, Homo sapien
cccccttgacctgggacatgtgctg

SEQ ID NO: 4021533 - DNA, 25 bp, Homo sapien
gctctggtcctctagcactgaacag

SEQ ID NO: 4021534 - DNA, 25 bp, Homo sapien
tcagcactttcttgtcacgtagctc

SEQ ID NO: 4021535 - DNA, 25 bp, Homo sapien
ttccattgatcatattggcctcctt

SEQ ID NO: 4021536 - DNA, 25 bp, Homo sapien
catctgagatttcaatgccagcccg

SEQ ID NO: 4021537 - DNA, 25 bp, Homo sapien
aatgccagcccgagacacttgggga

SEQ ID NO: 4021538 - DNA, 25 bp, Homo sapien
ggtgctcacttcttccattgatcat

SEQ ID NO: 4021539 - DNA, 25 bp, Homo sapien
agctgcccagttacgttaatatttt

SEQ ID NO: 4021540 - DNA, 25 bp, Homo sapien
ccgaggttcaggtgaatcttgtgcc

SEQ ID NO: 4021541 - DNA, 25 bp, Homo sapien
cgaggttcaggtgaatcttgtgcct

SEQ ID NO: 4021542 - DNA, 25 bp, Homo sapien
agttaagctgcccagttacgttaat

SEQ ID NO: 4021543 - DNA, 25 bp, Homo sapien
cagaaaaggtgatgtgcaggctact

SEQ ID NO: 4021544 - DNA, 25 bp, Homo sapien
cctaaagcaagtgggaagtggtagc

SEQ ID NO: 4021545 - DNA, 25 bp, Homo sapien
gaaggttgcaagatcatggtgccta

SEQ ID NO: 4021546 - DNA, 25 bp, Homo sapien
gagccataggttactccagggccct

SEQ ID NO: 4021547 - DNA, 25 bp, Homo sapien
ccgaacccgtacaccagaaactgct

SEQ ID NO: 4021548 - DNA, 25 bp, Homo sapien
attcctcaaggcaaggcaatgacct

SEQ ID NO: 4021549 - DNA, 25 bp, Homo sapien
gcaaggcaatgaccttgcaagggca

SEQ ID NO: 4021550 - DNA, 25 bp, Homo sapien
tcctctggatgcttcgaagattcct

SEQ ID NO: 4021551 - DNA, 25 bp, Homo sapien
tgagaagcagccagaagagctgagt

SEQ ID NO: 4021552 - DNA, 25 bp, Homo sapien
cttgagaagcagccagaagagctga

SEQ ID NO: 4021553 - DNA, 25 bp, Homo sapien
ttgagaagcagccagaagagctgag

SEQ ID NO: 4021554 - DNA, 25 bp, Homo sapien
agaagcagccagaagagctgagtgg

SEQ ID NO: 4021555 - DNA, 25 bp, Homo sapien
ttccgctgtccgctccaggagcacc

SEQ ID NO: 4021556 - DNA, 25 bp, Homo sapien
tccgctgtccgctccaggagcacca

SEQ ID NO: 4021557 - DNA, 25 bp, Homo sapien
aacttccgctgtccgctccaggagc

SEQ ID NO: 4021558 - DNA, 25 bp, Homo sapien
tccaacttccgctgtccgctccagg

SEQ ID NO: 4021559 - DNA, 25 bp, Homo sapien
gaaggctgtgacttttgtactgtaa

SEQ ID NO: 4021560 - DNA, 25 bp, Homo sapien
ttgaaggaaggctgtgacttttgta

SEQ ID NO: 4021561 - DNA, 25 bp, Homo sapien
gctgtgacttttgtactgtaagata

SEQ ID NO: 4021562 - DNA, 25 bp, Homo sapien
ttttgtactgtaagatacatttgga

SEQ ID NO: 4021563 - DNA, 25 bp, Homo sapien
cggctgcctaggacaccattgggaa

SEQ ID NO: 4021564 - DNA, 25 bp, Homo sapien
ggcctctaggaatggtgcctcaaaa

SEQ ID NO: 4021565 - DNA, 25 bp, Homo sapien
caaaagcatggccacttagcctggg

SEQ ID NO: 4021566 - DNA, 25 bp, Homo sapien
tcgggtgcttacgaagtccttgggc

SEQ ID NO: 4021567 - DNA, 25 bp, Homo sapien
ggttggtatgcagcagcgcacctcc

SEQ ID NO: 4021568 - DNA, 25 bp, Homo sapien
cagctgtggagaactttgagtcaac

SEQ ID NO: 4021569 - DNA, 25 bp, Homo sapien
gtggagaactttgagtcaactaaac

SEQ ID NO: 4021570 - DNA, 25 bp, Homo sapien
tgcccagcatgcttccccctttact

SEQ ID NO: 4021571 - DNA, 25 bp, Homo sapien
caaaactgccaaccaaatgagagac

SEQ ID NO: 4021572 - DNA, 25 bp, Homo sapien
catggtccaggcagattaataatat

SEQ ID NO: 4021573 - DNA, 25 bp, Homo sapien
tatcacaactagcaatatatgccag

SEQ ID NO: 4021574 - DNA, 25 bp, Homo sapien
gcatccaagcttctaataggcagat

SEQ ID NO: 4021575 - DNA, 25 bp, Homo sapien
taaacagcaggtcgcctaggaactc

SEQ ID NO: 4021576 - DNA, 25 bp, Homo sapien
ggattactagttttacagctgccga

SEQ ID NO: 4021577 - DNA, 25 bp, Homo sapien
gaggagcagtgaatctgttgcccct

SEQ ID NO: 4021578 - DNA, 25 bp, Homo sapien
gagttgggccaagcataagagccaa

SEQ ID NO: 4021579 - DNA, 25 bp, Homo sapien
ttcaaacagaatgctcacagagtgc

SEQ ID NO: 4021580 - DNA, 25 bp, Homo sapien
gacaaacagagaatgagggcagacg

SEQ ID NO: 4021581 - DNA, 25 bp, Homo sapien
caaagctttatgtgtcgccccacga

SEQ ID NO: 4021582 - DNA, 25 bp, Homo sapien
cacagagtgccagttacacagggcc

SEQ ID NO: 4021583 - DNA, 25 bp, Homo sapien
tcttggctgtgtattcccatgcatt

SEQ ID NO: 4021584 - DNA, 25 bp, Homo sapien
cttcttggctgtgtattcccatgca

SEQ ID NO: 4021585 - DNA, 25 bp, Homo sapien
tgttaagggtatgagtggagggagg

SEQ ID NO: 4021586 - DNA, 25 bp, Homo sapien
tgcttcttggctgtgtattcccatg

SEQ ID NO: 4021587 - DNA, 25 bp, Homo sapien
gcaaaatcactatcagaatctctgc

SEQ ID NO: 4021588 - DNA, 25 bp, Homo sapien
aaactggaaaagcatcccctgttca

SEQ ID NO: 4021589 - DNA, 25 bp, Homo sapien
cagaagacaacattgtcgagatggt

SEQ ID NO: 4021590 - DNA, 25 bp, Homo sapien
gatttctttgtacaagttgacaagc

SEQ ID NO: 4021591 - DNA, 25 bp, Homo sapien
ggtttccaagtgaaagaagccatga

SEQ ID NO: 4021592 - DNA, 25 bp, Homo sapien
gggtttccaagtgaaagaagccatg

SEQ ID NO: 4021593 - DNA, 25 bp, Homo sapien
tggggtttccaagtgaaagaagcca

SEQ ID NO: 4021594 - DNA, 25 bp, Homo sapien
ccgaggggttttcccagcatgtgcc

SEQ ID NO: 4021595 - DNA, 25 bp, Homo sapien
accgaggggttttcccagcatgtgc

SEQ ID NO: 4021596 - DNA, 25 bp, Homo sapien
gaagttcttgtagagctggagaaac

SEQ ID NO: 4021597 - DNA, 25 bp, Homo sapien
tgtggtttcttgacccctcgcagct

SEQ ID NO: 4021598 - DNA, 25 bp, Homo sapien
gggatgtggtttcttgacccctcgc

SEQ ID NO: 4021599 - DNA, 25 bp, Homo sapien
gctgcccagagcactagaagttctt

SEQ ID NO: 4021600 - DNA, 25 bp, Homo sapien
aagtacagtaatgagaaggggtgat

SEQ ID NO: 4021601 - DNA, 25 bp, Homo sapien
cagtaatgagaaggggtgatagaat

SEQ ID NO: 4021602 - DNA, 25 bp, Homo sapien
agaatggaaaaaggagttagatctg

SEQ ID NO: 4021603 - DNA, 25 bp, Homo sapien
gtgatagaatggaaaaaggagttag

SEQ ID NO: 4021604 - DNA, 25 bp, Homo sapien
gagcctggaatacctgacccgtctt

SEQ ID NO: 4021605 - DNA, 25 bp, Homo sapien
gcagtacttgtctggaccctgaatg

SEQ ID NO: 4021606 - DNA, 25 bp, Homo sapien
cttctgatgtacaaacaggcacccc

SEQ ID NO: 4021607 - DNA, 25 bp, Homo sapien
caatgtgttcggttttggtcctcac

SEQ ID NO: 4021608 - DNA, 25 bp, Homo sapien
gcaaatcacgtgacccagagtcagg

SEQ ID NO: 4021609 - DNA, 25 bp, Homo sapien
gagttaccttggcaccacgaaggag

SEQ ID NO: 4021610 - DNA, 25 bp, Homo sapien
tgatgcggcgagaagcccatgtgca

SEQ ID NO: 4021611 - DNA, 25 bp, Homo sapien
cactttgcacgtgaatgatgcggcg

SEQ ID NO: 4021612 - DNA, 25 bp, Homo sapien
caaaacctgcatcagcgagaaggag

SEQ ID NO: 4021613 - DNA, 25 bp, Homo sapien
gtcccaaaacctgcatcagcgagaa

SEQ ID NO: 4021614 - DNA, 25 bp, Homo sapien
catcagcgagaaggagacgagacga

SEQ ID NO: 4021615 - DNA, 25 bp, Homo sapien
cctgcatcagcgagaaggagacgag

SEQ ID NO: 4021616 - DNA, 25 bp, Homo sapien
gatggcactaacacgacacaagctc

SEQ ID NO: 4021617 - DNA, 25 bp, Homo sapien
gaggtacgttcctatgcaaccgaga

SEQ ID NO: 4021618 - DNA, 25 bp, Homo sapien
gctcgagcagctatgcaaacgcgct

SEQ ID NO: 4021619 - DNA, 25 bp, Homo sapien
aaccagtgccgctgcattaaaggga

SEQ ID NO: 4021620 - DNA, 25 bp, Homo sapien
gaacccaggctcacgacaatagatg

SEQ ID NO: 4021621 - DNA, 25 bp, Homo sapien
tattctgtgcccatagttgcggtga

SEQ ID NO: 4021622 - DNA, 25 bp, Homo sapien
caagctgaccctgtaacctgagagt

SEQ ID NO: 4021623 - DNA, 25 bp, Homo sapien
taattggttcctgaatctgcccgca

SEQ ID NO: 4021624 - DNA, 25 bp, Homo sapien
gctgactgagttcacggcacacagg

SEQ ID NO: 4021625 - DNA, 25 bp, Homo sapien
tcatgtgatgatggcaagagtccgg

SEQ ID NO: 4021626 - DNA, 25 bp, Homo sapien
gctgctgtcccaaagtcactctgtg

SEQ ID NO: 4021627 - DNA, 25 bp, Homo sapien
tgtgtctcctggcatcgcagctgtg

SEQ ID NO: 4021628 - DNA, 25 bp, Homo sapien
actgtcggttcagctctggtgcttc

SEQ ID NO: 4021629 - DNA, 25 bp, Homo sapien
ccaggaatccgccatgtgtggctgg

SEQ ID NO: 4021630 - DNA, 25 bp, Homo sapien
agacccagcactgtcggttcagctc

SEQ ID NO: 4021631 - DNA, 25 bp, Homo sapien
tccggggccaggaatccgccatgtg

SEQ ID NO: 4021632 - DNA, 25 bp, Homo sapien
ctgttgtgtacggatattagaaggg

SEQ ID NO: 4021633 - DNA, 25 bp, Homo sapien
gttcaggagctgttgtgtacggata

SEQ ID NO: 4021634 - DNA, 25 bp, Homo sapien
tgtctcctaggtccccaagtccttg

SEQ ID NO: 4021635 - DNA, 25 bp, Homo sapien
ccccatttgccttatatgtgttcag

SEQ ID NO: 4021636 - DNA, 25 bp, Homo sapien
gcccatgaatctgtcgtagcagata

SEQ ID NO: 4021637 - DNA, 25 bp, Homo sapien
catctgtaacgtgtttgtgggagaa

SEQ ID NO: 4021638 - DNA, 25 bp, Homo sapien
taccctgagacaccagactcagttt

SEQ ID NO: 4021639 - DNA, 25 bp, Homo sapien
gaatctgtcgtagcagatacccaca

SEQ ID NO: 4021640 - DNA, 25 bp, Homo sapien
tctcgtggcggcagtctaagtgaaa

SEQ ID NO: 4021641 - DNA, 25 bp, Homo sapien
gggcagggtatctctcgtggcggca

SEQ ID NO: 4021642 - DNA, 25 bp, Homo sapien
ctctcgtggcggcagtctaagtgaa

SEQ ID NO: 4021643 - DNA, 25 bp, Homo sapien
ggtatctctcgtggcggcagtctaa

SEQ ID NO: 4021644 - DNA, 25 bp, Homo sapien
ctccatcatctcagggttgtggtgg

SEQ ID NO: 4021645 - DNA, 25 bp, Homo sapien
catgttccctcattgcacacatgca

SEQ ID NO: 4021646 - DNA, 25 bp, Homo sapien
gaaccggtggggtcatgttccctca

SEQ ID NO: 4021647 - DNA, 25 bp, Homo sapien
catttgtaacccaggtaaattccag

SEQ ID NO: 4021648 - DNA, 25 bp, Homo sapien
ggtggggtcatgttccctcattgca

SEQ ID NO: 4021649 - DNA, 25 bp, Homo sapien
ccacaatagccaggggcgttatcag

SEQ ID NO: 4021650 - DNA, 25 bp, Homo sapien
cctgattccagggccgaatgtggcc

SEQ ID NO: 4021651 - DNA, 25 bp, Homo sapien
cagggccgaatgtggccacaatagc

SEQ ID NO: 4021652 - DNA, 25 bp, Homo sapien
gcgttatcagggggcctaccaggcc

SEQ ID NO: 4021653 - DNA, 25 bp, Homo sapien
tgacctggggcaagtcgccctccct

SEQ ID NO: 4021654 - DNA, 25 bp, Homo sapien
gggcaagtcgccctccctctctgtg

SEQ ID NO: 4021655 - DNA, 25 bp, Homo sapien
ccctctctgtgcctcgatttgccac

SEQ ID NO: 4021656 - DNA, 25 bp, Homo sapien
cctggggcaagtcgccctccctctc

SEQ ID NO: 4021657 - DNA, 25 bp, Homo sapien
taggtgctgctactgattgggatag

SEQ ID NO: 4021658 - DNA, 25 bp, Homo sapien
aggtgctgctactgattgggatagg

SEQ ID NO: 4021659 - DNA, 25 bp, Homo sapien
ggtgctgctactgattgggataggc

SEQ ID NO: 4021660 - DNA, 25 bp, Homo sapien
ctaggtgctgctactgattgggata

SEQ ID NO: 4021661 - DNA, 25 bp, Homo sapien
tcaatgaccgtcttggtgtaggagt

SEQ ID NO: 4021662 - DNA, 25 bp, Homo sapien
agaccttgcgcttgtgccggaactc

SEQ ID NO: 4021663 - DNA, 25 bp, Homo sapien
gcctcagggtctatgaaggtcggct

SEQ ID NO: 4021664 - DNA, 25 bp, Homo sapien
cggaagtacttgatggcctcagggt

SEQ ID NO: 4021665 - DNA, 25 bp, Homo sapien
ctgccatgcagcaggtaaaggagcc

SEQ ID NO: 4021666 - DNA, 25 bp, Homo sapien
ctcagttttgctgttccaaccctgc

SEQ ID NO: 4021667 - DNA, 25 bp, Homo sapien
gctcctggatccctgttcttcagtc

SEQ ID NO: 4021668 - DNA, 25 bp, Homo sapien
tttgctgttccaaccctgcatttcc

SEQ ID NO: 4021669 - DNA, 25 bp, Homo sapien
gcccacccagctggtttctaaacat

SEQ ID NO: 4021670 - DNA, 25 bp, Homo sapien
ttagcagcttgtacttctgaactgg

SEQ ID NO: 4021671 - DNA, 25 bp, Homo sapien
gcagattggacaccatagggagaaa

SEQ ID NO: 4021672 - DNA, 25 bp, Homo sapien
ggcacacggagctgcgtgggtgatt

SEQ ID NO: 4021673 - DNA, 25 bp, Homo sapien
tgattggcctggtttccggagccaa

SEQ ID NO: 4021674 - DNA, 25 bp, Homo sapien
catggagaccttctacttcttgcaa

SEQ ID NO: 4021675 - DNA, 25 bp, Homo sapien
gtccctctaagaaaccggcactcaa

SEQ ID NO: 4021676 - DNA, 25 bp, Homo sapien
tcaaccggctttgagcgcctcaaaa

SEQ ID NO: 4021677 - DNA, 25 bp, Homo sapien
tacttcttgcaaaggtgtccctcta

SEQ ID NO: 4021678 - DNA, 25 bp, Homo sapien
catgtgggcgaccattcccaggagg

SEQ ID NO: 4021679 - DNA, 25 bp, Homo sapien
aggaccacccgtagtcccaggaatg

SEQ ID NO: 4021680 - DNA, 25 bp, Homo sapien
tcctcaggaccgaggctcacggtga

SEQ ID NO: 4021681 - DNA, 25 bp, Homo sapien
gaacacctgcgtgtacatcatgtgg

SEQ ID NO: 4021682 - DNA, 25 bp, Homo sapien
gggaccagcaaagaaagctgaggca

SEQ ID NO: 4021683 - DNA, 25 bp, Homo sapien
ccaggatgaagccaacatctgatat

SEQ ID NO: 4021684 - DNA, 25 bp, Homo sapien
ctgatattaagcagagcaggaggga

SEQ ID NO: 4021685 - DNA, 25 bp, Homo sapien
ctgagggaaaaccagcgtggagtct

SEQ ID NO: 4021686 - DNA, 25 bp, Homo sapien
ggcaagatgcttgcatgatgaaagg

SEQ ID NO: 4021687 - DNA, 25 bp, Homo sapien
caagatgcttgcatgatgaaaggca

SEQ ID NO: 4021688 - DNA, 25 bp, Homo sapien
gaggcaagatgcttgcatgatgaaa

SEQ ID NO: 4021689 - DNA, 25 bp, Homo sapien
tgaggcaagatgcttgcatgatgaa

SEQ ID NO: 4021690 - DNA, 25 bp, Homo sapien
tgggctgcggttaccccagtctgca

SEQ ID NO: 4021691 - DNA, 25 bp, Homo sapien
cctcgtcctgaatcgggcttggtcg

SEQ ID NO: 4021692 - DNA, 25 bp, Homo sapien
taggactaggacaccccttcaatca

SEQ ID NO: 4021693 - DNA, 25 bp, Homo sapien
gtgaagccacagagaccctaggtca

SEQ ID NO: 4021694 - DNA, 25 bp, Homo sapien
acattccctcccaggccactcaagg

SEQ ID NO: 4021695 - DNA, 25 bp, Homo sapien
ggccactcaaggcatcttgagtttc

SEQ ID NO: 4021696 - DNA, 25 bp, Homo sapien
gggttggaaggccagcatgtgttca

SEQ ID NO: 4021697 - DNA, 25 bp, Homo sapien
tcttgagtttcagcctccgagaagg

SEQ ID NO: 4021698 - DNA, 25 bp, Homo sapien
tgcaggaattttccgaacgactttc

SEQ ID NO: 4021699 - DNA, 25 bp, Homo sapien
ctgtgcaggaattttccgaacgact

SEQ ID NO: 4021700 - DNA, 25 bp, Homo sapien
ttccttagtggatcagcctcaattt

SEQ ID NO: 4021701 - DNA, 25 bp, Homo sapien
tgtgcaggaattttccgaacgactt

SEQ ID NO: 4021702 - DNA, 25 bp, Homo sapien
agagcaccgtgaagacagccgcgaa

SEQ ID NO: 4021703 - DNA, 25 bp, Homo sapien
gacagccgcgaaggcattgagcttg

SEQ ID NO: 4021704 - DNA, 25 bp, Homo sapien
gagcttgagcccgtcgatgacattg

SEQ ID NO: 4021705 - DNA, 25 bp, Homo sapien
gagcccgtcgatgacattgctggag

SEQ ID NO: 4021706 - DNA, 25 bp, Homo sapien
agaatgtacagcacctcggagacca

SEQ ID NO: 4021707 - DNA, 25 bp, Homo sapien
acagcacctcggagaccacagacag

SEQ ID NO: 4021708 - DNA, 25 bp, Homo sapien
aatgtacagcacctcggagaccaca

SEQ ID NO: 4021709 - DNA, 25 bp, Homo sapien
tgtacagcacctcggagaccacaga

SEQ ID NO: 4021710 - DNA, 25 bp, Homo sapien
tgcccctcatcatggcgctgctcac

SEQ ID NO: 4021711 - DNA, 25 bp, Homo sapien
gcccctcatcatggcgctgctcact

SEQ ID NO: 4021712 - DNA, 25 bp, Homo sapien
tgctgatgctcctatcgctgggttt

SEQ ID NO: 4021713 - DNA, 25 bp, Homo sapien
tgctcctatcgctgggtttccagcc

SEQ ID NO: 4021714 - DNA, 25 bp, Homo sapien
tcgcggaaggacaggaagtcagaac

SEQ ID NO: 4021715 - DNA, 25 bp, Homo sapien
tcgccttagtgatgccgggaaagcc

SEQ ID NO: 4021716 - DNA, 25 bp, Homo sapien
tcagaacagaccagtctctcagcag

SEQ ID NO: 4021717 - DNA, 25 bp, Homo sapien
tcttagtgctgtggaatgcaagctc

SEQ ID NO: 4021718 - DNA, 25 bp, Homo sapien
tgatggtactccaactcagtctccc

SEQ ID NO: 4021719 - DNA, 25 bp, Homo sapien
tgtggcctgatggtactccaactca

SEQ ID NO: 4021720 - DNA, 25 bp, Homo sapien
tccccatcctgagcactaatgcaat

SEQ ID NO: 4021721 - DNA, 25 bp, Homo sapien
ccccatcctgagcactaatgcaatt

SEQ ID NO: 4021722 - DNA, 25 bp, Homo sapien
acagcagtgactgcacaaacccaga

SEQ ID NO: 4021723 - DNA, 25 bp, Homo sapien
aacagcagtgactgcacaaacccag

SEQ ID NO: 4021724 - DNA, 25 bp, Homo sapien
acagaacaggacttggatccagtcc

SEQ ID NO: 4021725 - DNA, 25 bp, Homo sapien
tgcagacagaacaggacttggatcc

SEQ ID NO: 4021726 - DNA, 25 bp, Homo sapien
gggaatgcagacagaacaggacttg

SEQ ID NO: 4021727 - DNA, 25 bp, Homo sapien
gaatgcagacagaacaggacttgga

SEQ ID NO: 4021728 - DNA, 25 bp, Homo sapien
cttcccacctctccaccaaagccca

SEQ ID NO: 4021729 - DNA, 25 bp, Homo sapien
catcaacttttcttcccacctctcc

SEQ ID NO: 4021730 - DNA, 25 bp, Homo sapien
ttcccacctctccaccaaagcccat

SEQ ID NO: 4021731 - DNA, 25 bp, Homo sapien
ctccatcaacttttcttcccacctc

SEQ ID NO: 4021732 - DNA, 25 bp, Homo sapien
ttgaggccatggagctttctagttc

SEQ ID NO: 4021733 - DNA, 25 bp, Homo sapien
cagtcttattgccatggatgatgaa

SEQ ID NO: 4021734 - DNA, 25 bp, Homo sapien
tggagctttctagttcatcagtctt

SEQ ID NO: 4021735 - DNA, 25 bp, Homo sapien
gccatggagctttctagttcatcag

SEQ ID NO: 4021736 - DNA, 25 bp, Homo sapien
gttgaggaccctgccttgatcgtac

SEQ ID NO: 4021737 - DNA, 25 bp, Homo sapien
gccccttctcaagttgaggaccctg

SEQ ID NO: 4021738 - DNA, 25 bp, Homo sapien
tgtcttatgcggcagccccttctca

SEQ ID NO: 4021739 - DNA, 25 bp, Homo sapien
tcttatgcggcagccccttctcaag

SEQ ID NO: 4021740 - DNA, 25 bp, Homo sapien
ggtctcctgcagcccagattatacc

SEQ ID NO: 4021741 - DNA, 25 bp, Homo sapien
tcctgccagcatgggtctcctgcag

SEQ ID NO: 4021742 - DNA, 25 bp, Homo sapien
cctctcctgccagcatgggtctcct

SEQ ID NO: 4021743 - DNA, 25 bp, Homo sapien
cattaccttcctctcctgccagcat

SEQ ID NO: 4021744 - DNA, 25 bp, Homo sapien
tttaaaagcgagctatgggccaggc

SEQ ID NO: 4021745 - DNA, 25 bp, Homo sapien
aataaatgtacagggcaggaaagtc

SEQ ID NO: 4021746 - DNA, 25 bp, Homo sapien
ccagcacgcaggtcattagttccat

SEQ ID NO: 4021747 - DNA, 25 bp, Homo sapien
tgagaactccacaggaaatcatgag

SEQ ID NO: 4021748 - DNA, 25 bp, Homo sapien
tctgctcctgtggctctcaaggctc

SEQ ID NO: 4021749 - DNA, 25 bp, Homo sapien
ggctctcaaggctccagccagtgtt

SEQ ID NO: 4021750 - DNA, 25 bp, Homo sapien
gcctggacagcttttggaaatctcc

SEQ ID NO: 4021751 - DNA, 25 bp, Homo sapien
gctgcctggacagcttttggaaatc

SEQ ID NO: 4021752 - DNA, 25 bp, Homo sapien
ctgacacccctcatgcacgagaagg

SEQ ID NO: 4021753 - DNA, 25 bp, Homo sapien
gagatgcttccaacatggcgctcct

SEQ ID NO: 4021754 - DNA, 25 bp, Homo sapien
gtcacttagctatgtccactgagca

SEQ ID NO: 4021755 - DNA, 25 bp, Homo sapien
ccttgagcaaggcagttgacctctc

SEQ ID NO: 4021756 - DNA, 25 bp, Homo sapien
tagctcagatgtcagtttgggcagc

SEQ ID NO: 4021757 - DNA, 25 bp, Homo sapien
tgtaaatcgatttcaggcggagaac

SEQ ID NO: 4021758 - DNA, 25 bp, Homo sapien
tcaagagtgtgaccatggagccaac

SEQ ID NO: 4021759 - DNA, 25 bp, Homo sapien
aaatgactcacgcaagactcaagag

SEQ ID NO: 4021760 - DNA, 25 bp, Homo sapien
gtcaatgaagctgcgacatttttca

SEQ ID NO: 4021761 - DNA, 25 bp, Homo sapien
ctttctccgatgccggggccaggtc

SEQ ID NO: 4021762 - DNA, 25 bp, Homo sapien
gggccaggtcaatgaagctgcgaca

SEQ ID NO: 4021763 - DNA, 25 bp, Homo sapien
caggtcaatgaagctgcgacatttt

SEQ ID NO: 4021764 - DNA, 25 bp, Homo sapien
ggcttattgcccatttctatatctt

SEQ ID NO: 4021765 - DNA, 25 bp, Homo sapien
ttcatgggcttattgcccatttcta

SEQ ID NO: 4021766 - DNA, 25 bp, Homo sapien
tattatgggtgattagttctttata

SEQ ID NO: 4021767 - DNA, 25 bp, Homo sapien
tccttttattatgggtgattagttc

SEQ ID NO: 4021768 - DNA, 25 bp, Homo sapien
tgctggccagattcaaggaattcag

SEQ ID NO: 4021769 - DNA, 25 bp, Homo sapien
tttgctggccagattcaaggaattc

SEQ ID NO: 4021770 - DNA, 25 bp, Homo sapien
ttgctggccagattcaaggaattca

SEQ ID NO: 4021771 - DNA, 25 bp, Homo sapien
ctttgctggccagattcaaggaatt

SEQ ID NO: 4021772 - DNA, 25 bp, Homo sapien
aacacagactaacacgactccttga

SEQ ID NO: 4021773 - DNA, 25 bp, Homo sapien
aacacgatgctttccgctcagcctg

SEQ ID NO: 4021774 - DNA, 25 bp, Homo sapien
gcagaagcagaagctaacacgatgc

SEQ ID NO: 4021775 - DNA, 25 bp, Homo sapien
taacacgactccttgaggaacacag

SEQ ID NO: 4021776 - DNA, 25 bp, Homo sapien
ccaagtttagtgtgtgtgctgccag

SEQ ID NO: 4021777 - DNA, 25 bp, Homo sapien
gtttagtgtgtgtgctgccagagca

SEQ ID NO: 4021778 - DNA, 25 bp, Homo sapien
atgtgtgtgttatccttgcacagag

SEQ ID NO: 4021779 - DNA, 25 bp, Homo sapien
caagtttagtgtgtgtgctgccaga

SEQ ID NO: 4021780 - DNA, 25 bp, Homo sapien
tcccatgccctcttccagaaaagga

SEQ ID NO: 4021781 - DNA, 25 bp, Homo sapien
cctcccatgccctcttccagaaaag

SEQ ID NO: 4021782 - DNA, 25 bp, Homo sapien
agcctcccatgccctcttccagaaa

SEQ ID NO: 4021783 - DNA, 25 bp, Homo sapien
tcagcctcccatgccctcttccaga

SEQ ID NO: 4021784 - DNA, 25 bp, Homo sapien
tcagagataccacgtctttcgggcc

SEQ ID NO: 4021785 - DNA, 25 bp, Homo sapien
ataccacgtctttcgggccagctct

SEQ ID NO: 4021786 - DNA, 25 bp, Homo sapien
cagagataccacgtctttcgggcca

SEQ ID NO: 4021787 - DNA, 25 bp, Homo sapien
gagataccacgtctttcgggccagc

SEQ ID NO: 4021788 - DNA, 25 bp, Homo sapien
tgtggcacaaccagctgtccggcag

SEQ ID NO: 4021789 - DNA, 25 bp, Homo sapien
ctccaaaacacgcactccagcccag

SEQ ID NO: 4021790 - DNA, 25 bp, Homo sapien
tgtctgcctccaaaacacgcactcc

SEQ ID NO: 4021791 - DNA, 25 bp, Homo sapien
gcacaaccagctgtccggcagctgt

SEQ ID NO: 4021792 - DNA, 25 bp, Homo sapien
cctggactcctcgacccggagtttg

SEQ ID NO: 4021793 - DNA, 25 bp, Homo sapien
agagggctccctggcgtctggcaat

SEQ ID NO: 4021794 - DNA, 25 bp, Homo sapien
gggccaggatacagagggctccctg

SEQ ID NO: 4021795 - DNA, 25 bp, Homo sapien
cagttccctagcctgcctctcccag

SEQ ID NO: 4021796 - DNA, 25 bp, Homo sapien
gcgtgggttggcgatgggggtggaa

SEQ ID NO: 4021797 - DNA, 25 bp, Homo sapien
gtggaaggctcccgggtctgtggat

SEQ ID NO: 4021798 - DNA, 25 bp, Homo sapien
tcggcgtgggttggcgatgggggtg

SEQ ID NO: 4021799 - DNA, 25 bp, Homo sapien
ggtggaaggctcccgggtctgtgga

SEQ ID NO: 4021800 - DNA, 25 bp, Homo sapien
caagcccgctgagctcctcctcgca

SEQ ID NO: 4021801 - DNA, 25 bp, Homo sapien
cgagtaccagatgccggtgtggaaa

SEQ ID NO: 4021802 - DNA, 25 bp, Homo sapien
ccgctgagctcctcctcgcacgagt

SEQ ID NO: 4021803 - DNA, 25 bp, Homo sapien
gctcctcctcgcacgagtaccagat

SEQ ID NO: 4021804 - DNA, 25 bp, Homo sapien
aagaggaagcggtcgtcgccggtct

SEQ ID NO: 4021805 - DNA, 25 bp, Homo sapien
gaggaagcggtcgtcgccggtctcc

SEQ ID NO: 4021806 - DNA, 25 bp, Homo sapien
ctgaagaggaagcggtcgtcgccgg

SEQ ID NO: 4021807 - DNA, 25 bp, Homo sapien
ggaagcggtcgtcgccggtctccca

SEQ ID NO: 4021808 - DNA, 25 bp, Homo sapien
ggccgtggcgttggcgcccgagttg

SEQ ID NO: 4021809 - DNA, 25 bp, Homo sapien
ggggcagttggcgcgcccgccctgg

SEQ ID NO: 4021810 - DNA, 25 bp, Homo sapien
tggcgcccgagttggggcagttggc

SEQ ID NO: 4021811 - DNA, 25 bp, Homo sapien
cgttggcgcccgagttggggcagtt

SEQ ID NO: 4021812 - DNA, 25 bp, Homo sapien
tgaggaaagcggtggtggcgaacag

SEQ ID NO: 4021813 - DNA, 25 bp, Homo sapien
aggaaagcggtggtggcgaacagca

SEQ ID NO: 4021814 - DNA, 25 bp, Homo sapien
tggtgaggaaagcggtggtggcgaa

SEQ ID NO: 4021815 - DNA, 25 bp, Homo sapien
gtgaggaaagcggtggtggcgaaca

SEQ ID NO: 4021816 - DNA, 25 bp, Homo sapien
agctccgcgcgcgaagttggcagct

SEQ ID NO: 4021817 - DNA, 25 bp, Homo sapien
ccgccgggacgggactgcaccgccg

SEQ ID NO: 4021818 - DNA, 25 bp, Homo sapien
gggagctccgcgcgcgaagttggca

SEQ ID NO: 4021819 - DNA, 25 bp, Homo sapien
cgccgggacgggactgcaccgccgg

SEQ ID NO: 4021820 - DNA, 25 bp, Homo sapien
tcgggtgcctgagatcggcggcggc

SEQ ID NO: 4021821 - DNA, 25 bp, Homo sapien
gtgtctaacaggaccgcacgtgctg

SEQ ID NO: 4021822 - DNA, 25 bp, Homo sapien
gacccatgtctggtttcgtgtctaa

SEQ ID NO: 4021823 - DNA, 25 bp, Homo sapien
caagatattcatgccggcggagggt

SEQ ID NO: 4021824 - DNA, 25 bp, Homo sapien
gatcacacaggaatgcagagaccac

SEQ ID NO: 4021825 - DNA, 25 bp, Homo sapien
tattagagctgcaaacgatacctca

SEQ ID NO: 4021826 - DNA, 25 bp, Homo sapien
ggatagccctcatttcatcttgaaa

SEQ ID NO: 4021827 - DNA, 25 bp, Homo sapien
gacatgagaatctcgttctgtggag

SEQ ID NO: 4021828 - DNA, 25 bp, Homo sapien
ccatacttggtttgagtggctatta

SEQ ID NO: 4021829 - DNA, 25 bp, Homo sapien
gagctgagagaatcgctggagccct

SEQ ID NO: 4021830 - DNA, 25 bp, Homo sapien
ctgagagaatcgctggagccctgga

SEQ ID NO: 4021831 - DNA, 25 bp, Homo sapien
agactgggcaatatggacaaacccc

SEQ ID NO: 4021832 - DNA, 25 bp, Homo sapien
ccagactgggcaatatggacaaacc

SEQ ID NO: 4021833 - DNA, 25 bp, Homo sapien
ctcttctgtctacctgggagtgtgg

SEQ ID NO: 4021834 - DNA, 25 bp, Homo sapien
ctacctgggagtgtggctgtgcagt

SEQ ID NO: 4021835 - DNA, 25 bp, Homo sapien
ttctgtctacctgggagtgtggctg

SEQ ID NO: 4021836 - DNA, 25 bp, Homo sapien
ggaggaggaacgtgtcttcctggag

SEQ ID NO: 4021837 - DNA, 25 bp, Homo sapien
tggtgcctcctagtacctggccaca

SEQ ID NO: 4021838 - DNA, 25 bp, Homo sapien
gccaaggagtgtgaccaaggcccat

SEQ ID NO: 4021839 - DNA, 25 bp, Homo sapien
aaggtggcactgtcgtgagctgtcc

SEQ ID NO: 4021840 - DNA, 25 bp, Homo sapien
tgagctgtccttggcaattctgccc

SEQ ID NO: 4021841 - DNA, 25 bp, Homo sapien
ggtcgttgaccagcctgtgcacatt

SEQ ID NO: 4021842 - DNA, 25 bp, Homo sapien
gcaggctgtcgttgcagagtctgta

SEQ ID NO: 4021843 - DNA, 25 bp, Homo sapien
tcgttgcagagtctgtagtagcgca

SEQ ID NO: 4021844 - DNA, 25 bp, Homo sapien
tctgtagtagcgcaggtcgttgacc

SEQ ID NO: 4021845 - DNA, 25 bp, Homo sapien
caagaggaatacgtccctagggcct

SEQ ID NO: 4021846 - DNA, 25 bp, Homo sapien
ggagtaacaggacccacacttcaga

SEQ ID NO: 4021847 - DNA, 25 bp, Homo sapien
tcgggacctccatggctgagactaa

SEQ ID NO: 4021848 - DNA, 25 bp, Homo sapien
gaccaaagcgctgcaccatgaagaa

SEQ ID NO: 4021849 - DNA, 25 bp, Homo sapien
gaggaaggcggcaaagaagccatca

SEQ ID NO: 4021850 - DNA, 25 bp, Homo sapien
ccccagcacacttttctggttggca

SEQ ID NO: 4021851 - DNA, 25 bp, Homo sapien
tcaaagtcgactgaggccatgttgt

SEQ ID NO: 4021852 - DNA, 25 bp, Homo sapien
tcatgggacttgtggaccaggacct

SEQ ID NO: 4021853 - DNA, 25 bp, Homo sapien
ttaaaaaggtggatgtcgggctgga

SEQ ID NO: 4021854 - DNA, 25 bp, Homo sapien
gtggatgtcgggctggagaaaggac

SEQ ID NO: 4021855 - DNA, 25 bp, Homo sapien
gagtctccaagtagaagagattttg

SEQ ID NO: 4021856 - DNA, 25 bp, Homo sapien
tctgcttggtgttgagagtctccaa

SEQ ID NO: 4021857 - DNA, 25 bp, Homo sapien
ctgggtgtaaaagttactagttcag

SEQ ID NO: 4021858 - DNA, 25 bp, Homo sapien
taaactgctttggaattcctgggtg

SEQ ID NO: 4021859 - DNA, 25 bp, Homo sapien
tccaggcacagaagctcagtcctgt

SEQ ID NO: 4021860 - DNA, 25 bp, Homo sapien
cctggaggttaagcctctgcctggg

SEQ ID NO: 4021861 - DNA, 25 bp, Homo sapien
ccagttgtgatggagcgtccggaaa

SEQ ID NO: 4021862 - DNA, 25 bp, Homo sapien
tggacttgaagaagtacctccagtt

SEQ ID NO: 4021863 - DNA, 25 bp, Homo sapien
ggaaaaggagctcaaacagctcggc

SEQ ID NO: 4021864 - DNA, 25 bp, Homo sapien
cactggccagcacggtggacttgaa

SEQ ID NO: 4021865 - DNA, 25 bp, Homo sapien
gctccatgcacagggcgatgatgct

SEQ ID NO: 4021866 - DNA, 25 bp, Homo sapien
ggaggatgctctcggctaactgctc

SEQ ID NO: 4021867 - DNA, 25 bp, Homo sapien
tgctccatgcacagggcgatgatgc

SEQ ID NO: 4021868 - DNA, 25 bp, Homo sapien
tgccctcgtggaggatgctctcggc

SEQ ID NO: 4021869 - DNA, 25 bp, Homo sapien
ggaagaagctcagcatctcatcagt

SEQ ID NO: 4021870 - DNA, 25 bp, Homo sapien
tctaaggcctcgaaacagagtgagg

SEQ ID NO: 4021871 - DNA, 25 bp, Homo sapien
gaaagtctgtatgatttgctcagtg

SEQ ID NO: 4021872 - DNA, 25 bp, Homo sapien
tgctcagtgaaaggcacacccatct

SEQ ID NO: 4021873 - DNA, 25 bp, Homo sapien
caatatcttctaagacgctgagtgt

SEQ ID NO: 4021874 - DNA, 25 bp, Homo sapien
tctgtcgagacttggtggactcccc

SEQ ID NO: 4021875 - DNA, 25 bp, Homo sapien
tcttctaagacgctgagtgtctggt

SEQ ID NO: 4021876 - DNA, 25 bp, Homo sapien
gattcctgcagcgactggtagcaaa

SEQ ID NO: 4021877 - DNA, 25 bp, Homo sapien
gaaatgcgaacacgaacatgcacca

SEQ ID NO: 4021878 - DNA, 25 bp, Homo sapien
aacaggcctggacgcttcaaaaatg

SEQ ID NO: 4021879 - DNA, 25 bp, Homo sapien
aatggacagactggcaggccctact

SEQ ID NO: 4021880 - DNA, 25 bp, Homo sapien
gagctggagccattcagacccaagt

SEQ ID NO: 4021881 - DNA, 25 bp, Homo sapien
cccgggagagtgcagagatgaggct

SEQ ID NO: 4021882 - DNA, 25 bp, Homo sapien
aggctggcgtggttgatggagcgca

SEQ ID NO: 4021883 - DNA, 25 bp, Homo sapien
gcttcaggttgcgatagtcccggga

SEQ ID NO: 4021884 - DNA, 25 bp, Homo sapien
ttgatggagcgcacgggccactgct

SEQ ID NO: 4021885 - DNA, 25 bp, Homo sapien
gaaggtttggccacggaagcagcaa

SEQ ID NO: 4021886 - DNA, 25 bp, Homo sapien
tggccacggaagcagcaagatgtta

SEQ ID NO: 4021887 - DNA, 25 bp, Homo sapien
caagatgttagagagggctcggcac

SEQ ID NO: 4021888 - DNA, 25 bp, Homo sapien
gagggctcggcacaccaacacctgg

SEQ ID NO: 4021889 - DNA, 25 bp, Homo sapien
ttatcgacaagtcgcagggcagagg

SEQ ID NO: 4021890 - DNA, 25 bp, Homo sapien
gatgctgatcagaaagacgggccgc

SEQ ID NO: 4021891 - DNA, 25 bp, Homo sapien
aagtggcacgcagatagcagcagct

SEQ ID NO: 4021892 - DNA, 25 bp, Homo sapien
gttgaatactttctgcactgcaggg

SEQ ID NO: 4021893 - DNA, 25 bp, Homo sapien
ggtgccgtttcatagcattttgccc

SEQ ID NO: 4021894 - DNA, 25 bp, Homo sapien
caaattatgcaataacgcaaggcac

SEQ ID NO: 4021895 - DNA, 25 bp, Homo sapien
tatctccagctatctacaaacttag

SEQ ID NO: 4021896 - DNA, 25 bp, Homo sapien
tatttctctggagcatgcggtgccg

SEQ ID NO: 4021897 - DNA, 25 bp, Homo sapien
cagtgagcatgtattcatgtggaac

SEQ ID NO: 4021898 - DNA, 25 bp, Homo sapien
catgtggaactcagataactaaaaa

SEQ ID NO: 4021899 - DNA, 25 bp, Homo sapien
gatttatgggtctaactctgtgtca

SEQ ID NO: 4021900 - DNA, 25 bp, Homo sapien
tatctgaatgcatgtaggctacaac

SEQ ID NO: 4021901 - DNA, 25 bp, Homo sapien
cgtgttctgccggtgaacttcactg

SEQ ID NO: 4021902 - DNA, 25 bp, Homo sapien
gtgtgattgcatccatggtagtaga

SEQ ID NO: 4021903 - DNA, 25 bp, Homo sapien
ctgtgctaaccagtgagagtaagcc

SEQ ID NO: 4021904 - DNA, 25 bp, Homo sapien
aatactgtgctaaccagtgagagta

SEQ ID NO: 4021905 - DNA, 25 bp, Homo sapien
ttgatattaagagccttctgacatg

SEQ ID NO: 4021906 - DNA, 25 bp, Homo sapien
cattgcctatgtagtaaccttgcta

SEQ ID NO: 4021907 - DNA, 25 bp, Homo sapien
gagccttctgacatgatgcaagagg

SEQ ID NO: 4021908 - DNA, 25 bp, Homo sapien
agatctggatctgcaaaaggtcctc

SEQ ID NO: 4021909 - DNA, 25 bp, Homo sapien
tctgtagagctcctcaaggctgaaa

SEQ ID NO: 4021910 - DNA, 25 bp, Homo sapien
gtcagccttaggagtaagaatttca

SEQ ID NO: 4021911 - DNA, 25 bp, Homo sapien
gaatttcagtcaatctagcacatct

SEQ ID NO: 4021912 - DNA, 25 bp, Homo sapien
aagagaaaggacatcaaagtcagcc

SEQ ID NO: 4021913 - DNA, 25 bp, Homo sapien
acagcagtttcaatgttgtacaatt

SEQ ID NO: 4021914 - DNA, 25 bp, Homo sapien
tgtacaattttatctgagatccgta

SEQ ID NO: 4021915 - DNA, 25 bp, Homo sapien
tgagatccgtacagagtgactttga

SEQ ID NO: 4021916 - DNA, 25 bp, Homo sapien
ggtttcaatactgatggcacagcag

SEQ ID NO: 4021917 - DNA, 25 bp, Homo sapien
cccgccaactgaacagataagatat

SEQ ID NO: 4021918 - DNA, 25 bp, Homo sapien
gccaactgaacagataagatatatc

SEQ ID NO: 4021919 - DNA, 25 bp, Homo sapien
gccccgccaactgaacagataagat

SEQ ID NO: 4021920 - DNA, 25 bp, Homo sapien
tgcgccccgccaactgaacagataa

SEQ ID NO: 4021921 - DNA, 25 bp, Homo sapien
ccgataaagtactcggccaggcggc

SEQ ID NO: 4021922 - DNA, 25 bp, Homo sapien
tccccgataaagtactcggccaggc

SEQ ID NO: 4021923 - DNA, 25 bp, Homo sapien
ggcagtcgttctccgccgtgatgtt

SEQ ID NO: 4021924 - DNA, 25 bp, Homo sapien
tgcagccgccggcagtcgttctccg

SEQ ID NO: 4021925 - DNA, 25 bp, Homo sapien
cttacttttcaacacaacttcttca

SEQ ID NO: 4021926 - DNA, 25 bp, Homo sapien
tctgaaatttccttacttttcaaca

SEQ ID NO: 4021927 - DNA, 25 bp, Homo sapien
tacttttcaacacaacttcttcaaa

SEQ ID NO: 4021928 - DNA, 25 bp, Homo sapien
tgaaatttccttacttttcaacaca

SEQ ID NO: 4021929 - DNA, 25 bp, Homo sapien
gctggccaaaatgtgcatcccattg

SEQ ID NO: 4021930 - DNA, 25 bp, Homo sapien
ttgtcatacacggtcacagcaccag

SEQ ID NO: 4021931 - DNA, 25 bp, Homo sapien
cagcaccaggagtagacaagaatcg

SEQ ID NO: 4021932 - DNA, 25 bp, Homo sapien
gcggctggcgcccatttacacaggc

SEQ ID NO: 4021933 - DNA, 25 bp, Homo sapien
gagccgggacagatcccataagaag

SEQ ID NO: 4021934 - DNA, 25 bp, Homo sapien
agagccgggacagatcccataagaa

SEQ ID NO: 4021935 - DNA, 25 bp, Homo sapien
cagagccgggacagatcccataaga

SEQ ID NO: 4021936 - DNA, 25 bp, Homo sapien
ctcccccacagctttttatcataag

SEQ ID NO: 4021937 - DNA, 25 bp, Homo sapien
cacagctttttatcataagccttta

SEQ ID NO: 4021938 - DNA, 25 bp, Homo sapien
cagctttttatcataagcctttaaa

SEQ ID NO: 4021939 - DNA, 25 bp, Homo sapien
ccccacagctttttatcataagcct

SEQ ID NO: 4021940 - DNA, 25 bp, Homo sapien
ctgaccctgaagtgactataaactg

SEQ ID NO: 4021941 - DNA, 25 bp, Homo sapien
aacttctaaattgtcctgaagaaca

SEQ ID NO: 4021942 - DNA, 25 bp, Homo sapien
tataaactgttgtaatcccaaataa

SEQ ID NO: 4021943 - DNA, 25 bp, Homo sapien
cctgaagtgactataaactgttgta

SEQ ID NO: 4021944 - DNA, 25 bp, Homo sapien
cctccaagctctgccgtaagtaccg

SEQ ID NO: 4021945 - DNA, 25 bp, Homo sapien
ccaagctctgccgtaagtaccgctg

SEQ ID NO: 4021946 - DNA, 25 bp, Homo sapien
tccaagctctgccgtaagtaccgct

SEQ ID NO: 4021947 - DNA, 25 bp, Homo sapien
acctccaagctctgccgtaagtacc

SEQ ID NO: 4021948 - DNA, 25 bp, Homo sapien
cagctgggcttggttgtatctgaac

SEQ ID NO: 4021949 - DNA, 25 bp, Homo sapien
gttgtatctgaactggattcgattc

SEQ ID NO: 4021950 - DNA, 25 bp, Homo sapien
tctgaactggattcgattcaacacc

SEQ ID NO: 4021951 - DNA, 25 bp, Homo sapien
cgattcaacacctctgtgagcagga

SEQ ID NO: 4021952 - DNA, 25 bp, Homo sapien
agatagtccaaaaacagcgtccaga

SEQ ID NO: 4021953 - DNA, 25 bp, Homo sapien
caaaaacagcgtccagatatccaaa

SEQ ID NO: 4021954 - DNA, 25 bp, Homo sapien
aaacagcgtccagatatccaaacaa

SEQ ID NO: 4021955 - DNA, 25 bp, Homo sapien
tagtccaaaaacagcgtccagatat

SEQ ID NO: 4021956 - DNA, 25 bp, Homo sapien
ggagtaagactcgattcttcttagg

SEQ ID NO: 4021957 - DNA, 25 bp, Homo sapien
gaactgggagtaagactcgattctt

SEQ ID NO: 4021958 - DNA, 25 bp, Homo sapien
aagactcgattcttcttaggtgaac

SEQ ID NO: 4021959 - DNA, 25 bp, Homo sapien
tcgattcttcttaggtgaacactca

SEQ ID NO: 4021960 - DNA, 25 bp, Homo sapien
aggcaacccttcattccattaacca

SEQ ID NO: 4021961 - DNA, 25 bp, Homo sapien
caggacaggcaacccttcattccat

SEQ ID NO: 4021962 - DNA, 25 bp, Homo sapien
ctacaggacaggcaacccttcattc

SEQ ID NO: 4021963 - DNA, 25 bp, Homo sapien
ggcaacccttcattccattaaccac

SEQ ID NO: 4021964 - DNA, 25 bp, Homo sapien
ggcttcttataatctagtgcgctca

SEQ ID NO: 4021965 - DNA, 25 bp, Homo sapien
gcaactttaatcctcagacactgtc

SEQ ID NO: 4021966 - DNA, 25 bp, Homo sapien
tgttgtgacccaattaaagtgaagg

SEQ ID NO: 4021967 - DNA, 25 bp, Homo sapien
ttcaatctggcaagtctagaaggct

SEQ ID NO: 4021968 - DNA, 25 bp, Homo sapien
aataaaatgtcccatgttgctcctg

SEQ ID NO: 4021969 - DNA, 25 bp, Homo sapien
gctcattactgcaaaagctattttt

SEQ ID NO: 4021970 - DNA, 25 bp, Homo sapien
taaagacatactaggccttagctga

SEQ ID NO: 4021971 - DNA, 25 bp, Homo sapien
aaggtaaagacatactaggccttag

SEQ ID NO: 4021972 - DNA, 25 bp, Homo sapien
ttcacagggcaataggaagcacagg

SEQ ID NO: 4021973 - DNA, 25 bp, Homo sapien
tatacagagcaaacatcacggtttt

SEQ ID NO: 4021974 - DNA, 25 bp, Homo sapien
caagagcacaaaagttacacgtaac

SEQ ID NO: 4021975 - DNA, 25 bp, Homo sapien
ccttctggtacaggtgctaatgaac

SEQ ID NO: 4021976 - DNA, 25 bp, Homo sapien
ctcagagtactgtgatggagtcgtc

SEQ ID NO: 4021977 - DNA, 25 bp, Homo sapien
gctccacttgagaggacaataacaa

SEQ ID NO: 4021978 - DNA, 25 bp, Homo sapien
aaaagtaggtcattgtaggctccac

SEQ ID NO: 4021979 - DNA, 25 bp, Homo sapien
gaaagtccctaaaccgtcaatctga

SEQ ID NO: 4021980 - DNA, 25 bp, Homo sapien
ttggctacgcaggagcagcagtctc

SEQ ID NO: 4021981 - DNA, 25 bp, Homo sapien
tgttcttggctacgcaggagcagca

SEQ ID NO: 4021982 - DNA, 25 bp, Homo sapien
cctgttcttggctacgcaggagcag

SEQ ID NO: 4021983 - DNA, 25 bp, Homo sapien
tcttggctacgcaggagcagcagtc

SEQ ID NO: 4021984 - DNA, 25 bp, Homo sapien
cccttccagctaatctcagacttac

SEQ ID NO: 4021985 - DNA, 25 bp, Homo sapien
tactggcacacacctacctttctgt

SEQ ID NO: 4021986 - DNA, 25 bp, Homo sapien
aagacaacaaacctacacaaggcac

SEQ ID NO: 4021987 - DNA, 25 bp, Homo sapien
aacaaacctacacaaggcacaagca

SEQ ID NO: 4021988 - DNA, 25 bp, Homo sapien
gaggattacagatgccatgcagcac

SEQ ID NO: 4021989 - DNA, 25 bp, Homo sapien
gattacagatgccatgcagcacagc

SEQ ID NO: 4021990 - DNA, 25 bp, Homo sapien
attacagatgccatgcagcacagca

SEQ ID NO: 4021991 - DNA, 25 bp, Homo sapien
aaagaggattacagatgccatgcag

SEQ ID NO: 4021992 - DNA, 25 bp, Homo sapien
cagttcttggacatgagttcattga

SEQ ID NO: 4021993 - DNA, 25 bp, Homo sapien
cacagttcttggacatgagttcatt

SEQ ID NO: 4021994 - DNA, 25 bp, Homo sapien
agttcttggacatgagttcattgat

SEQ ID NO: 4021995 - DNA, 25 bp, Homo sapien
acacagttcttggacatgagttcat

SEQ ID NO: 4021996 - DNA, 25 bp, Homo sapien
ttctcaaggaggataacagacaaag

SEQ ID NO: 4021997 - DNA, 25 bp, Homo sapien
taggaattaagagggtgcgctagct

SEQ ID NO: 4021998 - DNA, 25 bp, Homo sapien
aattaaggaatggagaagctgtagc

SEQ ID NO: 4021999 - DNA, 25 bp, Homo sapien
gacacactggcatcaaattacatag

SEQ ID NO: 4022000 - DNA, 25 bp, Homo sapien
agacaccatgcccagatatatatat

SEQ ID NO: 4022001 - DNA, 25 bp, Homo sapien
agccattctcccacttcaaccctcc

SEQ ID NO: 4022002 - DNA, 25 bp, Homo sapien
gcaggagacaccatgcccagatata

SEQ ID NO: 4022003 - DNA, 25 bp, Homo sapien
aagccattctcccacttcaaccctc

SEQ ID NO: 4022004 - DNA, 25 bp, Homo sapien
gtggtggagtggcagcagtaacact

SEQ ID NO: 4022005 - DNA, 25 bp, Homo sapien
gtggcagcagtaacactgtgtttgt

SEQ ID NO: 4022006 - DNA, 25 bp, Homo sapien
taaagaaagttcctagacatccaag

SEQ ID NO: 4022007 - DNA, 25 bp, Homo sapien
agattccctcaagtagcaagcccag

SEQ ID NO: 4022008 - DNA, 25 bp, Homo sapien
gaggctctcatcaaacagaaaagac

SEQ ID NO: 4022009 - DNA, 25 bp, Homo sapien
gagccattgcactaacccaagttta

SEQ ID NO: 4022010 - DNA, 25 bp, Homo sapien
aagcactgtctgcacctggtccagt

SEQ ID NO: 4022011 - DNA, 25 bp, Homo sapien
caagcactgtctgcacctggtccag

SEQ ID NO: 4022012 - DNA, 25 bp, Homo sapien
ccaagcactgtctgcacctggtcca

SEQ ID NO: 4022013 - DNA, 25 bp, Homo sapien
gcccaagcactgtctgcacctggtc

SEQ ID NO: 4022014 - DNA, 25 bp, Homo sapien
tacagactttatattcttcacttca

SEQ ID NO: 4022015 - DNA, 25 bp, Homo sapien
tcttcacttcaagaaatacagggta

SEQ ID NO: 4022016 - DNA, 25 bp, Homo sapien
aatacagggtacgggctgggcgtgg

SEQ ID NO: 4022017 - DNA, 25 bp, Homo sapien
aaataactctccctatcacaaagca

SEQ ID NO: 4022018 - DNA, 25 bp, Homo sapien
tggaaaatctatctgcaagctctcc

SEQ ID NO: 4022019 - DNA, 25 bp, Homo sapien
tgcatccttactctctcagctggaa

SEQ ID NO: 4022020 - DNA, 25 bp, Homo sapien
tcagctggaaatgactcgtaatgcc

SEQ ID NO: 4022021 - DNA, 25 bp, Homo sapien
gcctgtaacataggtaatctctgca

SEQ ID NO: 4022022 - DNA, 25 bp, Homo sapien
attagaagtaatccagagatggtct

SEQ ID NO: 4022023 - DNA, 25 bp, Homo sapien
ttagaagtaatccagagatggtcta

SEQ ID NO: 4022024 - DNA, 25 bp, Homo sapien
tattagaagtaatccagagatggtc

SEQ ID NO: 4022025 - DNA, 25 bp, Homo sapien
gtctggctccttctactacatggtg

SEQ ID NO: 4022026 - DNA, 25 bp, Homo sapien
cctgacgcccacttaagagagcctt

SEQ ID NO: 4022027 - DNA, 25 bp, Homo sapien
agtgtattggacagaacgccaggga

SEQ ID NO: 4022028 - DNA, 25 bp, Homo sapien
tcaaagggaccaatcccagcggtgg

SEQ ID NO: 4022029 - DNA, 25 bp, Homo sapien
gcagagcttgttccggataaagtaa

SEQ ID NO: 4022030 - DNA, 25 bp, Homo sapien
agtttgggcagacagctacggattt

SEQ ID NO: 4022031 - DNA, 25 bp, Homo sapien
tgggcagacagctacggatttccat

SEQ ID NO: 4022032 - DNA, 25 bp, Homo sapien
tgcagagcttgttccggataaagta

SEQ ID NO: 4022033 - DNA, 25 bp, Homo sapien
ccccaagccacattttattgatcag

SEQ ID NO: 4022034 - DNA, 25 bp, Homo sapien
caagccacattttattgatcagatt

SEQ ID NO: 4022035 - DNA, 25 bp, Homo sapien
gatgggaccccaagccacattttat

SEQ ID NO: 4022036 - DNA, 25 bp, Homo sapien
ctgagatgggaccccaagccacatt

SEQ ID NO: 4022037 - DNA, 25 bp, Homo sapien
tgttaaactgtacatcattacatag

SEQ ID NO: 4022038 - DNA, 25 bp, Homo sapien
agaatctccaggctcctatttgctg

SEQ ID NO: 4022039 - DNA, 25 bp, Homo sapien
aatctccaggctcctatttgctggg

SEQ ID NO: 4022040 - DNA, 25 bp, Homo sapien
tctccaggctcctatttgctgggca

SEQ ID NO: 4022041 - DNA, 25 bp, Homo sapien
ctccaggctcctatttgctgggcaa

SEQ ID NO: 4022042 - DNA, 25 bp, Homo sapien
tgtacaatcgtgaaaaaattctgtc

SEQ ID NO: 4022043 - DNA, 25 bp, Homo sapien
ttgtacaatcgtgaaaaaattctgt

SEQ ID NO: 4022044 - DNA, 25 bp, Homo sapien
gactttccaatgccctgagagaggc

SEQ ID NO: 4022045 - DNA, 25 bp, Homo sapien
tcaaaaagcctataaataagtgttc

SEQ ID NO: 4022046 - DNA, 25 bp, Homo sapien
tattcaaaaagcctataaataagtg

SEQ ID NO: 4022047 - DNA, 25 bp, Homo sapien
catctaccagaaaggctaaaattta

SEQ ID NO: 4022048 - DNA, 25 bp, Homo sapien
ttaaaataagatagtgctacacatc

SEQ ID NO: 4022049 - DNA, 25 bp, Homo sapien
taagcccctgggatacaatgatgag

SEQ ID NO: 4022050 - DNA, 25 bp, Homo sapien
cagagtgttgctgtatcaccccaga

SEQ ID NO: 4022051 - DNA, 25 bp, Homo sapien
caatgatgagtaagacggtccctaa

SEQ ID NO: 4022052 - DNA, 25 bp, Homo sapien
tgaaggtggcctagcagttacatcc

SEQ ID NO: 4022053 - DNA, 25 bp, Homo sapien
aagtaaatgctacacctgaccacag

SEQ ID NO: 4022054 - DNA, 25 bp, Homo sapien
tgctatgaaaggcatgactgagcca

SEQ ID NO: 4022055 - DNA, 25 bp, Homo sapien
cacagattgatcctggactggaggg

SEQ ID NO: 4022056 - DNA, 25 bp, Homo sapien
taactgtaccatagtcatgtgggag

SEQ ID NO: 4022057 - DNA, 25 bp, Homo sapien
tgagtatgaaactgacgaaccacta

SEQ ID NO: 4022058 - DNA, 25 bp, Homo sapien
cgaaccactataaaagcatgctgca

SEQ ID NO: 4022059 - DNA, 25 bp, Homo sapien
tgaaactgacgaaccactataaaag

SEQ ID NO: 4022060 - DNA, 25 bp, Homo sapien
catcaggtaatgaatgagtatgaaa

SEQ ID NO: 4022061 - DNA, 25 bp, Homo sapien
tccctggtgtaccaatcagataaat

SEQ ID NO: 4022062 - DNA, 25 bp, Homo sapien
ggtgtaccaatcagataaatcactc

SEQ ID NO: 4022063 - DNA, 25 bp, Homo sapien
tggtgtaccaatcagataaatcact

SEQ ID NO: 4022064 - DNA, 25 bp, Homo sapien
cctggtgtaccaatcagataaatca

SEQ ID NO: 4022065 - DNA, 25 bp, Homo sapien
agttccatgtcttcacacacaccat

SEQ ID NO: 4022066 - DNA, 25 bp, Homo sapien
cacataacagttccatgtcttcaca

SEQ ID NO: 4022067 - DNA, 25 bp, Homo sapien
ataacagttccatgtcttcacacac

SEQ ID NO: 4022068 - DNA, 25 bp, Homo sapien
tttctctccacataacagttccatg

SEQ ID NO: 4022069 - DNA, 25 bp, Homo sapien
agatcgaggtcactatgagctgtga

SEQ ID NO: 4022070 - DNA, 25 bp, Homo sapien
ggagatcgaggtcactatgagctgt

SEQ ID NO: 4022071 - DNA, 25 bp, Homo sapien
gaccaggagatcgaggtcactatga

SEQ ID NO: 4022072 - DNA, 25 bp, Homo sapien
caggagatcgaggtcactatgagct

SEQ ID NO: 4022073 - DNA, 25 bp, Homo sapien
cgccaccacacggatgaagcttgag

SEQ ID NO: 4022074 - DNA, 25 bp, Homo sapien
acacgccaccacacggatgaagctt

SEQ ID NO: 4022075 - DNA, 25 bp, Homo sapien
gccaccacacggatgaagcttgaga

SEQ ID NO: 4022076 - DNA, 25 bp, Homo sapien
gaaggaagctctgacacacgccacc

SEQ ID NO: 4022077 - DNA, 25 bp, Homo sapien
aggccaaatacttcatgactccact

SEQ ID NO: 4022078 - DNA, 25 bp, Homo sapien
aacaggccaaatacttcatgactcc

SEQ ID NO: 4022079 - DNA, 25 bp, Homo sapien
tgtgaaataaggcagtcacaacagg

SEQ ID NO: 4022080 - DNA, 25 bp, Homo sapien
caacaggccaaatacttcatgactc

SEQ ID NO: 4022081 - DNA, 25 bp, Homo sapien
tcttgggcttcggacacgtcccgct

SEQ ID NO: 4022082 - DNA, 25 bp, Homo sapien
ctgaacgggcggaggctgacaggcc

SEQ ID NO: 4022083 - DNA, 25 bp, Homo sapien
gtcccgctcgcacagttcaggtcat

SEQ ID NO: 4022084 - DNA, 25 bp, Homo sapien
tcgggggaccccgagacaattcatc

SEQ ID NO: 4022085 - DNA, 25 bp, Homo sapien
aatgagtgtcacggttgaagtcgga

SEQ ID NO: 4022086 - DNA, 25 bp, Homo sapien
agaatgagtgtcacggttgaagtcg

SEQ ID NO: 4022087 - DNA, 25 bp, Homo sapien
atgagtgtcacggttgaagtcggag

SEQ ID NO: 4022088 - DNA, 25 bp, Homo sapien
gaatgagtgtcacggttgaagtcgg

SEQ ID NO: 4022089 - DNA, 25 bp, Homo sapien
agggggcgtcagatgcccacttcac

SEQ ID NO: 4022090 - DNA, 25 bp, Homo sapien
ttgagggggcgtcagatgcccactt

SEQ ID NO: 4022091 - DNA, 25 bp, Homo sapien
gagggggcgtcagatgcccacttca

SEQ ID NO: 4022092 - DNA, 25 bp, Homo sapien
tgagggggcgtcagatgcccacttc

SEQ ID NO: 4022093 - DNA, 25 bp, Homo sapien
cttcttgatgtcgtcatattcgaca

SEQ ID NO: 4022094 - DNA, 25 bp, Homo sapien
gtcgtcatattcgacaggtttttcc

SEQ ID NO: 4022095 - DNA, 25 bp, Homo sapien
gtcatattcgacaggtttttccagg

SEQ ID NO: 4022096 - DNA, 25 bp, Homo sapien
tgatgtcgtcatattcgacaggttt

SEQ ID NO: 4022097 - DNA, 25 bp, Homo sapien
gcagcaccagtagaggcagggatga

SEQ ID NO: 4022098 - DNA, 25 bp, Homo sapien
cagcaccagtagaggcagggatgat

SEQ ID NO: 4022099 - DNA, 25 bp, Homo sapien
tggcagcaccagtagaggcagggat

SEQ ID NO: 4022100 - DNA, 25 bp, Homo sapien
cttggcagcaccagtagaggcaggg

SEQ ID NO: 4022101 - DNA, 25 bp, Homo sapien
atgagtccttctacaataccagagt

SEQ ID NO: 4022102 - DNA, 25 bp, Homo sapien
gtcatgagtccttctacaataccag

SEQ ID NO: 4022103 - DNA, 25 bp, Homo sapien
gagtccttctacaataccagagttg

SEQ ID NO: 4022104 - DNA, 25 bp, Homo sapien
gtccttctacaataccagagttgtc

SEQ ID NO: 4022105 - DNA, 25 bp, Homo sapien
catacttctcatggctcacgcccat

SEQ ID NO: 4022106 - DNA, 25 bp, Homo sapien
tgtcatacttctcatggctcacgcc

SEQ ID NO: 4022107 - DNA, 25 bp, Homo sapien
gcattgctgacgatcttgaggccgt

SEQ ID NO: 4022108 - DNA, 25 bp, Homo sapien
attgctgacgatcttgaggccgttg

SEQ ID NO: 4022109 - DNA, 25 bp, Homo sapien
gatgctggtggactctacgacgtat

SEQ ID NO: 4022110 - DNA, 25 bp, Homo sapien
ggtggactctacgacgtattcagca

SEQ ID NO: 4022111 - DNA, 25 bp, Homo sapien
gctggtggactctacgacgtattca

SEQ ID NO: 4022112 - DNA, 25 bp, Homo sapien
tgctggtggactctacgacgtattc

SEQ ID NO: 4022113 - DNA, 25 bp, Homo sapien
ccatggaatttgctacggatgcaat

SEQ ID NO: 4022114 - DNA, 25 bp, Homo sapien
ctacggatgcaatcatactggaaca

SEQ ID NO: 4022115 - DNA, 25 bp, Homo sapien
gaatttgctacggatgcaatcatac

SEQ ID NO: 4022116 - DNA, 25 bp, Homo sapien
gatgatgggatttccccgttctcag

SEQ ID NO: 4022117 - DNA, 25 bp, Homo sapien
gtagtcaaggtcaatgaagggtcat

SEQ ID NO: 4022118 - DNA, 25 bp, Homo sapien
atacgaccaaatccatttgttccga

SEQ ID NO: 4022119 - DNA, 25 bp, Homo sapien
cgaccaaatccatttgttccgacct

SEQ ID NO: 4022120 - DNA, 25 bp, Homo sapien
caaatccatttgttccgaccttcac

SEQ ID NO: 4022121 - DNA, 25 bp, Homo sapien
tcccatctctactaaaaatacaaaa

SEQ ID NO: 4022122 - DNA, 25 bp, Homo sapien
ttagctgagagtggtggcacgcacc

SEQ ID NO: 4022123 - DNA, 25 bp, Homo sapien
gctactctcaaggctgaggcacgag

SEQ ID NO: 4022124 - DNA, 25 bp, Homo sapien
ccagcctggcctgtatggtaaaatc

SEQ ID NO: 4022125 - DNA, 25 bp, Homo sapien
taaggcttaattgtagtagtccctg

SEQ ID NO: 4022126 - DNA, 25 bp, Homo sapien
cctggcctgtcatcgcatattttta

SEQ ID NO: 4022127 - DNA, 25 bp, Homo sapien
aaagaacacaggagtgctaatacca

SEQ ID NO: 4022128 - DNA, 25 bp, Homo sapien
gtagtccctgttgcatgtatagatc

SEQ ID NO: 4022129 - DNA, 25 bp, Homo sapien
catctggctatttgtcgtagaggcg

SEQ ID NO: 4022130 - DNA, 25 bp, Homo sapien
gggttggcacactttcagctgcaaa

SEQ ID NO: 4022131 - DNA, 25 bp, Homo sapien
tcctatttccttggtgccgtcccga

SEQ ID NO: 4022132 - DNA, 25 bp, Homo sapien
cagcacctggctcgtgtgtcagata

SEQ ID NO: 4022133 - DNA, 25 bp, Homo sapien
tccctgggcaccgtcacactgtgtt

SEQ ID NO: 4022134 - DNA, 25 bp, Homo sapien
tggccatggtcacagagttgtattt

SEQ ID NO: 4022135 - DNA, 25 bp, Homo sapien
ggagagctcatcagtacttgtgctg

SEQ ID NO: 4022136 - DNA, 25 bp, Homo sapien
gtatttcggcagtggagagctcatc

SEQ ID NO: 4022137 - DNA, 25 bp, Homo sapien
cataaatgtggaccaacaagccagg

SEQ ID NO: 4022138 - DNA, 25 bp, Homo sapien
gaggaggttctccactacaaaagac

SEQ ID NO: 4022139 - DNA, 25 bp, Homo sapien
tacaaaagaccattgtgcctggcac

SEQ ID NO: 4022140 - DNA, 25 bp, Homo sapien
cagtatggccaactgaacacagtgg

SEQ ID NO: 4022141 - DNA, 25 bp, Homo sapien
tgagttctctgacgtctcgctggaa

SEQ ID NO: 4022142 - DNA, 25 bp, Homo sapien
gacctcagttggatagggcaaccac

SEQ ID NO: 4022143 - DNA, 25 bp, Homo sapien
caggcggacgcatggatgaatgaaa

SEQ ID NO: 4022144 - DNA, 25 bp, Homo sapien
ttgcagcagggatcgcaaaggcgac

SEQ ID NO: 4022145 - DNA, 25 bp, Homo sapien
gtctcgtcccgcagggcccagaaag

SEQ ID NO: 4022146 - DNA, 25 bp, Homo sapien
gacagtctggggcagtctcgtcccg

SEQ ID NO: 4022147 - DNA, 25 bp, Homo sapien
tcctctgtaacctcgttctcgcccc

SEQ ID NO: 4022148 - DNA, 25 bp, Homo sapien
ccagaaagctggaccaggtgaccct

SEQ ID NO: 4022149 - DNA, 25 bp, Homo sapien
cttgggcgactgagcccctggcggc

SEQ ID NO: 4022150 - DNA, 25 bp, Homo sapien
gacttgggcgactgagcccctggcg

SEQ ID NO: 4022151 - DNA, 25 bp, Homo sapien
caggacttgggcgactgagcccctg

SEQ ID NO: 4022152 - DNA, 25 bp, Homo sapien
gctccaggacttgggcgactgagcc

SEQ ID NO: 4022153 - DNA, 25 bp, Homo sapien
atggtcgtggcgccctgagcccccg

SEQ ID NO: 4022154 - DNA, 25 bp, Homo sapien
gggccgggcagacgaagaccgcgac

SEQ ID NO: 4022155 - DNA, 25 bp, Homo sapien
aggtgagtggccaccgaggtcccca

SEQ ID NO: 4022156 - DNA, 25 bp, Homo sapien
gggcagacgaagaccgcgacggcgc

SEQ ID NO: 4022157 - DNA, 25 bp, Homo sapien
tgcgggcagacctctggcagcctct

SEQ ID NO: 4022158 - DNA, 25 bp, Homo sapien
gggcacttgatgcgggcagacctct

SEQ ID NO: 4022159 - DNA, 25 bp, Homo sapien
acttgatgcgggcagacctctggca

SEQ ID NO: 4022160 - DNA, 25 bp, Homo sapien
ttgatgcgggcagacctctggcagc

SEQ ID NO: 4022161 - DNA, 25 bp, Homo sapien
caggtgccctgaagactgagtgacc

SEQ ID NO: 4022162 - DNA, 25 bp, Homo sapien
gccctgaagactgagtgaccttggg

SEQ ID NO: 4022163 - DNA, 25 bp, Homo sapien
ggtgccctgaagactgagtgacctt

SEQ ID NO: 4022164 - DNA, 25 bp, Homo sapien
tcaggtgccctgaagactgagtgac

SEQ ID NO: 4022165 - DNA, 25 bp, Homo sapien
gaaaccacgtaatgtcagggttgga

SEQ ID NO: 4022166 - DNA, 25 bp, Homo sapien
ccgtgaagtttggaagggatgtctc

SEQ ID NO: 4022167 - DNA, 25 bp, Homo sapien
agtttggaagggatgtctccaccat

SEQ ID NO: 4022168 - DNA, 25 bp, Homo sapien
ctctgcccgtgaagtttggaaggga

SEQ ID NO: 4022169 - DNA, 25 bp, Homo sapien
gccctctctctgcccgtgaagtttg

SEQ ID NO: 4022170 - DNA, 25 bp, Homo sapien
gacagagcgctactcctggcagtgc

SEQ ID NO: 4022171 - DNA, 25 bp, Homo sapien
tcctgtgcggtgagtcaccagcagc

SEQ ID NO: 4022172 - DNA, 25 bp, Homo sapien
tcagagcgtcctgtgcggtgagtca

SEQ ID NO: 4022173 - DNA, 25 bp, Homo sapien
tcctggcagtgcgtcaatcagagcg

SEQ ID NO: 4022174 - DNA, 25 bp, Homo sapien
attgttccacctcatccaccctcca

SEQ ID NO: 4022175 - DNA, 25 bp, Homo sapien
gattgttccacctcatccaccctcc

SEQ ID NO: 4022176 - DNA, 25 bp, Homo sapien
tgggtaattgttgtgcctcggcctc

SEQ ID NO: 4022177 - DNA, 25 bp, Homo sapien
ttgttccacctcatccaccctccac

SEQ ID NO: 4022178 - DNA, 25 bp, Homo sapien
aatgtatccatgtcctgacctggca

SEQ ID NO: 4022179 - DNA, 25 bp, Homo sapien
aaatgtatccatgtcctgacctggc

SEQ ID NO: 4022180 - DNA, 25 bp, Homo sapien
aaaatgtatccatgtcctgacctgg

SEQ ID NO: 4022181 - DNA, 25 bp, Homo sapien
atgtatccatgtcctgacctggcag

SEQ ID NO: 4022182 - DNA, 25 bp, Homo sapien
ccagttgcaaagaggctttcttgca

SEQ ID NO: 4022183 - DNA, 25 bp, Homo sapien
caaagaggctttcttgcagaagggg

SEQ ID NO: 4022184 - DNA, 25 bp, Homo sapien
gaggctttcttgcagaaggggggat

SEQ ID NO: 4022185 - DNA, 25 bp, Homo sapien
aagaggctttcttgcagaagggggg

SEQ ID NO: 4022186 - DNA, 25 bp, Homo sapien
ctcttgcgcacgttgaaacattttc

SEQ ID NO: 4022187 - DNA, 25 bp, Homo sapien
cgccgcaactcttgcgcacgttgaa

SEQ ID NO: 4022188 - DNA, 25 bp, Homo sapien
atttgtggtagtcctctgcccgccg

SEQ ID NO: 4022189 - DNA, 25 bp, Homo sapien
tttgcatttgtggtagtcctctgcc

SEQ ID NO: 4022190 - DNA, 25 bp, Homo sapien
tgaattcaacaatccaggctgggtg

SEQ ID NO: 4022191 - DNA, 25 bp, Homo sapien
taatatgaccaaaacatgaaagact

SEQ ID NO: 4022192 - DNA, 25 bp, Homo sapien
aaagagatcagtcatatggcagcaa

SEQ ID NO: 4022193 - DNA, 25 bp, Homo sapien
aaatgaatctggaggtgacccaagc

SEQ ID NO: 4022194 - DNA, 25 bp, Homo sapien
gagtaatgacgtctttcaggccaat

SEQ ID NO: 4022195 - DNA, 25 bp, Homo sapien
gtaatgacgtctttcaggccaattt

SEQ ID NO: 4022196 - DNA, 25 bp, Homo sapien
tgacgtctttcaggccaattttatt

SEQ ID NO: 4022197 - DNA, 25 bp, Homo sapien
tagagtaatgacgtctttcaggcca

SEQ ID NO: 4022198 - DNA, 25 bp, Homo sapien
tctttgtgtgcatacaaatggacct

SEQ ID NO: 4022199 - DNA, 25 bp, Homo sapien
tttgtgtgcatacaaatggacctca

SEQ ID NO: 4022200 - DNA, 25 bp, Homo sapien
tcttttctttgtgtgcatacaaatg

SEQ ID NO: 4022201 - DNA, 25 bp, Homo sapien
tttctttgtgtgcatacaaatggac

SEQ ID NO: 4022202 - DNA, 25 bp, Homo sapien
aggagaaggtgagaaacctgaggtc

SEQ ID NO: 4022203 - DNA, 25 bp, Homo sapien
gaggtcaagaagctgttctttccct

SEQ ID NO: 4022204 - DNA, 25 bp, Homo sapien
aaactcatttccacactatggggac

SEQ ID NO: 4022205 - DNA, 25 bp, Homo sapien
cactatggggactccaacagagcca

SEQ ID NO: 4022206 - DNA, 25 bp, Homo sapien
ttcgagaccagaagatagtcttcag

SEQ ID NO: 4022207 - DNA, 25 bp, Homo sapien
atttcgagaccagaagatagtcttc

SEQ ID NO: 4022208 - DNA, 25 bp, Homo sapien
tccatttcgagaccagaagatagtc

SEQ ID NO: 4022209 - DNA, 25 bp, Homo sapien
ccatcatgtccatttcgagaccaga

SEQ ID NO: 4022210 - DNA, 25 bp, Homo sapien
gaatgttaaatgtgtaacgtctcag

SEQ ID NO: 4022211 - DNA, 25 bp, Homo sapien
gatagacagccagactattgataac

SEQ ID NO: 4022212 - DNA, 25 bp, Homo sapien
acgatgacgatagacagccagacta

SEQ ID NO: 4022213 - DNA, 25 bp, Homo sapien
atgttaaatgtgtaacgtctcagaa

SEQ ID NO: 4022214 - DNA, 25 bp, Homo sapien
tttcactcagaaagaatcatcctta

SEQ ID NO: 4022215 - DNA, 25 bp, Homo sapien
catgcagcccgtcactcatggctaa

SEQ ID NO: 4022216 - DNA, 25 bp, Homo sapien
cccgtcactcatggctaagacaagc

SEQ ID NO: 4022217 - DNA, 25 bp, Homo sapien
cactcatggctaagacaagctaagt

SEQ ID NO: 4022218 - DNA, 25 bp, Homo sapien
cgtcactcatggctaagacaagcta

SEQ ID NO: 4022219 - DNA, 25 bp, Homo sapien
aggtacgcaccaccaggcccgacta

SEQ ID NO: 4022220 - DNA, 25 bp, Homo sapien
ctctccagtaactgggataacaggt

SEQ ID NO: 4022221 - DNA, 25 bp, Homo sapien
ataacaggtacgcaccaccaggccc

SEQ ID NO: 4022222 - DNA, 25 bp, Homo sapien
tctccagtaactgggataacaggta

SEQ ID NO: 4022223 - DNA, 25 bp, Homo sapien
gataaatcccagcaggagccaaatg

SEQ ID NO: 4022224 - DNA, 25 bp, Homo sapien
taaatcccagcaggagccaaatgag

SEQ ID NO: 4022225 - DNA, 25 bp, Homo sapien
tgaggagccaaaagcgcagccgcat

SEQ ID NO: 4022226 - DNA, 25 bp, Homo sapien
aaatgaggagccaaaagcgcagccg

SEQ ID NO: 4022227 - DNA, 25 bp, Homo sapien
agtcaccgtgatcatagcccaagca

SEQ ID NO: 4022228 - DNA, 25 bp, Homo sapien
tgaagtcagattagaccaaaagtga

SEQ ID NO: 4022229 - DNA, 25 bp, Homo sapien
tgatcatagcccaagcagagacagg

SEQ ID NO: 4022230 - DNA, 25 bp, Homo sapien
catgaagggttgctagagtcaccgt

SEQ ID NO: 4022231 - DNA, 25 bp, Homo sapien
ttacatccgaccaaactgctttttc

SEQ ID NO: 4022232 - DNA, 25 bp, Homo sapien
ttcatcatgctggtgatgattttgt

SEQ ID NO: 4022233 - DNA, 25 bp, Homo sapien
tgaagtctactctgtttcatcatgc

SEQ ID NO: 4022234 - DNA, 25 bp, Homo sapien
gtgatgattttgtgcagctctggga

SEQ ID NO: 4022235 - DNA, 25 bp, Homo sapien
gctgagacccgggaactgctcaagg

SEQ ID NO: 4022236 - DNA, 25 bp, Homo sapien
tcacccgatatgagatgtgtggcag

SEQ ID NO: 4022237 - DNA, 25 bp, Homo sapien
cccgatatgagatgtgtggcagctg

SEQ ID NO: 4022238 - DNA, 25 bp, Homo sapien
cgggaactgctcaagggcaccaggc

SEQ ID NO: 4022239 - DNA, 25 bp, Homo sapien
aggtactcgcatgggcatgtcactg

SEQ ID NO: 4022240 - DNA, 25 bp, Homo sapien
ctcaggtactcgcatgggcatgtca

SEQ ID NO: 4022241 - DNA, 25 bp, Homo sapien
tcctcaggtactcgcatgggcatgt

SEQ ID NO: 4022242 - DNA, 25 bp, Homo sapien
cttcctcaggtactcgcatgggcat

SEQ ID NO: 4022243 - DNA, 25 bp, Homo sapien
tgagaacagcggctcatcatgagtg

SEQ ID NO: 4022244 - DNA, 25 bp, Homo sapien
tgcagaatgagaacagcggctcatc

SEQ ID NO: 4022245 - DNA, 25 bp, Homo sapien
gaacagcggctcatcatgagtgcca

SEQ ID NO: 4022246 - DNA, 25 bp, Homo sapien
acagcggctcatcatgagtgccaac

SEQ ID NO: 4022247 - DNA, 25 bp, Homo sapien
tactttgaatttctacttcatgcca

SEQ ID NO: 4022248 - DNA, 25 bp, Homo sapien
ccaagttcaaattcctgtactttga

SEQ ID NO: 4022249 - DNA, 25 bp, Homo sapien
ttgaatttctacttcatgccatgca

SEQ ID NO: 4022250 - DNA, 25 bp, Homo sapien
gatgtttgagtctatagtggtcaag

SEQ ID NO: 4022251 - DNA, 25 bp, Homo sapien
catttcactattattggatatacag

SEQ ID NO: 4022252 - DNA, 25 bp, Homo sapien
tcttggagcagcgaaagcgactcgc

SEQ ID NO: 4022253 - DNA, 25 bp, Homo sapien
cagcagcggcgtcagttgctgcacc

SEQ ID NO: 4022254 - DNA, 25 bp, Homo sapien
gctgcaccgccgacttcttggagca

SEQ ID NO: 4022255 - DNA, 25 bp, Homo sapien
agaagacgccgccaagtggaacccg

SEQ ID NO: 4022256 - DNA, 25 bp, Homo sapien
gtgaactgcgctgtcagcagggccg

SEQ ID NO: 4022257 - DNA, 25 bp, Homo sapien
ggccgccccgggtgtgaactgcgct

SEQ ID NO: 4022258 - DNA, 25 bp, Homo sapien
actgcgctgtcagcagggccgcgct

SEQ ID NO: 4022259 - DNA, 25 bp, Homo sapien
gggccgcgctgacacgggtggccca

SEQ ID NO: 4022260 - DNA, 25 bp, Homo sapien
ggtcaacatgcgctggctgagctta

SEQ ID NO: 4022261 - DNA, 25 bp, Homo sapien
gaaacgagaaggtgcaatgacacag

SEQ ID NO: 4022262 - DNA, 25 bp, Homo sapien
ccctaatcagagaggatcacaggag

SEQ ID NO: 4022263 - DNA, 25 bp, Homo sapien
cacagcagagcacaatgcagaatcc

SEQ ID NO: 4022264 - DNA, 25 bp, Homo sapien
tgtgattaatgtactgacgaaccga

SEQ ID NO: 4022265 - DNA, 25 bp, Homo sapien
ccgctgtgattaatgtactgacgaa

SEQ ID NO: 4022266 - DNA, 25 bp, Homo sapien
cgtgggcgaggctgcaaaggctgga

SEQ ID NO: 4022267 - DNA, 25 bp, Homo sapien
tgcccagccgccgtccacgcgcgtc

SEQ ID NO: 4022268 - DNA, 25 bp, Homo sapien
cagagtgtctgcgtgaccaggcata

SEQ ID NO: 4022269 - DNA, 25 bp, Homo sapien
tagctttatccagactcttgggagc

SEQ ID NO: 4022270 - DNA, 25 bp, Homo sapien
taaacaactcttgtgtgagaggatg

SEQ ID NO: 4022271 - DNA, 25 bp, Homo sapien
ggaaggcgaagctttcaactctaaa

SEQ ID NO: 4022272 - DNA, 25 bp, Homo sapien
aggagaccctctgcctggcgaccgc

SEQ ID NO: 4022273 - DNA, 25 bp, Homo sapien
gctcctaaccgctagtgatccacca

SEQ ID NO: 4022274 - DNA, 25 bp, Homo sapien
tgaggagaccctctgcctggcgacc

SEQ ID NO: 4022275 - DNA, 25 bp, Homo sapien
tctgcctggcgaccgccccgtctga

SEQ ID NO: 4022276 - DNA, 25 bp, Homo sapien
agggtccaactgtcactactgtctc

SEQ ID NO: 4022277 - DNA, 25 bp, Homo sapien
cctcaatacatctgtgactttcttt

SEQ ID NO: 4022278 - DNA, 25 bp, Homo sapien
tgtctccactatgtcttcctgatgt

SEQ ID NO: 4022279 - DNA, 25 bp, Homo sapien
ccggtcacatcctcaatacatctgt

SEQ ID NO: 4022280 - DNA, 25 bp, Homo sapien
tgggctcaacacacctttgtggcaa

SEQ ID NO: 4022281 - DNA, 25 bp, Homo sapien
ctttgaggtcaggaacgtgttcaat

SEQ ID NO: 4022282 - DNA, 25 bp, Homo sapien
tttgtggcaacaagcaatcaaccag

SEQ ID NO: 4022283 - DNA, 25 bp, Homo sapien
tataatcagcaaatgaatgggctca

SEQ ID NO: 4022284 - DNA, 25 bp, Homo sapien
gactgaggtgtggtttaggacttca

SEQ ID NO: 4022285 - DNA, 25 bp, Homo sapien
ccaggcgggaaacagagtggagagc

SEQ ID NO: 4022286 - DNA, 25 bp, Homo sapien
aacagacctttagtgactgaggtgt

SEQ ID NO: 4022287 - DNA, 25 bp, Homo sapien
acttcaaggttggatggcccaggcg

SEQ ID NO: 4022288 - DNA, 25 bp, Homo sapien
tcagtaggccgtctgagactgctgc

SEQ ID NO: 4022289 - DNA, 25 bp, Homo sapien
accgcggcgcatgtagccctcgttt

SEQ ID NO: 4022290 - DNA, 25 bp, Homo sapien
cgtttttgcggtagccgtccttctg

SEQ ID NO: 4022291 - DNA, 25 bp, Homo sapien
tctgagactgctgctggcggtagcc

SEQ ID NO: 4022292 - DNA, 25 bp, Homo sapien
gcaaggagaggagccgaagtactca

SEQ ID NO: 4022293 - DNA, 25 bp, Homo sapien
cacccgttcgttgttctccaccagg

SEQ ID NO: 4022294 - DNA, 25 bp, Homo sapien
tgccctgcttgtggtcaaacacccg

SEQ ID NO: 4022295 - DNA, 25 bp, Homo sapien
cactgtctgtgttggctggtccagg

SEQ ID NO: 4022296 - DNA, 25 bp, Homo sapien
agtagcccccgtaggtgccctgctt

SEQ ID NO: 4022297 - DNA, 25 bp, Homo sapien
ctgacaggcgccaaggcagaggagg

SEQ ID NO: 4022298 - DNA, 25 bp, Homo sapien
cagatccagctcaaacatgtctgac

SEQ ID NO: 4022299 - DNA, 25 bp, Homo sapien
gggcagatccagctcaaacatgtct

SEQ ID NO: 4022300 - DNA, 25 bp, Homo sapien
tgggcagatccagctcaaacatgtc

SEQ ID NO: 4022301 - DNA, 25 bp, Homo sapien
ggcagatccagctcaaacatgtctg

SEQ ID NO: 4022302 - DNA, 25 bp, Homo sapien
aagaggtaggtcctcagtgactctt

SEQ ID NO: 4022303 - DNA, 25 bp, Homo sapien
ctgctgtaggtgaagaggtaggtcc

SEQ ID NO: 4022304 - DNA, 25 bp, Homo sapien
ctgtaggtgaagaggtaggtcctca

SEQ ID NO: 4022305 - DNA, 25 bp, Homo sapien
gagtcatagacactgctgtaggtga

SEQ ID NO: 4022306 - DNA, 25 bp, Homo sapien
ggacagaagacacaacagggcctca

SEQ ID NO: 4022307 - DNA, 25 bp, Homo sapien
cccgacccatcacggcctctctgtc

SEQ ID NO: 4022308 - DNA, 25 bp, Homo sapien
ctcttcttccccgacccatcacggc

SEQ ID NO: 4022309 - DNA, 25 bp, Homo sapien
acagaagacacaacagggcctcagg

SEQ ID NO: 4022310 - DNA, 25 bp, Homo sapien
cacatgttcccgcatggactcaggg

SEQ ID NO: 4022311 - DNA, 25 bp, Homo sapien
ggtcttccagtcacccatcttcatg

SEQ ID NO: 4022312 - DNA, 25 bp, Homo sapien
taaccagcatggtgcggactttgtc

SEQ ID NO: 4022313 - DNA, 25 bp, Homo sapien
tcagcctcggggaaaaggtcccaca

SEQ ID NO: 4022314 - DNA, 25 bp, Homo sapien
caaacaaaatgtgcctaagggaact

SEQ ID NO: 4022315 - DNA, 25 bp, Homo sapien
gcccaaacatatacatgaccaggag

SEQ ID NO: 4022316 - DNA, 25 bp, Homo sapien
caggagcgacagactgccaatattc

SEQ ID NO: 4022317 - DNA, 25 bp, Homo sapien
gtggagaagcagacagccctttccc

SEQ ID NO: 4022318 - DNA, 25 bp, Homo sapien
tcggccactcgactggatgtccagc

SEQ ID NO: 4022319 - DNA, 25 bp, Homo sapien
aactgcttgctgatcatgcgtcggc

SEQ ID NO: 4022320 - DNA, 25 bp, Homo sapien
gcgttgtgtgcgtccttggtcaggc

SEQ ID NO: 4022321 - DNA, 25 bp, Homo sapien
catcgctctcatgggcggccatgta

SEQ ID NO: 4022322 - DNA, 25 bp, Homo sapien
ttgggctcaagcactaccaagcctg

SEQ ID NO: 4022323 - DNA, 25 bp, Homo sapien
tatgtgtttacatgcaggaggactg

SEQ ID NO: 4022324 - DNA, 25 bp, Homo sapien
tggcaactgggaaagaccaagtgtc

SEQ ID NO: 4022325 - DNA, 25 bp, Homo sapien
gtctacttaaatttgcaccggccag

SEQ ID NO: 4022326 - DNA, 25 bp, Homo sapien
ggtctgcatgctgaatgttgtcctg

SEQ ID NO: 4022327 - DNA, 25 bp, Homo sapien
ctgcactggcgggtctgcatgctga

SEQ ID NO: 4022328 - DNA, 25 bp, Homo sapien
tgtcctgcaagtggctcatgagcat

SEQ ID NO: 4022329 - DNA, 25 bp, Homo sapien
atgttgtcctgcaagtggctcatga

SEQ ID NO: 4022330 - DNA, 25 bp, Homo sapien
aggtcgcgggcctggtaccagcgcg

SEQ ID NO: 4022331 - DNA, 25 bp, Homo sapien
agagcatggtggtagatgtggcaga

SEQ ID NO: 4022332 - DNA, 25 bp, Homo sapien
gcatggtggtagatgtggcagagga

SEQ ID NO: 4022333 - DNA, 25 bp, Homo sapien
taccagcgcgagtgcagagcatggt

SEQ ID NO: 4022334 - DNA, 25 bp, Homo sapien
gtcctcgccctcattttctgcctgg

SEQ ID NO: 4022335 - DNA, 25 bp, Homo sapien
gcggatccggtctgtgcggtccttg

SEQ ID NO: 4022336 - DNA, 25 bp, Homo sapien
tagatgtacttgcacagtctctcca

SEQ ID NO: 4022337 - DNA, 25 bp, Homo sapien
tctgtgcggtccttggcgtagatgt

SEQ ID NO: 4022338 - DNA, 25 bp, Homo sapien
cgcagcaggtagatgcggcagacct

SEQ ID NO: 4022339 - DNA, 25 bp, Homo sapien
caaacttgtagtaggtgtgcaggat

SEQ ID NO: 4022340 - DNA, 25 bp, Homo sapien
tgcacacgctcgatgatggcacaca

SEQ ID NO: 4022341 - DNA, 25 bp, Homo sapien
agatgcggcagacctcctcggtagt

SEQ ID NO: 4022342 - DNA, 25 bp, Homo sapien
gagtgagggtcagtattttgcatta

SEQ ID NO: 4022343 - DNA, 25 bp, Homo sapien
aattcttcatccattcgttccacca

SEQ ID NO: 4022344 - DNA, 25 bp, Homo sapien
accagagttaggatgcagccacgga

SEQ ID NO: 4022345 - DNA, 25 bp, Homo sapien
ccattcgttccaccagagttaggat

SEQ ID NO: 4022346 - DNA, 25 bp, Homo sapien
cagcgttgtgcaggttctcactctc

SEQ ID NO: 4022347 - DNA, 25 bp, Homo sapien
agtccaggcacttcccccacatctc

SEQ ID NO: 4022348 - DNA, 25 bp, Homo sapien
atcagctcattgatgcagtccaggc

SEQ ID NO: 4022349 - DNA, 25 bp, Homo sapien
tcagctcattgatgcagtccaggca

SEQ ID NO: 4022350 - DNA, 25 bp, Homo sapien
tgttttccgctgcaatctgaaccag

SEQ ID NO: 4022351 - DNA, 25 bp, Homo sapien
gaacttgatcttgacaatgacgccc

SEQ ID NO: 4022352 - DNA, 25 bp, Homo sapien
aatgacgccctctcccaggttgttt

SEQ ID NO: 4022353 - DNA, 25 bp, Homo sapien
gagaggcgatgatattgaacttgat

SEQ ID NO: 4022354 - DNA, 25 bp, Homo sapien
tgtaggatctcattcagtttcttga

SEQ ID NO: 4022355 - DNA, 25 bp, Homo sapien
cagtttcttgataacaacagcatgg

SEQ ID NO: 4022356 - DNA, 25 bp, Homo sapien
gatcagttcccttcttgcctcgtgc

SEQ ID NO: 4022357 - DNA, 25 bp, Homo sapien
ggtgatctcagttcccttggcaaac

SEQ ID NO: 4022358 - DNA, 25 bp, Homo sapien
tgtatcagcacatatcccgtcatgt

SEQ ID NO: 4022359 - DNA, 25 bp, Homo sapien
gtatcagcacatatcccgtcatgta

SEQ ID NO: 4022360 - DNA, 25 bp, Homo sapien
ctgtatcagcacatatcccgtcatg

SEQ ID NO: 4022361 - DNA, 25 bp, Homo sapien
ttatgtcctcccaaactgttcccca

SEQ ID NO: 4022362 - DNA, 25 bp, Homo sapien
atgtcctcccaaactgttccccaat

SEQ ID NO: 4022363 - DNA, 25 bp, Homo sapien
ctcccaaactgttccccaattcatt

SEQ ID NO: 4022364 - DNA, 25 bp, Homo sapien
ttcattttacctctgaaaccctcac

SEQ ID NO: 4022365 - DNA, 25 bp, Homo sapien
gatttcctgtcgtgcttcttcttag

SEQ ID NO: 4022366 - DNA, 25 bp, Homo sapien
gcttggatttcctgtcgtgcttctt

SEQ ID NO: 4022367 - DNA, 25 bp, Homo sapien
aggcgcttggatttcctgtcgtgct

SEQ ID NO: 4022368 - DNA, 25 bp, Homo sapien
cactccccgccttcattgtcctcct

SEQ ID NO: 4022369 - DNA, 25 bp, Homo sapien
caacaaaagtgtatggactggccaa

SEQ ID NO: 4022370 - DNA, 25 bp, Homo sapien
cttaaaatggtcttaggctactgga

SEQ ID NO: 4022371 - DNA, 25 bp, Homo sapien
aagatcaccagctaccttaaaatgg

SEQ ID NO: 4022372 - DNA, 25 bp, Homo sapien
taaattaagtcttcccttgccagaa

SEQ ID NO: 4022373 - DNA, 25 bp, Homo sapien
gctgaagctcatgagaataaaccca

SEQ ID NO: 4022374 - DNA, 25 bp, Homo sapien
cagagggcctatcgtgttttctaga

SEQ ID NO: 4022375 - DNA, 25 bp, Homo sapien
tacacagaaaaacgggcaaacagaa

SEQ ID NO: 4022376 - DNA, 25 bp, Homo sapien
cctgggtggcatactcaaggagagt

SEQ ID NO: 4022377 - DNA, 25 bp, Homo sapien
ttgtccacttatggtgctccagaag

SEQ ID NO: 4022378 - DNA, 25 bp, Homo sapien
tgtggaattgtccacttatggtgct

SEQ ID NO: 4022379 - DNA, 25 bp, Homo sapien
gagatgcccaatctttagaagacag

SEQ ID NO: 4022380 - DNA, 25 bp, Homo sapien
tcagactttggaattagagatgccc

SEQ ID NO: 4022381 - DNA, 25 bp, Homo sapien
aaattagtggttgcccagggatagg

SEQ ID NO: 4022382 - DNA, 25 bp, Homo sapien
tgtggtgagttctatgggtgtaaac

SEQ ID NO: 4022383 - DNA, 25 bp, Homo sapien
aggcagggagaagtattacaaaggg

SEQ ID NO: 4022384 - DNA, 25 bp, Homo sapien
gatattatgttttgattgtggtgag

SEQ ID NO: 4022385 - DNA, 25 bp, Homo sapien
ggctggaaactcactacctccctaa

SEQ ID NO: 4022386 - DNA, 25 bp, Homo sapien
gtaagttgttcagcctctctagacc

SEQ ID NO: 4022387 - DNA, 25 bp, Homo sapien
ttagccggatgtactggagtgtacc

SEQ ID NO: 4022388 - DNA, 25 bp, Homo sapien
ttgagatttcactcccatgggatac

SEQ ID NO: 4022389 - DNA, 25 bp, Homo sapien
ttgaggccagcgcggtttgtttccc

SEQ ID NO: 4022390 - DNA, 25 bp, Homo sapien
catcttcggaatcttctgagtcctc

SEQ ID NO: 4022391 - DNA, 25 bp, Homo sapien
tcctctgagtcggaatcggaagatg

SEQ ID NO: 4022392 - DNA, 25 bp, Homo sapien
aatcggaagatgtggaacctgtgtc

SEQ ID NO: 4022393 - DNA, 25 bp, Homo sapien
ggaacttgcgactctccccagaagg

SEQ ID NO: 4022394 - DNA, 25 bp, Homo sapien
ttcaagaaagttgcagcactgactc

SEQ ID NO: 4022395 - DNA, 25 bp, Homo sapien
agttgcagcactgactccgtcctca

SEQ ID NO: 4022396 - DNA, 25 bp, Homo sapien
tctttttgaggaacttgcgactctc

SEQ ID NO: 4022397 - DNA, 25 bp, Homo sapien
tcagcatcttcatccgcagactgct

SEQ ID NO: 4022398 - DNA, 25 bp, Homo sapien
agcatcttcatccgcagactgctcg

SEQ ID NO: 4022399 - DNA, 25 bp, Homo sapien
ctcagcatcttcatccgcagactgc

SEQ ID NO: 4022400 - DNA, 25 bp, Homo sapien
catcttcatccgcagactgctcggg

SEQ ID NO: 4022401 - DNA, 25 bp, Homo sapien
tgggactcgaaatcacggttgtatt

SEQ ID NO: 4022402 - DNA, 25 bp, Homo sapien
gaaatcacggttgtattttcggatc

SEQ ID NO: 4022403 - DNA, 25 bp, Homo sapien
cttgtgatatgggactcgaaatcac

SEQ ID NO: 4022404 - DNA, 25 bp, Homo sapien
tattttcggatcttctgacgcaagg

SEQ ID NO: 4022405 - DNA, 25 bp, Homo sapien
agagccttggcattgttcttgttca

SEQ ID NO: 4022406 - DNA, 25 bp, Homo sapien
gagccttggcattgttcttgttcat

SEQ ID NO: 4022407 - DNA, 25 bp, Homo sapien
ccttggcattgttcttgttcatctt

SEQ ID NO: 4022408 - DNA, 25 bp, Homo sapien
tcagagccttggcattgttcttgtt

SEQ ID NO: 4022409 - DNA, 25 bp, Homo sapien
aggtcagccaggatgcggatataga

SEQ ID NO: 4022410 - DNA, 25 bp, Homo sapien
agccaggatgcggatatagaaccgg

SEQ ID NO: 4022411 - DNA, 25 bp, Homo sapien
tgcggatatagaaccgggggacacc

SEQ ID NO: 4022412 - DNA, 25 bp, Homo sapien
cacaatgcttttggccttcccatat

SEQ ID NO: 4022413 - DNA, 25 bp, Homo sapien
cacttggtgacatcacgaatcttca

SEQ ID NO: 4022414 - DNA, 25 bp, Homo sapien
ttcatggcattacggatggtccgga

SEQ ID NO: 4022415 - DNA, 25 bp, Homo sapien
ccggataaggttggtcagctcctca

SEQ ID NO: 4022416 - DNA, 25 bp, Homo sapien
tggtccggataaggttggtcagctc

SEQ ID NO: 4022417 - DNA, 25 bp, Homo sapien
tcttcatcctcgctcagcaacaatg

SEQ ID NO: 4022418 - DNA, 25 bp, Homo sapien
gcactgcggacaactctcttggtat

SEQ ID NO: 4022419 - DNA, 25 bp, Homo sapien
ttcatcctcgctcagcaacaatggc

SEQ ID NO: 4022420 - DNA, 25 bp, Homo sapien
cttggcactgcggacaactctcttg

SEQ ID NO: 4022421 - DNA, 25 bp, Homo sapien
gacaaggacgactcggactcgctgt

SEQ ID NO: 4022422 - DNA, 25 bp, Homo sapien
tttggtgacgagctcctccccggac

SEQ ID NO: 4022423 - DNA, 25 bp, Homo sapien
tgtttgccatagttgcctccgacag

SEQ ID NO: 4022424 - DNA, 25 bp, Homo sapien
gactcgctgtccgaaccggtggtga

SEQ ID NO: 4022425 - DNA, 25 bp, Homo sapien
acggcgcggaggtgctacggccgga

SEQ ID NO: 4022426 - DNA, 25 bp, Homo sapien
cgacggcgcggaggtgctacggccg

SEQ ID NO: 4022427 - DNA, 25 bp, Homo sapien
cggcgcggaggtgctacggccggac

SEQ ID NO: 4022428 - DNA, 25 bp, Homo sapien
ggcgacggcgcggaggtgctacggc

SEQ ID NO: 4022429 - DNA, 25 bp, Homo sapien
ggccacgcgaagaggcccgagccaa

SEQ ID NO: 4022430 - DNA, 25 bp, Homo sapien
gcgtcaccggccacgcgaagaggcc

SEQ ID NO: 4022431 - DNA, 25 bp, Homo sapien
gggagccaaggcgtcaccggccacg

SEQ ID NO: 4022432 - DNA, 25 bp, Homo sapien
gagccaacacctcccgacgcccaac

SEQ ID NO: 4022433 - DNA, 25 bp, Homo sapien
cacgaagcacgaggcccaaaaaata

SEQ ID NO: 4022434 - DNA, 25 bp, Homo sapien
ccacgaagcacgaggcccaaaaaat

SEQ ID NO: 4022435 - DNA, 25 bp, Homo sapien
tgacagcggaaacgccgagagagaa

SEQ ID NO: 4022436 - DNA, 25 bp, Homo sapien
cagggccctgacagcggaaacgccg

SEQ ID NO: 4022437 - DNA, 25 bp, Homo sapien
tgagcccgcgagtcacaccgcaggg

SEQ ID NO: 4022438 - DNA, 25 bp, Homo sapien
gccctgacagcggaaacgccgagag

SEQ ID NO: 4022439 - DNA, 25 bp, Homo sapien
ttcttgctatatccccacttggtgg

SEQ ID NO: 4022440 - DNA, 25 bp, Homo sapien
tgccttcttgctatatccccacttg

SEQ ID NO: 4022441 - DNA, 25 bp, Homo sapien
aaagagattgcttgtctcgttctct

SEQ ID NO: 4022442 - DNA, 25 bp, Homo sapien
gccttcttgctatatccccacttgg

SEQ ID NO: 4022443 - DNA, 25 bp, Homo sapien
tctagaggtgcaggagaaatgcgcc

SEQ ID NO: 4022444 - DNA, 25 bp, Homo sapien
gcaattgtcacgcagttcaacctgg

SEQ ID NO: 4022445 - DNA, 25 bp, Homo sapien
caggtggtccactaggcaattgtca

SEQ ID NO: 4022446 - DNA, 25 bp, Homo sapien
ttcaaggacgagctggaagcctcca

SEQ ID NO: 4022447 - DNA, 25 bp, Homo sapien
tagcctcgttaaggctgggtctcag

SEQ ID NO: 4022448 - DNA, 25 bp, Homo sapien
gttgccccaggtcacggctggtcca

SEQ ID NO: 4022449 - DNA, 25 bp, Homo sapien
cagacctcactggagagaggtggct

SEQ ID NO: 4022450 - DNA, 25 bp, Homo sapien
ctgcagcccattggacggtgaggtt

SEQ ID NO: 4022451 - DNA, 25 bp, Homo sapien
caaaacatatctgcactggctcacg

SEQ ID NO: 4022452 - DNA, 25 bp, Homo sapien
catatctgcactggctcacgcatgt

SEQ ID NO: 4022453 - DNA, 25 bp, Homo sapien
gggaccaaaacatatctgcactggc

SEQ ID NO: 4022454 - DNA, 25 bp, Homo sapien
tgctggggaccaaaacatatctgca

SEQ ID NO: 4022455 - DNA, 25 bp, Homo sapien
ctgcttctcttctcgtgcttttgtg

SEQ ID NO: 4022456 - DNA, 25 bp, Homo sapien
ttcattagagacagtactttattca

SEQ ID NO: 4022457 - DNA, 25 bp, Homo sapien
cagcctaaagtacttttcattagag

SEQ ID NO: 4022458 - DNA, 25 bp, Homo sapien
tttgtgtcttgagacagtctgtctg

SEQ ID NO: 4022459 - DNA, 25 bp, Homo sapien
attgttccacctcatccaccctcca

SEQ ID NO: 4022460 - DNA, 25 bp, Homo sapien
gattgttccacctcatccaccctcc

SEQ ID NO: 4022461 - DNA, 25 bp, Homo sapien
ttgttccacctcatccaccctccac

SEQ ID NO: 4022462 - DNA, 25 bp, Homo sapien
tgggtaattgttgtgcctcggcctc

SEQ ID NO: 4022463 - DNA, 25 bp, Homo sapien
atgtatccatgtcctgacctggcag

SEQ ID NO: 4022464 - DNA, 25 bp, Homo sapien
aatgtatccatgtcctgacctggca

SEQ ID NO: 4022465 - DNA, 25 bp, Homo sapien
aaatgtatccatgtcctgacctggc

SEQ ID NO: 4022466 - DNA, 25 bp, Homo sapien
aaaatgtatccatgtcctgacctgg

SEQ ID NO: 4022467 - DNA, 25 bp, Homo sapien
ccagttgcaaagaggctttcttgca

SEQ ID NO: 4022468 - DNA, 25 bp, Homo sapien
caaagaggctttcttgcagaagggg

SEQ ID NO: 4022469 - DNA, 25 bp, Homo sapien
gaggctttcttgcagaaggggggat

SEQ ID NO: 4022470 - DNA, 25 bp, Homo sapien
aagaggctttcttgcagaagggggg

SEQ ID NO: 4022471 - DNA, 25 bp, Homo sapien
cgccgcaactcttgcgcacgttgaa

SEQ ID NO: 4022472 - DNA, 25 bp, Homo sapien
ctcttgcgcacgttgaaacattttc

SEQ ID NO: 4022473 - DNA, 25 bp, Homo sapien
atttgtggtagtcctctgcccgccg

SEQ ID NO: 4022474 - DNA, 25 bp, Homo sapien
tttgcatttgtggtagtcctctgcc

SEQ ID NO: 4022475 - DNA, 25 bp, Homo sapien
tcacaactaactccatcggaagcag

SEQ ID NO: 4022476 - DNA, 25 bp, Homo sapien
gaagcagaggattgctcctcatctg

SEQ ID NO: 4022477 - DNA, 25 bp, Homo sapien
tccatcggaagcagaggattgctcc

SEQ ID NO: 4022478 - DNA, 25 bp, Homo sapien
tcatcacaactaactccatcggaag

SEQ ID NO: 4022479 - DNA, 25 bp, Homo sapien
tatggtgtcattaaccccgcagttc

SEQ ID NO: 4022480 - DNA, 25 bp, Homo sapien
gaatatggtgtcattaaccccgcag

SEQ ID NO: 4022481 - DNA, 25 bp, Homo sapien
atggtgtcattaaccccgcagttca

SEQ ID NO: 4022482 - DNA, 25 bp, Homo sapien
aatatggtgtcattaaccccgcagt

SEQ ID NO: 4022483 - DNA, 25 bp, Homo sapien
aaggaattatacagcttaaactaat

SEQ ID NO: 4022484 - DNA, 25 bp, Homo sapien
attatacagcttaaactaatgaagc

SEQ ID NO: 4022485 - DNA, 25 bp, Homo sapien
tacagcttaaactaatgaagcagaa

SEQ ID NO: 4022486 - DNA, 25 bp, Homo sapien
ggaattatacagcttaaactaatga

SEQ ID NO: 4022487 - DNA, 25 bp, Homo sapien
gtaatgacgtctttcaggccaattt

SEQ ID NO: 4022488 - DNA, 25 bp, Homo sapien
gagtaatgacgtctttcaggccaat

SEQ ID NO: 4022489 - DNA, 25 bp, Homo sapien
tgacgtctttcaggccaattttatt

SEQ ID NO: 4022490 - DNA, 25 bp, Homo sapien
tagagtaatgacgtctttcaggcca

SEQ ID NO: 4022491 - DNA, 25 bp, Homo sapien
tctttgtgtgcatacaaatggacct

SEQ ID NO: 4022492 - DNA, 25 bp, Homo sapien
tttgtgtgcatacaaatggacctca

SEQ ID NO: 4022493 - DNA, 25 bp, Homo sapien
tcttttctttgtgtgcatacaaatg

SEQ ID NO: 4022494 - DNA, 25 bp, Homo sapien
tttctttgtgtgcatacaaatggac

SEQ ID NO: 4022495 - DNA, 25 bp, Homo sapien
aggagaaggtgagaaacctgaggtc

SEQ ID NO: 4022496 - DNA, 25 bp, Homo sapien
gaggtcaagaagctgttctttccct

SEQ ID NO: 4022497 - DNA, 25 bp, Homo sapien
aaactcatttccacactatggggac

SEQ ID NO: 4022498 - DNA, 25 bp, Homo sapien
cactatggggactccaacagagcca

SEQ ID NO: 4022499 - DNA, 25 bp, Homo sapien
ttcgagaccagaagatagtcttcag

SEQ ID NO: 4022500 - DNA, 25 bp, Homo sapien
tccatttcgagaccagaagatagtc

SEQ ID NO: 4022501 - DNA, 25 bp, Homo sapien
atttcgagaccagaagatagtcttc

SEQ ID NO: 4022502 - DNA, 25 bp, Homo sapien
ccatcatgtccatttcgagaccaga

SEQ ID NO: 4022503 - DNA, 25 bp, Homo sapien
tacctctacagaaagttagtatact

SEQ ID NO: 4022504 - DNA, 25 bp, Homo sapien
ctctacagaaagttagtatactcac

SEQ ID NO: 4022505 - DNA, 25 bp, Homo sapien
cctctacagaaagttagtatactca

SEQ ID NO: 4022506 - DNA, 25 bp, Homo sapien
gtatacctctacagaaagttagtat

SEQ ID NO: 4022507 - DNA, 25 bp, Homo sapien
gatagacagccagactattgataac

SEQ ID NO: 4022508 - DNA, 25 bp, Homo sapien
acgatgacgatagacagccagacta

SEQ ID NO: 4022509 - DNA, 25 bp, Homo sapien
atgttaaatgtgtaacgtctcagaa

SEQ ID NO: 4022510 - DNA, 25 bp, Homo sapien
gaatgttaaatgtgtaacgtctcag

SEQ ID NO: 4022511 - DNA, 25 bp, Homo sapien
gtgcctgacaatgcactcagcaaat

SEQ ID NO: 4022512 - DNA, 25 bp, Homo sapien
acaggtgcctgacaatgcactcagc

SEQ ID NO: 4022513 - DNA, 25 bp, Homo sapien
caggtgcctgacaatgcactcagca

SEQ ID NO: 4022514 - DNA, 25 bp, Homo sapien
gagtacaggtgcctgacaatgcact

SEQ ID NO: 4022515 - DNA, 25 bp, Homo sapien
aggtacgcaccaccaggcccgacta

SEQ ID NO: 4022516 - DNA, 25 bp, Homo sapien
ctctccagtaactgggataacaggt

SEQ ID NO: 4022517 - DNA, 25 bp, Homo sapien
ataacaggtacgcaccaccaggccc

SEQ ID NO: 4022518 - DNA, 25 bp, Homo sapien
tctccagtaactgggataacaggta

SEQ ID NO: 4022519 - DNA, 25 bp, Homo sapien
aaaagcgcagccgcatgtcctggtc

SEQ ID NO: 4022520 - DNA, 25 bp, Homo sapien
atgaggagccaaaagcgcagccgca

SEQ ID NO: 4022521 - DNA, 25 bp, Homo sapien
gccaaaagcgcagccgcatgtcctg

SEQ ID NO: 4022522 - DNA, 25 bp, Homo sapien
ggagccaaaagcgcagccgcatgtc

SEQ ID NO: 4022523 - DNA, 25 bp, Homo sapien
ttagctacaggtcacggagaagatc

SEQ ID NO: 4022524 - DNA, 25 bp, Homo sapien
gtttagctacaggtcacggagaaga

SEQ ID NO: 4022525 - DNA, 25 bp, Homo sapien
ggatccggttcaaattaagttctca

SEQ ID NO: 4022526 - DNA, 25 bp, Homo sapien
ttaagttctcaagcgctggtggaag

SEQ ID NO: 4022527 - DNA, 25 bp, Homo sapien
tacattcgaccaaactgctttttct

SEQ ID NO: 4022528 - DNA, 25 bp, Homo sapien
tctactccgtttaatcatgctggtg

SEQ ID NO: 4022529 - DNA, 25 bp, Homo sapien
gaagtctactccgtttaatcatgct

SEQ ID NO: 4022530 - DNA, 25 bp, Homo sapien
ctccgtttaatcatgctggtgatga

SEQ ID NO: 4022531 - DNA, 25 bp, Homo sapien
aggtactcgcatgggcatgtcactg

SEQ ID NO: 4022532 - DNA, 25 bp, Homo sapien
ctcaggtactcgcatgggcatgtca

SEQ ID NO: 4022533 - DNA, 25 bp, Homo sapien
tcctcaggtactcgcatgggcatgt

SEQ ID NO: 4022534 - DNA, 25 bp, Homo sapien
cttcctcaggtactcgcatgggcat

SEQ ID NO: 4022535 - DNA, 25 bp, Homo sapien
ccaagttgctgtgcgaccaggtggt

SEQ ID NO: 4022536 - DNA, 25 bp, Homo sapien
ggtctcggccttctacgccggtgag

SEQ ID NO: 4022537 - DNA, 25 bp, Homo sapien
tcaactacgtgtggctgggcctgct

SEQ ID NO: 4022538 - DNA, 25 bp, Homo sapien
tggtggtgaccttccacgccaactt

SEQ ID NO: 4022539 - DNA, 25 bp, Homo sapien
cagaaaatccacgcctggggccccg

SEQ ID NO: 4022540 - DNA, 25 bp, Homo sapien
ctgctgttcagaaaatccacgcctg

SEQ ID NO: 4022541 - DNA, 25 bp, Homo sapien
gaacaaaatgcaaggggacccgtga

SEQ ID NO: 4022542 - DNA, 25 bp, Homo sapien
cgcataggttgcataggttatagtc

SEQ ID NO: 4022543 - DNA, 25 bp, Homo sapien
ccagtgagtcatgatgctagcgcat

SEQ ID NO: 4022544 - DNA, 25 bp, Homo sapien
cagggtgacctcattccacccaggg

SEQ ID NO: 4022545 - DNA, 25 bp, Homo sapien
atattctcccaagtagtgtgtcccc

SEQ ID NO: 4022546 - DNA, 25 bp, Homo sapien
ttgccttcttcatcaatgtcatcta

SEQ ID NO: 4022547 - DNA, 25 bp, Homo sapien
ttcatcaatgtcatctacctcatac

SEQ ID NO: 4022548 - DNA, 25 bp, Homo sapien
cttcatcaatgtcatctacctcata

SEQ ID NO: 4022549 - DNA, 25 bp, Homo sapien
gctttgccttcttcatcaatgtcat

SEQ ID NO: 4022550 - DNA, 25 bp, Homo sapien
cacagcacgctctgtggagtttttc

SEQ ID NO: 4022551 - DNA, 25 bp, Homo sapien
gcccacagcacgctctgtggagttt

SEQ ID NO: 4022552 - DNA, 25 bp, Homo sapien
acagcacgctctgtggagtttttct

SEQ ID NO: 4022553 - DNA, 25 bp, Homo sapien
ccgcccacagcacgctctgtggagt

SEQ ID NO: 4022554 - DNA, 25 bp, Homo sapien
gggcaggtgcagggggcgtgacttc

SEQ ID NO: 4022555 - DNA, 25 bp, Homo sapien
gggctggaggcgcggcctgaggtgg

SEQ ID NO: 4022556 - DNA, 25 bp, Homo sapien
gctggaggcgcggcctgaggtgggc

SEQ ID NO: 4022557 - DNA, 25 bp, Homo sapien
gcaggtgcagggggcgtgacttcat

SEQ ID NO: 4022558 - DNA, 25 bp, Homo sapien
tggcctgggcggtttccacatgtga

SEQ ID NO: 4022559 - DNA, 25 bp, Homo sapien
agctctggcccctagtagcagctca

SEQ ID NO: 4022560 - DNA, 25 bp, Homo sapien
tcaatgggccgtgtttgtcctggag

SEQ ID NO: 4022561 - DNA, 25 bp, Homo sapien
gggtcttgcaatgctgcaccaggtt

SEQ ID NO: 4022562 - DNA, 25 bp, Homo sapien
catggatcagggcacggtagaagca

SEQ ID NO: 4022563 - DNA, 25 bp, Homo sapien
ctgtaggggcgcatggatcagggca

SEQ ID NO: 4022564 - DNA, 25 bp, Homo sapien
gggcgcatggatcagggcacggtag

SEQ ID NO: 4022565 - DNA, 25 bp, Homo sapien
ccgctgtaggggcgcatggatcagg

SEQ ID NO: 4022566 - DNA, 25 bp, Homo sapien
ttacagggccaacatgagctgctcc

SEQ ID NO: 4022567 - DNA, 25 bp, Homo sapien
ctgggggttggccttccactgatgc

SEQ ID NO: 4022568 - DNA, 25 bp, Homo sapien
ggccttccactgatgccatgactgc

SEQ ID NO: 4022569 - DNA, 25 bp, Homo sapien
ggttggccttccactgatgccatga

SEQ ID NO: 4022570 - DNA, 25 bp, Homo sapien
gaatagacaatacaccttgagcgag

SEQ ID NO: 4022571 - DNA, 25 bp, Homo sapien
tatacatgcttgctcctaggactca

SEQ ID NO: 4022572 - DNA, 25 bp, Homo sapien
tgaccaggtgaatgccgaggcttcc

SEQ ID NO: 4022573 - DNA, 25 bp, Homo sapien
gatccggcgcaagctcacggtgtgt

SEQ ID NO: 4022574 - DNA, 25 bp, Homo sapien
ttgccttcttcatcaatgtcatcta

SEQ ID NO: 4022575 - DNA, 25 bp, Homo sapien
ttcatcaatgtcatctacctcatac

SEQ ID NO: 4022576 - DNA, 25 bp, Homo sapien
cttcatcaatgtcatctacctcata

SEQ ID NO: 4022577 - DNA, 25 bp, Homo sapien
gctttgccttcttcatcaatgtcat

SEQ ID NO: 4022578 - DNA, 25 bp, Homo sapien
agaggagactgtggacctcatggtt

SEQ ID NO: 4022579 - DNA, 25 bp, Homo sapien
ccgtccgccgggagttcatggacca

SEQ ID NO: 4022580 - DNA, 25 bp, Homo sapien
tgaggaaaggtaggtgccggccagc

SEQ ID NO: 4022581 - DNA, 25 bp, Homo sapien
ttcaaaagatcctggagtttgtggg

SEQ ID NO: 4022582 - DNA, 25 bp, Homo sapien
agggggaatgtgtttaatcccagca

SEQ ID NO: 4022583 - DNA, 25 bp, Homo sapien
tgctgtcctgccctgtgtcgttggg

SEQ ID NO: 4022584 - DNA, 25 bp, Homo sapien
tgtttaatcccagcacgtcctctgc

SEQ ID NO: 4022585 - DNA, 25 bp, Homo sapien
gggatggcgagtctgccaggcggca

SEQ ID NO: 4022586 - DNA, 25 bp, Homo sapien
ttcttgggttccttacaagccacca

SEQ ID NO: 4022587 - DNA, 25 bp, Homo sapien
tcttgggttccttacaagccaccac

SEQ ID NO: 4022588 - DNA, 25 bp, Homo sapien
cttgggttccttacaagccaccacg

SEQ ID NO: 4022589 - DNA, 25 bp, Homo sapien
ggggaggggaatagccatctgcata

SEQ ID NO: 4022590 - DNA, 25 bp, Homo sapien
tcaaacaggaccgagtagtcatcct

SEQ ID NO: 4022591 - DNA, 25 bp, Homo sapien
gtcttcaaacaggaccgagtagtca

SEQ ID NO: 4022592 - DNA, 25 bp, Homo sapien
aacaggaccgagtagtcatcctggg

SEQ ID NO: 4022593 - DNA, 25 bp, Homo sapien
tgtcccatgtcaccaagagcacaag

SEQ ID NO: 4022594 - DNA, 25 bp, Homo sapien
tgttgagaggactgagggcaaccca

SEQ ID NO: 4022595 - DNA, 25 bp, Homo sapien
caggagcttcccatctcggagctgg

SEQ ID NO: 4022596 - DNA, 25 bp, Homo sapien
ccagcctagaccacaggaggctctg

SEQ ID NO: 4022597 - DNA, 25 bp, Homo sapien
ccatggcctctcccctggaggctgc

SEQ ID NO: 4022598 - DNA, 25 bp, Homo sapien
acccatggcctctcccctggaggct

SEQ ID NO: 4022599 - DNA, 25 bp, Homo sapien
atggcctctcccctggaggctgctt

SEQ ID NO: 4022600 - DNA, 25 bp, Homo sapien
atcacccatggcctctcccctggag

SEQ ID NO: 4022601 - DNA, 25 bp, Homo sapien
ggcgcatggatcagggcgcggtaga

SEQ ID NO: 4022602 - DNA, 25 bp, Homo sapien
tagtctggggatacagggccagcac

SEQ ID NO: 4022603 - DNA, 25 bp, Homo sapien
agcgggatgacacggcgccggctca

SEQ ID NO: 4022604 - DNA, 25 bp, Homo sapien
cgtctccgggttggccttccactgg

SEQ ID NO: 4022605 - DNA, 25 bp, Homo sapien
ttcatcgatgtcatctacctcatac

SEQ ID NO: 4022606 - DNA, 25 bp, Homo sapien
tttgccttcttcatcgatgtcatct

SEQ ID NO: 4022607 - DNA, 25 bp, Homo sapien
gccttcttcatcgatgtcatctacc

SEQ ID NO: 4022608 - DNA, 25 bp, Homo sapien
cttcatcgatgtcatctacctcata

SEQ ID NO: 4022609 - DNA, 25 bp, Homo sapien
ctggatgcagccaggggcgcagtac

SEQ ID NO: 4022610 - DNA, 25 bp, Homo sapien
gaggaaaaggctggatgcagccagg

SEQ ID NO: 4022611 - DNA, 25 bp, Homo sapien
caaaaggaggaaaaggctggatgca

SEQ ID NO: 4022612 - DNA, 25 bp, Homo sapien
ctgcagacaaaaggaggaaaaggct

SEQ ID NO: 4022613 - DNA, 25 bp, Homo sapien
tccacggccttcacccgggcagcca

SEQ ID NO: 4022614 - DNA, 25 bp, Homo sapien
ggtggcatggctgtaactgaccacc

SEQ ID NO: 4022615 - DNA, 25 bp, Homo sapien
cccatccacggccttcacccgggca

SEQ ID NO: 4022616 - DNA, 25 bp, Homo sapien
tggtggcatggctgtaactgaccac

SEQ ID NO: 4022617 - DNA, 25 bp, Homo sapien
tgaggcagggatggccccacagagg

SEQ ID NO: 4022618 - DNA, 25 bp, Homo sapien
ctgaggcagggatggccccacagag

SEQ ID NO: 4022619 - DNA, 25 bp, Homo sapien
accagcccctccctcgcagctgctg

SEQ ID NO: 4022620 - DNA, 25 bp, Homo sapien
gtggaacaaagggtcagtcccagcc

SEQ ID NO: 4022621 - DNA, 25 bp, Homo sapien
tgagtggaacaaagggtcagtccca

SEQ ID NO: 4022622 - DNA, 25 bp, Homo sapien
ctgtgagtggaacaaagggtcagtc

SEQ ID NO: 4022623 - DNA, 25 bp, Homo sapien
tctgcgcatggtcttccggggtggc

SEQ ID NO: 4022624 - DNA, 25 bp, Homo sapien
ctgctgcagcagggtcatcagcacc

SEQ ID NO: 4022625 - DNA, 25 bp, Homo sapien
cagggtcatcagcacccctctgcgc

SEQ ID NO: 4022626 - DNA, 25 bp, Homo sapien
cagggtcatggccgactgctgcagc

SEQ ID NO: 4022627 - DNA, 25 bp, Homo sapien
tctcagtggtagagccagtctgcca

SEQ ID NO: 4022628 - DNA, 25 bp, Homo sapien
gcctctcctcttgtcctagcaaagg

SEQ ID NO: 4022629 - DNA, 25 bp, Homo sapien
gtctgccagagcctccatgggagga

SEQ ID NO: 4022630 - DNA, 25 bp, Homo sapien
aaaggacctcccagcatgttctctc

SEQ ID NO: 4022631 - DNA, 25 bp, Homo sapien
caatccgcctctcttccaacagaga

SEQ ID NO: 4022632 - DNA, 25 bp, Homo sapien
gagacttgatttccgcgatcttgtc

SEQ ID NO: 4022633 - DNA, 25 bp, Homo sapien
gcctctcttccaacagagacttgat

SEQ ID NO: 4022634 - DNA, 25 bp, Homo sapien
ccaacagagacttgatttccgcgat

SEQ ID NO: 4022635 - DNA, 25 bp, Homo sapien
gaggccacgcagctttgtccggtaa

SEQ ID NO: 4022636 - DNA, 25 bp, Homo sapien
cggttgtgtagaggccacgcagctt

SEQ ID NO: 4022637 - DNA, 25 bp, Homo sapien
cagctttgtccggtaatagggagaa

SEQ ID NO: 4022638 - DNA, 25 bp, Homo sapien
tctgcatcggccttggcggttgtgt

SEQ ID NO: 4022639 - DNA, 25 bp, Homo sapien
tgtgtgctctaagggcaagcttccc

SEQ ID NO: 4022640 - DNA, 25 bp, Homo sapien
tgcctttcgaatcctcagagtagag

SEQ ID NO: 4022641 - DNA, 25 bp, Homo sapien
ttttgaatacaatgaccacctcggt

SEQ ID NO: 4022642 - DNA, 25 bp, Homo sapien
gattaacggaaagctgtccctcctg

SEQ ID NO: 4022643 - DNA, 25 bp, Homo sapien
ctctgtctgcatccgctcatgggtc

SEQ ID NO: 4022644 - DNA, 25 bp, Homo sapien
gttgtgttcgctccgcgaacgctct

SEQ ID NO: 4022645 - DNA, 25 bp, Homo sapien
tgggtcttctggatgttcactaagt

SEQ ID NO: 4022646 - DNA, 25 bp, Homo sapien
gttcactaagttgtgttcgctccgc

SEQ ID NO: 4022647 - DNA, 25 bp, Homo sapien
ctctgtgagaagttctgcaatgcgg

SEQ ID NO: 4022648 - DNA, 25 bp, Homo sapien
aagttctgcaatgcgggaatcggca

SEQ ID NO: 4022649 - DNA, 25 bp, Homo sapien
tgtgagaagttctgcaatgcgggaa

SEQ ID NO: 4022650 - DNA, 25 bp, Homo sapien
caatgcgggaatcggcagacacgag

SEQ ID NO: 4022651 - DNA, 25 bp, Homo sapien
tcacgatgaatggagtaaactcttc

SEQ ID NO: 4022652 - DNA, 25 bp, Homo sapien
cacttaatcaactgcgaacctctcg

SEQ ID NO: 4022653 - DNA, 25 bp, Homo sapien
taacctcctcaacctgatgaagggc

SEQ ID NO: 4022654 - DNA, 25 bp, Homo sapien
ccctaagtcaggaacaagatgagca

SEQ ID NO: 4022655 - DNA, 25 bp, Homo sapien
ccccattcttgagagtggaatcctc

SEQ ID NO: 4022656 - DNA, 25 bp, Homo sapien
ctctttcataagggcgctaacccca

SEQ ID NO: 4022657 - DNA, 25 bp, Homo sapien
cattcttgagagtggaatcctcaca

SEQ ID NO: 4022658 - DNA, 25 bp, Homo sapien
tcttgagagtggaatcctcacagcc

SEQ ID NO: 4022659 - DNA, 25 bp, Homo sapien
cacaaagaaatgaagtacgccacct

SEQ ID NO: 4022660 - DNA, 25 bp, Homo sapien
aagaaatgaagtacgccacctgcca

SEQ ID NO: 4022661 - DNA, 25 bp, Homo sapien
ccacaaagaaatgaagtacgccacc

SEQ ID NO: 4022662 - DNA, 25 bp, Homo sapien
atgaagtacgccacctgccatacag

SEQ ID NO: 4022663 - DNA, 25 bp, Homo sapien
tttttgtaaacacagatcatatttt

SEQ ID NO: 4022664 - DNA, 25 bp, Homo sapien
ggaagagaacgttcagcaagccaaa

SEQ ID NO: 4022665 - DNA, 25 bp, Homo sapien
cctgactagaggctcaagggttcaa

SEQ ID NO: 4022666 - DNA, 25 bp, Homo sapien
tttggctgcaaaccggagccgagga

SEQ ID NO: 4022667 - DNA, 25 bp, Homo sapien
tggtggagaccaaagcctgactaga

SEQ ID NO: 4022668 - DNA, 25 bp, Homo sapien
gagtccgggacaaaacaagctcgtc

SEQ ID NO: 4022669 - DNA, 25 bp, Homo sapien
aagctcgtcgggctggaaactgcga

SEQ ID NO: 4022670 - DNA, 25 bp, Homo sapien
agcaggcgcgttcctcgaacccttt

SEQ ID NO: 4022671 - DNA, 25 bp, Homo sapien
ccctttttcggagtctgcggatgat

SEQ ID NO: 4022672 - DNA, 25 bp, Homo sapien
aagattggcggcacgtcgagaaccg

SEQ ID NO: 4022673 - DNA, 25 bp, Homo sapien
ctgcgttcgaagattggcggcacgt

SEQ ID NO: 4022674 - DNA, 25 bp, Homo sapien
ttggcggcacgtcgagaaccgcaca

SEQ ID NO: 4022675 - DNA, 25 bp, Homo sapien
cgtcgagaaccgcacacgctttttt

SEQ ID NO: 4022676 - DNA, 25 bp, Homo sapien
ttaaccaaccaaagtgcttgtgcgt

SEQ ID NO: 4022677 - DNA, 25 bp, Homo sapien
aaccaaccaaagtgcttgtgcgttt

SEQ ID NO: 4022678 - DNA, 25 bp, Homo sapien
ccaaccaaagtgcttgtgcgttttc

SEQ ID NO: 4022679 - DNA, 25 bp, Homo sapien
aaccaaagtgcttgtgcgttttcag

SEQ ID NO: 4022680 - DNA, 25 bp, Homo sapien
gaaatcatgaccttgtggtcactga

SEQ ID NO: 4022681 - DNA, 25 bp, Homo sapien
tcatgaccttgtggtcactgatgtc

SEQ ID NO: 4022682 - DNA, 25 bp, Homo sapien
gaatgtccggggaaatcatgacctt

SEQ ID NO: 4022683 - DNA, 25 bp, Homo sapien
tcaagcagggaatgtccggggaaat

SEQ ID NO: 4022684 - DNA, 25 bp, Homo sapien
aatgatacatcaagacactgaggcc

SEQ ID NO: 4022685 - DNA, 25 bp, Homo sapien
attggagcaagccttctggcaccca

SEQ ID NO: 4022686 - DNA, 25 bp, Homo sapien
gaatcagactccttaagttcacggt

SEQ ID NO: 4022687 - DNA, 25 bp, Homo sapien
caccagcctgtgtcggagaatcaga

SEQ ID NO: 4022688 - DNA, 25 bp, Homo sapien
cttaggccggcccagacgggcttgc

SEQ ID NO: 4022689 - DNA, 25 bp, Homo sapien
ttaggccggcccagacgggcttgca

SEQ ID NO: 4022690 - DNA, 25 bp, Homo sapien
gcttaggccggcccagacgggcttg

SEQ ID NO: 4022691 - DNA, 25 bp, Homo sapien
gtgcacgcgactccttgggacagag

SEQ ID NO: 4022692 - DNA, 25 bp, Homo sapien
catcatgcctcagagggcttggctc

SEQ ID NO: 4022693 - DNA, 25 bp, Homo sapien
ggacagagacgtctaggagggaccc

SEQ ID NO: 4022694 - DNA, 25 bp, Homo sapien
gctcccaggccggagtccgacgaaa

SEQ ID NO: 4022695 - DNA, 25 bp, Homo sapien
gggcacagaggaccatggggccggc

SEQ ID NO: 4022696 - DNA, 25 bp, Homo sapien
gcacagaggaccatggggccggctt

SEQ ID NO: 4022697 - DNA, 25 bp, Homo sapien
gccggcttcgggattccactcgttc

SEQ ID NO: 4022698 - DNA, 25 bp, Homo sapien
ggcacagaggaccatggggccggct

SEQ ID NO: 4022699 - DNA, 25 bp, Homo sapien
gaccaaattcttgcccacctgcatg

SEQ ID NO: 4022700 - DNA, 25 bp, Homo sapien
tctgcatcaaggagccttggtgcct

SEQ ID NO: 4022701 - DNA, 25 bp, Homo sapien
ccttttctttcgagtcccagccttg

SEQ ID NO: 4022702 - DNA, 25 bp, Homo sapien
ccaacagcgtccacttttctagaag

SEQ ID NO: 4022703 - DNA, 25 bp, Homo sapien
ataggcctctcccagtgacgggcaa

SEQ ID NO: 4022704 - DNA, 25 bp, Homo sapien
taggccacagctagtctgggccgcc

SEQ ID NO: 4022705 - DNA, 25 bp, Homo sapien
tcctctttgctcagggccagaactc

SEQ ID NO: 4022706 - DNA, 25 bp, Homo sapien
catcggccgcatcctcctgagtatt

SEQ ID NO: 4022707 - DNA, 25 bp, Homo sapien
cagtagcctctaggagcctttctcc

SEQ ID NO: 4022708 - DNA, 25 bp, Homo sapien
cctcctgaggctgtcccagcctccc

SEQ ID NO: 4022709 - DNA, 25 bp, Homo sapien
agcctccccgcctgaggctatcccg

SEQ ID NO: 4022710 - DNA, 25 bp, Homo sapien
ccatctaaaattgccctggcctctt

SEQ ID NO: 4022711 - DNA, 25 bp, Homo sapien
ctccccgcctgaggctgtctcagcc

SEQ ID NO: 4022712 - DNA, 25 bp, Homo sapien
tagtgctttcacaggccttctccac

SEQ ID NO: 4022713 - DNA, 25 bp, Homo sapien
ccccatgccctagtgctttcacagg

SEQ ID NO: 4022714 - DNA, 25 bp, Homo sapien
atgccaggtccactctgactccgcc

SEQ ID NO: 4022715 - DNA, 25 bp, Homo sapien
atctcccggttgtcccctgccgcct

SEQ ID NO: 4022716 - DNA, 25 bp, Homo sapien
agctgagctccccacttcatgtctt

SEQ ID NO: 4022717 - DNA, 25 bp, Homo sapien
tttctggcctccaagtgggcgcttg

SEQ ID NO: 4022718 - DNA, 25 bp, Homo sapien
cctcgttttggctgcctctaaggcc

SEQ ID NO: 4022719 - DNA, 25 bp, Homo sapien
aagtgggcgcttggctcctggcacc

SEQ ID NO: 4022720 - DNA, 25 bp, Homo sapien
tgcgcctcccgctctacagtgggga

SEQ ID NO: 4022721 - DNA, 25 bp, Homo sapien
ctgcgcctcccgctctacagtgggg

SEQ ID NO: 4022722 - DNA, 25 bp, Homo sapien
agcccagggaggtatagccggagga

SEQ ID NO: 4022723 - DNA, 25 bp, Homo sapien
cagggaggtatagccggaggaagtc

SEQ ID NO: 4022724 - DNA, 25 bp, Homo sapien
ccagggaggtatagccggaggaagt

SEQ ID NO: 4022725 - DNA, 25 bp, Homo sapien
cccagggaggtatagccggaggaag

SEQ ID NO: 4022726 - DNA, 25 bp, Homo sapien
gagtttcttcctggcatcatgcctt

SEQ ID NO: 4022727 - DNA, 25 bp, Homo sapien
gggagtttcttcctggcatcatgcc

SEQ ID NO: 4022728 - DNA, 25 bp, Homo sapien
accccagagaccctccatgaactgt

SEQ ID NO: 4022729 - DNA, 25 bp, Homo sapien
caccccagagaccctccatgaactg

SEQ ID NO: 4022730 - DNA, 25 bp, Homo sapien
gaggcaggcagatcgcctgccagga

SEQ ID NO: 4022731 - DNA, 25 bp, Homo sapien
tcgggcatggtggcagagacctgta

SEQ ID NO: 4022732 - DNA, 25 bp, Homo sapien
aatgagtcgggcatggtggcagaga

SEQ ID NO: 4022733 - DNA, 25 bp, Homo sapien
cgaggcaggcagatcgcctgccagg

SEQ ID NO: 4022734 - DNA, 25 bp, Homo sapien
gaaatcatgaccttgtggtcactga

SEQ ID NO: 4022735 - DNA, 25 bp, Homo sapien
tcatgaccttgtggtcactgatgtc

SEQ ID NO: 4022736 - DNA, 25 bp, Homo sapien
gaatgtccggggaaatcatgacctt

SEQ ID NO: 4022737 - DNA, 25 bp, Homo sapien
tcaagcagggaatgtccggggaaat

SEQ ID NO: 4022738 - DNA, 25 bp, Homo sapien
tttttaaaagatggggatcttgcta

SEQ ID NO: 4022739 - DNA, 25 bp, Homo sapien
tttaaaagatggggatcttgctatg

SEQ ID NO: 4022740 - DNA, 25 bp, Homo sapien
ttaaaagatggggatcttgctatgc

SEQ ID NO: 4022741 - DNA, 25 bp, Homo sapien
ttttaaaagatggggatcttgctat

SEQ ID NO: 4022742 - DNA, 25 bp, Homo sapien
aatgatacatcaagacactgaggcc

SEQ ID NO: 4022743 - DNA, 25 bp, Homo sapien
attggagcaagccttctggcaccca

SEQ ID NO: 4022744 - DNA, 25 bp, Homo sapien
caccagcctgtgtcggagaatcaga

SEQ ID NO: 4022745 - DNA, 25 bp, Homo sapien
gaatcagactccttaagttcacggt

SEQ ID NO: 4022746 - DNA, 25 bp, Homo sapien
cttaggccggcccagacgggcttgc

SEQ ID NO: 4022747 - DNA, 25 bp, Homo sapien
ttaggccggcccagacgggcttgca

SEQ ID NO: 4022748 - DNA, 25 bp, Homo sapien
gcttaggccggcccagacgggcttg

SEQ ID NO: 4022749 - DNA, 25 bp, Homo sapien
tcatgccagggtgcgcgaggccaaa

SEQ ID NO: 4022750 - DNA, 25 bp, Homo sapien
ctcctgcatcatgccagggtgcgcg

SEQ ID NO: 4022751 - DNA, 25 bp, Homo sapien
catcatgccagggtgcgcgaggcca

SEQ ID NO: 4022752 - DNA, 25 bp, Homo sapien
cctgcatcatgccagggtgcgcgag

SEQ ID NO: 4022753 - DNA, 25 bp, Homo sapien
cccatcatgcctcagagggcttggc

SEQ ID NO: 4022754 - DNA, 25 bp, Homo sapien
gagcttctcgagaggtgcacgcgac

SEQ ID NO: 4022755 - DNA, 25 bp, Homo sapien
ggacagagacgtctaggagggaccc

SEQ ID NO: 4022756 - DNA, 25 bp, Homo sapien
gctcccaggccggagtccgacgaaa

SEQ ID NO: 4022757 - DNA, 25 bp, Homo sapien
cgggagcgacgctgtgaggagcttc

SEQ ID NO: 4022758 - DNA, 25 bp, Homo sapien
gggcacagaggaccatggggccggc

SEQ ID NO: 4022759 - DNA, 25 bp, Homo sapien
gcacagaggaccatggggccggctt

SEQ ID NO: 4022760 - DNA, 25 bp, Homo sapien
gccggcttcgggattccactcgttc

SEQ ID NO: 4022761 - DNA, 25 bp, Homo sapien
ggcacagaggaccatggggccggct

SEQ ID NO: 4022762 - DNA, 25 bp, Homo sapien
ccttttctttcgagtcccagccttg

SEQ ID NO: 4022763 - DNA, 25 bp, Homo sapien
tctgcatcaaggagccttggtgcct

SEQ ID NO: 4022764 - DNA, 25 bp, Homo sapien
gaccaaattcttgcccacctgcatg

SEQ ID NO: 4022765 - DNA, 25 bp, Homo sapien
ccaacagcgtccacttttctagaag

SEQ ID NO: 4022766 - DNA, 25 bp, Homo sapien
gctcctggttctctgagacagacgc

SEQ ID NO: 4022767 - DNA, 25 bp, Homo sapien
tcctggttctctgagacagacgcct

SEQ ID NO: 4022768 - DNA, 25 bp, Homo sapien
ctggttctctgagacagacgcctct

SEQ ID NO: 4022769 - DNA, 25 bp, Homo sapien
cctggttctctgagacagacgcctc

SEQ ID NO: 4022770 - DNA, 25 bp, Homo sapien
catgccctagtgctttcacaggcct

SEQ ID NO: 4022771 - DNA, 25 bp, Homo sapien
cagtagcctctaggagcctttctcc

SEQ ID NO: 4022772 - DNA, 25 bp, Homo sapien
ccatctaaaattgccctggcctctt

SEQ ID NO: 4022773 - DNA, 25 bp, Homo sapien
atgccaggtccactctgactccgcc

SEQ ID NO: 4022774 - DNA, 25 bp, Homo sapien
agctgagctccccacttcatgtctt

SEQ ID NO: 4022775 - DNA, 25 bp, Homo sapien
tttctggcctccaagtgggcgcttg

SEQ ID NO: 4022776 - DNA, 25 bp, Homo sapien
cctcgttttggctgcctctaaggcc

SEQ ID NO: 4022777 - DNA, 25 bp, Homo sapien
aagtgggcgcttggctcctggcacc

SEQ ID NO: 4022778 - DNA, 25 bp, Homo sapien
tgcgcctcccgctctacagtgggga

SEQ ID NO: 4022779 - DNA, 25 bp, Homo sapien
ctgcgcctcccgctctacagtgggg

SEQ ID NO: 4022780 - DNA, 25 bp, Homo sapien
agcccagggaggtatagccggagga

SEQ ID NO: 4022781 - DNA, 25 bp, Homo sapien
cagggaggtatagccggaggaagtc

SEQ ID NO: 4022782 - DNA, 25 bp, Homo sapien
ccagggaggtatagccggaggaagt

SEQ ID NO: 4022783 - DNA, 25 bp, Homo sapien
cccagggaggtatagccggaggaag

SEQ ID NO: 4022784 - DNA, 25 bp, Homo sapien
gagtttcttcctggcatcatgcctt

SEQ ID NO: 4022785 - DNA, 25 bp, Homo sapien
gggagtttcttcctggcatcatgcc

SEQ ID NO: 4022786 - DNA, 25 bp, Homo sapien
accccagagaccctccatgaactgt

SEQ ID NO: 4022787 - DNA, 25 bp, Homo sapien
caccccagagaccctccatgaactg

SEQ ID NO: 4022788 - DNA, 25 bp, Homo sapien
gcaatcctctgcttccgatggagtt

SEQ ID NO: 4022789 - DNA, 25 bp, Homo sapien
cttccgatggagttagttgtgatga

SEQ ID NO: 4022790 - DNA, 25 bp, Homo sapien
aaggatctctctatggctgatggtc

SEQ ID NO: 4022791 - DNA, 25 bp, Homo sapien
tgaactgcggggttaatgacaccat

SEQ ID NO: 4022792 - DNA, 25 bp, Homo sapien
agtgaaaagaaatattacagccatg

SEQ ID NO: 4022793 - DNA, 25 bp, Homo sapien
ctgggagtgaaaagaaatattacag

SEQ ID NO: 4022794 - DNA, 25 bp, Homo sapien
gggagtgaaaagaaatattacagcc

SEQ ID NO: 4022795 - DNA, 25 bp, Homo sapien
ggagtgaaaagaaatattacagcca

SEQ ID NO: 4022796 - DNA, 25 bp, Homo sapien
aaatatcacttacatgagatatacc

SEQ ID NO: 4022797 - DNA, 25 bp, Homo sapien
cacttacatgagatatacccaaggg

SEQ ID NO: 4022798 - DNA, 25 bp, Homo sapien
tggttattgcaacaggggcacggaa

SEQ ID NO: 4022799 - DNA, 25 bp, Homo sapien
cccaaggggtggtctacagagactt

SEQ ID NO: 4022800 - DNA, 25 bp, Homo sapien
gctcgagtgtaacaacagtcgtggc

SEQ ID NO: 4022801 - DNA, 25 bp, Homo sapien
cctcagctcgagtgtaacaacagtc

SEQ ID NO: 4022802 - DNA, 25 bp, Homo sapien
agccggcctcctcagctcgagtgta

SEQ ID NO: 4022803 - DNA, 25 bp, Homo sapien
gagtgtaacaacagtcgtggccatg

SEQ ID NO: 4022804 - DNA, 25 bp, Homo sapien
ctgcggatgtcacatgggcaggaca

SEQ ID NO: 4022805 - DNA, 25 bp, Homo sapien
aaggaaccatatttcgtataggcga

SEQ ID NO: 4022806 - DNA, 25 bp, Homo sapien
aagccacaaaaggaaccatatttcg

SEQ ID NO: 4022807 - DNA, 25 bp, Homo sapien
catatttcgtataggcgatgggagt

SEQ ID NO: 4022808 - DNA, 25 bp, Homo sapien
aaccatatttcgtataggcgatggg

SEQ ID NO: 4022809 - DNA, 25 bp, Homo sapien
acgccggtgcacacataatatcctg

SEQ ID NO: 4022810 - DNA, 25 bp, Homo sapien
cggtgcacacataatatcctggagg

SEQ ID NO: 4022811 - DNA, 25 bp, Homo sapien
tagggaccaacacaacccacaattc

SEQ ID NO: 4022812 - DNA, 25 bp, Homo sapien
atcccacgccggtgcacacataata

SEQ ID NO: 4022813 - DNA, 25 bp, Homo sapien
cgaagtctggtcgtggctgacatca

SEQ ID NO: 4022814 - DNA, 25 bp, Homo sapien
ccgaagtctggtcgtggctgacatc

SEQ ID NO: 4022815 - DNA, 25 bp, Homo sapien
tttgagggaggtgcaactcacgcat

SEQ ID NO: 4022816 - DNA, 25 bp, Homo sapien
aacacagtcatcacgtttatgaact

SEQ ID NO: 4022817 - DNA, 25 bp, Homo sapien
catcaggcagataatgtgtcaatgt

SEQ ID NO: 4022818 - DNA, 25 bp, Homo sapien
cacgcatgagcatgaaaacacagtc

SEQ ID NO: 4022819 - DNA, 25 bp, Homo sapien
gggtgggtcacgcactgacatcccc

SEQ ID NO: 4022820 - DNA, 25 bp, Homo sapien
tgacatccccgcctgtcttgggaac

SEQ ID NO: 4022821 - DNA, 25 bp, Homo sapien
acccggaggccggcgtcgatacact

SEQ ID NO: 4022822 - DNA, 25 bp, Homo sapien
ctcagagttggggacccggaggccg

SEQ ID NO: 4022823 - DNA, 25 bp, Homo sapien
tgcatggggaacttggccttggtgg

SEQ ID NO: 4022824 - DNA, 25 bp, Homo sapien
gcatggggaacttggccttggtggg

SEQ ID NO: 4022825 - DNA, 25 bp, Homo sapien
ctgcatggggaacttggccttggtg

SEQ ID NO: 4022826 - DNA, 25 bp, Homo sapien
catggggaacttggccttggtgggg

SEQ ID NO: 4022827 - DNA, 25 bp, Homo sapien
ctagacgcgcagcttggcgcagccc

SEQ ID NO: 4022828 - DNA, 25 bp, Homo sapien
gcagcttggcgcagccccgcacagg

SEQ ID NO: 4022829 - DNA, 25 bp, Homo sapien
cccgcacaggctccgtggaggcttc

SEQ ID NO: 4022830 - DNA, 25 bp, Homo sapien
agacgcgcagcttggcgcagccccg

SEQ ID NO: 4022831 - DNA, 25 bp, Homo sapien
cagcctgaaactgcttttgctgagc

SEQ ID NO: 4022832 - DNA, 25 bp, Homo sapien
tcacccagcctgaaactgcttttgc

SEQ ID NO: 4022833 - DNA, 25 bp, Homo sapien
tgaaactgcttttgctgagcgtgtc

SEQ ID NO: 4022834 - DNA, 25 bp, Homo sapien
cctgaaactgcttttgctgagcgtg

SEQ ID NO: 4022835 - DNA, 25 bp, Homo sapien
cagctcagctcctcgtgtagccact

SEQ ID NO: 4022836 - DNA, 25 bp, Homo sapien
agctcctcgtgtagccactccacct

SEQ ID NO: 4022837 - DNA, 25 bp, Homo sapien
tggcactcggccatcttgcacttgt

SEQ ID NO: 4022838 - DNA, 25 bp, Homo sapien
actcggccatcttgcacttgtactc

SEQ ID NO: 4022839 - DNA, 25 bp, Homo sapien
agtgaggtagtactgccccctaggg

SEQ ID NO: 4022840 - DNA, 25 bp, Homo sapien
gagctccacccgggcttggtgctgc

SEQ ID NO: 4022841 - DNA, 25 bp, Homo sapien
aacattttgcctctgcgacccagct

SEQ ID NO: 4022842 - DNA, 25 bp, Homo sapien
tgccagcggaagaggttagcccggt

SEQ ID NO: 4022843 - DNA, 25 bp, Homo sapien
gatgaagaagataccaagagagttg

SEQ ID NO: 4022844 - DNA, 25 bp, Homo sapien
tgctgagcgaggatgaagaagatac

SEQ ID NO: 4022845 - DNA, 25 bp, Homo sapien
cgaggatgaagaagataccaagaga

SEQ ID NO: 4022846 - DNA, 25 bp, Homo sapien
aagaagataccaagagagttgtccg

SEQ ID NO: 4022847 - DNA, 25 bp, Homo sapien
agttgctatgggtgttagcttttac

SEQ ID NO: 4022848 - DNA, 25 bp, Homo sapien
aacctttgcctaactgaaattcatg

SEQ ID NO: 4022849 - DNA, 25 bp, Homo sapien
tttacatttagtcttatagttggtc

SEQ ID NO: 4022850 - DNA, 25 bp, Homo sapien
ttattttctggatcctgtctaaaaa

SEQ ID NO: 4022851 - DNA, 25 bp, Homo sapien
ttttacataagtatgggtccacagt

SEQ ID NO: 4022852 - DNA, 25 bp, Homo sapien
ttacataagtatgggtccacagtag

SEQ ID NO: 4022853 - DNA, 25 bp, Homo sapien
tttacataagtatgggtccacagta

SEQ ID NO: 4022854 - DNA, 25 bp, Homo sapien
tgggggggaacggaggctgggcaca

SEQ ID NO: 4022855 - DNA, 25 bp, Homo sapien
tctctctcagtcaagagaagggtgg

SEQ ID NO: 4022856 - DNA, 25 bp, Homo sapien
agtctctctcagtcaagagaagggt

SEQ ID NO: 4022857 - DNA, 25 bp, Homo sapien
ctctctcagtcaagagaagggtggg

SEQ ID NO: 4022858 - DNA, 25 bp, Homo sapien
agtcggcggtgcagcaactgacgcc

SEQ ID NO: 4022859 - DNA, 25 bp, Homo sapien
tgcgaggggcgccacctgtaggctg

SEQ ID NO: 4022860 - DNA, 25 bp, Homo sapien
tgtgggcactgcctagaggttgctg

SEQ ID NO: 4022861 - DNA, 25 bp, Homo sapien
ccgtctggaggttgccgtggctctc

SEQ ID NO: 4022862 - DNA, 25 bp, Homo sapien
tttttgtaggtttcaggcacagaac

SEQ ID NO: 4022863 - DNA, 25 bp, Homo sapien
acctgccacggacaaggccttgtgt

SEQ ID NO: 4022864 - DNA, 25 bp, Homo sapien
tgtatatccaataatagtgaaatgg

SEQ ID NO: 4022865 - DNA, 25 bp, Homo sapien
tgaaatggatcccactaattatgac

SEQ ID NO: 4022866 - DNA, 25 bp, Homo sapien
gaggatgggaacattgagagagttg

SEQ ID NO: 4022867 - DNA, 25 bp, Homo sapien
ttaccccatatgatagttttgagga

SEQ ID NO: 4022868 - DNA, 25 bp, Homo sapien
cagttaccccatatgatagttttga

SEQ ID NO: 4022869 - DNA, 25 bp, Homo sapien
cctcagttaccccatatgatagttt

SEQ ID NO: 4022870 - DNA, 25 bp, Homo sapien
cccagcttcaaatggttctctgcct

SEQ ID NO: 4022871 - DNA, 25 bp, Homo sapien
agtactgggattatttatacgcatg

SEQ ID NO: 4022872 - DNA, 25 bp, Homo sapien
agctaccgcacctgggctatttttt

SEQ ID NO: 4022873 - DNA, 25 bp, Homo sapien
cgtgccagcctcatgtcattcttgt

SEQ ID NO: 4022874 - DNA, 25 bp, Homo sapien
aggatctctctatggctgatggtct

SEQ ID NO: 4022875 - DNA, 25 bp, Homo sapien
ggatctctctatggctgatggtctc

SEQ ID NO: 4022876 - DNA, 25 bp, Homo sapien
aaagtgcagtagtgaactgcggggt

SEQ ID NO: 4022877 - DNA, 25 bp, Homo sapien
aaggatctctctatggctgatggtc

SEQ ID NO: 4022878 - DNA, 25 bp, Homo sapien
gcatggtgctgctggggactcatcg

SEQ ID NO: 4022879 - DNA, 25 bp, Homo sapien
tcatctggctatgccagggtgccca

SEQ ID NO: 4022880 - DNA, 25 bp, Homo sapien
tactcggggtgggtggcatggtgct

SEQ ID NO: 4022881 - DNA, 25 bp, Homo sapien
tggtgctgctggggactcatcgcac

SEQ ID NO: 4022882 - DNA, 25 bp, Homo sapien
gctcgagtgtaacaacagtcgtggc

SEQ ID NO: 4022883 - DNA, 25 bp, Homo sapien
cctcagctcgagtgtaacaacagtc

SEQ ID NO: 4022884 - DNA, 25 bp, Homo sapien
gagtgtaacaacagtcgtggccatg

SEQ ID NO: 4022885 - DNA, 25 bp, Homo sapien
agccggcctcctcagctcgagtgta

SEQ ID NO: 4022886 - DNA, 25 bp, Homo sapien
gaaccatatttcgtataggtgatgg

SEQ ID NO: 4022887 - DNA, 25 bp, Homo sapien
aaaggaaccatatttcgtataggtg

SEQ ID NO: 4022888 - DNA, 25 bp, Homo sapien
aaggaaccatatttcgtataggtga

SEQ ID NO: 4022889 - DNA, 25 bp, Homo sapien
accatatttcgtataggtgatggga

SEQ ID NO: 4022890 - DNA, 25 bp, Homo sapien
cgaagtctggtcgtggctgacatca

SEQ ID NO: 4022891 - DNA, 25 bp, Homo sapien
ccgaagtctggtcgtggctgacatc

SEQ ID NO: 4022892 - DNA, 25 bp, Homo sapien
tgtgtcaatgtcaaaacaaggtttg

SEQ ID NO: 4022893 - DNA, 25 bp, Homo sapien
gtgcaactcacgcatgagcatgaaa

SEQ ID NO: 4022894 - DNA, 25 bp, Homo sapien
aggtgcaactcacgcatgagcatga

SEQ ID NO: 4022895 - DNA, 25 bp, Homo sapien
actcacgcatgagcatgaaaacaca

SEQ ID NO: 4022896 - DNA, 25 bp, Homo sapien
tgtaaatatgtgttacatctctaga

SEQ ID NO: 4022897 - DNA, 25 bp, Homo sapien
taggtacctggcattttgcctctct

SEQ ID NO: 4022898 - DNA, 25 bp, Homo sapien
tttggagaatggcctaataggtacc

SEQ ID NO: 4022899 - DNA, 25 bp, Homo sapien
ttggagaatggcctaataggtacct

SEQ ID NO: 4022900 - DNA, 25 bp, Homo sapien
tggagaatggcctaataggtacctg

SEQ ID NO: 4022901 - DNA, 25 bp, Homo sapien
ccacacccagcctctgccttccagg

SEQ ID NO: 4022902 - DNA, 25 bp, Homo sapien
aagtgatccacctgccttggcctcc

SEQ ID NO: 4022903 - DNA, 25 bp, Homo sapien
tttaagcaattctcctgtctcagcc

SEQ ID NO: 4022904 - DNA, 25 bp, Homo sapien
cctccaccttgcgtgttcaagcgat

SEQ ID NO: 4022905 - DNA, 25 bp, Homo sapien
aatgggctcaagcttatgcaccaag

SEQ ID NO: 4022906 - DNA, 25 bp, Homo sapien
taagatctcagaagttgggtaaatg

SEQ ID NO: 4022907 - DNA, 25 bp, Homo sapien
ggaaaacacttgaaactgatgatca

SEQ ID NO: 4022908 - DNA, 25 bp, Homo sapien
agcttctcgataagatctcagaagt

SEQ ID NO: 4022909 - DNA, 25 bp, Homo sapien
gcatgccagcatatgaaaccccaag

SEQ ID NO: 4022910 - DNA, 25 bp, Homo sapien
gagcatgtgcacttcagtatactga

SEQ ID NO: 4022911 - DNA, 25 bp, Homo sapien
cagcccatgccaaggtaggaatcag

SEQ ID NO: 4022912 - DNA, 25 bp, Homo sapien
gagatgcaaaccgtaaatccctgga

SEQ ID NO: 4022913 - DNA, 25 bp, Homo sapien
tgtgtttgttagggaacccaggaga

SEQ ID NO: 4022914 - DNA, 25 bp, Homo sapien
tgccaggaaaaagctggactgtgtt

SEQ ID NO: 4022915 - DNA, 25 bp, Homo sapien
taaaacaccatttgggctgggcgtg

SEQ ID NO: 4022916 - DNA, 25 bp, Homo sapien
agacatgatgacctttaaaacacca

SEQ ID NO: 4022917 - DNA, 25 bp, Homo sapien
tgtgcttcacctactagatctcgtc

SEQ ID NO: 4022918 - DNA, 25 bp, Homo sapien
gattaagattaggtgtcactcccat

SEQ ID NO: 4022919 - DNA, 25 bp, Homo sapien
aaaacctgatcccagattagctacc

SEQ ID NO: 4022920 - DNA, 25 bp, Homo sapien
gataatgtccgtgtctcttacaaga

SEQ ID NO: 4022921 - DNA, 25 bp, Homo sapien
ctcgggtggtccagtcccggagact

SEQ ID NO: 4022922 - DNA, 25 bp, Homo sapien
gagggtagctccttgcgaaacctac

SEQ ID NO: 4022923 - DNA, 25 bp, Homo sapien
acctgcctaaaagcgcagtggctcg

SEQ ID NO: 4022924 - DNA, 25 bp, Homo sapien
tggcacttaaggctctgcccacggg

SEQ ID NO: 4022925 - DNA, 25 bp, Homo sapien
gtgtgcgcggcacctcgcgccactg

SEQ ID NO: 4022926 - DNA, 25 bp, Homo sapien
ctctcccactttcccgccgggagct

SEQ ID NO: 4022927 - DNA, 25 bp, Homo sapien
accctaaatccttggcgcgcgtgag

SEQ ID NO: 4022928 - DNA, 25 bp, Homo sapien
gccgggagctaaccgcgccggtgtg

SEQ ID NO: 4022929 - DNA, 25 bp, Homo sapien
ttagccgaggtaaggtcagtgcagc

SEQ ID NO: 4022930 - DNA, 25 bp, Homo sapien
cagctctcagtgaccccgactgtct

SEQ ID NO: 4022931 - DNA, 25 bp, Homo sapien
cctgcacctgtctgtgaagtatgta

SEQ ID NO: 4022932 - DNA, 25 bp, Homo sapien
tcgctcagttgtgatccagcagccc

SEQ ID NO: 4022933 - DNA, 25 bp, Homo sapien
gcgacctgagacctccatgagtgga

SEQ ID NO: 4022934 - DNA, 25 bp, Homo sapien
tggagggaagagtgatctatgtctc

SEQ ID NO: 4022935 - DNA, 25 bp, Homo sapien
tgatctatgtctcttcccccagcag

SEQ ID NO: 4022936 - DNA, 25 bp, Homo sapien
gaactgaagattgtcctggccgcga

SEQ ID NO: 4022937 - DNA, 25 bp, Homo sapien
caggggtggggggttcctgctctgc

SEQ ID NO: 4022938 - DNA, 25 bp, Homo sapien
gtggggggttcctgctctgcccctg

SEQ ID NO: 4022939 - DNA, 25 bp, Homo sapien
cagcaggggtggggggttcctgctc

SEQ ID NO: 4022940 - DNA, 25 bp, Homo sapien
cagggccagggtccagcaggggtgg

SEQ ID NO: 4022941 - DNA, 25 bp, Homo sapien
ttaacttgagtgacctgtgtgagag

SEQ ID NO: 4022942 - DNA, 25 bp, Homo sapien
aggatggctggacaaggacttttac

SEQ ID NO: 4022943 - DNA, 25 bp, Homo sapien
tataacttcagacttgggccccctg

SEQ ID NO: 4022944 - DNA, 25 bp, Homo sapien
ccccgctggagacggaagatctttt

SEQ ID NO: 4022945 - DNA, 25 bp, Homo sapien
tcccaggaggctgaataacggcatc

SEQ ID NO: 4022946 - DNA, 25 bp, Homo sapien
gaaacaagatgggtttggcacctga

SEQ ID NO: 4022947 - DNA, 25 bp, Homo sapien
tggctccagagcgatagaacattct

SEQ ID NO: 4022948 - DNA, 25 bp, Homo sapien
taggcaatcactaagctcactggac

SEQ ID NO: 4022949 - DNA, 25 bp, Homo sapien
ccggttgccatctcgcagggtgaaa

SEQ ID NO: 4022950 - DNA, 25 bp, Homo sapien
cgcagggtgaaacgctggcctttct

SEQ ID NO: 4022951 - DNA, 25 bp, Homo sapien
gccaatagtccggttgccatctcgc

SEQ ID NO: 4022952 - DNA, 25 bp, Homo sapien
tgccatctcgcagggtgaaacgctg

SEQ ID NO: 4022953 - DNA, 25 bp, Homo sapien
aatctttctgtgggtacatgctggc

SEQ ID NO: 4022954 - DNA, 25 bp, Homo sapien
aacctgcttcagcttagggcacact

SEQ ID NO: 4022955 - DNA, 25 bp, Homo sapien
tgaaacgctcaaaaagaagagacct

SEQ ID NO: 4022956 - DNA, 25 bp, Homo sapien
taagccttcatatataatgaaacgc

SEQ ID NO: 4022957 - DNA, 25 bp, Homo sapien
gacacaaagggcttgtggcggccac

SEQ ID NO: 4022958 - DNA, 25 bp, Homo sapien
tcccaagtcagggagaacatgacag

SEQ ID NO: 4022959 - DNA, 25 bp, Homo sapien
gggcaggataatccgacaggccatg

SEQ ID NO: 4022960 - DNA, 25 bp, Homo sapien
tgacaggcatgaagtgggacacaaa

SEQ ID NO: 4022961 - DNA, 25 bp, Homo sapien
ctcccgcttcaagcctcggaccagg

SEQ ID NO: 4022962 - DNA, 25 bp, Homo sapien
gccccgccgcaagtcctcccgcttc

SEQ ID NO: 4022963 - DNA, 25 bp, Homo sapien
ccgcttcaagcctcggaccagggcc

SEQ ID NO: 4022964 - DNA, 25 bp, Homo sapien
cctcccgcttcaagcctcggaccag

SEQ ID NO: 4022965 - DNA, 25 bp, Homo sapien
gaaggaaggcgaatgtgagacagag

SEQ ID NO: 4022966 - DNA, 25 bp, Homo sapien
tgctctccagactggcttcccaaac

SEQ ID NO: 4022967 - DNA, 25 bp, Homo sapien
cacaagggatctgccggggtaaggc

SEQ ID NO: 4022968 - DNA, 25 bp, Homo sapien
tctgccggggtaaggccacccttca

SEQ ID NO: 4022969 - DNA, 25 bp, Homo sapien
taaaatgccacgctctagtgtacct

SEQ ID NO: 4022970 - DNA, 25 bp, Homo sapien
tgtacctgtcaccacggtgccacgg

SEQ ID NO: 4022971 - DNA, 25 bp, Homo sapien
taggagctcacactcgtctcccttc

SEQ ID NO: 4022972 - DNA, 25 bp, Homo sapien
cacagtgcggatgttcttgctatgt

SEQ ID NO: 4022973 - DNA, 25 bp, Homo sapien
cagggacggagtacaccgcctccac

SEQ ID NO: 4022974 - DNA, 25 bp, Homo sapien
agggacggagtacaccgcctccaca

SEQ ID NO: 4022975 - DNA, 25 bp, Homo sapien
ggacggagtacaccgcctccacagg

SEQ ID NO: 4022976 - DNA, 25 bp, Homo sapien
gggacggagtacaccgcctccacag

SEQ ID NO: 4022977 - DNA, 25 bp, Homo sapien
cattctacttccctcgattatcaag

SEQ ID NO: 4022978 - DNA, 25 bp, Homo sapien
aaagcagagctctgggtgcccatcc

SEQ ID NO: 4022979 - DNA, 25 bp, Homo sapien
tccctcgattatcaagagccacttc

SEQ ID NO: 4022980 - DNA, 25 bp, Homo sapien
cccagacacaaagcagagctctggg

SEQ ID NO: 4022981 - DNA, 25 bp, Homo sapien
caagggcacagagagcagagcctac

SEQ ID NO: 4022982 - DNA, 25 bp, Homo sapien
ctcaagggcacagagagcagagcct

SEQ ID NO: 4022983 - DNA, 25 bp, Homo sapien
tcaagggcacagagagcagagccta

SEQ ID NO: 4022984 - DNA, 25 bp, Homo sapien
ctcctcccctttatagccaaactcg

SEQ ID NO: 4022985 - DNA, 25 bp, Homo sapien
agttccaccagttccaccatctcag

SEQ ID NO: 4022986 - DNA, 25 bp, Homo sapien
agccaaactcggtgagcagctcccg

SEQ ID NO: 4022987 - DNA, 25 bp, Homo sapien
ttccaccagttccaccatctcagag

SEQ ID NO: 4022988 - DNA, 25 bp, Homo sapien
ctggacagcgtcagccttgttcaca

SEQ ID NO: 4022989 - DNA, 25 bp, Homo sapien
gcgtcagccttgttcacatacacca

SEQ ID NO: 4022990 - DNA, 25 bp, Homo sapien
gacagcgtcagccttgttcacatac

SEQ ID NO: 4022991 - DNA, 25 bp, Homo sapien
cagcgtcagccttgttcacatacac

SEQ ID NO: 4022992 - DNA, 25 bp, Homo sapien
cagtaataagtgctctcgggtctgg

SEQ ID NO: 4022993 - DNA, 25 bp, Homo sapien
ggccgtcattggctgctaccaccag

SEQ ID NO: 4022994 - DNA, 25 bp, Homo sapien
accaccaggatgcagccgtcgaggg

SEQ ID NO: 4022995 - DNA, 25 bp, Homo sapien
ctgtctggccagtaataagtgctct

SEQ ID NO: 4022996 - DNA, 25 bp, Homo sapien
cattgatggtgataccccgagctcg

SEQ ID NO: 4022997 - DNA, 25 bp, Homo sapien
ccccgagctcgctcctccggggcat

SEQ ID NO: 4022998 - DNA, 25 bp, Homo sapien
ttgatggtgataccccgagctcgct

SEQ ID NO: 4022999 - DNA, 25 bp, Homo sapien
ccgagctcgctcctccggggcattg

SEQ ID NO: 4023000 - DNA, 25 bp, Homo sapien
attcacatgtggcttgtcgcgcacg

SEQ ID NO: 4023001 - DNA, 25 bp, Homo sapien
ttgtcgcgcacgtaagtcttcttgg

SEQ ID NO: 4023002 - DNA, 25 bp, Homo sapien
tcagcgtggtcttcccgtggtccac

SEQ ID NO: 4023003 - DNA, 25 bp, Homo sapien
atggctgcagtcagcgtggtcttcc

SEQ ID NO: 4023004 - DNA, 25 bp, Homo sapien
tggggcgtcgcgcgcagcagggtgg

SEQ ID NO: 4023005 - DNA, 25 bp, Homo sapien
ctgaagtggggcgtcgcgcgcagca

SEQ ID NO: 4023006 - DNA, 25 bp, Homo sapien
cgctgaagtggggcgtcgcgcgcag

SEQ ID NO: 4023007 - DNA, 25 bp, Homo sapien
ggcgtcgcgcgcagcagggtggcgg

SEQ ID NO: 4023008 - DNA, 25 bp, Homo sapien
aacgtagttctctctggcggtcgca

SEQ ID NO: 4023009 - DNA, 25 bp, Homo sapien
gatggagaggttttccaccactcgc

SEQ ID NO: 4023010 - DNA, 25 bp, Homo sapien
tcatgggcgtagtagttctcaggtc

SEQ ID NO: 4023011 - DNA, 25 bp, Homo sapien
gggcactgaggagcgtcccctaaat

SEQ ID NO: 4023012 - DNA, 25 bp, Homo sapien
gatcactgggcgatgaaagctgagc

SEQ ID NO: 4023013 - DNA, 25 bp, Homo sapien
tctgccagggttgtttaagctggta

SEQ ID NO: 4023014 - DNA, 25 bp, Homo sapien
tttatcacatagatagacacctgtc

SEQ ID NO: 4023015 - DNA, 25 bp, Homo sapien
gaaagctatactctttttctgccag

SEQ ID NO: 4023016 - DNA, 25 bp, Homo sapien
cagcctcctcccacttctttacctt

SEQ ID NO: 4023017 - DNA, 25 bp, Homo sapien
ttctttaccttccactcattcctca

SEQ ID NO: 4023018 - DNA, 25 bp, Homo sapien
ctcccacttctttaccttccactca

SEQ ID NO: 4023019 - DNA, 25 bp, Homo sapien
cttccactcattcctcaaaccacta

SEQ ID NO: 4023020 - DNA, 25 bp, Homo sapien
caacttccgactctggggttcaagt

SEQ ID NO: 4023021 - DNA, 25 bp, Homo sapien
tcactgcaacttccgactctggggt

SEQ ID NO: 4023022 - DNA, 25 bp, Homo sapien
actgcaacttccgactctggggttc

SEQ ID NO: 4023023 - DNA, 25 bp, Homo sapien
tgcaacttccgactctggggttcaa

SEQ ID NO: 4023024 - DNA, 25 bp, Homo sapien
ttgcctctgcctccggagggactgg

SEQ ID NO: 4023025 - DNA, 25 bp, Homo sapien
atagggattctagttctgttgcctg

SEQ ID NO: 4023026 - DNA, 25 bp, Homo sapien
cgctcccggccctgacctcattttt

SEQ ID NO: 4023027 - DNA, 25 bp, Homo sapien
tctgcctccggagggactgggacta

SEQ ID NO: 4023028 - DNA, 25 bp, Homo sapien
cctgattctcttagccacaaagtct

SEQ ID NO: 4023029 - DNA, 25 bp, Homo sapien
aggtggcctgattctcttagccaca

SEQ ID NO: 4023030 - DNA, 25 bp, Homo sapien
aacttgatgaacctcaaggtggcct

SEQ ID NO: 4023031 - DNA, 25 bp, Homo sapien
tgatgaacctcaaggtggcctgatt

SEQ ID NO: 4023032 - DNA, 25 bp, Homo sapien
gtgggagctggtgatagagcagttt

SEQ ID NO: 4023033 - DNA, 25 bp, Homo sapien
agctggtgatagagcagtttgaaga

SEQ ID NO: 4023034 - DNA, 25 bp, Homo sapien
ggagctggtgatagagcagtttgaa

SEQ ID NO: 4023035 - DNA, 25 bp, Homo sapien
gctggtgatagagcagtttgaagac

SEQ ID NO: 4023036 - DNA, 25 bp, Homo sapien
gccgcatgcatttccttcgtaagtg

SEQ ID NO: 4023037 - DNA, 25 bp, Homo sapien
caccctcgcggcttcaagagcttgg

SEQ ID NO: 4023038 - DNA, 25 bp, Homo sapien
taagctttaagggtgttctcagcca

SEQ ID NO: 4023039 - DNA, 25 bp, Homo sapien
gagtcccgagcatcccattgtacag

SEQ ID NO: 4023040 - DNA, 25 bp, Homo sapien
aatagccactttcatactttgggag

SEQ ID NO: 4023041 - DNA, 25 bp, Homo sapien
atagccactttcatactttgggagg

SEQ ID NO: 4023042 - DNA, 25 bp, Homo sapien
aatgtcaggctataagccatttttt

SEQ ID NO: 4023043 - DNA, 25 bp, Homo sapien
tttgccccagtgttacaggcgcagc

SEQ ID NO: 4023044 - DNA, 25 bp, Homo sapien
cccagtgttacaggcgcagcagagc

SEQ ID NO: 4023045 - DNA, 25 bp, Homo sapien
tctttgccccagtgttacaggcgca

SEQ ID NO: 4023046 - DNA, 25 bp, Homo sapien
gccccagtgttacaggcgcagcaga

SEQ ID NO: 4023047 - DNA, 25 bp, Homo sapien
gcacctgacctgcttgacgtttcca

SEQ ID NO: 4023048 - DNA, 25 bp, Homo sapien
gaggagccatgagattctaggacaa

SEQ ID NO: 4023049 - DNA, 25 bp, Homo sapien
tgcctactctctagatagccaccag

SEQ ID NO: 4023050 - DNA, 25 bp, Homo sapien
tctgtcccaagcctgaaacgggacg

SEQ ID NO: 4023051 - DNA, 25 bp, Homo sapien
tacacccatgaactagaaattgctg

SEQ ID NO: 4023052 - DNA, 25 bp, Homo sapien
ggagttctcgcagtgggtctaagca

SEQ ID NO: 4023053 - DNA, 25 bp, Homo sapien
cagagttttgtggaagactacaccc

SEQ ID NO: 4023054 - DNA, 25 bp, Homo sapien
gaaggaaatgtcaaacgtcagcttg

SEQ ID NO: 4023055 - DNA, 25 bp, Homo sapien
gcggtgtcacacattctggagtaca

SEQ ID NO: 4023056 - DNA, 25 bp, Homo sapien
gaagtatccatgatacatttggtga

SEQ ID NO: 4023057 - DNA, 25 bp, Homo sapien
gagagtcttgcggtgtcacacattc

SEQ ID NO: 4023058 - DNA, 25 bp, Homo sapien
cttttcctggctactgatgttttgt

SEQ ID NO: 4023059 - DNA, 25 bp, Homo sapien
tggttaagctggtctactactaaaa

SEQ ID NO: 4023060 - DNA, 25 bp, Homo sapien
gacagtgccacaataggccatcctt

SEQ ID NO: 4023061 - DNA, 25 bp, Homo sapien
agtgccacaataggccatccttttc

SEQ ID NO: 4023062 - DNA, 25 bp, Homo sapien
gggacagtgccacaataggccatcc

SEQ ID NO: 4023063 - DNA, 25 bp, Homo sapien
cagtgccacaataggccatcctttt

SEQ ID NO: 4023064 - DNA, 25 bp, Homo sapien
ttctactagaccagcgccagaatgg

SEQ ID NO: 4023065 - DNA, 25 bp, Homo sapien
tgttttctgtagcaagactgtctcg

SEQ ID NO: 4023066 - DNA, 25 bp, Homo sapien
tctgtggttggtaacaaggtgagcc

SEQ ID NO: 4023067 - DNA, 25 bp, Homo sapien
taagttgtgggtcacgtagtggcac

SEQ ID NO: 4023068 - DNA, 25 bp, Homo sapien
aaggaggatttgtgggctgggcctg

SEQ ID NO: 4023069 - DNA, 25 bp, Homo sapien
gaaggaggatttgtgggctgggcct

SEQ ID NO: 4023070 - DNA, 25 bp, Homo sapien
gagcctgcacctttggttccgggag

SEQ ID NO: 4023071 - DNA, 25 bp, Homo sapien
cagtctcagggacggtggaaaagcc

SEQ ID NO: 4023072 - DNA, 25 bp, Homo sapien
cagagcgaggcctcatggttcagga

SEQ ID NO: 4023073 - DNA, 25 bp, Homo sapien
ggtcgccgctgtggacaagcgtctt

SEQ ID NO: 4023074 - DNA, 25 bp, Homo sapien
gtgtccttgatgtccctgacgtccg

SEQ ID NO: 4023075 - DNA, 25 bp, Homo sapien
ggcgcctcatccatgatgctgcgca

SEQ ID NO: 4023076 - DNA, 25 bp, Homo sapien
cgtgagtggcgcctcatccatgatg

SEQ ID NO: 4023077 - DNA, 25 bp, Homo sapien
tgtccctgacgtccgtgagtggcgc

SEQ ID NO: 4023078 - DNA, 25 bp, Homo sapien
gggacagtcgcacgaaatccctctg

SEQ ID NO: 4023079 - DNA, 25 bp, Homo sapien
agggcctgggacagtcgcacgaaat

SEQ ID NO: 4023080 - DNA, 25 bp, Homo sapien
gacagtcgcacgaaatccctctgca

SEQ ID NO: 4023081 - DNA, 25 bp, Homo sapien
gcctgggacagtcgcacgaaatccc

SEQ ID NO: 4023082 - DNA, 25 bp, Homo sapien
agccgcagcaccttggccctctgtt

SEQ ID NO: 4023083 - DNA, 25 bp, Homo sapien
gccgcagcaccttggccctctgttc

SEQ ID NO: 4023084 - DNA, 25 bp, Homo sapien
ccgcagcaccttggccctctgttct

SEQ ID NO: 4023085 - DNA, 25 bp, Homo sapien
cgcagcaccttggccctctgttctg

SEQ ID NO: 4023086 - DNA, 25 bp, Homo sapien
ctgcacccgctccatctctgtcctc

SEQ ID NO: 4023087 - DNA, 25 bp, Homo sapien
gttcctgctgcacccgctccatctc

SEQ ID NO: 4023088 - DNA, 25 bp, Homo sapien
gctgcacccgctccatctctgtcct

SEQ ID NO: 4023089 - DNA, 25 bp, Homo sapien
ttgctctgttcctgctgcacccgct

SEQ ID NO: 4023090 - DNA, 25 bp, Homo sapien
gggggagacgtcagggccatgccct

SEQ ID NO: 4023091 - DNA, 25 bp, Homo sapien
agggcagggggagacgtcagggcca

SEQ ID NO: 4023092 - DNA, 25 bp, Homo sapien
gggagacgtcagggccatgccctct

SEQ ID NO: 4023093 - DNA, 25 bp, Homo sapien
gagacgtcagggccatgccctctcc

SEQ ID NO: 4023094 - DNA, 25 bp, Homo sapien
agccagggtgggcgatccccaagat

SEQ ID NO: 4023095 - DNA, 25 bp, Homo sapien
tgggcgatccccaagatcacctcca

SEQ ID NO: 4023096 - DNA, 25 bp, Homo sapien
agggtgggcgatccccaagatcacc

SEQ ID NO: 4023097 - DNA, 25 bp, Homo sapien
ccagggtgggcgatccccaagatca

SEQ ID NO: 4023098 - DNA, 25 bp, Homo sapien
agagcctcccgcagcgtcacgatct

SEQ ID NO: 4023099 - DNA, 25 bp, Homo sapien
gtcacgatctcgatccgcaggcgct

SEQ ID NO: 4023100 - DNA, 25 bp, Homo sapien
ccctcgcctcttgccgcgtgcagca

SEQ ID NO: 4023101 - DNA, 25 bp, Homo sapien
gcagcgtcacgatctcgatccgcag

SEQ ID NO: 4023102 - DNA, 25 bp, Homo sapien
gattacctacagcaagagccccttg

SEQ ID NO: 4023103 - DNA, 25 bp, Homo sapien
ggaagagtcccaaccataaagttca

SEQ ID NO: 4023104 - DNA, 25 bp, Homo sapien
ggaagctcaggacacacgaccatgc

SEQ ID NO: 4023105 - DNA, 25 bp, Homo sapien
tgggaggaggacaggtgcgctccgg

SEQ ID NO: 4023106 - DNA, 25 bp, Homo sapien
gtgcccggaagtggacagatctcag

SEQ ID NO: 4023107 - DNA, 25 bp, Homo sapien
tgcccggaagtggacagatctcagg

SEQ ID NO: 4023108 - DNA, 25 bp, Homo sapien
tccaggctctcagtgcccacactca

SEQ ID NO: 4023109 - DNA, 25 bp, Homo sapien
caggctctcagtgcccacactcagc

SEQ ID NO: 4023110 - DNA, 25 bp, Homo sapien
ctctcagtgcccacactcagcttac

SEQ ID NO: 4023111 - DNA, 25 bp, Homo sapien
gctccaggctctcagtgcccacact

SEQ ID NO: 4023112 - DNA, 25 bp, Homo sapien
cattcaaccgctttacctcatggtg

SEQ ID NO: 4023113 - DNA, 25 bp, Homo sapien
tggttttcctcattcaaccgcttta

SEQ ID NO: 4023114 - DNA, 25 bp, Homo sapien
caaccgctttacctcatggtgcagg

SEQ ID NO: 4023115 - DNA, 25 bp, Homo sapien
ctcattcaaccgctttacctcatgg

SEQ ID NO: 4023116 - DNA, 25 bp, Homo sapien
tatggacagacagttagtataaggc

SEQ ID NO: 4023117 - DNA, 25 bp, Homo sapien
gggcgtctccagtccctaggaggcc

SEQ ID NO: 4023118 - DNA, 25 bp, Homo sapien
gcaatgaagaggacagggcgtctcc

SEQ ID NO: 4023119 - DNA, 25 bp, Homo sapien
gacagttagtataaggcaatgaaga

SEQ ID NO: 4023120 - DNA, 25 bp, Homo sapien
tgagcgacagagcaacacaccattt

SEQ ID NO: 4023121 - DNA, 25 bp, Homo sapien
tcaggagggtgaggctgcaggattg

SEQ ID NO: 4023122 - DNA, 25 bp, Homo sapien
tccagcctggccagcctgagcgaca

SEQ ID NO: 4023123 - DNA, 25 bp, Homo sapien
aaaaaacaggaggccgggctcagtg

SEQ ID NO: 4023124 - DNA, 25 bp, Homo sapien
tgactctgcaaactagggcccatta

SEQ ID NO: 4023125 - DNA, 25 bp, Homo sapien
cagttttatagatggtgaggcagag

SEQ ID NO: 4023126 - DNA, 25 bp, Homo sapien
gtcacctcgcccagtcagatttgat

SEQ ID NO: 4023127 - DNA, 25 bp, Homo sapien
tgggattagctcaagatcaaacagc

SEQ ID NO: 4023128 - DNA, 25 bp, Homo sapien
ttccaccacgtgcaactgattcctg

SEQ ID NO: 4023129 - DNA, 25 bp, Homo sapien
gggacaggacaggttccttgacttc

SEQ ID NO: 4023130 - DNA, 25 bp, Homo sapien
tggcaccggttccagggtgtggcct

SEQ ID NO: 4023131 - DNA, 25 bp, Homo sapien
cacgtgcaactgattcctgctggac

SEQ ID NO: 4023132 - DNA, 25 bp, Homo sapien
ctgccctagggcccccaggtactca

SEQ ID NO: 4023133 - DNA, 25 bp, Homo sapien
tgccctagggcccccaggtactcac

SEQ ID NO: 4023134 - DNA, 25 bp, Homo sapien
ggctcacggtcccttgcagggtccg

SEQ ID NO: 4023135 - DNA, 25 bp, Homo sapien
ctcacggtcccttgcagggtccgca

SEQ ID NO: 4023136 - DNA, 25 bp, Homo sapien
tcacggtcccttgcagggtccgcag

SEQ ID NO: 4023137 - DNA, 25 bp, Homo sapien
ctggctcacggtcccttgcagggtc

SEQ ID NO: 4023138 - DNA, 25 bp, Homo sapien
ggcacagtcctcattgctccgtctc

SEQ ID NO: 4023139 - DNA, 25 bp, Homo sapien
gccctcttggagctcgtcccgctcg

SEQ ID NO: 4023140 - DNA, 25 bp, Homo sapien
acagtcctcattgctccgtctcagg

SEQ ID NO: 4023141 - DNA, 25 bp, Homo sapien
gctcgcgactgacgctctccaggtc

SEQ ID NO: 4023142 - DNA, 25 bp, Homo sapien
gccagtctctatcctataagcccag

SEQ ID NO: 4023143 - DNA, 25 bp, Homo sapien
agttccagcctgaacccgggtcagt

SEQ ID NO: 4023144 - DNA, 25 bp, Homo sapien
agagtacttcctcacgccatctggg

SEQ ID NO: 4023145 - DNA, 25 bp, Homo sapien
gagttataatttctttaccacataa

SEQ ID NO: 4023146 - DNA, 25 bp, Homo sapien
caggtagatgccctcgggaaccagg

SEQ ID NO: 4023147 - DNA, 25 bp, Homo sapien
cccactgagtgtctgggacgagctg

SEQ ID NO: 4023148 - DNA, 25 bp, Homo sapien
cagggtgcccgtagacaccagcgag

SEQ ID NO: 4023149 - DNA, 25 bp, Homo sapien
accagcgaggccgtctcttcctgtt

SEQ ID NO: 4023150 - DNA, 25 bp, Homo sapien
tcgcagttgtgagcgaaggcctcag

SEQ ID NO: 4023151 - DNA, 25 bp, Homo sapien
atggaggcgctgtcatcgcagttgt

SEQ ID NO: 4023152 - DNA, 25 bp, Homo sapien
agcgaaggcctcagcggctggaccc

SEQ ID NO: 4023153 - DNA, 25 bp, Homo sapien
caactccgtggagccgtgcagggaa

SEQ ID NO: 4023154 - DNA, 25 bp, Homo sapien
ccatgggcagtacgatctcccgcag

SEQ ID NO: 4023155 - DNA, 25 bp, Homo sapien
ggcagtacgatctcccgcagcttct

SEQ ID NO: 4023156 - DNA, 25 bp, Homo sapien
ctccttttccatgggcagtacgatc

SEQ ID NO: 4023157 - DNA, 25 bp, Homo sapien
cttttccatgggcagtacgatctcc

SEQ ID NO: 4023158 - DNA, 25 bp, Homo sapien
tccactcccttctatgtgcgtaaac

SEQ ID NO: 4023159 - DNA, 25 bp, Homo sapien
taaataaaaccagtctgcctagact

SEQ ID NO: 4023160 - DNA, 25 bp, Homo sapien
ttataagcatgagttagtcctctgc

SEQ ID NO: 4023161 - DNA, 25 bp, Homo sapien
gctgcaagcttgatttctggctcaa

SEQ ID NO: 4023162 - DNA, 25 bp, Homo sapien
catgaccagggaatgggacatccac

SEQ ID NO: 4023163 - DNA, 25 bp, Homo sapien
aacattcttccaaatcccagggcag

SEQ ID NO: 4023164 - DNA, 25 bp, Homo sapien
cctagaatcactgctgggtgccccg

SEQ ID NO: 4023165 - DNA, 25 bp, Homo sapien
cgaacttggtcacccactaataagg

SEQ ID NO: 4023166 - DNA, 25 bp, Homo sapien
tgcttcagggcggtgatctgggctt

SEQ ID NO: 4023167 - DNA, 25 bp, Homo sapien
agggggtaggcccgggacagcagct

SEQ ID NO: 4023168 - DNA, 25 bp, Homo sapien
tcagggcggtgatctgggcttcata

SEQ ID NO: 4023169 - DNA, 25 bp, Homo sapien
tcctgcttcagggcggtgatctggg

SEQ ID NO: 4023170 - DNA, 25 bp, Homo sapien
ctcagcccgaagccggctgagctca

SEQ ID NO: 4023171 - DNA, 25 bp, Homo sapien
acctgactcggcctcaccatttgcc

SEQ ID NO: 4023172 - DNA, 25 bp, Homo sapien
gccttcgtgctctcgctcacctctg

SEQ ID NO: 4023173 - DNA, 25 bp, Homo sapien
tcctgggaccgggagtcctccagtg

SEQ ID NO: 4023174 - DNA, 25 bp, Homo sapien
ccatctcttaccccaggccacctac

SEQ ID NO: 4023175 - DNA, 25 bp, Homo sapien
gccgctcatcgtcgtccgcggccac

SEQ ID NO: 4023176 - DNA, 25 bp, Homo sapien
cgctcatcgtcgtccgcggccaccg

SEQ ID NO: 4023177 - DNA, 25 bp, Homo sapien
ccgccgccgctcatcgtcgtccgcg

SEQ ID NO: 4023178 - DNA, 25 bp, Homo sapien
gccgccgctcatcgtcgtccgcggc

SEQ ID NO: 4023179 - DNA, 25 bp, Homo sapien
ctttcaagcccggaagaggatcctt

SEQ ID NO: 4023180 - DNA, 25 bp, Homo sapien
tcatttttctgagcgcctcggagtc

SEQ ID NO: 4023181 - DNA, 25 bp, Homo sapien
cccgcgtagttagtcggagtctgaa

SEQ ID NO: 4023182 - DNA, 25 bp, Homo sapien
ggagtctgaaacttgcacgtcccca

SEQ ID NO: 4023183 - DNA, 25 bp, Homo sapien
ttcctcctcccaacgccctcaaatc

SEQ ID NO: 4023184 - DNA, 25 bp, Homo sapien
gactattccagaatgtgcccctttt

SEQ ID NO: 4023185 - DNA, 25 bp, Homo sapien
taaactctacttccaatgtgctgac

SEQ ID NO: 4023186 - DNA, 25 bp, Homo sapien
tctgtaaaggacacgccaggaacct

SEQ ID NO: 4023187 - DNA, 25 bp, Homo sapien
ccttgattctacgtgtcctcctgca

SEQ ID NO: 4023188 - DNA, 25 bp, Homo sapien
aaaagcagaacgcatactcgggcac

SEQ ID NO: 4023189 - DNA, 25 bp, Homo sapien
tactcgggcactcaagaagttaagg

SEQ ID NO: 4023190 - DNA, 25 bp, Homo sapien
cattgcgtccgactatgcttgattg

SEQ ID NO: 4023191 - DNA, 25 bp, Homo sapien
tctcttgcttctacagggatctgga

SEQ ID NO: 4023192 - DNA, 25 bp, Homo sapien
cacctcagggtcaagagcaacaggg

SEQ ID NO: 4023193 - DNA, 25 bp, Homo sapien
agcaacagggccaagaggatgaagt

SEQ ID NO: 4023194 - DNA, 25 bp, Homo sapien
tcaaaatccgttgccgggctgacct

SEQ ID NO: 4023195 - DNA, 25 bp, Homo sapien
ggctgacctggtcagattgcccctc

SEQ ID NO: 4023196 - DNA, 25 bp, Homo sapien
gatgaaggtggtggattctcagccc

SEQ ID NO: 4023197 - DNA, 25 bp, Homo sapien
tggctccgtccacaagtcatgctga

SEQ ID NO: 4023198 - DNA, 25 bp, Homo sapien
gcttgaggcttatacactggtgtgg

SEQ ID NO: 4023199 - DNA, 25 bp, Homo sapien
cacacatgctggctgaagcgtaagc

SEQ ID NO: 4023200 - DNA, 25 bp, Homo sapien
ttgtatctaggggtatccgtcactg

SEQ ID NO: 4023201 - DNA, 25 bp, Homo sapien
tatctaggggtatccgtcactgaac

SEQ ID NO: 4023202 - DNA, 25 bp, Homo sapien
atctaggggtatccgtcactgaaca

SEQ ID NO: 4023203 - DNA, 25 bp, Homo sapien
ttctttgtatctaggggtatccgtc

SEQ ID NO: 4023204 - DNA, 25 bp, Homo sapien
tatagggtgccactaaagaaccact

SEQ ID NO: 4023205 - DNA, 25 bp, Homo sapien
gaagacaggatggttcccgagaact

SEQ ID NO: 4023206 - DNA, 25 bp, Homo sapien
aaggctcaggagtttacaaggctag

SEQ ID NO: 4023207 - DNA, 25 bp, Homo sapien
gacgctctttttgacgctccaggga

SEQ ID NO: 4023208 - DNA, 25 bp, Homo sapien
acttccctcgcctgtgttcggtcca

SEQ ID NO: 4023209 - DNA, 25 bp, Homo sapien
gcctgtgttcggtccatcctccttt

SEQ ID NO: 4023210 - DNA, 25 bp, Homo sapien
tccgggcgcacttccctcgcctgtg

SEQ ID NO: 4023211 - DNA, 25 bp, Homo sapien
gcgcacttccctcgcctgtgttcgg

SEQ ID NO: 4023212 - DNA, 25 bp, Homo sapien
gcttcaggtgcctttggtagacaca

SEQ ID NO: 4023213 - DNA, 25 bp, Homo sapien
cctgttcatgctaggagcctctggc

SEQ ID NO: 4023214 - DNA, 25 bp, Homo sapien
gactgtacccgtccttagcttcagg

SEQ ID NO: 4023215 - DNA, 25 bp, Homo sapien
caaagttaacagtggcctcctagtt

SEQ ID NO: 4023216 - DNA, 25 bp, Homo sapien
cagcacgggagtttttgtttgtgtg

SEQ ID NO: 4023217 - DNA, 25 bp, Homo sapien
tccttagtaggctgggaccacaagt

SEQ ID NO: 4023218 - DNA, 25 bp, Homo sapien
gaccacaagtgtgtggcaacacgct

SEQ ID NO: 4023219 - DNA, 25 bp, Homo sapien
ccacaagtgtgtggcaacacgctcg

SEQ ID NO: 4023220 - DNA, 25 bp, Homo sapien
attctacaaagaatttgaaagatat

SEQ ID NO: 4023221 - DNA, 25 bp, Homo sapien
tatcctatgtgcagaaatcaggaaa

SEQ ID NO: 4023222 - DNA, 25 bp, Homo sapien
tttatcctatgtgcagaaatcagga

SEQ ID NO: 4023223 - DNA, 25 bp, Homo sapien
tttttatcctatgtgcagaaatcag

SEQ ID NO: 4023224 - DNA, 25 bp, Homo sapien
gagctaccgcacttgggctattttt

SEQ ID NO: 4023225 - DNA, 25 bp, Homo sapien
ccacaaccttttcctgctgggttca

SEQ ID NO: 4023226 - DNA, 25 bp, Homo sapien
tcaccacaaccttttcctgctgggt

SEQ ID NO: 4023227 - DNA, 25 bp, Homo sapien
cgtgagctaccgcacttgggctatt

SEQ ID NO: 4023228 - DNA, 25 bp, Homo sapien
ccctcaaactctgtgaactgaacct

SEQ ID NO: 4023229 - DNA, 25 bp, Homo sapien
ctgccctcaaactctgtgaactgaa

SEQ ID NO: 4023230 - DNA, 25 bp, Homo sapien
caaactctgtgaactgaaccttgtt

SEQ ID NO: 4023231 - DNA, 25 bp, Homo sapien
ctcaaactctgtgaactgaaccttg

SEQ ID NO: 4023232 - DNA, 25 bp, Homo sapien
tctgcttccgatggagttagttgtg

SEQ ID NO: 4023233 - DNA, 25 bp, Homo sapien
tcctctgcttccgatggagttagtt

SEQ ID NO: 4023234 - DNA, 25 bp, Homo sapien
gcaatcctctgcttccgatggagtt

SEQ ID NO: 4023235 - DNA, 25 bp, Homo sapien
cttccgatggagttagttgtgatga

SEQ ID NO: 4023236 - DNA, 25 bp, Homo sapien
gaagtagcaaaacggctcctgaccc

SEQ ID NO: 4023237 - DNA, 25 bp, Homo sapien
tgtgaagtagcaaaacggctcctga

SEQ ID NO: 4023238 - DNA, 25 bp, Homo sapien
cttaatatttaccagtgaccaaaag

SEQ ID NO: 4023239 - DNA, 25 bp, Homo sapien
gctcctgaccccattgccagctaga

SEQ ID NO: 4023240 - DNA, 25 bp, Homo sapien
tctgattgacgcactgccaggagta

SEQ ID NO: 4023241 - DNA, 25 bp, Homo sapien
tgattgacgcactgccaggagtagc

SEQ ID NO: 4023242 - DNA, 25 bp, Homo sapien
aggacgctctgattgacgcactgcc

SEQ ID NO: 4023243 - DNA, 25 bp, Homo sapien
cgctctgattgacgcactgccagga

SEQ ID NO: 4023244 - DNA, 25 bp, Homo sapien
tataatgaaatcctcctcagaggcc

SEQ ID NO: 4023245 - DNA, 25 bp, Homo sapien
caggttacaccctctcgtaaaattg

SEQ ID NO: 4023246 - DNA, 25 bp, Homo sapien
cccttcagggcaggtttataatgaa

SEQ ID NO: 4023247 - DNA, 25 bp, Homo sapien
caggtgcggtgacacccatctgtaa

SEQ ID NO: 4023248 - DNA, 25 bp, Homo sapien
aaggaaccatatttcgtataggcga

SEQ ID NO: 4023249 - DNA, 25 bp, Homo sapien
gaaccatatttcgtataggcgatgg

SEQ ID NO: 4023250 - DNA, 25 bp, Homo sapien
ggaaccatatttcgtataggcgatg

SEQ ID NO: 4023251 - DNA, 25 bp, Homo sapien
accatatttcgtataggcgatggga

SEQ ID NO: 4023252 - DNA, 25 bp, Homo sapien
ccgaagtctggtcgtggctgacatc

SEQ ID NO: 4023253 - DNA, 25 bp, Homo sapien
cgaagtctggtcgtggctgacatca

SEQ ID NO: 4023254 - DNA, 25 bp, Homo sapien
tgcaactcacgcatgagcatggaaa

SEQ ID NO: 4023255 - DNA, 25 bp, Homo sapien
actcacgcatgagcatggaaacaca

SEQ ID NO: 4023256 - DNA, 25 bp, Homo sapien
aggtgcaactcacgcatgagcatgg

SEQ ID NO: 4023257 - DNA, 25 bp, Homo sapien
gaaacacagtcatcacgtttatgaa

SEQ ID NO: 4023258 - DNA, 25 bp, Homo sapien
ctgacaccctgacgttcttgactca

SEQ ID NO: 4023259 - DNA, 25 bp, Homo sapien
ggcatatttcgccttctttttgtgc

SEQ ID NO: 4023260 - DNA, 25 bp, Homo sapien
cttcaagtttgagtgtagaagggca

SEQ ID NO: 4023261 - DNA, 25 bp, Homo sapien
caccctgacgttcttgactcatctg

SEQ ID NO: 4023262 - DNA, 25 bp, Homo sapien
ggctgcacagtattccatggcatat

SEQ ID NO: 4023263 - DNA, 25 bp, Homo sapien
gctgcacagtattccatggcatata

SEQ ID NO: 4023264 - DNA, 25 bp, Homo sapien
tgcacagtattccatggcatatatg

SEQ ID NO: 4023265 - DNA, 25 bp, Homo sapien
gcacagtattccatggcatatatgt

SEQ ID NO: 4023266 - DNA, 25 bp, Homo sapien
gcaagtcgctcatgggtgtaatccc

SEQ ID NO: 4023267 - DNA, 25 bp, Homo sapien
taataagtaatcattggaaagcccc

SEQ ID NO: 4023268 - DNA, 25 bp, Homo sapien
tagtgatagtaagtggcaagtcgct

SEQ ID NO: 4023269 - DNA, 25 bp, Homo sapien
gaagacgcaggttgcaacataccct

SEQ ID NO: 4023270 - DNA, 25 bp, Homo sapien
gacctggggccaggtccaagcagca

SEQ ID NO: 4023271 - DNA, 25 bp, Homo sapien
ctggggccaggtccaagcagcagca

SEQ ID NO: 4023272 - DNA, 25 bp, Homo sapien
cctcgccagacctggggccaggtcc

SEQ ID NO: 4023273 - DNA, 25 bp, Homo sapien
cagacctggggccaggtccaagcag

SEQ ID NO: 4023274 - DNA, 25 bp, Homo sapien
aggtagcggccccatcggagggtgg

SEQ ID NO: 4023275 - DNA, 25 bp, Homo sapien
gtagcggccccatcggagggtggca

SEQ ID NO: 4023276 - DNA, 25 bp, Homo sapien
tagcggccccatcggagggtggcag

SEQ ID NO: 4023277 - DNA, 25 bp, Homo sapien
gcggccccatcggagggtggcagag

SEQ ID NO: 4023278 - DNA, 25 bp, Homo sapien
tctgttagcagctccgcaggattca

SEQ ID NO: 4023279 - DNA, 25 bp, Homo sapien
tgttgtgtgtgtaagtctgctctgt

SEQ ID NO: 4023280 - DNA, 25 bp, Homo sapien
tagcagctccgcaggattcattcac

SEQ ID NO: 4023281 - DNA, 25 bp, Homo sapien
tgtgtgtaagtctgctctgttagca

SEQ ID NO: 4023282 - DNA, 25 bp, Homo sapien
gagaaagccctggtacactagtcag

SEQ ID NO: 4023283 - DNA, 25 bp, Homo sapien
tgtcagaatctacgaacccttcaga

SEQ ID NO: 4023284 - DNA, 25 bp, Homo sapien
gaggctgtctcaaaagtcagtggga

SEQ ID NO: 4023285 - DNA, 25 bp, Homo sapien
gaagtcggtctaagcaaagagcagg

SEQ ID NO: 4023286 - DNA, 25 bp, Homo sapien
tctgaggtccgtgatcagaactgcg

SEQ ID NO: 4023287 - DNA, 25 bp, Homo sapien
tgggatccaccggacactgcagtcc

SEQ ID NO: 4023288 - DNA, 25 bp, Homo sapien
caggcttcgggtctttgcctcctta

SEQ ID NO: 4023289 - DNA, 25 bp, Homo sapien
gggtctttgcctccttagtcacctg

SEQ ID NO: 4023290 - DNA, 25 bp, Homo sapien
catggtctggcctcaatgtgcccag

SEQ ID NO: 4023291 - DNA, 25 bp, Homo sapien
tggtctggcctcaatgtgcccagga

SEQ ID NO: 4023292 - DNA, 25 bp, Homo sapien
atggtctggcctcaatgtgcccagg

SEQ ID NO: 4023293 - DNA, 25 bp, Homo sapien
gggttgatgacctgtacaaagcccc

SEQ ID NO: 4023294 - DNA, 25 bp, Homo sapien
ccaaaagaatgggatggtgtcccga

SEQ ID NO: 4023295 - DNA, 25 bp, Homo sapien
cacatgttctcgaggtcagacccct

SEQ ID NO: 4023296 - DNA, 25 bp, Homo sapien
cgagggtacaccaactggcaggctg

SEQ ID NO: 4023297 - DNA, 25 bp, Homo sapien
gagaactcttgcctcaagggtcccc

SEQ ID NO: 4023298 - DNA, 25 bp, Homo sapien
gggttgctgcccagaattcaattgc

SEQ ID NO: 4023299 - DNA, 25 bp, Homo sapien
gaatcaggctgtcaagttgcacaaa

SEQ ID NO: 4023300 - DNA, 25 bp, Homo sapien
tgagattcagtggtcacacccgacg

SEQ ID NO: 4023301 - DNA, 25 bp, Homo sapien
tctggaatagctggacataagtctc

SEQ ID NO: 4023302 - DNA, 25 bp, Homo sapien
tcctggccagaatacacacttttgt

SEQ ID NO: 4023303 - DNA, 25 bp, Homo sapien
catttctgatagaggacttgtaccc

SEQ ID NO: 4023304 - DNA, 25 bp, Homo sapien
gacaatttgtaggtgctggcaaggc

SEQ ID NO: 4023305 - DNA, 25 bp, Homo sapien
tgatgaaaatgcagcgcgcctggag

SEQ ID NO: 4023306 - DNA, 25 bp, Homo sapien
tacaactcagcagtaccaagggctg

SEQ ID NO: 4023307 - DNA, 25 bp, Homo sapien
caggtgaacccgtgagcaactgtgg

SEQ ID NO: 4023308 - DNA, 25 bp, Homo sapien
cacaaaagtctccatcctgcgggag

SEQ ID NO: 4023309 - DNA, 25 bp, Homo sapien
tgtgaggtcattagcccaggacccg

SEQ ID NO: 4023310 - DNA, 25 bp, Homo sapien
tgataccgcaataaacctgacttgt

SEQ ID NO: 4023311 - DNA, 25 bp, Homo sapien
aggaacgcagaggtgccggagtctc

SEQ ID NO: 4023312 - DNA, 25 bp, Homo sapien
agcagcatgtgaggtcattagccca

SEQ ID NO: 4023313 - DNA, 25 bp, Homo sapien
cctccaaagccgcagccaatgagaa

SEQ ID NO: 4023314 - DNA, 25 bp, Homo sapien
tgattaaacgtatgatttctgccac

SEQ ID NO: 4023315 - DNA, 25 bp, Homo sapien
cttggcaagcaggagggcgccgtga

SEQ ID NO: 4023316 - DNA, 25 bp, Homo sapien
cagccaatgagaaggctattttagc

SEQ ID NO: 4023317 - DNA, 25 bp, Homo sapien
ttctggagctgtgagtagcaccgct

SEQ ID NO: 4023318 - DNA, 25 bp, Homo sapien
gcatcacgggctgctgttgctccag

SEQ ID NO: 4023319 - DNA, 25 bp, Homo sapien
gagaggcatttacgacctcagcgac

SEQ ID NO: 4023320 - DNA, 25 bp, Homo sapien
tgattagggacgctccacggacttc

SEQ ID NO: 4023321 - DNA, 25 bp, Homo sapien
gctcccggatcactgggccgacacc

SEQ ID NO: 4023322 - DNA, 25 bp, Homo sapien
ccggatcactgggccgacaccggag

SEQ ID NO: 4023323 - DNA, 25 bp, Homo sapien
gatcactgggccgacaccggaggct

SEQ ID NO: 4023324 - DNA, 25 bp, Homo sapien
cactgggccgacaccggaggctgct

SEQ ID NO: 4023325 - DNA, 25 bp, Homo sapien
gagaaatagacatgatgcatctgat

SEQ ID NO: 4023326 - DNA, 25 bp, Homo sapien
ctggctttgaggtctggagatctag

SEQ ID NO: 4023327 - DNA, 25 bp, Homo sapien
ggtctggagatctagatgcccacaa

SEQ ID NO: 4023328 - DNA, 25 bp, Homo sapien
catgatgcatctgatgagctcggaa

SEQ ID NO: 4023329 - DNA, 25 bp, Homo sapien
tgtggttcggctacagaagagaata

SEQ ID NO: 4023330 - DNA, 25 bp, Homo sapien
tagaagtcagaaccccaccagcttc

SEQ ID NO: 4023331 - DNA, 25 bp, Homo sapien
tattttttgtggttcggctacagaa

SEQ ID NO: 4023332 - DNA, 25 bp, Homo sapien
gtgtgaatcgggatagaagtcagaa

SEQ ID NO: 4023333 - DNA, 25 bp, Homo sapien
caaattcctcttgttgaaaccatgc

SEQ ID NO: 4023334 - DNA, 25 bp, Homo sapien
aacaaattcctcttgttgaaaccat

SEQ ID NO: 4023335 - DNA, 25 bp, Homo sapien
acaaattcctcttgttgaaaccatg

SEQ ID NO: 4023336 - DNA, 25 bp, Homo sapien
tgtggatgtcatgcaggaccgcagc

SEQ ID NO: 4023337 - DNA, 25 bp, Homo sapien
ccctgggaggacttagcgatgatct

SEQ ID NO: 4023338 - DNA, 25 bp, Homo sapien
gcaaaaagctgctctcgggaaccct

SEQ ID NO: 4023339 - DNA, 25 bp, Homo sapien
aagacacaccagtttggccatgggc

SEQ ID NO: 4023340 - DNA, 25 bp, Homo sapien
ttggctttcattgacgatggaatga

SEQ ID NO: 4023341 - DNA, 25 bp, Homo sapien
caggattgctgaggcggcctctggc

SEQ ID NO: 4023342 - DNA, 25 bp, Homo sapien
attttgggttctagtcccgctcgtg

SEQ ID NO: 4023343 - DNA, 25 bp, Homo sapien
cttagactgtttccaaagtccggtg

SEQ ID NO: 4023344 - DNA, 25 bp, Homo sapien
gagtggaacatggaacgtaccaagg

SEQ ID NO: 4023345 - DNA, 25 bp, Homo sapien
gaacgtaccaaggagtgggcatctg

SEQ ID NO: 4023346 - DNA, 25 bp, Homo sapien
caaggagtgggcaagttgggtggga

SEQ ID NO: 4023347 - DNA, 25 bp, Homo sapien
ccgactctcacagcgggagctgtca

SEQ ID NO: 4023348 - DNA, 25 bp, Homo sapien
tggttgtgaacgtagcaccaacttc

SEQ ID NO: 4023349 - DNA, 25 bp, Homo sapien
aagggccatggacttctgaacccag

SEQ ID NO: 4023350 - DNA, 25 bp, Homo sapien
gatcgctgcgtttttctagtaaagc

SEQ ID NO: 4023351 - DNA, 25 bp, Homo sapien
gagaagccctgtgtacaaaagccgc

SEQ ID NO: 4023352 - DNA, 25 bp, Homo sapien
cgcaaagaattaacgctgaggatga

SEQ ID NO: 4023353 - DNA, 25 bp, Homo sapien
cagggagaagacctttagctcagaa

SEQ ID NO: 4023354 - DNA, 25 bp, Homo sapien
ggagccgggctaagccagttcccac

SEQ ID NO: 4023355 - DNA, 25 bp, Homo sapien
tttagctcagaacggcgcaaagaat

SEQ ID NO: 4023356 - DNA, 25 bp, Homo sapien
tctgaagtagtgcacaaccctggga

SEQ ID NO: 4023357 - DNA, 25 bp, Homo sapien
tgccaatgactagaagagaccctct

SEQ ID NO: 4023358 - DNA, 25 bp, Homo sapien
tcagaagacccatcagaagactagg

SEQ ID NO: 4023359 - DNA, 25 bp, Homo sapien
aaaaacttatggtccccaggagatg

SEQ ID NO: 4023360 - DNA, 25 bp, Homo sapien
ggtacagtcatgtgagcctggtgca

SEQ ID NO: 4023361 - DNA, 25 bp, Homo sapien
gacttcgggctatgaggatgattaa

SEQ ID NO: 4023362 - DNA, 25 bp, Homo sapien
gcagccttgctgcagcatgaggaac

SEQ ID NO: 4023363 - DNA, 25 bp, Homo sapien
ttagggcagatgtagtaaggacttc

SEQ ID NO: 4023364 - DNA, 25 bp, Homo sapien
tgtttccacaatatgacacgatgtc

SEQ ID NO: 4023365 - DNA, 25 bp, Homo sapien
tgacacgatgtcaggctcagcctaa

SEQ ID NO: 4023366 - DNA, 25 bp, Homo sapien
gaatgagggaacgagtgtttccaca

SEQ ID NO: 4023367 - DNA, 25 bp, Homo sapien
gccttggactgagcaggttttgatg

SEQ ID NO: 4023368 - DNA, 25 bp, Homo sapien
aagcgggagacagcagtttgagaac

SEQ ID NO: 4023369 - DNA, 25 bp, Homo sapien
tgtcgggagcagtcttgacccatgg

SEQ ID NO: 4023370 - DNA, 25 bp, Homo sapien
tttgagaacagtcgcggctctgagt

SEQ ID NO: 4023371 - DNA, 25 bp, Homo sapien
taagcgccgtatgtgtgaggtaaca

SEQ ID NO: 4023372 - DNA, 25 bp, Homo sapien
ccagttccgctgtgtttcgggagca

SEQ ID NO: 4023373 - DNA, 25 bp, Homo sapien
tcatcgtggccatgagctcttaaca

SEQ ID NO: 4023374 - DNA, 25 bp, Homo sapien
aagacggacaggtgcaagtagtacg

SEQ ID NO: 4023375 - DNA, 25 bp, Homo sapien
gatccaccagatcggagaagacgga

SEQ ID NO: 4023376 - DNA, 25 bp, Homo sapien
agtttctggagctctacccagccac

SEQ ID NO: 4023377 - DNA, 25 bp, Homo sapien
gtttctggagctctacccagccacg

SEQ ID NO: 4023378 - DNA, 25 bp, Homo sapien
agggcactaagcagcacacacgtgt

SEQ ID NO: 4023379 - DNA, 25 bp, Homo sapien
gggcactaagcagcacacacgtgtt

SEQ ID NO: 4023380 - DNA, 25 bp, Homo sapien
ggcactaagcagcacacacgtgttg

SEQ ID NO: 4023381 - DNA, 25 bp, Homo sapien
gtggccttgcgctcactccactggg

SEQ ID NO: 4023382 - DNA, 25 bp, Homo sapien
taaagatcagcacgaggttttctca

SEQ ID NO: 4023383 - DNA, 25 bp, Homo sapien
cagcatcgctcgtctgtaagtatga

SEQ ID NO: 4023384 - DNA, 25 bp, Homo sapien
gagccaaaggaatgcgcagctttta

SEQ ID NO: 4023385 - DNA, 25 bp, Homo sapien
tcggaggagttgctgtctggatttc

SEQ ID NO: 4023386 - DNA, 25 bp, Homo sapien
ggtgtctctcgttcctccgtcactg

SEQ ID NO: 4023387 - DNA, 25 bp, Homo sapien
ggcccattggctccagcacagatct

SEQ ID NO: 4023388 - DNA, 25 bp, Homo sapien
aacaagattccgttctggtgtctct

SEQ ID NO: 4023389 - DNA, 25 bp, Homo sapien
ggcgacgggtttgaggccacgtctg

SEQ ID NO: 4023390 - DNA, 25 bp, Homo sapien
gcgacgggtttgaggccacgtctgc

SEQ ID NO: 4023391 - DNA, 25 bp, Homo sapien
gctttgctgccgtgggtaccctgag

SEQ ID NO: 4023392 - DNA, 25 bp, Homo sapien
attctgcggcgatgctgcctctgga

SEQ ID NO: 4023393 - DNA, 25 bp, Homo sapien
gatagaccagttggccacttcaggg

SEQ ID NO: 4023394 - DNA, 25 bp, Homo sapien
agcatctgcgcaagccacagcagga

SEQ ID NO: 4023395 - DNA, 25 bp, Homo sapien
aagactggtcttttgtgatggatga

SEQ ID NO: 4023396 - DNA, 25 bp, Homo sapien
tgaagagaggtccagtatgcttcct

SEQ ID NO: 4023397 - DNA, 25 bp, Homo sapien
tgatggatgaagagaggtccagtat

SEQ ID NO: 4023398 - DNA, 25 bp, Homo sapien
gagaggtccagtatgcttcctacca

SEQ ID NO: 4023399 - DNA, 25 bp, Homo sapien
caccgggagccagatgacgttgatc

SEQ ID NO: 4023400 - DNA, 25 bp, Homo sapien
tctgatggccttacctagatgtgag

SEQ ID NO: 4023401 - DNA, 25 bp, Homo sapien
gaaagacagattgccagcaggtagc

SEQ ID NO: 4023402 - DNA, 25 bp, Homo sapien
tattctgtgtgttaggcggtgagcc

SEQ ID NO: 4023403 - DNA, 25 bp, Homo sapien
cactcatgggagctcgtggttagat

SEQ ID NO: 4023404 - DNA, 25 bp, Homo sapien
tggactctcatcctccagtcggctg

SEQ ID NO: 4023405 - DNA, 25 bp, Homo sapien
gggctgctcagattctactcatgga

SEQ ID NO: 4023406 - DNA, 25 bp, Homo sapien
tgagaccttttaacgcctagctact

SEQ ID NO: 4023407 - DNA, 25 bp, Homo sapien
cacaagtccattcgagtttggtgtc

SEQ ID NO: 4023408 - DNA, 25 bp, Homo sapien
tgagcccttctgtgagtagatgcac

SEQ ID NO: 4023409 - DNA, 25 bp, Homo sapien
tagatgcacacctctgaggctaaga

SEQ ID NO: 4023410 - DNA, 25 bp, Homo sapien
tcctgtgcaatccagtaaccttgaa

SEQ ID NO: 4023411 - DNA, 25 bp, Homo sapien
gacccaaaatcatgcactctagcct

SEQ ID NO: 4023412 - DNA, 25 bp, Homo sapien
ggttagtagagatttgtttaataga

SEQ ID NO: 4023413 - DNA, 25 bp, Homo sapien
agtgacccaaaatcatgcactctag

SEQ ID NO: 4023414 - DNA, 25 bp, Homo sapien
gttagtagagatttgtttaatagag

SEQ ID NO: 4023415 - DNA, 25 bp, Homo sapien
gtctctgtagaccaccccttgggta

SEQ ID NO: 4023416 - DNA, 25 bp, Homo sapien
ccactgcttccaagtctctgtagac

SEQ ID NO: 4023417 - DNA, 25 bp, Homo sapien
gctagagtgtgctgacgtgatcttg

SEQ ID NO: 4023418 - DNA, 25 bp, Homo sapien
cccttgggtatatctcatgtaagtg

SEQ ID NO: 4023419 - DNA, 25 bp, Homo sapien
tcttgggtttgcgtgacggttccac

SEQ ID NO: 4023420 - DNA, 25 bp, Homo sapien
cttgggtttgcgtgacggttccaca

SEQ ID NO: 4023421 - DNA, 25 bp, Homo sapien
tgcgtgacggttccacatcaccgac

SEQ ID NO: 4023422 - DNA, 25 bp, Homo sapien
tgcgtgacggttccacgtcaccgac

SEQ ID NO: 4023423 - DNA, 25 bp, Homo sapien
tcttgggtttgcgtggtttttctgc

SEQ ID NO: 4023424 - DNA, 25 bp, Homo sapien
gtggttccatctcagccgccctctg

SEQ ID NO: 4023425 - DNA, 25 bp, Homo sapien
gggtttgcgtggtttttctgcctca

SEQ ID NO: 4023426 - DNA, 25 bp, Homo sapien
atcatcggctgagggtggaagcggc

SEQ ID NO: 4023427 - DNA, 25 bp, Homo sapien
gctgagggtggaagcggcccccgca

SEQ ID NO: 4023428 - DNA, 25 bp, Homo sapien
cccgcagacgctcggcaggtgtctt

SEQ ID NO: 4023429 - DNA, 25 bp, Homo sapien
atcatcggctgagggtggaagcggc

SEQ ID NO: 4023430 - DNA, 25 bp, Homo sapien
gatattatcatctgctgaggttgga

SEQ ID NO: 4023431 - DNA, 25 bp, Homo sapien
tggaagcggaacccacagacgctcc

SEQ ID NO: 4023432 - DNA, 25 bp, Homo sapien
ggaagcggaacccacagacgctccc

SEQ ID NO: 4023433 - DNA, 25 bp, Homo sapien
ttgatattatcatctgctgagggtg

SEQ ID NO: 4023434 - DNA, 25 bp, Homo sapien
ctcggcaggtgtcttgatattatca

SEQ ID NO: 4023435 - DNA, 25 bp, Homo sapien
tcggcaggtgtcttgatattatcat

SEQ ID NO: 4023436 - DNA, 25 bp, Homo sapien
atattatcatctgctgagggtggag

SEQ ID NO: 4023437 - DNA, 25 bp, Homo sapien
ggtggaaggggagtgagctgacgct

SEQ ID NO: 4023438 - DNA, 25 bp, Homo sapien
gctcggaaggtgtcttgagattatc

SEQ ID NO: 4023439 - DNA, 25 bp, Homo sapien
aaggggagtgagctgacgctcggaa

SEQ ID NO: 4023440 - DNA, 25 bp, Homo sapien
tgtcttgagattatcatccgctgac

SEQ ID NO: 4023441 - DNA, 25 bp, Homo sapien
tcagcaggtatcttgatattatcat

SEQ ID NO: 4023442 - DNA, 25 bp, Homo sapien
gctcggaaggtgtcttgagattatc

SEQ ID NO: 4023443 - DNA, 25 bp, Homo sapien
ggtggaaggggagtgagctgacgct

SEQ ID NO: 4023444 - DNA, 25 bp, Homo sapien
ctcggaaggtgtcttgagattatca

SEQ ID NO: 4023445 - DNA, 25 bp, Homo sapien
aaggggagtgagctgacgctcggaa

SEQ ID NO: 4023446 - DNA, 25 bp, Homo sapien
ggagcagacactcggcacgtgtctt

SEQ ID NO: 4023447 - DNA, 25 bp, Homo sapien
gatggagcagacactcggcacgtgt

SEQ ID NO: 4023448 - DNA, 25 bp, Homo sapien
gggatggagcagacactcggcacgt

SEQ ID NO: 4023449 - DNA, 25 bp, Homo sapien
aggggatggagcagacactcggcac

SEQ ID NO: 4023450 - DNA, 25 bp, Homo sapien
taggactcggcagcttttgaaggta

SEQ ID NO: 4023451 - DNA, 25 bp, Homo sapien
aaggtacagaggccacacaagaacc

SEQ ID NO: 4023452 - DNA, 25 bp, Homo sapien
aatcataggactcggcagcttttga

SEQ ID NO: 4023453 - DNA, 25 bp, Homo sapien
aggtacagaggccacacaagaacca

SEQ ID NO: 4023454 - DNA, 25 bp, Homo sapien
aaaatgtatccatgtcctgacctgg

SEQ ID NO: 4023455 - DNA, 25 bp, Homo sapien
aatgtatccatgtcctgacctggca

SEQ ID NO: 4023456 - DNA, 25 bp, Homo sapien
aaatgtatccatgtcctgacctggc

SEQ ID NO: 4023457 - DNA, 25 bp, Homo sapien
atgtatccatgtcctgacctggcag

SEQ ID NO: 4023458 - DNA, 25 bp, Homo sapien
ccagttgcaaagagcctttcttgca

SEQ ID NO: 4023459 - DNA, 25 bp, Homo sapien
gcaaagagcctttcttgcagaaggg

SEQ ID NO: 4023460 - DNA, 25 bp, Homo sapien
tgcaaagagcctttcttgcagaagg

SEQ ID NO: 4023461 - DNA, 25 bp, Homo sapien
gttgcaaagagcctttcttgcagaa

SEQ ID NO: 4023462 - DNA, 25 bp, Homo sapien
aacacatgagaaattgaatgttgag

SEQ ID NO: 4023463 - DNA, 25 bp, Homo sapien
ccaacacatgagaaattgaatgttg

SEQ ID NO: 4023464 - DNA, 25 bp, Homo sapien
caacacatgagaaattgaatgttga

SEQ ID NO: 4023465 - DNA, 25 bp, Homo sapien
gccaacacatgagaaattgaatgtt

SEQ ID NO: 4023466 - DNA, 25 bp, Homo sapien
cgccgcaactcttgcgcacgttgaa

SEQ ID NO: 4023467 - DNA, 25 bp, Homo sapien
ctcttgcgcacgttgaaacattttc

SEQ ID NO: 4023468 - DNA, 25 bp, Homo sapien
atttgtggtagtcctctgcccgccg

SEQ ID NO: 4023469 - DNA, 25 bp, Homo sapien
tttgcatttgtggtagtcctctgcc

SEQ ID NO: 4023470 - DNA, 25 bp, Homo sapien
gaaaacgtatttcagatggctataa

SEQ ID NO: 4023471 - DNA, 25 bp, Homo sapien
aatctatctctacctagaaaacgta

SEQ ID NO: 4023472 - DNA, 25 bp, Homo sapien
tataagagtacagtctgagccggtc

SEQ ID NO: 4023473 - DNA, 25 bp, Homo sapien
caactgtacccttacacaatctatc

SEQ ID NO: 4023474 - DNA, 25 bp, Homo sapien
aggatgtggttgatcctacaacaac

SEQ ID NO: 4023475 - DNA, 25 bp, Homo sapien
ggttgatcctacaacaacacacttt

SEQ ID NO: 4023476 - DNA, 25 bp, Homo sapien
tatccttaccgtgtttcacagggca

SEQ ID NO: 4023477 - DNA, 25 bp, Homo sapien
gtattaatatccttaccgtgtttca

SEQ ID NO: 4023478 - DNA, 25 bp, Homo sapien
gaaatgcacacacatgatccaccag

SEQ ID NO: 4023479 - DNA, 25 bp, Homo sapien
tctgaagcttctgatctccgatgag

SEQ ID NO: 4023480 - DNA, 25 bp, Homo sapien
tccagaaggaactactgagatgcaa

SEQ ID NO: 4023481 - DNA, 25 bp, Homo sapien
gagttgacataagtgcatctgaagc

SEQ ID NO: 4023482 - DNA, 25 bp, Homo sapien
gtcctgtccccacgctaaagaagct

SEQ ID NO: 4023483 - DNA, 25 bp, Homo sapien
gtaatgacgtctttcaggccaattt

SEQ ID NO: 4023484 - DNA, 25 bp, Homo sapien
tagagtaatgacgtctttcaggcca

SEQ ID NO: 4023485 - DNA, 25 bp, Homo sapien
tgacgtctttcaggccaattttatt

SEQ ID NO: 4023486 - DNA, 25 bp, Homo sapien
gagtaatgacgtctttcaggccaat

SEQ ID NO: 4023487 - DNA, 25 bp, Homo sapien
ttcgagaccagaagatagtcttcag

SEQ ID NO: 4023488 - DNA, 25 bp, Homo sapien
tccatttcgagaccagaagatagtc

SEQ ID NO: 4023489 - DNA, 25 bp, Homo sapien
ccatcatgtccatttcgagaccaga

SEQ ID NO: 4023490 - DNA, 25 bp, Homo sapien
atttcgagaccagaagatagtcttc

SEQ ID NO: 4023491 - DNA, 25 bp, Homo sapien
tcattgaggctggtttgaacttaac

SEQ ID NO: 4023492 - DNA, 25 bp, Homo sapien
catctcagatgtcggtcagatacct

SEQ ID NO: 4023493 - DNA, 25 bp, Homo sapien
cactaatgactgaattcccaccaag

SEQ ID NO: 4023494 - DNA, 25 bp, Homo sapien
tctgtccctgctctactcagagttc

SEQ ID NO: 4023495 - DNA, 25 bp, Homo sapien
ggtaaactatccagagggtaatgac

SEQ ID NO: 4023496 - DNA, 25 bp, Homo sapien
cgcaataataatatgtaaccaagga

SEQ ID NO: 4023497 - DNA, 25 bp, Homo sapien
taacttgtcggaaacgcaataataa

SEQ ID NO: 4023498 - DNA, 25 bp, Homo sapien
gtaatgacaactttataacttgtcg

SEQ ID NO: 4023499 - DNA, 25 bp, Homo sapien
ggctggagtgaagtggtgcaatctt

SEQ ID NO: 4023500 - DNA, 25 bp, Homo sapien
tacaggtctctgccaccatgcccga

SEQ ID NO: 4023501 - DNA, 25 bp, Homo sapien
gagttccgctccactcagtcgccca

SEQ ID NO: 4023502 - DNA, 25 bp, Homo sapien
cctgacaggcgatctgcctgcctca

SEQ ID NO: 4023503 - DNA, 25 bp, Homo sapien
tctaaataatacttctctcttggat

SEQ ID NO: 4023504 - DNA, 25 bp, Homo sapien
ctaaataatacttctctcttggatt

SEQ ID NO: 4023505 - DNA, 25 bp, Homo sapien
aaataatacttctctcttggattat

SEQ ID NO: 4023506 - DNA, 25 bp, Homo sapien
tgatttctggtcctccccaaccagc

SEQ ID NO: 4023507 - DNA, 25 bp, Homo sapien
ctgatttctggtcctccccaaccag

SEQ ID NO: 4023508 - DNA, 25 bp, Homo sapien
ctgggcgctccttccttcctgagct

SEQ ID NO: 4023509 - DNA, 25 bp, Homo sapien
tgcttctgggcgctccttccttcct

SEQ ID NO: 4023510 - DNA, 25 bp, Homo sapien
gtgatgattttgtgcagctctggga

SEQ ID NO: 4023511 - DNA, 25 bp, Homo sapien
ttcatcatgctggtgatgattttgt

SEQ ID NO: 4023512 - DNA, 25 bp, Homo sapien
tgaagtctactctgtttcatcatgc

SEQ ID NO: 4023513 - DNA, 25 bp, Homo sapien
ttacatctgaccaaactgctttttc

SEQ ID NO: 4023514 - DNA, 25 bp, Homo sapien
tgtcgttgggcacttgtctggttgt

SEQ ID NO: 4023515 - DNA, 25 bp, Homo sapien
cctaagccacttgtatggaaagaaa

SEQ ID NO: 4023516 - DNA, 25 bp, Homo sapien
ccagcctaaacttggcaagataata

SEQ ID NO: 4023517 - DNA, 25 bp, Homo sapien
ctttaggttaccatgccagcaatga

SEQ ID NO: 4023518 - DNA, 25 bp, Homo sapien
tcaggtactcgcatgggcatgtcac

SEQ ID NO: 4023519 - DNA, 25 bp, Homo sapien
tcctcaggtactcgcatgggcatgt

SEQ ID NO: 4023520 - DNA, 25 bp, Homo sapien
ctcaggtactcgcatgggcatgtca

SEQ ID NO: 4023521 - DNA, 25 bp, Homo sapien
cttcctcaggtactcgcatgggcat

SEQ ID NO: 4023522 - DNA, 25 bp, Homo sapien
gagctggccctggtcatgggacagg

SEQ ID NO: 4023523 - DNA, 25 bp, Homo sapien
tccttggtgagctggccctggtcat

SEQ ID NO: 4023524 - DNA, 25 bp, Homo sapien
ccttggtgagctggccctggtcatg

SEQ ID NO: 4023525 - DNA, 25 bp, Homo sapien
ggtgagctggccctggtcatgggac

SEQ ID NO: 4023526 - DNA, 25 bp, Homo sapien
tgagtgccaacctattagataattt

SEQ ID NO: 4023527 - DNA, 25 bp, Homo sapien
gttgaatgagtggaaaaacaaggtg

SEQ ID NO: 4023528 - DNA, 25 bp, Homo sapien
ttgaatgagtggaaaaacaaggtga

SEQ ID NO: 4023529 - DNA, 25 bp, Homo sapien
gaatccttagctcattcggttgtgg

SEQ ID NO: 4023530 - DNA, 25 bp, Homo sapien
gtcgaatcaatgcatgtgggctccg

SEQ ID NO: 4023531 - DNA, 25 bp, Homo sapien
ccctatttaatcacacaaggccttg

SEQ ID NO: 4023532 - DNA, 25 bp, Homo sapien
ccggagccacactgtttagattcta

SEQ ID NO: 4023533 - DNA, 25 bp, Homo sapien
ctttatacgttaaggtaaacatgag

SEQ ID NO: 4023534 - DNA, 25 bp, Homo sapien
ttcacttggatgtaatgcttcacgc

SEQ ID NO: 4023535 - DNA, 25 bp, Homo sapien
acttgtacaccagcagatttaaaca

SEQ ID NO: 4023536 - DNA, 25 bp, Homo sapien
tatgtaactatctcaagaagtttca

SEQ ID NO: 4023537 - DNA, 25 bp, Homo sapien
taataaagagatcatctggaactgc

SEQ ID NO: 4023538 - DNA, 25 bp, Homo sapien
gaccaaattaagtgtagatcgtctc

SEQ ID NO: 4023539 - DNA, 25 bp, Homo sapien
tttctcttccaaggaccatcagtca

SEQ ID NO: 4023540 - DNA, 25 bp, Homo sapien
ggaactgcaatttctaactcataca

SEQ ID NO: 4023541 - DNA, 25 bp, Homo sapien
gaaggtagaatgaggcatgttgaca

SEQ ID NO: 4023542 - DNA, 25 bp, Homo sapien
cattcagtcggattgggtggcttag

SEQ ID NO: 4023543 - DNA, 25 bp, Homo sapien
agtttacttttgaatgtccttgctc

SEQ ID NO: 4023544 - DNA, 25 bp, Homo sapien
tccttgctcaacaggaagggtccat

SEQ ID NO: 4023545 - DNA, 25 bp, Homo sapien
ttgaagcttcgtctgtatttctggc

SEQ ID NO: 4023546 - DNA, 25 bp, Homo sapien
agaccattaccatcctgcgccccat

SEQ ID NO: 4023547 - DNA, 25 bp, Homo sapien
gtgaatggtgggtaacaattgaagc

SEQ ID NO: 4023548 - DNA, 25 bp, Homo sapien
tcatcccaagaccattaccatcctg

SEQ ID NO: 4023549 - DNA, 25 bp, Homo sapien
acgcgcatgaaacacacgactgcac

SEQ ID NO: 4023550 - DNA, 25 bp, Homo sapien
gaaacacacgactgcacttcaggct

SEQ ID NO: 4023551 - DNA, 25 bp, Homo sapien
tgagcaggccactcttccttctcta

SEQ ID NO: 4023552 - DNA, 25 bp, Homo sapien
gagcaggccactcttccttctctat

SEQ ID NO: 4023553 - DNA, 25 bp, Homo sapien
aatgatctggatgaatgggcttaga

SEQ ID NO: 4023554 - DNA, 25 bp, Homo sapien
atctggatgaatgggcttagaggat

SEQ ID NO: 4023555 - DNA, 25 bp, Homo sapien
tgatctggatgaatgggcttagagg

SEQ ID NO: 4023556 - DNA, 25 bp, Homo sapien
gaatgatctggatgaatgggcttag

SEQ ID NO: 4023557 - DNA, 25 bp, Homo sapien
tggaagagcctggagtttattctca

SEQ ID NO: 4023558 - DNA, 25 bp, Homo sapien
caggataggttaagagaggatcaaa

SEQ ID NO: 4023559 - DNA, 25 bp, Homo sapien
gctggggtcgaatcaacagatcctg

SEQ ID NO: 4023560 - DNA, 25 bp, Homo sapien
tgcagctggagcaggataggttaag

SEQ ID NO: 4023561 - DNA, 25 bp, Homo sapien
cacttctcatccagacctcatttgt

SEQ ID NO: 4023562 - DNA, 25 bp, Homo sapien
ggtctgtcctataacgcccacacaa

SEQ ID NO: 4023563 - DNA, 25 bp, Homo sapien
gcatgagtcaaacacgcctggtcac

SEQ ID NO: 4023564 - DNA, 25 bp, Homo sapien
agtcaaacacgcctggtcacacttc

SEQ ID NO: 4023565 - DNA, 25 bp, Homo sapien
agtataccttaatgcctgcatccat

SEQ ID NO: 4023566 - DNA, 25 bp, Homo sapien
ggtacacagtataccttaatgcctg

SEQ ID NO: 4023567 - DNA, 25 bp, Homo sapien
cttaatgcctgcatccatggcctca

SEQ ID NO: 4023568 - DNA, 25 bp, Homo sapien
tctggtacacagtataccttaatgc

SEQ ID NO: 4023569 - DNA, 25 bp, Homo sapien
cataaagcttcaccgaagagtggaa

SEQ ID NO: 4023570 - DNA, 25 bp, Homo sapien
catgctgtttacatgaacataaagc

SEQ ID NO: 4023571 - DNA, 25 bp, Homo sapien
gaacataaagcttcaccgaagagtg

SEQ ID NO: 4023572 - DNA, 25 bp, Homo sapien
caccgaagagtggaataagacagtc

SEQ ID NO: 4023573 - DNA, 25 bp, Homo sapien
gcctaaaggaactgtctttacatac

SEQ ID NO: 4023574 - DNA, 25 bp, Homo sapien
tttgccatccttgcgattatctcag

SEQ ID NO: 4023575 - DNA, 25 bp, Homo sapien
taaggtctttgttctacagtaatga

SEQ ID NO: 4023576 - DNA, 25 bp, Homo sapien
tctggatttaccagcttgcccaact

SEQ ID NO: 4023577 - DNA, 25 bp, Homo sapien
taagaatgtgcttgtaaaaatatac

SEQ ID NO: 4023578 - DNA, 25 bp, Homo sapien
tcataagaatgtgcttgtaaaaata

SEQ ID NO: 4023579 - DNA, 25 bp, Homo sapien
taatagtcataagaatgtgcttgta

SEQ ID NO: 4023580 - DNA, 25 bp, Homo sapien
ttaatagtcataagaatgtgcttgt

SEQ ID NO: 4023581 - DNA, 25 bp, Homo sapien
gatgcgggatgtttgcttcaagtac

SEQ ID NO: 4023582 - DNA, 25 bp, Homo sapien
ttctatcgggtttaaagcagttgcc

SEQ ID NO: 4023583 - DNA, 25 bp, Homo sapien
aagcagttgccaaacaaacagaact

SEQ ID NO: 4023584 - DNA, 25 bp, Homo sapien
gatcttgttctatcgggtttaaagc

SEQ ID NO: 4023585 - DNA, 25 bp, Homo sapien
cttctgatcttgttctatcgggttt

SEQ ID NO: 4023586 - DNA, 25 bp, Homo sapien
tgatattttctcctggtaacaattc

SEQ ID NO: 4023587 - DNA, 25 bp, Homo sapien
atattttctcctggtaacaattcta

SEQ ID NO: 4023588 - DNA, 25 bp, Homo sapien
ccgatccaccatacactgctgaaat

SEQ ID NO: 4023589 - DNA, 25 bp, Homo sapien
tccaccatacactgctgaaattctg

SEQ ID NO: 4023590 - DNA, 25 bp, Homo sapien
attctgtctataccaactttgactg

SEQ ID NO: 4023591 - DNA, 25 bp, Homo sapien
ctgaaattctgtctataccaacttt

SEQ ID NO: 4023592 - DNA, 25 bp, Homo sapien
ggaagtgctactggtactctttttc

SEQ ID NO: 4023593 - DNA, 25 bp, Homo sapien
tactggtactctttttcaagtcatg

SEQ ID NO: 4023594 - DNA, 25 bp, Homo sapien
gctactggtactctttttcaagtca

SEQ ID NO: 4023595 - DNA, 25 bp, Homo sapien
agtgctactggtactctttttcaag

SEQ ID NO: 4023596 - DNA, 25 bp, Homo sapien
ataatttataacctcaggggaagag

SEQ ID NO: 4023597 - DNA, 25 bp, Homo sapien
ggaagagtcagtcggtttggacagc

SEQ ID NO: 4023598 - DNA, 25 bp, Homo sapien
agagtcagtcggtttggacagcaca

SEQ ID NO: 4023599 - DNA, 25 bp, Homo sapien
taacctcaggggaagagtcagtcgg

SEQ ID NO: 4023600 - DNA, 25 bp, Homo sapien
tgcagcaatgaacacctatcatggc

SEQ ID NO: 4023601 - DNA, 25 bp, Homo sapien
cagacaatgtttcgggctggcactg

SEQ ID NO: 4023602 - DNA, 25 bp, Homo sapien
caggtgttcctggtactccacagag

SEQ ID NO: 4023603 - DNA, 25 bp, Homo sapien
tggcactgttacacccagcattggc

SEQ ID NO: 4023604 - DNA, 25 bp, Homo sapien
tcacaggactaatgagcaaatactc

SEQ ID NO: 4023605 - DNA, 25 bp, Homo sapien
tctatctggaggaagcaatgagtct

SEQ ID NO: 4023606 - DNA, 25 bp, Homo sapien
tatggtacaagctcctctatctgga

SEQ ID NO: 4023607 - DNA, 25 bp, Homo sapien
aaaaccatgtgcctatgtatgctgc

SEQ ID NO: 4023608 - DNA, 25 bp, Homo sapien
atagcttcaggacaatgaagttcac

SEQ ID NO: 4023609 - DNA, 25 bp, Homo sapien
ttttccaacaatagatgatgaccag

SEQ ID NO: 4023610 - DNA, 25 bp, Homo sapien
tgttgagccactgagttaatccaca

SEQ ID NO: 4023611 - DNA, 25 bp, Homo sapien
gatgatgaccagacagcaattccct

SEQ ID NO: 4023612 - DNA, 25 bp, Homo sapien
ggagagtcgaatccgcgttagccag

SEQ ID NO: 4023613 - DNA, 25 bp, Homo sapien
tcaaagccatgtctcactgtcactg

SEQ ID NO: 4023614 - DNA, 25 bp, Homo sapien
aggctggcctgccaacaatcctacc

SEQ ID NO: 4023615 - DNA, 25 bp, Homo sapien
atcctaccctcatgatggagagtcg

SEQ ID NO: 4023616 - DNA, 25 bp, Homo sapien
agaagaagaacaagtctaagttggt

SEQ ID NO: 4023617 - DNA, 25 bp, Homo sapien
taacatcctgatcagggtttaatgt

SEQ ID NO: 4023618 - DNA, 25 bp, Homo sapien
tgtctgcagttgtccactgactaac

SEQ ID NO: 4023619 - DNA, 25 bp, Homo sapien
ctgactaacatcctgatcagggttt

SEQ ID NO: 4023620 - DNA, 25 bp, Homo sapien
gcatctgtcttcaggagattgcgtg

SEQ ID NO: 4023621 - DNA, 25 bp, Homo sapien
acagtgaattgtgcagcttcccata

SEQ ID NO: 4023622 - DNA, 25 bp, Homo sapien
cccagtggggttctcagcttagaaa

SEQ ID NO: 4023623 - DNA, 25 bp, Homo sapien
agattgcgtggaattgttgactggt

SEQ ID NO: 4023624 - DNA, 25 bp, Homo sapien
ttcatatttaaaagacaatgacaac

SEQ ID NO: 4023625 - DNA, 25 bp, Homo sapien
tatttaaaagacaatgacaacttca

SEQ ID NO: 4023626 - DNA, 25 bp, Homo sapien
agtttcatatttaaaagacaatgac

SEQ ID NO: 4023627 - DNA, 25 bp, Homo sapien
catatttaaaagacaatgacaactt

SEQ ID NO: 4023628 - DNA, 25 bp, Homo sapien
ctcatgtgacttcttaatgctaaag

SEQ ID NO: 4023629 - DNA, 25 bp, Homo sapien
tgtgacttcttaatgctaaagaaat

SEQ ID NO: 4023630 - DNA, 25 bp, Homo sapien
cttggtgctttactcatgtgacttc

SEQ ID NO: 4023631 - DNA, 25 bp, Homo sapien
acttggtgctttactcatgtgactt

SEQ ID NO: 4023632 - DNA, 25 bp, Homo sapien
tgagggaggcatatcaaacatgtga

SEQ ID NO: 4023633 - DNA, 25 bp, Homo sapien
aatcattatgcttatgtattacaaa

SEQ ID NO: 4023634 - DNA, 25 bp, Homo sapien
ttttcttgcagacctgcaaaatttg

SEQ ID NO: 4023635 - DNA, 25 bp, Homo sapien
cttgcagacctgcaaaatttgatta

SEQ ID NO: 4023636 - DNA, 25 bp, Homo sapien
ttcttgcagacctgcaaaatttgat

SEQ ID NO: 4023637 - DNA, 25 bp, Homo sapien
taattttcttgcagacctgcaaaat

SEQ ID NO: 4023638 - DNA, 25 bp, Homo sapien
agttttccaaatgcttgtcgaatac

SEQ ID NO: 4023639 - DNA, 25 bp, Homo sapien
cagttttccaaatgcttgtcgaata

SEQ ID NO: 4023640 - DNA, 25 bp, Homo sapien
agttgaacacggcaaacatcaacac

SEQ ID NO: 4023641 - DNA, 25 bp, Homo sapien
ctagttgaacacggcaaacatcaac

SEQ ID NO: 4023642 - DNA, 25 bp, Homo sapien
gttgaacacggcaaacatcaacaca

SEQ ID NO: 4023643 - DNA, 25 bp, Homo sapien
ttgaacacggcaaacatcaacacat

SEQ ID NO: 4023644 - DNA, 25 bp, Homo sapien
gaaagaacgaaatagacaaagcagg

SEQ ID NO: 4023645 - DNA, 25 bp, Homo sapien
tatgaaagaacgaaatagacaaagc

SEQ ID NO: 4023646 - DNA, 25 bp, Homo sapien
aatagacaaagcaggtgtgttaaca

SEQ ID NO: 4023647 - DNA, 25 bp, Homo sapien
gaacgaaatagacaaagcaggtgtg

SEQ ID NO: 4023648 - DNA, 25 bp, Homo sapien
gcatgcctgcagacagatattcaca

SEQ ID NO: 4023649 - DNA, 25 bp, Homo sapien
tccagaatcctcattgactgtcacg

SEQ ID NO: 4023650 - DNA, 25 bp, Homo sapien
cacgtaatgtaactgatgggtcatc

SEQ ID NO: 4023651 - DNA, 25 bp, Homo sapien
cctactctagactaggcactgttct

SEQ ID NO: 4023652 - DNA, 25 bp, Homo sapien
caacaaagagtgagtgcctactcta

SEQ ID NO: 4023653 - DNA, 25 bp, Homo sapien
ctaaaaggcctttgcaaaatttatg

SEQ ID NO: 4023654 - DNA, 25 bp, Homo sapien
aagacagttggagatagcgcccaca

SEQ ID NO: 4023655 - DNA, 25 bp, Homo sapien
attcttactcagaagtgcaaagaca

SEQ ID NO: 4023656 - DNA, 25 bp, Homo sapien
gtgtagagcacagcatactgaatgg

SEQ ID NO: 4023657 - DNA, 25 bp, Homo sapien
tgaacagccaggtcactgtgcacaa

SEQ ID NO: 4023658 - DNA, 25 bp, Homo sapien
acacagcgggaccccatctctacta

SEQ ID NO: 4023659 - DNA, 25 bp, Homo sapien
aacacagcgggaccccatctctact

SEQ ID NO: 4023660 - DNA, 25 bp, Homo sapien
caacacagcgggaccccatctctac

SEQ ID NO: 4023661 - DNA, 25 bp, Homo sapien
tatgtgccttttgcggaagtagact

SEQ ID NO: 4023662 - DNA, 25 bp, Homo sapien
ggcaaggtgccctgttcaataagga

SEQ ID NO: 4023663 - DNA, 25 bp, Homo sapien
tgtatttggcccacggaccatagtt

SEQ ID NO: 4023664 - DNA, 25 bp, Homo sapien
taaacagagccctttgtatgtgcct

SEQ ID NO: 4023665 - DNA, 25 bp, Homo sapien
aaacaacatggagcacactgaagcg

SEQ ID NO: 4023666 - DNA, 25 bp, Homo sapien
tgtaactggtaataagcgaagcagc

SEQ ID NO: 4023667 - DNA, 25 bp, Homo sapien
gcagctatggaattatacaaggcaa

SEQ ID NO: 4023668 - DNA, 25 bp, Homo sapien
tacaaggcaatccaatcaaacaaca

SEQ ID NO: 4023669 - DNA, 25 bp, Homo sapien
tagtagaggcgaactttcaccatgt

SEQ ID NO: 4023670 - DNA, 25 bp, Homo sapien
ttttagtagaggcgaactttcacca

SEQ ID NO: 4023671 - DNA, 25 bp, Homo sapien
agaggcgaactttcaccatgttggc

SEQ ID NO: 4023672 - DNA, 25 bp, Homo sapien
caccacccctggctaatttttctat

SEQ ID NO: 4023673 - DNA, 25 bp, Homo sapien
gcagggccacgtcgaattacttaaa

SEQ ID NO: 4023674 - DNA, 25 bp, Homo sapien
aagagcagggccacgtcgaattact

SEQ ID NO: 4023675 - DNA, 25 bp, Homo sapien
acaagtgatcagcccgacgtggcct

SEQ ID NO: 4023676 - DNA, 25 bp, Homo sapien
acaaatcaagagcagggccacgtcg

SEQ ID NO: 4023677 - DNA, 25 bp, Homo sapien
gtttggatttgagaatacttgcaca

SEQ ID NO: 4023678 - DNA, 25 bp, Homo sapien
gcccaggtgacaacagcatgactct

SEQ ID NO: 4023679 - DNA, 25 bp, Homo sapien
cctaaaagaaagactacaggttgag

SEQ ID NO: 4023680 - DNA, 25 bp, Homo sapien
tagacgccttctattcatagcctga

SEQ ID NO: 4023681 - DNA, 25 bp, Homo sapien
ataaggaatattcaacctgtatgaa

SEQ ID NO: 4023682 - DNA, 25 bp, Homo sapien
aaggaatattcaacctgtatgaatg

SEQ ID NO: 4023683 - DNA, 25 bp, Homo sapien
cctgtatgaatgttcctagggaaaa

SEQ ID NO: 4023684 - DNA, 25 bp, Homo sapien
tattcaacctgtatgaatgttccta

SEQ ID NO: 4023685 - DNA, 25 bp, Homo sapien
gcagacatgttgacatgacagtgaa

SEQ ID NO: 4023686 - DNA, 25 bp, Homo sapien
tgtaatgagaaaaggcttaactgtg

SEQ ID NO: 4023687 - DNA, 25 bp, Homo sapien
tatggctgtttgttacatacagtga

SEQ ID NO: 4023688 - DNA, 25 bp, Homo sapien
tacatacagtgattctgcagacatg

SEQ ID NO: 4023689 - DNA, 25 bp, Homo sapien
gtttagggcacaagtcatttctccc

SEQ ID NO: 4023690 - DNA, 25 bp, Homo sapien
tgtctacattgaacacatgattctt

SEQ ID NO: 4023691 - DNA, 25 bp, Homo sapien
ttttgcattgtctacattgaacaca

SEQ ID NO: 4023692 - DNA, 25 bp, Homo sapien
aatattaacttataggcagtctcca

SEQ ID NO: 4023693 - DNA, 25 bp, Homo sapien
tgatggcagtttcgtatttatctgt

SEQ ID NO: 4023694 - DNA, 25 bp, Homo sapien
gatgatggcagtttcgtatttatct

SEQ ID NO: 4023695 - DNA, 25 bp, Homo sapien
taacgcaagaatagtagtttagatg

SEQ ID NO: 4023696 - DNA, 25 bp, Homo sapien
ctctttttctttatgataacgcaag

SEQ ID NO: 4023697 - DNA, 25 bp, Homo sapien
catgtcattacacatgttaaagtcc

SEQ ID NO: 4023698 - DNA, 25 bp, Homo sapien
actccaactacatggcattctggaa

SEQ ID NO: 4023699 - DNA, 25 bp, Homo sapien
tgttaaagtccatagaatacataac

SEQ ID NO: 4023700 - DNA, 25 bp, Homo sapien
atcctgtatgatactggtaataggg

SEQ ID NO: 4023701 - DNA, 25 bp, Homo sapien
taccacaagtctggcaattctccag

SEQ ID NO: 4023702 - DNA, 25 bp, Homo sapien
ttctccagttggtctaatccatatg

SEQ ID NO: 4023703 - DNA, 25 bp, Homo sapien
ggtaccacaagtctggcaattctcc

SEQ ID NO: 4023704 - DNA, 25 bp, Homo sapien
ggtctaatccatatgtaatgaccat

SEQ ID NO: 4023705 - DNA, 25 bp, Homo sapien
cacaatgtatagtcatgctaggatc

SEQ ID NO: 4023706 - DNA, 25 bp, Homo sapien
caatgtatagtcatgctaggatcca

SEQ ID NO: 4023707 - DNA, 25 bp, Homo sapien
gtcacaatgtatagtcatgctagga

SEQ ID NO: 4023708 - DNA, 25 bp, Homo sapien
atgtatagtcatgctaggatccaag

SEQ ID NO: 4023709 - DNA, 25 bp, Homo sapien
tggtttgcagccgtcacacatctca

SEQ ID NO: 4023710 - DNA, 25 bp, Homo sapien
aaaaacacctggtttgcagccgtca

SEQ ID NO: 4023711 - DNA, 25 bp, Homo sapien
aaacacctggtttgcagccgtcaca

SEQ ID NO: 4023712 - DNA, 25 bp, Homo sapien
acctggtttgcagccgtcacacatc

SEQ ID NO: 4023713 - DNA, 25 bp, Homo sapien
tctatctactgatggtctcttttga

SEQ ID NO: 4023714 - DNA, 25 bp, Homo sapien
gataagcactctcatgcttaccaca

SEQ ID NO: 4023715 - DNA, 25 bp, Homo sapien
taatggccaataattgtgtactaaa

SEQ ID NO: 4023716 - DNA, 25 bp, Homo sapien
tactacaagctagctcttgggcttt

SEQ ID NO: 4023717 - DNA, 25 bp, Homo sapien
gggatgtgggatgccccctgactta

SEQ ID NO: 4023718 - DNA, 25 bp, Homo sapien
gtttgctgaaccaaccagccctaga

SEQ ID NO: 4023719 - DNA, 25 bp, Homo sapien
tctgatgactggtcccctagacacg

SEQ ID NO: 4023720 - DNA, 25 bp, Homo sapien
cctagacacgcagtttgctgaacca

SEQ ID NO: 4023721 - DNA, 25 bp, Homo sapien
gctggcactgttgcttgtgaggaaa

SEQ ID NO: 4023722 - DNA, 25 bp, Homo sapien
taaggccctagcttagaacctcaat

SEQ ID NO: 4023723 - DNA, 25 bp, Homo sapien
cacgttgcacgtgactctgctggca

SEQ ID NO: 4023724 - DNA, 25 bp, Homo sapien
ggaggctgctctccgtttccgagct

SEQ ID NO: 4023725 - DNA, 25 bp, Homo sapien
ggtaggcatcttttaaactgcaggt

SEQ ID NO: 4023726 - DNA, 25 bp, Homo sapien
agataaaaataacgagggaggctgg

SEQ ID NO: 4023727 - DNA, 25 bp, Homo sapien
aagataaaaataacgagggaggctg

SEQ ID NO: 4023728 - DNA, 25 bp, Homo sapien
agggtaggcatcttttaaactgcag

SEQ ID NO: 4023729 - DNA, 25 bp, Homo sapien
tgagcaacacggcgagataccgtct

SEQ ID NO: 4023730 - DNA, 25 bp, Homo sapien
ctgagcaacacggcgagataccgtc

SEQ ID NO: 4023731 - DNA, 25 bp, Homo sapien
cctgagcaacacggcgagataccgt

SEQ ID NO: 4023732 - DNA, 25 bp, Homo sapien
tcaaagtcctagcaatctgggccag

SEQ ID NO: 4023733 - DNA, 25 bp, Homo sapien
gctgtagacacattaagcccagggc

SEQ ID NO: 4023734 - DNA, 25 bp, Homo sapien
tcagcattccaggagttgatgagcc

SEQ ID NO: 4023735 - DNA, 25 bp, Homo sapien
tccagtgggtctgaaaacatcagca

SEQ ID NO: 4023736 - DNA, 25 bp, Homo sapien
ccctcttgggcctgagaaggccggg

SEQ ID NO: 4023737 - DNA, 25 bp, Homo sapien
actccctcttgggcctgagaaggcc

SEQ ID NO: 4023738 - DNA, 25 bp, Homo sapien
ccactccctcttgggcctgagaagg

SEQ ID NO: 4023739 - DNA, 25 bp, Homo sapien
ctgggcaccactccctcttgggcct

SEQ ID NO: 4023740 - DNA, 25 bp, Homo sapien
ggaattctatatggtgcctctgata

SEQ ID NO: 4023741 - DNA, 25 bp, Homo sapien
atgtggaattctatatggtgcctct

SEQ ID NO: 4023742 - DNA, 25 bp, Homo sapien
ctgcaaggaatatgtggaattctat

SEQ ID NO: 4023743 - DNA, 25 bp, Homo sapien
gtggaattctatatggtgcctctga

SEQ ID NO: 4023744 - DNA, 25 bp, Homo sapien
gaggtttgttcaactggtcagggcc

SEQ ID NO: 4023745 - DNA, 25 bp, Homo sapien
gaggaaccctgagctctctaggagg

SEQ ID NO: 4023746 - DNA, 25 bp, Homo sapien
cattttacaagcagggatagaggcc

SEQ ID NO: 4023747 - DNA, 25 bp, Homo sapien
taggtggtggcagtacagactccta

SEQ ID NO: 4023748 - DNA, 25 bp, Homo sapien
ttcaaaggcatggatgtgcgggagc

SEQ ID NO: 4023749 - DNA, 25 bp, Homo sapien
ggtcagggttttctgttcaaaggca

SEQ ID NO: 4023750 - DNA, 25 bp, Homo sapien
ttctgctaggcacgcgttcaccagc

SEQ ID NO: 4023751 - DNA, 25 bp, Homo sapien
tgcgggagctcttctgctaggcacg

SEQ ID NO: 4023752 - DNA, 25 bp, Homo sapien
tagggtgacccaagagactggtgtc

SEQ ID NO: 4023753 - DNA, 25 bp, Homo sapien
ccgtgggaacacgtacttggagaga

SEQ ID NO: 4023754 - DNA, 25 bp, Homo sapien
gactggtgtccccaaggttgtagtc

SEQ ID NO: 4023755 - DNA, 25 bp, Homo sapien
tcacgaaggcgggatcctcaaggtc

SEQ ID NO: 4023756 - DNA, 25 bp, Homo sapien
tcgaacttggccgacaccaccagga

SEQ ID NO: 4023757 - DNA, 25 bp, Homo sapien
tctgaagcagcggtttcccctcgaa

SEQ ID NO: 4023758 - DNA, 25 bp, Homo sapien
tgtgtctctgaagcagcggtttccc

SEQ ID NO: 4023759 - DNA, 25 bp, Homo sapien
aagcagcggtttcccctcgaacttg

SEQ ID NO: 4023760 - DNA, 25 bp, Homo sapien
aggagcaacggttgagggtcgtgtc

SEQ ID NO: 4023761 - DNA, 25 bp, Homo sapien
agcaacggttgagggtcgtgtcctc

SEQ ID NO: 4023762 - DNA, 25 bp, Homo sapien
gagcaacggttgagggtcgtgtcct

SEQ ID NO: 4023763 - DNA, 25 bp, Homo sapien
ggagcaacggttgagggtcgtgtcc

SEQ ID NO: 4023764 - DNA, 25 bp, Homo sapien
cggaagaatatgaatggtgccgaac

SEQ ID NO: 4023765 - DNA, 25 bp, Homo sapien
gaatatgaatggtgccgaacccgcc

SEQ ID NO: 4023766 - DNA, 25 bp, Homo sapien
cgagcggaagaatatgaatggtgcc

SEQ ID NO: 4023767 - DNA, 25 bp, Homo sapien
ctaccgagcggaagaatatgaatgg

SEQ ID NO: 4023768 - DNA, 25 bp, Homo sapien
cttctcgcggaggtattcggcgctg

SEQ ID NO: 4023769 - DNA, 25 bp, Homo sapien
ttctcgcggaggtattcggcgctga

SEQ ID NO: 4023770 - DNA, 25 bp, Homo sapien
gcttctcgcggaggtattcggcgct

SEQ ID NO: 4023771 - DNA, 25 bp, Homo sapien
tgtcaacactgctcgtcgggtccag

SEQ ID NO: 4023772 - DNA, 25 bp, Homo sapien
gccgatgctgaatggtacgcgctcg

SEQ ID NO: 4023773 - DNA, 25 bp, Homo sapien
gatagtccccgagagcttgttccga

SEQ ID NO: 4023774 - DNA, 25 bp, Homo sapien
taccttgctgccttacaggagccac

SEQ ID NO: 4023775 - DNA, 25 bp, Homo sapien
tcacgctgcgctgggtgcgcccaga

SEQ ID NO: 4023776 - DNA, 25 bp, Homo sapien
ctcgcctgcgaggagagacagcctt

SEQ ID NO: 4023777 - DNA, 25 bp, Homo sapien
gtgctggcgcacatgctgcgcgcac

SEQ ID NO: 4023778 - DNA, 25 bp, Homo sapien
cagacctccgccaggacctctgcct

SEQ ID NO: 4023779 - DNA, 25 bp, Homo sapien
cttactattgtctggcatgctacgt

SEQ ID NO: 4023780 - DNA, 25 bp, Homo sapien
aactgcagctcattcttgtgtgcac

SEQ ID NO: 4023781 - DNA, 25 bp, Homo sapien
caactgccacactgcactatcagag

SEQ ID NO: 4023782 - DNA, 25 bp, Homo sapien
tctctaaaacaatgtaatgaactgc

SEQ ID NO: 4023783 - DNA, 25 bp, Homo sapien
gtttgtggggcgctccctgccagag

SEQ ID NO: 4023784 - DNA, 25 bp, Homo sapien
agcacacgtcgttcaaggagatgaa

SEQ ID NO: 4023785 - DNA, 25 bp, Homo sapien
aagaaccctatgaccaactacacca

SEQ ID NO: 4023786 - DNA, 25 bp, Homo sapien
gatgaagaagaaccctatgaccaac

SEQ ID NO: 4023787 - DNA, 25 bp, Homo sapien
ggactggaagaccaccttcaccgtg

SEQ ID NO: 4023788 - DNA, 25 bp, Homo sapien
caccttcaccgtggcgcagaatgag

SEQ ID NO: 4023789 - DNA, 25 bp, Homo sapien
gcagaatgagcgcttcgatgcggac

SEQ ID NO: 4023790 - DNA, 25 bp, Homo sapien
tcgatgcggactatgcggagaagat

SEQ ID NO: 4023791 - DNA, 25 bp, Homo sapien
tggagaagtaaaacccaggagatgt

SEQ ID NO: 4023792 - DNA, 25 bp, Homo sapien
tgagctgaaagagtgaatgcccggt

SEQ ID NO: 4023793 - DNA, 25 bp, Homo sapien
gcccggtggggccacatatggtcac

SEQ ID NO: 4023794 - DNA, 25 bp, Homo sapien
ccccaggtcaccatatctggggagg

SEQ ID NO: 4023795 - DNA, 25 bp, Homo sapien
gtggaggacgtcgagtccgccgggc

SEQ ID NO: 4023796 - DNA, 25 bp, Homo sapien
agatggtggaggacgtcgagtccgc

SEQ ID NO: 4023797 - DNA, 25 bp, Homo sapien
tggtggaggacgtcgagtccgccgg

SEQ ID NO: 4023798 - DNA, 25 bp, Homo sapien
aggacgtcgagtccgccgggcagcg

SEQ ID NO: 4023799 - DNA, 25 bp, Homo sapien
tttcttgggctccttagaagctacc

SEQ ID NO: 4023800 - DNA, 25 bp, Homo sapien
gctccttagaagctaccaggtacct

SEQ ID NO: 4023801 - DNA, 25 bp, Homo sapien
tagaagctaccaggtacctctgggc

SEQ ID NO: 4023802 - DNA, 25 bp, Homo sapien
ccacactgagatgaggggagtagcc

SEQ ID NO: 4023803 - DNA, 25 bp, Homo sapien
cttcaaacaggatagaatagtcctc

SEQ ID NO: 4023804 - DNA, 25 bp, Homo sapien
cagccccggggctggtgtcactcac

SEQ ID NO: 4023805 - DNA, 25 bp, Homo sapien
ggaagggcagagagcagccccgggg

SEQ ID NO: 4023806 - DNA, 25 bp, Homo sapien
gtggggcaggtggacaggaagggca

SEQ ID NO: 4023807 - DNA, 25 bp, Homo sapien
ctgtggggcaggtggacaggaaggg

SEQ ID NO: 4023808 - DNA, 25 bp, Homo sapien
ttgttggtggcatggctgtaactga

SEQ ID NO: 4023809 - DNA, 25 bp, Homo sapien
tgttggtggcatggctgtaactgac

SEQ ID NO: 4023810 - DNA, 25 bp, Homo sapien
ccatccacggccttcacccgggcag

SEQ ID NO: 4023811 - DNA, 25 bp, Homo sapien
atccacggccttcacccgggcagcc

SEQ ID NO: 4023812 - DNA, 25 bp, Homo sapien
ccacggccttcacccgggcagccac

SEQ ID NO: 4023813 - DNA, 25 bp, Homo sapien
cccatccacggccttcacccgggca

SEQ ID NO: 4023814 - DNA, 25 bp, Homo sapien
tctccaggtctggccacgtagtctc

SEQ ID NO: 4023815 - DNA, 25 bp, Homo sapien
tgtctccaggtctggccacgtagtc

SEQ ID NO: 4023816 - DNA, 25 bp, Homo sapien
cttgtctccaggtctggccacgtag

SEQ ID NO: 4023817 - DNA, 25 bp, Homo sapien
ttgtctccaggtctggccacgtagt

SEQ ID NO: 4023818 - DNA, 25 bp, Homo sapien
tgaggcagggatggccccacagagg

SEQ ID NO: 4023819 - DNA, 25 bp, Homo sapien
ctgaggcagggatggccccacagag

SEQ ID NO: 4023820 - DNA, 25 bp, Homo sapien
tctgcgcatggtcttccggggtggc

SEQ ID NO: 4023821 - DNA, 25 bp, Homo sapien
cagggtcatcagcacccctctgcgc

SEQ ID NO: 4023822 - DNA, 25 bp, Homo sapien
ctgctgcagcagggtcatcagcacc

SEQ ID NO: 4023823 - DNA, 25 bp, Homo sapien
cagggtcatggccgactgctgcagc

SEQ ID NO: 4023824 - DNA, 25 bp, Homo sapien
tacatatgggtgagacggcagcaca

SEQ ID NO: 4023825 - DNA, 25 bp, Homo sapien
gctgctgcgctcaactacatatggg

SEQ ID NO: 4023826 - DNA, 25 bp, Homo sapien
tcttcttgatgtcggtgctgacaca

SEQ ID NO: 4023827 - DNA, 25 bp, Homo sapien
caggactgtgacctgatctgccagg

SEQ ID NO: 4023828 - DNA, 25 bp, Homo sapien
gggctcactgtcaaccctgttcgtc

SEQ ID NO: 4023829 - DNA, 25 bp, Homo sapien
cttggcggaccattggccgaggtcc

SEQ ID NO: 4023830 - DNA, 25 bp, Homo sapien
aaaggcggggcttggcggaccattg

SEQ ID NO: 4023831 - DNA, 25 bp, Homo sapien
gtggggctcactgtcaaccctgttc

SEQ ID NO: 4023832 - DNA, 25 bp, Homo sapien
ctgttaagagggggagggtctctgt

SEQ ID NO: 4023833 - DNA, 25 bp, Homo sapien
tgttaagagggggagggtctctgtg

SEQ ID NO: 4023834 - DNA, 25 bp, Homo sapien
aagagggggagggtctctgtgcccg

SEQ ID NO: 4023835 - DNA, 25 bp, Homo sapien
agggggagggtctctgtgcccggag

SEQ ID NO: 4023836 - DNA, 25 bp, Homo sapien
cggggccagggctcggctgaagctg

SEQ ID NO: 4023837 - DNA, 25 bp, Homo sapien
cagttgcggggccagggctcggctg

SEQ ID NO: 4023838 - DNA, 25 bp, Homo sapien
gggcgtgccttcaggcagttgcggg

SEQ ID NO: 4023839 - DNA, 25 bp, Homo sapien
cagggggcgtgccttcaggcagttg

SEQ ID NO: 4023840 - DNA, 25 bp, Homo sapien
gatgatagtacttctggccattcct

SEQ ID NO: 4023841 - DNA, 25 bp, Homo sapien
catggagattgtgctcgtcgtgcac

SEQ ID NO: 4023842 - DNA, 25 bp, Homo sapien
gacgacttcggatcctgctgttgag

SEQ ID NO: 4023843 - DNA, 25 bp, Homo sapien
tccaagagggctgtgtgcaccctgc

SEQ ID NO: 4023844 - DNA, 25 bp, Homo sapien
caaagtcccacatagagccaatggc

SEQ ID NO: 4023845 - DNA, 25 bp, Homo sapien
cctggcctctactgtgagtgagtaa

SEQ ID NO: 4023846 - DNA, 25 bp, Homo sapien
aaataacagacgatggtcctggcct

SEQ ID NO: 4023847 - DNA, 25 bp, Homo sapien
ctgtgtactaaactgcctgggggca

SEQ ID NO: 4023848 - DNA, 25 bp, Homo sapien
cagtaccagctcagttgctcaatgg

SEQ ID NO: 4023849 - DNA, 25 bp, Homo sapien
tagaggcatgcgctatcacaccctg

SEQ ID NO: 4023850 - DNA, 25 bp, Homo sapien
tggtgtcccctcctcattctgcgga

SEQ ID NO: 4023851 - DNA, 25 bp, Homo sapien
catcagagttttgttcattcccaca

SEQ ID NO: 4023852 - DNA, 25 bp, Homo sapien
tgttacactcgagctgaggaggccg

SEQ ID NO: 4023853 - DNA, 25 bp, Homo sapien
attctttgttagtttttggagtgtg

SEQ ID NO: 4023854 - DNA, 25 bp, Homo sapien
ctcttgggtttgcgtgacggttcca

SEQ ID NO: 4023855 - DNA, 25 bp, Homo sapien
tgggtttgcgtgacggttccacgtc

SEQ ID NO: 4023856 - DNA, 25 bp, Homo sapien
tttgcgtgacggttccacgtcaccg

SEQ ID NO: 4023857 - DNA, 25 bp, Homo sapien
tgcgtgacggttccacgtcaccgac

SEQ ID NO: 4023858 - DNA, 25 bp, Homo sapien
tgcgtgacggttccacatcaccgac

SEQ ID NO: 4023859 - DNA, 25 bp, Homo sapien
cttgggtttgcgtgacggttccaca

SEQ ID NO: 4023860 - DNA, 25 bp, Homo sapien
tcttgggtttgcgtgacggttccac

SEQ ID NO: 4023861 - DNA, 25 bp, Homo sapien
tgcgtgacggttccacgtcaccgac

SEQ ID NO: 4023862 - DNA, 25 bp, Homo sapien
gggaggtggttccatctcagccgcc

SEQ ID NO: 4023863 - DNA, 25 bp, Homo sapien
aagcggcccccgcagacgctcggca

SEQ ID NO: 4023864 - DNA, 25 bp, Homo sapien
ggtggaagcggcccccgcagacgct

SEQ ID NO: 4023865 - DNA, 25 bp, Homo sapien
cccgcagacgctcggcaggtgtctt

SEQ ID NO: 4023866 - DNA, 25 bp, Homo sapien
cccccgcagacgctcggcaggtgtc

SEQ ID NO: 4023867 - DNA, 25 bp, Homo sapien
gacgctcagaaggtgtcttgagatt

SEQ ID NO: 4023868 - DNA, 25 bp, Homo sapien
ctgacgctcagaaggtgtcttgaga

SEQ ID NO: 4023869 - DNA, 25 bp, Homo sapien
tgtcttgagattatcatccgctgag

SEQ ID NO: 4023870 - DNA, 25 bp, Homo sapien
ggtgtcttgagattatcatccgctg

SEQ ID NO: 4023871 - DNA, 25 bp, Homo sapien
cccccgcagacgctcggcaggtgtc

SEQ ID NO: 4023872 - DNA, 25 bp, Homo sapien
aagcggcccccgcagacgctcggca

SEQ ID NO: 4023873 - DNA, 25 bp, Homo sapien
ggtggaagcggcccccgcagacgct

SEQ ID NO: 4023874 - DNA, 25 bp, Homo sapien
cccgcagacgctcggcaggtgtctt

SEQ ID NO: 4023875 - DNA, 25 bp, Homo sapien
ctgagggtggaagcggcccccgcag

SEQ ID NO: 4023876 - DNA, 25 bp, Homo sapien
atccgctgagggtggaagcggcccc

SEQ ID NO: 4023877 - DNA, 25 bp, Homo sapien
tgacgctcggaaggtgtcttgagat

SEQ ID NO: 4023878 - DNA, 25 bp, Homo sapien
atcatccgctgagggtggaagcggc

SEQ ID NO: 4023879 - DNA, 25 bp, Homo sapien
gtgtcttgatattatcatctgctga

SEQ ID NO: 4023880 - DNA, 25 bp, Homo sapien
tgtcttgatattatcatctgctgag

SEQ ID NO: 4023881 - DNA, 25 bp, Homo sapien
tctgctgagggtggagctgagggtg

SEQ ID NO: 4023882 - DNA, 25 bp, Homo sapien
ctgagggtggagctgagggtggaag

SEQ ID NO: 4023883 - DNA, 25 bp, Homo sapien
ctgacgctcggaaggtgtcttgaga

SEQ ID NO: 4023884 - DNA, 25 bp, Homo sapien
gtcttgagattatcatccgctgagg

SEQ ID NO: 4023885 - DNA, 25 bp, Homo sapien
tgacgctcggaaggtgtcttgagat

SEQ ID NO: 4023886 - DNA, 25 bp, Homo sapien
agattatcatccgctgagggtggaa

SEQ ID NO: 4023887 - DNA, 25 bp, Homo sapien
tctgctgagggtggagctgagggtg

SEQ ID NO: 4023888 - DNA, 25 bp, Homo sapien
gtgtcttgatattatcatctgctga

SEQ ID NO: 4023889 - DNA, 25 bp, Homo sapien
tgtcttgatattatcatctgctgag

SEQ ID NO: 4023890 - DNA, 25 bp, Homo sapien
ctgagggtggagctgagggtggaag

SEQ ID NO: 4023891 - DNA, 25 bp, Homo sapien
gctcggaaggtgtcttgagattatc

SEQ ID NO: 4023892 - DNA, 25 bp, Homo sapien
ctcggaaggtgtcttgagattatca

SEQ ID NO: 4023893 - DNA, 25 bp, Homo sapien
atcatccgctgagggtggaagcggc

SEQ ID NO: 4023894 - DNA, 25 bp, Homo sapien
ctgagggtggaagcggcccccgcag

SEQ ID NO: 4023895 - DNA, 25 bp, Homo sapien
gctgagggtggaagcggcccccgca

SEQ ID NO: 4023896 - DNA, 25 bp, Homo sapien
tgagctgacgctcggaaggtgtctt

SEQ ID NO: 4023897 - DNA, 25 bp, Homo sapien
aaggggagtgagctgacgctcggaa

SEQ ID NO: 4023898 - DNA, 25 bp, Homo sapien
cccgcagacgctcggcaggtgtctt

SEQ ID NO: 4023899 - DNA, 25 bp, Homo sapien
gatggtggaagcggaatccgcagac

SEQ ID NO: 4023900 - DNA, 25 bp, Homo sapien
ggctgatggtggaagcggaatccgc

SEQ ID NO: 4023901 - DNA, 25 bp, Homo sapien
atggtggaagcggaatccgcagacg

SEQ ID NO: 4023902 - DNA, 25 bp, Homo sapien
tggtggaagcggaatccgcagacgc

SEQ ID NO: 4023903 - DNA, 25 bp, Homo sapien
tgagctgacgctcggaaggtgtctt

SEQ ID NO: 4023904 - DNA, 25 bp, Homo sapien
atcatccgctgagggtggaaggcag

SEQ ID NO: 4023905 - DNA, 25 bp, Homo sapien
aggggagtgagctgacgctcggaag

SEQ ID NO: 4023906 - DNA, 25 bp, Homo sapien
ggaaggggagtgagctgacgctcgg

SEQ ID NO: 4023907 - DNA, 25 bp, Homo sapien
aaggggagtgagctgacgctcggaa

SEQ ID NO: 4023908 - DNA, 25 bp, Homo sapien
ctgagggtggaagcggcccccgcag

SEQ ID NO: 4023909 - DNA, 25 bp, Homo sapien
cgctgagggtggaagcggcccccgc

SEQ ID NO: 4023910 - DNA, 25 bp, Homo sapien
tgagctgacgctcggaaggtgtctt

SEQ ID NO: 4023911 - DNA, 25 bp, Homo sapien
ggagcagacactcggcacgtgtctt

SEQ ID NO: 4023912 - DNA, 25 bp, Homo sapien
ggagtgagctgacgctcggaaggtg

SEQ ID NO: 4023913 - DNA, 25 bp, Homo sapien
gatggagcagacactcggcacgtgt

SEQ ID NO: 4023914 - DNA, 25 bp, Homo sapien
gggatggagcagacactcggcacgt

SEQ ID NO: 4023915 - DNA, 25 bp, Homo sapien
agtgtgaccaccctgctccaaatct

SEQ ID NO: 4023916 - DNA, 25 bp, Homo sapien
tcagtgtgaccaccctgctccaaat

SEQ ID NO: 4023917 - DNA, 25 bp, Homo sapien
gtcagtgtgaccaccctgctccaaa

SEQ ID NO: 4023918 - DNA, 25 bp, Homo sapien
atttggaattgtccctgtgggtaat

SEQ ID NO: 4023919 - DNA, 25 bp, Homo sapien
ttgtccctgtgggtaataagttaca

SEQ ID NO: 4023920 - DNA, 25 bp, Homo sapien
ggtaataagttacattcactcttca

SEQ ID NO: 4023921 - DNA, 25 bp, Homo sapien
cctgtgggtaataagttacattcac

SEQ ID NO: 4023922 - DNA, 25 bp, Homo sapien
ccagttgcaaagagcctttcttgca

SEQ ID NO: 4023923 - DNA, 25 bp, Homo sapien
gcaaagagcctttcttgcagaaggg

SEQ ID NO: 4023924 - DNA, 25 bp, Homo sapien
tgcaaagagcctttcttgcagaagg

SEQ ID NO: 4023925 - DNA, 25 bp, Homo sapien
gttgcaaagagcctttcttgcagaa

SEQ ID NO: 4023926 - DNA, 25 bp, Homo sapien
ccaacacatgagaaattgaatgttg

SEQ ID NO: 4023927 - DNA, 25 bp, Homo sapien
aacacatgagaaattgaatgttgag

SEQ ID NO: 4023928 - DNA, 25 bp, Homo sapien
caacacatgagaaattgaatgttga

SEQ ID NO: 4023929 - DNA, 25 bp, Homo sapien
gccaacacatgagaaattgaatgtt

SEQ ID NO: 4023930 - DNA, 25 bp, Homo sapien
tcagcactgaactatcctgcaactg

SEQ ID NO: 4023931 - DNA, 25 bp, Homo sapien
gcatcagcactgaactatcctgcaa

SEQ ID NO: 4023932 - DNA, 25 bp, Homo sapien
ctgcatcagcactgaactatcctgc

SEQ ID NO: 4023933 - DNA, 25 bp, Homo sapien
cagcactgaactatcctgcaactgc

SEQ ID NO: 4023934 - DNA, 25 bp, Homo sapien
ctcttgcgcacgttgaaacattttc

SEQ ID NO: 4023935 - DNA, 25 bp, Homo sapien
cgccgcaactcttgcgcacgttgaa

SEQ ID NO: 4023936 - DNA, 25 bp, Homo sapien
atttgtggtagtcctctgcccgccg

SEQ ID NO: 4023937 - DNA, 25 bp, Homo sapien
tttgcatttgtggtagtcctctgcc

SEQ ID NO: 4023938 - DNA, 25 bp, Homo sapien
aactgtacccttacacaatctatct

SEQ ID NO: 4023939 - DNA, 25 bp, Homo sapien
aatctatctctacctagaaaacgta

SEQ ID NO: 4023940 - DNA, 25 bp, Homo sapien
tctatctctacctagaaaacgtatt

SEQ ID NO: 4023941 - DNA, 25 bp, Homo sapien
tgtacccttacacaatctatctcta

SEQ ID NO: 4023942 - DNA, 25 bp, Homo sapien
catagtccttttgaaggatgtggtt

SEQ ID NO: 4023943 - DNA, 25 bp, Homo sapien
gggcttataaacaggcatagtcctt

SEQ ID NO: 4023944 - DNA, 25 bp, Homo sapien
agctgggcttataaacaggcatagt

SEQ ID NO: 4023945 - DNA, 25 bp, Homo sapien
caggcatagtccttttgaaggatgt

SEQ ID NO: 4023946 - DNA, 25 bp, Homo sapien
gaaatgcacacacatgatccaccag

SEQ ID NO: 4023947 - DNA, 25 bp, Homo sapien
tccagaaggaactactgagatgcaa

SEQ ID NO: 4023948 - DNA, 25 bp, Homo sapien
tctgaagcttctgatctccgatgag

SEQ ID NO: 4023949 - DNA, 25 bp, Homo sapien
gagttgacataagtgcatctgaagc

SEQ ID NO: 4023950 - DNA, 25 bp, Homo sapien
gtcctgtccccacgctaaagaagct

SEQ ID NO: 4023951 - DNA, 25 bp, Homo sapien
caacagtatttgtgtcaaggcacat

SEQ ID NO: 4023952 - DNA, 25 bp, Homo sapien
acaacagtatttgtgtcaaggcaca

SEQ ID NO: 4023953 - DNA, 25 bp, Homo sapien
tgacgtctttcaggccaattttatt

SEQ ID NO: 4023954 - DNA, 25 bp, Homo sapien
gtaatgacgtctttcaggccaattt

SEQ ID NO: 4023955 - DNA, 25 bp, Homo sapien
gagtaatgacgtctttcaggccaat

SEQ ID NO: 4023956 - DNA, 25 bp, Homo sapien
tagagtaatgacgtctttcaggcca

SEQ ID NO: 4023957 - DNA, 25 bp, Homo sapien
aaactcatttccacactatgcggat

SEQ ID NO: 4023958 - DNA, 25 bp, Homo sapien
cacactatgcggattccaacagagc

SEQ ID NO: 4023959 - DNA, 25 bp, Homo sapien
tatgcggattccaacagagccatac

SEQ ID NO: 4023960 - DNA, 25 bp, Homo sapien
tcatttccacactatgcggattcca

SEQ ID NO: 4023961 - DNA, 25 bp, Homo sapien
ttcgagaccagaagatagtcttcag

SEQ ID NO: 4023962 - DNA, 25 bp, Homo sapien
atttcgagaccagaagatagtcttc

SEQ ID NO: 4023963 - DNA, 25 bp, Homo sapien
tccatttcgagaccagaagatagtc

SEQ ID NO: 4023964 - DNA, 25 bp, Homo sapien
ccatcatgtccatttcgagaccaga

SEQ ID NO: 4023965 - DNA, 25 bp, Homo sapien
cattgttcagaaggaggttcagccc

SEQ ID NO: 4023966 - DNA, 25 bp, Homo sapien
gacaaattatggcacaacttagcag

SEQ ID NO: 4023967 - DNA, 25 bp, Homo sapien
gaatggcaagacaaaatgtagagct

SEQ ID NO: 4023968 - DNA, 25 bp, Homo sapien
ggcagtgccaaatgacgtgtaatta

SEQ ID NO: 4023969 - DNA, 25 bp, Homo sapien
tatactaataaatcatttccctgat

SEQ ID NO: 4023970 - DNA, 25 bp, Homo sapien
gttttcataattcttatactaataa

SEQ ID NO: 4023971 - DNA, 25 bp, Homo sapien
ctatccagagggtaatgacaacttt

SEQ ID NO: 4023972 - DNA, 25 bp, Homo sapien
cggaaacgcaataatgacatgtaac

SEQ ID NO: 4023973 - DNA, 25 bp, Homo sapien
ataacttgtcggaaacgcaataatg

SEQ ID NO: 4023974 - DNA, 25 bp, Homo sapien
gtaatgacaactttataacttgtcg

SEQ ID NO: 4023975 - DNA, 25 bp, Homo sapien
tttcactcagaaagaatcatcctta

SEQ ID NO: 4023976 - DNA, 25 bp, Homo sapien
cactcatgggtaagacaagctaagt

SEQ ID NO: 4023977 - DNA, 25 bp, Homo sapien
aaattgatgtataacattggatgca

SEQ ID NO: 4023978 - DNA, 25 bp, Homo sapien
cacatgcagcccgtcactcatgggt

SEQ ID NO: 4023979 - DNA, 25 bp, Homo sapien
tatatatcacatggtaaaagaatcc

SEQ ID NO: 4023980 - DNA, 25 bp, Homo sapien
ataaaaaacaaatgatggcaggatg

SEQ ID NO: 4023981 - DNA, 25 bp, Homo sapien
taaaaaacaaatgatggcaggatgg

SEQ ID NO: 4023982 - DNA, 25 bp, Homo sapien
aaaaaacaaatgatggcaggatggc

SEQ ID NO: 4023983 - DNA, 25 bp, Homo sapien
acatccatgtagccatccgtccatc

SEQ ID NO: 4023984 - DNA, 25 bp, Homo sapien
aggtcccgatagtaaaccatctcca

SEQ ID NO: 4023985 - DNA, 25 bp, Homo sapien
gaaggtcccgatagtaaaccatctc

SEQ ID NO: 4023986 - DNA, 25 bp, Homo sapien
cctgccctagatttggctgggcatg

SEQ ID NO: 4023987 - DNA, 25 bp, Homo sapien
tttttatatgctgcagccatgttcc

SEQ ID NO: 4023988 - DNA, 25 bp, Homo sapien
ttaacaaaagtatggaattcaattc

SEQ ID NO: 4023989 - DNA, 25 bp, Homo sapien
gttcctgccctagatttggctgggc

SEQ ID NO: 4023990 - DNA, 25 bp, Homo sapien
tggaggttattcgtgcagcccagga

SEQ ID NO: 4023991 - DNA, 25 bp, Homo sapien
gttattcgtgcagcccaggaaaggc

SEQ ID NO: 4023992 - DNA, 25 bp, Homo sapien
caatggaggttattcgtgcagccca

SEQ ID NO: 4023993 - DNA, 25 bp, Homo sapien
ttggggtctcgaacaatggaggtta

SEQ ID NO: 4023994 - DNA, 25 bp, Homo sapien
ggatccatcggaggtggcaggtgta

SEQ ID NO: 4023995 - DNA, 25 bp, Homo sapien
atccatcggaggtggcaggtgtagg

SEQ ID NO: 4023996 - DNA, 25 bp, Homo sapien
gatccatcggaggtggcaggtgtag

SEQ ID NO: 4023997 - DNA, 25 bp, Homo sapien
gtggatccatcggaggtggcaggtg

SEQ ID NO: 4023998 - DNA, 25 bp, Homo sapien
gagttgacacgagcctggccaatat

SEQ ID NO: 4023999 - DNA, 25 bp, Homo sapien
taaacagggtaaaactatgcatatt

SEQ ID NO: 4024000 - DNA, 25 bp, Homo sapien
caagataatgttcaacttaatgact

SEQ ID NO: 4024001 - DNA, 25 bp, Homo sapien
ttttacttggaccgggtgcagcggc

SEQ ID NO: 4024002 - DNA, 25 bp, Homo sapien
aggaagaagccagtactgtgactgc

SEQ ID NO: 4024003 - DNA, 25 bp, Homo sapien
agccagtactgtgactgcgtaagct

SEQ ID NO: 4024004 - DNA, 25 bp, Homo sapien
gaagccagtactgtgactgcgtaag

SEQ ID NO: 4024005 - DNA, 25 bp, Homo sapien
aagaagccagtactgtgactgcgta

SEQ ID NO: 4024006 - DNA, 25 bp, Homo sapien
aggtactcgcatgggcatgtcactg

SEQ ID NO: 4024007 - DNA, 25 bp, Homo sapien
ctcaggtactcgcatgggcatgtca

SEQ ID NO: 4024008 - DNA, 25 bp, Homo sapien
tcctcaggtactcgcatgggcatgt

SEQ ID NO: 4024009 - DNA, 25 bp, Homo sapien
cttcctcaggtactcgcatgggcat

SEQ ID NO: 4024010 - DNA, 25 bp, Homo sapien
tttgcagaatgagaacaggggctca

SEQ ID NO: 4024011 - DNA, 25 bp, Homo sapien
acaggggctcatgatgagtgccaac

SEQ ID NO: 4024012 - DNA, 25 bp, Homo sapien
gagcttcaccatttgcagaatgaga

SEQ ID NO: 4024013 - DNA, 25 bp, Homo sapien
gaacaggggctcatgatgagtgcca

SEQ ID NO: 4024014 - DNA, 25 bp, Homo sapien
gttgaatgagtggaaaaacaaggtg

SEQ ID NO: 4024015 - DNA, 25 bp, Homo sapien
ttgaatgagtggaaaaacaaggtga

SEQ ID NO: 4024016 - DNA, 25 bp, Homo sapien
tattggatatacagttctgtgcctg

SEQ ID NO: 4024017 - DNA, 25 bp, Homo sapien
attggatatacagttctgtgcctga

SEQ ID NO: 4024018 - DNA, 25 bp, Homo sapien
gaatccttagctcattcggttgtgg

SEQ ID NO: 4024019 - DNA, 25 bp, Homo sapien
ccggagccacactgtttagattcta

SEQ ID NO: 4024020 - DNA, 25 bp, Homo sapien
ccctatttaatcacacaaggccttg

SEQ ID NO: 4024021 - DNA, 25 bp, Homo sapien
gtcgaatcaatgcatgtgggctccg

SEQ ID NO: 4024022 - DNA, 25 bp, Homo sapien
cattagatctcatctcagttatatt

SEQ ID NO: 4024023 - DNA, 25 bp, Homo sapien
tgcgtgttccaaaaattgcatacat

SEQ ID NO: 4024024 - DNA, 25 bp, Homo sapien
catgtcacgaatggctgggcaccgt

SEQ ID NO: 4024025 - DNA, 25 bp, Homo sapien
gtatgttgttgatatgcgtgttcca

SEQ ID NO: 4024026 - DNA, 25 bp, Homo sapien
ctgatctcgtgatctccgcgcctcg

SEQ ID NO: 4024027 - DNA, 25 bp, Homo sapien
accacatccagctaattttttgtat

SEQ ID NO: 4024028 - DNA, 25 bp, Homo sapien
actacaagtgctgccaccacatcca

SEQ ID NO: 4024029 - DNA, 25 bp, Homo sapien
cgtgcccagcctaatttttgcattt

SEQ ID NO: 4024030 - DNA, 25 bp, Homo sapien
gacattatgtaaccatctcaagaag

SEQ ID NO: 4024031 - DNA, 25 bp, Homo sapien
tagtgtatggttggcgtattctgtg

SEQ ID NO: 4024032 - DNA, 25 bp, Homo sapien
gctttttagttttgggcagattcag

SEQ ID NO: 4024033 - DNA, 25 bp, Homo sapien
cagattcagttgactaaagcacctc

SEQ ID NO: 4024034 - DNA, 25 bp, Homo sapien
tacctggcaaaacttcacggaagct

SEQ ID NO: 4024035 - DNA, 25 bp, Homo sapien
gcctaggcaacgtggcaagagcctg

SEQ ID NO: 4024036 - DNA, 25 bp, Homo sapien
gactcacgctggaggatctctcgag

SEQ ID NO: 4024037 - DNA, 25 bp, Homo sapien
tgtaaaagtacttgcggctgggcgt

SEQ ID NO: 4024038 - DNA, 25 bp, Homo sapien
tgtgtgtttacaattttctggccag

SEQ ID NO: 4024039 - DNA, 25 bp, Homo sapien
tttggtgagagggaattaggccact

SEQ ID NO: 4024040 - DNA, 25 bp, Homo sapien
agtttccactgatcaccttttagct

SEQ ID NO: 4024041 - DNA, 25 bp, Homo sapien
aaattagctgagtgccgtggcttgc

SEQ ID NO: 4024042 - DNA, 25 bp, Homo sapien
tgctcaacaggaagggtccattcag

SEQ ID NO: 4024043 - DNA, 25 bp, Homo sapien
cattcagtcggattgggtggcttag

SEQ ID NO: 4024044 - DNA, 25 bp, Homo sapien
tggtttacatctcaactatcacagc

SEQ ID NO: 4024045 - DNA, 25 bp, Homo sapien
gctggtcttttcagtttactttgga

SEQ ID NO: 4024046 - DNA, 25 bp, Homo sapien
tacgcgtgatatgactgcacgggct

SEQ ID NO: 4024047 - DNA, 25 bp, Homo sapien
aagtagtaaccctatcttagtctga

SEQ ID NO: 4024048 - DNA, 25 bp, Homo sapien
tgtaatagctgtaatgccaggtcca

SEQ ID NO: 4024049 - DNA, 25 bp, Homo sapien
tcagctggagccatagcaactcaag

SEQ ID NO: 4024050 - DNA, 25 bp, Homo sapien
gagccacggtgcccctcctccttta

SEQ ID NO: 4024051 - DNA, 25 bp, Homo sapien
tgagccacggtgcccctcctccttt

SEQ ID NO: 4024052 - DNA, 25 bp, Homo sapien
aagtgtttcactccactgggctagg

SEQ ID NO: 4024053 - DNA, 25 bp, Homo sapien
cagttgcaaactagtggtcctcagc

SEQ ID NO: 4024054 - DNA, 25 bp, Homo sapien
tcagatgctagtgcaaaggaagctc

SEQ ID NO: 4024055 - DNA, 25 bp, Homo sapien
caataaattaggcatggttgcttcc

SEQ ID NO: 4024056 - DNA, 25 bp, Homo sapien
tcatcccaagaccattaccatcctg

SEQ ID NO: 4024057 - DNA, 25 bp, Homo sapien
ttgaagcttcgtctgtatttctggc

SEQ ID NO: 4024058 - DNA, 25 bp, Homo sapien
agaccattaccatcctgcgccccat

SEQ ID NO: 4024059 - DNA, 25 bp, Homo sapien
gtgaatggtgggtaacaattgaagc

SEQ ID NO: 4024060 - DNA, 25 bp, Homo sapien
gcaaaagaaactaggatcagtgtga

SEQ ID NO: 4024061 - DNA, 25 bp, Homo sapien
aaagaaactaggatcagtgtgaaca

SEQ ID NO: 4024062 - DNA, 25 bp, Homo sapien
agcaaaagaaactaggatcagtgtg

SEQ ID NO: 4024063 - DNA, 25 bp, Homo sapien
caaaagaaactaggatcagtgtgaa

SEQ ID NO: 4024064 - DNA, 25 bp, Homo sapien
ctgtaattaagtgctccgggaggcc

SEQ ID NO: 4024065 - DNA, 25 bp, Homo sapien
ctccagaaagtataggcacaacagc

SEQ ID NO: 4024066 - DNA, 25 bp, Homo sapien
aaggcaggaagatcgactgaactca

SEQ ID NO: 4024067 - DNA, 25 bp, Homo sapien
actgaactcaggagctcgggaccag

SEQ ID NO: 4024068 - DNA, 25 bp, Homo sapien
ggcagtcatgtcagtctaaccacag

SEQ ID NO: 4024069 - DNA, 25 bp, Homo sapien
gtccagctaaaatcagggtccagct

SEQ ID NO: 4024070 - DNA, 25 bp, Homo sapien
tatcagggcgcttccagtcattgag

SEQ ID NO: 4024071 - DNA, 25 bp, Homo sapien
tctaccattccaagtagtctctgct

SEQ ID NO: 4024072 - DNA, 25 bp, Homo sapien
gcatgccaccatacctgggttaatt

SEQ ID NO: 4024073 - DNA, 25 bp, Homo sapien
tgcatgccaccatacctgggttaat

SEQ ID NO: 4024074 - DNA, 25 bp, Homo sapien
gtgcatgccaccatacctgggttaa

SEQ ID NO: 4024075 - DNA, 25 bp, Homo sapien
atgccaccatacctgggttaatttt

SEQ ID NO: 4024076 - DNA, 25 bp, Homo sapien
gatgacgatcaataggaaccaacta

SEQ ID NO: 4024077 - DNA, 25 bp, Homo sapien
gaaaagatgccaaaagtccccttca

SEQ ID NO: 4024078 - DNA, 25 bp, Homo sapien
gccagccaccggaaagttttatgta

SEQ ID NO: 4024079 - DNA, 25 bp, Homo sapien
cacggactgtcctataatgcccata

SEQ ID NO: 4024080 - DNA, 25 bp, Homo sapien
ggtctcactatgtcgggtcgccgtg

SEQ ID NO: 4024081 - DNA, 25 bp, Homo sapien
cattatatcccaacgtagagctcag

SEQ ID NO: 4024082 - DNA, 25 bp, Homo sapien
cacaaaaataagtcgtacatcttca

SEQ ID NO: 4024083 - DNA, 25 bp, Homo sapien
cagtggtccctatcttggccgttag

SEQ ID NO: 4024084 - DNA, 25 bp, Homo sapien
agtataccttaatgcctgcatccac

SEQ ID NO: 4024085 - DNA, 25 bp, Homo sapien
ggtacacagtataccttaatgcctg

SEQ ID NO: 4024086 - DNA, 25 bp, Homo sapien
cttaatgcctgcatccacggcctca

SEQ ID NO: 4024087 - DNA, 25 bp, Homo sapien
tctggtacacagtataccttaatgc

SEQ ID NO: 4024088 - DNA, 25 bp, Homo sapien
tcatgctgtttacatgaacgtaaag

SEQ ID NO: 4024089 - DNA, 25 bp, Homo sapien
catgctgtttacatgaacgtaaagc

SEQ ID NO: 4024090 - DNA, 25 bp, Homo sapien
gtctccaaagcaaacgagcaataca

SEQ ID NO: 4024091 - DNA, 25 bp, Homo sapien
caaagcaaacgagcaatacagctac

SEQ ID NO: 4024092 - DNA, 25 bp, Homo sapien
gaaactgtggtctccaaagcaaacg

SEQ ID NO: 4024093 - DNA, 25 bp, Homo sapien
gtggtctccaaagcaaacgagcaat

SEQ ID NO: 4024094 - DNA, 25 bp, Homo sapien
gatgcgggatgtttgcttcaagtac

SEQ ID NO: 4024095 - DNA, 25 bp, Homo sapien
cttctgatcttgttctatcgggttt

SEQ ID NO: 4024096 - DNA, 25 bp, Homo sapien
ttctatcgggtttaaagcagttgcc

SEQ ID NO: 4024097 - DNA, 25 bp, Homo sapien
aagcagttgccaaacaaacagaact

SEQ ID NO: 4024098 - DNA, 25 bp, Homo sapien
gatcttgttctatcgggtttaaagc

SEQ ID NO: 4024099 - DNA, 25 bp, Homo sapien
tggacttcacatgttacgaagcagt

SEQ ID NO: 4024100 - DNA, 25 bp, Homo sapien
tcacatgttacgaagcagttttttc

SEQ ID NO: 4024101 - DNA, 25 bp, Homo sapien
ctggacttcacatgttacgaagcag

SEQ ID NO: 4024102 - DNA, 25 bp, Homo sapien
catgttacgaagcagttttttcatg

SEQ ID NO: 4024103 - DNA, 25 bp, Homo sapien
tgatattttctcctggtaacaattc

SEQ ID NO: 4024104 - DNA, 25 bp, Homo sapien
atattttctcctggtaacaattcta

SEQ ID NO: 4024105 - DNA, 25 bp, Homo sapien
gtggagctgactcgcccctgtgtct

SEQ ID NO: 4024106 - DNA, 25 bp, Homo sapien
ggcaaaccagaaagtcacagctaca

SEQ ID NO: 4024107 - DNA, 25 bp, Homo sapien
gcttgtattcctatgcagcctgtgg

SEQ ID NO: 4024108 - DNA, 25 bp, Homo sapien
cacagctacagactttcagtggagc

SEQ ID NO: 4024109 - DNA, 25 bp, Homo sapien
tccaccatacactgccgaaattctg

SEQ ID NO: 4024110 - DNA, 25 bp, Homo sapien
caatccaccatacactgccgaaatt

SEQ ID NO: 4024111 - DNA, 25 bp, Homo sapien
tacactgccgaaattctgtctatac

SEQ ID NO: 4024112 - DNA, 25 bp, Homo sapien
attctgtctataccaactttgactg

SEQ ID NO: 4024113 - DNA, 25 bp, Homo sapien
gaggtccaattagtccttctatcaa

SEQ ID NO: 4024114 - DNA, 25 bp, Homo sapien
cacatgctcagtgaagcaattacac

SEQ ID NO: 4024115 - DNA, 25 bp, Homo sapien
acagcacatgctcagtgaagcaatt

SEQ ID NO: 4024116 - DNA, 25 bp, Homo sapien
tctgttttatgtgctgcctgggtca

SEQ ID NO: 4024117 - DNA, 25 bp, Homo sapien
ggaagtgctactggtactctttttc

SEQ ID NO: 4024118 - DNA, 25 bp, Homo sapien
agtgctactggtactctttttcaag

SEQ ID NO: 4024119 - DNA, 25 bp, Homo sapien
tactggtactctttttcaagtcatg

SEQ ID NO: 4024120 - DNA, 25 bp, Homo sapien
gctactggtactctttttcaagtca

SEQ ID NO: 4024121 - DNA, 25 bp, Homo sapien
ataatttataacctcaggggaagag

SEQ ID NO: 4024122 - DNA, 25 bp, Homo sapien
taacctcaggggaagagtcagtcgg

SEQ ID NO: 4024123 - DNA, 25 bp, Homo sapien
ggaagagtcagtcggtttggacagc

SEQ ID NO: 4024124 - DNA, 25 bp, Homo sapien
agagtcagtcggtttggacagcaca

SEQ ID NO: 4024125 - DNA, 25 bp, Homo sapien
caggtgttcctggtactccacagag

SEQ ID NO: 4024126 - DNA, 25 bp, Homo sapien
tgcagcaatgaacacctatcatggc

SEQ ID NO: 4024127 - DNA, 25 bp, Homo sapien
cagacaatgtttcgggctggcactg

SEQ ID NO: 4024128 - DNA, 25 bp, Homo sapien
tggcactgttacacccagcattggc

SEQ ID NO: 4024129 - DNA, 25 bp, Homo sapien
atcagtttatgagaatggattccaa

SEQ ID NO: 4024130 - DNA, 25 bp, Homo sapien
aataacactgtagaatacttaacat

SEQ ID NO: 4024131 - DNA, 25 bp, Homo sapien
tatggtacactcataaatacaaatc

SEQ ID NO: 4024132 - DNA, 25 bp, Homo sapien
gaaacaaccttaatgcccaacagta

SEQ ID NO: 4024133 - DNA, 25 bp, Homo sapien
tcacaggactaatgagcaaatactc

SEQ ID NO: 4024134 - DNA, 25 bp, Homo sapien
aaaaccatgtgcctatgtatgctgc

SEQ ID NO: 4024135 - DNA, 25 bp, Homo sapien
tctatctggaggaagcaatgagtct

SEQ ID NO: 4024136 - DNA, 25 bp, Homo sapien
tatggtacaagctcctctatctgga

SEQ ID NO: 4024137 - DNA, 25 bp, Homo sapien
gatgatgaccagacagcaattccct

SEQ ID NO: 4024138 - DNA, 25 bp, Homo sapien
ttttccaacaatagatgatgaccag

SEQ ID NO: 4024139 - DNA, 25 bp, Homo sapien
atagcttcaggacaatgaagttcac

SEQ ID NO: 4024140 - DNA, 25 bp, Homo sapien
tgttgagccactgagttaatccaca

SEQ ID NO: 4024141 - DNA, 25 bp, Homo sapien
aggctggcctgccaacaatcctacc

SEQ ID NO: 4024142 - DNA, 25 bp, Homo sapien
ggagagtcgaatccgcgttagccag

SEQ ID NO: 4024143 - DNA, 25 bp, Homo sapien
tcaaagccatgtctcactgtcactg

SEQ ID NO: 4024144 - DNA, 25 bp, Homo sapien
atcctaccctcatgatggagagtcg

SEQ ID NO: 4024145 - DNA, 25 bp, Homo sapien
acaagtttggcgattggtatagaaa

SEQ ID NO: 4024146 - DNA, 25 bp, Homo sapien
caagtttggcgattggtatagaaaa

SEQ ID NO: 4024147 - DNA, 25 bp, Homo sapien
gacaagtttggcgattggtatagaa

SEQ ID NO: 4024148 - DNA, 25 bp, Homo sapien
ctgacaagtttggcgattggtatag

SEQ ID NO: 4024149 - DNA, 25 bp, Homo sapien
aagaaaagctcaggactggttcaat

SEQ ID NO: 4024150 - DNA, 25 bp, Homo sapien
agaaaagctcaggactggttcaatt

SEQ ID NO: 4024151 - DNA, 25 bp, Homo sapien
agaagaagaacaagtctaagttggt

SEQ ID NO: 4024152 - DNA, 25 bp, Homo sapien
taacatcctgatcagggtttaatgt

SEQ ID NO: 4024153 - DNA, 25 bp, Homo sapien
tgtctgcagttgtccactgactaac

SEQ ID NO: 4024154 - DNA, 25 bp, Homo sapien
ctgactaacatcctgatcagggttt

SEQ ID NO: 4024155 - DNA, 25 bp, Homo sapien
acagtgaattgtgcagcttcccata

SEQ ID NO: 4024156 - DNA, 25 bp, Homo sapien
cccagtggggttctcagcttagaaa

SEQ ID NO: 4024157 - DNA, 25 bp, Homo sapien
agattgcgtggaattgttgactggt

SEQ ID NO: 4024158 - DNA, 25 bp, Homo sapien
gcatctgtcttcaggagattgcgtg

SEQ ID NO: 4024159 - DNA, 25 bp, Homo sapien
ttcatatttaaaagacaatgacaac

SEQ ID NO: 4024160 - DNA, 25 bp, Homo sapien
agtttcatatttaaaagacaatgac

SEQ ID NO: 4024161 - DNA, 25 bp, Homo sapien
tatttaaaagacaatgacaacttca

SEQ ID NO: 4024162 - DNA, 25 bp, Homo sapien
catatttaaaagacaatgacaactt

SEQ ID NO: 4024163 - DNA, 25 bp, Homo sapien
ctcatgtgacttcttaatgctaaag

SEQ ID NO: 4024164 - DNA, 25 bp, Homo sapien
cttggtgctttactcatgtgacttc

SEQ ID NO: 4024165 - DNA, 25 bp, Homo sapien
tgtgacttcttaatgctaaagaaat

SEQ ID NO: 4024166 - DNA, 25 bp, Homo sapien
acttggtgctttactcatgtgactt

SEQ ID NO: 4024167 - DNA, 25 bp, Homo sapien
tgagggaggcatatcaaacatgtga

SEQ ID NO: 4024168 - DNA, 25 bp, Homo sapien
aatcattatgcttatgtattacaaa

SEQ ID NO: 4024169 - DNA, 25 bp, Homo sapien
agttttccaaatgcttgtcgaatac

SEQ ID NO: 4024170 - DNA, 25 bp, Homo sapien
cagttttccaaatgcttgtcgaata

SEQ ID NO: 4024171 - DNA, 25 bp, Homo sapien
ttgaacatggcaaacatcaacacat

SEQ ID NO: 4024172 - DNA, 25 bp, Homo sapien
agttgaacatggcaaacatcaacac

SEQ ID NO: 4024173 - DNA, 25 bp, Homo sapien
ctagttgaacatggcaaacatcaac

SEQ ID NO: 4024174 - DNA, 25 bp, Homo sapien
gttgaacatggcaaacatcaacaca

SEQ ID NO: 4024175 - DNA, 25 bp, Homo sapien
tatgaaagaacgaaatagacaaagc

SEQ ID NO: 4024176 - DNA, 25 bp, Homo sapien
gaaagaacgaaatagacaaagcagg

SEQ ID NO: 4024177 - DNA, 25 bp, Homo sapien
aatagacaaagcaggtgtgttaaca

SEQ ID NO: 4024178 - DNA, 25 bp, Homo sapien
gaacgaaatagacaaagcaggtgtg

SEQ ID NO: 4024179 - DNA, 25 bp, Homo sapien
gcatgcctgcagacagatattcaca

SEQ ID NO: 4024180 - DNA, 25 bp, Homo sapien
ctaaaaggcctttgcaaaatttatg

SEQ ID NO: 4024181 - DNA, 25 bp, Homo sapien
tccaaagcccaagtcattaacagtt

SEQ ID NO: 4024182 - DNA, 25 bp, Homo sapien
aagacagttggagatagcgcccaca

SEQ ID NO: 4024183 - DNA, 25 bp, Homo sapien
attcttactcagaagtgcaaagaca

SEQ ID NO: 4024184 - DNA, 25 bp, Homo sapien
gtgtagagcacagcatactgaatgg

SEQ ID NO: 4024185 - DNA, 25 bp, Homo sapien
tgaacagccaggtcactgtgcacaa

SEQ ID NO: 4024186 - DNA, 25 bp, Homo sapien
acacagcgggaccccatctctacta

SEQ ID NO: 4024187 - DNA, 25 bp, Homo sapien
aacacagcgggaccccatctctact

SEQ ID NO: 4024188 - DNA, 25 bp, Homo sapien
caacacagcgggaccccatctctac

SEQ ID NO: 4024189 - DNA, 25 bp, Homo sapien
tatgtgccttttgcggaagtagact

SEQ ID NO: 4024190 - DNA, 25 bp, Homo sapien
ggcaaggtgccctgttcaataagga

SEQ ID NO: 4024191 - DNA, 25 bp, Homo sapien
tgtatttggcccacggaccatagtt

SEQ ID NO: 4024192 - DNA, 25 bp, Homo sapien
taaacagagccctttgtatgtgcct

SEQ ID NO: 4024193 - DNA, 25 bp, Homo sapien
tgtaactggtaataagcgaagcagc

SEQ ID NO: 4024194 - DNA, 25 bp, Homo sapien
gcagctatggaattatacaaggcaa

SEQ ID NO: 4024195 - DNA, 25 bp, Homo sapien
tacaaggcaatccaatcaaacaaca

SEQ ID NO: 4024196 - DNA, 25 bp, Homo sapien
aaacaacatggagcacactgaagcg

SEQ ID NO: 4024197 - DNA, 25 bp, Homo sapien
tagtagaggcgaactttcaccatgt

SEQ ID NO: 4024198 - DNA, 25 bp, Homo sapien
caccacccctggctaatttttctat

SEQ ID NO: 4024199 - DNA, 25 bp, Homo sapien
ttttagtagaggcgaactttcacca

SEQ ID NO: 4024200 - DNA, 25 bp, Homo sapien
agaggcgaactttcaccatgttggc

SEQ ID NO: 4024201 - DNA, 25 bp, Homo sapien
gtttggatttgagaatacttgcaca

SEQ ID NO: 4024202 - DNA, 25 bp, Homo sapien
gcccaggtgacaacagcatgactct

SEQ ID NO: 4024203 - DNA, 25 bp, Homo sapien
tagacgccttctattcatagcctga

SEQ ID NO: 4024204 - DNA, 25 bp, Homo sapien
cctaaaagaaagactacaggttgag

SEQ ID NO: 4024205 - DNA, 25 bp, Homo sapien
tccaaaatcaaaaacacttccagtc

SEQ ID NO: 4024206 - DNA, 25 bp, Homo sapien
agataaggaatattcaacctgtatg

SEQ ID NO: 4024207 - DNA, 25 bp, Homo sapien
aatcaaaaacacttccagtcccaag

SEQ ID NO: 4024208 - DNA, 25 bp, Homo sapien
caaaaacacttccagtcccaagtat

SEQ ID NO: 4024209 - DNA, 25 bp, Homo sapien
acaaagtcattacaattaaagactc

SEQ ID NO: 4024210 - DNA, 25 bp, Homo sapien
ttgcattgtctacattgaacacatg

SEQ ID NO: 4024211 - DNA, 25 bp, Homo sapien
attgtctacattgaacacatgattc

SEQ ID NO: 4024212 - DNA, 25 bp, Homo sapien
ttttgcattgtctacattgaacaca

SEQ ID NO: 4024213 - DNA, 25 bp, Homo sapien
gcattgtctacattgaacacatgat

SEQ ID NO: 4024214 - DNA, 25 bp, Homo sapien
tagggcacaagtcatttctcccaat

SEQ ID NO: 4024215 - DNA, 25 bp, Homo sapien
gtttagggcacaagtcatttctccc

SEQ ID NO: 4024216 - DNA, 25 bp, Homo sapien
ttctcccaatattaacttataggca

SEQ ID NO: 4024217 - DNA, 25 bp, Homo sapien
aatattaacttataggcagtctcca

SEQ ID NO: 4024218 - DNA, 25 bp, Homo sapien
aactcttcagtgactcaagttgtca

SEQ ID NO: 4024219 - DNA, 25 bp, Homo sapien
actcaagttgtcaaaattcattatc

SEQ ID NO: 4024220 - DNA, 25 bp, Homo sapien
gtgactcaagttgtcaaaattcatt

SEQ ID NO: 4024221 - DNA, 25 bp, Homo sapien
agtgactcaagttgtcaaaattcat

SEQ ID NO: 4024222 - DNA, 25 bp, Homo sapien
gatgatggcagtttcgtatttatct

SEQ ID NO: 4024223 - DNA, 25 bp, Homo sapien
tgatggcagtttcgtatttatctgt

SEQ ID NO: 4024224 - DNA, 25 bp, Homo sapien
taacgcaagaatagtagtttagatg

SEQ ID NO: 4024225 - DNA, 25 bp, Homo sapien
ctctttttctttatgataacgcaag

SEQ ID NO: 4024226 - DNA, 25 bp, Homo sapien
tagaagctgagtgttaaatatgtac

SEQ ID NO: 4024227 - DNA, 25 bp, Homo sapien
cactaaaaatagaggcctggcagag

SEQ ID NO: 4024228 - DNA, 25 bp, Homo sapien
cactgagactagctatcaaccacta

SEQ ID NO: 4024229 - DNA, 25 bp, Homo sapien
gaaaaaacgagtaaagctacactga

SEQ ID NO: 4024230 - DNA, 25 bp, Homo sapien
caatgtatagtcatgctaggatcca

SEQ ID NO: 4024231 - DNA, 25 bp, Homo sapien
ttctccagttggtctaatccatatg

SEQ ID NO: 4024232 - DNA, 25 bp, Homo sapien
ggtaccacaagtctggcaattctcc

SEQ ID NO: 4024233 - DNA, 25 bp, Homo sapien
ggtctaatccatatgtaatgaccat

SEQ ID NO: 4024234 - DNA, 25 bp, Homo sapien
tggtttgcagccgtcacacatctca

SEQ ID NO: 4024235 - DNA, 25 bp, Homo sapien
aaaaacacctggtttgcagccgtca

SEQ ID NO: 4024236 - DNA, 25 bp, Homo sapien
acctggtttgcagccgtcacacatc

SEQ ID NO: 4024237 - DNA, 25 bp, Homo sapien
aaacacctggtttgcagccgtcaca

SEQ ID NO: 4024238 - DNA, 25 bp, Homo sapien
gataagcactctcatgcttaccaca

SEQ ID NO: 4024239 - DNA, 25 bp, Homo sapien
tactacaagctagctcttgggcttt

SEQ ID NO: 4024240 - DNA, 25 bp, Homo sapien
taatggccaataattgtgtactaaa

SEQ ID NO: 4024241 - DNA, 25 bp, Homo sapien
tctatctactgatggtctcttttga

SEQ ID NO: 4024242 - DNA, 25 bp, Homo sapien
tgaatgacacttcaaatgcccaaaa

SEQ ID NO: 4024243 - DNA, 25 bp, Homo sapien
aatgacacttcaaatgcccaaaagc

SEQ ID NO: 4024244 - DNA, 25 bp, Homo sapien
tttgaatgacacttcaaatgcccaa

SEQ ID NO: 4024245 - DNA, 25 bp, Homo sapien
gaatgacacttcaaatgcccaaaag

SEQ ID NO: 4024246 - DNA, 25 bp, Homo sapien
actgttacgtatgcctcagtaattg

SEQ ID NO: 4024247 - DNA, 25 bp, Homo sapien
gttacgtatgcctcagtaattggag

SEQ ID NO: 4024248 - DNA, 25 bp, Homo sapien
aactgttacgtatgcctcagtaatt

SEQ ID NO: 4024249 - DNA, 25 bp, Homo sapien
acgtatgcctcagtaattggaggac

SEQ ID NO: 4024250 - DNA, 25 bp, Homo sapien
ctgaagcgttccccaatgctcctca

SEQ ID NO: 4024251 - DNA, 25 bp, Homo sapien
ttcatccactgattccccagaggcc

SEQ ID NO: 4024252 - DNA, 25 bp, Homo sapien
agaagcgcagccagctttggtgatg

SEQ ID NO: 4024253 - DNA, 25 bp, Homo sapien
cggagaagcgcagccagctttggtg

SEQ ID NO: 4024254 - DNA, 25 bp, Homo sapien
cactgatggaggagggacgtcttca

SEQ ID NO: 4024255 - DNA, 25 bp, Homo sapien
taaattctagcacatatgctctagt

SEQ ID NO: 4024256 - DNA, 25 bp, Homo sapien
tgtaggtataaatgaagacggaagc

SEQ ID NO: 4024257 - DNA, 25 bp, Homo sapien
aagccaacattaaacccaatagaca

SEQ ID NO: 4024258 - DNA, 25 bp, Homo sapien
taatctcttaaatcaactcagaaag

SEQ ID NO: 4024259 - DNA, 25 bp, Homo sapien
aaatgcaagatcagctacccaaaat

SEQ ID NO: 4024260 - DNA, 25 bp, Homo sapien
ctgctgcgtgagcgaaggtttctga

SEQ ID NO: 4024261 - DNA, 25 bp, Homo sapien
cgtgagcgaaggtttctgagtatga

SEQ ID NO: 4024262 - DNA, 25 bp, Homo sapien
gagcgaaggtttctgagtatgatct

SEQ ID NO: 4024263 - DNA, 25 bp, Homo sapien
ctgcgtgagcgaaggtttctgagta

SEQ ID NO: 4024264 - DNA, 25 bp, Homo sapien
ccctggaacctcaaatatcactgat

SEQ ID NO: 4024265 - DNA, 25 bp, Homo sapien
aaccctggaacctcaaatatcactg

SEQ ID NO: 4024266 - DNA, 25 bp, Homo sapien
tggaacctcaaatatcactgattat

SEQ ID NO: 4024267 - DNA, 25 bp, Homo sapien
taaccctggaacctcaaatatcact

SEQ ID NO: 4024268 - DNA, 25 bp, Homo sapien
gagggtaacatcgagccaccaaaag

SEQ ID NO: 4024269 - DNA, 25 bp, Homo sapien
aatatgagggtaacatcgagccacc

SEQ ID NO: 4024270 - DNA, 25 bp, Homo sapien
tcgagccaccaaaagaatgcactta

SEQ ID NO: 4024271 - DNA, 25 bp, Homo sapien
caccaaaagaatgcacttaacacat

SEQ ID NO: 4024272 - DNA, 25 bp, Homo sapien
gcactaatccttgaacagtgtatcc

SEQ ID NO: 4024273 - DNA, 25 bp, Homo sapien
gcatatatgtatgtagcactaatcc

SEQ ID NO: 4024274 - DNA, 25 bp, Homo sapien
cccggcgtgtaagccaatttcttag

SEQ ID NO: 4024275 - DNA, 25 bp, Homo sapien
agtgtatcctttactcaaactgaga

SEQ ID NO: 4024276 - DNA, 25 bp, Homo sapien
tgctttgtaggtggcacataagtag

SEQ ID NO: 4024277 - DNA, 25 bp, Homo sapien
ctttgtaggtggcacataagtagag

SEQ ID NO: 4024278 - DNA, 25 bp, Homo sapien
gtgctttgtaggtggcacataagta

SEQ ID NO: 4024279 - DNA, 25 bp, Homo sapien
ttgcagatgagctaaatttgctaaa

SEQ ID NO: 4024280 - DNA, 25 bp, Homo sapien
tgtctcaactcctgaagcaatttgc

SEQ ID NO: 4024281 - DNA, 25 bp, Homo sapien
aaacactctatacataactacattc

SEQ ID NO: 4024282 - DNA, 25 bp, Homo sapien
taactacattctacataatatccaa

SEQ ID NO: 4024283 - DNA, 25 bp, Homo sapien
agtgagggaaggcccaaaaatgcta

SEQ ID NO: 4024284 - DNA, 25 bp, Homo sapien
tgagggaaggcccaaaaatgctaaa

SEQ ID NO: 4024285 - DNA, 25 bp, Homo sapien
gtgcagcagccaagatattatccaa

SEQ ID NO: 4024286 - DNA, 25 bp, Homo sapien
ctttcattaagcacatcatgtgcag

SEQ ID NO: 4024287 - DNA, 25 bp, Homo sapien
atcatgtgcagcagccaagatatta

SEQ ID NO: 4024288 - DNA, 25 bp, Homo sapien
taagcacatcatgtgcagcagccaa

SEQ ID NO: 4024289 - DNA, 25 bp, Homo sapien
ctcccatgtagctggaattacggtc

SEQ ID NO: 4024290 - DNA, 25 bp, Homo sapien
cccatgtagctggaattacggtcat

SEQ ID NO: 4024291 - DNA, 25 bp, Homo sapien
tgtagctggaattacggtcatgtgc

SEQ ID NO: 4024292 - DNA, 25 bp, Homo sapien
catgtagctggaattacggtcatgt

SEQ ID NO: 4024293 - DNA, 25 bp, Homo sapien
actactcaaggtagcattacctagt

SEQ ID NO: 4024294 - DNA, 25 bp, Homo sapien
taagttcttgatcatcataatacag

SEQ ID NO: 4024295 - DNA, 25 bp, Homo sapien
catatttccaaacatactatactta

SEQ ID NO: 4024296 - DNA, 25 bp, Homo sapien
aaaatcctcatatttccaaacatac

SEQ ID NO: 4024297 - DNA, 25 bp, Homo sapien
gcttattttctggttgctgaataaa

SEQ ID NO: 4024298 - DNA, 25 bp, Homo sapien
gttgctgaataaattctttcaactg

SEQ ID NO: 4024299 - DNA, 25 bp, Homo sapien
tggttgctgaataaattctttcaac

SEQ ID NO: 4024300 - DNA, 25 bp, Homo sapien
cagcttattttctggttgctgaata

SEQ ID NO: 4024301 - DNA, 25 bp, Homo sapien
tcccgggtgatcctccgaagaagat

SEQ ID NO: 4024302 - DNA, 25 bp, Homo sapien
acattgttaaccctcagctcttgcc

SEQ ID NO: 4024303 - DNA, 25 bp, Homo sapien
tcagggctggtcacattgttaaccc

SEQ ID NO: 4024304 - DNA, 25 bp, Homo sapien
tccgaccataagtattttccccaga

SEQ ID NO: 4024305 - DNA, 25 bp, Homo sapien
ctcatgtctttggtggctaaagcac

SEQ ID NO: 4024306 - DNA, 25 bp, Homo sapien
atatgattgttcgtttcattcagtc

SEQ ID NO: 4024307 - DNA, 25 bp, Homo sapien
ctacaaacagcaatgtgtacgttat

SEQ ID NO: 4024308 - DNA, 25 bp, Homo sapien
aatatgattgttcgtttcattcagt

SEQ ID NO: 4024309 - DNA, 25 bp, Homo sapien
cagcaatgtgtacgttatttaaata

SEQ ID NO: 4024310 - DNA, 25 bp, Homo sapien
tatcatcgtgcctttgccgagacac

SEQ ID NO: 4024311 - DNA, 25 bp, Homo sapien
cattctgtatgtcagcgtggactct

SEQ ID NO: 4024312 - DNA, 25 bp, Homo sapien
cgtggactctggtatcatcgtgcct

SEQ ID NO: 4024313 - DNA, 25 bp, Homo sapien
gacaccacagctgaatttgaaggtt

SEQ ID NO: 4024314 - DNA, 25 bp, Homo sapien
aaaaatcgcatactgtgtaacatgg

SEQ ID NO: 4024315 - DNA, 25 bp, Homo sapien
cgcatactgtgtaacatggagcctt

SEQ ID NO: 4024316 - DNA, 25 bp, Homo sapien
aatcgcatactgtgtaacatggagc

SEQ ID NO: 4024317 - DNA, 25 bp, Homo sapien
ctcaaaaatcgcatactgtgtaaca

SEQ ID NO: 4024318 - DNA, 25 bp, Homo sapien
gtgggactagaaactcatgacacca

SEQ ID NO: 4024319 - DNA, 25 bp, Homo sapien
gtaggtgggactagaaactcatgac

SEQ ID NO: 4024320 - DNA, 25 bp, Homo sapien
taggtgggactagaaactcatgaca

SEQ ID NO: 4024321 - DNA, 25 bp, Homo sapien
aggtgggactagaaactcatgacac

SEQ ID NO: 4024322 - DNA, 25 bp, Homo sapien
tacttaaaactatcacattggcaga

SEQ ID NO: 4024323 - DNA, 25 bp, Homo sapien
gatctcggtgatctgacagcctcgg

SEQ ID NO: 4024324 - DNA, 25 bp, Homo sapien
gcccatacacactacaacagaggga

SEQ ID NO: 4024325 - DNA, 25 bp, Homo sapien
aaatgatgatgcacagctatgctga

SEQ ID NO: 4024326 - DNA, 25 bp, Homo sapien
aacagggtggccatagtaaataatg

SEQ ID NO: 4024327 - DNA, 25 bp, Homo sapien
taagtaagcaaagtaaggcgatagt

SEQ ID NO: 4024328 - DNA, 25 bp, Homo sapien
tacgacatacttacgaactatttgc

SEQ ID NO: 4024329 - DNA, 25 bp, Homo sapien
tatagtaactatacgataggccact

SEQ ID NO: 4024330 - DNA, 25 bp, Homo sapien
actgcgcgtggccaaattaccgtat

SEQ ID NO: 4024331 - DNA, 25 bp, Homo sapien
caaattaccgtattctttcttctgt

SEQ ID NO: 4024332 - DNA, 25 bp, Homo sapien
tgcgcgtggccaaattaccgtattc

SEQ ID NO: 4024333 - DNA, 25 bp, Homo sapien
cgcgtggccaaattaccgtattctt

SEQ ID NO: 4024334 - DNA, 25 bp, Homo sapien
aacaattttaccagatccatgcaca

SEQ ID NO: 4024335 - DNA, 25 bp, Homo sapien
catatctgtaccttgactgaggtca

SEQ ID NO: 4024336 - DNA, 25 bp, Homo sapien
ggctgccataagaggaatgctttcc

SEQ ID NO: 4024337 - DNA, 25 bp, Homo sapien
aacttgcaggatctcgttttcatga

SEQ ID NO: 4024338 - DNA, 25 bp, Homo sapien
catcagacatactagtatacagctt

SEQ ID NO: 4024339 - DNA, 25 bp, Homo sapien
tgtacctatggacatcaaacttagt

SEQ ID NO: 4024340 - DNA, 25 bp, Homo sapien
cttagtacagactgataaaaggctg

SEQ ID NO: 4024341 - DNA, 25 bp, Homo sapien
taaaaggctgaacagacaactctgg

SEQ ID NO: 4024342 - DNA, 25 bp, Homo sapien
gatctctgtcttgattgatactaga

SEQ ID NO: 4024343 - DNA, 25 bp, Homo sapien
gactccaatgtcaaattaatcaatg

SEQ ID NO: 4024344 - DNA, 25 bp, Homo sapien
gactttagctattggcaatgatagg

SEQ ID NO: 4024345 - DNA, 25 bp, Homo sapien
caaactaaggtggaaaaaatgacag

SEQ ID NO: 4024346 - DNA, 25 bp, Homo sapien
aatgagccgggctgttggcaagcgc

SEQ ID NO: 4024347 - DNA, 25 bp, Homo sapien
cattcttaaatgtcgggtgcggtgg

SEQ ID NO: 4024348 - DNA, 25 bp, Homo sapien
agccaagtatctgtgccgctgcact

SEQ ID NO: 4024349 - DNA, 25 bp, Homo sapien
tgcagtaagccaagtatctgtgccg

SEQ ID NO: 4024350 - DNA, 25 bp, Homo sapien
atctcaattctagactcaggcacta

SEQ ID NO: 4024351 - DNA, 25 bp, Homo sapien
gtcattccagctccgcgaatagttg

SEQ ID NO: 4024352 - DNA, 25 bp, Homo sapien
agctccgcgaatagttggtgccgcc

SEQ ID NO: 4024353 - DNA, 25 bp, Homo sapien
aatagttggtgccgccgctgctcag

SEQ ID NO: 4024354 - DNA, 25 bp, Homo sapien
ccgcgaatagttggtgccgccgctg

SEQ ID NO: 4024355 - DNA, 25 bp, Homo sapien
gagaagcgcgagtcgccgcccgaac

SEQ ID NO: 4024356 - DNA, 25 bp, Homo sapien
ccagagaagcgcgagtcgccgcccg

SEQ ID NO: 4024357 - DNA, 25 bp, Homo sapien
gcccgaaccggccgctgccgacacc

SEQ ID NO: 4024358 - DNA, 25 bp, Homo sapien
gccgccgcccagagaagcgcgagtc

SEQ ID NO: 4024359 - DNA, 25 bp, Homo sapien
gttccgggttccgcctgagcccgca

SEQ ID NO: 4024360 - DNA, 25 bp, Homo sapien
ttccgggttccgcctgagcccgcaa

SEQ ID NO: 4024361 - DNA, 25 bp, Homo sapien
tccgggttccgcctgagcccgcaac

SEQ ID NO: 4024362 - DNA, 25 bp, Homo sapien
tgaaggggcgccgacttctcttcca

SEQ ID NO: 4024363 - DNA, 25 bp, Homo sapien
cggatgaaggggcgccgacttctct

SEQ ID NO: 4024364 - DNA, 25 bp, Homo sapien
ggcggatgaaggggcgccgacttct

SEQ ID NO: 4024365 - DNA, 25 bp, Homo sapien
gatgaaggggcgccgacttctcttc

SEQ ID NO: 4024366 - DNA, 25 bp, Homo sapien
caagtgtctaaaccttatctgcata

SEQ ID NO: 4024367 - DNA, 25 bp, Homo sapien
aaaattccctaaaccatctgatgca

SEQ ID NO: 4024368 - DNA, 25 bp, Homo sapien
gaggagacgtacctgaccatctacc

SEQ ID NO: 4024369 - DNA, 25 bp, Homo sapien
ccaggatgctccttaaacaagtgtc

SEQ ID NO: 4024370 - DNA, 25 bp, Homo sapien
ctgggcagaaacgatccaaggcctg

SEQ ID NO: 4024371 - DNA, 25 bp, Homo sapien
gctgggcagaaacgatccaaggcct

SEQ ID NO: 4024372 - DNA, 25 bp, Homo sapien
tgaaatgcccaccgaagggcagggc

SEQ ID NO: 4024373 - DNA, 25 bp, Homo sapien
ggaccctgctgtcccgtcactgaag

SEQ ID NO: 4024374 - DNA, 25 bp, Homo sapien
gaaatgcccaccgaagggcagggca

SEQ ID NO: 4024375 - DNA, 25 bp, Homo sapien
ggtttctgggaccaatgaccttagc

SEQ ID NO: 4024376 - DNA, 25 bp, Homo sapien
tggtttctgggaccaatgaccttag

SEQ ID NO: 4024377 - DNA, 25 bp, Homo sapien
gtggtttctgggaccaatgacctta

SEQ ID NO: 4024378 - DNA, 25 bp, Homo sapien
gacggtccaggaacgcaaaaatgta

SEQ ID NO: 4024379 - DNA, 25 bp, Homo sapien
acggtccaggaacgcaaaaatgtag

SEQ ID NO: 4024380 - DNA, 25 bp, Homo sapien
cgatgtactgcgatgaaggccggat

SEQ ID NO: 4024381 - DNA, 25 bp, Homo sapien
ccgtgggcgtcacgaagatgcccga

SEQ ID NO: 4024382 - DNA, 25 bp, Homo sapien
tggcgaagaccagggccacgatgta

SEQ ID NO: 4024383 - DNA, 25 bp, Homo sapien
tagtcgccgcccgatttggagatgg

SEQ ID NO: 4024384 - DNA, 25 bp, Homo sapien
gcagccgagcgaggattgtgcgcgc

SEQ ID NO: 4024385 - DNA, 25 bp, Homo sapien
agccgagcgaggattgtgcgcgccg

SEQ ID NO: 4024386 - DNA, 25 bp, Homo sapien
ccgagcgaggattgtgcgcgccgct

SEQ ID NO: 4024387 - DNA, 25 bp, Homo sapien
cgagcgaggattgtgcgcgccgctc

SEQ ID NO: 4024388 - DNA, 25 bp, Homo sapien
tagtggcctggaaggacgcccagac

SEQ ID NO: 4024389 - DNA, 25 bp, Homo sapien
cttgtgccctcattagtggcctgga

SEQ ID NO: 4024390 - DNA, 25 bp, Homo sapien
ttgtgccctcattagtggcctggaa

SEQ ID NO: 4024391 - DNA, 25 bp, Homo sapien
ggcctggaaggacgcccagaccttc

SEQ ID NO: 4024392 - DNA, 25 bp, Homo sapien
aaacaggagagtacgaaatgcagag

SEQ ID NO: 4024393 - DNA, 25 bp, Homo sapien
aacaggagagtacgaaatgcagaga

SEQ ID NO: 4024394 - DNA, 25 bp, Homo sapien
acaggagagtacgaaatgcagagag

SEQ ID NO: 4024395 - DNA, 25 bp, Homo sapien
aaaacaggagagtacgaaatgcaga

SEQ ID NO: 4024396 - DNA, 25 bp, Homo sapien
caacgggctccttctggatgatcca

SEQ ID NO: 4024397 - DNA, 25 bp, Homo sapien
tctggatgatccaggtgaccgactc

SEQ ID NO: 4024398 - DNA, 25 bp, Homo sapien
gatgatccaggtgaccgactcggtc

SEQ ID NO: 4024399 - DNA, 25 bp, Homo sapien
tggcttggggccacttcaacgggct

SEQ ID NO: 4024400 - DNA, 25 bp, Homo sapien
agagaccgagaagccaaggccgtgt

SEQ ID NO: 4024401 - DNA, 25 bp, Homo sapien
agaccgagaagccaaggccgtgtca

SEQ ID NO: 4024402 - DNA, 25 bp, Homo sapien
gagagaccgagaagccaaggccgtg

SEQ ID NO: 4024403 - DNA, 25 bp, Homo sapien
ccgagaagccaaggccgtgtcagtc

SEQ ID NO: 4024404 - DNA, 25 bp, Homo sapien
gcgtgctgggagctgagtgcatagt

SEQ ID NO: 4024405 - DNA, 25 bp, Homo sapien
gctgggagctgagtgcatagtgaca

SEQ ID NO: 4024406 - DNA, 25 bp, Homo sapien
catagtgacaggtcggcactggtag

SEQ ID NO: 4024407 - DNA, 25 bp, Homo sapien
ctgagtgcatagtgacaggtcggca

SEQ ID NO: 4024408 - DNA, 25 bp, Homo sapien
gctgtgctggatgcagggaagcgta

SEQ ID NO: 4024409 - DNA, 25 bp, Homo sapien
cagggaagcgtatggagagctgggc

SEQ ID NO: 4024410 - DNA, 25 bp, Homo sapien
cacatctgaggcttgcgttgactcc

SEQ ID NO: 4024411 - DNA, 25 bp, Homo sapien
gatcttggagaaaggcgacactctt

SEQ ID NO: 4024412 - DNA, 25 bp, Homo sapien
tatgttttacttccagcaagacgtc

SEQ ID NO: 4024413 - DNA, 25 bp, Homo sapien
tctgcagcatctgatgatgggcccc

SEQ ID NO: 4024414 - DNA, 25 bp, Homo sapien
cttatgttttacttccagcaagacg

SEQ ID NO: 4024415 - DNA, 25 bp, Homo sapien
ttacttccagcaagacgtccaccag

SEQ ID NO: 4024416 - DNA, 25 bp, Homo sapien
cacagaattccagtgaactaaatgc

SEQ ID NO: 4024417 - DNA, 25 bp, Homo sapien
cagaattccagtgaactaaatgcag

SEQ ID NO: 4024418 - DNA, 25 bp, Homo sapien
cccacgacagcttccttgtaatttt

SEQ ID NO: 4024419 - DNA, 25 bp, Homo sapien
gacagcttccttgtaattttggtat

SEQ ID NO: 4024420 - DNA, 25 bp, Homo sapien
ccctcgttcactgctccccagtgga

SEQ ID NO: 4024421 - DNA, 25 bp, Homo sapien
tctgcggggtacacgtggccgtcca

SEQ ID NO: 4024422 - DNA, 25 bp, Homo sapien
ccagtggaagtgaaattgcttcagt

SEQ ID NO: 4024423 - DNA, 25 bp, Homo sapien
acgtggccgtccactgtgtgctctg

SEQ ID NO: 4024424 - DNA, 25 bp, Homo sapien
gcactgatcacgaattcgcggtggc

SEQ ID NO: 4024425 - DNA, 25 bp, Homo sapien
acgaattcgcggtggcccgagtgcc

SEQ ID NO: 4024426 - DNA, 25 bp, Homo sapien
ctggagcactgatcacgaattcgcg

SEQ ID NO: 4024427 - DNA, 25 bp, Homo sapien
tgatcacgaattcgcggtggcccga

SEQ ID NO: 4024428 - DNA, 25 bp, Homo sapien
ccttggcttgtgtcccgcaggagct

SEQ ID NO: 4024429 - DNA, 25 bp, Homo sapien
tctaataaaggatcaaccacatggg

SEQ ID NO: 4024430 - DNA, 25 bp, Homo sapien
tgacaccggccatgggttaacgtgg

SEQ ID NO: 4024431 - DNA, 25 bp, Homo sapien
cacatttggcactagcttgagccca

SEQ ID NO: 4024432 - DNA, 25 bp, Homo sapien
cactatctaccacagaatgttccct

SEQ ID NO: 4024433 - DNA, 25 bp, Homo sapien
ttataactcagtaaggaacactctg

SEQ ID NO: 4024434 - DNA, 25 bp, Homo sapien
acaactaatttataactcagtaagg

SEQ ID NO: 4024435 - DNA, 25 bp, Homo sapien
tccaactctggatacagattggcag

SEQ ID NO: 4024436 - DNA, 25 bp, Homo sapien
tgtcctctttaacggagtgcacagc

SEQ ID NO: 4024437 - DNA, 25 bp, Homo sapien
ttgtcctctttaacggagtgcacag

SEQ ID NO: 4024438 - DNA, 25 bp, Homo sapien
ggttgtcctctttaacggagtgcac

SEQ ID NO: 4024439 - DNA, 25 bp, Homo sapien
gttgtcctctttaacggagtgcaca

SEQ ID NO: 4024440 - DNA, 25 bp, Homo sapien
gctggctgcagggattcaagctcct

SEQ ID NO: 4024441 - DNA, 25 bp, Homo sapien
tcgtgtaattacactgaggcaggca

SEQ ID NO: 4024442 - DNA, 25 bp, Homo sapien
taggagcaatgagtggagcagaacc

SEQ ID NO: 4024443 - DNA, 25 bp, Homo sapien
tcatgttacagagacccaggacgac

SEQ ID NO: 4024444 - DNA, 25 bp, Homo sapien
cagcaagctggaagggacgatgatc

SEQ ID NO: 4024445 - DNA, 25 bp, Homo sapien
tcaaggctgaagtttggccgggcat

SEQ ID NO: 4024446 - DNA, 25 bp, Homo sapien
tgggagttgccctgctctaggacaa

SEQ ID NO: 4024447 - DNA, 25 bp, Homo sapien
tgcccaggcagtatggtgagaccgt

SEQ ID NO: 4024448 - DNA, 25 bp, Homo sapien
tcacgcttccagaaagctgagatct

SEQ ID NO: 4024449 - DNA, 25 bp, Homo sapien
tgctccaaggtgacccgtggctgga

SEQ ID NO: 4024450 - DNA, 25 bp, Homo sapien
ataccagtcctcagagcgctctcgg

SEQ ID NO: 4024451 - DNA, 25 bp, Homo sapien
ggcgttcagccaacacagcggtggt

SEQ ID NO: 4024452 - DNA, 25 bp, Homo sapien
ggtgctggactaagaggtgcaggct

SEQ ID NO: 4024453 - DNA, 25 bp, Homo sapien
tcctggtgctggactaagaggtgca

SEQ ID NO: 4024454 - DNA, 25 bp, Homo sapien
tgctggactaagaggtgcaggcttg

SEQ ID NO: 4024455 - DNA, 25 bp, Homo sapien
ctggactaagaggtgcaggcttgga

SEQ ID NO: 4024456 - DNA, 25 bp, Homo sapien
taacaattctcttggccatgcgcgg

SEQ ID NO: 4024457 - DNA, 25 bp, Homo sapien
ttacatgtccagttaggccactagg

SEQ ID NO: 4024458 - DNA, 25 bp, Homo sapien
gccactaggtgaggagaaaccttta

SEQ ID NO: 4024459 - DNA, 25 bp, Homo sapien
gaacagttggccacttgtgatgggc

SEQ ID NO: 4024460 - DNA, 25 bp, Homo sapien
tgtttctcaagtatatagtggagta

SEQ ID NO: 4024461 - DNA, 25 bp, Homo sapien
cttgcattgtttctcaagtatatag

SEQ ID NO: 4024462 - DNA, 25 bp, Homo sapien
aataaaactaagataccaattgact

SEQ ID NO: 4024463 - DNA, 25 bp, Homo sapien
taccaattgacttctcttgcattgt

SEQ ID NO: 4024464 - DNA, 25 bp, Homo sapien
aacggactgctgtactcttaaggac

SEQ ID NO: 4024465 - DNA, 25 bp, Homo sapien
gacagagagctactcaacggactgc

SEQ ID NO: 4024466 - DNA, 25 bp, Homo sapien
tacagaaccgaccagacgtgatagc

SEQ ID NO: 4024467 - DNA, 25 bp, Homo sapien
gctcaaaagtggaatgaccgtccct

SEQ ID NO: 4024468 - DNA, 25 bp, Homo sapien
gatagagacgttctcttaaatccaa

SEQ ID NO: 4024469 - DNA, 25 bp, Homo sapien
taacaccaatagagagatgaggatg

SEQ ID NO: 4024470 - DNA, 25 bp, Homo sapien
atggagtaggtgttaggtggatgct

SEQ ID NO: 4024471 - DNA, 25 bp, Homo sapien
ccaaggtccagatgagagtagaatc

SEQ ID NO: 4024472 - DNA, 25 bp, Homo sapien
ggagctacagatcagcccggagcta

SEQ ID NO: 4024473 - DNA, 25 bp, Homo sapien
gagctactggctcatgggcgccaaa

SEQ ID NO: 4024474 - DNA, 25 bp, Homo sapien
cctgagggcgggattttggacacac

SEQ ID NO: 4024475 - DNA, 25 bp, Homo sapien
tactggatctgctgaacgaaggctc

SEQ ID NO: 4024476 - DNA, 25 bp, Homo sapien
gttcaagaacggctacaatctccgg

SEQ ID NO: 4024477 - DNA, 25 bp, Homo sapien
acaagctgtcgcactcggacgagaa

SEQ ID NO: 4024478 - DNA, 25 bp, Homo sapien
ccggtcgcgtctgccttggagaaga

SEQ ID NO: 4024479 - DNA, 25 bp, Homo sapien
ttcaagcgcaaggaccgcatgagct

SEQ ID NO: 4024480 - DNA, 25 bp, Homo sapien
gacgccttgccacggatacgggtta

SEQ ID NO: 4024481 - DNA, 25 bp, Homo sapien
caacaaaggtacatgccgagggctg

SEQ ID NO: 4024482 - DNA, 25 bp, Homo sapien
tacgggttaagggtgctgtagccaa

SEQ ID NO: 4024483 - DNA, 25 bp, Homo sapien
tatatttcggaccacatgaaggtgc

SEQ ID NO: 4024484 - DNA, 25 bp, Homo sapien
gagtagtcaagaaagccagttccag

SEQ ID NO: 4024485 - DNA, 25 bp, Homo sapien
tcacaaggcaaggtttccgctgcgc

SEQ ID NO: 4024486 - DNA, 25 bp, Homo sapien
gaggttgaacctcctggtaatgtgt

SEQ ID NO: 4024487 - DNA, 25 bp, Homo sapien
gctgcgcagccacaaggtcttgtct

SEQ ID NO: 4024488 - DNA, 25 bp, Homo sapien
tcaaccctgcaagtggctaggagtc

SEQ ID NO: 4024489 - DNA, 25 bp, Homo sapien
gctaggagtcagtgtctcgtcatcc

SEQ ID NO: 4024490 - DNA, 25 bp, Homo sapien
gtctcccggccatggagaatgagtt

SEQ ID NO: 4024491 - DNA, 25 bp, Homo sapien
tcatcctgggagaggtctcccggcc

SEQ ID NO: 4024492 - DNA, 25 bp, Homo sapien
ctgtgcagcgtgcactgcaagaccc

SEQ ID NO: 4024493 - DNA, 25 bp, Homo sapien
aggccccgcgggctgaccgcatcct

SEQ ID NO: 4024494 - DNA, 25 bp, Homo sapien
gcatccacgcggtgaaggaccacgg

SEQ ID NO: 4024495 - DNA, 25 bp, Homo sapien
gcaagctgtgcagcgtgcactgcaa

SEQ ID NO: 4024496 - DNA, 25 bp, Homo sapien
attcagatcgcgctgtgatccgtgg

SEQ ID NO: 4024497 - DNA, 25 bp, Homo sapien
tactggtgaggtttgtccaatggcg

SEQ ID NO: 4024498 - DNA, 25 bp, Homo sapien
gctgtgatccgtggtgtttctcctg

SEQ ID NO: 4024499 - DNA, 25 bp, Homo sapien
ttctcctgtgcaggtactggtgagg

SEQ ID NO: 4024500 - DNA, 25 bp, Homo sapien
tagagaatgaaagctgcacctgtcc

SEQ ID NO: 4024501 - DNA, 25 bp, Homo sapien
cggttgtgttgaagtcccctggaca

SEQ ID NO: 4024502 - DNA, 25 bp, Homo sapien
gaattgccctcactaagaactgccg

SEQ ID NO: 4024503 - DNA, 25 bp, Homo sapien
tagcccctggaggtttgaagaggcc

SEQ ID NO: 4024504 - DNA, 25 bp, Homo sapien
acttaagaaggaggcgtctctcctg

SEQ ID NO: 4024505 - DNA, 25 bp, Homo sapien
ccggttgcctgggtaacgcgtggct

SEQ ID NO: 4024506 - DNA, 25 bp, Homo sapien
gggacttaagaaggaggcgtctctc

SEQ ID NO: 4024507 - DNA, 25 bp, Homo sapien
ggttgcctgggtaacgcgtggctcc

SEQ ID NO: 4024508 - DNA, 25 bp, Homo sapien
cgagtactggttccgaacgcacgca

SEQ ID NO: 4024509 - DNA, 25 bp, Homo sapien
gggctagattcattcacgtgcttcg

SEQ ID NO: 4024510 - DNA, 25 bp, Homo sapien
ccagtccgcgagtttctttcttgaa

SEQ ID NO: 4024511 - DNA, 25 bp, Homo sapien
ctacaacgcggttcggatttggcgg

SEQ ID NO: 4024512 - DNA, 25 bp, Homo sapien
gaaatccagcggctctatgaactgc

SEQ ID NO: 4024513 - DNA, 25 bp, Homo sapien
gactccagtatctgtcgtcgcaggg

SEQ ID NO: 4024514 - DNA, 25 bp, Homo sapien
tactctggagctgcaagccgagatc

SEQ ID NO: 4024515 - DNA, 25 bp, Homo sapien
cgtgattggctggaaacggtcccga

SEQ ID NO: 4024516 - DNA, 25 bp, Homo sapien
gcacccagcctagagccattcttga

SEQ ID NO: 4024517 - DNA, 25 bp, Homo sapien
gcagcaagtcttggtagctataaga

SEQ ID NO: 4024518 - DNA, 25 bp, Homo sapien
tttaccctcagagtcatgcctttcc

SEQ ID NO: 4024519 - DNA, 25 bp, Homo sapien
cttgcctggatagttgtagtagctc

SEQ ID NO: 4024520 - DNA, 25 bp, Homo sapien
gctgcactcagccataaatcgtgtc

SEQ ID NO: 4024521 - DNA, 25 bp, Homo sapien
gaacagaactctgttcttgtcctgg

SEQ ID NO: 4024522 - DNA, 25 bp, Homo sapien
aagggattccatcttgccagggaag

SEQ ID NO: 4024523 - DNA, 25 bp, Homo sapien
ttgccattcccctgcccagtatgtt

SEQ ID NO: 4024524 - DNA, 25 bp, Homo sapien
agccagaaacgggaggcccgcctgg

SEQ ID NO: 4024525 - DNA, 25 bp, Homo sapien
acgggaggcccgcctggacaaggtg

SEQ ID NO: 4024526 - DNA, 25 bp, Homo sapien
tcagcccggagccagaaacgggagg

SEQ ID NO: 4024527 - DNA, 25 bp, Homo sapien
cagcccggagccagaaacgggaggc

SEQ ID NO: 4024528 - DNA, 25 bp, Homo sapien
tgaaagccagatgggtagaggtgcc

SEQ ID NO: 4024529 - DNA, 25 bp, Homo sapien
actcagggagcagtgtgccttcagc

SEQ ID NO: 4024530 - DNA, 25 bp, Homo sapien
gccctcagttagcacctgtcccatc

SEQ ID NO: 4024531 - DNA, 25 bp, Homo sapien
cagctggctccaaggtagaaaccca

SEQ ID NO: 4024532 - DNA, 25 bp, Homo sapien
ctagatcggtgcttgctctactcac

SEQ ID NO: 4024533 - DNA, 25 bp, Homo sapien
gaaccttacagggtcattcagaccc

SEQ ID NO: 4024534 - DNA, 25 bp, Homo sapien
attcagaccccatcttagccctaga

SEQ ID NO: 4024535 - DNA, 25 bp, Homo sapien
ctttccaatagttgggagtcttctg

SEQ ID NO: 4024536 - DNA, 25 bp, Homo sapien
aggccccttaactctgacagatgag

SEQ ID NO: 4024537 - DNA, 25 bp, Homo sapien
ttgagctccaagaatgtgacctgta

SEQ ID NO: 4024538 - DNA, 25 bp, Homo sapien
ggtctcagtcgatcattcaggaagt

SEQ ID NO: 4024539 - DNA, 25 bp, Homo sapien
ccagaaggcgtagaatttagtgacc

SEQ ID NO: 4024540 - DNA, 25 bp, Homo sapien
ggctgttggcaattcctgagtcatg

SEQ ID NO: 4024541 - DNA, 25 bp, Homo sapien
tcttgcctctggtgactggtgttaa

SEQ ID NO: 4024542 - DNA, 25 bp, Homo sapien
gctgttctgtctcgaaaagttccta

SEQ ID NO: 4024543 - DNA, 25 bp, Homo sapien
tgtgacccattctctaaagactaga

SEQ ID NO: 4024544 - DNA, 25 bp, Homo sapien
tgggacctgcatccaggcactctgg

SEQ ID NO: 4024545 - DNA, 25 bp, Homo sapien
aggacatccacaactctaacagagg

SEQ ID NO: 4024546 - DNA, 25 bp, Homo sapien
gaacaggctgttggcatagcagcaa

SEQ ID NO: 4024547 - DNA, 25 bp, Homo sapien
tggcttctccagtaaaccaaaggac

SEQ ID NO: 4024548 - DNA, 25 bp, Homo sapien
aggaagtggagtgtatagtgagcta

SEQ ID NO: 4024549 - DNA, 25 bp, Homo sapien
gaagtggagtgtatagtgagctatg

SEQ ID NO: 4024550 - DNA, 25 bp, Homo sapien
aagtggagtgtatagtgagctatga

SEQ ID NO: 4024551 - DNA, 25 bp, Homo sapien
aaaataatgacatacgtgctacaac

SEQ ID NO: 4024552 - DNA, 25 bp, Homo sapien
gaccttgatttgacctcgggccaca

SEQ ID NO: 4024553 - DNA, 25 bp, Homo sapien
tcagcagcatggagagccatatcag

SEQ ID NO: 4024554 - DNA, 25 bp, Homo sapien
cactacgtggagtgtttgccatcct

SEQ ID NO: 4024555 - DNA, 25 bp, Homo sapien
tcatgcccatatcccggtggaatct

SEQ ID NO: 4024556 - DNA, 25 bp, Homo sapien
ggagtggcaccattacggatcactg

SEQ ID NO: 4024557 - DNA, 25 bp, Homo sapien
aggcgtgagcctccaagacgggcca

SEQ ID NO: 4024558 - DNA, 25 bp, Homo sapien
gagcctccaagacgggccaaagttg

SEQ ID NO: 4024559 - DNA, 25 bp, Homo sapien
tggagtggcaccattacggatcact

SEQ ID NO: 4024560 - DNA, 25 bp, Homo sapien
agcagctactatatgccaggttcaa

SEQ ID NO: 4024561 - DNA, 25 bp, Homo sapien
taagcagctactatatgccaggttc

SEQ ID NO: 4024562 - DNA, 25 bp, Homo sapien
tattaagcagctactatatgccagg

SEQ ID NO: 4024563 - DNA, 25 bp, Homo sapien
ttaagcagctactatatgccaggtt

SEQ ID NO: 4024564 - DNA, 25 bp, Homo sapien
tgacatcaaacaagtgggcggtggg

SEQ ID NO: 4024565 - DNA, 25 bp, Homo sapien
acaccacatgagcatgggtggcagg

SEQ ID NO: 4024566 - DNA, 25 bp, Homo sapien
ggacaccacatgagcatgggtggca

SEQ ID NO: 4024567 - DNA, 25 bp, Homo sapien
attctagtgagggtagaaaatatca

SEQ ID NO: 4024568 - DNA, 25 bp, Homo sapien
cgtgacgtcaccaaagagaggctga

SEQ ID NO: 4024569 - DNA, 25 bp, Homo sapien
tatcctccctgatttgaggcccggg

SEQ ID NO: 4024570 - DNA, 25 bp, Homo sapien
gtcaaatagtgaagtcccgccagga

SEQ ID NO: 4024571 - DNA, 25 bp, Homo sapien
acaacacatgaggaaggcgtgagac

SEQ ID NO: 4024572 - DNA, 25 bp, Homo sapien
tgcgggcggccgtgatcaggtggat

SEQ ID NO: 4024573 - DNA, 25 bp, Homo sapien
gatgagcgacttcagcaaggcgatg

SEQ ID NO: 4024574 - DNA, 25 bp, Homo sapien
ttcttggcgcggtctgctgcgtcca

SEQ ID NO: 4024575 - DNA, 25 bp, Homo sapien
ccagggcagccatgttgcgggcggc

SEQ ID NO: 4024576 - DNA, 25 bp, Homo sapien
gcagcaggggagtttggggcccgaa

SEQ ID NO: 4024577 - DNA, 25 bp, Homo sapien
ggcaggccagatccccctcccatcc

SEQ ID NO: 4024578 - DNA, 25 bp, Homo sapien
gcccgaaggagggggcctccatctc

SEQ ID NO: 4024579 - DNA, 25 bp, Homo sapien
ctccatctccctgggcaggccagat

SEQ ID NO: 4024580 - DNA, 25 bp, Homo sapien
aggaggcagtagaagagctcattcc

SEQ ID NO: 4024581 - DNA, 25 bp, Homo sapien
gaggaggcagtagaagagctcattc

SEQ ID NO: 4024582 - DNA, 25 bp, Homo sapien
ggaggcagtagaagagctcattccc

SEQ ID NO: 4024583 - DNA, 25 bp, Homo sapien
gaggcagtagaagagctcattccca

SEQ ID NO: 4024584 - DNA, 25 bp, Homo sapien
acaggccacgttagcaagaggcagg

SEQ ID NO: 4024585 - DNA, 25 bp, Homo sapien
cacaatctcggcatattacttctct

SEQ ID NO: 4024586 - DNA, 25 bp, Homo sapien
taatgaaggcacaatctcggcatat

SEQ ID NO: 4024587 - DNA, 25 bp, Homo sapien
gaaggcacaatctcggcatattact

SEQ ID NO: 4024588 - DNA, 25 bp, Homo sapien
ttgtgactctcactgcctcggacca

SEQ ID NO: 4024589 - DNA, 25 bp, Homo sapien
cctcgaggtgtagtagatccgaagc

SEQ ID NO: 4024590 - DNA, 25 bp, Homo sapien
tagatccgaagcaccggattcccgg

SEQ ID NO: 4024591 - DNA, 25 bp, Homo sapien
ccggattcccggacaagtcgatcat

SEQ ID NO: 4024592 - DNA, 25 bp, Homo sapien
taaggaccagtatcctgccgaaagc

SEQ ID NO: 4024593 - DNA, 25 bp, Homo sapien
gaatacccagccagaagagtcctaa

SEQ ID NO: 4024594 - DNA, 25 bp, Homo sapien
cgaaagccacagttacctatttggg

SEQ ID NO: 4024595 - DNA, 25 bp, Homo sapien
tggaaaactgggcacggctaaggac

SEQ ID NO: 4024596 - DNA, 25 bp, Homo sapien
agcagggccaggttgaccaacaggc

SEQ ID NO: 4024597 - DNA, 25 bp, Homo sapien
tggagcagcggtccgtcagcatgtc

SEQ ID NO: 4024598 - DNA, 25 bp, Homo sapien
agaacagcgtggctccagggtacag

SEQ ID NO: 4024599 - DNA, 25 bp, Homo sapien
gatttggaagaacagcgtggctcca

SEQ ID NO: 4024600 - DNA, 25 bp, Homo sapien
agcgtgtccatcgaaagcgtccagc

SEQ ID NO: 4024601 - DNA, 25 bp, Homo sapien
tccatcgaaagcgtccagcaggccg

SEQ ID NO: 4024602 - DNA, 25 bp, Homo sapien
agagcgcgagcagcgtgtccatcga

SEQ ID NO: 4024603 - DNA, 25 bp, Homo sapien
gtgtccatcgaaagcgtccagcagg

SEQ ID NO: 4024604 - DNA, 25 bp, Homo sapien
gatggcgaagacaatccgggcataa

SEQ ID NO: 4024605 - DNA, 25 bp, Homo sapien
agaaatgatggcgaagacaatccgg

SEQ ID NO: 4024606 - DNA, 25 bp, Homo sapien
tagaaagaaatgatggcgaagacaa

SEQ ID NO: 4024607 - DNA, 25 bp, Homo sapien
aagtagaaagaaatgatggcgaaga

SEQ ID NO: 4024608 - DNA, 25 bp, Homo sapien
caaggcccctcgccctctcgttcgg

SEQ ID NO: 4024609 - DNA, 25 bp, Homo sapien
aggatcagggagcccgccaaggccc

SEQ ID NO: 4024610 - DNA, 25 bp, Homo sapien
gccaaggcccctcgccctctcgttc

SEQ ID NO: 4024611 - DNA, 25 bp, Homo sapien
ggatcagggagcccgccaaggcccc

SEQ ID NO: 4024612 - DNA, 25 bp, Homo sapien
gttgggcacgaacaggaagatattt

SEQ ID NO: 4024613 - DNA, 25 bp, Homo sapien
tgaggttgggcacgaacaggaagat

SEQ ID NO: 4024614 - DNA, 25 bp, Homo sapien
aggttgggcacgaacaggaagatat

SEQ ID NO: 4024615 - DNA, 25 bp, Homo sapien
gatgaggttgggcacgaacaggaag

SEQ ID NO: 4024616 - DNA, 25 bp, Homo sapien
ttggctcgtaccaaagcgcagagga

SEQ ID NO: 4024617 - DNA, 25 bp, Homo sapien
gcgcccgtcgttgcaaaattggaga

SEQ ID NO: 4024618 - DNA, 25 bp, Homo sapien
cagatgggttgcttttcgcgtgccc

SEQ ID NO: 4024619 - DNA, 25 bp, Homo sapien
tgagtctttgcgtccccaagaggcc

SEQ ID NO: 4024620 - DNA, 25 bp, Homo sapien
ggcaggcccctcgtttggcaactga

SEQ ID NO: 4024621 - DNA, 25 bp, Homo sapien
tattgctcaaaaacaagaattcaga

SEQ ID NO: 4024622 - DNA, 25 bp, Homo sapien
ggccaagggaacagtagagctatcg

SEQ ID NO: 4024623 - DNA, 25 bp, Homo sapien
ctcctggccggagtcaggcctaggg

SEQ ID NO: 4024624 - DNA, 25 bp, Homo sapien
ggcaggatgctggtttatttactgt

SEQ ID NO: 4024625 - DNA, 25 bp, Homo sapien
aggatgctggtttatttactgtagg

SEQ ID NO: 4024626 - DNA, 25 bp, Homo sapien
gggcggcaggatgctggtttattta

SEQ ID NO: 4024627 - DNA, 25 bp, Homo sapien
tgggcggcaggatgctggtttattt

SEQ ID NO: 4024628 - DNA, 25 bp, Homo sapien
cccctcgtgggatagggagactatt

SEQ ID NO: 4024629 - DNA, 25 bp, Homo sapien
gactatttacacagccagggaggag

SEQ ID NO: 4024630 - DNA, 25 bp, Homo sapien
gtatttccctctgcccgaatgagga

SEQ ID NO: 4024631 - DNA, 25 bp, Homo sapien
aggaggcagagaccgggtcccgtat

SEQ ID NO: 4024632 - DNA, 25 bp, Homo sapien
atggaaacttcatactcccgcgtat

SEQ ID NO: 4024633 - DNA, 25 bp, Homo sapien
tggaaacttcatactcccgcgtatc

SEQ ID NO: 4024634 - DNA, 25 bp, Homo sapien
gatggaaacttcatactcccgcgta

SEQ ID NO: 4024635 - DNA, 25 bp, Homo sapien
agatggaaacttcatactcccgcgt

SEQ ID NO: 4024636 - DNA, 25 bp, Homo sapien
cagcttcatacagcgggttgctgaa

SEQ ID NO: 4024637 - DNA, 25 bp, Homo sapien
agtgggagcccgagaagccgaaaag

SEQ ID NO: 4024638 - DNA, 25 bp, Homo sapien
ggttgctgaagtccgactccacggt

SEQ ID NO: 4024639 - DNA, 25 bp, Homo sapien
tcatacagcgggttgctgaagtccg

SEQ ID NO: 4024640 - DNA, 25 bp, Homo sapien
caatgaccaagcctagaggcagcag

SEQ ID NO: 4024641 - DNA, 25 bp, Homo sapien
cagctgccgtgatggatctgtggtc

SEQ ID NO: 4024642 - DNA, 25 bp, Homo sapien
tagtagatgtaaacgccactgccga

SEQ ID NO: 4024643 - DNA, 25 bp, Homo sapien
actgccgaggacaatgaccaagcct

SEQ ID NO: 4024644 - DNA, 25 bp, Homo sapien
cagttttcggttgtccaggagctcc

SEQ ID NO: 4024645 - DNA, 25 bp, Homo sapien
ccagttttcggttgtccaggagctc

SEQ ID NO: 4024646 - DNA, 25 bp, Homo sapien
tccagttttcggttgtccaggagct

SEQ ID NO: 4024647 - DNA, 25 bp, Homo sapien
agttttcggttgtccaggagctcct

SEQ ID NO: 4024648 - DNA, 25 bp, Homo sapien
cccgcctggtagtggtgcttgtaca

SEQ ID NO: 4024649 - DNA, 25 bp, Homo sapien
ggtgacctcgccgataagctcaaag

SEQ ID NO: 4024650 - DNA, 25 bp, Homo sapien
ctcaaagccctcatagcagaagaag

SEQ ID NO: 4024651 - DNA, 25 bp, Homo sapien
gcttgtacagcgtctggtagccatt

SEQ ID NO: 4024652 - DNA, 25 bp, Homo sapien
cggggagcatgccagtcacgtgcca

SEQ ID NO: 4024653 - DNA, 25 bp, Homo sapien
ctgcggggagcatgccagtcacgtg

SEQ ID NO: 4024654 - DNA, 25 bp, Homo sapien
tgcggggagcatgccagtcacgtgc

SEQ ID NO: 4024655 - DNA, 25 bp, Homo sapien
ggggagcatgccagtcacgtgccag

SEQ ID NO: 4024656 - DNA, 25 bp, Homo sapien
cctcccagggtgtgccccagactca

SEQ ID NO: 4024657 - DNA, 25 bp, Homo sapien
ctcccagggtgtgccccagactcac

SEQ ID NO: 4024658 - DNA, 25 bp, Homo sapien
tatcgctccacttgggtgtgcctgt

SEQ ID NO: 4024659 - DNA, 25 bp, Homo sapien
tgcggtgcccgttggcaatctcgcc

SEQ ID NO: 4024660 - DNA, 25 bp, Homo sapien
tcgccagggtcagcacaagtcatga

SEQ ID NO: 4024661 - DNA, 25 bp, Homo sapien
tggcaggcagcggtactggacgtgg

SEQ ID NO: 4024662 - DNA, 25 bp, Homo sapien
tcccgtggcgcaggatggaatgcaa

SEQ ID NO: 4024663 - DNA, 25 bp, Homo sapien
tcactcccgtggcgcaggatggaat

SEQ ID NO: 4024664 - DNA, 25 bp, Homo sapien
atcactcccgtggcgcaggatggaa

SEQ ID NO: 4024665 - DNA, 25 bp, Homo sapien
actcccgtggcgcaggatggaatgc

SEQ ID NO: 4024666 - DNA, 25 bp, Homo sapien
agctcgtagccaggctcgcactggt

SEQ ID NO: 4024667 - DNA, 25 bp, Homo sapien
gaatgtcggagcctagcagctcgta

SEQ ID NO: 4024668 - DNA, 25 bp, Homo sapien
gatcaggtccccgtgggatgccgtt

SEQ ID NO: 4024669 - DNA, 25 bp, Homo sapien
taggtgagcaccgtgccccggatca

SEQ ID NO: 4024670 - DNA, 25 bp, Homo sapien
gcagctgggccaagactcgggcgct

SEQ ID NO: 4024671 - DNA, 25 bp, Homo sapien
caagactcgggcgctgggaccgtcc

SEQ ID NO: 4024672 - DNA, 25 bp, Homo sapien
tgaagtgcaatacgaagccctggcc

SEQ ID NO: 4024673 - DNA, 25 bp, Homo sapien
tcgaacagcgtcagcatgtcccctt

SEQ ID NO: 4024674 - DNA, 25 bp, Homo sapien
caacttggagcaagatgcgcttctc

SEQ ID NO: 4024675 - DNA, 25 bp, Homo sapien
aggaccacgccagctggttccgaca

SEQ ID NO: 4024676 - DNA, 25 bp, Homo sapien
tcttggcccgggctatagctctggg

SEQ ID NO: 4024677 - DNA, 25 bp, Homo sapien
gggccagtcgggagagaggaccacg

SEQ ID NO: 4024678 - DNA, 25 bp, Homo sapien
tgcccctgggcgatactcagggtcc

SEQ ID NO: 4024679 - DNA, 25 bp, Homo sapien
gcacgagaaggttgccagtgcccct

SEQ ID NO: 4024680 - DNA, 25 bp, Homo sapien
tccagggcatatcctgggaggcacg

SEQ ID NO: 4024681 - DNA, 25 bp, Homo sapien
cgtggtagtgacatttccatgtgcc

SEQ ID NO: 4024682 - DNA, 25 bp, Homo sapien
tcaaatcgaaggcttaacagcaggg

SEQ ID NO: 4024683 - DNA, 25 bp, Homo sapien
ccatgtccgaatcatagatcacggg

SEQ ID NO: 4024684 - DNA, 25 bp, Homo sapien
cgtcactgatgagaccccgctcggg

SEQ ID NO: 4024685 - DNA, 25 bp, Homo sapien
tccacgtagagggactgggcgtcac

SEQ ID NO: 4024686 - DNA, 25 bp, Homo sapien
tcatccagcgagaccctttcaaagt

SEQ ID NO: 4024687 - DNA, 25 bp, Homo sapien
acacgatgcggcccagggtggcatt

SEQ ID NO: 4024688 - DNA, 25 bp, Homo sapien
tcaatgacccaacggcaggtgaggt

SEQ ID NO: 4024689 - DNA, 25 bp, Homo sapien
cattgtggatggtgccaccacagga

SEQ ID NO: 4024690 - DNA, 25 bp, Homo sapien
tcacagtgaaaggtggcagtgcccc

SEQ ID NO: 4024691 - DNA, 25 bp, Homo sapien
tggccgggtgccattgaggcagatg

SEQ ID NO: 4024692 - DNA, 25 bp, Homo sapien
ctgcagctggtagcccgaatcacag

SEQ ID NO: 4024693 - DNA, 25 bp, Homo sapien
gtccgtcacactcacgtccccatgg

SEQ ID NO: 4024694 - DNA, 25 bp, Homo sapien
aaaaggctagtctatgaggtcagga

SEQ ID NO: 4024695 - DNA, 25 bp, Homo sapien
tctacactggcccaagccttattta

SEQ ID NO: 4024696 - DNA, 25 bp, Homo sapien
ccactgtgctggtattttcagtaca

SEQ ID NO: 4024697 - DNA, 25 bp, Homo sapien
atacctggcctaaccactgtctaca

SEQ ID NO: 4024698 - DNA, 25 bp, Homo sapien
tcctgtgacaggttcagcgtctgca

SEQ ID NO: 4024699 - DNA, 25 bp, Homo sapien
tggttgggctccgaaggacttgtcc

SEQ ID NO: 4024700 - DNA, 25 bp, Homo sapien
atcctgaagccaccgccccttggga

SEQ ID NO: 4024701 - DNA, 25 bp, Homo sapien
tctccaagcatggatgagttggcca

SEQ ID NO: 4024702 - DNA, 25 bp, Homo sapien
tggatgctgtaagtgcagtccagga

SEQ ID NO: 4024703 - DNA, 25 bp, Homo sapien
tagccagggtagacatggatgctgt

SEQ ID NO: 4024704 - DNA, 25 bp, Homo sapien
agatctggagactccacataccctt

SEQ ID NO: 4024705 - DNA, 25 bp, Homo sapien
tacccttcgccctcggagatgttgt

SEQ ID NO: 4024706 - DNA, 25 bp, Homo sapien
ctgggctggtcaccgtagtggtaac

SEQ ID NO: 4024707 - DNA, 25 bp, Homo sapien
tggtcaccgtagtggtaacagttgt

SEQ ID NO: 4024708 - DNA, 25 bp, Homo sapien
gatgatggtggtcgtcgtctcctcc

SEQ ID NO: 4024709 - DNA, 25 bp, Homo sapien
gatggtggtcgtcgtctcctcctct

SEQ ID NO: 4024710 - DNA, 25 bp, Homo sapien
ggcactgcgagagtctggccggccg

SEQ ID NO: 4024711 - DNA, 25 bp, Homo sapien
gggtcagcagttctggcgcagtggg

SEQ ID NO: 4024712 - DNA, 25 bp, Homo sapien
tgacggctgttgtcagaggccctgt

SEQ ID NO: 4024713 - DNA, 25 bp, Homo sapien
gctagcgtggggtcccgatcagatc

SEQ ID NO: 4024714 - DNA, 25 bp, Homo sapien
ctcagcagggccccatgaagcagtt

SEQ ID NO: 4024715 - DNA, 25 bp, Homo sapien
cagcagggccccatgaagcagttca

SEQ ID NO: 4024716 - DNA, 25 bp, Homo sapien
cctcagcagggccccatgaagcagt

SEQ ID NO: 4024717 - DNA, 25 bp, Homo sapien
tcagcagggccccatgaagcagttc

SEQ ID NO: 4024718 - DNA, 25 bp, Homo sapien
ctccatgcttctgccgcctccgcag

SEQ ID NO: 4024719 - DNA, 25 bp, Homo sapien
ggtccctccatgcttctgccgcctc

SEQ ID NO: 4024720 - DNA, 25 bp, Homo sapien
cctccatgcttctgccgcctccgca

SEQ ID NO: 4024721 - DNA, 25 bp, Homo sapien
ccaggtccctccatgcttctgccgc

SEQ ID NO: 4024722 - DNA, 25 bp, Homo sapien
ggacagctcagcagaattaggaaca

SEQ ID NO: 4024723 - DNA, 25 bp, Homo sapien
agggacagctcagcagaattaggaa

SEQ ID NO: 4024724 - DNA, 25 bp, Homo sapien
cagggacagctcagcagaattagga

SEQ ID NO: 4024725 - DNA, 25 bp, Homo sapien
gggacagctcagcagaattaggaac

SEQ ID NO: 4024726 - DNA, 25 bp, Homo sapien
tcgtaggagtcagcaaagaaagaca

SEQ ID NO: 4024727 - DNA, 25 bp, Homo sapien
gtggcctgggttaccctcctgctca

SEQ ID NO: 4024728 - DNA, 25 bp, Homo sapien
ctcttctcgcggctctgtggtggag

SEQ ID NO: 4024729 - DNA, 25 bp, Homo sapien
tgtgcctctctaagtaatctggctg

SEQ ID NO: 4024730 - DNA, 25 bp, Homo sapien
actaccctgcaggacgcgggaggct

SEQ ID NO: 4024731 - DNA, 25 bp, Homo sapien
acagactgataacgctgagctgggc

SEQ ID NO: 4024732 - DNA, 25 bp, Homo sapien
gaagggccgcacactttggcatgga

SEQ ID NO: 4024733 - DNA, 25 bp, Homo sapien
aggcccaggccagtctagtacaaag

SEQ ID NO: 4024734 - DNA, 25 bp, Homo sapien
taaatccctcttaaccagctggaga

SEQ ID NO: 4024735 - DNA, 25 bp, Homo sapien
gccggaatgtaccatgttgttagca

SEQ ID NO: 4024736 - DNA, 25 bp, Homo sapien
gacaagtgttggcttcggaaggctc

SEQ ID NO: 4024737 - DNA, 25 bp, Homo sapien
gagctgtgccatgcaatgaagggac

SEQ ID NO: 4024738 - DNA, 25 bp, Homo sapien
caatttgttggccatgaggacgctc

SEQ ID NO: 4024739 - DNA, 25 bp, Homo sapien
gttcagggtctcctcgaagatccgg

SEQ ID NO: 4024740 - DNA, 25 bp, Homo sapien
tggatcctgcggacacggtgctctc

SEQ ID NO: 4024741 - DNA, 25 bp, Homo sapien
atatggcgccggacatggatcctgc

SEQ ID NO: 4024742 - DNA, 25 bp, Homo sapien
ggcaggaacatcgttagagcccagg

SEQ ID NO: 4024743 - DNA, 25 bp, Homo sapien
ggtcaggagtgcacccagtgtctta

SEQ ID NO: 4024744 - DNA, 25 bp, Homo sapien
tactggaagatcaaaagggaggcca

SEQ ID NO: 4024745 - DNA, 25 bp, Homo sapien
gccaggagtgttacaactttaagaa

SEQ ID NO: 4024746 - DNA, 25 bp, Homo sapien
tgaaaagggcccagctaatgggaga

SEQ ID NO: 4024747 - DNA, 25 bp, Homo sapien
gtgagccatgcactctaattattgg

SEQ ID NO: 4024748 - DNA, 25 bp, Homo sapien
cctagcttccactgtgtgaaaaggg

SEQ ID NO: 4024749 - DNA, 25 bp, Homo sapien
tcctgagtacctgggtgtaccacta

SEQ ID NO: 4024750 - DNA, 25 bp, Homo sapien
ttttaattagagttagggctcactc

SEQ ID NO: 4024751 - DNA, 25 bp, Homo sapien
tgactcaggatctacaaactcagag

SEQ ID NO: 4024752 - DNA, 25 bp, Homo sapien
gttctaagagacatctgattctgag

SEQ ID NO: 4024753 - DNA, 25 bp, Homo sapien
tgattgccacattaatgactcagga

SEQ ID NO: 4024754 - DNA, 25 bp, Homo sapien
ggtgcagcacacctcggcgattttg

SEQ ID NO: 4024755 - DNA, 25 bp, Homo sapien
gggccagcttgtcgaacagctcgat

SEQ ID NO: 4024756 - DNA, 25 bp, Homo sapien
tcttctccgtagcatagacaatgga

SEQ ID NO: 4024757 - DNA, 25 bp, Homo sapien
atccttgaggaagagtagccgcccg

SEQ ID NO: 4024758 - DNA, 25 bp, Homo sapien
ggtgtcccgacctcctcatctgtaa

SEQ ID NO: 4024759 - DNA, 25 bp, Homo sapien
aaatggagctcacaacagtactgac

SEQ ID NO: 4024760 - DNA, 25 bp, Homo sapien
caggctaaacgggtctcagaaggga

SEQ ID NO: 4024761 - DNA, 25 bp, Homo sapien
ttttaactgggtgacactaggcaag

SEQ ID NO: 4024762 - DNA, 25 bp, Homo sapien
taggctcgccactatcactttgtcc

SEQ ID NO: 4024763 - DNA, 25 bp, Homo sapien
agcacttgggataggctcgccacta

SEQ ID NO: 4024764 - DNA, 25 bp, Homo sapien
ttgggataggctcgccactatcact

SEQ ID NO: 4024765 - DNA, 25 bp, Homo sapien
aatgagagcacttgggataggctcg

SEQ ID NO: 4024766 - DNA, 25 bp, Homo sapien
tggccctcgccttgggcagaagcag

SEQ ID NO: 4024767 - DNA, 25 bp, Homo sapien
gaatctgcgagcaggcacagatgtt

SEQ ID NO: 4024768 - DNA, 25 bp, Homo sapien
gatgttcttgtaggccccccgtgtg

SEQ ID NO: 4024769 - DNA, 25 bp, Homo sapien
agcgtcaggggtaagaggcgaagcc

SEQ ID NO: 4024770 - DNA, 25 bp, Homo sapien
ggagtacttgttgttactgcggttg

SEQ ID NO: 4024771 - DNA, 25 bp, Homo sapien
taggagtacttgttgttactgcggt

SEQ ID NO: 4024772 - DNA, 25 bp, Homo sapien
ggtgtaggagtacttgttgttactg

SEQ ID NO: 4024773 - DNA, 25 bp, Homo sapien
tgtaggagtacttgttgttactgcg

SEQ ID NO: 4024774 - DNA, 25 bp, Homo sapien
gagatgtcaccatggggatgaggca

SEQ ID NO: 4024775 - DNA, 25 bp, Homo sapien
ggcgtgtccgtcatgccattcagat

SEQ ID NO: 4024776 - DNA, 25 bp, Homo sapien
aaagctggttgggaacaactccaga

SEQ ID NO: 4024777 - DNA, 25 bp, Homo sapien
tgcccgggatgcttctttgctcagc

SEQ ID NO: 4024778 - DNA, 25 bp, Homo sapien
ttggtcccacggacaccttgctgct

SEQ ID NO: 4024779 - DNA, 25 bp, Homo sapien
aacggtatcagttcgggcacagaaa

SEQ ID NO: 4024780 - DNA, 25 bp, Homo sapien
gaaaggccgaccctgccagatatta

SEQ ID NO: 4024781 - DNA, 25 bp, Homo sapien
tcaggatctcagcagtggctcggct

SEQ ID NO: 4024782 - DNA, 25 bp, Homo sapien
gaaatctgaagcaaacccatgggct

SEQ ID NO: 4024783 - DNA, 25 bp, Homo sapien
accgcatccagcccttaagtgcatt

SEQ ID NO: 4024784 - DNA, 25 bp, Homo sapien
gcccttaagtgcatttcctatctgc

SEQ ID NO: 4024785 - DNA, 25 bp, Homo sapien
tgcagacctgtgagctaaagagaca

SEQ ID NO: 4024786 - DNA, 25 bp, Homo sapien
acctgtgagctaaagagacaggtca

SEQ ID NO: 4024787 - DNA, 25 bp, Homo sapien
gacaggaggcacatataagtcatac

SEQ ID NO: 4024788 - DNA, 25 bp, Homo sapien
taatccagttggagaaatgctagga

SEQ ID NO: 4024789 - DNA, 25 bp, Homo sapien
tgggtgtgcaaagccgtcttgtcct

SEQ ID NO: 4024790 - DNA, 25 bp, Homo sapien
cctgcctgtaaaagtttgggtgtgc

SEQ ID NO: 4024791 - DNA, 25 bp, Homo sapien
gctgagacgctgaaagacaacacct

SEQ ID NO: 4024792 - DNA, 25 bp, Homo sapien
gaaaatctctgcaaggtaagccctt

SEQ ID NO: 4024793 - DNA, 25 bp, Homo sapien
gtatttaatctttgcacggaagcca

SEQ ID NO: 4024794 - DNA, 25 bp, Homo sapien
tttctgccgctacacaaggatctcc

SEQ ID NO: 4024795 - DNA, 25 bp, Homo sapien
gaaccagtaattacattcgtgccat

SEQ ID NO: 4024796 - DNA, 25 bp, Homo sapien
tagactggaccctggtttgatgaac

SEQ ID NO: 4024797 - DNA, 25 bp, Homo sapien
tggagaaaccggagtatgccctgga

SEQ ID NO: 4024798 - DNA, 25 bp, Homo sapien
cagataaccagatgcaacgtgaaga

SEQ ID NO: 4024799 - DNA, 25 bp, Homo sapien
tgtatataatccatgccctagggaa

SEQ ID NO: 4024800 - DNA, 25 bp, Homo sapien
caacacgattgtattttggcaagca

SEQ ID NO: 4024801 - DNA, 25 bp, Homo sapien
tagtcccatgctacaggcttagagg

SEQ ID NO: 4024802 - DNA, 25 bp, Homo sapien
cattcaatgctagatgccacaagtg

SEQ ID NO: 4024803 - DNA, 25 bp, Homo sapien
aaggtcagatagtcaggtagcctgg

SEQ ID NO: 4024804 - DNA, 25 bp, Homo sapien
cattaaaattggatgggtgcccctg

SEQ ID NO: 4024805 - DNA, 25 bp, Homo sapien
tatacacaagcagatagcagaattg

SEQ ID NO: 4024806 - DNA, 25 bp, Homo sapien
tattgatgaagtgccacacactgag

SEQ ID NO: 4024807 - DNA, 25 bp, Homo sapien
gcaggagaattgcttgaacctggga

SEQ ID NO: 4024808 - DNA, 25 bp, Homo sapien
tacttgggaggctgaggcaggagaa

SEQ ID NO: 4024809 - DNA, 25 bp, Homo sapien
gtagcaggcgcctgtaattctagct

SEQ ID NO: 4024810 - DNA, 25 bp, Homo sapien
cagctggactggctgcataggaaca

SEQ ID NO: 4024811 - DNA, 25 bp, Homo sapien
tactcaggtgcgagtgtaacagctg

SEQ ID NO: 4024812 - DNA, 25 bp, Homo sapien
tatttaaccattgcaaaggtcctgg

SEQ ID NO: 4024813 - DNA, 25 bp, Homo sapien
caagaaccagtaagtattccctgag

SEQ ID NO: 4024814 - DNA, 25 bp, Homo sapien
gttctctcgtactctccggcagtgg

SEQ ID NO: 4024815 - DNA, 25 bp, Homo sapien
aggtagtagcgtgcttcgcccagca

SEQ ID NO: 4024816 - DNA, 25 bp, Homo sapien
gacccatcccgcaggtaattgagga

SEQ ID NO: 4024817 - DNA, 25 bp, Homo sapien
tgaggattgtaccaaagtgacggcc

SEQ ID NO: 4024818 - DNA, 25 bp, Homo sapien
ggaaagatggctttgctgcgggacc

SEQ ID NO: 4024819 - DNA, 25 bp, Homo sapien
ggagaggcagggggaaagatggctt

SEQ ID NO: 4024820 - DNA, 25 bp, Homo sapien
aaagatggctttgctgcgggacctg

SEQ ID NO: 4024821 - DNA, 25 bp, Homo sapien
agaggcagggggaaagatggctttg

SEQ ID NO: 4024822 - DNA, 25 bp, Homo sapien
tgtagtgcaacgagccgcccacgtt

SEQ ID NO: 4024823 - DNA, 25 bp, Homo sapien
tcacgtatttgctgttcggggtcag

SEQ ID NO: 4024824 - DNA, 25 bp, Homo sapien
tgagggtgcgcagcgtggtgtagtg

SEQ ID NO: 4024825 - DNA, 25 bp, Homo sapien
tcagcggcttgagaccgtaggcggc

SEQ ID NO: 4024826 - DNA, 25 bp, Homo sapien
acggcgatcccaggatctctccgcg

SEQ ID NO: 4024827 - DNA, 25 bp, Homo sapien
tctctccgcgccctgcggcctgctc

SEQ ID NO: 4024828 - DNA, 25 bp, Homo sapien
cactcaccgcagctactctgcaaga

SEQ ID NO: 4024829 - DNA, 25 bp, Homo sapien
ctgcggcctgctcccgaagaccctc

SEQ ID NO: 4024830 - DNA, 25 bp, Homo sapien
gaacacaacttatccctctaggaag

SEQ ID NO: 4024831 - DNA, 25 bp, Homo sapien
gaatctctggtgaccgaacacaact

SEQ ID NO: 4024832 - DNA, 25 bp, Homo sapien
gcaactagttagcatccgagagtct

SEQ ID NO: 4024833 - DNA, 25 bp, Homo sapien
tctaggaaggtagggatgccaactg

SEQ ID NO: 4024834 - DNA, 25 bp, Homo sapien
ggactaagacagtgtttatatgtca

SEQ ID NO: 4024835 - DNA, 25 bp, Homo sapien
tattctattgcaacacagaatggac

SEQ ID NO: 4024836 - DNA, 25 bp, Homo sapien
tatatgtcaaaatctattttcctgt

SEQ ID NO: 4024837 - DNA, 25 bp, Homo sapien
gcagagggaatataaccttagcctt

SEQ ID NO: 4024838 - DNA, 25 bp, Homo sapien
atccttgggcagcagaagaaggagc

SEQ ID NO: 4024839 - DNA, 25 bp, Homo sapien
ccctgctggaggcacagaagcggac

SEQ ID NO: 4024840 - DNA, 25 bp, Homo sapien
tggctgccctgctggaggcacagaa

SEQ ID NO: 4024841 - DNA, 25 bp, Homo sapien
gctgccctgctggaggcacagaagc

SEQ ID NO: 4024842 - DNA, 25 bp, Homo sapien
gcctggggggcagtcgtgggagccc

SEQ ID NO: 4024843 - DNA, 25 bp, Homo sapien
taataaactgttggttattctaaca

SEQ ID NO: 4024844 - DNA, 25 bp, Homo sapien
gagccccaggcaagcttttaataaa

SEQ ID NO: 4024845 - DNA, 25 bp, Homo sapien
aaactgttggttattctaacagatc

SEQ ID NO: 4024846 - DNA, 25 bp, Homo sapien
actttaggtgtgaccagatctcgga

SEQ ID NO: 4024847 - DNA, 25 bp, Homo sapien
gatctcggatctcaaaggtggtctt

SEQ ID NO: 4024848 - DNA, 25 bp, Homo sapien
gagaaggcttaagcactggctgccc

SEQ ID NO: 4024849 - DNA, 25 bp, Homo sapien
ccaagtgggcattaggttatcagac

SEQ ID NO: 4024850 - DNA, 25 bp, Homo sapien
tgtacatgtatcaagggtccctcct

SEQ ID NO: 4024851 - DNA, 25 bp, Homo sapien
gggtgctatgtatgctttgtacatg

SEQ ID NO: 4024852 - DNA, 25 bp, Homo sapien
gtgtccttgggagctgcagtcttct

SEQ ID NO: 4024853 - DNA, 25 bp, Homo sapien
acagcttgtgtccttgggagctgca

SEQ ID NO: 4024854 - DNA, 25 bp, Homo sapien
gatgccacgcatatgtgaccagtct

SEQ ID NO: 4024855 - DNA, 25 bp, Homo sapien
ttccaggctgtacgtctgcgtggcc

SEQ ID NO: 4024856 - DNA, 25 bp, Homo sapien
tgagtccagggtccgtcggtacagc

SEQ ID NO: 4024857 - DNA, 25 bp, Homo sapien
gcttctcctaaagggttccaggctg

SEQ ID NO: 4024858 - DNA, 25 bp, Homo sapien
tgatgttcgcaacatccaaggaggc

SEQ ID NO: 4024859 - DNA, 25 bp, Homo sapien
cactgatgatgttcgcaacatccaa

SEQ ID NO: 4024860 - DNA, 25 bp, Homo sapien
ccgagccactgatgatgttcgcaac

SEQ ID NO: 4024861 - DNA, 25 bp, Homo sapien
gagccactgatgatgttcgcaacat

SEQ ID NO: 4024862 - DNA, 25 bp, Homo sapien
gcaacaggagcccaacagcttcttg

SEQ ID NO: 4024863 - DNA, 25 bp, Homo sapien
cgcttccagttctgcccggaggata

SEQ ID NO: 4024864 - DNA, 25 bp, Homo sapien
cacaggcccgaatgtagcgcttcag

SEQ ID NO: 4024865 - DNA, 25 bp, Homo sapien
ttcttgtagtttcgatgggcaccac

SEQ ID NO: 4024866 - DNA, 25 bp, Homo sapien
ttccctcctttggcctctggacttc

SEQ ID NO: 4024867 - DNA, 25 bp, Homo sapien
ccctcctttggcctctggacttcca

SEQ ID NO: 4024868 - DNA, 25 bp, Homo sapien
cttccctcctttggcctctggactt

SEQ ID NO: 4024869 - DNA, 25 bp, Homo sapien
cctcctttggcctctggacttccat

SEQ ID NO: 4024870 - DNA, 25 bp, Homo sapien
agctcttcttggaagagcggttctt

SEQ ID NO: 4024871 - DNA, 25 bp, Homo sapien
ctctgcactgggggttctctatctc

SEQ ID NO: 4024872 - DNA, 25 bp, Homo sapien
gcccagtctggccatctttctagag

SEQ ID NO: 4024873 - DNA, 25 bp, Homo sapien
tcgctgtctgagtctcccaagagcc

SEQ ID NO: 4024874 - DNA, 25 bp, Homo sapien
ccagtctggccatctttctagagcc

SEQ ID NO: 4024875 - DNA, 25 bp, Homo sapien
tgctctttcttctgggctaggatct

SEQ ID NO: 4024876 - DNA, 25 bp, Homo sapien
tctcctccctagctgactttctccg

SEQ ID NO: 4024877 - DNA, 25 bp, Homo sapien
tgggctaggatctcctcttcactct

SEQ ID NO: 4024878 - DNA, 25 bp, Homo sapien
tttctccggccattgctcctggttc

SEQ ID NO: 4024879 - DNA, 25 bp, Homo sapien
tcctctgaacgggttctgcctcgct

SEQ ID NO: 4024880 - DNA, 25 bp, Homo sapien
tctgaacgggttctgcctcgctctc

SEQ ID NO: 4024881 - DNA, 25 bp, Homo sapien
tgaacgggttctgcctcgctctcct

SEQ ID NO: 4024882 - DNA, 25 bp, Homo sapien
tgctgtcctctgaacgggttctgcc

SEQ ID NO: 4024883 - DNA, 25 bp, Homo sapien
ttcctactgactgaggccttgcctg

SEQ ID NO: 4024884 - DNA, 25 bp, Homo sapien
tggtgcctgcttctttaccacaggt

SEQ ID NO: 4024885 - DNA, 25 bp, Homo sapien
tggcctgcttcctactgactgaggc

SEQ ID NO: 4024886 - DNA, 25 bp, Homo sapien
cttccctggcctgcttcctactgac

SEQ ID NO: 4024887 - DNA, 25 bp, Homo sapien
gctctcctcaactgcctttgaggct

SEQ ID NO: 4024888 - DNA, 25 bp, Homo sapien
gaggctcgccttggattctcctctt

SEQ ID NO: 4024889 - DNA, 25 bp, Homo sapien
ctctgccgttcctcatcactgctct

SEQ ID NO: 4024890 - DNA, 25 bp, Homo sapien
ggtccaaagtagtctgggctggagg

SEQ ID NO: 4024891 - DNA, 25 bp, Homo sapien
ccgactctgaattgaagcggaacct

SEQ ID NO: 4024892 - DNA, 25 bp, Homo sapien
cttgcccttcttggtaaggtccagt

SEQ ID NO: 4024893 - DNA, 25 bp, Homo sapien
cttccctggaagcggcttcatccac

SEQ ID NO: 4024894 - DNA, 25 bp, Homo sapien
ctttttctctccgggtcgctacaag

SEQ ID NO: 4024895 - DNA, 25 bp, Homo sapien
ctgtgtgtgcgccaagagggcaaac

SEQ ID NO: 4024896 - DNA, 25 bp, Homo sapien
tgtgtgcgccaagagggcaaactat

SEQ ID NO: 4024897 - DNA, 25 bp, Homo sapien
tgtgcgccaagagggcaaactatgc

SEQ ID NO: 4024898 - DNA, 25 bp, Homo sapien
gccaagagggcaaactatgcaccaa

SEQ ID NO: 4024899 - DNA, 25 bp, Homo sapien
cgcgccccgtcaggcccctcctcct

SEQ ID NO: 4024900 - DNA, 25 bp, Homo sapien
gcggcccaggctccggcccggcaca

SEQ ID NO: 4024901 - DNA, 25 bp, Homo sapien
tcctcctcagcagcaagccccgcct

SEQ ID NO: 4024902 - DNA, 25 bp, Homo sapien
ccgcggcccaggctccggcccggca

SEQ ID NO: 4024903 - DNA, 25 bp, Homo sapien
ctccgccgcacgatggaatgcgtaa

SEQ ID NO: 4024904 - DNA, 25 bp, Homo sapien
ctgcggcccgagtgagctaagtacc

SEQ ID NO: 4024905 - DNA, 25 bp, Homo sapien
gagtgagctaagtacctccgccgca

SEQ ID NO: 4024906 - DNA, 25 bp, Homo sapien
gccgcacgatggaatgcgtaagcgt

SEQ ID NO: 4024907 - DNA, 25 bp, Homo sapien
acatggtgtcaggacggagtcccga

SEQ ID NO: 4024908 - DNA, 25 bp, Homo sapien
tgcagggacatggtgtcaggacgga

SEQ ID NO: 4024909 - DNA, 25 bp, Homo sapien
atggtgtcaggacggagtcccgacc

SEQ ID NO: 4024910 - DNA, 25 bp, Homo sapien
gtgtcaggacggagtcccgacccac

SEQ ID NO: 4024911 - DNA, 25 bp, Homo sapien
cggaagaagctacgggtgaactcct

SEQ ID NO: 4024912 - DNA, 25 bp, Homo sapien
gcctcggaagaagctacgggtgaac

SEQ ID NO: 4024913 - DNA, 25 bp, Homo sapien
cgggcggcctcggaagaagctacgg

SEQ ID NO: 4024914 - DNA, 25 bp, Homo sapien
ctcggaagaagctacgggtgaactc

SEQ ID NO: 4024915 - DNA, 25 bp, Homo sapien
gttagaaaccaattcggcgccggca

SEQ ID NO: 4024916 - DNA, 25 bp, Homo sapien
gccgagaactttgccagacgagact

SEQ ID NO: 4024917 - DNA, 25 bp, Homo sapien
tttgggtgaaacctaatcagcccgc

SEQ ID NO: 4024918 - DNA, 25 bp, Homo sapien
taagtacattagagtcaggaacggc

SEQ ID NO: 4024919 - DNA, 25 bp, Homo sapien
gcagtctcaatctccgagtagttct

SEQ ID NO: 4024920 - DNA, 25 bp, Homo sapien
gaggttatacctttctgggatggac

SEQ ID NO: 4024921 - DNA, 25 bp, Homo sapien
ccagtgcccttctgtagtgtagagg

SEQ ID NO: 4024922 - DNA, 25 bp, Homo sapien
cagatgccactgcatcatcagataa

SEQ ID NO: 4024923 - DNA, 25 bp, Homo sapien
ccttggatggagacgatgacctggt

SEQ ID NO: 4024924 - DNA, 25 bp, Homo sapien
gatgacctggtgatcgacatcccgg

SEQ ID NO: 4024925 - DNA, 25 bp, Homo sapien
cagatgttcagcgatgcaggtagcg

SEQ ID NO: 4024926 - DNA, 25 bp, Homo sapien
ggagtgaccgtgacatcacgccatg

SEQ ID NO: 4024927 - DNA, 25 bp, Homo sapien
tacagggctaggttttttcaatgaa

SEQ ID NO: 4024928 - DNA, 25 bp, Homo sapien
aaggcgtaaacatgcacgggtgtcc

SEQ ID NO: 4024929 - DNA, 25 bp, Homo sapien
cctcggaggtgtttattgatgccca

SEQ ID NO: 4024930 - DNA, 25 bp, Homo sapien
ttatttaaacgagtggccgggagca

SEQ ID NO: 4024931 - DNA, 25 bp, Homo sapien
catatttgcagggactagcgagtca

SEQ ID NO: 4024932 - DNA, 25 bp, Homo sapien
gggcagcccaccctgtgtaaacgtg

SEQ ID NO: 4024933 - DNA, 25 bp, Homo sapien
tatgtgaatatagaactccgcagcc

SEQ ID NO: 4024934 - DNA, 25 bp, Homo sapien
taaacgtgcaacacactcgtgcgaa

SEQ ID NO: 4024935 - DNA, 25 bp, Homo sapien
tgaggacagagccccggccgcaggg

SEQ ID NO: 4024936 - DNA, 25 bp, Homo sapien
ggctgaggacagagccccggccgca

SEQ ID NO: 4024937 - DNA, 25 bp, Homo sapien
tcaggctgaggacagagccccggcc

SEQ ID NO: 4024938 - DNA, 25 bp, Homo sapien
aggctgaggacagagccccggccgc

SEQ ID NO: 4024939 - DNA, 25 bp, Homo sapien
tccagggctgcgtccggctgctgca

SEQ ID NO: 4024940 - DNA, 25 bp, Homo sapien
cgctccagggctgcgtccggctgct

SEQ ID NO: 4024941 - DNA, 25 bp, Homo sapien
cactccagtgcttccgagcctcgcc

SEQ ID NO: 4024942 - DNA, 25 bp, Homo sapien
cagtgcttccgagcctcgcctcggg

SEQ ID NO: 4024943 - DNA, 25 bp, Homo sapien
ggagagctctatctcgtagaaaaac

SEQ ID NO: 4024944 - DNA, 25 bp, Homo sapien
gtcatagtcccagacggtgacttcc

SEQ ID NO: 4024945 - DNA, 25 bp, Homo sapien
gtcattggatttgccaatgtcatag

SEQ ID NO: 4024946 - DNA, 25 bp, Homo sapien
agagtggagagctctatctcgtaga

SEQ ID NO: 4024947 - DNA, 25 bp, Homo sapien
tgggttgagagtcttcttcttcaca

SEQ ID NO: 4024948 - DNA, 25 bp, Homo sapien
ttaaattctgggttgagagtcttct

SEQ ID NO: 4024949 - DNA, 25 bp, Homo sapien
gggttgagagtcttcttcttcacac

SEQ ID NO: 4024950 - DNA, 25 bp, Homo sapien
ctcgttaaattctgggttgagagtc

SEQ ID NO: 4024951 - DNA, 25 bp, Homo sapien
gatttcttgtccacatcgggcctca

SEQ ID NO: 4024952 - DNA, 25 bp, Homo sapien
acgtcttatgcttggatttcttgtc

SEQ ID NO: 4024953 - DNA, 25 bp, Homo sapien
tcttgtccacatcgggcctcaggta

SEQ ID NO: 4024954 - DNA, 25 bp, Homo sapien
cgtcttatgcttggatttcttgtcc

SEQ ID NO: 4024955 - DNA, 25 bp, Homo sapien
tccatggcagccagatgggcgcagc

SEQ ID NO: 4024956 - DNA, 25 bp, Homo sapien
cgcgagctgtagctgagactcagca

SEQ ID NO: 4024957 - DNA, 25 bp, Homo sapien
gagtaaccgttgacgtccatggcag

SEQ ID NO: 4024958 - DNA, 25 bp, Homo sapien
agcgcaagatgcctaccagcagtcc

SEQ ID NO: 4024959 - DNA, 25 bp, Homo sapien
ataacaggagatgcccctcagcgcc

SEQ ID NO: 4024960 - DNA, 25 bp, Homo sapien
agatgcccctcagcgccgctgacat

SEQ ID NO: 4024961 - DNA, 25 bp, Homo sapien
gataacaggagatgcccctcagcgc

SEQ ID NO: 4024962 - DNA, 25 bp, Homo sapien
caggagatgcccctcagcgccgctg

SEQ ID NO: 4024963 - DNA, 25 bp, Homo sapien
gttctggaagcctggcctccccagg

SEQ ID NO: 4024964 - DNA, 25 bp, Homo sapien
gccccctcccctggcgcccctgcag

SEQ ID NO: 4024965 - DNA, 25 bp, Homo sapien
agaaggttctggaagcctggcctcc

SEQ ID NO: 4024966 - DNA, 25 bp, Homo sapien
ctgagggggcaaagagaaggttctg

SEQ ID NO: 4024967 - DNA, 25 bp, Homo sapien
ttgaggcggcggaggggcacgcgga

SEQ ID NO: 4024968 - DNA, 25 bp, Homo sapien
cgcggatctccccaataaactcatt

SEQ ID NO: 4024969 - DNA, 25 bp, Homo sapien
gcttcttctgcgaaggcttgaggcg

SEQ ID NO: 4024970 - DNA, 25 bp, Homo sapien
ttcttctgcgaaggcttgaggcggc

SEQ ID NO: 4024971 - DNA, 25 bp, Homo sapien
ggtgtaggaagggccttggaccagc

SEQ ID NO: 4024972 - DNA, 25 bp, Homo sapien
ggaagggccttggaccagcccagct

SEQ ID NO: 4024973 - DNA, 25 bp, Homo sapien
taggaagggccttggaccagcccag

SEQ ID NO: 4024974 - DNA, 25 bp, Homo sapien
tgtaggaagggccttggaccagccc

SEQ ID NO: 4024975 - DNA, 25 bp, Homo sapien
ctacgtctcatctggaagacaggct

SEQ ID NO: 4024976 - DNA, 25 bp, Homo sapien
gaaggacaagcagatttgcccattc

SEQ ID NO: 4024977 - DNA, 25 bp, Homo sapien
cctcagaaatcttggagcacgctgc

SEQ ID NO: 4024978 - DNA, 25 bp, Homo sapien
cagccattgtgggaagccctcagaa

SEQ ID NO: 4024979 - DNA, 25 bp, Homo sapien
tagacacaggccgtgagagctagaa

SEQ ID NO: 4024980 - DNA, 25 bp, Homo sapien
cctgggggcaggagccgaacaccac

SEQ ID NO: 4024981 - DNA, 25 bp, Homo sapien
agctagaagggccttggagccttgg

SEQ ID NO: 4024982 - DNA, 25 bp, Homo sapien
cgaacaccacggtggatgtggccat

SEQ ID NO: 4024983 - DNA, 25 bp, Homo sapien
gagcaagttccctgtccctgaagac

SEQ ID NO: 4024984 - DNA, 25 bp, Homo sapien
ccgaatagctgaaaccaaggtggcc

SEQ ID NO: 4024985 - DNA, 25 bp, Homo sapien
tcagatgagcggaatttaggctggc

SEQ ID NO: 4024986 - DNA, 25 bp, Homo sapien
cacctgacttgagggagtactctcc

SEQ ID NO: 4024987 - DNA, 25 bp, Homo sapien
gtaagtcaggtcctcattccacacg

SEQ ID NO: 4024988 - DNA, 25 bp, Homo sapien
gatgtcgtcatctgtgatcccgctg

SEQ ID NO: 4024989 - DNA, 25 bp, Homo sapien
tccacacgggattcagtgtgttcct

SEQ ID NO: 4024990 - DNA, 25 bp, Homo sapien
tgagcaccttgtgcgtgatgtcgtc

SEQ ID NO: 4024991 - DNA, 25 bp, Homo sapien
cttgacgtaggggtcggcgaggcca

SEQ ID NO: 4024992 - DNA, 25 bp, Homo sapien
tgacgtaggggtcggcgaggccatt

SEQ ID NO: 4024993 - DNA, 25 bp, Homo sapien
ggtcggcgaggccattgaaatccat

SEQ ID NO: 4024994 - DNA, 25 bp, Homo sapien
gtaggggtcggcgaggccattgaaa

SEQ ID NO: 4024995 - DNA, 25 bp, Homo sapien
caggaggcccggtcgtagagaaggt

SEQ ID NO: 4024996 - DNA, 25 bp, Homo sapien
gaggcccggtcgtagagaaggtcaa

SEQ ID NO: 4024997 - DNA, 25 bp, Homo sapien
gtgcaggaggcccggtcgtagagaa

SEQ ID NO: 4024998 - DNA, 25 bp, Homo sapien
gagtgcaggaggcccggtcgtagag

SEQ ID NO: 4024999 - DNA, 25 bp, Homo sapien
tccgcaccatcctcaggcgtggtgg

SEQ ID NO: 4025000 - DNA, 25 bp, Homo sapien
tcatccgagtcatagctgtccacct

SEQ ID NO: 4025001 - DNA, 25 bp, Homo sapien
tggcatcatccgagtcatagctgtc

SEQ ID NO: 4025002 - DNA, 25 bp, Homo sapien
acctccgcaccatcctcaggcgtgg

SEQ ID NO: 4025003 - DNA, 25 bp, Homo sapien
gggaagtagtcagagatctggcgga

SEQ ID NO: 4025004 - DNA, 25 bp, Homo sapien
ccccgggggaagtagtcagagatct

SEQ ID NO: 4025005 - DNA, 25 bp, Homo sapien
tagtcagagatctggcggatgggcc

SEQ ID NO: 4025006 - DNA, 25 bp, Homo sapien
tccccgggggaagtagtcagagatc

SEQ ID NO: 4025007 - DNA, 25 bp, Homo sapien
agagggcgtgtgagccagtgagccc

SEQ ID NO: 4025008 - DNA, 25 bp, Homo sapien
gtgtgagccagtgagcccatcatac

SEQ ID NO: 4025009 - DNA, 25 bp, Homo sapien
taggagagggcgtgtgagccagtga

SEQ ID NO: 4025010 - DNA, 25 bp, Homo sapien
ggcgtgtgagccagtgagcccatca

SEQ ID NO: 4025011 - DNA, 25 bp, Homo sapien
caggcgacggcctcctcggtctgtg

SEQ ID NO: 4025012 - DNA, 25 bp, Homo sapien
ccaggcgacggcctcctcggtctgt

SEQ ID NO: 4025013 - DNA, 25 bp, Homo sapien
agggccaggcgacggcctcctcggt

SEQ ID NO: 4025014 - DNA, 25 bp, Homo sapien
gctgagggccaggcgacggcctcct

SEQ ID NO: 4025015 - DNA, 25 bp, Homo sapien
ggtggtgtgtgccagccggtggcag

SEQ ID NO: 4025016 - DNA, 25 bp, Homo sapien
tggtgtgtgccagccggtggcaggt

SEQ ID NO: 4025017 - DNA, 25 bp, Homo sapien
gtggtgtgtgccagccggtggcagg

SEQ ID NO: 4025018 - DNA, 25 bp, Homo sapien
gggtggtgtgtgccagccggtggca

SEQ ID NO: 4025019 - DNA, 25 bp, Homo sapien
ccacaggggctgggctgccaaccca

SEQ ID NO: 4025020 - DNA, 25 bp, Homo sapien
ctccacaggggctgggctgccaacc

SEQ ID NO: 4025021 - DNA, 25 bp, Homo sapien
caggggctgggctgccaacccactc

SEQ ID NO: 4025022 - DNA, 25 bp, Homo sapien
acaggggctgggctgccaacccact

SEQ ID NO: 4025023 - DNA, 25 bp, Homo sapien
caggctggcacgcttccccgcaccc

SEQ ID NO: 4025024 - DNA, 25 bp, Homo sapien
cacaggctggcacgcttccccgcac

SEQ ID NO: 4025025 - DNA, 25 bp, Homo sapien
aggctggcacgcttccccgcaccct

SEQ ID NO: 4025026 - DNA, 25 bp, Homo sapien
gctggcacgcttccccgcaccctca

SEQ ID NO: 4025027 - DNA, 25 bp, Homo sapien
ccggcgaggagagcgcggagtcgag

SEQ ID NO: 4025028 - DNA, 25 bp, Homo sapien
gccggcgaggagagcgcggagtcga

SEQ ID NO: 4025029 - DNA, 25 bp, Homo sapien
ggccggcgaggagagcgcggagtcg

SEQ ID NO: 4025030 - DNA, 25 bp, Homo sapien
cggccggcgaggagagcgcggagtc

SEQ ID NO: 4025031 - DNA, 25 bp, Homo sapien
aggtggaggcgaggatgcagccggc

SEQ ID NO: 4025032 - DNA, 25 bp, Homo sapien
aggggcacgcggaccggcacacact

SEQ ID NO: 4025033 - DNA, 25 bp, Homo sapien
gagggggcgggatctcggactccca

SEQ ID NO: 4025034 - DNA, 25 bp, Homo sapien
gagcgccgagaaagtgcggggagga

SEQ ID NO: 4025035 - DNA, 25 bp, Homo sapien
cggaccaccggcctcgttgtcatgg

SEQ ID NO: 4025036 - DNA, 25 bp, Homo sapien
cagaatcgccgggtgttccccaact

SEQ ID NO: 4025037 - DNA, 25 bp, Homo sapien
cgttgtcatggcgacgccggctcat

SEQ ID NO: 4025038 - DNA, 25 bp, Homo sapien
caccaggaagcagccgccagaatcg

SEQ ID NO: 4025039 - DNA, 25 bp, Homo sapien
gatggtatctcctttgggaaccacc

SEQ ID NO: 4025040 - DNA, 25 bp, Homo sapien
cgaagacacgaaggggcttatcacc

SEQ ID NO: 4025041 - DNA, 25 bp, Homo sapien
ccgaagacacgaaggggcttatcac

SEQ ID NO: 4025042 - DNA, 25 bp, Homo sapien
catcccgaagacacgaaggggctta

SEQ ID NO: 4025043 - DNA, 25 bp, Homo sapien
tcccgaagacacgaaggggcttatc

SEQ ID NO: 4025044 - DNA, 25 bp, Homo sapien
atcttggctcacatgcgctcctcta

SEQ ID NO: 4025045 - DNA, 25 bp, Homo sapien
ggctcaggcctagggatcttggctc

SEQ ID NO: 4025046 - DNA, 25 bp, Homo sapien
acacctagacggctcaggcctaggg

SEQ ID NO: 4025047 - DNA, 25 bp, Homo sapien
gggatcttggctcacatgcgctcct

SEQ ID NO: 4025048 - DNA, 25 bp, Homo sapien
gcgcttccttaggaagtcaccgtgg

SEQ ID NO: 4025049 - DNA, 25 bp, Homo sapien
cttcctaggagccttcctggggcat

SEQ ID NO: 4025050 - DNA, 25 bp, Homo sapien
gtcaggactcggctcagcaccgctt

SEQ ID NO: 4025051 - DNA, 25 bp, Homo sapien
ctgggaaccgcgcttccttaggaag

SEQ ID NO: 4025052 - DNA, 25 bp, Homo sapien
aggatcgcttgagtgaagccagcct

SEQ ID NO: 4025053 - DNA, 25 bp, Homo sapien
ctccagggactgcggcgagaggatc

SEQ ID NO: 4025054 - DNA, 25 bp, Homo sapien
cagggactgcggcgagaggatcgct

SEQ ID NO: 4025055 - DNA, 25 bp, Homo sapien
tccagggactgcggcgagaggatcg

SEQ ID NO: 4025056 - DNA, 25 bp, Homo sapien
cgtggtggtatgtgtcttgggaggc

SEQ ID NO: 4025057 - DNA, 25 bp, Homo sapien
aaaaaaccctgagatatcacttatt

SEQ ID NO: 4025058 - DNA, 25 bp, Homo sapien
gatatcacttattacccataaaatg

SEQ ID NO: 4025059 - DNA, 25 bp, Homo sapien
agctgagacggactgatcccttgag

SEQ ID NO: 4025060 - DNA, 25 bp, Homo sapien
tgacctcgtgatggtgggaggatct

SEQ ID NO: 4025061 - DNA, 25 bp, Homo sapien
gacctcgtgatggtgggaggatctc

SEQ ID NO: 4025062 - DNA, 25 bp, Homo sapien
ctgacctcgtgatggtgggaggatc

SEQ ID NO: 4025063 - DNA, 25 bp, Homo sapien
acctcgtgatggtgggaggatctct

SEQ ID NO: 4025064 - DNA, 25 bp, Homo sapien
tgcttagttgttcatatgttgtttc

SEQ ID NO: 4025065 - DNA, 25 bp, Homo sapien
agggaaagagcttagccgtgtttgc

SEQ ID NO: 4025066 - DNA, 25 bp, Homo sapien
aagaatggtaactgtgtctcttgac

SEQ ID NO: 4025067 - DNA, 25 bp, Homo sapien
cctgcacaagaatggtaactgtgtc

SEQ ID NO: 4025068 - DNA, 25 bp, Homo sapien
ttgaattttgtgccacatgcatagg

SEQ ID NO: 4025069 - DNA, 25 bp, Homo sapien
cagagcaggtctggagtaggactcc

SEQ ID NO: 4025070 - DNA, 25 bp, Homo sapien
gaatatagatagcaagacaaggccc

SEQ ID NO: 4025071 - DNA, 25 bp, Homo sapien
taaagccacgagtatggatgagatc

SEQ ID NO: 4025072 - DNA, 25 bp, Homo sapien
tgggaccatccactgagacgaaaag

SEQ ID NO: 4025073 - DNA, 25 bp, Homo sapien
tgctctctgcatagggttgcggcag

SEQ ID NO: 4025074 - DNA, 25 bp, Homo sapien
agagcacctcacacgcgcagataca

SEQ ID NO: 4025075 - DNA, 25 bp, Homo sapien
ctgcatagggttgcggcagagcacc

SEQ ID NO: 4025076 - DNA, 25 bp, Homo sapien
cgcgcagatacacgcctggctttag

SEQ ID NO: 4025077 - DNA, 25 bp, Homo sapien
gtgccgcatccctcctctttgtaaa

SEQ ID NO: 4025078 - DNA, 25 bp, Homo sapien
tttcagcaagatggccgtgccgcat

SEQ ID NO: 4025079 - DNA, 25 bp, Homo sapien
aacacagcttcctttagttcgggct

SEQ ID NO: 4025080 - DNA, 25 bp, Homo sapien
accaccccaaattgtgcctgttgtc

SEQ ID NO: 4025081 - DNA, 25 bp, Homo sapien
cctccagcgcaagggtgtgcaggaa

SEQ ID NO: 4025082 - DNA, 25 bp, Homo sapien
ggcgtcctctcctctcgggtgatgg

SEQ ID NO: 4025083 - DNA, 25 bp, Homo sapien
tattagcggtctgtaaagcacctcc

SEQ ID NO: 4025084 - DNA, 25 bp, Homo sapien
tcaagctggcctaccctggagagga

SEQ ID NO: 4025085 - DNA, 25 bp, Homo sapien
gagcggggccagaagaggcggcagg

SEQ ID NO: 4025086 - DNA, 25 bp, Homo sapien
cggggccagaagaggcggcaggccc

SEQ ID NO: 4025087 - DNA, 25 bp, Homo sapien
gggccagaagaggcggcaggcccca

SEQ ID NO: 4025088 - DNA, 25 bp, Homo sapien
gccgggagcggggccagaagaggcg

SEQ ID NO: 4025089 - DNA, 25 bp, Homo sapien
aagaaccagtagagctgaggggcca

SEQ ID NO: 4025090 - DNA, 25 bp, Homo sapien
cgcccgtaggcccagtacaggtagg

SEQ ID NO: 4025091 - DNA, 25 bp, Homo sapien
gggcaggccggcatggcgcccgtag

SEQ ID NO: 4025092 - DNA, 25 bp, Homo sapien
cgcagcgcccaggttgacgtgggca

SEQ ID NO: 4025093 - DNA, 25 bp, Homo sapien
gcaccaggtgctcaaaatgcacggg

SEQ ID NO: 4025094 - DNA, 25 bp, Homo sapien
aaccagacactttgccaggacacaa

SEQ ID NO: 4025095 - DNA, 25 bp, Homo sapien
gccacggcagcagaagggctcggcc

SEQ ID NO: 4025096 - DNA, 25 bp, Homo sapien
tccctgcgaccctagcaggcagctc

SEQ ID NO: 4025097 - DNA, 25 bp, Homo sapien
tgaggatcttgccaaggcagacgaa

SEQ ID NO: 4025098 - DNA, 25 bp, Homo sapien
cagaaagaagtctcccttaccctgt

SEQ ID NO: 4025099 - DNA, 25 bp, Homo sapien
tcttgccaaggcagacgaagggcgt

SEQ ID NO: 4025100 - DNA, 25 bp, Homo sapien
tgccatcaacatgcaacccagaaag

SEQ ID NO: 4025101 - DNA, 25 bp, Homo sapien
gacctggtgcttgtgccagtgacag

SEQ ID NO: 4025102 - DNA, 25 bp, Homo sapien
tgtgcaggtagccacgcgctatggc

SEQ ID NO: 4025103 - DNA, 25 bp, Homo sapien
attgcgtgtaggcagaggacagcca

SEQ ID NO: 4025104 - DNA, 25 bp, Homo sapien
gatgtcgtagatgaagtagggcaca

SEQ ID NO: 4025105 - DNA, 25 bp, Homo sapien
taccatgaggttaggaccagcaaca

SEQ ID NO: 4025106 - DNA, 25 bp, Homo sapien
cctctctctctgcagtatagtcggg

SEQ ID NO: 4025107 - DNA, 25 bp, Homo sapien
ggtcacacagtcatgcagctagtaa

SEQ ID NO: 4025108 - DNA, 25 bp, Homo sapien
cagatacagtgccaaaataagccca

SEQ ID NO: 4025109 - DNA, 25 bp, Homo sapien
gacgatgtagccggcagtggaggcc

SEQ ID NO: 4025110 - DNA, 25 bp, Homo sapien
cgatgtagccggcagtggaggccat

SEQ ID NO: 4025111 - DNA, 25 bp, Homo sapien
ggtggagacgatgtagccggcagtg

SEQ ID NO: 4025112 - DNA, 25 bp, Homo sapien
caggaggtggagacgatgtagccgg

SEQ ID NO: 4025113 - DNA, 25 bp, Homo sapien
gatggcctggacagaggacaccagc

SEQ ID NO: 4025114 - DNA, 25 bp, Homo sapien
aaaggcagaagggaagaggcgtgtg

SEQ ID NO: 4025115 - DNA, 25 bp, Homo sapien
agaaaggcagaagggaagaggcgtg

SEQ ID NO: 4025116 - DNA, 25 bp, Homo sapien
aaggcagaagggaagaggcgtgtgc

SEQ ID NO: 4025117 - DNA, 25 bp, Homo sapien
ctagaaaggcagaagggaagaggcg

SEQ ID NO: 4025118 - DNA, 25 bp, Homo sapien
gcgttcagccacttctcgggccagt

SEQ ID NO: 4025119 - DNA, 25 bp, Homo sapien
tctgtcctgaggtgagactgagagt

SEQ ID NO: 4025120 - DNA, 25 bp, Homo sapien
gccccgcttagctgtccagtcatga

SEQ ID NO: 4025121 - DNA, 25 bp, Homo sapien
taacgactgcgctttgcgttcagcc

SEQ ID NO: 4025122 - DNA, 25 bp, Homo sapien
gagacaatgactgcgtcggcctcct

SEQ ID NO: 4025123 - DNA, 25 bp, Homo sapien
tggctgagacaatgactgcgtcggc

SEQ ID NO: 4025124 - DNA, 25 bp, Homo sapien
gctgagacaatgactgcgtcggcct

SEQ ID NO: 4025125 - DNA, 25 bp, Homo sapien
ctggctgagacaatgactgcgtcgg

SEQ ID NO: 4025126 - DNA, 25 bp, Homo sapien
gagaggaggaagagtccggggaaca

SEQ ID NO: 4025127 - DNA, 25 bp, Homo sapien
ccccggccaccatcggggtcagcat

SEQ ID NO: 4025128 - DNA, 25 bp, Homo sapien
cttggagaggaggaagagtccgggg

SEQ ID NO: 4025129 - DNA, 25 bp, Homo sapien
cccccggccaccatcggggtcagca

SEQ ID NO: 4025130 - DNA, 25 bp, Homo sapien
aagaggggatggcttggtgagggac

SEQ ID NO: 4025131 - DNA, 25 bp, Homo sapien
gaggggaggcttacgtgagaggctg

SEQ ID NO: 4025132 - DNA, 25 bp, Homo sapien
gggccagggagtccgatgaaactgg

SEQ ID NO: 4025133 - DNA, 25 bp, Homo sapien
gaaggagggagaaaacgatgagaag

SEQ ID NO: 4025134 - DNA, 25 bp, Homo sapien
ctgcagcggcgtctccccatgcagc

SEQ ID NO: 4025135 - DNA, 25 bp, Homo sapien
taaaatctgtgttccgtgtacctcc

SEQ ID NO: 4025136 - DNA, 25 bp, Homo sapien
ggcggccaccgtaactactcgattg

SEQ ID NO: 4025137 - DNA, 25 bp, Homo sapien
tttcaaacccatggttgcagccggg

SEQ ID NO: 4025138 - DNA, 25 bp, Homo sapien
tactcgattgaggactacaaggctg

SEQ ID NO: 4025139 - DNA, 25 bp, Homo sapien
aaaagatcagttccaccagccatgg

SEQ ID NO: 4025140 - DNA, 25 bp, Homo sapien
actctgcttctgctttcaccacaaa

SEQ ID NO: 4025141 - DNA, 25 bp, Homo sapien
gctggtgtcttttgactccacattc

SEQ ID NO: 4025142 - DNA, 25 bp, Homo sapien
aagtaaaagatcagttccaccagcc

SEQ ID NO: 4025143 - DNA, 25 bp, Homo sapien
tggatgctaccaggacagcctcttg

SEQ ID NO: 4025144 - DNA, 25 bp, Homo sapien
gcacaacgggaagaagacgcaaccc

SEQ ID NO: 4025145 - DNA, 25 bp, Homo sapien
ggttggtgtggttctgcaagcccca

SEQ ID NO: 4025146 - DNA, 25 bp, Homo sapien
cagcgcagggcagtgaagcacaacg

SEQ ID NO: 4025147 - DNA, 25 bp, Homo sapien
gaaagggaggttgatgtttctcctc

SEQ ID NO: 4025148 - DNA, 25 bp, Homo sapien
agaaagggaggttgatgtttctcct

SEQ ID NO: 4025149 - DNA, 25 bp, Homo sapien
tcttccaagggaccttctcgggata

SEQ ID NO: 4025150 - DNA, 25 bp, Homo sapien
tgaagtgtcttccaagggaccttct

SEQ ID NO: 4025151 - DNA, 25 bp, Homo sapien
caaaagaaataacaggtgcaagcct

SEQ ID NO: 4025152 - DNA, 25 bp, Homo sapien
taaagccaaagcgattgttgttcca

SEQ ID NO: 4025153 - DNA, 25 bp, Homo sapien
tttcttcttgttgagagcaaaacag

SEQ ID NO: 4025154 - DNA, 25 bp, Homo sapien
tggttagagtcaggcccgagtctca

SEQ ID NO: 4025155 - DNA, 25 bp, Homo sapien
ggcccgagtctcactggaatctgga

SEQ ID NO: 4025156 - DNA, 25 bp, Homo sapien
caggccatgagctggttagagtcag

SEQ ID NO: 4025157 - DNA, 25 bp, Homo sapien
aggctgtttcactcatcctctccac

SEQ ID NO: 4025158 - DNA, 25 bp, Homo sapien
tagggactgtcccaagcaatgccag

SEQ ID NO: 4025159 - DNA, 25 bp, Homo sapien
cactagcctggcatccttgtgcaag

SEQ ID NO: 4025160 - DNA, 25 bp, Homo sapien
ggagtcagacagctaagggtccaat

SEQ ID NO: 4025161 - DNA, 25 bp, Homo sapien
gggctcctcatcaatgaaacagcag

SEQ ID NO: 4025162 - DNA, 25 bp, Homo sapien
ggctacaagcatgtgccaccgtgcc

SEQ ID NO: 4025163 - DNA, 25 bp, Homo sapien
tgcctggctaatttttgctttttgg

SEQ ID NO: 4025164 - DNA, 25 bp, Homo sapien
ctggggctacaagcatgtgccaccg

SEQ ID NO: 4025165 - DNA, 25 bp, Homo sapien
ctgcctcagcttcctgagtatctgg

SEQ ID NO: 4025166 - DNA, 25 bp, Homo sapien
cagatatactgtggcagaactagaa

SEQ ID NO: 4025167 - DNA, 25 bp, Homo sapien
tgagccttcattctatgccatgtgc

SEQ ID NO: 4025168 - DNA, 25 bp, Homo sapien
gtcaattgacttgtccagggttgca

SEQ ID NO: 4025169 - DNA, 25 bp, Homo sapien
gagggttatccccactttccacatg

SEQ ID NO: 4025170 - DNA, 25 bp, Homo sapien
tccaacgtccggcatctgatgagga

SEQ ID NO: 4025171 - DNA, 25 bp, Homo sapien
tgctcagtggcttggccggagatac

SEQ ID NO: 4025172 - DNA, 25 bp, Homo sapien
ggcaggcgtttctcccttttgcaga

SEQ ID NO: 4025173 - DNA, 25 bp, Homo sapien
ccggagatacatccaagtggtgggt

SEQ ID NO: 4025174 - DNA, 25 bp, Homo sapien
gtttggcaggaactgtgaccccgca

SEQ ID NO: 4025175 - DNA, 25 bp, Homo sapien
tgccgggccccacgatagtgtgaat

SEQ ID NO: 4025176 - DNA, 25 bp, Homo sapien
tcctctgaagcaccggtgagtgggc

SEQ ID NO: 4025177 - DNA, 25 bp, Homo sapien
ctaaatataggtccctgccagagga

SEQ ID NO: 4025178 - DNA, 25 bp, Homo sapien
gcccagggccaaacacaggagccca

SEQ ID NO: 4025179 - DNA, 25 bp, Homo sapien
cccgcccagggccaaacacaggagc

SEQ ID NO: 4025180 - DNA, 25 bp, Homo sapien
ccccgcccagggccaaacacaggag

SEQ ID NO: 4025181 - DNA, 25 bp, Homo sapien
cagggccaaacacaggagcccaatg

SEQ ID NO: 4025182 - DNA, 25 bp, Homo sapien
cccagcagccttggttaggctttga

SEQ ID NO: 4025183 - DNA, 25 bp, Homo sapien
tccattcacacggaggtgagagccg

SEQ ID NO: 4025184 - DNA, 25 bp, Homo sapien
caaaaatactctggtcccagaacaa

SEQ ID NO: 4025185 - DNA, 25 bp, Homo sapien
aacaacagactggtgtggcctgcac

SEQ ID NO: 4025186 - DNA, 25 bp, Homo sapien
ggagcgggaggtttgtgatggaggc

SEQ ID NO: 4025187 - DNA, 25 bp, Homo sapien
agggagcgggaggtttgtgatggag

SEQ ID NO: 4025188 - DNA, 25 bp, Homo sapien
ggaagggagcgggaggtttgtgatg

SEQ ID NO: 4025189 - DNA, 25 bp, Homo sapien
aagggagcgggaggtttgtgatgga

SEQ ID NO: 4025190 - DNA, 25 bp, Homo sapien
tggagccgctgggtacccggagccc

SEQ ID NO: 4025191 - DNA, 25 bp, Homo sapien
ctgagcgcccggagtctggagcctc

SEQ ID NO: 4025192 - DNA, 25 bp, Homo sapien
agatagcccccaggcgcggtgtatg

SEQ ID NO: 4025193 - DNA, 25 bp, Homo sapien
tccagaaatgcagccgagtaggggg

SEQ ID NO: 4025194 - DNA, 25 bp, Homo sapien
gagagagggatgtcagagcagggca

SEQ ID NO: 4025195 - DNA, 25 bp, Homo sapien
ttcacgaatgtctccacccagggtg

SEQ ID NO: 4025196 - DNA, 25 bp, Homo sapien
ctgttctggatctgattcacgaatg

SEQ ID NO: 4025197 - DNA, 25 bp, Homo sapien
acccagggtggagtcgcagggacca

SEQ ID NO: 4025198 - DNA, 25 bp, Homo sapien
gccccatggaaagccgcagggtgca

SEQ ID NO: 4025199 - DNA, 25 bp, Homo sapien
agtttcctcttcacacgggcgtctc

SEQ ID NO: 4025200 - DNA, 25 bp, Homo sapien
ttcctcttcacacgggcgtctcgct

SEQ ID NO: 4025201 - DNA, 25 bp, Homo sapien
tggctctgggccccgcagtttcctc

SEQ ID NO: 4025202 - DNA, 25 bp, Homo sapien
ctggctctgggccccgcagtttcct

SEQ ID NO: 4025203 - DNA, 25 bp, Homo sapien
cccactagaaatcagctgcatgagg

SEQ ID NO: 4025204 - DNA, 25 bp, Homo sapien
cactagaaatcagctgcatgagggc

SEQ ID NO: 4025205 - DNA, 25 bp, Homo sapien
tctccccactagaaatcagctgcat

SEQ ID NO: 4025206 - DNA, 25 bp, Homo sapien
tccccactagaaatcagctgcatga

SEQ ID NO: 4025207 - DNA, 25 bp, Homo sapien
aaacatttgttgaatgcatgaacaa

SEQ ID NO: 4025208 - DNA, 25 bp, Homo sapien
tgttgaatgcatgaacaaatgaatg

SEQ ID NO: 4025209 - DNA, 25 bp, Homo sapien
gaacaaatgaatgaacaactcccac

SEQ ID NO: 4025210 - DNA, 25 bp, Homo sapien
catttgttgaatgcatgaacaaatg

SEQ ID NO: 4025211 - DNA, 25 bp, Homo sapien
caaagggattggctgcaatcttcag

SEQ ID NO: 4025212 - DNA, 25 bp, Homo sapien
ggcaaagggattggctgcaatcttc

SEQ ID NO: 4025213 - DNA, 25 bp, Homo sapien
tttggcaaagggattggctgcaatc

SEQ ID NO: 4025214 - DNA, 25 bp, Homo sapien
aagggattggctgcaatcttcagtt

SEQ ID NO: 4025215 - DNA, 25 bp, Homo sapien
acttgtgcatggagtgcaggatcag

SEQ ID NO: 4025216 - DNA, 25 bp, Homo sapien
gctgggctgcccgaactaggtgtat

SEQ ID NO: 4025217 - DNA, 25 bp, Homo sapien
tctggtaggctgtcacggagatgaa

SEQ ID NO: 4025218 - DNA, 25 bp, Homo sapien
ggaaggaggccatgcccccccagtg

SEQ ID NO: 4025219 - DNA, 25 bp, Homo sapien
tgaatgtagacacggtcaggcaggc

SEQ ID NO: 4025220 - DNA, 25 bp, Homo sapien
acacgatggaaagacacaggctgcc

SEQ ID NO: 4025221 - DNA, 25 bp, Homo sapien
ctgacactcggcaggcagggaacat

SEQ ID NO: 4025222 - DNA, 25 bp, Homo sapien
tccagaagaaacaagtagcgggcct

SEQ ID NO: 4025223 - DNA, 25 bp, Homo sapien
ccttccatagctcccggttctccag

SEQ ID NO: 4025224 - DNA, 25 bp, Homo sapien
ccacagagctgaactccttccatag

SEQ ID NO: 4025225 - DNA, 25 bp, Homo sapien
ccggagaggaagcaatccagtttag

SEQ ID NO: 4025226 - DNA, 25 bp, Homo sapien
aagcaatccagtttaggggtgtcca

SEQ ID NO: 4025227 - DNA, 25 bp, Homo sapien
tagccctccgctagggcgggtggga

SEQ ID NO: 4025228 - DNA, 25 bp, Homo sapien
ggtacaattctcgtggatggtacat

SEQ ID NO: 4025229 - DNA, 25 bp, Homo sapien
gtagcggtagccctccgctagggcg

SEQ ID NO: 4025230 - DNA, 25 bp, Homo sapien
aagctggagtcggccccaggttggg

SEQ ID NO: 4025231 - DNA, 25 bp, Homo sapien
gttgtagttccgtctggcctcaggt

SEQ ID NO: 4025232 - DNA, 25 bp, Homo sapien
gttccgtctggcctcaggtctcgct

SEQ ID NO: 4025233 - DNA, 25 bp, Homo sapien
gtagttccgtctggcctcaggtctc

SEQ ID NO: 4025234 - DNA, 25 bp, Homo sapien
tgtagttccgtctggcctcaggtct

SEQ ID NO: 4025235 - DNA, 25 bp, Homo sapien
tccaaagttcgaaggcgctcacagt

SEQ ID NO: 4025236 - DNA, 25 bp, Homo sapien
ggacgcggcctgagctgatttcaca

SEQ ID NO: 4025237 - DNA, 25 bp, Homo sapien
ctggaacctggacggagccaagagt

SEQ ID NO: 4025238 - DNA, 25 bp, Homo sapien
tcggcttgattgatccccagggctc

SEQ ID NO: 4025239 - DNA, 25 bp, Homo sapien
cacgcgtggggtaagaagggcctgg

SEQ ID NO: 4025240 - DNA, 25 bp, Homo sapien
tatgtacaaacgctacagaacgagg

SEQ ID NO: 4025241 - DNA, 25 bp, Homo sapien
ttcacagagcagacggtgcactggg

SEQ ID NO: 4025242 - DNA, 25 bp, Homo sapien
gcctggtgggaggagttcacagagc

SEQ ID NO: 4025243 - DNA, 25 bp, Homo sapien
ggttaaaaacgagatccaagccagc

SEQ ID NO: 4025244 - DNA, 25 bp, Homo sapien
aaaacgagatccaagccagccagat

SEQ ID NO: 4025245 - DNA, 25 bp, Homo sapien
gagatccaagccagccagatcgcag

SEQ ID NO: 4025246 - DNA, 25 bp, Homo sapien
ttaaaaacgagatccaagccagcca

SEQ ID NO: 4025247 - DNA, 25 bp, Homo sapien
cacagtgcatgcaataaaatatata

SEQ ID NO: 4025248 - DNA, 25 bp, Homo sapien
ggtcacagtgcatgcaataaaatat

SEQ ID NO: 4025249 - DNA, 25 bp, Homo sapien
tcacagtgcatgcaataaaatatat

SEQ ID NO: 4025250 - DNA, 25 bp, Homo sapien
gtcacagtgcatgcaataaaatata

SEQ ID NO: 4025251 - DNA, 25 bp, Homo sapien
gagccacatgcgtcgggggagcggg

SEQ ID NO: 4025252 - DNA, 25 bp, Homo sapien
tgagggtccagagctcccttcgggt

SEQ ID NO: 4025253 - DNA, 25 bp, Homo sapien
aagccagtggcgctccctggcggcc

SEQ ID NO: 4025254 - DNA, 25 bp, Homo sapien
ggccgggctggagccacatgcgtcg

SEQ ID NO: 4025255 - DNA, 25 bp, Homo sapien
ttcaatgatgtacttcccctctttg

SEQ ID NO: 4025256 - DNA, 25 bp, Homo sapien
gttgagttcaatgatgtacttcccc

SEQ ID NO: 4025257 - DNA, 25 bp, Homo sapien
gtggttgagttcaatgatgtacttc

SEQ ID NO: 4025258 - DNA, 25 bp, Homo sapien
gagttcaatgatgtacttcccctct

SEQ ID NO: 4025259 - DNA, 25 bp, Homo sapien
ggcagggccgtatttctcacaaaca

SEQ ID NO: 4025260 - DNA, 25 bp, Homo sapien
tacagtatctgcttggccttgcagg

SEQ ID NO: 4025261 - DNA, 25 bp, Homo sapien
ggagcaacagtctcaccacaaggca

SEQ ID NO: 4025262 - DNA, 25 bp, Homo sapien
gaatagaactccctgactcaaaggt

SEQ ID NO: 4025263 - DNA, 25 bp, Homo sapien
tccaagcgacgcctgaagaatcctg

SEQ ID NO: 4025264 - DNA, 25 bp, Homo sapien
gtagaggtccagagtggccaagcca

SEQ ID NO: 4025265 - DNA, 25 bp, Homo sapien
acagccaatctgtggcagggtcagc

SEQ ID NO: 4025266 - DNA, 25 bp, Homo sapien
ggtagtgaaatcagaccctggacag

SEQ ID NO: 4025267 - DNA, 25 bp, Homo sapien
cctgtcttcttctgtagagataata

SEQ ID NO: 4025268 - DNA, 25 bp, Homo sapien
ccctgtcttcttctgtagagataat

SEQ ID NO: 4025269 - DNA, 25 bp, Homo sapien
gatgctgacttgtgtgagctcggcc

SEQ ID NO: 4025270 - DNA, 25 bp, Homo sapien
tggaaggtcaggtcaaaggctagcc

SEQ ID NO: 4025271 - DNA, 25 bp, Homo sapien
gaatgagataatagacgccaggcac

SEQ ID NO: 4025272 - DNA, 25 bp, Homo sapien
gagctcggcctatgcaatctgaaag

SEQ ID NO: 4025273 - DNA, 25 bp, Homo sapien
atggaggccggtcagcagcacccgc

SEQ ID NO: 4025274 - DNA, 25 bp, Homo sapien
gcatggaggccggtcagcagcaccc

SEQ ID NO: 4025275 - DNA, 25 bp, Homo sapien
gtggatgtcggcgacagcatggagg

SEQ ID NO: 4025276 - DNA, 25 bp, Homo sapien
tcggcgacagcatggaggccggtca

SEQ ID NO: 4025277 - DNA, 25 bp, Homo sapien
ctgtggggacatggggtagtcccag

SEQ ID NO: 4025278 - DNA, 25 bp, Homo sapien
tggggacatggggtagtcccaggga

SEQ ID NO: 4025279 - DNA, 25 bp, Homo sapien
cagggagggtcctgccatcacaggg

SEQ ID NO: 4025280 - DNA, 25 bp, Homo sapien
cccagggagggtcctgccatcacag

SEQ ID NO: 4025281 - DNA, 25 bp, Homo sapien
tcacaacagaggtcagggaaagcaa

SEQ ID NO: 4025282 - DNA, 25 bp, Homo sapien
aaagcaagaagggaggccagatact

SEQ ID NO: 4025283 - DNA, 25 bp, Homo sapien
ctctgggagtctcagcaggatgcca

SEQ ID NO: 4025284 - DNA, 25 bp, Homo sapien
gggtcacaggtcacaacagaggtca

SEQ ID NO: 4025285 - DNA, 25 bp, Homo sapien
aagaggtaggcacgcccctgactgc

SEQ ID NO: 4025286 - DNA, 25 bp, Homo sapien
gttgaagaggtaggcacgcccctga

SEQ ID NO: 4025287 - DNA, 25 bp, Homo sapien
gaagaggtaggcacgcccctgactg

SEQ ID NO: 4025288 - DNA, 25 bp, Homo sapien
agtgggcacagctatacctccggtg

SEQ ID NO: 4025289 - DNA, 25 bp, Homo sapien
cctgaaacgtcttgggctttgaaat

SEQ ID NO: 4025290 - DNA, 25 bp, Homo sapien
ggtgacaatcatccaagtaggcctg

SEQ ID NO: 4025291 - DNA, 25 bp, Homo sapien
tcgtggttggccaggtgagcgcggc

SEQ ID NO: 4025292 - DNA, 25 bp, Homo sapien
cagtggccccacgcggggagcggcc

SEQ ID NO: 4025293 - DNA, 25 bp, Homo sapien
ggaggcctcaggttgcatccatggg

SEQ ID NO: 4025294 - DNA, 25 bp, Homo sapien
gaccagaggcgtctcggttttgact

SEQ ID NO: 4025295 - DNA, 25 bp, Homo sapien
cttgcgacctcatctggagagcagt

SEQ ID NO: 4025296 - DNA, 25 bp, Homo sapien
ggtgcccagggtgagtcacccgcct

SEQ ID NO: 4025297 - DNA, 25 bp, Homo sapien
taggaggcctcgccgtgaaggttga

SEQ ID NO: 4025298 - DNA, 25 bp, Homo sapien
gaggcctcgccgtgaaggttgaggg

SEQ ID NO: 4025299 - DNA, 25 bp, Homo sapien
gcctcgccgtgaaggttgagggtca

SEQ ID NO: 4025300 - DNA, 25 bp, Homo sapien
ggaggcctcgccgtgaaggttgagg

SEQ ID NO: 4025301 - DNA, 25 bp, Homo sapien
gggctcttacctgcaacgcggagcc

SEQ ID NO: 4025302 - DNA, 25 bp, Homo sapien
tacgctcaggggctcttacctgcaa

SEQ ID NO: 4025303 - DNA, 25 bp, Homo sapien
gggctctcacctgcgggcgccaagg

SEQ ID NO: 4025304 - DNA, 25 bp, Homo sapien
cgcggagccttacctggactccggg

SEQ ID NO: 4025305 - DNA, 25 bp, Homo sapien
cgcaggcgcctggacttgtttacac

SEQ ID NO: 4025306 - DNA, 25 bp, Homo sapien
cgggcccgggttcgcaggcgcctgg

SEQ ID NO: 4025307 - DNA, 25 bp, Homo sapien
agtggggggcgctcctggcgggcgc

SEQ ID NO: 4025308 - DNA, 25 bp, Homo sapien
cccgggttcgcaggcgcctggactt

SEQ ID NO: 4025309 - DNA, 25 bp, Homo sapien
ccaatgggcgctccgcatgcaaatg

SEQ ID NO: 4025310 - DNA, 25 bp, Homo sapien
cattcctgcttgtggcccgcgcagg

SEQ ID NO: 4025311 - DNA, 25 bp, Homo sapien
ggagatgagtataatgacccgcgtt

SEQ ID NO: 4025312 - DNA, 25 bp, Homo sapien
gcatcaatcccgtgaggccgtttct

SEQ ID NO: 4025313 - DNA, 25 bp, Homo sapien
taagaggcgaagctggaattctcac

SEQ ID NO: 4025314 - DNA, 25 bp, Homo sapien
taggttatccagctagtaagaggcg

SEQ ID NO: 4025315 - DNA, 25 bp, Homo sapien
gaggtctcgcggctccctaggttat

SEQ ID NO: 4025316 - DNA, 25 bp, Homo sapien
ggcccattccatggcttttgccaga

SEQ ID NO: 4025317 - DNA, 25 bp, Homo sapien
cagccagggcgtcggaccaggcaat

SEQ ID NO: 4025318 - DNA, 25 bp, Homo sapien
ggcaattcctactgtccagcatcac

SEQ ID NO: 4025319 - DNA, 25 bp, Homo sapien
agggcgtcggaccaggcaattccta

SEQ ID NO: 4025320 - DNA, 25 bp, Homo sapien
aagacccaaagatgcgcgcccctgg

SEQ ID NO: 4025321 - DNA, 25 bp, Homo sapien
agagaaacaggagacctcgaggctt

SEQ ID NO: 4025322 - DNA, 25 bp, Homo sapien
aagagaaacaggagacctcgaggct

SEQ ID NO: 4025323 - DNA, 25 bp, Homo sapien
gctcccacgctgaaggctgcttcaa

SEQ ID NO: 4025324 - DNA, 25 bp, Homo sapien
catggttgtccaggtagtgccgcag

SEQ ID NO: 4025325 - DNA, 25 bp, Homo sapien
taatccgttatgacgccagtggctc

SEQ ID NO: 4025326 - DNA, 25 bp, Homo sapien
tccgggcagctggtccatggttgtc

SEQ ID NO: 4025327 - DNA, 25 bp, Homo sapien
cagcagagtgggaccggaaccctgc

SEQ ID NO: 4025328 - DNA, 25 bp, Homo sapien
tctgtgtgcggtggaagtggtggtc

SEQ ID NO: 4025329 - DNA, 25 bp, Homo sapien
ctgccaggtctgtgtgcggtggaag

SEQ ID NO: 4025330 - DNA, 25 bp, Homo sapien
tgcccgagtgatgcagctagttggc

SEQ ID NO: 4025331 - DNA, 25 bp, Homo sapien
ctcgctcctccaagtgtcggatcag

SEQ ID NO: 4025332 - DNA, 25 bp, Homo sapien
acccctcgctcctccaagtgtcgga

SEQ ID NO: 4025333 - DNA, 25 bp, Homo sapien
tcctccaagtgtcggatcagactct

SEQ ID NO: 4025334 - DNA, 25 bp, Homo sapien
tccaagtgtcggatcagactcttcc

SEQ ID NO: 4025335 - DNA, 25 bp, Homo sapien
gtaggtctctatggggacacgccac

SEQ ID NO: 4025336 - DNA, 25 bp, Homo sapien
cagtaggtctctatggggacacgcc

SEQ ID NO: 4025337 - DNA, 25 bp, Homo sapien
agaagggcagcagtaggtctctatg

SEQ ID NO: 4025338 - DNA, 25 bp, Homo sapien
ggagaagggcagcagtaggtctcta

SEQ ID NO: 4025339 - DNA, 25 bp, Homo sapien
gccaataactggttcaggcaagagc

SEQ ID NO: 4025340 - DNA, 25 bp, Homo sapien
ccaataactggttcaggcaagagca

SEQ ID NO: 4025341 - DNA, 25 bp, Homo sapien
gagagaaggaagtgggggttagctc

SEQ ID NO: 4025342 - DNA, 25 bp, Homo sapien
agagagaaggaagtgggggttagct

SEQ ID NO: 4025343 - DNA, 25 bp, Homo sapien
cctcggcttattgtgaaggacaggg

SEQ ID NO: 4025344 - DNA, 25 bp, Homo sapien
cagaatcctcggcttattgtgaagg

SEQ ID NO: 4025345 - DNA, 25 bp, Homo sapien
gcacccagaatcctcggcttattgt

SEQ ID NO: 4025346 - DNA, 25 bp, Homo sapien
gaagaagaacttctcagggattggg

SEQ ID NO: 4025347 - DNA, 25 bp, Homo sapien
tgatttcattacggtcatagcgtct

SEQ ID NO: 4025348 - DNA, 25 bp, Homo sapien
gatttcattacggtcatagcgtctc

SEQ ID NO: 4025349 - DNA, 25 bp, Homo sapien
ttctccgaggcccagatggtgattt

SEQ ID NO: 4025350 - DNA, 25 bp, Homo sapien
atttcattacggtcatagcgtctca

SEQ ID NO: 4025351 - DNA, 25 bp, Homo sapien
ttccctttgatctctacgctcatgg

SEQ ID NO: 4025352 - DNA, 25 bp, Homo sapien
gatgagctcttcgttcttccctttg

SEQ ID NO: 4025353 - DNA, 25 bp, Homo sapien
aacaggtcctccagacgaaccatgc

SEQ ID NO: 4025354 - DNA, 25 bp, Homo sapien
atctctacgctcatgggtgtccttg

SEQ ID NO: 4025355 - DNA, 25 bp, Homo sapien
ggagagaagtaaacctccagcttct

SEQ ID NO: 4025356 - DNA, 25 bp, Homo sapien
tcagctgacagtcgagctccaggag

SEQ ID NO: 4025357 - DNA, 25 bp, Homo sapien
cacatccctgtttaggcccgactgg

SEQ ID NO: 4025358 - DNA, 25 bp, Homo sapien
ccgactggcggcacaggttctcatc

SEQ ID NO: 4025359 - DNA, 25 bp, Homo sapien
ccaggaggtccgagcgctgggccat

SEQ ID NO: 4025360 - DNA, 25 bp, Homo sapien
tgtgatgcagtccacgacctgcaca

SEQ ID NO: 4025361 - DNA, 25 bp, Homo sapien
tgaatggcgtcccttgctgtgatgc

SEQ ID NO: 4025362 - DNA, 25 bp, Homo sapien
cccagctaggaagtgaatggcgtcc

SEQ ID NO: 4025363 - DNA, 25 bp, Homo sapien
aatgtgagagcggagttcgtggcgg

SEQ ID NO: 4025364 - DNA, 25 bp, Homo sapien
tggtgttctccagcagctctccaga

SEQ ID NO: 4025365 - DNA, 25 bp, Homo sapien
atggtgttctccagcagctctccag

SEQ ID NO: 4025366 - DNA, 25 bp, Homo sapien
tccatggtgttctccagcagctctc

SEQ ID NO: 4025367 - DNA, 25 bp, Homo sapien
ggcctccatggtgttctccagcagc

SEQ ID NO: 4025368 - DNA, 25 bp, Homo sapien
tttctagcatgcccccttggaccta

SEQ ID NO: 4025369 - DNA, 25 bp, Homo sapien
tcttcttcctcgtccacaccctgcc

SEQ ID NO: 4025370 - DNA, 25 bp, Homo sapien
ctgttctcacccctacccggctcac

SEQ ID NO: 4025371 - DNA, 25 bp, Homo sapien
tggacctacccctctgtgctgtcca

SEQ ID NO: 4025372 - DNA, 25 bp, Homo sapien
gcagggagggcatagtacagcaaaa

SEQ ID NO: 4025373 - DNA, 25 bp, Homo sapien
caggcggatgcggaaggtgggagcc

SEQ ID NO: 4025374 - DNA, 25 bp, Homo sapien
ggagggcatagtacagcaaaaggct

SEQ ID NO: 4025375 - DNA, 25 bp, Homo sapien
gggcatagtacagcaaaaggctcat

SEQ ID NO: 4025376 - DNA, 25 bp, Homo sapien
taaaaaccacccaggactgtcagga

SEQ ID NO: 4025377 - DNA, 25 bp, Homo sapien
gacaggaagccattagcgagaggac

SEQ ID NO: 4025378 - DNA, 25 bp, Homo sapien
tgtgctgcctgcctagccagtgtgg

SEQ ID NO: 4025379 - DNA, 25 bp, Homo sapien
cgagggcacgcgaagtgacagcttt

SEQ ID NO: 4025380 - DNA, 25 bp, Homo sapien
gacctcttgcctctttgccagttct

SEQ ID NO: 4025381 - DNA, 25 bp, Homo sapien
gggtgacagaggccctcagtgacct

SEQ ID NO: 4025382 - DNA, 25 bp, Homo sapien
tcagtgacctcttgcctctttgcca

SEQ ID NO: 4025383 - DNA, 25 bp, Homo sapien
gtgacctcttgcctctttgccagtt

SEQ ID NO: 4025384 - DNA, 25 bp, Homo sapien
ggccccagggtgcagagatgtctgt

SEQ ID NO: 4025385 - DNA, 25 bp, Homo sapien
gccccagggtgcagagatgtctgtc

SEQ ID NO: 4025386 - DNA, 25 bp, Homo sapien
cccagggtgcagagatgtctgtctg

SEQ ID NO: 4025387 - DNA, 25 bp, Homo sapien
caggccccagggtgcagagatgtct

SEQ ID NO: 4025388 - DNA, 25 bp, Homo sapien
gctggaagcgtgctgtctcctggaa

SEQ ID NO: 4025389 - DNA, 25 bp, Homo sapien
tccagctccatggcgaaggtgaagg

SEQ ID NO: 4025390 - DNA, 25 bp, Homo sapien
gggcctccagcactccgggctggaa

SEQ ID NO: 4025391 - DNA, 25 bp, Homo sapien
cgctccttaggtaggtcatccagct

SEQ ID NO: 4025392 - DNA, 25 bp, Homo sapien
ctacgtgcccccctgctcccctgcc

SEQ ID NO: 4025393 - DNA, 25 bp, Homo sapien
ccactgctgctggggactggcccac

SEQ ID NO: 4025394 - DNA, 25 bp, Homo sapien
ccagccccactgctgctggggactg

SEQ ID NO: 4025395 - DNA, 25 bp, Homo sapien
ccccactgctgctggggactggccc

SEQ ID NO: 4025396 - DNA, 25 bp, Homo sapien
tcgggtcatagtactgctccaggta

SEQ ID NO: 4025397 - DNA, 25 bp, Homo sapien
taaaggttaacatccggtccagcag

SEQ ID NO: 4025398 - DNA, 25 bp, Homo sapien
ctcatccgtcgggtcatagtactgc

SEQ ID NO: 4025399 - DNA, 25 bp, Homo sapien
cctccactgtgatccgtttattggg

SEQ ID NO: 4025400 - DNA, 25 bp, Homo sapien
agagactgtaggtagtttcgggcct

SEQ ID NO: 4025401 - DNA, 25 bp, Homo sapien
ttggagggcagagactgtaggtagt

SEQ ID NO: 4025402 - DNA, 25 bp, Homo sapien
gatgatacaattcaggtcctcctgg

SEQ ID NO: 4025403 - DNA, 25 bp, Homo sapien
tggagtctgacttggggaaaagctt

SEQ ID NO: 4025404 - DNA, 25 bp, Homo sapien
ccagaatgtggttgagctgatccag

SEQ ID NO: 4025405 - DNA, 25 bp, Homo sapien
atgggccggttagagagcatctcag

SEQ ID NO: 4025406 - DNA, 25 bp, Homo sapien
tgatccaggtagtgcttgccaggga

SEQ ID NO: 4025407 - DNA, 25 bp, Homo sapien
cagatgtcgatggacttggtatagc

SEQ ID NO: 4025408 - DNA, 25 bp, Homo sapien
ttccttgcagagcccaaggcccaga

SEQ ID NO: 4025409 - DNA, 25 bp, Homo sapien
agtgtctggctcagaggtagctcca

SEQ ID NO: 4025410 - DNA, 25 bp, Homo sapien
gcccagagggtagaattcctgtgtc

SEQ ID NO: 4025411 - DNA, 25 bp, Homo sapien
cgttcctttcaggagtgggcagccc

SEQ ID NO: 4025412 - DNA, 25 bp, Homo sapien
ctcaggatcggcaatccgggccagg

SEQ ID NO: 4025413 - DNA, 25 bp, Homo sapien
tcaggaagccggtgtggtcatgctc

SEQ ID NO: 4025414 - DNA, 25 bp, Homo sapien
tagccacatactccgtcaggaagcc

SEQ ID NO: 4025415 - DNA, 25 bp, Homo sapien
tcagcatgatctctggggcccggta

SEQ ID NO: 4025416 - DNA, 25 bp, Homo sapien
ggggacaggtgcccaaccctctgac

SEQ ID NO: 4025417 - DNA, 25 bp, Homo sapien
ttagatctcggtggagcacgttggc

SEQ ID NO: 4025418 - DNA, 25 bp, Homo sapien
gcaacttgtacaggtcagtctccat

SEQ ID NO: 4025419 - DNA, 25 bp, Homo sapien
aggtcgcaggtggtgttgatgagca

SEQ ID NO: 4025420 - DNA, 25 bp, Homo sapien
ggttggagggctttagatctcggtg

SEQ ID NO: 4025421 - DNA, 25 bp, Homo sapien
aggatggttccgcagacccccccag

SEQ ID NO: 4025422 - DNA, 25 bp, Homo sapien
cccaggcagggggcagtgggaggca

SEQ ID NO: 4025423 - DNA, 25 bp, Homo sapien
ctgaggatggttccgcagacccccc

SEQ ID NO: 4025424 - DNA, 25 bp, Homo sapien
ccccccaggcagggggcagtgggag

SEQ ID NO: 4025425 - DNA, 25 bp, Homo sapien
cagccgactggccaaggtgaaggat

SEQ ID NO: 4025426 - DNA, 25 bp, Homo sapien
agccgactggccaaggtgaaggata

SEQ ID NO: 4025427 - DNA, 25 bp, Homo sapien
gccgactggccaaggtgaaggatac

SEQ ID NO: 4025428 - DNA, 25 bp, Homo sapien
tggacgcccgcagaatgtctcggat

SEQ ID NO: 4025429 - DNA, 25 bp, Homo sapien
tctcggatgccgatgacattctcat

SEQ ID NO: 4025430 - DNA, 25 bp, Homo sapien
tcttgatggccacgcgagtcttgcg

SEQ ID NO: 4025431 - DNA, 25 bp, Homo sapien
ttctcatggcggaagcgcagcagga

SEQ ID NO: 4025432 - DNA, 25 bp, Homo sapien
ggggaccggagagaggctgctgctg

SEQ ID NO: 4025433 - DNA, 25 bp, Homo sapien
ggaccggagagaggctgctgctgtg

SEQ ID NO: 4025434 - DNA, 25 bp, Homo sapien
ctgaggggaccggagagaggctgct

SEQ ID NO: 4025435 - DNA, 25 bp, Homo sapien
accggagagaggctgctgctgtggc

SEQ ID NO: 4025436 - DNA, 25 bp, Homo sapien
tacagaagggtggactcaaagcctc

SEQ ID NO: 4025437 - DNA, 25 bp, Homo sapien
ggaagagactgaccgctcactgact

SEQ ID NO: 4025438 - DNA, 25 bp, Homo sapien
gcccttcggtgactttacaaacaga

SEQ ID NO: 4025439 - DNA, 25 bp, Homo sapien
gctggctctggtcaaatcataaaca

SEQ ID NO: 4025440 - DNA, 25 bp, Homo sapien
tcctcgggacgctccgcgtctccac

SEQ ID NO: 4025441 - DNA, 25 bp, Homo sapien
ctcctcgggacgctccgcgtctcca

SEQ ID NO: 4025442 - DNA, 25 bp, Homo sapien
cctcgggacgctccgcgtctccacg

SEQ ID NO: 4025443 - DNA, 25 bp, Homo sapien
ctcgggacgctccgcgtctccacgt

SEQ ID NO: 4025444 - DNA, 25 bp, Homo sapien
agcgcgggcccacgtcgaacggctg

SEQ ID NO: 4025445 - DNA, 25 bp, Homo sapien
gatgtactgcaactgcgtgtagcgc

SEQ ID NO: 4025446 - DNA, 25 bp, Homo sapien
tactgcaactgcgtgtagcgcgggc

SEQ ID NO: 4025447 - DNA, 25 bp, Homo sapien
cctcgccgatgtactgcaactgcgt

SEQ ID NO: 4025448 - DNA, 25 bp, Homo sapien
ggcctggaagagctccgccccaagg

SEQ ID NO: 4025449 - DNA, 25 bp, Homo sapien
tccacctccggcttttgggggatca

SEQ ID NO: 4025450 - DNA, 25 bp, Homo sapien
gggatcactgtcctctctcggcagc

SEQ ID NO: 4025451 - DNA, 25 bp, Homo sapien
gacaagagcatcttcagcgggcgag

SEQ ID NO: 4025452 - DNA, 25 bp, Homo sapien
ctctgcggaggcgagggctagggac

SEQ ID NO: 4025453 - DNA, 25 bp, Homo sapien
agcacagtgtcgagggcccgactcc

SEQ ID NO: 4025454 - DNA, 25 bp, Homo sapien
ggctagggaccaccgcggccaagat

SEQ ID NO: 4025455 - DNA, 25 bp, Homo sapien
ggctgtcaccgcgacccagccagcg

SEQ ID NO: 4025456 - DNA, 25 bp, Homo sapien
tgagagcaaaacaagaaaagaccaa

SEQ ID NO: 4025457 - DNA, 25 bp, Homo sapien
gccctgggcttggagacaggaaggg

SEQ ID NO: 4025458 - DNA, 25 bp, Homo sapien
agacaggaaggggttgagagcaaaa

SEQ ID NO: 4025459 - DNA, 25 bp, Homo sapien
gaaggggttgagagcaaaacaagaa

SEQ ID NO: 4025460 - DNA, 25 bp, Homo sapien
gctctttgggcaggccgacctagca

SEQ ID NO: 4025461 - DNA, 25 bp, Homo sapien
ggctctgggcatggcaccctccaag

SEQ ID NO: 4025462 - DNA, 25 bp, Homo sapien
tggggctcttcacatacgctcctca

SEQ ID NO: 4025463 - DNA, 25 bp, Homo sapien
gtgagtaggcgaggctgaggctagg

SEQ ID NO: 4025464 - DNA, 25 bp, Homo sapien
cctcagagcagtcggagtggcctct

SEQ ID NO: 4025465 - DNA, 25 bp, Homo sapien
cagagcagtcggagtggcctctccc

SEQ ID NO: 4025466 - DNA, 25 bp, Homo sapien
acctcagagcagtcggagtggcctc

SEQ ID NO: 4025467 - DNA, 25 bp, Homo sapien
tcagagcagtcggagtggcctctcc

SEQ ID NO: 4025468 - DNA, 25 bp, Homo sapien
aaccattaggaaggacgggctctgc

SEQ ID NO: 4025469 - DNA, 25 bp, Homo sapien
tgaaccattaggaaggacgggctct

SEQ ID NO: 4025470 - DNA, 25 bp, Homo sapien
tgatgacgcctgagtctgaaccatt

SEQ ID NO: 4025471 - DNA, 25 bp, Homo sapien
gacgcctgagtctgaaccattagga

SEQ ID NO: 4025472 - DNA, 25 bp, Homo sapien
ggtcccctagacacgcagtttgctg

SEQ ID NO: 4025473 - DNA, 25 bp, Homo sapien
taaggccctagcttagaacctcaat

SEQ ID NO: 4025474 - DNA, 25 bp, Homo sapien
gtttgctgaaccaaccagccctaga

SEQ ID NO: 4025475 - DNA, 25 bp, Homo sapien
cacgttgcacgtgactctgctggca

SEQ ID NO: 4025476 - DNA, 25 bp, Homo sapien
ggtaggcatcttttaaactgcaggt

SEQ ID NO: 4025477 - DNA, 25 bp, Homo sapien
tgagcaacacggcgagataccgtct

SEQ ID NO: 4025478 - DNA, 25 bp, Homo sapien
agggtaggcatcttttaaactgcag

SEQ ID NO: 4025479 - DNA, 25 bp, Homo sapien
agataaaaataacgagggaggctgg

SEQ ID NO: 4025480 - DNA, 25 bp, Homo sapien
gctgtagacacattaagcccagggc

SEQ ID NO: 4025481 - DNA, 25 bp, Homo sapien
tatatggtgcctctgatactgcggt

SEQ ID NO: 4025482 - DNA, 25 bp, Homo sapien
cattttacaagcagggatagaggcc

SEQ ID NO: 4025483 - DNA, 25 bp, Homo sapien
tcaaagtcctagcaatctgggccag

SEQ ID NO: 4025484 - DNA, 25 bp, Homo sapien
tgtcgctcacgtgcccactggtctg

SEQ ID NO: 4025485 - DNA, 25 bp, Homo sapien
ctgtcgctcacgtgcccactggtct

SEQ ID NO: 4025486 - DNA, 25 bp, Homo sapien
ttctgtcgctcacgtgcccactggt

SEQ ID NO: 4025487 - DNA, 25 bp, Homo sapien
tttctgtcgctcacgtgcccactgg

SEQ ID NO: 4025488 - DNA, 25 bp, Homo sapien
tagggtgacccaagagactggtgtc

SEQ ID NO: 4025489 - DNA, 25 bp, Homo sapien
ccgtgggaacacgtacttggagaga

SEQ ID NO: 4025490 - DNA, 25 bp, Homo sapien
tcacgaaggcgggatcctcaaggtc

SEQ ID NO: 4025491 - DNA, 25 bp, Homo sapien
gactggtgtccccaaggttgtagtc

SEQ ID NO: 4025492 - DNA, 25 bp, Homo sapien
tcgaacttggccgacaccaccagga

SEQ ID NO: 4025493 - DNA, 25 bp, Homo sapien
tctgaagcagcggtttcccctcgaa

SEQ ID NO: 4025494 - DNA, 25 bp, Homo sapien
tgtgtctctgaagcagcggtttccc

SEQ ID NO: 4025495 - DNA, 25 bp, Homo sapien
aagcagcggtttcccctcgaacttg

SEQ ID NO: 4025496 - DNA, 25 bp, Homo sapien
aggagcaacggttgagggtcgtgtc

SEQ ID NO: 4025497 - DNA, 25 bp, Homo sapien
agcaacggttgagggtcgtgtcctc

SEQ ID NO: 4025498 - DNA, 25 bp, Homo sapien
ggagcaacggttgagggtcgtgtcc

SEQ ID NO: 4025499 - DNA, 25 bp, Homo sapien
gagcaacggttgagggtcgtgtcct

SEQ ID NO: 4025500 - DNA, 25 bp, Homo sapien
cggaagaatatgaatggtgccgaac

SEQ ID NO: 4025501 - DNA, 25 bp, Homo sapien
gaatatgaatggtgccgaacccgcc

SEQ ID NO: 4025502 - DNA, 25 bp, Homo sapien
cgagcggaagaatatgaatggtgcc

SEQ ID NO: 4025503 - DNA, 25 bp, Homo sapien
ctaccgagcggaagaatatgaatgg

SEQ ID NO: 4025504 - DNA, 25 bp, Homo sapien
cttctcgcggaggtattcggcgctg

SEQ ID NO: 4025505 - DNA, 25 bp, Homo sapien
ttctcgcggaggtattcggcgctga

SEQ ID NO: 4025506 - DNA, 25 bp, Homo sapien
gcttctcgcggaggtattcggcgct

SEQ ID NO: 4025507 - DNA, 25 bp, Homo sapien
gccgatgctgaatggtacgcgctcg

SEQ ID NO: 4025508 - DNA, 25 bp, Homo sapien
tgtcaacactgctcgtcgggtccag

SEQ ID NO: 4025509 - DNA, 25 bp, Homo sapien
taccttgctgccttacaggagccac

SEQ ID NO: 4025510 - DNA, 25 bp, Homo sapien
gatagtccccgagagcttgttccga

SEQ ID NO: 4025511 - DNA, 25 bp, Homo sapien
ctcgcctgcgaggagagacagcctt

SEQ ID NO: 4025512 - DNA, 25 bp, Homo sapien
tcacgctgcgctgggtgcgcccaga

SEQ ID NO: 4025513 - DNA, 25 bp, Homo sapien
gtgctggcgcacatgctgcgcgcac

SEQ ID NO: 4025514 - DNA, 25 bp, Homo sapien
cagacctccgccaggacctctgcct

SEQ ID NO: 4025515 - DNA, 25 bp, Homo sapien
cttactattgtctggcatgctacgt

SEQ ID NO: 4025516 - DNA, 25 bp, Homo sapien
aactgcagctcattcttgtgtgcac

SEQ ID NO: 4025517 - DNA, 25 bp, Homo sapien
caactgccacactgcactatcagag

SEQ ID NO: 4025518 - DNA, 25 bp, Homo sapien
tctctaaaacaatgtaatgaactgc

SEQ ID NO: 4025519 - DNA, 25 bp, Homo sapien
gtttgtggggcgctccctgccagag

SEQ ID NO: 4025520 - DNA, 25 bp, Homo sapien
agcacacgtcgttcaaggagatgaa

SEQ ID NO: 4025521 - DNA, 25 bp, Homo sapien
gatgaagaagaaccctatgaccaac

SEQ ID NO: 4025522 - DNA, 25 bp, Homo sapien
aagaaccctatgaccaactacacca

SEQ ID NO: 4025523 - DNA, 25 bp, Homo sapien
ggactggaagaccaccttcaccgtg

SEQ ID NO: 4025524 - DNA, 25 bp, Homo sapien
caccttcaccgtggcgcagaatgag

SEQ ID NO: 4025525 - DNA, 25 bp, Homo sapien
tcgatgcggactatgcggagaagat

SEQ ID NO: 4025526 - DNA, 25 bp, Homo sapien
gcagaatgagcgcttcgatgcggac

SEQ ID NO: 4025527 - DNA, 25 bp, Homo sapien
tggagaagtaaaacccaggagatgt

SEQ ID NO: 4025528 - DNA, 25 bp, Homo sapien
ccccaggtcaccatatctggggagg

SEQ ID NO: 4025529 - DNA, 25 bp, Homo sapien
gcccggtggggccacatatggtcac

SEQ ID NO: 4025530 - DNA, 25 bp, Homo sapien
tgagctgaaagagtgaatgcccggt

SEQ ID NO: 4025531 - DNA, 25 bp, Homo sapien
gtggaggacgtcgagtccgccgggc

SEQ ID NO: 4025532 - DNA, 25 bp, Homo sapien
agatggtggaggacgtcgagtccgc

SEQ ID NO: 4025533 - DNA, 25 bp, Homo sapien
aggacgtcgagtccgccgggcagcg

SEQ ID NO: 4025534 - DNA, 25 bp, Homo sapien
tggtggaggacgtcgagtccgccgg

SEQ ID NO: 4025535 - DNA, 25 bp, Homo sapien
tagaagctaccaggtacctctgggc

SEQ ID NO: 4025536 - DNA, 25 bp, Homo sapien
gctccttagaagctaccaggtacct

SEQ ID NO: 4025537 - DNA, 25 bp, Homo sapien
tttcttgggctccttagaagctacc

SEQ ID NO: 4025538 - DNA, 25 bp, Homo sapien
ccacactgagatgaggggagtagcc

SEQ ID NO: 4025539 - DNA, 25 bp, Homo sapien
cttcaaacaggatagaatagtcctc

SEQ ID NO: 4025540 - DNA, 25 bp, Homo sapien
ggaagggcagagagcagccccgggg

SEQ ID NO: 4025541 - DNA, 25 bp, Homo sapien
ctgtggggcaggtggacaggaaggg

SEQ ID NO: 4025542 - DNA, 25 bp, Homo sapien
cagccccggggctggtgtcactcac

SEQ ID NO: 4025543 - DNA, 25 bp, Homo sapien
gtggggcaggtggacaggaagggca

SEQ ID NO: 4025544 - DNA, 25 bp, Homo sapien
tgttggtggcatggctgtaactgac

SEQ ID NO: 4025545 - DNA, 25 bp, Homo sapien
ttgttggtggcatggctgtaactga

SEQ ID NO: 4025546 - DNA, 25 bp, Homo sapien
ccatccacggccttcacccgggcag

SEQ ID NO: 4025547 - DNA, 25 bp, Homo sapien
atccacggccttcacccgggcagcc

SEQ ID NO: 4025548 - DNA, 25 bp, Homo sapien
cccatccacggccttcacccgggca

SEQ ID NO: 4025549 - DNA, 25 bp, Homo sapien
ccacggccttcacccgggcagccac

SEQ ID NO: 4025550 - DNA, 25 bp, Homo sapien
tctccaggtctggccacgtagtctc

SEQ ID NO: 4025551 - DNA, 25 bp, Homo sapien
cttgtctccaggtctggccacgtag

SEQ ID NO: 4025552 - DNA, 25 bp, Homo sapien
ttgtctccaggtctggccacgtagt

SEQ ID NO: 4025553 - DNA, 25 bp, Homo sapien
tgtctccaggtctggccacgtagtc

SEQ ID NO: 4025554 - DNA, 25 bp, Homo sapien
tgaggcagggatggccccacagagg

SEQ ID NO: 4025555 - DNA, 25 bp, Homo sapien
ctgaggcagggatggccccacagag

SEQ ID NO: 4025556 - DNA, 25 bp, Homo sapien
tctgcgcatggtcttccggggtggc

SEQ ID NO: 4025557 - DNA, 25 bp, Homo sapien
ctgctgcagcagggtcatcagcacc

SEQ ID NO: 4025558 - DNA, 25 bp, Homo sapien
cagggtcatcagcacccctctgcgc

SEQ ID NO: 4025559 - DNA, 25 bp, Homo sapien
cagggtcatggccgactgctgcagc

SEQ ID NO: 4025560 - DNA, 25 bp, Homo sapien
tacatatgggtgagacggcagcaca

SEQ ID NO: 4025561 - DNA, 25 bp, Homo sapien
gctgctgcgctcaactacatatggg

SEQ ID NO: 4025562 - DNA, 25 bp, Homo sapien
tcttcttgatgtcggtgctgacaca

SEQ ID NO: 4025563 - DNA, 25 bp, Homo sapien
caggactgtgacctgatctgccagg

SEQ ID NO: 4025564 - DNA, 25 bp, Homo sapien
cagcacaatggtggccgcaaaaaag

SEQ ID NO: 4025565 - DNA, 25 bp, Homo sapien
ccagcagcacaatggtggccgcaaa

SEQ ID NO: 4025566 - DNA, 25 bp, Homo sapien
gggctcactgtcaaccctgttcgtc

SEQ ID NO: 4025567 - DNA, 25 bp, Homo sapien
cttggcggaccattggccgaggtcc

SEQ ID NO: 4025568 - DNA, 25 bp, Homo sapien
aagagggggagggtctctgtgcccg

SEQ ID NO: 4025569 - DNA, 25 bp, Homo sapien
ctgttaagagggggagggtctctgt

SEQ ID NO: 4025570 - DNA, 25 bp, Homo sapien
tgttaagagggggagggtctctgtg

SEQ ID NO: 4025571 - DNA, 25 bp, Homo sapien
agggggagggtctctgtgcccggag

SEQ ID NO: 4025572 - DNA, 25 bp, Homo sapien
cggggccagggctcggctgaagctg

SEQ ID NO: 4025573 - DNA, 25 bp, Homo sapien
cagggggcgtgccttcaggcagttg

SEQ ID NO: 4025574 - DNA, 25 bp, Homo sapien
cagttgcggggccagggctcggctg

SEQ ID NO: 4025575 - DNA, 25 bp, Homo sapien
gggcgtgccttcaggcagttgcggg

SEQ ID NO: 4025576 - DNA, 25 bp, Homo sapien
gatgatagtacttctggccattcct

SEQ ID NO: 4025577 - DNA, 25 bp, Homo sapien
catggagattgtgctcgtcgtgcac

SEQ ID NO: 4025578 - DNA, 25 bp, Homo sapien
gacgacttcggatcctgctgttgag

SEQ ID NO: 4025579 - DNA, 25 bp, Homo sapien
tccaagagggctgtgtgcaccctgc

SEQ ID NO: 4025580 - DNA, 25 bp, Homo sapien
cctggcctctactgtgagtgagtaa

SEQ ID NO: 4025581 - DNA, 25 bp, Homo sapien
aaataacagacgatggtcctggcct

SEQ ID NO: 4025582 - DNA, 25 bp, Homo sapien
ctgtgtactaaactgcctgggggca

SEQ ID NO: 4025583 - DNA, 25 bp, Homo sapien
caaagtcccacatagagccaatggc

SEQ ID NO: 4025584 - DNA, 25 bp, Homo sapien
cagtaccagctcagttgctcaatgg

SEQ ID NO: 4025585 - DNA, 25 bp, Homo sapien
tagaggcatgcgctatcacaccctg

SEQ ID NO: 4025586 - DNA, 25 bp, Homo sapien
tggtgtcccctcctcattctgcgga

SEQ ID NO: 4025587 - DNA, 25 bp, Homo sapien
catcagagttttgttcattcccaca

SEQ ID NO: 4025588 - DNA, 25 bp, Homo sapien
attctttgttagtttttggagtgtg

SEQ ID NO: 4025589 - DNA, 25 bp, Homo sapien
ttgcgtgacggttccacatcaccga

SEQ ID NO: 4025590 - DNA, 25 bp, Homo sapien
gtttgcgtgacggttccacatcacc

SEQ ID NO: 4025591 - DNA, 25 bp, Homo sapien
gggtttgcgtgacggttccacatca

SEQ ID NO: 4025592 - DNA, 25 bp, Homo sapien
cttgggtttgcgtgacggttccaca

SEQ ID NO: 4025593 - DNA, 25 bp, Homo sapien
tttgcgtgacggttccacgtcaccg

SEQ ID NO: 4025594 - DNA, 25 bp, Homo sapien
ctcttgggtttgcgtgacggttcca

SEQ ID NO: 4025595 - DNA, 25 bp, Homo sapien
tgggtttgcgtgacggttccacgtc

SEQ ID NO: 4025596 - DNA, 25 bp, Homo sapien
tgcgtgacggttccacgtcaccgac

SEQ ID NO: 4025597 - DNA, 25 bp, Homo sapien
gggtttgcgtggtttttctgcctca

SEQ ID NO: 4025598 - DNA, 25 bp, Homo sapien
ctgagggtggaagcggcccccgcag

SEQ ID NO: 4025599 - DNA, 25 bp, Homo sapien
tcttgggtttgcgtggtttttctgc

SEQ ID NO: 4025600 - DNA, 25 bp, Homo sapien
gtggttccatctcagccgccctctg

SEQ ID NO: 4025601 - DNA, 25 bp, Homo sapien
agtgagctgacgctcagaaggtgtc

SEQ ID NO: 4025602 - DNA, 25 bp, Homo sapien
tgagctgacgctcagaaggtgtctt

SEQ ID NO: 4025603 - DNA, 25 bp, Homo sapien
gggagtgagctgacgctcagaaggt

SEQ ID NO: 4025604 - DNA, 25 bp, Homo sapien
gaaggggagtgagctgacgctcaga

SEQ ID NO: 4025605 - DNA, 25 bp, Homo sapien
tgtcttgatattatcatctgctgag

SEQ ID NO: 4025606 - DNA, 25 bp, Homo sapien
gtgtcttgatattatcatctgctga

SEQ ID NO: 4025607 - DNA, 25 bp, Homo sapien
ctgagggtggagctgagggtggaag

SEQ ID NO: 4025608 - DNA, 25 bp, Homo sapien
tctgctgagggtggagctgagggtg

SEQ ID NO: 4025609 - DNA, 25 bp, Homo sapien
ctgagggtggaagcggcccccgcag

SEQ ID NO: 4025610 - DNA, 25 bp, Homo sapien
tgacgctcggaaggtgtcttgagat

SEQ ID NO: 4025611 - DNA, 25 bp, Homo sapien
gctgacgctcggaaggtgtcttgag

SEQ ID NO: 4025612 - DNA, 25 bp, Homo sapien
cgctgagggtggaagcggcccccgc

SEQ ID NO: 4025613 - DNA, 25 bp, Homo sapien
tctgctgagggtggagctgagggtg

SEQ ID NO: 4025614 - DNA, 25 bp, Homo sapien
gtgtcttgatattatcatctgctga

SEQ ID NO: 4025615 - DNA, 25 bp, Homo sapien
tgtcttgatattatcatctgctgag

SEQ ID NO: 4025616 - DNA, 25 bp, Homo sapien
ctgagggtggagctgagggtggaag

SEQ ID NO: 4025617 - DNA, 25 bp, Homo sapien
tgagctgacgctcggaaggtgtctt

SEQ ID NO: 4025618 - DNA, 25 bp, Homo sapien
aaggggagtgagctgacgctcggaa

SEQ ID NO: 4025619 - DNA, 25 bp, Homo sapien
cccgcagacgctcggcaggtgtctt

SEQ ID NO: 4025620 - DNA, 25 bp, Homo sapien
tgagggtggaaggggcccccgcaga

SEQ ID NO: 4025621 - DNA, 25 bp, Homo sapien
gcggcccccgcagacgctccccgca

SEQ ID NO: 4025622 - DNA, 25 bp, Homo sapien
ccgcagacgctccccgcagacgctc

SEQ ID NO: 4025623 - DNA, 25 bp, Homo sapien
ggcccccgcagacgctccccgcaga

SEQ ID NO: 4025624 - DNA, 25 bp, Homo sapien
cccccgcagacgctccccgcagacg

SEQ ID NO: 4025625 - DNA, 25 bp, Homo sapien
tctgctgagggtggagctgagggtg

SEQ ID NO: 4025626 - DNA, 25 bp, Homo sapien
gtgtcttgatattatcatctgctga

SEQ ID NO: 4025627 - DNA, 25 bp, Homo sapien
tgtcttgatattatcatctgctgag

SEQ ID NO: 4025628 - DNA, 25 bp, Homo sapien
ctgagggtggagctgagggtggaag

SEQ ID NO: 4025629 - DNA, 25 bp, Homo sapien
ctgagggtggaagcggcccccgcag

SEQ ID NO: 4025630 - DNA, 25 bp, Homo sapien
tgacgctcggaaggtgtcttgagat

SEQ ID NO: 4025631 - DNA, 25 bp, Homo sapien
atccgctgagggtggaagcggcccc

SEQ ID NO: 4025632 - DNA, 25 bp, Homo sapien
atcatccgctgagggtggaagcggc

SEQ ID NO: 4025633 - DNA, 25 bp, Homo sapien
tgagctgacgctcggaaggtgtctt

SEQ ID NO: 4025634 - DNA, 25 bp, Homo sapien
aaggggagtgagctgacgctcggaa

SEQ ID NO: 4025635 - DNA, 25 bp, Homo sapien
ctgagggtggaagcggcccccgcag

SEQ ID NO: 4025636 - DNA, 25 bp, Homo sapien
cgctgagggtggaagcggcccccgc

SEQ ID NO: 4025637 - DNA, 25 bp, Homo sapien
gcaggtgtcttgatattatcatctg

SEQ ID NO: 4025638 - DNA, 25 bp, Homo sapien
ggcaggtgtcttgatattatcatct

SEQ ID NO: 4025639 - DNA, 25 bp, Homo sapien
ctgatggtggaagcggaatccgcag

SEQ ID NO: 4025640 - DNA, 25 bp, Homo sapien
tggaagcggaatccgcagacgctca

SEQ ID NO: 4025641 - DNA, 25 bp, Homo sapien
ggctgatggtggaagcggaatccgc

SEQ ID NO: 4025642 - DNA, 25 bp, Homo sapien
tggtggaagcggaatccgcagacgc

SEQ ID NO: 4025643 - DNA, 25 bp, Homo sapien
gctcggaaggtgtcttgagattatc

SEQ ID NO: 4025644 - DNA, 25 bp, Homo sapien
aaggggagtgagctgacgctcggaa

SEQ ID NO: 4025645 - DNA, 25 bp, Homo sapien
gggtggaaggggagtgagctgacgc

SEQ ID NO: 4025646 - DNA, 25 bp, Homo sapien
ggaaggggagtgagctgacgctcgg

SEQ ID NO: 4025647 - DNA, 25 bp, Homo sapien
gtgtcttgatattatcatctgctga

SEQ ID NO: 4025648 - DNA, 25 bp, Homo sapien
ttgatattatcatctgctgagggtg

SEQ ID NO: 4025649 - DNA, 25 bp, Homo sapien
atattatcatctgctgagggtggag

SEQ ID NO: 4025650 - DNA, 25 bp, Homo sapien
tgtcttgatattatcatctgctgag

SEQ ID NO: 4025651 - DNA, 25 bp, Homo sapien
ggaaggggagtgagctgacgctcgg

SEQ ID NO: 4025652 - DNA, 25 bp, Homo sapien
aggggagtgagctgacgctcggaag

SEQ ID NO: 4025653 - DNA, 25 bp, Homo sapien
ggtggaaggggagtgagctgacgct

SEQ ID NO: 4025654 - DNA, 25 bp, Homo sapien
tgagctgacgctcggaaggtgtctt

SEQ ID NO: 4025655 - DNA, 25 bp, Homo sapien
aggggagtgagctgacgctcggaag

SEQ ID NO: 4025656 - DNA, 25 bp, Homo sapien
gaaggggagtgagctgacgctcgga

SEQ ID NO: 4025657 - DNA, 25 bp, Homo sapien
ggagtgagctgacgctcggaaggtg

SEQ ID NO: 4025658 - DNA, 25 bp, Homo sapien
tgagctgacgctcggaaggtgtctt

SEQ ID NO: 4025659 - DNA, 25 bp, Homo sapien
tgagctgacgctcggaaggtgtctt

SEQ ID NO: 4025660 - DNA, 25 bp, Homo sapien
ggagtgagctgacgctcggaaggtg

SEQ ID NO: 4025661 - DNA, 25 bp, Homo sapien
aggggagtgagctgacgctcggaag

SEQ ID NO: 4025662 - DNA, 25 bp, Homo sapien
gaaggggagtgagctgacgctcgga

SEQ ID NO: 4025663 - DNA, 25 bp, Homo sapien
gctgagggtggaagcggcccccgca

SEQ ID NO: 4025664 - DNA, 25 bp, Homo sapien
ctgagggtggaagcggcccccgcag

SEQ ID NO: 4025665 - DNA, 25 bp, Homo sapien
cccgcagacgctcggcaggtgtctt

SEQ ID NO: 4025666 - DNA, 25 bp, Homo sapien
gtgagctgatgctcggaaggtgtct

SEQ ID NO: 4025667 - DNA, 25 bp, Homo sapien
tgagcagacactcgggaggtgtctt

SEQ ID NO: 4025668 - DNA, 25 bp, Homo sapien
gacactcaggaggtgtcttgagatt

SEQ ID NO: 4025669 - DNA, 25 bp, Homo sapien
gattatcatccgctgagggtggagc

SEQ ID NO: 4025670 - DNA, 25 bp, Homo sapien
gaaggggagtgagcagacactcagg

SEQ ID NO: 4025671 - DNA, 25 bp, Homo sapien
agtgtgaccaccctgctccaaatct

SEQ ID NO: 4025672 - DNA, 25 bp, Homo sapien
tcagtgtgaccaccctgctccaaat

SEQ ID NO: 4025673 - DNA, 25 bp, Homo sapien
gtcagtgtgaccaccctgctccaaa

SEQ ID NO: 4025674 - DNA, 25 bp, Homo sapien
tcactcccaggtaataccaaattgt

SEQ ID NO: 4025675 - DNA, 25 bp, Homo sapien
ttcactcccaggtaataccaaattg

SEQ ID NO: 4025676 - DNA, 25 bp, Homo sapien
cactcccaggtaataccaaattgta

SEQ ID NO: 4025677 - DNA, 25 bp, Homo sapien
ctcccaggtaataccaaattgtaag

SEQ ID NO: 4025678 - DNA, 25 bp, Homo sapien
ccagttgcaaagagcctttcttgca

SEQ ID NO: 4025679 - DNA, 25 bp, Homo sapien
gcaaagagcctttcttgcagaaggg

SEQ ID NO: 4025680 - DNA, 25 bp, Homo sapien
tgcaaagagcctttcttgcagaagg

SEQ ID NO: 4025681 - DNA, 25 bp, Homo sapien
gttgcaaagagcctttcttgcagaa

SEQ ID NO: 4025682 - DNA, 25 bp, Homo sapien
ccaacacatgagaaattgaatgttg

SEQ ID NO: 4025683 - DNA, 25 bp, Homo sapien
aacacatgagaaattgaatgttgag

SEQ ID NO: 4025684 - DNA, 25 bp, Homo sapien
gccaacacatgagaaattgaatgtt

SEQ ID NO: 4025685 - DNA, 25 bp, Homo sapien
caacacatgagaaattgaatgttga

SEQ ID NO: 4025686 - DNA, 25 bp, Homo sapien
cgccgcaactcttgcgcacgttgaa

SEQ ID NO: 4025687 - DNA, 25 bp, Homo sapien
atttgtggtagtcctctgcccgccg

SEQ ID NO: 4025688 - DNA, 25 bp, Homo sapien
ctcttgcgcacgttgaaacattttc

SEQ ID NO: 4025689 - DNA, 25 bp, Homo sapien
tttgcatttgtggtagtcctctgcc

SEQ ID NO: 4025690 - DNA, 25 bp, Homo sapien
catagtccttttgaaggatgtggtt

SEQ ID NO: 4025691 - DNA, 25 bp, Homo sapien
gggcttataaacaggcatagtcctt

SEQ ID NO: 4025692 - DNA, 25 bp, Homo sapien
agctgggcttataaacaggcatagt

SEQ ID NO: 4025693 - DNA, 25 bp, Homo sapien
caggcatagtccttttgaaggatgt

SEQ ID NO: 4025694 - DNA, 25 bp, Homo sapien
ctctccttttctgcatgctcacatt

SEQ ID NO: 4025695 - DNA, 25 bp, Homo sapien
catgctcacattctttcacgcttag

SEQ ID NO: 4025696 - DNA, 25 bp, Homo sapien
ttctgcatgctcacattctttcacg

SEQ ID NO: 4025697 - DNA, 25 bp, Homo sapien
tccttttctgcatgctcacattctt

SEQ ID NO: 4025698 - DNA, 25 bp, Homo sapien
gaaatgcacacacatgatccaccag

SEQ ID NO: 4025699 - DNA, 25 bp, Homo sapien
caacagtatttgtgtcaaggcacat

SEQ ID NO: 4025700 - DNA, 25 bp, Homo sapien
acaacagtatttgtgtcaaggcaca

SEQ ID NO: 4025701 - DNA, 25 bp, Homo sapien
gagtaatgacgtctttcaggccaat

SEQ ID NO: 4025702 - DNA, 25 bp, Homo sapien
tgacgtctttcaggccaattttatt

SEQ ID NO: 4025703 - DNA, 25 bp, Homo sapien
gtaatgacgtctttcaggccaattt

SEQ ID NO: 4025704 - DNA, 25 bp, Homo sapien
tagagtaatgacgtctttcaggcca

SEQ ID NO: 4025705 - DNA, 25 bp, Homo sapien
tctttgtgtgcatacaaatggacct

SEQ ID NO: 4025706 - DNA, 25 bp, Homo sapien
tcttttctttgtgtgcatacaaatg

SEQ ID NO: 4025707 - DNA, 25 bp, Homo sapien
tttctttgtgtgcatacaaatggac

SEQ ID NO: 4025708 - DNA, 25 bp, Homo sapien
tttgtgtgcatacaaatggacctca

SEQ ID NO: 4025709 - DNA, 25 bp, Homo sapien
tccatttcgagaccagaagatagtc

SEQ ID NO: 4025710 - DNA, 25 bp, Homo sapien
ttcgagaccagaagatagtcttcag

SEQ ID NO: 4025711 - DNA, 25 bp, Homo sapien
atttcgagaccagaagatagtcttc

SEQ ID NO: 4025712 - DNA, 25 bp, Homo sapien
ccatcatgtccatttcgagaccaga

SEQ ID NO: 4025713 - DNA, 25 bp, Homo sapien
gacaaattatggcacaacttagcag

SEQ ID NO: 4025714 - DNA, 25 bp, Homo sapien
cattgttcagaaggaggttcagccc

SEQ ID NO: 4025715 - DNA, 25 bp, Homo sapien
ggcagtgccaaatgacgtgtaatta

SEQ ID NO: 4025716 - DNA, 25 bp, Homo sapien
gaatggcaagacaaaatgtagagct

SEQ ID NO: 4025717 - DNA, 25 bp, Homo sapien
aacttgtcggaaacgcaataatgac

SEQ ID NO: 4025718 - DNA, 25 bp, Homo sapien
cggaaacgcaataatgacatgtaac

SEQ ID NO: 4025719 - DNA, 25 bp, Homo sapien
ggtaaactatccagagggtaatgac

SEQ ID NO: 4025720 - DNA, 25 bp, Homo sapien
gtaatgacaactttataacttgtcg

SEQ ID NO: 4025721 - DNA, 25 bp, Homo sapien
cctgacagtgcactcagcaaatttt

SEQ ID NO: 4025722 - DNA, 25 bp, Homo sapien
gtgcctgacagtgcactcagcaaat

SEQ ID NO: 4025723 - DNA, 25 bp, Homo sapien
tacaggtgcctgacagtgcactcag

SEQ ID NO: 4025724 - DNA, 25 bp, Homo sapien
gagtacaggtgcctgacagtgcact

SEQ ID NO: 4025725 - DNA, 25 bp, Homo sapien
cactcatgggtaagacaagctaagt

SEQ ID NO: 4025726 - DNA, 25 bp, Homo sapien
cacatgcagcccgtcactcatgggt

SEQ ID NO: 4025727 - DNA, 25 bp, Homo sapien
aaattgatgtataacattggatgca

SEQ ID NO: 4025728 - DNA, 25 bp, Homo sapien
tatatatcacatggtaaaagaatcc

SEQ ID NO: 4025729 - DNA, 25 bp, Homo sapien
gcctgagctgtgtaatttcatgcca

SEQ ID NO: 4025730 - DNA, 25 bp, Homo sapien
gccacgtgatacagcccagtaaaaa

SEQ ID NO: 4025731 - DNA, 25 bp, Homo sapien
taatttcatgccacgtgatacagcc

SEQ ID NO: 4025732 - DNA, 25 bp, Homo sapien
accccacgggtccagcgtctactca

SEQ ID NO: 4025733 - DNA, 25 bp, Homo sapien
attccagtaggagcccaaagaggag

SEQ ID NO: 4025734 - DNA, 25 bp, Homo sapien
ggctgataaattccagtaggagccc

SEQ ID NO: 4025735 - DNA, 25 bp, Homo sapien
gataaattccagtaggagcccaaag

SEQ ID NO: 4025736 - DNA, 25 bp, Homo sapien
taaattccagtaggagcccaaagag

SEQ ID NO: 4025737 - DNA, 25 bp, Homo sapien
agcctccgctcagccattcatatcc

SEQ ID NO: 4025738 - DNA, 25 bp, Homo sapien
cattcatatcctaagcaacaaaaca

SEQ ID NO: 4025739 - DNA, 25 bp, Homo sapien
tccgctcagccattcatatcctaag

SEQ ID NO: 4025740 - DNA, 25 bp, Homo sapien
tcagccattcatatcctaagcaaca

SEQ ID NO: 4025741 - DNA, 25 bp, Homo sapien
cctgccctagatttggctgggcatg

SEQ ID NO: 4025742 - DNA, 25 bp, Homo sapien
tttttatatgctgcagccatgttcc

SEQ ID NO: 4025743 - DNA, 25 bp, Homo sapien
ttaacaaaagtatggaattcaattc

SEQ ID NO: 4025744 - DNA, 25 bp, Homo sapien
gttcctgccctagatttggctgggc

SEQ ID NO: 4025745 - DNA, 25 bp, Homo sapien
ggatccatcggaggtggcaggtgta

SEQ ID NO: 4025746 - DNA, 25 bp, Homo sapien
gatccatcggaggtggcaggtgtag

SEQ ID NO: 4025747 - DNA, 25 bp, Homo sapien
atccatcggaggtggcaggtgtagg

SEQ ID NO: 4025748 - DNA, 25 bp, Homo sapien
gtggatccatcggaggtggcaggtg

SEQ ID NO: 4025749 - DNA, 25 bp, Homo sapien
taaacagggtaaaactatgcatatt

SEQ ID NO: 4025750 - DNA, 25 bp, Homo sapien
gagttgacacgagcctggccaatat

SEQ ID NO: 4025751 - DNA, 25 bp, Homo sapien
caagataatgttcaacttaatgact

SEQ ID NO: 4025752 - DNA, 25 bp, Homo sapien
ttttacttggaccgggtgcagcggc

SEQ ID NO: 4025753 - DNA, 25 bp, Homo sapien
tcgttgggcacttgtctggttgttt

SEQ ID NO: 4025754 - DNA, 25 bp, Homo sapien
tcacctttttaagtgtcgttgggca

SEQ ID NO: 4025755 - DNA, 25 bp, Homo sapien
ccagcctaaacttggcaagataata

SEQ ID NO: 4025756 - DNA, 25 bp, Homo sapien
ggttaccatgccagcaatgattcct

SEQ ID NO: 4025757 - DNA, 25 bp, Homo sapien
agccagtactgtgactgcgtaagct

SEQ ID NO: 4025758 - DNA, 25 bp, Homo sapien
gaagccagtactgtgactgcgtaag

SEQ ID NO: 4025759 - DNA, 25 bp, Homo sapien
aggaagaagccagtactgtgactgc

SEQ ID NO: 4025760 - DNA, 25 bp, Homo sapien
aagaagccagtactgtgactgcgta

SEQ ID NO: 4025761 - DNA, 25 bp, Homo sapien
tcctcaggtactcgcatgggcatgt

SEQ ID NO: 4025762 - DNA, 25 bp, Homo sapien
aggtactcgcatgggcatgtcactg

SEQ ID NO: 4025763 - DNA, 25 bp, Homo sapien
ctcaggtactcgcatgggcatgtca

SEQ ID NO: 4025764 - DNA, 25 bp, Homo sapien
cttcctcaggtactcgcatgggcat

SEQ ID NO: 4025765 - DNA, 25 bp, Homo sapien
gagcttcaccatttgcagaatgaga

SEQ ID NO: 4025766 - DNA, 25 bp, Homo sapien
gaacaggggctcatgatgagtgcca

SEQ ID NO: 4025767 - DNA, 25 bp, Homo sapien
tttgcagaatgagaacaggggctca

SEQ ID NO: 4025768 - DNA, 25 bp, Homo sapien
acaggggctcatgatgagtgccaac

SEQ ID NO: 4025769 - DNA, 25 bp, Homo sapien
gttgaatgagtggaaaaacaaggtg

SEQ ID NO: 4025770 - DNA, 25 bp, Homo sapien
ttgaatgagtggaaaaacaaggtga

SEQ ID NO: 4025771 - DNA, 25 bp, Homo sapien
catttcactattattggatatacag

SEQ ID NO: 4025772 - DNA, 25 bp, Homo sapien
ccctatttaatcacacaaggccttg

SEQ ID NO: 4025773 - DNA, 25 bp, Homo sapien
gaatccttagctcattcggttgtgg

SEQ ID NO: 4025774 - DNA, 25 bp, Homo sapien
ccggagccacactgtttagattcta

SEQ ID NO: 4025775 - DNA, 25 bp, Homo sapien
gtcgaatcaatgcatgtgggctccg

SEQ ID NO: 4025776 - DNA, 25 bp, Homo sapien
catgtcacgaatggctgggcaccgt

SEQ ID NO: 4025777 - DNA, 25 bp, Homo sapien
cattagatctcatctcagttatatt

SEQ ID NO: 4025778 - DNA, 25 bp, Homo sapien
tgcgtgttccaaaaattgcatacat

SEQ ID NO: 4025779 - DNA, 25 bp, Homo sapien
gtatgttgttgatatgcgtgttcca

SEQ ID NO: 4025780 - DNA, 25 bp, Homo sapien
cgtgcccagcctaatttttgcattt

SEQ ID NO: 4025781 - DNA, 25 bp, Homo sapien
actacaagtgctgccaccacatcca

SEQ ID NO: 4025782 - DNA, 25 bp, Homo sapien
ctgatctcgtgatctccgcgcctcg

SEQ ID NO: 4025783 - DNA, 25 bp, Homo sapien
accacatccagctaattttttgtat

SEQ ID NO: 4025784 - DNA, 25 bp, Homo sapien
tagtgtatggttggcgtattctgtg

SEQ ID NO: 4025785 - DNA, 25 bp, Homo sapien
gacattatgtaaccatctcaagaag

SEQ ID NO: 4025786 - DNA, 25 bp, Homo sapien
cagattcagttgactaaagcacctc

SEQ ID NO: 4025787 - DNA, 25 bp, Homo sapien
ttcacttggatgtaatgcttcacgc

SEQ ID NO: 4025788 - DNA, 25 bp, Homo sapien
gcctaggcaacgtggcaagagcctg

SEQ ID NO: 4025789 - DNA, 25 bp, Homo sapien
gactcacgctggaggatctctcgag

SEQ ID NO: 4025790 - DNA, 25 bp, Homo sapien
tgtaaaagtacttgcggctgggcgt

SEQ ID NO: 4025791 - DNA, 25 bp, Homo sapien
tacctggcaaaacttcacggaagct

SEQ ID NO: 4025792 - DNA, 25 bp, Homo sapien
tgtgtgtttacaattttctggccag

SEQ ID NO: 4025793 - DNA, 25 bp, Homo sapien
tttggtgagagggaattaggccact

SEQ ID NO: 4025794 - DNA, 25 bp, Homo sapien
agtttccactgatcaccttttagct

SEQ ID NO: 4025795 - DNA, 25 bp, Homo sapien
ttaggccacttgagagtttgtgtgt

SEQ ID NO: 4025796 - DNA, 25 bp, Homo sapien
gaccaaattaagtgtagatcgtctc

SEQ ID NO: 4025797 - DNA, 25 bp, Homo sapien
taataaagagatcatctggaactgc

SEQ ID NO: 4025798 - DNA, 25 bp, Homo sapien
tttctcttccaaggaccatcagtca

SEQ ID NO: 4025799 - DNA, 25 bp, Homo sapien
ggaactgcaatttctaactcataca

SEQ ID NO: 4025800 - DNA, 25 bp, Homo sapien
gaaggtagaatgaggcatgttgaca

SEQ ID NO: 4025801 - DNA, 25 bp, Homo sapien
cattcagtcggattgggtggcttag

SEQ ID NO: 4025802 - DNA, 25 bp, Homo sapien
tccttgctcaacaggaagggtccat

SEQ ID NO: 4025803 - DNA, 25 bp, Homo sapien
acatctcaactatcacagcagccgg

SEQ ID NO: 4025804 - DNA, 25 bp, Homo sapien
gctaatcacaaacaacctgcgggca

SEQ ID NO: 4025805 - DNA, 25 bp, Homo sapien
tgttggcagggcagcctttaaggac

SEQ ID NO: 4025806 - DNA, 25 bp, Homo sapien
tatgtggagacctgataagtaagca

SEQ ID NO: 4025807 - DNA, 25 bp, Homo sapien
tagtgtcagagatagttaaaagtcc

SEQ ID NO: 4025808 - DNA, 25 bp, Homo sapien
tgtaatagctgtaatgccaggtcca

SEQ ID NO: 4025809 - DNA, 25 bp, Homo sapien
gccgcagtgggcaatgatcatgtca

SEQ ID NO: 4025810 - DNA, 25 bp, Homo sapien
tcagctggagccatagcaactcaag

SEQ ID NO: 4025811 - DNA, 25 bp, Homo sapien
gagacaagactgacctcccatcatc

SEQ ID NO: 4025812 - DNA, 25 bp, Homo sapien
gagccacggtgcccctcctccttta

SEQ ID NO: 4025813 - DNA, 25 bp, Homo sapien
tgagccacggtgcccctcctccttt

SEQ ID NO: 4025814 - DNA, 25 bp, Homo sapien
aagtgtttcactccactgggctagg

SEQ ID NO: 4025815 - DNA, 25 bp, Homo sapien
cagttgcaaactagtggtcctcagc

SEQ ID NO: 4025816 - DNA, 25 bp, Homo sapien
tcagatgctagtgcaaaggaagctc

SEQ ID NO: 4025817 - DNA, 25 bp, Homo sapien
caataaattaggcatggttgcttcc

SEQ ID NO: 4025818 - DNA, 25 bp, Homo sapien
agaccattaccatcctgcgccccat

SEQ ID NO: 4025819 - DNA, 25 bp, Homo sapien
tcatcccaagaccattaccatcctg

SEQ ID NO: 4025820 - DNA, 25 bp, Homo sapien
gtgaatggtgggtaacaattgaagc

SEQ ID NO: 4025821 - DNA, 25 bp, Homo sapien
ttgaagcttcgtctgtatttctggc

SEQ ID NO: 4025822 - DNA, 25 bp, Homo sapien
gcaaaagaaactaggatcagtgtga

SEQ ID NO: 4025823 - DNA, 25 bp, Homo sapien
aaagaaactaggatcagtgtgaaca

SEQ ID NO: 4025824 - DNA, 25 bp, Homo sapien
caaaagaaactaggatcagtgtgaa

SEQ ID NO: 4025825 - DNA, 25 bp, Homo sapien
agcaaaagaaactaggatcagtgtg

SEQ ID NO: 4025826 - DNA, 25 bp, Homo sapien
gcctcaatttactcattgctgaaaa

SEQ ID NO: 4025827 - DNA, 25 bp, Homo sapien
ttgctgaaaaaggacgactctgtat

SEQ ID NO: 4025828 - DNA, 25 bp, Homo sapien
tcaatttactcattgctgaaaaagg

SEQ ID NO: 4025829 - DNA, 25 bp, Homo sapien
caatttactcattgctgaaaaagga

SEQ ID NO: 4025830 - DNA, 25 bp, Homo sapien
aaggcaggaagatcgactgaactca

SEQ ID NO: 4025831 - DNA, 25 bp, Homo sapien
ctgtaattaagtgctccgggaggcc

SEQ ID NO: 4025832 - DNA, 25 bp, Homo sapien
ctccagaaagtataggcacaacagc

SEQ ID NO: 4025833 - DNA, 25 bp, Homo sapien
actgaactcaggagctcgggaccag

SEQ ID NO: 4025834 - DNA, 25 bp, Homo sapien
ggcagtcatgtcagtctaaccacag

SEQ ID NO: 4025835 - DNA, 25 bp, Homo sapien
gtccagctaaaatcagggtccagct

SEQ ID NO: 4025836 - DNA, 25 bp, Homo sapien
tatcagggcgcttccagtcattgag

SEQ ID NO: 4025837 - DNA, 25 bp, Homo sapien
tctaccattccaagtagtctctgct

SEQ ID NO: 4025838 - DNA, 25 bp, Homo sapien
tgcatgccaccatacctgggttaat

SEQ ID NO: 4025839 - DNA, 25 bp, Homo sapien
gtgcatgccaccatacctgggttaa

SEQ ID NO: 4025840 - DNA, 25 bp, Homo sapien
atgccaccatacctgggttaatttt

SEQ ID NO: 4025841 - DNA, 25 bp, Homo sapien
gcatgccaccatacctgggttaatt

SEQ ID NO: 4025842 - DNA, 25 bp, Homo sapien
gggcccaattatagtcctcctgaaa

SEQ ID NO: 4025843 - DNA, 25 bp, Homo sapien
taatgcccatacaacaggtcactgt

SEQ ID NO: 4025844 - DNA, 25 bp, Homo sapien
ttctgagcctcccaccaatgttggt

SEQ ID NO: 4025845 - DNA, 25 bp, Homo sapien
gccagccaccggaaagttttatgta

SEQ ID NO: 4025846 - DNA, 25 bp, Homo sapien
ggtctcactatgtcgggtcgccgtg

SEQ ID NO: 4025847 - DNA, 25 bp, Homo sapien
cattatatcccaacgtagagctcag

SEQ ID NO: 4025848 - DNA, 25 bp, Homo sapien
cacaaaaataagtcgtacatcttca

SEQ ID NO: 4025849 - DNA, 25 bp, Homo sapien
cagtggtccctatcttggccgttag

SEQ ID NO: 4025850 - DNA, 25 bp, Homo sapien
tatattcctgatacatgcaatatgg

SEQ ID NO: 4025851 - DNA, 25 bp, Homo sapien
ccgtaaaaatatcatgctgagcaag

SEQ ID NO: 4025852 - DNA, 25 bp, Homo sapien
gccaaacacaagagaacatgttgtt

SEQ ID NO: 4025853 - DNA, 25 bp, Homo sapien
tgttatgatttcacgtacatgaaac

SEQ ID NO: 4025854 - DNA, 25 bp, Homo sapien
ggtacacagtataccttaatgcctg

SEQ ID NO: 4025855 - DNA, 25 bp, Homo sapien
ttaatgcctgcatccacggcctcac

SEQ ID NO: 4025856 - DNA, 25 bp, Homo sapien
tctggtacacagtataccttaatgc

SEQ ID NO: 4025857 - DNA, 25 bp, Homo sapien
aactgattctggtacacagtatacc

SEQ ID NO: 4025858 - DNA, 25 bp, Homo sapien
catgctgtttacatgaacgtaaagc

SEQ ID NO: 4025859 - DNA, 25 bp, Homo sapien
gctgtttacatgaacgtaaagcttc

SEQ ID NO: 4025860 - DNA, 25 bp, Homo sapien
tcatgctgtttacatgaacgtaaag

SEQ ID NO: 4025861 - DNA, 25 bp, Homo sapien
tgctgtttacatgaacgtaaagctt

SEQ ID NO: 4025862 - DNA, 25 bp, Homo sapien
gtctccaaagcaaacgagcaataca

SEQ ID NO: 4025863 - DNA, 25 bp, Homo sapien
caaagcaaacgagcaatacagctac

SEQ ID NO: 4025864 - DNA, 25 bp, Homo sapien
gaaactgtggtctccaaagcaaacg

SEQ ID NO: 4025865 - DNA, 25 bp, Homo sapien
gtggtctccaaagcaaacgagcaat

SEQ ID NO: 4025866 - DNA, 25 bp, Homo sapien
gatgcgggatgtttgcttcaagtac

SEQ ID NO: 4025867 - DNA, 25 bp, Homo sapien
cttctgatcttgttctatcgggttt

SEQ ID NO: 4025868 - DNA, 25 bp, Homo sapien
ttctatcgggtttaaagcagttgcc

SEQ ID NO: 4025869 - DNA, 25 bp, Homo sapien
aagcagttgccaaacaaacagaact

SEQ ID NO: 4025870 - DNA, 25 bp, Homo sapien
gatcttgttctatcgggtttaaagc

SEQ ID NO: 4025871 - DNA, 25 bp, Homo sapien
tggacttcacatgttacgaagcagt

SEQ ID NO: 4025872 - DNA, 25 bp, Homo sapien
tcacatgttacgaagcagttttttc

SEQ ID NO: 4025873 - DNA, 25 bp, Homo sapien
ctggacttcacatgttacgaagcag

SEQ ID NO: 4025874 - DNA, 25 bp, Homo sapien
catgttacgaagcagttttttcatg

SEQ ID NO: 4025875 - DNA, 25 bp, Homo sapien
tgatattttctcctggtaacaattc

SEQ ID NO: 4025876 - DNA, 25 bp, Homo sapien
cagcaagtagattgatattttctcc

SEQ ID NO: 4025877 - DNA, 25 bp, Homo sapien
cctccagcaagtagattgatatttt

SEQ ID NO: 4025878 - DNA, 25 bp, Homo sapien
atattttctcctggtaacaattcta

SEQ ID NO: 4025879 - DNA, 25 bp, Homo sapien
gcttgtattcctatgcagcctgtgg

SEQ ID NO: 4025880 - DNA, 25 bp, Homo sapien
gtggagctgactcgcccctgtgtct

SEQ ID NO: 4025881 - DNA, 25 bp, Homo sapien
ggcaaaccagaaagtcacagctaca

SEQ ID NO: 4025882 - DNA, 25 bp, Homo sapien
cacagctacagactttcagtggagc

SEQ ID NO: 4025883 - DNA, 25 bp, Homo sapien
caatccaccatacactgccgaaatt

SEQ ID NO: 4025884 - DNA, 25 bp, Homo sapien
tccaccatacactgccgaaattctg

SEQ ID NO: 4025885 - DNA, 25 bp, Homo sapien
attctgtctataccaactttgactg

SEQ ID NO: 4025886 - DNA, 25 bp, Homo sapien
tacactgccgaaattctgtctatac

SEQ ID NO: 4025887 - DNA, 25 bp, Homo sapien
aaggctgactactcccatctggatg

SEQ ID NO: 4025888 - DNA, 25 bp, Homo sapien
taatccctagagcatctgacaaggc

SEQ ID NO: 4025889 - DNA, 25 bp, Homo sapien
tctggatgtcctatatctagggcac

SEQ ID NO: 4025890 - DNA, 25 bp, Homo sapien
tgctaagctaggattctgacccagg

SEQ ID NO: 4025891 - DNA, 25 bp, Homo sapien
gaggtccaattagtccttctatcaa

SEQ ID NO: 4025892 - DNA, 25 bp, Homo sapien
acagcacatgctcagtgaagcaatt

SEQ ID NO: 4025893 - DNA, 25 bp, Homo sapien
cacatgctcagtgaagcaattacac

SEQ ID NO: 4025894 - DNA, 25 bp, Homo sapien
tctgttttatgtgctgcctgggtca

SEQ ID NO: 4025895 - DNA, 25 bp, Homo sapien
ggaagtgctactggtactctttttc

SEQ ID NO: 4025896 - DNA, 25 bp, Homo sapien
agtgctactggtactctttttcaag

SEQ ID NO: 4025897 - DNA, 25 bp, Homo sapien
tactggtactctttttcaagtcatg

SEQ ID NO: 4025898 - DNA, 25 bp, Homo sapien
gctactggtactctttttcaagtca

SEQ ID NO: 4025899 - DNA, 25 bp, Homo sapien
ataatttataacctcaggggaagag

SEQ ID NO: 4025900 - DNA, 25 bp, Homo sapien
taacctcaggggaagagtcagtcgg

SEQ ID NO: 4025901 - DNA, 25 bp, Homo sapien
agagtcagtcggtttggacagcaca

SEQ ID NO: 4025902 - DNA, 25 bp, Homo sapien
ggaagagtcagtcggtttggacagc

SEQ ID NO: 4025903 - DNA, 25 bp, Homo sapien
tggcactgttacacccagcattggc

SEQ ID NO: 4025904 - DNA, 25 bp, Homo sapien
tgcagcaatgaacacctatcatggc

SEQ ID NO: 4025905 - DNA, 25 bp, Homo sapien
caggtgttcctggtactccacagag

SEQ ID NO: 4025906 - DNA, 25 bp, Homo sapien
cagacaatgtttcgggctggcactg

SEQ ID NO: 4025907 - DNA, 25 bp, Homo sapien
atcagtttatgagaatggattccaa

SEQ ID NO: 4025908 - DNA, 25 bp, Homo sapien
aataacactgtagaatacttaacat

SEQ ID NO: 4025909 - DNA, 25 bp, Homo sapien
tatggtacactcataaatacaaatc

SEQ ID NO: 4025910 - DNA, 25 bp, Homo sapien
gaaacaaccttaatgcccaacagta

SEQ ID NO: 4025911 - DNA, 25 bp, Homo sapien
tcacaggactaatgagcaaatactc

SEQ ID NO: 4025912 - DNA, 25 bp, Homo sapien
tatggtacaagctcctctatctgga

SEQ ID NO: 4025913 - DNA, 25 bp, Homo sapien
aaaaccatgtgcctatgtatgctgc

SEQ ID NO: 4025914 - DNA, 25 bp, Homo sapien
tctatctggaggaagcaatgagtct

SEQ ID NO: 4025915 - DNA, 25 bp, Homo sapien
tgttgagccactgagttaatccaca

SEQ ID NO: 4025916 - DNA, 25 bp, Homo sapien
atagcttcaggacaatgaagttcac

SEQ ID NO: 4025917 - DNA, 25 bp, Homo sapien
ttttccaacaatagatgatgaccag

SEQ ID NO: 4025918 - DNA, 25 bp, Homo sapien
gatgatgaccagacagcaattccct

SEQ ID NO: 4025919 - DNA, 25 bp, Homo sapien
atcctaccctcatgatggagagtcg

SEQ ID NO: 4025920 - DNA, 25 bp, Homo sapien
tcaaagccatgtctcactgtcactg

SEQ ID NO: 4025921 - DNA, 25 bp, Homo sapien
ggagagtcgaatccgcgttagccag

SEQ ID NO: 4025922 - DNA, 25 bp, Homo sapien
aggctggcctgccaacaatcctacc

SEQ ID NO: 4025923 - DNA, 25 bp, Homo sapien
taacatcctgatcagggtttaatgt

SEQ ID NO: 4025924 - DNA, 25 bp, Homo sapien
agaagaagaacaagtctaagttggt

SEQ ID NO: 4025925 - DNA, 25 bp, Homo sapien
tgtctgcagttgtccactgactaac

SEQ ID NO: 4025926 - DNA, 25 bp, Homo sapien
ctgactaacatcctgatcagggttt

SEQ ID NO: 4025927 - DNA, 25 bp, Homo sapien
gcatctgtcttcaggagattgcgtg

SEQ ID NO: 4025928 - DNA, 25 bp, Homo sapien
cccagtggggttctcagcttagaaa

SEQ ID NO: 4025929 - DNA, 25 bp, Homo sapien
agattgcgtggaattgttgactggt

SEQ ID NO: 4025930 - DNA, 25 bp, Homo sapien
acagtgaattgtgcagcttcccata

SEQ ID NO: 4025931 - DNA, 25 bp, Homo sapien
ttcatatttaaaagacaatgacaac

SEQ ID NO: 4025932 - DNA, 25 bp, Homo sapien
agtttcatatttaaaagacaatgac

SEQ ID NO: 4025933 - DNA, 25 bp, Homo sapien
tatttaaaagacaatgacaacttca

SEQ ID NO: 4025934 - DNA, 25 bp, Homo sapien
catatttaaaagacaatgacaactt

SEQ ID NO: 4025935 - DNA, 25 bp, Homo sapien
ctcatgtgacttcttaatgctaaag

SEQ ID NO: 4025936 - DNA, 25 bp, Homo sapien
cttggtgctttactcatgtgacttc

SEQ ID NO: 4025937 - DNA, 25 bp, Homo sapien
tgtgacttcttaatgctaaagaaat

SEQ ID NO: 4025938 - DNA, 25 bp, Homo sapien
acttggtgctttactcatgtgactt

SEQ ID NO: 4025939 - DNA, 25 bp, Homo sapien
tgagggaggcatatcaaacatgtga

SEQ ID NO: 4025940 - DNA, 25 bp, Homo sapien
aatcattatgcttatgtattacaaa

SEQ ID NO: 4025941 - DNA, 25 bp, Homo sapien
agttttccaaatgcttgtcgaatac

SEQ ID NO: 4025942 - DNA, 25 bp, Homo sapien
cagttttccaaatgcttgtcgaata

SEQ ID NO: 4025943 - DNA, 25 bp, Homo sapien
agttgaacatggcaaacatcaacac

SEQ ID NO: 4025944 - DNA, 25 bp, Homo sapien
ttgaacatggcaaacatcaacacat

SEQ ID NO: 4025945 - DNA, 25 bp, Homo sapien
ctagttgaacatggcaaacatcaac

SEQ ID NO: 4025946 - DNA, 25 bp, Homo sapien
gttgaacatggcaaacatcaacaca

SEQ ID NO: 4025947 - DNA, 25 bp, Homo sapien
gcatgcctgcagacagatattcaca

SEQ ID NO: 4025948 - DNA, 25 bp, Homo sapien
ctaaaaggcctttgcaaaatttatg

SEQ ID NO: 4025949 - DNA, 25 bp, Homo sapien
tccaaagcccaagtcattaacagtt

SEQ ID NO: 4025950 - DNA, 25 bp, Homo sapien
aagacagttggagatagcgcccaca

SEQ ID NO: 4025951 - DNA, 25 bp, Homo sapien
attcttactcagaagtgcaaagaca

SEQ ID NO: 4025952 - DNA, 25 bp, Homo sapien
gtgtagagcacagcatactgaatgg

SEQ ID NO: 4025953 - DNA, 25 bp, Homo sapien
tgaacagccaggtcactgtgcacaa

SEQ ID NO: 4025954 - DNA, 25 bp, Homo sapien
aaacaacatggagcacactgaagcg

SEQ ID NO: 4025955 - DNA, 25 bp, Homo sapien
tgtaactggtaataagcgaagcagc

SEQ ID NO: 4025956 - DNA, 25 bp, Homo sapien
gcagctatggaattatacaaggcaa

SEQ ID NO: 4025957 - DNA, 25 bp, Homo sapien
tacaaggcaatccaatcaaacaaca

SEQ ID NO: 4025958 - DNA, 25 bp, Homo sapien
gattagggatgctcaccagaaagtg

SEQ ID NO: 4025959 - DNA, 25 bp, Homo sapien
gtttggatttgagaatacttgcaca

SEQ ID NO: 4025960 - DNA, 25 bp, Homo sapien
cctaaaagaaagactacaggttgag

SEQ ID NO: 4025961 - DNA, 25 bp, Homo sapien
tagacgccttctattcatagcctga

SEQ ID NO: 4025962 - DNA, 25 bp, Homo sapien
acaaagtcattacaattaaagactc

SEQ ID NO: 4025963 - DNA, 25 bp, Homo sapien
ttttgcattgtctacattgaacaca

SEQ ID NO: 4025964 - DNA, 25 bp, Homo sapien
gcattgtctacattgaacacatgat

SEQ ID NO: 4025965 - DNA, 25 bp, Homo sapien
attgtctacattgaacacatgattc

SEQ ID NO: 4025966 - DNA, 25 bp, Homo sapien
ttgcattgtctacattgaacacatg

SEQ ID NO: 4025967 - DNA, 25 bp, Homo sapien
gtttagggcacaagtcatttctccc

SEQ ID NO: 4025968 - DNA, 25 bp, Homo sapien
ttctcccaatattaacttataggca

SEQ ID NO: 4025969 - DNA, 25 bp, Homo sapien
tagggcacaagtcatttctcccaat

SEQ ID NO: 4025970 - DNA, 25 bp, Homo sapien
aatattaacttataggcagtctcca

SEQ ID NO: 4025971 - DNA, 25 bp, Homo sapien
ctctttttctttatgataacgcaag

SEQ ID NO: 4025972 - DNA, 25 bp, Homo sapien
gatgatggcagtttcgtatttatct

SEQ ID NO: 4025973 - DNA, 25 bp, Homo sapien
tgatggcagtttcgtatttatctgt

SEQ ID NO: 4025974 - DNA, 25 bp, Homo sapien
taacgcaagaatagtagtttagatg

SEQ ID NO: 4025975 - DNA, 25 bp, Homo sapien
actccaactacatggcattctggaa

SEQ ID NO: 4025976 - DNA, 25 bp, Homo sapien
catgtcattacacatgttaaagtcc

SEQ ID NO: 4025977 - DNA, 25 bp, Homo sapien
tgttaaagtccatagaatacataac

SEQ ID NO: 4025978 - DNA, 25 bp, Homo sapien
atcctgtatgatactggtaataggg

SEQ ID NO: 4025979 - DNA, 25 bp, Homo sapien
cagacaaagtccttaatttcttaca

SEQ ID NO: 4025980 - DNA, 25 bp, Homo sapien
gggcttaatcgatcttcctccctca

SEQ ID NO: 4025981 - DNA, 25 bp, Homo sapien
cattgcccaagctgtgccagaattc

SEQ ID NO: 4025982 - DNA, 25 bp, Homo sapien
tacatatcgatttaagggcctgaat

SEQ ID NO: 4025983 - DNA, 25 bp, Homo sapien
aaaaacacctggtttgcagccgtca

SEQ ID NO: 4025984 - DNA, 25 bp, Homo sapien
caatgtatagtcatgctaggatcca

SEQ ID NO: 4025985 - DNA, 25 bp, Homo sapien
ggtaccacaagtctggcaattctcc

SEQ ID NO: 4025986 - DNA, 25 bp, Homo sapien
taggatccaagctgccgagcaaaac

SEQ ID NO: 4025987 - DNA, 25 bp, Homo sapien
taatggccaataattgtgtactaaa

SEQ ID NO: 4025988 - DNA, 25 bp, Homo sapien
gataagcactctcatgcttaccaca

SEQ ID NO: 4025989 - DNA, 25 bp, Homo sapien
tactacaagctagctcttgggcttt

SEQ ID NO: 4025990 - DNA, 25 bp, Homo sapien
tctatctactgatggtctcttttga

SEQ ID NO: 4025991 - DNA, 25 bp, Homo sapien
gttacgtatgcctcagtaattggag

SEQ ID NO: 4025992 - DNA, 25 bp, Homo sapien
actgttacgtatgcctcagtaattg

SEQ ID NO: 4025993 - DNA, 25 bp, Homo sapien
aactgttacgtatgcctcagtaatt

SEQ ID NO: 4025994 - DNA, 25 bp, Homo sapien
acgtatgcctcagtaattggaggac

SEQ ID NO: 4025995 - DNA, 25 bp, Homo sapien
ctgaagcgttccccaatgctcctca

SEQ ID NO: 4025996 - DNA, 25 bp, Homo sapien
gaagcgcagccagctttggtgatga

SEQ ID NO: 4025997 - DNA, 25 bp, Homo sapien
cggagaagcgcagccagctttggtg

SEQ ID NO: 4025998 - DNA, 25 bp, Homo sapien
ttcatccactgattccccagaggcc

SEQ ID NO: 4025999 - DNA, 25 bp, Homo sapien
cactgatggaggagggacgtcttca

SEQ ID NO: 4026000 - DNA, 25 bp, Homo sapien
aaatgcaagatcagctacccaaaat

SEQ ID NO: 4026001 - DNA, 25 bp, Homo sapien
ctgcgtgagcgaaggtttctgagta

SEQ ID NO: 4026002 - DNA, 25 bp, Homo sapien
ctgctgcgtgagcgaaggtttctga

SEQ ID NO: 4026003 - DNA, 25 bp, Homo sapien
cgtgagcgaaggtttctgagtatga

SEQ ID NO: 4026004 - DNA, 25 bp, Homo sapien
gagcgaaggtttctgagtatgatct

SEQ ID NO: 4026005 - DNA, 25 bp, Homo sapien
gagggtaacatcgagccaccaaaag

SEQ ID NO: 4026006 - DNA, 25 bp, Homo sapien
aatatgagggtaacatcgagccacc

SEQ ID NO: 4026007 - DNA, 25 bp, Homo sapien
caccaaaagaatgcacttaacacat

SEQ ID NO: 4026008 - DNA, 25 bp, Homo sapien
tcgagccaccaaaagaatgcactta

SEQ ID NO: 4026009 - DNA, 25 bp, Homo sapien
tgctttgtaggtggcacataagtag

SEQ ID NO: 4026010 - DNA, 25 bp, Homo sapien
ctttgtaggtggcacataagtagag

SEQ ID NO: 4026011 - DNA, 25 bp, Homo sapien
gtgctttgtaggtggcacataagta

SEQ ID NO: 4026012 - DNA, 25 bp, Homo sapien
ttgcagatgagctaaatttgctaaa

SEQ ID NO: 4026013 - DNA, 25 bp, Homo sapien
tgtctcaactcctgaagcaatttgc

SEQ ID NO: 4026014 - DNA, 25 bp, Homo sapien
taactacattctacataatatccaa

SEQ ID NO: 4026015 - DNA, 25 bp, Homo sapien
agtgagggaaggcccaaaaatgcta

SEQ ID NO: 4026016 - DNA, 25 bp, Homo sapien
aaacactctatacataactacattc

SEQ ID NO: 4026017 - DNA, 25 bp, Homo sapien
tgagggaaggcccaaaaatgctaaa

SEQ ID NO: 4026018 - DNA, 25 bp, Homo sapien
gtacagcagccaagatattatccaa

SEQ ID NO: 4026019 - DNA, 25 bp, Homo sapien
gccaagatattatccaattgtttaa

SEQ ID NO: 4026020 - DNA, 25 bp, Homo sapien
atcatgtacagcagccaagatatta

SEQ ID NO: 4026021 - DNA, 25 bp, Homo sapien
tcattaagcacatcatgtacagcag

SEQ ID NO: 4026022 - DNA, 25 bp, Homo sapien
ctcccatgtagctggaattacggtc

SEQ ID NO: 4026023 - DNA, 25 bp, Homo sapien
catgtagctggaattacggtcatgt

SEQ ID NO: 4026024 - DNA, 25 bp, Homo sapien
tgtagctggaattacggtcatgtgc

SEQ ID NO: 4026025 - DNA, 25 bp, Homo sapien
cccatgtagctggaattacggtcat

SEQ ID NO: 4026026 - DNA, 25 bp, Homo sapien
cagcttattttctggttgctgaata

SEQ ID NO: 4026027 - DNA, 25 bp, Homo sapien
tctttcaactgctttacagtgacca

SEQ ID NO: 4026028 - DNA, 25 bp, Homo sapien
tcaactgctttacagtgaccaatct

SEQ ID NO: 4026029 - DNA, 25 bp, Homo sapien
aaattctttcaactgctttacagtg

SEQ ID NO: 4026030 - DNA, 25 bp, Homo sapien
tcccgggtgatcctccgaagaagat

SEQ ID NO: 4026031 - DNA, 25 bp, Homo sapien
acattgttaaccctcagctcttgcc

SEQ ID NO: 4026032 - DNA, 25 bp, Homo sapien
tcagggctggtcacattgttaaccc

SEQ ID NO: 4026033 - DNA, 25 bp, Homo sapien
tccgaccataagtattttccccaga

SEQ ID NO: 4026034 - DNA, 25 bp, Homo sapien
ctcatgtctttggtggctaaagcac

SEQ ID NO: 4026035 - DNA, 25 bp, Homo sapien
tatcatcgtgcctttgccgagacac

SEQ ID NO: 4026036 - DNA, 25 bp, Homo sapien
cgtggactctggtatcatcgtgcct

SEQ ID NO: 4026037 - DNA, 25 bp, Homo sapien
cattctgtatgtcagcgtggactct

SEQ ID NO: 4026038 - DNA, 25 bp, Homo sapien
gacaccacagctgaatttgaaggtt

SEQ ID NO: 4026039 - DNA, 25 bp, Homo sapien
ctcctcacatgacttgataataaga

SEQ ID NO: 4026040 - DNA, 25 bp, Homo sapien
cacatgacttgataataagaataat

SEQ ID NO: 4026041 - DNA, 25 bp, Homo sapien
tctcctcacatgacttgataataag

SEQ ID NO: 4026042 - DNA, 25 bp, Homo sapien
ccaaaattattcagatgaaccataa

SEQ ID NO: 4026043 - DNA, 25 bp, Homo sapien
agatccattccgtcagttacctgga

SEQ ID NO: 4026044 - DNA, 25 bp, Homo sapien
gatcaagatccattccgtcagttac

SEQ ID NO: 4026045 - DNA, 25 bp, Homo sapien
tcaccaaaattattcagatgaacca

SEQ ID NO: 4026046 - DNA, 25 bp, Homo sapien
gcctcccagccccgcggccctaggc

SEQ ID NO: 4026047 - DNA, 25 bp, Homo sapien
cctaggcctcggcccgcccgaggcg

SEQ ID NO: 4026048 - DNA, 25 bp, Homo sapien
tcccagccccgcggccctaggcctc

SEQ ID NO: 4026049 - DNA, 25 bp, Homo sapien
ctcggcccgcccgaggcggagcccg

SEQ ID NO: 4026050 - DNA, 25 bp, Homo sapien
agctccgcgaatagttggtgccgcc

SEQ ID NO: 4026051 - DNA, 25 bp, Homo sapien
aatagttggtgccgccgctgctcag

SEQ ID NO: 4026052 - DNA, 25 bp, Homo sapien
gtcattccagctccgcgaatagttg

SEQ ID NO: 4026053 - DNA, 25 bp, Homo sapien
ccgcgaatagttggtgccgccgctg

SEQ ID NO: 4026054 - DNA, 25 bp, Homo sapien
agggcaggacgagggagcggcgcgg

SEQ ID NO: 4026055 - DNA, 25 bp, Homo sapien
ggcaggacgagggagcggcgcggtg

SEQ ID NO: 4026056 - DNA, 25 bp, Homo sapien
cccgcagggcaggacgagggagcgg

SEQ ID NO: 4026057 - DNA, 25 bp, Homo sapien
gcagggcaggacgagggagcggcgc

SEQ ID NO: 4026058 - DNA, 25 bp, Homo sapien
tcttccagggccgtgcgcggcccac

SEQ ID NO: 4026059 - DNA, 25 bp, Homo sapien
cgacgctggggccccggaggacgag

SEQ ID NO: 4026060 - DNA, 25 bp, Homo sapien
ctcacgctcacacggccactgcttc

SEQ ID NO: 4026061 - DNA, 25 bp, Homo sapien
cgcgccgccgctgtcgtacggcaag

SEQ ID NO: 4026062 - DNA, 25 bp, Homo sapien
tcaacaaattaagccaggtgcggcg

SEQ ID NO: 4026063 - DNA, 25 bp, Homo sapien
aattaagccaggtgcggcgactcac

SEQ ID NO: 4026064 - DNA, 25 bp, Homo sapien
cactatacctggctcaaagatttct

SEQ ID NO: 4026065 - DNA, 25 bp, Homo sapien
ttaatcaacaaattaagccaggtgc

SEQ ID NO: 4026066 - DNA, 25 bp, Homo sapien
ggcatcttactgtgtcaccggcagg

SEQ ID NO: 4026067 - DNA, 25 bp, Homo sapien
ccttagggatctcggtcttgggcca

SEQ ID NO: 4026068 - DNA, 25 bp, Homo sapien
aatgaaattccggtgtgagcaggca

SEQ ID NO: 4026069 - DNA, 25 bp, Homo sapien
tttacacggcaagcagagtccaggc

SEQ ID NO: 4026070 - DNA, 25 bp, Homo sapien
gaaattgactgaaaaatggcctcca

SEQ ID NO: 4026071 - DNA, 25 bp, Homo sapien
aaattgactgaaaaatggcctccaa

SEQ ID NO: 4026072 - DNA, 25 bp, Homo sapien
agcttccggcaataaacaccgtccg

SEQ ID NO: 4026073 - DNA, 25 bp, Homo sapien
gtccgggaagtagccttcactcacc

SEQ ID NO: 4026074 - DNA, 25 bp, Homo sapien
cgggaagtagccttcactcacccag

SEQ ID NO: 4026075 - DNA, 25 bp, Homo sapien
caccgtccgggaagtagccttcact

SEQ ID NO: 4026076 - DNA, 25 bp, Homo sapien
acatcacatccaccagaccatctcc

SEQ ID NO: 4026077 - DNA, 25 bp, Homo sapien
ccttcagacgcatagccaaccgttc

SEQ ID NO: 4026078 - DNA, 25 bp, Homo sapien
ctccgccaactcctcagcgaacatg

SEQ ID NO: 4026079 - DNA, 25 bp, Homo sapien
ttgtggggtcctagggtctgacacc

SEQ ID NO: 4026080 - DNA, 25 bp, Homo sapien
ctggtacacaccaaggttgccccgg

SEQ ID NO: 4026081 - DNA, 25 bp, Homo sapien
ctcctcctcgggcccccagacgcct

SEQ ID NO: 4026082 - DNA, 25 bp, Homo sapien
gcccccagacgcctcagtgccccag

SEQ ID NO: 4026083 - DNA, 25 bp, Homo sapien
cctcgggcccccagacgcctcagtg

SEQ ID NO: 4026084 - DNA, 25 bp, Homo sapien
cctttctccctttgcctcctcctcg

SEQ ID NO: 4026085 - DNA, 25 bp, Homo sapien
gggcttgggcactcattgaggtctg

SEQ ID NO: 4026086 - DNA, 25 bp, Homo sapien
agggcttgggcactcattgaggtct

SEQ ID NO: 4026087 - DNA, 25 bp, Homo sapien
taatgggaagatggagtgatttccc

SEQ ID NO: 4026088 - DNA, 25 bp, Homo sapien
aatgggaagatggagtgatttccca

SEQ ID NO: 4026089 - DNA, 25 bp, Homo sapien
cagctgtctcggatctgagcatccc

SEQ ID NO: 4026090 - DNA, 25 bp, Homo sapien
catcccggttcaggaagtagttgcc

SEQ ID NO: 4026091 - DNA, 25 bp, Homo sapien
caggttaaagggtgtgatccgaaca

SEQ ID NO: 4026092 - DNA, 25 bp, Homo sapien
caggaagtagttgccatcggcatca

SEQ ID NO: 4026093 - DNA, 25 bp, Homo sapien
catcgctatccaaagagtgtttgcc

SEQ ID NO: 4026094 - DNA, 25 bp, Homo sapien
caagatgtcatatttgctggacccc

SEQ ID NO: 4026095 - DNA, 25 bp, Homo sapien
cctctgaggccaagatgtcatattt

SEQ ID NO: 4026096 - DNA, 25 bp, Homo sapien
tttgcctttaaagcggctcccagga

SEQ ID NO: 4026097 - DNA, 25 bp, Homo sapien
ctcccacgccttggaaggtcacttt

SEQ ID NO: 4026098 - DNA, 25 bp, Homo sapien
tcatctcccacgccttggaaggtca

SEQ ID NO: 4026099 - DNA, 25 bp, Homo sapien
atctcccacgccttggaaggtcact

SEQ ID NO: 4026100 - DNA, 25 bp, Homo sapien
ctcctcatctcccacgccttggaag

SEQ ID NO: 4026101 - DNA, 25 bp, Homo sapien
gacggggcaaagaggtgtttctcaa

SEQ ID NO: 4026102 - DNA, 25 bp, Homo sapien
acggggcaaagaggtgtttctcaag

SEQ ID NO: 4026103 - DNA, 25 bp, Homo sapien
tgggtctagcatccgcgagttaaac

SEQ ID NO: 4026104 - DNA, 25 bp, Homo sapien
tctgtgacaggtacagtttgggagc

SEQ ID NO: 4026105 - DNA, 25 bp, Homo sapien
tgggagcggagggagcacaaaagca

SEQ ID NO: 4026106 - DNA, 25 bp, Homo sapien
gggactcgccaacagacgcagcaca

SEQ ID NO: 4026107 - DNA, 25 bp, Homo sapien
cgccatcacccggaagaggactgcg

SEQ ID NO: 4026108 - DNA, 25 bp, Homo sapien
tacatccggggcacccggccgccat

SEQ ID NO: 4026109 - DNA, 25 bp, Homo sapien
tgggaatccgcggaaggcgaggtgg

SEQ ID NO: 4026110 - DNA, 25 bp, Homo sapien
atgcttgcgccagggctacatccgg

SEQ ID NO: 4026111 - DNA, 25 bp, Homo sapien
ccctatgcctttaccatcctgaccc

SEQ ID NO: 4026112 - DNA, 25 bp, Homo sapien
agaaccctatgcctttaccatcctg

SEQ ID NO: 4026113 - DNA, 25 bp, Homo sapien
tgcagaaccctatgcctttaccatc

SEQ ID NO: 4026114 - DNA, 25 bp, Homo sapien
aaccctatgcctttaccatcctgac

SEQ ID NO: 4026115 - DNA, 25 bp, Homo sapien
taagaggtacctacttgccaagaca

SEQ ID NO: 4026116 - DNA, 25 bp, Homo sapien
aaagctaagaggtacctacttgcca

SEQ ID NO: 4026117 - DNA, 25 bp, Homo sapien
gctaagaggtacctacttgccaaga

SEQ ID NO: 4026118 - DNA, 25 bp, Homo sapien
agctaagaggtacctacttgccaag

SEQ ID NO: 4026119 - DNA, 25 bp, Homo sapien
gaaaacaggcccaggtacaacagca

SEQ ID NO: 4026120 - DNA, 25 bp, Homo sapien
tggagctcaagggaagacccttacc

SEQ ID NO: 4026121 - DNA, 25 bp, Homo sapien
caagggaagacccttacccagatag

SEQ ID NO: 4026122 - DNA, 25 bp, Homo sapien
acattgggttccaccccctggagct

SEQ ID NO: 4026123 - DNA, 25 bp, Homo sapien
cagagacagaagagaatgtaaacat

SEQ ID NO: 4026124 - DNA, 25 bp, Homo sapien
tacaggagcattatggaaggagaac

SEQ ID NO: 4026125 - DNA, 25 bp, Homo sapien
cctgggatgacaacgggccattcag

SEQ ID NO: 4026126 - DNA, 25 bp, Homo sapien
tacacaattacaacacaggtccaga

SEQ ID NO: 4026127 - DNA, 25 bp, Homo sapien
tgtcctgcccgtgtagggatcagca

SEQ ID NO: 4026128 - DNA, 25 bp, Homo sapien
ccatctgcctttcgacgcagcgaaa

SEQ ID NO: 4026129 - DNA, 25 bp, Homo sapien
aacccaagggggtgctattgccagt

SEQ ID NO: 4026130 - DNA, 25 bp, Homo sapien
ggtgctattgccagtgggtgaggga

SEQ ID NO: 4026131 - DNA, 25 bp, Homo sapien
cagcgaaagcttccggccttgagcc

SEQ ID NO: 4026132 - DNA, 25 bp, Homo sapien
ttgccgccggcgctcctcgtggatg

SEQ ID NO: 4026133 - DNA, 25 bp, Homo sapien
ctcgtggatggcccgggacccatgc

SEQ ID NO: 4026134 - DNA, 25 bp, Homo sapien
ccgggacccatgcagtcgccgtgag

SEQ ID NO: 4026135 - DNA, 25 bp, Homo sapien
atgcagtcgccgtgagggccgatac

SEQ ID NO: 4026136 - DNA, 25 bp, Homo sapien
tgcattctcccgctcaatcagtgct

SEQ ID NO: 4026137 - DNA, 25 bp, Homo sapien
cgtttcccgccacttcttgagctgg

SEQ ID NO: 4026138 - DNA, 25 bp, Homo sapien
gcgtttcccgccacttcttgagctg

SEQ ID NO: 4026139 - DNA, 25 bp, Homo sapien
gtgcttctgtcaccggcagattggt

SEQ ID NO: 4026140 - DNA, 25 bp, Homo sapien
tcatacatgccttggcaggagcgca

SEQ ID NO: 4026141 - DNA, 25 bp, Homo sapien
ctggggcaggttacgcagctgctcc

SEQ ID NO: 4026142 - DNA, 25 bp, Homo sapien
tgagcccagcgtgtggcgcagcagg

SEQ ID NO: 4026143 - DNA, 25 bp, Homo sapien
tgctccatggtctcatacatgcctt

SEQ ID NO: 4026144 - DNA, 25 bp, Homo sapien
aatatgacagaacccctggtagcca

SEQ ID NO: 4026145 - DNA, 25 bp, Homo sapien
tcctgatcaggatagactcacagcc

SEQ ID NO: 4026146 - DNA, 25 bp, Homo sapien
tggtcagacccaagatctcagcctg

SEQ ID NO: 4026147 - DNA, 25 bp, Homo sapien
tgaggccctgtgaaagtacatgagc

SEQ ID NO: 4026148 - DNA, 25 bp, Homo sapien
gaagatgcacatgaaccactccgtc

SEQ ID NO: 4026149 - DNA, 25 bp, Homo sapien
tagagcacagggtcaatgcgctgcc

SEQ ID NO: 4026150 - DNA, 25 bp, Homo sapien
cactccgtcatgtagagcacagggt

SEQ ID NO: 4026151 - DNA, 25 bp, Homo sapien
cccggcgcaggagtgcaaaaaagat

SEQ ID NO: 4026152 - DNA, 25 bp, Homo sapien
ctgcaggtgggacaagccatgagaa

SEQ ID NO: 4026153 - DNA, 25 bp, Homo sapien
ccccatcaggggagaactggccggc

SEQ ID NO: 4026154 - DNA, 25 bp, Homo sapien
ccatcaggggagaactggccggccc

SEQ ID NO: 4026155 - DNA, 25 bp, Homo sapien
agcctggaggaaacgccacagcccc

SEQ ID NO: 4026156 - DNA, 25 bp, Homo sapien
tgcagcctggaggaaacgccacagc

SEQ ID NO: 4026157 - DNA, 25 bp, Homo sapien
cactgtagtaacctgggaggtactt

SEQ ID NO: 4026158 - DNA, 25 bp, Homo sapien
tagtaacctgggaggtacttgtcgc

SEQ ID NO: 4026159 - DNA, 25 bp, Homo sapien
cagccctgcactgtagtaacctggg

SEQ ID NO: 4026160 - DNA, 25 bp, Homo sapien
taacctgggaggtacttgtcgcaga

SEQ ID NO: 4026161 - DNA, 25 bp, Homo sapien
agaagagcaagaacaaggaggaggg

SEQ ID NO: 4026162 - DNA, 25 bp, Homo sapien
cactgtagggtgagatcccccctgc

SEQ ID NO: 4026163 - DNA, 25 bp, Homo sapien
ccggtagatggtgtaggccttcagg

SEQ ID NO: 4026164 - DNA, 25 bp, Homo sapien
ctgggcctggcagtaaccctcgtca

SEQ ID NO: 4026165 - DNA, 25 bp, Homo sapien
gtaaccctcgtcaggccggtagatg

SEQ ID NO: 4026166 - DNA, 25 bp, Homo sapien
ggccttcaggattcggtacaggtcc

SEQ ID NO: 4026167 - DNA, 25 bp, Homo sapien
gccttatcggtctcactggatttca

SEQ ID NO: 4026168 - DNA, 25 bp, Homo sapien
aaatgtctttgtcaccccaaagcag

SEQ ID NO: 4026169 - DNA, 25 bp, Homo sapien
cgcctttggctacatactccacatg

SEQ ID NO: 4026170 - DNA, 25 bp, Homo sapien
gaataaaatctgtaccctagatctg

SEQ ID NO: 4026171 - DNA, 25 bp, Homo sapien
tcgagcagcaaacatctcgtggaaa

SEQ ID NO: 4026172 - DNA, 25 bp, Homo sapien
ccttctcaatcacatccagccactt

SEQ ID NO: 4026173 - DNA, 25 bp, Homo sapien
gcagcaaacatctcgtggaaaggga

SEQ ID NO: 4026174 - DNA, 25 bp, Homo sapien
acatctcgtggaaagggaactggcg

SEQ ID NO: 4026175 - DNA, 25 bp, Homo sapien
tccttgctattagacaggtactgcc

SEQ ID NO: 4026176 - DNA, 25 bp, Homo sapien
acaggtactgccaggctttggctct

SEQ ID NO: 4026177 - DNA, 25 bp, Homo sapien
aggggatccccttccggcagcgcag

SEQ ID NO: 4026178 - DNA, 25 bp, Homo sapien
agaagttccttgctattagacaggt

SEQ ID NO: 4026179 - DNA, 25 bp, Homo sapien
tcccagttactgaacatgtccagcc

SEQ ID NO: 4026180 - DNA, 25 bp, Homo sapien
ccacgtccacgggaatggagctctc

SEQ ID NO: 4026181 - DNA, 25 bp, Homo sapien
agccatttgagctcccgctgccgag

SEQ ID NO: 4026182 - DNA, 25 bp, Homo sapien
ttctggaatcgccgtgacagccact

SEQ ID NO: 4026183 - DNA, 25 bp, Homo sapien
tgtgagctgccaaacatcaggatgt

SEQ ID NO: 4026184 - DNA, 25 bp, Homo sapien
gaaataacacacagcgaagtgccca

SEQ ID NO: 4026185 - DNA, 25 bp, Homo sapien
gactacaactagttcagcaggacca

SEQ ID NO: 4026186 - DNA, 25 bp, Homo sapien
tcagaggttcatactcatggtgccc

SEQ ID NO: 4026187 - DNA, 25 bp, Homo sapien
tgaacgctgcgaaagtaacatggat

SEQ ID NO: 4026188 - DNA, 25 bp, Homo sapien
accagagaggctatgcgcaggccaa

SEQ ID NO: 4026189 - DNA, 25 bp, Homo sapien
cagcctgctattgaggagagagcca

SEQ ID NO: 4026190 - DNA, 25 bp, Homo sapien
gcaaagaaacagcacccggcatagt

SEQ ID NO: 4026191 - DNA, 25 bp, Homo sapien
ctcaggccccggagagaactaggaa

SEQ ID NO: 4026192 - DNA, 25 bp, Homo sapien
cagatgattggctccttgaaaggac

SEQ ID NO: 4026193 - DNA, 25 bp, Homo sapien
gagatctctaggctaaacccgaggt

SEQ ID NO: 4026194 - DNA, 25 bp, Homo sapien
cccaggagatgctgtaggctgactg

SEQ ID NO: 4026195 - DNA, 25 bp, Homo sapien
ggcacacaacccatcaaaggcaagg

SEQ ID NO: 4026196 - DNA, 25 bp, Homo sapien
gggaagccactagctcaagggcaca

SEQ ID NO: 4026197 - DNA, 25 bp, Homo sapien
ggtctgaaactccactaacatgcca

SEQ ID NO: 4026198 - DNA, 25 bp, Homo sapien
gcacctcaggatgctcaagacacgg

SEQ ID NO: 4026199 - DNA, 25 bp, Homo sapien
atggagctcacatcatccgccaagg

SEQ ID NO: 4026200 - DNA, 25 bp, Homo sapien
acatcatccgccaaggactccaagg

SEQ ID NO: 4026201 - DNA, 25 bp, Homo sapien
atacttgtccgtcttgcgcagggcc

SEQ ID NO: 4026202 - DNA, 25 bp, Homo sapien
aggaagccatacttgtccgtcttgc

SEQ ID NO: 4026203 - DNA, 25 bp, Homo sapien
gaggctcacggagtccaagtaactc

SEQ ID NO: 4026204 - DNA, 25 bp, Homo sapien
gaggcccagagatgccaggtcccag

SEQ ID NO: 4026205 - DNA, 25 bp, Homo sapien
gtccaagtaactcagcgtgtccggg

SEQ ID NO: 4026206 - DNA, 25 bp, Homo sapien
tcacggagtccaagtaactcagcgt

SEQ ID NO: 4026207 - DNA, 25 bp, Homo sapien
gacagctaccggagcctcacaagtc

SEQ ID NO: 4026208 - DNA, 25 bp, Homo sapien
atgctgatgttgctgcggcagctcc

SEQ ID NO: 4026209 - DNA, 25 bp, Homo sapien
gctggggtcacggtcacgacagcta

SEQ ID NO: 4026210 - DNA, 25 bp, Homo sapien
gtcacggtcacgacagctaccggag

SEQ ID NO: 4026211 - DNA, 25 bp, Homo sapien
agggcaccaggagccgttctggaag

SEQ ID NO: 4026212 - DNA, 25 bp, Homo sapien
aggccactgtggttcccggcttggg

SEQ ID NO: 4026213 - DNA, 25 bp, Homo sapien
cgtgcagtcactcctgaggccactg

SEQ ID NO: 4026214 - DNA, 25 bp, Homo sapien
cttgtcctgatgcactccgtgcagt

SEQ ID NO: 4026215 - DNA, 25 bp, Homo sapien
cccctgcggccagagccctcgatgt

SEQ ID NO: 4026216 - DNA, 25 bp, Homo sapien
agagccctcgatgtctcaactccag

SEQ ID NO: 4026217 - DNA, 25 bp, Homo sapien
gagtctgcccctgcggccagagccc

SEQ ID NO: 4026218 - DNA, 25 bp, Homo sapien
ctcctctgtcttcggcgagtctgcc

SEQ ID NO: 4026219 - DNA, 25 bp, Homo sapien
gattccgggccggaggggagctgcg

SEQ ID NO: 4026220 - DNA, 25 bp, Homo sapien
gggccggagcagaggtctcggccga

SEQ ID NO: 4026221 - DNA, 25 bp, Homo sapien
ggagctgcggctttggggcttcggg

SEQ ID NO: 4026222 - DNA, 25 bp, Homo sapien
gcaccaccaccgtgctgcccgtgac

SEQ ID NO: 4026223 - DNA, 25 bp, Homo sapien
ctggaggtcccggagccaccaccac

SEQ ID NO: 4026224 - DNA, 25 bp, Homo sapien
gagccaccaccacgacgggcccggc

SEQ ID NO: 4026225 - DNA, 25 bp, Homo sapien
cggagccaccaccacgacgggcccg

SEQ ID NO: 4026226 - DNA, 25 bp, Homo sapien
aggtcccggagccaccaccacgacg

SEQ ID NO: 4026227 - DNA, 25 bp, Homo sapien
caggggcgccgtgcccgtctccatg

SEQ ID NO: 4026228 - DNA, 25 bp, Homo sapien
tccatggccgcgggccgcccctcac

SEQ ID NO: 4026229 - DNA, 25 bp, Homo sapien
ggggcgccgtgcccgtctccatggc

SEQ ID NO: 4026230 - DNA, 25 bp, Homo sapien
ccgtctccatggccgcgggccgccc

SEQ ID NO: 4026231 - DNA, 25 bp, Homo sapien
acacgccgcagagccggctccgcgc

SEQ ID NO: 4026232 - DNA, 25 bp, Homo sapien
cgttccacgcctgcgcgcggactgg

SEQ ID NO: 4026233 - DNA, 25 bp, Homo sapien
gtctcggcgttccacgcctgcgcgc

SEQ ID NO: 4026234 - DNA, 25 bp, Homo sapien
cagcgtctcggcgttccacgcctgc

SEQ ID NO: 4026235 - DNA, 25 bp, Homo sapien
cacaaatgaatggatgcggcctgga

SEQ ID NO: 4026236 - DNA, 25 bp, Homo sapien
cagatcaagaacatgtgggcggcct

SEQ ID NO: 4026237 - DNA, 25 bp, Homo sapien
tatgggcggcgccttcagagtgtct

SEQ ID NO: 4026238 - DNA, 25 bp, Homo sapien
aaaagcgagtgtctgggaggccaat

SEQ ID NO: 4026239 - DNA, 25 bp, Homo sapien
actgaaggcggagccgaggtaaggc

SEQ ID NO: 4026240 - DNA, 25 bp, Homo sapien
gattggacaagaggccgactgaagg

SEQ ID NO: 4026241 - DNA, 25 bp, Homo sapien
gactccggaagacagtgatgcggtc

SEQ ID NO: 4026242 - DNA, 25 bp, Homo sapien
tgcggtcggagattgtgcaggcccc

SEQ ID NO: 4026243 - DNA, 25 bp, Homo sapien
gggcgtctgactgctcgccctgggc

SEQ ID NO: 4026244 - DNA, 25 bp, Homo sapien
gctctgctgcatttgggcctgcatc

SEQ ID NO: 4026245 - DNA, 25 bp, Homo sapien
agagggcgtctgactgctcgccctg

SEQ ID NO: 4026246 - DNA, 25 bp, Homo sapien
tcagagggcgtctgactgctcgccc

SEQ ID NO: 4026247 - DNA, 25 bp, Homo sapien
ctgtgcagggcgagattgcaggcgg

SEQ ID NO: 4026248 - DNA, 25 bp, Homo sapien
cagggcgagattgcaggcggtgacc

SEQ ID NO: 4026249 - DNA, 25 bp, Homo sapien
caggcggtgacctggcgaagccaga

SEQ ID NO: 4026250 - DNA, 25 bp, Homo sapien
agattgcaggcggtgacctggcgaa

SEQ ID NO: 4026251 - DNA, 25 bp, Homo sapien
atctctgtggcgctctggcgggaaa

SEQ ID NO: 4026252 - DNA, 25 bp, Homo sapien
gcttctcggtgtccgccagaggcag

SEQ ID NO: 4026253 - DNA, 25 bp, Homo sapien
ggatcagcttctcggtgtccgccag

SEQ ID NO: 4026254 - DNA, 25 bp, Homo sapien
tcttcgtctttctcgcggatcagct

SEQ ID NO: 4026255 - DNA, 25 bp, Homo sapien
ctaggaggcggagccagttccttga

SEQ ID NO: 4026256 - DNA, 25 bp, Homo sapien
aatcaggagcgggacctgaggttgt

SEQ ID NO: 4026257 - DNA, 25 bp, Homo sapien
tccttgaggttagggccggaggcaa

SEQ ID NO: 4026258 - DNA, 25 bp, Homo sapien
gacctgaggttgtgggtgaggccca

SEQ ID NO: 4026259 - DNA, 25 bp, Homo sapien
tctgcaccagcatccgtcgcaggtt

SEQ ID NO: 4026260 - DNA, 25 bp, Homo sapien
tcaggaaatcgcagtgatgtgggtt

SEQ ID NO: 4026261 - DNA, 25 bp, Homo sapien
gtgcgtcacctctttcaggtcctgc

SEQ ID NO: 4026262 - DNA, 25 bp, Homo sapien
ggtagccctcgtagagcagatcgtg

SEQ ID NO: 4026263 - DNA, 25 bp, Homo sapien
ccacgactgcaaaagggatgctttc

SEQ ID NO: 4026264 - DNA, 25 bp, Homo sapien
ctcgcatgatcccacgactgcaaaa

SEQ ID NO: 4026265 - DNA, 25 bp, Homo sapien
aggagtagcggcgtcccctcaccgg

SEQ ID NO: 4026266 - DNA, 25 bp, Homo sapien
tgatcccacgactgcaaaagggatg

SEQ ID NO: 4026267 - DNA, 25 bp, Homo sapien
ccattggctcacacggcagaaactt

SEQ ID NO: 4026268 - DNA, 25 bp, Homo sapien
gggttcaccattggctcacacggca

SEQ ID NO: 4026269 - DNA, 25 bp, Homo sapien
ggcaggggttcaccattggctcaca

SEQ ID NO: 4026270 - DNA, 25 bp, Homo sapien
ttcaccattggctcacacggcagaa

SEQ ID NO: 4026271 - DNA, 25 bp, Homo sapien
tgcccggcctgccttccttctttgt

SEQ ID NO: 4026272 - DNA, 25 bp, Homo sapien
ccaccgtgcccggcctgccttcctt

SEQ ID NO: 4026273 - DNA, 25 bp, Homo sapien
accgtgcccggcctgccttccttct

SEQ ID NO: 4026274 - DNA, 25 bp, Homo sapien
cgtgcccggcctgccttccttcttt

SEQ ID NO: 4026275 - DNA, 25 bp, Homo sapien
tcagagtcacattcggggaactggt

SEQ ID NO: 4026276 - DNA, 25 bp, Homo sapien
tcttcatcagagtcacattcgggga

SEQ ID NO: 4026277 - DNA, 25 bp, Homo sapien
aactggtagatgtggatctcctctt

SEQ ID NO: 4026278 - DNA, 25 bp, Homo sapien
tcctcttccttcaactgatcccgga

SEQ ID NO: 4026279 - DNA, 25 bp, Homo sapien
tatagagacagtgtgaaacgggcca

SEQ ID NO: 4026280 - DNA, 25 bp, Homo sapien
gaaatcaggtttggcttcacatggg

SEQ ID NO: 4026281 - DNA, 25 bp, Homo sapien
gacagacatttcatgaccagagaca

SEQ ID NO: 4026282 - DNA, 25 bp, Homo sapien
catggctatgctggcggcttaccac

SEQ ID NO: 4026283 - DNA, 25 bp, Homo sapien
ccaatgactgggatgatgttgactt

SEQ ID NO: 4026284 - DNA, 25 bp, Homo sapien
catccgctttgccaatgactgggat

SEQ ID NO: 4026285 - DNA, 25 bp, Homo sapien
gggcatcagagcatccgctttgcca

SEQ ID NO: 4026286 - DNA, 25 bp, Homo sapien
cgctttgccaatgactgggatgatg

SEQ ID NO: 4026287 - DNA, 25 bp, Homo sapien
gcacccagggattggtcattgccca

SEQ ID NO: 4026288 - DNA, 25 bp, Homo sapien
ctgcacccagggattggtcattgcc

SEQ ID NO: 4026289 - DNA, 25 bp, Homo sapien
agccctccctaaatgcgccagcccc

SEQ ID NO: 4026290 - DNA, 25 bp, Homo sapien
ccagggattggtcattgcccagcct

SEQ ID NO: 4026291 - DNA, 25 bp, Homo sapien
tcgggagtcctggatgttcttccgg

SEQ ID NO: 4026292 - DNA, 25 bp, Homo sapien
gtactgctcaaattgctcctcgatg

SEQ ID NO: 4026293 - DNA, 25 bp, Homo sapien
tctcatccctaaggtactgctcaaa

SEQ ID NO: 4026294 - DNA, 25 bp, Homo sapien
gatgaatttcaccaccggaagccag

SEQ ID NO: 4026295 - DNA, 25 bp, Homo sapien
cacaagggtcagcttcactttcaca

SEQ ID NO: 4026296 - DNA, 25 bp, Homo sapien
caatggccagggtctgtgtcaagcg

SEQ ID NO: 4026297 - DNA, 25 bp, Homo sapien
aggtgtgtccacaagggtcagcttc

SEQ ID NO: 4026298 - DNA, 25 bp, Homo sapien
cttcctcaatctctacgccccggcg

SEQ ID NO: 4026299 - DNA, 25 bp, Homo sapien
acctggcgatcctcatagaggttgg

SEQ ID NO: 4026300 - DNA, 25 bp, Homo sapien
ggtggatttccctaggcctgactcc

SEQ ID NO: 4026301 - DNA, 25 bp, Homo sapien
gggtggatttccctaggcctgactc

SEQ ID NO: 4026302 - DNA, 25 bp, Homo sapien
ctggcacctggcgatcctcatagag

SEQ ID NO: 4026303 - DNA, 25 bp, Homo sapien
caaaccccttcttgacagacttgcg

SEQ ID NO: 4026304 - DNA, 25 bp, Homo sapien
tcttgacagacttgcggtgcagctg

SEQ ID NO: 4026305 - DNA, 25 bp, Homo sapien
caccattagcgtgaagtcaaacccc

SEQ ID NO: 4026306 - DNA, 25 bp, Homo sapien
ggagggcagcaaaacccacgtactc

SEQ ID NO: 4026307 - DNA, 25 bp, Homo sapien
tgcacctgccgtctctccccacttc

SEQ ID NO: 4026308 - DNA, 25 bp, Homo sapien
cactgcacctgccgtctctccccac

SEQ ID NO: 4026309 - DNA, 25 bp, Homo sapien
ccccacttcctctggtggggcagga

SEQ ID NO: 4026310 - DNA, 25 bp, Homo sapien
tccccacttcctctggtggggcagg

SEQ ID NO: 4026311 - DNA, 25 bp, Homo sapien
gtagctccatcatcgtggtgagaca

SEQ ID NO: 4026312 - DNA, 25 bp, Homo sapien
gattccaagtcccactgtagctcca

SEQ ID NO: 4026313 - DNA, 25 bp, Homo sapien
cttcacacatctggattccaagtcc

SEQ ID NO: 4026314 - DNA, 25 bp, Homo sapien
aagtcccactgtagctccatcatcg

SEQ ID NO: 4026315 - DNA, 25 bp, Homo sapien
gctaataaatgtgaattaatgcata

SEQ ID NO: 4026316 - DNA, 25 bp, Homo sapien
tcttggcttagcactaagatgctaa

SEQ ID NO: 4026317 - DNA, 25 bp, Homo sapien
ggctgaagacacctccagacactct

SEQ ID NO: 4026318 - DNA, 25 bp, Homo sapien
tactgggatcttgctcctagggcct

SEQ ID NO: 4026319 - DNA, 25 bp, Homo sapien
tgcctttgcgtcctctgtgactcag

SEQ ID NO: 4026320 - DNA, 25 bp, Homo sapien
ctcggactctgcgtcaatgacttta

SEQ ID NO: 4026321 - DNA, 25 bp, Homo sapien
tacgtctctgtctctagcggctaat

SEQ ID NO: 4026322 - DNA, 25 bp, Homo sapien
gcggctaatctttggctccccttat

SEQ ID NO: 4026323 - DNA, 25 bp, Homo sapien
cctgcctcggtctccccagcccagc

SEQ ID NO: 4026324 - DNA, 25 bp, Homo sapien
cggtctccccagcccagcccccatt

SEQ ID NO: 4026325 - DNA, 25 bp, Homo sapien
ctgcctcggtctccccagcccagcc

SEQ ID NO: 4026326 - DNA, 25 bp, Homo sapien
tctccccagcccagcccccattcca

SEQ ID NO: 4026327 - DNA, 25 bp, Homo sapien
gctttgtttcccacgtctcggcgcc

SEQ ID NO: 4026328 - DNA, 25 bp, Homo sapien
cgctttgtttcccacgtctcggcgc

SEQ ID NO: 4026329 - DNA, 25 bp, Homo sapien
ccgctttgtttcccacgtctcggcg

SEQ ID NO: 4026330 - DNA, 25 bp, Homo sapien
cgggcctcaccacccagctgcagcc

SEQ ID NO: 4026331 - DNA, 25 bp, Homo sapien
tcgggcctcaccacccagctgcagc

SEQ ID NO: 4026332 - DNA, 25 bp, Homo sapien
cagttgctaagctcaaaaaccttga

SEQ ID NO: 4026333 - DNA, 25 bp, Homo sapien
tccagtctaggcctcgcttctgagc

SEQ ID NO: 4026334 - DNA, 25 bp, Homo sapien
acttctgtcacctgggtatgagcca

SEQ ID NO: 4026335 - DNA, 25 bp, Homo sapien
tccagatatgtcaagaagccgtgac

SEQ ID NO: 4026336 - DNA, 25 bp, Homo sapien
cgcctttggcggcagctcgtgcctg

SEQ ID NO: 4026337 - DNA, 25 bp, Homo sapien
ccggactgcggacgcgcctttggcg

SEQ ID NO: 4026338 - DNA, 25 bp, Homo sapien
agcggccctacgcttgcgccgactg

SEQ ID NO: 4026339 - DNA, 25 bp, Homo sapien
tgcggcacgcgcttcgctcagagct

SEQ ID NO: 4026340 - DNA, 25 bp, Homo sapien
tgggagacagggagaatcccctgcc

SEQ ID NO: 4026341 - DNA, 25 bp, Homo sapien
gcctgtatatttgcgccggctgcgg

SEQ ID NO: 4026342 - DNA, 25 bp, Homo sapien
tccctcggcccgtgttagtgaataa

SEQ ID NO: 4026343 - DNA, 25 bp, Homo sapien
ccaccgagcgttgcccggagtgtga

SEQ ID NO: 4026344 - DNA, 25 bp, Homo sapien
cccggcaatggttggggctacagtt

SEQ ID NO: 4026345 - DNA, 25 bp, Homo sapien
cctagggaatccagcccatcataaa

SEQ ID NO: 4026346 - DNA, 25 bp, Homo sapien
ggtactatgagaggcctagggaatc

SEQ ID NO: 4026347 - DNA, 25 bp, Homo sapien
ctacaggcatagaggcccggcaatg

SEQ ID NO: 4026348 - DNA, 25 bp, Homo sapien
gcattccagggtcattagagcttgc

SEQ ID NO: 4026349 - DNA, 25 bp, Homo sapien
cattccagggtcattagagcttgca

SEQ ID NO: 4026350 - DNA, 25 bp, Homo sapien
attccagggtcattagagcttgcaa

SEQ ID NO: 4026351 - DNA, 25 bp, Homo sapien
cataactcattgaaacctcacgacc

SEQ ID NO: 4026352 - DNA, 25 bp, Homo sapien
ataactcattgaaacctcacgaccc

SEQ ID NO: 4026353 - DNA, 25 bp, Homo sapien
cacataactcattgaaacctcacga

SEQ ID NO: 4026354 - DNA, 25 bp, Homo sapien
acataactcattgaaacctcacgac

SEQ ID NO: 4026355 - DNA, 25 bp, Homo sapien
gaagctgaagtgcagaacgattaat

SEQ ID NO: 4026356 - DNA, 25 bp, Homo sapien
tcatttagcttgcaagtgtcaaaga

SEQ ID NO: 4026357 - DNA, 25 bp, Homo sapien
tagcttgcaagtgtcaaagatggca

SEQ ID NO: 4026358 - DNA, 25 bp, Homo sapien
tttagcttgcaagtgtcaaagatgg

SEQ ID NO: 4026359 - DNA, 25 bp, Homo sapien
ggccatccaggaataatctagaagt

SEQ ID NO: 4026360 - DNA, 25 bp, Homo sapien
gaacttacatgacatcctactggga

SEQ ID NO: 4026361 - DNA, 25 bp, Homo sapien
tctagaagttatcgcccaaaaccat

SEQ ID NO: 4026362 - DNA, 25 bp, Homo sapien
ggtacaacagggaaacacgagaatg

SEQ ID NO: 4026363 - DNA, 25 bp, Homo sapien
gagtcacagggaatgtccgcaggcc

SEQ ID NO: 4026364 - DNA, 25 bp, Homo sapien
tcacagggaatgtccgcaggcccca

SEQ ID NO: 4026365 - DNA, 25 bp, Homo sapien
ttgaggtctggcctgtggagtcaca

SEQ ID NO: 4026366 - DNA, 25 bp, Homo sapien
tgtggagtcacagggaatgtccgca

SEQ ID NO: 4026367 - DNA, 25 bp, Homo sapien
tagcgtcgccggttgatgtccattt

SEQ ID NO: 4026368 - DNA, 25 bp, Homo sapien
gagagcactgctagcggcagatcca

SEQ ID NO: 4026369 - DNA, 25 bp, Homo sapien
gacgtcactaagctcctcttgaagg

SEQ ID NO: 4026370 - DNA, 25 bp, Homo sapien
gcgggctgctaatgccaccaggtag

SEQ ID NO: 4026371 - DNA, 25 bp, Homo sapien
tctcgttccgcagcaaactcagcat

SEQ ID NO: 4026372 - DNA, 25 bp, Homo sapien
gagattccgaggctgatggaactgt

SEQ ID NO: 4026373 - DNA, 25 bp, Homo sapien
tgttcccagtctcgttccgcagcaa

SEQ ID NO: 4026374 - DNA, 25 bp, Homo sapien
caaggccaggaggagattccgaggc

SEQ ID NO: 4026375 - DNA, 25 bp, Homo sapien
ctgaaataggacaaaggagtgtaag

SEQ ID NO: 4026376 - DNA, 25 bp, Homo sapien
ccaagtctccgggttagagggtgat

SEQ ID NO: 4026377 - DNA, 25 bp, Homo sapien
agctacccccgtagtatgtaatggg

SEQ ID NO: 4026378 - DNA, 25 bp, Homo sapien
cagaggcagctacccccgtagtatg

SEQ ID NO: 4026379 - DNA, 25 bp, Homo sapien
cagatgaggtaagaaggctcaccca

SEQ ID NO: 4026380 - DNA, 25 bp, Homo sapien
gctgaagggcgttcctagttaccac

SEQ ID NO: 4026381 - DNA, 25 bp, Homo sapien
tgccggtatcttcccagggctaggc

SEQ ID NO: 4026382 - DNA, 25 bp, Homo sapien
aggcggtatctggtgccggtatctt

SEQ ID NO: 4026383 - DNA, 25 bp, Homo sapien
cccgagctgggccaggcctgcttac

SEQ ID NO: 4026384 - DNA, 25 bp, Homo sapien
tgtcctcgagcgtgggctccgggct

SEQ ID NO: 4026385 - DNA, 25 bp, Homo sapien
atgtcctcgagcgtgggctccgggc

SEQ ID NO: 4026386 - DNA, 25 bp, Homo sapien
tccccacgaatctccccaccggcca

SEQ ID NO: 4026387 - DNA, 25 bp, Homo sapien
cgtgtccccacgaatctccccaccg

SEQ ID NO: 4026388 - DNA, 25 bp, Homo sapien
ccacgaatctccccaccggccacag

SEQ ID NO: 4026389 - DNA, 25 bp, Homo sapien
acgaatctccccaccggccacagac

SEQ ID NO: 4026390 - DNA, 25 bp, Homo sapien
gaaaacccacgagccacgctcgaag

SEQ ID NO: 4026391 - DNA, 25 bp, Homo sapien
acggaaaacccacgagccacgctcg

SEQ ID NO: 4026392 - DNA, 25 bp, Homo sapien
cccaccgctgcaccgcgacttcacg

SEQ ID NO: 4026393 - DNA, 25 bp, Homo sapien
gctgcaccgcgacttcacggaaaac

SEQ ID NO: 4026394 - DNA, 25 bp, Homo sapien
caatcacctagaaagggcagccgga

SEQ ID NO: 4026395 - DNA, 25 bp, Homo sapien
taacatcttaatgaccactgaggcc

SEQ ID NO: 4026396 - DNA, 25 bp, Homo sapien
tgatcaaatcaccaggaatctgccg

SEQ ID NO: 4026397 - DNA, 25 bp, Homo sapien
caaaatgttactctggcctcggaat

SEQ ID NO: 4026398 - DNA, 25 bp, Homo sapien
gcttgtcaatgatccgggccgttcg

SEQ ID NO: 4026399 - DNA, 25 bp, Homo sapien
gatttcagaacaaaagcgagccgcc

SEQ ID NO: 4026400 - DNA, 25 bp, Homo sapien
tcagtaatccccatggcgtagaggt

SEQ ID NO: 4026401 - DNA, 25 bp, Homo sapien
cccgaaagcctttgaccatgagtgg

SEQ ID NO: 4026402 - DNA, 25 bp, Homo sapien
ggacgcctcttcctggccacccacc

SEQ ID NO: 4026403 - DNA, 25 bp, Homo sapien
tgggacgcctcttcctggccaccca

SEQ ID NO: 4026404 - DNA, 25 bp, Homo sapien
acgcctcttcctggccacccaccag

SEQ ID NO: 4026405 - DNA, 25 bp, Homo sapien
ctgggacgcctcttcctggccaccc

SEQ ID NO: 4026406 - DNA, 25 bp, Homo sapien
cgtcagtcccgccaggagtttgagc

SEQ ID NO: 4026407 - DNA, 25 bp, Homo sapien
cagcgggggccgcacgtccggccgc

SEQ ID NO: 4026408 - DNA, 25 bp, Homo sapien
tcagtcccgccaggagtttgagcag

SEQ ID NO: 4026409 - DNA, 25 bp, Homo sapien
ggccgcacgtccggccgcgtcagtc

SEQ ID NO: 4026410 - DNA, 25 bp, Homo sapien
cccttcatgccggagaagcccgtca

SEQ ID NO: 4026411 - DNA, 25 bp, Homo sapien
cttcatgccggagaagcccgtcagc

SEQ ID NO: 4026412 - DNA, 25 bp, Homo sapien
ccttcatgccggagaagcccgtcag

SEQ ID NO: 4026413 - DNA, 25 bp, Homo sapien
ctcgaagggccggtagttcgagaag

SEQ ID NO: 4026414 - DNA, 25 bp, Homo sapien
gaagggccggtagttcgagaagctc

SEQ ID NO: 4026415 - DNA, 25 bp, Homo sapien
ggctcgaagggccggtagttcgaga

SEQ ID NO: 4026416 - DNA, 25 bp, Homo sapien
cgaagggccggtagttcgagaagct

SEQ ID NO: 4026417 - DNA, 25 bp, Homo sapien
cgcccgtcgccgaggcttccgccat

SEQ ID NO: 4026418 - DNA, 25 bp, Homo sapien
aggcgcccgtcgccgaggcttccgc

SEQ ID NO: 4026419 - DNA, 25 bp, Homo sapien
gctgccatcgcctctccgcaggcgc

SEQ ID NO: 4026420 - DNA, 25 bp, Homo sapien
gcccagagtcaagcccgccgggccc

SEQ ID NO: 4026421 - DNA, 25 bp, Homo sapien
gggattctccctagcgctactcaag

SEQ ID NO: 4026422 - DNA, 25 bp, Homo sapien
gagccgccggactcccttatttata

SEQ ID NO: 4026423 - DNA, 25 bp, Homo sapien
tatttatagccctggcgattgacag

SEQ ID NO: 4026424 - DNA, 25 bp, Homo sapien
aatcttcctgatagaggagccgccg

SEQ ID NO: 4026425 - DNA, 25 bp, Homo sapien
agtgggagcggagaaagacacagga

SEQ ID NO: 4026426 - DNA, 25 bp, Homo sapien
tgggagcggagaaagacacaggaat

SEQ ID NO: 4026427 - DNA, 25 bp, Homo sapien
gggagcggagaaagacacaggaatc

SEQ ID NO: 4026428 - DNA, 25 bp, Homo sapien
gtgggagcggagaaagacacaggaa

SEQ ID NO: 4026429 - DNA, 25 bp, Homo sapien
atacaaagttgatgaggccgggctg

SEQ ID NO: 4026430 - DNA, 25 bp, Homo sapien
tagctactattatagccaggcattg

SEQ ID NO: 4026431 - DNA, 25 bp, Homo sapien
ccaggcattgggcgaggttctgaca

SEQ ID NO: 4026432 - DNA, 25 bp, Homo sapien
gagtgagatacaaagttgatgaggc

SEQ ID NO: 4026433 - DNA, 25 bp, Homo sapien
caagggcaacgtagacctggtattt

SEQ ID NO: 4026434 - DNA, 25 bp, Homo sapien
gggtcccttgcgtctggcttctgca

SEQ ID NO: 4026435 - DNA, 25 bp, Homo sapien
tggttcgatgagcttgcagccagat

SEQ ID NO: 4026436 - DNA, 25 bp, Homo sapien
gcttctgcagaatgtatcaagggca

SEQ ID NO: 4026437 - DNA, 25 bp, Homo sapien
gcccaggtcctgcataagaagagat

SEQ ID NO: 4026438 - DNA, 25 bp, Homo sapien
ggtcctgcataagaagagattgagc

SEQ ID NO: 4026439 - DNA, 25 bp, Homo sapien
caggtcctgcataagaagagattga

SEQ ID NO: 4026440 - DNA, 25 bp, Homo sapien
tgagctatgattgtgaccgtgcact

SEQ ID NO: 4026441 - DNA, 25 bp, Homo sapien
aaagaagaagtagagtttggggctg

SEQ ID NO: 4026442 - DNA, 25 bp, Homo sapien
cacacacaaatattcgggtgtggtg

SEQ ID NO: 4026443 - DNA, 25 bp, Homo sapien
gaagaagtagagtttggggctgggc

SEQ ID NO: 4026444 - DNA, 25 bp, Homo sapien
cacacacacaaatattcgggtgtgg

SEQ ID NO: 4026445 - DNA, 25 bp, Homo sapien
ccgggaggcagaggttgcagtgagc

SEQ ID NO: 4026446 - DNA, 25 bp, Homo sapien
gaggcatgaaaatcgctggaacccg

SEQ ID NO: 4026447 - DNA, 25 bp, Homo sapien
caagattgtgccagtgcactccagc

SEQ ID NO: 4026448 - DNA, 25 bp, Homo sapien
gcctgggcaacaagagcgaaactcc

SEQ ID NO: 4026449 - DNA, 25 bp, Homo sapien
tccacaagctacaaaacagaatttg

SEQ ID NO: 4026450 - DNA, 25 bp, Homo sapien
cagacaaatggaaagggatatataa

SEQ ID NO: 4026451 - DNA, 25 bp, Homo sapien
tcagattatgttaaacggaaggacc

SEQ ID NO: 4026452 - DNA, 25 bp, Homo sapien
taaacggaaggaccctgatgctctg

SEQ ID NO: 4026453 - DNA, 25 bp, Homo sapien
ggcacaagcaaacaggacctgactt

SEQ ID NO: 4026454 - DNA, 25 bp, Homo sapien
gacttccttcaacatggagctgtcc

SEQ ID NO: 4026455 - DNA, 25 bp, Homo sapien
tcggtgggtagctgacccgctcatc

SEQ ID NO: 4026456 - DNA, 25 bp, Homo sapien
tgctgggctggagcaatgggctgca

SEQ ID NO: 4026457 - DNA, 25 bp, Homo sapien
ttcgaggctgtagtgagctgcgatt

SEQ ID NO: 4026458 - DNA, 25 bp, Homo sapien
ctgtagtgagctgcgattgcaccac

SEQ ID NO: 4026459 - DNA, 25 bp, Homo sapien
ggctgtagtgagctgcgattgcacc

SEQ ID NO: 4026460 - DNA, 25 bp, Homo sapien
gagttcgaggctgtagtgagctgcg

SEQ ID NO: 4026461 - DNA, 25 bp, Homo sapien
tctcagcggatagaagggacccaag

SEQ ID NO: 4026462 - DNA, 25 bp, Homo sapien
ggacccaagtgctctcaggaattca

SEQ ID NO: 4026463 - DNA, 25 bp, Homo sapien
caggaattcagtggtttggacgctc

SEQ ID NO: 4026464 - DNA, 25 bp, Homo sapien
gctgagagccagatgatcgtgctga

SEQ ID NO: 4026465 - DNA, 25 bp, Homo sapien
tcccggcccgtggtggatatggtca

SEQ ID NO: 4026466 - DNA, 25 bp, Homo sapien
gcaacaaagcgaggctctaacaaca

SEQ ID NO: 4026467 - DNA, 25 bp, Homo sapien
gctagaatgaactgggagccctaat

SEQ ID NO: 4026468 - DNA, 25 bp, Homo sapien
tcccagtgcatgaagtggagtgctc

SEQ ID NO: 4026469 - DNA, 25 bp, Homo sapien
gctggatggccaccggaccagaaga

SEQ ID NO: 4026470 - DNA, 25 bp, Homo sapien
gaaggaatatagctgtcaccaccag

SEQ ID NO: 4026471 - DNA, 25 bp, Homo sapien
ttcatttcccggtaagggagccagc

SEQ ID NO: 4026472 - DNA, 25 bp, Homo sapien
aatgctctgggatgagctacctgca

SEQ ID NO: 4026473 - DNA, 25 bp, Homo sapien
aaactgtagtctcaggacctaggga

SEQ ID NO: 4026474 - DNA, 25 bp, Homo sapien
tgtggagaaactgtagtctcaggac

SEQ ID NO: 4026475 - DNA, 25 bp, Homo sapien
aactgtagtctcaggacctagggat

SEQ ID NO: 4026476 - DNA, 25 bp, Homo sapien
cagaacctgtccttgcacactcccc

SEQ ID NO: 4026477 - DNA, 25 bp, Homo sapien
ccccagaacctgtccttgcacactc

SEQ ID NO: 4026478 - DNA, 25 bp, Homo sapien
aagcaaatgtgacctgtgtcactac

SEQ ID NO: 4026479 - DNA, 25 bp, Homo sapien
gcaaatgtgacctgtgtcactacgt

SEQ ID NO: 4026480 - DNA, 25 bp, Homo sapien
caacgagagtttcagcagctaccaa

SEQ ID NO: 4026481 - DNA, 25 bp, Homo sapien
tatcctccctaaaggttcctctagc

SEQ ID NO: 4026482 - DNA, 25 bp, Homo sapien
taagctaacccactctaattaggta

SEQ ID NO: 4026483 - DNA, 25 bp, Homo sapien
ttttacccgctcctgactcaacgag

SEQ ID NO: 4026484 - DNA, 25 bp, Homo sapien
gcatctcaaactgcggtgtagacag

SEQ ID NO: 4026485 - DNA, 25 bp, Homo sapien
tcccgcagatgccacagatgttagg

SEQ ID NO: 4026486 - DNA, 25 bp, Homo sapien
ggagaaggcctttccgcagtcatcg

SEQ ID NO: 4026487 - DNA, 25 bp, Homo sapien
actgtggacccggtgatgctgcaga

SEQ ID NO: 4026488 - DNA, 25 bp, Homo sapien
tccgaggttcatagccagggctttg

SEQ ID NO: 4026489 - DNA, 25 bp, Homo sapien
atatctagagctctcagattcatag

SEQ ID NO: 4026490 - DNA, 25 bp, Homo sapien
ggctccgaggttcatagccagggct

SEQ ID NO: 4026491 - DNA, 25 bp, Homo sapien
tcatatctagagctctcagattcat

SEQ ID NO: 4026492 - DNA, 25 bp, Homo sapien
aaatggtatctcttcgacttcatag

SEQ ID NO: 4026493 - DNA, 25 bp, Homo sapien
gattcagggcttctgggtgcaaact

SEQ ID NO: 4026494 - DNA, 25 bp, Homo sapien
cccgggctttcaggctcaaatctgg

SEQ ID NO: 4026495 - DNA, 25 bp, Homo sapien
tcagggctctgagaatctgattcag

SEQ ID NO: 4026496 - DNA, 25 bp, Homo sapien
ctgaggtacccttcggggctcctca

SEQ ID NO: 4026497 - DNA, 25 bp, Homo sapien
tctgaggtacccttcggggctcctc

SEQ ID NO: 4026498 - DNA, 25 bp, Homo sapien
tgaggtacccttcggggctcctcat

SEQ ID NO: 4026499 - DNA, 25 bp, Homo sapien
ctctgaggtacccttcggggctcct

SEQ ID NO: 4026500 - DNA, 25 bp, Homo sapien
ggctcgaggccccacggcaacgcct

SEQ ID NO: 4026501 - DNA, 25 bp, Homo sapien
ccggacgtcttgaccccgcgcctct

SEQ ID NO: 4026502 - DNA, 25 bp, Homo sapien
gatcccgcgacccggcctcggttgc

SEQ ID NO: 4026503 - DNA, 25 bp, Homo sapien
gcgatggcggccgatcccgcgaccc

SEQ ID NO: 4026504 - DNA, 25 bp, Homo sapien
tcttgacagttaacgagcccgatgc

SEQ ID NO: 4026505 - DNA, 25 bp, Homo sapien
tacgcttcgtgctgaaacaagtttg

SEQ ID NO: 4026506 - DNA, 25 bp, Homo sapien
taacgagcccgatgcccctgtgtga

SEQ ID NO: 4026507 - DNA, 25 bp, Homo sapien
gcaggagccatggatcgtgttttct

SEQ ID NO: 4026508 - DNA, 25 bp, Homo sapien
caacaccagctaatccaaggcagga

SEQ ID NO: 4026509 - DNA, 25 bp, Homo sapien
cttatcatgagccacaagtcccagg

SEQ ID NO: 4026510 - DNA, 25 bp, Homo sapien
taagggctgcatcttgacccaacac

SEQ ID NO: 4026511 - DNA, 25 bp, Homo sapien
gagagcagccacaccctaaaaatgg

SEQ ID NO: 4026512 - DNA, 25 bp, Homo sapien
gagatgccccagtgtattgaacatg

SEQ ID NO: 4026513 - DNA, 25 bp, Homo sapien
tgagaggagcttccgtatgcactgc

SEQ ID NO: 4026514 - DNA, 25 bp, Homo sapien
catccgatgctagaggagatgcccc

SEQ ID NO: 4026515 - DNA, 25 bp, Homo sapien
gcacagggccctttggaaagaacaa

SEQ ID NO: 4026516 - DNA, 25 bp, Homo sapien
caacaactgcgactttctgagagcc

SEQ ID NO: 4026517 - DNA, 25 bp, Homo sapien
tcgggccgcccacaatgtctagatg

SEQ ID NO: 4026518 - DNA, 25 bp, Homo sapien
ccatgtgcccctgtgataaagtgac

SEQ ID NO: 4026519 - DNA, 25 bp, Homo sapien
gatgggtacggttgccactggctac

SEQ ID NO: 4026520 - DNA, 25 bp, Homo sapien
gtcttcaggccgaagcagcggccac

SEQ ID NO: 4026521 - DNA, 25 bp, Homo sapien
gcttctcgcccctgtggctgtaaat

SEQ ID NO: 4026522 - DNA, 25 bp, Homo sapien
gaaggcccgaccacactcgggacag

SEQ ID NO: 4026523 - DNA, 25 bp, Homo sapien
gacccattggtgcttggccatgccg

SEQ ID NO: 4026524 - DNA, 25 bp, Homo sapien
ccggcgccgggccttggacagctgc

SEQ ID NO: 4026525 - DNA, 25 bp, Homo sapien
tccggcgccgggccttggacagctg

SEQ ID NO: 4026526 - DNA, 25 bp, Homo sapien
agctgctccaacccggcaaaggggg

SEQ ID NO: 4026527 - DNA, 25 bp, Homo sapien
ccggcggccacagggtcgggcttct

SEQ ID NO: 4026528 - DNA, 25 bp, Homo sapien
ctgtcggacacttcgccacctccgg

SEQ ID NO: 4026529 - DNA, 25 bp, Homo sapien
gggtccgcttctgtcggacacttcg

SEQ ID NO: 4026530 - DNA, 25 bp, Homo sapien
caggagatgagcgccggcttgctgc

SEQ ID NO: 4026531 - DNA, 25 bp, Homo sapien
gcttctgtcggacacttcgccacct

SEQ ID NO: 4026532 - DNA, 25 bp, Homo sapien
agaagaacgcaaaccccacgctgcg

SEQ ID NO: 4026533 - DNA, 25 bp, Homo sapien
agggccctctgcgcgggccgcaggc

SEQ ID NO: 4026534 - DNA, 25 bp, Homo sapien
cgagcgcgcccaggtggccgtaggt

SEQ ID NO: 4026535 - DNA, 25 bp, Homo sapien
ccaggtggccgtaggtctcccgcat

SEQ ID NO: 4026536 - DNA, 25 bp, Homo sapien
gaagtacacggccacgtcggcgaag

SEQ ID NO: 4026537 - DNA, 25 bp, Homo sapien
cggcgccatggggactgtcagcccc

SEQ ID NO: 4026538 - DNA, 25 bp, Homo sapien
actgtcagccccagcgacggatcgg

SEQ ID NO: 4026539 - DNA, 25 bp, Homo sapien
tcagccccagcgacggatcggtcat

SEQ ID NO: 4026540 - DNA, 25 bp, Homo sapien
ctgtcagccccagcgacggatcggt

SEQ ID NO: 4026541 - DNA, 25 bp, Homo sapien
gtagagcccccgaaggcccactaga

SEQ ID NO: 4026542 - DNA, 25 bp, Homo sapien
aaactaagggccgatggctgcgagt

SEQ ID NO: 4026543 - DNA, 25 bp, Homo sapien
gtcttcaaataaaacggcggcagcg

SEQ ID NO: 4026544 - DNA, 25 bp, Homo sapien
tccatggtcagaactggacgatgtc

SEQ ID NO: 4026545 - DNA, 25 bp, Homo sapien
ctgaaaggtggaaagggcgcaagaa

SEQ ID NO: 4026546 - DNA, 25 bp, Homo sapien
tttggtagcatgacgggccactgaa

SEQ ID NO: 4026547 - DNA, 25 bp, Homo sapien
atgacgccaaacttccccaggtcct

SEQ ID NO: 4026548 - DNA, 25 bp, Homo sapien
ttaacccccacagccaggtgtgccc

SEQ ID NO: 4026549 - DNA, 25 bp, Homo sapien
ggttgcacttctagttgtcttgaga

SEQ ID NO: 4026550 - DNA, 25 bp, Homo sapien
gtgaggttgcacttctagttgtctt

SEQ ID NO: 4026551 - DNA, 25 bp, Homo sapien
acatttatccggcaattccaaggcg

SEQ ID NO: 4026552 - DNA, 25 bp, Homo sapien
ccggcaattccaaggcgtgaggttg

SEQ ID NO: 4026553 - DNA, 25 bp, Homo sapien
ctgctcctttgccaaaaatgcctgc

SEQ ID NO: 4026554 - DNA, 25 bp, Homo sapien
ctctgctcctttgccaaaaatgcct

SEQ ID NO: 4026555 - DNA, 25 bp, Homo sapien
aggaatttttctgtgctcttgctct

SEQ ID NO: 4026556 - DNA, 25 bp, Homo sapien
gctcctttgccaaaaatgcctgctt

SEQ ID NO: 4026557 - DNA, 25 bp, Homo sapien
ctggctgaaggtactggcgaagtgt

SEQ ID NO: 4026558 - DNA, 25 bp, Homo sapien
gaaggtactggcgaagtgtggctgc

SEQ ID NO: 4026559 - DNA, 25 bp, Homo sapien
gctgaaggtactggcgaagtgtggc

SEQ ID NO: 4026560 - DNA, 25 bp, Homo sapien
aaggtactggcgaagtgtggctgca

SEQ ID NO: 4026561 - DNA, 25 bp, Homo sapien
gtctgataagcaaagtctgctggct

SEQ ID NO: 4026562 - DNA, 25 bp, Homo sapien
agtttgtccctaacagagggctggt

SEQ ID NO: 4026563 - DNA, 25 bp, Homo sapien
gatggagttctttcgtatggccgca

SEQ ID NO: 4026564 - DNA, 25 bp, Homo sapien
taccttgtgacgtttattacaggag

SEQ ID NO: 4026565 - DNA, 25 bp, Homo sapien
ttctttgggtcatatacatctttgc

SEQ ID NO: 4026566 - DNA, 25 bp, Homo sapien
tgcctacatgcctattcctagagac

SEQ ID NO: 4026567 - DNA, 25 bp, Homo sapien
tgattctgcatcagggaggccttat

SEQ ID NO: 4026568 - DNA, 25 bp, Homo sapien
taaaagataacctcgtgattctgca

SEQ ID NO: 4026569 - DNA, 25 bp, Homo sapien
cggagcctaggtcgagttgccaaat

SEQ ID NO: 4026570 - DNA, 25 bp, Homo sapien
tggaaaggcctatttggacagagac

SEQ ID NO: 4026571 - DNA, 25 bp, Homo sapien
ggccagatccagtacacagtcacag

SEQ ID NO: 4026572 - DNA, 25 bp, Homo sapien
aataaatatgacaaccgcaggccag

SEQ ID NO: 4026573 - DNA, 25 bp, Homo sapien
aaagacaatgagtattgtgttctgg

SEQ ID NO: 4026574 - DNA, 25 bp, Homo sapien
attgtgttctgggagggtcacaaga

SEQ ID NO: 4026575 - DNA, 25 bp, Homo sapien
tctgggagggtcacaagaataaaaa

SEQ ID NO: 4026576 - DNA, 25 bp, Homo sapien
tgttctgggagggtcacaagaataa

SEQ ID NO: 4026577 - DNA, 25 bp, Homo sapien
taatgtctagatagtcacttttaag

SEQ ID NO: 4026578 - DNA, 25 bp, Homo sapien
aggaggctgctaagggcccaagatc

SEQ ID NO: 4026579 - DNA, 25 bp, Homo sapien
ggaggctgctaagggcccaagatca

SEQ ID NO: 4026580 - DNA, 25 bp, Homo sapien
ctcgggcctcccgtaatgtctagat

SEQ ID NO: 4026581 - DNA, 25 bp, Homo sapien
cacagtcggcgcagccatagggttt

SEQ ID NO: 4026582 - DNA, 25 bp, Homo sapien
tgtgactgtagacgtgctccaccag

SEQ ID NO: 4026583 - DNA, 25 bp, Homo sapien
tgggctgccatctccgagctctggc

SEQ ID NO: 4026584 - DNA, 25 bp, Homo sapien
tgaacccactggtgtttggccacgg

SEQ ID NO: 4026585 - DNA, 25 bp, Homo sapien
cgtccccggtgcggtgccttggaca

SEQ ID NO: 4026586 - DNA, 25 bp, Homo sapien
ggcgtccccggtgcggtgccttgga

SEQ ID NO: 4026587 - DNA, 25 bp, Homo sapien
gccgagggggcttggggagacttca

SEQ ID NO: 4026588 - DNA, 25 bp, Homo sapien
ccccggtgcggtgccttggacagct

SEQ ID NO: 4026589 - DNA, 25 bp, Homo sapien
tcaacagagtttaagagactgggcg

SEQ ID NO: 4026590 - DNA, 25 bp, Homo sapien
agtgacacctgttcctcggctgcag

SEQ ID NO: 4026591 - DNA, 25 bp, Homo sapien
cctgatccagaaggaggaacggaca

SEQ ID NO: 4026592 - DNA, 25 bp, Homo sapien
ggctcggctcatcctggtccttgaa

SEQ ID NO: 4026593 - DNA, 25 bp, Homo sapien
cagagtgtagtgaccacgcagaggt

SEQ ID NO: 4026594 - DNA, 25 bp, Homo sapien
tcgtcgcagttgagaaggcagttca

SEQ ID NO: 4026595 - DNA, 25 bp, Homo sapien
tttctaggctgcatctgggagccac

SEQ ID NO: 4026596 - DNA, 25 bp, Homo sapien
aaattacccaggcttcgtggcgagc

SEQ ID NO: 4026597 - DNA, 25 bp, Homo sapien
cgtttgtgtctgacatttcgccacc

SEQ ID NO: 4026598 - DNA, 25 bp, Homo sapien
gtccgtttgtgtctgacatttcgcc

SEQ ID NO: 4026599 - DNA, 25 bp, Homo sapien
tccgtttgtgtctgacatttcgcca

SEQ ID NO: 4026600 - DNA, 25 bp, Homo sapien
tttgtgtctgacatttcgccacctc

SEQ ID NO: 4026601 - DNA, 25 bp, Homo sapien
agaagaacgcaaaccccacgctgcg

SEQ ID NO: 4026602 - DNA, 25 bp, Homo sapien
ggccctctgcgctggccgcaagcag

SEQ ID NO: 4026603 - DNA, 25 bp, Homo sapien
agtacacggccacgtccgcgaagct

SEQ ID NO: 4026604 - DNA, 25 bp, Homo sapien
cgagagcgctcaggtggccgtaggt

SEQ ID NO: 4026605 - DNA, 25 bp, Homo sapien
tcaggtggccgtaggtctcccgcat

SEQ ID NO: 4026606 - DNA, 25 bp, Homo sapien
agggagcggggccagaggcggcgcc

SEQ ID NO: 4026607 - DNA, 25 bp, Homo sapien
cggggagggagcggggccagaggcg

SEQ ID NO: 4026608 - DNA, 25 bp, Homo sapien
ggagggagcggggccagaggcggcg

SEQ ID NO: 4026609 - DNA, 25 bp, Homo sapien
ggagcggggccagaggcggcgccat

SEQ ID NO: 4026610 - DNA, 25 bp, Homo sapien
gaaactaacggtgccgatggcagcg

SEQ ID NO: 4026611 - DNA, 25 bp, Homo sapien
tgtcaaccccgacgacggatcggct

SEQ ID NO: 4026612 - DNA, 25 bp, Homo sapien
gcactagagggcgtggaaactaacg

SEQ ID NO: 4026613 - DNA, 25 bp, Homo sapien
gatggcagcgggtgtataatcagaa

SEQ ID NO: 4026614 - DNA, 25 bp, Homo sapien
tcaacctgccgcataagtgaggaga

SEQ ID NO: 4026615 - DNA, 25 bp, Homo sapien
ggagctctcggtcctcagacacttt

SEQ ID NO: 4026616 - DNA, 25 bp, Homo sapien
cagaagaaacaggtcggattgctcc

SEQ ID NO: 4026617 - DNA, 25 bp, Homo sapien
tgatctggcgggaatctcaggaaac

SEQ ID NO: 4026618 - DNA, 25 bp, Homo sapien
tgaatttcagttccggagtccccga

SEQ ID NO: 4026619 - DNA, 25 bp, Homo sapien
gggtggcaagtctaatctattcgaa

SEQ ID NO: 4026620 - DNA, 25 bp, Homo sapien
tccttcgtgccaaggtcaggctcaa

SEQ ID NO: 4026621 - DNA, 25 bp, Homo sapien
tcagggatccgtcagtccttcgtgc

SEQ ID NO: 4026622 - DNA, 25 bp, Homo sapien
cggtggatccactggtgcgcttcca

SEQ ID NO: 4026623 - DNA, 25 bp, Homo sapien
gagtgcatgcgcctgtggctgacca

SEQ ID NO: 4026624 - DNA, 25 bp, Homo sapien
agtccgtgcacacgtggcgccgctg

SEQ ID NO: 4026625 - DNA, 25 bp, Homo sapien
cctcgaagatgtctgggtagtgccg

SEQ ID NO: 4026626 - DNA, 25 bp, Homo sapien
tgctgggtatgggtgccgggggctg

SEQ ID NO: 4026627 - DNA, 25 bp, Homo sapien
atccatgctgggtatgggtgccggg

SEQ ID NO: 4026628 - DNA, 25 bp, Homo sapien
catgctgggtatgggtgccgggggc

SEQ ID NO: 4026629 - DNA, 25 bp, Homo sapien
agcatccatgctgggtatgggtgcc

SEQ ID NO: 4026630 - DNA, 25 bp, Homo sapien
gcacttcaggactctccttcacagg

SEQ ID NO: 4026631 - DNA, 25 bp, Homo sapien
gctgggtcagggttgcgttccacca

SEQ ID NO: 4026632 - DNA, 25 bp, Homo sapien
gttgcgttccaccagcacttcagga

SEQ ID NO: 4026633 - DNA, 25 bp, Homo sapien
cgtgccggggccacgctaatagctg

SEQ ID NO: 4026634 - DNA, 25 bp, Homo sapien
taaaagtgccttatctgagccttgg

SEQ ID NO: 4026635 - DNA, 25 bp, Homo sapien
gacttcacagcgttactggtttagc

SEQ ID NO: 4026636 - DNA, 25 bp, Homo sapien
tctgtccagtgattaacacacaggc

SEQ ID NO: 4026637 - DNA, 25 bp, Homo sapien
aaggcagtgagggaagttctgtcca

SEQ ID NO: 4026638 - DNA, 25 bp, Homo sapien
agtgcctggttggactgggctccca

SEQ ID NO: 4026639 - DNA, 25 bp, Homo sapien
gttgaatttctttagggatgctgga

SEQ ID NO: 4026640 - DNA, 25 bp, Homo sapien
tcctctagtacccaacacagttgaa

SEQ ID NO: 4026641 - DNA, 25 bp, Homo sapien
ggtctgccttctttactcctctagt

SEQ ID NO: 4026642 - DNA, 25 bp, Homo sapien
tgggcggcggggctccaagcctcac

SEQ ID NO: 4026643 - DNA, 25 bp, Homo sapien
cagtctttcccccttctcaggatcc

SEQ ID NO: 4026644 - DNA, 25 bp, Homo sapien
ctctccgagctcctcccagtctttc

SEQ ID NO: 4026645 - DNA, 25 bp, Homo sapien
cccttctcaggatcctgggcggcgg

SEQ ID NO: 4026646 - DNA, 25 bp, Homo sapien
tctcctgttccatccaagagatgag

SEQ ID NO: 4026647 - DNA, 25 bp, Homo sapien
ctcctgttccatccaagagatgagg

SEQ ID NO: 4026648 - DNA, 25 bp, Homo sapien
tcctgttccatccaagagatgaggg

SEQ ID NO: 4026649 - DNA, 25 bp, Homo sapien
agagaacagggatcacagcgcgggc

SEQ ID NO: 4026650 - DNA, 25 bp, Homo sapien
gagagaacagggatcacagcgcggg

SEQ ID NO: 4026651 - DNA, 25 bp, Homo sapien
ggcaccccctcggagcttatactca

SEQ ID NO: 4026652 - DNA, 25 bp, Homo sapien
aggccatcgtgggaagatggcattc

SEQ ID NO: 4026653 - DNA, 25 bp, Homo sapien
ccatcgtgggaagatggcattcccc

SEQ ID NO: 4026654 - DNA, 25 bp, Homo sapien
ctgagaggccatcgtgggaagatgg

SEQ ID NO: 4026655 - DNA, 25 bp, Homo sapien
gaatgaaatggatgcgggtgaaaac

SEQ ID NO: 4026656 - DNA, 25 bp, Homo sapien
ctgaatgaaatggatgcgggtgaaa

SEQ ID NO: 4026657 - DNA, 25 bp, Homo sapien
aaatggatgcgggtgaaaacactcc

SEQ ID NO: 4026658 - DNA, 25 bp, Homo sapien
gatgcgggtgaaaacactcccgagg

SEQ ID NO: 4026659 - DNA, 25 bp, Homo sapien
gttggtgcaagagtgcgggattagg

SEQ ID NO: 4026660 - DNA, 25 bp, Homo sapien
tctcggcccttctacatcatctccc

SEQ ID NO: 4026661 - DNA, 25 bp, Homo sapien
tctcccctgtgaacccggtgaagga

SEQ ID NO: 4026662 - DNA, 25 bp, Homo sapien
agtgcgggattagggctcacagtcc

SEQ ID NO: 4026663 - DNA, 25 bp, Homo sapien
ctgcaaccaggccgggtctccccgg

SEQ ID NO: 4026664 - DNA, 25 bp, Homo sapien
ctcgcagccccgatcggcggccgcc

SEQ ID NO: 4026665 - DNA, 25 bp, Homo sapien
agccccgatcggcggccgccaggtc

SEQ ID NO: 4026666 - DNA, 25 bp, Homo sapien
gcctcgcagccccgatcggcggccg

SEQ ID NO: 4026667 - DNA, 25 bp, Homo sapien
ggggcctcgcagccccgatcggcgg

SEQ ID NO: 4026668 - DNA, 25 bp, Homo sapien
tattcacttcatggccgcttggaca

SEQ ID NO: 4026669 - DNA, 25 bp, Homo sapien
ttctgaaaatatggcgaccaccctt

SEQ ID NO: 4026670 - DNA, 25 bp, Homo sapien
ctggctgctagggattcgaggattc

SEQ ID NO: 4026671 - DNA, 25 bp, Homo sapien
tcttaagggcgccattatttgacca

SEQ ID NO: 4026672 - DNA, 25 bp, Homo sapien
tcaagaaagatgtaagggcccgaag

SEQ ID NO: 4026673 - DNA, 25 bp, Homo sapien
cccttaaataaagccgcttcggctg

SEQ ID NO: 4026674 - DNA, 25 bp, Homo sapien
agtagaggagaggcttcttgccttc

SEQ ID NO: 4026675 - DNA, 25 bp, Homo sapien
tcatcgtcccacttgcccttaaata

SEQ ID NO: 4026676 - DNA, 25 bp, Homo sapien
aagctgcgcggtgattggcctggga

SEQ ID NO: 4026677 - DNA, 25 bp, Homo sapien
cgacgatcccggaagaagctgcgcg

SEQ ID NO: 4026678 - DNA, 25 bp, Homo sapien
cgcggtcctgaagcctctgttgaca

SEQ ID NO: 4026679 - DNA, 25 bp, Homo sapien
cccgcaatacgcaacggccgatgat

SEQ ID NO: 4026680 - DNA, 25 bp, Homo sapien
gattgtgtcccctacggtctcttac

SEQ ID NO: 4026681 - DNA, 25 bp, Homo sapien
tggcaaaccatgtgtacacccgcgg

SEQ ID NO: 4026682 - DNA, 25 bp, Homo sapien
gctctagaccgaagctgcaggcgaa

SEQ ID NO: 4026683 - DNA, 25 bp, Homo sapien
cagtagcttagctgcggagtccacc

SEQ ID NO: 4026684 - DNA, 25 bp, Homo sapien
tcagttcttctcataccgggtctcc

SEQ ID NO: 4026685 - DNA, 25 bp, Homo sapien
cctctctaaactgggttgggcctca

SEQ ID NO: 4026686 - DNA, 25 bp, Homo sapien
gataacaagcaaggcctaccaggtc

SEQ ID NO: 4026687 - DNA, 25 bp, Homo sapien
tgccagccctagtatatcgagcctt

SEQ ID NO: 4026688 - DNA, 25 bp, Homo sapien
ttgagttctggaactgcctcactgc

SEQ ID NO: 4026689 - DNA, 25 bp, Homo sapien
ccttgagttctggaactgcctcact

SEQ ID NO: 4026690 - DNA, 25 bp, Homo sapien
tgagttctggaactgcctcactgca

SEQ ID NO: 4026691 - DNA, 25 bp, Homo sapien
gagttctggaactgcctcactgcac

SEQ ID NO: 4026692 - DNA, 25 bp, Homo sapien
gcacgcatcaccacacccagttttt

SEQ ID NO: 4026693 - DNA, 25 bp, Homo sapien
tggccaggatgctcttgatctcctg

SEQ ID NO: 4026694 - DNA, 25 bp, Homo sapien
gtttttgtatttttagcagagacag

SEQ ID NO: 4026695 - DNA, 25 bp, Homo sapien
acgcatcaccacacccagtttttgt

SEQ ID NO: 4026696 - DNA, 25 bp, Homo sapien
tacttgtcaataacagagtacaact

SEQ ID NO: 4026697 - DNA, 25 bp, Homo sapien
gatcagataattatgagaagtcaca

SEQ ID NO: 4026698 - DNA, 25 bp, Homo sapien
tgactgggcttcaatcgactttact

SEQ ID NO: 4026699 - DNA, 25 bp, Homo sapien
gaagtcacacaacatacaggagatg

SEQ ID NO: 4026700 - DNA, 25 bp, Homo sapien
gactgagccaagctaggaatccagg

SEQ ID NO: 4026701 - DNA, 25 bp, Homo sapien
tacccagctgagagcttaagtttct

SEQ ID NO: 4026702 - DNA, 25 bp, Homo sapien
tccaggtccaccaattcaggagagg

SEQ ID NO: 4026703 - DNA, 25 bp, Homo sapien
tgttactcagactgaagtggcgcca

SEQ ID NO: 4026704 - DNA, 25 bp, Homo sapien
tgcagaaatgcttagtcccacctac

SEQ ID NO: 4026705 - DNA, 25 bp, Homo sapien
attcaaagaagcagtcttttcaaag

SEQ ID NO: 4026706 - DNA, 25 bp, Homo sapien
tgcccggcaccagttcccattaatt

SEQ ID NO: 4026707 - DNA, 25 bp, Homo sapien
aattatcttggaacccaaggattca

SEQ ID NO: 4026708 - DNA, 25 bp, Homo sapien
ctcttcaaaagtagggctagcagat

SEQ ID NO: 4026709 - DNA, 25 bp, Homo sapien
cctcttcaaaagtagggctagcaga

SEQ ID NO: 4026710 - DNA, 25 bp, Homo sapien
ttgagactggagtctcactttgtcg

SEQ ID NO: 4026711 - DNA, 25 bp, Homo sapien
ctaaatgggccagaaagaactctct

SEQ ID NO: 4026712 - DNA, 25 bp, Homo sapien
agaaagaactctcttaactgttgtt

SEQ ID NO: 4026713 - DNA, 25 bp, Homo sapien
tttttgagactggagtctcactttg

SEQ ID NO: 4026714 - DNA, 25 bp, Homo sapien
ataactgttgacatacaagcattac

SEQ ID NO: 4026715 - DNA, 25 bp, Homo sapien
tcataactgttgacatacaagcatt

SEQ ID NO: 4026716 - DNA, 25 bp, Homo sapien
gcgcctggccttcataactgttgac

SEQ ID NO: 4026717 - DNA, 25 bp, Homo sapien
cataactgttgacatacaagcatta

SEQ ID NO: 4026718 - DNA, 25 bp, Homo sapien
gggaccccatctcagaggagtagga

SEQ ID NO: 4026719 - DNA, 25 bp, Homo sapien
gttggcccagttccagagtccgcta

SEQ ID NO: 4026720 - DNA, 25 bp, Homo sapien
ccctgtgtgctggagcttcagaaaa

SEQ ID NO: 4026721 - DNA, 25 bp, Homo sapien
tgcaggctcctttaataggcactgg

SEQ ID NO: 4026722 - DNA, 25 bp, Homo sapien
gggaaacgctgaccagtttgtgtga

SEQ ID NO: 4026723 - DNA, 25 bp, Homo sapien
ggaaacgctgaccagtttgtgtgaa

SEQ ID NO: 4026724 - DNA, 25 bp, Homo sapien
gaaacgctgaccagtttgtgtgaac

SEQ ID NO: 4026725 - DNA, 25 bp, Homo sapien
ctgcaggagcggtggatccaccgat

SEQ ID NO: 4026726 - DNA, 25 bp, Homo sapien
gcttccagggcggtcttgcgcttga

SEQ ID NO: 4026727 - DNA, 25 bp, Homo sapien
ggtggatccaccgatgggcttccag

SEQ ID NO: 4026728 - DNA, 25 bp, Homo sapien
tggaaagtgccggaagtgaactggg

SEQ ID NO: 4026729 - DNA, 25 bp, Homo sapien
aagggtagctgaagttgcggccaca

SEQ ID NO: 4026730 - DNA, 25 bp, Homo sapien
tacctgcgctgggagaaacgcgcct

SEQ ID NO: 4026731 - DNA, 25 bp, Homo sapien
tgcagtctgagcacgcgtaaggctt

SEQ ID NO: 4026732 - DNA, 25 bp, Homo sapien
tcgccggtgtggatgaactgatgct

SEQ ID NO: 4026733 - DNA, 25 bp, Homo sapien
cactccttgacagccacttcatgcg

SEQ ID NO: 4026734 - DNA, 25 bp, Homo sapien
ttgcagaactctgggcaggcgacgc

SEQ ID NO: 4026735 - DNA, 25 bp, Homo sapien
gggctctgcctagggttgcagaact

SEQ ID NO: 4026736 - DNA, 25 bp, Homo sapien
gttttggacacttcttcagcctttc

SEQ ID NO: 4026737 - DNA, 25 bp, Homo sapien
ttggcccctgctgaaagctgcagag

SEQ ID NO: 4026738 - DNA, 25 bp, Homo sapien
ctgcttcctgtccttggcccctgct

SEQ ID NO: 4026739 - DNA, 25 bp, Homo sapien
tgtccttggcccctgctgaaagctg

SEQ ID NO: 4026740 - DNA, 25 bp, Homo sapien
tcctgtccttggcccctgctgaaag

SEQ ID NO: 4026741 - DNA, 25 bp, Homo sapien
ccttccacccacgagataaaagcgg

SEQ ID NO: 4026742 - DNA, 25 bp, Homo sapien
cttccacccacgagataaaagcggg

SEQ ID NO: 4026743 - DNA, 25 bp, Homo sapien
ctccttccacccacgagataaaagc

SEQ ID NO: 4026744 - DNA, 25 bp, Homo sapien
cacccacgagataaaagcgggtttg

SEQ ID NO: 4026745 - DNA, 25 bp, Homo sapien
gcgctggccgcaggcattcccactc

SEQ ID NO: 4026746 - DNA, 25 bp, Homo sapien
ccggcctgctttccctcgtcctccg

SEQ ID NO: 4026747 - DNA, 25 bp, Homo sapien
ccgcgaagctcacggcgcccggcct

SEQ ID NO: 4026748 - DNA, 25 bp, Homo sapien
cggcctgctttccctcgtcctccgg

SEQ ID NO: 4026749 - DNA, 25 bp, Homo sapien
tccgcgaagctcacggcgcccggcc

SEQ ID NO: 4026750 - DNA, 25 bp, Homo sapien
tcctgcccttaaccaagatggaacc

SEQ ID NO: 4026751 - DNA, 25 bp, Homo sapien
tggaaccttcctggcgtcaacaccc

SEQ ID NO: 4026752 - DNA, 25 bp, Homo sapien
gacaagtccgtaagggactcctgcc

SEQ ID NO: 4026753 - DNA, 25 bp, Homo sapien
tggagatgctggcgctttcctgtct

SEQ ID NO: 4026754 - DNA, 25 bp, Homo sapien
tcctttgctccggacctgtgatatt

SEQ ID NO: 4026755 - DNA, 25 bp, Homo sapien
tggtcctttgctccggacctgtgat

SEQ ID NO: 4026756 - DNA, 25 bp, Homo sapien
tttgctccggacctgtgatattctg

SEQ ID NO: 4026757 - DNA, 25 bp, Homo sapien
tgctccggacctgtgatattctgga

SEQ ID NO: 4026758 - DNA, 25 bp, Homo sapien
taatgggactgttccagacacgcac

SEQ ID NO: 4026759 - DNA, 25 bp, Homo sapien
tgagaatcagggtcaagtacggccc

SEQ ID NO: 4026760 - DNA, 25 bp, Homo sapien
tctgccaggtagagcacaagccagt

SEQ ID NO: 4026761 - DNA, 25 bp, Homo sapien
aatgacgtcacctctcctaatggga

SEQ ID NO: 4026762 - DNA, 25 bp, Homo sapien
gatagcagatctagggctacagttt

SEQ ID NO: 4026763 - DNA, 25 bp, Homo sapien
ggccttggggctacacttgtggaca

SEQ ID NO: 4026764 - DNA, 25 bp, Homo sapien
ggctacacttgtggacagccagaga

SEQ ID NO: 4026765 - DNA, 25 bp, Homo sapien
actggagcccccgatagcagatcta

SEQ ID NO: 4026766 - DNA, 25 bp, Homo sapien
caaaacgcttggagcaaaggtcgca

SEQ ID NO: 4026767 - DNA, 25 bp, Homo sapien
gacgtccacagctagggcactggtg

SEQ ID NO: 4026768 - DNA, 25 bp, Homo sapien
tcttgcgctgggagaaacgtttgcc

SEQ ID NO: 4026769 - DNA, 25 bp, Homo sapien
tcacagtgctcgcaggcatagggac

SEQ ID NO: 4026770 - DNA, 25 bp, Homo sapien
ctgatgatcagggaaggtacagccg

SEQ ID NO: 4026771 - DNA, 25 bp, Homo sapien
tgatgatcagggaaggtacagccgc

SEQ ID NO: 4026772 - DNA, 25 bp, Homo sapien
aggtacagccgcagtcagggcagat

SEQ ID NO: 4026773 - DNA, 25 bp, Homo sapien
tcagggaaggtacagccgcagtcag

SEQ ID NO: 4026774 - DNA, 25 bp, Homo sapien
cctaggaatcagtcggggtttgctg

SEQ ID NO: 4026775 - DNA, 25 bp, Homo sapien
ctgcctaggaatcagtcggggtttg

SEQ ID NO: 4026776 - DNA, 25 bp, Homo sapien
atcagtcggggtttgctgggcctcc

SEQ ID NO: 4026777 - DNA, 25 bp, Homo sapien
tttgctgggcctccggcctcgcttc

SEQ ID NO: 4026778 - DNA, 25 bp, Homo sapien
gaagtttaggatctctttggtccaa

SEQ ID NO: 4026779 - DNA, 25 bp, Homo sapien
caactcaaaggtggctagaggcaga

SEQ ID NO: 4026780 - DNA, 25 bp, Homo sapien
catcctgccgtaagagcagaaagag

SEQ ID NO: 4026781 - DNA, 25 bp, Homo sapien
gcagtatgtccttcgctgataaggg

SEQ ID NO: 4026782 - DNA, 25 bp, Homo sapien
cctagcccaaccaaaactctggaca

SEQ ID NO: 4026783 - DNA, 25 bp, Homo sapien
agcccaaccaaaactctggacagag

SEQ ID NO: 4026784 - DNA, 25 bp, Homo sapien
gcccaaccaaaactctggacagagc

SEQ ID NO: 4026785 - DNA, 25 bp, Homo sapien
tagcccaaccaaaactctggacaga

SEQ ID NO: 4026786 - DNA, 25 bp, Homo sapien
gtcatcggtgtttcgttccaaccag

SEQ ID NO: 4026787 - DNA, 25 bp, Homo sapien
tctcgggtactcctgcggatctaga

SEQ ID NO: 4026788 - DNA, 25 bp, Homo sapien
ggatctagagcagccggttcccagt

SEQ ID NO: 4026789 - DNA, 25 bp, Homo sapien
tctggactgttagccctctcgggta

SEQ ID NO: 4026790 - DNA, 25 bp, Homo sapien
aacctggtcgcctgccaggaccgtg

SEQ ID NO: 4026791 - DNA, 25 bp, Homo sapien
gcctccctgcctacaccctctccgg

SEQ ID NO: 4026792 - DNA, 25 bp, Homo sapien
tccctgcctacaccctctccggctc

SEQ ID NO: 4026793 - DNA, 25 bp, Homo sapien
ctcccctgacaacctggtcgcctgc

SEQ ID NO: 4026794 - DNA, 25 bp, Homo sapien
gaagtacacggccacgtccacgaac

SEQ ID NO: 4026795 - DNA, 25 bp, Homo sapien
cgagcgcgcccaggtgaccgtaggt

SEQ ID NO: 4026796 - DNA, 25 bp, Homo sapien
agggccctctgcgcgggccgcaggc

SEQ ID NO: 4026797 - DNA, 25 bp, Homo sapien
gcgcgcccaggtgaccgtaggtctc

SEQ ID NO: 4026798 - DNA, 25 bp, Homo sapien
tgccccttttccgactgggtctggc

SEQ ID NO: 4026799 - DNA, 25 bp, Homo sapien
ggagcggagccgaaggtggcgccat

SEQ ID NO: 4026800 - DNA, 25 bp, Homo sapien
ggacccgagaagccggcgccacggc

SEQ ID NO: 4026801 - DNA, 25 bp, Homo sapien
cctcggccctcgggcgctggcggcc

SEQ ID NO: 4026802 - DNA, 25 bp, Homo sapien
tccagctatcgattttattgaccgg

SEQ ID NO: 4026803 - DNA, 25 bp, Homo sapien
tgctgttattcaggaaactcctgcc

SEQ ID NO: 4026804 - DNA, 25 bp, Homo sapien
acttgggtgaaaggcaccggaagat

SEQ ID NO: 4026805 - DNA, 25 bp, Homo sapien
aaaatggcggcgctgctaccgcacc

SEQ ID NO: 4026806 - DNA, 25 bp, Homo sapien
tacgcgcgttcattggacgagagcc

SEQ ID NO: 4026807 - DNA, 25 bp, Homo sapien
ccctcaagtgtaatggcgctgcgat

SEQ ID NO: 4026808 - DNA, 25 bp, Homo sapien
cgagcgttctgattgggtgctagca

SEQ ID NO: 4026809 - DNA, 25 bp, Homo sapien
tccgtttgaacgaagccaagagctg

SEQ ID NO: 4026810 - DNA, 25 bp, Homo sapien
gatcaggcgactacaaggagttgtg

SEQ ID NO: 4026811 - DNA, 25 bp, Homo sapien
aagctggactgctaggatcaggcga

SEQ ID NO: 4026812 - DNA, 25 bp, Homo sapien
aaggagttgtgaagcgacttgcacc

SEQ ID NO: 4026813 - DNA, 25 bp, Homo sapien
gagttgtgaagcgacttgcaccgac

SEQ ID NO: 4026814 - DNA, 25 bp, Homo sapien
cactgaaggagggaacgatttgagc

SEQ ID NO: 4026815 - DNA, 25 bp, Homo sapien
tttccgctgttcgactctggcaggc

SEQ ID NO: 4026816 - DNA, 25 bp, Homo sapien
cactctggccgagttagagctgaga

SEQ ID NO: 4026817 - DNA, 25 bp, Homo sapien
tactggtgttctcagagcatccttg

SEQ ID NO: 4026818 - DNA, 25 bp, Homo sapien
tcttctcaagttcaatattctgcat

SEQ ID NO: 4026819 - DNA, 25 bp, Homo sapien
ttcttctcaagttcaatattctgca

SEQ ID NO: 4026820 - DNA, 25 bp, Homo sapien
ttgttttcttctcaagttcaatatt

SEQ ID NO: 4026821 - DNA, 25 bp, Homo sapien
ttttcttctcaagttcaatattctg

SEQ ID NO: 4026822 - DNA, 25 bp, Homo sapien
tatgaatggccaagggagcctcttt

SEQ ID NO: 4026823 - DNA, 25 bp, Homo sapien
tggagcaagtttcccagtcagcaag

SEQ ID NO: 4026824 - DNA, 25 bp, Homo sapien
catccgcatatgtgcgtggacagcg

SEQ ID NO: 4026825 - DNA, 25 bp, Homo sapien
cacacagtcaaagcaccagtagggc

SEQ ID NO: 4026826 - DNA, 25 bp, Homo sapien
gctgccattcataaacgggagtgcc

SEQ ID NO: 4026827 - DNA, 25 bp, Homo sapien
gttatgcagtgctacggaggacacc

SEQ ID NO: 4026828 - DNA, 25 bp, Homo sapien
taaagttttgccaccagtgctagtg

SEQ ID NO: 4026829 - DNA, 25 bp, Homo sapien
ggtagtgtcccaacccaaatgctgc

SEQ ID NO: 4026830 - DNA, 25 bp, Homo sapien
cctgattaggcaccacttgtggctg

SEQ ID NO: 4026831 - DNA, 25 bp, Homo sapien
tcacgtccctgattaggcaccactt

SEQ ID NO: 4026832 - DNA, 25 bp, Homo sapien
gattaggcaccacttgtggctgttg

SEQ ID NO: 4026833 - DNA, 25 bp, Homo sapien
cgtccctgattaggcaccacttgtg

SEQ ID NO: 4026834 - DNA, 25 bp, Homo sapien
ctgaatgaaggaggacaaacgcaga

SEQ ID NO: 4026835 - DNA, 25 bp, Homo sapien
atgaaggaggacaaacgcagaaatg

SEQ ID NO: 4026836 - DNA, 25 bp, Homo sapien
caaagacaaaaggatctgttttaag

SEQ ID NO: 4026837 - DNA, 25 bp, Homo sapien
gaatgaaggaggacaaacgcagaaa

SEQ ID NO: 4026838 - DNA, 25 bp, Homo sapien
tacggcatgaccatcctcagcattc

SEQ ID NO: 4026839 - DNA, 25 bp, Homo sapien
ctacggcatgaccatcctcagcatt

SEQ ID NO: 4026840 - DNA, 25 bp, Homo sapien
ctcatggttgaggagcccccaggcc

SEQ ID NO: 4026841 - DNA, 25 bp, Homo sapien
catggttgaggagcccccaggccat

SEQ ID NO: 4026842 - DNA, 25 bp, Homo sapien
tcatggttgaggagcccccaggcca

SEQ ID NO: 4026843 - DNA, 25 bp, Homo sapien
gattgggcggtgtccagaggctccg

SEQ ID NO: 4026844 - DNA, 25 bp, Homo sapien
tccagaggctccgagaagaaggcca

SEQ ID NO: 4026845 - DNA, 25 bp, Homo sapien
ccagaggctccgagaagaaggccat

SEQ ID NO: 4026846 - DNA, 25 bp, Homo sapien
gggaccggcgattgggcggtgtcca

SEQ ID NO: 4026847 - DNA, 25 bp, Homo sapien
gtttgtgtcgcgagcccttgagccg

SEQ ID NO: 4026848 - DNA, 25 bp, Homo sapien
taatcttcctgttccctcgctaggc

SEQ ID NO: 4026849 - DNA, 25 bp, Homo sapien
tgatgctggaagacatcgccagtcc

SEQ ID NO: 4026850 - DNA, 25 bp, Homo sapien
cttgggatccgagtgaattctagcc

SEQ ID NO: 4026851 - DNA, 25 bp, Homo sapien
tcagcttcgtctggagagcggcctg

SEQ ID NO: 4026852 - DNA, 25 bp, Homo sapien
tggtcgtcagcttcgtctggagagc

SEQ ID NO: 4026853 - DNA, 25 bp, Homo sapien
gccgagaccgagaccgggagcagcg

SEQ ID NO: 4026854 - DNA, 25 bp, Homo sapien
gccaggccttggtcgtcagcttcgt

SEQ ID NO: 4026855 - DNA, 25 bp, Homo sapien
gggcctcagccgctaacgccctttc

SEQ ID NO: 4026856 - DNA, 25 bp, Homo sapien
ctcgtccgcgcagctcacccaccgg

SEQ ID NO: 4026857 - DNA, 25 bp, Homo sapien
ctaacgccctttctggtgagtttgg

SEQ ID NO: 4026858 - DNA, 25 bp, Homo sapien
tcagccgctaacgccctttctggtg

SEQ ID NO: 4026859 - DNA, 25 bp, Homo sapien
tccggcgccgtctttgcccagaaag

SEQ ID NO: 4026860 - DNA, 25 bp, Homo sapien
ccggcgccgtctttgcccagaaaga

SEQ ID NO: 4026861 - DNA, 25 bp, Homo sapien
ttcctgcctgggtccggccccctga

SEQ ID NO: 4026862 - DNA, 25 bp, Homo sapien
ctgcctgggtccggccccctgaggc

SEQ ID NO: 4026863 - DNA, 25 bp, Homo sapien
ttgctaaggggccatgctgacctct

SEQ ID NO: 4026864 - DNA, 25 bp, Homo sapien
catgctgacctctgtataatgtttt

SEQ ID NO: 4026865 - DNA, 25 bp, Homo sapien
gctgacctctgtataatgttttagt

SEQ ID NO: 4026866 - DNA, 25 bp, Homo sapien
tgctaaggggccatgctgacctctg

SEQ ID NO: 4026867 - DNA, 25 bp, Homo sapien
aacttgctgcagcttactgggtgat

SEQ ID NO: 4026868 - DNA, 25 bp, Homo sapien
cgaagcagcgctacagaagtgggct

SEQ ID NO: 4026869 - DNA, 25 bp, Homo sapien
catcctcgcgtaaaacgaagcagcg

SEQ ID NO: 4026870 - DNA, 25 bp, Homo sapien
tctagaaagtttgcgaagagatggc

SEQ ID NO: 4026871 - DNA, 25 bp, Homo sapien
gtgctgcaccctacgctagcacgcg

SEQ ID NO: 4026872 - DNA, 25 bp, Homo sapien
gcaaacggtaaaggcgctccgagga

SEQ ID NO: 4026873 - DNA, 25 bp, Homo sapien
aggtggcggtggtccgagctggcag

SEQ ID NO: 4026874 - DNA, 25 bp, Homo sapien
caggtagatctaggggcaaacggta

SEQ ID NO: 4026875 - DNA, 25 bp, Homo sapien
gttcgctgggagtagcgtctgccct

SEQ ID NO: 4026876 - DNA, 25 bp, Homo sapien
catctgtgtgctgcgcgaagaggca

SEQ ID NO: 4026877 - DNA, 25 bp, Homo sapien
ccggcgatagcgattccgagcgagt

SEQ ID NO: 4026878 - DNA, 25 bp, Homo sapien
tgtctctcgcgagaagacgggccgc

SEQ ID NO: 4026879 - DNA, 25 bp, Homo sapien
tgggacgagtagtcggggcgcgcgc

SEQ ID NO: 4026880 - DNA, 25 bp, Homo sapien
agtcacccctcaggggcgcgcggga

SEQ ID NO: 4026881 - DNA, 25 bp, Homo sapien
accacatctagccgggggaccagga

SEQ ID NO: 4026882 - DNA, 25 bp, Homo sapien
acccagtcacccctcaggggcgcgc

SEQ ID NO: 4026883 - DNA, 25 bp, Homo sapien
ctctcagcctttcgcggtcgggtga

SEQ ID NO: 4026884 - DNA, 25 bp, Homo sapien
tggtggcacgaaccctcccttctct

SEQ ID NO: 4026885 - DNA, 25 bp, Homo sapien
cagcctttcgcggtcgggtgatggg

SEQ ID NO: 4026886 - DNA, 25 bp, Homo sapien
ctggtggcacgaaccctcccttctc

SEQ ID NO: 4026887 - DNA, 25 bp, Homo sapien
taatcttttctgtatcctcccagtt

SEQ ID NO: 4026888 - DNA, 25 bp, Homo sapien
ttagtatatgtgttgccaaagtgag

SEQ ID NO: 4026889 - DNA, 25 bp, Homo sapien
agtatatgtgttgccaaagtgagca

SEQ ID NO: 4026890 - DNA, 25 bp, Homo sapien
cttttctgtatcctcccagttttag

SEQ ID NO: 4026891 - DNA, 25 bp, Homo sapien
tcacagttcagcttaagtaaaccag

SEQ ID NO: 4026892 - DNA, 25 bp, Homo sapien
taacccgcacggtaataaatgggca

SEQ ID NO: 4026893 - DNA, 25 bp, Homo sapien
ttgagtgacatttggacaagtccct

SEQ ID NO: 4026894 - DNA, 25 bp, Homo sapien
tcttccctgggcgtgtacctcatga

SEQ ID NO: 4026895 - DNA, 25 bp, Homo sapien
tgaaataccatgctggccatttgtg

SEQ ID NO: 4026896 - DNA, 25 bp, Homo sapien
tatttcatgtggttgaaataccatg

SEQ ID NO: 4026897 - DNA, 25 bp, Homo sapien
ttggctaatgttgagctttatttca

SEQ ID NO: 4026898 - DNA, 25 bp, Homo sapien
ccctgttggctaatgttgagcttta

SEQ ID NO: 4026899 - DNA, 25 bp, Homo sapien
ggcagaaatctacccaagaagaggg

SEQ ID NO: 4026900 - DNA, 25 bp, Homo sapien
gccaaactggtttgagtcagccaca

SEQ ID NO: 4026901 - DNA, 25 bp, Homo sapien
tctgtatgagcatccgcgtaaggag

SEQ ID NO: 4026902 - DNA, 25 bp, Homo sapien
tagcccaggactatatgttccaggc

SEQ ID NO: 4026903 - DNA, 25 bp, Homo sapien
gcttgaaacgggttgcagtacctag

SEQ ID NO: 4026904 - DNA, 25 bp, Homo sapien
cagtacctagggtcctgctctctga

SEQ ID NO: 4026905 - DNA, 25 bp, Homo sapien
ttctccattcccataactgttttca

SEQ ID NO: 4026906 - DNA, 25 bp, Homo sapien
cttagggaagtaaagtctttctgat

SEQ ID NO: 4026907 - DNA, 25 bp, Homo sapien
gcccattgggctatgagaatgaggt

SEQ ID NO: 4026908 - DNA, 25 bp, Homo sapien
tgagattttgatccgtgacagggaa

SEQ ID NO: 4026909 - DNA, 25 bp, Homo sapien
tttcccataggcgatcttgtgagct

SEQ ID NO: 4026910 - DNA, 25 bp, Homo sapien
gagtgaagttactctagcctcactg

SEQ ID NO: 4026911 - DNA, 25 bp, Homo sapien
ttctactgcaaatgggaaacttcaa

SEQ ID NO: 4026912 - DNA, 25 bp, Homo sapien
gatgtgtccagactgcacttcccac

SEQ ID NO: 4026913 - DNA, 25 bp, Homo sapien
gatgtgaatacagttgttgtgacag

SEQ ID NO: 4026914 - DNA, 25 bp, Homo sapien
caggttcacctgatgtgaatacagt

SEQ ID NO: 4026915 - DNA, 25 bp, Homo sapien
caactgttgcgcagggatagtgcct

SEQ ID NO: 4026916 - DNA, 25 bp, Homo sapien
ggaacactggtagtcctggcagcgt

SEQ ID NO: 4026917 - DNA, 25 bp, Homo sapien
gcatgatcatggagggccagtacca

SEQ ID NO: 4026918 - DNA, 25 bp, Homo sapien
tggatgaaacccacccaggctatgg

SEQ ID NO: 4026919 - DNA, 25 bp, Homo sapien
cagacctttattggggaaaatgttg

SEQ ID NO: 4026920 - DNA, 25 bp, Homo sapien
acttgggtcttgatgtaggctcgga

SEQ ID NO: 4026921 - DNA, 25 bp, Homo sapien
ctggaagggccgctctagtgcagtc

SEQ ID NO: 4026922 - DNA, 25 bp, Homo sapien
tagtgcagtcaacttgctgctgagc

SEQ ID NO: 4026923 - DNA, 25 bp, Homo sapien
taggctcggaggacgtggatgtggc

SEQ ID NO: 4026924 - DNA, 25 bp, Homo sapien
tggtccctagttgggcaaacagtcc

SEQ ID NO: 4026925 - DNA, 25 bp, Homo sapien
taggaaatgttagcaagcccttgtg

SEQ ID NO: 4026926 - DNA, 25 bp, Homo sapien
tatagaggtagcaatgttgtttccc

SEQ ID NO: 4026927 - DNA, 25 bp, Homo sapien
cctagcacataggattgagggagga

SEQ ID NO: 4026928 - DNA, 25 bp, Homo sapien
gggccactgtctctagttcctcttt

SEQ ID NO: 4026929 - DNA, 25 bp, Homo sapien
tctggctctggtggggccactgtct

SEQ ID NO: 4026930 - DNA, 25 bp, Homo sapien
tggtggggccactgtctctagttcc

SEQ ID NO: 4026931 - DNA, 25 bp, Homo sapien
gctctggctctggtggggccactgt

SEQ ID NO: 4026932 - DNA, 25 bp, Homo sapien
tccatctccttgctttcttctttct

SEQ ID NO: 4026933 - DNA, 25 bp, Homo sapien
tgcggggtaactgcctgctcctcca

SEQ ID NO: 4026934 - DNA, 25 bp, Homo sapien
tgctcctccatctccttgctttctt

SEQ ID NO: 4026935 - DNA, 25 bp, Homo sapien
ctgcggggtaactgcctgctcctcc

SEQ ID NO: 4026936 - DNA, 25 bp, Homo sapien
ccagaagcaggaagagactgtggcc

SEQ ID NO: 4026937 - DNA, 25 bp, Homo sapien
gaagcaggaagagactgtggcccca

SEQ ID NO: 4026938 - DNA, 25 bp, Homo sapien
ctgcaaaccagaagcaggaagagac

SEQ ID NO: 4026939 - DNA, 25 bp, Homo sapien
gccctgccctggcactctcccttac

SEQ ID NO: 4026940 - DNA, 25 bp, Homo sapien
gctgtagccccatgtaagtcaaaga

SEQ ID NO: 4026941 - DNA, 25 bp, Homo sapien
gtagccccatgtaagtcaaagacag

SEQ ID NO: 4026942 - DNA, 25 bp, Homo sapien
ggtggctgtagccccatgtaagtca

SEQ ID NO: 4026943 - DNA, 25 bp, Homo sapien
tggctgtagccccatgtaagtcaaa

SEQ ID NO: 4026944 - DNA, 25 bp, Homo sapien
cgtatttatagagcttgaagtggcg

SEQ ID NO: 4026945 - DNA, 25 bp, Homo sapien
tgaagtggcggaagtaagtgttgac

SEQ ID NO: 4026946 - DNA, 25 bp, Homo sapien
gttgaccacgtagtcttccaaggcc

SEQ ID NO: 4026947 - DNA, 25 bp, Homo sapien
gggtgtgaagacgtatttatagagc

SEQ ID NO: 4026948 - DNA, 25 bp, Homo sapien
tgtggtggtgactcggaattagaac

SEQ ID NO: 4026949 - DNA, 25 bp, Homo sapien
ctcggaattagaaccctgactacct

SEQ ID NO: 4026950 - DNA, 25 bp, Homo sapien
tagaaccctgactaccttccggagc

SEQ ID NO: 4026951 - DNA, 25 bp, Homo sapien
ctccaaaagcccagcaacaggagca

SEQ ID NO: 4026952 - DNA, 25 bp, Homo sapien
aagaagataagggtgatgaatgtga

SEQ ID NO: 4026953 - DNA, 25 bp, Homo sapien
acaagaagataagggtgatgaatgt

SEQ ID NO: 4026954 - DNA, 25 bp, Homo sapien
cttcacaagaagataagggtgatga

SEQ ID NO: 4026955 - DNA, 25 bp, Homo sapien
tcacaagaagataagggtgatgaat

SEQ ID NO: 4026956 - DNA, 25 bp, Homo sapien
gtagcggtagcactcctccacgttg

SEQ ID NO: 4026957 - DNA, 25 bp, Homo sapien
ggcaaaaaaggacactggtgaagta

SEQ ID NO: 4026958 - DNA, 25 bp, Homo sapien
gacactggtgaagtagcggtagcac

SEQ ID NO: 4026959 - DNA, 25 bp, Homo sapien
gtgaagtagcggtagcactcctcca

SEQ ID NO: 4026960 - DNA, 25 bp, Homo sapien
gcagtgaggccctctctggtatcca

SEQ ID NO: 4026961 - DNA, 25 bp, Homo sapien
agtgaggccctctctggtatccatt

SEQ ID NO: 4026962 - DNA, 25 bp, Homo sapien
attcattcacttcactcaacagctg

SEQ ID NO: 4026963 - DNA, 25 bp, Homo sapien
ttcattcacttcactcaacagctgt

SEQ ID NO: 4026964 - DNA, 25 bp, Homo sapien
tctagataaggaagcagtggattgg

SEQ ID NO: 4026965 - DNA, 25 bp, Homo sapien
agtcctgtaaaatgtgtgctgtatc

SEQ ID NO: 4026966 - DNA, 25 bp, Homo sapien
gctgatggcttgtgtatgatgatgc

SEQ ID NO: 4026967 - DNA, 25 bp, Homo sapien
atggtcacttgtgccaggcccggtt

SEQ ID NO: 4026968 - DNA, 25 bp, Homo sapien
caagccttgtgaagatcctggagca

SEQ ID NO: 4026969 - DNA, 25 bp, Homo sapien
cctgctggcggcagaaaatgagcgc

SEQ ID NO: 4026970 - DNA, 25 bp, Homo sapien
aagaggtccagggtgatggcgtccc

SEQ ID NO: 4026971 - DNA, 25 bp, Homo sapien
gccgctgacgtctgctccagtgaga

SEQ ID NO: 4026972 - DNA, 25 bp, Homo sapien
ttcatcaccctacacccaccacatg

SEQ ID NO: 4026973 - DNA, 25 bp, Homo sapien
gagaggagtgagtgacaactgggcc

SEQ ID NO: 4026974 - DNA, 25 bp, Homo sapien
gtgagtgacaactgggcctcctttc

SEQ ID NO: 4026975 - DNA, 25 bp, Homo sapien
tcatgttttcccaacctgacccctc

SEQ ID NO: 4026976 - DNA, 25 bp, Homo sapien
catggaatggacgtccaggtacttc

SEQ ID NO: 4026977 - DNA, 25 bp, Homo sapien
ccagctggtgcatggaatggacgtc

SEQ ID NO: 4026978 - DNA, 25 bp, Homo sapien
gcatggaatggacgtccaggtactt

SEQ ID NO: 4026979 - DNA, 25 bp, Homo sapien
gctggtgcatggaatggacgtccag

SEQ ID NO: 4026980 - DNA, 25 bp, Homo sapien
cacatgcagatccggggtcggggca

SEQ ID NO: 4026981 - DNA, 25 bp, Homo sapien
gctgtaacttgccatctcatctcaa

SEQ ID NO: 4026982 - DNA, 25 bp, Homo sapien
cagctgcggtgtcctggcccgtagc

SEQ ID NO: 4026983 - DNA, 25 bp, Homo sapien
tagcgaatctccagcaggccggaga

SEQ ID NO: 4026984 - DNA, 25 bp, Homo sapien
aagccgctgtaacttgccatctcat

SEQ ID NO: 4026985 - DNA, 25 bp, Homo sapien
taaatattcacgagcagaccagact

SEQ ID NO: 4026986 - DNA, 25 bp, Homo sapien
gacgtcccgaacgttagtaagcata

SEQ ID NO: 4026987 - DNA, 25 bp, Homo sapien
ttcagcaggccctaggtgctctacg

SEQ ID NO: 4026988 - DNA, 25 bp, Homo sapien
gtaagcataatgacaggtggcgcct

SEQ ID NO: 4026989 - DNA, 25 bp, Homo sapien
agtggctggtcttgcggttgagcat

SEQ ID NO: 4026990 - DNA, 25 bp, Homo sapien
gagagatgttcaagctccgactgca

SEQ ID NO: 4026991 - DNA, 25 bp, Homo sapien
gactgcaccctcattcccaaaaagt

SEQ ID NO: 4026992 - DNA, 25 bp, Homo sapien
actgagctgcgatccttccccgctt

SEQ ID NO: 4026993 - DNA, 25 bp, Homo sapien
tcttccaggttgctaatacgagggc

SEQ ID NO: 4026994 - DNA, 25 bp, Homo sapien
tacgtgagaagttgcgagtgcccac

SEQ ID NO: 4026995 - DNA, 25 bp, Homo sapien
tcacgccagtgggagcgaagagaac

SEQ ID NO: 4026996 - DNA, 25 bp, Homo sapien
tggcgggaccaagcgtaaccaatag

SEQ ID NO: 4026997 - DNA, 25 bp, Homo sapien
tccgctctctcaagggctgatcggg

SEQ ID NO: 4026998 - DNA, 25 bp, Homo sapien
agcctaggacctccacctgtagcct

SEQ ID NO: 4026999 - DNA, 25 bp, Homo sapien
tctctcaagggctgatcgggagaag

SEQ ID NO: 4027000 - DNA, 25 bp, Homo sapien
accaagcggaaggaatcagaactcc

SEQ ID NO: 4027001 - DNA, 25 bp, Homo sapien
tgacctcgggcgtagggccggcggc

SEQ ID NO: 4027002 - DNA, 25 bp, Homo sapien
ggccgccacggtgacctcgggcgta

SEQ ID NO: 4027003 - DNA, 25 bp, Homo sapien
ccaggacgaactggagaaggagacg

SEQ ID NO: 4027004 - DNA, 25 bp, Homo sapien
gcggcgggcacgctggtggaagcgc

SEQ ID NO: 4027005 - DNA, 25 bp, Homo sapien
tcttgagacgtgactcctgacgggc

SEQ ID NO: 4027006 - DNA, 25 bp, Homo sapien
gatggcaacatggttctccgcacaa

SEQ ID NO: 4027007 - DNA, 25 bp, Homo sapien
tatgctacaccctagtccgaaacag

SEQ ID NO: 4027008 - DNA, 25 bp, Homo sapien
catctcatagggcaacagtctctcc

SEQ ID NO: 4027009 - DNA, 25 bp, Homo sapien
tatactgaccatgtttctgcacccc

SEQ ID NO: 4027010 - DNA, 25 bp, Homo sapien
tttgaggaaatgagctgccactggc

SEQ ID NO: 4027011 - DNA, 25 bp, Homo sapien
tattctttggaggtcgactagcagc

SEQ ID NO: 4027012 - DNA, 25 bp, Homo sapien
gattgggctggatctcacaaccctg

SEQ ID NO: 4027013 - DNA, 25 bp, Homo sapien
taagggattccataggcctctttcc

SEQ ID NO: 4027014 - DNA, 25 bp, Homo sapien
gttttgataagggattccataggcc

SEQ ID NO: 4027015 - DNA, 25 bp, Homo sapien
tgataagggattccataggcctctt

SEQ ID NO: 4027016 - DNA, 25 bp, Homo sapien
tggggttttgataagggattccata

SEQ ID NO: 4027017 - DNA, 25 bp, Homo sapien
gttactcccgggtcagtgccattgc

SEQ ID NO: 4027018 - DNA, 25 bp, Homo sapien
taccatctgatagggttatcctccc

SEQ ID NO: 4027019 - DNA, 25 bp, Homo sapien
catcatctgagggtcgttactcccg

SEQ ID NO: 4027020 - DNA, 25 bp, Homo sapien
cagtgcagtgagtgggaccttttct

SEQ ID NO: 4027021 - DNA, 25 bp, Homo sapien
caggagggctgcgacttctgtgaag

SEQ ID NO: 4027022 - DNA, 25 bp, Homo sapien
tctctgtgggggtaggggtctcgcc

SEQ ID NO: 4027023 - DNA, 25 bp, Homo sapien
ggctgcgacttctgtgaagccggct

SEQ ID NO: 4027024 - DNA, 25 bp, Homo sapien
gcgacttctgtgaagccggctccac

SEQ ID NO: 4027025 - DNA, 25 bp, Homo sapien
cagtcggagcacacgaacaggttct

SEQ ID NO: 4027026 - DNA, 25 bp, Homo sapien
cattcagggcatttaaagggcttcc

SEQ ID NO: 4027027 - DNA, 25 bp, Homo sapien
acactgggcacttgaacgggtcctc

SEQ ID NO: 4027028 - DNA, 25 bp, Homo sapien
gatctgtggacagggtgactgcctc

SEQ ID NO: 4027029 - DNA, 25 bp, Homo sapien
agatccgggccccacagcgcagtct

SEQ ID NO: 4027030 - DNA, 25 bp, Homo sapien
ctctgtgagcatcgttggggctctg

SEQ ID NO: 4027031 - DNA, 25 bp, Homo sapien
ggctctgttccggaccctgcagatc

SEQ ID NO: 4027032 - DNA, 25 bp, Homo sapien
ggccccacagcgcagtctcgggctc

SEQ ID NO: 4027033 - DNA, 25 bp, Homo sapien
cagagctcaggactgcagtgttcca

SEQ ID NO: 4027034 - DNA, 25 bp, Homo sapien
ctcaggactgcagtgttccagggac

SEQ ID NO: 4027035 - DNA, 25 bp, Homo sapien
cccagagctcaggactgcagtgttc

SEQ ID NO: 4027036 - DNA, 25 bp, Homo sapien
agctcaggactgcagtgttccaggg

SEQ ID NO: 4027037 - DNA, 25 bp, Homo sapien
caccccggccacagccccgggcgcg

SEQ ID NO: 4027038 - DNA, 25 bp, Homo sapien
cggccgtcccgggcactccaggcca

SEQ ID NO: 4027039 - DNA, 25 bp, Homo sapien
cggccacagccccgggcgcgggtgg

SEQ ID NO: 4027040 - DNA, 25 bp, Homo sapien
ccggcggccgtcccgggcactccag

SEQ ID NO: 4027041 - DNA, 25 bp, Homo sapien
gggtccttctcaaggggtgattcca

SEQ ID NO: 4027042 - DNA, 25 bp, Homo sapien
ggtgattccaggctgaggacccggg

SEQ ID NO: 4027043 - DNA, 25 bp, Homo sapien
agttcagggtgactgggacggagca

SEQ ID NO: 4027044 - DNA, 25 bp, Homo sapien
gaaaagccggaaggcggaatccagc

SEQ ID NO: 4027045 - DNA, 25 bp, Homo sapien
atcataagctccaacctctggtgtc

SEQ ID NO: 4027046 - DNA, 25 bp, Homo sapien
gtctggccagggatactctagaggg

SEQ ID NO: 4027047 - DNA, 25 bp, Homo sapien
ctggccagggatactctagagggca

SEQ ID NO: 4027048 - DNA, 25 bp, Homo sapien
catcataagctccaacctctggtgt

SEQ ID NO: 4027049 - DNA, 25 bp, Homo sapien
caaatgtccccagagtgactagcgg

SEQ ID NO: 4027050 - DNA, 25 bp, Homo sapien
aataacttgtccgaggagctcagcc

SEQ ID NO: 4027051 - DNA, 25 bp, Homo sapien
tgcgcggttacaggcattcaatcct

SEQ ID NO: 4027052 - DNA, 25 bp, Homo sapien
tattctcatgtctcaaacgtgaccc

SEQ ID NO: 4027053 - DNA, 25 bp, Homo sapien
ccccagagtgaaaggatgtagccac

SEQ ID NO: 4027054 - DNA, 25 bp, Homo sapien
gtgaaaggatgtagccacacagaac

SEQ ID NO: 4027055 - DNA, 25 bp, Homo sapien
gagcagatggccgagaaccgcaccc

SEQ ID NO: 4027056 - DNA, 25 bp, Homo sapien
cagagtgaaaggatgtagccacaca

SEQ ID NO: 4027057 - DNA, 25 bp, Homo sapien
gggccgctgaggattctccgaattc

SEQ ID NO: 4027058 - DNA, 25 bp, Homo sapien
ccgaattcgctggatctggacccag

SEQ ID NO: 4027059 - DNA, 25 bp, Homo sapien
tccttggaggtggtccagtgagtcc

SEQ ID NO: 4027060 - DNA, 25 bp, Homo sapien
ttttttgctgcggcttagacgaggg

SEQ ID NO: 4027061 - DNA, 25 bp, Homo sapien
tgatcaacaggggaacgtgcgttcg

SEQ ID NO: 4027062 - DNA, 25 bp, Homo sapien
caacaggggaacgtgcgttcgccag

SEQ ID NO: 4027063 - DNA, 25 bp, Homo sapien
gaatgatcaacaggggaacgtgcgt

SEQ ID NO: 4027064 - DNA, 25 bp, Homo sapien
ctgaatgatcaacaggggaacgtgc

SEQ ID NO: 4027065 - DNA, 25 bp, Homo sapien
tagttgtctgggccgctggggtcgc

SEQ ID NO: 4027066 - DNA, 25 bp, Homo sapien
gtctgggccgctggggtcgcctcca

SEQ ID NO: 4027067 - DNA, 25 bp, Homo sapien
tctgggccgctggggtcgcctccac

SEQ ID NO: 4027068 - DNA, 25 bp, Homo sapien
ttagttgtctgggccgctggggtcg

SEQ ID NO: 4027069 - DNA, 25 bp, Homo sapien
acggccaggacgtgcaggccgcccc

SEQ ID NO: 4027070 - DNA, 25 bp, Homo sapien
gccaggacgtgcaggccgccccctg

SEQ ID NO: 4027071 - DNA, 25 bp, Homo sapien
cacggccaggacgtgcaggccgccc

SEQ ID NO: 4027072 - DNA, 25 bp, Homo sapien
ggccaggacgtgcaggccgccccct

SEQ ID NO: 4027073 - DNA, 25 bp, Homo sapien
gagggccgaggaagccaccatcacg

SEQ ID NO: 4027074 - DNA, 25 bp, Homo sapien
ttgtgggctcaaccaatgtcttctg

SEQ ID NO: 4027075 - DNA, 25 bp, Homo sapien
cacgacgtcacagagcaagctccat

SEQ ID NO: 4027076 - DNA, 25 bp, Homo sapien
tccttgtgggctcaaccaatgtctt

SEQ ID NO: 4027077 - DNA, 25 bp, Homo sapien
tgggcatgccgtggtgtcggcccct

SEQ ID NO: 4027078 - DNA, 25 bp, Homo sapien
ccagtggctgtgctgcgagtcttat

SEQ ID NO: 4027079 - DNA, 25 bp, Homo sapien
agtcttattccagcgcggcgcccga

SEQ ID NO: 4027080 - DNA, 25 bp, Homo sapien
tgctgcgagtcttattccagcgcgg

SEQ ID NO: 4027081 - DNA, 25 bp, Homo sapien
gctgagtactcgcacttgacactgt

SEQ ID NO: 4027082 - DNA, 25 bp, Homo sapien
ttcgcaggctggcagcatcgcggct

SEQ ID NO: 4027083 - DNA, 25 bp, Homo sapien
caggctggcagcatcgcggctttga

SEQ ID NO: 4027084 - DNA, 25 bp, Homo sapien
tgagtactcgcacttgacactgtaa

SEQ ID NO: 4027085 - DNA, 25 bp, Homo sapien
cttgacatgcagaggctgggaacag

SEQ ID NO: 4027086 - DNA, 25 bp, Homo sapien
catgcagaggctgggaacaggtgcc

SEQ ID NO: 4027087 - DNA, 25 bp, Homo sapien
tgcagaggctgggaacaggtgcctc

SEQ ID NO: 4027088 - DNA, 25 bp, Homo sapien
cagaggctgggaacaggtgcctcac

SEQ ID NO: 4027089 - DNA, 25 bp, Homo sapien
ggggaagagtgaaggtaatctcata

SEQ ID NO: 4027090 - DNA, 25 bp, Homo sapien
gcgggggaagagtgaaggtaatctc

SEQ ID NO: 4027091 - DNA, 25 bp, Homo sapien
cgggggaagagtgaaggtaatctca

SEQ ID NO: 4027092 - DNA, 25 bp, Homo sapien
gggaagagtgaaggtaatctcatac

SEQ ID NO: 4027093 - DNA, 25 bp, Homo sapien
catgaagcctctcatcaaagcagac

SEQ ID NO: 4027094 - DNA, 25 bp, Homo sapien
tgccgcaaagcagatactcctccgg

SEQ ID NO: 4027095 - DNA, 25 bp, Homo sapien
agccctctgtatcgtggcctgccgc

SEQ ID NO: 4027096 - DNA, 25 bp, Homo sapien
cgcaaagcagatactcctccggact

SEQ ID NO: 4027097 - DNA, 25 bp, Homo sapien
caaagcagatactcctccggactct

SEQ ID NO: 4027098 - DNA, 25 bp, Homo sapien
cttagcagcctcccgtgttgcaggg

SEQ ID NO: 4027099 - DNA, 25 bp, Homo sapien
gcagcctcccgtgttgcaggggctg

SEQ ID NO: 4027100 - DNA, 25 bp, Homo sapien
gcttagcagcctcccgtgttgcagg

SEQ ID NO: 4027101 - DNA, 25 bp, Homo sapien
tagcagcctcccgtgttgcaggggc

SEQ ID NO: 4027102 - DNA, 25 bp, Homo sapien
tccttaggacaagatgtaaatcaag

SEQ ID NO: 4027103 - DNA, 25 bp, Homo sapien
attttgaaacgtaagtagcacctca

SEQ ID NO: 4027104 - DNA, 25 bp, Homo sapien
gattaacagccaaagctatatgcag

SEQ ID NO: 4027105 - DNA, 25 bp, Homo sapien
tttcaagtttcatggacagtggaca

SEQ ID NO: 4027106 - DNA, 25 bp, Homo sapien
tagagagaaacaacaaccgaatgca

SEQ ID NO: 4027107 - DNA, 25 bp, Homo sapien
taatatcaacaccatgcagacaaag

SEQ ID NO: 4027108 - DNA, 25 bp, Homo sapien
cccgattaagggatactagagagaa

SEQ ID NO: 4027109 - DNA, 25 bp, Homo sapien
catctaaagggtgttactgagacaa

SEQ ID NO: 4027110 - DNA, 25 bp, Homo sapien
ggaacatgaggtctgcaacttattc

SEQ ID NO: 4027111 - DNA, 25 bp, Homo sapien
tgtgaacaccaggtgaatttgggac

SEQ ID NO: 4027112 - DNA, 25 bp, Homo sapien
aaggctatgcagatgtccattgtac

SEQ ID NO: 4027113 - DNA, 25 bp, Homo sapien
tgtactgtgggaggaaacacactat

SEQ ID NO: 4027114 - DNA, 25 bp, Homo sapien
cggtggcacaagtccatagtccgag

SEQ ID NO: 4027115 - DNA, 25 bp, Homo sapien
caggctggtgaggttaagagcttgg

SEQ ID NO: 4027116 - DNA, 25 bp, Homo sapien
aaaggaggacatttaggcactgaaa

SEQ ID NO: 4027117 - DNA, 25 bp, Homo sapien
gacatttaggcactgaaaccatttg

SEQ ID NO: 4027118 - DNA, 25 bp, Homo sapien
cacgactgcccggtgaggtagatac

SEQ ID NO: 4027119 - DNA, 25 bp, Homo sapien
ggataccattaacgtctgcccatag

SEQ ID NO: 4027120 - DNA, 25 bp, Homo sapien
tacaattaacccttagctgagagca

SEQ ID NO: 4027121 - DNA, 25 bp, Homo sapien
aagggtgccccaagtcataccatgc

SEQ ID NO: 4027122 - DNA, 25 bp, Homo sapien
tcaccctggtgacgactgagaaaag

SEQ ID NO: 4027123 - DNA, 25 bp, Homo sapien
catgggctgaacctaaagcattggc

SEQ ID NO: 4027124 - DNA, 25 bp, Homo sapien
gaaagcgttttctgtaattcaccag

SEQ ID NO: 4027125 - DNA, 25 bp, Homo sapien
tcccagcacaagaagtggtactgca

SEQ ID NO: 4027126 - DNA, 25 bp, Homo sapien
tgaaaggccgcttgtccacatgggt

SEQ ID NO: 4027127 - DNA, 25 bp, Homo sapien
gaaccacttgccgtatgtcctcggg

SEQ ID NO: 4027128 - DNA, 25 bp, Homo sapien
tcctagtacaacagacccaacggtg

SEQ ID NO: 4027129 - DNA, 25 bp, Homo sapien
tggcatacataagccctggcgtgcg

SEQ ID NO: 4027130 - DNA, 25 bp, Homo sapien
ggagctctggtgtccggcaccgcca

SEQ ID NO: 4027131 - DNA, 25 bp, Homo sapien
cttcagccccttctcgtgaagggct

SEQ ID NO: 4027132 - DNA, 25 bp, Homo sapien
tgaagggctctcctcgtcattctca

SEQ ID NO: 4027133 - DNA, 25 bp, Homo sapien
cgccatggaactgggccggacattt

SEQ ID NO: 4027134 - DNA, 25 bp, Homo sapien
cttccgatggccagacactatgctt

SEQ ID NO: 4027135 - DNA, 25 bp, Homo sapien
gccagacggccatagaatggtcgat

SEQ ID NO: 4027136 - DNA, 25 bp, Homo sapien
ccacagagctggttgttgccggttg

SEQ ID NO: 4027137 - DNA, 25 bp, Homo sapien
gcacccggcctcaatatttgaagcg

SEQ ID NO: 4027138 - DNA, 25 bp, Homo sapien
ctcttttgtcaataagctcattaat

SEQ ID NO: 4027139 - DNA, 25 bp, Homo sapien
ttacacttagcttaaagtacacatt

SEQ ID NO: 4027140 - DNA, 25 bp, Homo sapien
gagtcctgctttggcgcccaggttg

SEQ ID NO: 4027141 - DNA, 25 bp, Homo sapien
tgttattacacttagcttaaagtac

SEQ ID NO: 4027142 - DNA, 25 bp, Homo sapien
gacatcaccccaagtctaagcaggg

SEQ ID NO: 4027143 - DNA, 25 bp, Homo sapien
agaattacctctaggcgctctacca

SEQ ID NO: 4027144 - DNA, 25 bp, Homo sapien
cagcaatcacctgggcaaaggtctc

SEQ ID NO: 4027145 - DNA, 25 bp, Homo sapien
gatggcattcataccgcatggtgac

SEQ ID NO: 4027146 - DNA, 25 bp, Homo sapien
cagcttctgcctcgcgaggtggaga

SEQ ID NO: 4027147 - DNA, 25 bp, Homo sapien
ccgcactggagaccgggaatggctc

SEQ ID NO: 4027148 - DNA, 25 bp, Homo sapien
ttgactccggataaatcaccccaga

SEQ ID NO: 4027149 - DNA, 25 bp, Homo sapien
tgtgacacgggaacggcagcttctg

SEQ ID NO: 4027150 - DNA, 25 bp, Homo sapien
gcctggctaatgtctgtggctttga

SEQ ID NO: 4027151 - DNA, 25 bp, Homo sapien
ccactgcagctgctgtcggaagcat

SEQ ID NO: 4027152 - DNA, 25 bp, Homo sapien
gaaacagttacactacattgcagca

SEQ ID NO: 4027153 - DNA, 25 bp, Homo sapien
gctttgagcccctatatgtgtggca

SEQ ID NO: 4027154 - DNA, 25 bp, Homo sapien
gcaacaggacaggcaggccggcttc

SEQ ID NO: 4027155 - DNA, 25 bp, Homo sapien
ggcccctggggcaacaggacaggca

SEQ ID NO: 4027156 - DNA, 25 bp, Homo sapien
gggcaacaggacaggcaggccggct

SEQ ID NO: 4027157 - DNA, 25 bp, Homo sapien
aggggcccctggggcaacaggacag

SEQ ID NO: 4027158 - DNA, 25 bp, Homo sapien
caggggcatttgggcagatgcgctt

SEQ ID NO: 4027159 - DNA, 25 bp, Homo sapien
gacaggtggcactggctcaaagaca

SEQ ID NO: 4027160 - DNA, 25 bp, Homo sapien
cagatgcgcttgagtgggggggcac

SEQ ID NO: 4027161 - DNA, 25 bp, Homo sapien
ggcaccctccgagtcctctgtgtca

SEQ ID NO: 4027162 - DNA, 25 bp, Homo sapien
gtggacaggcgtgagctccacagaa

SEQ ID NO: 4027163 - DNA, 25 bp, Homo sapien
aaacaacaacgacagtgacactgtg

SEQ ID NO: 4027164 - DNA, 25 bp, Homo sapien
tgacactgtgtggaggaacgaacct

SEQ ID NO: 4027165 - DNA, 25 bp, Homo sapien
ctgaaaatgcctcgaggtagcctcg

SEQ ID NO: 4027166 - DNA, 25 bp, Homo sapien
aggctccaagccttcgactgcccag

SEQ ID NO: 4027167 - DNA, 25 bp, Homo sapien
tccaagccttcgactgcccagatcc

SEQ ID NO: 4027168 - DNA, 25 bp, Homo sapien
gctccaagccttcgactgcccagat

SEQ ID NO: 4027169 - DNA, 25 bp, Homo sapien
caagccttcgactgcccagatcccc

SEQ ID NO: 4027170 - DNA, 25 bp, Homo sapien
cattgggggttcgtcggtgctgcca

SEQ ID NO: 4027171 - DNA, 25 bp, Homo sapien
ttccagcagttctggaacaggctcc

SEQ ID NO: 4027172 - DNA, 25 bp, Homo sapien
ctccttggtcagcattgggggttcg

SEQ ID NO: 4027173 - DNA, 25 bp, Homo sapien
ggtgctgccagcagttatgcccccg

SEQ ID NO: 4027174 - DNA, 25 bp, Homo sapien
ctggaacgtcaaggtaacaaacatc

SEQ ID NO: 4027175 - DNA, 25 bp, Homo sapien
ggtaacaaacatcccctgaacagcc

SEQ ID NO: 4027176 - DNA, 25 bp, Homo sapien
gtcaaggtaacaaacatcccctgaa

SEQ ID NO: 4027177 - DNA, 25 bp, Homo sapien
acgtcaaggtaacaaacatcccctg

SEQ ID NO: 4027178 - DNA, 25 bp, Homo sapien
cagatggtcacaggccccagtcaca

SEQ ID NO: 4027179 - DNA, 25 bp, Homo sapien
gaaacagatggtcacaggccccagt

SEQ ID NO: 4027180 - DNA, 25 bp, Homo sapien
gggaaacagatggtcacaggcccca

SEQ ID NO: 4027181 - DNA, 25 bp, Homo sapien
aacagatggtcacaggccccagtca

SEQ ID NO: 4027182 - DNA, 25 bp, Homo sapien
tgtagctacagggagattctgcagg

SEQ ID NO: 4027183 - DNA, 25 bp, Homo sapien
ccagaggaatgagactgtagctaca

SEQ ID NO: 4027184 - DNA, 25 bp, Homo sapien
ctgtatagattctaagagaccagag

SEQ ID NO: 4027185 - DNA, 25 bp, Homo sapien
agctggtaggttagactctggagaa

SEQ ID NO: 4027186 - DNA, 25 bp, Homo sapien
accttccgaatggaaactctggttg

SEQ ID NO: 4027187 - DNA, 25 bp, Homo sapien
tgcagggaaccttccgaatggaaac

SEQ ID NO: 4027188 - DNA, 25 bp, Homo sapien
tgggggtccggcaggtgacacaggg

SEQ ID NO: 4027189 - DNA, 25 bp, Homo sapien
tccgaatggaaactctggttgctgt

SEQ ID NO: 4027190 - DNA, 25 bp, Homo sapien
ttaagatccagcaggatgagagggc

SEQ ID NO: 4027191 - DNA, 25 bp, Homo sapien
gacgttcccggccacgggatctctc

SEQ ID NO: 4027192 - DNA, 25 bp, Homo sapien
atccagcaggatgagagggccaccc

SEQ ID NO: 4027193 - DNA, 25 bp, Homo sapien
gactggcgcccctgccccgacgttc

SEQ ID NO: 4027194 - DNA, 25 bp, Homo sapien
ctcctcctggggatccaccactggc

SEQ ID NO: 4027195 - DNA, 25 bp, Homo sapien
ctggggatccaccactggcacccac

SEQ ID NO: 4027196 - DNA, 25 bp, Homo sapien
tcctcctggggatccaccactggca

SEQ ID NO: 4027197 - DNA, 25 bp, Homo sapien
ctcctggggatccaccactggcacc

SEQ ID NO: 4027198 - DNA, 25 bp, Homo sapien
tcgcccacagtcacccatcgcttct

SEQ ID NO: 4027199 - DNA, 25 bp, Homo sapien
tgaagatacgaagggaagtgtcgcc

SEQ ID NO: 4027200 - DNA, 25 bp, Homo sapien
gaagtgtcgcccacagtcacccatc

SEQ ID NO: 4027201 - DNA, 25 bp, Homo sapien
ttgaagatacgaagggaagtgtcgc

SEQ ID NO: 4027202 - DNA, 25 bp, Homo sapien
ggaccttctcgatggtcgccatcac

SEQ ID NO: 4027203 - DNA, 25 bp, Homo sapien
cggctccgggtctcggcccgtacag

SEQ ID NO: 4027204 - DNA, 25 bp, Homo sapien
cggcccgtacagtccggccggccat

SEQ ID NO: 4027205 - DNA, 25 bp, Homo sapien
tccggaccttctcgatggtcgccat

SEQ ID NO: 4027206 - DNA, 25 bp, Homo sapien
gcgggctcaggctccgcgccaggcc

SEQ ID NO: 4027207 - DNA, 25 bp, Homo sapien
tggagttggccgcgccctctctcgt

SEQ ID NO: 4027208 - DNA, 25 bp, Homo sapien
tgcccgccgccgagagcgggagttg

SEQ ID NO: 4027209 - DNA, 25 bp, Homo sapien
cgggagttggggacggacgcgcgag

SEQ ID NO: 4027210 - DNA, 25 bp, Homo sapien
agcccaggcctggaagcccggccgg

SEQ ID NO: 4027211 - DNA, 25 bp, Homo sapien
gaagtggacacccagtaccactgga

SEQ ID NO: 4027212 - DNA, 25 bp, Homo sapien
gatgggtaacccatggaatggcatc

SEQ ID NO: 4027213 - DNA, 25 bp, Homo sapien
gttgacccagacctagaacgcaggc

SEQ ID NO: 4027214 - DNA, 25 bp, Homo sapien
catctttccaaccaggaagtggaca

SEQ ID NO: 4027215 - DNA, 25 bp, Homo sapien
gcaaggcagaaaagaggccattgtg

SEQ ID NO: 4027216 - DNA, 25 bp, Homo sapien
agcaaggcagaaaagaggccattgt

SEQ ID NO: 4027217 - DNA, 25 bp, Homo sapien
gctgagtacttagccttgagcagag

SEQ ID NO: 4027218 - DNA, 25 bp, Homo sapien
ggcagcaagccctagagtatcctct

SEQ ID NO: 4027219 - DNA, 25 bp, Homo sapien
tgatggcggccatattgcccagcag

SEQ ID NO: 4027220 - DNA, 25 bp, Homo sapien
tgtccagtggccatattcccgggtc

SEQ ID NO: 4027221 - DNA, 25 bp, Homo sapien
gccgttccccgtcatccagggcgtg

SEQ ID NO: 4027222 - DNA, 25 bp, Homo sapien
cagccgttccccgtcatccagggcg

SEQ ID NO: 4027223 - DNA, 25 bp, Homo sapien
ggctcagccgttccccgtcatccag

SEQ ID NO: 4027224 - DNA, 25 bp, Homo sapien
ctcagccgttccccgtcatccaggg

SEQ ID NO: 4027225 - DNA, 25 bp, Homo sapien
caggtcttaaagaaggcggtggcag

SEQ ID NO: 4027226 - DNA, 25 bp, Homo sapien
ccaggtcttaaagaaggcggtggca

SEQ ID NO: 4027227 - DNA, 25 bp, Homo sapien
ggtcttaaagaaggcggtggcagga

SEQ ID NO: 4027228 - DNA, 25 bp, Homo sapien
gtcttaaagaaggcggtggcaggag

SEQ ID NO: 4027229 - DNA, 25 bp, Homo sapien
ctcccctcgtcccctgctcatgccc

SEQ ID NO: 4027230 - DNA, 25 bp, Homo sapien
tcgtcccctgctcatgccccttgtc

SEQ ID NO: 4027231 - DNA, 25 bp, Homo sapien
cctcgtcccctgctcatgccccttg

SEQ ID NO: 4027232 - DNA, 25 bp, Homo sapien
tcccctgctcatgccccttgtcatt

SEQ ID NO: 4027233 - DNA, 25 bp, Homo sapien
gggccaggctataggcttgactgat

SEQ ID NO: 4027234 - DNA, 25 bp, Homo sapien
agcagcgctgaggtgttcttctgca

SEQ ID NO: 4027235 - DNA, 25 bp, Homo sapien
atgtagagggccaggctataggctt

SEQ ID NO: 4027236 - DNA, 25 bp, Homo sapien
gctataggcttgactgatgggctca

SEQ ID NO: 4027237 - DNA, 25 bp, Homo sapien
ctgaggggtggcgacagcagggtca

SEQ ID NO: 4027238 - DNA, 25 bp, Homo sapien
gaggggtggcgacagcagggtcagc

SEQ ID NO: 4027239 - DNA, 25 bp, Homo sapien
acagcagggtcagcaggcagaggcg

SEQ ID NO: 4027240 - DNA, 25 bp, Homo sapien
agcagggtcagcaggcagaggcggg

SEQ ID NO: 4027241 - DNA, 25 bp, Homo sapien
tgctctctcctcggcttcttcctct

SEQ ID NO: 4027242 - DNA, 25 bp, Homo sapien
gtgaacagctcatgctctctcctcg

SEQ ID NO: 4027243 - DNA, 25 bp, Homo sapien
ccagtgaacagctcatgctctctcc

SEQ ID NO: 4027244 - DNA, 25 bp, Homo sapien
tgaacagctcatgctctctcctcgg

SEQ ID NO: 4027245 - DNA, 25 bp, Homo sapien
gacagagtatggaacaagacagaca

SEQ ID NO: 4027246 - DNA, 25 bp, Homo sapien
tcattcaggacttatgggccctgac

SEQ ID NO: 4027247 - DNA, 25 bp, Homo sapien
catatatgtgggatcatgccaggcc

SEQ ID NO: 4027248 - DNA, 25 bp, Homo sapien
gacaaaaatccgtgccctcgtggag

SEQ ID NO: 4027249 - DNA, 25 bp, Homo sapien
cctgggcttgtcaagggttgcccca

SEQ ID NO: 4027250 - DNA, 25 bp, Homo sapien
cacaggttctaactcacagggcaca

SEQ ID NO: 4027251 - DNA, 25 bp, Homo sapien
tgtttatcactagcttggacaagtt

SEQ ID NO: 4027252 - DNA, 25 bp, Homo sapien
gggttgccccagtaacatataatgc

SEQ ID NO: 4027253 - DNA, 25 bp, Homo sapien
gaaaccccgctattggcctcgtgtg

SEQ ID NO: 4027254 - DNA, 25 bp, Homo sapien
tcactggccagtgaagtctactaac

SEQ ID NO: 4027255 - DNA, 25 bp, Homo sapien
ggtactacacgtgggcaccaccata

SEQ ID NO: 4027256 - DNA, 25 bp, Homo sapien
caatggtagccaactatgtatttat

SEQ ID NO: 4027257 - DNA, 25 bp, Homo sapien
tctatatcgatgttgccatcccaca

SEQ ID NO: 4027258 - DNA, 25 bp, Homo sapien
tgatcccaaggctgaccctgagctt

SEQ ID NO: 4027259 - DNA, 25 bp, Homo sapien
tctcacagaggcattttccgttcac

SEQ ID NO: 4027260 - DNA, 25 bp, Homo sapien
tcgcccaagttggtcagtgtcaatc

SEQ ID NO: 4027261 - DNA, 25 bp, Homo sapien
gttcttctcccaagcatgtggcaag

SEQ ID NO: 4027262 - DNA, 25 bp, Homo sapien
cactaacttcccctgggaaccgcag

SEQ ID NO: 4027263 - DNA, 25 bp, Homo sapien
aattagttatggctatctctgtaat

SEQ ID NO: 4027264 - DNA, 25 bp, Homo sapien
caattattgggtgccttgcagtggg

SEQ ID NO: 4027265 - DNA, 25 bp, Homo sapien
aagaagcctcctatccagccttggg

SEQ ID NO: 4027266 - DNA, 25 bp, Homo sapien
cagtcgaatggagattgagcgcccc

SEQ ID NO: 4027267 - DNA, 25 bp, Homo sapien
ttgtaagacactgattcccggaggt

SEQ ID NO: 4027268 - DNA, 25 bp, Homo sapien
cctgactgataaagcctgagcggca

SEQ ID NO: 4027269 - DNA, 25 bp, Homo sapien
tcacatttcaacagcgacgtccttt

SEQ ID NO: 4027270 - DNA, 25 bp, Homo sapien
tttctctgttggactcggcaaggaa

SEQ ID NO: 4027271 - DNA, 25 bp, Homo sapien
cagcgacgtcctttctctgttggac

SEQ ID NO: 4027272 - DNA, 25 bp, Homo sapien
tttcaacagcgacgtcctttctctg

SEQ ID NO: 4027273 - DNA, 25 bp, Homo sapien
tggactacacatcccatgtcgcagt

SEQ ID NO: 4027274 - DNA, 25 bp, Homo sapien
gggcgaggtcgccatctttttcgta

SEQ ID NO: 4027275 - DNA, 25 bp, Homo sapien
ttttcgtagtcctctccctcatttc

SEQ ID NO: 4027276 - DNA, 25 bp, Homo sapien
caggcaccggcgcagaggtcgaggg

SEQ ID NO: 4027277 - DNA, 25 bp, Homo sapien
cgacttgagatgatagacgggagcc

SEQ ID NO: 4027278 - DNA, 25 bp, Homo sapien
gggagactgcaactcccgtcaggcc

SEQ ID NO: 4027279 - DNA, 25 bp, Homo sapien
tctttacggtagtctcctcgtcctc

SEQ ID NO: 4027280 - DNA, 25 bp, Homo sapien
gctaggtagcctgccatctttacgg

SEQ ID NO: 4027281 - DNA, 25 bp, Homo sapien
gcagcagatggactgcgactcccgt

SEQ ID NO: 4027282 - DNA, 25 bp, Homo sapien
aggtaccacacacgcggagggttgt

SEQ ID NO: 4027283 - DNA, 25 bp, Homo sapien
gttcctgacgagtagaaatggcagc

SEQ ID NO: 4027284 - DNA, 25 bp, Homo sapien
cgactactagtcaggtgtatgtccc

SEQ ID NO: 4027285 - DNA, 25 bp, Homo sapien
gctgtccccagcgtcctattgttcc

SEQ ID NO: 4027286 - DNA, 25 bp, Homo sapien
cgtagcatcagtggccgcaggacta

SEQ ID NO: 4027287 - DNA, 25 bp, Homo sapien
tcctgtttgtagttcccgctgtccc

SEQ ID NO: 4027288 - DNA, 25 bp, Homo sapien
ggcaacgggactctaactcccggca

SEQ ID NO: 4027289 - DNA, 25 bp, Homo sapien
tccccctggaagggccgcgccgcag

SEQ ID NO: 4027290 - DNA, 25 bp, Homo sapien
gccgcagcccgtgggagggcctcgc

SEQ ID NO: 4027291 - DNA, 25 bp, Homo sapien
gcagcccgtgggagggcctcgcccc

SEQ ID NO: 4027292 - DNA, 25 bp, Homo sapien
gcgccgcagcccgtgggagggcctc

SEQ ID NO: 4027293 - DNA, 25 bp, Homo sapien
gcctctccgcacaatacttgaacat

SEQ ID NO: 4027294 - DNA, 25 bp, Homo sapien
ttactgtattgagcggcggcacccg

SEQ ID NO: 4027295 - DNA, 25 bp, Homo sapien
tgggcgcccatttgggactgcgcca

SEQ ID NO: 4027296 - DNA, 25 bp, Homo sapien
ccgccggacccgcattatggctggg

SEQ ID NO: 4027297 - DNA, 25 bp, Homo sapien
tctgctgtttgatccctatgcagta

SEQ ID NO: 4027298 - DNA, 25 bp, Homo sapien
tagagcagagaatgatcccaggcag

SEQ ID NO: 4027299 - DNA, 25 bp, Homo sapien
tttgatccctatgcagtaaacctgt

SEQ ID NO: 4027300 - DNA, 25 bp, Homo sapien
cctgttagaagcatgtcatccagcc

SEQ ID NO: 4027301 - DNA, 25 bp, Homo sapien
tcccaggtagtgagtagctggtact

SEQ ID NO: 4027302 - DNA, 25 bp, Homo sapien
cctcccaggtagtgagtagctggta

SEQ ID NO: 4027303 - DNA, 25 bp, Homo sapien
ttccaggctcaaaagatgctcccac

SEQ ID NO: 4027304 - DNA, 25 bp, Homo sapien
agcctcccaggtagtgagtagctgg

SEQ ID NO: 4027305 - DNA, 25 bp, Homo sapien
ccaggcctgagtccttagcaagggt

SEQ ID NO: 4027306 - DNA, 25 bp, Homo sapien
ggtccagtccttagcccttgaaata

SEQ ID NO: 4027307 - DNA, 25 bp, Homo sapien
ggtgtttctacccaaggcattggtc

SEQ ID NO: 4027308 - DNA, 25 bp, Homo sapien
gaaatacaaagctcttctgacactg

SEQ ID NO: 4027309 - DNA, 25 bp, Homo sapien
gcataaaccaggctctaagggtctt

SEQ ID NO: 4027310 - DNA, 25 bp, Homo sapien
ttggactatctacccctcacacggg

SEQ ID NO: 4027311 - DNA, 25 bp, Homo sapien
gggtcttttctgcactgttcggatg

SEQ ID NO: 4027312 - DNA, 25 bp, Homo sapien
tctgaaacttaggtcaatgacttgc

SEQ ID NO: 4027313 - DNA, 25 bp, Homo sapien
tttgagtacggcaaagtagggcacc

SEQ ID NO: 4027314 - DNA, 25 bp, Homo sapien
tcatcagaaaaccttgaggcggtcc

SEQ ID NO: 4027315 - DNA, 25 bp, Homo sapien
taggccccactaggctcatcagaaa

SEQ ID NO: 4027316 - DNA, 25 bp, Homo sapien
gaaaggtaccctgcatttatgtgcg

SEQ ID NO: 4027317 - DNA, 25 bp, Homo sapien
tgtgcgcttggttgcgagacaccat

SEQ ID NO: 4027318 - DNA, 25 bp, Homo sapien
caaacctggaggcacggtcgtcttg

SEQ ID NO: 4027319 - DNA, 25 bp, Homo sapien
taagaccttccagagaccatggtgc

SEQ ID NO: 4027320 - DNA, 25 bp, Homo sapien
gctcgcaggcccagacaagtggtag

SEQ ID NO: 4027321 - DNA, 25 bp, Homo sapien
aatgttttgtagcagccagcagctg

SEQ ID NO: 4027322 - DNA, 25 bp, Homo sapien
tgttaatagcgcaaacccgacgcca

SEQ ID NO: 4027323 - DNA, 25 bp, Homo sapien
gaagatcgtgatctactccaagcag

SEQ ID NO: 4027324 - DNA, 25 bp, Homo sapien
gggtgccggcctgtacagattctgt

SEQ ID NO: 4027325 - DNA, 25 bp, Homo sapien
gacagtccgagactgtctcggaccc

SEQ ID NO: 4027326 - DNA, 25 bp, Homo sapien
aggaataccccaccagtgcccgcca

SEQ ID NO: 4027327 - DNA, 25 bp, Homo sapien
cctgcagagacagtccgagactgtc

SEQ ID NO: 4027328 - DNA, 25 bp, Homo sapien
ccgcaccaggaataccccaccagtg

SEQ ID NO: 4027329 - DNA, 25 bp, Homo sapien
gatcatgagggacttctaccgccag

SEQ ID NO: 4027330 - DNA, 25 bp, Homo sapien
cacatggatgggtcgagtgagtcac

SEQ ID NO: 4027331 - DNA, 25 bp, Homo sapien
tacccggaacgtgatcgaggcttgt

SEQ ID NO: 4027332 - DNA, 25 bp, Homo sapien
gaagctgcagcttggatacgcctcc

SEQ ID NO: 4027333 - DNA, 25 bp, Homo sapien
atgtgggcggcaactacctgggccc

SEQ ID NO: 4027334 - DNA, 25 bp, Homo sapien
caggagagcaagtgactaccagggc

SEQ ID NO: 4027335 - DNA, 25 bp, Homo sapien
gttctttgcagatgcaggctggccc

SEQ ID NO: 4027336 - DNA, 25 bp, Homo sapien
cggcaactacctgggcccaaagagg

SEQ ID NO: 4027337 - DNA, 25 bp, Homo sapien
gccttgagtctgtgttgtgtcctga

SEQ ID NO: 4027338 - DNA, 25 bp, Homo sapien
tcctgatggccgcttggtgagtgtc

SEQ ID NO: 4027339 - DNA, 25 bp, Homo sapien
tgacacctccaagttctagggccgt

SEQ ID NO: 4027340 - DNA, 25 bp, Homo sapien
agaggctccacaggcttacgctgct

SEQ ID NO: 4027341 - DNA, 25 bp, Homo sapien
gattttcctgtgttttatccatttg

SEQ ID NO: 4027342 - DNA, 25 bp, Homo sapien
gttgctatttctcccgtcccacagg

SEQ ID NO: 4027343 - DNA, 25 bp, Homo sapien
atccatttgcaagttggtcaccaat

SEQ ID NO: 4027344 - DNA, 25 bp, Homo sapien
gattggttgctatttctcccgtccc

SEQ ID NO: 4027345 - DNA, 25 bp, Homo sapien
gggctcatgtcagcaaacacggcta

SEQ ID NO: 4027346 - DNA, 25 bp, Homo sapien
acatgtgggctcaatggttgcaggc

SEQ ID NO: 4027347 - DNA, 25 bp, Homo sapien
tacatgggatggacacgcagtgtgc

SEQ ID NO: 4027348 - DNA, 25 bp, Homo sapien
acatcatgtgtacacgctcagggcg

SEQ ID NO: 4027349 - DNA, 25 bp, Homo sapien
cctgtggccccaaggccgtgggact

SEQ ID NO: 4027350 - DNA, 25 bp, Homo sapien
gacttccggaaacacctgggctgaa

SEQ ID NO: 4027351 - DNA, 25 bp, Homo sapien
gtctcccaagcagcccgagatggga

SEQ ID NO: 4027352 - DNA, 25 bp, Homo sapien
gagggccgtggccagacttggggca

SEQ ID NO: 4027353 - DNA, 25 bp, Homo sapien
tcatgatcctagaccacggagtggg

SEQ ID NO: 4027354 - DNA, 25 bp, Homo sapien
gccagggcatggcacatttgtgtac

SEQ ID NO: 4027355 - DNA, 25 bp, Homo sapien
tcacatctgtttggccacatgcaca

SEQ ID NO: 4027356 - DNA, 25 bp, Homo sapien
gcacacacacgtacgcttcacatga

SEQ ID NO: 4027357 - DNA, 25 bp, Homo sapien
aaatccaggcctgtgtacccctcag

SEQ ID NO: 4027358 - DNA, 25 bp, Homo sapien
tcagtaacattcctacaagtagccc

SEQ ID NO: 4027359 - DNA, 25 bp, Homo sapien
ccaaacccgagttccctgaggcaga

SEQ ID NO: 4027360 - DNA, 25 bp, Homo sapien
aggaggcattcgtgtgatccccgca

SEQ ID NO: 4027361 - DNA, 25 bp, Homo sapien
aatcgcttgcgtcagggaggcacag

SEQ ID NO: 4027362 - DNA, 25 bp, Homo sapien
acaaagggctcaggtatcagtggct

SEQ ID NO: 4027363 - DNA, 25 bp, Homo sapien
gatctaggtgtgagcatgcagagcc

SEQ ID NO: 4027364 - DNA, 25 bp, Homo sapien
aatgatgtagccgtgtgtggccaca

SEQ ID NO: 4027365 - DNA, 25 bp, Homo sapien
gggtgtccacacgtctcgagcatgt

SEQ ID NO: 4027366 - DNA, 25 bp, Homo sapien
acgcctgctgcgatctacgtgcggg

SEQ ID NO: 4027367 - DNA, 25 bp, Homo sapien
tgtgccggcggcatgcatgttggtg

SEQ ID NO: 4027368 - DNA, 25 bp, Homo sapien
catgttggtgtgcatgtgtaatcac

SEQ ID NO: 4027369 - DNA, 25 bp, Homo sapien
ttttgggagtgagcctggagcaggg

SEQ ID NO: 4027370 - DNA, 25 bp, Homo sapien
gtggtgggggtattgctcccgatgt

SEQ ID NO: 4027371 - DNA, 25 bp, Homo sapien
tattgctcccgatgtggtgggggaa

SEQ ID NO: 4027372 - DNA, 25 bp, Homo sapien
gttttgggagtgagcctggagcagg

SEQ ID NO: 4027373 - DNA, 25 bp, Homo sapien
ccagcgtccccccaatggatgacgc

SEQ ID NO: 4027374 - DNA, 25 bp, Homo sapien
gtccccccaatggatgacgccaaga

SEQ ID NO: 4027375 - DNA, 25 bp, Homo sapien
cccaatggatgacgccaagaccacc

SEQ ID NO: 4027376 - DNA, 25 bp, Homo sapien
ccccaatggatgacgccaagaccac

SEQ ID NO: 4027377 - DNA, 25 bp, Homo sapien
ctccacgtagtccacagaatgttcc

SEQ ID NO: 4027378 - DNA, 25 bp, Homo sapien
ttggtgtcagacacagctcgctcca

SEQ ID NO: 4027379 - DNA, 25 bp, Homo sapien
cgttgtactcgatgcggtcaatcat

SEQ ID NO: 4027380 - DNA, 25 bp, Homo sapien
gttccacgttgtactcgatgcggtc

SEQ ID NO: 4027381 - DNA, 25 bp, Homo sapien
gtgcagctcgcggatgctggtctcc

SEQ ID NO: 4027382 - DNA, 25 bp, Homo sapien
cattcagcgcctgcttcgtcatctg

SEQ ID NO: 4027383 - DNA, 25 bp, Homo sapien
tggccatgtccacaaacatatcgtg

SEQ ID NO: 4027384 - DNA, 25 bp, Homo sapien
cattgtgcctcgtctcaatctcatt

SEQ ID NO: 4027385 - DNA, 25 bp, Homo sapien
tatcctagggctcgagagttctgac

SEQ ID NO: 4027386 - DNA, 25 bp, Homo sapien
gaaacgacttgcttcagtagcagag

SEQ ID NO: 4027387 - DNA, 25 bp, Homo sapien
taatgtaggcaaatcagttctctgg

SEQ ID NO: 4027388 - DNA, 25 bp, Homo sapien
acgaacgactccgtcatctgatggg

SEQ ID NO: 4027389 - DNA, 25 bp, Homo sapien
aagatggccagcttcccgctctcca

SEQ ID NO: 4027390 - DNA, 25 bp, Homo sapien
gtcttccagttcttcgttggtggtg

SEQ ID NO: 4027391 - DNA, 25 bp, Homo sapien
ccagttcttcgttggtggtggtcct

SEQ ID NO: 4027392 - DNA, 25 bp, Homo sapien
ttccagttcttcgttggtggtggtc

SEQ ID NO: 4027393 - DNA, 25 bp, Homo sapien
gcagcctcaaggagttcggggtcct

SEQ ID NO: 4027394 - DNA, 25 bp, Homo sapien
cctcccacgccgccttaagccaggg

SEQ ID NO: 4027395 - DNA, 25 bp, Homo sapien
agcctcaaggagttcggggtcctgg

SEQ ID NO: 4027396 - DNA, 25 bp, Homo sapien
ctcccacgccgccttaagccagggg

SEQ ID NO: 4027397 - DNA, 25 bp, Homo sapien
tcattacctccacgaacttccggga

SEQ ID NO: 4027398 - DNA, 25 bp, Homo sapien
tgatctccagttgccgctggatccg

SEQ ID NO: 4027399 - DNA, 25 bp, Homo sapien
gggtcgcgttatattcggtcattac

SEQ ID NO: 4027400 - DNA, 25 bp, Homo sapien
gctggatccggtccttgcagcggtc

SEQ ID NO: 4027401 - DNA, 25 bp, Homo sapien
caggtccgcggaggaacggttcagc

SEQ ID NO: 4027402 - DNA, 25 bp, Homo sapien
ctgggtcttgcggatgcgcaggtcc

SEQ ID NO: 4027403 - DNA, 25 bp, Homo sapien
tgcggatgcgcaggtccgcggagga

SEQ ID NO: 4027404 - DNA, 25 bp, Homo sapien
ggatgcgcaggtccgcggaggaacg

SEQ ID NO: 4027405 - DNA, 25 bp, Homo sapien
cttcctggttgagggattgtactcc

SEQ ID NO: 4027406 - DNA, 25 bp, Homo sapien
ttcctggttgagggattgtactcct

SEQ ID NO: 4027407 - DNA, 25 bp, Homo sapien
accttgttggccgtcttcttgatgt

SEQ ID NO: 4027408 - DNA, 25 bp, Homo sapien
ttgttggccgtcttcttgatgtctg

SEQ ID NO: 4027409 - DNA, 25 bp, Homo sapien
ccgaaccttgttggccgtcttcttg

SEQ ID NO: 4027410 - DNA, 25 bp, Homo sapien
tcaatttggaccgaaccttgttggc

SEQ ID NO: 4027411 - DNA, 25 bp, Homo sapien
ggcgctatgctgttttttcacctgc

SEQ ID NO: 4027412 - DNA, 25 bp, Homo sapien
cacatcctccgacagtttctcaatg

SEQ ID NO: 4027413 - DNA, 25 bp, Homo sapien
catcctccgacagtttctcaatgca

SEQ ID NO: 4027414 - DNA, 25 bp, Homo sapien
tgcggccaggatggcgctatgctgt

SEQ ID NO: 4027415 - DNA, 25 bp, Homo sapien
aaatcggctatacccagccaagctg

SEQ ID NO: 4027416 - DNA, 25 bp, Homo sapien
cagccaagctgtcaggccaaacaac

SEQ ID NO: 4027417 - DNA, 25 bp, Homo sapien
tgtcaggccaaacaacgggttccag

SEQ ID NO: 4027418 - DNA, 25 bp, Homo sapien
ctggagcagaaaatcggctataccc

SEQ ID NO: 4027419 - DNA, 25 bp, Homo sapien
cgatccacgtggaccacctcctctt

SEQ ID NO: 4027420 - DNA, 25 bp, Homo sapien
tccacgtggaccacctcctcttcat

SEQ ID NO: 4027421 - DNA, 25 bp, Homo sapien
gatccacgtggaccacctcctcttc

SEQ ID NO: 4027422 - DNA, 25 bp, Homo sapien
atccacgtggaccacctcctcttca

SEQ ID NO: 4027423 - DNA, 25 bp, Homo sapien
gcttgttcttccagcttctccgagc

SEQ ID NO: 4027424 - DNA, 25 bp, Homo sapien
gttcttccagcttctccgagcctca

SEQ ID NO: 4027425 - DNA, 25 bp, Homo sapien
tgggcttgttcttccagcttctccg

SEQ ID NO: 4027426 - DNA, 25 bp, Homo sapien
ttcttccagcttctccgagcctcat

SEQ ID NO: 4027427 - DNA, 25 bp, Homo sapien
tatgtcgatgtggagcgacggcaag

SEQ ID NO: 4027428 - DNA, 25 bp, Homo sapien
agacagatggtgagacggtgacaaa

SEQ ID NO: 4027429 - DNA, 25 bp, Homo sapien
ggacagatacagaagcggaaggagg

SEQ ID NO: 4027430 - DNA, 25 bp, Homo sapien
cacgggccttgtgtgtatgtcgatg

SEQ ID NO: 4027431 - DNA, 25 bp, Homo sapien
aagcagagcacggcccgtgttccat

SEQ ID NO: 4027432 - DNA, 25 bp, Homo sapien
ggggcctgcatcagcccttgactgc

SEQ ID NO: 4027433 - DNA, 25 bp, Homo sapien
agttcccccaagcagagcacggccc

SEQ ID NO: 4027434 - DNA, 25 bp, Homo sapien
atcagcccttgactgcccggggtgc

SEQ ID NO: 4027435 - DNA, 25 bp, Homo sapien
tccgcagctcttgagtccgatcctt

SEQ ID NO: 4027436 - DNA, 25 bp, Homo sapien
cgcagctcttgagtccgatccttca

SEQ ID NO: 4027437 - DNA, 25 bp, Homo sapien
actccgcagctcttgagtccgatcc

SEQ ID NO: 4027438 - DNA, 25 bp, Homo sapien
gcagctcttgagtccgatccttcat

SEQ ID NO: 4027439 - DNA, 25 bp, Homo sapien
ctctgtgccggaggccggggtctgg

SEQ ID NO: 4027440 - DNA, 25 bp, Homo sapien
ctgctccgggtctcccgcctctgtg

SEQ ID NO: 4027441 - DNA, 25 bp, Homo sapien
gtctcccgcctctgtgccggaggcc

SEQ ID NO: 4027442 - DNA, 25 bp, Homo sapien
gccgggctgcggtggcgatgcggct

SEQ ID NO: 4027443 - DNA, 25 bp, Homo sapien
ctaggtttagatgagatcccaaggg

SEQ ID NO: 4027444 - DNA, 25 bp, Homo sapien
tatgctgaatctctaatctccaatg

SEQ ID NO: 4027445 - DNA, 25 bp, Homo sapien
gaggatgatgggactcgtgccatta

SEQ ID NO: 4027446 - DNA, 25 bp, Homo sapien
gaaaggtaactaggtttagatgaga

SEQ ID NO: 4027447 - DNA, 25 bp, Homo sapien
tatataatacaagccacccagctcc

SEQ ID NO: 4027448 - DNA, 25 bp, Homo sapien
cagccgcggtgccagctgactgcag

SEQ ID NO: 4027449 - DNA, 25 bp, Homo sapien
cattgttgtttatctcggtaagaaa

SEQ ID NO: 4027450 - DNA, 25 bp, Homo sapien
cagaatctggagaaacaatacattg

SEQ ID NO: 4027451 - DNA, 25 bp, Homo sapien
acatctggctaattttttatatttt

SEQ ID NO: 4027452 - DNA, 25 bp, Homo sapien
catctggctaattttttatatttta

SEQ ID NO: 4027453 - DNA, 25 bp, Homo sapien
gtagagacggggttgcactgtattg

SEQ ID NO: 4027454 - DNA, 25 bp, Homo sapien
gagacggggttgcactgtattgccc

SEQ ID NO: 4027455 - DNA, 25 bp, Homo sapien
cagcgccaatctctctaaatggcct

SEQ ID NO: 4027456 - DNA, 25 bp, Homo sapien
gcacctagcctaatatagttaatat

SEQ ID NO: 4027457 - DNA, 25 bp, Homo sapien
tatagttaatatccccgtcaaggct

SEQ ID NO: 4027458 - DNA, 25 bp, Homo sapien
tagcctaatatagttaatatccccg

SEQ ID NO: 4027459 - DNA, 25 bp, Homo sapien
tataatcctgagaagtttagtggac

SEQ ID NO: 4027460 - DNA, 25 bp, Homo sapien
tttagtggaccaagatggcatgcca

SEQ ID NO: 4027461 - DNA, 25 bp, Homo sapien
gatggcatgccatcaagacgctgag

SEQ ID NO: 4027462 - DNA, 25 bp, Homo sapien
tcaagacgctgagaaacaaagagga

SEQ ID NO: 4027463 - DNA, 25 bp, Homo sapien
agaacaaagtcattacctggcctca

SEQ ID NO: 4027464 - DNA, 25 bp, Homo sapien
catgaaagcctgaaattctgtccac

SEQ ID NO: 4027465 - DNA, 25 bp, Homo sapien
tatagagggcccgtaatgttcttgg

SEQ ID NO: 4027466 - DNA, 25 bp, Homo sapien
tccccagattcagttaagaacaaag

SEQ ID NO: 4027467 - DNA, 25 bp, Homo sapien
aattttctgacgctgacgactcgga

SEQ ID NO: 4027468 - DNA, 25 bp, Homo sapien
gagctgccctgacatggtctgacgg

SEQ ID NO: 4027469 - DNA, 25 bp, Homo sapien
tctgacggctcacaaggtggtgagt

SEQ ID NO: 4027470 - DNA, 25 bp, Homo sapien
acctgtcagaggctgcgccagaagg

SEQ ID NO: 4027471 - DNA, 25 bp, Homo sapien
ccccaaatgctaagtcgtcagtccg

SEQ ID NO: 4027472 - DNA, 25 bp, Homo sapien
ccaaatgctaagtcgtcagtccgcc

SEQ ID NO: 4027473 - DNA, 25 bp, Homo sapien
aaatgctaagtcgtcagtccgccca

SEQ ID NO: 4027474 - DNA, 25 bp, Homo sapien
agccccaaatgctaagtcgtcagtc

SEQ ID NO: 4027475 - DNA, 25 bp, Homo sapien
agcaataaaggcgaggtcagcaagg

SEQ ID NO: 4027476 - DNA, 25 bp, Homo sapien
cacccactgcctcgaaaggcctctg

SEQ ID NO: 4027477 - DNA, 25 bp, Homo sapien
ctctgggggtggtcggcgcgcccct

SEQ ID NO: 4027478 - DNA, 25 bp, Homo sapien
acccactgcctcgaaaggcctctgg

SEQ ID NO: 4027479 - DNA, 25 bp, Homo sapien
tctgggggtggtcggcgcgcccctc

SEQ ID NO: 4027480 - DNA, 25 bp, Homo sapien
cattctgcggtccacgagtttggga

SEQ ID NO: 4027481 - DNA, 25 bp, Homo sapien
tccggtgacggtagcaagttctcgc

SEQ ID NO: 4027482 - DNA, 25 bp, Homo sapien
gcgggtgtctcggattacgtacaaa

SEQ ID NO: 4027483 - DNA, 25 bp, Homo sapien
acgtcgtgatgagaacggcgtccca

SEQ ID NO: 4027484 - DNA, 25 bp, Homo sapien
aaacggtggtgccaatgactccggg

SEQ ID NO: 4027485 - DNA, 25 bp, Homo sapien
gacgaactggaacgcaggacttctg

SEQ ID NO: 4027486 - DNA, 25 bp, Homo sapien
gaagagacgcgaccatgtgcgcatg

SEQ ID NO: 4027487 - DNA, 25 bp, Homo sapien
gcatgccccgaatttatcacggagg

SEQ ID NO: 4027488 - DNA, 25 bp, Homo sapien
gagtagcgtggtctggagtacccca

SEQ ID NO: 4027489 - DNA, 25 bp, Homo sapien
ccccaggtccggacaattcggcaga

SEQ ID NO: 4027490 - DNA, 25 bp, Homo sapien
ttcggcagactattgtcaaactggg

SEQ ID NO: 4027491 - DNA, 25 bp, Homo sapien
caggagttggagaaacagcaggtca

SEQ ID NO: 4027492 - DNA, 25 bp, Homo sapien
agaccgcgtcgcgtaagcgctggat

SEQ ID NO: 4027493 - DNA, 25 bp, Homo sapien
gcttcgctgatgcacattggaccgg

SEQ ID NO: 4027494 - DNA, 25 bp, Homo sapien
cccgcgttgccatgtgtgggagacc

SEQ ID NO: 4027495 - DNA, 25 bp, Homo sapien
taagcgctggatgtggcttcgctga

SEQ ID NO: 4027496 - DNA, 25 bp, Homo sapien
gattgtataccgcaaggggctggat

SEQ ID NO: 4027497 - DNA, 25 bp, Homo sapien
ccccaaagacactggaaggctgtgt

SEQ ID NO: 4027498 - DNA, 25 bp, Homo sapien
gcaaggggctggatcgaacccccca

SEQ ID NO: 4027499 - DNA, 25 bp, Homo sapien
aagtggttggattgtataccgcaag

SEQ ID NO: 4027500 - DNA, 25 bp, Homo sapien
ctctgccttcagagtaaaattgcaa

SEQ ID NO: 4027501 - DNA, 25 bp, Homo sapien
tctgccttcagagtaaaattgcaag

SEQ ID NO: 4027502 - DNA, 25 bp, Homo sapien
cactgtctatgcagcgggtgtccac

SEQ ID NO: 4027503 - DNA, 25 bp, Homo sapien
tcggcatccactgtctatgcagcgg

SEQ ID NO: 4027504 - DNA, 25 bp, Homo sapien
gagtctctcggcatccactgtctat

SEQ ID NO: 4027505 - DNA, 25 bp, Homo sapien
tgggatctgatagagtctctcggca

SEQ ID NO: 4027506 - DNA, 25 bp, Homo sapien
gccacgtgcagtgtgtgcctcttct

SEQ ID NO: 4027507 - DNA, 25 bp, Homo sapien
gcagtgtgtgcctcttcttagccat

SEQ ID NO: 4027508 - DNA, 25 bp, Homo sapien
cgtgcagtgtgtgcctcttcttagc

SEQ ID NO: 4027509 - DNA, 25 bp, Homo sapien
gcagcgggggccatgtgcagcgggg

SEQ ID NO: 4027510 - DNA, 25 bp, Homo sapien
caggttgtgatccatagagcagtta

SEQ ID NO: 4027511 - DNA, 25 bp, Homo sapien
tgtgatccatagagcagttaaaggt

SEQ ID NO: 4027512 - DNA, 25 bp, Homo sapien
catagagcagttaaaggtaaaggta

SEQ ID NO: 4027513 - DNA, 25 bp, Homo sapien
gtaatgtccaggttgtgatccatag

SEQ ID NO: 4027514 - DNA, 25 bp, Homo sapien
tgttcactgctggacttatcaatgc

SEQ ID NO: 4027515 - DNA, 25 bp, Homo sapien
gtgaggtttattccttcatggtcca

SEQ ID NO: 4027516 - DNA, 25 bp, Homo sapien
tcaaataagtatgggctaaacaaag

SEQ ID NO: 4027517 - DNA, 25 bp, Homo sapien
tccttcaggttggagctatcatttc

SEQ ID NO: 4027518 - DNA, 25 bp, Homo sapien
ctagacagtcacgtctcagcttctg

SEQ ID NO: 4027519 - DNA, 25 bp, Homo sapien
gctctcttagctggccgacagggga

SEQ ID NO: 4027520 - DNA, 25 bp, Homo sapien
gctttaatgagtgttactcctagac

SEQ ID NO: 4027521 - DNA, 25 bp, Homo sapien
gatctggagtctaaagagcagagcc

SEQ ID NO: 4027522 - DNA, 25 bp, Homo sapien
ggctcgacgacaccacaaaggattt

SEQ ID NO: 4027523 - DNA, 25 bp, Homo sapien
cgctcgtggctctggtaggaactga

SEQ ID NO: 4027524 - DNA, 25 bp, Homo sapien
gcaagtcgctggcactcaagaaggc

SEQ ID NO: 4027525 - DNA, 25 bp, Homo sapien
taggaactgagctgcgtgaagccct

SEQ ID NO: 4027526 - DNA, 25 bp, Homo sapien
tgcgggggtgtggaggacttggcat

SEQ ID NO: 4027527 - DNA, 25 bp, Homo sapien
ctgcgggggtgtggaggacttggca

SEQ ID NO: 4027528 - DNA, 25 bp, Homo sapien
acagacccataacgtgaccccactg

SEQ ID NO: 4027529 - DNA, 25 bp, Homo sapien
tgcctgtctgggctgtactttaggg

SEQ ID NO: 4027530 - DNA, 25 bp, Homo sapien
gacccataacgtgaccccactgcct

SEQ ID NO: 4027531 - DNA, 25 bp, Homo sapien
gaaggcgacagacccataacgtgac

SEQ ID NO: 4027532 - DNA, 25 bp, Homo sapien
ggctggctgggtgtctctattccaa

SEQ ID NO: 4027533 - DNA, 25 bp, Homo sapien
tgagtacgccggtgcttgcggaaca

SEQ ID NO: 4027534 - DNA, 25 bp, Homo sapien
gaagggtcagcaaagctcttgccgc

SEQ ID NO: 4027535 - DNA, 25 bp, Homo sapien
gcatagcggacacgcatagggccta

SEQ ID NO: 4027536 - DNA, 25 bp, Homo sapien
gatcttgagcttggagagcgcgcca

SEQ ID NO: 4027537 - DNA, 25 bp, Homo sapien
agtctgccggcccatgtgtggcagc

SEQ ID NO: 4027538 - DNA, 25 bp, Homo sapien
tgccctgggcgcgtttggaaatgtc

SEQ ID NO: 4027539 - DNA, 25 bp, Homo sapien
tctgccggcccatgtgtggcagcgt

SEQ ID NO: 4027540 - DNA, 25 bp, Homo sapien
gaaatgtcttggtacaggacacgca

SEQ ID NO: 4027541 - DNA, 25 bp, Homo sapien
cggcggcccgagcgcttgtagccgg

SEQ ID NO: 4027542 - DNA, 25 bp, Homo sapien
cgagcgcttgtagccgggggctggg

SEQ ID NO: 4027543 - DNA, 25 bp, Homo sapien
gcccgagcgcttgtagccgggggct

SEQ ID NO: 4027544 - DNA, 25 bp, Homo sapien
cggcccgagcgcttgtagccggggg

SEQ ID NO: 4027545 - DNA, 25 bp, Homo sapien
gaaaggagttggaccaagtgtccgc

SEQ ID NO: 4027546 - DNA, 25 bp, Homo sapien
ctctgacatcctgcgttcgtttcct

SEQ ID NO: 4027547 - DNA, 25 bp, Homo sapien
tcctccctgatctgctcattgaaga

SEQ ID NO: 4027548 - DNA, 25 bp, Homo sapien
gttggaccaagtgtccgcagagcca

SEQ ID NO: 4027549 - DNA, 25 bp, Homo sapien
cagctcagtgtccaagaactatgcc

SEQ ID NO: 4027550 - DNA, 25 bp, Homo sapien
tgaaggtctccaagcgcccagaaaa

SEQ ID NO: 4027551 - DNA, 25 bp, Homo sapien
gataaagagtgtacccagacgtggg

SEQ ID NO: 4027552 - DNA, 25 bp, Homo sapien
actatgccaggataaagagtgtacc

SEQ ID NO: 4027553 - DNA, 25 bp, Homo sapien
gacaggtccccagcatttgtgtttt

SEQ ID NO: 4027554 - DNA, 25 bp, Homo sapien
tgagccaatgggctaaatctggtag

SEQ ID NO: 4027555 - DNA, 25 bp, Homo sapien
aatctggtagctggcactgtctgga

SEQ ID NO: 4027556 - DNA, 25 bp, Homo sapien
gtagctggcactgtctggaagtgac

SEQ ID NO: 4027557 - DNA, 25 bp, Homo sapien
ccctgacgcgtggcaagggccacat

SEQ ID NO: 4027558 - DNA, 25 bp, Homo sapien
agcccctgacgcgtggcaagggcca

SEQ ID NO: 4027559 - DNA, 25 bp, Homo sapien
aggagcccctgacgcgtggcaaggg

SEQ ID NO: 4027560 - DNA, 25 bp, Homo sapien
acaggagcccctgacgcgtggcaag

SEQ ID NO: 4027561 - DNA, 25 bp, Homo sapien
ccaaatctgacaagtccttcactgg

SEQ ID NO: 4027562 - DNA, 25 bp, Homo sapien
cttccaccaggaggatcctcaagca

SEQ ID NO: 4027563 - DNA, 25 bp, Homo sapien
ttccaccaggaggatcctcaagcat

SEQ ID NO: 4027564 - DNA, 25 bp, Homo sapien
ttcctgcttgttccaaatctgacaa

SEQ ID NO: 4027565 - DNA, 25 bp, Homo sapien
ttggccccaatcccacaaaactcca

SEQ ID NO: 4027566 - DNA, 25 bp, Homo sapien
tggccccaatcccacaaaactccat

SEQ ID NO: 4027567 - DNA, 25 bp, Homo sapien
acaagcttactagtcacggtcccag

SEQ ID NO: 4027568 - DNA, 25 bp, Homo sapien
tactccttgcaagcttaccatgggc

SEQ ID NO: 4027569 - DNA, 25 bp, Homo sapien
ggcaaagggctaggaaaccgatcat

SEQ ID NO: 4027570 - DNA, 25 bp, Homo sapien
tacgctgccgacagtggtctcaaga

SEQ ID NO: 4027571 - DNA, 25 bp, Homo sapien
cacctctagatgcagtttcctgggc

SEQ ID NO: 4027572 - DNA, 25 bp, Homo sapien
cgaggagccgagagttgcagaaacc

SEQ ID NO: 4027573 - DNA, 25 bp, Homo sapien
ggcaggaccccggttataagcctca

SEQ ID NO: 4027574 - DNA, 25 bp, Homo sapien
cagaaaacgtggcttcggaggacgt

SEQ ID NO: 4027575 - DNA, 25 bp, Homo sapien
cctgggatcttgcagcgcgggccac

SEQ ID NO: 4027576 - DNA, 25 bp, Homo sapien
aagatggcgttctctaggaccgcgg

SEQ ID NO: 4027577 - DNA, 25 bp, Homo sapien
aacccaaaacatggcgggctctagg

SEQ ID NO: 4027578 - DNA, 25 bp, Homo sapien
acagccggcgggttctaggacctgc

SEQ ID NO: 4027579 - DNA, 25 bp, Homo sapien
cctatggcggcagagaagcatcttg

SEQ ID NO: 4027580 - DNA, 25 bp, Homo sapien
tcaccaaagtactgtggccagggct

SEQ ID NO: 4027581 - DNA, 25 bp, Homo sapien
caggtcaccggcaatgtcttcaaga

SEQ ID NO: 4027582 - DNA, 25 bp, Homo sapien
tagcttagcgtgcaaagacgccgcg

SEQ ID NO: 4027583 - DNA, 25 bp, Homo sapien
gcctcatcaccgtgctcttctcagc

SEQ ID NO: 4027584 - DNA, 25 bp, Homo sapien
tgttcctcgcgtccctgtccttgaa

SEQ ID NO: 4027585 - DNA, 25 bp, Homo sapien
agggagaggcggatgcagagcccca

SEQ ID NO: 4027586 - DNA, 25 bp, Homo sapien
caccggtgggaaagttgcctgtgga

SEQ ID NO: 4027587 - DNA, 25 bp, Homo sapien
aattttcaaaacaacgtggctggcg

SEQ ID NO: 4027588 - DNA, 25 bp, Homo sapien
tgtcctgagaatggccaggtcccct

SEQ ID NO: 4027589 - DNA, 25 bp, Homo sapien
aagctgagacgcctgcttggtagca

SEQ ID NO: 4027590 - DNA, 25 bp, Homo sapien
tgcctggaatcacacatgacagggt

SEQ ID NO: 4027591 - DNA, 25 bp, Homo sapien
acagggtctgtcttggccgccatga

SEQ ID NO: 4027592 - DNA, 25 bp, Homo sapien
agaacggcacgttctcactggagag

SEQ ID NO: 4027593 - DNA, 25 bp, Homo sapien
ccattcctcgaaggaacagggtctg

SEQ ID NO: 4027594 - DNA, 25 bp, Homo sapien
gaatctgaatcaaatgggtctgcct

SEQ ID NO: 4027595 - DNA, 25 bp, Homo sapien
tcgggctctggttcctcggcgaagt

SEQ ID NO: 4027596 - DNA, 25 bp, Homo sapien
aagtagacctgccagtccaaactgc

SEQ ID NO: 4027597 - DNA, 25 bp, Homo sapien
tgctgacccagtcctcataggcagg

SEQ ID NO: 4027598 - DNA, 25 bp, Homo sapien
aagcatctccgaagctgtgcagccc

SEQ ID NO: 4027599 - DNA, 25 bp, Homo sapien
ctgtgcaggacggtagagcaggcta

SEQ ID NO: 4027600 - DNA, 25 bp, Homo sapien
caggctagggaacctctggctgttt

SEQ ID NO: 4027601 - DNA, 25 bp, Homo sapien
gctgtttgggggctaattggcaaaa

SEQ ID NO: 4027602 - DNA, 25 bp, Homo sapien
ggaaggtccgttcttgagctattgg

SEQ ID NO: 4027603 - DNA, 25 bp, Homo sapien
agctcacccacagcactggtacaca

SEQ ID NO: 4027604 - DNA, 25 bp, Homo sapien
ctcacagctgggcagctcacccaca

SEQ ID NO: 4027605 - DNA, 25 bp, Homo sapien
ctgggcagctcacccacagcactgg

SEQ ID NO: 4027606 - DNA, 25 bp, Homo sapien
agctgggcagctcacccacagcact

SEQ ID NO: 4027607 - DNA, 25 bp, Homo sapien
cccggcagaatagggctgccatcac

SEQ ID NO: 4027608 - DNA, 25 bp, Homo sapien
tcacgggcactgtctggagggagct

SEQ ID NO: 4027609 - DNA, 25 bp, Homo sapien
ccccaggagggtcacgggcactgtc

SEQ ID NO: 4027610 - DNA, 25 bp, Homo sapien
catccccggcagaatagggctgcca

SEQ ID NO: 4027611 - DNA, 25 bp, Homo sapien
ctgcaggttggatggacagcagccc

SEQ ID NO: 4027612 - DNA, 25 bp, Homo sapien
ccccggcctgcaggttggatggaca

SEQ ID NO: 4027613 - DNA, 25 bp, Homo sapien
tgccccggcctgcaggttggatgga

SEQ ID NO: 4027614 - DNA, 25 bp, Homo sapien
aggttggatggacagcagccctggc

SEQ ID NO: 4027615 - DNA, 25 bp, Homo sapien
cccactcctccggtctggtccccag

SEQ ID NO: 4027616 - DNA, 25 bp, Homo sapien
cagccctacgctccattcctctggg

SEQ ID NO: 4027617 - DNA, 25 bp, Homo sapien
tggtggtcaggatagggcaggcaga

SEQ ID NO: 4027618 - DNA, 25 bp, Homo sapien
catgtcgtagcccccctcagggtgg

SEQ ID NO: 4027619 - DNA, 25 bp, Homo sapien
agtgtggacggcaccaggtgacagg

SEQ ID NO: 4027620 - DNA, 25 bp, Homo sapien
gtgtggacggcaccaggtgacaggg

SEQ ID NO: 4027621 - DNA, 25 bp, Homo sapien
aggcagtgtggacggcaccaggtga

SEQ ID NO: 4027622 - DNA, 25 bp, Homo sapien
gggcacagcagagagggatccaaga

SEQ ID NO: 4027623 - DNA, 25 bp, Homo sapien
acagcagagagggatccaagactca

SEQ ID NO: 4027624 - DNA, 25 bp, Homo sapien
gcacagcagagagggatccaagact

SEQ ID NO: 4027625 - DNA, 25 bp, Homo sapien
cagcagagagggatccaagactcac

SEQ ID NO: 4027626 - DNA, 25 bp, Homo sapien
tgggcagcagttagcaccgcctcct

SEQ ID NO: 4027627 - DNA, 25 bp, Homo sapien
tcctgggcacagcttgatgcaaagc

SEQ ID NO: 4027628 - DNA, 25 bp, Homo sapien
ctgaacccagtgtccgtcaggctcg

SEQ ID NO: 4027629 - DNA, 25 bp, Homo sapien
catcactcatctccggggtctctgg

SEQ ID NO: 4027630 - DNA, 25 bp, Homo sapien
tgtccgtcaggctcgaggcacagca

SEQ ID NO: 4027631 - DNA, 25 bp, Homo sapien
agtcctgtgagtccaacccccagcc

SEQ ID NO: 4027632 - DNA, 25 bp, Homo sapien
tgcctgagcccagctatggcagaca

SEQ ID NO: 4027633 - DNA, 25 bp, Homo sapien
tgagcccagctatggcagacaccct

SEQ ID NO: 4027634 - DNA, 25 bp, Homo sapien
gacaccctctgattgcaggtctttc

SEQ ID NO: 4027635 - DNA, 25 bp, Homo sapien
tacagttacatgtggggcgactgat

SEQ ID NO: 4027636 - DNA, 25 bp, Homo sapien
caggcgcagattgcgtagggtccca

SEQ ID NO: 4027637 - DNA, 25 bp, Homo sapien
gcagctggttgtagatacagttaca

SEQ ID NO: 4027638 - DNA, 25 bp, Homo sapien
cgggccgggttggacaggtgtcgct

SEQ ID NO: 4027639 - DNA, 25 bp, Homo sapien
gagcttcagtctgggccagcactta

SEQ ID NO: 4027640 - DNA, 25 bp, Homo sapien
ctgagactgtgacgctgggcaagca

SEQ ID NO: 4027641 - DNA, 25 bp, Homo sapien
ggagctgagactgtgacgctgggca

SEQ ID NO: 4027642 - DNA, 25 bp, Homo sapien
gcagagtgcctctccgagcttcagt

SEQ ID NO: 4027643 - DNA, 25 bp, Homo sapien
caaaggggaagcgatgggcgggctg

SEQ ID NO: 4027644 - DNA, 25 bp, Homo sapien
gccctggctgtagtggttataggcc

SEQ ID NO: 4027645 - DNA, 25 bp, Homo sapien
ctggctgtagtggttataggccctg

SEQ ID NO: 4027646 - DNA, 25 bp, Homo sapien
catcactggtgtcctgatcccagcc

SEQ ID NO: 4027647 - DNA, 25 bp, Homo sapien
cactgaccaggaattcagttctgtt

SEQ ID NO: 4027648 - DNA, 25 bp, Homo sapien
ctgagtccctcacgctgcagagaac

SEQ ID NO: 4027649 - DNA, 25 bp, Homo sapien
agggctgagtccctcacgctgcaga

SEQ ID NO: 4027650 - DNA, 25 bp, Homo sapien
tgaccaggaattcagttctgttgct

SEQ ID NO: 4027651 - DNA, 25 bp, Homo sapien
tagacagtgacaccatgggagaccc

SEQ ID NO: 4027652 - DNA, 25 bp, Homo sapien
gatagcagagagcactccacggctt

SEQ ID NO: 4027653 - DNA, 25 bp, Homo sapien
cccacaggtaggtggaagatagcag

SEQ ID NO: 4027654 - DNA, 25 bp, Homo sapien
caagggtagacagtgacaccatggg

SEQ ID NO: 4027655 - DNA, 25 bp, Homo sapien
taagcgaggtcattcccttgcaacc

SEQ ID NO: 4027656 - DNA, 25 bp, Homo sapien
gagacaaattgtccactccccagag

SEQ ID NO: 4027657 - DNA, 25 bp, Homo sapien
tgaggtagggtctcgtcctgtcgcc

SEQ ID NO: 4027658 - DNA, 25 bp, Homo sapien
tactctagaggcagggactagcctt

SEQ ID NO: 4027659 - DNA, 25 bp, Homo sapien
ccagggccactcgccagggactgtg

SEQ ID NO: 4027660 - DNA, 25 bp, Homo sapien
cagggccactcgccagggactgtgt

SEQ ID NO: 4027661 - DNA, 25 bp, Homo sapien
tgtggaaaggagttagtcacactga

SEQ ID NO: 4027662 - DNA, 25 bp, Homo sapien
acagcagatacctgtcctgacctca

SEQ ID NO: 4027663 - DNA, 25 bp, Homo sapien
ctgtggaaaggagttagtcacactg

SEQ ID NO: 4027664 - DNA, 25 bp, Homo sapien
tcacactgacagcagatacctgtcc

SEQ ID NO: 4027665 - DNA, 25 bp, Homo sapien
tgcagctggcccgagaaaatctcat

SEQ ID NO: 4027666 - DNA, 25 bp, Homo sapien
ggagcccagagtttgcctgacgtca

SEQ ID NO: 4027667 - DNA, 25 bp, Homo sapien
tacggagttacatccccactggtgg

SEQ ID NO: 4027668 - DNA, 25 bp, Homo sapien
gaggccgagacagcttttattggaa

SEQ ID NO: 4027669 - DNA, 25 bp, Homo sapien
cagccagggctaggtgggtttcaca

SEQ ID NO: 4027670 - DNA, 25 bp, Homo sapien
gaagaacactttggcgcgtgcctcc

SEQ ID NO: 4027671 - DNA, 25 bp, Homo sapien
tactacttgagtggcctgggagagc

SEQ ID NO: 4027672 - DNA, 25 bp, Homo sapien
catatattatagatgctggccgggc

SEQ ID NO: 4027673 - DNA, 25 bp, Homo sapien
tccatggcagacacatggttcagac

SEQ ID NO: 4027674 - DNA, 25 bp, Homo sapien
gtccatggcagacacatggttcaga

SEQ ID NO: 4027675 - DNA, 25 bp, Homo sapien
aactttattgctcagaaccttccct

SEQ ID NO: 4027676 - DNA, 25 bp, Homo sapien
ctttattgctcagaaccttccctcc

SEQ ID NO: 4027677 - DNA, 25 bp, Homo sapien
actttattgctcagaaccttccctc

SEQ ID NO: 4027678 - DNA, 25 bp, Homo sapien
tagaagccccacatctagggccttc

SEQ ID NO: 4027679 - DNA, 25 bp, Homo sapien
ccattgtcatgtgcgggtatggcag

SEQ ID NO: 4027680 - DNA, 25 bp, Homo sapien
ttctagggacccagatatgccccct

SEQ ID NO: 4027681 - DNA, 25 bp, Homo sapien
tatgcccccttaggcaaggctcaca

SEQ ID NO: 4027682 - DNA, 25 bp, Homo sapien
aggtcagcctggcttgggttgaggg

SEQ ID NO: 4027683 - DNA, 25 bp, Homo sapien
gaggtcagcctggcttgggttgagg

SEQ ID NO: 4027684 - DNA, 25 bp, Homo sapien
gcaaagcagatgaggtcagcctggc

SEQ ID NO: 4027685 - DNA, 25 bp, Homo sapien
caaagcaaagcagatgaggtcagcc

SEQ ID NO: 4027686 - DNA, 25 bp, Homo sapien
tagccttgccctggggttcttggac

SEQ ID NO: 4027687 - DNA, 25 bp, Homo sapien
tgcctcttagccttgccctggggtt

SEQ ID NO: 4027688 - DNA, 25 bp, Homo sapien
ttagccttgccctggggttcttgga

SEQ ID NO: 4027689 - DNA, 25 bp, Homo sapien
tcagtgcctcttagccttgccctgg

SEQ ID NO: 4027690 - DNA, 25 bp, Homo sapien
ctcacgttgatagcataggtggtga

SEQ ID NO: 4027691 - DNA, 25 bp, Homo sapien
cacgttgatagcataggtggtgata

SEQ ID NO: 4027692 - DNA, 25 bp, Homo sapien
gctcacgttgatagcataggtggtg

SEQ ID NO: 4027693 - DNA, 25 bp, Homo sapien
cgttgatagcataggtggtgataca

SEQ ID NO: 4027694 - DNA, 25 bp, Homo sapien
aggccaggtagacagaaccagcgag

SEQ ID NO: 4027695 - DNA, 25 bp, Homo sapien
ccagcgagagacaccagggagctca

SEQ ID NO: 4027696 - DNA, 25 bp, Homo sapien
ccaggccaggtagacagaaccagcg

SEQ ID NO: 4027697 - DNA, 25 bp, Homo sapien
gccaggtagacagaaccagcgagag

SEQ ID NO: 4027698 - DNA, 25 bp, Homo sapien
agaggcccagcgtgtccgcaggcaa

SEQ ID NO: 4027699 - DNA, 25 bp, Homo sapien
caggacagaggcccagcgtgtccgc

SEQ ID NO: 4027700 - DNA, 25 bp, Homo sapien
acagaggcccagcgtgtccgcaggc

SEQ ID NO: 4027701 - DNA, 25 bp, Homo sapien
ggacagaggcccagcgtgtccgcag

SEQ ID NO: 4027702 - DNA, 25 bp, Homo sapien
cctgggcaacatggcgagacaccat

SEQ ID NO: 4027703 - DNA, 25 bp, Homo sapien
gaggcagacagattgcttgagacca

SEQ ID NO: 4027704 - DNA, 25 bp, Homo sapien
agcctgggcaacatggcgagacacc

SEQ ID NO: 4027705 - DNA, 25 bp, Homo sapien
ccagcctgggcaacatggcgagaca

SEQ ID NO: 4027706 - DNA, 25 bp, Homo sapien
ctgtagtgtgtagaagatgcaaccg

SEQ ID NO: 4027707 - DNA, 25 bp, Homo sapien
tagaagatgcaaccgaatatgctgt

SEQ ID NO: 4027708 - DNA, 25 bp, Homo sapien
caaccgaatatgctgttggattgat

SEQ ID NO: 4027709 - DNA, 25 bp, Homo sapien
tgtgtagaagatgcaaccgaatatg

SEQ ID NO: 4027710 - DNA, 25 bp, Homo sapien
aaccaggttaggactgtcaacccag

SEQ ID NO: 4027711 - DNA, 25 bp, Homo sapien
gaaccaggttaggactgtcaaccca

SEQ ID NO: 4027712 - DNA, 25 bp, Homo sapien
gggtggaaccaggttaggactgtca

SEQ ID NO: 4027713 - DNA, 25 bp, Homo sapien
tggaaccaggttaggactgtcaacc

SEQ ID NO: 4027714 - DNA, 25 bp, Homo sapien
aagccacctgggctatcctctgttc

SEQ ID NO: 4027715 - DNA, 25 bp, Homo sapien
ccaagggtcgatgatctcctggcac

SEQ ID NO: 4027716 - DNA, 25 bp, Homo sapien
tttccaagaagccacctgggctatc

SEQ ID NO: 4027717 - DNA, 25 bp, Homo sapien
ccatcctagtccaagggtcgatgat

SEQ ID NO: 4027718 - DNA, 25 bp, Homo sapien
ttatgctaacgcctggccatcacgc

SEQ ID NO: 4027719 - DNA, 25 bp, Homo sapien
gcaaggctggtataacggttcactc

SEQ ID NO: 4027720 - DNA, 25 bp, Homo sapien
ggttcactcggttttgcatcagaga

SEQ ID NO: 4027721 - DNA, 25 bp, Homo sapien
cctcctctgtattccgtcattatgc

SEQ ID NO: 4027722 - DNA, 25 bp, Homo sapien
ggcatccaattcacgtgcgagtccc

SEQ ID NO: 4027723 - DNA, 25 bp, Homo sapien
tatttcgaacaccagtatcgctggg

SEQ ID NO: 4027724 - DNA, 25 bp, Homo sapien
tcctggtcaccgttattccttggca

SEQ ID NO: 4027725 - DNA, 25 bp, Homo sapien
tgcgagtccccggaataatcccagt

SEQ ID NO: 4027726 - DNA, 25 bp, Homo sapien
actaagcccgtcaggcaaagagcga

SEQ ID NO: 4027727 - DNA, 25 bp, Homo sapien
aggcaaagagcgagccgcacccagc

SEQ ID NO: 4027728 - DNA, 25 bp, Homo sapien
gccgccttcacgtgcagcgcgtaga

SEQ ID NO: 4027729 - DNA, 25 bp, Homo sapien
gtagagcgagagcactaagcccgtc

SEQ ID NO: 4027730 - DNA, 25 bp, Homo sapien
gggccgggcggcgaatggccgcgcc

SEQ ID NO: 4027731 - DNA, 25 bp, Homo sapien
cgcactccacgacccaaatggctgt

SEQ ID NO: 4027732 - DNA, 25 bp, Homo sapien
tatctccaggttccgcccgaggcgc

SEQ ID NO: 4027733 - DNA, 25 bp, Homo sapien
gcgattggccggccgtgctcgcact

SEQ ID NO: 4027734 - DNA, 25 bp, Homo sapien
acagcgaagaatgccgggactagtg

SEQ ID NO: 4027735 - DNA, 25 bp, Homo sapien
aaggcatcaagggaaatgaagtctc

SEQ ID NO: 4027736 - DNA, 25 bp, Homo sapien
agtcggcgcggctgcaaggcatcaa

SEQ ID NO: 4027737 - DNA, 25 bp, Homo sapien
tcaagcgggcgagttaggaaaacag

SEQ ID NO: 4027738 - DNA, 25 bp, Homo sapien
tccgattcgggaaccaagcatttcc

SEQ ID NO: 4027739 - DNA, 25 bp, Homo sapien
gatccagcgaatacggcgatccgat

SEQ ID NO: 4027740 - DNA, 25 bp, Homo sapien
cctatgccaagtcctgttgtaagaa

SEQ ID NO: 4027741 - DNA, 25 bp, Homo sapien
tccgggacctagagaccagcggatc

SEQ ID NO: 4027742 - DNA, 25 bp, Homo sapien
tacattcacagaaccactcctttgg

SEQ ID NO: 4027743 - DNA, 25 bp, Homo sapien
cgcctggcaacacctgagcttgcat

SEQ ID NO: 4027744 - DNA, 25 bp, Homo sapien
gagcttgcatcaactcaacagtcag

SEQ ID NO: 4027745 - DNA, 25 bp, Homo sapien
tcacagacgtcccatctgatggtga

SEQ ID NO: 4027746 - DNA, 25 bp, Homo sapien
gtggggcgaccccagcctactcagt

SEQ ID NO: 4027747 - DNA, 25 bp, Homo sapien
ctggcgagtggactgttcgagccct

SEQ ID NO: 4027748 - DNA, 25 bp, Homo sapien
cgggacggcacgtcctcagaccaaa

SEQ ID NO: 4027749 - DNA, 25 bp, Homo sapien
cgggccgaaccaagtgacccgcgtg

SEQ ID NO: 4027750 - DNA, 25 bp, Homo sapien
catagagccacaatggagagtcacc

SEQ ID NO: 4027751 - DNA, 25 bp, Homo sapien
tgagcacaagtatggcaatgcgccc

SEQ ID NO: 4027752 - DNA, 25 bp, Homo sapien
gccccgtgcacgttaggaagttcag

SEQ ID NO: 4027753 - DNA, 25 bp, Homo sapien
catcaatggccatgtggctgcccgg

SEQ ID NO: 4027754 - DNA, 25 bp, Homo sapien
gaataccgaaatctgcaggcgctca

SEQ ID NO: 4027755 - DNA, 25 bp, Homo sapien
attgctaagacggatagttcaaccg

SEQ ID NO: 4027756 - DNA, 25 bp, Homo sapien
gccaaacagcagatatgaagtcagc

SEQ ID NO: 4027757 - DNA, 25 bp, Homo sapien
tactgagtacctacccggtctggca

SEQ ID NO: 4027758 - DNA, 25 bp, Homo sapien
atggagtctggctcttggtccccag

SEQ ID NO: 4027759 - DNA, 25 bp, Homo sapien
ggctcttggtccccaggctggagtg

SEQ ID NO: 4027760 - DNA, 25 bp, Homo sapien
tggagtctggctcttggtccccagg

SEQ ID NO: 4027761 - DNA, 25 bp, Homo sapien
ggagtctggctcttggtccccaggc

SEQ ID NO: 4027762 - DNA, 25 bp, Homo sapien
aacctgatccacctcacagttgtgg

SEQ ID NO: 4027763 - DNA, 25 bp, Homo sapien
ggccctgaactctggaaactgcttc

SEQ ID NO: 4027764 - DNA, 25 bp, Homo sapien
gaagtgatccagtctcgagtgaacg

SEQ ID NO: 4027765 - DNA, 25 bp, Homo sapien
cttctcagtgtgcaggattcctttt

SEQ ID NO: 4027766 - DNA, 25 bp, Homo sapien
aatgccaaacacttgttagccggtg

SEQ ID NO: 4027767 - DNA, 25 bp, Homo sapien
aacggtgggctggaattagaataat

SEQ ID NO: 4027768 - DNA, 25 bp, Homo sapien
tgttttaatacatgacctcactgac

SEQ ID NO: 4027769 - DNA, 25 bp, Homo sapien
agcagaagtattcagctaaatggtt

SEQ ID NO: 4027770 - DNA, 25 bp, Homo sapien
tcatccagttaacaatcagcaaggt

SEQ ID NO: 4027771 - DNA, 25 bp, Homo sapien
gagccaccacgtttagctgagtata

SEQ ID NO: 4027772 - DNA, 25 bp, Homo sapien
tacagtggcgagctcttgggttact

SEQ ID NO: 4027773 - DNA, 25 bp, Homo sapien
tacctctgagttggcaaccagcagg

SEQ ID NO: 4027774 - DNA, 25 bp, Homo sapien
caagtcaagctctccaagaagtgag

SEQ ID NO: 4027775 - DNA, 25 bp, Homo sapien
tttgttctcacctggaggaggtgaa

SEQ ID NO: 4027776 - DNA, 25 bp, Homo sapien
ggccaagagcggatgttcttcattt

SEQ ID NO: 4027777 - DNA, 25 bp, Homo sapien
tgttcttcatttcacttcacacatg

SEQ ID NO: 4027778 - DNA, 25 bp, Homo sapien
ggcgctcagcggccagtgggcaaga

SEQ ID NO: 4027779 - DNA, 25 bp, Homo sapien
aatcatttctgccctgttactccca

SEQ ID NO: 4027780 - DNA, 25 bp, Homo sapien
tcctccggagtccaggagtcagggc

SEQ ID NO: 4027781 - DNA, 25 bp, Homo sapien
agatccaagcgccagcccagttccg

SEQ ID NO: 4027782 - DNA, 25 bp, Homo sapien
cagagagatgtgctcatcagtctgg

SEQ ID NO: 4027783 - DNA, 25 bp, Homo sapien
ggcagagagatgtgctcatcagtct

SEQ ID NO: 4027784 - DNA, 25 bp, Homo sapien
agggcagagagatgtgctcatcagt

SEQ ID NO: 4027785 - DNA, 25 bp, Homo sapien
gagagatgtgctcatcagtctgggc

SEQ ID NO: 4027786 - DNA, 25 bp, Homo sapien
cctgactctcagtgatggtcccaaa

SEQ ID NO: 4027787 - DNA, 25 bp, Homo sapien
agctccccaggagctcggccaatgg

SEQ ID NO: 4027788 - DNA, 25 bp, Homo sapien
gaagaatgggctcaaagatcaagat

SEQ ID NO: 4027789 - DNA, 25 bp, Homo sapien
agcacacccagaagaatgggctcaa

SEQ ID NO: 4027790 - DNA, 25 bp, Homo sapien
ctgaaggaaggagtggctcaagtca

SEQ ID NO: 4027791 - DNA, 25 bp, Homo sapien
gaaggagtggctcaagtcaggccct

SEQ ID NO: 4027792 - DNA, 25 bp, Homo sapien
gatgcatccatcctggaagtagggc

SEQ ID NO: 4027793 - DNA, 25 bp, Homo sapien
tcctgtccttgagtgtgatgcatcc

SEQ ID NO: 4027794 - DNA, 25 bp, Homo sapien
agaggcaggaaaaggatgggcctca

SEQ ID NO: 4027795 - DNA, 25 bp, Homo sapien
caggaaaaggatgggcctcagcaag

SEQ ID NO: 4027796 - DNA, 25 bp, Homo sapien
acagaggttgctgtcgggctgggac

SEQ ID NO: 4027797 - DNA, 25 bp, Homo sapien
aggcaggaaaaggatgggcctcagc

SEQ ID NO: 4027798 - DNA, 25 bp, Homo sapien
tgggtttggggcaccacacgaggct

SEQ ID NO: 4027799 - DNA, 25 bp, Homo sapien
ttggggcaccacacgaggctggagt

SEQ ID NO: 4027800 - DNA, 25 bp, Homo sapien
tcctgggtttggggcaccacacgag

SEQ ID NO: 4027801 - DNA, 25 bp, Homo sapien
ggcaccacacgaggctggagttctg

SEQ ID NO: 4027802 - DNA, 25 bp, Homo sapien
ggatccaggaggcatagctggaggc

SEQ ID NO: 4027803 - DNA, 25 bp, Homo sapien
tggatccaggaggcatagctggagg

SEQ ID NO: 4027804 - DNA, 25 bp, Homo sapien
ttggatccaggaggcatagctggag

SEQ ID NO: 4027805 - DNA, 25 bp, Homo sapien
gatccaggaggcatagctggaggcc

SEQ ID NO: 4027806 - DNA, 25 bp, Homo sapien
aggcctgttgcgggccccacaggca

SEQ ID NO: 4027807 - DNA, 25 bp, Homo sapien
caggcctgttgcgggccccacaggc

SEQ ID NO: 4027808 - DNA, 25 bp, Homo sapien
gcttggcgtcgatgttgtacaggca

SEQ ID NO: 4027809 - DNA, 25 bp, Homo sapien
tcagaggcacctcgagttgctgcag

SEQ ID NO: 4027810 - DNA, 25 bp, Homo sapien
tgtacaggcagttacacgtctcacg

SEQ ID NO: 4027811 - DNA, 25 bp, Homo sapien
tcttggacaaagtgcggctcctcag

SEQ ID NO: 4027812 - DNA, 25 bp, Homo sapien
tcctcggagtaggagtctagctggt

SEQ ID NO: 4027813 - DNA, 25 bp, Homo sapien
cagatgggccggatgtagcgggaga

SEQ ID NO: 4027814 - DNA, 25 bp, Homo sapien
ccagcttgacctcataggcttcctt

SEQ ID NO: 4027815 - DNA, 25 bp, Homo sapien
agtgcaatgtcgccctgggagccct

SEQ ID NO: 4027816 - DNA, 25 bp, Homo sapien
ggattgacccattaactttgacctc

SEQ ID NO: 4027817 - DNA, 25 bp, Homo sapien
gattgacccattaactttgacctcc

SEQ ID NO: 4027818 - DNA, 25 bp, Homo sapien
tggattgacccattaactttgacct

SEQ ID NO: 4027819 - DNA, 25 bp, Homo sapien
attgacccattaactttgacctcca

SEQ ID NO: 4027820 - DNA, 25 bp, Homo sapien
gctgccacctgtgatgcgtgcttgg

SEQ ID NO: 4027821 - DNA, 25 bp, Homo sapien
actgaccggcgactgcactgctgcc

SEQ ID NO: 4027822 - DNA, 25 bp, Homo sapien
ctgctcagacacgagagagccacca

SEQ ID NO: 4027823 - DNA, 25 bp, Homo sapien
cacacacatggacgccttcataggt

SEQ ID NO: 4027824 - DNA, 25 bp, Homo sapien
taatccaagatagagcagaatggcc

SEQ ID NO: 4027825 - DNA, 25 bp, Homo sapien
tgtccccgaccggagtaatccaaga

SEQ ID NO: 4027826 - DNA, 25 bp, Homo sapien
gagtaatccaagatagagcagaatg

SEQ ID NO: 4027827 - DNA, 25 bp, Homo sapien
ctgtccccgaccggagtaatccaag

SEQ ID NO: 4027828 - DNA, 25 bp, Homo sapien
ccaggcacgcaaggtaggaagcctt

SEQ ID NO: 4027829 - DNA, 25 bp, Homo sapien
gtggacgagtcaccagcaccgtctg

SEQ ID NO: 4027830 - DNA, 25 bp, Homo sapien
cctggagtatccgaagcgagcagtg

SEQ ID NO: 4027831 - DNA, 25 bp, Homo sapien
tgtgtgcacatgcataggccttttg

SEQ ID NO: 4027832 - DNA, 25 bp, Homo sapien
tttacacctttattgtccgctcctc

SEQ ID NO: 4027833 - DNA, 25 bp, Homo sapien
ctgggttcaaaatagcccgggcact

SEQ ID NO: 4027834 - DNA, 25 bp, Homo sapien
cagagccgctgcaatctcggtgggt

SEQ ID NO: 4027835 - DNA, 25 bp, Homo sapien
cccactgggcgggaagtagagggtg

SEQ ID NO: 4027836 - DNA, 25 bp, Homo sapien
agcaggagcaggaagtagactgcat

SEQ ID NO: 4027837 - DNA, 25 bp, Homo sapien
gatcaggagagtcagcaggagcagg

SEQ ID NO: 4027838 - DNA, 25 bp, Homo sapien
tcagctctggatcaggagagtcagc

SEQ ID NO: 4027839 - DNA, 25 bp, Homo sapien
agtagactgcatgcggggatcccga

SEQ ID NO: 4027840 - DNA, 25 bp, Homo sapien
ccttgaacagccatgcccacgagga

SEQ ID NO: 4027841 - DNA, 25 bp, Homo sapien
cgaggatccaggacccttccgtcat

SEQ ID NO: 4027842 - DNA, 25 bp, Homo sapien
aacagccatgcccacgaggatccag

SEQ ID NO: 4027843 - DNA, 25 bp, Homo sapien
atgcccacgaggatccaggaccctt

SEQ ID NO: 4027844 - DNA, 25 bp, Homo sapien
ctggcacaggaggggcggtgctgag

SEQ ID NO: 4027845 - DNA, 25 bp, Homo sapien
gcacaggaggggcggtgctgaggtc

SEQ ID NO: 4027846 - DNA, 25 bp, Homo sapien
acaggaggggcggtgctgaggtcat

SEQ ID NO: 4027847 - DNA, 25 bp, Homo sapien
tggcacaggaggggcggtgctgagg

SEQ ID NO: 4027848 - DNA, 25 bp, Homo sapien
ggccaaatacccaataattccaatc

SEQ ID NO: 4027849 - DNA, 25 bp, Homo sapien
cgggtccagctagggtcccatttgg

SEQ ID NO: 4027850 - DNA, 25 bp, Homo sapien
tctggccacgaagcactctggtctg

SEQ ID NO: 4027851 - DNA, 25 bp, Homo sapien
ccaataattccaatcctggccaggt

SEQ ID NO: 4027852 - DNA, 25 bp, Homo sapien
gggcaggatgccctgatagaggcag

SEQ ID NO: 4027853 - DNA, 25 bp, Homo sapien
gattcgttgtgtcaagatggagaca

SEQ ID NO: 4027854 - DNA, 25 bp, Homo sapien
tagaggcagtcacagattcgttgtg

SEQ ID NO: 4027855 - DNA, 25 bp, Homo sapien
aggatgccctgatagaggcagtcac

SEQ ID NO: 4027856 - DNA, 25 bp, Homo sapien
tccacccgggagctcagctccagga

SEQ ID NO: 4027857 - DNA, 25 bp, Homo sapien
gctccacccgggagctcagctccag

SEQ ID NO: 4027858 - DNA, 25 bp, Homo sapien
agccggatgctgatgaccaagcggg

SEQ ID NO: 4027859 - DNA, 25 bp, Homo sapien
ggatgctgatgaccaagcgggatac

SEQ ID NO: 4027860 - DNA, 25 bp, Homo sapien
gcccggcccagatacacttcaatgt

SEQ ID NO: 4027861 - DNA, 25 bp, Homo sapien
gtaaggcactgttgtagagcctggc

SEQ ID NO: 4027862 - DNA, 25 bp, Homo sapien
gatacacttcaatgtaaggcactgt

SEQ ID NO: 4027863 - DNA, 25 bp, Homo sapien
caatgtaaggcactgttgtagagcc

SEQ ID NO: 4027864 - DNA, 25 bp, Homo sapien
atcccagtgcagactcgatcaccag

SEQ ID NO: 4027865 - DNA, 25 bp, Homo sapien
aggaggatcccagtgcagactcgat

SEQ ID NO: 4027866 - DNA, 25 bp, Homo sapien
ggccaggaggatcccagtgcagact

SEQ ID NO: 4027867 - DNA, 25 bp, Homo sapien
gaggatcccagtgcagactcgatca

SEQ ID NO: 4027868 - DNA, 25 bp, Homo sapien
tgtgtgggggacaagtctgtgtctc

SEQ ID NO: 4027869 - DNA, 25 bp, Homo sapien
gggccccaatcccaggctagctggt

SEQ ID NO: 4027870 - DNA, 25 bp, Homo sapien
tggtcctccaggtaggctccccgag

SEQ ID NO: 4027871 - DNA, 25 bp, Homo sapien
tccccgagtcacatggctgatccat

SEQ ID NO: 4027872 - DNA, 25 bp, Homo sapien
ctcctcctggcacaaaaggctccaa

SEQ ID NO: 4027873 - DNA, 25 bp, Homo sapien
tggcacaaaaggctccaacgcgagt

SEQ ID NO: 4027874 - DNA, 25 bp, Homo sapien
acaaaaggctccaacgcgagtcatt

SEQ ID NO: 4027875 - DNA, 25 bp, Homo sapien
aaggctcggggacgtagacagccac

SEQ ID NO: 4027876 - DNA, 25 bp, Homo sapien
gcccacttggactcgccttccacag

SEQ ID NO: 4027877 - DNA, 25 bp, Homo sapien
ctagagcccacttggactcgccttc

SEQ ID NO: 4027878 - DNA, 25 bp, Homo sapien
ccgccctctccctagagcccacttg

SEQ ID NO: 4027879 - DNA, 25 bp, Homo sapien
gagcccacttggactcgccttccac

SEQ ID NO: 4027880 - DNA, 25 bp, Homo sapien
agcagcgcgcctgggccaagcgcgg

SEQ ID NO: 4027881 - DNA, 25 bp, Homo sapien
ctccgggcagcggtactgccgcccc

SEQ ID NO: 4027882 - DNA, 25 bp, Homo sapien
agggcagagcgcgtgcggcgggtct

SEQ ID NO: 4027883 - DNA, 25 bp, Homo sapien
tggcggccgtacaggcagtggcacc

SEQ ID NO: 4027884 - DNA, 25 bp, Homo sapien
caggtccgaggcgttgtcccacgaa

SEQ ID NO: 4027885 - DNA, 25 bp, Homo sapien
acgaagcgttctcgtgctgcaccag

SEQ ID NO: 4027886 - DNA, 25 bp, Homo sapien
cggctcccgggcaggaagtagtgtt

SEQ ID NO: 4027887 - DNA, 25 bp, Homo sapien
aagccgcgctcaggttcacgggcgt

SEQ ID NO: 4027888 - DNA, 25 bp, Homo sapien
aaagcagctggcaggtgccaagacc

SEQ ID NO: 4027889 - DNA, 25 bp, Homo sapien
ggtctggatcctggcaccatcacct

SEQ ID NO: 4027890 - DNA, 25 bp, Homo sapien
ggtgccaagacccagctttcagaca

SEQ ID NO: 4027891 - DNA, 25 bp, Homo sapien
tttcagacaccagcgccccatggca

SEQ ID NO: 4027892 - DNA, 25 bp, Homo sapien
tggggatctgactgggtcttctggg

SEQ ID NO: 4027893 - DNA, 25 bp, Homo sapien
ctcctggggatctgactgggtcttc

SEQ ID NO: 4027894 - DNA, 25 bp, Homo sapien
ggctcctggggatctgactgggtct

SEQ ID NO: 4027895 - DNA, 25 bp, Homo sapien
cctggggatctgactgggtcttctg

SEQ ID NO: 4027896 - DNA, 25 bp, Homo sapien
caggcccaggctctgaacccatcac

SEQ ID NO: 4027897 - DNA, 25 bp, Homo sapien
ctgggtgggaaaggcaggcccaggc

SEQ ID NO: 4027898 - DNA, 25 bp, Homo sapien
aggcaggcccaggctctgaacccat

SEQ ID NO: 4027899 - DNA, 25 bp, Homo sapien
aaggcaggcccaggctctgaaccca

SEQ ID NO: 4027900 - DNA, 25 bp, Homo sapien
cccgtatccatgcctcataggtagc

SEQ ID NO: 4027901 - DNA, 25 bp, Homo sapien
tcccgtatccatgcctcataggtag

SEQ ID NO: 4027902 - DNA, 25 bp, Homo sapien
ctgctcccgtatccatgcctcatag

SEQ ID NO: 4027903 - DNA, 25 bp, Homo sapien
gctcccgtatccatgcctcataggt

SEQ ID NO: 4027904 - DNA, 25 bp, Homo sapien
aggtgtccctgcggccctctgggta

SEQ ID NO: 4027905 - DNA, 25 bp, Homo sapien
agtgaggttgaagggaccgggctgg

SEQ ID NO: 4027906 - DNA, 25 bp, Homo sapien
cacttcctgtagcacccaggggaga

SEQ ID NO: 4027907 - DNA, 25 bp, Homo sapien
tggagagtgaggttgaagggaccgg

SEQ ID NO: 4027908 - DNA, 25 bp, Homo sapien
ggcacaggtctgaccacggctgatg

SEQ ID NO: 4027909 - DNA, 25 bp, Homo sapien
acaggtctgaccacggctgatgtgg

SEQ ID NO: 4027910 - DNA, 25 bp, Homo sapien
cacaggtctgaccacggctgatgtg

SEQ ID NO: 4027911 - DNA, 25 bp, Homo sapien
gcacaggtctgaccacggctgatgt

SEQ ID NO: 4027912 - DNA, 25 bp, Homo sapien
cccagcaggcggtgccgtgcacgaa

SEQ ID NO: 4027913 - DNA, 25 bp, Homo sapien
tgcacgaagcggtgtgaggcgcggg

SEQ ID NO: 4027914 - DNA, 25 bp, Homo sapien
gctccacttggctgtagttggccgg

SEQ ID NO: 4027915 - DNA, 25 bp, Homo sapien
gccactgcgcgggtgtgcgcgccgt

SEQ ID NO: 4027916 - DNA, 25 bp, Homo sapien
gagcccccgcagatgtggccacctc

SEQ ID NO: 4027917 - DNA, 25 bp, Homo sapien
aacagtgagcagcggagaggaccca

SEQ ID NO: 4027918 - DNA, 25 bp, Homo sapien
gaaacagtgagcagcggagaggacc

SEQ ID NO: 4027919 - DNA, 25 bp, Homo sapien
aaacagtgagcagcggagaggaccc

SEQ ID NO: 4027920 - DNA, 25 bp, Homo sapien
ccacgatgcgggccgagggctcagg

SEQ ID NO: 4027921 - DNA, 25 bp, Homo sapien
gtttgagccccccacgatgcgggcc

SEQ ID NO: 4027922 - DNA, 25 bp, Homo sapien
tgccaaggccaggtgcccggctgcg

SEQ ID NO: 4027923 - DNA, 25 bp, Homo sapien
aggtgcccggctgcgcgtttgagcc

SEQ ID NO: 4027924 - DNA, 25 bp, Homo sapien
caacggggagccgtggaagccaaag

SEQ ID NO: 4027925 - DNA, 25 bp, Homo sapien
ctgcaacggggagccgtggaagcca

SEQ ID NO: 4027926 - DNA, 25 bp, Homo sapien
cgtggaagccaaagctcccctcggg

SEQ ID NO: 4027927 - DNA, 25 bp, Homo sapien
ggagccgtggaagccaaagctcccc

SEQ ID NO: 4027928 - DNA, 25 bp, Homo sapien
taactcaggacgaaggcccgtcctc

SEQ ID NO: 4027929 - DNA, 25 bp, Homo sapien
ccagaagcccaggtaactcaggacg

SEQ ID NO: 4027930 - DNA, 25 bp, Homo sapien
gcccaggtaactcaggacgaaggcc

SEQ ID NO: 4027931 - DNA, 25 bp, Homo sapien
caggtaactcaggacgaaggcccgt

SEQ ID NO: 4027932 - DNA, 25 bp, Homo sapien
ggttcttcctgggtaggactgagag

SEQ ID NO: 4027933 - DNA, 25 bp, Homo sapien
ctgagtcctggaaggctcctgggat

SEQ ID NO: 4027934 - DNA, 25 bp, Homo sapien
tcctggaaggctcctgggatgggac

SEQ ID NO: 4027935 - DNA, 25 bp, Homo sapien
cctggaaggctcctgggatgggact

SEQ ID NO: 4027936 - DNA, 25 bp, Homo sapien
aaggctcctgggatgggactgatga

SEQ ID NO: 4027937 - DNA, 25 bp, Homo sapien
gcgctagagtcagcggaggcagagc

SEQ ID NO: 4027938 - DNA, 25 bp, Homo sapien
cgggccatggcgctagagtcagcgg

SEQ ID NO: 4027939 - DNA, 25 bp, Homo sapien
catggcgctagagtcagcggaggca

SEQ ID NO: 4027940 - DNA, 25 bp, Homo sapien
ggccatggcgctagagtcagcggag

SEQ ID NO: 4027941 - DNA, 25 bp, Homo sapien
tgagggtggaaaacgcccattctcc

SEQ ID NO: 4027942 - DNA, 25 bp, Homo sapien
gcaaggcaaccctgaaagacgacga

SEQ ID NO: 4027943 - DNA, 25 bp, Homo sapien
ccaggcgtcggtactcagcggtgtt

SEQ ID NO: 4027944 - DNA, 25 bp, Homo sapien
cggacatggcctcaaacggtaggta

SEQ ID NO: 4027945 - DNA, 25 bp, Homo sapien
tttgtgagaacttgggagcctgaac

SEQ ID NO: 4027946 - DNA, 25 bp, Homo sapien
gaaaccgatgatcccactcctggga

SEQ ID NO: 4027947 - DNA, 25 bp, Homo sapien
tgtgtattcccatgtgtcctctagg

SEQ ID NO: 4027948 - DNA, 25 bp, Homo sapien
gaatccacgagcttgatttgcacta

SEQ ID NO: 4027949 - DNA, 25 bp, Homo sapien
tcttctccagcggaagtgaccgtgg

SEQ ID NO: 4027950 - DNA, 25 bp, Homo sapien
gaccgtggtggcttcaataaatttg

SEQ ID NO: 4027951 - DNA, 25 bp, Homo sapien
caaccttttgtagccgttggaagct

SEQ ID NO: 4027952 - DNA, 25 bp, Homo sapien
tgcctggtgtgtgctaacctggagc

SEQ ID NO: 4027953 - DNA, 25 bp, Homo sapien
tctgagaggaccctgaaaatctacc

SEQ ID NO: 4027954 - DNA, 25 bp, Homo sapien
cgggaccaaggatcacgtcatgact

SEQ ID NO: 4027955 - DNA, 25 bp, Homo sapien
ccggtgagttcacacgtggtggcat

SEQ ID NO: 4027956 - DNA, 25 bp, Homo sapien
cagtgatgctgatgcgtctggacca

SEQ ID NO: 4027957 - DNA, 25 bp, Homo sapien
caaggcctgggtgagaatgttacaa

SEQ ID NO: 4027958 - DNA, 25 bp, Homo sapien
cagttgcttgatggatactaggtgc

SEQ ID NO: 4027959 - DNA, 25 bp, Homo sapien
caagtcttagtggttgttgccagct

SEQ ID NO: 4027960 - DNA, 25 bp, Homo sapien
caagtctttaatggttgccagcagt

SEQ ID NO: 4027961 - DNA, 25 bp, Homo sapien
cagcacatggtttgcattgccacag

SEQ ID NO: 4027962 - DNA, 25 bp, Homo sapien
caggtagaagatgtcaaggtgtcca

SEQ ID NO: 4027963 - DNA, 25 bp, Homo sapien
tgaaacccagaggaacgcatgcgta

SEQ ID NO: 4027964 - DNA, 25 bp, Homo sapien
caaggcacttgtacagaggttgaaa

SEQ ID NO: 4027965 - DNA, 25 bp, Homo sapien
gctggcttttcgtatattgtgtata

SEQ ID NO: 4027966 - DNA, 25 bp, Homo sapien
ctgaccggagtgttgctgggaagga

SEQ ID NO: 4027967 - DNA, 25 bp, Homo sapien
gggctgaccggagtgttgctgggaa

SEQ ID NO: 4027968 - DNA, 25 bp, Homo sapien
ttcaagctggcttttcgtatattgt

SEQ ID NO: 4027969 - DNA, 25 bp, Homo sapien
ggaccttcccgtacagagcatccag

SEQ ID NO: 4027970 - DNA, 25 bp, Homo sapien
cagcagccactcaacgtttgtgacc

SEQ ID NO: 4027971 - DNA, 25 bp, Homo sapien
tggtgtgaaactgaagagcttccgc

SEQ ID NO: 4027972 - DNA, 25 bp, Homo sapien
ccaccaggtaggactgggactccct

SEQ ID NO: 4027973 - DNA, 25 bp, Homo sapien
cagcccggtgctggtctataaagtg

SEQ ID NO: 4027974 - DNA, 25 bp, Homo sapien
tcgcgataagcgcagcccggtgctg

SEQ ID NO: 4027975 - DNA, 25 bp, Homo sapien
cggtgctggtctataaagtgcaggc

SEQ ID NO: 4027976 - DNA, 25 bp, Homo sapien
agcgcagcccggtgctggtctataa

SEQ ID NO: 4027977 - DNA, 25 bp, Homo sapien
ctggatcccagctggcgcggctcca

SEQ ID NO: 4027978 - DNA, 25 bp, Homo sapien
cccgttggtcggtaggccaagcgtg

SEQ ID NO: 4027979 - DNA, 25 bp, Homo sapien
cctgcaggcccatgtcgcgcagcac

SEQ ID NO: 4027980 - DNA, 25 bp, Homo sapien
caggtagaagctgaccagcttgtcg

SEQ ID NO: 4027981 - DNA, 25 bp, Homo sapien
gttagcggtgagctcggcgccgtag

SEQ ID NO: 4027982 - DNA, 25 bp, Homo sapien
tgtcggtgaggtccaaggcgtccat

SEQ ID NO: 4027983 - DNA, 25 bp, Homo sapien
ctcggcgccgtaggtctccaggtag

SEQ ID NO: 4027984 - DNA, 25 bp, Homo sapien
ccccgcgggatgcgcccgtagccct

SEQ ID NO: 4027985 - DNA, 25 bp, Homo sapien
cccgcgggatgcgcccgtagccctc

SEQ ID NO: 4027986 - DNA, 25 bp, Homo sapien
ggttctccagcgcatccaggatggc

SEQ ID NO: 4027987 - DNA, 25 bp, Homo sapien
cagcgcatccaggatggcgtcgcgc

SEQ ID NO: 4027988 - DNA, 25 bp, Homo sapien
tctccagcgcatccaggatggcgtc

SEQ ID NO: 4027989 - DNA, 25 bp, Homo sapien
tcaggttctccagcgcatccaggat

SEQ ID NO: 4027990 - DNA, 25 bp, Homo sapien
ccaggcctctggattggggccccag

SEQ ID NO: 4027991 - DNA, 25 bp, Homo sapien
aggcgcttccttactacacccttgg

SEQ ID NO: 4027992 - DNA, 25 bp, Homo sapien
gttgccctccagcaaaaggcgcttc

SEQ ID NO: 4027993 - DNA, 25 bp, Homo sapien
cagccgccgaccaggaggaagtcgg

SEQ ID NO: 4027994 - DNA, 25 bp, Homo sapien
catggatgtttatcatgccttctca

SEQ ID NO: 4027995 - DNA, 25 bp, Homo sapien
cacttgtggtccaacagccagtgtt

SEQ ID NO: 4027996 - DNA, 25 bp, Homo sapien
caccatgggtggcacttgtggtcca

SEQ ID NO: 4027997 - DNA, 25 bp, Homo sapien
tacaccggagggattgtggctcact

SEQ ID NO: 4027998 - DNA, 25 bp, Homo sapien
tggaggcacggaggcgtccttggtc

SEQ ID NO: 4027999 - DNA, 25 bp, Homo sapien
cactgctgttgtcttacgcgactgg

SEQ ID NO: 4028000 - DNA, 25 bp, Homo sapien
ggcttcacaggcgttgcattactcc

SEQ ID NO: 4028001 - DNA, 25 bp, Homo sapien
aagaataaatgacaggtgcaggggc

SEQ ID NO: 4028002 - DNA, 25 bp, Homo sapien
tgtgcttaagaccccaacctcaggg

SEQ ID NO: 4028003 - DNA, 25 bp, Homo sapien
ctgtgcttaagaccccaacctcagg

SEQ ID NO: 4028004 - DNA, 25 bp, Homo sapien
tgcttaagaccccaacctcagggca

SEQ ID NO: 4028005 - DNA, 25 bp, Homo sapien
gtgcttaagaccccaacctcagggc

SEQ ID NO: 4028006 - DNA, 25 bp, Homo sapien
tcctcgtagtaggaggcgaccagct

SEQ ID NO: 4028007 - DNA, 25 bp, Homo sapien
tccaacatgcgcatgtcgcgcagca

SEQ ID NO: 4028008 - DNA, 25 bp, Homo sapien
tcggtgaggtccacgatatctagct

SEQ ID NO: 4028009 - DNA, 25 bp, Homo sapien
gccacgacgagctcggctgcgtagt

SEQ ID NO: 4028010 - DNA, 25 bp, Homo sapien
tgctgttcccaatctgcagaggagg

SEQ ID NO: 4028011 - DNA, 25 bp, Homo sapien
tggcagctcctattcaaccctgtgg

SEQ ID NO: 4028012 - DNA, 25 bp, Homo sapien
gactctgcaaacaccgcctagaggg

SEQ ID NO: 4028013 - DNA, 25 bp, Homo sapien
tcccgggaaggagactgatctggca

SEQ ID NO: 4028014 - DNA, 25 bp, Homo sapien
cggcagcccattgcggaggttttct

SEQ ID NO: 4028015 - DNA, 25 bp, Homo sapien
cactcattttcacggggagggtgtg

SEQ ID NO: 4028016 - DNA, 25 bp, Homo sapien
gccccggcagcccattgcggaggtt

SEQ ID NO: 4028017 - DNA, 25 bp, Homo sapien
cccattgcggaggttttctcgggag

SEQ ID NO: 4028018 - DNA, 25 bp, Homo sapien
tctttctgcgtatagttgccccagc

SEQ ID NO: 4028019 - DNA, 25 bp, Homo sapien
ccagcttgagctgcatgcattgaag

SEQ ID NO: 4028020 - DNA, 25 bp, Homo sapien
aaaagctgcgtaatccaggtggtcc

SEQ ID NO: 4028021 - DNA, 25 bp, Homo sapien
gaaactttctttcgaagctgccaca

SEQ ID NO: 4028022 - DNA, 25 bp, Homo sapien
gaatcctctgggttggatgacagca

SEQ ID NO: 4028023 - DNA, 25 bp, Homo sapien
ctatccaaaaggacgtgccctcctc

SEQ ID NO: 4028024 - DNA, 25 bp, Homo sapien
ctcgttcctcctccagaatcctctg

SEQ ID NO: 4028025 - DNA, 25 bp, Homo sapien
gctgctccggaccttctcgttcctc

SEQ ID NO: 4028026 - DNA, 25 bp, Homo sapien
gctacatacatgtgtggcaagtgtt

SEQ ID NO: 4028027 - DNA, 25 bp, Homo sapien
gcaacacactctcttggcactgcaa

SEQ ID NO: 4028028 - DNA, 25 bp, Homo sapien
cagtgcctgagtgatggcaacacac

SEQ ID NO: 4028029 - DNA, 25 bp, Homo sapien
gaggaaatgtttggacagctttggc

SEQ ID NO: 4028030 - DNA, 25 bp, Homo sapien
cttgaagccttgtctcagagtccac

SEQ ID NO: 4028031 - DNA, 25 bp, Homo sapien
cacacttggtggtggctcattgaga

SEQ ID NO: 4028032 - DNA, 25 bp, Homo sapien
gggcctccacgtctgagttcgagca

SEQ ID NO: 4028033 - DNA, 25 bp, Homo sapien
ttttacagagagtggacccttggcc

SEQ ID NO: 4028034 - DNA, 25 bp, Homo sapien
tccctaaagaggtgagcatgtggca

SEQ ID NO: 4028035 - DNA, 25 bp, Homo sapien
tgagtctcaagaggttaaacgaccg

SEQ ID NO: 4028036 - DNA, 25 bp, Homo sapien
gaatgggtgctgcaatccactctgc

SEQ ID NO: 4028037 - DNA, 25 bp, Homo sapien
catgtccagaagagcacacgggatc

SEQ ID NO: 4028038 - DNA, 25 bp, Homo sapien
gaagtgggacttcccgtcgcctgcg

SEQ ID NO: 4028039 - DNA, 25 bp, Homo sapien
ctgctggagcctgcgcagcttggat

SEQ ID NO: 4028040 - DNA, 25 bp, Homo sapien
gacggtcaatcctgtgggtgaagac

SEQ ID NO: 4028041 - DNA, 25 bp, Homo sapien
ccatgagaagccgtgggtggaacca

SEQ ID NO: 4028042 - DNA, 25 bp, Homo sapien
tcagacatcggttcatattaagaca

SEQ ID NO: 4028043 - DNA, 25 bp, Homo sapien
tcacaaggcattcaagtgtacagtg

SEQ ID NO: 4028044 - DNA, 25 bp, Homo sapien
caagtcacctccttaaaggtagtca

SEQ ID NO: 4028045 - DNA, 25 bp, Homo sapien
ttccaggcgatgtgcaagtgtatgc

SEQ ID NO: 4028046 - DNA, 25 bp, Homo sapien
gctggagcgcatagacaccgattcc

SEQ ID NO: 4028047 - DNA, 25 bp, Homo sapien
ttctcggaggcagtgcagaacacgc

SEQ ID NO: 4028048 - DNA, 25 bp, Homo sapien
taacaggtgtatcacccacagagaa

SEQ ID NO: 4028049 - DNA, 25 bp, Homo sapien
cacttagctattggatgagggctgc

SEQ ID NO: 4028050 - DNA, 25 bp, Homo sapien
tctgttctaaaagcgagtggtctca

SEQ ID NO: 4028051 - DNA, 25 bp, Homo sapien
gctgagcctgagttgtctgttctaa

SEQ ID NO: 4028052 - DNA, 25 bp, Homo sapien
ggttgagttgaggacacgtcctgtc

SEQ ID NO: 4028053 - DNA, 25 bp, Homo sapien
aattcgagttcaccttggctgagcc

SEQ ID NO: 4028054 - DNA, 25 bp, Homo sapien
ttcttggcgttcaaccctccatctt

SEQ ID NO: 4028055 - DNA, 25 bp, Homo sapien
gccctgcatccccaattgccagttc

SEQ ID NO: 4028056 - DNA, 25 bp, Homo sapien
tctcctacccacgcggcttggaagt

SEQ ID NO: 4028057 - DNA, 25 bp, Homo sapien
ccacgcggcttggaagtgtgtccga

SEQ ID NO: 4028058 - DNA, 25 bp, Homo sapien
cataggtggccaaaacagtcattgc

SEQ ID NO: 4028059 - DNA, 25 bp, Homo sapien
ggaccagccatgcaggacgtgctta

SEQ ID NO: 4028060 - DNA, 25 bp, Homo sapien
gaattgggcaacctgagagagctct

SEQ ID NO: 4028061 - DNA, 25 bp, Homo sapien
gggccacacgattggatttcaggaa

SEQ ID NO: 4028062 - DNA, 25 bp, Homo sapien
tgaactctccagcttcgcgtgagaa

SEQ ID NO: 4028063 - DNA, 25 bp, Homo sapien
gaattagtgtcatgtcagcatcagc

SEQ ID NO: 4028064 - DNA, 25 bp, Homo sapien
ttcagggcgcacagcatgagaggct

SEQ ID NO: 4028065 - DNA, 25 bp, Homo sapien
gagatgcctgcatgctgggttctgc

SEQ ID NO: 4028066 - DNA, 25 bp, Homo sapien
agattataggcttctgccaccatac

SEQ ID NO: 4028067 - DNA, 25 bp, Homo sapien
tgagattataggcttctgccaccat

SEQ ID NO: 4028068 - DNA, 25 bp, Homo sapien
acctcccgagtagcctcccgagtag

SEQ ID NO: 4028069 - DNA, 25 bp, Homo sapien
gctgagattataggcttctgccacc

SEQ ID NO: 4028070 - DNA, 25 bp, Homo sapien
cctgcacttcaggtgacatccaaag

SEQ ID NO: 4028071 - DNA, 25 bp, Homo sapien
ggtcgtctgacttctcgtgccattt

SEQ ID NO: 4028072 - DNA, 25 bp, Homo sapien
tcaggtttgatctggcactggaccc

SEQ ID NO: 4028073 - DNA, 25 bp, Homo sapien
ggtgacatccaaagctctgtcaggt

SEQ ID NO: 4028074 - DNA, 25 bp, Homo sapien
tcagggtgagctgtaactcccttca

SEQ ID NO: 4028075 - DNA, 25 bp, Homo sapien
gggtgtcaccctcagcttctcaggg

SEQ ID NO: 4028076 - DNA, 25 bp, Homo sapien
gctccccttcgagaagaactgtggg

SEQ ID NO: 4028077 - DNA, 25 bp, Homo sapien
gaactgtgggcaagatggcctctgt

SEQ ID NO: 4028078 - DNA, 25 bp, Homo sapien
gatgcttgtgctgctctctggctct

SEQ ID NO: 4028079 - DNA, 25 bp, Homo sapien
tcagccagcgagatctggccatcag

SEQ ID NO: 4028080 - DNA, 25 bp, Homo sapien
tcaggtacccgcctatctctcctct

SEQ ID NO: 4028081 - DNA, 25 bp, Homo sapien
ggatgtggtcatggaggccccatct

SEQ ID NO: 4028082 - DNA, 25 bp, Homo sapien
tgcaggtgaataacctcagccagcg

SEQ ID NO: 4028083 - DNA, 25 bp, Homo sapien
tatttcccctgatagcttggcttct

SEQ ID NO: 4028084 - DNA, 25 bp, Homo sapien
ttatttcccctgatagcttggcttc

SEQ ID NO: 4028085 - DNA, 25 bp, Homo sapien
tcccctgatagcttggcttcttcaa

SEQ ID NO: 4028086 - DNA, 25 bp, Homo sapien
tttcccctgatagcttggcttcttc

SEQ ID NO: 4028087 - DNA, 25 bp, Homo sapien
gagcctccgtctgaaatccagagag

SEQ ID NO: 4028088 - DNA, 25 bp, Homo sapien
tggagcctccgtctgaaatccagag

SEQ ID NO: 4028089 - DNA, 25 bp, Homo sapien
actgtggagcctccgtctgaaatcc

SEQ ID NO: 4028090 - DNA, 25 bp, Homo sapien
tgtggagcctccgtctgaaatccag

SEQ ID NO: 4028091 - DNA, 25 bp, Homo sapien
cacctccgtatcagcggcgtgggaa

SEQ ID NO: 4028092 - DNA, 25 bp, Homo sapien
tatcagcggcgtgggaaaagcacgt

SEQ ID NO: 4028093 - DNA, 25 bp, Homo sapien
tcgagcacctccgtatcagcggcgt

SEQ ID NO: 4028094 - DNA, 25 bp, Homo sapien
tgtgagtggaggaggctccctcgag

SEQ ID NO: 4028095 - DNA, 25 bp, Homo sapien
tcacacctttattgtgtccgggggc

SEQ ID NO: 4028096 - DNA, 25 bp, Homo sapien
cacacctttattgtgtccgggggcg

SEQ ID NO: 4028097 - DNA, 25 bp, Homo sapien
caggggtgttcgtagcccgtgggca

SEQ ID NO: 4028098 - DNA, 25 bp, Homo sapien
tcaggggtgttcgtagcccgtgggc

SEQ ID NO: 4028099 - DNA, 25 bp, Homo sapien
ggggtgttcgtagcccgtgggcaga

SEQ ID NO: 4028100 - DNA, 25 bp, Homo sapien
ggtgttcgtagcccgtgggcagagg

SEQ ID NO: 4028101 - DNA, 25 bp, Homo sapien
cggtggcccgagtggagataggagt

SEQ ID NO: 4028102 - DNA, 25 bp, Homo sapien
tgcggaggtgttggtagggacggaa

SEQ ID NO: 4028103 - DNA, 25 bp, Homo sapien
gtggcccgagtggagataggagttg

SEQ ID NO: 4028104 - DNA, 25 bp, Homo sapien
cttggtgcggatgcggaggtgttgg

SEQ ID NO: 4028105 - DNA, 25 bp, Homo sapien
acggagcggggtgagcgcggcggtc

SEQ ID NO: 4028106 - DNA, 25 bp, Homo sapien
ggagcggggtgagcgcggcggtcct

SEQ ID NO: 4028107 - DNA, 25 bp, Homo sapien
ctgcggacggagcggggtgagcgcg

SEQ ID NO: 4028108 - DNA, 25 bp, Homo sapien
ggacggagcggggtgagcgcggcgg

SEQ ID NO: 4028109 - DNA, 25 bp, Homo sapien
ggcctcctttggcagcgctggccaa

SEQ ID NO: 4028110 - DNA, 25 bp, Homo sapien
cgtggcctcctttggcagcgctggc

SEQ ID NO: 4028111 - DNA, 25 bp, Homo sapien
cctcctttggcagcgctggccaagc

SEQ ID NO: 4028112 - DNA, 25 bp, Homo sapien
gtggcctcctttggcagcgctggcc

SEQ ID NO: 4028113 - DNA, 25 bp, Homo sapien
ccagcgctgtcctcgctccctttcc

SEQ ID NO: 4028114 - DNA, 25 bp, Homo sapien
cagcgctgtcctcgctccctttcct

SEQ ID NO: 4028115 - DNA, 25 bp, Homo sapien
accagcgctgtcctcgctccctttc

SEQ ID NO: 4028116 - DNA, 25 bp, Homo sapien
ggggagccgggaaccagcgctgtcc

SEQ ID NO: 4028117 - DNA, 25 bp, Homo sapien
gaatctgtgtctgatgctgggaaca

SEQ ID NO: 4028118 - DNA, 25 bp, Homo sapien
gaacactgatgttctggctgaatcc

SEQ ID NO: 4028119 - DNA, 25 bp, Homo sapien
ccaaggctgcaaactaggacagagt

SEQ ID NO: 4028120 - DNA, 25 bp, Homo sapien
gccagctggtctataaagagcgcct

SEQ ID NO: 4028121 - DNA, 25 bp, Homo sapien
ggagatgcacgagacccgagtaaat

SEQ ID NO: 4028122 - DNA, 25 bp, Homo sapien
catagtcaccttggctaactttcca

SEQ ID NO: 4028123 - DNA, 25 bp, Homo sapien
tgttatcactatagacataaccgtg

SEQ ID NO: 4028124 - DNA, 25 bp, Homo sapien
ggaatcatcgaatgacaggcacagt

SEQ ID NO: 4028125 - DNA, 25 bp, Homo sapien
gagataggttaccagacagacatgc

SEQ ID NO: 4028126 - DNA, 25 bp, Homo sapien
tgaaagaaacccaagttttagcata

SEQ ID NO: 4028127 - DNA, 25 bp, Homo sapien
gaaacccaagttttagcatagaata

SEQ ID NO: 4028128 - DNA, 25 bp, Homo sapien
ccagacagacatgccctatgttctt

SEQ ID NO: 4028129 - DNA, 25 bp, Homo sapien
tacaacaagtagacggcagtgcctg

SEQ ID NO: 4028130 - DNA, 25 bp, Homo sapien
catcaaggactgaggtagcaagctt

SEQ ID NO: 4028131 - DNA, 25 bp, Homo sapien
ggctcatgatgacaggacttgcacc

SEQ ID NO: 4028132 - DNA, 25 bp, Homo sapien
tcaggcgaagcccaatggagaagca

SEQ ID NO: 4028133 - DNA, 25 bp, Homo sapien
acgcccagccgacaactaacaaaca

SEQ ID NO: 4028134 - DNA, 25 bp, Homo sapien
cacgcccagccgacaactaacaaac

SEQ ID NO: 4028135 - DNA, 25 bp, Homo sapien
gcccagccgacaactaacaaacact

SEQ ID NO: 4028136 - DNA, 25 bp, Homo sapien
ccagccgacaactaacaaacacttt

SEQ ID NO: 4028137 - DNA, 25 bp, Homo sapien
tttatttcacagagatgcggtctcg

SEQ ID NO: 4028138 - DNA, 25 bp, Homo sapien
tcaaattcttcgggctcacgcgatc

SEQ ID NO: 4028139 - DNA, 25 bp, Homo sapien
tctcaaattcttcgggctcacgcga

SEQ ID NO: 4028140 - DNA, 25 bp, Homo sapien
caaattcttcgggctcacgcgatcc

SEQ ID NO: 4028141 - DNA, 25 bp, Homo sapien
gcacctgcctaaatcccttaatgta

SEQ ID NO: 4028142 - DNA, 25 bp, Homo sapien
tataagggaaaggagcgagaattca

SEQ ID NO: 4028143 - DNA, 25 bp, Homo sapien
tacagaaaagccgtcctgagcgggt

SEQ ID NO: 4028144 - DNA, 25 bp, Homo sapien
cacttctgagaaagatctgccatac

SEQ ID NO: 4028145 - DNA, 25 bp, Homo sapien
gtgtgggttcgagggcggtggagga

SEQ ID NO: 4028146 - DNA, 25 bp, Homo sapien
tggctggcggaacctgggcaacttc

SEQ ID NO: 4028147 - DNA, 25 bp, Homo sapien
tcgccgagcggtccggccgctctgt

SEQ ID NO: 4028148 - DNA, 25 bp, Homo sapien
ggaggagctcggcactgtcgctgaa

SEQ ID NO: 4028149 - DNA, 25 bp, Homo sapien
ctgcgggaaggccggatggaaccag

SEQ ID NO: 4028150 - DNA, 25 bp, Homo sapien
ggggctcccacagggccggagccca

SEQ ID NO: 4028151 - DNA, 25 bp, Homo sapien
tccggggcgactgagctgggtgcga

SEQ ID NO: 4028152 - DNA, 25 bp, Homo sapien
gaggctgacgctctccacgctccca

SEQ ID NO: 4028153 - DNA, 25 bp, Homo sapien
cccagaggtgctgtccggggcgact

SEQ ID NO: 4028154 - DNA, 25 bp, Homo sapien
aggtcttctcccctgggtgcggaag

SEQ ID NO: 4028155 - DNA, 25 bp, Homo sapien
acgcgctgggagagggaggtcttct

SEQ ID NO: 4028156 - DNA, 25 bp, Homo sapien
ttctcccctgggtgcggaaggacgc

SEQ ID NO: 4028157 - DNA, 25 bp, Homo sapien
aggacgcgctgggagagggaggtct

SEQ ID NO: 4028158 - DNA, 25 bp, Homo sapien
tgatgaggttggagcggccacagca

SEQ ID NO: 4028159 - DNA, 25 bp, Homo sapien
tgaattcgctggtggccgatcagct

SEQ ID NO: 4028160 - DNA, 25 bp, Homo sapien
agagctggccgctaaacccttgccg

SEQ ID NO: 4028161 - DNA, 25 bp, Homo sapien
gcagacgaatggcttctcccgagtg

SEQ ID NO: 4028162 - DNA, 25 bp, Homo sapien
gacagcgacaaggtctctcgccagt

SEQ ID NO: 4028163 - DNA, 25 bp, Homo sapien
tggggacagcgacaaggtctctcgc

SEQ ID NO: 4028164 - DNA, 25 bp, Homo sapien
gggacagcgacaaggtctctcgcca

SEQ ID NO: 4028165 - DNA, 25 bp, Homo sapien
cagcgacaaggtctctcgccagtcg

SEQ ID NO: 4028166 - DNA, 25 bp, Homo sapien
ggaggagggatgcgctctgagtaaa

SEQ ID NO: 4028167 - DNA, 25 bp, Homo sapien
aggagggatgcgctctgagtaaaac

SEQ ID NO: 4028168 - DNA, 25 bp, Homo sapien
gaggagggatgcgctctgagtaaaa

SEQ ID NO: 4028169 - DNA, 25 bp, Homo sapien
tggaggagggatgcgctctgagtaa

SEQ ID NO: 4028170 - DNA, 25 bp, Homo sapien
caggccttgcacttgcagggctgac

SEQ ID NO: 4028171 - DNA, 25 bp, Homo sapien
tcccgcaggccttgcacttgcaggg

SEQ ID NO: 4028172 - DNA, 25 bp, Homo sapien
ccgcaggccttgcacttgcagggct

SEQ ID NO: 4028173 - DNA, 25 bp, Homo sapien
cctcccgcaggccttgcacttgcag

SEQ ID NO: 4028174 - DNA, 25 bp, Homo sapien
ggccctgggtgaatctgccggtgct

SEQ ID NO: 4028175 - DNA, 25 bp, Homo sapien
gctgaaacgctttccacagtcaggg

SEQ ID NO: 4028176 - DNA, 25 bp, Homo sapien
cctgggtgaatctgccggtgctgca

SEQ ID NO: 4028177 - DNA, 25 bp, Homo sapien
ctggctgaaacgctttccacagtca

SEQ ID NO: 4028178 - DNA, 25 bp, Homo sapien
gtaactgtacgggaggctttgccgc

SEQ ID NO: 4028179 - DNA, 25 bp, Homo sapien
cttcggagatgaccgctcagggagt

SEQ ID NO: 4028180 - DNA, 25 bp, Homo sapien
tgtggggcctctgccgcactcaggc

SEQ ID NO: 4028181 - DNA, 25 bp, Homo sapien
cttcccgtggccacgagctcacagt

SEQ ID NO: 4028182 - DNA, 25 bp, Homo sapien
ccccaggcctcgggggctgtctgga

SEQ ID NO: 4028183 - DNA, 25 bp, Homo sapien
ggccccaggcctcgggggctgtctg

SEQ ID NO: 4028184 - DNA, 25 bp, Homo sapien
aggcctcgggggctgtctggagagt

SEQ ID NO: 4028185 - DNA, 25 bp, Homo sapien
cctcgggggctgtctggagagttct

SEQ ID NO: 4028186 - DNA, 25 bp, Homo sapien
tcttggatacgctggtcctcactgc

SEQ ID NO: 4028187 - DNA, 25 bp, Homo sapien
agtccatcctcttggatacgctggt

SEQ ID NO: 4028188 - DNA, 25 bp, Homo sapien
tcttgaggctctcgggcatgtccct

SEQ ID NO: 4028189 - DNA, 25 bp, Homo sapien
taatgtaagacgctgggcaatgtca

SEQ ID NO: 4028190 - DNA, 25 bp, Homo sapien
tgcggaaggaaagatttcagatccc

SEQ ID NO: 4028191 - DNA, 25 bp, Homo sapien
ctgcggaaggaaagatttcagatcc

SEQ ID NO: 4028192 - DNA, 25 bp, Homo sapien
ctcccactgagctccaagcctgcaa

SEQ ID NO: 4028193 - DNA, 25 bp, Homo sapien
cccactgagctccaagcctgcaaag

SEQ ID NO: 4028194 - DNA, 25 bp, Homo sapien
cactgagctccaagcctgcaaagca

SEQ ID NO: 4028195 - DNA, 25 bp, Homo sapien
actgagctccaagcctgcaaagcat

SEQ ID NO: 4028196 - DNA, 25 bp, Homo sapien
tacctgcaagcaatggatgaatctc

SEQ ID NO: 4028197 - DNA, 25 bp, Homo sapien
aagaggaactgctgttacctgcaag

SEQ ID NO: 4028198 - DNA, 25 bp, Homo sapien
tgatgatggttatgcccgtgtacac

SEQ ID NO: 4028199 - DNA, 25 bp, Homo sapien
gcaaagttctgcaccctgaatgtga

SEQ ID NO: 4028200 - DNA, 25 bp, Homo sapien
tgttaccgaaatcagtccttgtgcc

SEQ ID NO: 4028201 - DNA, 25 bp, Homo sapien
ccattccaagcaacagacgagtcta

SEQ ID NO: 4028202 - DNA, 25 bp, Homo sapien
cattcatggtcttgagggccctagg

SEQ ID NO: 4028203 - DNA, 25 bp, Homo sapien
ggcctctggcctcgataaagcagca

SEQ ID NO: 4028204 - DNA, 25 bp, Homo sapien
ccccgagagacacggcggatcggaa

SEQ ID NO: 4028205 - DNA, 25 bp, Homo sapien
taacctcagtcatagggcgctccgt

SEQ ID NO: 4028206 - DNA, 25 bp, Homo sapien
aacatggtccccgcaagggaccctg

SEQ ID NO: 4028207 - DNA, 25 bp, Homo sapien
ccacggcccaggactaggatgccgg

SEQ ID NO: 4028208 - DNA, 25 bp, Homo sapien
ggagtccgcgccatgcgcatgcaca

SEQ ID NO: 4028209 - DNA, 25 bp, Homo sapien
ctcctcccaccttttgcgcgtctcg

SEQ ID NO: 4028210 - DNA, 25 bp, Homo sapien
ctcgcccgggcatcgaaggaaggga

SEQ ID NO: 4028211 - DNA, 25 bp, Homo sapien
cgaaggaagggaatgacggcgcgac

SEQ ID NO: 4028212 - DNA, 25 bp, Homo sapien
caaaaaccttgtacgtgagtattca

SEQ ID NO: 4028213 - DNA, 25 bp, Homo sapien
cacacatggctggttggaacgtaaa

SEQ ID NO: 4028214 - DNA, 25 bp, Homo sapien
tcatgagggaagagctcacataacc

SEQ ID NO: 4028215 - DNA, 25 bp, Homo sapien
tgctgcatcgtagaatgcctaaggc

SEQ ID NO: 4028216 - DNA, 25 bp, Homo sapien
catgtccagaataggtcatctgtag

SEQ ID NO: 4028217 - DNA, 25 bp, Homo sapien
ggactgaatgtttgtatcgccccca

SEQ ID NO: 4028218 - DNA, 25 bp, Homo sapien
tctgtagagataagatgtagattag

SEQ ID NO: 4028219 - DNA, 25 bp, Homo sapien
gactgaatgtttgtatcgcccccaa

SEQ ID NO: 4028220 - DNA, 25 bp, Homo sapien
gtggcagatgtctgtaatctcagct

SEQ ID NO: 4028221 - DNA, 25 bp, Homo sapien
ccgagaccacgccattgcactgcag

SEQ ID NO: 4028222 - DNA, 25 bp, Homo sapien
gccgagaccacgccattgcactgca

SEQ ID NO: 4028223 - DNA, 25 bp, Homo sapien
caggtgtggtggcagatgtctgtaa

SEQ ID NO: 4028224 - DNA, 25 bp, Homo sapien
caaatatttcaattctaaggtttgg

SEQ ID NO: 4028225 - DNA, 25 bp, Homo sapien
aaaggccaaatatttcaattctaag

SEQ ID NO: 4028226 - DNA, 25 bp, Homo sapien
atatttcaattctaaggtttggaat

SEQ ID NO: 4028227 - DNA, 25 bp, Homo sapien
gagaaaaggccaaatatttcaattc

SEQ ID NO: 4028228 - DNA, 25 bp, Homo sapien
tgctcatttgtgaggatccagtgac

SEQ ID NO: 4028229 - DNA, 25 bp, Homo sapien
taaatatagcgatattgttaccaaa

SEQ ID NO: 4028230 - DNA, 25 bp, Homo sapien
tgcaggagaataaatatagcgatat

SEQ ID NO: 4028231 - DNA, 25 bp, Homo sapien
tgacaaagccccgaatctccaggct

SEQ ID NO: 4028232 - DNA, 25 bp, Homo sapien
cactgctgggaagcgaaggcatctg

SEQ ID NO: 4028233 - DNA, 25 bp, Homo sapien
ccactgctgggaagcgaaggcatct

SEQ ID NO: 4028234 - DNA, 25 bp, Homo sapien
tccactgctgggaagcgaaggcatc

SEQ ID NO: 4028235 - DNA, 25 bp, Homo sapien
tgtccactgctgggaagcgaaggca

SEQ ID NO: 4028236 - DNA, 25 bp, Homo sapien
tagttgtcacgactctctagtcccc

SEQ ID NO: 4028237 - DNA, 25 bp, Homo sapien
ctctagtccccattattccagagca

SEQ ID NO: 4028238 - DNA, 25 bp, Homo sapien
gcgaggcctgtggatgcagttctct

SEQ ID NO: 4028239 - DNA, 25 bp, Homo sapien
ctagggactacagcccagaaaaatg

SEQ ID NO: 4028240 - DNA, 25 bp, Homo sapien
tagccctgagacataagtggtgcgg

SEQ ID NO: 4028241 - DNA, 25 bp, Homo sapien
tcagggaatctgtagggacaagact

SEQ ID NO: 4028242 - DNA, 25 bp, Homo sapien
aatgctaatctgctgactaaccctg

SEQ ID NO: 4028243 - DNA, 25 bp, Homo sapien
cacccttcatgggtagctgaggtca

SEQ ID NO: 4028244 - DNA, 25 bp, Homo sapien
tctgccttgcctagttgagcctgtg

SEQ ID NO: 4028245 - DNA, 25 bp, Homo sapien
ccttcagatagggaaaggagcttca

SEQ ID NO: 4028246 - DNA, 25 bp, Homo sapien
cagcccagaggagacgatgttaccg

SEQ ID NO: 4028247 - DNA, 25 bp, Homo sapien
tgtgtgtctcgccaggctcagagct

SEQ ID NO: 4028248 - DNA, 25 bp, Homo sapien
aaaccctggctcgtactctctgaag

SEQ ID NO: 4028249 - DNA, 25 bp, Homo sapien
tgggcactgggtcacaagcttggac

SEQ ID NO: 4028250 - DNA, 25 bp, Homo sapien
tactctatgtgggtagcgtcctcga

SEQ ID NO: 4028251 - DNA, 25 bp, Homo sapien
gaaactgaggtctgccgagtcatcc

SEQ ID NO: 4028252 - DNA, 25 bp, Homo sapien
cagctgactgggctctttgaaggca

SEQ ID NO: 4028253 - DNA, 25 bp, Homo sapien
atgttcagtccccaatgtccaggca

SEQ ID NO: 4028254 - DNA, 25 bp, Homo sapien
gaagggactgtgtcagctactgcca

SEQ ID NO: 4028255 - DNA, 25 bp, Homo sapien
gaggacttttgaagggctcacacac

SEQ ID NO: 4028256 - DNA, 25 bp, Homo sapien
tttagcggtgtgagcgcgctggtgc

SEQ ID NO: 4028257 - DNA, 25 bp, Homo sapien
acttagaggccttctcacccatgtg

SEQ ID NO: 4028258 - DNA, 25 bp, Homo sapien
tcacccatgtggagcgcaggtgctg

SEQ ID NO: 4028259 - DNA, 25 bp, Homo sapien
gcagtcccctcagcggtaaggcttt

SEQ ID NO: 4028260 - DNA, 25 bp, Homo sapien
gagtacggcttttcaccggtgtgta

SEQ ID NO: 4028261 - DNA, 25 bp, Homo sapien
tgtacccagtggtgcttaaccagat

SEQ ID NO: 4028262 - DNA, 25 bp, Homo sapien
gccacatcggaagcttctgccataa

SEQ ID NO: 4028263 - DNA, 25 bp, Homo sapien
caacggtaaggcttgtcaccagagg

SEQ ID NO: 4028264 - DNA, 25 bp, Homo sapien
gactgcgctgcgagtgaagaactcc

SEQ ID NO: 4028265 - DNA, 25 bp, Homo sapien
gagcctgaccattttccgggcgggc

SEQ ID NO: 4028266 - DNA, 25 bp, Homo sapien
gaagaactccccgtttcctagatgc

SEQ ID NO: 4028267 - DNA, 25 bp, Homo sapien
aagcggcagcgaacgttctcggtag

SEQ ID NO: 4028268 - DNA, 25 bp, Homo sapien
gggtcccggcttccttacatggtca

SEQ ID NO: 4028269 - DNA, 25 bp, Homo sapien
ggtctcagtccagggaaggccttgc

SEQ ID NO: 4028270 - DNA, 25 bp, Homo sapien
tctgtccagaagagtggctgcagca

SEQ ID NO: 4028271 - DNA, 25 bp, Homo sapien
gagggtctccgaacctgaggtctaa

SEQ ID NO: 4028272 - DNA, 25 bp, Homo sapien
aaaacgccgcgtaaatcttgcctca

SEQ ID NO: 4028273 - DNA, 25 bp, Homo sapien
tattctgatcgctcagagaggactc

SEQ ID NO: 4028274 - DNA, 25 bp, Homo sapien
gcttcttcgagaaggatggagcccc

SEQ ID NO: 4028275 - DNA, 25 bp, Homo sapien
cactgggcatgtggttgtcagagcc

SEQ ID NO: 4028276 - DNA, 25 bp, Homo sapien
gggagggtccttgcaattccagcga

SEQ ID NO: 4028277 - DNA, 25 bp, Homo sapien
cccacacgcccacaaagtggattgc

SEQ ID NO: 4028278 - DNA, 25 bp, Homo sapien
caattccagcgaatcggaggccagg

SEQ ID NO: 4028279 - DNA, 25 bp, Homo sapien
acacagacaagaactcccgtgcggg

SEQ ID NO: 4028280 - DNA, 25 bp, Homo sapien
tgtgtgggtacctgaagctgacgcc

SEQ ID NO: 4028281 - DNA, 25 bp, Homo sapien
taagactcggcagtttgggcccgga

SEQ ID NO: 4028282 - DNA, 25 bp, Homo sapien
tcttcgacaaatacctgggagcagc

SEQ ID NO: 4028283 - DNA, 25 bp, Homo sapien
gactcacaatcgtctcgggctggta

SEQ ID NO: 4028284 - DNA, 25 bp, Homo sapien
atacatttatttgaaccggcctggg

SEQ ID NO: 4028285 - DNA, 25 bp, Homo sapien
aatacatttatttgaaccggcctgg

SEQ ID NO: 4028286 - DNA, 25 bp, Homo sapien
aaatacatttatttgaaccggcctg

SEQ ID NO: 4028287 - DNA, 25 bp, Homo sapien
ttggtgattaaagcctcccaaagcc

SEQ ID NO: 4028288 - DNA, 25 bp, Homo sapien
taccatcttgaacgcccacaaaaag

SEQ ID NO: 4028289 - DNA, 25 bp, Homo sapien
agccaatccttggcatggcctttgg

SEQ ID NO: 4028290 - DNA, 25 bp, Homo sapien
ggtgggcacaataccatcttgaacg

SEQ ID NO: 4028291 - DNA, 25 bp, Homo sapien
tggctccaggcagggctgatggtgg

SEQ ID NO: 4028292 - DNA, 25 bp, Homo sapien
gtggctccaggcagggctgatggtg

SEQ ID NO: 4028293 - DNA, 25 bp, Homo sapien
agggtggggtgaggacaggacaaga

SEQ ID NO: 4028294 - DNA, 25 bp, Homo sapien
ggtggggtgaggacaggacaagaga

SEQ ID NO: 4028295 - DNA, 25 bp, Homo sapien
cagggtggggtgaggacaggacaag

SEQ ID NO: 4028296 - DNA, 25 bp, Homo sapien
gtggggtgaggacaggacaagagat

SEQ ID NO: 4028297 - DNA, 25 bp, Homo sapien
tggtcttcagtctccggcatagcaa

SEQ ID NO: 4028298 - DNA, 25 bp, Homo sapien
gtgtcacaagcgctaccatctgggt

SEQ ID NO: 4028299 - DNA, 25 bp, Homo sapien
caaggccaacggctttaaacacaag

SEQ ID NO: 4028300 - DNA, 25 bp, Homo sapien
tgtgcaagagactttagggccaggc

SEQ ID NO: 4028301 - DNA, 25 bp, Homo sapien
gaggagctgagttcccgcaaactaa

SEQ ID NO: 4028302 - DNA, 25 bp, Homo sapien
cgcaaactaactgcagggcctcaat

SEQ ID NO: 4028303 - DNA, 25 bp, Homo sapien
tacagaatgggtgcccagagagtgc

SEQ ID NO: 4028304 - DNA, 25 bp, Homo sapien
catggagatgaatggtagggcacca

SEQ ID NO: 4028305 - DNA, 25 bp, Homo sapien
actgcgttggacaccataagccaca

SEQ ID NO: 4028306 - DNA, 25 bp, Homo sapien
catgatggcagtggccgtgttcctc

SEQ ID NO: 4028307 - DNA, 25 bp, Homo sapien
tgggcccgtgtggtcaacctcaatg

SEQ ID NO: 4028308 - DNA, 25 bp, Homo sapien
tctatgcctaagaccaactgcgttg

SEQ ID NO: 4028309 - DNA, 25 bp, Homo sapien
cctggggcccactgcatctgattgg

SEQ ID NO: 4028310 - DNA, 25 bp, Homo sapien
ctggggcccactgcatctgattggc

SEQ ID NO: 4028311 - DNA, 25 bp, Homo sapien
cacccgctgcagttgccctaaggaa

SEQ ID NO: 4028312 - DNA, 25 bp, Homo sapien
tgcagttgccctaaggaaaaataaa

SEQ ID NO: 4028313 - DNA, 25 bp, Homo sapien
cccgctgcagttgccctaaggaaaa

SEQ ID NO: 4028314 - DNA, 25 bp, Homo sapien
tggcccacccgctgcagttgcccta

SEQ ID NO: 4028315 - DNA, 25 bp, Homo sapien
tcttttcgggagacagaagccatgt

SEQ ID NO: 4028316 - DNA, 25 bp, Homo sapien
cacctctagctggtgcttctcggtc

SEQ ID NO: 4028317 - DNA, 25 bp, Homo sapien
catgtggccctccactcatccacct

SEQ ID NO: 4028318 - DNA, 25 bp, Homo sapien
tcacaagaccttcttttcgggagac

SEQ ID NO: 4028319 - DNA, 25 bp, Homo sapien
agagatcatggggtgctgccgggaa

SEQ ID NO: 4028320 - DNA, 25 bp, Homo sapien
gagagatcatggggtgctgccggga

SEQ ID NO: 4028321 - DNA, 25 bp, Homo sapien
agatcatggggtgctgccgggaatg

SEQ ID NO: 4028322 - DNA, 25 bp, Homo sapien
gggagagatcatggggtgctgccgg

SEQ ID NO: 4028323 - DNA, 25 bp, Homo sapien
gtgtgtctccttgacgacgacccag

SEQ ID NO: 4028324 - DNA, 25 bp, Homo sapien
gaacagcatgtccaacacttcgtgt

SEQ ID NO: 4028325 - DNA, 25 bp, Homo sapien
tccaacacttcgtgtgtctccttga

SEQ ID NO: 4028326 - DNA, 25 bp, Homo sapien
gtgtctccttgacgacgacccagct

SEQ ID NO: 4028327 - DNA, 25 bp, Homo sapien
cagcccatgtgtggcggcccttagg

SEQ ID NO: 4028328 - DNA, 25 bp, Homo sapien
tctggttcagaactacctgtacctg

SEQ ID NO: 4028329 - DNA, 25 bp, Homo sapien
gcctgccttctggttcagaactacc

SEQ ID NO: 4028330 - DNA, 25 bp, Homo sapien
tggcggcccttaggatggtcttggg

SEQ ID NO: 4028331 - DNA, 25 bp, Homo sapien
aggattcttggtgcccctcaaccag

SEQ ID NO: 4028332 - DNA, 25 bp, Homo sapien
aggaggtaggattcttggtgcccct

SEQ ID NO: 4028333 - DNA, 25 bp, Homo sapien
tttgtgactggtcccagcagaggag

SEQ ID NO: 4028334 - DNA, 25 bp, Homo sapien
cccagcagaggaggtaggattcttg

SEQ ID NO: 4028335 - DNA, 25 bp, Homo sapien
gcatgcccaaccagccactgaacag

SEQ ID NO: 4028336 - DNA, 25 bp, Homo sapien
tttcttcctgtatccagtcatccaa

SEQ ID NO: 4028337 - DNA, 25 bp, Homo sapien
tgaaatgatccaggcttcactcagg

SEQ ID NO: 4028338 - DNA, 25 bp, Homo sapien
tcttacatctgcttcatgttataca

SEQ ID NO: 4028339 - DNA, 25 bp, Homo sapien
ttcagcagcaatgaagaacccagga

SEQ ID NO: 4028340 - DNA, 25 bp, Homo sapien
gtggcggtggtgacgagcgggagac

SEQ ID NO: 4028341 - DNA, 25 bp, Homo sapien
gcagcaatgaagaacccaggacaga

SEQ ID NO: 4028342 - DNA, 25 bp, Homo sapien
gagcgggagacgctaggccactcac

SEQ ID NO: 4028343 - DNA, 25 bp, Homo sapien
gacccccagggatagagacggagct

SEQ ID NO: 4028344 - DNA, 25 bp, Homo sapien
tggagaccaagcggtgtaaggggac

SEQ ID NO: 4028345 - DNA, 25 bp, Homo sapien
cagggatagagacggagctggccag

SEQ ID NO: 4028346 - DNA, 25 bp, Homo sapien
gatagagacggagctggccagaaac

SEQ ID NO: 4028347 - DNA, 25 bp, Homo sapien
taggcagtgggagaggttgagacac

SEQ ID NO: 4028348 - DNA, 25 bp, Homo sapien
agctggggtcaggatgcctaggcag

SEQ ID NO: 4028349 - DNA, 25 bp, Homo sapien
gggtcaggatgcctaggcagtggga

SEQ ID NO: 4028350 - DNA, 25 bp, Homo sapien
gatgcctaggcagtgggagaggttg

SEQ ID NO: 4028351 - DNA, 25 bp, Homo sapien
cggagccggccttcgttcaaggtct

SEQ ID NO: 4028352 - DNA, 25 bp, Homo sapien
tgcagttgggtcgagtacctctccc

SEQ ID NO: 4028353 - DNA, 25 bp, Homo sapien
tcccctctgaaggtagtgcttcagg

SEQ ID NO: 4028354 - DNA, 25 bp, Homo sapien
ccacagcggctccatgcgattggct

SEQ ID NO: 4028355 - DNA, 25 bp, Homo sapien
gggtgagagagtgaggtagctgaag

SEQ ID NO: 4028356 - DNA, 25 bp, Homo sapien
ctggggtgagagagtgaggtagctg

SEQ ID NO: 4028357 - DNA, 25 bp, Homo sapien
tggggtgagagagtgaggtagctga

SEQ ID NO: 4028358 - DNA, 25 bp, Homo sapien
ggggtgagagagtgaggtagctgaa

SEQ ID NO: 4028359 - DNA, 25 bp, Homo sapien
gcatcaggaggctgaccaagagccc

SEQ ID NO: 4028360 - DNA, 25 bp, Homo sapien
gggcaacctgacaccagagggagca

SEQ ID NO: 4028361 - DNA, 25 bp, Homo sapien
ggaggctgaccaagagccccgccag

SEQ ID NO: 4028362 - DNA, 25 bp, Homo sapien
caacctgacaccagagggagcatca

SEQ ID NO: 4028363 - DNA, 25 bp, Homo sapien
ggttagtcccggatatgtccctggc

SEQ ID NO: 4028364 - DNA, 25 bp, Homo sapien
ggtgccctcggaatacccttgaaca

SEQ ID NO: 4028365 - DNA, 25 bp, Homo sapien
tgggtggaataagcccgagcatcct

SEQ ID NO: 4028366 - DNA, 25 bp, Homo sapien
catatgctgtgggaataaacgctgt

SEQ ID NO: 4028367 - DNA, 25 bp, Homo sapien
ttcctccgagcctggtgcacggtca

SEQ ID NO: 4028368 - DNA, 25 bp, Homo sapien
tggtgcacggtcagggcagcccgag

SEQ ID NO: 4028369 - DNA, 25 bp, Homo sapien
gctgacacgtcagccatgttgttcc

SEQ ID NO: 4028370 - DNA, 25 bp, Homo sapien
gagtggccccaccagcaacactcac

SEQ ID NO: 4028371 - DNA, 25 bp, Homo sapien
cacagagcccaggtaaactcacaca

SEQ ID NO: 4028372 - DNA, 25 bp, Homo sapien
ggtaaactcacacactaccaaggca

SEQ ID NO: 4028373 - DNA, 25 bp, Homo sapien
cttgaagtggcaggtaaactcacag

SEQ ID NO: 4028374 - DNA, 25 bp, Homo sapien
caaggcaggtgttttaggcagatgg

SEQ ID NO: 4028375 - DNA, 25 bp, Homo sapien
cagattgggtatacaggagccataa

SEQ ID NO: 4028376 - DNA, 25 bp, Homo sapien
tcatggtgaaacagattgggtatac

SEQ ID NO: 4028377 - DNA, 25 bp, Homo sapien
taatctcaaggaacatggctacgtc

SEQ ID NO: 4028378 - DNA, 25 bp, Homo sapien
tggctacgtcattgaggatgtccgc

SEQ ID NO: 4028379 - DNA, 25 bp, Homo sapien
actgcttggcattgcagtccagttt

SEQ ID NO: 4028380 - DNA, 25 bp, Homo sapien
tgcttggcattgcagtccagtttgc

SEQ ID NO: 4028381 - DNA, 25 bp, Homo sapien
aggcaaagacgatgcggcccagcat

SEQ ID NO: 4028382 - DNA, 25 bp, Homo sapien
accaggcaaagacgatgcggcccag

SEQ ID NO: 4028383 - DNA, 25 bp, Homo sapien
ttccaccaggcaaagacgatgcggc

SEQ ID NO: 4028384 - DNA, 25 bp, Homo sapien
ctttccaccaggcaaagacgatgcg

SEQ ID NO: 4028385 - DNA, 25 bp, Homo sapien
ggtggccgtggcagctgaaacagtg

SEQ ID NO: 4028386 - DNA, 25 bp, Homo sapien
gcttttgcgttccccacccctatgc

SEQ ID NO: 4028387 - DNA, 25 bp, Homo sapien
tggccgtggcagctgaaacagtggc

SEQ ID NO: 4028388 - DNA, 25 bp, Homo sapien
ttgcgttccccacccctatgcccag

SEQ ID NO: 4028389 - DNA, 25 bp, Homo sapien
ctgcacggaatcccacagctggtag

SEQ ID NO: 4028390 - DNA, 25 bp, Homo sapien
ccgggctgacgctatcagggaagcc

SEQ ID NO: 4028391 - DNA, 25 bp, Homo sapien
ggcaagtagtccgggctgacgctat

SEQ ID NO: 4028392 - DNA, 25 bp, Homo sapien
aagtagtccgggctgacgctatcag

SEQ ID NO: 4028393 - DNA, 25 bp, Homo sapien
tagtccgggctgacgctatcaggga

SEQ ID NO: 4028394 - DNA, 25 bp, Homo sapien
gaagcccccacttcgcccgcatctc

SEQ ID NO: 4028395 - DNA, 25 bp, Homo sapien
cttcaggtttgaccgtgaaggccct

SEQ ID NO: 4028396 - DNA, 25 bp, Homo sapien
cacttcgcccgcatctcgtccttca

SEQ ID NO: 4028397 - DNA, 25 bp, Homo sapien
tttgaccgtgaaggccctggagagc

SEQ ID NO: 4028398 - DNA, 25 bp, Homo sapien
gtgcctccccggagccgaactgctc

SEQ ID NO: 4028399 - DNA, 25 bp, Homo sapien
gggtctccaaacccgcgtcgtcagc

SEQ ID NO: 4028400 - DNA, 25 bp, Homo sapien
tcccactgcaggctcccgtccgcgg

SEQ ID NO: 4028401 - DNA, 25 bp, Homo sapien
gctcggaacacagcggggtctccaa

SEQ ID NO: 4028402 - DNA, 25 bp, Homo sapien
gcatcatgagaagaaattggaccag

SEQ ID NO: 4028403 - DNA, 25 bp, Homo sapien
catccttcggccttctgcgagactg

SEQ ID NO: 4028404 - DNA, 25 bp, Homo sapien
ggccttctgcgagactgcaggaaca

SEQ ID NO: 4028405 - DNA, 25 bp, Homo sapien
cctggcctggactagaaattctcca

SEQ ID NO: 4028406 - DNA, 25 bp, Homo sapien
caaggcaggaagttcttgtgtgttt

SEQ ID NO: 4028407 - DNA, 25 bp, Homo sapien
gaatccgagggatgaaaaaaatcaa

SEQ ID NO: 4028408 - DNA, 25 bp, Homo sapien
gtccatgaaattggggggagtccaa

SEQ ID NO: 4028409 - DNA, 25 bp, Homo sapien
tttttgcgggagagagtccatgaaa

SEQ ID NO: 4028410 - DNA, 25 bp, Homo sapien
tcttcactccgaagcagaaatttgc

SEQ ID NO: 4028411 - DNA, 25 bp, Homo sapien
ctccttcccatctagtgcagcatct

SEQ ID NO: 4028412 - DNA, 25 bp, Homo sapien
tccttcccatctagtgcagcatctt

SEQ ID NO: 4028413 - DNA, 25 bp, Homo sapien
agcatcttcactccgaagcagaaat

SEQ ID NO: 4028414 - DNA, 25 bp, Homo sapien
catcaactattacaggcagcaggtg

SEQ ID NO: 4028415 - DNA, 25 bp, Homo sapien
gaagtctcatgagctcccgagtcac

SEQ ID NO: 4028416 - DNA, 25 bp, Homo sapien
ggtggaggactggatgaacttctac

SEQ ID NO: 4028417 - DNA, 25 bp, Homo sapien
tttcctggccaagtacagggacttc

SEQ ID NO: 4028418 - DNA, 25 bp, Homo sapien
ttacagatcatcttccttgagttta

SEQ ID NO: 4028419 - DNA, 25 bp, Homo sapien
tgcactaactgggacgcgccccggg

SEQ ID NO: 4028420 - DNA, 25 bp, Homo sapien
cgcaggaggaactggcgacagacac

SEQ ID NO: 4028421 - DNA, 25 bp, Homo sapien
cgcaccggcgctgcactaactggga

SEQ ID NO: 4028422 - DNA, 25 bp, Homo sapien
cccaagttcccgcaggaggaactgg

SEQ ID NO: 4028423 - DNA, 25 bp, Homo sapien
agtagctcaccgtgataaagccacc

SEQ ID NO: 4028424 - DNA, 25 bp, Homo sapien
tagctcaccgtgataaagccacctt

SEQ ID NO: 4028425 - DNA, 25 bp, Homo sapien
agctcaccgtgataaagccaccttt

SEQ ID NO: 4028426 - DNA, 25 bp, Homo sapien
gctcaccgtgataaagccacctttg

SEQ ID NO: 4028427 - DNA, 25 bp, Homo sapien
gctgaaggttgtgggttcaccggaa

SEQ ID NO: 4028428 - DNA, 25 bp, Homo sapien
gcactgtgatttgtttgcgatggcc

SEQ ID NO: 4028429 - DNA, 25 bp, Homo sapien
ggacatgctggggatatcccccaaa

SEQ ID NO: 4028430 - DNA, 25 bp, Homo sapien
tgatttgtttgcgatggccatgaca

SEQ ID NO: 4028431 - DNA, 25 bp, Homo sapien
aaggaatcccacaaacaatggctgc

SEQ ID NO: 4028432 - DNA, 25 bp, Homo sapien
caccagaggtatgttatggtccaca

SEQ ID NO: 4028433 - DNA, 25 bp, Homo sapien
cagagtttatgtttccacgcagggt

SEQ ID NO: 4028434 - DNA, 25 bp, Homo sapien
tgcttttgggtcgaaagattccctc

SEQ ID NO: 4028435 - DNA, 25 bp, Homo sapien
agatagttctccgatttatgtggat

SEQ ID NO: 4028436 - DNA, 25 bp, Homo sapien
tcagatagttctccgatttatgtgg

SEQ ID NO: 4028437 - DNA, 25 bp, Homo sapien
atcccagttggtggctgttgaacac

SEQ ID NO: 4028438 - DNA, 25 bp, Homo sapien
gttctccgatttatgtggattgtct

SEQ ID NO: 4028439 - DNA, 25 bp, Homo sapien
ggtccttgttcacagtgtggtgcac

SEQ ID NO: 4028440 - DNA, 25 bp, Homo sapien
tccagtccagcactggtccttgttc

SEQ ID NO: 4028441 - DNA, 25 bp, Homo sapien
acagtgtggtgcacctgcctttcac

SEQ ID NO: 4028442 - DNA, 25 bp, Homo sapien
cagtccagcactggtccttgttcac

SEQ ID NO: 4028443 - DNA, 25 bp, Homo sapien
cactgtgcgaacacacatagggagg

SEQ ID NO: 4028444 - DNA, 25 bp, Homo sapien
cagacattgattggcctgctcttgg

SEQ ID NO: 4028445 - DNA, 25 bp, Homo sapien
accaggttctgctcaggacaggcca

SEQ ID NO: 4028446 - DNA, 25 bp, Homo sapien
gccatgatctgaagagtgaacgtga

SEQ ID NO: 4028447 - DNA, 25 bp, Homo sapien
tggtgttgagggctgacccgatgtc

SEQ ID NO: 4028448 - DNA, 25 bp, Homo sapien
catctagttctctttagtatcttca

SEQ ID NO: 4028449 - DNA, 25 bp, Homo sapien
tcagcaggataacactagataacat

SEQ ID NO: 4028450 - DNA, 25 bp, Homo sapien
ctggtgccagaactataggaaattg

SEQ ID NO: 4028451 - DNA, 25 bp, Homo sapien
tagataacatctagttctctttagt

SEQ ID NO: 4028452 - DNA, 25 bp, Homo sapien
gaaaacagataatggctactgttat

SEQ ID NO: 4028453 - DNA, 25 bp, Homo sapien
tgctgtgatgcatgtcaaaatcccc

SEQ ID NO: 4028454 - DNA, 25 bp, Homo sapien
tataactcaatgcagccatcacaag

SEQ ID NO: 4028455 - DNA, 25 bp, Homo sapien
taactcaatgcagccatcacaagga

SEQ ID NO: 4028456 - DNA, 25 bp, Homo sapien
gctgttcaggtcttcccctgagtcc

SEQ ID NO: 4028457 - DNA, 25 bp, Homo sapien
atcctgcaccggcacaagctgaagg

SEQ ID NO: 4028458 - DNA, 25 bp, Homo sapien
tgaaggtccaacacattcataggac

SEQ ID NO: 4028459 - DNA, 25 bp, Homo sapien
gaatcacggcttgggccagaggctc

SEQ ID NO: 4028460 - DNA, 25 bp, Homo sapien
cagctgtgactctgttgtctccagg

SEQ ID NO: 4028461 - DNA, 25 bp, Homo sapien
gctggtgaacatttctgccctgagt

SEQ ID NO: 4028462 - DNA, 25 bp, Homo sapien
catttctgccctgagtgctctgtgt

SEQ ID NO: 4028463 - DNA, 25 bp, Homo sapien
cttgggcagtggctggtgaacattt

SEQ ID NO: 4028464 - DNA, 25 bp, Homo sapien
ccaggtcagcagagaataggcctac

SEQ ID NO: 4028465 - DNA, 25 bp, Homo sapien
cctgggctgtgttgtgataaatggc

SEQ ID NO: 4028466 - DNA, 25 bp, Homo sapien
ataggcctactgttcccacacctgg

SEQ ID NO: 4028467 - DNA, 25 bp, Homo sapien
taaatggcttcagatggagtgtgca

SEQ ID NO: 4028468 - DNA, 25 bp, Homo sapien
ttcggctcatgtccttgatgctgtc

SEQ ID NO: 4028469 - DNA, 25 bp, Homo sapien
ttgcactttcggctcatgtccttga

SEQ ID NO: 4028470 - DNA, 25 bp, Homo sapien
tccttttgcactttcggctcatgtc

SEQ ID NO: 4028471 - DNA, 25 bp, Homo sapien
tcaagcagtccttttgcactttcgg

SEQ ID NO: 4028472 - DNA, 25 bp, Homo sapien
ctgctctatcttggcagctgtccat

SEQ ID NO: 4028473 - DNA, 25 bp, Homo sapien
ctatacctaaccgatatttgtgggt

SEQ ID NO: 4028474 - DNA, 25 bp, Homo sapien
tcctaggcatagagtcccaaagtct

SEQ ID NO: 4028475 - DNA, 25 bp, Homo sapien
tgaattgggctctgatctcagtgca

SEQ ID NO: 4028476 - DNA, 25 bp, Homo sapien
cccaaagtctatacctaaccgatat

SEQ ID NO: 4028477 - DNA, 25 bp, Homo sapien
tccttatccaagcccctttctgtaa

SEQ ID NO: 4028478 - DNA, 25 bp, Homo sapien
gcatgtggctcttactggaatgaga

SEQ ID NO: 4028479 - DNA, 25 bp, Homo sapien
ttgcatgtggctcttactggaatga

SEQ ID NO: 4028480 - DNA, 25 bp, Homo sapien
tgtggctcttactggaatgagaaga

SEQ ID NO: 4028481 - DNA, 25 bp, Homo sapien
tgtcctttttcccatccgccaggtg

SEQ ID NO: 4028482 - DNA, 25 bp, Homo sapien
aaagggttcctcacatatatgtact

SEQ ID NO: 4028483 - DNA, 25 bp, Homo sapien
gatgcttcgcataacttactcagga

SEQ ID NO: 4028484 - DNA, 25 bp, Homo sapien
cagtgttatcagatgcatttcagga

SEQ ID NO: 4028485 - DNA, 25 bp, Homo sapien
ggttcccatcaagacatgaactagg

SEQ ID NO: 4028486 - DNA, 25 bp, Homo sapien
gctgccgattacctcatggccagga

SEQ ID NO: 4028487 - DNA, 25 bp, Homo sapien
ggccagggcccaatacattgccaaa

SEQ ID NO: 4028488 - DNA, 25 bp, Homo sapien
tgattggccccacgttgcatccaag

SEQ ID NO: 4028489 - DNA, 25 bp, Homo sapien
gggttctccccatgcggtattaata

SEQ ID NO: 4028490 - DNA, 25 bp, Homo sapien
taaacctagcgcttgctgaaactgg

SEQ ID NO: 4028491 - DNA, 25 bp, Homo sapien
gcttagcgccagcatccaaaatgaa

SEQ ID NO: 4028492 - DNA, 25 bp, Homo sapien
attctttaggtcaccctgccgatgg

SEQ ID NO: 4028493 - DNA, 25 bp, Homo sapien
gagcagggttctcagttggtgcttc

SEQ ID NO: 4028494 - DNA, 25 bp, Homo sapien
gcagggttctcagttggtgcttcac

SEQ ID NO: 4028495 - DNA, 25 bp, Homo sapien
agcagggttctcagttggtgcttca

SEQ ID NO: 4028496 - DNA, 25 bp, Homo sapien
gcgacgccggtaattgtagggacgc

SEQ ID NO: 4028497 - DNA, 25 bp, Homo sapien
tagggacgccggtatccacggcgaa

SEQ ID NO: 4028498 - DNA, 25 bp, Homo sapien
gtaattgtagggacgccggtatcca

SEQ ID NO: 4028499 - DNA, 25 bp, Homo sapien
ggacgccggtatccacggcgaacag

SEQ ID NO: 4028500 - DNA, 25 bp, Homo sapien
actgctggggcaggtcgtgggcgag

SEQ ID NO: 4028501 - DNA, 25 bp, Homo sapien
gggcaggtcgtgggcgaggaggtcc

SEQ ID NO: 4028502 - DNA, 25 bp, Homo sapien
aggtcgtgggcgaggaggtcccctg

SEQ ID NO: 4028503 - DNA, 25 bp, Homo sapien
gcaggtcgtgggcgaggaggtcccc

SEQ ID NO: 4028504 - DNA, 25 bp, Homo sapien
ttgggcggtaagttggatttcgatg

SEQ ID NO: 4028505 - DNA, 25 bp, Homo sapien
gggcggtaagttggatttcgatgaa

SEQ ID NO: 4028506 - DNA, 25 bp, Homo sapien
cttgggcggtaagttggatttcgat

SEQ ID NO: 4028507 - DNA, 25 bp, Homo sapien
tgggcggtaagttggatttcgatga

SEQ ID NO: 4028508 - DNA, 25 bp, Homo sapien
taagaccggtgagcgacggtcaaac

SEQ ID NO: 4028509 - DNA, 25 bp, Homo sapien
cggtcaaacgtctgtcccacgtggt

SEQ ID NO: 4028510 - DNA, 25 bp, Homo sapien
aggcgggaaccgctgctgcctgtac

SEQ ID NO: 4028511 - DNA, 25 bp, Homo sapien
ccagagaactgcctatcagtggtag

SEQ ID NO: 4028512 - DNA, 25 bp, Homo sapien
gctcccttcttcctcctcctcccag

SEQ ID NO: 4028513 - DNA, 25 bp, Homo sapien
ccttcttcctcctcctcccagcgta

SEQ ID NO: 4028514 - DNA, 25 bp, Homo sapien
ctgccgctcccttcttcctcctcct

SEQ ID NO: 4028515 - DNA, 25 bp, Homo sapien
tcccttcttcctcctcctcccagcg

SEQ ID NO: 4028516 - DNA, 25 bp, Homo sapien
gggccatggcgccttccatagtagc

SEQ ID NO: 4028517 - DNA, 25 bp, Homo sapien
gccatggcgccttccatagtagcca

SEQ ID NO: 4028518 - DNA, 25 bp, Homo sapien
atggcgccttccatagtagccacgt

SEQ ID NO: 4028519 - DNA, 25 bp, Homo sapien
ggagggccatggcgccttccatagt

SEQ ID NO: 4028520 - DNA, 25 bp, Homo sapien
cggcgccaatcagcgcgtaacgact

SEQ ID NO: 4028521 - DNA, 25 bp, Homo sapien
cgcgtaacgactgccctccacagga

SEQ ID NO: 4028522 - DNA, 25 bp, Homo sapien
ctgtaacggcgccaatcagcgcgta

SEQ ID NO: 4028523 - DNA, 25 bp, Homo sapien
tccaccccggccagtcacactggct

SEQ ID NO: 4028524 - DNA, 25 bp, Homo sapien
atcaaactctacagtttctccatct

SEQ ID NO: 4028525 - DNA, 25 bp, Homo sapien
tcaaactctacagtttctccatctc

SEQ ID NO: 4028526 - DNA, 25 bp, Homo sapien
actctacagtttctccatctcctac

SEQ ID NO: 4028527 - DNA, 25 bp, Homo sapien
aaactctacagtttctccatctcct

SEQ ID NO: 4028528 - DNA, 25 bp, Homo sapien
tgtgggttattcttcttgatggcag

SEQ ID NO: 4028529 - DNA, 25 bp, Homo sapien
tttctgtgggttattcttcttgatg

SEQ ID NO: 4028530 - DNA, 25 bp, Homo sapien
tctgtgggttattcttcttgatggc

SEQ ID NO: 4028531 - DNA, 25 bp, Homo sapien
agatatttctgtgggttattcttct

SEQ ID NO: 4028532 - DNA, 25 bp, Homo sapien
ttataaatccatatccatttctgac

SEQ ID NO: 4028533 - DNA, 25 bp, Homo sapien
tttctccgcgtcttcgctgtcggcg

SEQ ID NO: 4028534 - DNA, 25 bp, Homo sapien
tggtggcgagaacttttttctccgc

SEQ ID NO: 4028535 - DNA, 25 bp, Homo sapien
tgccaaggactttggtggcgagaac

SEQ ID NO: 4028536 - DNA, 25 bp, Homo sapien
tggcgagaacttttttctccgcgtc

SEQ ID NO: 4028537 - DNA, 25 bp, Homo sapien
ccgcggtgcccgtggctgcgggggc

SEQ ID NO: 4028538 - DNA, 25 bp, Homo sapien
gccgcggtgcccgtggctgcggggg

SEQ ID NO: 4028539 - DNA, 25 bp, Homo sapien
gcggccgcggtgcccgtggctgcgg

SEQ ID NO: 4028540 - DNA, 25 bp, Homo sapien
cggccgcggtgcccgtggctgcggg

SEQ ID NO: 4028541 - DNA, 25 bp, Homo sapien
cggcgggcgccggggccgcggcttg

SEQ ID NO: 4028542 - DNA, 25 bp, Homo sapien
tgcgacgagggcggcgggcgccggg

SEQ ID NO: 4028543 - DNA, 25 bp, Homo sapien
ctgcgacgagggcggcgggcgccgg

SEQ ID NO: 4028544 - DNA, 25 bp, Homo sapien
gccggggccgcggcttggggtgcac

SEQ ID NO: 4028545 - DNA, 25 bp, Homo sapien
gatgatggtggcctcgcccgcctcg

SEQ ID NO: 4028546 - DNA, 25 bp, Homo sapien
ccggctcttggtcgcggggtcctgg

SEQ ID NO: 4028547 - DNA, 25 bp, Homo sapien
cggccgccaccgcaggagcctgctg

SEQ ID NO: 4028548 - DNA, 25 bp, Homo sapien
ccgccaccgcaggagcctgctggag

SEQ ID NO: 4028549 - DNA, 25 bp, Homo sapien
ctcgagcttcgggatgcgcgctcgc

SEQ ID NO: 4028550 - DNA, 25 bp, Homo sapien
aggcagctcgagcttcgggatgcgc

SEQ ID NO: 4028551 - DNA, 25 bp, Homo sapien
gagcttcgggatgcgcgctcgcttc

SEQ ID NO: 4028552 - DNA, 25 bp, Homo sapien
gcagctcgagcttcgggatgcgcgc

SEQ ID NO: 4028553 - DNA, 25 bp, Homo sapien
tcaagcttgcccagcagtgaccatg

SEQ ID NO: 4028554 - DNA, 25 bp, Homo sapien
gaccatggtttgtgatgtggcgcaa

SEQ ID NO: 4028555 - DNA, 25 bp, Homo sapien
caactgtctgttgtccaaggaggta

SEQ ID NO: 4028556 - DNA, 25 bp, Homo sapien
tagaattggacctgttaaacagctc

SEQ ID NO: 4028557 - DNA, 25 bp, Homo sapien
tgggatgctgactgctcatcttcct

SEQ ID NO: 4028558 - DNA, 25 bp, Homo sapien
ccataggcttctctgggatgctgac

SEQ ID NO: 4028559 - DNA, 25 bp, Homo sapien
ctctgggatgctgactgctcatctt

SEQ ID NO: 4028560 - DNA, 25 bp, Homo sapien
gatgctgactgctcatcttccttcc

SEQ ID NO: 4028561 - DNA, 25 bp, Homo sapien
tactcacctttgcaggaactgacct

SEQ ID NO: 4028562 - DNA, 25 bp, Homo sapien
ctggctttcagagcatcactgtggg

SEQ ID NO: 4028563 - DNA, 25 bp, Homo sapien
tggaaagacccaagaggtgcccatg

SEQ ID NO: 4028564 - DNA, 25 bp, Homo sapien
agtgcatactatgcccagggtcctg

SEQ ID NO: 4028565 - DNA, 25 bp, Homo sapien
cgtgaattacgataaaaggctttgc

SEQ ID NO: 4028566 - DNA, 25 bp, Homo sapien
acttcgatgtcgagtaaggcgtgaa

SEQ ID NO: 4028567 - DNA, 25 bp, Homo sapien
taaggcatgaactataaataaaggc

SEQ ID NO: 4028568 - DNA, 25 bp, Homo sapien
tctccggtatgactacttcgatgtc

SEQ ID NO: 4028569 - DNA, 25 bp, Homo sapien
ctctcgtgctgagtaagggctgaag

SEQ ID NO: 4028570 - DNA, 25 bp, Homo sapien
agcatgaattctctcgtgctgagta

SEQ ID NO: 4028571 - DNA, 25 bp, Homo sapien
catgaattctctcgtgctgagtaag

SEQ ID NO: 4028572 - DNA, 25 bp, Homo sapien
ttctctcgtgctgagtaagggctga

SEQ ID NO: 4028573 - DNA, 25 bp, Homo sapien
gcagccttctcttgactatggatac

SEQ ID NO: 4028574 - DNA, 25 bp, Homo sapien
ccttctcttgactatggatactctg

SEQ ID NO: 4028575 - DNA, 25 bp, Homo sapien
cttgactatggatactctgatggac

SEQ ID NO: 4028576 - DNA, 25 bp, Homo sapien
ttctcttgactatggatactctgat

SEQ ID NO: 4028577 - DNA, 25 bp, Homo sapien
ctttctcaagaggactggagtatca

SEQ ID NO: 4028578 - DNA, 25 bp, Homo sapien
tctcaagaggactggagtatcatga

SEQ ID NO: 4028579 - DNA, 25 bp, Homo sapien
cttctttctcaagaggactggagta

SEQ ID NO: 4028580 - DNA, 25 bp, Homo sapien
tcaagaggactggagtatcatgaga

SEQ ID NO: 4028581 - DNA, 25 bp, Homo sapien
gtccttcagtagttggccaatcttt

SEQ ID NO: 4028582 - DNA, 25 bp, Homo sapien
tgtccttcagtagttggccaatctt

SEQ ID NO: 4028583 - DNA, 25 bp, Homo sapien
tttgtccttcagtagttggccaatc

SEQ ID NO: 4028584 - DNA, 25 bp, Homo sapien
ccttcagtagttggccaatcttttt

SEQ ID NO: 4028585 - DNA, 25 bp, Homo sapien
atccagagcttcctacaagaatggg

SEQ ID NO: 4028586 - DNA, 25 bp, Homo sapien
tgagtagtttcaaagggcattcgca

SEQ ID NO: 4028587 - DNA, 25 bp, Homo sapien
aaagggcattcgcatttctctgtcc

SEQ ID NO: 4028588 - DNA, 25 bp, Homo sapien
tggggattccttggaagagtttcac

SEQ ID NO: 4028589 - DNA, 25 bp, Homo sapien
aggcagcagagccttacccggtgtt

SEQ ID NO: 4028590 - DNA, 25 bp, Homo sapien
cagcagctcccgatgccacaagtgg

SEQ ID NO: 4028591 - DNA, 25 bp, Homo sapien
ggtccagagtgtgcaccaaactagt

SEQ ID NO: 4028592 - DNA, 25 bp, Homo sapien
tcacaggattctgctctcggccttg

SEQ ID NO: 4028593 - DNA, 25 bp, Homo sapien
gccatagcctaaccatcagggccaa

SEQ ID NO: 4028594 - DNA, 25 bp, Homo sapien
gctgtagacagatctgaagtcaggg

SEQ ID NO: 4028595 - DNA, 25 bp, Homo sapien
cacagtccccacaccataggaggaa

SEQ ID NO: 4028596 - DNA, 25 bp, Homo sapien
gcatgttgacatgcttggtgcttaa

SEQ ID NO: 4028597 - DNA, 25 bp, Homo sapien
agtggtcgacctgtggacacctcct

SEQ ID NO: 4028598 - DNA, 25 bp, Homo sapien
tgagggtgttcgctctcgtctggca

SEQ ID NO: 4028599 - DNA, 25 bp, Homo sapien
ttagacgcgcaagtgccctcagatc

SEQ ID NO: 4028600 - DNA, 25 bp, Homo sapien
caggccctcgatttccctgaggtta

SEQ ID NO: 4028601 - DNA, 25 bp, Homo sapien
taggctactgtaaatgacacatgcg

SEQ ID NO: 4028602 - DNA, 25 bp, Homo sapien
tttcatgatgccactaggctactgt

SEQ ID NO: 4028603 - DNA, 25 bp, Homo sapien
gacacatgcggctcaattttattcc

SEQ ID NO: 4028604 - DNA, 25 bp, Homo sapien
cacatgcggctcaattttattccta

SEQ ID NO: 4028605 - DNA, 25 bp, Homo sapien
gggctgcagacaatcattcattcag

SEQ ID NO: 4028606 - DNA, 25 bp, Homo sapien
gatggacagaaccttcgggtctaca

SEQ ID NO: 4028607 - DNA, 25 bp, Homo sapien
gagattgctaccctgtgagcctgag

SEQ ID NO: 4028608 - DNA, 25 bp, Homo sapien
catgattggcctggccgtagctcca

SEQ ID NO: 4028609 - DNA, 25 bp, Homo sapien
gacacaggaagggttgtcacctctc

SEQ ID NO: 4028610 - DNA, 25 bp, Homo sapien
taaaaatgcggaaacgcagccccag

SEQ ID NO: 4028611 - DNA, 25 bp, Homo sapien
cgttcagtgttcaacctctctgcta

SEQ ID NO: 4028612 - DNA, 25 bp, Homo sapien
tccacctgagaattatatacaactg

SEQ ID NO: 4028613 - DNA, 25 bp, Homo sapien
gaagtatgcctctaagtcaccatga

SEQ ID NO: 4028614 - DNA, 25 bp, Homo sapien
gaagttactttgaagaattagcatg

SEQ ID NO: 4028615 - DNA, 25 bp, Homo sapien
tctttctagtcttcttgcaatgctt

SEQ ID NO: 4028616 - DNA, 25 bp, Homo sapien
tcctggcctcatagagtaaattggg

SEQ ID NO: 4028617 - DNA, 25 bp, Homo sapien
gctttggtatcatggcactcctggc

SEQ ID NO: 4028618 - DNA, 25 bp, Homo sapien
cctggccatgtgtcctaaagtctgg

SEQ ID NO: 4028619 - DNA, 25 bp, Homo sapien
aaagtctggcagttcttgcatgttc

SEQ ID NO: 4028620 - DNA, 25 bp, Homo sapien
ccatgtgtcctaaagtctggcagtt

SEQ ID NO: 4028621 - DNA, 25 bp, Homo sapien
cctgatcctggccatgtgtcctaaa

SEQ ID NO: 4028622 - DNA, 25 bp, Homo sapien
ctgtgctgtggtacaaacctgtgcc

SEQ ID NO: 4028623 - DNA, 25 bp, Homo sapien
tgtgctgtggtacaaacctgtgcca

SEQ ID NO: 4028624 - DNA, 25 bp, Homo sapien
gtgctgtggtacaaacctgtgccat

SEQ ID NO: 4028625 - DNA, 25 bp, Homo sapien
ccctggggaaatagcgatggcctgg

SEQ ID NO: 4028626 - DNA, 25 bp, Homo sapien
gaaaaatcattgaagttgttcaaac

SEQ ID NO: 4028627 - DNA, 25 bp, Homo sapien
ctgaaggaagaatagaagttcacat

SEQ ID NO: 4028628 - DNA, 25 bp, Homo sapien
aaatcattgaagttgttcaaaccaa

SEQ ID NO: 4028629 - DNA, 25 bp, Homo sapien
cttgcttagttttaagttttgacat

SEQ ID NO: 4028630 - DNA, 25 bp, Homo sapien
gcttgcttagttttaagttttgaca

SEQ ID NO: 4028631 - DNA, 25 bp, Homo sapien
tatatacactgcaattgactgccca

SEQ ID NO: 4028632 - DNA, 25 bp, Homo sapien
tatgatacgtgaaaaatccttgaag

SEQ ID NO: 4028633 - DNA, 25 bp, Homo sapien
gaaatcaacaaacggccattcatta

SEQ ID NO: 4028634 - DNA, 25 bp, Homo sapien
cattgcggtgcttaacctgcaggaa

SEQ ID NO: 4028635 - DNA, 25 bp, Homo sapien
cctgggtatcctgggatggcggctc

SEQ ID NO: 4028636 - DNA, 25 bp, Homo sapien
tgggtatcctgggatggcggctcat

SEQ ID NO: 4028637 - DNA, 25 bp, Homo sapien
ggtatcctgggatggcggctcatga

SEQ ID NO: 4028638 - DNA, 25 bp, Homo sapien
gtatcctgggatggcggctcatgag

SEQ ID NO: 4028639 - DNA, 25 bp, Homo sapien
ctacttcctccagaacaatatccat

SEQ ID NO: 4028640 - DNA, 25 bp, Homo sapien
tacttcctccagaacaatatccata

SEQ ID NO: 4028641 - DNA, 25 bp, Homo sapien
gatgtatttgtgagcatgtagcttc

SEQ ID NO: 4028642 - DNA, 25 bp, Homo sapien
aaagacctgatgtatttgtgagcat

SEQ ID NO: 4028643 - DNA, 25 bp, Homo sapien
tggaagacactcagtgcacacagcc

SEQ ID NO: 4028644 - DNA, 25 bp, Homo sapien
agacactcagtgcacacagccctgc

SEQ ID NO: 4028645 - DNA, 25 bp, Homo sapien
ctggaagacactcagtgcacacagc

SEQ ID NO: 4028646 - DNA, 25 bp, Homo sapien
gaagacactcagtgcacacagccct

SEQ ID NO: 4028647 - DNA, 25 bp, Homo sapien
gaatccgaccatgatctgagataat

SEQ ID NO: 4028648 - DNA, 25 bp, Homo sapien
agatcatgcctattgcaaaatcctt

SEQ ID NO: 4028649 - DNA, 25 bp, Homo sapien
ccgaccatgatctgagataataaga

SEQ ID NO: 4028650 - DNA, 25 bp, Homo sapien
atcatgcctattgcaaaatccttgg

SEQ ID NO: 4028651 - DNA, 25 bp, Homo sapien
cagagctttgtgctgttcagataat

SEQ ID NO: 4028652 - DNA, 25 bp, Homo sapien
agagctttgtgctgttcagataatg

SEQ ID NO: 4028653 - DNA, 25 bp, Homo sapien
agctttgtgctgttcagataatgac

SEQ ID NO: 4028654 - DNA, 25 bp, Homo sapien
gagctttgtgctgttcagataatga

SEQ ID NO: 4028655 - DNA, 25 bp, Homo sapien
actgtcatcctgagataccgctcat

SEQ ID NO: 4028656 - DNA, 25 bp, Homo sapien
tgtcatcctgagataccgctcatgc

SEQ ID NO: 4028657 - DNA, 25 bp, Homo sapien
ctgtcatcctgagataccgctcatg

SEQ ID NO: 4028658 - DNA, 25 bp, Homo sapien
aatgctctaatagtagcctggtggt

SEQ ID NO: 4028659 - DNA, 25 bp, Homo sapien
ctaatagtagcctggtggtgttcct

SEQ ID NO: 4028660 - DNA, 25 bp, Homo sapien
aatagtagcctggtggtgttccttt

SEQ ID NO: 4028661 - DNA, 25 bp, Homo sapien
cattccaaatgctctaatagtagcc

SEQ ID NO: 4028662 - DNA, 25 bp, Homo sapien
agccccctcggaaagtaatccagca

SEQ ID NO: 4028663 - DNA, 25 bp, Homo sapien
ttcttatttagttgattaacatcat

SEQ ID NO: 4028664 - DNA, 25 bp, Homo sapien
atcttgtgaccaagagtgcccagcc

SEQ ID NO: 4028665 - DNA, 25 bp, Homo sapien
tgcaatcaccgcctcttgggcgtaa

SEQ ID NO: 4028666 - DNA, 25 bp, Homo sapien
caattttgcagtaagatagaagcct

SEQ ID NO: 4028667 - DNA, 25 bp, Homo sapien
gatagtacccgatctcacaattttg

SEQ ID NO: 4028668 - DNA, 25 bp, Homo sapien
tatcaggcacttaattccaagttgc

SEQ ID NO: 4028669 - DNA, 25 bp, Homo sapien
caactttccgacatttagctggctg

SEQ ID NO: 4028670 - DNA, 25 bp, Homo sapien
aactgggtcctctaggctccaggaa

SEQ ID NO: 4028671 - DNA, 25 bp, Homo sapien
gacaattccagcaagtccctgtatc

SEQ ID NO: 4028672 - DNA, 25 bp, Homo sapien
attagttggaatggcggtaagacgc

SEQ ID NO: 4028673 - DNA, 25 bp, Homo sapien
taagacgcactatgtggactccgtg

SEQ ID NO: 4028674 - DNA, 25 bp, Homo sapien
atgagaactcctcaaccatgggcac

SEQ ID NO: 4028675 - DNA, 25 bp, Homo sapien
ggaatgagaactcctcaaccatggg

SEQ ID NO: 4028676 - DNA, 25 bp, Homo sapien
cggaatgagaactcctcaaccatgg

SEQ ID NO: 4028677 - DNA, 25 bp, Homo sapien
agaactcctcaaccatgggcaccag

SEQ ID NO: 4028678 - DNA, 25 bp, Homo sapien
tctgtctagcccagaggctccatag

SEQ ID NO: 4028679 - DNA, 25 bp, Homo sapien
gattcattcccgagagctaactgag

SEQ ID NO: 4028680 - DNA, 25 bp, Homo sapien
gcatttgaacgtaaccagccctgga

SEQ ID NO: 4028681 - DNA, 25 bp, Homo sapien
cagaccagtcttcaggtcggaaaga

SEQ ID NO: 4028682 - DNA, 25 bp, Homo sapien
gattttttggcacacggactggctc

SEQ ID NO: 4028683 - DNA, 25 bp, Homo sapien
gtcctgagtctgagctgaaaccagc

SEQ ID NO: 4028684 - DNA, 25 bp, Homo sapien
ctctgtcctgagtctgagctgaaac

SEQ ID NO: 4028685 - DNA, 25 bp, Homo sapien
tctgagctgaaaccagctggccaag

SEQ ID NO: 4028686 - DNA, 25 bp, Homo sapien
actgcattctaaccgtggtgataga

SEQ ID NO: 4028687 - DNA, 25 bp, Homo sapien
tgcattctaaccgtggtgatagaac

SEQ ID NO: 4028688 - DNA, 25 bp, Homo sapien
attctaaccgtggtgatagaacaag

SEQ ID NO: 4028689 - DNA, 25 bp, Homo sapien
cactgcattctaaccgtggtgatag

SEQ ID NO: 4028690 - DNA, 25 bp, Homo sapien
tacgatattcactgtgtgcgacagg

SEQ ID NO: 4028691 - DNA, 25 bp, Homo sapien
catagatgtgtactactgtgcgaga

SEQ ID NO: 4028692 - DNA, 25 bp, Homo sapien
ctactctggcaatggtaagacaggc

SEQ ID NO: 4028693 - DNA, 25 bp, Homo sapien
gaaggtgtcccgcaaagctctggat

SEQ ID NO: 4028694 - DNA, 25 bp, Homo sapien
gctctaattgcacagcctacaggca

SEQ ID NO: 4028695 - DNA, 25 bp, Homo sapien
aaacttcagctcagtccaggcacac

SEQ ID NO: 4028696 - DNA, 25 bp, Homo sapien
gataagcacacatgtccccacattg

SEQ ID NO: 4028697 - DNA, 25 bp, Homo sapien
cacacaccgtctctgaatgggcatt

SEQ ID NO: 4028698 - DNA, 25 bp, Homo sapien
ggagtcccaccccatagcttgctat

SEQ ID NO: 4028699 - DNA, 25 bp, Homo sapien
aggacgctctcatctactctgggcc

SEQ ID NO: 4028700 - DNA, 25 bp, Homo sapien
tttcacattaagacagcattttccc

SEQ ID NO: 4028701 - DNA, 25 bp, Homo sapien
cacaatcattgtcatcaaaatcccc

SEQ ID NO: 4028702 - DNA, 25 bp, Homo sapien
cacagttccctttcttcttctcttc

SEQ ID NO: 4028703 - DNA, 25 bp, Homo sapien
tcacagttccctttcttcttctctt

SEQ ID NO: 4028704 - DNA, 25 bp, Homo sapien
tagggttttcaggaccttcctcatg

SEQ ID NO: 4028705 - DNA, 25 bp, Homo sapien
tttctctgctgctcaaaagctttgt

SEQ ID NO: 4028706 - DNA, 25 bp, Homo sapien
tgctgctcaaaagctttgtcccttt

SEQ ID NO: 4028707 - DNA, 25 bp, Homo sapien
tcatgcatccctctgatcatgtttc

SEQ ID NO: 4028708 - DNA, 25 bp, Homo sapien
aaatatgcatcttccattgcctgat

SEQ ID NO: 4028709 - DNA, 25 bp, Homo sapien
aatatgcatcttccattgcctgatc

SEQ ID NO: 4028710 - DNA, 25 bp, Homo sapien
atatgcatcttccattgcctgatcc

SEQ ID NO: 4028711 - DNA, 25 bp, Homo sapien
gctgtcagtcaagtctccactcttt

SEQ ID NO: 4028712 - DNA, 25 bp, Homo sapien
tgtcagtcaagtctccactctttcc

SEQ ID NO: 4028713 - DNA, 25 bp, Homo sapien
ctgtcagtcaagtctccactctttc

SEQ ID NO: 4028714 - DNA, 25 bp, Homo sapien
cagctgtcctgggagcatgtctcta

SEQ ID NO: 4028715 - DNA, 25 bp, Homo sapien
tcctgggagcatgtctctacatctc

SEQ ID NO: 4028716 - DNA, 25 bp, Homo sapien
tgtcctgggagcatgtctctacatc

SEQ ID NO: 4028717 - DNA, 25 bp, Homo sapien
ctgggagcatgtctctacatctcta

SEQ ID NO: 4028718 - DNA, 25 bp, Homo sapien
gggtgacgcaggctcaaggatgcaa

SEQ ID NO: 4028719 - DNA, 25 bp, Homo sapien
ccggctgccgcatcagcgagtgcag

SEQ ID NO: 4028720 - DNA, 25 bp, Homo sapien
gctggacccgggtcctccggctgcc

SEQ ID NO: 4028721 - DNA, 25 bp, Homo sapien
aaggatgcaactcggccaggagtga

SEQ ID NO: 4028722 - DNA, 25 bp, Homo sapien
cgatagccgcgtcaccccctccacc

SEQ ID NO: 4028723 - DNA, 25 bp, Homo sapien
cccgcgcaggctgccaagagagatg

SEQ ID NO: 4028724 - DNA, 25 bp, Homo sapien
ctgcgcctccctccgcgatagccgc

SEQ ID NO: 4028725 - DNA, 25 bp, Homo sapien
tccgcgatagccgcgtcaccccctc

SEQ ID NO: 4028726 - DNA, 25 bp, Homo sapien
cgctgccttagccaggacgcaggta

SEQ ID NO: 4028727 - DNA, 25 bp, Homo sapien
ggcgcgggtgtctaggcaaggaacc

SEQ ID NO: 4028728 - DNA, 25 bp, Homo sapien
aggagtgaccctcggcgctgcctta

SEQ ID NO: 4028729 - DNA, 25 bp, Homo sapien
ggacgcaggtagatctggcagctga

SEQ ID NO: 4028730 - DNA, 25 bp, Homo sapien
gccaaaagccatgacggcaaaatgc

SEQ ID NO: 4028731 - DNA, 25 bp, Homo sapien
aaagccatgacggcaaaatgccggg

SEQ ID NO: 4028732 - DNA, 25 bp, Homo sapien
agccgcggtggcctcggccaaaagc

SEQ ID NO: 4028733 - DNA, 25 bp, Homo sapien
ctcggccaaaagccatgacggcaaa

SEQ ID NO: 4028734 - DNA, 25 bp, Homo sapien
tctttctttgttcctgggcagcggt

SEQ ID NO: 4028735 - DNA, 25 bp, Homo sapien
ttggaaattgatctgagagcgcgga

SEQ ID NO: 4028736 - DNA, 25 bp, Homo sapien
attgatctgagagcgcggaaggaca

SEQ ID NO: 4028737 - DNA, 25 bp, Homo sapien
gagcgcggaaggacagaattctttc

SEQ ID NO: 4028738 - DNA, 25 bp, Homo sapien
gatcatgtcctattctatcttgagg

SEQ ID NO: 4028739 - DNA, 25 bp, Homo sapien
ggctgcaattgtcagtcactctcca

SEQ ID NO: 4028740 - DNA, 25 bp, Homo sapien
ggcacatgttaagcatccacaaccc

SEQ ID NO: 4028741 - DNA, 25 bp, Homo sapien
gacattctatgcctgtacaccacat

SEQ ID NO: 4028742 - DNA, 25 bp, Homo sapien
actgagatcatatagatgacagcac

SEQ ID NO: 4028743 - DNA, 25 bp, Homo sapien
tcagcctcttcaacagctgatatta

SEQ ID NO: 4028744 - DNA, 25 bp, Homo sapien
gctggaagctgatgtttaaaatact

SEQ ID NO: 4028745 - DNA, 25 bp, Homo sapien
atgaaccaccatatgggctggaagc

SEQ ID NO: 4028746 - DNA, 25 bp, Homo sapien
atatcttcagctaagatttcccaac

SEQ ID NO: 4028747 - DNA, 25 bp, Homo sapien
cgccaaggctttttgaccaccgcgg

SEQ ID NO: 4028748 - DNA, 25 bp, Homo sapien
caagcgccaaggctttttgaccacc

SEQ ID NO: 4028749 - DNA, 25 bp, Homo sapien
cccaagcgccaaggctttttgacca

SEQ ID NO: 4028750 - DNA, 25 bp, Homo sapien
gcgccaaggctttttgaccaccgcg

SEQ ID NO: 4028751 - DNA, 25 bp, Homo sapien
tgaggaaaccgaaggcctgagggag

SEQ ID NO: 4028752 - DNA, 25 bp, Homo sapien
tgagggagaaatgacttgccaggaa

SEQ ID NO: 4028753 - DNA, 25 bp, Homo sapien
caggatttgtggagcaggtgcgtgg

SEQ ID NO: 4028754 - DNA, 25 bp, Homo sapien
agccctctcatcttgtaggtgagga

SEQ ID NO: 4028755 - DNA, 25 bp, Homo sapien
tggcctgttgactgagggtgagcca

SEQ ID NO: 4028756 - DNA, 25 bp, Homo sapien
tgttgactgagggtgagccactcca

SEQ ID NO: 4028757 - DNA, 25 bp, Homo sapien
gactgagggtgagccactccatcct

SEQ ID NO: 4028758 - DNA, 25 bp, Homo sapien
cctgttgactgagggtgagccactc

SEQ ID NO: 4028759 - DNA, 25 bp, Homo sapien
ggtagagataacatggtctcaggac

SEQ ID NO: 4028760 - DNA, 25 bp, Homo sapien
gtagagataacatggtctcaggaca

SEQ ID NO: 4028761 - DNA, 25 bp, Homo sapien
aggtagagataacatggtctcagga

SEQ ID NO: 4028762 - DNA, 25 bp, Homo sapien
tagagataacatggtctcaggacag

SEQ ID NO: 4028763 - DNA, 25 bp, Homo sapien
gaaatccctgcaagtatcccaacag

SEQ ID NO: 4028764 - DNA, 25 bp, Homo sapien
tttcagcaatattacagcaaacaag

SEQ ID NO: 4028765 - DNA, 25 bp, Homo sapien
tttaaggaatccaccgaacgataga

SEQ ID NO: 4028766 - DNA, 25 bp, Homo sapien
aattagcaaacaccttacacccatg

SEQ ID NO: 4028767 - DNA, 25 bp, Homo sapien
cccaagaagatacacgaacggtcaa

SEQ ID NO: 4028768 - DNA, 25 bp, Homo sapien
tactctatgggtagaactggccacc

SEQ ID NO: 4028769 - DNA, 25 bp, Homo sapien
caagcaagtcaaaaggcagctcaaa

SEQ ID NO: 4028770 - DNA, 25 bp, Homo sapien
gattcttacagtggtaccatgtgca

SEQ ID NO: 4028771 - DNA, 25 bp, Homo sapien
cactgaaagaggttagacggataac

SEQ ID NO: 4028772 - DNA, 25 bp, Homo sapien
tgtatcaccatattcatgaagctgg

SEQ ID NO: 4028773 - DNA, 25 bp, Homo sapien
tgaggtacagacaacagccagactt

SEQ ID NO: 4028774 - DNA, 25 bp, Homo sapien
catagaaacaattgtctgcactggg

SEQ ID NO: 4028775 - DNA, 25 bp, Homo sapien
aaatttgataatacaaacatgtaat

SEQ ID NO: 4028776 - DNA, 25 bp, Homo sapien
aatatctacatatcatccatatatc

SEQ ID NO: 4028777 - DNA, 25 bp, Homo sapien
tgtaatatctacatatcatccatat

SEQ ID NO: 4028778 - DNA, 25 bp, Homo sapien
catgtaatatctacatatcatccat

SEQ ID NO: 4028779 - DNA, 25 bp, Homo sapien
atgggctaaagagaatgtcgctttt

SEQ ID NO: 4028780 - DNA, 25 bp, Homo sapien
taaagagaatgtcgcttttgccttc

SEQ ID NO: 4028781 - DNA, 25 bp, Homo sapien
aagacccagtcacacgatgcgagca

SEQ ID NO: 4028782 - DNA, 25 bp, Homo sapien
acgaagacccagtcacacgatgcga

SEQ ID NO: 4028783 - DNA, 25 bp, Homo sapien
tgttcaataaaaagtaaacttcata

SEQ ID NO: 4028784 - DNA, 25 bp, Homo sapien
aaaagtaaacttcataaattcacat

SEQ ID NO: 4028785 - DNA, 25 bp, Homo sapien
aaagtaaacttcataaattcacatt

SEQ ID NO: 4028786 - DNA, 25 bp, Homo sapien
gttgctaaagccctcttcatgtctc

SEQ ID NO: 4028787 - DNA, 25 bp, Homo sapien
catagacgcacggtaccttctaggt

SEQ ID NO: 4028788 - DNA, 25 bp, Homo sapien
gcacggtaccttctaggttgctaaa

SEQ ID NO: 4028789 - DNA, 25 bp, Homo sapien
tctaggttgctaaagccctcttcat

SEQ ID NO: 4028790 - DNA, 25 bp, Homo sapien
gaaggcaaacttgaagtaccagaat

SEQ ID NO: 4028791 - DNA, 25 bp, Homo sapien
ggcaaacttgaagtaccagaatcaa

SEQ ID NO: 4028792 - DNA, 25 bp, Homo sapien
tgctcaccacagaagcgcaagctca

SEQ ID NO: 4028793 - DNA, 25 bp, Homo sapien
cacagaagcgcaagctcacacagct

SEQ ID NO: 4028794 - DNA, 25 bp, Homo sapien
tatcatacagtaactgagcacaagt

SEQ ID NO: 4028795 - DNA, 25 bp, Homo sapien
ttcccttatcatacagtaactgagc

SEQ ID NO: 4028796 - DNA, 25 bp, Homo sapien
tcaagtgctaatgttggtgctgggt

SEQ ID NO: 4028797 - DNA, 25 bp, Homo sapien
gtgctgggtcctagtgtaaagccaa

SEQ ID NO: 4028798 - DNA, 25 bp, Homo sapien
ggtttcagctgattcaatgggcaaa

SEQ ID NO: 4028799 - DNA, 25 bp, Homo sapien
cgtccgcatgtcagagaactgcacg

SEQ ID NO: 4028800 - DNA, 25 bp, Homo sapien
gacacgtccgcatgtcagagaactg

SEQ ID NO: 4028801 - DNA, 25 bp, Homo sapien
tggtttcagctgattcaatgggcaa

SEQ ID NO: 4028802 - DNA, 25 bp, Homo sapien
ttgatgtacttgttgatgagcccat

SEQ ID NO: 4028803 - DNA, 25 bp, Homo sapien
gatgtacttgttgatgagcccattc

SEQ ID NO: 4028804 - DNA, 25 bp, Homo sapien
agcggagctgggagttgatgtactt

SEQ ID NO: 4028805 - DNA, 25 bp, Homo sapien
gtacttgttgatgagcccattccac

SEQ ID NO: 4028806 - DNA, 25 bp, Homo sapien
gcttgcaacaaatgcacagctaaga

SEQ ID NO: 4028807 - DNA, 25 bp, Homo sapien
cttgcaacaaatgcacagctaagat

SEQ ID NO: 4028808 - DNA, 25 bp, Homo sapien
accagctccggtgttgctccctgta

SEQ ID NO: 4028809 - DNA, 25 bp, Homo sapien
accttcatgagcagcgtgatccact

SEQ ID NO: 4028810 - DNA, 25 bp, Homo sapien
agctccggtgttgctccctgtacac

SEQ ID NO: 4028811 - DNA, 25 bp, Homo sapien
ccttcatgagcagcgtgatccactg

SEQ ID NO: 4028812 - DNA, 25 bp, Homo sapien
attccatgcgtgtcttgtccgtcgt

SEQ ID NO: 4028813 - DNA, 25 bp, Homo sapien
agagtcgtcctctgtgtccgaatcc

SEQ ID NO: 4028814 - DNA, 25 bp, Homo sapien
tctgctgagggctgtgcagcggccg

SEQ ID NO: 4028815 - DNA, 25 bp, Homo sapien
caatcactcggcctaggcctggagg

SEQ ID NO: 4028816 - DNA, 25 bp, Homo sapien
tgccagcttgaggtcgtattttcct

SEQ ID NO: 4028817 - DNA, 25 bp, Homo sapien
tccaatcttcatcgtggcagccagt

SEQ ID NO: 4028818 - DNA, 25 bp, Homo sapien
tcatgaccctcgttccaatcttcat

SEQ ID NO: 4028819 - DNA, 25 bp, Homo sapien
acacctctcatgaccctcgttccaa

SEQ ID NO: 4028820 - DNA, 25 bp, Homo sapien
cctcgttccaatcttcatcgtggca

SEQ ID NO: 4028821 - DNA, 25 bp, Homo sapien
tatcttcctcaacattgtcacaact

SEQ ID NO: 4028822 - DNA, 25 bp, Homo sapien
tgttgcttccaaaactgtggcagaa

SEQ ID NO: 4028823 - DNA, 25 bp, Homo sapien
ggcagaagcaccttgagcagaagca

SEQ ID NO: 4028824 - DNA, 25 bp, Homo sapien
gagatgcacaggagccgtttccttc

SEQ ID NO: 4028825 - DNA, 25 bp, Homo sapien
catgctgagcatcatcaggaggaag

SEQ ID NO: 4028826 - DNA, 25 bp, Homo sapien
cccaggctcggtcccaatgggttct

SEQ ID NO: 4028827 - DNA, 25 bp, Homo sapien
caatcaggcgcagtgccgtctgagt

SEQ ID NO: 4028828 - DNA, 25 bp, Homo sapien
caatgggttctcactggtgatggtc

SEQ ID NO: 4028829 - DNA, 25 bp, Homo sapien
cactgacatttcttgtgcgtggata

SEQ ID NO: 4028830 - DNA, 25 bp, Homo sapien
ctaataagcattgacacccacttac

SEQ ID NO: 4028831 - DNA, 25 bp, Homo sapien
aacataacgcagaaagcacgggcta

SEQ ID NO: 4028832 - DNA, 25 bp, Homo sapien
gactaataagcattgacacccactg

SEQ ID NO: 4028833 - DNA, 25 bp, Homo sapien
agaatgttctgaacagtccaagcat

SEQ ID NO: 4028834 - DNA, 25 bp, Homo sapien
tagaatgttctgaacagtccaagca

SEQ ID NO: 4028835 - DNA, 25 bp, Homo sapien
aatttgactcgggacactgccagac

SEQ ID NO: 4028836 - DNA, 25 bp, Homo sapien
taaagaatttgactcgggacactgc

SEQ ID NO: 4028837 - DNA, 25 bp, Homo sapien
gactcgggacactgccagacttcta

SEQ ID NO: 4028838 - DNA, 25 bp, Homo sapien
aagataaagaatttgactcgggaca

SEQ ID NO: 4028839 - DNA, 25 bp, Homo sapien
caaattcagcaattgtactgaggag

SEQ ID NO: 4028840 - DNA, 25 bp, Homo sapien
gggcaaattcagcaattgtactgag

SEQ ID NO: 4028841 - DNA, 25 bp, Homo sapien
gaggagtggagactgcggataaaga

SEQ ID NO: 4028842 - DNA, 25 bp, Homo sapien
ttaagggcaaattcagcaattgtac

SEQ ID NO: 4028843 - DNA, 25 bp, Homo sapien
tgggtctcttgtccacatttattgg

SEQ ID NO: 4028844 - DNA, 25 bp, Homo sapien
cacatttattggactatgaggcaaa

SEQ ID NO: 4028845 - DNA, 25 bp, Homo sapien
tgtccacatttattggactatgagg

SEQ ID NO: 4028846 - DNA, 25 bp, Homo sapien
taattgcaatgggtctcttgtccac

SEQ ID NO: 4028847 - DNA, 25 bp, Homo sapien
gaaatgtcacatggaatcaacagta

SEQ ID NO: 4028848 - DNA, 25 bp, Homo sapien
aagcacatgctttaatagtatcttc

SEQ ID NO: 4028849 - DNA, 25 bp, Homo sapien
cagcgaggcagggtgaagcacatgc

SEQ ID NO: 4028850 - DNA, 25 bp, Homo sapien
ggagagatttccgtatttaatcata

SEQ ID NO: 4028851 - DNA, 25 bp, Homo sapien
cctccgttcccgaattatcttctga

SEQ ID NO: 4028852 - DNA, 25 bp, Homo sapien
tcctccgttcccgaattatcttctg

SEQ ID NO: 4028853 - DNA, 25 bp, Homo sapien
acaactttaacaacaaatatttctg

SEQ ID NO: 4028854 - DNA, 25 bp, Homo sapien
ctgcaaagttaaccaggaaaagaca

SEQ ID NO: 4028855 - DNA, 25 bp, Homo sapien
tgcaaagttaaccaggaaaagacaa

SEQ ID NO: 4028856 - DNA, 25 bp, Homo sapien
taacaacaaatatttctgcaactgt

SEQ ID NO: 4028857 - DNA, 25 bp, Homo sapien
acattttgcttggtagacaactcta

SEQ ID NO: 4028858 - DNA, 25 bp, Homo sapien
tgacttaggcaacgttctgtgcttt

SEQ ID NO: 4028859 - DNA, 25 bp, Homo sapien
cactgacttaggcaacgttctgtgc

SEQ ID NO: 4028860 - DNA, 25 bp, Homo sapien
tgcatgaactaaagataatgccaca

SEQ ID NO: 4028861 - DNA, 25 bp, Homo sapien
gaagcaacataacagcaagcgaccg

SEQ ID NO: 4028862 - DNA, 25 bp, Homo sapien
agcaacataacagcaagcgaccgac

SEQ ID NO: 4028863 - DNA, 25 bp, Homo sapien
ttcatgttttaagaagcaacataac

SEQ ID NO: 4028864 - DNA, 25 bp, Homo sapien
tgttttaagaagcaacataacagca

SEQ ID NO: 4028865 - DNA, 25 bp, Homo sapien
tgcctacagtacctttctatttgac

SEQ ID NO: 4028866 - DNA, 25 bp, Homo sapien
gggaaacatgatcggtgtggtcaaa

SEQ ID NO: 4028867 - DNA, 25 bp, Homo sapien
tcggtgtggtcaaatggcactgcct

SEQ ID NO: 4028868 - DNA, 25 bp, Homo sapien
aatggcactgcctacagtacctttc

SEQ ID NO: 4028869 - DNA, 25 bp, Homo sapien
gcaatggcttgcagaaatgcctgag

SEQ ID NO: 4028870 - DNA, 25 bp, Homo sapien
tgaatgttattgtctgcaatggctt

SEQ ID NO: 4028871 - DNA, 25 bp, Homo sapien
tggcttgcagaaatgcctgagaatg

SEQ ID NO: 4028872 - DNA, 25 bp, Homo sapien
tgttattgtctgcaatggcttgcag

SEQ ID NO: 4028873 - DNA, 25 bp, Homo sapien
gagcagtcgcgatttgctggcaggt

SEQ ID NO: 4028874 - DNA, 25 bp, Homo sapien
gtgggagcagtcgcgatttgctggc

SEQ ID NO: 4028875 - DNA, 25 bp, Homo sapien
ggagcagtcgcgatttgctggcagg

SEQ ID NO: 4028876 - DNA, 25 bp, Homo sapien
gcagcctccagagaagatggatgac

SEQ ID NO: 4028877 - DNA, 25 bp, Homo sapien
cctccagagaagatggatgactgaa

SEQ ID NO: 4028878 - DNA, 25 bp, Homo sapien
cagagaagatggatgactgaagcca

SEQ ID NO: 4028879 - DNA, 25 bp, Homo sapien
gagaagatggatgactgaagccatt

SEQ ID NO: 4028880 - DNA, 25 bp, Homo sapien
gaactcaggattgtagttccagtcc

SEQ ID NO: 4028881 - DNA, 25 bp, Homo sapien
gcatcagaactcaggattgtagttc

SEQ ID NO: 4028882 - DNA, 25 bp, Homo sapien
aactcaggattgtagttccagtcca

SEQ ID NO: 4028883 - DNA, 25 bp, Homo sapien
tcagaactcaggattgtagttccag

SEQ ID NO: 4028884 - DNA, 25 bp, Homo sapien
cagataccgtgtgaagactgagttg

SEQ ID NO: 4028885 - DNA, 25 bp, Homo sapien
gcctggttccacagataccgtgtga

SEQ ID NO: 4028886 - DNA, 25 bp, Homo sapien
taccgtgtgaagactgagttgcaca

SEQ ID NO: 4028887 - DNA, 25 bp, Homo sapien
tccacagataccgtgtgaagactga

SEQ ID NO: 4028888 - DNA, 25 bp, Homo sapien
tcagcaaaaagcaaagattttctta

SEQ ID NO: 4028889 - DNA, 25 bp, Homo sapien
cagcaaaaagcaaagattttcttac

SEQ ID NO: 4028890 - DNA, 25 bp, Homo sapien
tggcacattcaatctcgacaggaga

SEQ ID NO: 4028891 - DNA, 25 bp, Homo sapien
tctcgacaggagacagcggtgtgct

SEQ ID NO: 4028892 - DNA, 25 bp, Homo sapien
tcctctctgtgtctatcagaggtga

SEQ ID NO: 4028893 - DNA, 25 bp, Homo sapien
caggagacagcggtgtgctcattgc

SEQ ID NO: 4028894 - DNA, 25 bp, Homo sapien
tctgcatcactcaaggcatacagcc

SEQ ID NO: 4028895 - DNA, 25 bp, Homo sapien
tgcatcactcaaggcatacagcctc

SEQ ID NO: 4028896 - DNA, 25 bp, Homo sapien
cctctgcatcactcaaggcatacag

SEQ ID NO: 4028897 - DNA, 25 bp, Homo sapien
ctgcatcactcaaggcatacagcct

SEQ ID NO: 4028898 - DNA, 25 bp, Homo sapien
ggtgacttcaaactcgaaagcagct

SEQ ID NO: 4028899 - DNA, 25 bp, Homo sapien
gggtgacttcaaactcgaaagcagc

SEQ ID NO: 4028900 - DNA, 25 bp, Homo sapien
tgacttcaaactcgaaagcagcttc

SEQ ID NO: 4028901 - DNA, 25 bp, Homo sapien
ccgggtgacttcaaactcgaaagca

SEQ ID NO: 4028902 - DNA, 25 bp, Homo sapien
ctttctcatcaatcacaatccagaa

SEQ ID NO: 4028903 - DNA, 25 bp, Homo sapien
cactttctcatcaatcacaatccag

SEQ ID NO: 4028904 - DNA, 25 bp, Homo sapien
atacactttctcatcaatcacaatc

SEQ ID NO: 4028905 - DNA, 25 bp, Homo sapien
tacactttctcatcaatcacaatcc

SEQ ID NO: 4028906 - DNA, 25 bp, Homo sapien
tcggacagctacacggcagaggcat

SEQ ID NO: 4028907 - DNA, 25 bp, Homo sapien
acgtcggacagctacacggcagagg

SEQ ID NO: 4028908 - DNA, 25 bp, Homo sapien
gagacgtcggacagctacacggcag

SEQ ID NO: 4028909 - DNA, 25 bp, Homo sapien
agccagatcttctaaatgggccatg

SEQ ID NO: 4028910 - DNA, 25 bp, Homo sapien
tcctcccccagctcggcgtccacac

SEQ ID NO: 4028911 - DNA, 25 bp, Homo sapien
atgcctgctcctcccccagctcggc

SEQ ID NO: 4028912 - DNA, 25 bp, Homo sapien
gctcctcccccagctcggcgtccac

SEQ ID NO: 4028913 - DNA, 25 bp, Homo sapien
ctgctcctcccccagctcggcgtcc

SEQ ID NO: 4028914 - DNA, 25 bp, Homo sapien
tcatctgactcgctgctgttaccac

SEQ ID NO: 4028915 - DNA, 25 bp, Homo sapien
accaaatacacccacgccagagaaa

SEQ ID NO: 4028916 - DNA, 25 bp, Homo sapien
tgactcgctgctgttaccaccaaat

SEQ ID NO: 4028917 - DNA, 25 bp, Homo sapien
gctgttaccaccaaatacacccacg

SEQ ID NO: 4028918 - DNA, 25 bp, Homo sapien
tgcatgttgccctcggaggggggcg

SEQ ID NO: 4028919 - DNA, 25 bp, Homo sapien
gtgcatgttgccctcggaggggggc

SEQ ID NO: 4028920 - DNA, 25 bp, Homo sapien
gcatgttgccctcggaggggggcgt

SEQ ID NO: 4028921 - DNA, 25 bp, Homo sapien
caaaagcaaggtgctggtgccctgg

SEQ ID NO: 4028922 - DNA, 25 bp, Homo sapien
ctcagcgtgcctctctgcacagcca

SEQ ID NO: 4028923 - DNA, 25 bp, Homo sapien
acagccagctccagcaggatggcca

SEQ ID NO: 4028924 - DNA, 25 bp, Homo sapien
gctccagcaggatggccagagccaa

SEQ ID NO: 4028925 - DNA, 25 bp, Homo sapien
agcaggatggccagagccaagtgct

SEQ ID NO: 4028926 - DNA, 25 bp, Homo sapien
ggtgcctggcgttccgtgaacatcc

SEQ ID NO: 4028927 - DNA, 25 bp, Homo sapien
ccttttggtgcctggcgttccgtga

SEQ ID NO: 4028928 - DNA, 25 bp, Homo sapien
gcttctggccttttggtgcctggcg

SEQ ID NO: 4028929 - DNA, 25 bp, Homo sapien
ttggtgcctggcgttccgtgaacat

SEQ ID NO: 4028930 - DNA, 25 bp, Homo sapien
aggtgcaggagtttcatcttttttc

SEQ ID NO: 4028931 - DNA, 25 bp, Homo sapien
ttgtcatccagatcttctttctttg

SEQ ID NO: 4028932 - DNA, 25 bp, Homo sapien
ttgacttggccctatatacaggtgc

SEQ ID NO: 4028933 - DNA, 25 bp, Homo sapien
ctatatacaggtgcaggagtttcat

SEQ ID NO: 4028934 - DNA, 25 bp, Homo sapien
tatgatggtggacacctatagttcc

SEQ ID NO: 4028935 - DNA, 25 bp, Homo sapien
cataaacaaaccaatatatcggccg

SEQ ID NO: 4028936 - DNA, 25 bp, Homo sapien
tggacacctatagttccaggtactc

SEQ ID NO: 4028937 - DNA, 25 bp, Homo sapien
caaaccaatatatcggccgggagtg

SEQ ID NO: 4028938 - DNA, 25 bp, Homo sapien
tattcagagggcatcttttctccag

SEQ ID NO: 4028939 - DNA, 25 bp, Homo sapien
tcaaccatttggagtcaaggcgagc

SEQ ID NO: 4028940 - DNA, 25 bp, Homo sapien
ttttctccagcttcctcccagttct

SEQ ID NO: 4028941 - DNA, 25 bp, Homo sapien
acacaaatattcagagggcatcttt

SEQ ID NO: 4028942 - DNA, 25 bp, Homo sapien
cgcaggcgtgcgcacacagcctccc

SEQ ID NO: 4028943 - DNA, 25 bp, Homo sapien
gcaggcgtgcgcacacagcctccca

SEQ ID NO: 4028944 - DNA, 25 bp, Homo sapien
ccccgcaggcgtgcgcacacagcct

SEQ ID NO: 4028945 - DNA, 25 bp, Homo sapien
ccgcaggcgtgcgcacacagcctcc

SEQ ID NO: 4028946 - DNA, 25 bp, Homo sapien
ctgtgagtggtatggcactgctgtg

SEQ ID NO: 4028947 - DNA, 25 bp, Homo sapien
tgtgagtggtatggcactgctgtga

SEQ ID NO: 4028948 - DNA, 25 bp, Homo sapien
tggctgtgagtggtatggcactgct

SEQ ID NO: 4028949 - DNA, 25 bp, Homo sapien
gctgtgagtggtatggcactgctgt

SEQ ID NO: 4028950 - DNA, 25 bp, Homo sapien
ttcaaaatcaagaactgttcgtctc

SEQ ID NO: 4028951 - DNA, 25 bp, Homo sapien
agaactgttcgtctctctggaatat

SEQ ID NO: 4028952 - DNA, 25 bp, Homo sapien
tctctctggaatattagtatcataa

SEQ ID NO: 4028953 - DNA, 25 bp, Homo sapien
tctctggaatattagtatcataagc

SEQ ID NO: 4028954 - DNA, 25 bp, Homo sapien
cagctgacgtgctatggtcaaagaa

SEQ ID NO: 4028955 - DNA, 25 bp, Homo sapien
caagggaaagagtctgtagaagttc

SEQ ID NO: 4028956 - DNA, 25 bp, Homo sapien
tgttgtggcaattccccgaccaagg

SEQ ID NO: 4028957 - DNA, 25 bp, Homo sapien
gaattcggaattagcaattgaccaa

SEQ ID NO: 4028958 - DNA, 25 bp, Homo sapien
aatctttttctacttccttaatgat

SEQ ID NO: 4028959 - DNA, 25 bp, Homo sapien
cttccttaatgattctaattgcaga

SEQ ID NO: 4028960 - DNA, 25 bp, Homo sapien
cttaatgattctaattgcagacaat

SEQ ID NO: 4028961 - DNA, 25 bp, Homo sapien
tccttaatgattctaattgcagaca

SEQ ID NO: 4028962 - DNA, 25 bp, Homo sapien
atgttgacatcttccatggccctac

SEQ ID NO: 4028963 - DNA, 25 bp, Homo sapien
catggccctactcctaaattaataa

SEQ ID NO: 4028964 - DNA, 25 bp, Homo sapien
ttccatggccctactcctaaattaa

SEQ ID NO: 4028965 - DNA, 25 bp, Homo sapien
ctatgttgacatcttccatggccct

SEQ ID NO: 4028966 - DNA, 25 bp, Homo sapien
tttcgtagctgacattgtggtgggt

SEQ ID NO: 4028967 - DNA, 25 bp, Homo sapien
tttctgaatcctttcgtagctgaca

SEQ ID NO: 4028968 - DNA, 25 bp, Homo sapien
gctgttacccattccttgatactga

SEQ ID NO: 4028969 - DNA, 25 bp, Homo sapien
gatactgacagtacaatggccatcc

SEQ ID NO: 4028970 - DNA, 25 bp, Homo sapien
ctgaaagataactctggcatcttcc

SEQ ID NO: 4028971 - DNA, 25 bp, Homo sapien
tatcaataatctgatttatcacagg

SEQ ID NO: 4028972 - DNA, 25 bp, Homo sapien
ttatcaataatctgatttatcacag

SEQ ID NO: 4028973 - DNA, 25 bp, Homo sapien
tttctgttcttaatgatcacagtta

SEQ ID NO: 4028974 - DNA, 25 bp, Homo sapien
ggatgcttttgaaagctgcccgcat

SEQ ID NO: 4028975 - DNA, 25 bp, Homo sapien
aggatgcttttgaaagctgcccgca

SEQ ID NO: 4028976 - DNA, 25 bp, Homo sapien
gcctagagacgtgatgccctgcatt

SEQ ID NO: 4028977 - DNA, 25 bp, Homo sapien
gaggttgcaagtcgcaagccttggc

SEQ ID NO: 4028978 - DNA, 25 bp, Homo sapien
cttgggtgggagacaccatggtaca

SEQ ID NO: 4028979 - DNA, 25 bp, Homo sapien
caggccatgtcttcggaggttgcaa

SEQ ID NO: 4028980 - DNA, 25 bp, Homo sapien
ggcaccagaagtagaccctgatcat

SEQ ID NO: 4028981 - DNA, 25 bp, Homo sapien
ctgatcatggagtgtggtgccctca

SEQ ID NO: 4028982 - DNA, 25 bp, Homo sapien
gatgaagaacaagtgcagcagcctt

SEQ ID NO: 4028983 - DNA, 25 bp, Homo sapien
tcagcagacatgcatgctggacagc

SEQ ID NO: 4028984 - DNA, 25 bp, Homo sapien
gggatcagctttagcaggcaggcat

SEQ ID NO: 4028985 - DNA, 25 bp, Homo sapien
caggcaggcatccttctcagcactg

SEQ ID NO: 4028986 - DNA, 25 bp, Homo sapien
cagcactgccatccaggactctttc

SEQ ID NO: 4028987 - DNA, 25 bp, Homo sapien
ctttagcaggcaggcatccttctca

SEQ ID NO: 4028988 - DNA, 25 bp, Homo sapien
agccagccctgcctgggccgcggcc

SEQ ID NO: 4028989 - DNA, 25 bp, Homo sapien
cctgggccgcggccgccggcctcat

SEQ ID NO: 4028990 - DNA, 25 bp, Homo sapien
atccggcccaggcagcagccagccc

SEQ ID NO: 4028991 - DNA, 25 bp, Homo sapien
catccggcccaggcagcagccagcc

SEQ ID NO: 4028992 - DNA, 25 bp, Homo sapien
gatagtcggataattatgtctctta

SEQ ID NO: 4028993 - DNA, 25 bp, Homo sapien
gaaaccccgatgtgaagtgtacata

SEQ ID NO: 4028994 - DNA, 25 bp, Homo sapien
tctgggtcgatcttagctttataca

SEQ ID NO: 4028995 - DNA, 25 bp, Homo sapien
tgttcggtttacagagtttgctact

SEQ ID NO: 4028996 - DNA, 25 bp, Homo sapien
ccagtcaggctttagtggacacgaa

SEQ ID NO: 4028997 - DNA, 25 bp, Homo sapien
tcaacaccgtattggaaatcctgct

SEQ ID NO: 4028998 - DNA, 25 bp, Homo sapien
tattcatggagattaacgctcaggt

SEQ ID NO: 4028999 - DNA, 25 bp, Homo sapien
caggtttcaaagacccctcaagtgc

SEQ ID NO: 4029000 - DNA, 25 bp, Homo sapien
cacatggctgggaattgggtttttc

SEQ ID NO: 4029001 - DNA, 25 bp, Homo sapien
cagacacatggctgggaattgggtt

SEQ ID NO: 4029002 - DNA, 25 bp, Homo sapien
tagcagcacctttgtaacccagtga

SEQ ID NO: 4029003 - DNA, 25 bp, Homo sapien
gggtttttctcctccgctcttagca

SEQ ID NO: 4029004 - DNA, 25 bp, Homo sapien
ccacggccacatccgcaaaaagggt

SEQ ID NO: 4029005 - DNA, 25 bp, Homo sapien
gttgtctttccaaggcggctcagct

SEQ ID NO: 4029006 - DNA, 25 bp, Homo sapien
caggccaggccgtggttgtctttcc

SEQ ID NO: 4029007 - DNA, 25 bp, Homo sapien
cgcaaaaagggtactggtgaacgtg

SEQ ID NO: 4029008 - DNA, 25 bp, Homo sapien
cctgctgaagagacattggagctag

SEQ ID NO: 4029009 - DNA, 25 bp, Homo sapien
tagggcggctagtttcacctggtaa

SEQ ID NO: 4029010 - DNA, 25 bp, Homo sapien
gcttgtcatgttcgaagtttgatac

SEQ ID NO: 4029011 - DNA, 25 bp, Homo sapien
gttgaagacggttccgctccctgtc

SEQ ID NO: 4029012 - DNA, 25 bp, Homo sapien
caaagggccgttcgcctttcatggc

SEQ ID NO: 4029013 - DNA, 25 bp, Homo sapien
tcgatttcctgtcagccaacaaagg

SEQ ID NO: 4029014 - DNA, 25 bp, Homo sapien
tccacagcagcgttgccgtggtaac

SEQ ID NO: 4029015 - DNA, 25 bp, Homo sapien
cgtggtaacgatcctccgccggacg

SEQ ID NO: 4029016 - DNA, 25 bp, Homo sapien
gagaagcccgttcatgagtgtctga

SEQ ID NO: 4029017 - DNA, 25 bp, Homo sapien
cccctcgagaagcccgttcatgagt

SEQ ID NO: 4029018 - DNA, 25 bp, Homo sapien
tcgagaagcccgttcatgagtgtct

SEQ ID NO: 4029019 - DNA, 25 bp, Homo sapien
ctcgagaagcccgttcatgagtgtc

SEQ ID NO: 4029020 - DNA, 25 bp, Homo sapien
ctgtgcagcttcatgcactggaacc

SEQ ID NO: 4029021 - DNA, 25 bp, Homo sapien
tgtgcagcttcatgcactggaacca

SEQ ID NO: 4029022 - DNA, 25 bp, Homo sapien
tgcagcttcatgcactggaaccaaa

SEQ ID NO: 4029023 - DNA, 25 bp, Homo sapien
gcagcttcatgcactggaaccaaac

SEQ ID NO: 4029024 - DNA, 25 bp, Homo sapien
ctggcttcacaccacacaccagcac

SEQ ID NO: 4029025 - DNA, 25 bp, Homo sapien
gcttcacaccacacaccagcaccat

SEQ ID NO: 4029026 - DNA, 25 bp, Homo sapien
tggcttcacaccacacaccagcacc

SEQ ID NO: 4029027 - DNA, 25 bp, Homo sapien
ggcttcacaccacacaccagcacca

SEQ ID NO: 4029028 - DNA, 25 bp, Homo sapien
ttgataggttctagtacacagaagt

SEQ ID NO: 4029029 - DNA, 25 bp, Homo sapien
tgacagccctttatggaatgttgct

SEQ ID NO: 4029030 - DNA, 25 bp, Homo sapien
ttactaattgtgcactttggccaac

SEQ ID NO: 4029031 - DNA, 25 bp, Homo sapien
tcctaacagccatgagtttacagct

SEQ ID NO: 4029032 - DNA, 25 bp, Homo sapien
tttgaagaatcaaagtgaccaatgg

SEQ ID NO: 4029033 - DNA, 25 bp, Homo sapien
gaatagtctgttcatgcactcataa

SEQ ID NO: 4029034 - DNA, 25 bp, Homo sapien
tcaatcagttttagtgtgaatttca

SEQ ID NO: 4029035 - DNA, 25 bp, Homo sapien
cttggaaacagaatcatctttcaat

SEQ ID NO: 4029036 - DNA, 25 bp, Homo sapien
tttctggaacttagtcatgccattg

SEQ ID NO: 4029037 - DNA, 25 bp, Homo sapien
ctggaacttagtcatgccattgtag

SEQ ID NO: 4029038 - DNA, 25 bp, Homo sapien
ttctggaacttagtcatgccattgt

SEQ ID NO: 4029039 - DNA, 25 bp, Homo sapien
tctggaacttagtcatgccattgta

SEQ ID NO: 4029040 - DNA, 25 bp, Homo sapien
tgcttgtgctatgcgcaggcaggac

SEQ ID NO: 4029041 - DNA, 25 bp, Homo sapien
ttggaggaccccacatacctaggtg

SEQ ID NO: 4029042 - DNA, 25 bp, Homo sapien
tacctgggcatatctgaaaaccttg

SEQ ID NO: 4029043 - DNA, 25 bp, Homo sapien
gaaatgtgacataccactgggccaa

SEQ ID NO: 4029044 - DNA, 25 bp, Homo sapien
tcctgtgaaagaaagttgtgctgca

SEQ ID NO: 4029045 - DNA, 25 bp, Homo sapien
ggctcacttacaaccaagtgttgtg

SEQ ID NO: 4029046 - DNA, 25 bp, Homo sapien
gagacaagaagctgttggctcactt

SEQ ID NO: 4029047 - DNA, 25 bp, Homo sapien
cctgcaatgacagtcctcaaactta

SEQ ID NO: 4029048 - DNA, 25 bp, Homo sapien
ccccgcagcggcgttctcatgggtg

SEQ ID NO: 4029049 - DNA, 25 bp, Homo sapien
ttatcattccatgcaaacacactca

SEQ ID NO: 4029050 - DNA, 25 bp, Homo sapien
tcatgggtggcgtcacagtggctcc

SEQ ID NO: 4029051 - DNA, 25 bp, Homo sapien
acacaagcggcggtgtcccagtggt

SEQ ID NO: 4029052 - DNA, 25 bp, Homo sapien
tctcatagagatcctgcagggacac

SEQ ID NO: 4029053 - DNA, 25 bp, Homo sapien
gcatacccatccaggctatgtctgg

SEQ ID NO: 4029054 - DNA, 25 bp, Homo sapien
tacacaactgggtcatggtgtctac

SEQ ID NO: 4029055 - DNA, 25 bp, Homo sapien
cgacacgacggtgactctcagaggg

SEQ ID NO: 4029056 - DNA, 25 bp, Homo sapien
gttgttctacttctgtaacccatga

SEQ ID NO: 4029057 - DNA, 25 bp, Homo sapien
cagctactcctgctaagttaccaag

SEQ ID NO: 4029058 - DNA, 25 bp, Homo sapien
aaagaaggaacacctttgcagctac

SEQ ID NO: 4029059 - DNA, 25 bp, Homo sapien
tataggctctcaaaaagtcattaca

SEQ ID NO: 4029060 - DNA, 25 bp, Homo sapien
tgcgagttagtaaataactgtgctc

SEQ ID NO: 4029061 - DNA, 25 bp, Homo sapien
cgagttagtaaataactgtgctcct

SEQ ID NO: 4029062 - DNA, 25 bp, Homo sapien
tgtgcgagttagtaaataactgtgc

SEQ ID NO: 4029063 - DNA, 25 bp, Homo sapien
cttgtgcgagttagtaaataactgt

SEQ ID NO: 4029064 - DNA, 25 bp, Homo sapien
tgcaattgagcctatgactgaggat

SEQ ID NO: 4029065 - DNA, 25 bp, Homo sapien
tgaggatgaagactctataaaggac

SEQ ID NO: 4029066 - DNA, 25 bp, Homo sapien
cctatgactgaggatgaagactcta

SEQ ID NO: 4029067 - DNA, 25 bp, Homo sapien
cagacacatgcaattgagcctatga

SEQ ID NO: 4029068 - DNA, 25 bp, Homo sapien
gcgaggcgagccatggtgtcgcagg

SEQ ID NO: 4029069 - DNA, 25 bp, Homo sapien
gcagcgaggcgagccatggtgtcgc

SEQ ID NO: 4029070 - DNA, 25 bp, Homo sapien
aggcgagccatggtgtcgcaggctc

SEQ ID NO: 4029071 - DNA, 25 bp, Homo sapien
cgagccatggtgtcgcaggctctag

SEQ ID NO: 4029072 - DNA, 25 bp, Homo sapien
cagctctcaccgatggccagctcct

SEQ ID NO: 4029073 - DNA, 25 bp, Homo sapien
tggagcagctctcaccgatggccag

SEQ ID NO: 4029074 - DNA, 25 bp, Homo sapien
ctgtctccctggccatcttctttga

SEQ ID NO: 4029075 - DNA, 25 bp, Homo sapien
ctcaccgatggccagctcctaccac

SEQ ID NO: 4029076 - DNA, 25 bp, Homo sapien
cgccggagtttcacaaagaaagtct

SEQ ID NO: 4029077 - DNA, 25 bp, Homo sapien
cggcccgagcccctcacgcactcac

SEQ ID NO: 4029078 - DNA, 25 bp, Homo sapien
cccggcccgagcccctcacgcactc

SEQ ID NO: 4029079 - DNA, 25 bp, Homo sapien
cacaaagaaagtctcccggcccgag

SEQ ID NO: 4029080 - DNA, 25 bp, Homo sapien
cgccggcggcgactcgggctcccgc

SEQ ID NO: 4029081 - DNA, 25 bp, Homo sapien
cggcggcgactcgggctcccgccgc

SEQ ID NO: 4029082 - DNA, 25 bp, Homo sapien
cggcaccgacgccggcggcgactcg

SEQ ID NO: 4029083 - DNA, 25 bp, Homo sapien
ggcaccgacgccggcggcgactcgg

SEQ ID NO: 4029084 - DNA, 25 bp, Homo sapien
tggtggttggcccttgggtgggctc

SEQ ID NO: 4029085 - DNA, 25 bp, Homo sapien
tgggtgggctccggcgccagcggcg

SEQ ID NO: 4029086 - DNA, 25 bp, Homo sapien
ccagcggcggcgattgctccatatc

SEQ ID NO: 4029087 - DNA, 25 bp, Homo sapien
tcagctccttgtggtggttggccct

SEQ ID NO: 4029088 - DNA, 25 bp, Homo sapien
gagtcaagggtctgtttgggtggca

SEQ ID NO: 4029089 - DNA, 25 bp, Homo sapien
ggataccatgctcactaagtggtaa

SEQ ID NO: 4029090 - DNA, 25 bp, Homo sapien
catgctcactaagtggtaagtatag

SEQ ID NO: 4029091 - DNA, 25 bp, Homo sapien
taccatgctcactaagtggtaagta

SEQ ID NO: 4029092 - DNA, 25 bp, Homo sapien
gtgttcacagggcaccgtcacagcc

SEQ ID NO: 4029093 - DNA, 25 bp, Homo sapien
ctttaaagacttttgccgtggctca

SEQ ID NO: 4029094 - DNA, 25 bp, Homo sapien
actcacagtgggacacggtggctca

SEQ ID NO: 4029095 - DNA, 25 bp, Homo sapien
cagcctctgaaacatgctgtcttta

SEQ ID NO: 4029096 - DNA, 25 bp, Homo sapien
agttgatactataagttagtactac

SEQ ID NO: 4029097 - DNA, 25 bp, Homo sapien
aagaaatgagttaggcaacaggcta

SEQ ID NO: 4029098 - DNA, 25 bp, Homo sapien
actataagttagtactacaatgaca

SEQ ID NO: 4029099 - DNA, 25 bp, Homo sapien
taaagaaatgagttaggcaacaggc

SEQ ID NO: 4029100 - DNA, 25 bp, Homo sapien
actatacaagcaatattaaatagta

SEQ ID NO: 4029101 - DNA, 25 bp, Homo sapien
taaaaatactaaactatacaagcaa

SEQ ID NO: 4029102 - DNA, 25 bp, Homo sapien
ttaaatagtatataaacttggatta

SEQ ID NO: 4029103 - DNA, 25 bp, Homo sapien
aatgattaataacatgttgatcttt

SEQ ID NO: 4029104 - DNA, 25 bp, Homo sapien
gatatggtaaccaaaactctactat

SEQ ID NO: 4029105 - DNA, 25 bp, Homo sapien
gtgagaacacgtagttatgtggtgt

SEQ ID NO: 4029106 - DNA, 25 bp, Homo sapien
taaccaaaactctactatctacttc

SEQ ID NO: 4029107 - DNA, 25 bp, Homo sapien
caggatatggtaaccaaaactctac

SEQ ID NO: 4029108 - DNA, 25 bp, Homo sapien
tttcacctcatctcacctcagcatt

SEQ ID NO: 4029109 - DNA, 25 bp, Homo sapien
tcatctcctttcacctcatctcacc

SEQ ID NO: 4029110 - DNA, 25 bp, Homo sapien
ctttcacctcatctcacctcagcat

SEQ ID NO: 4029111 - DNA, 25 bp, Homo sapien
cctttcacctcatctcacctcagca

SEQ ID NO: 4029112 - DNA, 25 bp, Homo sapien
attgcatctcatctcatgatttcca

SEQ ID NO: 4029113 - DNA, 25 bp, Homo sapien
cattatgtcatttcatctcatcaca

SEQ ID NO: 4029114 - DNA, 25 bp, Homo sapien
tttcattatgtcatttcatctcatc

SEQ ID NO: 4029115 - DNA, 25 bp, Homo sapien
tgatttccatttcatcattccattt

SEQ ID NO: 4029116 - DNA, 25 bp, Homo sapien
catctcatctcatcatttcttattt

SEQ ID NO: 4029117 - DNA, 25 bp, Homo sapien
cttatttcatctcattttatctcat

SEQ ID NO: 4029118 - DNA, 25 bp, Homo sapien
catttcttatttcatctcattttat

SEQ ID NO: 4029119 - DNA, 25 bp, Homo sapien
ttcttatttcatctcattttatctc

SEQ ID NO: 4029120 - DNA, 25 bp, Homo sapien
tcatctcctcttatcattcatctga

SEQ ID NO: 4029121 - DNA, 25 bp, Homo sapien
atcatctcctcttatcattcatctg

SEQ ID NO: 4029122 - DNA, 25 bp, Homo sapien
aatctcatttcatctcatcatttca

SEQ ID NO: 4029123 - DNA, 25 bp, Homo sapien
atttcatcatttcatctcatcattt

SEQ ID NO: 4029124 - DNA, 25 bp, Homo sapien
tcatttcatcatttcatctcatcat

SEQ ID NO: 4029125 - DNA, 25 bp, Homo sapien
catcatttcatcatttcatctcatc

SEQ ID NO: 4029126 - DNA, 25 bp, Homo sapien
ttttatctcattatatcatctcatc

SEQ ID NO: 4029127 - DNA, 25 bp, Homo sapien
tcattttatctcattatatcatctc

SEQ ID NO: 4029128 - DNA, 25 bp, Homo sapien
tttatctcattatatcatctcatct

SEQ ID NO: 4029129 - DNA, 25 bp, Homo sapien
ctcatcattttatctcattatatca

SEQ ID NO: 4029130 - DNA, 25 bp, Homo sapien
gtaaccttatcacttcatctaagtg

SEQ ID NO: 4029131 - DNA, 25 bp, Homo sapien
atctcatctcaagtaaccttatcac

SEQ ID NO: 4029132 - DNA, 25 bp, Homo sapien
catctcaagtaaccttatcacttca

SEQ ID NO: 4029133 - DNA, 25 bp, Homo sapien
tcaagtaaccttatcacttcatcta

SEQ ID NO: 4029134 - DNA, 25 bp, Homo sapien
aatgattctccaaacttggcctctc

SEQ ID NO: 4029135 - DNA, 25 bp, Homo sapien
cacagtgcccatcctatttatttac

SEQ ID NO: 4029136 - DNA, 25 bp, Homo sapien
ctgccttcgcaacccaaaatgctgg

SEQ ID NO: 4029137 - DNA, 25 bp, Homo sapien
taataaagaaaaggtctcaatatgt

SEQ ID NO: 4029138 - DNA, 25 bp, Homo sapien
ggtagaaatggccagtgtacggcca

SEQ ID NO: 4029139 - DNA, 25 bp, Homo sapien
aatggccagtgtacggccaggccag

SEQ ID NO: 4029140 - DNA, 25 bp, Homo sapien
tagaaatggccagtgtacggccagg

SEQ ID NO: 4029141 - DNA, 25 bp, Homo sapien
caggtcatggccaaaaacagggcag

SEQ ID NO: 4029142 - DNA, 25 bp, Homo sapien
catggcagtgcctggtcaactctgg

SEQ ID NO: 4029143 - DNA, 25 bp, Homo sapien
ccaacgttgggacagggcaaatcag

SEQ ID NO: 4029144 - DNA, 25 bp, Homo sapien
ccagggacagggcatgacaggaagt

SEQ ID NO: 4029145 - DNA, 25 bp, Homo sapien
gctgggccaacgttgggacagggca

SEQ ID NO: 4029146 - DNA, 25 bp, Homo sapien
cccgcggcgactggggctcccacct

SEQ ID NO: 4029147 - DNA, 25 bp, Homo sapien
gcccgcggcgactggggctcccacc

SEQ ID NO: 4029148 - DNA, 25 bp, Homo sapien
cgcccgcggcgactggggctcccac

SEQ ID NO: 4029149 - DNA, 25 bp, Homo sapien
cctggggtcggcttgggcgccggca

SEQ ID NO: 4029150 - DNA, 25 bp, Homo sapien
accacaagaggtatcagacacaggg

SEQ ID NO: 4029151 - DNA, 25 bp, Homo sapien
ttaccacaagaggtatcagacacag

SEQ ID NO: 4029152 - DNA, 25 bp, Homo sapien
gcaattaccacaagaggtatcagac

SEQ ID NO: 4029153 - DNA, 25 bp, Homo sapien
aattaccacaagaggtatcagacac

SEQ ID NO: 4029154 - DNA, 25 bp, Homo sapien
ttccccttcacgaggccgcttttga

SEQ ID NO: 4029155 - DNA, 25 bp, Homo sapien
cacagccaggcgctttgtggtctcg

SEQ ID NO: 4029156 - DNA, 25 bp, Homo sapien
aggcgctttgtggtctcggcaccct

SEQ ID NO: 4029157 - DNA, 25 bp, Homo sapien
cgaggccgcttttgactagtagaag

SEQ ID NO: 4029158 - DNA, 25 bp, Homo sapien
gaacctgagatagagctgtggattc

SEQ ID NO: 4029159 - DNA, 25 bp, Homo sapien
gacagaagatcttgaaactttctct

SEQ ID NO: 4029160 - DNA, 25 bp, Homo sapien
tgtggattcattttcctcagacaga

SEQ ID NO: 4029161 - DNA, 25 bp, Homo sapien
ctgggctagaacctgagatagagct

SEQ ID NO: 4029162 - DNA, 25 bp, Homo sapien
acagacctgaaataactccagagtt

SEQ ID NO: 4029163 - DNA, 25 bp, Homo sapien
taagcttccaaaccataaggcatag

SEQ ID NO: 4029164 - DNA, 25 bp, Homo sapien
ccagagttgaggctagcattaagct

SEQ ID NO: 4029165 - DNA, 25 bp, Homo sapien
gccatattctttatagtccttcttg

SEQ ID NO: 4029166 - DNA, 25 bp, Homo sapien
ctggcatgtaccactcttcaaatct

SEQ ID NO: 4029167 - DNA, 25 bp, Homo sapien
gggacagttttgtattcatcaacaa

SEQ ID NO: 4029168 - DNA, 25 bp, Homo sapien
tgggacagttttgtattcatcaaca

SEQ ID NO: 4029169 - DNA, 25 bp, Homo sapien
agaacaacattcttatacagtggac

SEQ ID NO: 4029170 - DNA, 25 bp, Homo sapien
aagaacaacattcttatacagtgga

SEQ ID NO: 4029171 - DNA, 25 bp, Homo sapien
attatgaacttctcctggttgatca

SEQ ID NO: 4029172 - DNA, 25 bp, Homo sapien
ttatgaacttctcctggttgatcac

SEQ ID NO: 4029173 - DNA, 25 bp, Homo sapien
tatatcagggcaaaagtaacagtat

SEQ ID NO: 4029174 - DNA, 25 bp, Homo sapien
tcatacttagcaaattccttgacta

SEQ ID NO: 4029175 - DNA, 25 bp, Homo sapien
attccttgactatatcagggcaaaa

SEQ ID NO: 4029176 - DNA, 25 bp, Homo sapien
gtatttctccttaatggcttttgtg

SEQ ID NO: 4029177 - DNA, 25 bp, Homo sapien
aatacacagtatcacctacaatcag

SEQ ID NO: 4029178 - DNA, 25 bp, Homo sapien
atacacagtatcacctacaatcagg

SEQ ID NO: 4029179 - DNA, 25 bp, Homo sapien
tacacagtatcacctacaatcagga

SEQ ID NO: 4029180 - DNA, 25 bp, Homo sapien
aatcaggatgtgattgatgcagctc

SEQ ID NO: 4029181 - DNA, 25 bp, Homo sapien
ataaccttctacaactgggagaaca

SEQ ID NO: 4029182 - DNA, 25 bp, Homo sapien
ctggtacattaaatagttcaaacat

SEQ ID NO: 4029183 - DNA, 25 bp, Homo sapien
ctgtattttctagtgtattcagtgg

SEQ ID NO: 4029184 - DNA, 25 bp, Homo sapien
gtattttctagtgtattcagtggaa

SEQ ID NO: 4029185 - DNA, 25 bp, Homo sapien
gctctgtattttctagtgtattcag

SEQ ID NO: 4029186 - DNA, 25 bp, Homo sapien
atgctctgtattttctagtgtattc

SEQ ID NO: 4029187 - DNA, 25 bp, Homo sapien
catatctattgatgtgctttgctgg

SEQ ID NO: 4029188 - DNA, 25 bp, Homo sapien
cattatgtgttcgaattttaaccac

SEQ ID NO: 4029189 - DNA, 25 bp, Homo sapien
tgagtttggcattatgtgttcgaat

SEQ ID NO: 4029190 - DNA, 25 bp, Homo sapien
tcatctgttgtaggcatatctgttg

SEQ ID NO: 4029191 - DNA, 25 bp, Homo sapien
caaaggatgtgatgacagtagcatt

SEQ ID NO: 4029192 - DNA, 25 bp, Homo sapien
tgatgacagtagcatttttagccat

SEQ ID NO: 4029193 - DNA, 25 bp, Homo sapien
cttggaaccatatgcaaaggatgtg

SEQ ID NO: 4029194 - DNA, 25 bp, Homo sapien
accatatgcaaaggatgtgatgaca

SEQ ID NO: 4029195 - DNA, 25 bp, Homo sapien
cagctccaaatggagctctacttat

SEQ ID NO: 4029196 - DNA, 25 bp, Homo sapien
ccaaatggagctctacttatgggca

SEQ ID NO: 4029197 - DNA, 25 bp, Homo sapien
gctccaaatggagctctacttatgg

SEQ ID NO: 4029198 - DNA, 25 bp, Homo sapien
tccaaatggagctctacttatgggc

SEQ ID NO: 4029199 - DNA, 25 bp, Homo sapien
tggaacaccagtggcaccattaact

SEQ ID NO: 4029200 - DNA, 25 bp, Homo sapien
caccagtggcaccattaactgcttt

SEQ ID NO: 4029201 - DNA, 25 bp, Homo sapien
gtacagctatacctttgtcaacctt

SEQ ID NO: 4029202 - DNA, 25 bp, Homo sapien
aattggaacaccagtggcaccatta

SEQ ID NO: 4029203 - DNA, 25 bp, Homo sapien
gaaacagccattcactcgtttcctt

SEQ ID NO: 4029204 - DNA, 25 bp, Homo sapien
gaggaaacagccattcactcgtttc

SEQ ID NO: 4029205 - DNA, 25 bp, Homo sapien
ggaaacagccattcactcgtttcct

SEQ ID NO: 4029206 - DNA, 25 bp, Homo sapien
aagaggaaacagccattcactcgtt

SEQ ID NO: 4029207 - DNA, 25 bp, Homo sapien
tgccattgaggattgtgagcttcca

SEQ ID NO: 4029208 - DNA, 25 bp, Homo sapien
gaacagcaggctgcttcaaggtaac

SEQ ID NO: 4029209 - DNA, 25 bp, Homo sapien
tggtacaaaaagcaggagtatctgt

SEQ ID NO: 4029210 - DNA, 25 bp, Homo sapien
aaagcaggagtatctgtagtagcag

SEQ ID NO: 4029211 - DNA, 25 bp, Homo sapien
gaggaactgcgacccgcagagggct

SEQ ID NO: 4029212 - DNA, 25 bp, Homo sapien
cgaggaactgcgacccgcagagggc

SEQ ID NO: 4029213 - DNA, 25 bp, Homo sapien
ccgaggaactgcgacccgcagaggg

SEQ ID NO: 4029214 - DNA, 25 bp, Homo sapien
ggccgaggaactgcgacccgcagag

SEQ ID NO: 4029215 - DNA, 25 bp, Homo sapien
gggggtcgctctcggctgcctcacc

SEQ ID NO: 4029216 - DNA, 25 bp, Homo sapien
gcgggggggtcgctctcggctgcct

SEQ ID NO: 4029217 - DNA, 25 bp, Homo sapien
gctctcggctgcctcaccgggtaat

SEQ ID NO: 4029218 - DNA, 25 bp, Homo sapien
tcgctctcggctgcctcaccgggta

SEQ ID NO: 4029219 - DNA, 25 bp, Homo sapien
cacagaagacactactctgtccatc

SEQ ID NO: 4029220 - DNA, 25 bp, Homo sapien
tgataggagaggggggtgtagtagt

SEQ ID NO: 4029221 - DNA, 25 bp, Homo sapien
ataggagaggggggtgtagtagtca

SEQ ID NO: 4029222 - DNA, 25 bp, Homo sapien
taggagaggggggtgtagtagtcat

SEQ ID NO: 4029223 - DNA, 25 bp, Homo sapien
ggtgataggagaggggggtgtagta

SEQ ID NO: 4029224 - DNA, 25 bp, Homo sapien
tctttctttttcagtattagtggac

SEQ ID NO: 4029225 - DNA, 25 bp, Homo sapien
cttctttctttttcagtattagtgg

SEQ ID NO: 4029226 - DNA, 25 bp, Homo sapien
ttctttttcagtattagtggaccca

SEQ ID NO: 4029227 - DNA, 25 bp, Homo sapien
tctttttcagtattagtggacccac

SEQ ID NO: 4029228 - DNA, 25 bp, Homo sapien
tattatgtgaatcatcatgggcagg

SEQ ID NO: 4029229 - DNA, 25 bp, Homo sapien
ttattatgtgaatcatcatgggcag

SEQ ID NO: 4029230 - DNA, 25 bp, Homo sapien
tggcagggtagtcacattggccacg

SEQ ID NO: 4029231 - DNA, 25 bp, Homo sapien
ctagcaagcagaggcccgtgtggtc

SEQ ID NO: 4029232 - DNA, 25 bp, Homo sapien
cacaggggctgggtttgacaccagt

SEQ ID NO: 4029233 - DNA, 25 bp, Homo sapien
tgacaccagtgggagccggggccct

SEQ ID NO: 4029234 - DNA, 25 bp, Homo sapien
cgaatagggaatccaataaattagg

SEQ ID NO: 4029235 - DNA, 25 bp, Homo sapien
ctacgaatagggaatccaataaatt

SEQ ID NO: 4029236 - DNA, 25 bp, Homo sapien
tacgaatagggaatccaataaatta

SEQ ID NO: 4029237 - DNA, 25 bp, Homo sapien
acgaatagggaatccaataaattag

SEQ ID NO: 4029238 - DNA, 25 bp, Homo sapien
ggccaccagggccttgtgggctagg

SEQ ID NO: 4029239 - DNA, 25 bp, Homo sapien
gccaccagggccttgtgggctaggt

SEQ ID NO: 4029240 - DNA, 25 bp, Homo sapien
caccagggccttgtgggctaggtgc

SEQ ID NO: 4029241 - DNA, 25 bp, Homo sapien
ccagggccttgtgggctaggtgccg

SEQ ID NO: 4029242 - DNA, 25 bp, Homo sapien
gcgggaagccgagcccagcttctca

SEQ ID NO: 4029243 - DNA, 25 bp, Homo sapien
ctgtcaggctcaggcgggaagccga

SEQ ID NO: 4029244 - DNA, 25 bp, Homo sapien
ctgcatcttgggaatgcccaccagc

SEQ ID NO: 4029245 - DNA, 25 bp, Homo sapien
tctcctctgtcaggctcaggcggga

SEQ ID NO: 4029246 - DNA, 25 bp, Homo sapien
ttgccttccacgttgattctcatgg

SEQ ID NO: 4029247 - DNA, 25 bp, Homo sapien
tcttgccttccacgttgattctcat

SEQ ID NO: 4029248 - DNA, 25 bp, Homo sapien
gccttccacgttgattctcatggcg

SEQ ID NO: 4029249 - DNA, 25 bp, Homo sapien
ttccacgttgattctcatggcggca

SEQ ID NO: 4029250 - DNA, 25 bp, Homo sapien
attcatccaggagggtgtacttggg

SEQ ID NO: 4029251 - DNA, 25 bp, Homo sapien
tgcattcatccaggagggtgtactt

SEQ ID NO: 4029252 - DNA, 25 bp, Homo sapien
ggtgcattcatccaggagggtgtac

SEQ ID NO: 4029253 - DNA, 25 bp, Homo sapien
ctggtgcattcatccaggagggtgt

SEQ ID NO: 4029254 - DNA, 25 bp, Homo sapien
ccggcgggacgtccttccagtcaca

SEQ ID NO: 4029255 - DNA, 25 bp, Homo sapien
ggccatgccgattctctgcttctcg

SEQ ID NO: 4029256 - DNA, 25 bp, Homo sapien
tctgcttctcgccacccggcgggac

SEQ ID NO: 4029257 - DNA, 25 bp, Homo sapien
tgtggtagaacatgcgggccatgcc

SEQ ID NO: 4029258 - DNA, 25 bp, Homo sapien
gtcctccctggtaggcgggcctcag

SEQ ID NO: 4029259 - DNA, 25 bp, Homo sapien
ggtaggcgggcctcagaggtagcac

SEQ ID NO: 4029260 - DNA, 25 bp, Homo sapien
tcctccctggtaggcgggcctcaga

SEQ ID NO: 4029261 - DNA, 25 bp, Homo sapien
gccctgcccctgtggcacctggcac

SEQ ID NO: 4029262 - DNA, 25 bp, Homo sapien
tgccctgcccctgtggcacctggca

SEQ ID NO: 4029263 - DNA, 25 bp, Homo sapien
cctctgccctgcccctgtggcacct

SEQ ID NO: 4029264 - DNA, 25 bp, Homo sapien
tctgccctgcccctgtggcacctgg

SEQ ID NO: 4029265 - DNA, 25 bp, Homo sapien
tagactcctggatgttgagataatc

SEQ ID NO: 4029266 - DNA, 25 bp, Homo sapien
cctggatgttgagataatcttcact

SEQ ID NO: 4029267 - DNA, 25 bp, Homo sapien
tggatgttgagataatcttcactgc

SEQ ID NO: 4029268 - DNA, 25 bp, Homo sapien
gactcctggatgttgagataatctt

SEQ ID NO: 4029269 - DNA, 25 bp, Homo sapien
tgagtagcccttccttcgcatgtcc

SEQ ID NO: 4029270 - DNA, 25 bp, Homo sapien
tcctccactgagtccgggtaggtca

SEQ ID NO: 4029271 - DNA, 25 bp, Homo sapien
atgtggtgcaggtgcatgatgtcca

SEQ ID NO: 4029272 - DNA, 25 bp, Homo sapien
gtaggtcacctggtcacgcagggaa

SEQ ID NO: 4029273 - DNA, 25 bp, Homo sapien
ggagaatctgttatgggacatttgg

SEQ ID NO: 4029274 - DNA, 25 bp, Homo sapien
gttaatccttgcttttgattcagct

SEQ ID NO: 4029275 - DNA, 25 bp, Homo sapien
ttaatccttgcttttgattcagctg

SEQ ID NO: 4029276 - DNA, 25 bp, Homo sapien
tctggacatgcacaattgttctctt

SEQ ID NO: 4029277 - DNA, 25 bp, Homo sapien
tgcactggcgtctctggacatgcac

SEQ ID NO: 4029278 - DNA, 25 bp, Homo sapien
cactggcgtctctggacatgcacaa

SEQ ID NO: 4029279 - DNA, 25 bp, Homo sapien
gcgtctctggacatgcacaattgtt

SEQ ID NO: 4029280 - DNA, 25 bp, Homo sapien
cagtgatgtacatttctcaatcagc

SEQ ID NO: 4029281 - DNA, 25 bp, Homo sapien
tcagtgatgtacatttctcaatcag

SEQ ID NO: 4029282 - DNA, 25 bp, Homo sapien
gtgatgtacatttctcaatcagcaa

SEQ ID NO: 4029283 - DNA, 25 bp, Homo sapien
gatgtacatttctcaatcagcaacc

SEQ ID NO: 4029284 - DNA, 25 bp, Homo sapien
cacacatgaaggttgcccgctggtt

SEQ ID NO: 4029285 - DNA, 25 bp, Homo sapien
acacacatgaaggttgcccgctggt

SEQ ID NO: 4029286 - DNA, 25 bp, Homo sapien
cacatgaaggttgcccgctggttcc

SEQ ID NO: 4029287 - DNA, 25 bp, Homo sapien
acacacacatgaaggttgcccgctg

SEQ ID NO: 4029288 - DNA, 25 bp, Homo sapien
ctctgctgcctggtcacattctgta

SEQ ID NO: 4029289 - DNA, 25 bp, Homo sapien
tctgctgcctggtcacattctgtac

SEQ ID NO: 4029290 - DNA, 25 bp, Homo sapien
gggcactgaacaggtacatgattcc

SEQ ID NO: 4029291 - DNA, 25 bp, Homo sapien
ttcatttcacttcatttcatttcat

SEQ ID NO: 4029292 - DNA, 25 bp, Homo sapien
tcatttcacttcatttcatttcatc

SEQ ID NO: 4029293 - DNA, 25 bp, Homo sapien
tcatcatttcatttcatcatttcat

SEQ ID NO: 4029294 - DNA, 25 bp, Homo sapien
tttcatcatttcatttcatcatttc

SEQ ID NO: 4029295 - DNA, 25 bp, Homo sapien
catcatttcatttcatcatttcatc

SEQ ID NO: 4029296 - DNA, 25 bp, Homo sapien
catttcatcatttcatttcatcatt

SEQ ID NO: 4029297 - DNA, 25 bp, Homo sapien
tcctgagagcacgtctctacatcta

SEQ ID NO: 4029298 - DNA, 25 bp, Homo sapien
tgagagcacgtctctacatctatac

SEQ ID NO: 4029299 - DNA, 25 bp, Homo sapien
gagcacgtctctacatctatacctg

SEQ ID NO: 4029300 - DNA, 25 bp, Homo sapien
gagagcacgtctctacatctatacc

SEQ ID NO: 4029301 - DNA, 25 bp, Homo sapien
acagcgcacttgttgcgcaaccggc

SEQ ID NO: 4029302 - DNA, 25 bp, Homo sapien
acacagcgcacttgttgcgcaaccg

SEQ ID NO: 4029303 - DNA, 25 bp, Homo sapien
cacagcgcacttgttgcgcaaccgg

SEQ ID NO: 4029304 - DNA, 25 bp, Homo sapien
gagctgcccacaagcttctggagct

SEQ ID NO: 4029305 - DNA, 25 bp, Homo sapien
gctgcccacaagcttctggagctgc

SEQ ID NO: 4029306 - DNA, 25 bp, Homo sapien
gccaatggagatgcggataagcttc

SEQ ID NO: 4029307 - DNA, 25 bp, Homo sapien
tggagctgcccacaagcttctggag

SEQ ID NO: 4029308 - DNA, 25 bp, Homo sapien
cgtctggctggctgcggcccctgcg

SEQ ID NO: 4029309 - DNA, 25 bp, Homo sapien
tgcagcgtctggctggctgcggccc

SEQ ID NO: 4029310 - DNA, 25 bp, Homo sapien
gtctggctggctgcggcccctgcgc

SEQ ID NO: 4029311 - DNA, 25 bp, Homo sapien
tgctgcagcgtctggctggctgcgg

SEQ ID NO: 4029312 - DNA, 25 bp, Homo sapien
ctcccctggccgctacgcgcagcgc

SEQ ID NO: 4029313 - DNA, 25 bp, Homo sapien
cccctggccgctacgcgcagcgccg

SEQ ID NO: 4029314 - DNA, 25 bp, Homo sapien
ttctctcccctggccgctacgcgca

SEQ ID NO: 4029315 - DNA, 25 bp, Homo sapien
tctcccctggccgctacgcgcagcg

SEQ ID NO: 4029316 - DNA, 25 bp, Homo sapien
ggtgattggccaaacatatgtcaca

SEQ ID NO: 4029317 - DNA, 25 bp, Homo sapien
cacaacattgcccaatacaggcagg

SEQ ID NO: 4029318 - DNA, 25 bp, Homo sapien
caatttgagttataggcaagagagt

SEQ ID NO: 4029319 - DNA, 25 bp, Homo sapien
ggtgcttggcccagtggtatgtcac

SEQ ID NO: 4029320 - DNA, 25 bp, Homo sapien
agatgagaagacctgaactctggga

SEQ ID NO: 4029321 - DNA, 25 bp, Homo sapien
tgagaagacctgaactctgggacag

SEQ ID NO: 4029322 - DNA, 25 bp, Homo sapien
caagagatgagaagacctgaactct

SEQ ID NO: 4029323 - DNA, 25 bp, Homo sapien
ctgggcagacaagagatgagaagac

SEQ ID NO: 4029324 - DNA, 25 bp, Homo sapien
cttaagctgtgaaaatgcaaacact

SEQ ID NO: 4029325 - DNA, 25 bp, Homo sapien
aggttttcagatatgcccaggtacc

SEQ ID NO: 4029326 - DNA, 25 bp, Homo sapien
gttttcagatatgcccaggtacccc

SEQ ID NO: 4029327 - DNA, 25 bp, Homo sapien
tccttttcttaagctgtgaaaatgc

SEQ ID NO: 4029328 - DNA, 25 bp, Homo sapien
cagtcttgtatacagtctccagggc

SEQ ID NO: 4029329 - DNA, 25 bp, Homo sapien
gagacccatggaattattgagcctg

SEQ ID NO: 4029330 - DNA, 25 bp, Homo sapien
gcagcaggcaggactttcaattgac

SEQ ID NO: 4029331 - DNA, 25 bp, Homo sapien
ctattataaacacgctcatgagggc

SEQ ID NO: 4029332 - DNA, 25 bp, Homo sapien
tacactggtgggaaagtctccgtga

SEQ ID NO: 4029333 - DNA, 25 bp, Homo sapien
gacctagatatggaccacgcagcga

SEQ ID NO: 4029334 - DNA, 25 bp, Homo sapien
ccgtagctgtttccttagtggatgc

SEQ ID NO: 4029335 - DNA, 25 bp, Homo sapien
gtccacactaagaccctgaggcctg

SEQ ID NO: 4029336 - DNA, 25 bp, Homo sapien
caggaaatcgagacactcgtgaggg

SEQ ID NO: 4029337 - DNA, 25 bp, Homo sapien
cacggcaacgctgctgtggaggcca

SEQ ID NO: 4029338 - DNA, 25 bp, Homo sapien
tgttggctgacaggaaatcgagaca

SEQ ID NO: 4029339 - DNA, 25 bp, Homo sapien
gaggccatgaaaggcgaacggccct

SEQ ID NO: 4029340 - DNA, 25 bp, Homo sapien
cagccctagggacgggccgcactgc

SEQ ID NO: 4029341 - DNA, 25 bp, Homo sapien
cccagccctagggacgggccgcact

SEQ ID NO: 4029342 - DNA, 25 bp, Homo sapien
ccagccctagggacgggccgcactg

SEQ ID NO: 4029343 - DNA, 25 bp, Homo sapien
aagggagtgacaagaggaggagcga

SEQ ID NO: 4029344 - DNA, 25 bp, Homo sapien
agggagtgacaagaggaggagcgaa

SEQ ID NO: 4029345 - DNA, 25 bp, Homo sapien
aaagggagtgacaagaggaggagcg

SEQ ID NO: 4029346 - DNA, 25 bp, Homo sapien
tctccgcagggcgaaactgctgggc

SEQ ID NO: 4029347 - DNA, 25 bp, Homo sapien
gacagggagcggaaccgtcttcaac

SEQ ID NO: 4029348 - DNA, 25 bp, Homo sapien
caattaccaggtgaaactagccgcc

SEQ ID NO: 4029349 - DNA, 25 bp, Homo sapien
taaaagcctgcagctcgaggagaca

SEQ ID NO: 4029350 - DNA, 25 bp, Homo sapien
tgtaggcggcttcgtttaccaagct

SEQ ID NO: 4029351 - DNA, 25 bp, Homo sapien
ggctacaggaggacaatcccagatt

SEQ ID NO: 4029352 - DNA, 25 bp, Homo sapien
taaatcgagagtgtctggtcctcac

SEQ ID NO: 4029353 - DNA, 25 bp, Homo sapien
tttcatgccaaaccctcgccaaggg

SEQ ID NO: 4029354 - DNA, 25 bp, Homo sapien
aaagcacaagctgagccgccttgga

SEQ ID NO: 4029355 - DNA, 25 bp, Homo sapien
gctgctcagctcgattttctttccc

SEQ ID NO: 4029356 - DNA, 25 bp, Homo sapien
gctctctccaagcaaagcacaagct

SEQ ID NO: 4029357 - DNA, 25 bp, Homo sapien
cttggaaagacaaccacggcctggc

SEQ ID NO: 4029358 - DNA, 25 bp, Homo sapien
gaaaatgtcacgttcaccagtaccc

SEQ ID NO: 4029359 - DNA, 25 bp, Homo sapien
atgtcacgttcaccagtaccctttt

SEQ ID NO: 4029360 - DNA, 25 bp, Homo sapien
aaatgtcacgttcaccagtaccctt

SEQ ID NO: 4029361 - DNA, 25 bp, Homo sapien
ctgggaatgcgcaagttcagagctt

SEQ ID NO: 4029362 - DNA, 25 bp, Homo sapien
catttattaatagaagctatgtctc

SEQ ID NO: 4029363 - DNA, 25 bp, Homo sapien
taaacccagacacttatcacaggaa

SEQ ID NO: 4029364 - DNA, 25 bp, Homo sapien
tatgtctcagatagctgaagatggt

SEQ ID NO: 4029365 - DNA, 25 bp, Homo sapien
cctaaacccagacacttatcacagg

SEQ ID NO: 4029366 - DNA, 25 bp, Homo sapien
tgattggataatacggccccaggcc

SEQ ID NO: 4029367 - DNA, 25 bp, Homo sapien
ggtaaaatgttccaagccgcagcct

SEQ ID NO: 4029368 - DNA, 25 bp, Homo sapien
gaagatgtgagccaactcgtagcca

SEQ ID NO: 4029369 - DNA, 25 bp, Homo sapien
gaagcccggccttcactgtgggata

SEQ ID NO: 4029370 - DNA, 25 bp, Homo sapien
agactgcgttaggaagaggctcaag

SEQ ID NO: 4029371 - DNA, 25 bp, Homo sapien
tcaagactgcgttaggaagaggctc

SEQ ID NO: 4029372 - DNA, 25 bp, Homo sapien
gctcaagggggcagacagtgccacc

SEQ ID NO: 4029373 - DNA, 25 bp, Homo sapien
ctcaagggggcagacagtgccacct

SEQ ID NO: 4029374 - DNA, 25 bp, Homo sapien
tccttcttggagtgcggaggtcctg

SEQ ID NO: 4029375 - DNA, 25 bp, Homo sapien
gtctcctcgtttgctcagccggcag

SEQ ID NO: 4029376 - DNA, 25 bp, Homo sapien
tgaggtggtcctgcgtctcgaggag

SEQ ID NO: 4029377 - DNA, 25 bp, Homo sapien
cttcaggaacgacagacagcttttc

SEQ ID NO: 4029378 - DNA, 25 bp, Homo sapien
catcctgtgttcaacaaacagaagt

SEQ ID NO: 4029379 - DNA, 25 bp, Homo sapien
tcattcatacatcctgtgttcaaca

SEQ ID NO: 4029380 - DNA, 25 bp, Homo sapien
ctagccgtcattcatacatcctgtg

SEQ ID NO: 4029381 - DNA, 25 bp, Homo sapien
acagaagtggcagcgggagctgctg

SEQ ID NO: 4029382 - DNA, 25 bp, Homo sapien
gcctgccacgcaacatgctcaggtg

SEQ ID NO: 4029383 - DNA, 25 bp, Homo sapien
ttgtgcaggacacatcgccgccctt

SEQ ID NO: 4029384 - DNA, 25 bp, Homo sapien
ctgctgcgaggcgagttggtctgca

SEQ ID NO: 4029385 - DNA, 25 bp, Homo sapien
tgctcaggtgccagatctcgggcat

SEQ ID NO: 4029386 - DNA, 25 bp, Homo sapien
ttactgcatctggttggtcagcagt

SEQ ID NO: 4029387 - DNA, 25 bp, Homo sapien
tactgcatctggttggtcagcagtc

SEQ ID NO: 4029388 - DNA, 25 bp, Homo sapien
ttcctgtccatccactggggcaaag

SEQ ID NO: 4029389 - DNA, 25 bp, Homo sapien
tcctgtccatccactggggcaaagt

SEQ ID NO: 4029390 - DNA, 25 bp, Homo sapien
cctgtccatccactggggcaaagtc

SEQ ID NO: 4029391 - DNA, 25 bp, Homo sapien
tgtccatccactggggcaaagtcca

SEQ ID NO: 4029392 - DNA, 25 bp, Homo sapien
ttccccacagtgacctccttgccat

SEQ ID NO: 4029393 - DNA, 25 bp, Homo sapien
gcccacctttcggtggaggatgctg

SEQ ID NO: 4029394 - DNA, 25 bp, Homo sapien
ttgccattcacatgcagcgacaggc

SEQ ID NO: 4029395 - DNA, 25 bp, Homo sapien
acaggcccacctttcggtggaggat

SEQ ID NO: 4029396 - DNA, 25 bp, Homo sapien
gaccctgtgccccagtctccccatc

SEQ ID NO: 4029397 - DNA, 25 bp, Homo sapien
tgctcctggaaccccaggaccctgt

SEQ ID NO: 4029398 - DNA, 25 bp, Homo sapien
ctcctggaaccccaggaccctgtgc

SEQ ID NO: 4029399 - DNA, 25 bp, Homo sapien
gtgccccagtctccccatctgcagc

SEQ ID NO: 4029400 - DNA, 25 bp, Homo sapien
tgtgaaataggcaatatttgtccct

SEQ ID NO: 4029401 - DNA, 25 bp, Homo sapien
gccattgtgcaaactctcacttaat

SEQ ID NO: 4029402 - DNA, 25 bp, Homo sapien
tctcacttaatttctggcagtttcc

SEQ ID NO: 4029403 - DNA, 25 bp, Homo sapien
caaactctcacttaatttctggcag

SEQ ID NO: 4029404 - DNA, 25 bp, Homo sapien
ctgccttattgctgaggtccggccg

SEQ ID NO: 4029405 - DNA, 25 bp, Homo sapien
gggctgccttattgctgaggtccgg

SEQ ID NO: 4029406 - DNA, 25 bp, Homo sapien
gaggtccgggggctgccttattgct

SEQ ID NO: 4029407 - DNA, 25 bp, Homo sapien
atgcagtccctgggggggccggcgc

SEQ ID NO: 4029408 - DNA, 25 bp, Homo sapien
tgggagatgaagcgggcaggcgctc

SEQ ID NO: 4029409 - DNA, 25 bp, Homo sapien
gatgaagcgggcaggcgctccaggt

SEQ ID NO: 4029410 - DNA, 25 bp, Homo sapien
cagctcctgggagatgaagcgggca

SEQ ID NO: 4029411 - DNA, 25 bp, Homo sapien
taggcgctctggctgcgcagctcct

SEQ ID NO: 4029412 - DNA, 25 bp, Homo sapien
gctggatgtctttgtgcccggcgcc

SEQ ID NO: 4029413 - DNA, 25 bp, Homo sapien
ggatgtctttgtgcccggcgccctc

SEQ ID NO: 4029414 - DNA, 25 bp, Homo sapien
tagagctggatgtctttgtgcccgg

SEQ ID NO: 4029415 - DNA, 25 bp, Homo sapien
tgtagagctggatgtctttgtgccc

SEQ ID NO: 4029416 - DNA, 25 bp, Homo sapien
agcggctccacggcgttggggcagc

SEQ ID NO: 4029417 - DNA, 25 bp, Homo sapien
gcggctccacggcgttggggcagcg

SEQ ID NO: 4029418 - DNA, 25 bp, Homo sapien
acctcgtctttcgtgtcctggatga

SEQ ID NO: 4029419 - DNA, 25 bp, Homo sapien
gcgagaagtccatcacctcgtcttt

SEQ ID NO: 4029420 - DNA, 25 bp, Homo sapien
catcacctcgtctttcgtgtcctgg

SEQ ID NO: 4029421 - DNA, 25 bp, Homo sapien
gaagtccatcacctcgtctttcgtg

SEQ ID NO: 4029422 - DNA, 25 bp, Homo sapien
tggggaaggcatcgaagcagtaggt

SEQ ID NO: 4029423 - DNA, 25 bp, Homo sapien
ttggggaaggcatcgaagcagtagg

SEQ ID NO: 4029424 - DNA, 25 bp, Homo sapien
ctcaggtccaaggtgagcggcgagt

SEQ ID NO: 4029425 - DNA, 25 bp, Homo sapien
cgtggcggactcgtagcgcgaggcc

SEQ ID NO: 4029426 - DNA, 25 bp, Homo sapien
gactcgtagcgcgaggccaggtcca

SEQ ID NO: 4029427 - DNA, 25 bp, Homo sapien
ccacggtgggcaccgtgccgatgct

SEQ ID NO: 4029428 - DNA, 25 bp, Homo sapien
tccacggtgggcaccgtgccgatgc

SEQ ID NO: 4029429 - DNA, 25 bp, Homo sapien
acaggatgatgccgtccgggctgat

SEQ ID NO: 4029430 - DNA, 25 bp, Homo sapien
gtacaggatgatgccgtccgggctg

SEQ ID NO: 4029431 - DNA, 25 bp, Homo sapien
ctgccggtacaggatgatgccgtcc

SEQ ID NO: 4029432 - DNA, 25 bp, Homo sapien
gatgccgtccgggctgatgcggtac

SEQ ID NO: 4029433 - DNA, 25 bp, Homo sapien
gtcgatgccgagaccccagaactct

SEQ ID NO: 4029434 - DNA, 25 bp, Homo sapien
caccctgtcgatgccgagaccccag

SEQ ID NO: 4029435 - DNA, 25 bp, Homo sapien
ctgccaccctgtcgatgccgagacc

SEQ ID NO: 4029436 - DNA, 25 bp, Homo sapien
tccaggctctgatgccaggcagatg

SEQ ID NO: 4029437 - DNA, 25 bp, Homo sapien
tagccagagtagtggtaggagaaaa

SEQ ID NO: 4029438 - DNA, 25 bp, Homo sapien
gcgttgatgtcggcgtagaggttcg

SEQ ID NO: 4029439 - DNA, 25 bp, Homo sapien
tgatgtcggcgtagaggttcgtctc

SEQ ID NO: 4029440 - DNA, 25 bp, Homo sapien
gtagccagagtagtggtaggagaaa

SEQ ID NO: 4029441 - DNA, 25 bp, Homo sapien
tcaatactccataatcaccttggct

SEQ ID NO: 4029442 - DNA, 25 bp, Homo sapien
gacagtgaagtccagaataggttgg

SEQ ID NO: 4029443 - DNA, 25 bp, Homo sapien
tgattatgactggatggcatgtact

SEQ ID NO: 4029444 - DNA, 25 bp, Homo sapien
gaaaatgcactcacagattatgcgt

SEQ ID NO: 4029445 - DNA, 25 bp, Homo sapien
ttttcggatgctgtgatttttgtaa

SEQ ID NO: 4029446 - DNA, 25 bp, Homo sapien
tttcggatgctgtgatttttgtaat

SEQ ID NO: 4029447 - DNA, 25 bp, Homo sapien
aatattagtggaaagcggaacgacg

SEQ ID NO: 4029448 - DNA, 25 bp, Homo sapien
gacggacaagacacgcatggaatga

SEQ ID NO: 4029449 - DNA, 25 bp, Homo sapien
cacgcttgtcgtgtccgggtgtgca

SEQ ID NO: 4029450 - DNA, 25 bp, Homo sapien
caccaagactttatgcggactgctg

SEQ ID NO: 4029451 - DNA, 25 bp, Homo sapien
agcaacaccggagctggtgcatgct

SEQ ID NO: 4029452 - DNA, 25 bp, Homo sapien
tctattttcccttccgcagcttctc

SEQ ID NO: 4029453 - DNA, 25 bp, Homo sapien
tgtctttagggacttgttaccaagc

SEQ ID NO: 4029454 - DNA, 25 bp, Homo sapien
tggtgtacagggagcaacaccggag

SEQ ID NO: 4029455 - DNA, 25 bp, Homo sapien
tcaaataattaaagcttcaagggaa

SEQ ID NO: 4029456 - DNA, 25 bp, Homo sapien
ataattaaagcttcaagggaagaat

SEQ ID NO: 4029457 - DNA, 25 bp, Homo sapien
caaataattaaagcttcaagggaag

SEQ ID NO: 4029458 - DNA, 25 bp, Homo sapien
tgagatactgactcagtttataacc

SEQ ID NO: 4029459 - DNA, 25 bp, Homo sapien
tcttgagatactgactcagtttata

SEQ ID NO: 4029460 - DNA, 25 bp, Homo sapien
tcaaatcttgagatactgactcagt

SEQ ID NO: 4029461 - DNA, 25 bp, Homo sapien
gatactgactcagtttataaccgca

SEQ ID NO: 4029462 - DNA, 25 bp, Homo sapien
catctcatcatttcatctcatttta

SEQ ID NO: 4029463 - DNA, 25 bp, Homo sapien
tcatctcatcatttcatctcatttt

SEQ ID NO: 4029464 - DNA, 25 bp, Homo sapien
catttcatcttttcatctcatttca

SEQ ID NO: 4029465 - DNA, 25 bp, Homo sapien
atcatttcatcttttcatctcattt

SEQ ID NO: 4029466 - DNA, 25 bp, Homo sapien
ttcatcttttcatctcatttcatca

SEQ ID NO: 4029467 - DNA, 25 bp, Homo sapien
atttcatctcatcatttcatctttt

SEQ ID NO: 4029468 - DNA, 25 bp, Homo sapien
ttcatcatttcatctcatcatttca

SEQ ID NO: 4029469 - DNA, 25 bp, Homo sapien
tttcatcatttcatctcatcatttc

SEQ ID NO: 4029470 - DNA, 25 bp, Homo sapien
catcatttcatctcaacatttcatt

SEQ ID NO: 4029471 - DNA, 25 bp, Homo sapien
ttcatttcatcatttcatctcaaca

SEQ ID NO: 4029472 - DNA, 25 bp, Homo sapien
ttcatcatttcatctcaacatttca

SEQ ID NO: 4029473 - DNA, 25 bp, Homo sapien
catttcatcatttcatctcaacatt

SEQ ID NO: 4029474 - DNA, 25 bp, Homo sapien
catctttccatctcatcatttcatt

SEQ ID NO: 4029475 - DNA, 25 bp, Homo sapien
catttcatcttttcatctcatttca

SEQ ID NO: 4029476 - DNA, 25 bp, Homo sapien
tcatctcatttcatctttccatctc

SEQ ID NO: 4029477 - DNA, 25 bp, Homo sapien
atttcatcttttcatctcatttcat

SEQ ID NO: 4029478 - DNA, 25 bp, Homo sapien
catcatttcatcatctcatgatttc

SEQ ID NO: 4029479 - DNA, 25 bp, Homo sapien
catttcatcatctcatgatttcatt

SEQ ID NO: 4029480 - DNA, 25 bp, Homo sapien
tttcatcatctcatgatttcatttc

SEQ ID NO: 4029481 - DNA, 25 bp, Homo sapien
tcatttcatcatctcatgatttcat

SEQ ID NO: 4029482 - DNA, 25 bp, Homo sapien
gccaggagtgaactggggccccgaa

SEQ ID NO: 4029483 - DNA, 25 bp, Homo sapien
cgaaggaggtgtccgggctgctcct

SEQ ID NO: 4029484 - DNA, 25 bp, Homo sapien
tcaagggtgcaactcggccaggagt

SEQ ID NO: 4029485 - DNA, 25 bp, Homo sapien
gccccgaaggaggtgtccgggctgc

SEQ ID NO: 4029486 - DNA, 25 bp, Homo sapien
cccaccaccaccatccttcttctcc

SEQ ID NO: 4029487 - DNA, 25 bp, Homo sapien
acaggctgccaatgaagatgacgat

SEQ ID NO: 4029488 - DNA, 25 bp, Homo sapien
ccctgtgccaccctccgtggccgcc

SEQ ID NO: 4029489 - DNA, 25 bp, Homo sapien
gtgccaccctccgtggccgccgcat

SEQ ID NO: 4029490 - DNA, 25 bp, Homo sapien
gccacaggggcctaggcaaggagcc

SEQ ID NO: 4029491 - DNA, 25 bp, Homo sapien
aggccacaggggcctaggcaaggag

SEQ ID NO: 4029492 - DNA, 25 bp, Homo sapien
ggccacaggggcctaggcaaggagc

SEQ ID NO: 4029493 - DNA, 25 bp, Homo sapien
agcgtacaaaaagccgaggcgcggt

SEQ ID NO: 4029494 - DNA, 25 bp, Homo sapien
cgcagcgtacaaaaagccgaggcgc

SEQ ID NO: 4029495 - DNA, 25 bp, Homo sapien
agccgcagcgtacaaaaagccgagg

SEQ ID NO: 4029496 - DNA, 25 bp, Homo sapien
aagccgcagcgtacaaaaagccgag

SEQ ID NO: 4029497 - DNA, 25 bp, Homo sapien
gtgaagttcaagttcactcttgcac

SEQ ID NO: 4029498 - DNA, 25 bp, Homo sapien
ctgagtgaagttcaagttcactctt

SEQ ID NO: 4029499 - DNA, 25 bp, Homo sapien
gaagttcaagttcactcttgcacag

SEQ ID NO: 4029500 - DNA, 25 bp, Homo sapien
gagtgaagttcaagttcactcttgc

SEQ ID NO: 4029501 - DNA, 25 bp, Homo sapien
ttttcaaatatcgcatttttttcac

SEQ ID NO: 4029502 - DNA, 25 bp, Homo sapien
tcaaatatcgcatttttttcacaga

SEQ ID NO: 4029503 - DNA, 25 bp, Homo sapien
caaatatcgcatttttttcacagac

SEQ ID NO: 4029504 - DNA, 25 bp, Homo sapien
ttcaaatatcgcatttttttcacag

SEQ ID NO: 4029505 - DNA, 25 bp, Homo sapien
tcatcatttcatcccatttcttcat

SEQ ID NO: 4029506 - DNA, 25 bp, Homo sapien
catttcatcccatttcttcatttca

SEQ ID NO: 4029507 - DNA, 25 bp, Homo sapien
ttcatcccatttcttcatttcatca

SEQ ID NO: 4029508 - DNA, 25 bp, Homo sapien
atcatttcatcccatttcttcattt

SEQ ID NO: 4029509 - DNA, 25 bp, Homo sapien
tccatcgtccgtatttcctgctggg

SEQ ID NO: 4029510 - DNA, 25 bp, Homo sapien
tctgatgactctcctgttaccaaaa

SEQ ID NO: 4029511 - DNA, 25 bp, Homo sapien
gtttggtgtcattgtggtgcatgag

SEQ ID NO: 4029512 - DNA, 25 bp, Homo sapien
gtgtcattgtggtgcatgaggtggc

SEQ ID NO: 4029513 - DNA, 25 bp, Homo sapien
tggtgtcattgtggtgcatgaggtg

SEQ ID NO: 4029514 - DNA, 25 bp, Homo sapien
tttggtgtcattgtggtgcatgagg

SEQ ID NO: 4029515 - DNA, 25 bp, Homo sapien
tataaagcagttggcctgagctcag

SEQ ID NO: 4029516 - DNA, 25 bp, Homo sapien
gcagagacctggctgacagtgtata

SEQ ID NO: 4029517 - DNA, 25 bp, Homo sapien
ttagcagagggtgattgtcatccag

SEQ ID NO: 4029518 - DNA, 25 bp, Homo sapien
agagggtgattgtcatccaggcaga

SEQ ID NO: 4029519 - DNA, 25 bp, Homo sapien
ggttggccgtattctaagccaggtc

SEQ ID NO: 4029520 - DNA, 25 bp, Homo sapien
tcttggttggccgtattctaagcca

SEQ ID NO: 4029521 - DNA, 25 bp, Homo sapien
gccgtattctaagccaggtccctct

SEQ ID NO: 4029522 - DNA, 25 bp, Homo sapien
ccaggctcttggttggccgtattct

SEQ ID NO: 4029523 - DNA, 25 bp, Homo sapien
ttggaaaatgacaggtttttattgc

SEQ ID NO: 4029524 - DNA, 25 bp, Homo sapien
gtttttattgctatgtttgcagtgg

SEQ ID NO: 4029525 - DNA, 25 bp, Homo sapien
tttattgctatgtttgcagtggctt

SEQ ID NO: 4029526 - DNA, 25 bp, Homo sapien
tggaaaatgacaggtttttattgct

SEQ ID NO: 4029527 - DNA, 25 bp, Homo sapien
agccgtctcgggactggacgtgaca

SEQ ID NO: 4029528 - DNA, 25 bp, Homo sapien
ccgtctcgggactggacgtgacaga

SEQ ID NO: 4029529 - DNA, 25 bp, Homo sapien
gtctcgggactggacgtgacagaca

SEQ ID NO: 4029530 - DNA, 25 bp, Homo sapien
cagccgtctcgggactggacgtgac

SEQ ID NO: 4029531 - DNA, 25 bp, Homo sapien
tgcaggaagtgcatccgccttgagc

SEQ ID NO: 4029532 - DNA, 25 bp, Homo sapien
ggtgcaggaagtgcatccgccttga

SEQ ID NO: 4029533 - DNA, 25 bp, Homo sapien
aggtgcaggaagtgcatccgccttg

SEQ ID NO: 4029534 - DNA, 25 bp, Homo sapien
caggaagtgcatccgccttgagcct

SEQ ID NO: 4029535 - DNA, 25 bp, Homo sapien
ccgaggcccccaccatgcacttttc

SEQ ID NO: 4029536 - DNA, 25 bp, Homo sapien
aacagctcgaagcttttgttttgcc

SEQ ID NO: 4029537 - DNA, 25 bp, Homo sapien
gttagatctataaattcacactcct

SEQ ID NO: 4029538 - DNA, 25 bp, Homo sapien
caacagctcgaagcttttgttttgc

SEQ ID NO: 4029539 - DNA, 25 bp, Homo sapien
tcacgcacgcgtgcactcgcaccca

SEQ ID NO: 4029540 - DNA, 25 bp, Homo sapien
atgtgcaaaatacaagcctcctttg

SEQ ID NO: 4029541 - DNA, 25 bp, Homo sapien
gcacgcgtgcactcgcacccaagct

SEQ ID NO: 4029542 - DNA, 25 bp, Homo sapien
gcagaggggtaaggtagggctcaca

SEQ ID NO: 4029543 - DNA, 25 bp, Homo sapien
gaaaaagttgttttagtgagcactc

SEQ ID NO: 4029544 - DNA, 25 bp, Homo sapien
ctggtgatgtgagctgagctgtccc

SEQ ID NO: 4029545 - DNA, 25 bp, Homo sapien
gatgtgagctgagctgtcccatgac

SEQ ID NO: 4029546 - DNA, 25 bp, Homo sapien
ggtgagctggtgatgtgagctgagc

SEQ ID NO: 4029547 - DNA, 25 bp, Homo sapien
gtgatgtgagctgagctgtcccatg

SEQ ID NO: 4029548 - DNA, 25 bp, Homo sapien
ccttgctgctctcggacactggggt

SEQ ID NO: 4029549 - DNA, 25 bp, Homo sapien
tgagctcggtactccaagtggtgga

SEQ ID NO: 4029550 - DNA, 25 bp, Homo sapien
cctgagctcggtactccaagtggtg

SEQ ID NO: 4029551 - DNA, 25 bp, Homo sapien
tgctgctctcggacactggggtcag

SEQ ID NO: 4029552 - DNA, 25 bp, Homo sapien
ctcagccatggtgcccttggccctg

SEQ ID NO: 4029553 - DNA, 25 bp, Homo sapien
acagcatggaggacagcacgaaggc

SEQ ID NO: 4029554 - DNA, 25 bp, Homo sapien
gcagtggcatgcacagcatggagga

SEQ ID NO: 4029555 - DNA, 25 bp, Homo sapien
gcacagcatggaggacagcacgaag

SEQ ID NO: 4029556 - DNA, 25 bp, Homo sapien
tagtacacaacgttgaagatgaaga

SEQ ID NO: 4029557 - DNA, 25 bp, Homo sapien
gtagtacacaacgttgaagatgaag

SEQ ID NO: 4029558 - DNA, 25 bp, Homo sapien
agtacacaacgttgaagatgaagat

SEQ ID NO: 4029559 - DNA, 25 bp, Homo sapien
cccgatcatacaggcaatgtcgtcc

SEQ ID NO: 4029560 - DNA, 25 bp, Homo sapien
tcggtacccgatcatacaggcaatg

SEQ ID NO: 4029561 - DNA, 25 bp, Homo sapien
agcaccatttcatccaggggcaagg

SEQ ID NO: 4029562 - DNA, 25 bp, Homo sapien
gggcaaggtcggtacccgatcatac

SEQ ID NO: 4029563 - DNA, 25 bp, Homo sapien
ccaccaccacgcactcccaaaaggc

SEQ ID NO: 4029564 - DNA, 25 bp, Homo sapien
cgcactcccaaaaggcctgccagag

SEQ ID NO: 4029565 - DNA, 25 bp, Homo sapien
cacgcactcccaaaaggcctgccag

SEQ ID NO: 4029566 - DNA, 25 bp, Homo sapien
ccaccacgcactcccaaaaggcctg

SEQ ID NO: 4029567 - DNA, 25 bp, Homo sapien
cagagcccagtcagggaggatggca

SEQ ID NO: 4029568 - DNA, 25 bp, Homo sapien
gccaccagaggtcacaggcagaccc

SEQ ID NO: 4029569 - DNA, 25 bp, Homo sapien
gggacagagcccagtcagggaggat

SEQ ID NO: 4029570 - DNA, 25 bp, Homo sapien
ggaggatggcagacggccaccagag

SEQ ID NO: 4029571 - DNA, 25 bp, Homo sapien
gcacaacagagggccacagagatct

SEQ ID NO: 4029572 - DNA, 25 bp, Homo sapien
cacaacagagggccacagagatctc

SEQ ID NO: 4029573 - DNA, 25 bp, Homo sapien
ggttgaggaggccggtgatgaagcc

SEQ ID NO: 4029574 - DNA, 25 bp, Homo sapien
tgaggaggccggtgatgaagccctc

SEQ ID NO: 4029575 - DNA, 25 bp, Homo sapien
gaggccggtgatgaagccctccaca

SEQ ID NO: 4029576 - DNA, 25 bp, Homo sapien
ggaggttgaggaggccggtgatgaa

SEQ ID NO: 4029577 - DNA, 25 bp, Homo sapien
cacccctttccttgcccgcagccct

SEQ ID NO: 4029578 - DNA, 25 bp, Homo sapien
ctccacccctttccttgcccgcagc

SEQ ID NO: 4029579 - DNA, 25 bp, Homo sapien
ctagctcaggccgagccccgcacca

SEQ ID NO: 4029580 - DNA, 25 bp, Homo sapien
gccgagccccgcaccaccctccacc

SEQ ID NO: 4029581 - DNA, 25 bp, Homo sapien
gagccccatgcaaatctggttgtcg

SEQ ID NO: 4029582 - DNA, 25 bp, Homo sapien
ccagagccccatgcaaatctggttg

SEQ ID NO: 4029583 - DNA, 25 bp, Homo sapien
cccatgcaaatctggttgtcgagac

SEQ ID NO: 4029584 - DNA, 25 bp, Homo sapien
gccccatgcaaatctggttgtcgag

SEQ ID NO: 4029585 - DNA, 25 bp, Homo sapien
gcatgaagaagaacagggcagccca

SEQ ID NO: 4029586 - DNA, 25 bp, Homo sapien
tctgaggtgctgtcaaccctgggtc

SEQ ID NO: 4029587 - DNA, 25 bp, Homo sapien
gaccttgcagccgatgtcgtgccct

SEQ ID NO: 4029588 - DNA, 25 bp, Homo sapien
ggctgggaggtcctgtctctgtcaa

SEQ ID NO: 4029589 - DNA, 25 bp, Homo sapien
ctctgtcaacattgaaaaatcccag

SEQ ID NO: 4029590 - DNA, 25 bp, Homo sapien
gagaagaccacgaagccagcaaaga

SEQ ID NO: 4029591 - DNA, 25 bp, Homo sapien
tgttgatgacagccaggatgatggc

SEQ ID NO: 4029592 - DNA, 25 bp, Homo sapien
tgatgacagccaggatgatggcgtc

SEQ ID NO: 4029593 - DNA, 25 bp, Homo sapien
ttgatgacagccaggatgatggcgt

SEQ ID NO: 4029594 - DNA, 25 bp, Homo sapien
ctgttgatgacagccaggatgatgg

SEQ ID NO: 4029595 - DNA, 25 bp, Homo sapien
ccaggccaatggcataagaaaagaa

SEQ ID NO: 4029596 - DNA, 25 bp, Homo sapien
ttgttgaagcggttgtagctgccca

SEQ ID NO: 4029597 - DNA, 25 bp, Homo sapien
aagaaaatctgggtccccacatcta

SEQ ID NO: 4029598 - DNA, 25 bp, Homo sapien
gggcccccaggccaatggcataaga

SEQ ID NO: 4029599 - DNA, 25 bp, Homo sapien
agtgcaggcatgaggggcctgcagg

SEQ ID NO: 4029600 - DNA, 25 bp, Homo sapien
gggctcccccacaacaccctgctgc

SEQ ID NO: 4029601 - DNA, 25 bp, Homo sapien
ctagaggagggctggagagtgcagg

SEQ ID NO: 4029602 - DNA, 25 bp, Homo sapien
gctggagagtgcaggcatgaggggc

SEQ ID NO: 4029603 - DNA, 25 bp, Homo sapien
caggaccacgtaggggaatgtagca

SEQ ID NO: 4029604 - DNA, 25 bp, Homo sapien
gaccagtcaggcttgagatagtaaa

SEQ ID NO: 4029605 - DNA, 25 bp, Homo sapien
agctttgaccagtcaggcttgagat

SEQ ID NO: 4029606 - DNA, 25 bp, Homo sapien
gcacgaccaggaccacgtaggggaa

SEQ ID NO: 4029607 - DNA, 25 bp, Homo sapien
aagcccactccgagcacctccggtc

SEQ ID NO: 4029608 - DNA, 25 bp, Homo sapien
gctgctcagcggggactgcggcacc

SEQ ID NO: 4029609 - DNA, 25 bp, Homo sapien
agcccactccgagcacctccggtcc

SEQ ID NO: 4029610 - DNA, 25 bp, Homo sapien
ggctgctcagcggggactgcggcac

SEQ ID NO: 4029611 - DNA, 25 bp, Homo sapien
gggcagtgcacgcatgggaggccca

SEQ ID NO: 4029612 - DNA, 25 bp, Homo sapien
cctgcatgcctctagtggtaccttt

SEQ ID NO: 4029613 - DNA, 25 bp, Homo sapien
cgttgctacgggtgtgcctggcaca

SEQ ID NO: 4029614 - DNA, 25 bp, Homo sapien
ggctagactctgtctggtcacctcc

SEQ ID NO: 4029615 - DNA, 25 bp, Homo sapien
agcaggccagcagacaaagggtcac

SEQ ID NO: 4029616 - DNA, 25 bp, Homo sapien
cacccagcaggccagcagacaaagg

SEQ ID NO: 4029617 - DNA, 25 bp, Homo sapien
ccagcaggccagcagacaaagggtc

SEQ ID NO: 4029618 - DNA, 25 bp, Homo sapien
gacacagaagtagaccagcacccag

SEQ ID NO: 4029619 - DNA, 25 bp, Homo sapien
cccagacagcctcaagactttgttc

SEQ ID NO: 4029620 - DNA, 25 bp, Homo sapien
cccagttgagggcccctggcacctc

SEQ ID NO: 4029621 - DNA, 25 bp, Homo sapien
gagggactgccaagaaacaccctgg

SEQ ID NO: 4029622 - DNA, 25 bp, Homo sapien
aaggacttgaccaggtaatagaagc

SEQ ID NO: 4029623 - DNA, 25 bp, Homo sapien
caggccagcaccatgatgtagtagg

SEQ ID NO: 4029624 - DNA, 25 bp, Homo sapien
taggtgttgcagtagaagacgatca

SEQ ID NO: 4029625 - DNA, 25 bp, Homo sapien
taaaggacttgaccaggtaatagaa

SEQ ID NO: 4029626 - DNA, 25 bp, Homo sapien
aggtagtgttggagacagttgcccc

SEQ ID NO: 4029627 - DNA, 25 bp, Homo sapien
ttgccttgtggagctgcctatgccc

SEQ ID NO: 4029628 - DNA, 25 bp, Homo sapien
taggacctacctagagagccaagtg

SEQ ID NO: 4029629 - DNA, 25 bp, Homo sapien
ccaaattcactgtgcggcctgaaca

SEQ ID NO: 4029630 - DNA, 25 bp, Homo sapien
tccgaccagggctatcaggatgcag

SEQ ID NO: 4029631 - DNA, 25 bp, Homo sapien
cagggctatcaggatgcagggaata

SEQ ID NO: 4029632 - DNA, 25 bp, Homo sapien
gctatcaggatgcagggaataagga

SEQ ID NO: 4029633 - DNA, 25 bp, Homo sapien
ttcctccgaccagggctatcaggat

SEQ ID NO: 4029634 - DNA, 25 bp, Homo sapien
caggcacatgactgcgagaggggtg

SEQ ID NO: 4029635 - DNA, 25 bp, Homo sapien
ccaccgagcagcagcggtggaccag

SEQ ID NO: 4029636 - DNA, 25 bp, Homo sapien
gtgcccaggggccaaccgctgcccg

SEQ ID NO: 4029637 - DNA, 25 bp, Homo sapien
ggggtggaggcggacggcccagcca

SEQ ID NO: 4029638 - DNA, 25 bp, Homo sapien
ccaggcccacggcgaagcccacaca

SEQ ID NO: 4029639 - DNA, 25 bp, Homo sapien
tccgccattcttgtagcacaggtag

SEQ ID NO: 4029640 - DNA, 25 bp, Homo sapien
gcccacggcgaagcccacacacgac

SEQ ID NO: 4029641 - DNA, 25 bp, Homo sapien
aggcccacggcgaagcccacacacg

SEQ ID NO: 4029642 - DNA, 25 bp, Homo sapien
atgaagtccatctggcgcgtccagg

SEQ ID NO: 4029643 - DNA, 25 bp, Homo sapien
tgaagtccatctggcgcgtccaggt

SEQ ID NO: 4029644 - DNA, 25 bp, Homo sapien
gatgaagtccatctggcgcgtccag

SEQ ID NO: 4029645 - DNA, 25 bp, Homo sapien
cgggcgcgatgagggggcccttctt

SEQ ID NO: 4029646 - DNA, 25 bp, Homo sapien
ccgggcgcgatgagggggcccttct

SEQ ID NO: 4029647 - DNA, 25 bp, Homo sapien
agatgccgttctcggcgctcttctt

SEQ ID NO: 4029648 - DNA, 25 bp, Homo sapien
tgccgttctcggcgctcttcttcgc

SEQ ID NO: 4029649 - DNA, 25 bp, Homo sapien
ccgttctcggcgctcttcttcgcca

SEQ ID NO: 4029650 - DNA, 25 bp, Homo sapien
gatgccgttctcggcgctcttcttc

SEQ ID NO: 4029651 - DNA, 25 bp, Homo sapien
cgttccgactgttcctctcttcccg

SEQ ID NO: 4029652 - DNA, 25 bp, Homo sapien
actcgccaccgcgttccgactgttc

SEQ ID NO: 4029653 - DNA, 25 bp, Homo sapien
caccgcgttccgactgttcctctct

SEQ ID NO: 4029654 - DNA, 25 bp, Homo sapien
tcgccaccgcgttccgactgttcct

SEQ ID NO: 4029655 - DNA, 25 bp, Homo sapien
tgtgcttagaccaggggcggtgggc

SEQ ID NO: 4029656 - DNA, 25 bp, Homo sapien
aggtcacactgctcatcagaagttt

SEQ ID NO: 4029657 - DNA, 25 bp, Homo sapien
tgctcatcagaagtttctcactagg

SEQ ID NO: 4029658 - DNA, 25 bp, Homo sapien
tcagaagtttctcactagggtcttc

SEQ ID NO: 4029659 - DNA, 25 bp, Homo sapien
accagcgttgagcatcccgtgttga

SEQ ID NO: 4029660 - DNA, 25 bp, Homo sapien
gtaacaaagacacccaccagcgttg

SEQ ID NO: 4029661 - DNA, 25 bp, Homo sapien
tgcatgcagcacatgacagcttaaa

SEQ ID NO: 4029662 - DNA, 25 bp, Homo sapien
ccgtgttgatgacagcgaccaccat

SEQ ID NO: 4029663 - DNA, 25 bp, Homo sapien
aactgggtcctctaggctccaggaa

SEQ ID NO: 4029664 - DNA, 25 bp, Homo sapien
gacaattccagcaagtccctgtatc

SEQ ID NO: 4029665 - DNA, 25 bp, Homo sapien
attagttggaatggcggtaagacgc

SEQ ID NO: 4029666 - DNA, 25 bp, Homo sapien
taagacgcactatgtggactccgtg

SEQ ID NO: 4029667 - DNA, 25 bp, Homo sapien
atgagaactcctcaaccatgcgcac

SEQ ID NO: 4029668 - DNA, 25 bp, Homo sapien
ccatgcgcaccagcatcagagtcat

SEQ ID NO: 4029669 - DNA, 25 bp, Homo sapien
tcaaccatgcgcaccagcatcagag

SEQ ID NO: 4029670 - DNA, 25 bp, Homo sapien
aaccatgcgcaccagcatcagagtc

SEQ ID NO: 4029671 - DNA, 25 bp, Homo sapien
gtgtgccaagcacaactccctacag

SEQ ID NO: 4029672 - DNA, 25 bp, Homo sapien
cactttctgagcattagtgtgtgcc

SEQ ID NO: 4029673 - DNA, 25 bp, Homo sapien
aaaaaacatagattgtgcagatgtg

SEQ ID NO: 4029674 - DNA, 25 bp, Homo sapien
tcacgggaggttgtggctaacactt

SEQ ID NO: 4029675 - DNA, 25 bp, Homo sapien
catagatgtgtactactgtgcgaga

SEQ ID NO: 4029676 - DNA, 25 bp, Homo sapien
gaaggtgtcccgcaaagctctggat

SEQ ID NO: 4029677 - DNA, 25 bp, Homo sapien
ctactctggcaatggtaagacaggc

SEQ ID NO: 4029678 - DNA, 25 bp, Homo sapien
tacgatattcactgtgtgcgacagg

SEQ ID NO: 4029679 - DNA, 25 bp, Homo sapien
cccacgtggacctttccctcagaca

SEQ ID NO: 4029680 - DNA, 25 bp, Homo sapien
tccccacgtggacctttccctcaga

SEQ ID NO: 4029681 - DNA, 25 bp, Homo sapien
cagacacggtggtgaggggtagctc

SEQ ID NO: 4029682 - DNA, 25 bp, Homo sapien
gacacggtggtgaggggtagctcag

SEQ ID NO: 4029683 - DNA, 25 bp, Homo sapien
actccagacacggtggtgaggggta

SEQ ID NO: 4029684 - DNA, 25 bp, Homo sapien
tccagacacggtggtgaggggtagc

SEQ ID NO: 4029685 - DNA, 25 bp, Homo sapien
tcaccagtagtgttagaaagaggct

SEQ ID NO: 4029686 - DNA, 25 bp, Homo sapien
cctttgatagaagccaccatgacct

SEQ ID NO: 4029687 - DNA, 25 bp, Homo sapien
tgtgcaaagtaccacagagtgagtc

SEQ ID NO: 4029688 - DNA, 25 bp, Homo sapien
tgcaagtggccaacagtagtgaaga

SEQ ID NO: 4029689 - DNA, 25 bp, Homo sapien
gacagtaggaaaatctgaagcctct

SEQ ID NO: 4029690 - DNA, 25 bp, Homo sapien
aaagatgaaagtgtggcagtgcaca

SEQ ID NO: 4029691 - DNA, 25 bp, Homo sapien
ctgaggaggagaacatagggaaact

SEQ ID NO: 4029692 - DNA, 25 bp, Homo sapien
ccagtataatctgggttaaagatga

SEQ ID NO: 4029693 - DNA, 25 bp, Homo sapien
gccttcacctattgattggaggaat

SEQ ID NO: 4029694 - DNA, 25 bp, Homo sapien
caactcatgagtgtttagccttcac

SEQ ID NO: 4029695 - DNA, 25 bp, Homo sapien
tcattcatagatcacgtatttggca

SEQ ID NO: 4029696 - DNA, 25 bp, Homo sapien
gaagacgtgttcttcttcccatcgt

SEQ ID NO: 4029697 - DNA, 25 bp, Homo sapien
tcacagttccctttcttcttctctt

SEQ ID NO: 4029698 - DNA, 25 bp, Homo sapien
cacagttccctttcttcttctcttc

SEQ ID NO: 4029699 - DNA, 25 bp, Homo sapien
caataattgtagaatctggctaggc

SEQ ID NO: 4029700 - DNA, 25 bp, Homo sapien
tattgatgtagagctgatcttgtgc

SEQ ID NO: 4029701 - DNA, 25 bp, Homo sapien
atactatctgagtttggactctcac

SEQ ID NO: 4029702 - DNA, 25 bp, Homo sapien
ggactctcacctgtgactttgagaa

SEQ ID NO: 4029703 - DNA, 25 bp, Homo sapien
tcatgcatccctctgatcatgtttc

SEQ ID NO: 4029704 - DNA, 25 bp, Homo sapien
tagggttttcaggaccttcctcatg

SEQ ID NO: 4029705 - DNA, 25 bp, Homo sapien
tttctctgctgctcaaaagctttgt

SEQ ID NO: 4029706 - DNA, 25 bp, Homo sapien
tgctgctcaaaagctttgtcccttt

SEQ ID NO: 4029707 - DNA, 25 bp, Homo sapien
aaatatgcatcttccattgcctgat

SEQ ID NO: 4029708 - DNA, 25 bp, Homo sapien
aatatgcatcttccattgcctgatc

SEQ ID NO: 4029709 - DNA, 25 bp, Homo sapien
atatgcatcttccattgcctgatcc

SEQ ID NO: 4029710 - DNA, 25 bp, Homo sapien
gctgtcagtcaagtctccactcttt

SEQ ID NO: 4029711 - DNA, 25 bp, Homo sapien
tgtcagtcaagtctccactctttcc

SEQ ID NO: 4029712 - DNA, 25 bp, Homo sapien
ctgtcagtcaagtctccactctttc

SEQ ID NO: 4029713 - DNA, 25 bp, Homo sapien
cagctgtcctgggagcatgtctcta

SEQ ID NO: 4029714 - DNA, 25 bp, Homo sapien
ctgggagcatgtctctacatctcta

SEQ ID NO: 4029715 - DNA, 25 bp, Homo sapien
tcctgggagcatgtctctacatctc

SEQ ID NO: 4029716 - DNA, 25 bp, Homo sapien
tgtcctgggagcatgtctctacatc

SEQ ID NO: 4029717 - DNA, 25 bp, Homo sapien
ggctggtcccgggtcctccagctgc

SEQ ID NO: 4029718 - DNA, 25 bp, Homo sapien
gggtgacgcaggctcaaggatgcaa

SEQ ID NO: 4029719 - DNA, 25 bp, Homo sapien
tccaagggggtgacgcaggctcaag

SEQ ID NO: 4029720 - DNA, 25 bp, Homo sapien
agctgccgcatcagcgagtgcagga

SEQ ID NO: 4029721 - DNA, 25 bp, Homo sapien
cgatagccgcgtcaccccctccacc

SEQ ID NO: 4029722 - DNA, 25 bp, Homo sapien
cccgcgcaggctgccaagagagatg

SEQ ID NO: 4029723 - DNA, 25 bp, Homo sapien
cttggacacagtgcacttggtgggc

SEQ ID NO: 4029724 - DNA, 25 bp, Homo sapien
ctgcgcctccctccgcgatagccgc

SEQ ID NO: 4029725 - DNA, 25 bp, Homo sapien
ctgcccaggaacagagcctggggcg

SEQ ID NO: 4029726 - DNA, 25 bp, Homo sapien
ccaggaacagagcctggggcgcggg

SEQ ID NO: 4029727 - DNA, 25 bp, Homo sapien
tgcccaggaacagagcctggggcgc

SEQ ID NO: 4029728 - DNA, 25 bp, Homo sapien
ggaacagagcctggggcgcgggtgt

SEQ ID NO: 4029729 - DNA, 25 bp, Homo sapien
gggcaacaagccagggcggccgagg

SEQ ID NO: 4029730 - DNA, 25 bp, Homo sapien
ctcaaaaagccgcagcgtccggtgc

SEQ ID NO: 4029731 - DNA, 25 bp, Homo sapien
gcgggagtaaaaagccgcgtcggca

SEQ ID NO: 4029732 - DNA, 25 bp, Homo sapien
cagccgcggcgacaaaaagctgtgg

SEQ ID NO: 4029733 - DNA, 25 bp, Homo sapien
acgacggcaaaaagccgcgtcggcg

SEQ ID NO: 4029734 - DNA, 25 bp, Homo sapien
cgcagcggcggggtcaaaaatccac

SEQ ID NO: 4029735 - DNA, 25 bp, Homo sapien
tcaaaaatccacgacggcaaaaagc

SEQ ID NO: 4029736 - DNA, 25 bp, Homo sapien
gcggggtcaaaaatccacgacggca

SEQ ID NO: 4029737 - DNA, 25 bp, Homo sapien
tctttctttgttcctgggcagcggt

SEQ ID NO: 4029738 - DNA, 25 bp, Homo sapien
attgatctgagagcgcggaaggaca

SEQ ID NO: 4029739 - DNA, 25 bp, Homo sapien
gagcgcggaaggacagaattctttc

SEQ ID NO: 4029740 - DNA, 25 bp, Homo sapien
ttggaaattgatctgagagcgcgga

SEQ ID NO: 4029741 - DNA, 25 bp, Homo sapien
aagctgaagttcatcaatcagtgtg

SEQ ID NO: 4029742 - DNA, 25 bp, Homo sapien
tctaagggttcactggttattacca

SEQ ID NO: 4029743 - DNA, 25 bp, Homo sapien
tcagtgtgtctaagggttcactggt

SEQ ID NO: 4029744 - DNA, 25 bp, Homo sapien
caaaagctgaagttcatcaatcagt

SEQ ID NO: 4029745 - DNA, 25 bp, Homo sapien
cgccaaggctttttgaccaccgcgg

SEQ ID NO: 4029746 - DNA, 25 bp, Homo sapien
caagcgccaaggctttttgaccacc

SEQ ID NO: 4029747 - DNA, 25 bp, Homo sapien
cccaagcgccaaggctttttgacca

SEQ ID NO: 4029748 - DNA, 25 bp, Homo sapien
gcgccaaggctttttgaccaccgcg

SEQ ID NO: 4029749 - DNA, 25 bp, Homo sapien
gtcatcttcattggcagcctgtgcg

SEQ ID NO: 4029750 - DNA, 25 bp, Homo sapien
acctcacccagcaggagatacagac

SEQ ID NO: 4029751 - DNA, 25 bp, Homo sapien
ctgtgtccagtgacctcacccagca

SEQ ID NO: 4029752 - DNA, 25 bp, Homo sapien
ccagtgacctcacccagcaggagat

SEQ ID NO: 4029753 - DNA, 25 bp, Homo sapien
cctcacccagcaggagatacagacc

SEQ ID NO: 4029754 - DNA, 25 bp, Homo sapien
tagttcaagtaccttttgacaggtg

SEQ ID NO: 4029755 - DNA, 25 bp, Homo sapien
taaacatacgtttagatgtaccacg

SEQ ID NO: 4029756 - DNA, 25 bp, Homo sapien
caggtgtaaaactgtagacagactg

SEQ ID NO: 4029757 - DNA, 25 bp, Homo sapien
gtgtaaatcaaaaagtctcaatgtc

SEQ ID NO: 4029758 - DNA, 25 bp, Homo sapien
tgagttcttctccttgataagagaa

SEQ ID NO: 4029759 - DNA, 25 bp, Homo sapien
ttcttctccttgataagagaactca

SEQ ID NO: 4029760 - DNA, 25 bp, Homo sapien
gagttcttctccttgataagagaac

SEQ ID NO: 4029761 - DNA, 25 bp, Homo sapien
cttgagttcttctccttgataagag

SEQ ID NO: 4029762 - DNA, 25 bp, Homo sapien
gttgctaaagccctcttcatgtctc

SEQ ID NO: 4029763 - DNA, 25 bp, Homo sapien
gcacggtaccttctaggttgctaaa

SEQ ID NO: 4029764 - DNA, 25 bp, Homo sapien
catagacgcacggtaccttctaggt

SEQ ID NO: 4029765 - DNA, 25 bp, Homo sapien
tctaggttgctaaagccctcttcat

SEQ ID NO: 4029766 - DNA, 25 bp, Homo sapien
tatcatacagtaactgagcacaagt

SEQ ID NO: 4029767 - DNA, 25 bp, Homo sapien
ttcccttatcatacagtaactgagc

SEQ ID NO: 4029768 - DNA, 25 bp, Homo sapien
tcaagtgctaatgttggtgctgggt

SEQ ID NO: 4029769 - DNA, 25 bp, Homo sapien
gtgctgggtcctagtgtaaagccaa

SEQ ID NO: 4029770 - DNA, 25 bp, Homo sapien
ggtttcagctgattcaatgggcaaa

SEQ ID NO: 4029771 - DNA, 25 bp, Homo sapien
cgtccgcatgtcagagaactgcacg

SEQ ID NO: 4029772 - DNA, 25 bp, Homo sapien
gacacgtccgcatgtcagagaactg

SEQ ID NO: 4029773 - DNA, 25 bp, Homo sapien
tggtttcagctgattcaatgggcaa

SEQ ID NO: 4029774 - DNA, 25 bp, Homo sapien
gatgtacttgttgatgagcccattc

SEQ ID NO: 4029775 - DNA, 25 bp, Homo sapien
agcggagctgggagttgatgtactt

SEQ ID NO: 4029776 - DNA, 25 bp, Homo sapien
gtacttgttgatgagcccattccac

SEQ ID NO: 4029777 - DNA, 25 bp, Homo sapien
ttgatgtacttgttgatgagcccat

SEQ ID NO: 4029778 - DNA, 25 bp, Homo sapien
gcttgcaacaaatgcacagctaaga

SEQ ID NO: 4029779 - DNA, 25 bp, Homo sapien
cttgcaacaaatgcacagctaagat

SEQ ID NO: 4029780 - DNA, 25 bp, Homo sapien
accagctccggtgttgctccctgta

SEQ ID NO: 4029781 - DNA, 25 bp, Homo sapien
accttcatgagcagcgtgatccact

SEQ ID NO: 4029782 - DNA, 25 bp, Homo sapien
agctccggtgttgctccctgtacac

SEQ ID NO: 4029783 - DNA, 25 bp, Homo sapien
ccttcatgagcagcgtgatccactg

SEQ ID NO: 4029784 - DNA, 25 bp, Homo sapien
gaactctgagagaacaaatttgttg

SEQ ID NO: 4029785 - DNA, 25 bp, Homo sapien
cccgcacctggatttgggacttctg

SEQ ID NO: 4029786 - DNA, 25 bp, Homo sapien
tgtttgaagccagtgttatgggttg

SEQ ID NO: 4029787 - DNA, 25 bp, Homo sapien
tgagactggcacaatgcgtccccac

SEQ ID NO: 4029788 - DNA, 25 bp, Homo sapien
attccatgcgtgtcttgtccgtcgt

SEQ ID NO: 4029789 - DNA, 25 bp, Homo sapien
atcacttggcctaggcctggaggag

SEQ ID NO: 4029790 - DNA, 25 bp, Homo sapien
tctgctgagggctgtgcagcggccg

SEQ ID NO: 4029791 - DNA, 25 bp, Homo sapien
tgccagcttgaggtcgtattttcct

SEQ ID NO: 4029792 - DNA, 25 bp, Homo sapien
tcaccaatcacttggcctaggcctg

SEQ ID NO: 4029793 - DNA, 25 bp, Homo sapien
tccaatcttcatcgtggcagccagt

SEQ ID NO: 4029794 - DNA, 25 bp, Homo sapien
tcatgaccctcgttccaatcttcat

SEQ ID NO: 4029795 - DNA, 25 bp, Homo sapien
acacctctcatgaccctcgttccaa

SEQ ID NO: 4029796 - DNA, 25 bp, Homo sapien
cctcgttccaatcttcatcgtggca

SEQ ID NO: 4029797 - DNA, 25 bp, Homo sapien
tatcttcctcaacattgtcacaact

SEQ ID NO: 4029798 - DNA, 25 bp, Homo sapien
ggcagaagcaccttgagcagaagca

SEQ ID NO: 4029799 - DNA, 25 bp, Homo sapien
tgttgcttccaaaactgtggcagaa

SEQ ID NO: 4029800 - DNA, 25 bp, Homo sapien
gagatgcacaggagccgtttccttc

SEQ ID NO: 4029801 - DNA, 25 bp, Homo sapien
ctggtgatggtctgcaggggaactg

SEQ ID NO: 4029802 - DNA, 25 bp, Homo sapien
cccaggctcggtcccaatgggttct

SEQ ID NO: 4029803 - DNA, 25 bp, Homo sapien
ggctcggtcccaatgggttctcact

SEQ ID NO: 4029804 - DNA, 25 bp, Homo sapien
caatgggttctcactggtgatggtc

SEQ ID NO: 4029805 - DNA, 25 bp, Homo sapien
aacataacgcagaaagcacgggcta

SEQ ID NO: 4029806 - DNA, 25 bp, Homo sapien
ctaataagcattgacacccacttac

SEQ ID NO: 4029807 - DNA, 25 bp, Homo sapien
cactgacatttcttgtgcgtggata

SEQ ID NO: 4029808 - DNA, 25 bp, Homo sapien
gactaataagcattgacacccactg

SEQ ID NO: 4029809 - DNA, 25 bp, Homo sapien
agaatgttctgaacagtccaagcat

SEQ ID NO: 4029810 - DNA, 25 bp, Homo sapien
tagaatgttctgaacagtccaagca

SEQ ID NO: 4029811 - DNA, 25 bp, Homo sapien
taaagaatttgactcgggacactgc

SEQ ID NO: 4029812 - DNA, 25 bp, Homo sapien
gactcgggacactgccagacttcta

SEQ ID NO: 4029813 - DNA, 25 bp, Homo sapien
aatttgactcgggacactgccagac

SEQ ID NO: 4029814 - DNA, 25 bp, Homo sapien
aagataaagaatttgactcgggaca

SEQ ID NO: 4029815 - DNA, 25 bp, Homo sapien
gtatctatcccttccaggcgaacct

SEQ ID NO: 4029816 - DNA, 25 bp, Homo sapien
ctatcccttccaggcgaacctctgc

SEQ ID NO: 4029817 - DNA, 25 bp, Homo sapien
tcccttccaggcgaacctctgctct

SEQ ID NO: 4029818 - DNA, 25 bp, Homo sapien
atctatcccttccaggcgaacctct

SEQ ID NO: 4029819 - DNA, 25 bp, Homo sapien
caaattcagcaattgtactgaggag

SEQ ID NO: 4029820 - DNA, 25 bp, Homo sapien
gaggagtggagactgcggataaaga

SEQ ID NO: 4029821 - DNA, 25 bp, Homo sapien
gggcaaattcagcaattgtactgag

SEQ ID NO: 4029822 - DNA, 25 bp, Homo sapien
ttaagggcaaattcagcaattgtac

SEQ ID NO: 4029823 - DNA, 25 bp, Homo sapien
tgggtctcttgtccacatttattgg

SEQ ID NO: 4029824 - DNA, 25 bp, Homo sapien
cacatttattggactatgaggcaaa

SEQ ID NO: 4029825 - DNA, 25 bp, Homo sapien
tgtccacatttattggactatgagg

SEQ ID NO: 4029826 - DNA, 25 bp, Homo sapien
taattgcaatgggtctcttgtccac

SEQ ID NO: 4029827 - DNA, 25 bp, Homo sapien
cctccgttcccgaattatcttctga

SEQ ID NO: 4029828 - DNA, 25 bp, Homo sapien
tcctccgttcccgaattatcttctg

SEQ ID NO: 4029829 - DNA, 25 bp, Homo sapien
taacaacaaatatttctgcaactgt

SEQ ID NO: 4029830 - DNA, 25 bp, Homo sapien
ctgcaaagttaaccaggaaaagaca

SEQ ID NO: 4029831 - DNA, 25 bp, Homo sapien
tgcaaagttaaccaggaaaagacaa

SEQ ID NO: 4029832 - DNA, 25 bp, Homo sapien
acaactttaacaacaaatatttctg

SEQ ID NO: 4029833 - DNA, 25 bp, Homo sapien
acattttgcttggtagacaactcta

SEQ ID NO: 4029834 - DNA, 25 bp, Homo sapien
tgacttaggcaacgttctgtgcttt

SEQ ID NO: 4029835 - DNA, 25 bp, Homo sapien
cactgacttaggcaacgttctgtgc

SEQ ID NO: 4029836 - DNA, 25 bp, Homo sapien
tgcatgaactaaagataatgccaca

SEQ ID NO: 4029837 - DNA, 25 bp, Homo sapien
gaagcaacataacagcaagcgaccg

SEQ ID NO: 4029838 - DNA, 25 bp, Homo sapien
tgttttaagaagcaacataacagca

SEQ ID NO: 4029839 - DNA, 25 bp, Homo sapien
agcaacataacagcaagcgaccgac

SEQ ID NO: 4029840 - DNA, 25 bp, Homo sapien
ttcatgttttaagaagcaacataac

SEQ ID NO: 4029841 - DNA, 25 bp, Homo sapien
ggtgtggtcaaatggcactgcctac

SEQ ID NO: 4029842 - DNA, 25 bp, Homo sapien
gatcggtgtggtcaaatggcactgc

SEQ ID NO: 4029843 - DNA, 25 bp, Homo sapien
tcaaatggcactgcctacagtacct

SEQ ID NO: 4029844 - DNA, 25 bp, Homo sapien
gggaaacatgatcggtgtggtcaaa

SEQ ID NO: 4029845 - DNA, 25 bp, Homo sapien
cacgttgtgatcctgaatgttattg

SEQ ID NO: 4029846 - DNA, 25 bp, Homo sapien
cttcacgttgtgatcctgaatgtta

SEQ ID NO: 4029847 - DNA, 25 bp, Homo sapien
acgttgtgatcctgaatgttattgt

SEQ ID NO: 4029848 - DNA, 25 bp, Homo sapien
tcacgttgtgatcctgaatgttatt

SEQ ID NO: 4029849 - DNA, 25 bp, Homo sapien
tcagaactcaggattgtagttccag

SEQ ID NO: 4029850 - DNA, 25 bp, Homo sapien
gaactcaggattgtagttccagtcc

SEQ ID NO: 4029851 - DNA, 25 bp, Homo sapien
aactcaggattgtagttccagtcca

SEQ ID NO: 4029852 - DNA, 25 bp, Homo sapien
gcatcagaactcaggattgtagttc

SEQ ID NO: 4029853 - DNA, 25 bp, Homo sapien
tggcacattcaatctcgacaggaga

SEQ ID NO: 4029854 - DNA, 25 bp, Homo sapien
caggagacagcggtgtgctcattgc

SEQ ID NO: 4029855 - DNA, 25 bp, Homo sapien
tcctctctgtgtctatcagaggtga

SEQ ID NO: 4029856 - DNA, 25 bp, Homo sapien
tctcgacaggagacagcggtgtgct

SEQ ID NO: 4029857 - DNA, 25 bp, Homo sapien
tctgcatcactcaaggcatacagcc

SEQ ID NO: 4029858 - DNA, 25 bp, Homo sapien
cctctgcatcactcaaggcatacag

SEQ ID NO: 4029859 - DNA, 25 bp, Homo sapien
tgcatcactcaaggcatacagcctc

SEQ ID NO: 4029860 - DNA, 25 bp, Homo sapien
ctgcatcactcaaggcatacagcct

SEQ ID NO: 4029861 - DNA, 25 bp, Homo sapien
ggtgacttcaaactcgaaagcagct

SEQ ID NO: 4029862 - DNA, 25 bp, Homo sapien
gggtgacttcaaactcgaaagcagc

SEQ ID NO: 4029863 - DNA, 25 bp, Homo sapien
ccgggtgacttcaaactcgaaagca

SEQ ID NO: 4029864 - DNA, 25 bp, Homo sapien
tgacttcaaactcgaaagcagcttc

SEQ ID NO: 4029865 - DNA, 25 bp, Homo sapien
cactttctcatcaatcacaatccag

SEQ ID NO: 4029866 - DNA, 25 bp, Homo sapien
ctttctcatcaatcacaatccagaa

SEQ ID NO: 4029867 - DNA, 25 bp, Homo sapien
atacactttctcatcaatcacaatc

SEQ ID NO: 4029868 - DNA, 25 bp, Homo sapien
tacactttctcatcaatcacaatcc

SEQ ID NO: 4029869 - DNA, 25 bp, Homo sapien
gacagcccacgttcagagtataaag

SEQ ID NO: 4029870 - DNA, 25 bp, Homo sapien
taagacagcccacgttcagagtata

SEQ ID NO: 4029871 - DNA, 25 bp, Homo sapien
gcccacgttcagagtataaagaagg

SEQ ID NO: 4029872 - DNA, 25 bp, Homo sapien
cagcccacgttcagagtataaagaa

SEQ ID NO: 4029873 - DNA, 25 bp, Homo sapien
agacgtcggacagctacacggcaga

SEQ ID NO: 4029874 - DNA, 25 bp, Homo sapien
tcggacagctacacggcagaggcat

SEQ ID NO: 4029875 - DNA, 25 bp, Homo sapien
acgtcggacagctacacggcagagg

SEQ ID NO: 4029876 - DNA, 25 bp, Homo sapien
gagacgtcggacagctacacggcag

SEQ ID NO: 4029877 - DNA, 25 bp, Homo sapien
agccagatcttctaaatgggccatg

SEQ ID NO: 4029878 - DNA, 25 bp, Homo sapien
ctgtaaagaccagcactcctggagg

SEQ ID NO: 4029879 - DNA, 25 bp, Homo sapien
taaagaccagcactcctggaggttt

SEQ ID NO: 4029880 - DNA, 25 bp, Homo sapien
gaccagcactcctggaggtttacac

SEQ ID NO: 4029881 - DNA, 25 bp, Homo sapien
cactcctggaggtttacacccaggg

SEQ ID NO: 4029882 - DNA, 25 bp, Homo sapien
agagtgacagctcagatgacatgcc

SEQ ID NO: 4029883 - DNA, 25 bp, Homo sapien
aacagagtgacagctcagatgacat

SEQ ID NO: 4029884 - DNA, 25 bp, Homo sapien
gagctggtactaaacagagtgacag

SEQ ID NO: 4029885 - DNA, 25 bp, Homo sapien
aggggggagctggtactaaacagag

SEQ ID NO: 4029886 - DNA, 25 bp, Homo sapien
gtgcatgttgccctcggaggggggc

SEQ ID NO: 4029887 - DNA, 25 bp, Homo sapien
gcatgttgccctcggaggggggcgt

SEQ ID NO: 4029888 - DNA, 25 bp, Homo sapien
tgcatgttgccctcggaggggggcg

SEQ ID NO: 4029889 - DNA, 25 bp, Homo sapien
caaaagcaaggtgctggtgccctgg

SEQ ID NO: 4029890 - DNA, 25 bp, Homo sapien
acagccagctccagcaggatggcca

SEQ ID NO: 4029891 - DNA, 25 bp, Homo sapien
ctcagcgtgcctctctgcacagcca

SEQ ID NO: 4029892 - DNA, 25 bp, Homo sapien
gctccagcaggatggccagagccaa

SEQ ID NO: 4029893 - DNA, 25 bp, Homo sapien
agcaggatggccagagccaagtgct

SEQ ID NO: 4029894 - DNA, 25 bp, Homo sapien
tggccttttggtgcctggcgttctg

SEQ ID NO: 4029895 - DNA, 25 bp, Homo sapien
gccttttggtgcctggcgttctgtg

SEQ ID NO: 4029896 - DNA, 25 bp, Homo sapien
gcttctggccttttggtgcctggcg

SEQ ID NO: 4029897 - DNA, 25 bp, Homo sapien
cttttggtgcctggcgttctgtgaa

SEQ ID NO: 4029898 - DNA, 25 bp, Homo sapien
aggtgcaggagtttcatcttttttc

SEQ ID NO: 4029899 - DNA, 25 bp, Homo sapien
ttgtcatccagatcttctttctttg

SEQ ID NO: 4029900 - DNA, 25 bp, Homo sapien
ttgacttggccctatatacaggtgc

SEQ ID NO: 4029901 - DNA, 25 bp, Homo sapien
ctatatacaggtgcaggagtttcat

SEQ ID NO: 4029902 - DNA, 25 bp, Homo sapien
atctgttttcaaccatttggagtca

SEQ ID NO: 4029903 - DNA, 25 bp, Homo sapien
cgagcctgggcagccaaacacaaat

SEQ ID NO: 4029904 - DNA, 25 bp, Homo sapien
tcaaccatttggagtcaaggcgagc

SEQ ID NO: 4029905 - DNA, 25 bp, Homo sapien
agtcaaggcgagcctgggcagccaa

SEQ ID NO: 4029906 - DNA, 25 bp, Homo sapien
tgcccgcgcgggactgccgccccct

SEQ ID NO: 4029907 - DNA, 25 bp, Homo sapien
gacccgcgcttaccgccaatcgcaa

SEQ ID NO: 4029908 - DNA, 25 bp, Homo sapien
tctcgctacccgaggggcgtgcccg

SEQ ID NO: 4029909 - DNA, 25 bp, Homo sapien
ccgcgatcccgacgcctctcgctac

SEQ ID NO: 4029910 - DNA, 25 bp, Homo sapien
ctgtgagtggtatggcactgctgtg

SEQ ID NO: 4029911 - DNA, 25 bp, Homo sapien
tggctgtgagtggtatggcactgct

SEQ ID NO: 4029912 - DNA, 25 bp, Homo sapien
tgtgagtggtatggcactgctgtga

SEQ ID NO: 4029913 - DNA, 25 bp, Homo sapien
gctgtgagtggtatggcactgctgt

SEQ ID NO: 4029914 - DNA, 25 bp, Homo sapien
tctttttctacttccttaatgactc

SEQ ID NO: 4029915 - DNA, 25 bp, Homo sapien
ttccttaatgactctaattgcagac

SEQ ID NO: 4029916 - DNA, 25 bp, Homo sapien
tctacttccttaatgactctaattg

SEQ ID NO: 4029917 - DNA, 25 bp, Homo sapien
tacttccttaatgactctaattgca

SEQ ID NO: 4029918 - DNA, 25 bp, Homo sapien
gctgttacccattccttgatactga

SEQ ID NO: 4029919 - DNA, 25 bp, Homo sapien
tttcgtagctgacattgtggtgggt

SEQ ID NO: 4029920 - DNA, 25 bp, Homo sapien
tttctgaatcctttcgtagctgaca

SEQ ID NO: 4029921 - DNA, 25 bp, Homo sapien
gatactgacagtacaatggccatcc

SEQ ID NO: 4029922 - DNA, 25 bp, Homo sapien
ctgaaagataactctggcatcttcc

SEQ ID NO: 4029923 - DNA, 25 bp, Homo sapien
ttatcaataatctgatttatcacag

SEQ ID NO: 4029924 - DNA, 25 bp, Homo sapien
tatcaataatctgatttatcacagg

SEQ ID NO: 4029925 - DNA, 25 bp, Homo sapien
ggatgcttttgaaagctgcccgcat

SEQ ID NO: 4029926 - DNA, 25 bp, Homo sapien
aggatgcttttgaaagctgcccgca

SEQ ID NO: 4029927 - DNA, 25 bp, Homo sapien
gaaaaacatgagactcggagtgggc

SEQ ID NO: 4029928 - DNA, 25 bp, Homo sapien
tcattcagcccaagtagatgtcctt

SEQ ID NO: 4029929 - DNA, 25 bp, Homo sapien
acattgtgttgaagctcctgggagc

SEQ ID NO: 4029930 - DNA, 25 bp, Homo sapien
ctggctgaagaaccacaagaggtct

SEQ ID NO: 4029931 - DNA, 25 bp, Homo sapien
cagcactgccatccaggactctttc

SEQ ID NO: 4029932 - DNA, 25 bp, Homo sapien
gggatcagctttagcaggcaggcat

SEQ ID NO: 4029933 - DNA, 25 bp, Homo sapien
caggcaggcatccttctcagcactg

SEQ ID NO: 4029934 - DNA, 25 bp, Homo sapien
ctttagcaggcaggcatccttctca

SEQ ID NO: 4029935 - DNA, 25 bp, Homo sapien
agccagccctgcctgggccgcggcc

SEQ ID NO: 4029936 - DNA, 25 bp, Homo sapien
atccggcccaggcagcagccagccc

SEQ ID NO: 4029937 - DNA, 25 bp, Homo sapien
cctgggccgcggccgccggcctcat

SEQ ID NO: 4029938 - DNA, 25 bp, Homo sapien
catccggcccaggcagcagccagcc

SEQ ID NO: 4029939 - DNA, 25 bp, Homo sapien
tccaagaaggaatccggcgcccagt

SEQ ID NO: 4029940 - DNA, 25 bp, Homo sapien
aaagctgtctgtcgttcctgaagga

SEQ ID NO: 4029941 - DNA, 25 bp, Homo sapien
gctgaagattgtagttatctaggag

SEQ ID NO: 4029942 - DNA, 25 bp, Homo sapien
tgagcctcttcctaacgcagtcttg

SEQ ID NO: 4029943 - DNA, 25 bp, Homo sapien
gatagtcggataattatgtctctta

SEQ ID NO: 4029944 - DNA, 25 bp, Homo sapien
tgttcggtttacagagtttgctact

SEQ ID NO: 4029945 - DNA, 25 bp, Homo sapien
gaaaccccgatgtgaagtgtacata

SEQ ID NO: 4029946 - DNA, 25 bp, Homo sapien
tctgggtcgatcttagctttataca

SEQ ID NO: 4029947 - DNA, 25 bp, Homo sapien
ctttggagagaattatgcacgtcac

SEQ ID NO: 4029948 - DNA, 25 bp, Homo sapien
cacgtcactcagttgctctaacaag

SEQ ID NO: 4029949 - DNA, 25 bp, Homo sapien
tgtcacatgcactctcacgatgagg

SEQ ID NO: 4029950 - DNA, 25 bp, Homo sapien
tgctaccgtcatgggagcaagaaca

SEQ ID NO: 4029951 - DNA, 25 bp, Homo sapien
caggccaggccgtggttgtctttcc

SEQ ID NO: 4029952 - DNA, 25 bp, Homo sapien
cgcaaaaagggtactggtgaacgtg

SEQ ID NO: 4029953 - DNA, 25 bp, Homo sapien
tccaaggcggctcagcttgtgcttt

SEQ ID NO: 4029954 - DNA, 25 bp, Homo sapien
ccacggccacatccgcaaaaagggt

SEQ ID NO: 4029955 - DNA, 25 bp, Homo sapien
tccacagcagcgttgccgtggtaac

SEQ ID NO: 4029956 - DNA, 25 bp, Homo sapien
tcgatttcctgtcagccaacaaagg

SEQ ID NO: 4029957 - DNA, 25 bp, Homo sapien
caaagggccgttcgcctttcatggc

SEQ ID NO: 4029958 - DNA, 25 bp, Homo sapien
cgtggtaacgatcctccgccggacg

SEQ ID NO: 4029959 - DNA, 25 bp, Homo sapien
ttcctctgttctctaggctgtcaca

SEQ ID NO: 4029960 - DNA, 25 bp, Homo sapien
ctgccatttgccttttcaaaaccat

SEQ ID NO: 4029961 - DNA, 25 bp, Homo sapien
aaccatttcctctgttctctaggct

SEQ ID NO: 4029962 - DNA, 25 bp, Homo sapien
tgccatttgccttttcaaaaccatt

SEQ ID NO: 4029963 - DNA, 25 bp, Homo sapien
gcaggacagaggaattaatcatact

SEQ ID NO: 4029964 - DNA, 25 bp, Homo sapien
taatcatactcacattgttctacaa

SEQ ID NO: 4029965 - DNA, 25 bp, Homo sapien
tacaaccatcatccacattcatagg

SEQ ID NO: 4029966 - DNA, 25 bp, Homo sapien
cattcatagggaaatttgttcattt

SEQ ID NO: 4029967 - DNA, 25 bp, Homo sapien
tgtgcagcttcatgcactggaacca

SEQ ID NO: 4029968 - DNA, 25 bp, Homo sapien
tgcagcttcatgcactggaaccaaa

SEQ ID NO: 4029969 - DNA, 25 bp, Homo sapien
gcagcttcatgcactggaaccaaac

SEQ ID NO: 4029970 - DNA, 25 bp, Homo sapien
ctgtgcagcttcatgcactggaacc

SEQ ID NO: 4029971 - DNA, 25 bp, Homo sapien
caggttgttgagaagtgtgcccggg

SEQ ID NO: 4029972 - DNA, 25 bp, Homo sapien
tctctataatcctctatggcaattt

SEQ ID NO: 4029973 - DNA, 25 bp, Homo sapien
tctgcaggttgttgagaagtgtgcc

SEQ ID NO: 4029974 - DNA, 25 bp, Homo sapien
tccagcatctgcaggttgttgagaa

SEQ ID NO: 4029975 - DNA, 25 bp, Homo sapien
tggcttcacaccacacaccagcacc

SEQ ID NO: 4029976 - DNA, 25 bp, Homo sapien
ctggcttcacaccacacaccagcac

SEQ ID NO: 4029977 - DNA, 25 bp, Homo sapien
gcttcacaccacacaccagcaccat

SEQ ID NO: 4029978 - DNA, 25 bp, Homo sapien
ggcttcacaccacacaccagcacca

SEQ ID NO: 4029979 - DNA, 25 bp, Homo sapien
tggactctgggatagatgttcacat

SEQ ID NO: 4029980 - DNA, 25 bp, Homo sapien
ggatagatgttcacatcccaatcca

SEQ ID NO: 4029981 - DNA, 25 bp, Homo sapien
cctctggactctgggatagatgttc

SEQ ID NO: 4029982 - DNA, 25 bp, Homo sapien
tgggatagatgttcacatcccaatc

SEQ ID NO: 4029983 - DNA, 25 bp, Homo sapien
ctggaacttagtcatgccattgtag

SEQ ID NO: 4029984 - DNA, 25 bp, Homo sapien
tttctggaacttagtcatgccattg

SEQ ID NO: 4029985 - DNA, 25 bp, Homo sapien
ttctggaacttagtcatgccattgt

SEQ ID NO: 4029986 - DNA, 25 bp, Homo sapien
tctggaacttagtcatgccattgta

SEQ ID NO: 4029987 - DNA, 25 bp, Homo sapien
tgtttactgctgcgatgtgtggggc

SEQ ID NO: 4029988 - DNA, 25 bp, Homo sapien
tttactgctgcgatgtgtggggcct

SEQ ID NO: 4029989 - DNA, 25 bp, Homo sapien
gtttactgctgcgatgtgtggggcc

SEQ ID NO: 4029990 - DNA, 25 bp, Homo sapien
ctgtttactgctgcgatgtgtgggg

SEQ ID NO: 4029991 - DNA, 25 bp, Homo sapien
gtttcccaagtgtctatagcgccag

SEQ ID NO: 4029992 - DNA, 25 bp, Homo sapien
tcccaagtgtctatagcgccaggtg

SEQ ID NO: 4029993 - DNA, 25 bp, Homo sapien
caagtgtctatagcgccaggtgccc

SEQ ID NO: 4029994 - DNA, 25 bp, Homo sapien
gtctatagcgccaggtgccccattg

SEQ ID NO: 4029995 - DNA, 25 bp, Homo sapien
cagtagttccccatccggaacaaag

SEQ ID NO: 4029996 - DNA, 25 bp, Homo sapien
agactgcagaccctcgcatgggctc

SEQ ID NO: 4029997 - DNA, 25 bp, Homo sapien
gcagtagttccccatccggaacaaa

SEQ ID NO: 4029998 - DNA, 25 bp, Homo sapien
aaagactgcagaccctcgcatgggc

SEQ ID NO: 4029999 - DNA, 25 bp, Homo sapien
gtggttgtgggctagacctgtggcc

SEQ ID NO: 4030000 - DNA, 25 bp, Homo sapien
gttgtgggctagacctgtggccttc

SEQ ID NO: 4030001 - DNA, 25 bp, Homo sapien
ctaggtggttgtgggctagacctgt

SEQ ID NO: 4030002 - DNA, 25 bp, Homo sapien
tggttgtgggctagacctgtggcct

SEQ ID NO: 4030003 - DNA, 25 bp, Homo sapien
taaaatactcccaagtaactcgtgc

SEQ ID NO: 4030004 - DNA, 25 bp, Homo sapien
ttttcgtggttatgcacagagtgct

SEQ ID NO: 4030005 - DNA, 25 bp, Homo sapien
ggcgttcctttaacacatgtgcaga

SEQ ID NO: 4030006 - DNA, 25 bp, Homo sapien
aatttgccagcatacctgggtgctt

SEQ ID NO: 4030007 - DNA, 25 bp, Homo sapien
gagcggcgctgcgcgtagcggccag

SEQ ID NO: 4030008 - DNA, 25 bp, Homo sapien
gccggttgcgcaacaagtgcgctgt

SEQ ID NO: 4030009 - DNA, 25 bp, Homo sapien
gcggcgctgcgcgtagcggccaggg

SEQ ID NO: 4030010 - DNA, 25 bp, Homo sapien
cggttgcgcaacaagtgcgctgtgt

SEQ ID NO: 4030011 - DNA, 25 bp, Homo sapien
tcctgtgaaagaaagttgtgctgca

SEQ ID NO: 4030012 - DNA, 25 bp, Homo sapien
ggctcacttacaaccaagtgttgtg

SEQ ID NO: 4030013 - DNA, 25 bp, Homo sapien
gagacaagaagctgttggctcactt

SEQ ID NO: 4030014 - DNA, 25 bp, Homo sapien
cctgcaatgacagtcctcaaactta

SEQ ID NO: 4030015 - DNA, 25 bp, Homo sapien
gaaaaacatgagactcggagtgggc

SEQ ID NO: 4030016 - DNA, 25 bp, Homo sapien
tcattcagcccaagtagatgtcctt

SEQ ID NO: 4030017 - DNA, 25 bp, Homo sapien
ctggctgaagaaccacaagaggtct

SEQ ID NO: 4030018 - DNA, 25 bp, Homo sapien
acattgtgttgaagctcctgggagc

SEQ ID NO: 4030019 - DNA, 25 bp, Homo sapien
cctgggccgcggccgccggcctcat

SEQ ID NO: 4030020 - DNA, 25 bp, Homo sapien
agccagccctgcctgggccgcggcc

SEQ ID NO: 4030021 - DNA, 25 bp, Homo sapien
atccggcccaggcagcagccagccc

SEQ ID NO: 4030022 - DNA, 25 bp, Homo sapien
catccggcccaggcagcagccagcc

SEQ ID NO: 4030023 - DNA, 25 bp, Homo sapien
tccaagaaggaatccggcgcccagt

SEQ ID NO: 4030024 - DNA, 25 bp, Homo sapien
gctgaagattgtagttatctaggag

SEQ ID NO: 4030025 - DNA, 25 bp, Homo sapien
aaagctgtctgtcgttcctgaagga

SEQ ID NO: 4030026 - DNA, 25 bp, Homo sapien
tgagcctcttcctaacgcagtcttg

SEQ ID NO: 4030027 - DNA, 25 bp, Homo sapien
tgctaccgtcatgggagcaagaaca

SEQ ID NO: 4030028 - DNA, 25 bp, Homo sapien
cacgtcactcagttgctctaacaag

SEQ ID NO: 4030029 - DNA, 25 bp, Homo sapien
tgtcacatgcactctcacgatgagg

SEQ ID NO: 4030030 - DNA, 25 bp, Homo sapien
ctttggagagaattatgcacgtcac

SEQ ID NO: 4030031 - DNA, 25 bp, Homo sapien
tccaaggcggctcagcttgtgcttt

SEQ ID NO: 4030032 - DNA, 25 bp, Homo sapien
caggccaggccgtggttgtctttcc

SEQ ID NO: 4030033 - DNA, 25 bp, Homo sapien
cgcaaaaagggtactggtgaacgtg

SEQ ID NO: 4030034 - DNA, 25 bp, Homo sapien
ccacggccacatccgcaaaaagggt

SEQ ID NO: 4030035 - DNA, 25 bp, Homo sapien
caaagggccgttcgcctttcatggc

SEQ ID NO: 4030036 - DNA, 25 bp, Homo sapien
tcgatttcctgtcagccaacaaagg

SEQ ID NO: 4030037 - DNA, 25 bp, Homo sapien
tccacagcagcgttgccgtggtaac

SEQ ID NO: 4030038 - DNA, 25 bp, Homo sapien
cgtggtaacgatcctccgccggacg

SEQ ID NO: 4030039 - DNA, 25 bp, Homo sapien
ttcctctgttctctaggctgtcaca

SEQ ID NO: 4030040 - DNA, 25 bp, Homo sapien
ctgccatttgccttttcaaaaccat

SEQ ID NO: 4030041 - DNA, 25 bp, Homo sapien
aaccatttcctctgttctctaggct

SEQ ID NO: 4030042 - DNA, 25 bp, Homo sapien
tgccatttgccttttcaaaaccatt

SEQ ID NO: 4030043 - DNA, 25 bp, Homo sapien
gcaggacagaggaattaatcatact

SEQ ID NO: 4030044 - DNA, 25 bp, Homo sapien
tacaaccatcatccacattcatagg

SEQ ID NO: 4030045 - DNA, 25 bp, Homo sapien
taatcatactcacattgttctacaa

SEQ ID NO: 4030046 - DNA, 25 bp, Homo sapien
cattcatagggaaatttgttcattt

SEQ ID NO: 4030047 - DNA, 25 bp, Homo sapien
ctgtgcagcttcatgcactggaacc

SEQ ID NO: 4030048 - DNA, 25 bp, Homo sapien
tgtgcagcttcatgcactggaacca

SEQ ID NO: 4030049 - DNA, 25 bp, Homo sapien
tgcagcttcatgcactggaaccaaa

SEQ ID NO: 4030050 - DNA, 25 bp, Homo sapien
gcagcttcatgcactggaaccaaac

SEQ ID NO: 4030051 - DNA, 25 bp, Homo sapien
tggcttcacaccacacaccagcacc

SEQ ID NO: 4030052 - DNA, 25 bp, Homo sapien
gcttcacaccacacaccagcaccat

SEQ ID NO: 4030053 - DNA, 25 bp, Homo sapien
ctggcttcacaccacacaccagcac

SEQ ID NO: 4030054 - DNA, 25 bp, Homo sapien
ggcttcacaccacacaccagcacca

SEQ ID NO: 4030055 - DNA, 25 bp, Homo sapien
ggatagatgttcacatcccaatcca

SEQ ID NO: 4030056 - DNA, 25 bp, Homo sapien
cctctggactctgggatagatgttc

SEQ ID NO: 4030057 - DNA, 25 bp, Homo sapien
tgggatagatgttcacatcccaatc

SEQ ID NO: 4030058 - DNA, 25 bp, Homo sapien
tggactctgggatagatgttcacat

SEQ ID NO: 4030059 - DNA, 25 bp, Homo sapien
agatccagcgcttttctctttgtgg

SEQ ID NO: 4030060 - DNA, 25 bp, Homo sapien
tacccatgggtaatcatgccttcct

SEQ ID NO: 4030061 - DNA, 25 bp, Homo sapien
ctttggctcagatgggttgcttcag

SEQ ID NO: 4030062 - DNA, 25 bp, Homo sapien
gatctctacccatctacccagaagg

SEQ ID NO: 4030063 - DNA, 25 bp, Homo sapien
ctggaacttagtcatgccattgtag

SEQ ID NO: 4030064 - DNA, 25 bp, Homo sapien
tttctggaacttagtcatgccattg

SEQ ID NO: 4030065 - DNA, 25 bp, Homo sapien
ttctggaacttagtcatgccattgt

SEQ ID NO: 4030066 - DNA, 25 bp, Homo sapien
tctggaacttagtcatgccattgta

SEQ ID NO: 4030067 - DNA, 25 bp, Homo sapien
ctgtttactgctgcgatgtgtgggg

SEQ ID NO: 4030068 - DNA, 25 bp, Homo sapien
tttactgctgcgatgtgtggggcct

SEQ ID NO: 4030069 - DNA, 25 bp, Homo sapien
tgtttactgctgcgatgtgtggggc

SEQ ID NO: 4030070 - DNA, 25 bp, Homo sapien
gtttactgctgcgatgtgtggggcc

SEQ ID NO: 4030071 - DNA, 25 bp, Homo sapien
gtctatagcgccaggtgccccattg

SEQ ID NO: 4030072 - DNA, 25 bp, Homo sapien
gtttcccaagtgtctatagcgccag

SEQ ID NO: 4030073 - DNA, 25 bp, Homo sapien
tcccaagtgtctatagcgccaggtg

SEQ ID NO: 4030074 - DNA, 25 bp, Homo sapien
caagtgtctatagcgccaggtgccc

SEQ ID NO: 4030075 - DNA, 25 bp, Homo sapien
agactgcagaccctcgcatgggctc

SEQ ID NO: 4030076 - DNA, 25 bp, Homo sapien
cagtagttccccatccggaacaaag

SEQ ID NO: 4030077 - DNA, 25 bp, Homo sapien
gcagtagttccccatccggaacaaa

SEQ ID NO: 4030078 - DNA, 25 bp, Homo sapien
aaagactgcagaccctcgcatgggc

SEQ ID NO: 4030079 - DNA, 25 bp, Homo sapien
gttgtgggctagacctgtggccttc

SEQ ID NO: 4030080 - DNA, 25 bp, Homo sapien
gtggttgtgggctagacctgtggcc

SEQ ID NO: 4030081 - DNA, 25 bp, Homo sapien
ctaggtggttgtgggctagacctgt

SEQ ID NO: 4030082 - DNA, 25 bp, Homo sapien
tggttgtgggctagacctgtggcct

SEQ ID NO: 4030083 - DNA, 25 bp, Homo sapien
ttttcgtggttatgcacagagtgct

SEQ ID NO: 4030084 - DNA, 25 bp, Homo sapien
ggcgttcctttaacacatgtgcaga

SEQ ID NO: 4030085 - DNA, 25 bp, Homo sapien
taaaatactcccaagtaactcgtgc

SEQ ID NO: 4030086 - DNA, 25 bp, Homo sapien
aatttgccagcatacctgggtgctt

SEQ ID NO: 4030087 - DNA, 25 bp, Homo sapien
ttatcattccatgcaaacacactca

SEQ ID NO: 4030088 - DNA, 25 bp, Homo sapien
tcatgggtggcgtcacagtggctcc

SEQ ID NO: 4030089 - DNA, 25 bp, Homo sapien
acacaagcggcggtgtcccagtggt

SEQ ID NO: 4030090 - DNA, 25 bp, Homo sapien
ccccgcagcggcgttctcatgggtg

SEQ ID NO: 4030091 - DNA, 25 bp, Homo sapien
agcggggactgcagcgcactcagct

SEQ ID NO: 4030092 - DNA, 25 bp, Homo sapien
cacaggtctgagctcggcctcgaac

SEQ ID NO: 4030093 - DNA, 25 bp, Homo sapien
cttctgctccacaggtctgagctcg

SEQ ID NO: 4030094 - DNA, 25 bp, Homo sapien
ggactgcagcgcactcagcttctgc

SEQ ID NO: 4030095 - DNA, 25 bp, Homo sapien
ctgttttccgagaaatgcaggctgc

SEQ ID NO: 4030096 - DNA, 25 bp, Homo sapien
tgagaaagccggctccaccaacgct

SEQ ID NO: 4030097 - DNA, 25 bp, Homo sapien
ggatggtgaagacgtggacagcggc

SEQ ID NO: 4030098 - DNA, 25 bp, Homo sapien
ccccaggcatgaggtgcacagagag

SEQ ID NO: 4030099 - DNA, 25 bp, Homo sapien
gctggtcactgtgcacctcgtgttc

SEQ ID NO: 4030100 - DNA, 25 bp, Homo sapien
taatactcgtatactttataattca

SEQ ID NO: 4030101 - DNA, 25 bp, Homo sapien
gtcactgtgcacctcgtgttctcag

SEQ ID NO: 4030102 - DNA, 25 bp, Homo sapien
gactttaatactcgtatactttata

SEQ ID NO: 4030103 - DNA, 25 bp, Homo sapien
tgcgagttagtaaataactgtgctc

SEQ ID NO: 4030104 - DNA, 25 bp, Homo sapien
cgagttagtaaataactgtgctcct

SEQ ID NO: 4030105 - DNA, 25 bp, Homo sapien
cttgtgcgagttagtaaataactgt

SEQ ID NO: 4030106 - DNA, 25 bp, Homo sapien
tgtgcgagttagtaaataactgtgc

SEQ ID NO: 4030107 - DNA, 25 bp, Homo sapien
tgcaattgagcctatgactgaggat

SEQ ID NO: 4030108 - DNA, 25 bp, Homo sapien
tgaggatgaagactctataaaggac

SEQ ID NO: 4030109 - DNA, 25 bp, Homo sapien
cagacacatgcaattgagcctatga

SEQ ID NO: 4030110 - DNA, 25 bp, Homo sapien
cctatgactgaggatgaagactcta

SEQ ID NO: 4030111 - DNA, 25 bp, Homo sapien
aggcgagccatggtgtcgcaggctc

SEQ ID NO: 4030112 - DNA, 25 bp, Homo sapien
gcgaggcgagccatggtgtcgcagg

SEQ ID NO: 4030113 - DNA, 25 bp, Homo sapien
gcagcgaggcgagccatggtgtcgc

SEQ ID NO: 4030114 - DNA, 25 bp, Homo sapien
cgagccatggtgtcgcaggctctag

SEQ ID NO: 4030115 - DNA, 25 bp, Homo sapien
tggagcagctctcaccgatggccag

SEQ ID NO: 4030116 - DNA, 25 bp, Homo sapien
ctgtctccctggccatcttctttga

SEQ ID NO: 4030117 - DNA, 25 bp, Homo sapien
ctcaccgatggccagctcctaccac

SEQ ID NO: 4030118 - DNA, 25 bp, Homo sapien
cagctctcaccgatggccagctcct

SEQ ID NO: 4030119 - DNA, 25 bp, Homo sapien
cgccggagtttcacaaagaaagtct

SEQ ID NO: 4030120 - DNA, 25 bp, Homo sapien
cggcccgagcccctcacgcactcac

SEQ ID NO: 4030121 - DNA, 25 bp, Homo sapien
cccggcccgagcccctcacgcactc

SEQ ID NO: 4030122 - DNA, 25 bp, Homo sapien
cacaaagaaagtctcccggcccgag

SEQ ID NO: 4030123 - DNA, 25 bp, Homo sapien
cgccggcggcgactcgggctcccgc

SEQ ID NO: 4030124 - DNA, 25 bp, Homo sapien
cggcaccgacgccggcggcgactcg

SEQ ID NO: 4030125 - DNA, 25 bp, Homo sapien
cggcggcgactcgggctcccgccgc

SEQ ID NO: 4030126 - DNA, 25 bp, Homo sapien
ggcaccgacgccggcggcgactcgg

SEQ ID NO: 4030127 - DNA, 25 bp, Homo sapien
tgggtgggctccggcgccagcggcg

SEQ ID NO: 4030128 - DNA, 25 bp, Homo sapien
tggtggttggcccttgggtgggctc

SEQ ID NO: 4030129 - DNA, 25 bp, Homo sapien
tcagctccttgtggtggttggccct

SEQ ID NO: 4030130 - DNA, 25 bp, Homo sapien
ccagcggcggcgattgctccatatc

SEQ ID NO: 4030131 - DNA, 25 bp, Homo sapien
gagtcaagggtctgtttgggtggca

SEQ ID NO: 4030132 - DNA, 25 bp, Homo sapien
ggataccatgctcactaagtggtaa

SEQ ID NO: 4030133 - DNA, 25 bp, Homo sapien
taccatgctcactaagtggtaagta

SEQ ID NO: 4030134 - DNA, 25 bp, Homo sapien
catgctcactaagtggtaagtatag

SEQ ID NO: 4030135 - DNA, 25 bp, Homo sapien
gtgttcacagggcaccgtcacagcc

SEQ ID NO: 4030136 - DNA, 25 bp, Homo sapien
cagcctctgaaacatgctgtcttta

SEQ ID NO: 4030137 - DNA, 25 bp, Homo sapien
actcacagtgggacacggtggctca

SEQ ID NO: 4030138 - DNA, 25 bp, Homo sapien
ctttaaagacttttgccgtggctca

SEQ ID NO: 4030139 - DNA, 25 bp, Homo sapien
agttgatactataagttagtactac

SEQ ID NO: 4030140 - DNA, 25 bp, Homo sapien
actataagttagtactacaatgaca

SEQ ID NO: 4030141 - DNA, 25 bp, Homo sapien
aagaaatgagttaggcaacaggcta

SEQ ID NO: 4030142 - DNA, 25 bp, Homo sapien
taaagaaatgagttaggcaacaggc

SEQ ID NO: 4030143 - DNA, 25 bp, Homo sapien
taaaaatactaaactatacaagcaa

SEQ ID NO: 4030144 - DNA, 25 bp, Homo sapien
actatacaagcaatattaaatagta

SEQ ID NO: 4030145 - DNA, 25 bp, Homo sapien
aatgattaataacatgttgatcttt

SEQ ID NO: 4030146 - DNA, 25 bp, Homo sapien
ttaaatagtatataaacttggatta

SEQ ID NO: 4030147 - DNA, 25 bp, Homo sapien
gtgagaacacgtagttatgtggtgt

SEQ ID NO: 4030148 - DNA, 25 bp, Homo sapien
taaccaaaactctactatctacttc

SEQ ID NO: 4030149 - DNA, 25 bp, Homo sapien
caggatatggtaaccaaaactctac

SEQ ID NO: 4030150 - DNA, 25 bp, Homo sapien
gatatggtaaccaaaactctactat

SEQ ID NO: 4030151 - DNA, 25 bp, Homo sapien
catctcatcagtttaactcatttcg

SEQ ID NO: 4030152 - DNA, 25 bp, Homo sapien
tctcatcagtttaactcatttcgtc

SEQ ID NO: 4030153 - DNA, 25 bp, Homo sapien
ctcatcagtttaactcatttcgtct

SEQ ID NO: 4030154 - DNA, 25 bp, Homo sapien
tcattatttcatgtcatgtcatctc

SEQ ID NO: 4030155 - DNA, 25 bp, Homo sapien
tttcattatttcatgtcatgtcatc

SEQ ID NO: 4030156 - DNA, 25 bp, Homo sapien
ttcattatttcatgtcatgtcatct

SEQ ID NO: 4030157 - DNA, 25 bp, Homo sapien
cattatttcatgtcatgtcatctca

SEQ ID NO: 4030158 - DNA, 25 bp, Homo sapien
tcatctcctcttatcattcatctga

SEQ ID NO: 4030159 - DNA, 25 bp, Homo sapien
atcatctcctcttatcattcatctg

SEQ ID NO: 4030160 - DNA, 25 bp, Homo sapien
caactcattgcatctcatctcatca

SEQ ID NO: 4030161 - DNA, 25 bp, Homo sapien
catcattacatttcataatttcctt

SEQ ID NO: 4030162 - DNA, 25 bp, Homo sapien
cattatttcatctgatttcatgtca

SEQ ID NO: 4030163 - DNA, 25 bp, Homo sapien
catttcttctcatctcatcattgcc

SEQ ID NO: 4030164 - DNA, 25 bp, Homo sapien
ttcttctcatcatttcatctcgttt

SEQ ID NO: 4030165 - DNA, 25 bp, Homo sapien
tcttctcatcatttcatctcgtttc

SEQ ID NO: 4030166 - DNA, 25 bp, Homo sapien
atcatttcatctcgtttcatctcat

SEQ ID NO: 4030167 - DNA, 25 bp, Homo sapien
atttcatctcgtttcatctcatcat

SEQ ID NO: 4030168 - DNA, 25 bp, Homo sapien
atttcatcatttcatctcatcattt

SEQ ID NO: 4030169 - DNA, 25 bp, Homo sapien
tcatctcatcatttcatcatttcat

SEQ ID NO: 4030170 - DNA, 25 bp, Homo sapien
catctcatcatttcatcatttcatc

SEQ ID NO: 4030171 - DNA, 25 bp, Homo sapien
atcatttcatcatttcatctcatca

SEQ ID NO: 4030172 - DNA, 25 bp, Homo sapien
aatgattctccaaacttggcctctc

SEQ ID NO: 4030173 - DNA, 25 bp, Homo sapien
ctgccttcgcaacccaaaatgctgg

SEQ ID NO: 4030174 - DNA, 25 bp, Homo sapien
taataaagaaaaggtctcaatatgt

SEQ ID NO: 4030175 - DNA, 25 bp, Homo sapien
cacagtgcccatcctatttatttac

SEQ ID NO: 4030176 - DNA, 25 bp, Homo sapien
ggtagaaatggccagtgtacggcca

SEQ ID NO: 4030177 - DNA, 25 bp, Homo sapien
tagaaatggccagtgtacggccagg

SEQ ID NO: 4030178 - DNA, 25 bp, Homo sapien
aatggccagtgtacggccaggccag

SEQ ID NO: 4030179 - DNA, 25 bp, Homo sapien
caggtcatggccaaaaacagggcag

SEQ ID NO: 4030180 - DNA, 25 bp, Homo sapien
catggcagtgcctggtcaactctgg

SEQ ID NO: 4030181 - DNA, 25 bp, Homo sapien
ccaacgttgggacagggcaaatcag

SEQ ID NO: 4030182 - DNA, 25 bp, Homo sapien
gctgggccaacgttgggacagggca

SEQ ID NO: 4030183 - DNA, 25 bp, Homo sapien
ccagggacagggcatgacaggaagt

SEQ ID NO: 4030184 - DNA, 25 bp, Homo sapien
gcccgcggcgactggggctcccacc

SEQ ID NO: 4030185 - DNA, 25 bp, Homo sapien
cccgcggcgactggggctcccacct

SEQ ID NO: 4030186 - DNA, 25 bp, Homo sapien
cgcccgcggcgactggggctcccac

SEQ ID NO: 4030187 - DNA, 25 bp, Homo sapien
cctggggtcggcttgggcgccggca

SEQ ID NO: 4030188 - DNA, 25 bp, Homo sapien
gcaattaccacaagaggtatcagat

SEQ ID NO: 4030189 - DNA, 25 bp, Homo sapien
ttccccttcacgaggccgcttttga

SEQ ID NO: 4030190 - DNA, 25 bp, Homo sapien
cacagccaggcgctttgtggtctcg

SEQ ID NO: 4030191 - DNA, 25 bp, Homo sapien
aggcgctttgtggtctcggcaccct

SEQ ID NO: 4030192 - DNA, 25 bp, Homo sapien
cgaggccgcttttgactagtagaag

SEQ ID NO: 4030193 - DNA, 25 bp, Homo sapien
gaacctgagatagagctgtggattc

SEQ ID NO: 4030194 - DNA, 25 bp, Homo sapien
gacagaagatcttgaaactttctct

SEQ ID NO: 4030195 - DNA, 25 bp, Homo sapien
tgtggattcattttcctcagacaga

SEQ ID NO: 4030196 - DNA, 25 bp, Homo sapien
ctgggctagaacctgagatagagct

SEQ ID NO: 4030197 - DNA, 25 bp, Homo sapien
taggctagcataggttcagttctcc

SEQ ID NO: 4030198 - DNA, 25 bp, Homo sapien
agtactgcctcagctctatctcaga

SEQ ID NO: 4030199 - DNA, 25 bp, Homo sapien
ctctaatttgagcatacagcagtct

SEQ ID NO: 4030200 - DNA, 25 bp, Homo sapien
ttttggttacagagtataggccaca

SEQ ID NO: 4030201 - DNA, 25 bp, Homo sapien
atgtgacggattaccacccggacct

SEQ ID NO: 4030202 - DNA, 25 bp, Homo sapien
gcatagtgctgcatgtgacggatta

SEQ ID NO: 4030203 - DNA, 25 bp, Homo sapien
tagtgctgcatgtgacggattacca

SEQ ID NO: 4030204 - DNA, 25 bp, Homo sapien
cataaggcatagtgctgcatgtgac

SEQ ID NO: 4030205 - DNA, 25 bp, Homo sapien
ctggcatgtaccactcttcaaatct

SEQ ID NO: 4030206 - DNA, 25 bp, Homo sapien
gggacagttttgtattcatcaacaa

SEQ ID NO: 4030207 - DNA, 25 bp, Homo sapien
aagaacaacattcttatacagtgga

SEQ ID NO: 4030208 - DNA, 25 bp, Homo sapien
tgggacagttttgtattcatcaaca

SEQ ID NO: 4030209 - DNA, 25 bp, Homo sapien
agaacaacattcttatacagtggac

SEQ ID NO: 4030210 - DNA, 25 bp, Homo sapien
attatgaacttctcctggttgatca

SEQ ID NO: 4030211 - DNA, 25 bp, Homo sapien
ttatgaacttctcctggttgatcac

SEQ ID NO: 4030212 - DNA, 25 bp, Homo sapien
tcatacttagcaaattccttgacta

SEQ ID NO: 4030213 - DNA, 25 bp, Homo sapien
attccttgactatatcagggcaaaa

SEQ ID NO: 4030214 - DNA, 25 bp, Homo sapien
gtatttctccttaatggcttttgtg

SEQ ID NO: 4030215 - DNA, 25 bp, Homo sapien
tatatcagggcaaaagtaacagtat

SEQ ID NO: 4030216 - DNA, 25 bp, Homo sapien
aatcaggatgtgattgatgcagctc

SEQ ID NO: 4030217 - DNA, 25 bp, Homo sapien
aatacacagtatcacctacaatcag

SEQ ID NO: 4030218 - DNA, 25 bp, Homo sapien
atacacagtatcacctacaatcagg

SEQ ID NO: 4030219 - DNA, 25 bp, Homo sapien
tacacagtatcacctacaatcagga

SEQ ID NO: 4030220 - DNA, 25 bp, Homo sapien
ataaccttctacaactgggagaaca

SEQ ID NO: 4030221 - DNA, 25 bp, Homo sapien
atgtagaatcctggtacattaaata

SEQ ID NO: 4030222 - DNA, 25 bp, Homo sapien
ctgtattttctagtgtattcagtgg

SEQ ID NO: 4030223 - DNA, 25 bp, Homo sapien
gctctgtattttctagtgtattcag

SEQ ID NO: 4030224 - DNA, 25 bp, Homo sapien
atgctctgtattttctagtgtattc

SEQ ID NO: 4030225 - DNA, 25 bp, Homo sapien
gtattttctagtgtattcagtggaa

SEQ ID NO: 4030226 - DNA, 25 bp, Homo sapien
gacactgtgatcttcaataaggttg

SEQ ID NO: 4030227 - DNA, 25 bp, Homo sapien
tataagttagcattttcaagagttc

SEQ ID NO: 4030228 - DNA, 25 bp, Homo sapien
tcaagagttcacatataggtttttt

SEQ ID NO: 4030229 - DNA, 25 bp, Homo sapien
gaattcttatcacagccaatcatcc

SEQ ID NO: 4030230 - DNA, 25 bp, Homo sapien
caacaatatctaataccttaactca

SEQ ID NO: 4030231 - DNA, 25 bp, Homo sapien
tttgatggacactgctaaattatcc

SEQ ID NO: 4030232 - DNA, 25 bp, Homo sapien
tctgtaggaatagagtcctagaaat

SEQ ID NO: 4030233 - DNA, 25 bp, Homo sapien
acacctggctggaaatgatctgtgt

SEQ ID NO: 4030234 - DNA, 25 bp, Homo sapien
catatctattgatgtgctttgctgg

SEQ ID NO: 4030235 - DNA, 25 bp, Homo sapien
cattatgtgttcgaattttaaccac

SEQ ID NO: 4030236 - DNA, 25 bp, Homo sapien
tgagtttggcattatgtgttcgaat

SEQ ID NO: 4030237 - DNA, 25 bp, Homo sapien
tcatctgttgtaggcatatctgttg

SEQ ID NO: 4030238 - DNA, 25 bp, Homo sapien
caaaggatgtgatgacagtagcatt

SEQ ID NO: 4030239 - DNA, 25 bp, Homo sapien
tgatgacagtagcatttttagccat

SEQ ID NO: 4030240 - DNA, 25 bp, Homo sapien
cttggaaccatatgcaaaggatgtg

SEQ ID NO: 4030241 - DNA, 25 bp, Homo sapien
accatatgcaaaggatgtgatgaca

SEQ ID NO: 4030242 - DNA, 25 bp, Homo sapien
cagctccaaatggagctctacttat

SEQ ID NO: 4030243 - DNA, 25 bp, Homo sapien
ccaaatggagctctacttatgggca

SEQ ID NO: 4030244 - DNA, 25 bp, Homo sapien
gctccaaatggagctctacttatgg

SEQ ID NO: 4030245 - DNA, 25 bp, Homo sapien
tccaaatggagctctacttatgggc

SEQ ID NO: 4030246 - DNA, 25 bp, Homo sapien
tggaacaccagtggcaccattaact

SEQ ID NO: 4030247 - DNA, 25 bp, Homo sapien
caccagtggcaccattaactgcttt

SEQ ID NO: 4030248 - DNA, 25 bp, Homo sapien
gtacagctatacctttgtcaacctt

SEQ ID NO: 4030249 - DNA, 25 bp, Homo sapien
aattggaacaccagtggcaccatta

SEQ ID NO: 4030250 - DNA, 25 bp, Homo sapien
tgccattgaggattgtgagcttcca

SEQ ID NO: 4030251 - DNA, 25 bp, Homo sapien
gaacagcaggctgcttcaaggtaac

SEQ ID NO: 4030252 - DNA, 25 bp, Homo sapien
aaagcaggagtatctgtagtagcag

SEQ ID NO: 4030253 - DNA, 25 bp, Homo sapien
tggtacaaaaagcaggagtatctgt

SEQ ID NO: 4030254 - DNA, 25 bp, Homo sapien
gaggaactgcgacccgcagagggct

SEQ ID NO: 4030255 - DNA, 25 bp, Homo sapien
cgaggaactgcgacccgcagagggc

SEQ ID NO: 4030256 - DNA, 25 bp, Homo sapien
ccgaggaactgcgacccgcagaggg

SEQ ID NO: 4030257 - DNA, 25 bp, Homo sapien
ggccgaggaactgcgacccgcagag

SEQ ID NO: 4030258 - DNA, 25 bp, Homo sapien
gggggtcgctctcggctgcctcacc

SEQ ID NO: 4030259 - DNA, 25 bp, Homo sapien
gcgggggggtcgctctcggctgcct

SEQ ID NO: 4030260 - DNA, 25 bp, Homo sapien
gctctcggctgcctcaccgggtaat

SEQ ID NO: 4030261 - DNA, 25 bp, Homo sapien
tcgctctcggctgcctcaccgggta

SEQ ID NO: 4030262 - DNA, 25 bp, Homo sapien
cacagaagacactactctgtccatc

SEQ ID NO: 4030263 - DNA, 25 bp, Homo sapien
ggtgataggagaggggggtgtagta

SEQ ID NO: 4030264 - DNA, 25 bp, Homo sapien
taggagaggggggtgtagtagccat

SEQ ID NO: 4030265 - DNA, 25 bp, Homo sapien
tgataggagaggggggtgtagtagc

SEQ ID NO: 4030266 - DNA, 25 bp, Homo sapien
ataggagaggggggtgtagtagcca

SEQ ID NO: 4030267 - DNA, 25 bp, Homo sapien
cttctttctttttcagtattagtgg

SEQ ID NO: 4030268 - DNA, 25 bp, Homo sapien
tctttctttttcagtattagtggac

SEQ ID NO: 4030269 - DNA, 25 bp, Homo sapien
ttctttttcagtattagtggaccca

SEQ ID NO: 4030270 - DNA, 25 bp, Homo sapien
tctttttcagtattagtggacccac

SEQ ID NO: 4030271 - DNA, 25 bp, Homo sapien
ttattatgtgaatcatcacgggcag

SEQ ID NO: 4030272 - DNA, 25 bp, Homo sapien
tattatgtgaatcatcacgggcagg

SEQ ID NO: 4030273 - DNA, 25 bp, Homo sapien
ctagcaagcagaggcccgtgtggtc

SEQ ID NO: 4030274 - DNA, 25 bp, Homo sapien
cacaggggctgggtttgacaccagt

SEQ ID NO: 4030275 - DNA, 25 bp, Homo sapien
tggcagggtagtcacattggccacg

SEQ ID NO: 4030276 - DNA, 25 bp, Homo sapien
tgacaccagtgggagccggggccct

SEQ ID NO: 4030277 - DNA, 25 bp, Homo sapien
caaatagggaatccaataaattagg

SEQ ID NO: 4030278 - DNA, 25 bp, Homo sapien
ctacaaatagggaatccaataaatt

SEQ ID NO: 4030279 - DNA, 25 bp, Homo sapien
tacaaatagggaatccaataaatta

SEQ ID NO: 4030280 - DNA, 25 bp, Homo sapien
acaaatagggaatccaataaattag

SEQ ID NO: 4030281 - DNA, 25 bp, Homo sapien
ggccaccagggccttgtgggctagg

SEQ ID NO: 4030282 - DNA, 25 bp, Homo sapien
gccaccagggccttgtgggctaggt

SEQ ID NO: 4030283 - DNA, 25 bp, Homo sapien
caccagggccttgtgggctaggtgc

SEQ ID NO: 4030284 - DNA, 25 bp, Homo sapien
ccagggccttgtgggctaggtgccg

SEQ ID NO: 4030285 - DNA, 25 bp, Homo sapien
ctgctgcatcttgggaatgcccgcc

SEQ ID NO: 4030286 - DNA, 25 bp, Homo sapien
ggcagccgagcccagcttctcaaac

SEQ ID NO: 4030287 - DNA, 25 bp, Homo sapien
tgcatcttgggaatgcccgccagct

SEQ ID NO: 4030288 - DNA, 25 bp, Homo sapien
ctcctctgtcaggctcaggcgggca

SEQ ID NO: 4030289 - DNA, 25 bp, Homo sapien
ttgccttccacgttgattctcatgg

SEQ ID NO: 4030290 - DNA, 25 bp, Homo sapien
tcttgccttccacgttgattctcat

SEQ ID NO: 4030291 - DNA, 25 bp, Homo sapien
gccttccacgttgattctcatggcg

SEQ ID NO: 4030292 - DNA, 25 bp, Homo sapien
ttccacgttgattctcatggcggca

SEQ ID NO: 4030293 - DNA, 25 bp, Homo sapien
attcatccaggagggtgtacttggg

SEQ ID NO: 4030294 - DNA, 25 bp, Homo sapien
ctggtgcattcatccaggagggtgt

SEQ ID NO: 4030295 - DNA, 25 bp, Homo sapien
ggtgcattcatccaggagggtgtac

SEQ ID NO: 4030296 - DNA, 25 bp, Homo sapien
tgcattcatccaggagggtgtactt

SEQ ID NO: 4030297 - DNA, 25 bp, Homo sapien
ccggcgggacgtccttccagtcaca

SEQ ID NO: 4030298 - DNA, 25 bp, Homo sapien
tgtggtagaacatgcgggccatgcc

SEQ ID NO: 4030299 - DNA, 25 bp, Homo sapien
ggccatgccgattctctgcttctcg

SEQ ID NO: 4030300 - DNA, 25 bp, Homo sapien
tctgcttctcgccacccggcgggac

SEQ ID NO: 4030301 - DNA, 25 bp, Homo sapien
gtcctccctggtaggcgggcctcag

SEQ ID NO: 4030302 - DNA, 25 bp, Homo sapien
ggtaggcgggcctcagaggtagcac

SEQ ID NO: 4030303 - DNA, 25 bp, Homo sapien
tcctccctggtaggcgggcctcaga

SEQ ID NO: 4030304 - DNA, 25 bp, Homo sapien
tgccctgcccctgtggcacctggca

SEQ ID NO: 4030305 - DNA, 25 bp, Homo sapien
cctctgccctgcccctgtggcacct

SEQ ID NO: 4030306 - DNA, 25 bp, Homo sapien
tctgccctgcccctgtggcacctgg

SEQ ID NO: 4030307 - DNA, 25 bp, Homo sapien
gccctgcccctgtggcacctggcac

SEQ ID NO: 4030308 - DNA, 25 bp, Homo sapien
cctggatgttgagataatcttcact

SEQ ID NO: 4030309 - DNA, 25 bp, Homo sapien
tggatgttgagataatcttcactgc

SEQ ID NO: 4030310 - DNA, 25 bp, Homo sapien
tagactcctggatgttgagataatc

SEQ ID NO: 4030311 - DNA, 25 bp, Homo sapien
gactcctggatgttgagataatctt

SEQ ID NO: 4030312 - DNA, 25 bp, Homo sapien
taggtcacctggtcacgcagggaac

SEQ ID NO: 4030313 - DNA, 25 bp, Homo sapien
ccctcccgctgcaggatgtagtgca

SEQ ID NO: 4030314 - DNA, 25 bp, Homo sapien
agtgcaggtgcatgatgtccaggat

SEQ ID NO: 4030315 - DNA, 25 bp, Homo sapien
aggatgtagtgcaggtgcatgatgt

SEQ ID NO: 4030316 - DNA, 25 bp, Homo sapien
ggagaatctgttatgggacatttgg

SEQ ID NO: 4030317 - DNA, 25 bp, Homo sapien
ttaatccttgcttttgattcagctg

SEQ ID NO: 4030318 - DNA, 25 bp, Homo sapien
gttaatccttgcttttgattcagct

SEQ ID NO: 4030319 - DNA, 25 bp, Homo sapien
tgcactggcgtctctggacatgcac

SEQ ID NO: 4030320 - DNA, 25 bp, Homo sapien
tctggacatgcacaattgttctctt

SEQ ID NO: 4030321 - DNA, 25 bp, Homo sapien
gcgtctctggacatgcacaattgtt

SEQ ID NO: 4030322 - DNA, 25 bp, Homo sapien
cactggcgtctctggacatgcacaa

SEQ ID NO: 4030323 - DNA, 25 bp, Homo sapien
tcagtgatgtacatttctcaatcgg

SEQ ID NO: 4030324 - DNA, 25 bp, Homo sapien
gatgtacatttctcaatcggcaacc

SEQ ID NO: 4030325 - DNA, 25 bp, Homo sapien
tgatgtacatttctcaatcggcaac

SEQ ID NO: 4030326 - DNA, 25 bp, Homo sapien
agtgatgtacatttctcaatcggca

SEQ ID NO: 4030327 - DNA, 25 bp, Homo sapien
ctctgctgcctggtcacattctgta

SEQ ID NO: 4030328 - DNA, 25 bp, Homo sapien
tctgctgcctggtcacattctgtac

SEQ ID NO: 4030329 - DNA, 25 bp, Homo sapien
gggcactgaacaggtacatgattcc

SEQ ID NO: 4030330 - DNA, 25 bp, Homo sapien
catctcatcatcatttcatctcatc

SEQ ID NO: 4030331 - DNA, 25 bp, Homo sapien
tcatcatcatttcatctcatcattt

SEQ ID NO: 4030332 - DNA, 25 bp, Homo sapien
tctcatcatcatttcatctcatcat

SEQ ID NO: 4030333 - DNA, 25 bp, Homo sapien
atttcatcatttcatctcatcatca

SEQ ID NO: 4030334 - DNA, 25 bp, Homo sapien
tttcatttcatgtagtcatttcatt

SEQ ID NO: 4030335 - DNA, 25 bp, Homo sapien
atatcatttcatcatttcatttcat

SEQ ID NO: 4030336 - DNA, 25 bp, Homo sapien
gagagcacgtctctacatctatacc

SEQ ID NO: 4030337 - DNA, 25 bp, Homo sapien
tgagagcacgtctctacatctatac

SEQ ID NO: 4030338 - DNA, 25 bp, Homo sapien
tcctgagagcacgtctctacatcta

SEQ ID NO: 4030339 - DNA, 25 bp, Homo sapien
gagcacgtctctacatctatacctg

SEQ ID NO: 4030340 - DNA, 25 bp, Homo sapien
ttttggtgcaaggatgagaagccct

SEQ ID NO: 4030341 - DNA, 25 bp, Homo sapien
tggtgcaaggatgagaagcccttaa

SEQ ID NO: 4030342 - DNA, 25 bp, Homo sapien
caaggatgagaagcccttaaaagta

SEQ ID NO: 4030343 - DNA, 25 bp, Homo sapien
gatcttttggtgcaaggatgagaag

SEQ ID NO: 4030344 - DNA, 25 bp, Homo sapien
acagcgcacttgttgcgcaaccggc

SEQ ID NO: 4030345 - DNA, 25 bp, Homo sapien
acacagcgcacttgttgcgcaaccg

SEQ ID NO: 4030346 - DNA, 25 bp, Homo sapien
cacagcgcacttgttgcgcaaccgg

SEQ ID NO: 4030347 - DNA, 25 bp, Homo sapien
gagctgcccacaagcttctggagct

SEQ ID NO: 4030348 - DNA, 25 bp, Homo sapien
gctgcccacaagcttctggagctgc

SEQ ID NO: 4030349 - DNA, 25 bp, Homo sapien
gccaatggagatgcggataagcttc

SEQ ID NO: 4030350 - DNA, 25 bp, Homo sapien
tggagctgcccacaagcttctggag

SEQ ID NO: 4030351 - DNA, 25 bp, Homo sapien
tgcagcgtctggctggctgcggccc

SEQ ID NO: 4030352 - DNA, 25 bp, Homo sapien
gctgcagcgtctggctggctgcggc

SEQ ID NO: 4030353 - DNA, 25 bp, Homo sapien
ctgcagcgtctggctggctgcggcc

SEQ ID NO: 4030354 - DNA, 25 bp, Homo sapien
tgctgcagcgtctggctggctgcgg

SEQ ID NO: 4030355 - DNA, 25 bp, Homo sapien
ctcccctggccgctacgcgcagcgc

SEQ ID NO: 4030356 - DNA, 25 bp, Homo sapien
tctcccctggccgctacgcgcagcg

SEQ ID NO: 4030357 - DNA, 25 bp, Homo sapien
ttctctcccctggccgctacgcgca

SEQ ID NO: 4030358 - DNA, 25 bp, Homo sapien
cccctggccgctacgcgcagcgccg

SEQ ID NO: 4030359 - DNA, 25 bp, Homo sapien
ctatgcaggccgcagcggccaaggc

SEQ ID NO: 4030360 - DNA, 25 bp, Homo sapien
cctcagagccgcggcagcggtggca

SEQ ID NO: 4030361 - DNA, 25 bp, Homo sapien
ccggcgccgcctgaacaaggacgcc

SEQ ID NO: 4030362 - DNA, 25 bp, Homo sapien
ccccggcgccgcctgaacaaggacg

SEQ ID NO: 4030363 - DNA, 25 bp, Homo sapien
cagagccgcggcagcggtggcaaaa

SEQ ID NO: 4030364 - DNA, 25 bp, Homo sapien
gacatggcttgaatgtgcaagaaaa

SEQ ID NO: 4030365 - DNA, 25 bp, Homo sapien
ctttcaaggtgatctgacatggctt

SEQ ID NO: 4030366 - DNA, 25 bp, Homo sapien
tgagaatttattcccatggacaggg

SEQ ID NO: 4030367 - DNA, 25 bp, Homo sapien
tcatggcaccaattgttagtcactt

SEQ ID NO: 4030368 - DNA, 25 bp, Homo sapien
cctaggtactgtgctagagctatca

SEQ ID NO: 4030369 - DNA, 25 bp, Homo sapien
cagatgtaaaggctagtgaagacca

SEQ ID NO: 4030370 - DNA, 25 bp, Homo sapien
cacacgtagcaaaagagagtcacat

SEQ ID NO: 4030371 - DNA, 25 bp, Homo sapien
cattcaatgtgagagttatgatctc

SEQ ID NO: 4030372 - DNA, 25 bp, Homo sapien
acagacaagagacgagaagacctga

SEQ ID NO: 4030373 - DNA, 25 bp, Homo sapien
caagagacgagaagacctgaactct

SEQ ID NO: 4030374 - DNA, 25 bp, Homo sapien
gacaagagacgagaagacctgaact

SEQ ID NO: 4030375 - DNA, 25 bp, Homo sapien
ggacagacaagagacgagaagacct

SEQ ID NO: 4030376 - DNA, 25 bp, Homo sapien
gtgccccggcccaaaggtgcaggtc

SEQ ID NO: 4030377 - DNA, 25 bp, Homo sapien
gttttcagatatgcccaggtacccc

SEQ ID NO: 4030378 - DNA, 25 bp, Homo sapien
cttccttttcttaagctctgaaaat

SEQ ID NO: 4030379 - DNA, 25 bp, Homo sapien
tcaaggttttcagatatgcccaggt

SEQ ID NO: 4030380 - DNA, 25 bp, Homo sapien
tttcttaagctctgaaaatgcaaac

SEQ ID NO: 4030381 - DNA, 25 bp, Homo sapien
ctgaaaaggaggataatggcattgt

SEQ ID NO: 4030382 - DNA, 25 bp, Homo sapien
aaaggaggataatggcattgttcat

SEQ ID NO: 4030383 - DNA, 25 bp, Homo sapien
gaaaaggaggataatggcattgttc

SEQ ID NO: 4030384 - DNA, 25 bp, Homo sapien
aaaaggaggataatggcattgttca

SEQ ID NO: 4030385 - DNA, 25 bp, Homo sapien
ttctggaagctcgccttctcctgct

SEQ ID NO: 4030386 - DNA, 25 bp, Homo sapien
gcttctggaagctcgccttctcctg

SEQ ID NO: 4030387 - DNA, 25 bp, Homo sapien
tgctggctcttcgttttccccaccc

SEQ ID NO: 4030388 - DNA, 25 bp, Homo sapien
tcctgctggctcttcgttttcccca

SEQ ID NO: 4030389 - DNA, 25 bp, Homo sapien
cagtcttgtatacagtctccagggc

SEQ ID NO: 4030390 - DNA, 25 bp, Homo sapien
gagacccatggaattattgagcctg

SEQ ID NO: 4030391 - DNA, 25 bp, Homo sapien
gcagcaggcaggactttcaattgac

SEQ ID NO: 4030392 - DNA, 25 bp, Homo sapien
ctattataaacacgctcatgagggc

SEQ ID NO: 4030393 - DNA, 25 bp, Homo sapien
gtccacactaagaccctgaggcctg

SEQ ID NO: 4030394 - DNA, 25 bp, Homo sapien
gacctagatatggaccacgcagcga

SEQ ID NO: 4030395 - DNA, 25 bp, Homo sapien
tacactggtgggaaagtctccgtga

SEQ ID NO: 4030396 - DNA, 25 bp, Homo sapien
ccgtagctgtttccttagtggatgc

SEQ ID NO: 4030397 - DNA, 25 bp, Homo sapien
caggaaatcgagacactcgtgaggg

SEQ ID NO: 4030398 - DNA, 25 bp, Homo sapien
cacggcaacgctgctgtggaggcca

SEQ ID NO: 4030399 - DNA, 25 bp, Homo sapien
tgttggctgacaggaaatcgagaca

SEQ ID NO: 4030400 - DNA, 25 bp, Homo sapien
gaggccatgaaaggcgaacggccct

SEQ ID NO: 4030401 - DNA, 25 bp, Homo sapien
tctccgcagggcgaaactgctgggc

SEQ ID NO: 4030402 - DNA, 25 bp, Homo sapien
gacagggagcggaaccgtcttcaac

SEQ ID NO: 4030403 - DNA, 25 bp, Homo sapien
caattaccaggtgaaactagccgcc

SEQ ID NO: 4030404 - DNA, 25 bp, Homo sapien
taaaagcctgcagctcgaggagaca

SEQ ID NO: 4030405 - DNA, 25 bp, Homo sapien
ggtgcatactgggagttgtagtctc

SEQ ID NO: 4030406 - DNA, 25 bp, Homo sapien
gcatactgggagttgtagtctctcc

SEQ ID NO: 4030407 - DNA, 25 bp, Homo sapien
cgcggtgcatactgggagttgtagt

SEQ ID NO: 4030408 - DNA, 25 bp, Homo sapien
tgcatactgggagttgtagtctctc

SEQ ID NO: 4030409 - DNA, 25 bp, Homo sapien
gctctctccaagcaaagcacaagct

SEQ ID NO: 4030410 - DNA, 25 bp, Homo sapien
aaagcacaagctgagccgccttgga

SEQ ID NO: 4030411 - DNA, 25 bp, Homo sapien
gctgctcagctcgattttctttccc

SEQ ID NO: 4030412 - DNA, 25 bp, Homo sapien
cttggaaagacaaccacggcctggc

SEQ ID NO: 4030413 - DNA, 25 bp, Homo sapien
catttattaatagaagctatgtctc

SEQ ID NO: 4030414 - DNA, 25 bp, Homo sapien
taaacccagacacttatcacaggaa

SEQ ID NO: 4030415 - DNA, 25 bp, Homo sapien
cctaaacccagacacttatcacagg

SEQ ID NO: 4030416 - DNA, 25 bp, Homo sapien
tatgtctcagatagctgaagatggt

SEQ ID NO: 4030417 - DNA, 25 bp, Homo sapien
gaggctcaagggggcagacagtgcc

SEQ ID NO: 4030418 - DNA, 25 bp, Homo sapien
agactgcgttaggaagaggctcaag

SEQ ID NO: 4030419 - DNA, 25 bp, Homo sapien
tcaagactgcgttaggaagaggctc

SEQ ID NO: 4030420 - DNA, 25 bp, Homo sapien
ggctcaagggggcagacagtgccac

SEQ ID NO: 4030421 - DNA, 25 bp, Homo sapien
cttcaggaacgacagacagcttttc

SEQ ID NO: 4030422 - DNA, 25 bp, Homo sapien
tccttcttggagtgcggaggtcctg

SEQ ID NO: 4030423 - DNA, 25 bp, Homo sapien
gtctcctcgtttgctcagccggcag

SEQ ID NO: 4030424 - DNA, 25 bp, Homo sapien
tgaggtggtcctgcgtctcgaggag

SEQ ID NO: 4030425 - DNA, 25 bp, Homo sapien
gcctgccacgcaacatgctcaggtg

SEQ ID NO: 4030426 - DNA, 25 bp, Homo sapien
ctgctgcgaggcgagttggtctgca

SEQ ID NO: 4030427 - DNA, 25 bp, Homo sapien
ttgtgcaggacacatcgccgccctt

SEQ ID NO: 4030428 - DNA, 25 bp, Homo sapien
tgctcaggtgccagatctcgggcat

SEQ ID NO: 4030429 - DNA, 25 bp, Homo sapien
ttcctgtccatccactggggcaaag

SEQ ID NO: 4030430 - DNA, 25 bp, Homo sapien
cctgtccatccactggggcaaagtc

SEQ ID NO: 4030431 - DNA, 25 bp, Homo sapien
tcctgtccatccactggggcaaagt

SEQ ID NO: 4030432 - DNA, 25 bp, Homo sapien
tgtccatccactggggcaaagtcca

SEQ ID NO: 4030433 - DNA, 25 bp, Homo sapien
ttccccacagtgacctccttgccat

SEQ ID NO: 4030434 - DNA, 25 bp, Homo sapien
gcccacctttcggtggaggatgctg

SEQ ID NO: 4030435 - DNA, 25 bp, Homo sapien
ttgccattcacatgcagcgacaggc

SEQ ID NO: 4030436 - DNA, 25 bp, Homo sapien
acaggcccacctttcggtggaggat

SEQ ID NO: 4030437 - DNA, 25 bp, Homo sapien
actgttccaggccagaatgacggaa

SEQ ID NO: 4030438 - DNA, 25 bp, Homo sapien
ttttacaaccctcatggccaccctg

SEQ ID NO: 4030439 - DNA, 25 bp, Homo sapien
gacggaattgttccgctgctgctgt

SEQ ID NO: 4030440 - DNA, 25 bp, Homo sapien
caaatgctgttggcatcacttttac

SEQ ID NO: 4030441 - DNA, 25 bp, Homo sapien
tttgtgagtctccacagaatcagct

SEQ ID NO: 4030442 - DNA, 25 bp, Homo sapien
ttagattcagagcaggtggttggac

SEQ ID NO: 4030443 - DNA, 25 bp, Homo sapien
ggaaatactagatatcacgtactga

SEQ ID NO: 4030444 - DNA, 25 bp, Homo sapien
tttctcacggaaaaatagagtatga

SEQ ID NO: 4030445 - DNA, 25 bp, Homo sapien
tgtgaaataggcaatatttgtccct

SEQ ID NO: 4030446 - DNA, 25 bp, Homo sapien
gccattgtgcaaactctcacttaat

SEQ ID NO: 4030447 - DNA, 25 bp, Homo sapien
caaactctcacttaatttctggcag

SEQ ID NO: 4030448 - DNA, 25 bp, Homo sapien
tctcacttaatttctggcagtttcc

SEQ ID NO: 4030449 - DNA, 25 bp, Homo sapien
cacagttatgcagcaatttatcttt

SEQ ID NO: 4030450 - DNA, 25 bp, Homo sapien
ggtcatattatgtttgcttacggca

SEQ ID NO: 4030451 - DNA, 25 bp, Homo sapien
tgcttacggcaaagttatcagcaaa

SEQ ID NO: 4030452 - DNA, 25 bp, Homo sapien
aaaaaagtcacagttatgcagcaat

SEQ ID NO: 4030453 - DNA, 25 bp, Homo sapien
ccaaaaggaaaggagtgcgtagctc

SEQ ID NO: 4030454 - DNA, 25 bp, Homo sapien
aaaaggaaaggagtgcgtagctctg

SEQ ID NO: 4030455 - DNA, 25 bp, Homo sapien
tccaaaaggaaaggagtgcgtagct

SEQ ID NO: 4030456 - DNA, 25 bp, Homo sapien
aaggaaaggagtgcgtagctctgtt

SEQ ID NO: 4030457 - DNA, 25 bp, Homo sapien
gcagtccctggggaggccggcgcgg

SEQ ID NO: 4030458 - DNA, 25 bp, Homo sapien
ggccctggcggccgctaggcgctct

SEQ ID NO: 4030459 - DNA, 25 bp, Homo sapien
ctggcggccgctaggcgctctggct

SEQ ID NO: 4030460 - DNA, 25 bp, Homo sapien
gttggggccctggcggccgctaggc

SEQ ID NO: 4030461 - DNA, 25 bp, Homo sapien
ctgggagatgaagcgggcaggcgct

SEQ ID NO: 4030462 - DNA, 25 bp, Homo sapien
ggagatgaagcgggcaggcgctcca

SEQ ID NO: 4030463 - DNA, 25 bp, Homo sapien
agatgaagcgggcaggcgctccagg

SEQ ID NO: 4030464 - DNA, 25 bp, Homo sapien
gatgaagcgggcaggcgctccaggt

SEQ ID NO: 4030465 - DNA, 25 bp, Homo sapien
gctggatgtctttgtgcccggcgcc

SEQ ID NO: 4030466 - DNA, 25 bp, Homo sapien
ggatgtctttgtgcccggcgccctc

SEQ ID NO: 4030467 - DNA, 25 bp, Homo sapien
tagagctggatgtctttgtgcccgg

SEQ ID NO: 4030468 - DNA, 25 bp, Homo sapien
tgtagagctggatgtctttgtgccc

SEQ ID NO: 4030469 - DNA, 25 bp, Homo sapien
acctcgtctttcgtgtcctggatga

SEQ ID NO: 4030470 - DNA, 25 bp, Homo sapien
ggcgttggggcagcgctggtagagc

SEQ ID NO: 4030471 - DNA, 25 bp, Homo sapien
ccacggcgttggggcagcgctggta

SEQ ID NO: 4030472 - DNA, 25 bp, Homo sapien
gaagtccatcacctcgtctttcgtg

SEQ ID NO: 4030473 - DNA, 25 bp, Homo sapien
tggggaaggcgtcgaagcagtaggt

SEQ ID NO: 4030474 - DNA, 25 bp, Homo sapien
ttggggaaggcgtcgaagcagtagg

SEQ ID NO: 4030475 - DNA, 25 bp, Homo sapien
ctcaggtccaaggtgagcggcgagt

SEQ ID NO: 4030476 - DNA, 25 bp, Homo sapien
tccacggtgggcaccgtgccgatgc

SEQ ID NO: 4030477 - DNA, 25 bp, Homo sapien
cgtggcggactcgtagcgcgaggcc

SEQ ID NO: 4030478 - DNA, 25 bp, Homo sapien
ccacggtgggcaccgtgccgatgct

SEQ ID NO: 4030479 - DNA, 25 bp, Homo sapien
gactcgtagcgcgaggccaggtcca

SEQ ID NO: 4030480 - DNA, 25 bp, Homo sapien
acaggatgatgccgtccgggctgat

SEQ ID NO: 4030481 - DNA, 25 bp, Homo sapien
gtacaggatgatgccgtccgggctg

SEQ ID NO: 4030482 - DNA, 25 bp, Homo sapien
ctgccggtacaggatgatgccgtcc

SEQ ID NO: 4030483 - DNA, 25 bp, Homo sapien
gatgccgtccgggctgatgcggtac

SEQ ID NO: 4030484 - DNA, 25 bp, Homo sapien
tccaggctctgatgccaggcagatg

SEQ ID NO: 4030485 - DNA, 25 bp, Homo sapien
gtcgatgccgagaccccagaactct

SEQ ID NO: 4030486 - DNA, 25 bp, Homo sapien
caccctgtcgatgccgagaccccag

SEQ ID NO: 4030487 - DNA, 25 bp, Homo sapien
ctgccaccctgtcgatgccgagacc

SEQ ID NO: 4030488 - DNA, 25 bp, Homo sapien
tgatgtcggcgtagaggttcgtctc

SEQ ID NO: 4030489 - DNA, 25 bp, Homo sapien
gcgttgatgtcggcgtagaggttcg

SEQ ID NO: 4030490 - DNA, 25 bp, Homo sapien
tagccagagtagtggtaggagaaaa

SEQ ID NO: 4030491 - DNA, 25 bp, Homo sapien
gtagccagagtagtggtaggagaaa

SEQ ID NO: 4030492 - DNA, 25 bp, Homo sapien
tttcggatgctgtgatttttgtaat

SEQ ID NO: 4030493 - DNA, 25 bp, Homo sapien
ttttcggatgctgtgatttttgtaa

SEQ ID NO: 4030494 - DNA, 25 bp, Homo sapien
ccagcactattaacttactgcagac

SEQ ID NO: 4030495 - DNA, 25 bp, Homo sapien
cactattaacttactgcagactctt

SEQ ID NO: 4030496 - DNA, 25 bp, Homo sapien
tgatgtttaccagcactattaactt

SEQ ID NO: 4030497 - DNA, 25 bp, Homo sapien
accccactacaatgatgtttaccag

SEQ ID NO: 4030498 - DNA, 25 bp, Homo sapien
ttttcaaatagcgcatttttttcac

SEQ ID NO: 4030499 - DNA, 25 bp, Homo sapien
caaatagcgcatttttttcacagac

SEQ ID NO: 4030500 - DNA, 25 bp, Homo sapien
ctacttttcaaatagcgcatttttt

SEQ ID NO: 4030501 - DNA, 25 bp, Homo sapien
ttcaaatagcgcatttttttcacag

SEQ ID NO: 4030502 - DNA, 25 bp, Homo sapien
tgagatactgactcagtttataacc

SEQ ID NO: 4030503 - DNA, 25 bp, Homo sapien
tcttgagatactgactcagtttata

SEQ ID NO: 4030504 - DNA, 25 bp, Homo sapien
tcaaatcttgagatactgactcagt

SEQ ID NO: 4030505 - DNA, 25 bp, Homo sapien
gatactgactcagtttataaccgca

SEQ ID NO: 4030506 - DNA, 25 bp, Homo sapien
tttcacttcatttcattgtttcatt

SEQ ID NO: 4030507 - DNA, 25 bp, Homo sapien
ttcatctcatttcatttcacttcat

SEQ ID NO: 4030508 - DNA, 25 bp, Homo sapien
ttcatttcacttcatttcattgttt

SEQ ID NO: 4030509 - DNA, 25 bp, Homo sapien
catctcatttcatttcacttcattt

SEQ ID NO: 4030510 - DNA, 25 bp, Homo sapien
catcatttcatcatctcatgatttc

SEQ ID NO: 4030511 - DNA, 25 bp, Homo sapien
catttcatcatctcatgatttcatt

SEQ ID NO: 4030512 - DNA, 25 bp, Homo sapien
tcatcatttcatcatctcatgattt

SEQ ID NO: 4030513 - DNA, 25 bp, Homo sapien
tcatctcatcatttcatcatctcat

SEQ ID NO: 4030514 - DNA, 25 bp, Homo sapien
ggttcctggcaagtcatttctccct

SEQ ID NO: 4030515 - DNA, 25 bp, Homo sapien
tataatgtcttaaccacgggtgcgg

SEQ ID NO: 4030516 - DNA, 25 bp, Homo sapien
cctacaagatgagagggctggacca

SEQ ID NO: 4030517 - DNA, 25 bp, Homo sapien
caagacagttcattcgggctgagcc

SEQ ID NO: 4030518 - DNA, 25 bp, Homo sapien
gccaggagtgaactggggccccgaa

SEQ ID NO: 4030519 - DNA, 25 bp, Homo sapien
cgaaggaggtgtccgggctgctcct

SEQ ID NO: 4030520 - DNA, 25 bp, Homo sapien
tcaagggtgcaactcggccaggagt

SEQ ID NO: 4030521 - DNA, 25 bp, Homo sapien
gccccgaaggaggtgtccgggctgc

SEQ ID NO: 4030522 - DNA, 25 bp, Homo sapien
cccaccaccaccatccttcttctcc

SEQ ID NO: 4030523 - DNA, 25 bp, Homo sapien
acaggctgccaatgaagatgacgat

SEQ ID NO: 4030524 - DNA, 25 bp, Homo sapien
ccctgtgccaccctccgtggccgcc

SEQ ID NO: 4030525 - DNA, 25 bp, Homo sapien
gtgccaccctccgtggccgccgcat

SEQ ID NO: 4030526 - DNA, 25 bp, Homo sapien
aacattccattggaaaaagctacac

SEQ ID NO: 4030527 - DNA, 25 bp, Homo sapien
aaacattccattggaaaaagctaca

SEQ ID NO: 4030528 - DNA, 25 bp, Homo sapien
taaacattccattggaaaaagctac

SEQ ID NO: 4030529 - DNA, 25 bp, Homo sapien
tataaggtgtggtcaccgaagtctt

SEQ ID NO: 4030530 - DNA, 25 bp, Homo sapien
ttataaggtgtggtcaccgaagtct

SEQ ID NO: 4030531 - DNA, 25 bp, Homo sapien
tttataaggtgtggtcaccgaagtc

SEQ ID NO: 4030532 - DNA, 25 bp, Homo sapien
tccatcgtccgtatttcctgctggg

SEQ ID NO: 4030533 - DNA, 25 bp, Homo sapien
ccctgaccctgaaatgcctggccct

SEQ ID NO: 4030534 - DNA, 25 bp, Homo sapien
gccctgaccctgaaatgcctggccc

SEQ ID NO: 4030535 - DNA, 25 bp, Homo sapien
ttgctggtcttaccatggcccagac

SEQ ID NO: 4030536 - DNA, 25 bp, Homo sapien
tgctggtcttaccatggcccagacc

SEQ ID NO: 4030537 - DNA, 25 bp, Homo sapien
gtttggtgtcattgtggtgcatgag

SEQ ID NO: 4030538 - DNA, 25 bp, Homo sapien
gtgtcattgtggtgcatgaggtggc

SEQ ID NO: 4030539 - DNA, 25 bp, Homo sapien
tttggtgtcattgtggtgcatgagg

SEQ ID NO: 4030540 - DNA, 25 bp, Homo sapien
tggtgtcattgtggtgcatgaggtg

SEQ ID NO: 4030541 - DNA, 25 bp, Homo sapien
tataaagcagttggcctgagctcag

SEQ ID NO: 4030542 - DNA, 25 bp, Homo sapien
gcagagacctggctgacagtgtata

SEQ ID NO: 4030543 - DNA, 25 bp, Homo sapien
ttagcagagggtgattgtcatccag

SEQ ID NO: 4030544 - DNA, 25 bp, Homo sapien
agagggtgattgtcatccaggcaga

SEQ ID NO: 4030545 - DNA, 25 bp, Homo sapien
gccgtattctaagccaggtccctct

SEQ ID NO: 4030546 - DNA, 25 bp, Homo sapien
ggttggccgtattctaagccaggtc

SEQ ID NO: 4030547 - DNA, 25 bp, Homo sapien
tcttggttggccgtattctaagcca

SEQ ID NO: 4030548 - DNA, 25 bp, Homo sapien
ccaggctcttggttggccgtattct

SEQ ID NO: 4030549 - DNA, 25 bp, Homo sapien
agccgtctcgggactggacgtgaca

SEQ ID NO: 4030550 - DNA, 25 bp, Homo sapien
ccgtctcgggactggacgtgacaga

SEQ ID NO: 4030551 - DNA, 25 bp, Homo sapien
cagccgtctcgggactggacgtgac

SEQ ID NO: 4030552 - DNA, 25 bp, Homo sapien
gtctcgggactggacgtgacagaca

SEQ ID NO: 4030553 - DNA, 25 bp, Homo sapien
ggtgcaggaagtgcatccgccttga

SEQ ID NO: 4030554 - DNA, 25 bp, Homo sapien
tgcaggaagtgcatccgccttgagc

SEQ ID NO: 4030555 - DNA, 25 bp, Homo sapien
aggtgcaggaagtgcatccgccttg

SEQ ID NO: 4030556 - DNA, 25 bp, Homo sapien
caggaagtgcatccgccttgagcct

SEQ ID NO: 4030557 - DNA, 25 bp, Homo sapien
tattggtggtgattggcgcaggaac

SEQ ID NO: 4030558 - DNA, 25 bp, Homo sapien
cacacaattgatattggtggtgatt

SEQ ID NO: 4030559 - DNA, 25 bp, Homo sapien
gaaccagaaggttccactgctggct

SEQ ID NO: 4030560 - DNA, 25 bp, Homo sapien
tgattggcgcaggaaccagaaggtt

SEQ ID NO: 4030561 - DNA, 25 bp, Homo sapien
cagaccccaaaagcgtcagggaaag

SEQ ID NO: 4030562 - DNA, 25 bp, Homo sapien
cctctcccaggcagaccccaaaagc

SEQ ID NO: 4030563 - DNA, 25 bp, Homo sapien
caggcagaccccaaaagcgtcaggg

SEQ ID NO: 4030564 - DNA, 25 bp, Homo sapien
ccaaaagcgtcagggaaaggcaggc

SEQ ID NO: 4030565 - DNA, 25 bp, Homo sapien
gatgtgagctgagctgtcccatgac

SEQ ID NO: 4030566 - DNA, 25 bp, Homo sapien
ctggtgatgtgagctgagctgtccc

SEQ ID NO: 4030567 - DNA, 25 bp, Homo sapien
ggtgagctggtgatgtgagctgagc

SEQ ID NO: 4030568 - DNA, 25 bp, Homo sapien
gtgatgtgagctgagctgtcccatg

SEQ ID NO: 4030569 - DNA, 25 bp, Homo sapien
ccttgctgctctcggacactggggt

SEQ ID NO: 4030570 - DNA, 25 bp, Homo sapien
tgagctcggtactccaagtggtgga

SEQ ID NO: 4030571 - DNA, 25 bp, Homo sapien
cctgagctcggtactccaagtggtg

SEQ ID NO: 4030572 - DNA, 25 bp, Homo sapien
tgctgctctcggacactggggtcag

SEQ ID NO: 4030573 - DNA, 25 bp, Homo sapien
acagcatggaggacagcacgaaggc

SEQ ID NO: 4030574 - DNA, 25 bp, Homo sapien
gcagtggcatgcacagcatggagga

SEQ ID NO: 4030575 - DNA, 25 bp, Homo sapien
gcacagcatggaggacagcacgaag

SEQ ID NO: 4030576 - DNA, 25 bp, Homo sapien
ctcagccatggtgcccttggccctg

SEQ ID NO: 4030577 - DNA, 25 bp, Homo sapien
gtagtacacaacgttgaagatgaag

SEQ ID NO: 4030578 - DNA, 25 bp, Homo sapien
agtacacaacgttgaagatgaagat

SEQ ID NO: 4030579 - DNA, 25 bp, Homo sapien
tagtacacaacgttgaagatgaaga

SEQ ID NO: 4030580 - DNA, 25 bp, Homo sapien
cccgatcatacaggcaatgtcgtcc

SEQ ID NO: 4030581 - DNA, 25 bp, Homo sapien
agcaccatttcatccaggggcaagg

SEQ ID NO: 4030582 - DNA, 25 bp, Homo sapien
tcggtacccgatcatacaggcaatg

SEQ ID NO: 4030583 - DNA, 25 bp, Homo sapien
gggcaaggtcggtacccgatcatac

SEQ ID NO: 4030584 - DNA, 25 bp, Homo sapien
ccaccacgcactcccaaaaggcctg

SEQ ID NO: 4030585 - DNA, 25 bp, Homo sapien
ccaccaccacgcactcccaaaaggc

SEQ ID NO: 4030586 - DNA, 25 bp, Homo sapien
cacgcactcccaaaaggcctgccag

SEQ ID NO: 4030587 - DNA, 25 bp, Homo sapien
cgcactcccaaaaggcctgccagag

SEQ ID NO: 4030588 - DNA, 25 bp, Homo sapien
gcacaacagagggccacagagatct

SEQ ID NO: 4030589 - DNA, 25 bp, Homo sapien
cacaacagagggccacagagatctc

SEQ ID NO: 4030590 - DNA, 25 bp, Homo sapien
tgaggaggccggtgatgaagccctc

SEQ ID NO: 4030591 - DNA, 25 bp, Homo sapien
ggttgaggaggccggtgatgaagcc

SEQ ID NO: 4030592 - DNA, 25 bp, Homo sapien
gaggccggtgatgaagccctccaca

SEQ ID NO: 4030593 - DNA, 25 bp, Homo sapien
ggaggttgaggaggccggtgatgaa

SEQ ID NO: 4030594 - DNA, 25 bp, Homo sapien
cccatgcaaatctggctgtcgagac

SEQ ID NO: 4030595 - DNA, 25 bp, Homo sapien
agagccccatgcaaatctggctgtc

SEQ ID NO: 4030596 - DNA, 25 bp, Homo sapien
ccagagccccatgcaaatctggctg

SEQ ID NO: 4030597 - DNA, 25 bp, Homo sapien
gccccatgcaaatctggctgtcgag

SEQ ID NO: 4030598 - DNA, 25 bp, Homo sapien
gcatgaagaagaacagggcagccca

SEQ ID NO: 4030599 - DNA, 25 bp, Homo sapien
gagaagaccacgaagccagcaaaga

SEQ ID NO: 4030600 - DNA, 25 bp, Homo sapien
tgttgatgacagccaggatgatggc

SEQ ID NO: 4030601 - DNA, 25 bp, Homo sapien
ctgttgatgacagccaggatgatgg

SEQ ID NO: 4030602 - DNA, 25 bp, Homo sapien
tgatgacagccaggatgatggcgtc

SEQ ID NO: 4030603 - DNA, 25 bp, Homo sapien
ttgatgacagccaggatgatggcgt

SEQ ID NO: 4030604 - DNA, 25 bp, Homo sapien
gggcccccaggccaatggcataaga

SEQ ID NO: 4030605 - DNA, 25 bp, Homo sapien
ttgttgaagcggttgtagctgccca

SEQ ID NO: 4030606 - DNA, 25 bp, Homo sapien
ccaggccaatggcataagaaaagaa

SEQ ID NO: 4030607 - DNA, 25 bp, Homo sapien
aagaaaatctgggtccccacatcta

SEQ ID NO: 4030608 - DNA, 25 bp, Homo sapien
gaccagtcaggcttgagatagtaaa

SEQ ID NO: 4030609 - DNA, 25 bp, Homo sapien
agctttgaccagtcaggcttgagat

SEQ ID NO: 4030610 - DNA, 25 bp, Homo sapien
gcacgaccaggaccacgtaggggaa

SEQ ID NO: 4030611 - DNA, 25 bp, Homo sapien
caggaccacgtaggggaatgtagca

SEQ ID NO: 4030612 - DNA, 25 bp, Homo sapien
aagcccactccgagcacctccggtc

SEQ ID NO: 4030613 - DNA, 25 bp, Homo sapien
agcccactccgagcacctccggtcc

SEQ ID NO: 4030614 - DNA, 25 bp, Homo sapien
cacccagcaggccagcagacaaagg

SEQ ID NO: 4030615 - DNA, 25 bp, Homo sapien
agcaggccagcagacaaagggtcac

SEQ ID NO: 4030616 - DNA, 25 bp, Homo sapien
ccagcaggccagcagacaaagggtc

SEQ ID NO: 4030617 - DNA, 25 bp, Homo sapien
acagaagtagaccagcacccagcag

SEQ ID NO: 4030618 - DNA, 25 bp, Homo sapien
cccagacagcctcaagactttgttc

SEQ ID NO: 4030619 - DNA, 25 bp, Homo sapien
cccagttgagggcccctggcacctc

SEQ ID NO: 4030620 - DNA, 25 bp, Homo sapien
taaaggacttgaccaggtaatagaa

SEQ ID NO: 4030621 - DNA, 25 bp, Homo sapien
taggtgttgcagtagaagacgatca

SEQ ID NO: 4030622 - DNA, 25 bp, Homo sapien
caggccagcaccatgatgtagtagg

SEQ ID NO: 4030623 - DNA, 25 bp, Homo sapien
aaggacttgaccaggtaatagaagc

SEQ ID NO: 4030624 - DNA, 25 bp, Homo sapien
ccgggaagtccttgccatgtagatt

SEQ ID NO: 4030625 - DNA, 25 bp, Homo sapien
agccttgtttgtggtgctcctgact

SEQ ID NO: 4030626 - DNA, 25 bp, Homo sapien
tgctcccaccgtctgtccttctgga

SEQ ID NO: 4030627 - DNA, 25 bp, Homo sapien
catgtagattctttcctggccacct

SEQ ID NO: 4030628 - DNA, 25 bp, Homo sapien
cagggctatcaggatgcagggaata

SEQ ID NO: 4030629 - DNA, 25 bp, Homo sapien
ttcctccgaccagggctatcaggat

SEQ ID NO: 4030630 - DNA, 25 bp, Homo sapien
gctatcaggatgcagggaataagga

SEQ ID NO: 4030631 - DNA, 25 bp, Homo sapien
tccgaccagggctatcaggatgcag

SEQ ID NO: 4030632 - DNA, 25 bp, Homo sapien
gctttcccacctcggcggccaatcg

SEQ ID NO: 4030633 - DNA, 25 bp, Homo sapien
ctgctttcccacctcggcggccaat

SEQ ID NO: 4030634 - DNA, 25 bp, Homo sapien
cacctcggcggccaatcgctccttc

SEQ ID NO: 4030635 - DNA, 25 bp, Homo sapien
gcggccaatcgctccttccagccca

SEQ ID NO: 4030636 - DNA, 25 bp, Homo sapien
gcctcgcgggcatcgccggcccccg

SEQ ID NO: 4030637 - DNA, 25 bp, Homo sapien
cctcgcgggcatcgccggcccccgc

SEQ ID NO: 4030638 - DNA, 25 bp, Homo sapien
agcctcgcgggcatcgccggccccc

SEQ ID NO: 4030639 - DNA, 25 bp, Homo sapien
agcacaggtaggggaagcgccacac

SEQ ID NO: 4030640 - DNA, 25 bp, Homo sapien
ctccgccattcttgtagcacaggta

SEQ ID NO: 4030641 - DNA, 25 bp, Homo sapien
tgtagcacaggtaggggaagcgcca

SEQ ID NO: 4030642 - DNA, 25 bp, Homo sapien
tccgccattcttgtagcacaggtag

SEQ ID NO: 4030643 - DNA, 25 bp, Homo sapien
gcgaagcccacacacgacatgatga

SEQ ID NO: 4030644 - DNA, 25 bp, Homo sapien
gttgcccagatccacggcgaagccc

SEQ ID NO: 4030645 - DNA, 25 bp, Homo sapien
ttgcccagatccacggcgaagccca

SEQ ID NO: 4030646 - DNA, 25 bp, Homo sapien
ccacacacgacatgatgaagtccat

SEQ ID NO: 4030647 - DNA, 25 bp, Homo sapien
cgggcgcgatgagggggcccttctt

SEQ ID NO: 4030648 - DNA, 25 bp, Homo sapien
ccgttctcggcgctcttcttcgcca

SEQ ID NO: 4030649 - DNA, 25 bp, Homo sapien
agatgccgttctcggcgctcttctt

SEQ ID NO: 4030650 - DNA, 25 bp, Homo sapien
ccgggcgcgatgagggggcccttct

SEQ ID NO: 4030651 - DNA, 25 bp, Homo sapien
ggttccgaggctcttgcccgcggct

SEQ ID NO: 4030652 - DNA, 25 bp, Homo sapien
tccgcggcagcggttccgaggctct

SEQ ID NO: 4030653 - DNA, 25 bp, Homo sapien
gcggctgcccggctcacccgagact

SEQ ID NO: 4030654 - DNA, 25 bp, Homo sapien
ggctcacccgagactccgttggcgg

SEQ ID NO: 4030655 - DNA, 25 bp, Homo sapien
gaattctgagaacatgctactgtgg

SEQ ID NO: 4030656 - DNA, 25 bp, Homo sapien
ttctgagaacatgctactgtggtgc

SEQ ID NO: 4030657 - DNA, 25 bp, Homo sapien
ggagaattctgagaacatgctactg

SEQ ID NO: 4030658 - DNA, 25 bp, Homo sapien
tgagaacatgctactgtggtgctgc

SEQ ID NO: 4030659 - DNA, 25 bp, Homo sapien
ccaagaaagtgttgtaacagctgca

SEQ ID NO: 4030660 - DNA, 25 bp, Homo sapien
taatcataggctgcgatggactgga

SEQ ID NO: 4030661 - DNA, 25 bp, Homo sapien
taaaataattgtgctgccgtggttc

SEQ ID NO: 4030662 - DNA, 25 bp, Homo sapien
gaataaatgtgtctccagtaggaac

SEQ ID NO: 4030663 - DNA, 25 bp, Homo sapien
gggattgagttcagtcaagggggct

SEQ ID NO: 4030664 - DNA, 25 bp, Homo sapien
gcagctgccacaggtaaggggctcc

SEQ ID NO: 4030665 - DNA, 25 bp, Homo sapien
agtaccagtgatgaggaggggattg

SEQ ID NO: 4030666 - DNA, 25 bp, Homo sapien
tggcagctgccacaggtaaggggct

SEQ ID NO: 4030667 - DNA, 25 bp, Homo sapien
gacatctacagcgagaccaagagga

SEQ ID NO: 4030668 - DNA, 25 bp, Homo sapien
tgtgaatatctctttcaggctgagg

SEQ ID NO: 4030669 - DNA, 25 bp, Homo sapien
gaccaccgctgacttctgtgaatat

SEQ ID NO: 4030670 - DNA, 25 bp, Homo sapien
accaagaggaggcacgtgttccggc

SEQ ID NO: 4030671 - DNA, 25 bp, Homo sapien
tacgatattcactgtgtgcgacagg

SEQ ID NO: 4030672 - DNA, 25 bp, Homo sapien
catagatgtgtactactgtgcgaga

SEQ ID NO: 4030673 - DNA, 25 bp, Homo sapien
gaaggtgtcccgcaaagctctggat

SEQ ID NO: 4030674 - DNA, 25 bp, Homo sapien
ctactctggcaatggtaagacaggc

SEQ ID NO: 4030675 - DNA, 25 bp, Homo sapien
gctctaattgcacagcctacaggca

SEQ ID NO: 4030676 - DNA, 25 bp, Homo sapien
aaacttcagctcagtccaggcacac

SEQ ID NO: 4030677 - DNA, 25 bp, Homo sapien
cacacaccgtctctgaatgggcatt

SEQ ID NO: 4030678 - DNA, 25 bp, Homo sapien
gataagcacacatgtccccacattg

SEQ ID NO: 4030679 - DNA, 25 bp, Homo sapien
ctccaatagtctccactattatcat

SEQ ID NO: 4030680 - DNA, 25 bp, Homo sapien
ggagtcccaccccatagcttgctat

SEQ ID NO: 4030681 - DNA, 25 bp, Homo sapien
aggacgctctcatctactctgggcc

SEQ ID NO: 4030682 - DNA, 25 bp, Homo sapien
tttcacattaagacagcattttccc

SEQ ID NO: 4030683 - DNA, 25 bp, Homo sapien
cacaatcattgtcatcaaaatcccc

SEQ ID NO: 4030684 - DNA, 25 bp, Homo sapien
gaattggcccttcaaggagtctgcg

SEQ ID NO: 4030685 - DNA, 25 bp, Homo sapien
ttgtctgggctcacattgacttccc

SEQ ID NO: 4030686 - DNA, 25 bp, Homo sapien
tcagatgcccctgcagcgaggtttt

SEQ ID NO: 4030687 - DNA, 25 bp, Homo sapien
gcgtgttcttagcattgtctctgga

SEQ ID NO: 4030688 - DNA, 25 bp, Homo sapien
cggacccagtgcatccagtagctac

SEQ ID NO: 4030689 - DNA, 25 bp, Homo sapien
attggcggacccagtgcatccagta

SEQ ID NO: 4030690 - DNA, 25 bp, Homo sapien
gagattggcggacccagtgcatcca

SEQ ID NO: 4030691 - DNA, 25 bp, Homo sapien
cctggagattggcggacccagtgca

SEQ ID NO: 4030692 - DNA, 25 bp, Homo sapien
ggaccctccaggctgtactaagcct

SEQ ID NO: 4030693 - DNA, 25 bp, Homo sapien
acaggagagtctcagggaccctcca

SEQ ID NO: 4030694 - DNA, 25 bp, Homo sapien
gctgcacaggagagtctcagggacc

SEQ ID NO: 4030695 - DNA, 25 bp, Homo sapien
tgaaggtgaatccagaggctgcaca

SEQ ID NO: 4030696 - DNA, 25 bp, Homo sapien
actgccagagtgcttatctcactca

SEQ ID NO: 4030697 - DNA, 25 bp, Homo sapien
tgccagagtgcttatctcactcatg

SEQ ID NO: 4030698 - DNA, 25 bp, Homo sapien
agaaactgccagagtgcttatctca

SEQ ID NO: 4030699 - DNA, 25 bp, Homo sapien
aaactgccagagtgcttatctcact

SEQ ID NO: 4030700 - DNA, 25 bp, Homo sapien
cccttagccaactccaggacagagc

SEQ ID NO: 4030701 - DNA, 25 bp, Homo sapien
ccttagccaactccaggacagagct

SEQ ID NO: 4030702 - DNA, 25 bp, Homo sapien
tgcgctcccgagtttgcctttgttg

SEQ ID NO: 4030703 - DNA, 25 bp, Homo sapien
cttgtttcctgagcgcatcctggtg

SEQ ID NO: 4030704 - DNA, 25 bp, Homo sapien
cctaatggtcctgggcattccttgg

SEQ ID NO: 4030705 - DNA, 25 bp, Homo sapien
gttctcaatgctcccggctgttctg

SEQ ID NO: 4030706 - DNA, 25 bp, Homo sapien
ccccatgatgtgagacaggaccctg

SEQ ID NO: 4030707 - DNA, 25 bp, Homo sapien
gttagtaactgtccatcccttaaca

SEQ ID NO: 4030708 - DNA, 25 bp, Homo sapien
catcccttaacagtggtggtcctga

SEQ ID NO: 4030709 - DNA, 25 bp, Homo sapien
tttgatgctgttccatagattttgc

SEQ ID NO: 4030710 - DNA, 25 bp, Homo sapien
cagttgtgtctgttgcacggtggtc

SEQ ID NO: 4030711 - DNA, 25 bp, Homo sapien
tgtgtctgttgcacggtggtcatcc

SEQ ID NO: 4030712 - DNA, 25 bp, Homo sapien
atcagttgtgtctgttgcacggtgg

SEQ ID NO: 4030713 - DNA, 25 bp, Homo sapien
agttgtgtctgttgcacggtggtca

SEQ ID NO: 4030714 - DNA, 25 bp, Homo sapien
ggggaagatgggtcacactggtaca

SEQ ID NO: 4030715 - DNA, 25 bp, Homo sapien
gcagccggggaagatgggtcacact

SEQ ID NO: 4030716 - DNA, 25 bp, Homo sapien
gccggggaagatgggtcacactggt

SEQ ID NO: 4030717 - DNA, 25 bp, Homo sapien
ctgcagccggggaagatgggtcaca

SEQ ID NO: 4030718 - DNA, 25 bp, Homo sapien
caagcctggttgttgagagctgttt

SEQ ID NO: 4030719 - DNA, 25 bp, Homo sapien
agcctggttgttgagagctgtttgt

SEQ ID NO: 4030720 - DNA, 25 bp, Homo sapien
aagcctggttgttgagagctgtttg

SEQ ID NO: 4030721 - DNA, 25 bp, Homo sapien
acaagcctggttgttgagagctgtt

SEQ ID NO: 4030722 - DNA, 25 bp, Homo sapien
tcagtgcacggggttccatcttgca

SEQ ID NO: 4030723 - DNA, 25 bp, Homo sapien
ttcagtgcacggggttccatcttgc

SEQ ID NO: 4030724 - DNA, 25 bp, Homo sapien
cttcagtgcacggggttccatcttg

SEQ ID NO: 4030725 - DNA, 25 bp, Homo sapien
ggaaggtcacatatattttggatag

SEQ ID NO: 4030726 - DNA, 25 bp, Homo sapien
ctggaaggtcacatatattttggat

SEQ ID NO: 4030727 - DNA, 25 bp, Homo sapien
gaaggtcacatatattttggatagg

SEQ ID NO: 4030728 - DNA, 25 bp, Homo sapien
aaggtcacatatattttggataggt

SEQ ID NO: 4030729 - DNA, 25 bp, Homo sapien
agtttgtacagcactctcctatatg

SEQ ID NO: 4030730 - DNA, 25 bp, Homo sapien
cagtagttatcatcaccagtacttc

SEQ ID NO: 4030731 - DNA, 25 bp, Homo sapien
agttatcatcaccagtacttctcac

SEQ ID NO: 4030732 - DNA, 25 bp, Homo sapien
gatattgctgcataatgcagaaggc

SEQ ID NO: 4030733 - DNA, 25 bp, Homo sapien
ggatattgctgcataatgcagaagg

SEQ ID NO: 4030734 - DNA, 25 bp, Homo sapien
taccaatgtgtaataggcctaaatg

SEQ ID NO: 4030735 - DNA, 25 bp, Homo sapien
caatgtgtaataggcctaaatgtgt

SEQ ID NO: 4030736 - DNA, 25 bp, Homo sapien
ccaatgtgtaataggcctaaatgtg

SEQ ID NO: 4030737 - DNA, 25 bp, Homo sapien
agtaccaatgtgtaataggcctaaa

SEQ ID NO: 4030738 - DNA, 25 bp, Homo sapien
tagttacattcatgtggtgcctctt

SEQ ID NO: 4030739 - DNA, 25 bp, Homo sapien
catagttacattcatgtggtgcctc

SEQ ID NO: 4030740 - DNA, 25 bp, Homo sapien
tctacacgacaatatgaattggaac

SEQ ID NO: 4030741 - DNA, 25 bp, Homo sapien
taatattgtcatctacacgacaata

SEQ ID NO: 4030742 - DNA, 25 bp, Homo sapien
cccccacagcacatgtccacggtga

SEQ ID NO: 4030743 - DNA, 25 bp, Homo sapien
gtagctgagatagtagcagtctgga

SEQ ID NO: 4030744 - DNA, 25 bp, Homo sapien
cccacagcacatgtccacggtgacc

SEQ ID NO: 4030745 - DNA, 25 bp, Homo sapien
ggcccccacagcacatgtccacggt

SEQ ID NO: 4030746 - DNA, 25 bp, Homo sapien
ccagaaactgaaggtctttgccgtg

SEQ ID NO: 4030747 - DNA, 25 bp, Homo sapien
cagaaactgaaggtctttgccgtgg

SEQ ID NO: 4030748 - DNA, 25 bp, Homo sapien
ccagcccagaaactgaaggtctttg

SEQ ID NO: 4030749 - DNA, 25 bp, Homo sapien
gcccagaaactgaaggtctttgccg

SEQ ID NO: 4030750 - DNA, 25 bp, Homo sapien
gatgcgtagtgccacgagggatggc

SEQ ID NO: 4030751 - DNA, 25 bp, Homo sapien
tgcgtagtgccacgagggatggcct

SEQ ID NO: 4030752 - DNA, 25 bp, Homo sapien
cttggaggatgcgtagtgccacgag

SEQ ID NO: 4030753 - DNA, 25 bp, Homo sapien
gaggatgcgtagtgccacgagggat

SEQ ID NO: 4030754 - DNA, 25 bp, Homo sapien
ctggagtcaggagcacccagagccc

SEQ ID NO: 4030755 - DNA, 25 bp, Homo sapien
tggagtcaggagcacccagagcccc

SEQ ID NO: 4030756 - DNA, 25 bp, Homo sapien
gagccccagcagcaagaggggggcc

SEQ ID NO: 4030757 - DNA, 25 bp, Homo sapien
ccagagccccagcagcaagaggggg

SEQ ID NO: 4030758 - DNA, 25 bp, Homo sapien
cgcgcctctgcctgcctcatgtccc

SEQ ID NO: 4030759 - DNA, 25 bp, Homo sapien
ctaagggtgacccgcgcctctgcct

SEQ ID NO: 4030760 - DNA, 25 bp, Homo sapien
tctgcctgcctcatgtcccagccca

SEQ ID NO: 4030761 - DNA, 25 bp, Homo sapien
tgcctcatgtcccagcccagggata

SEQ ID NO: 4030762 - DNA, 25 bp, Homo sapien
gctgcggtggctgcgtccctcccag

SEQ ID NO: 4030763 - DNA, 25 bp, Homo sapien
cggtggctgcgtccctcccagggag

SEQ ID NO: 4030764 - DNA, 25 bp, Homo sapien
tgcggtggctgcgtccctcccaggg

SEQ ID NO: 4030765 - DNA, 25 bp, Homo sapien
agctgcggtggctgcgtccctccca

SEQ ID NO: 4030766 - DNA, 25 bp, Homo sapien
acttgcatttccagataagtctcca

SEQ ID NO: 4030767 - DNA, 25 bp, Homo sapien
catttccagataagtctccatgcaa

SEQ ID NO: 4030768 - DNA, 25 bp, Homo sapien
cagataagtctccatgcaacacagt

SEQ ID NO: 4030769 - DNA, 25 bp, Homo sapien
cggcaacttgcatttccagataagt

SEQ ID NO: 4030770 - DNA, 25 bp, Homo sapien
cagaaagcaggaaaagcaaacggaa

SEQ ID NO: 4030771 - DNA, 25 bp, Homo sapien
attttgaccacagggaaacatcttc

SEQ ID NO: 4030772 - DNA, 25 bp, Homo sapien
agcgccaggaaagggcttgaggcct

SEQ ID NO: 4030773 - DNA, 25 bp, Homo sapien
cttgaggcctggaattttgaccaca

SEQ ID NO: 4030774 - DNA, 25 bp, Homo sapien
ctgcagctgattccaccctgtgttc

SEQ ID NO: 4030775 - DNA, 25 bp, Homo sapien
gctcatgtaccagctaccgacggtg

SEQ ID NO: 4030776 - DNA, 25 bp, Homo sapien
tgcaggtagagcgtgttctttgagt

SEQ ID NO: 4030777 - DNA, 25 bp, Homo sapien
gctgcaccggagagttttaggtacc

SEQ ID NO: 4030778 - DNA, 25 bp, Homo sapien
gagcgtgttctttgagttgtctgtg

SEQ ID NO: 4030779 - DNA, 25 bp, Homo sapien
cacacatatccagtgtttctctcac

SEQ ID NO: 4030780 - DNA, 25 bp, Homo sapien
tggtcagaaactcccacacatatcc

SEQ ID NO: 4030781 - DNA, 25 bp, Homo sapien
agacactggtcagaaactcccacac

SEQ ID NO: 4030782 - DNA, 25 bp, Homo sapien
gaaactcccacacatatccagtgtt

SEQ ID NO: 4030783 - DNA, 25 bp, Homo sapien
gcaacaaggaaaacccagctgagct

SEQ ID NO: 4030784 - DNA, 25 bp, Homo sapien
actcaatctctttagttctccatga

SEQ ID NO: 4030785 - DNA, 25 bp, Homo sapien
ccatgaatcaccttgtaaaatagca

SEQ ID NO: 4030786 - DNA, 25 bp, Homo sapien
tcaccttgtaaaatagcaacaagga

SEQ ID NO: 4030787 - DNA, 25 bp, Homo sapien
ccttctggaagcaattgtaaagaat

SEQ ID NO: 4030788 - DNA, 25 bp, Homo sapien
tccttctggaagcaattgtaaagaa

SEQ ID NO: 4030789 - DNA, 25 bp, Homo sapien
ggctgccgatgaggttctggagctg

SEQ ID NO: 4030790 - DNA, 25 bp, Homo sapien
ccgcgcaggctgccgatgaggttct

SEQ ID NO: 4030791 - DNA, 25 bp, Homo sapien
caggctgccgatgaggttctggagc

SEQ ID NO: 4030792 - DNA, 25 bp, Homo sapien
cgcaggctgccgatgaggttctgga

SEQ ID NO: 4030793 - DNA, 25 bp, Homo sapien
caccgcggccggcgcatcacccccg

SEQ ID NO: 4030794 - DNA, 25 bp, Homo sapien
ctcccaccgcggccggcgcatcacc

SEQ ID NO: 4030795 - DNA, 25 bp, Homo sapien
cccaccgcggccggcgcatcacccc

SEQ ID NO: 4030796 - DNA, 25 bp, Homo sapien
accgcggccggcgcatcacccccgc

SEQ ID NO: 4030797 - DNA, 25 bp, Homo sapien
tcatggtgacaaaggcgggggtcat

SEQ ID NO: 4030798 - DNA, 25 bp, Homo sapien
gggtcatgtagcgtgccttcacccc

SEQ ID NO: 4030799 - DNA, 25 bp, Homo sapien
caaaggcgggggtcatgtagcgtgc

SEQ ID NO: 4030800 - DNA, 25 bp, Homo sapien
tctcgggccatggcgtccaggttgg

SEQ ID NO: 4030801 - DNA, 25 bp, Homo sapien
gggagccctgactttgtaccggtgc

SEQ ID NO: 4030802 - DNA, 25 bp, Homo sapien
tgaggaggacggtcgggcctctcat

SEQ ID NO: 4030803 - DNA, 25 bp, Homo sapien
cagtgaggaggacggtcgggcctct

SEQ ID NO: 4030804 - DNA, 25 bp, Homo sapien
gccacagtgaggaggacggtcgggc

SEQ ID NO: 4030805 - DNA, 25 bp, Homo sapien
cacagtgaggaggacggtcgggcct

SEQ ID NO: 4030806 - DNA, 25 bp, Homo sapien
agtcagcctttcctaacccaggtgg

SEQ ID NO: 4030807 - DNA, 25 bp, Homo sapien
cagggaccactggtacggatccccg

SEQ ID NO: 4030808 - DNA, 25 bp, Homo sapien
tcaaggaggactccgtgccagtgac

SEQ ID NO: 4030809 - DNA, 25 bp, Homo sapien
atgacaccgcagacgtcgtccacag

SEQ ID NO: 4030810 - DNA, 25 bp, Homo sapien
tccctggcgtttcttcataagcttc

SEQ ID NO: 4030811 - DNA, 25 bp, Homo sapien
cctggcgtttcttcataagcttctc

SEQ ID NO: 4030812 - DNA, 25 bp, Homo sapien
ccctggcgtttcttcataagcttct

SEQ ID NO: 4030813 - DNA, 25 bp, Homo sapien
ctccctggcgtttcttcataagctt

SEQ ID NO: 4030814 - DNA, 25 bp, Homo sapien
ctcctctgtttttagaccacatttg

SEQ ID NO: 4030815 - DNA, 25 bp, Homo sapien
gattcccaggtgcatgagttgctcc

SEQ ID NO: 4030816 - DNA, 25 bp, Homo sapien
cctctgtttttagaccacatttgtt

SEQ ID NO: 4030817 - DNA, 25 bp, Homo sapien
ttgattcccaggtgcatgagttgct

SEQ ID NO: 4030818 - DNA, 25 bp, Homo sapien
gtacttaagaacatacatgtgatga

SEQ ID NO: 4030819 - DNA, 25 bp, Homo sapien
taacgtctgtacttaagaacataca

SEQ ID NO: 4030820 - DNA, 25 bp, Homo sapien
tgtgatgaatgcaatcaacactcat

SEQ ID NO: 4030821 - DNA, 25 bp, Homo sapien
cttgtgctgataacgtctgtactta

SEQ ID NO: 4030822 - DNA, 25 bp, Homo sapien
agggctggagaaccgcgtccttccg

SEQ ID NO: 4030823 - DNA, 25 bp, Homo sapien
tggagaaccgcgtccttccgaggcg

SEQ ID NO: 4030824 - DNA, 25 bp, Homo sapien
agcctcggtcctgtttaggcacgga

SEQ ID NO: 4030825 - DNA, 25 bp, Homo sapien
ctcggtcctgtttaggcacggaaag

SEQ ID NO: 4030826 - DNA, 25 bp, Homo sapien
cacgtgggctcttaagtgatgaact

SEQ ID NO: 4030827 - DNA, 25 bp, Homo sapien
gaatcggcagttatgcagaagacgc

SEQ ID NO: 4030828 - DNA, 25 bp, Homo sapien
aatgaacgagtgagacaggtcaggc

SEQ ID NO: 4030829 - DNA, 25 bp, Homo sapien
gatagtggactggaacacgtgggct

SEQ ID NO: 4030830 - DNA, 25 bp, Homo sapien
ccttcagagaatgtgagtgatgttg

SEQ ID NO: 4030831 - DNA, 25 bp, Homo sapien
cataacaacccgctatatgttggtt

SEQ ID NO: 4030832 - DNA, 25 bp, Homo sapien
actctggtattccagttgccataac

SEQ ID NO: 4030833 - DNA, 25 bp, Homo sapien
tattccagttgccataacaacccgc

SEQ ID NO: 4030834 - DNA, 25 bp, Homo sapien
aatcggagcaccagaaccaactcat

SEQ ID NO: 4030835 - DNA, 25 bp, Homo sapien
gattaaatcggagcaccagaaccaa

SEQ ID NO: 4030836 - DNA, 25 bp, Homo sapien
atcatttgattaaatcggagcacca

SEQ ID NO: 4030837 - DNA, 25 bp, Homo sapien
ttgattaaatcggagcaccagaacc

SEQ ID NO: 4030838 - DNA, 25 bp, Homo sapien
ctttgcaaactcctcgttgcagctc

SEQ ID NO: 4030839 - DNA, 25 bp, Homo sapien
tgcaaactcctcgttgcagctcctt

SEQ ID NO: 4030840 - DNA, 25 bp, Homo sapien
tttgcaaactcctcgttgcagctcc

SEQ ID NO: 4030841 - DNA, 25 bp, Homo sapien
caaacccctctgtcttccttgcaaa

SEQ ID NO: 4030842 - DNA, 25 bp, Homo sapien
agccccgaccgatgggaggcacaag

SEQ ID NO: 4030843 - DNA, 25 bp, Homo sapien
catcatcaatggctaagcagatcat

SEQ ID NO: 4030844 - DNA, 25 bp, Homo sapien
gctaagcagatcatggagtacgttt

SEQ ID NO: 4030845 - DNA, 25 bp, Homo sapien
agaactgtctgagttgagaaggctg

SEQ ID NO: 4030846 - DNA, 25 bp, Homo sapien
cattcccacggagtatgtggcactc

SEQ ID NO: 4030847 - DNA, 25 bp, Homo sapien
ttcccacggagtatgtggcactctt

SEQ ID NO: 4030848 - DNA, 25 bp, Homo sapien
cccacggagtatgtggcactcttat

SEQ ID NO: 4030849 - DNA, 25 bp, Homo sapien
cggagtatgtggcactcttattatg

SEQ ID NO: 4030850 - DNA, 25 bp, Homo sapien
tgactgcccaggcaggtgtcagtgc

SEQ ID NO: 4030851 - DNA, 25 bp, Homo sapien
tactgactgcccaggcaggtgtcag

SEQ ID NO: 4030852 - DNA, 25 bp, Homo sapien
tgcccaggcaggtgtcagtgctcac

SEQ ID NO: 4030853 - DNA, 25 bp, Homo sapien
ctactgactgcccaggcaggtgtca

SEQ ID NO: 4030854 - DNA, 25 bp, Homo sapien
ggctttcatctcgatcttgtcctca

SEQ ID NO: 4030855 - DNA, 25 bp, Homo sapien
cctcaatgggggcattccctcttaa

SEQ ID NO: 4030856 - DNA, 25 bp, Homo sapien
cgaggaagagcagtaaggatccagg

SEQ ID NO: 4030857 - DNA, 25 bp, Homo sapien
gcattccctcttaaggagaacccca

SEQ ID NO: 4030858 - DNA, 25 bp, Homo sapien
agtaaggatccaggaagtgaacctc

SEQ ID NO: 4030859 - DNA, 25 bp, Homo sapien
gaagagagcatcattaggtgtagga

SEQ ID NO: 4030860 - DNA, 25 bp, Homo sapien
tttgaaggctggatcagacacttga

SEQ ID NO: 4030861 - DNA, 25 bp, Homo sapien
gatgcttcgaggaggcgtctactgc

SEQ ID NO: 4030862 - DNA, 25 bp, Homo sapien
cacttgaaagctaaagggaattttg

SEQ ID NO: 4030863 - DNA, 25 bp, Homo sapien
aagtccgtgactgtcagcttggaga

SEQ ID NO: 4030864 - DNA, 25 bp, Homo sapien
aagaagtccgtgactgtcagcttgg

SEQ ID NO: 4030865 - DNA, 25 bp, Homo sapien
gaagaagtccgtgactgtcagcttg

SEQ ID NO: 4030866 - DNA, 25 bp, Homo sapien
gaagtccgtgactgtcagcttggag

SEQ ID NO: 4030867 - DNA, 25 bp, Homo sapien
tgcactgactcctcgtgatgagcca

SEQ ID NO: 4030868 - DNA, 25 bp, Homo sapien
tacatgagccgggagcgttcctgtg

SEQ ID NO: 4030869 - DNA, 25 bp, Homo sapien
ttctgtagcacctcaatgctctgca

SEQ ID NO: 4030870 - DNA, 25 bp, Homo sapien
atggctctgcacaggtgggacttcc

SEQ ID NO: 4030871 - DNA, 25 bp, Homo sapien
ggcatgtggtcgtagagctgggaca

SEQ ID NO: 4030872 - DNA, 25 bp, Homo sapien
ggcgctgctgatcattcttcagtgt

SEQ ID NO: 4030873 - DNA, 25 bp, Homo sapien
tgtggtcgtagagctgggacaggca

SEQ ID NO: 4030874 - DNA, 25 bp, Homo sapien
catgtggtcgtagagctgggacagg

SEQ ID NO: 4030875 - DNA, 25 bp, Homo sapien
gggccagggccgcatagtggtgggc

SEQ ID NO: 4030876 - DNA, 25 bp, Homo sapien
gctgcgtgcagctgtcggcagacct

SEQ ID NO: 4030877 - DNA, 25 bp, Homo sapien
tgcgtgcagctgtcggcagacctct

SEQ ID NO: 4030878 - DNA, 25 bp, Homo sapien
atagtggtgggccttcacgcaggcc

SEQ ID NO: 4030879 - DNA, 25 bp, Homo sapien
ttttgacaagcacgctgagcatggc

SEQ ID NO: 4030880 - DNA, 25 bp, Homo sapien
tggattatgggtaaatgtctctttc

SEQ ID NO: 4030881 - DNA, 25 bp, Homo sapien
gagcatggcagggatcatatcgtaa

SEQ ID NO: 4030882 - DNA, 25 bp, Homo sapien
cttgggtttgtgcaagcatcatttt

SEQ ID NO: 4030883 - DNA, 25 bp, Homo sapien
cagcctgcgtgtgccgatagcgctg

SEQ ID NO: 4030884 - DNA, 25 bp, Homo sapien
tgccgatagcgctgggtcccaatct

SEQ ID NO: 4030885 - DNA, 25 bp, Homo sapien
ctgcgtgtgccgatagcgctgggtc

SEQ ID NO: 4030886 - DNA, 25 bp, Homo sapien
cgtgtgccgatagcgctgggtccca

SEQ ID NO: 4030887 - DNA, 25 bp, Homo sapien
ccagaaccccagtgagggagtcata

SEQ ID NO: 4030888 - DNA, 25 bp, Homo sapien
ctgaccagaaccccagtgagggagt

SEQ ID NO: 4030889 - DNA, 25 bp, Homo sapien
cagaaccccagtgagggagtcatac

SEQ ID NO: 4030890 - DNA, 25 bp, Homo sapien
gaccagaaccccagtgagggagtca

SEQ ID NO: 4030891 - DNA, 25 bp, Homo sapien
gggaataatcgattctcaacaaagc

SEQ ID NO: 4030892 - DNA, 25 bp, Homo sapien
gggtgggaataatcgattctcaaca

SEQ ID NO: 4030893 - DNA, 25 bp, Homo sapien
ccatgtgggtgggaataatcgattc

SEQ ID NO: 4030894 - DNA, 25 bp, Homo sapien
taatcgattctcaacaaagcccagc

SEQ ID NO: 4030895 - DNA, 25 bp, Homo sapien
ttgtctcagatccataagatctgtg

SEQ ID NO: 4030896 - DNA, 25 bp, Homo sapien
tcagatccataagatctgtgatttc

SEQ ID NO: 4030897 - DNA, 25 bp, Homo sapien
gatccataagatctgtgatttcatc

SEQ ID NO: 4030898 - DNA, 25 bp, Homo sapien
catcttcatataaatagccatcttc

SEQ ID NO: 4030899 - DNA, 25 bp, Homo sapien
gaaaagtgaggttagatactataaa

SEQ ID NO: 4030900 - DNA, 25 bp, Homo sapien
gtgcataacagtaatatgtcaattg

SEQ ID NO: 4030901 - DNA, 25 bp, Homo sapien
aatgtgattgaaaaccatgtatgtg

SEQ ID NO: 4030902 - DNA, 25 bp, Homo sapien
taacagtaatatgtcaattgtgaac

SEQ ID NO: 4030903 - DNA, 25 bp, Homo sapien
cacttgctcccgcacctttgggttt

SEQ ID NO: 4030904 - DNA, 25 bp, Homo sapien
gttgacgaagctcagctccagccgc

SEQ ID NO: 4030905 - DNA, 25 bp, Homo sapien
tgttctgatagacgcccactgagat

SEQ ID NO: 4030906 - DNA, 25 bp, Homo sapien
catctgcaggtctgagttgacgaag

SEQ ID NO: 4030907 - DNA, 25 bp, Homo sapien
cacaggcaatgacactgtgagctgc

SEQ ID NO: 4030908 - DNA, 25 bp, Homo sapien
acacctgccagtacgtggagctggg

SEQ ID NO: 4030909 - DNA, 25 bp, Homo sapien
agcacacctgccagtacgtggagct

SEQ ID NO: 4030910 - DNA, 25 bp, Homo sapien
agcttgcagcacacctgccagtacg

SEQ ID NO: 4030911 - DNA, 25 bp, Homo sapien
ccccgagtctccagtttggcctgtg

SEQ ID NO: 4030912 - DNA, 25 bp, Homo sapien
ctgccccgagtctccagtttggcct

SEQ ID NO: 4030913 - DNA, 25 bp, Homo sapien
tggctgccccgagtctccagtttgg

SEQ ID NO: 4030914 - DNA, 25 bp, Homo sapien
ggctgccccgagtctccagtttggc

SEQ ID NO: 4030915 - DNA, 25 bp, Homo sapien
agaccacctctcagggtttcctaat

SEQ ID NO: 4030916 - DNA, 25 bp, Homo sapien
tagcagtcatccttattcccttttc

SEQ ID NO: 4030917 - DNA, 25 bp, Homo sapien
catcagtccacaagaaatcccatac

SEQ ID NO: 4030918 - DNA, 25 bp, Homo sapien
tttcagaccattttcatcagtccac

SEQ ID NO: 4030919 - DNA, 25 bp, Homo sapien
attagcagtcatccttattcccttt

SEQ ID NO: 4030920 - DNA, 25 bp, Homo sapien
cctgacccttaccttgctctggccc

SEQ ID NO: 4030921 - DNA, 25 bp, Homo sapien
cttggccctgacccttaccttgctc

SEQ ID NO: 4030922 - DNA, 25 bp, Homo sapien
ggccctgacccttaccttgctctgg

SEQ ID NO: 4030923 - DNA, 25 bp, Homo sapien
tggccctgacccttaccttgctctg

SEQ ID NO: 4030924 - DNA, 25 bp, Homo sapien
ccctgaccctgaaatgcctggccct

SEQ ID NO: 4030925 - DNA, 25 bp, Homo sapien
gccctgaccctgaaatgcctggccc

SEQ ID NO: 4030926 - DNA, 25 bp, Homo sapien
tgctggtcttaccatggcccagacc

SEQ ID NO: 4030927 - DNA, 25 bp, Homo sapien
ttgctggtcttaccatggcccagac

SEQ ID NO: 4030928 - DNA, 25 bp, Homo sapien
tccacctgcttgaggagcgctaaag

SEQ ID NO: 4030929 - DNA, 25 bp, Homo sapien
cctgcttgaggagcgctaaagccca

SEQ ID NO: 4030930 - DNA, 25 bp, Homo sapien
gcttgaggagcgctaaagcccaggt

SEQ ID NO: 4030931 - DNA, 25 bp, Homo sapien
ttcctccacctgcttgaggagcgct

SEQ ID NO: 4030932 - DNA, 25 bp, Homo sapien
cttaaggttgtaattatttgcagcc

SEQ ID NO: 4030933 - DNA, 25 bp, Homo sapien
gctgcttgggcttaaggttgtaatt

SEQ ID NO: 4030934 - DNA, 25 bp, Homo sapien
ccaaagtgctgcttgggcttaaggt

SEQ ID NO: 4030935 - DNA, 25 bp, Homo sapien
gagccgcttcatggtcccaaaccag

SEQ ID NO: 4030936 - DNA, 25 bp, Homo sapien
ctggagcagcggacctccttgctta

SEQ ID NO: 4030937 - DNA, 25 bp, Homo sapien
gcggacctccttgcttactttgaat

SEQ ID NO: 4030938 - DNA, 25 bp, Homo sapien
gcagcggacctccttgcttactttg

SEQ ID NO: 4030939 - DNA, 25 bp, Homo sapien
gagcagcggacctccttgcttactt

SEQ ID NO: 4030940 - DNA, 25 bp, Homo sapien
tccagagggaaaaactgggtggtga

SEQ ID NO: 4030941 - DNA, 25 bp, Homo sapien
gtgacagggactggacagggatgcc

SEQ ID NO: 4030942 - DNA, 25 bp, Homo sapien
gactggacagggatgccacaggggc

SEQ ID NO: 4030943 - DNA, 25 bp, Homo sapien
ctgggtggtgacagggactggacag

SEQ ID NO: 4030944 - DNA, 25 bp, Homo sapien
tgggcatccgtctcctctgcggcat

SEQ ID NO: 4030945 - DNA, 25 bp, Homo sapien
cacttagtgagcatggtatccgctc

SEQ ID NO: 4030946 - DNA, 25 bp, Homo sapien
gcatggtatccgctcaggggcctct

SEQ ID NO: 4030947 - DNA, 25 bp, Homo sapien
gtgggcatccgtctcctctgcggca

SEQ ID NO: 4030948 - DNA, 25 bp, Homo sapien
taatgctgagtaatcttttgaatgg

SEQ ID NO: 4030949 - DNA, 25 bp, Homo sapien
ctgtagcgtatatcagcacttcact

SEQ ID NO: 4030950 - DNA, 25 bp, Homo sapien
gaatgaaatcttactacatatggtc

SEQ ID NO: 4030951 - DNA, 25 bp, Homo sapien
gagtaatcttttgaatggatatacc

SEQ ID NO: 4030952 - DNA, 25 bp, Homo sapien
cttacccaatggttgtgccttggcc

SEQ ID NO: 4030953 - DNA, 25 bp, Homo sapien
gccttacccaatggttgtgccttgg

SEQ ID NO: 4030954 - DNA, 25 bp, Homo sapien
ctgccttacccaatggttgtgcctt

SEQ ID NO: 4030955 - DNA, 25 bp, Homo sapien
acccaatggttgtgccttggccccg

SEQ ID NO: 4030956 - DNA, 25 bp, Homo sapien
agggccgctcgtgaacaggacaggt

SEQ ID NO: 4030957 - DNA, 25 bp, Homo sapien
gggccgctcgtgaacaggacaggtt

SEQ ID NO: 4030958 - DNA, 25 bp, Homo sapien
gtagggccgctcgtgaacaggacag

SEQ ID NO: 4030959 - DNA, 25 bp, Homo sapien
ggccgctcgtgaacaggacaggttc

SEQ ID NO: 4030960 - DNA, 25 bp, Homo sapien
gctgcccccaaggtgtcctctgtca

SEQ ID NO: 4030961 - DNA, 25 bp, Homo sapien
tgcccccaaggtgtcctctgtcacc

SEQ ID NO: 4030962 - DNA, 25 bp, Homo sapien
ctgcccccaaggtgtcctctgtcac

SEQ ID NO: 4030963 - DNA, 25 bp, Homo sapien
tgctgcccccaaggtgtcctctgtc

SEQ ID NO: 4030964 - DNA, 25 bp, Homo sapien
agggccggagagtctgactgtggct

SEQ ID NO: 4030965 - DNA, 25 bp, Homo sapien
cagggccggagagtctgactgtggc

SEQ ID NO: 4030966 - DNA, 25 bp, Homo sapien
gcagggccggagagtctgactgtgg

SEQ ID NO: 4030967 - DNA, 25 bp, Homo sapien
tgcagggccggagagtctgactgtg

SEQ ID NO: 4030968 - DNA, 25 bp, Homo sapien
tccctgagagctcacgtgtgaggtg

SEQ ID NO: 4030969 - DNA, 25 bp, Homo sapien
ctcgtggacggcagcactgcggtga

SEQ ID NO: 4030970 - DNA, 25 bp, Homo sapien
aagaaaagcacctgcatcaccctca

SEQ ID NO: 4030971 - DNA, 25 bp, Homo sapien
gcagcactgcggtgagacccagagc

SEQ ID NO: 4030972 - DNA, 25 bp, Homo sapien
tctgttgcaggatgaccatgaaagg

SEQ ID NO: 4030973 - DNA, 25 bp, Homo sapien
tgttgcaggatgaccatgaaaggtg

SEQ ID NO: 4030974 - DNA, 25 bp, Homo sapien
aaaggtgacagccactccacagcaa

SEQ ID NO: 4030975 - DNA, 25 bp, Homo sapien
cacagcaacgatgccagccatggcc

SEQ ID NO: 4030976 - DNA, 25 bp, Homo sapien
acagcgcacttgttgcgcaaccggc

SEQ ID NO: 4030977 - DNA, 25 bp, Homo sapien
acacagcgcacttgttgcgcaaccg

SEQ ID NO: 4030978 - DNA, 25 bp, Homo sapien
cacagcgcacttgttgcgcaaccgg

SEQ ID NO: 4030979 - DNA, 25 bp, Homo sapien
agctgcccacaagcttctggagctg

SEQ ID NO: 4030980 - DNA, 25 bp, Homo sapien
gccaatggagatgcggataagcttc

SEQ ID NO: 4030981 - DNA, 25 bp, Homo sapien
ctggagctgcccacaagcttctgga

SEQ ID NO: 4030982 - DNA, 25 bp, Homo sapien
ggagctgcccacaagcttctggagc

SEQ ID NO: 4030983 - DNA, 25 bp, Homo sapien
gctgcagcgtctggctggctgcggc

SEQ ID NO: 4030984 - DNA, 25 bp, Homo sapien
ctgcagcgtctggctggctgcggcc

SEQ ID NO: 4030985 - DNA, 25 bp, Homo sapien
tgctgcagcgtctggctggctgcgg

SEQ ID NO: 4030986 - DNA, 25 bp, Homo sapien
tgcagcgtctggctggctgcggccc

SEQ ID NO: 4030987 - DNA, 25 bp, Homo sapien
ctcccctggccgctacgcgcagcgc

SEQ ID NO: 4030988 - DNA, 25 bp, Homo sapien
cccctggccgctacgcgcagcgccg

SEQ ID NO: 4030989 - DNA, 25 bp, Homo sapien
ttctctcccctggccgctacgcgca

SEQ ID NO: 4030990 - DNA, 25 bp, Homo sapien
tctcccctggccgctacgcgcagcg

SEQ ID NO: 4030991 - DNA, 25 bp, Homo sapien
ctatgcaggccgcagcggccaaggc

SEQ ID NO: 4030992 - DNA, 25 bp, Homo sapien
agagccgcgtcggtggtggcaaaaa

SEQ ID NO: 4030993 - DNA, 25 bp, Homo sapien
tcggctccgcccgaacaaggacgcc

SEQ ID NO: 4030994 - DNA, 25 bp, Homo sapien
gccgcgtcggtggtggcaaaaagcg

SEQ ID NO: 4030995 - DNA, 25 bp, Homo sapien
cctcagagccgcgtcggtggtggca

SEQ ID NO: 4030996 - DNA, 25 bp, Homo sapien
tcatggcaccaattgttagtcactt

SEQ ID NO: 4030997 - DNA, 25 bp, Homo sapien
gacatggcttgaatgtgcaagaaaa

SEQ ID NO: 4030998 - DNA, 25 bp, Homo sapien
tgagaatttattcccatggacaggg

SEQ ID NO: 4030999 - DNA, 25 bp, Homo sapien
ctttcaaggtgatctgacatggctt

SEQ ID NO: 4031000 - DNA, 25 bp, Homo sapien
ggtgattggccaaacatatgtcaca

SEQ ID NO: 4031001 - DNA, 25 bp, Homo sapien
cacaacattgcccaatacaggcagg

SEQ ID NO: 4031002 - DNA, 25 bp, Homo sapien
caatttgagttataggcaagagagt

SEQ ID NO: 4031003 - DNA, 25 bp, Homo sapien
ggtgcttggcccagtggtatgtcac

SEQ ID NO: 4031004 - DNA, 25 bp, Homo sapien
agacctgaactctgggacagtctgg

SEQ ID NO: 4031005 - DNA, 25 bp, Homo sapien
gtgccccggcccaaaggtgcaggtc

SEQ ID NO: 4031006 - DNA, 25 bp, Homo sapien
gacctgaactctgggacagtctggg

SEQ ID NO: 4031007 - DNA, 25 bp, Homo sapien
cttaagctgtgaaaatgcaaacact

SEQ ID NO: 4031008 - DNA, 25 bp, Homo sapien
tcaaggttttcagatatgcccaggt

SEQ ID NO: 4031009 - DNA, 25 bp, Homo sapien
gttttcagatatgcccaggtacccc

SEQ ID NO: 4031010 - DNA, 25 bp, Homo sapien
tccttttcttaagctgtgaaaatgc

SEQ ID NO: 4031011 - DNA, 25 bp, Homo sapien
aaaggaggataatggcattgttcat

SEQ ID NO: 4031012 - DNA, 25 bp, Homo sapien
ctgaaaaggaggataatggcattgt

SEQ ID NO: 4031013 - DNA, 25 bp, Homo sapien
gaaaaggaggataatggcattgttc

SEQ ID NO: 4031014 - DNA, 25 bp, Homo sapien
aaaaggaggataatggcattgttca

SEQ ID NO: 4031015 - DNA, 25 bp, Homo sapien
cagtcttgtatacagtctccagggc

SEQ ID NO: 4031016 - DNA, 25 bp, Homo sapien
gagacccatggaattattgagcctg

SEQ ID NO: 4031017 - DNA, 25 bp, Homo sapien
ctattataaacacgctcatgagggc

SEQ ID NO: 4031018 - DNA, 25 bp, Homo sapien
gcagcaggcaggactttcaattgac

SEQ ID NO: 4031019 - DNA, 25 bp, Homo sapien
tacactggtgggaaagtctccgtga

SEQ ID NO: 4031020 - DNA, 25 bp, Homo sapien
ccgtagctgtttccttagtggatgc

SEQ ID NO: 4031021 - DNA, 25 bp, Homo sapien
gacctagatatggaccacgcagcga

SEQ ID NO: 4031022 - DNA, 25 bp, Homo sapien
gtccacactaagaccctgaggcctg

SEQ ID NO: 4031023 - DNA, 25 bp, Homo sapien
gaggccatgaaaggcgaacggccct

SEQ ID NO: 4031024 - DNA, 25 bp, Homo sapien
caggaaatcgagacactcgtgaggg

SEQ ID NO: 4031025 - DNA, 25 bp, Homo sapien
tgttggctgacaggaaatcgagaca

SEQ ID NO: 4031026 - DNA, 25 bp, Homo sapien
cacggcaacgctgctgtggaggcca

SEQ ID NO: 4031027 - DNA, 25 bp, Homo sapien
cagccctagggacgggccgcactgc

SEQ ID NO: 4031028 - DNA, 25 bp, Homo sapien
cccagccctagggacgggccgcact

SEQ ID NO: 4031029 - DNA, 25 bp, Homo sapien
ccagccctagggacgggccgcactg

SEQ ID NO: 4031030 - DNA, 25 bp, Homo sapien
tctccgcagggcgaaactgctgggc

SEQ ID NO: 4031031 - DNA, 25 bp, Homo sapien
caattaccaggtgaaactagccgcc

SEQ ID NO: 4031032 - DNA, 25 bp, Homo sapien
gacagggagcggaaccgtcttcaac

SEQ ID NO: 4031033 - DNA, 25 bp, Homo sapien
taaaagcctgcagctcgaggagaca

SEQ ID NO: 4031034 - DNA, 25 bp, Homo sapien
tttcatgccaaaccctcgccaaggg

SEQ ID NO: 4031035 - DNA, 25 bp, Homo sapien
ggctacaggaggacaatcccagatt

SEQ ID NO: 4031036 - DNA, 25 bp, Homo sapien
tgtaggcggcttcgtttaccaagct

SEQ ID NO: 4031037 - DNA, 25 bp, Homo sapien
taaatcgagagtgtctggtcctcac

SEQ ID NO: 4031038 - DNA, 25 bp, Homo sapien
gcgacttcgacttccagctgctcag

SEQ ID NO: 4031039 - DNA, 25 bp, Homo sapien
aaagcacaagctgagccgccttgga

SEQ ID NO: 4031040 - DNA, 25 bp, Homo sapien
cttggaaagacaaccacggcctggc

SEQ ID NO: 4031041 - DNA, 25 bp, Homo sapien
gctgctcagctcgattttctttccc

SEQ ID NO: 4031042 - DNA, 25 bp, Homo sapien
gaaaatgtcacgttcaccagtaccc

SEQ ID NO: 4031043 - DNA, 25 bp, Homo sapien
atgtcacgttcaccagtaccctttt

SEQ ID NO: 4031044 - DNA, 25 bp, Homo sapien
aaatgtcacgttcaccagtaccctt

SEQ ID NO: 4031045 - DNA, 25 bp, Homo sapien
ctgggaatgcgcaagttcagagctt

SEQ ID NO: 4031046 - DNA, 25 bp, Homo sapien
cctaaacccagacacttatcacagg

SEQ ID NO: 4031047 - DNA, 25 bp, Homo sapien
taaacccagacacttatcacaggaa

SEQ ID NO: 4031048 - DNA, 25 bp, Homo sapien
tatgtctcagatagctgaagatggt

SEQ ID NO: 4031049 - DNA, 25 bp, Homo sapien
catttattaatagaagctatgtctc

SEQ ID NO: 4031050 - DNA, 25 bp, Homo sapien
ggtaaaatgttccaagccgcagcct

SEQ ID NO: 4031051 - DNA, 25 bp, Homo sapien
tgattggataatacggccccaggcc

SEQ ID NO: 4031052 - DNA, 25 bp, Homo sapien
gaagatgtgagccaactcgtagcca

SEQ ID NO: 4031053 - DNA, 25 bp, Homo sapien
gaagcccggccttcactgtgggata

SEQ ID NO: 4031054 - DNA, 25 bp, Homo sapien
agactgcgttaggaagaggctcaag

SEQ ID NO: 4031055 - DNA, 25 bp, Homo sapien
gaggctcaagggggcagacagtgcc

SEQ ID NO: 4031056 - DNA, 25 bp, Homo sapien
tcaagactgcgttaggaagaggctc

SEQ ID NO: 4031057 - DNA, 25 bp, Homo sapien
ggctcaagggggcagacagtgccac

SEQ ID NO: 4031058 - DNA, 25 bp, Homo sapien
tccttcttggagtgcggaggtcctg

SEQ ID NO: 4031059 - DNA, 25 bp, Homo sapien
cttcaggaacgacagacagcttttc

SEQ ID NO: 4031060 - DNA, 25 bp, Homo sapien
gtctcctcgtttgctcagccggcag

SEQ ID NO: 4031061 - DNA, 25 bp, Homo sapien
tgaggtggtcctgcgtctcgaggag

SEQ ID NO: 4031062 - DNA, 25 bp, Homo sapien
gcctgccacgcaacatgctcaggtg

SEQ ID NO: 4031063 - DNA, 25 bp, Homo sapien
ctgctgcgaggcgagttggtctgca

SEQ ID NO: 4031064 - DNA, 25 bp, Homo sapien
ttgtgcaggacacatcgccgccctt

SEQ ID NO: 4031065 - DNA, 25 bp, Homo sapien
tgctcaggtgccagatctcgggcat

SEQ ID NO: 4031066 - DNA, 25 bp, Homo sapien
gttcctcttgcaggcacagtttgtg

SEQ ID NO: 4031067 - DNA, 25 bp, Homo sapien
aatggtatttttgcaggacaaaata

SEQ ID NO: 4031068 - DNA, 25 bp, Homo sapien
agtgatgagaatgaacccggtccaa

SEQ ID NO: 4031069 - DNA, 25 bp, Homo sapien
ggtccaagtagtccaggcttctctg

SEQ ID NO: 4031070 - DNA, 25 bp, Homo sapien
ggctctgaagtgctctttattgtgc

SEQ ID NO: 4031071 - DNA, 25 bp, Homo sapien
ctgaagtgctctttattgtgcaggt

SEQ ID NO: 4031072 - DNA, 25 bp, Homo sapien
gctctgaagtgctctttattgtgca

SEQ ID NO: 4031073 - DNA, 25 bp, Homo sapien
tctgaagtgctctttattgtgcagg

SEQ ID NO: 4031074 - DNA, 25 bp, Homo sapien
tcatgaggctcacgcatgacggcca

SEQ ID NO: 4031075 - DNA, 25 bp, Homo sapien
aggctcacgcatgacggccagtctc

SEQ ID NO: 4031076 - DNA, 25 bp, Homo sapien
atgaggctcacgcatgacggccagt

SEQ ID NO: 4031077 - DNA, 25 bp, Homo sapien
gaggctcacgcatgacggccagtct

SEQ ID NO: 4031078 - DNA, 25 bp, Homo sapien
caaattatgatcaatgtgcatttaa

SEQ ID NO: 4031079 - DNA, 25 bp, Homo sapien
gacatattcaaattatgatcaatgt

SEQ ID NO: 4031080 - DNA, 25 bp, Homo sapien
cctgagaaatcaggactcaatcatc

SEQ ID NO: 4031081 - DNA, 25 bp, Homo sapien
taaaacttctgcataaaatcttctc

SEQ ID NO: 4031082 - DNA, 25 bp, Homo sapien
tttgtcttgactaccaaccactctg

SEQ ID NO: 4031083 - DNA, 25 bp, Homo sapien
taatctagctttttgtcttgactac

SEQ ID NO: 4031084 - DNA, 25 bp, Homo sapien
tcttgactaccaaccactctggatt

SEQ ID NO: 4031085 - DNA, 25 bp, Homo sapien
agctttttgtcttgactaccaacca

SEQ ID NO: 4031086 - DNA, 25 bp, Homo sapien
aattatagaaaagtgtctgtgtgac

SEQ ID NO: 4031087 - DNA, 25 bp, Homo sapien
atagaaaagtgtctgtgtgactccc

SEQ ID NO: 4031088 - DNA, 25 bp, Homo sapien
ttatagaaaagtgtctgtgtgactc

SEQ ID NO: 4031089 - DNA, 25 bp, Homo sapien
agaaaagtgtctgtgtgactccctg

SEQ ID NO: 4031090 - DNA, 25 bp, Homo sapien
ttgcctttagtctgacaccataggc

SEQ ID NO: 4031091 - DNA, 25 bp, Homo sapien
gttggcccgtggtccacattcctga

SEQ ID NO: 4031092 - DNA, 25 bp, Homo sapien
acagagagtccttatttgcctttag

SEQ ID NO: 4031093 - DNA, 25 bp, Homo sapien
cataggcgagcctgagttggcccgt

SEQ ID NO: 4031094 - DNA, 25 bp, Homo sapien
ggaaacaggataccaagttcgcatg

SEQ ID NO: 4031095 - DNA, 25 bp, Homo sapien
taccaagttcgcatgaagacaatat

SEQ ID NO: 4031096 - DNA, 25 bp, Homo sapien
ggataccaagttcgcatgaagacaa

SEQ ID NO: 4031097 - DNA, 25 bp, Homo sapien
aacaggataccaagttcgcatgaag

SEQ ID NO: 4031098 - DNA, 25 bp, Homo sapien
cctcaaagctggcccggaaagctcc

SEQ ID NO: 4031099 - DNA, 25 bp, Homo sapien
tatcctcaaagctggcccggaaagc

SEQ ID NO: 4031100 - DNA, 25 bp, Homo sapien
cttatcctcaaagctggcccggaaa

SEQ ID NO: 4031101 - DNA, 25 bp, Homo sapien
gctcatcagcagcttatcctcaaag

SEQ ID NO: 4031102 - DNA, 25 bp, Homo sapien
ctggagcacagagtgctttcttgat

SEQ ID NO: 4031103 - DNA, 25 bp, Homo sapien
tggagcacagagtgctttcttgatc

SEQ ID NO: 4031104 - DNA, 25 bp, Homo sapien
gtgctttcttgatctgcccccttat

SEQ ID NO: 4031105 - DNA, 25 bp, Homo sapien
ctttcttgatctgcccccttatccc

SEQ ID NO: 4031106 - DNA, 25 bp, Homo sapien
cttccaaggcagaattaaatattcc

SEQ ID NO: 4031107 - DNA, 25 bp, Homo sapien
ccacttccaaggcagaattaaatat

SEQ ID NO: 4031108 - DNA, 25 bp, Homo sapien
ttcaaatttggccacttccaaggca

SEQ ID NO: 4031109 - DNA, 25 bp, Homo sapien
cttcaaatttggccacttccaaggc

SEQ ID NO: 4031110 - DNA, 25 bp, Homo sapien
agtgttcttgaaaattttatatgga

SEQ ID NO: 4031111 - DNA, 25 bp, Homo sapien
atgaagtgttcttgaaaattttata

SEQ ID NO: 4031112 - DNA, 25 bp, Homo sapien
cttaataaatgaagtgttcttgaaa

SEQ ID NO: 4031113 - DNA, 25 bp, Homo sapien
gaagtgttcttgaaaattttatatg

SEQ ID NO: 4031114 - DNA, 25 bp, Homo sapien
ttttatggatttatccagatcaagg

SEQ ID NO: 4031115 - DNA, 25 bp, Homo sapien
tatggatttatccagatcaaggaca

SEQ ID NO: 4031116 - DNA, 25 bp, Homo sapien
ttatggatttatccagatcaaggac

SEQ ID NO: 4031117 - DNA, 25 bp, Homo sapien
tttatggatttatccagatcaagga

SEQ ID NO: 4031118 - DNA, 25 bp, Homo sapien
actgtattgccaagaaaccagttcc

SEQ ID NO: 4031119 - DNA, 25 bp, Homo sapien
gacagactgtattgccaagaaacca

SEQ ID NO: 4031120 - DNA, 25 bp, Homo sapien
gccactgacagactgtattgccaag

SEQ ID NO: 4031121 - DNA, 25 bp, Homo sapien
ttatgccactgacagactgtattgc

SEQ ID NO: 4031122 - DNA, 25 bp, Homo sapien
cccaaaaggctgctccgcaatgcat

SEQ ID NO: 4031123 - DNA, 25 bp, Homo sapien
tgctccgcaatgcatgtgctgtggg

SEQ ID NO: 4031124 - DNA, 25 bp, Homo sapien
aaggctgctccgcaatgcatgtgct

SEQ ID NO: 4031125 - DNA, 25 bp, Homo sapien
gctgctccgcaatgcatgtgctgtg

SEQ ID NO: 4031126 - DNA, 25 bp, Homo sapien
ctccaccctacagaaaatatgattg

SEQ ID NO: 4031127 - DNA, 25 bp, Homo sapien
atgagagtgtaagatgattgatgga

SEQ ID NO: 4031128 - DNA, 25 bp, Homo sapien
cagagccttaggcaccaaatatgca

SEQ ID NO: 4031129 - DNA, 25 bp, Homo sapien
gccttaggcaccaaatatgcagcaa

SEQ ID NO: 4031130 - DNA, 25 bp, Homo sapien
gggaaatccacagagccttaggcac

SEQ ID NO: 4031131 - DNA, 25 bp, Homo sapien
ccccaggccgaaaaccctcatatgg

SEQ ID NO: 4031132 - DNA, 25 bp, Homo sapien
cccaggccgaaaaccctcatatgga

SEQ ID NO: 4031133 - DNA, 25 bp, Homo sapien
accccaggccgaaaaccctcatatg

SEQ ID NO: 4031134 - DNA, 25 bp, Homo sapien
ccaggccgaaaaccctcatatggaa

SEQ ID NO: 4031135 - DNA, 25 bp, Homo sapien
tcatcaaaatatgtgctttctcctt

SEQ ID NO: 4031136 - DNA, 25 bp, Homo sapien
gcatttctcctttaagatcatcaaa

SEQ ID NO: 4031137 - DNA, 25 bp, Homo sapien
gcttgtttctgcatttctcctttaa

SEQ ID NO: 4031138 - DNA, 25 bp, Homo sapien
gtttctgcatttctcctttaagatc

SEQ ID NO: 4031139 - DNA, 25 bp, Homo sapien
tggcactttcttctttgtcggggtc

SEQ ID NO: 4031140 - DNA, 25 bp, Homo sapien
ttttctcttcttatccaaatgcttt

SEQ ID NO: 4031141 - DNA, 25 bp, Homo sapien
gcactttcttctttgtcggggtcaa

SEQ ID NO: 4031142 - DNA, 25 bp, Homo sapien
tctcttcttatccaaatgctttttc

SEQ ID NO: 4031143 - DNA, 25 bp, Homo sapien
tgcacgtcccctgtttccaagtctt

SEQ ID NO: 4031144 - DNA, 25 bp, Homo sapien
caagtcttcaaagtcaccatagagc

SEQ ID NO: 4031145 - DNA, 25 bp, Homo sapien
tcttcaaagtcaccatagagctcct

SEQ ID NO: 4031146 - DNA, 25 bp, Homo sapien
ggcccgattttcccttgtgcacgtc

SEQ ID NO: 4031147 - DNA, 25 bp, Homo sapien
tgggaaaagaacacccaaaggctgc

SEQ ID NO: 4031148 - DNA, 25 bp, Homo sapien
ctgggaaaagaacacccaaaggctg

SEQ ID NO: 4031149 - DNA, 25 bp, Homo sapien
acaggcccacaatgcgctccacgtt

SEQ ID NO: 4031150 - DNA, 25 bp, Homo sapien
cacaacaggcccacaatgcgctcca

SEQ ID NO: 4031151 - DNA, 25 bp, Homo sapien
gcccacaatgcgctccacgttccaa

SEQ ID NO: 4031152 - DNA, 25 bp, Homo sapien
atgcgctccacgttccaagcctcat

SEQ ID NO: 4031153 - DNA, 25 bp, Homo sapien
tctgcttctcatgctccccgaggag

SEQ ID NO: 4031154 - DNA, 25 bp, Homo sapien
tccccgaggagtgcagccccagtgg

SEQ ID NO: 4031155 - DNA, 25 bp, Homo sapien
gcttctcatgctccccgaggagtgc

SEQ ID NO: 4031156 - DNA, 25 bp, Homo sapien
gcagccccagtgggcccaatggttc

SEQ ID NO: 4031157 - DNA, 25 bp, Homo sapien
gtggctatattcgaaacagaatctt

SEQ ID NO: 4031158 - DNA, 25 bp, Homo sapien
gctatattcgaaacagaatctttct

SEQ ID NO: 4031159 - DNA, 25 bp, Homo sapien
tgtggctatattcgaaacagaatct

SEQ ID NO: 4031160 - DNA, 25 bp, Homo sapien
ggctatattcgaaacagaatctttc

SEQ ID NO: 4031161 - DNA, 25 bp, Homo sapien
cttcaaggctggtggtttctgagaa

SEQ ID NO: 4031162 - DNA, 25 bp, Homo sapien
tcaaggctggtggtttctgagaaga

SEQ ID NO: 4031163 - DNA, 25 bp, Homo sapien
aaggctggtggtttctgagaagaca

SEQ ID NO: 4031164 - DNA, 25 bp, Homo sapien
caaggctggtggtttctgagaagac

SEQ ID NO: 4031165 - DNA, 25 bp, Homo sapien
gtggctatattcgaaacagaatctt

SEQ ID NO: 4031166 - DNA, 25 bp, Homo sapien
gctatattcgaaacagaatctttct

SEQ ID NO: 4031167 - DNA, 25 bp, Homo sapien
tgtggctatattcgaaacagaatct

SEQ ID NO: 4031168 - DNA, 25 bp, Homo sapien
ggctatattcgaaacagaatctttc

SEQ ID NO: 4031169 - DNA, 25 bp, Homo sapien
agtaatcgatacatgaagtaggttt

SEQ ID NO: 4031170 - DNA, 25 bp, Homo sapien
aaagtaatcgatacatgaagtaggt

SEQ ID NO: 4031171 - DNA, 25 bp, Homo sapien
caaagtaatcgatacatgaagtagg

SEQ ID NO: 4031172 - DNA, 25 bp, Homo sapien
aagtaatcgatacatgaagtaggtt

SEQ ID NO: 4031173 - DNA, 25 bp, Homo sapien
tcagctggttgtttctgagaagaca

SEQ ID NO: 4031174 - DNA, 25 bp, Homo sapien
ctcagctggttgtttctgagaagac

SEQ ID NO: 4031175 - DNA, 25 bp, Homo sapien
cttctcagctggttgtttctgagaa

SEQ ID NO: 4031176 - DNA, 25 bp, Homo sapien
tctcagctggttgtttctgagaaga

SEQ ID NO: 4031177 - DNA, 25 bp, Homo sapien
tcaaagcaggtggtacatgatcccg

SEQ ID NO: 4031178 - DNA, 25 bp, Homo sapien
aagcaggtggtacatgatcccgcat

SEQ ID NO: 4031179 - DNA, 25 bp, Homo sapien
ctgagaatcaatgtcaaagcaggtg

SEQ ID NO: 4031180 - DNA, 25 bp, Homo sapien
tgagaatcaatgtcaaagcaggtgg

SEQ ID NO: 4031181 - DNA, 25 bp, Homo sapien
cttatcaacattttggtcttcaaac

SEQ ID NO: 4031182 - DNA, 25 bp, Homo sapien
tgttttttcaatgccacatgcagca

SEQ ID NO: 4031183 - DNA, 25 bp, Homo sapien
caacattttggtcttcaaacaaggt

SEQ ID NO: 4031184 - DNA, 25 bp, Homo sapien
tctgttttttcaatgccacatgcag

SEQ ID NO: 4031185 - DNA, 25 bp, Homo sapien
tgtgcaacattatccagtaggtagc

SEQ ID NO: 4031186 - DNA, 25 bp, Homo sapien
aacattatccagtaggtagcgacac

SEQ ID NO: 4031187 - DNA, 25 bp, Homo sapien
gcaacattatccagtaggtagcgac

SEQ ID NO: 4031188 - DNA, 25 bp, Homo sapien
ggctgtgcaacattatccagtaggt

SEQ ID NO: 4031189 - DNA, 25 bp, Homo sapien
tcttttagttctgtggctatgttca

SEQ ID NO: 4031190 - DNA, 25 bp, Homo sapien
ttttagttctgtggctatgttcaaa

SEQ ID NO: 4031191 - DNA, 25 bp, Homo sapien
tagttctgtggctatgttcaaaaca

SEQ ID NO: 4031192 - DNA, 25 bp, Homo sapien
gttctgtggctatgttcaaaacaga

SEQ ID NO: 4031193 - DNA, 25 bp, Homo sapien
ttctgtagctatgttcgaaacagag

SEQ ID NO: 4031194 - DNA, 25 bp, Homo sapien
agctatgttcgaaacagagtctttc

SEQ ID NO: 4031195 - DNA, 25 bp, Homo sapien
cttttagttctgtagctatgttcga

SEQ ID NO: 4031196 - DNA, 25 bp, Homo sapien
tcatcttttagttctgtagctatgt

SEQ ID NO: 4031197 - DNA, 25 bp, Homo sapien
ttatttctgtggctatatttgaaac

SEQ ID NO: 4031198 - DNA, 25 bp, Homo sapien
tctgtggctatatttgaaacagaat

SEQ ID NO: 4031199 - DNA, 25 bp, Homo sapien
atttctgtggctatatttgaaacag

SEQ ID NO: 4031200 - DNA, 25 bp, Homo sapien
ctgtcccagatttttgtccatcatt

SEQ ID NO: 4031201 - DNA, 25 bp, Homo sapien
cttcaaggctggttgtttctgagaa

SEQ ID NO: 4031202 - DNA, 25 bp, Homo sapien
aaggctggttgtttctgagaacaca

SEQ ID NO: 4031203 - DNA, 25 bp, Homo sapien
caaggctggttgtttctgagaacac

SEQ ID NO: 4031204 - DNA, 25 bp, Homo sapien
tcaaggctggttgtttctgagaaca

SEQ ID NO: 4031205 - DNA, 25 bp, Homo sapien
ggttgcaggcacccggcagtcgctc

SEQ ID NO: 4031206 - DNA, 25 bp, Homo sapien
gagccgcacctctgggcgccctgag

SEQ ID NO: 4031207 - DNA, 25 bp, Homo sapien
gaggagccgcacctctgggcgccct

SEQ ID NO: 4031208 - DNA, 25 bp, Homo sapien
gggaggagccgcacctctgggcgcc

SEQ ID NO: 4031209 - DNA, 25 bp, Homo sapien
gttgcaaagtcatactcacctttct

SEQ ID NO: 4031210 - DNA, 25 bp, Homo sapien
caaagtcggtcacgtgcagtggctc

SEQ ID NO: 4031211 - DNA, 25 bp, Homo sapien
taaagttccaaagtcggtcacgtgc

SEQ ID NO: 4031212 - DNA, 25 bp, Homo sapien
aatgcataacgtccagtgaatttat

SEQ ID NO: 4031213 - DNA, 25 bp, Homo sapien
gagacttcagatcctccagtgatac

SEQ ID NO: 4031214 - DNA, 25 bp, Homo sapien
tgtgtccaccagagacttcagatcc

SEQ ID NO: 4031215 - DNA, 25 bp, Homo sapien
tctcaaagctacatttgacatttac

SEQ ID NO: 4031216 - DNA, 25 bp, Homo sapien
catttacttttgcagtggacttcat

SEQ ID NO: 4031217 - DNA, 25 bp, Homo sapien
acaaggaggcgctccggacaccagg

SEQ ID NO: 4031218 - DNA, 25 bp, Homo sapien
tccggacaccagggtccctcagaac

SEQ ID NO: 4031219 - DNA, 25 bp, Homo sapien
aggaaacaaggaggcgctccggaca

SEQ ID NO: 4031220 - DNA, 25 bp, Homo sapien
tcaggaaacaaggaggcgctccgga

SEQ ID NO: 4031221 - DNA, 25 bp, Homo sapien
gacttcccctcgctgtgtgtttcac

SEQ ID NO: 4031222 - DNA, 25 bp, Homo sapien
ctgacttcccctcgctgtgtgtttc

SEQ ID NO: 4031223 - DNA, 25 bp, Homo sapien
cactgacttcccctcgctgtgtgtt

SEQ ID NO: 4031224 - DNA, 25 bp, Homo sapien
acttcccctcgctgtgtgtttcaca

SEQ ID NO: 4031225 - DNA, 25 bp, Homo sapien
ctatcaccactaatgtatgaaatcc

SEQ ID NO: 4031226 - DNA, 25 bp, Homo sapien
gtgaatccagagtctggacaggaca

SEQ ID NO: 4031227 - DNA, 25 bp, Homo sapien
tcaccactaatgtatgaaatccact

SEQ ID NO: 4031228 - DNA, 25 bp, Homo sapien
agtctggacaggacagtctcaggga

SEQ ID NO: 4031229 - DNA, 25 bp, Homo sapien
ccatagctaagaaggaggctcggtc

SEQ ID NO: 4031230 - DNA, 25 bp, Homo sapien
cacccatagctaagaaggaggctcg

SEQ ID NO: 4031231 - DNA, 25 bp, Homo sapien
gcacctgccacagatgaaagagaca

SEQ ID NO: 4031232 - DNA, 25 bp, Homo sapien
gaaggttggagaacatccccctgtg

SEQ ID NO: 4031233 - DNA, 25 bp, Homo sapien
ggaagggcacacacatgggatggct

SEQ ID NO: 4031234 - DNA, 25 bp, Homo sapien
tctttttgtggtcctgggtgcaccg

SEQ ID NO: 4031235 - DNA, 25 bp, Homo sapien
gagctgcctttcatgaggaggggag

SEQ ID NO: 4031236 - DNA, 25 bp, Homo sapien
aggggaggggacatatttccatgtc

SEQ ID NO: 4031237 - DNA, 25 bp, Homo sapien
gtcctgggtgcaccgcccggcattg

SEQ ID NO: 4031238 - DNA, 25 bp, Homo sapien
tgcaagtagcagtaggtgaaggtgt

SEQ ID NO: 4031239 - DNA, 25 bp, Homo sapien
aagtagcagtaggtgaaggtgtatc

SEQ ID NO: 4031240 - DNA, 25 bp, Homo sapien
agtgcaagtagcagtaggtgaaggt

SEQ ID NO: 4031241 - DNA, 25 bp, Homo sapien
caagtagcagtaggtgaaggtgtat

SEQ ID NO: 4031242 - DNA, 25 bp, Homo sapien
gccccagactgcaccagctgcacca

SEQ ID NO: 4031243 - DNA, 25 bp, Homo sapien
cagccccagactgcaccagctgcac

SEQ ID NO: 4031244 - DNA, 25 bp, Homo sapien
ctcagccccagactgcaccagctgc

SEQ ID NO: 4031245 - DNA, 25 bp, Homo sapien
accagctgcaccaggaagtgggcac

SEQ ID NO: 4031246 - DNA, 25 bp, Homo sapien
agaggatcttgcaggtccagccaat

SEQ ID NO: 4031247 - DNA, 25 bp, Homo sapien
gaagaggatcttgcaggtccagcca

SEQ ID NO: 4031248 - DNA, 25 bp, Homo sapien
ccaagaagaggatcttgcaggtcca

SEQ ID NO: 4031249 - DNA, 25 bp, Homo sapien
agaagaggatcttgcaggtccagcc

SEQ ID NO: 4031250 - DNA, 25 bp, Homo sapien
catgaacctaaggattctcttttcc

SEQ ID NO: 4031251 - DNA, 25 bp, Homo sapien
ccagtagtaaggactggttgtgatg

SEQ ID NO: 4031252 - DNA, 25 bp, Homo sapien
gctcttcaggtccagggctgactcc

SEQ ID NO: 4031253 - DNA, 25 bp, Homo sapien
gactggttgtgatggagtggccaga

SEQ ID NO: 4031254 - DNA, 25 bp, Homo sapien
ctcttcaggtccagggctgactcct

SEQ ID NO: 4031255 - DNA, 25 bp, Homo sapien
tcttcactactgttggccacttgca

SEQ ID NO: 4031256 - DNA, 25 bp, Homo sapien
tctccacatgacacactggagggtg

SEQ ID NO: 4031257 - DNA, 25 bp, Homo sapien
tctgtggtactttgcacagcacagg

SEQ ID NO: 4031258 - DNA, 25 bp, Homo sapien
gcattcccaggtgagtctccacatg

SEQ ID NO: 4031259 - DNA, 25 bp, Homo sapien
agagaggaaagtcctatcagcctct

SEQ ID NO: 4031260 - DNA, 25 bp, Homo sapien
ggaaagtcctatcagcctctcccat

SEQ ID NO: 4031261 - DNA, 25 bp, Homo sapien
agtcctatcagcctctcccatatgg

SEQ ID NO: 4031262 - DNA, 25 bp, Homo sapien
agaggaaagtcctatcagcctctcc

SEQ ID NO: 4031263 - DNA, 25 bp, Homo sapien
ggaatgggcttgagacctcgagctt

SEQ ID NO: 4031264 - DNA, 25 bp, Homo sapien
cttgagacctcgagctttggcagca

SEQ ID NO: 4031265 - DNA, 25 bp, Homo sapien
tgggcttgagacctcgagctttggc

SEQ ID NO: 4031266 - DNA, 25 bp, Homo sapien
gagacctcgagctttggcagcaaga

SEQ ID NO: 4031267 - DNA, 25 bp, Homo sapien
atcctggtgacaatggttgagggct

SEQ ID NO: 4031268 - DNA, 25 bp, Homo sapien
ggtgacaatggttgagggcttttca

SEQ ID NO: 4031269 - DNA, 25 bp, Homo sapien
tggtgacaatggttgagggcttttc

SEQ ID NO: 4031270 - DNA, 25 bp, Homo sapien
cctggtgacaatggttgagggcttt

SEQ ID NO: 4031271 - DNA, 25 bp, Homo sapien
gatacaaggagttcttggcattgtc

SEQ ID NO: 4031272 - DNA, 25 bp, Homo sapien
aagatacaaggagttcttggcattg

SEQ ID NO: 4031273 - DNA, 25 bp, Homo sapien
tgaagatacaaggagttcttggcat

SEQ ID NO: 4031274 - DNA, 25 bp, Homo sapien
acaaggagttcttggcattgtctct

SEQ ID NO: 4031275 - DNA, 25 bp, Homo sapien
cccagtgcatagcatagctactgaa

SEQ ID NO: 4031276 - DNA, 25 bp, Homo sapien
acccagtgcatagcatagctactga

SEQ ID NO: 4031277 - DNA, 25 bp, Homo sapien
tcagggacccccaggctgtaccaag

SEQ ID NO: 4031278 - DNA, 25 bp, Homo sapien
ctgcacaggagagtctcagggaccc

SEQ ID NO: 4031279 - DNA, 25 bp, Homo sapien
ctcccccagactgcaccagctgaac

SEQ ID NO: 4031280 - DNA, 25 bp, Homo sapien
ccccagactgcaccagctgaacctc

SEQ ID NO: 4031281 - DNA, 25 bp, Homo sapien
cagggctgacgtctgtgttgagtgg

SEQ ID NO: 4031282 - DNA, 25 bp, Homo sapien
agggctgacgtctgtgttgagtggg

SEQ ID NO: 4031283 - DNA, 25 bp, Homo sapien
ccaatgttgctctcccagaatgaaa

SEQ ID NO: 4031284 - DNA, 25 bp, Homo sapien
cagtgatttgtcatcactataccca

SEQ ID NO: 4031285 - DNA, 25 bp, Homo sapien
gatttgtcatcactatacccagtaa

SEQ ID NO: 4031286 - DNA, 25 bp, Homo sapien
aaacagtgatttgtcatcactatac

SEQ ID NO: 4031287 - DNA, 25 bp, Homo sapien
cttgaaacagtgatttgtcatcact

SEQ ID NO: 4031288 - DNA, 25 bp, Homo sapien
cacagtgtctggagtgccccctggt

SEQ ID NO: 4031289 - DNA, 25 bp, Homo sapien
tgagcacccgctgttttcctgaggc

SEQ ID NO: 4031290 - DNA, 25 bp, Homo sapien
ccccagtgtcctgagcgctccctgg

SEQ ID NO: 4031291 - DNA, 25 bp, Homo sapien
tggttctgagcacccgctgttttcc

SEQ ID NO: 4031292 - DNA, 25 bp, Homo sapien
tggttttgagtaacccatggtgtcc

SEQ ID NO: 4031293 - DNA, 25 bp, Homo sapien
tggttttgagtgcccccttgtgttc

SEQ ID NO: 4031294 - DNA, 25 bp, Homo sapien
ttttgagtaacccatggtgtcctga

SEQ ID NO: 4031295 - DNA, 25 bp, Homo sapien
ccctggtggttttgagtaacccatg

SEQ ID NO: 4031296 - DNA, 25 bp, Homo sapien
cacggggaacctggatattgagagt

SEQ ID NO: 4031297 - DNA, 25 bp, Homo sapien
ccacggggaacctggatattgagag

SEQ ID NO: 4031298 - DNA, 25 bp, Homo sapien
ctaaggaagggcacagatgtggggt

SEQ ID NO: 4031299 - DNA, 25 bp, Homo sapien
taaggaagggcacagatgtggggtg

SEQ ID NO: 4031300 - DNA, 25 bp, Homo sapien
ggcacagatgtggggtggctcctca

SEQ ID NO: 4031301 - DNA, 25 bp, Homo sapien
acagatgtggggtggctcctcacca

SEQ ID NO: 4031302 - DNA, 25 bp, Homo sapien
gcctgtcgcacacagtgaatatcgt

SEQ ID NO: 4031303 - DNA, 25 bp, Homo sapien
gagctttgcgggacaccttcactga

SEQ ID NO: 4031304 - DNA, 25 bp, Homo sapien
cagtgaatatcgtagctggtgaagg

SEQ ID NO: 4031305 - DNA, 25 bp, Homo sapien
aaggtgtatccagagctttgcggga

SEQ ID NO: 4031306 - DNA, 25 bp, Homo sapien
tgctgccaccaaaaaaatgatcctt

SEQ ID NO: 4031307 - DNA, 25 bp, Homo sapien
gaggagctgtgttctcagcaacttc

SEQ ID NO: 4031308 - DNA, 25 bp, Homo sapien
aaaaaatgatccttcaggtccagtc

SEQ ID NO: 4031309 - DNA, 25 bp, Homo sapien
gccaccaaaaaaatgatccttcagg

SEQ ID NO: 4031310 - DNA, 25 bp, Homo sapien
tttgattagcatggagacaatctgg

SEQ ID NO: 4031311 - DNA, 25 bp, Homo sapien
gcatggagacaatctggatcatttc

SEQ ID NO: 4031312 - DNA, 25 bp, Homo sapien
ttagcatggagacaatctggatcat

SEQ ID NO: 4031313 - DNA, 25 bp, Homo sapien
ccatatttgattagcatggagacaa

SEQ ID NO: 4031314 - DNA, 25 bp, Homo sapien
gacactgagcagatgcctttgcctc

SEQ ID NO: 4031315 - DNA, 25 bp, Homo sapien
acgacactgagcagatgcctttgcc

SEQ ID NO: 4031316 - DNA, 25 bp, Homo sapien
cactacgacactgagcagatgcctt

SEQ ID NO: 4031317 - DNA, 25 bp, Homo sapien
cactgagcagatgcctttgcctcat

SEQ ID NO: 4031318 - DNA, 25 bp, Homo sapien
agccacccgcacagaccactggtga

SEQ ID NO: 4031319 - DNA, 25 bp, Homo sapien
ggacccacaggtggggtgacttgac

SEQ ID NO: 4031320 - DNA, 25 bp, Homo sapien
tcccaggaaacgatgagacatagtt

SEQ ID NO: 4031321 - DNA, 25 bp, Homo sapien
gtgaccctggtgagatgtctgaagg

SEQ ID NO: 4031322 - DNA, 25 bp, Homo sapien
cttcagtcatcctcttggtgatttg

SEQ ID NO: 4031323 - DNA, 25 bp, Homo sapien
ggtccccgaggcctgaccatccagc

SEQ ID NO: 4031324 - DNA, 25 bp, Homo sapien
gtgccccaccgtcattgtcctgagt

SEQ ID NO: 4031325 - DNA, 25 bp, Homo sapien
ctgagttgaatgtccctttgttggg

SEQ ID NO: 4031326 - DNA, 25 bp, Homo sapien
cattgtcctgagttgaatgtccctt

SEQ ID NO: 4031327 - DNA, 25 bp, Homo sapien
tgtgactggaatgtgtgccccaccg

SEQ ID NO: 4031328 - DNA, 25 bp, Homo sapien
catgcgtagctgagaacaatgtgtg

SEQ ID NO: 4031329 - DNA, 25 bp, Homo sapien
ttctacatatttctagccgggcatg

SEQ ID NO: 4031330 - DNA, 25 bp, Homo sapien
ggagtgtttcgatgtctttcaggtc

SEQ ID NO: 4031331 - DNA, 25 bp, Homo sapien
tcctgaagagtgtgtcatgcgtagc

SEQ ID NO: 4031332 - DNA, 25 bp, Homo sapien
ggagcttggatgcctgcacacttgg

SEQ ID NO: 4031333 - DNA, 25 bp, Homo sapien
gagcttggatgcctgcacacttggt

SEQ ID NO: 4031334 - DNA, 25 bp, Homo sapien
agcttggatgcctgcacacttggtc

SEQ ID NO: 4031335 - DNA, 25 bp, Homo sapien
aagccttcagaattgccttcgtacg

SEQ ID NO: 4031336 - DNA, 25 bp, Homo sapien
tcaagccttcagaattgccttcgta

SEQ ID NO: 4031337 - DNA, 25 bp, Homo sapien
gccttcagaattgccttcgtacgta

SEQ ID NO: 4031338 - DNA, 25 bp, Homo sapien
ccttcagaattgccttcgtacgtac

SEQ ID NO: 4031339 - DNA, 25 bp, Homo sapien
ggacttgactgaactataggtggta

SEQ ID NO: 4031340 - DNA, 25 bp, Homo sapien
acttgactgaactataggtggtaga

SEQ ID NO: 4031341 - DNA, 25 bp, Homo sapien
ttgactgaactataggtggtagaat

SEQ ID NO: 4031342 - DNA, 25 bp, Homo sapien
cttggacttgactgaactataggtg

SEQ ID NO: 4031343 - DNA, 25 bp, Homo sapien
tgttgggcaggaggtactcaatgtt

SEQ ID NO: 4031344 - DNA, 25 bp, Homo sapien
tgccaatgttgggcaggaggtactc

SEQ ID NO: 4031345 - DNA, 25 bp, Homo sapien
ccaatgttgggcaggaggtactcaa

SEQ ID NO: 4031346 - DNA, 25 bp, Homo sapien
aatgttgggcaggaggtactcaatg

SEQ ID NO: 4031347 - DNA, 25 bp, Homo sapien
aggggtcaactggcatgccctcgga

SEQ ID NO: 4031348 - DNA, 25 bp, Homo sapien
caggaggaggggtcaactggcatgc

SEQ ID NO: 4031349 - DNA, 25 bp, Homo sapien
aggaggggtcaactggcatgccctc

SEQ ID NO: 4031350 - DNA, 25 bp, Homo sapien
ggtcaactggcatgccctcggatgc

SEQ ID NO: 4031351 - DNA, 25 bp, Homo sapien
tctctcccttgtcctctttgtcact

SEQ ID NO: 4031352 - DNA, 25 bp, Homo sapien
ctttgtcactgaagaaccagtctga

SEQ ID NO: 4031353 - DNA, 25 bp, Homo sapien
tcccttgtcctctttgtcactgaag

SEQ ID NO: 4031354 - DNA, 25 bp, Homo sapien
tgtcctctttgtcactgaagaacca

SEQ ID NO: 4031355 - DNA, 25 bp, Homo sapien
tgggtcaccatgtctgtcatgttgc

SEQ ID NO: 4031356 - DNA, 25 bp, Homo sapien
cagtgtctccacgatcttgtagcgg

SEQ ID NO: 4031357 - DNA, 25 bp, Homo sapien
gtcatgttgccctcagacgtcctca

SEQ ID NO: 4031358 - DNA, 25 bp, Homo sapien
cacgatcttgtagcggtcaggcatg

SEQ ID NO: 4031359 - DNA, 25 bp, Homo sapien
tcatagtagtgtcctgggagatccc

SEQ ID NO: 4031360 - DNA, 25 bp, Homo sapien
tctcagagtggtcagcgatggtctt

SEQ ID NO: 4031361 - DNA, 25 bp, Homo sapien
gcccacaaggaatttgagtgtttca

SEQ ID NO: 4031362 - DNA, 25 bp, Homo sapien
gtcagcgatggtcttgagatggccc

SEQ ID NO: 4031363 - DNA, 25 bp, Homo sapien
tcccgcgcgtcctcaatgcagttgg

SEQ ID NO: 4031364 - DNA, 25 bp, Homo sapien
aatgcagttggcctcgatgaagtcg

SEQ ID NO: 4031365 - DNA, 25 bp, Homo sapien
agcttccgcagcgtcctcatccgct

SEQ ID NO: 4031366 - DNA, 25 bp, Homo sapien
gcctcgatgaagtcgttgtatttgt

SEQ ID NO: 4031367 - DNA, 25 bp, Homo sapien
gctcgagcagctttcggaagaagga

SEQ ID NO: 4031368 - DNA, 25 bp, Homo sapien
agaggctcgagcagctttcggaaga

SEQ ID NO: 4031369 - DNA, 25 bp, Homo sapien
cagcagtgaaaagaggctcgagcag

SEQ ID NO: 4031370 - DNA, 25 bp, Homo sapien
agcagctttcggaagaaggacttga

SEQ ID NO: 4031371 - DNA, 25 bp, Homo sapien
ttgagctgctcctgtaggctggaca

SEQ ID NO: 4031372 - DNA, 25 bp, Homo sapien
ggttctccgtggctggctggcactc

SEQ ID NO: 4031373 - DNA, 25 bp, Homo sapien
tttttcttgatgatgttgatgcccc

SEQ ID NO: 4031374 - DNA, 25 bp, Homo sapien
tgcccttggggcagccttcttattt

SEQ ID NO: 4031375 - DNA, 25 bp, Homo sapien
ctgaccccaaatgcccttggggcag

SEQ ID NO: 4031376 - DNA, 25 bp, Homo sapien
ttgaggaactcagacttgaggcccc

SEQ ID NO: 4031377 - DNA, 25 bp, Homo sapien
cctgaggccacgtgccgcactctgc

SEQ ID NO: 4031378 - DNA, 25 bp, Homo sapien
gaggccacgtgccgcactctgcttg

SEQ ID NO: 4031379 - DNA, 25 bp, Homo sapien
ccccaggccgcgagagcctttgggg

SEQ ID NO: 4031380 - DNA, 25 bp, Homo sapien
tcactttgcgataatcattaagctt

SEQ ID NO: 4031381 - DNA, 25 bp, Homo sapien
gatcagagcttggttggcacagccg

SEQ ID NO: 4031382 - DNA, 25 bp, Homo sapien
ctcactttgcgataatcattaagct

SEQ ID NO: 4031383 - DNA, 25 bp, Homo sapien
ttgctgatcagagcttggttggcac

SEQ ID NO: 4031384 - DNA, 25 bp, Homo sapien
acaataatccctgtcatcattaggg

SEQ ID NO: 4031385 - DNA, 25 bp, Homo sapien
cctgtcatcattagggtcaggatgg

SEQ ID NO: 4031386 - DNA, 25 bp, Homo sapien
aatccctgtcatcattagggtcagg

SEQ ID NO: 4031387 - DNA, 25 bp, Homo sapien
tcatcattagggtcaggatggtgac

SEQ ID NO: 4031388 - DNA, 25 bp, Homo sapien
ctgctgttctcccagatcgctctga

SEQ ID NO: 4031389 - DNA, 25 bp, Homo sapien
ccagatcgctctgatccccccagca

SEQ ID NO: 4031390 - DNA, 25 bp, Homo sapien
ttctcccagatcgctctgatccccc

SEQ ID NO: 4031391 - DNA, 25 bp, Homo sapien
gctgttctcccagatcgctctgatc

SEQ ID NO: 4031392 - DNA, 25 bp, Homo sapien
agccggaacacgtgcctcctcttgg

SEQ ID NO: 4031393 - DNA, 25 bp, Homo sapien
cggaacacgtgcctcctcttggtct

SEQ ID NO: 4031394 - DNA, 25 bp, Homo sapien
aagtcagcggtggtcagccggaaca

SEQ ID NO: 4031395 - DNA, 25 bp, Homo sapien
ggtggtcagccggaacacgtgcctc

SEQ ID NO: 4031396 - DNA, 25 bp, Homo sapien
tgcgccggcccccacagcccccgcc

SEQ ID NO: 4031397 - DNA, 25 bp, Homo sapien
cacagcccccgccgccgccggcccg

SEQ ID NO: 4031398 - DNA, 25 bp, Homo sapien
ctgcgccggcccccacagcccccgc

SEQ ID NO: 4031399 - DNA, 25 bp, Homo sapien
ccttgctcagcgagagcgagcgcgc

SEQ ID NO: 4031400 - DNA, 25 bp, Homo sapien
cttgctcagcgagagcgagcgcgcc

SEQ ID NO: 4031401 - DNA, 25 bp, Homo sapien
ctccttgctcagcgagagcgagcgc

SEQ ID NO: 4031402 - DNA, 25 bp, Homo sapien
tccttgctcagcgagagcgagcgcg

SEQ ID NO: 4031403 - DNA, 25 bp, Homo sapien
gcttccactggcgcaggccgctgcc

SEQ ID NO: 4031404 - DNA, 25 bp, Homo sapien
actggcgcaggccgctgcccgcttt

SEQ ID NO: 4031405 - DNA, 25 bp, Homo sapien
tccactggcgcaggccgctgcccgc

SEQ ID NO: 4031406 - DNA, 25 bp, Homo sapien
ccgcttccactggcgcaggccgctg

SEQ ID NO: 4031407 - DNA, 25 bp, Homo sapien
gcaggagctccatctcccatcagac

SEQ ID NO: 4031408 - DNA, 25 bp, Homo sapien
ggcaggagctccatctcccatcaga

SEQ ID NO: 4031409 - DNA, 25 bp, Homo sapien
tgagggcaggagctccatctcccat

SEQ ID NO: 4031410 - DNA, 25 bp, Homo sapien
agggcaggagctccatctcccatca

SEQ ID NO: 4031411 - DNA, 25 bp, Homo sapien
acaaaccagacaaagaggtcccgtg

SEQ ID NO: 4031412 - DNA, 25 bp, Homo sapien
caaagaggtcccgtggctggcagat

SEQ ID NO: 4031413 - DNA, 25 bp, Homo sapien
gtgagccctgctcatcacagaactg

SEQ ID NO: 4031414 - DNA, 25 bp, Homo sapien
catcatgtggatcctgagctgtgag

SEQ ID NO: 4031415 - DNA, 25 bp, Homo sapien
gaaccatgatgccacatgcgttctc

SEQ ID NO: 4031416 - DNA, 25 bp, Homo sapien
tgcacttggaaccatgatgccacat

SEQ ID NO: 4031417 - DNA, 25 bp, Homo sapien
gcagtctgtgcacttggaaccatga

SEQ ID NO: 4031418 - DNA, 25 bp, Homo sapien
tctgtgcacttggaaccatgatgcc

SEQ ID NO: 4031419 - DNA, 25 bp, Homo sapien
gctgaaggtcgcatctgagaggtca

SEQ ID NO: 4031420 - DNA, 25 bp, Homo sapien
tcagaggttgagtgtcgcttagaag

SEQ ID NO: 4031421 - DNA, 25 bp, Homo sapien
agtgtcgcttagaaggagcgtcagc

SEQ ID NO: 4031422 - DNA, 25 bp, Homo sapien
tgaaggtcgcatctgagaggtcaga

SEQ ID NO: 4031423 - DNA, 25 bp, Homo sapien
cacaccctcactcctgcgcacgcac

SEQ ID NO: 4031424 - DNA, 25 bp, Homo sapien
accctcactcctgcgcacgcacaca

SEQ ID NO: 4031425 - DNA, 25 bp, Homo sapien
acaccctcactcctgcgcacgcaca

SEQ ID NO: 4031426 - DNA, 25 bp, Homo sapien
cccacaccctcactcctgcgcacgc

SEQ ID NO: 4031427 - DNA, 25 bp, Homo sapien
caggctgggtatgcggtttggcagg

SEQ ID NO: 4031428 - DNA, 25 bp, Homo sapien
gcaggctgggtatgcggtttggcag

SEQ ID NO: 4031429 - DNA, 25 bp, Homo sapien
ttgagtccatcatcgcaggacttgg

SEQ ID NO: 4031430 - DNA, 25 bp, Homo sapien
ggtgttgagtccatcatcgcaggac

SEQ ID NO: 4031431 - DNA, 25 bp, Homo sapien
gaaggtgttgagtccatcatcgcag

SEQ ID NO: 4031432 - DNA, 25 bp, Homo sapien
cggaaggtgttgagtccatcatcgc

SEQ ID NO: 4031433 - DNA, 25 bp, Homo sapien
cgcgagtaatgccatccgagggtga

SEQ ID NO: 4031434 - DNA, 25 bp, Homo sapien
aatgccatccgagggtgaaggtgaa

SEQ ID NO: 4031435 - DNA, 25 bp, Homo sapien
tgcagtcccgcgagtaatgccatcc

SEQ ID NO: 4031436 - DNA, 25 bp, Homo sapien
tcccgcgagtaatgccatccgaggg

SEQ ID NO: 4031437 - DNA, 25 bp, Homo sapien
ttgcctccaccctagccttgccagc

SEQ ID NO: 4031438 - DNA, 25 bp, Homo sapien
tgcttgcctccaccctagccttgcc

SEQ ID NO: 4031439 - DNA, 25 bp, Homo sapien
acctgcttgcctccaccctagcctt

SEQ ID NO: 4031440 - DNA, 25 bp, Homo sapien
gaacctgcttgcctccaccctagcc

SEQ ID NO: 4031441 - DNA, 25 bp, Homo sapien
gagcgccccctggttgccccgcgcg

SEQ ID NO: 4031442 - DNA, 25 bp, Homo sapien
aggtttctgtctgggctcacaccga

SEQ ID NO: 4031443 - DNA, 25 bp, Homo sapien
ggaggtttctgtctgggctcacacc

SEQ ID NO: 4031444 - DNA, 25 bp, Homo sapien
cgcgcgcccctgcagggaggtttct

SEQ ID NO: 4031445 - DNA, 25 bp, Homo sapien
ggtgcagcgtagtctgttgtcccac

SEQ ID NO: 4031446 - DNA, 25 bp, Homo sapien
tgcagcgtagtctgttgtcccacca

SEQ ID NO: 4031447 - DNA, 25 bp, Homo sapien
gcagcgtagtctgttgtcccaccat

SEQ ID NO: 4031448 - DNA, 25 bp, Homo sapien
gtgcagcgtagtctgttgtcccacc

SEQ ID NO: 4031449 - DNA, 25 bp, Homo sapien
gcacaggagagtctaagggaccccc

SEQ ID NO: 4031450 - DNA, 25 bp, Homo sapien
caggagagtctaagggaccccccag

SEQ ID NO: 4031451 - DNA, 25 bp, Homo sapien
agagtctaagggaccccccaggctg

SEQ ID NO: 4031452 - DNA, 25 bp, Homo sapien
ctgcacaggagagtctaagggaccc

SEQ ID NO: 4031453 - DNA, 25 bp, Homo sapien
accagctgcacctcacactggacac

SEQ ID NO: 4031454 - DNA, 25 bp, Homo sapien
aggcctccggcagactccaccagct

SEQ ID NO: 4031455 - DNA, 25 bp, Homo sapien
ccaccagctgcacctcacactggac

SEQ ID NO: 4031456 - DNA, 25 bp, Homo sapien
caaggcctccggcagactccaccag

SEQ ID NO: 4031457 - DNA, 25 bp, Homo sapien
gggcagggcagcagatctgggaggt

SEQ ID NO: 4031458 - DNA, 25 bp, Homo sapien
tcagagctttagtctgcagggcagg

SEQ ID NO: 4031459 - DNA, 25 bp, Homo sapien
tgatgacactgatggggaacactgg

SEQ ID NO: 4031460 - DNA, 25 bp, Homo sapien
gcagcagatctgggaggtgatgaca

SEQ ID NO: 4031461 - DNA, 25 bp, Homo sapien
cctgagcgccccttggtgacctgag

SEQ ID NO: 4031462 - DNA, 25 bp, Homo sapien
ccctggtgttctgagcttccctgca

SEQ ID NO: 4031463 - DNA, 25 bp, Homo sapien
cagggaggtttgtgtctggccccac

SEQ ID NO: 4031464 - DNA, 25 bp, Homo sapien
ctgccttaatgtgtcctgagcgccc

SEQ ID NO: 4031465 - DNA, 25 bp, Homo sapien
ccatggtggtgtactcattgcacat

SEQ ID NO: 4031466 - DNA, 25 bp, Homo sapien
atggtggtgtactcattgcacatgt

SEQ ID NO: 4031467 - DNA, 25 bp, Homo sapien
tccatggtggtgtactcattgcaca

SEQ ID NO: 4031468 - DNA, 25 bp, Homo sapien
catggtggtgtactcattgcacatg

SEQ ID NO: 4031469 - DNA, 25 bp, Homo sapien
gaggaagtactggttatgatcggaa

SEQ ID NO: 4031470 - DNA, 25 bp, Homo sapien
atcggaaatccagaggcggcacagg

SEQ ID NO: 4031471 - DNA, 25 bp, Homo sapien
ttatgatcggaaatccagaggcggc

SEQ ID NO: 4031472 - DNA, 25 bp, Homo sapien
tgatcggaaatccagaggcggcaca

SEQ ID NO: 4031473 - DNA, 25 bp, Homo sapien
cacgactctgatgctggtgcgcatg

SEQ ID NO: 4031474 - DNA, 25 bp, Homo sapien
gagcttcctcacgactctgatgctg

SEQ ID NO: 4031475 - DNA, 25 bp, Homo sapien
ctggtgcgcatggttgaggacttct

SEQ ID NO: 4031476 - DNA, 25 bp, Homo sapien
cttctcattccggtaggtggcaatg

SEQ ID NO: 4031477 - DNA, 25 bp, Homo sapien
gcgtcttaccgccattccaactaat

SEQ ID NO: 4031478 - DNA, 25 bp, Homo sapien
cgtcttaccgccattccaactaata

SEQ ID NO: 4031479 - DNA, 25 bp, Homo sapien
accagctgcacctcacactgcacac

SEQ ID NO: 4031480 - DNA, 25 bp, Homo sapien
ctccaccagctgcacctcacactgc

SEQ ID NO: 4031481 - DNA, 25 bp, Homo sapien
cccaggctggaccaagcctccccca

SEQ ID NO: 4031482 - DNA, 25 bp, Homo sapien
aagcctcccccagactccaccagct

SEQ ID NO: 4031483 - DNA, 25 bp, Homo sapien
caaggtcacctcgcacatcctccat

SEQ ID NO: 4031484 - DNA, 25 bp, Homo sapien
ccaaggtcacctcgcacatcctcca

SEQ ID NO: 4031485 - DNA, 25 bp, Homo sapien
acacacactggcctgcgcccactgt

SEQ ID NO: 4031486 - DNA, 25 bp, Homo sapien
tcttaagccggtctgaaaagcgcaa

SEQ ID NO: 4031487 - DNA, 25 bp, Homo sapien
gattttccaggtgcgaccgtcaccc

SEQ ID NO: 4031488 - DNA, 25 bp, Homo sapien
cgcgcacggtgcgcacacacactgg

SEQ ID NO: 4031489 - DNA, 25 bp, Homo sapien
tgcctgttcaagagtctgccaaagt

SEQ ID NO: 4031490 - DNA, 25 bp, Homo sapien
tttcacatgtggtcctctagagtca

SEQ ID NO: 4031491 - DNA, 25 bp, Homo sapien
catgcctgttcaagagtctgccaaa

SEQ ID NO: 4031492 - DNA, 25 bp, Homo sapien
gtcatgattgctgtcgcatttcaaa

SEQ ID NO: 4031493 - DNA, 25 bp, Homo sapien
gggacactaatattgagggtgatga

SEQ ID NO: 4031494 - DNA, 25 bp, Homo sapien
ctggacctgattcacaagggacact

SEQ ID NO: 4031495 - DNA, 25 bp, Homo sapien
gacctgattcacaagggacactaat

SEQ ID NO: 4031496 - DNA, 25 bp, Homo sapien
aatcagtgcagatcccacggtgtgg

SEQ ID NO: 4031497 - DNA, 25 bp, Homo sapien
gtttttgcactgtgtctctcacaca

SEQ ID NO: 4031498 - DNA, 25 bp, Homo sapien
cagtaatacatgaccatgtcttcag

SEQ ID NO: 4031499 - DNA, 25 bp, Homo sapien
gtaggctgtgctcatggacctgtca

SEQ ID NO: 4031500 - DNA, 25 bp, Homo sapien
tcatggacctgtcactggtaatggt

SEQ ID NO: 4031501 - DNA, 25 bp, Homo sapien
ccagaacgtctgtgcatagtgtgtg

SEQ ID NO: 4031502 - DNA, 25 bp, Homo sapien
ccccagaacgtctgtgcatagtgtg

SEQ ID NO: 4031503 - DNA, 25 bp, Homo sapien
agaacgtctgtgcatagtgtgtgtt

SEQ ID NO: 4031504 - DNA, 25 bp, Homo sapien
cccagaacgtctgtgcatagtgtgt

SEQ ID NO: 4031505 - DNA, 25 bp, Homo sapien
tcagccccaggctgcaacagctgaa

SEQ ID NO: 4031506 - DNA, 25 bp, Homo sapien
cgtgtaaagtatttggtgaaggtgt

SEQ ID NO: 4031507 - DNA, 25 bp, Homo sapien
aacagctgaacctgggaatggacac

SEQ ID NO: 4031508 - DNA, 25 bp, Homo sapien
gctgcaacagctgaacctgggaatg

SEQ ID NO: 4031509 - DNA, 25 bp, Homo sapien
caagaagtggatcccccaggtacag

SEQ ID NO: 4031510 - DNA, 25 bp, Homo sapien
cagctgccaccaagaagtggatccc

SEQ ID NO: 4031511 - DNA, 25 bp, Homo sapien
caccaagaagtggatcccccaggta

SEQ ID NO: 4031512 - DNA, 25 bp, Homo sapien
tggatcccccaggtacagtccatgg

SEQ ID NO: 4031513 - DNA, 25 bp, Homo sapien
cacagacatccaaatttacctcagt

SEQ ID NO: 4031514 - DNA, 25 bp, Homo sapien
aatttacctcagtggatctcaggtt

SEQ ID NO: 4031515 - DNA, 25 bp, Homo sapien
cagtggatctcaggttatttgcata

SEQ ID NO: 4031516 - DNA, 25 bp, Homo sapien
ttgcatattcatgacatagcatttc

SEQ ID NO: 4031517 - DNA, 25 bp, Homo sapien
tttgggagtgccgtgtttcttcact

SEQ ID NO: 4031518 - DNA, 25 bp, Homo sapien
gtgccgtgtttcttcactgggctct

SEQ ID NO: 4031519 - DNA, 25 bp, Homo sapien
agatttgggagtgccgtgtttcttc

SEQ ID NO: 4031520 - DNA, 25 bp, Homo sapien
ggagtgccgtgtttcttcactgggc

SEQ ID NO: 4031521 - DNA, 25 bp, Homo sapien
gaaacataaaatgggtgtggtgaag

SEQ ID NO: 4031522 - DNA, 25 bp, Homo sapien
aagatgccgagtagagataccagaa

SEQ ID NO: 4031523 - DNA, 25 bp, Homo sapien
cacattgtgtaagtttagagtcatc

SEQ ID NO: 4031524 - DNA, 25 bp, Homo sapien
gagtcatcactgagcactgaaacca

SEQ ID NO: 4031525 - DNA, 25 bp, Homo sapien
ccagaccagcttcagtcaaaggctg

SEQ ID NO: 4031526 - DNA, 25 bp, Homo sapien
gcttccagggtagccgggaagctct

SEQ ID NO: 4031527 - DNA, 25 bp, Homo sapien
ggagccttgctcatcagtcaggcag

SEQ ID NO: 4031528 - DNA, 25 bp, Homo sapien
agaggcctgtcacctgaagagctgg

SEQ ID NO: 4031529 - DNA, 25 bp, Homo sapien
ggccacactaggagcgggcgaccct

SEQ ID NO: 4031530 - DNA, 25 bp, Homo sapien
tgtccatgggaccaactactgtagc

SEQ ID NO: 4031531 - DNA, 25 bp, Homo sapien
tcttgtccatgggaccaactactgt

SEQ ID NO: 4031532 - DNA, 25 bp, Homo sapien
tcttcttgtccatgggaccaactac

SEQ ID NO: 4031533 - DNA, 25 bp, Homo sapien
ttgtccatgggaccaactactgtag

SEQ ID NO: 4031534 - DNA, 25 bp, Homo sapien
cagaacctggttttcagctttctct

SEQ ID NO: 4031535 - DNA, 25 bp, Homo sapien
gactgcttccgcatggccagaacct

SEQ ID NO: 4031536 - DNA, 25 bp, Homo sapien
gaggccctcagactgcttccgcatg

SEQ ID NO: 4031537 - DNA, 25 bp, Homo sapien
tactgcaagcggtcgtactccttgg

SEQ ID NO: 4031538 - DNA, 25 bp, Homo sapien
cctgccggctaagcatggctgcatt

SEQ ID NO: 4031539 - DNA, 25 bp, Homo sapien
tggcctgccggctaagcatggctgc

SEQ ID NO: 4031540 - DNA, 25 bp, Homo sapien
tgccggctaagcatggctgcattgg

SEQ ID NO: 4031541 - DNA, 25 bp, Homo sapien
ggcctgccggctaagcatggctgca

SEQ ID NO: 4031542 - DNA, 25 bp, Homo sapien
gcgggcagaggacgctcctctggac

SEQ ID NO: 4031543 - DNA, 25 bp, Homo sapien
agcagcgggcagaggacgctcctct

SEQ ID NO: 4031544 - DNA, 25 bp, Homo sapien
tttggcacaaaatgggcagcagcgg

SEQ ID NO: 4031545 - DNA, 25 bp, Homo sapien
gcagaggacgctcctctggacttcc

SEQ ID NO: 4031546 - DNA, 25 bp, Homo sapien
cttcctccaacttcacctcagcatt

SEQ ID NO: 4031547 - DNA, 25 bp, Homo sapien
ccatttttctcagggaagggtctga

SEQ ID NO: 4031548 - DNA, 25 bp, Homo sapien
gccatttttctcagggaagggtctg

SEQ ID NO: 4031549 - DNA, 25 bp, Homo sapien
tgaggggccatttttctcagggaag

SEQ ID NO: 4031550 - DNA, 25 bp, Homo sapien
tgtacttcttggccgcctcactagc

SEQ ID NO: 4031551 - DNA, 25 bp, Homo sapien
cttggccgcctcactagcactctcc

SEQ ID NO: 4031552 - DNA, 25 bp, Homo sapien
ctgcaagatgagagtcaccaggcat

SEQ ID NO: 4031553 - DNA, 25 bp, Homo sapien
ccaaggcagctgagcgagaagccgc

SEQ ID NO: 4031554 - DNA, 25 bp, Homo sapien
gccaaggcagctgagcgagaagccg

SEQ ID NO: 4031555 - DNA, 25 bp, Homo sapien
actgtaaaggggtcttgcacccact

SEQ ID NO: 4031556 - DNA, 25 bp, Homo sapien
ctgtaaaggggtcttgcacccactc

SEQ ID NO: 4031557 - DNA, 25 bp, Homo sapien
cactgtaaaggggtcttgcacccac

SEQ ID NO: 4031558 - DNA, 25 bp, Homo sapien
tgaaaacgtgaaagtgcctcaccct

SEQ ID NO: 4031559 - DNA, 25 bp, Homo sapien
aaacgtgaaagtgcctcaccctgct

SEQ ID NO: 4031560 - DNA, 25 bp, Homo sapien
aaaacgtgaaagtgcctcaccctgc

SEQ ID NO: 4031561 - DNA, 25 bp, Homo sapien
gaaaacgtgaaagtgcctcaccctg

SEQ ID NO: 4031562 - DNA, 25 bp, Homo sapien
cactgagacgcagcctgggttcttg

SEQ ID NO: 4031563 - DNA, 25 bp, Homo sapien
actgagacgcagcctgggttcttgt

SEQ ID NO: 4031564 - DNA, 25 bp, Homo sapien
ctgagacgcagcctgggttcttgta

SEQ ID NO: 4031565 - DNA, 25 bp, Homo sapien
ggtccatgttggtcatggtaaggac

SEQ ID NO: 4031566 - DNA, 25 bp, Homo sapien
gggtccatgttggtcatggtaagga

SEQ ID NO: 4031567 - DNA, 25 bp, Homo sapien
agggtccatgttggtcatggtaagg

SEQ ID NO: 4031568 - DNA, 25 bp, Homo sapien
cagggtccatgttggtcatggtaag

SEQ ID NO: 4031569 - DNA, 25 bp, Homo sapien
tgatgagcctgttcttcagagacgt

SEQ ID NO: 4031570 - DNA, 25 bp, Homo sapien
cttggagatgatgagcctgttcttc

SEQ ID NO: 4031571 - DNA, 25 bp, Homo sapien
atgatgagcctgttcttcagagacg

SEQ ID NO: 4031572 - DNA, 25 bp, Homo sapien
gagatgatgagcctgttcttcagag

SEQ ID NO: 4031573 - DNA, 25 bp, Homo sapien
gatccagctcatacccattccagaa

SEQ ID NO: 4031574 - DNA, 25 bp, Homo sapien
atccagctcatacccattccagaag

SEQ ID NO: 4031575 - DNA, 25 bp, Homo sapien
agcatgcagctttctggttttagtc

SEQ ID NO: 4031576 - DNA, 25 bp, Homo sapien
caggcagcatgcagctttctggttt

SEQ ID NO: 4031577 - DNA, 25 bp, Homo sapien
gcagcatgcagctttctggttttag

SEQ ID NO: 4031578 - DNA, 25 bp, Homo sapien
ccaggcagcatgcagctttctggtt

SEQ ID NO: 4031579 - DNA, 25 bp, Homo sapien
ctccccgccttgaccgctgcagcct

SEQ ID NO: 4031580 - DNA, 25 bp, Homo sapien
ccgccttgaccgctgcagcctgcat

SEQ ID NO: 4031581 - DNA, 25 bp, Homo sapien
cccgccttgaccgctgcagcctgca

SEQ ID NO: 4031582 - DNA, 25 bp, Homo sapien
tccccgccttgaccgctgcagcctg

SEQ ID NO: 4031583 - DNA, 25 bp, Homo sapien
cctgctcccgctgatttttcccccg

SEQ ID NO: 4031584 - DNA, 25 bp, Homo sapien
tgccccagcctttgctgctttttga

SEQ ID NO: 4031585 - DNA, 25 bp, Homo sapien
tttttgatatcgcggctttttgtcc

SEQ ID NO: 4031586 - DNA, 25 bp, Homo sapien
ccgctgatttttcccccgctgccgg

SEQ ID NO: 4031587 - DNA, 25 bp, Homo sapien
ttgcccccgccgccacagtttttgc

SEQ ID NO: 4031588 - DNA, 25 bp, Homo sapien
gcccccgccgccacagtttttgcat

SEQ ID NO: 4031589 - DNA, 25 bp, Homo sapien
tgcccccgccgccacagtttttgca

SEQ ID NO: 4031590 - DNA, 25 bp, Homo sapien
tttgcatcttttttcccacgccttg

SEQ ID NO: 4031591 - DNA, 25 bp, Homo sapien
tgctgcagctttttgcggctctttg

SEQ ID NO: 4031592 - DNA, 25 bp, Homo sapien
ttcccacgccttggcggctttttgc

SEQ ID NO: 4031593 - DNA, 25 bp, Homo sapien
catcttttttcccacgccttggcgg

SEQ ID NO: 4031594 - DNA, 25 bp, Homo sapien
tattccaccgcggctttttgcccca

SEQ ID NO: 4031595 - DNA, 25 bp, Homo sapien
caccgcggctttttgccccagccgc

SEQ ID NO: 4031596 - DNA, 25 bp, Homo sapien
tccaccgcggctttttgccccagcc

SEQ ID NO: 4031597 - DNA, 25 bp, Homo sapien
attccaccgcggctttttgccccag

SEQ ID NO: 4031598 - DNA, 25 bp, Homo sapien
ggtgatacgaaggcctcggagggtg

SEQ ID NO: 4031599 - DNA, 25 bp, Homo sapien
gcgctgtgcgcggagcgatgggaga

SEQ ID NO: 4031600 - DNA, 25 bp, Homo sapien
cagtggcgggggtgatacgaaggcc

SEQ ID NO: 4031601 - DNA, 25 bp, Homo sapien
catagagcggcgctgtgcgcggagc

SEQ ID NO: 4031602 - DNA, 25 bp, Homo sapien
tccgctccagaaaccatgggatgct

SEQ ID NO: 4031603 - DNA, 25 bp, Homo sapien
gacggccccatgtcctcaaaaggaa

SEQ ID NO: 4031604 - DNA, 25 bp, Homo sapien
aacatggcgagacctagtgtacagg

SEQ ID NO: 4031605 - DNA, 25 bp, Homo sapien
aaggatattgtcttcgccagccacg

SEQ ID NO: 4031606 - DNA, 25 bp, Homo sapien
cgaggacacgagagatacacagacc

SEQ ID NO: 4031607 - DNA, 25 bp, Homo sapien
tgtgtgtttcagtgtgtgtccgtgt

SEQ ID NO: 4031608 - DNA, 25 bp, Homo sapien
gtgccacggcttccaccagacggat

SEQ ID NO: 4031609 - DNA, 25 bp, Homo sapien
ccagacggatgggtgcactctacaa

SEQ ID NO: 4031610 - DNA, 25 bp, Homo sapien
ccactggcgggtcttcgttggaaga

SEQ ID NO: 4031611 - DNA, 25 bp, Homo sapien
tcttcgttggaagaagcgacgatgg

SEQ ID NO: 4031612 - DNA, 25 bp, Homo sapien
cctctttcccgggatcaggctgctg

SEQ ID NO: 4031613 - DNA, 25 bp, Homo sapien
tgtcctgttggccactggcgggtct

SEQ ID NO: 4031614 - DNA, 25 bp, Homo sapien
gccagcccgatatattggaagctcg

SEQ ID NO: 4031615 - DNA, 25 bp, Homo sapien
ggaacgtggaatccggaatcatggt

SEQ ID NO: 4031616 - DNA, 25 bp, Homo sapien
actcggcttgagtgtgactcctgtg

SEQ ID NO: 4031617 - DNA, 25 bp, Homo sapien
ggcattacggcctgacgacggattc

SEQ ID NO: 4031618 - DNA, 25 bp, Homo sapien
gatgcctggaccttcgattctgaca

SEQ ID NO: 4031619 - DNA, 25 bp, Homo sapien
tctctctggcctgttcgggtacggg

SEQ ID NO: 4031620 - DNA, 25 bp, Homo sapien
tcaaagcacgctagcagggaatcat

SEQ ID NO: 4031621 - DNA, 25 bp, Homo sapien
tctgacacgaaatctgaatcctgga

SEQ ID NO: 4031622 - DNA, 25 bp, Homo sapien
cctggtgcatcacgtcctgaggatg

SEQ ID NO: 4031623 - DNA, 25 bp, Homo sapien
cagagaaaacaaacgcctggtgcat

SEQ ID NO: 4031624 - DNA, 25 bp, Homo sapien
cctgcgacatgggaagtctccacta

SEQ ID NO: 4031625 - DNA, 25 bp, Homo sapien
gaaaccacgcttcagtcggcctgaa

SEQ ID NO: 4031626 - DNA, 25 bp, Homo sapien
atttagctgtcaggcgctccacggc

SEQ ID NO: 4031627 - DNA, 25 bp, Homo sapien
tgagaactcctcctagactagttag

SEQ ID NO: 4031628 - DNA, 25 bp, Homo sapien
aagctggcgtggcaagagtaggcga

SEQ ID NO: 4031629 - DNA, 25 bp, Homo sapien
tggcgtctgcccgggccagtgtttc

SEQ ID NO: 4031630 - DNA, 25 bp, Homo sapien
aactcagggatcctaggcagatcag

SEQ ID NO: 4031631 - DNA, 25 bp, Homo sapien
tctgagtggagtctctcacgggacc

SEQ ID NO: 4031632 - DNA, 25 bp, Homo sapien
tggagtctctcacgggacctggaac

SEQ ID NO: 4031633 - DNA, 25 bp, Homo sapien
gaaagaatgatacccctcctctgag

SEQ ID NO: 4031634 - DNA, 25 bp, Homo sapien
aaacgattcctttatagggattgct

SEQ ID NO: 4031635 - DNA, 25 bp, Homo sapien
tagccggccagggtggtggtacctg

SEQ ID NO: 4031636 - DNA, 25 bp, Homo sapien
ttccgtcacatcaaccgcctggttg

SEQ ID NO: 4031637 - DNA, 25 bp, Homo sapien
ggacttgacacttcttccgtcacat

SEQ ID NO: 4031638 - DNA, 25 bp, Homo sapien
cctggacttgacacttcttccgtca

SEQ ID NO: 4031639 - DNA, 25 bp, Homo sapien
catcaaccgcctggttgttgaaatg

SEQ ID NO: 4031640 - DNA, 25 bp, Homo sapien
caccgccgctgtgggattttccgtg

SEQ ID NO: 4031641 - DNA, 25 bp, Homo sapien
gattttccgtgggagaagtatggga

SEQ ID NO: 4031642 - DNA, 25 bp, Homo sapien
ccgtgggagaagtatgggagaggac

SEQ ID NO: 4031643 - DNA, 25 bp, Homo sapien
gtatgggagaggactgacgcagctt

SEQ ID NO: 4031644 - DNA, 25 bp, Homo sapien
gaaatgtcacataggatgccctcct

SEQ ID NO: 4031645 - DNA, 25 bp, Homo sapien
catttccgggtcctcatggtgggat

SEQ ID NO: 4031646 - DNA, 25 bp, Homo sapien
ccccagcattgtaaagggtgcccag

SEQ ID NO: 4031647 - DNA, 25 bp, Homo sapien
cagagaggtgactagacagggaccc

SEQ ID NO: 4031648 - DNA, 25 bp, Homo sapien
cctggtggcctaggcttgtaatctc

SEQ ID NO: 4031649 - DNA, 25 bp, Homo sapien
tatgcagtctgagtaaaacccaccc

SEQ ID NO: 4031650 - DNA, 25 bp, Homo sapien
tgcgtgctgatacccgactgtagtc

SEQ ID NO: 4031651 - DNA, 25 bp, Homo sapien
gacgccctttgaaagtaagacacag

SEQ ID NO: 4031652 - DNA, 25 bp, Homo sapien
gacccttatgctcagaatgacgtgt

SEQ ID NO: 4031653 - DNA, 25 bp, Homo sapien
cgcgcatgacgatagccggctaatt

SEQ ID NO: 4031654 - DNA, 25 bp, Homo sapien
cctgagtcaaggtgtttctggcctt

SEQ ID NO: 4031655 - DNA, 25 bp, Homo sapien
gcaacaatgcagtacttgggcctgt

SEQ ID NO: 4031656 - DNA, 25 bp, Homo sapien
ggcgtcaggccttactcagtggcca

SEQ ID NO: 4031657 - DNA, 25 bp, Homo sapien
acatttgcaacggtgggcgtcaggc

SEQ ID NO: 4031658 - DNA, 25 bp, Homo sapien
atggcatagcccttgacccgcgtcg

SEQ ID NO: 4031659 - DNA, 25 bp, Homo sapien
tcagtggccaccgtttttgaagatg

SEQ ID NO: 4031660 - DNA, 25 bp, Homo sapien
tgtcccaccgaggtcaaatggatac

SEQ ID NO: 4031661 - DNA, 25 bp, Homo sapien
tacatgaactgtgaccgagccctgt

SEQ ID NO: 4031662 - DNA, 25 bp, Homo sapien
ggatcctcgggaccatgcttgctag

SEQ ID NO: 4031663 - DNA, 25 bp, Homo sapien
tgcttgctagcgctggatgaatctc

SEQ ID NO: 4031664 - DNA, 25 bp, Homo sapien
ctctcttgagagagtcctccgcggt

SEQ ID NO: 4031665 - DNA, 25 bp, Homo sapien
gagggcggctcgtcacctactgtgt

SEQ ID NO: 4031666 - DNA, 25 bp, Homo sapien
cacctactgtgtggcccgcgcctcc

SEQ ID NO: 4031667 - DNA, 25 bp, Homo sapien
ctcttgagagagtcctccgcggtgg

SEQ ID NO: 4031668 - DNA, 25 bp, Homo sapien
gaggctgcgcgagcggtggctgtgc

SEQ ID NO: 4031669 - DNA, 25 bp, Homo sapien
gcgtgacccgctccgctgcgagccg

SEQ ID NO: 4031670 - DNA, 25 bp, Homo sapien
gccgacaaccgcgtttgcgtggcac

SEQ ID NO: 4031671 - DNA, 25 bp, Homo sapien
gtgccaggcgttccgtccggcgcgt

SEQ ID NO: 4031672 - DNA, 25 bp, Homo sapien
gcggcgctccgcatgggcctggtga

SEQ ID NO: 4031673 - DNA, 25 bp, Homo sapien
cttgcccttgcggtccctggccttg

SEQ ID NO: 4031674 - DNA, 25 bp, Homo sapien
ttgtgtggcgctgccacgggccact

SEQ ID NO: 4031675 - DNA, 25 bp, Homo sapien
tgcagcgcgcgcagggaagagggtt

SEQ ID NO: 4031676 - DNA, 25 bp, Homo sapien
ggtccctcgcagctgccgtgcacgg

SEQ ID NO: 4031677 - DNA, 25 bp, Homo sapien
ctcgcagctgccgtgcacgggtcgg

SEQ ID NO: 4031678 - DNA, 25 bp, Homo sapien
agctgccgtgcacgggtcgggcggt

SEQ ID NO: 4031679 - DNA, 25 bp, Homo sapien
ccgccggtccctcgcagctgccgtg

SEQ ID NO: 4031680 - DNA, 25 bp, Homo sapien
cacgtgggcgcgaaggttcgggagt

SEQ ID NO: 4031681 - DNA, 25 bp, Homo sapien
ttcgcacgtgggcgcgaaggttcgg

SEQ ID NO: 4031682 - DNA, 25 bp, Homo sapien
ctgttcgcacgtgggcgcgaaggtt

SEQ ID NO: 4031683 - DNA, 25 bp, Homo sapien
gcacgtgggcgcgaaggttcgggag

SEQ ID NO: 4031684 - DNA, 25 bp, Homo sapien
atgggatgtccggttcgccgcccca

SEQ ID NO: 4031685 - DNA, 25 bp, Homo sapien
cccacaagccgggtcgcccgccctg

SEQ ID NO: 4031686 - DNA, 25 bp, Homo sapien
ctgtagtgtgggtgtatgggatgtc

SEQ ID NO: 4031687 - DNA, 25 bp, Homo sapien
gggtgtatgggatgtccggttcgcc

SEQ ID NO: 4031688 - DNA, 25 bp, Homo sapien
ttggaccggcgcagtttggaccaga

SEQ ID NO: 4031689 - DNA, 25 bp, Homo sapien
taatgcatgccgaagggtgctgacc

SEQ ID NO: 4031690 - DNA, 25 bp, Homo sapien
tggtgactctagatagcctcgggcc

SEQ ID NO: 4031691 - DNA, 25 bp, Homo sapien
taaacgatgccgactggcaacgtgg

SEQ ID NO: 4031692 - DNA, 25 bp, Homo sapien
gagcctgcggcttaatttgactcaa

SEQ ID NO: 4031693 - DNA, 25 bp, Homo sapien
tttgactcaacatgggaaaaatccc

SEQ ID NO: 4031694 - DNA, 25 bp, Homo sapien
cgagactctggcatgctaactagtt

SEQ ID NO: 4031695 - DNA, 25 bp, Homo sapien
gctgtttctctgttccatgggtggt

SEQ ID NO: 4031696 - DNA, 25 bp, Homo sapien
gacaagtggccttcagccacccgaa

SEQ ID NO: 4031697 - DNA, 25 bp, Homo sapien
cacccgaaattgagcaataacagat

SEQ ID NO: 4031698 - DNA, 25 bp, Homo sapien
ccttagatgtccgggactgcacgcg

SEQ ID NO: 4031699 - DNA, 25 bp, Homo sapien
cttcagccacccgaaattgagcaat

SEQ ID NO: 4031700 - DNA, 25 bp, Homo sapien
gattgcaattattccccatgaagga

SEQ ID NO: 4031701 - DNA, 25 bp, Homo sapien
gaatttccagtaagtgcgggtcata

SEQ ID NO: 4031702 - DNA, 25 bp, Homo sapien
cagaggcgggtaacctgttgaacct

SEQ ID NO: 4031703 - DNA, 25 bp, Homo sapien
cgggtcataagcttgcctgaagtcc

SEQ ID NO: 4031704 - DNA, 25 bp, Homo sapien
gaagacagtcgaacttgactatcta

SEQ ID NO: 4031705 - DNA, 25 bp, Homo sapien
aacgctgagaagacagtcgaacttg

SEQ ID NO: 4031706 - DNA, 25 bp, Homo sapien
ggaacgctgagaagacagtcgaact

SEQ ID NO: 4031707 - DNA, 25 bp, Homo sapien
gctgagaagacagtcgaacttgact

SEQ ID NO: 4031708 - DNA, 25 bp, Homo sapien
tgcgcgggcggggtcgtgccctttg

SEQ ID NO: 4031709 - DNA, 25 bp, Homo sapien
ccctgttccccgtgtggcgcgtgcg

SEQ ID NO: 4031710 - DNA, 25 bp, Homo sapien
gcgccgccgcgtccttcctccttgg

SEQ ID NO: 4031711 - DNA, 25 bp, Homo sapien
aacggagaagagcctcgaagccgcg

SEQ ID NO: 4031712 - DNA, 25 bp, Homo sapien
gagccggagaactcgggagggagag

SEQ ID NO: 4031713 - DNA, 25 bp, Homo sapien
gagagccggagaactcgggagggag

SEQ ID NO: 4031714 - DNA, 25 bp, Homo sapien
ctgagagccggagaactcgggaggg

SEQ ID NO: 4031715 - DNA, 25 bp, Homo sapien
agccggagaactcgggagggagagg

SEQ ID NO: 4031716 - DNA, 25 bp, Homo sapien
ggcaggctggatggctcgccagcct

SEQ ID NO: 4031717 - DNA, 25 bp, Homo sapien
gggccggccgggttcccattgctgc

SEQ ID NO: 4031718 - DNA, 25 bp, Homo sapien
ggatggttctcggcgtcatggcggg

SEQ ID NO: 4031719 - DNA, 25 bp, Homo sapien
cccctacatgtgagtcggcgggcgc

SEQ ID NO: 4031720 - DNA, 25 bp, Homo sapien
tccaggtacctagcgcgttctggcg

SEQ ID NO: 4031721 - DNA, 25 bp, Homo sapien
tgtccgtccgcccatgggtcgggtg

SEQ ID NO: 4031722 - DNA, 25 bp, Homo sapien
ctctccagccttcccgctagggcgt

SEQ ID NO: 4031723 - DNA, 25 bp, Homo sapien
agccttcccgctagggcgtctcgag

SEQ ID NO: 4031724 - DNA, 25 bp, Homo sapien
ttcaagtcgccgctgacgctggtgg

SEQ ID NO: 4031725 - DNA, 25 bp, Homo sapien
tttcaagtcgccgctgacgctggtg

SEQ ID NO: 4031726 - DNA, 25 bp, Homo sapien
ccgctgacgctggtgggggctttac

SEQ ID NO: 4031727 - DNA, 25 bp, Homo sapien
tcgccgctgacgctggtgggggctt

SEQ ID NO: 4031728 - DNA, 25 bp, Homo sapien
tgccgcgcgtatggcctgtgcaccg

SEQ ID NO: 4031729 - DNA, 25 bp, Homo sapien
cggccgtcgtgccatcgcgcgcctg

SEQ ID NO: 4031730 - DNA, 25 bp, Homo sapien
ggccgtcgtgccatcgcgcgcctgc

SEQ ID NO: 4031731 - DNA, 25 bp, Homo sapien
cgcgcctgccgcgcgtatggcctgt

SEQ ID NO: 4031732 - DNA, 25 bp, Homo sapien
tggggccgagttcccgtggccacca

SEQ ID NO: 4031733 - DNA, 25 bp, Homo sapien
gaagagagccggctggggccgagtt

SEQ ID NO: 4031734 - DNA, 25 bp, Homo sapien
gccaccaccgcggtccagattcctc

SEQ ID NO: 4031735 - DNA, 25 bp, Homo sapien
tggccaccaccgcggtccagattcc

SEQ ID NO: 4031736 - DNA, 25 bp, Homo sapien
aagtaggaaggatccgccagggaga

SEQ ID NO: 4031737 - DNA, 25 bp, Homo sapien
tcgccgccgcccctggtggcggtcc

SEQ ID NO: 4031738 - DNA, 25 bp, Homo sapien
ccgtcgttgtcgatcgtcgtgggta

SEQ ID NO: 4031739 - DNA, 25 bp, Homo sapien
tggaaggtcccgtgccgtcgttgtc

SEQ ID NO: 4031740 - DNA, 25 bp, Homo sapien
ccctggcggtgactcgctggatgct

SEQ ID NO: 4031741 - DNA, 25 bp, Homo sapien
ctagtggccgcggtcctggggttca

SEQ ID NO: 4031742 - DNA, 25 bp, Homo sapien
tggatgctgcagtgtcgtccgccat

SEQ ID NO: 4031743 - DNA, 25 bp, Homo sapien
tcctggggttcacgtgcccctggcg

SEQ ID NO: 4031744 - DNA, 25 bp, Homo sapien
ttatagagcggtttggatacagtct

SEQ ID NO: 4031745 - DNA, 25 bp, Homo sapien
aaatatttgtgagcactttattgcc

SEQ ID NO: 4031746 - DNA, 25 bp, Homo sapien
cactttattgcctatggtgaaatag

SEQ ID NO: 4031747 - DNA, 25 bp, Homo sapien
tgtgtccattatctaacagagttga

SEQ ID NO: 4031748 - DNA, 25 bp, Homo sapien
atagccttgaaacactaatgtcacg

SEQ ID NO: 4031749 - DNA, 25 bp, Homo sapien
ctaatgtcacgttgatgtctgcctt

SEQ ID NO: 4031750 - DNA, 25 bp, Homo sapien
tctttctctgctacctcattcctca

SEQ ID NO: 4031751 - DNA, 25 bp, Homo sapien
tattggtgtattctcatagccttga

SEQ ID NO: 4031752 - DNA, 25 bp, Homo sapien
cattgtgacttccaaactgaaggag

SEQ ID NO: 4031753 - DNA, 25 bp, Homo sapien
tggagcttttgacatggccttgagc

SEQ ID NO: 4031754 - DNA, 25 bp, Homo sapien
ttcattaaagggcttcttcaacaca

SEQ ID NO: 4031755 - DNA, 25 bp, Homo sapien
caacacatccactgttacattgtga

SEQ ID NO: 4031756 - DNA, 25 bp, Homo sapien
tggagtcccgagagtgaagaaccaa

SEQ ID NO: 4031757 - DNA, 25 bp, Homo sapien
ggaggagcagggtaagagcgcgtgg

SEQ ID NO: 4031758 - DNA, 25 bp, Homo sapien
gacacgcctggagtcccgagagtga

SEQ ID NO: 4031759 - DNA, 25 bp, Homo sapien
gggcgtctgagaacccggcagaggc

SEQ ID NO: 4031760 - DNA, 25 bp, Homo sapien
gtggaggcctcgaagcccgggcgcc

SEQ ID NO: 4031761 - DNA, 25 bp, Homo sapien
cggatccgcgtggcgggaagtgcag

SEQ ID NO: 4031762 - DNA, 25 bp, Homo sapien
ggagacccagggacggcggccgaga

SEQ ID NO: 4031763 - DNA, 25 bp, Homo sapien
ggccgagagcgtggaggcctcgaag

SEQ ID NO: 4031764 - DNA, 25 bp, Homo sapien
cattcacgaaatggatttccacaca

SEQ ID NO: 4031765 - DNA, 25 bp, Homo sapien
cctgtgtcgcggtggggctccattt

SEQ ID NO: 4031766 - DNA, 25 bp, Homo sapien
aggacagtgtagaggtcagagccca

SEQ ID NO: 4031767 - DNA, 25 bp, Homo sapien
cctgatggactcaaaagtgttctct

SEQ ID NO: 4031768 - DNA, 25 bp, Homo sapien
gggatcccgcgctgctctcctggga

SEQ ID NO: 4031769 - DNA, 25 bp, Homo sapien
cgctgctctcctgggactccgcctg

SEQ ID NO: 4031770 - DNA, 25 bp, Homo sapien
cgcgctgctctcctgggactccgcc

SEQ ID NO: 4031771 - DNA, 25 bp, Homo sapien
gatcccgcgctgctctcctgggact

SEQ ID NO: 4031772 - DNA, 25 bp, Homo sapien
ggatgtcccagttcacagggttact

SEQ ID NO: 4031773 - DNA, 25 bp, Homo sapien
gccgcaggaccccatggcggcccat

SEQ ID NO: 4031774 - DNA, 25 bp, Homo sapien
cacatgcagccttctgatcaaagga

SEQ ID NO: 4031775 - DNA, 25 bp, Homo sapien
gttcacagggttacttctgaaatgt

SEQ ID NO: 4031776 - DNA, 25 bp, Homo sapien
ttatcaatgcaattaattggccaca

SEQ ID NO: 4031777 - DNA, 25 bp, Homo sapien
cctttagttgacactgttcatggaa

SEQ ID NO: 4031778 - DNA, 25 bp, Homo sapien
gccacatgatttggtgtagtagtca

SEQ ID NO: 4031779 - DNA, 25 bp, Homo sapien
ggctttatgtctccacgtttgatga

SEQ ID NO: 4031780 - DNA, 25 bp, Homo sapien
accggaaatgttttgtggtgtggct

SEQ ID NO: 4031781 - DNA, 25 bp, Homo sapien
gcaattgctatcatgtaacacacgg

SEQ ID NO: 4031782 - DNA, 25 bp, Homo sapien
taacacacggtgaattagactgacg

SEQ ID NO: 4031783 - DNA, 25 bp, Homo sapien
tagactgacgagtacacaaaaccgg

SEQ ID NO: 4031784 - DNA, 25 bp, Homo sapien
aatatatctctgcaaacacatgcat

SEQ ID NO: 4031785 - DNA, 25 bp, Homo sapien
aaaatatatctctgcaaacacatgc

SEQ ID NO: 4031786 - DNA, 25 bp, Homo sapien
cttcaaaatatatctctgcaaacac

SEQ ID NO: 4031787 - DNA, 25 bp, Homo sapien
caaaatatatctctgcaaacacatg

SEQ ID NO: 4031788 - DNA, 25 bp, Homo sapien
gaagcctctgcatgctcacaatgac

SEQ ID NO: 4031789 - DNA, 25 bp, Homo sapien
caacaagatggtccccttttctctg

SEQ ID NO: 4031790 - DNA, 25 bp, Homo sapien
cacttgagggctgcatgattgctac

SEQ ID NO: 4031791 - DNA, 25 bp, Homo sapien
aagacattcgtaagcagtggcagca

SEQ ID NO: 4031792 - DNA, 25 bp, Homo sapien
cttgcagaccaggaggtgccagggc

SEQ ID NO: 4031793 - DNA, 25 bp, Homo sapien
tgatacttagcacaaccgtcttggt

SEQ ID NO: 4031794 - DNA, 25 bp, Homo sapien
gaccacaatgaggagcatccctaag

SEQ ID NO: 4031795 - DNA, 25 bp, Homo sapien
gaaggagtgaaagatgtaacctttg

SEQ ID NO: 4031796 - DNA, 25 bp, Homo sapien
caataccagcttgaaaaagaagggc

SEQ ID NO: 4031797 - DNA, 25 bp, Homo sapien
agaagggcaattgttagtagtacct

SEQ ID NO: 4031798 - DNA, 25 bp, Homo sapien
taccagcttgaaaaagaagggcaat

SEQ ID NO: 4031799 - DNA, 25 bp, Homo sapien
tccaataccagcttgaaaaagaagg

SEQ ID NO: 4031800 - DNA, 25 bp, Homo sapien
tccagaggcttgtgggcaatgtgta

SEQ ID NO: 4031801 - DNA, 25 bp, Homo sapien
gctgctttcaagtacatgcatggtg

SEQ ID NO: 4031802 - DNA, 25 bp, Homo sapien
gataatcagcgtgatgaaaacggtg

SEQ ID NO: 4031803 - DNA, 25 bp, Homo sapien
tattcacctcaaccttgctatgggc

SEQ ID NO: 4031804 - DNA, 25 bp, Homo sapien
tgcagaccgacatcaaagaagttgg

SEQ ID NO: 4031805 - DNA, 25 bp, Homo sapien
gaagttggttctaagtcctcatgct

SEQ ID NO: 4031806 - DNA, 25 bp, Homo sapien
gttttcctagcgatgccactttggg

SEQ ID NO: 4031807 - DNA, 25 bp, Homo sapien
cctcagcgacgttgggagctgcgtc

SEQ ID NO: 4031808 - DNA, 25 bp, Homo sapien
acaggatggtctccggacgccagga

SEQ ID NO: 4031809 - DNA, 25 bp, Homo sapien
tcccaggggtcaacaggatggtctc

SEQ ID NO: 4031810 - DNA, 25 bp, Homo sapien
gcagtgcgtcggtatcgaggctcca

SEQ ID NO: 4031811 - DNA, 25 bp, Homo sapien
aggagtcgcggagggccgaccaggt

SEQ ID NO: 4031812 - DNA, 25 bp, Homo sapien
ccttgcgaggcatgcagggaatagt

SEQ ID NO: 4031813 - DNA, 25 bp, Homo sapien
ggtcagtgcagtgtgctcctcgcag

SEQ ID NO: 4031814 - DNA, 25 bp, Homo sapien
tcagcctttggtcgcagggatgcca

SEQ ID NO: 4031815 - DNA, 25 bp, Homo sapien
acagagctttgtcctccttgcgagg

SEQ ID NO: 4031816 - DNA, 25 bp, Homo sapien
agatgccccgatccctctggattcc

SEQ ID NO: 4031817 - DNA, 25 bp, Homo sapien
aatgtggctcatatccaggttcatt

SEQ ID NO: 4031818 - DNA, 25 bp, Homo sapien
ttcatattcccccagatgccccgat

SEQ ID NO: 4031819 - DNA, 25 bp, Homo sapien
aaatgtggctcatatccaggttcat

SEQ ID NO: 4031820 - DNA, 25 bp, Homo sapien
ggtgtattgctggattcttggcctt

SEQ ID NO: 4031821 - DNA, 25 bp, Homo sapien
ctggtgtattgctggattcttggcc

SEQ ID NO: 4031822 - DNA, 25 bp, Homo sapien
cacgctggaccccatacctgtgggg

SEQ ID NO: 4031823 - DNA, 25 bp, Homo sapien
gagtgaccacgctggaccccatacc

SEQ ID NO: 4031824 - DNA, 25 bp, Homo sapien
aggccacaccatctgtttcactgac

SEQ ID NO: 4031825 - DNA, 25 bp, Homo sapien
aggtacaggctgttacctttgtctt

SEQ ID NO: 4031826 - DNA, 25 bp, Homo sapien
ggtacaggctgttacctttgtcttc

SEQ ID NO: 4031827 - DNA, 25 bp, Homo sapien
gccacaccatctgtttcactgacca

SEQ ID NO: 4031828 - DNA, 25 bp, Homo sapien
actcagtctccccagtcttccctct

SEQ ID NO: 4031829 - DNA, 25 bp, Homo sapien
tcctcctcccactgttcttttctga

SEQ ID NO: 4031830 - DNA, 25 bp, Homo sapien
tggctgtcctcctcccactgttctt

SEQ ID NO: 4031831 - DNA, 25 bp, Homo sapien
tcttttctgactcagtctccccagt

SEQ ID NO: 4031832 - DNA, 25 bp, Homo sapien
gtgaccacagctgaagactgagttg

SEQ ID NO: 4031833 - DNA, 25 bp, Homo sapien
gctgaagactgagttgatgagaccc

SEQ ID NO: 4031834 - DNA, 25 bp, Homo sapien
gactgagttgatgagaccccttctt

SEQ ID NO: 4031835 - DNA, 25 bp, Homo sapien
tgagttgatgagaccccttcttgcc

SEQ ID NO: 4031836 - DNA, 25 bp, Homo sapien
caggccctttggctgaacaagcacc

SEQ ID NO: 4031837 - DNA, 25 bp, Homo sapien
aaaaataactaggggcacgtggcag

SEQ ID NO: 4031838 - DNA, 25 bp, Homo sapien
cgtggcgggggtgggtatgcgccaa

SEQ ID NO: 4031839 - DNA, 25 bp, Homo sapien
gtggcgggggtgggtatgcgccaac

SEQ ID NO: 4031840 - DNA, 25 bp, Homo sapien
cctatgtagccatcccgcatggatg

SEQ ID NO: 4031841 - DNA, 25 bp, Homo sapien
atgtagccatcccgcatggatggct

SEQ ID NO: 4031842 - DNA, 25 bp, Homo sapien
ctatgtagccatcccgcatggatgg

SEQ ID NO: 4031843 - DNA, 25 bp, Homo sapien
gcctatgtagccatcccgcatggat

SEQ ID NO: 4031844 - DNA, 25 bp, Homo sapien
ggctccaagtagagatactgcaggc

SEQ ID NO: 4031845 - DNA, 25 bp, Homo sapien
gggctccaagtagagatactgcagg

SEQ ID NO: 4031846 - DNA, 25 bp, Homo sapien
tgggctccaagtagagatactgcag

SEQ ID NO: 4031847 - DNA, 25 bp, Homo sapien
tcaccttggggggatcatgcgggta

SEQ ID NO: 4031848 - DNA, 25 bp, Homo sapien
aatgttggggtgatagaccattgtc

SEQ ID NO: 4031849 - DNA, 25 bp, Homo sapien
gtgatagaccattgtctcacacttc

SEQ ID NO: 4031850 - DNA, 25 bp, Homo sapien
acttcaccttggggggatcatgcgg

SEQ ID NO: 4031851 - DNA, 25 bp, Homo sapien
ttcccactcttgtagaagccctcat

SEQ ID NO: 4031852 - DNA, 25 bp, Homo sapien
ctgaacacaaacttcccactcttgt

SEQ ID NO: 4031853 - DNA, 25 bp, Homo sapien
caaacttcccactcttgtagaagcc

SEQ ID NO: 4031854 - DNA, 25 bp, Homo sapien
cactcttgtagaagccctcatcagg

SEQ ID NO: 4031855 - DNA, 25 bp, Homo sapien
cttgaagttgaggaggtcgtctgga

SEQ ID NO: 4031856 - DNA, 25 bp, Homo sapien
gatatcacacgtcttgggcaggttc

SEQ ID NO: 4031857 - DNA, 25 bp, Homo sapien
ctgagaagctgatatcacacgtctt

SEQ ID NO: 4031858 - DNA, 25 bp, Homo sapien
aagttgaggaggtcgtctggatctg

SEQ ID NO: 4031859 - DNA, 25 bp, Homo sapien
gctgcttcagcgagaacagcttgat

SEQ ID NO: 4031860 - DNA, 25 bp, Homo sapien
ctgcttcagcgagaacagcttgatc

SEQ ID NO: 4031861 - DNA, 25 bp, Homo sapien
tgcttcagcgagaacagcttgatca

SEQ ID NO: 4031862 - DNA, 25 bp, Homo sapien
gcttcagcgagaacagcttgatcat

SEQ ID NO: 4031863 - DNA, 25 bp, Homo sapien
tgcggcctcctccgctactgccgca

SEQ ID NO: 4031864 - DNA, 25 bp, Homo sapien
tcctccgctactgccgcaacccgcc

SEQ ID NO: 4031865 - DNA, 25 bp, Homo sapien
ccgctcctgggactcgcagctgcgg

SEQ ID NO: 4031866 - DNA, 25 bp, Homo sapien
ccgctactgccgcaacccgcccggc

SEQ ID NO: 4031867 - DNA, 25 bp, Homo sapien
gcgatgccgggcgtcacccctcccg

SEQ ID NO: 4031868 - DNA, 25 bp, Homo sapien
gatgccgggcgtcacccctcccgcc

SEQ ID NO: 4031869 - DNA, 25 bp, Homo sapien
caaggcgatgccgggcgtcacccct

SEQ ID NO: 4031870 - DNA, 25 bp, Homo sapien
aggcgatgccgggcgtcacccctcc

SEQ ID NO: 4031871 - DNA, 25 bp, Homo sapien
ggaaggcgatcacggcaggtggcct

SEQ ID NO: 4031872 - DNA, 25 bp, Homo sapien
tctcccggggaaggcgatcacggca

SEQ ID NO: 4031873 - DNA, 25 bp, Homo sapien
gggaaggcgatcacggcaggtggcc

SEQ ID NO: 4031874 - DNA, 25 bp, Homo sapien
gaaggcgatcacggcaggtggcctg

SEQ ID NO: 4031875 - DNA, 25 bp, Homo sapien
tgtattccgtttcccaccgagcacg

SEQ ID NO: 4031876 - DNA, 25 bp, Homo sapien
accgagcacgtgaggaccaacgagc

SEQ ID NO: 4031877 - DNA, 25 bp, Homo sapien
tttcccaccgagcacgtgaggacca

SEQ ID NO: 4031878 - DNA, 25 bp, Homo sapien
gcacgtgaggaccaacgagcgctcg

SEQ ID NO: 4031879 - DNA, 25 bp, Homo sapien
ctggaaccaggccattgtttctttg

SEQ ID NO: 4031880 - DNA, 25 bp, Homo sapien
gcacagccagcgtcttcggaaacac

SEQ ID NO: 4031881 - DNA, 25 bp, Homo sapien
ccaaacagataagcccatgaacccg

SEQ ID NO: 4031882 - DNA, 25 bp, Homo sapien
tcttctgagccattgcaggcacagc

SEQ ID NO: 4031883 - DNA, 25 bp, Homo sapien
gggctcaaggccttcacaagggcac

SEQ ID NO: 4031884 - DNA, 25 bp, Homo sapien
cccgaggggctcaaggccttcacaa

SEQ ID NO: 4031885 - DNA, 25 bp, Homo sapien
aggccttcacaagggcactgtccca

SEQ ID NO: 4031886 - DNA, 25 bp, Homo sapien
tctggacgggatcccgaggggctca

SEQ ID NO: 4031887 - DNA, 25 bp, Homo sapien
tttctcacctcccaaggatgcagca

SEQ ID NO: 4031888 - DNA, 25 bp, Homo sapien
aatctttctcacctcccaaggatgc

SEQ ID NO: 4031889 - DNA, 25 bp, Homo sapien
tcaatctttctcacctcccaaggat

SEQ ID NO: 4031890 - DNA, 25 bp, Homo sapien
atctttctcacctcccaaggatgca

SEQ ID NO: 4031891 - DNA, 25 bp, Homo sapien
gggccaggcaggcatgtagatggag

SEQ ID NO: 4031892 - DNA, 25 bp, Homo sapien
caggcaggcatgtagatggagctca

SEQ ID NO: 4031893 - DNA, 25 bp, Homo sapien
aggcaggcatgtagatggagctcac

SEQ ID NO: 4031894 - DNA, 25 bp, Homo sapien
gccaggcaggcatgtagatggagct

SEQ ID NO: 4031895 - DNA, 25 bp, Homo sapien
tcagcagtgcatgctccaggagcct

SEQ ID NO: 4031896 - DNA, 25 bp, Homo sapien
gctttccggtatgggcaaggctctg

SEQ ID NO: 4031897 - DNA, 25 bp, Homo sapien
caggattgaccagacctggcagtgc

SEQ ID NO: 4031898 - DNA, 25 bp, Homo sapien
cctttccattaagctgagcacagga

SEQ ID NO: 4031899 - DNA, 25 bp, Homo sapien
gtacaaataggacaccaggtcttgc

SEQ ID NO: 4031900 - DNA, 25 bp, Homo sapien
ttgggaggaagctgttagaataacc

SEQ ID NO: 4031901 - DNA, 25 bp, Homo sapien
gtcttgctagttgggtctcaaaggc

SEQ ID NO: 4031902 - DNA, 25 bp, Homo sapien
tctctgtctcacagaggataatgca

SEQ ID NO: 4031903 - DNA, 25 bp, Homo sapien
ttcttgtagctgaggtctgttctgc

SEQ ID NO: 4031904 - DNA, 25 bp, Homo sapien
acactgttgagtgagatccatccac

SEQ ID NO: 4031905 - DNA, 25 bp, Homo sapien
cacatgactgcctgaacctgcatct

SEQ ID NO: 4031906 - DNA, 25 bp, Homo sapien
cttccttcttgtagctgaggtctgt

SEQ ID NO: 4031907 - DNA, 25 bp, Homo sapien
gcagaagcaattcgcatttggcagc

SEQ ID NO: 4031908 - DNA, 25 bp, Homo sapien
cacgggacccactgtctgagtcaag

SEQ ID NO: 4031909 - DNA, 25 bp, Homo sapien
tttgcaggtgctgaaaatcttcccc

SEQ ID NO: 4031910 - DNA, 25 bp, Homo sapien
gctcagggcttgtgttgtggaccac

SEQ ID NO: 4031911 - DNA, 25 bp, Homo sapien
aaggaggagggggctgcttagcttc

SEQ ID NO: 4031912 - DNA, 25 bp, Homo sapien
tggaaggaggagggggctgcttagc

SEQ ID NO: 4031913 - DNA, 25 bp, Homo sapien
gaaggaggagggggctgcttagctt

SEQ ID NO: 4031914 - DNA, 25 bp, Homo sapien
ctggaaggaggagggggctgcttag

SEQ ID NO: 4031915 - DNA, 25 bp, Homo sapien
ttatggccttcatgtgcaccttcac

SEQ ID NO: 4031916 - DNA, 25 bp, Homo sapien
cttatggccttcatgtgcaccttca

SEQ ID NO: 4031917 - DNA, 25 bp, Homo sapien
tatggccttcatgtgcaccttcact

SEQ ID NO: 4031918 - DNA, 25 bp, Homo sapien
tttcaccgcctgtctaccagcaatc

SEQ ID NO: 4031919 - DNA, 25 bp, Homo sapien
tcaccgcctgtctaccagcaatccc

SEQ ID NO: 4031920 - DNA, 25 bp, Homo sapien
ttcaccgcctgtctaccagcaatcc

SEQ ID NO: 4031921 - DNA, 25 bp, Homo sapien
gacaagtttgacagcgcccaataga

SEQ ID NO: 4031922 - DNA, 25 bp, Homo sapien
tcagcagtggattggtgtcattaaa

SEQ ID NO: 4031923 - DNA, 25 bp, Homo sapien
ctggtactccactagttgaacttgt

SEQ ID NO: 4031924 - DNA, 25 bp, Homo sapien
ctagttgaacttgtcatggaggaca

SEQ ID NO: 4031925 - DNA, 25 bp, Homo sapien
gtgtgactaattaggcacagtaata

SEQ ID NO: 4031926 - DNA, 25 bp, Homo sapien
cattctttactagtgaacatgagac

SEQ ID NO: 4031927 - DNA, 25 bp, Homo sapien
gcccaggcttgtacatacagattta

SEQ ID NO: 4031928 - DNA, 25 bp, Homo sapien
gctgaagtgattcttagccctttga

SEQ ID NO: 4031929 - DNA, 25 bp, Homo sapien
tcaaaggatcagtcgtgcaggctag

SEQ ID NO: 4031930 - DNA, 25 bp, Homo sapien
taggagcaccacagctgactggaca

SEQ ID NO: 4031931 - DNA, 25 bp, Homo sapien
caggccctgcatacaaaagagatct

SEQ ID NO: 4031932 - DNA, 25 bp, Homo sapien
cggaaatcctgtgcaagtgagagct

SEQ ID NO: 4031933 - DNA, 25 bp, Homo sapien
tgctgagaaccggaacaagactcct

SEQ ID NO: 4031934 - DNA, 25 bp, Homo sapien
tacaggcttctcaggtgctggccct

SEQ ID NO: 4031935 - DNA, 25 bp, Homo sapien
tcagtctctcggtcgttcagggcaa

SEQ ID NO: 4031936 - DNA, 25 bp, Homo sapien
tccagactgcggtccaagtggcact

SEQ ID NO: 4031937 - DNA, 25 bp, Homo sapien
gctgtacactttgcagtggaattcc

SEQ ID NO: 4031938 - DNA, 25 bp, Homo sapien
acatactaagttgctgtacactttg

SEQ ID NO: 4031939 - DNA, 25 bp, Homo sapien
tactaagttgctgtacactttgcag

SEQ ID NO: 4031940 - DNA, 25 bp, Homo sapien
agttgctgtacactttgcagtggaa

SEQ ID NO: 4031941 - DNA, 25 bp, Homo sapien
tctccatcacagaggtggtgtgaca

SEQ ID NO: 4031942 - DNA, 25 bp, Homo sapien
acactccatgactgggctctactgc

SEQ ID NO: 4031943 - DNA, 25 bp, Homo sapien
gtggtgtgacagcagtctgagggca

SEQ ID NO: 4031944 - DNA, 25 bp, Homo sapien
ggcaccacactccatgactgggctc

SEQ ID NO: 4031945 - DNA, 25 bp, Homo sapien
tgtggggtaattgtgagggtaactg

SEQ ID NO: 4031946 - DNA, 25 bp, Homo sapien
tgtgagggtaactgaagggccactt

SEQ ID NO: 4031947 - DNA, 25 bp, Homo sapien
taattgtgagggtaactgaagggcc

SEQ ID NO: 4031948 - DNA, 25 bp, Homo sapien
gagggtaactgaagggccactttca

SEQ ID NO: 4031949 - DNA, 25 bp, Homo sapien
atagctcggagtaatttgatggtct

SEQ ID NO: 4031950 - DNA, 25 bp, Homo sapien
tcccatagctcggagtaatttgatg

SEQ ID NO: 4031951 - DNA, 25 bp, Homo sapien
ccatagctcggagtaatttgatggt

SEQ ID NO: 4031952 - DNA, 25 bp, Homo sapien
catagctcggagtaatttgatggtc

SEQ ID NO: 4031953 - DNA, 25 bp, Homo sapien
cttcctgacccctgcccatgggcca

SEQ ID NO: 4031954 - DNA, 25 bp, Homo sapien
gacccctgcccatgggccacagccc

SEQ ID NO: 4031955 - DNA, 25 bp, Homo sapien
cctgcccatgggccacagccctcac

SEQ ID NO: 4031956 - DNA, 25 bp, Homo sapien
acccctgcccatgggccacagccct

SEQ ID NO: 4031957 - DNA, 25 bp, Homo sapien
tccatgagcaggctctactgctggt

SEQ ID NO: 4031958 - DNA, 25 bp, Homo sapien
gacaggtcccacctttcacaatcag

SEQ ID NO: 4031959 - DNA, 25 bp, Homo sapien
tccagggaccccttgatgtcctgat

SEQ ID NO: 4031960 - DNA, 25 bp, Homo sapien
tgcttagaacccttgtggttcttca

SEQ ID NO: 4031961 - DNA, 25 bp, Homo sapien
tgtatggctccaggtaacgcgtgtc

SEQ ID NO: 4031962 - DNA, 25 bp, Homo sapien
tggctccgcagacgtcctttagggc

SEQ ID NO: 4031963 - DNA, 25 bp, Homo sapien
cattgctcacaaccctgtatggctc

SEQ ID NO: 4031964 - DNA, 25 bp, Homo sapien
gcttttgtcgctggcattcccgtgg

SEQ ID NO: 4031965 - DNA, 25 bp, Homo sapien
aatccctgaagttggtgtctgtaag

SEQ ID NO: 4031966 - DNA, 25 bp, Homo sapien
tgaatccctgaagttggtgtctgta

SEQ ID NO: 4031967 - DNA, 25 bp, Homo sapien
gaatccctgaagttggtgtctgtaa

SEQ ID NO: 4031968 - DNA, 25 bp, Homo sapien
gataacagtatgaggtcctttccag

SEQ ID NO: 4031969 - DNA, 25 bp, Homo sapien
taatggcttcagtcgacttagacac

SEQ ID NO: 4031970 - DNA, 25 bp, Homo sapien
taacatataccaggtcacccagctg

SEQ ID NO: 4031971 - DNA, 25 bp, Homo sapien
cagagcttttggcatggtgaggata

SEQ ID NO: 4031972 - DNA, 25 bp, Homo sapien
tgaggatgcattccgctgttgagat

SEQ ID NO: 4031973 - DNA, 25 bp, Homo sapien
tctcacatgaggatgcattccgctg

SEQ ID NO: 4031974 - DNA, 25 bp, Homo sapien
gggctctcacatgaggatgcattcc

SEQ ID NO: 4031975 - DNA, 25 bp, Homo sapien
cacatgaggatgcattccgctgttg

SEQ ID NO: 4031976 - DNA, 25 bp, Homo sapien
cagaaggaatggaacagacctggca

SEQ ID NO: 4031977 - DNA, 25 bp, Homo sapien
cactgtagagactcgggaaatgcac

SEQ ID NO: 4031978 - DNA, 25 bp, Homo sapien
tccaggtgaacatgccgggagtcag

SEQ ID NO: 4031979 - DNA, 25 bp, Homo sapien
cctccttgtcacagtgggtcaccag

SEQ ID NO: 4031980 - DNA, 25 bp, Homo sapien
tcacctgctgtttccgaagagaaca

SEQ ID NO: 4031981 - DNA, 25 bp, Homo sapien
gagggaatcgctgctgaagctgtcc

SEQ ID NO: 4031982 - DNA, 25 bp, Homo sapien
gaagagaacaatctacactggaatg

SEQ ID NO: 4031983 - DNA, 25 bp, Homo sapien
gaaacacctccgcaacaagtaatcc

SEQ ID NO: 4031984 - DNA, 25 bp, Homo sapien
ggacatttttagagagtccagatgg

SEQ ID NO: 4031985 - DNA, 25 bp, Homo sapien
gggacatttttagagagtccagatg

SEQ ID NO: 4031986 - DNA, 25 bp, Homo sapien
agggacatttttagagagtccagat

SEQ ID NO: 4031987 - DNA, 25 bp, Homo sapien
gacatttttagagagtccagatggg

SEQ ID NO: 4031988 - DNA, 25 bp, Homo sapien
aaggtgcttggtgtctttgtaggcc

SEQ ID NO: 4031989 - DNA, 25 bp, Homo sapien
tagaaggtgcttggtgtctttgtag

SEQ ID NO: 4031990 - DNA, 25 bp, Homo sapien
gaaggtgcttggtgtctttgtaggc

SEQ ID NO: 4031991 - DNA, 25 bp, Homo sapien
agaaggtgcttggtgtctttgtagg

SEQ ID NO: 4031992 - DNA, 25 bp, Homo sapien
tcaaggagacatgggttggtgacag

SEQ ID NO: 4031993 - DNA, 25 bp, Homo sapien
tggtgacagttcaaaggacgggctt

SEQ ID NO: 4031994 - DNA, 25 bp, Homo sapien
ggacgggctttgtgtgggaagctga

SEQ ID NO: 4031995 - DNA, 25 bp, Homo sapien
catgggttggtgacagttcaaagga

SEQ ID NO: 4031996 - DNA, 25 bp, Homo sapien
tacacagagaaggaggatacccatg

SEQ ID NO: 4031997 - DNA, 25 bp, Homo sapien
tgcatcttagatttactgggaaggt

SEQ ID NO: 4031998 - DNA, 25 bp, Homo sapien
tagaggactagaatcagtgataaat

SEQ ID NO: 4031999 - DNA, 25 bp, Homo sapien
gatacccatgccaatggagagtttg

SEQ ID NO: 4032000 - DNA, 25 bp, Homo sapien
ctctctgtgatgtagacctggaatc

SEQ ID NO: 4032001 - DNA, 25 bp, Homo sapien
gaccaaatggtagaacaggacctgt

SEQ ID NO: 4032002 - DNA, 25 bp, Homo sapien
aatcccagtgaacatcctgcatcct

SEQ ID NO: 4032003 - DNA, 25 bp, Homo sapien
gacctggaatcccagtgaacatcct

SEQ ID NO: 4032004 - DNA, 25 bp, Homo sapien
gtgcaagccatgaaaggacctctat

SEQ ID NO: 4032005 - DNA, 25 bp, Homo sapien
tgcaaagcagtggaggacttttagt

SEQ ID NO: 4032006 - DNA, 25 bp, Homo sapien
gggcctgagacttgtgccacttgct

SEQ ID NO: 4032007 - DNA, 25 bp, Homo sapien
caagctgcactcttctcttggacag

SEQ ID NO: 4032008 - DNA, 25 bp, Homo sapien
tatttggttgactgatgaactgatg

SEQ ID NO: 4032009 - DNA, 25 bp, Homo sapien
ttatttggttgactgatgaactgat

SEQ ID NO: 4032010 - DNA, 25 bp, Homo sapien
atttggttgactgatgaactgatgc

SEQ ID NO: 4032011 - DNA, 25 bp, Homo sapien
tccagatactttcattccagagcca

SEQ ID NO: 4032012 - DNA, 25 bp, Homo sapien
actgtccagatactttcattccaga

SEQ ID NO: 4032013 - DNA, 25 bp, Homo sapien
caatggctaaataattgaattcaac

SEQ ID NO: 4032014 - DNA, 25 bp, Homo sapien
cagagccaatggctaaataattgaa

SEQ ID NO: 4032015 - DNA, 25 bp, Homo sapien
gactcccgccaagcctgcgtctctg

SEQ ID NO: 4032016 - DNA, 25 bp, Homo sapien
aggcagtcatccatccggcccagaa

SEQ ID NO: 4032017 - DNA, 25 bp, Homo sapien
gtctctgtaaggcagtcatccatcc

SEQ ID NO: 4032018 - DNA, 25 bp, Homo sapien
gtgctcctcagactcccgccaagcc

SEQ ID NO: 4032019 - DNA, 25 bp, Homo sapien
gccagcggcatccgcagccgtcgct

SEQ ID NO: 4032020 - DNA, 25 bp, Homo sapien
cagcggcatccgcagccgtcgcttg

SEQ ID NO: 4032021 - DNA, 25 bp, Homo sapien
gcggcatccgcagccgtcgcttgct

SEQ ID NO: 4032022 - DNA, 25 bp, Homo sapien
agcggcatccgcagccgtcgcttgc

SEQ ID NO: 4032023 - DNA, 25 bp, Homo sapien
ttgcttgttgcccacagccccgttt

SEQ ID NO: 4032024 - DNA, 25 bp, Homo sapien
gccccgtttggctccaggcaaatgt

SEQ ID NO: 4032025 - DNA, 25 bp, Homo sapien
ccaggcaaatgtgtcagggcatcct

SEQ ID NO: 4032026 - DNA, 25 bp, Homo sapien
cttgcagatcggggagggccatcag

SEQ ID NO: 4032027 - DNA, 25 bp, Homo sapien
gcagcgcagcgccgagttgctcctg

SEQ ID NO: 4032028 - DNA, 25 bp, Homo sapien
ccgcagcgcagcgccgagttgctcc

SEQ ID NO: 4032029 - DNA, 25 bp, Homo sapien
cgcagcgcagcgccgagttgctcct

SEQ ID NO: 4032030 - DNA, 25 bp, Homo sapien
acaccttcggggagcgtgcaaaggt

SEQ ID NO: 4032031 - DNA, 25 bp, Homo sapien
gtgcaaaggtggaaccgcagccgcc

SEQ ID NO: 4032032 - DNA, 25 bp, Homo sapien
tggagcggcgggacaccttcgggga

SEQ ID NO: 4032033 - DNA, 25 bp, Homo sapien
gggagcgtgcaaaggtggaaccgca

SEQ ID NO: 4032034 - DNA, 25 bp, Homo sapien
catccaccattgagacatattccag

SEQ ID NO: 4032035 - DNA, 25 bp, Homo sapien
acatccaccattgagacatattcca

SEQ ID NO: 4032036 - DNA, 25 bp, Homo sapien
aagacttagttcatgtcccagcaag

SEQ ID NO: 4032037 - DNA, 25 bp, Homo sapien
agacttagttcatgtcccagcaagt

SEQ ID NO: 4032038 - DNA, 25 bp, Homo sapien
ggaataagaacttctatggtagaga

SEQ ID NO: 4032039 - DNA, 25 bp, Homo sapien
tgctcttccgctctcagatggcttg

SEQ ID NO: 4032040 - DNA, 25 bp, Homo sapien
gctctcagatggcttggttgactga

SEQ ID NO: 4032041 - DNA, 25 bp, Homo sapien
ggtagagagtacttgctcttccgct

SEQ ID NO: 4032042 - DNA, 25 bp, Homo sapien
cagtgttggaccagtaaacaattca

SEQ ID NO: 4032043 - DNA, 25 bp, Homo sapien
tactcagtgttggaccagtaaacaa

SEQ ID NO: 4032044 - DNA, 25 bp, Homo sapien
ccttactcagtgttggaccagtaaa

SEQ ID NO: 4032045 - DNA, 25 bp, Homo sapien
ctcagtgttggaccagtaaacaatt

SEQ ID NO: 4032046 - DNA, 25 bp, Homo sapien
cacttcatgtctatgctcaaggaca

SEQ ID NO: 4032047 - DNA, 25 bp, Homo sapien
catttagtttgcagctgaaccatct

SEQ ID NO: 4032048 - DNA, 25 bp, Homo sapien
ccgtggctcgcagccatcacaagta

SEQ ID NO: 4032049 - DNA, 25 bp, Homo sapien
tatgctcaaggacataagggtcaca

SEQ ID NO: 4032050 - DNA, 25 bp, Homo sapien
acatactaagttgccgtgtgctttg

SEQ ID NO: 4032051 - DNA, 25 bp, Homo sapien
tactaagttgccgtgtgctttgcag

SEQ ID NO: 4032052 - DNA, 25 bp, Homo sapien
cacatactaagttgccgtgtgcttt

SEQ ID NO: 4032053 - DNA, 25 bp, Homo sapien
ctaagttgccgtgtgctttgcagtg

SEQ ID NO: 4032054 - DNA, 25 bp, Homo sapien
cttgctgggtctggttggccagaag

SEQ ID NO: 4032055 - DNA, 25 bp, Homo sapien
ttgctgggtctggttggccagaagc

SEQ ID NO: 4032056 - DNA, 25 bp, Homo sapien
agtgaaagttagttagcgtggccag

SEQ ID NO: 4032057 - DNA, 25 bp, Homo sapien
gtgaaagttagttagcgtggccagc

SEQ ID NO: 4032058 - DNA, 25 bp, Homo sapien
gaaagttagttagcgtggccagcat

SEQ ID NO: 4032059 - DNA, 25 bp, Homo sapien
gcccagctaagtgaatgagccagga

SEQ ID NO: 4032060 - DNA, 25 bp, Homo sapien
tggcacattcagaaggctcaccagg

SEQ ID NO: 4032061 - DNA, 25 bp, Homo sapien
aagtagcccagctaagtgaatgagc

SEQ ID NO: 4032062 - DNA, 25 bp, Homo sapien
agctaagtgaatgagccaggacagg

SEQ ID NO: 4032063 - DNA, 25 bp, Homo sapien
catagacaatgaaagggcactgcat

SEQ ID NO: 4032064 - DNA, 25 bp, Homo sapien
cacatagacaatgaaagggcactgc

SEQ ID NO: 4032065 - DNA, 25 bp, Homo sapien
tcacatagacaatgaaagggcactg

SEQ ID NO: 4032066 - DNA, 25 bp, Homo sapien
tgtcacatagacaatgaaagggcac

SEQ ID NO: 4032067 - DNA, 25 bp, Homo sapien
tcaacatcgagctacgctcctctcc

SEQ ID NO: 4032068 - DNA, 25 bp, Homo sapien
ctacgctcctctcctcgacatgccc

SEQ ID NO: 4032069 - DNA, 25 bp, Homo sapien
ccatggtaacagcccaaggctttat

SEQ ID NO: 4032070 - DNA, 25 bp, Homo sapien
tcttgcctttgcatgtgattctcac

SEQ ID NO: 4032071 - DNA, 25 bp, Homo sapien
atcttgcctttgcatgtgattctca

SEQ ID NO: 4032072 - DNA, 25 bp, Homo sapien
tgcatgtgattctcactggaatgga

SEQ ID NO: 4032073 - DNA, 25 bp, Homo sapien
tttgtgttagggagtactcggtctc

SEQ ID NO: 4032074 - DNA, 25 bp, Homo sapien
gggagtactcggtctccactgtcaa

SEQ ID NO: 4032075 - DNA, 25 bp, Homo sapien
gtttccccgacttctgagaaaagca

SEQ ID NO: 4032076 - DNA, 25 bp, Homo sapien
tcttgtttccccgacttctgagaaa

SEQ ID NO: 4032077 - DNA, 25 bp, Homo sapien
tttatttctgcagatccagtagttg

SEQ ID NO: 4032078 - DNA, 25 bp, Homo sapien
tatttctgcagatccagtagttgct

SEQ ID NO: 4032079 - DNA, 25 bp, Homo sapien
ttatttctgcagatccagtagttgc

SEQ ID NO: 4032080 - DNA, 25 bp, Homo sapien
gcctctgtaaacttcaaagagccag

SEQ ID NO: 4032081 - DNA, 25 bp, Homo sapien
ctctagcctctgtaaacttcaaaga

SEQ ID NO: 4032082 - DNA, 25 bp, Homo sapien
tcaaagagccagctgacattaacat

SEQ ID NO: 4032083 - DNA, 25 bp, Homo sapien
tgaagccttctctagcctctgtaaa

SEQ ID NO: 4032084 - DNA, 25 bp, Homo sapien
tcggccttgcttcacggggtcgttg

SEQ ID NO: 4032085 - DNA, 25 bp, Homo sapien
ttgcttcacggggtcgttggtgctc

SEQ ID NO: 4032086 - DNA, 25 bp, Homo sapien
cttcacggggtcgttggtgctcctc

SEQ ID NO: 4032087 - DNA, 25 bp, Homo sapien
tcacggggtcgttggtgctcctcag

SEQ ID NO: 4032088 - DNA, 25 bp, Homo sapien
tagagcagtgaccatccaggccgca

SEQ ID NO: 4032089 - DNA, 25 bp, Homo sapien
tatagagcagtgaccatccaggccg

SEQ ID NO: 4032090 - DNA, 25 bp, Homo sapien
ctatagagcagtgaccatccaggcc

SEQ ID NO: 4032091 - DNA, 25 bp, Homo sapien
gagcagtgaccatccaggccgcaac

SEQ ID NO: 4032092 - DNA, 25 bp, Homo sapien
cttatcctcagagcccagtttgacg

SEQ ID NO: 4032093 - DNA, 25 bp, Homo sapien
agagcccagtttgacgcaggccagg

SEQ ID NO: 4032094 - DNA, 25 bp, Homo sapien
acgcaggccaggcatttccgcttac

SEQ ID NO: 4032095 - DNA, 25 bp, Homo sapien
tcctcagagcccagtttgacgcagg

SEQ ID NO: 4032096 - DNA, 25 bp, Homo sapien
ctggccctgcgaaacgactgtgctc

SEQ ID NO: 4032097 - DNA, 25 bp, Homo sapien
tccaaggcgcgatccacactggtct

SEQ ID NO: 4032098 - DNA, 25 bp, Homo sapien
tccagttcttcttccggcaccttgt

SEQ ID NO: 4032099 - DNA, 25 bp, Homo sapien
cccactgtaagtgtgagtggattcc

SEQ ID NO: 4032100 - DNA, 25 bp, Homo sapien
aaacagctcgggtctttgcggtcgc

SEQ ID NO: 4032101 - DNA, 25 bp, Homo sapien
cctgctgcctcacgttggaattgga

SEQ ID NO: 4032102 - DNA, 25 bp, Homo sapien
ggccgcgtagcacggagttgctcct

SEQ ID NO: 4032103 - DNA, 25 bp, Homo sapien
ggtgcacgatgctcccaatccgtcg

SEQ ID NO: 4032104 - DNA, 25 bp, Homo sapien
cacttggtcatttttagcaccacat

SEQ ID NO: 4032105 - DNA, 25 bp, Homo sapien
cctagcacagagtgaatgctgaagg

SEQ ID NO: 4032106 - DNA, 25 bp, Homo sapien
ttttagcaccacatgcttggcccac

SEQ ID NO: 4032107 - DNA, 25 bp, Homo sapien
cacctagcacagagtgaatgctgaa

SEQ ID NO: 4032108 - DNA, 25 bp, Homo sapien
acaaaatcctttacatctctctctg

SEQ ID NO: 4032109 - DNA, 25 bp, Homo sapien
ctacaaaatcctttacatctctctc

SEQ ID NO: 4032110 - DNA, 25 bp, Homo sapien
tccaagccatcatctacaaaatcct

SEQ ID NO: 4032111 - DNA, 25 bp, Homo sapien
aaatcctttacatctctctctgttc

SEQ ID NO: 4032112 - DNA, 25 bp, Homo sapien
gcttcttcagcaacagcttgctctg

SEQ ID NO: 4032113 - DNA, 25 bp, Homo sapien
ttcagcaacagcttgctctggtgtg

SEQ ID NO: 4032114 - DNA, 25 bp, Homo sapien
gctgtgcttgtcctgatgcttctct

SEQ ID NO: 4032115 - DNA, 25 bp, Homo sapien
tgttcttttttgagtctccagcttc

SEQ ID NO: 4032116 - DNA, 25 bp, Homo sapien
ctggaagtagttgaagaggtctgat

SEQ ID NO: 4032117 - DNA, 25 bp, Homo sapien
ggaagtagttgaagaggtctgatat

SEQ ID NO: 4032118 - DNA, 25 bp, Homo sapien
tggaagtagttgaagaggtctgata

SEQ ID NO: 4032119 - DNA, 25 bp, Homo sapien
aataccagatctagggacagctacg

SEQ ID NO: 4032120 - DNA, 25 bp, Homo sapien
tctagggacagctacggagctggaa

SEQ ID NO: 4032121 - DNA, 25 bp, Homo sapien
acaccaccaataccagatctaggga

SEQ ID NO: 4032122 - DNA, 25 bp, Homo sapien
gacagctacggagctggaaagcact

SEQ ID NO: 4032123 - DNA, 25 bp, Homo sapien
tgaacccaattctgatcaggtttgg

SEQ ID NO: 4032124 - DNA, 25 bp, Homo sapien
gcaccagtgacagcaccattgctag

SEQ ID NO: 4032125 - DNA, 25 bp, Homo sapien
ccagcctgggtatgtgactagagtc

SEQ ID NO: 4032126 - DNA, 25 bp, Homo sapien
ctggaggacgagctgtttgaaccca

SEQ ID NO: 4032127 - DNA, 25 bp, Homo sapien
agagaactataaaatctgaaggttt

SEQ ID NO: 4032128 - DNA, 25 bp, Homo sapien
tttgatggctacgaagatgattggc

SEQ ID NO: 4032129 - DNA, 25 bp, Homo sapien
gaccacacttcttacatctaaaggg

SEQ ID NO: 4032130 - DNA, 25 bp, Homo sapien
tactatatccgaaggctttaccaca

SEQ ID NO: 4032131 - DNA, 25 bp, Homo sapien
tgattggcataactaaacattttcc

SEQ ID NO: 4032132 - DNA, 25 bp, Homo sapien
ttggaataagtgaaggctttttcac

SEQ ID NO: 4032133 - DNA, 25 bp, Homo sapien
aaaggaactgagggaataaaatgtg

SEQ ID NO: 4032134 - DNA, 25 bp, Homo sapien
agtggtttcatggttacaaagataa

SEQ ID NO: 4032135 - DNA, 25 bp, Homo sapien
ccaaattgtctacattcatagtgtt

SEQ ID NO: 4032136 - DNA, 25 bp, Homo sapien
taactaaaggcttcaccaaattgtc

SEQ ID NO: 4032137 - DNA, 25 bp, Homo sapien
aagaatccaagtggctgaaggctct

SEQ ID NO: 4032138 - DNA, 25 bp, Homo sapien
tctcaaaagaatccaagtggctgaa

SEQ ID NO: 4032139 - DNA, 25 bp, Homo sapien
tttacagagttttgtcccagtgtga

SEQ ID NO: 4032140 - DNA, 25 bp, Homo sapien
tacagagttttgtcccagtgtgagt

SEQ ID NO: 4032141 - DNA, 25 bp, Homo sapien
ctgacgtatataaggtacattggga

SEQ ID NO: 4032142 - DNA, 25 bp, Homo sapien
tctctgacgtatataaggtacattg

SEQ ID NO: 4032143 - DNA, 25 bp, Homo sapien
gatttctctgacgtatataaggtac

SEQ ID NO: 4032144 - DNA, 25 bp, Homo sapien
ggtgtgatttctctgacgtatataa

SEQ ID NO: 4032145 - DNA, 25 bp, Homo sapien
gaagatgtgtgaacaaaatgatggc

SEQ ID NO: 4032146 - DNA, 25 bp, Homo sapien
aagatgtgtgaacaaaatgatggct

SEQ ID NO: 4032147 - DNA, 25 bp, Homo sapien
cattttgagagaagagccctggcag

SEQ ID NO: 4032148 - DNA, 25 bp, Homo sapien
gagagccaaattatctgggtgctgg

SEQ ID NO: 4032149 - DNA, 25 bp, Homo sapien
aggagagccaaattatctgggtgct

SEQ ID NO: 4032150 - DNA, 25 bp, Homo sapien
aaagtcacatgacctggctgctgag

SEQ ID NO: 4032151 - DNA, 25 bp, Homo sapien
aaagtacagtcaagtctaccaggtg

SEQ ID NO: 4032152 - DNA, 25 bp, Homo sapien
acttctgtagggagagtccaggcaa

SEQ ID NO: 4032153 - DNA, 25 bp, Homo sapien
ggtgcttggcccattgatttgtccc

SEQ ID NO: 4032154 - DNA, 25 bp, Homo sapien
agtacagtcaagtctaccaggtgct

SEQ ID NO: 4032155 - DNA, 25 bp, Homo sapien
tcttaagtgctgaaaacgtgaacac

SEQ ID NO: 4032156 - DNA, 25 bp, Homo sapien
tgaaaacgtgaacactttcccaaga

SEQ ID NO: 4032157 - DNA, 25 bp, Homo sapien
cccaggttgtggttcaggtggcact

SEQ ID NO: 4032158 - DNA, 25 bp, Homo sapien
tgaaaggcctggaatagcctctgcg

SEQ ID NO: 4032159 - DNA, 25 bp, Homo sapien
tggaagtgactaactcaggagggct

SEQ ID NO: 4032160 - DNA, 25 bp, Homo sapien
taatgatgcctacccaagtgtagtt

SEQ ID NO: 4032161 - DNA, 25 bp, Homo sapien
tgtaaaaatttagtccctgatgtga

SEQ ID NO: 4032162 - DNA, 25 bp, Homo sapien
tgtctcacagggtgggacagccact

SEQ ID NO: 4032163 - DNA, 25 bp, Homo sapien
gcttggtgcacccagtgtgagtcat

SEQ ID NO: 4032164 - DNA, 25 bp, Homo sapien
cgtgggaaagttagaggctacagcc

SEQ ID NO: 4032165 - DNA, 25 bp, Homo sapien
tgctgcaccgatacccagtataggt

SEQ ID NO: 4032166 - DNA, 25 bp, Homo sapien
tgaactcctagggtctgagacctgt

SEQ ID NO: 4032167 - DNA, 25 bp, Homo sapien
caaaccctctataaaagtcaactgc

SEQ ID NO: 4032168 - DNA, 25 bp, Homo sapien
tctctgagtgccaggatctcaaaaa

SEQ ID NO: 4032169 - DNA, 25 bp, Homo sapien
gagtgagatactcgccagcacagtt

SEQ ID NO: 4032170 - DNA, 25 bp, Homo sapien
gatccccgcaaaagaagcatgtgag

SEQ ID NO: 4032171 - DNA, 25 bp, Homo sapien
ttggagtttccctcatgtgagctcg

SEQ ID NO: 4032172 - DNA, 25 bp, Homo sapien
ccctcatgtgagctcgactctggtt

SEQ ID NO: 4032173 - DNA, 25 bp, Homo sapien
tttccctcatgtgagctcgactctg

SEQ ID NO: 4032174 - DNA, 25 bp, Homo sapien
agctgtccttggaaccgattttcct

SEQ ID NO: 4032175 - DNA, 25 bp, Homo sapien
cacaaaggagctgaagtagctatca

SEQ ID NO: 4032176 - DNA, 25 bp, Homo sapien
gaatccatgtctatatggccctggc

SEQ ID NO: 4032177 - DNA, 25 bp, Homo sapien
tgtctccaaccaaacaccctagaag

SEQ ID NO: 4032178 - DNA, 25 bp, Homo sapien
cctggctgccaaagagctcccagtt

SEQ ID NO: 4032179 - DNA, 25 bp, Homo sapien
tgaattgtctcttcttatctgagcc

SEQ ID NO: 4032180 - DNA, 25 bp, Homo sapien
ttgtttgaattgtctcttcttatct

SEQ ID NO: 4032181 - DNA, 25 bp, Homo sapien
gtctcggctttttgtttgaattgtc

SEQ ID NO: 4032182 - DNA, 25 bp, Homo sapien
tgtctcttcttatctgagccctttt

SEQ ID NO: 4032183 - DNA, 25 bp, Homo sapien
gaagtttccctacatccaccattga

SEQ ID NO: 4032184 - DNA, 25 bp, Homo sapien
gcctccttagtaaacatggacttgg

SEQ ID NO: 4032185 - DNA, 25 bp, Homo sapien
tagaaggcttagtgcctgtcccagc

SEQ ID NO: 4032186 - DNA, 25 bp, Homo sapien
tgggacacgatatggtggagctcct

SEQ ID NO: 4032187 - DNA, 25 bp, Homo sapien
taacctcactataaagcaggcaaag

SEQ ID NO: 4032188 - DNA, 25 bp, Homo sapien
ggaacccgtgactctcaccatgtaa

SEQ ID NO: 4032189 - DNA, 25 bp, Homo sapien
tgcagaagtatgaaatggaacccgt

SEQ ID NO: 4032190 - DNA, 25 bp, Homo sapien
gcaggtgagcagacaacccatgaaa

SEQ ID NO: 4032191 - DNA, 25 bp, Homo sapien
ggtagttaccatgggctaagaattg

SEQ ID NO: 4032192 - DNA, 25 bp, Homo sapien
ggagatacccatcgaagggtgcata

SEQ ID NO: 4032193 - DNA, 25 bp, Homo sapien
gcgtacctgcactcctctgatacaa

SEQ ID NO: 4032194 - DNA, 25 bp, Homo sapien
aattagtatcaccaagcgtacctgc

SEQ ID NO: 4032195 - DNA, 25 bp, Homo sapien
gaaggcaatgtaactgcagaagaca

SEQ ID NO: 4032196 - DNA, 25 bp, Homo sapien
ggggcgaggtagctcttggctgcct

SEQ ID NO: 4032197 - DNA, 25 bp, Homo sapien
gaccagtgaaggcaatgtaactgca

SEQ ID NO: 4032198 - DNA, 25 bp, Homo sapien
ggctgcctgcaatccaatggcctct

SEQ ID NO: 4032199 - DNA, 25 bp, Homo sapien
tcagaaacgtgtgcataatacataa

SEQ ID NO: 4032200 - DNA, 25 bp, Homo sapien
atggcagttgaagccaaaacatctg

SEQ ID NO: 4032201 - DNA, 25 bp, Homo sapien
gatgtcaaatccatgtgggttgttc

SEQ ID NO: 4032202 - DNA, 25 bp, Homo sapien
gtttcttgaagagagcagtatttca

SEQ ID NO: 4032203 - DNA, 25 bp, Homo sapien
ggcttttgtgtacgctgtggctgct

SEQ ID NO: 4032204 - DNA, 25 bp, Homo sapien
cgcctcccaacagttcgggcttttg

SEQ ID NO: 4032205 - DNA, 25 bp, Homo sapien
tgcttctgctgccgaagcttggcat

SEQ ID NO: 4032206 - DNA, 25 bp, Homo sapien
caacagttcgggcttttgtgtacgc

SEQ ID NO: 4032207 - DNA, 25 bp, Homo sapien
ccacagggactctgcagtgtccggc

SEQ ID NO: 4032208 - DNA, 25 bp, Homo sapien
gactctgcagtgtccggctcaccag

SEQ ID NO: 4032209 - DNA, 25 bp, Homo sapien
cagggactctgcagtgtccggctca

SEQ ID NO: 4032210 - DNA, 25 bp, Homo sapien
agggactctgcagtgtccggctcac

SEQ ID NO: 4032211 - DNA, 25 bp, Homo sapien
acttgatatgatttattatttttac

SEQ ID NO: 4032212 - DNA, 25 bp, Homo sapien
gacttgatatgatttattattttta

SEQ ID NO: 4032213 - DNA, 25 bp, Homo sapien
tttcttatgacagtttcagaagcga

SEQ ID NO: 4032214 - DNA, 25 bp, Homo sapien
tgtgaggcacagatgagttattaaa

SEQ ID NO: 4032215 - DNA, 25 bp, Homo sapien
gaggcacagatgagttattaaaggc

SEQ ID NO: 4032216 - DNA, 25 bp, Homo sapien
ggcacagatgagttattaaaggcag

SEQ ID NO: 4032217 - DNA, 25 bp, Homo sapien
ctgcattaatcacagccaggaggtc

SEQ ID NO: 4032218 - DNA, 25 bp, Homo sapien
aatcacagccaggaggtccacacta

SEQ ID NO: 4032219 - DNA, 25 bp, Homo sapien
acagccaggaggtccacactagtac

SEQ ID NO: 4032220 - DNA, 25 bp, Homo sapien
tcacagccaggaggtccacactagt

SEQ ID NO: 4032221 - DNA, 25 bp, Homo sapien
ctgcgagcccgaggaccaagcggca

SEQ ID NO: 4032222 - DNA, 25 bp, Homo sapien
aggtgtgggccacgctgcgagcccg

SEQ ID NO: 4032223 - DNA, 25 bp, Homo sapien
gggagcgtccccgtgagaggcccga

SEQ ID NO: 4032224 - DNA, 25 bp, Homo sapien
ctttatcacagtggcgggagcgtcc

SEQ ID NO: 4032225 - DNA, 25 bp, Homo sapien
tgacggtttcatacactaacaaggg

SEQ ID NO: 4032226 - DNA, 25 bp, Homo sapien
tgtgacagcttagggaacagaaaaa

SEQ ID NO: 4032227 - DNA, 25 bp, Homo sapien
ggtgcactccgcatgtgtaaaaggg

SEQ ID NO: 4032228 - DNA, 25 bp, Homo sapien
gagcatgtctgaaacggtaggcccg

SEQ ID NO: 4032229 - DNA, 25 bp, Homo sapien
taacccgcctctagggacggccgca

SEQ ID NO: 4032230 - DNA, 25 bp, Homo sapien
tcccgcgcaggccataagaggcaaa

SEQ ID NO: 4032231 - DNA, 25 bp, Homo sapien
gcgcaggccataagaggcaaatgaa

SEQ ID NO: 4032232 - DNA, 25 bp, Homo sapien
ttggcgggaaatcgagaccctggca

SEQ ID NO: 4032233 - DNA, 25 bp, Homo sapien
aatttgcagtggatttccattttgc

SEQ ID NO: 4032234 - DNA, 25 bp, Homo sapien
ctagagaatttgcagtggatttcca

SEQ ID NO: 4032235 - DNA, 25 bp, Homo sapien
gagaatttgcagtggatttccattt

SEQ ID NO: 4032236 - DNA, 25 bp, Homo sapien
gcagtggatttccattttgctgcat

SEQ ID NO: 4032237 - DNA, 25 bp, Homo sapien
gtccagtgtgtatgtctgctaaagg

SEQ ID NO: 4032238 - DNA, 25 bp, Homo sapien
gtgtgtatgtctgctaaaggctgct

SEQ ID NO: 4032239 - DNA, 25 bp, Homo sapien
cagctgtccagtgtgtatgtctgct

SEQ ID NO: 4032240 - DNA, 25 bp, Homo sapien
tccatcacagaggtggggtgacagc

SEQ ID NO: 4032241 - DNA, 25 bp, Homo sapien
cagcatcgaagtctccacaggccaa

SEQ ID NO: 4032242 - DNA, 25 bp, Homo sapien
atcgaagtctccacaggccaattct

SEQ ID NO: 4032243 - DNA, 25 bp, Homo sapien
gcatcgaagtctccacaggccaatt

SEQ ID NO: 4032244 - DNA, 25 bp, Homo sapien
gccagcatcgaagtctccacaggcc

SEQ ID NO: 4032245 - DNA, 25 bp, Homo sapien
tcactggtcactcccggcagtggtc

SEQ ID NO: 4032246 - DNA, 25 bp, Homo sapien
gaggcgccaggcagttcagtgctgg

SEQ ID NO: 4032247 - DNA, 25 bp, Homo sapien
gagccttgaagaaggcgaaccgtgc

SEQ ID NO: 4032248 - DNA, 25 bp, Homo sapien
aaccgtgcagggaagtagtagctgt

SEQ ID NO: 4032249 - DNA, 25 bp, Homo sapien
ttccgccggccgcttgtctgcctga

SEQ ID NO: 4032250 - DNA, 25 bp, Homo sapien
ctgagtctctataggacagtggccc

SEQ ID NO: 4032251 - DNA, 25 bp, Homo sapien
ccttcccttgggatggacttcgcac

SEQ ID NO: 4032252 - DNA, 25 bp, Homo sapien
gtctgcctgagcttaaattccagtt

SEQ ID NO: 4032253 - DNA, 25 bp, Homo sapien
ctgggaaggacgtatccaccgcgcc

SEQ ID NO: 4032254 - DNA, 25 bp, Homo sapien
cccatgccggggagggtgcattcct

SEQ ID NO: 4032255 - DNA, 25 bp, Homo sapien
ggaaggacgtatccaccgcgccgtc

SEQ ID NO: 4032256 - DNA, 25 bp, Homo sapien
cacaccgttctcccggaaggcccat

SEQ ID NO: 4032257 - DNA, 25 bp, Homo sapien
cgcccacccacggggccagcagcat

SEQ ID NO: 4032258 - DNA, 25 bp, Homo sapien
ggccccggagctcggacccgcctgc

SEQ ID NO: 4032259 - DNA, 25 bp, Homo sapien
ccccggcgctgggccccggagctcg

SEQ ID NO: 4032260 - DNA, 25 bp, Homo sapien
gacccgcctgcctccccagcgcccc

SEQ ID NO: 4032261 - DNA, 25 bp, Homo sapien
agtgatagctgtgatggctgtgaac

SEQ ID NO: 4032262 - DNA, 25 bp, Homo sapien
gatagctgtgatggctgtgaaccat

SEQ ID NO: 4032263 - DNA, 25 bp, Homo sapien
cctggcagtgatagctgtgatggct

SEQ ID NO: 4032264 - DNA, 25 bp, Homo sapien
gcagtgatagctgtgatggctgtga

SEQ ID NO: 4032265 - DNA, 25 bp, Homo sapien
ggacaggcaatccatcctcaattga

SEQ ID NO: 4032266 - DNA, 25 bp, Homo sapien
tgagcagattggaagtgaaggaaca

SEQ ID NO: 4032267 - DNA, 25 bp, Homo sapien
ggatggtgggtaatgaaatctccga

SEQ ID NO: 4032268 - DNA, 25 bp, Homo sapien
tagagctggaaatcatagtgagcag

SEQ ID NO: 4032269 - DNA, 25 bp, Homo sapien
tttggaataactaccctgcctcttg

SEQ ID NO: 4032270 - DNA, 25 bp, Homo sapien
atgtccctttagtcccaacggctcg

SEQ ID NO: 4032271 - DNA, 25 bp, Homo sapien
tgttcccagtgtccaaaaatgtgca

SEQ ID NO: 4032272 - DNA, 25 bp, Homo sapien
catgattgtgtttgtgactagctac

SEQ ID NO: 4032273 - DNA, 25 bp, Homo sapien
tgtgagagtggcaatcccagttgtc

SEQ ID NO: 4032274 - DNA, 25 bp, Homo sapien
gtggcaatcccagttgtcggatact

SEQ ID NO: 4032275 - DNA, 25 bp, Homo sapien
tgagagtggcaatcccagttgtcgg

SEQ ID NO: 4032276 - DNA, 25 bp, Homo sapien
ccatgtgtgagagtggcaatcccag

SEQ ID NO: 4032277 - DNA, 25 bp, Homo sapien
gtgaccaggtaggagagtcacatca

SEQ ID NO: 4032278 - DNA, 25 bp, Homo sapien
tcacatcacctaggttctgggccag

SEQ ID NO: 4032279 - DNA, 25 bp, Homo sapien
cacatcacctaggttctgggccagg

SEQ ID NO: 4032280 - DNA, 25 bp, Homo sapien
tgtgagcagtgaccaggtaggagag

SEQ ID NO: 4032281 - DNA, 25 bp, Homo sapien
gctgctctgaaagaagggtgagcca

SEQ ID NO: 4032282 - DNA, 25 bp, Homo sapien
cgagggcagcaatatgtgcgcagac

SEQ ID NO: 4032283 - DNA, 25 bp, Homo sapien
tgccgtgcgtcgtcttctacctcag

SEQ ID NO: 4032284 - DNA, 25 bp, Homo sapien
caataaatcccacacgaatgttagg

SEQ ID NO: 4032285 - DNA, 25 bp, Homo sapien
tgctcccagctcagggttgcctggg

SEQ ID NO: 4032286 - DNA, 25 bp, Homo sapien
tctcttgataccacctctctttcca

SEQ ID NO: 4032287 - DNA, 25 bp, Homo sapien
tcttgataccacctctctttccagt

SEQ ID NO: 4032288 - DNA, 25 bp, Homo sapien
ttgataccacctctctttccagtgc

SEQ ID NO: 4032289 - DNA, 25 bp, Homo sapien
gcattgagcgttcaggatgctggtc

SEQ ID NO: 4032290 - DNA, 25 bp, Homo sapien
taagcattgagcgttcaggatgctg

SEQ ID NO: 4032291 - DNA, 25 bp, Homo sapien
gacactaagcattgagcgttcagga

SEQ ID NO: 4032292 - DNA, 25 bp, Homo sapien
ctagacactaagcattgagcgttca

SEQ ID NO: 4032293 - DNA, 25 bp, Homo sapien
ttttcctcctgcactagctgctgca

SEQ ID NO: 4032294 - DNA, 25 bp, Homo sapien
aatattgtttatgggccaagcacag

SEQ ID NO: 4032295 - DNA, 25 bp, Homo sapien
tcatataggtcaggaggttagcttc

SEQ ID NO: 4032296 - DNA, 25 bp, Homo sapien
tgatccaaagttgctgccctggcca

SEQ ID NO: 4032297 - DNA, 25 bp, Homo sapien
gattgatgttggcaccctcccgaag

SEQ ID NO: 4032298 - DNA, 25 bp, Homo sapien
tatcctgtggtaggtgctggtctgt

SEQ ID NO: 4032299 - DNA, 25 bp, Homo sapien
gttgcttagtctttgcatcagccag

SEQ ID NO: 4032300 - DNA, 25 bp, Homo sapien
tcagccagggcattgaggatgttga

SEQ ID NO: 4032301 - DNA, 25 bp, Homo sapien
ggcatcagtggaatgccgcatgcag

SEQ ID NO: 4032302 - DNA, 25 bp, Homo sapien
gcagttatgggtccccctggtcagc

SEQ ID NO: 4032303 - DNA, 25 bp, Homo sapien
ggaatgccgcatgcagttatgggtc

SEQ ID NO: 4032304 - DNA, 25 bp, Homo sapien
agtggaatgccgcatgcagttatgg

SEQ ID NO: 4032305 - DNA, 25 bp, Homo sapien
aataagtccttctatcactacccct

SEQ ID NO: 4032306 - DNA, 25 bp, Homo sapien
aagtccttctatcactacccctttg

SEQ ID NO: 4032307 - DNA, 25 bp, Homo sapien
tatcactacccctttgcccagatcc

SEQ ID NO: 4032308 - DNA, 25 bp, Homo sapien
ccctttgcccagatcctcacagatg

SEQ ID NO: 4032309 - DNA, 25 bp, Homo sapien
gagggagaggggtccatcagaaaat

SEQ ID NO: 4032310 - DNA, 25 bp, Homo sapien
aacttgagggagaggggtccatcag

SEQ ID NO: 4032311 - DNA, 25 bp, Homo sapien
cttgagggagaggggtccatcagaa

SEQ ID NO: 4032312 - DNA, 25 bp, Homo sapien
tgagggagaggggtccatcagaaaa

SEQ ID NO: 4032313 - DNA, 25 bp, Homo sapien
gcctgtagaggtacctgatggtcag

SEQ ID NO: 4032314 - DNA, 25 bp, Homo sapien
aagtgcctgtagaggtacctgatgg

SEQ ID NO: 4032315 - DNA, 25 bp, Homo sapien
caaagtgcctgtagaggtacctgat

SEQ ID NO: 4032316 - DNA, 25 bp, Homo sapien
cctcaaagtgcctgtagaggtacct

SEQ ID NO: 4032317 - DNA, 25 bp, Homo sapien
ccccagtgcactgccgcccagctca

SEQ ID NO: 4032318 - DNA, 25 bp, Homo sapien
ctacagaagacagagcatggaggag

SEQ ID NO: 4032319 - DNA, 25 bp, Homo sapien
tgcactgccgcccagctcagccctt

SEQ ID NO: 4032320 - DNA, 25 bp, Homo sapien
ggaggaggccccagtgcactgccgc

SEQ ID NO: 4032321 - DNA, 25 bp, Homo sapien
cctccacggccatcatcatggcaac

SEQ ID NO: 4032322 - DNA, 25 bp, Homo sapien
aagacagaaatgtccgatgccttct

SEQ ID NO: 4032323 - DNA, 25 bp, Homo sapien
gatgccttctgacaaccaacgatag

SEQ ID NO: 4032324 - DNA, 25 bp, Homo sapien
tgagtgccagatatatggaaccggt

SEQ ID NO: 4032325 - DNA, 25 bp, Homo sapien
caacgatagaccatgtgttgtcgtg

SEQ ID NO: 4032326 - DNA, 25 bp, Homo sapien
ctgtatttgcatattgcttgtcatt

SEQ ID NO: 4032327 - DNA, 25 bp, Homo sapien
ttgcttgtcatttttatgtgagtag

SEQ ID NO: 4032328 - DNA, 25 bp, Homo sapien
gcttgtcatttttatgtgagtaggc

SEQ ID NO: 4032329 - DNA, 25 bp, Homo sapien
tattgcttgtcatttttatgtgagt

SEQ ID NO: 4032330 - DNA, 25 bp, Homo sapien
ggaagtcagtctcggcattcccggg

SEQ ID NO: 4032331 - DNA, 25 bp, Homo sapien
agtcagtctcggcattcccgggcat

SEQ ID NO: 4032332 - DNA, 25 bp, Homo sapien
ccccgtggaagtcagtctcggcatt

SEQ ID NO: 4032333 - DNA, 25 bp, Homo sapien
cgtggaagtcagtctcggcattccc

SEQ ID NO: 4032334 - DNA, 25 bp, Homo sapien
tgcgacccggggcctctctgttcgg

SEQ ID NO: 4032335 - DNA, 25 bp, Homo sapien
attccagtccgcttgcatccccgct

SEQ ID NO: 4032336 - DNA, 25 bp, Homo sapien
agtccgcttgcatccccgctgcgac

SEQ ID NO: 4032337 - DNA, 25 bp, Homo sapien
ctcccattccagtccgcttgcatcc

SEQ ID NO: 4032338 - DNA, 25 bp, Homo sapien
gtgccactgccatggcccagtgccc

SEQ ID NO: 4032339 - DNA, 25 bp, Homo sapien
ctgtgccactgccatggcccagtgc

SEQ ID NO: 4032340 - DNA, 25 bp, Homo sapien
tggcccagtgccccccagtgtgggt

SEQ ID NO: 4032341 - DNA, 25 bp, Homo sapien
catggcccagtgccccccagtgtgg

SEQ ID NO: 4032342 - DNA, 25 bp, Homo sapien
gcactgtccccttatagattctaca

SEQ ID NO: 4032343 - DNA, 25 bp, Homo sapien
gattttcaaaataggccccaatgga

SEQ ID NO: 4032344 - DNA, 25 bp, Homo sapien
gaaagaacagtataactctctgaga

SEQ ID NO: 4032345 - DNA, 25 bp, Homo sapien
tctttcactatggacttcaatgggc

SEQ ID NO: 4032346 - DNA, 25 bp, Homo sapien
caaaacaaaggttgatgccatcaga

SEQ ID NO: 4032347 - DNA, 25 bp, Homo sapien
gaagtgtcccatcatagatcctaca

SEQ ID NO: 4032348 - DNA, 25 bp, Homo sapien
tttttcactactggcatcaatgggc

SEQ ID NO: 4032349 - DNA, 25 bp, Homo sapien
caatatgccacaattaatgtagggc

SEQ ID NO: 4032350 - DNA, 25 bp, Homo sapien
tgagtatttatcagtatattcctgc

SEQ ID NO: 4032351 - DNA, 25 bp, Homo sapien
tttatcagtatattcctgctgctcc

SEQ ID NO: 4032352 - DNA, 25 bp, Homo sapien
gtatttatcagtatattcctgctgc

SEQ ID NO: 4032353 - DNA, 25 bp, Homo sapien
caactttatatgttgagtatttatc

SEQ ID NO: 4032354 - DNA, 25 bp, Homo sapien
tcagggattcttgccagaggacaca

SEQ ID NO: 4032355 - DNA, 25 bp, Homo sapien
tgtggaggcgcactaagaacttcac

SEQ ID NO: 4032356 - DNA, 25 bp, Homo sapien
tcttggcggatataacaggaatcca

SEQ ID NO: 4032357 - DNA, 25 bp, Homo sapien
caaaagtatcacagttgcccagtca

SEQ ID NO: 4032358 - DNA, 25 bp, Homo sapien
catgcgcattcgtgaggcaggctcg

SEQ ID NO: 4032359 - DNA, 25 bp, Homo sapien
caggctcgggcacccggctttcagg

SEQ ID NO: 4032360 - DNA, 25 bp, Homo sapien
gagactggcgcatgcgcattcgtga

SEQ ID NO: 4032361 - DNA, 25 bp, Homo sapien
ctgtgcccagagactggcgcatgcg

SEQ ID NO: 4032362 - DNA, 25 bp, Homo sapien
cagcaggaaacctcgtggaacggag

SEQ ID NO: 4032363 - DNA, 25 bp, Homo sapien
aggaaacctcgtggaacggagccag

SEQ ID NO: 4032364 - DNA, 25 bp, Homo sapien
cagcagcaggaaacctcgtggaacg

SEQ ID NO: 4032365 - DNA, 25 bp, Homo sapien
cctcgtggaacggagccagcaaatg

SEQ ID NO: 4032366 - DNA, 25 bp, Homo sapien
ttttccaagccaaactatatccagc

SEQ ID NO: 4032367 - DNA, 25 bp, Homo sapien
gggcagataatcgttaacagtatac

SEQ ID NO: 4032368 - DNA, 25 bp, Homo sapien
gcagataatcgttaacagtatacaa

SEQ ID NO: 4032369 - DNA, 25 bp, Homo sapien
tccaagccaaactatatccagcttt

SEQ ID NO: 4032370 - DNA, 25 bp, Homo sapien
ccaaaaatcagaaagccactataaa

SEQ ID NO: 4032371 - DNA, 25 bp, Homo sapien
cttcttcaatggactaccaaaaatc

SEQ ID NO: 4032372 - DNA, 25 bp, Homo sapien
ctcccttcttcaatggactaccaaa

SEQ ID NO: 4032373 - DNA, 25 bp, Homo sapien
cttcaatggactaccaaaaatcaga

SEQ ID NO: 4032374 - DNA, 25 bp, Homo sapien
tcaatgcagctttggagaccttctg

SEQ ID NO: 4032375 - DNA, 25 bp, Homo sapien
tgaagtgttctgtgtactaacatag

SEQ ID NO: 4032376 - DNA, 25 bp, Homo sapien
tctgtgtactaacatagctttaaaa

SEQ ID NO: 4032377 - DNA, 25 bp, Homo sapien
gctttgtgtgcctggtctttttggc

SEQ ID NO: 4032378 - DNA, 25 bp, Homo sapien
agcatcagcttttccctttttccct

SEQ ID NO: 4032379 - DNA, 25 bp, Homo sapien
ttattcccctctgtgccagcatcag

SEQ ID NO: 4032380 - DNA, 25 bp, Homo sapien
ccagcatcagcttttccctttttcc

SEQ ID NO: 4032381 - DNA, 25 bp, Homo sapien
aggttattcccctctgtgccagcat

SEQ ID NO: 4032382 - DNA, 25 bp, Homo sapien
ggcatggtggcagtggcgacagtgg

SEQ ID NO: 4032383 - DNA, 25 bp, Homo sapien
tgctggatgcaggatgcagcggcac

SEQ ID NO: 4032384 - DNA, 25 bp, Homo sapien
ggcctttctaggcttgggctgtctg

SEQ ID NO: 4032385 - DNA, 25 bp, Homo sapien
gcggcacacgggctttggtctgtcg

SEQ ID NO: 4032386 - DNA, 25 bp, Homo sapien
gcacattaaggtccacggattttat

SEQ ID NO: 4032387 - DNA, 25 bp, Homo sapien
aaggtccacggattttattctcaag

SEQ ID NO: 4032388 - DNA, 25 bp, Homo sapien
caagtacctaactgtagccaacttc

SEQ ID NO: 4032389 - DNA, 25 bp, Homo sapien
tattctcaagtacctaactgtagcc

SEQ ID NO: 4032390 - DNA, 25 bp, Homo sapien
cctctgccctgattactacttgttt

SEQ ID NO: 4032391 - DNA, 25 bp, Homo sapien
ttctcatgagccatgaccgcagcat

SEQ ID NO: 4032392 - DNA, 25 bp, Homo sapien
actccagttggtggctggtgaacac

SEQ ID NO: 4032393 - DNA, 25 bp, Homo sapien
tactacttgttttgctacagttagc

SEQ ID NO: 4032394 - DNA, 25 bp, Homo sapien
gaggtccatggccactatcttcttg

SEQ ID NO: 4032395 - DNA, 25 bp, Homo sapien
cctttgcctgtggaggtccatggcc

SEQ ID NO: 4032396 - DNA, 25 bp, Homo sapien
attggcctttgcctgtggaggtcca

SEQ ID NO: 4032397 - DNA, 25 bp, Homo sapien
tggccactatcttcttggagtagct

SEQ ID NO: 4032398 - DNA, 25 bp, Homo sapien
ttcaaatccattcgataattcaatt

SEQ ID NO: 4032399 - DNA, 25 bp, Homo sapien
cattcaaatccattcgataattcaa

SEQ ID NO: 4032400 - DNA, 25 bp, Homo sapien
tcaaatccattcgataattcaattc

SEQ ID NO: 4032401 - DNA, 25 bp, Homo sapien
caaatccattcgataattcaattca

SEQ ID NO: 4032402 - DNA, 25 bp, Homo sapien
gacgattccgttcgagtccatttga

SEQ ID NO: 4032403 - DNA, 25 bp, Homo sapien
tgatgactccattcgatgaaattcg

SEQ ID NO: 4032404 - DNA, 25 bp, Homo sapien
tacattccatgacgattccgttcga

SEQ ID NO: 4032405 - DNA, 25 bp, Homo sapien
attcgatgttattcgatgattccat

SEQ ID NO: 4032406 - DNA, 25 bp, Homo sapien
gattccaatcgaatccattcaaaga

SEQ ID NO: 4032407 - DNA, 25 bp, Homo sapien
caattctattcaatgatgtttccat

SEQ ID NO: 4032408 - DNA, 25 bp, Homo sapien
gattccacttgattccatttacgat

SEQ ID NO: 4032409 - DNA, 25 bp, Homo sapien
ttccatgtgatgattccatcaattc

SEQ ID NO: 4032410 - DNA, 25 bp, Homo sapien
tccatttgattccagtctctgatga

SEQ ID NO: 4032411 - DNA, 25 bp, Homo sapien
gagtccatacgatgattccactcaa

SEQ ID NO: 4032412 - DNA, 25 bp, Homo sapien
atcgatggtgattccattagagtcc

SEQ ID NO: 4032413 - DNA, 25 bp, Homo sapien
tccaatcgatggtgattccattaga

SEQ ID NO: 4032414 - DNA, 25 bp, Homo sapien
gacgattccgttcgagtccatttga

SEQ ID NO: 4032415 - DNA, 25 bp, Homo sapien
attcgatgttattcgatgattccat

SEQ ID NO: 4032416 - DNA, 25 bp, Homo sapien
tacattccatgacgattccgttcga

SEQ ID NO: 4032417 - DNA, 25 bp, Homo sapien
tgatgactccattcgatgaaattcg

SEQ ID NO: 4032418 - DNA, 25 bp, Homo sapien
tgaatggaatcgttgagtttactct

SEQ ID NO: 4032419 - DNA, 25 bp, Homo sapien
gaatggaatcgttgagtttactcta

SEQ ID NO: 4032420 - DNA, 25 bp, Homo sapien
aatggaatcgttgagtttactctaa

SEQ ID NO: 4032421 - DNA, 25 bp, Homo sapien
tgatctgagagcacggaagcagaat

SEQ ID NO: 4032422 - DNA, 25 bp, Homo sapien
gagcacggaagcagaattatttctt

SEQ ID NO: 4032423 - DNA, 25 bp, Homo sapien
tctgagagcacggaagcagaattat

SEQ ID NO: 4032424 - DNA, 25 bp, Homo sapien
gaaactgatctgagagcacggaagc

SEQ ID NO: 4032425 - DNA, 25 bp, Homo sapien
ttatgagttccagctgttaacggat

SEQ ID NO: 4032426 - DNA, 25 bp, Homo sapien
aactatcaagtgtgatataattact

SEQ ID NO: 4032427 - DNA, 25 bp, Homo sapien
tgttaacggataatattttactgct

SEQ ID NO: 4032428 - DNA, 25 bp, Homo sapien
tttactgctgaaactatcaagtgtg

SEQ ID NO: 4032429 - DNA, 25 bp, Homo sapien
ttagttgcaaaatgcagcgctggtg

SEQ ID NO: 4032430 - DNA, 25 bp, Homo sapien
agttgcaaaatgcagcgctggtgtc

SEQ ID NO: 4032431 - DNA, 25 bp, Homo sapien
cattgttagttgcaaaatgcagcgc

SEQ ID NO: 4032432 - DNA, 25 bp, Homo sapien
tgttagttgcaaaatgcagcgctgg

SEQ ID NO: 4032433 - DNA, 25 bp, Homo sapien
tgccatgcaccatcaccagtcttta

SEQ ID NO: 4032434 - DNA, 25 bp, Homo sapien
ctttgatgatgccatgcaccatcac

SEQ ID NO: 4032435 - DNA, 25 bp, Homo sapien
gatgccatgcaccatcaccagtctt

SEQ ID NO: 4032436 - DNA, 25 bp, Homo sapien
ttaagacctttgatgatgccatgca

SEQ ID NO: 4032437 - DNA, 25 bp, Homo sapien
tttccctattatttcatcagcccaa

SEQ ID NO: 4032438 - DNA, 25 bp, Homo sapien
tattatttcatcagcccaatacaaa

SEQ ID NO: 4032439 - DNA, 25 bp, Homo sapien
tccctattatttcatcagcccaata

SEQ ID NO: 4032440 - DNA, 25 bp, Homo sapien
cagcccaatacaaattattgtcaaa

SEQ ID NO: 4032441 - DNA, 25 bp, Homo sapien
aagcacacatgcctgattgcagaaa

SEQ ID NO: 4032442 - DNA, 25 bp, Homo sapien
ttgcagaaatgaatattgtcccgac

SEQ ID NO: 4032443 - DNA, 25 bp, Homo sapien
tgtcccgacaatcaatatagaattc

SEQ ID NO: 4032444 - DNA, 25 bp, Homo sapien
aatagcttctgctaagcttgcgata

SEQ ID NO: 4032445 - DNA, 25 bp, Homo sapien
tgtccagttctcaccaaggcttggg

SEQ ID NO: 4032446 - DNA, 25 bp, Homo sapien
gccacccgggaaggtcatatagcca

SEQ ID NO: 4032447 - DNA, 25 bp, Homo sapien
cttaagaggtggtctgggctgttcc

SEQ ID NO: 4032448 - DNA, 25 bp, Homo sapien
tccaacagaggagtgggctgaccct

SEQ ID NO: 4032449 - DNA, 25 bp, Homo sapien
gaaatttttgcatgaccactactgg

SEQ ID NO: 4032450 - DNA, 25 bp, Homo sapien
ccttgggccaattccagagacaggc

SEQ ID NO: 4032451 - DNA, 25 bp, Homo sapien
tgatgccaagcccaacgagaaaggg

SEQ ID NO: 4032452 - DNA, 25 bp, Homo sapien
tatagctgcgagagaactgacttgc

SEQ ID NO: 4032453 - DNA, 25 bp, Homo sapien
gagtattagagagaacaccacccag

SEQ ID NO: 4032454 - DNA, 25 bp, Homo sapien
tgcatggtcccaacaagaacagatt

SEQ ID NO: 4032455 - DNA, 25 bp, Homo sapien
taggtactgtatgcatctctgggaa

SEQ ID NO: 4032456 - DNA, 25 bp, Homo sapien
tatcgtggctgggtaggctgttcct

SEQ ID NO: 4032457 - DNA, 25 bp, Homo sapien
ctggtgatccctggcaccataactg

SEQ ID NO: 4032458 - DNA, 25 bp, Homo sapien
gcaaatcagtataaggacctctcca

SEQ ID NO: 4032459 - DNA, 25 bp, Homo sapien
actcagttgagagtttggagttcca

SEQ ID NO: 4032460 - DNA, 25 bp, Homo sapien
catacttccaagtcttgatgagaac

SEQ ID NO: 4032461 - DNA, 25 bp, Homo sapien
ctgtaggagcggagagcaaatcagt

SEQ ID NO: 4032462 - DNA, 25 bp, Homo sapien
cattggctagcaagagagatgctgc

SEQ ID NO: 4032463 - DNA, 25 bp, Homo sapien
gaagccttagggtctctgtcaagaa

SEQ ID NO: 4032464 - DNA, 25 bp, Homo sapien
tgagtccccgaaagtcagttttgag

SEQ ID NO: 4032465 - DNA, 25 bp, Homo sapien
ccagggagcttgatcggcatgctca

SEQ ID NO: 4032466 - DNA, 25 bp, Homo sapien
aacaggatgcgagtcacaacaccga

SEQ ID NO: 4032467 - DNA, 25 bp, Homo sapien
aggatgcgagtcacaacaccgagag

SEQ ID NO: 4032468 - DNA, 25 bp, Homo sapien
tgcgagtcacaacaccgagagatgt

SEQ ID NO: 4032469 - DNA, 25 bp, Homo sapien
ctcacaacaggatgcgagtcacaac

SEQ ID NO: 4032470 - DNA, 25 bp, Homo sapien
ttgacaagtcgctctccattctgat

SEQ ID NO: 4032471 - DNA, 25 bp, Homo sapien
atgtattctgctgagacctaaattt

SEQ ID NO: 4032472 - DNA, 25 bp, Homo sapien
cattgcatgctgactctaggactgg

SEQ ID NO: 4032473 - DNA, 25 bp, Homo sapien
gacaatgagtttaaggtaggaattc

SEQ ID NO: 4032474 - DNA, 25 bp, Homo sapien
taaagatctgctccactctttttct

SEQ ID NO: 4032475 - DNA, 25 bp, Homo sapien
taattcttctagatacagctcctta

SEQ ID NO: 4032476 - DNA, 25 bp, Homo sapien
tctgacttttcatagtagcattgct

SEQ ID NO: 4032477 - DNA, 25 bp, Homo sapien
tacagtccgcttgtgaagttcttgc

SEQ ID NO: 4032478 - DNA, 25 bp, Homo sapien
cttgctttgtagagtttgaattcca

SEQ ID NO: 4032479 - DNA, 25 bp, Homo sapien
gtagaccaatgttttctaattgttc

SEQ ID NO: 4032480 - DNA, 25 bp, Homo sapien
aaagtagaccaatgttttctaattg

SEQ ID NO: 4032481 - DNA, 25 bp, Homo sapien
tgtaaaagtagaccaatgttttcta

SEQ ID NO: 4032482 - DNA, 25 bp, Homo sapien
ctgtaaaagtagaccaatgttttct

SEQ ID NO: 4032483 - DNA, 25 bp, Homo sapien
cacatgtagaccttctgaagatgca

SEQ ID NO: 4032484 - DNA, 25 bp, Homo sapien
tctctgcattcacatgtagaccttc

SEQ ID NO: 4032485 - DNA, 25 bp, Homo sapien
gcattcacatgtagaccttctgaag

SEQ ID NO: 4032486 - DNA, 25 bp, Homo sapien
ctgtagtgtttcacgtttctcttgc

SEQ ID NO: 4032487 - DNA, 25 bp, Homo sapien
tgcatgagtaaaataatatggtttg

SEQ ID NO: 4032488 - DNA, 25 bp, Homo sapien
tggtttggtaatgaagaaagaagac

SEQ ID NO: 4032489 - DNA, 25 bp, Homo sapien
ataatatggtttggtaatgaagaaa

SEQ ID NO: 4032490 - DNA, 25 bp, Homo sapien
ctgcatgagtaaaataatatggttt

SEQ ID NO: 4032491 - DNA, 25 bp, Homo sapien
aattaacataacatggtgtagcctc

SEQ ID NO: 4032492 - DNA, 25 bp, Homo sapien
tctagtggaggctctgatataggtt

SEQ ID NO: 4032493 - DNA, 25 bp, Homo sapien
gtttttttacagtatcagccagttc

SEQ ID NO: 4032494 - DNA, 25 bp, Homo sapien
taacatggtgtagcctctagtggag

SEQ ID NO: 4032495 - DNA, 25 bp, Homo sapien
ctgtaaagatatttttgttattgat

SEQ ID NO: 4032496 - DNA, 25 bp, Homo sapien
ttttatgaaatcgcatttattgatc

SEQ ID NO: 4032497 - DNA, 25 bp, Homo sapien
ttatgaaatcgcatttattgatcaa

SEQ ID NO: 4032498 - DNA, 25 bp, Homo sapien
tttatgaaatcgcatttattgatca

SEQ ID NO: 4032499 - DNA, 25 bp, Homo sapien
ttgctgtcgaagtaacagattttcg

SEQ ID NO: 4032500 - DNA, 25 bp, Homo sapien
gattgtcggctttcttgtaagcctc

SEQ ID NO: 4032501 - DNA, 25 bp, Homo sapien
tttgatcacggtcttgtagagcagc

SEQ ID NO: 4032502 - DNA, 25 bp, Homo sapien
tctttcctccgacattgtgattggg

SEQ ID NO: 4032503 - DNA, 25 bp, Homo sapien
tctatttccagtcttagccttgcaa

SEQ ID NO: 4032504 - DNA, 25 bp, Homo sapien
tactgtcctggaatatcattgttgc

SEQ ID NO: 4032505 - DNA, 25 bp, Homo sapien
ctttcaaaacttcaggctgtatact

SEQ ID NO: 4032506 - DNA, 25 bp, Homo sapien
ttttcagtgcatctatttccagtct

SEQ ID NO: 4032507 - DNA, 25 bp, Homo sapien
ttcctctgatatcactgctaagact

SEQ ID NO: 4032508 - DNA, 25 bp, Homo sapien
tgatatcactgctaagacttgttct

SEQ ID NO: 4032509 - DNA, 25 bp, Homo sapien
cttcctctgatatcactgctaagac

SEQ ID NO: 4032510 - DNA, 25 bp, Homo sapien
gatatcactgctaagacttgttctg

SEQ ID NO: 4032511 - DNA, 25 bp, Homo sapien
caatcgacttattctatgactacag

SEQ ID NO: 4032512 - DNA, 25 bp, Homo sapien
ttttgtcttacagtctgtagcccca

SEQ ID NO: 4032513 - DNA, 25 bp, Homo sapien
accattctctgcgtgattcttggag

SEQ ID NO: 4032514 - DNA, 25 bp, Homo sapien
tgtagccccagatacctgactgcca

SEQ ID NO: 4032515 - DNA, 25 bp, Homo sapien
tgtgaatggcatatctataaaatgt

SEQ ID NO: 4032516 - DNA, 25 bp, Homo sapien
cttttgtcctgattttactgtgaat

SEQ ID NO: 4032517 - DNA, 25 bp, Homo sapien
tttatatacctatacaggtttgtct

SEQ ID NO: 4032518 - DNA, 25 bp, Homo sapien
tgtttggatctatatagttcagtgg

SEQ ID NO: 4032519 - DNA, 25 bp, Homo sapien
cacctcgaacatttctgaatcaaaa

SEQ ID NO: 4032520 - DNA, 25 bp, Homo sapien
tgtggagcactctcaataataccca

SEQ ID NO: 4032521 - DNA, 25 bp, Homo sapien
tcttgtggagcactctcaataatac

SEQ ID NO: 4032522 - DNA, 25 bp, Homo sapien
gcactctcaataatacccataccat

SEQ ID NO: 4032523 - DNA, 25 bp, Homo sapien
ttgtgtgctcttgtggagcactctc

SEQ ID NO: 4032524 - DNA, 25 bp, Homo sapien
cccctctttagctccatattcgtta

SEQ ID NO: 4032525 - DNA, 25 bp, Homo sapien
catattcgttaagctgctgtggtgg

SEQ ID NO: 4032526 - DNA, 25 bp, Homo sapien
tttagcataagttatttctgttctg

SEQ ID NO: 4032527 - DNA, 25 bp, Homo sapien
tacatttatcttgcctctctttaat

SEQ ID NO: 4032528 - DNA, 25 bp, Homo sapien
cataggtcgtgagtcgtcaatagat

SEQ ID NO: 4032529 - DNA, 25 bp, Homo sapien
tcgtgagtcgtcaatagatggtttg

SEQ ID NO: 4032530 - DNA, 25 bp, Homo sapien
aagtcttcattagctgacataggtc

SEQ ID NO: 4032531 - DNA, 25 bp, Homo sapien
cattagctgacataggtcgtgagtc

SEQ ID NO: 4032532 - DNA, 25 bp, Homo sapien
gggctctatggcagtctccaacctt

SEQ ID NO: 4032533 - DNA, 25 bp, Homo sapien
caacctttaaatcttcagccaataa

SEQ ID NO: 4032534 - DNA, 25 bp, Homo sapien
cttcagccaataaaagcacaaattc

SEQ ID NO: 4032535 - DNA, 25 bp, Homo sapien
tcttctgcagggctctatggcagtc

SEQ ID NO: 4032536 - DNA, 25 bp, Homo sapien
ttttacaggatttccaggaatctca

SEQ ID NO: 4032537 - DNA, 25 bp, Homo sapien
ctttttacaggatttccaggaatct

SEQ ID NO: 4032538 - DNA, 25 bp, Homo sapien
ttacaggatttccaggaatctcatc

SEQ ID NO: 4032539 - DNA, 25 bp, Homo sapien
acaggatttccaggaatctcatcca

SEQ ID NO: 4032540 - DNA, 25 bp, Homo sapien
actgtgtagtaccacgtgatgccat

SEQ ID NO: 4032541 - DNA, 25 bp, Homo sapien
caaaatggtccagttagtgctgtgt

SEQ ID NO: 4032542 - DNA, 25 bp, Homo sapien
catggagcaaaatggtccagttagt

SEQ ID NO: 4032543 - DNA, 25 bp, Homo sapien
tgtgtagcactgtgtagtaccacgt

SEQ ID NO: 4032544 - DNA, 25 bp, Homo sapien
tgctgctccttctcccaagcacgcc

SEQ ID NO: 4032545 - DNA, 25 bp, Homo sapien
ctgctgctccttctcccaagcacgc

SEQ ID NO: 4032546 - DNA, 25 bp, Homo sapien
ctgctccttctcccaagcacgccat

SEQ ID NO: 4032547 - DNA, 25 bp, Homo sapien
acctgctgctccttctcccaagcac

SEQ ID NO: 4032548 - DNA, 25 bp, Homo sapien
gccaaacatgaaaacttgtcagatg

SEQ ID NO: 4032549 - DNA, 25 bp, Homo sapien
acatgaaaacttgtcagatgttcct

SEQ ID NO: 4032550 - DNA, 25 bp, Homo sapien
atgaaaacttgtcagatgttccttc

SEQ ID NO: 4032551 - DNA, 25 bp, Homo sapien
ctgccaaacatgaaaacttgtcaga

SEQ ID NO: 4032552 - DNA, 25 bp, Homo sapien
gtattcagacattacttggtgaatg

SEQ ID NO: 4032553 - DNA, 25 bp, Homo sapien
ctttgtattcagacattacttggtg

SEQ ID NO: 4032554 - DNA, 25 bp, Homo sapien
ttctttgtattcagacattacttgg

SEQ ID NO: 4032555 - DNA, 25 bp, Homo sapien
attttgaggatttctaggtgtctca

SEQ ID NO: 4032556 - DNA, 25 bp, Homo sapien
tattccagtgttaggatgtgtgctg

SEQ ID NO: 4032557 - DNA, 25 bp, Homo sapien
tattattccagtgttaggatgtgtg

SEQ ID NO: 4032558 - DNA, 25 bp, Homo sapien
attattccagtgttaggatgtgtgc

SEQ ID NO: 4032559 - DNA, 25 bp, Homo sapien
ttattccagtgttaggatgtgtgct

SEQ ID NO: 4032560 - DNA, 25 bp, Homo sapien
gaatgctgactattcttgctgattc

SEQ ID NO: 4032561 - DNA, 25 bp, Homo sapien
caatttagtgtaaactagccttcta

SEQ ID NO: 4032562 - DNA, 25 bp, Homo sapien
catctagacatatcttgggaaaaca

SEQ ID NO: 4032563 - DNA, 25 bp, Homo sapien
tcacaatgtacagcaagaatgaggg

SEQ ID NO: 4032564 - DNA, 25 bp, Homo sapien
tttgttcatgtacagctagcaaaaa

SEQ ID NO: 4032565 - DNA, 25 bp, Homo sapien
caagcttaactgcagttaaattttc

SEQ ID NO: 4032566 - DNA, 25 bp, Homo sapien
ctttcaagcttaactgcagttaaat

SEQ ID NO: 4032567 - DNA, 25 bp, Homo sapien
tcatgtacagctagcaaaaatggtg

SEQ ID NO: 4032568 - DNA, 25 bp, Homo sapien
tattggcatggtgtaaaagcagttt

SEQ ID NO: 4032569 - DNA, 25 bp, Homo sapien
taaggtagtattgccatagacatct

SEQ ID NO: 4032570 - DNA, 25 bp, Homo sapien
gggtcggctccgtgttctagcaaaa

SEQ ID NO: 4032571 - DNA, 25 bp, Homo sapien
tctagcaaaatagtcgcacattcct

SEQ ID NO: 4032572 - DNA, 25 bp, Homo sapien
atcctctgtccaccagaagagctac

SEQ ID NO: 4032573 - DNA, 25 bp, Homo sapien
ctaccacttctggatggccgttggc

SEQ ID NO: 4032574 - DNA, 25 bp, Homo sapien
agacatcaagttgacatcctctgtc

SEQ ID NO: 4032575 - DNA, 25 bp, Homo sapien
tcctgtttttgttgtcaaagacatc

SEQ ID NO: 4032576 - DNA, 25 bp, Homo sapien
tctgtggagcttgccgaggtgtttc

SEQ ID NO: 4032577 - DNA, 25 bp, Homo sapien
gaaaggatgcactccaccttggaga

SEQ ID NO: 4032578 - DNA, 25 bp, Homo sapien
tattgtacccgcactgggcgaaggg

SEQ ID NO: 4032579 - DNA, 25 bp, Homo sapien
tcagcgctcccgctcgaaaggatgc

SEQ ID NO: 4032580 - DNA, 25 bp, Homo sapien
aacaccaacagccggtgaaggagca

SEQ ID NO: 4032581 - DNA, 25 bp, Homo sapien
acaccaacagccggtgaaggagcag

SEQ ID NO: 4032582 - DNA, 25 bp, Homo sapien
accaacagccggtgaaggagcagga

SEQ ID NO: 4032583 - DNA, 25 bp, Homo sapien
caccaacagccggtgaaggagcagg

SEQ ID NO: 4032584 - DNA, 25 bp, Homo sapien
ggcccagtaagaccaagccactctg

SEQ ID NO: 4032585 - DNA, 25 bp, Homo sapien
aagtcagagccagtaacaagcgaag

SEQ ID NO: 4032586 - DNA, 25 bp, Homo sapien
caggaaacttcgcagtttccaaagt

SEQ ID NO: 4032587 - DNA, 25 bp, Homo sapien
ggcggaggctatcagagacacctca

SEQ ID NO: 4032588 - DNA, 25 bp, Homo sapien
ccacgaccacactcagggtcaaaac

SEQ ID NO: 4032589 - DNA, 25 bp, Homo sapien
cacgaccacactcagggtcaaaacg

SEQ ID NO: 4032590 - DNA, 25 bp, Homo sapien
catgatttacccataaaggagatgc

SEQ ID NO: 4032591 - DNA, 25 bp, Homo sapien
gcaacatcttaaagtaggtagctca

SEQ ID NO: 4032592 - DNA, 25 bp, Homo sapien
taaagcatgccctatttagcaacat

SEQ ID NO: 4032593 - DNA, 25 bp, Homo sapien
gaattgaaatcagaacaagaacaga

SEQ ID NO: 4032594 - DNA, 25 bp, Homo sapien
gaggcctggaatctgcccttaagca

SEQ ID NO: 4032595 - DNA, 25 bp, Homo sapien
cgacctattactctatcttggctaa

SEQ ID NO: 4032596 - DNA, 25 bp, Homo sapien
tgacttagtgaattaaccaggcttc

SEQ ID NO: 4032597 - DNA, 25 bp, Homo sapien
tattagtagccaattggtaagcagg

SEQ ID NO: 4032598 - DNA, 25 bp, Homo sapien
aaattttgcatcaaaggccaattat

SEQ ID NO: 4032599 - DNA, 25 bp, Homo sapien
aaatgctatgcataaattttgcatc

SEQ ID NO: 4032600 - DNA, 25 bp, Homo sapien
attttgcatcaaaggccaattatca

SEQ ID NO: 4032601 - DNA, 25 bp, Homo sapien
atgcataaattttgcatcaaaggcc

SEQ ID NO: 4032602 - DNA, 25 bp, Homo sapien
tccatagaagcctgtggaatgtact

SEQ ID NO: 4032603 - DNA, 25 bp, Homo sapien
taatttccatagaagcctgtggaat

SEQ ID NO: 4032604 - DNA, 25 bp, Homo sapien
tcaacttaatttccatagaagcctg

SEQ ID NO: 4032605 - DNA, 25 bp, Homo sapien
catagaagcctgtggaatgtacttc

SEQ ID NO: 4032606 - DNA, 25 bp, Homo sapien
caaagaaacatgaacgacacggttc

SEQ ID NO: 4032607 - DNA, 25 bp, Homo sapien
gacacggttcttatgagctcatcag

SEQ ID NO: 4032608 - DNA, 25 bp, Homo sapien
cacacaattagtcaacacagaaggc

SEQ ID NO: 4032609 - DNA, 25 bp, Homo sapien
taagagtggaccataaggacaggac

SEQ ID NO: 4032610 - DNA, 25 bp, Homo sapien
cagaaaaatgcgtcccattgacgtc

SEQ ID NO: 4032611 - DNA, 25 bp, Homo sapien
tacaacattggctctgaataacaca

SEQ ID NO: 4032612 - DNA, 25 bp, Homo sapien
gaacacccagcagatacaggttgta

SEQ ID NO: 4032613 - DNA, 25 bp, Homo sapien
gctgttttgacgactgcatagctca

SEQ ID NO: 4032614 - DNA, 25 bp, Homo sapien
cagtgattcttagggcagcatgtgc

SEQ ID NO: 4032615 - DNA, 25 bp, Homo sapien
aatacaggatggaaatcagactcac

SEQ ID NO: 4032616 - DNA, 25 bp, Homo sapien
cagactcactgtaattgggatgaaa

SEQ ID NO: 4032617 - DNA, 25 bp, Homo sapien
taccaggcttaatatgagagaacca

SEQ ID NO: 4032618 - DNA, 25 bp, Homo sapien
cagaaaagaaatgtgccaaaactac

SEQ ID NO: 4032619 - DNA, 25 bp, Homo sapien
tcagaaaagaaatgtgccaaaacta

SEQ ID NO: 4032620 - DNA, 25 bp, Homo sapien
gctcagaagggtcagttcttgcaca

SEQ ID NO: 4032621 - DNA, 25 bp, Homo sapien
tatctggcctttctgtgtggaggca

SEQ ID NO: 4032622 - DNA, 25 bp, Homo sapien
taccagttgcacactcaatcagctc

SEQ ID NO: 4032623 - DNA, 25 bp, Homo sapien
gatccactctttcagccacatctgg

SEQ ID NO: 4032624 - DNA, 25 bp, Homo sapien
gtcagagaagattgtaggtttcacc

SEQ ID NO: 4032625 - DNA, 25 bp, Homo sapien
gtattatattattcaccatggatat

SEQ ID NO: 4032626 - DNA, 25 bp, Homo sapien
cagagaagattgtaggtttcaccaa

SEQ ID NO: 4032627 - DNA, 25 bp, Homo sapien
gcaggtcagagaagattgtaggttt

SEQ ID NO: 4032628 - DNA, 25 bp, Homo sapien
tgtcactcagggtgcactgactccc

SEQ ID NO: 4032629 - DNA, 25 bp, Homo sapien
cactgactcccagggtagatttcta

SEQ ID NO: 4032630 - DNA, 25 bp, Homo sapien
cccagggtagatttctataccagca

SEQ ID NO: 4032631 - DNA, 25 bp, Homo sapien
ccttgcagtgatggatcccattgtc

SEQ ID NO: 4032632 - DNA, 25 bp, Homo sapien
tgcagcacacagttttccagcgtag

SEQ ID NO: 4032633 - DNA, 25 bp, Homo sapien
tagaaactctgctgatgtccgcact

SEQ ID NO: 4032634 - DNA, 25 bp, Homo sapien
gtgactccggtcgtctcacactgca

SEQ ID NO: 4032635 - DNA, 25 bp, Homo sapien
ttggcgccatataaatccgagttct

SEQ ID NO: 4032636 - DNA, 25 bp, Homo sapien
tctggttaactttctgtagcttgca

SEQ ID NO: 4032637 - DNA, 25 bp, Homo sapien
tagtgtatccaccttcatcgattac

SEQ ID NO: 4032638 - DNA, 25 bp, Homo sapien
cctctctaactatgaaaagtactag

SEQ ID NO: 4032639 - DNA, 25 bp, Homo sapien
tacattcactcataacaagagagtc

SEQ ID NO: 4032640 - DNA, 25 bp, Homo sapien
gattttaatatcagcaccagtgcag

SEQ ID NO: 4032641 - DNA, 25 bp, Homo sapien
gattccctctacagcatcatgctga

SEQ ID NO: 4032642 - DNA, 25 bp, Homo sapien
caaaagtgtcgcctttgcccctctt

SEQ ID NO: 4032643 - DNA, 25 bp, Homo sapien
gcagtccacaaaagtgtcgcctttg

SEQ ID NO: 4032644 - DNA, 25 bp, Homo sapien
caaattgctgaaacactgggtcaac

SEQ ID NO: 4032645 - DNA, 25 bp, Homo sapien
ccttaatgtttcaaggcagctcact

SEQ ID NO: 4032646 - DNA, 25 bp, Homo sapien
cctacaatctggaaagtatgcttct

SEQ ID NO: 4032647 - DNA, 25 bp, Homo sapien
tatatgagcctgtgaacatctcccc

SEQ ID NO: 4032648 - DNA, 25 bp, Homo sapien
tggagaaagtgccatgtaccacata

SEQ ID NO: 4032649 - DNA, 25 bp, Homo sapien
cagcaatggagaaagtgccatgtac

SEQ ID NO: 4032650 - DNA, 25 bp, Homo sapien
aatggagtcagcaatggagaaagtg

SEQ ID NO: 4032651 - DNA, 25 bp, Homo sapien
tagcagacaatggatcactatggaa

SEQ ID NO: 4032652 - DNA, 25 bp, Homo sapien
tggcaaagcctgtccgtaagcaggg

SEQ ID NO: 4032653 - DNA, 25 bp, Homo sapien
ttctgaccgctggaacggacaccct

SEQ ID NO: 4032654 - DNA, 25 bp, Homo sapien
accgcaggagaccagccatcatggt

SEQ ID NO: 4032655 - DNA, 25 bp, Homo sapien
gtggaggagaccacatgagtgatct

SEQ ID NO: 4032656 - DNA, 25 bp, Homo sapien
gatattttcctgctcggaatcagag

SEQ ID NO: 4032657 - DNA, 25 bp, Homo sapien
tgtggtagtcaacaataagtcctga

SEQ ID NO: 4032658 - DNA, 25 bp, Homo sapien
tgtttcaactgttccatctccgaat

SEQ ID NO: 4032659 - DNA, 25 bp, Homo sapien
caaaggattctcaatgagtttcagc

SEQ ID NO: 4032660 - DNA, 25 bp, Homo sapien
aataatcgtattcatcctcctcttc

SEQ ID NO: 4032661 - DNA, 25 bp, Homo sapien
cgaggttcaacacatctgacaaaat

SEQ ID NO: 4032662 - DNA, 25 bp, Homo sapien
aatcttaatcgaggttcaacacatc

SEQ ID NO: 4032663 - DNA, 25 bp, Homo sapien
tctgacaaaataatcgtattcatcc

SEQ ID NO: 4032664 - DNA, 25 bp, Homo sapien
ctgacatgctcaattgcaagggctg

SEQ ID NO: 4032665 - DNA, 25 bp, Homo sapien
ggcaaccgatgctccttcagatcaa

SEQ ID NO: 4032666 - DNA, 25 bp, Homo sapien
ggctgtctggtcaaacactcctgaa

SEQ ID NO: 4032667 - DNA, 25 bp, Homo sapien
tgctcacttgagagtcacagaggta

SEQ ID NO: 4032668 - DNA, 25 bp, Homo sapien
cattagtgtgccagactgcccgcca

SEQ ID NO: 4032669 - DNA, 25 bp, Homo sapien
gcaccttgaacacattagtgtgcca

SEQ ID NO: 4032670 - DNA, 25 bp, Homo sapien
attagtgtgccagactgcccgccat

SEQ ID NO: 4032671 - DNA, 25 bp, Homo sapien
acattagtgtgccagactgcccgcc

SEQ ID NO: 4032672 - DNA, 25 bp, Homo sapien
cacggtagctacaatcactgcatga

SEQ ID NO: 4032673 - DNA, 25 bp, Homo sapien
tgtaaactagaacctggtttatcac

SEQ ID NO: 4032674 - DNA, 25 bp, Homo sapien
atcttgataggctctgaatcgctca

SEQ ID NO: 4032675 - DNA, 25 bp, Homo sapien
gaatcgctcatagaacaaaagttga

SEQ ID NO: 4032676 - DNA, 25 bp, Homo sapien
tttggacacgtcactaccctccgtg

SEQ ID NO: 4032677 - DNA, 25 bp, Homo sapien
tatttctggactccggcccaagttg

SEQ ID NO: 4032678 - DNA, 25 bp, Homo sapien
aagttggcgctcctcactttggaca

SEQ ID NO: 4032679 - DNA, 25 bp, Homo sapien
gcagagaactagaagaccccggttc

SEQ ID NO: 4032680 - DNA, 25 bp, Homo sapien
cgcccgtcagcgacccgtcagccat

SEQ ID NO: 4032681 - DNA, 25 bp, Homo sapien
ctgctccaccgcccagcccatgcgc

SEQ ID NO: 4032682 - DNA, 25 bp, Homo sapien
ccatgcgctccggcgccatggccgc

SEQ ID NO: 4032683 - DNA, 25 bp, Homo sapien
ccgcccgtcagcgacccgtcagcca

SEQ ID NO: 4032684 - DNA, 25 bp, Homo sapien
ttcaaatttccgcggacggcagccc

SEQ ID NO: 4032685 - DNA, 25 bp, Homo sapien
aaatttccgcggacggcagcccagg

SEQ ID NO: 4032686 - DNA, 25 bp, Homo sapien
gcagcccaggcaacgacgtgatgac

SEQ ID NO: 4032687 - DNA, 25 bp, Homo sapien
aggcaacgacgtgatgacgcaggct

SEQ ID NO: 4032688 - DNA, 25 bp, Homo sapien
tattcataaataggtggcatgaaaa

SEQ ID NO: 4032689 - DNA, 25 bp, Homo sapien
ggtttaggaatgtgtacactctggc

SEQ ID NO: 4032690 - DNA, 25 bp, Homo sapien
ttgcgctgactgaagccctgttcac

SEQ ID NO: 4032691 - DNA, 25 bp, Homo sapien
gactgaagccctgttcaccccaagt

SEQ ID NO: 4032692 - DNA, 25 bp, Homo sapien
aggggtccgagggtctctgctggag

SEQ ID NO: 4032693 - DNA, 25 bp, Homo sapien
tgcaggggtccgagggtctctgctg

SEQ ID NO: 4032694 - DNA, 25 bp, Homo sapien
aacgttgagtcccaggtgagcctgc

SEQ ID NO: 4032695 - DNA, 25 bp, Homo sapien
gcaaccccaggtacaggtcttgagt

SEQ ID NO: 4032696 - DNA, 25 bp, Homo sapien
gacaccggcttttgtgcctgagagg

SEQ ID NO: 4032697 - DNA, 25 bp, Homo sapien
taaaagggcaggttgctaagagcca

SEQ ID NO: 4032698 - DNA, 25 bp, Homo sapien
gccccagcagaaaggttgtgaggct

SEQ ID NO: 4032699 - DNA, 25 bp, Homo sapien
ccccagcagaaaggttgtgaggctg

SEQ ID NO: 4032700 - DNA, 25 bp, Homo sapien
ctgggagctagaccacaaaccgacg

SEQ ID NO: 4032701 - DNA, 25 bp, Homo sapien
tgggctgacacagacggactgggat

SEQ ID NO: 4032702 - DNA, 25 bp, Homo sapien
gcatcaagccctgcttgtctcagtc

SEQ ID NO: 4032703 - DNA, 25 bp, Homo sapien
tgcagaaccaggctcagccattcca

SEQ ID NO: 4032704 - DNA, 25 bp, Homo sapien
aaaactcagaggtcctgataaggca

SEQ ID NO: 4032705 - DNA, 25 bp, Homo sapien
gaggtcctgataaggcagtgagcca

SEQ ID NO: 4032706 - DNA, 25 bp, Homo sapien
cgtgaccccatgctgtgctgatgaa

SEQ ID NO: 4032707 - DNA, 25 bp, Homo sapien
tagctgtgggccgtgaccccatgct

SEQ ID NO: 4032708 - DNA, 25 bp, Homo sapien
ggtggcccgccagggtatcctgctt

SEQ ID NO: 4032709 - DNA, 25 bp, Homo sapien
tgcgctcaggcaccaagtctgtggg

SEQ ID NO: 4032710 - DNA, 25 bp, Homo sapien
agcttcacccggctgctgtagttgc

SEQ ID NO: 4032711 - DNA, 25 bp, Homo sapien
ccatgagaggaaacggtcagagcca

SEQ ID NO: 4032712 - DNA, 25 bp, Homo sapien
acaggatgtcatagtgctcagccag

SEQ ID NO: 4032713 - DNA, 25 bp, Homo sapien
tgatgtcgtaggcaaggatggcccc

SEQ ID NO: 4032714 - DNA, 25 bp, Homo sapien
cagacgtctcaatggcacacaggat

SEQ ID NO: 4032715 - DNA, 25 bp, Homo sapien
gatggccccattggcactgcggtag

SEQ ID NO: 4032716 - DNA, 25 bp, Homo sapien
tatgggcttttgatcccctgggaga

SEQ ID NO: 4032717 - DNA, 25 bp, Homo sapien
taagttgttactggatcttcatgtg

SEQ ID NO: 4032718 - DNA, 25 bp, Homo sapien
cttttgatcccctgggagacgaggg

SEQ ID NO: 4032719 - DNA, 25 bp, Homo sapien
agacgagggtccctctataagttgt

SEQ ID NO: 4032720 - DNA, 25 bp, Homo sapien
agaggacagactctccagatctcca

SEQ ID NO: 4032721 - DNA, 25 bp, Homo sapien
caatctgccactctgattggagagt

SEQ ID NO: 4032722 - DNA, 25 bp, Homo sapien
tctgccactctgattggagagtctg

SEQ ID NO: 4032723 - DNA, 25 bp, Homo sapien
agggagaggacagactctccagatc

SEQ ID NO: 4032724 - DNA, 25 bp, Homo sapien
catgtaagattcagaagcgcacctc

SEQ ID NO: 4032725 - DNA, 25 bp, Homo sapien
cagaagaagcattctgccctgaggg

SEQ ID NO: 4032726 - DNA, 25 bp, Homo sapien
gaatccttcaccctctcatcagtgt

SEQ ID NO: 4032727 - DNA, 25 bp, Homo sapien
gaagaatggtacaactggtgcttcc

SEQ ID NO: 4032728 - DNA, 25 bp, Homo sapien
aaatgagcgtccacgtcgcttgacg

SEQ ID NO: 4032729 - DNA, 25 bp, Homo sapien
cagcgagaacgcctgcaatggcagc

SEQ ID NO: 4032730 - DNA, 25 bp, Homo sapien
gcgtctcccgggacaaatgagcgtc

SEQ ID NO: 4032731 - DNA, 25 bp, Homo sapien
gaagaaccgctacagggcagcgaga

SEQ ID NO: 4032732 - DNA, 25 bp, Homo sapien
aagaggccctgagaaagtgcgccta

SEQ ID NO: 4032733 - DNA, 25 bp, Homo sapien
gcgcctagggcagttgagttacaac

SEQ ID NO: 4032734 - DNA, 25 bp, Homo sapien
ggcagttgagttacaacttttcttg

SEQ ID NO: 4032735 - DNA, 25 bp, Homo sapien
tatgttttagggaggcaagaattgc

SEQ ID NO: 4032736 - DNA, 25 bp, Homo sapien
tttgaagacactactgatgcaagcc

SEQ ID NO: 4032737 - DNA, 25 bp, Homo sapien
tctgcacatgggaagataaactcgt

SEQ ID NO: 4032738 - DNA, 25 bp, Homo sapien
ggtacaatatacaatctggctgggc

SEQ ID NO: 4032739 - DNA, 25 bp, Homo sapien
ttccaatgcaacgtctctgggtagg

SEQ ID NO: 4032740 - DNA, 25 bp, Homo sapien
aatatctatttcactacaggcagcc

SEQ ID NO: 4032741 - DNA, 25 bp, Homo sapien
gacactctatggaagggccgtcaag

SEQ ID NO: 4032742 - DNA, 25 bp, Homo sapien
agtcagccccagtcaaagcatcaga

SEQ ID NO: 4032743 - DNA, 25 bp, Homo sapien
ccagcaagggctagtcatcaagtgc

SEQ ID NO: 4032744 - DNA, 25 bp, Homo sapien
tttagggaaaatcttacacatggcc

SEQ ID NO: 4032745 - DNA, 25 bp, Homo sapien
ggatggctgagtccaaatatgcaaa

SEQ ID NO: 4032746 - DNA, 25 bp, Homo sapien
caacatgggttcttaatggatggct

SEQ ID NO: 4032747 - DNA, 25 bp, Homo sapien
gacagacgcttttgggttagtactc

SEQ ID NO: 4032748 - DNA, 25 bp, Homo sapien
ttaaattgcagatcagtcatgctac

SEQ ID NO: 4032749 - DNA, 25 bp, Homo sapien
aattgcagatcagtcatgctacttg

SEQ ID NO: 4032750 - DNA, 25 bp, Homo sapien
taaattgcagatcagtcatgctact

SEQ ID NO: 4032751 - DNA, 25 bp, Homo sapien
attgcagatcagtcatgctacttgg

SEQ ID NO: 4032752 - DNA, 25 bp, Homo sapien
taagaaatgggaaacctacctcagc

SEQ ID NO: 4032753 - DNA, 25 bp, Homo sapien
caatctatggaagggaaacctagcg

SEQ ID NO: 4032754 - DNA, 25 bp, Homo sapien
gcatttctgaaaggcacaatctatg

SEQ ID NO: 4032755 - DNA, 25 bp, Homo sapien
tgtccggaggtgctgggtaaaacac

SEQ ID NO: 4032756 - DNA, 25 bp, Homo sapien
gggaggtcttctcgaatcttttgga

SEQ ID NO: 4032757 - DNA, 25 bp, Homo sapien
gccgcaagcgcaaatgctccagtgt

SEQ ID NO: 4032758 - DNA, 25 bp, Homo sapien
cactggattcaagattcgggaggtc

SEQ ID NO: 4032759 - DNA, 25 bp, Homo sapien
taaattggcccctcggattctggtg

SEQ ID NO: 4032760 - DNA, 25 bp, Homo sapien
tgtacaaattcatgatcaagcacgt

SEQ ID NO: 4032761 - DNA, 25 bp, Homo sapien
tatgtacaaattcatgatcaagcac

SEQ ID NO: 4032762 - DNA, 25 bp, Homo sapien
caaattcatgatcaagcacgtacca

SEQ ID NO: 4032763 - DNA, 25 bp, Homo sapien
aattcatgatcaagcacgtaccaca

SEQ ID NO: 4032764 - DNA, 25 bp, Homo sapien
tcctagtttgaacaattactgacta

SEQ ID NO: 4032765 - DNA, 25 bp, Homo sapien
ggagcttctgttacactcatcaatt

SEQ ID NO: 4032766 - DNA, 25 bp, Homo sapien
aagcaaaattggctcggctcagtgg

SEQ ID NO: 4032767 - DNA, 25 bp, Homo sapien
gaaagatggggatacaattcctagt

SEQ ID NO: 4032768 - DNA, 25 bp, Homo sapien
tgtattgctaaaaggatactgcgtt

SEQ ID NO: 4032769 - DNA, 25 bp, Homo sapien
attgctaaaaggatactgcgtttag

SEQ ID NO: 4032770 - DNA, 25 bp, Homo sapien
tattgctaaaaggatactgcgttta

SEQ ID NO: 4032771 - DNA, 25 bp, Homo sapien
actgtattgctaaaaggatactgcg

SEQ ID NO: 4032772 - DNA, 25 bp, Homo sapien
tgtacatatcaaatctcctaagagt

SEQ ID NO: 4032773 - DNA, 25 bp, Homo sapien
taggaattatcttaaactagaacat

SEQ ID NO: 4032774 - DNA, 25 bp, Homo sapien
tgacaaattagcctattatttgaca

SEQ ID NO: 4032775 - DNA, 25 bp, Homo sapien
aatgaacagtgattaaagtatcaga

SEQ ID NO: 4032776 - DNA, 25 bp, Homo sapien
gggtccatgcactgatttgctattt

SEQ ID NO: 4032777 - DNA, 25 bp, Homo sapien
ccattaccctcttgcctccgtgaag

SEQ ID NO: 4032778 - DNA, 25 bp, Homo sapien
ttttaggcactccattaccctcttg

SEQ ID NO: 4032779 - DNA, 25 bp, Homo sapien
taaaaagctgcacttgtagagaggg

SEQ ID NO: 4032780 - DNA, 25 bp, Homo sapien
gaacacaaggccatgacaactgatc

SEQ ID NO: 4032781 - DNA, 25 bp, Homo sapien
gaaacacaacactaccgtggctctt

SEQ ID NO: 4032782 - DNA, 25 bp, Homo sapien
tgctatcatgcagtcaggaatgacc

SEQ ID NO: 4032783 - DNA, 25 bp, Homo sapien
tcagatttccaagcaccccaaatgt

SEQ ID NO: 4032784 - DNA, 25 bp, Homo sapien
gaagcacttcatcctttcaaaagtg

SEQ ID NO: 4032785 - DNA, 25 bp, Homo sapien
caaaagtgccaatgatcaaggtgat

SEQ ID NO: 4032786 - DNA, 25 bp, Homo sapien
gaggttcgtgattctcttcactgaa

SEQ ID NO: 4032787 - DNA, 25 bp, Homo sapien
ctagctgtgctttggaatcgctgat

SEQ ID NO: 4032788 - DNA, 25 bp, Homo sapien
ctgggacatgaattcatatgcgact

SEQ ID NO: 4032789 - DNA, 25 bp, Homo sapien
tctgctttgatcaaagcactgatag

SEQ ID NO: 4032790 - DNA, 25 bp, Homo sapien
gtcttaagggcaattctgccagctc

SEQ ID NO: 4032791 - DNA, 25 bp, Homo sapien
catatgcgactgtctcatgattttc

SEQ ID NO: 4032792 - DNA, 25 bp, Homo sapien
acatctgttcatataccagttggcc

SEQ ID NO: 4032793 - DNA, 25 bp, Homo sapien
aatgcataactagatgtgggactgc

SEQ ID NO: 4032794 - DNA, 25 bp, Homo sapien
gataacagttattctgacagatgtg

SEQ ID NO: 4032795 - DNA, 25 bp, Homo sapien
caccaataataaacagggttcccat

SEQ ID NO: 4032796 - DNA, 25 bp, Homo sapien
ttccaccagctccaaaatgttttcg

SEQ ID NO: 4032797 - DNA, 25 bp, Homo sapien
tctttatatcgaaaagccagctggt

SEQ ID NO: 4032798 - DNA, 25 bp, Homo sapien
tgcaaataccaaaggtggcagtgtg

SEQ ID NO: 4032799 - DNA, 25 bp, Homo sapien
aagcgaatccgctgatttccaccag

SEQ ID NO: 4032800 - DNA, 25 bp, Homo sapien
tgtgggctctaatcatcattgctaa

SEQ ID NO: 4032801 - DNA, 25 bp, Homo sapien
atgtgggctctaatcatcattgcta

SEQ ID NO: 4032802 - DNA, 25 bp, Homo sapien
gtgggctctaatcatcattgctaac

SEQ ID NO: 4032803 - DNA, 25 bp, Homo sapien
aatgtgggctctaatcatcattgct

SEQ ID NO: 4032804 - DNA, 25 bp, Homo sapien
tgaatgaagcggcccacaaggctct

SEQ ID NO: 4032805 - DNA, 25 bp, Homo sapien
aatgaagcggcccacaaggctctgc

SEQ ID NO: 4032806 - DNA, 25 bp, Homo sapien
tgaagcggcccacaaggctctgctc

SEQ ID NO: 4032807 - DNA, 25 bp, Homo sapien
gatgaatgaagcggcccacaaggct

SEQ ID NO: 4032808 - DNA, 25 bp, Homo sapien
tataatccagaacattactaagcac

SEQ ID NO: 4032809 - DNA, 25 bp, Homo sapien
tcaaaagtctggtgagttcctttga

SEQ ID NO: 4032810 - DNA, 25 bp, Homo sapien
gttgtaagtgtcaactggtattttc

SEQ ID NO: 4032811 - DNA, 25 bp, Homo sapien
aaatattgttgtaagtgtcaactgg

SEQ ID NO: 4032812 - DNA, 25 bp, Homo sapien
tgcaccttaaatatacatagcccct

SEQ ID NO: 4032813 - DNA, 25 bp, Homo sapien
catgtgctgattcgtaggaaaacac

SEQ ID NO: 4032814 - DNA, 25 bp, Homo sapien
gtgctgattcgtaggaaaacaccac

SEQ ID NO: 4032815 - DNA, 25 bp, Homo sapien
ccttaaatatacatagcccctcatt

SEQ ID NO: 4032816 - DNA, 25 bp, Homo sapien
tggcaagattaatcagagagacttg

SEQ ID NO: 4032817 - DNA, 25 bp, Homo sapien
tcatggcaagattaatcagagagac

SEQ ID NO: 4032818 - DNA, 25 bp, Homo sapien
aacatttcatggcaagattaatcag

SEQ ID NO: 4032819 - DNA, 25 bp, Homo sapien
catttcatggcaagattaatcagag

SEQ ID NO: 4032820 - DNA, 25 bp, Homo sapien
caaaaagtttaatatccgctgggat

SEQ ID NO: 4032821 - DNA, 25 bp, Homo sapien
tgtatcactgtagccacctgctgtg

SEQ ID NO: 4032822 - DNA, 25 bp, Homo sapien
ggattccaggtccatcttcacggtg

SEQ ID NO: 4032823 - DNA, 25 bp, Homo sapien
ttcacggtgagcaaataaagctaat

SEQ ID NO: 4032824 - DNA, 25 bp, Homo sapien
tttacattctggtgtaactcagcac

SEQ ID NO: 4032825 - DNA, 25 bp, Homo sapien
ttacattctggtgtaactcagcaca

SEQ ID NO: 4032826 - DNA, 25 bp, Homo sapien
tacattctggtgtaactcagcacag

SEQ ID NO: 4032827 - DNA, 25 bp, Homo sapien
aataatacactccatgagatattct

SEQ ID NO: 4032828 - DNA, 25 bp, Homo sapien
taatacactccatgagatattcttg

SEQ ID NO: 4032829 - DNA, 25 bp, Homo sapien
gaataatacactccatgagatattc

SEQ ID NO: 4032830 - DNA, 25 bp, Homo sapien
tgaataatacactccatgagatatt

SEQ ID NO: 4032831 - DNA, 25 bp, Homo sapien
tgaactactaacttgaaaatcgtat

SEQ ID NO: 4032832 - DNA, 25 bp, Homo sapien
taagctattcctctagtaacgcatt

SEQ ID NO: 4032833 - DNA, 25 bp, Homo sapien
cacacataagggttaaaatctgttt

SEQ ID NO: 4032834 - DNA, 25 bp, Homo sapien
gtaacgcatttgaactactaacttg

SEQ ID NO: 4032835 - DNA, 25 bp, Homo sapien
ttccacatttacaccttccaactga

SEQ ID NO: 4032836 - DNA, 25 bp, Homo sapien
tgtttgtaacgttccacatttacac

SEQ ID NO: 4032837 - DNA, 25 bp, Homo sapien
taacgttccacatttacaccttcca

SEQ ID NO: 4032838 - DNA, 25 bp, Homo sapien
tgtaacgttccacatttacaccttc

SEQ ID NO: 4032839 - DNA, 25 bp, Homo sapien
tttttctctatctcggctatgtccc

SEQ ID NO: 4032840 - DNA, 25 bp, Homo sapien
tctctatctcggctatgtccctgat

SEQ ID NO: 4032841 - DNA, 25 bp, Homo sapien
tatctcggctatgtccctgatgctg

SEQ ID NO: 4032842 - DNA, 25 bp, Homo sapien
tctatctcggctatgtccctgatgc

SEQ ID NO: 4032843 - DNA, 25 bp, Homo sapien
tatttttctacgtctcctaggatgg

SEQ ID NO: 4032844 - DNA, 25 bp, Homo sapien
tcatcctgggccaactggacttgct

SEQ ID NO: 4032845 - DNA, 25 bp, Homo sapien
taattaaatgctcaaaacggacact

SEQ ID NO: 4032846 - DNA, 25 bp, Homo sapien
tcatgtccgtaatccagtgctttgg

SEQ ID NO: 4032847 - DNA, 25 bp, Homo sapien
tacaactccaactgtgatcaaaagg

SEQ ID NO: 4032848 - DNA, 25 bp, Homo sapien
ggcacatttctaccaaatctttcaa

SEQ ID NO: 4032849 - DNA, 25 bp, Homo sapien
catatacaactccaactgtgatcaa

SEQ ID NO: 4032850 - DNA, 25 bp, Homo sapien
tgaagaaggtaatttcgaagaaaca

SEQ ID NO: 4032851 - DNA, 25 bp, Homo sapien
gccttgggataatgtttccagcata

SEQ ID NO: 4032852 - DNA, 25 bp, Homo sapien
tgtcaggtagacctccaagtagtgc

SEQ ID NO: 4032853 - DNA, 25 bp, Homo sapien
aggtagacctccaagtagtgcagtt

SEQ ID NO: 4032854 - DNA, 25 bp, Homo sapien
agccttgggataatgtttccagcat

SEQ ID NO: 4032855 - DNA, 25 bp, Homo sapien
caatggttacctgtcagactgctaa

SEQ ID NO: 4032856 - DNA, 25 bp, Homo sapien
taaagcatgtgtggtcaagcaaagc

SEQ ID NO: 4032857 - DNA, 25 bp, Homo sapien
taaagaaccaactgtgtcatagcct

SEQ ID NO: 4032858 - DNA, 25 bp, Homo sapien
gaaaattgagatgcaccgacaacac

SEQ ID NO: 4032859 - DNA, 25 bp, Homo sapien
gaagtccggagttcaccaagcatat

SEQ ID NO: 4032860 - DNA, 25 bp, Homo sapien
gataacatagaagtccggagttcac

SEQ ID NO: 4032861 - DNA, 25 bp, Homo sapien
tggtgataacatagaagtccggagt

SEQ ID NO: 4032862 - DNA, 25 bp, Homo sapien
catagaagtccggagttcaccaagc

SEQ ID NO: 4032863 - DNA, 25 bp, Homo sapien
ctgcaatcaagagaactggcatact

SEQ ID NO: 4032864 - DNA, 25 bp, Homo sapien
agaactggcatactgattcaggtga

SEQ ID NO: 4032865 - DNA, 25 bp, Homo sapien
tgactatccatgtaagtttgctttc

SEQ ID NO: 4032866 - DNA, 25 bp, Homo sapien
gaagatactatcctgacatggcttt

SEQ ID NO: 4032867 - DNA, 25 bp, Homo sapien
taggaacacacgaactgcaactgtg

SEQ ID NO: 4032868 - DNA, 25 bp, Homo sapien
caaggaggctagtaattctggtcag

SEQ ID NO: 4032869 - DNA, 25 bp, Homo sapien
gactctagaagacactgcacatgct

SEQ ID NO: 4032870 - DNA, 25 bp, Homo sapien
tatacatgtgagtaaacagggctct

SEQ ID NO: 4032871 - DNA, 25 bp, Homo sapien
ggaatgactggaccttcacagcctg

SEQ ID NO: 4032872 - DNA, 25 bp, Homo sapien
gactggaccttcacagcctgtatgg

SEQ ID NO: 4032873 - DNA, 25 bp, Homo sapien
gaccttcacagcctgtatggcttca

SEQ ID NO: 4032874 - DNA, 25 bp, Homo sapien
tatggcttcatccaagagcttttcc

SEQ ID NO: 4032875 - DNA, 25 bp, Homo sapien
cagttataatatgagcacgctatca

SEQ ID NO: 4032876 - DNA, 25 bp, Homo sapien
taaatgaccgtacttcacagctaca

SEQ ID NO: 4032877 - DNA, 25 bp, Homo sapien
gagatgagagtacaccactgttatg

SEQ ID NO: 4032878 - DNA, 25 bp, Homo sapien
gaaaccaaagctcaaaacgtgccta

SEQ ID NO: 4032879 - DNA, 25 bp, Homo sapien
tgaggaagttcaagtttaccggcca

SEQ ID NO: 4032880 - DNA, 25 bp, Homo sapien
tatcaatggcgagacaaaagaggca

SEQ ID NO: 4032881 - DNA, 25 bp, Homo sapien
aaaagaggcaaggtgcgcccaatgc

SEQ ID NO: 4032882 - DNA, 25 bp, Homo sapien
cgggccctaaggagaagtactgctt

SEQ ID NO: 4032883 - DNA, 25 bp, Homo sapien
tcagtctcctttgcgaccgtcagga

SEQ ID NO: 4032884 - DNA, 25 bp, Homo sapien
ggtccccagaactcgctgacaaaca

SEQ ID NO: 4032885 - DNA, 25 bp, Homo sapien
ttgcgaccgtcaggattagaagaca

SEQ ID NO: 4032886 - DNA, 25 bp, Homo sapien
aattcatgtaagcaggtccccagaa

SEQ ID NO: 4032887 - DNA, 25 bp, Homo sapien
gacgctcagacctaggactaccggt

SEQ ID NO: 4032888 - DNA, 25 bp, Homo sapien
gctggtcttaatcccgaacggtctg

SEQ ID NO: 4032889 - DNA, 25 bp, Homo sapien
gaaaggccaaggaatcactgcgacc

SEQ ID NO: 4032890 - DNA, 25 bp, Homo sapien
tagaaacgcaacatctgggcgggtc

SEQ ID NO: 4032891 - DNA, 25 bp, Homo sapien
gcagcacccgccccgcgcgtagcct

SEQ ID NO: 4032892 - DNA, 25 bp, Homo sapien
aagcagcacccgccccgcgcgtagc

SEQ ID NO: 4032893 - DNA, 25 bp, Homo sapien
gcagcaagcagcacccgccccgcgc

SEQ ID NO: 4032894 - DNA, 25 bp, Homo sapien
gcaagcagcacccgccccgcgcgta

SEQ ID NO: 4032895 - DNA, 25 bp, Homo sapien
ttttgctttaagtgaatggcagtcc

SEQ ID NO: 4032896 - DNA, 25 bp, Homo sapien
tagatagataaacggaattggagcc

SEQ ID NO: 4032897 - DNA, 25 bp, Homo sapien
taaatagatagatactccagcctgg

SEQ ID NO: 4032898 - DNA, 25 bp, Homo sapien
tggcagtcccttgtcttattcagaa

SEQ ID NO: 4032899 - DNA, 25 bp, Homo sapien
gctcaaatcagggtcaacacaaggt

SEQ ID NO: 4032900 - DNA, 25 bp, Homo sapien
tacacatcacctagacccaagttat

SEQ ID NO: 4032901 - DNA, 25 bp, Homo sapien
aagtcatctaaccacattgccaata

SEQ ID NO: 4032902 - DNA, 25 bp, Homo sapien
taaagaggacagtataatgaaaccc

SEQ ID NO: 4032903 - DNA, 25 bp, Homo sapien
tgctaaaatccacataggtcacttg

SEQ ID NO: 4032904 - DNA, 25 bp, Homo sapien
tggcctaaacagacccctcaaagga

SEQ ID NO: 4032905 - DNA, 25 bp, Homo sapien
cccattagaaatagttgacccaaca

SEQ ID NO: 4032906 - DNA, 25 bp, Homo sapien
ggtcacttgtgttggcctggcctaa

SEQ ID NO: 4032907 - DNA, 25 bp, Homo sapien
tcttcagctgaccaacttggagcag

SEQ ID NO: 4032908 - DNA, 25 bp, Homo sapien
gcctagacttgctggtattgaaact

SEQ ID NO: 4032909 - DNA, 25 bp, Homo sapien
attgaaactgttagttcccaacaag

SEQ ID NO: 4032910 - DNA, 25 bp, Homo sapien
ctgaccaacttggagcaggcctaga

SEQ ID NO: 4032911 - DNA, 25 bp, Homo sapien
ttccagaggaaacttaacaacttga

SEQ ID NO: 4032912 - DNA, 25 bp, Homo sapien
cagaggaaacttaacaacttgagaa

SEQ ID NO: 4032913 - DNA, 25 bp, Homo sapien
cttccagaggaaacttaacaacttg

SEQ ID NO: 4032914 - DNA, 25 bp, Homo sapien
aggaaacttaacaacttgagaactg

SEQ ID NO: 4032915 - DNA, 25 bp, Homo sapien
ctgttgcatgtctaattaaaatcta

SEQ ID NO: 4032916 - DNA, 25 bp, Homo sapien
agtgaaactgttgcatgtctaatta

SEQ ID NO: 4032917 - DNA, 25 bp, Homo sapien
aaggtagtgaaactgttgcatgtct

SEQ ID NO: 4032918 - DNA, 25 bp, Homo sapien
gaaactgttgcatgtctaattaaaa

SEQ ID NO: 4032919 - DNA, 25 bp, Homo sapien
gaggaaaacatatgtttactattca

SEQ ID NO: 4032920 - DNA, 25 bp, Homo sapien
actaaaatcataaggaggaaaacat

SEQ ID NO: 4032921 - DNA, 25 bp, Homo sapien
agctagagaaaagttactaaaatca

SEQ ID NO: 4032922 - DNA, 25 bp, Homo sapien
cacacccagcttatatactgtattc

SEQ ID NO: 4032923 - DNA, 25 bp, Homo sapien
agtaatttctggacccattggagca

SEQ ID NO: 4032924 - DNA, 25 bp, Homo sapien
tctggacccattggagcagcagagt

SEQ ID NO: 4032925 - DNA, 25 bp, Homo sapien
gacccattggagcagcagagttgaa

SEQ ID NO: 4032926 - DNA, 25 bp, Homo sapien
aatttctggacccattggagcagca

SEQ ID NO: 4032927 - DNA, 25 bp, Homo sapien
cagcagtcaccacatagaaatgttt

SEQ ID NO: 4032928 - DNA, 25 bp, Homo sapien
ggcagcagtcaccacatagaaatgt

SEQ ID NO: 4032929 - DNA, 25 bp, Homo sapien
tggcagcagtcaccacatagaaatg

SEQ ID NO: 4032930 - DNA, 25 bp, Homo sapien
gttggcagcagtcaccacatagaaa

SEQ ID NO: 4032931 - DNA, 25 bp, Homo sapien
ctgtttagaatcaaaatgtaagtaa

SEQ ID NO: 4032932 - DNA, 25 bp, Homo sapien
tttctgtttagaatcaaaatgtaag

SEQ ID NO: 4032933 - DNA, 25 bp, Homo sapien
atctttctgtttagaatcaaaatgt

SEQ ID NO: 4032934 - DNA, 25 bp, Homo sapien
ttctgtttagaatcaaaatgtaagt

SEQ ID NO: 4032935 - DNA, 25 bp, Homo sapien
gttgggatttgagacgagttttgga

SEQ ID NO: 4032936 - DNA, 25 bp, Homo sapien
tattcagccactcgtgtttcaggca

SEQ ID NO: 4032937 - DNA, 25 bp, Homo sapien
gcaaattattcagccactcgtgttt

SEQ ID NO: 4032938 - DNA, 25 bp, Homo sapien
gagttttggatcttgaagctttggc

SEQ ID NO: 4032939 - DNA, 25 bp, Homo sapien
gggcccatgagtgacaagcaatgaa

SEQ ID NO: 4032940 - DNA, 25 bp, Homo sapien
ggcccatgagtgacaagcaatgaaa

SEQ ID NO: 4032941 - DNA, 25 bp, Homo sapien
aagggcccatgagtgacaagcaatg

SEQ ID NO: 4032942 - DNA, 25 bp, Homo sapien
agggcccatgagtgacaagcaatga

SEQ ID NO: 4032943 - DNA, 25 bp, Homo sapien
cctccgagagcccttcaaaggtgtc

SEQ ID NO: 4032944 - DNA, 25 bp, Homo sapien
aaatcccagctacagtttacaatga

SEQ ID NO: 4032945 - DNA, 25 bp, Homo sapien
cagcaaccgggaaacaaagtccttg

SEQ ID NO: 4032946 - DNA, 25 bp, Homo sapien
tctgcatctgtttcccctagaaatg

SEQ ID NO: 4032947 - DNA, 25 bp, Homo sapien
aaactcataattgacgacttctggg

SEQ ID NO: 4032948 - DNA, 25 bp, Homo sapien
tcaggagtgccgaagttcaccttca

SEQ ID NO: 4032949 - DNA, 25 bp, Homo sapien
gcatgtaggtgatgactcccacact

SEQ ID NO: 4032950 - DNA, 25 bp, Homo sapien
caggaactcaggagtgccgaagttc

SEQ ID NO: 4032951 - DNA, 25 bp, Homo sapien
ttgcttctttcagtagtcaaattta

SEQ ID NO: 4032952 - DNA, 25 bp, Homo sapien
ccacattacacctgtgaattactgg

SEQ ID NO: 4032953 - DNA, 25 bp, Homo sapien
acttctggcttttctaagtcagcga

SEQ ID NO: 4032954 - DNA, 25 bp, Homo sapien
tcccatcagccatatggcctggact

SEQ ID NO: 4032955 - DNA, 25 bp, Homo sapien
gaagctgaacagtattcatctgcat

SEQ ID NO: 4032956 - DNA, 25 bp, Homo sapien
ctcccaatagccctatgaaataggt

SEQ ID NO: 4032957 - DNA, 25 bp, Homo sapien
gatggacactaggtggtaactttta

SEQ ID NO: 4032958 - DNA, 25 bp, Homo sapien
taaggctaggaagagagtcaacggt

SEQ ID NO: 4032959 - DNA, 25 bp, Homo sapien
acgatgggcagaagcaacctcaagc

SEQ ID NO: 4032960 - DNA, 25 bp, Homo sapien
aactgtgcccagtctagatcagcga

SEQ ID NO: 4032961 - DNA, 25 bp, Homo sapien
catagttaggaagcaatggagtctg

SEQ ID NO: 4032962 - DNA, 25 bp, Homo sapien
acgtcactgaacgaaggtgggaaga

SEQ ID NO: 4032963 - DNA, 25 bp, Homo sapien
actgagacattcaccccaaagctgt

SEQ ID NO: 4032964 - DNA, 25 bp, Homo sapien
ctcaagtctgtctatggccataagg

SEQ ID NO: 4032965 - DNA, 25 bp, Homo sapien
attactgtcatgttaagcctctggt

SEQ ID NO: 4032966 - DNA, 25 bp, Homo sapien
tagttaaagttgcatccagcatacc

SEQ ID NO: 4032967 - DNA, 25 bp, Homo sapien
cacacatgtgactggacttcacagc

SEQ ID NO: 4032968 - DNA, 25 bp, Homo sapien
cagtattcagcacacatgtgactgg

SEQ ID NO: 4032969 - DNA, 25 bp, Homo sapien
ctctccaggcgcacagtattcagca

SEQ ID NO: 4032970 - DNA, 25 bp, Homo sapien
ggagctctccaggcgcacagtattc

SEQ ID NO: 4032971 - DNA, 25 bp, Homo sapien
aatttgatgtcctgtctgattgacg

SEQ ID NO: 4032972 - DNA, 25 bp, Homo sapien
gatcttaatttgatgtcctgtctga

SEQ ID NO: 4032973 - DNA, 25 bp, Homo sapien
cctgtctgattgacgcacaatatgt

SEQ ID NO: 4032974 - DNA, 25 bp, Homo sapien
agtcaatgatcttaatttgatgtcc

SEQ ID NO: 4032975 - DNA, 25 bp, Homo sapien
tatacaagagcgtgtcatttgcaaa

SEQ ID NO: 4032976 - DNA, 25 bp, Homo sapien
cagattgttcagtcccagtatttag

SEQ ID NO: 4032977 - DNA, 25 bp, Homo sapien
gaaaacattcagtctcctactacaa

SEQ ID NO: 4032978 - DNA, 25 bp, Homo sapien
aattgccctagtgatagcctccagt

SEQ ID NO: 4032979 - DNA, 25 bp, Homo sapien
gactgtctgtggatagagctctcaa

SEQ ID NO: 4032980 - DNA, 25 bp, Homo sapien
ggaagaatgcatcgtaggatctcct

SEQ ID NO: 4032981 - DNA, 25 bp, Homo sapien
tcatgccagcttgctcacagagaag

SEQ ID NO: 4032982 - DNA, 25 bp, Homo sapien
gaggcagcaagagtggcctgtccca

SEQ ID NO: 4032983 - DNA, 25 bp, Homo sapien
cctcacagatctgcctggtgaacag

SEQ ID NO: 4032984 - DNA, 25 bp, Homo sapien
tgtgatccggtcgaagagctcaccc

SEQ ID NO: 4032985 - DNA, 25 bp, Homo sapien
cagctcagtcaggtggtacttctca

SEQ ID NO: 4032986 - DNA, 25 bp, Homo sapien
ggtgcaggtaatgcacaccctcaca

SEQ ID NO: 4032987 - DNA, 25 bp, Homo sapien
ggatcaggttcacgtggctgagctg

SEQ ID NO: 4032988 - DNA, 25 bp, Homo sapien
gctgagctggttcatgatgttgatc

SEQ ID NO: 4032989 - DNA, 25 bp, Homo sapien
tctcgaaggcgtcatagagctggat

SEQ ID NO: 4032990 - DNA, 25 bp, Homo sapien
tgacaagggtgcagctgtgcttgct

SEQ ID NO: 4032991 - DNA, 25 bp, Homo sapien
acttctctgtgcacctgtggacctg

SEQ ID NO: 4032992 - DNA, 25 bp, Homo sapien
ctctgtgcacctgtggacctggcca

SEQ ID NO: 4032993 - DNA, 25 bp, Homo sapien
agtgggaggcctgtggacttctctg

SEQ ID NO: 4032994 - DNA, 25 bp, Homo sapien
gcacacctcgtaacccgcagagatg

SEQ ID NO: 4032995 - DNA, 25 bp, Homo sapien
ctcgtaacccgcagagatggaggtc

SEQ ID NO: 4032996 - DNA, 25 bp, Homo sapien
acttcgtgctggcacacctcgtaac

SEQ ID NO: 4032997 - DNA, 25 bp, Homo sapien
gacttcgtgctggcacacctcgtaa

SEQ ID NO: 4032998 - DNA, 25 bp, Homo sapien
gttggctcgggctagcgtttgttca

SEQ ID NO: 4032999 - DNA, 25 bp, Homo sapien
cgtttgttcagtgctcgccatggga

SEQ ID NO: 4033000 - DNA, 25 bp, Homo sapien
tatgaaccggttgtgcaccaagggc

SEQ ID NO: 4033001 - DNA, 25 bp, Homo sapien
tttgcctgctctccaactaccggga

SEQ ID NO: 4033002 - DNA, 25 bp, Homo sapien
ttactgcttcagctctcaccggagc

SEQ ID NO: 4033003 - DNA, 25 bp, Homo sapien
tccttactgcttcagctctcaccgg

SEQ ID NO: 4033004 - DNA, 25 bp, Homo sapien
cctccttactgcttcagctctcacc

SEQ ID NO: 4033005 - DNA, 25 bp, Homo sapien
cttactgcttcagctctcaccggag

SEQ ID NO: 4033006 - DNA, 25 bp, Homo sapien
ttgtcgtcactcctggccaagcttg

SEQ ID NO: 4033007 - DNA, 25 bp, Homo sapien
caggggtctgttctccgggctcagt

SEQ ID NO: 4033008 - DNA, 25 bp, Homo sapien
cagggccccaacctcgtggtcattg

SEQ ID NO: 4033009 - DNA, 25 bp, Homo sapien
aagcttggtctcgtgccaggctcgg

SEQ ID NO: 4033010 - DNA, 25 bp, Homo sapien
gtggtgagggtgggtccaaggctgc

SEQ ID NO: 4033011 - DNA, 25 bp, Homo sapien
ggtgagggtgggtccaaggctgccc

SEQ ID NO: 4033012 - DNA, 25 bp, Homo sapien
tgtggtgagggtgggtccaaggctg

SEQ ID NO: 4033013 - DNA, 25 bp, Homo sapien
ctgtggtgagggtgggtccaaggct

SEQ ID NO: 4033014 - DNA, 25 bp, Homo sapien
cctaggtgcgtgtgactcactgggt

SEQ ID NO: 4033015 - DNA, 25 bp, Homo sapien
tgggtgggaggtagaaatccttcca

SEQ ID NO: 4033016 - DNA, 25 bp, Homo sapien
ctgtccctaggtgcgtgtgactcac

SEQ ID NO: 4033017 - DNA, 25 bp, Homo sapien
catggttcggtaatgacaggtagga

SEQ ID NO: 4033018 - DNA, 25 bp, Homo sapien
gagtctgcgggttctttactctgct

SEQ ID NO: 4033019 - DNA, 25 bp, Homo sapien
caggtccctccgagagaagcccggg

SEQ ID NO: 4033020 - DNA, 25 bp, Homo sapien
gctacagacatctgcctgccgagag

SEQ ID NO: 4033021 - DNA, 25 bp, Homo sapien
ctaggaaacaccaggtccctccgag

SEQ ID NO: 4033022 - DNA, 25 bp, Homo sapien
tcctgaggttctcgctgggtgtctc

SEQ ID NO: 4033023 - DNA, 25 bp, Homo sapien
tcgtgccttcctctaagggctcagg

SEQ ID NO: 4033024 - DNA, 25 bp, Homo sapien
agaccacattgaccctgccgggtgc

SEQ ID NO: 4033025 - DNA, 25 bp, Homo sapien
gtcaggcctgctggacgatgctcct

SEQ ID NO: 4033026 - DNA, 25 bp, Homo sapien
ctggcccggtgagaccactgcctgg

SEQ ID NO: 4033027 - DNA, 25 bp, Homo sapien
agctcccagccctgacgctctgatg

SEQ ID NO: 4033028 - DNA, 25 bp, Homo sapien
atctccctggcccggtgagaccact

SEQ ID NO: 4033029 - DNA, 25 bp, Homo sapien
tgacgctctgatggggggcagcctc

SEQ ID NO: 4033030 - DNA, 25 bp, Homo sapien
cagactgcaccccactggtgctcag

SEQ ID NO: 4033031 - DNA, 25 bp, Homo sapien
gctgtatcagtgagtgccttacacc

SEQ ID NO: 4033032 - DNA, 25 bp, Homo sapien
agaggccgctgtatcagtgagtgcc

SEQ ID NO: 4033033 - DNA, 25 bp, Homo sapien
gccgctgtatcagtgagtgccttac

SEQ ID NO: 4033034 - DNA, 25 bp, Homo sapien
gtatcagtgagtgccttacacctgg

SEQ ID NO: 4033035 - DNA, 25 bp, Homo sapien
atgatcaccagcgtcatcaatgtgg

SEQ ID NO: 4033036 - DNA, 25 bp, Homo sapien
gcgtcatcaatgtggcccagatccc

SEQ ID NO: 4033037 - DNA, 25 bp, Homo sapien
agatcccctgctcggcagacagctc

SEQ ID NO: 4033038 - DNA, 25 bp, Homo sapien
tcaccagcgtcatcaatgtggccca

SEQ ID NO: 4033039 - DNA, 25 bp, Homo sapien
ttacccactggcagaaagggacttg

SEQ ID NO: 4033040 - DNA, 25 bp, Homo sapien
tcctcttttacccactggcagaaag

SEQ ID NO: 4033041 - DNA, 25 bp, Homo sapien
ctttggcagaccttgttgggctcaa

SEQ ID NO: 4033042 - DNA, 25 bp, Homo sapien
ggacttggacagactgtcctttggc

SEQ ID NO: 4033043 - DNA, 25 bp, Homo sapien
caaactggccactcctgcctgtccc

SEQ ID NO: 4033044 - DNA, 25 bp, Homo sapien
gctaagctcaaggttggggacagga

SEQ ID NO: 4033045 - DNA, 25 bp, Homo sapien
ccactccctctggagctaagctcaa

SEQ ID NO: 4033046 - DNA, 25 bp, Homo sapien
acaaactggccactcctgcctgtcc

SEQ ID NO: 4033047 - DNA, 25 bp, Homo sapien
gaaggggacaccatgcctccagctc

SEQ ID NO: 4033048 - DNA, 25 bp, Homo sapien
aatggcaggcagtgtccggactgga

SEQ ID NO: 4033049 - DNA, 25 bp, Homo sapien
tgtccggactggaaatccacctatg

SEQ ID NO: 4033050 - DNA, 25 bp, Homo sapien
cagagaagtgtggtggtcctccctc

SEQ ID NO: 4033051 - DNA, 25 bp, Homo sapien
gtgctgggccgcatcctgctgcatg

SEQ ID NO: 4033052 - DNA, 25 bp, Homo sapien
gcatgaggaaatccgccacctttga

SEQ ID NO: 4033053 - DNA, 25 bp, Homo sapien
atggccctgtccaccgcagccacca

SEQ ID NO: 4033054 - DNA, 25 bp, Homo sapien
cacctttgatttctggaacgtggcc

SEQ ID NO: 4033055 - DNA, 25 bp, Homo sapien
gtgtcaatgtggggaaccccatcag

SEQ ID NO: 4033056 - DNA, 25 bp, Homo sapien
tgtcaatgtggggaaccccatcagc

SEQ ID NO: 4033057 - DNA, 25 bp, Homo sapien
gtcaatgtggggaaccccatcagcc

SEQ ID NO: 4033058 - DNA, 25 bp, Homo sapien
gctctgcaacttctctgtgacatct

SEQ ID NO: 4033059 - DNA, 25 bp, Homo sapien
gtctcggcacatgctctgcaacttc

SEQ ID NO: 4033060 - DNA, 25 bp, Homo sapien
ggtccaccttctcgttcagcatgtt

SEQ ID NO: 4033061 - DNA, 25 bp, Homo sapien
ggagctggtccaccttctcgttcag

SEQ ID NO: 4033062 - DNA, 25 bp, Homo sapien
ggttgttaagcaggtcttgcccaac

SEQ ID NO: 4033063 - DNA, 25 bp, Homo sapien
gttgttaagcaggtcttgcccaacc

SEQ ID NO: 4033064 - DNA, 25 bp, Homo sapien
catgccccagactctccttggaggt

SEQ ID NO: 4033065 - DNA, 25 bp, Homo sapien
cagactctccttggaggttcctgac

SEQ ID NO: 4033066 - DNA, 25 bp, Homo sapien
gactctccttggaggttcctgacat

SEQ ID NO: 4033067 - DNA, 25 bp, Homo sapien
cccagactctccttggaggttcctg

SEQ ID NO: 4033068 - DNA, 25 bp, Homo sapien
ctgcaaggtcattgtcctccgtagc

SEQ ID NO: 4033069 - DNA, 25 bp, Homo sapien
tcactcaggcggtggtgtctgcaag

SEQ ID NO: 4033070 - DNA, 25 bp, Homo sapien
tcctccgtagctgacagactcctgg

SEQ ID NO: 4033071 - DNA, 25 bp, Homo sapien
agcaccaacctccacgatggcctgg

SEQ ID NO: 4033072 - DNA, 25 bp, Homo sapien
ctgggcagcccacagagaaatccaa

SEQ ID NO: 4033073 - DNA, 25 bp, Homo sapien
tgtcattggtggaatgacccagaac

SEQ ID NO: 4033074 - DNA, 25 bp, Homo sapien
cacagccctgggtgtcattggtgga

SEQ ID NO: 4033075 - DNA, 25 bp, Homo sapien
tctatcccgatagttgcccctgggc

SEQ ID NO: 4033076 - DNA, 25 bp, Homo sapien
caggaaaccctgacaatccgggaag

SEQ ID NO: 4033077 - DNA, 25 bp, Homo sapien
tttggagcacatggatttcctgcgg

SEQ ID NO: 4033078 - DNA, 25 bp, Homo sapien
gatcctctcgcggaaaaagacaggc

SEQ ID NO: 4033079 - DNA, 25 bp, Homo sapien
cttctggtgacctaacagtctcggg

SEQ ID NO: 4033080 - DNA, 25 bp, Homo sapien
gatgcatttgttgcagaaggcccaa

SEQ ID NO: 4033081 - DNA, 25 bp, Homo sapien
gaaagccacgcagagtttaatgcgg

SEQ ID NO: 4033082 - DNA, 25 bp, Homo sapien
gtctgtccaccacacgatgcatttg

SEQ ID NO: 4033083 - DNA, 25 bp, Homo sapien
gagtttaatgcggacaacttcaggg

SEQ ID NO: 4033084 - DNA, 25 bp, Homo sapien
ggtgtaacccgacgcccgctgctgg

SEQ ID NO: 4033085 - DNA, 25 bp, Homo sapien
tgctgggaccgcgcagtgctggagt

SEQ ID NO: 4033086 - DNA, 25 bp, Homo sapien
gcaaatatctgggtgtaacccgacg

SEQ ID NO: 4033087 - DNA, 25 bp, Homo sapien
atatctgggtgtaacccgacgcccg

SEQ ID NO: 4033088 - DNA, 25 bp, Homo sapien
caagatctgtgcaagctgccctctg

SEQ ID NO: 4033089 - DNA, 25 bp, Homo sapien
gcagttaagtggcttgtcaacagtt

SEQ ID NO: 4033090 - DNA, 25 bp, Homo sapien
cttgttttcataagtctccagtgag

SEQ ID NO: 4033091 - DNA, 25 bp, Homo sapien
cagacaaacttaaacctggaggcag

SEQ ID NO: 4033092 - DNA, 25 bp, Homo sapien
ggaaacctaagtggcgtgtgtcagc

SEQ ID NO: 4033093 - DNA, 25 bp, Homo sapien
aaggcgatgacttctcttggagctg

SEQ ID NO: 4033094 - DNA, 25 bp, Homo sapien
gagctgggcgaacaaatgggaacat

SEQ ID NO: 4033095 - DNA, 25 bp, Homo sapien
tgcccaaaacaacccacaatgaagg

SEQ ID NO: 4033096 - DNA, 25 bp, Homo sapien
cccaggccctcagtccaagcagctg

SEQ ID NO: 4033097 - DNA, 25 bp, Homo sapien
ccccaggccctcagtccaagcagct

SEQ ID NO: 4033098 - DNA, 25 bp, Homo sapien
atccccaggccctcagtccaagcag

SEQ ID NO: 4033099 - DNA, 25 bp, Homo sapien
ccatccccaggccctcagtccaagc

SEQ ID NO: 4033100 - DNA, 25 bp, Homo sapien
gagagagagccaactataaatccac

SEQ ID NO: 4033101 - DNA, 25 bp, Homo sapien
gtcatcaggcctcagttaaatgtca

SEQ ID NO: 4033102 - DNA, 25 bp, Homo sapien
gcaggtgctcaatacgtacttcatg

SEQ ID NO: 4033103 - DNA, 25 bp, Homo sapien
ctaaagtaagctccgcaaggacagg

SEQ ID NO: 4033104 - DNA, 25 bp, Homo sapien
tgaaacatcatgctgcatacaatat

SEQ ID NO: 4033105 - DNA, 25 bp, Homo sapien
acatcctacaatgtgaacatacata

SEQ ID NO: 4033106 - DNA, 25 bp, Homo sapien
atctttactttagacatcctacaat

SEQ ID NO: 4033107 - DNA, 25 bp, Homo sapien
agacatcctacaatgtgaacataca

SEQ ID NO: 4033108 - DNA, 25 bp, Homo sapien
gaataaattcaaacacccgggcaca

SEQ ID NO: 4033109 - DNA, 25 bp, Homo sapien
gactctaaaacgcacacaaggctga

SEQ ID NO: 4033110 - DNA, 25 bp, Homo sapien
ttgcatcactggagcctaagaggga

SEQ ID NO: 4033111 - DNA, 25 bp, Homo sapien
tcaaggcaaaaagtcccaaccagtg

SEQ ID NO: 4033112 - DNA, 25 bp, Homo sapien
cacaggctaaacgacaggcgagaaa

SEQ ID NO: 4033113 - DNA, 25 bp, Homo sapien
gatggcccttattgatgcagtcaga

SEQ ID NO: 4033114 - DNA, 25 bp, Homo sapien
gagaaagaaacaatcgatggccctt

SEQ ID NO: 4033115 - DNA, 25 bp, Homo sapien
agctttgctcccgaagtgtggcaca

SEQ ID NO: 4033116 - DNA, 25 bp, Homo sapien
acacgaaagccttttcatcagacag

SEQ ID NO: 4033117 - DNA, 25 bp, Homo sapien
acgaaagccttttcatcagacaggt

SEQ ID NO: 4033118 - DNA, 25 bp, Homo sapien
ccaaggcgactgaaaacacgaaagc

SEQ ID NO: 4033119 - DNA, 25 bp, Homo sapien
aaacacgaaagccttttcatcagac

SEQ ID NO: 4033120 - DNA, 25 bp, Homo sapien
taggatgatccaattaggccacttc

SEQ ID NO: 4033121 - DNA, 25 bp, Homo sapien
taacatggtatcctggccgtcaaca

SEQ ID NO: 4033122 - DNA, 25 bp, Homo sapien
catacgtggagcttgactgtagtca

SEQ ID NO: 4033123 - DNA, 25 bp, Homo sapien
taaacagtcctggtgggctactcat

SEQ ID NO: 4033124 - DNA, 25 bp, Homo sapien
tcatctgactagatagaaaagtcca

SEQ ID NO: 4033125 - DNA, 25 bp, Homo sapien
gattggcaaactaggccgagtgcag

SEQ ID NO: 4033126 - DNA, 25 bp, Homo sapien
cgaagacttacattagactaaccaa

SEQ ID NO: 4033127 - DNA, 25 bp, Homo sapien
tagcactaagaagcatatccaagaa

SEQ ID NO: 4033128 - DNA, 25 bp, Homo sapien
tgcattccctctatttcaactgaaa

SEQ ID NO: 4033129 - DNA, 25 bp, Homo sapien
agctgcattccctctatttcaactg

SEQ ID NO: 4033130 - DNA, 25 bp, Homo sapien
ttctaaaataggagtcctcggcata

SEQ ID NO: 4033131 - DNA, 25 bp, Homo sapien
gtcctcggcataggttttctgcacc

SEQ ID NO: 4033132 - DNA, 25 bp, Homo sapien
tcttcctcgtctgatatgatctgaa

SEQ ID NO: 4033133 - DNA, 25 bp, Homo sapien
tttttggcagatgcacttttaggtc

SEQ ID NO: 4033134 - DNA, 25 bp, Homo sapien
ctgaatggctgttacttcgagacct

SEQ ID NO: 4033135 - DNA, 25 bp, Homo sapien
cctaactctctctgttcgcctcctc

SEQ ID NO: 4033136 - DNA, 25 bp, Homo sapien
gcacccatatgcaatttgtggacct

SEQ ID NO: 4033137 - DNA, 25 bp, Homo sapien
aatgtgaacacaagtcggatattta

SEQ ID NO: 4033138 - DNA, 25 bp, Homo sapien
cttctcaaaagaggtacctgtactt

SEQ ID NO: 4033139 - DNA, 25 bp, Homo sapien
tgcctattaaagtctaacactgaat

SEQ ID NO: 4033140 - DNA, 25 bp, Homo sapien
aggccaggtaaatgacttcgtaact

SEQ ID NO: 4033141 - DNA, 25 bp, Homo sapien
tacatagggtgtgccccaaaaagag

SEQ ID NO: 4033142 - DNA, 25 bp, Homo sapien
ggcagggaactaaggcaatctcaca

SEQ ID NO: 4033143 - DNA, 25 bp, Homo sapien
cactcccacgctgtactttcatttt

SEQ ID NO: 4033144 - DNA, 25 bp, Homo sapien
accacaaggacatgatttacatgca

SEQ ID NO: 4033145 - DNA, 25 bp, Homo sapien
tatgtaaccacaaggacatgattta

SEQ ID NO: 4033146 - DNA, 25 bp, Homo sapien
taaatatgtaaccacaaggacatga

SEQ ID NO: 4033147 - DNA, 25 bp, Homo sapien
ctaataaatatgtaaccacaaggac

SEQ ID NO: 4033148 - DNA, 25 bp, Homo sapien
tcggaggcgggcgtgcggcacactc

SEQ ID NO: 4033149 - DNA, 25 bp, Homo sapien
gggcgtgcggcacactctcgccggg

SEQ ID NO: 4033150 - DNA, 25 bp, Homo sapien
ggggttctcggagctagggcctggc

SEQ ID NO: 4033151 - DNA, 25 bp, Homo sapien
ccggccgcaggaggggttctcggag

SEQ ID NO: 4033152 - DNA, 25 bp, Homo sapien
caaaggcgcgctcctccagtggccg

SEQ ID NO: 4033153 - DNA, 25 bp, Homo sapien
ccgccaggtggacgctggcgggcca

SEQ ID NO: 4033154 - DNA, 25 bp, Homo sapien
caggtggacgctggcgggccacggc

SEQ ID NO: 4033155 - DNA, 25 bp, Homo sapien
ggccgccgccaggtggacgctggcg

SEQ ID NO: 4033156 - DNA, 25 bp, Homo sapien
gcccccctccacagacaacggccgc

SEQ ID NO: 4033157 - DNA, 25 bp, Homo sapien
ccccctccacagacaacggccgcca

SEQ ID NO: 4033158 - DNA, 25 bp, Homo sapien
ccctccacagacaacggccgccaag

SEQ ID NO: 4033159 - DNA, 25 bp, Homo sapien
cctccacagacaacggccgccaagc

SEQ ID NO: 4033160 - DNA, 25 bp, Homo sapien
tcgcactcggggcatgatttggtgg

SEQ ID NO: 4033161 - DNA, 25 bp, Homo sapien
cactttcttggctcgagttgcagac

SEQ ID NO: 4033162 - DNA, 25 bp, Homo sapien
tcactttcttggctcgagttgcaga

SEQ ID NO: 4033163 - DNA, 25 bp, Homo sapien
ctgttggtcgcactcggggcatgat

SEQ ID NO: 4033164 - DNA, 25 bp, Homo sapien
tcacacttcggcagcccggcctccg

SEQ ID NO: 4033165 - DNA, 25 bp, Homo sapien
ctcaaacaagcctctggcgggtgcg

SEQ ID NO: 4033166 - DNA, 25 bp, Homo sapien
gcgggcctcaaacaagcctctggcg

SEQ ID NO: 4033167 - DNA, 25 bp, Homo sapien
ctcccctcacacttcggcagcccgg

SEQ ID NO: 4033168 - DNA, 25 bp, Homo sapien
aatgagcagctttatgacgcccacc

SEQ ID NO: 4033169 - DNA, 25 bp, Homo sapien
acgcccacccgcatctgcaccagca

SEQ ID NO: 4033170 - DNA, 25 bp, Homo sapien
caccgcggccacgtccacaccgtct

SEQ ID NO: 4033171 - DNA, 25 bp, Homo sapien
ctgggcaagcattaggccataggtg

SEQ ID NO: 4033172 - DNA, 25 bp, Homo sapien
cctgttgcacggagatggcccgcag

SEQ ID NO: 4033173 - DNA, 25 bp, Homo sapien
gaactcgtcgttcctagacttgaag

SEQ ID NO: 4033174 - DNA, 25 bp, Homo sapien
tgaagagtttcaaaccgggagaggc

SEQ ID NO: 4033175 - DNA, 25 bp, Homo sapien
cagtaaatgcctccttcgtttgccc

SEQ ID NO: 4033176 - DNA, 25 bp, Homo sapien
ccttgtgccagatgccgcgggcgtt

SEQ ID NO: 4033177 - DNA, 25 bp, Homo sapien
agtctctagggcgtccatcgcggga

SEQ ID NO: 4033178 - DNA, 25 bp, Homo sapien
cttgtagtgcggtgccggtcctcaa

SEQ ID NO: 4033179 - DNA, 25 bp, Homo sapien
tgctgttgctgttccgcgtcggtcc

SEQ ID NO: 4033180 - DNA, 25 bp, Homo sapien
ctgagtacgggtggcccgggctgtc

SEQ ID NO: 4033181 - DNA, 25 bp, Homo sapien
gagtacgggtggcccgggctgtcca

SEQ ID NO: 4033182 - DNA, 25 bp, Homo sapien
tgagtacgggtggcccgggctgtcc

SEQ ID NO: 4033183 - DNA, 25 bp, Homo sapien
tggatggcgcctccagcgcgaagcc

SEQ ID NO: 4033184 - DNA, 25 bp, Homo sapien
ctggatggcgcctccagcgcgaagc

SEQ ID NO: 4033185 - DNA, 25 bp, Homo sapien
ggatggcgcctccagcgcgaagcca

SEQ ID NO: 4033186 - DNA, 25 bp, Homo sapien
gatggcgcctccagcgcgaagccac

SEQ ID NO: 4033187 - DNA, 25 bp, Homo sapien
tcgggaaactcgtcctgcgccggga

SEQ ID NO: 4033188 - DNA, 25 bp, Homo sapien
actgggtcttggtggccgctcaggt

SEQ ID NO: 4033189 - DNA, 25 bp, Homo sapien
tcaggtcgggaaactcgtcctgcgc

SEQ ID NO: 4033190 - DNA, 25 bp, Homo sapien
ggaggcgagcttcagcgccccgcgg

SEQ ID NO: 4033191 - DNA, 25 bp, Homo sapien
agaagggcatgtgcgggcgctcggt

SEQ ID NO: 4033192 - DNA, 25 bp, Homo sapien
tgtcggagaagggcatgtgcgggcg

SEQ ID NO: 4033193 - DNA, 25 bp, Homo sapien
gaagggcatgtgcgggcgctcggtg

SEQ ID NO: 4033194 - DNA, 25 bp, Homo sapien
cggagaagggcatgtgcgggcgctc

SEQ ID NO: 4033195 - DNA, 25 bp, Homo sapien
tgagaaggatctgtgtaggtcatct

SEQ ID NO: 4033196 - DNA, 25 bp, Homo sapien
gaaaaatgagaaggatctgtgtagg

SEQ ID NO: 4033197 - DNA, 25 bp, Homo sapien
aaatgagaaggatctgtgtaggtca

SEQ ID NO: 4033198 - DNA, 25 bp, Homo sapien
agaaggatctgtgtaggtcatctgt

SEQ ID NO: 4033199 - DNA, 25 bp, Homo sapien
accaattcatcgatgcccacgatga

SEQ ID NO: 4033200 - DNA, 25 bp, Homo sapien
gacaaaccaattcatcgatgcccac

SEQ ID NO: 4033201 - DNA, 25 bp, Homo sapien
aaaccaattcatcgatgcccacgat

SEQ ID NO: 4033202 - DNA, 25 bp, Homo sapien
caaaccaattcatcgatgcccacga

SEQ ID NO: 4033203 - DNA, 25 bp, Homo sapien
tgtgtgtctgccctactctcgtgga

SEQ ID NO: 4033204 - DNA, 25 bp, Homo sapien
tggagtccatgaacccgcaggtgaa

SEQ ID NO: 4033205 - DNA, 25 bp, Homo sapien
tcagtgaggccttgcaatacggttc

SEQ ID NO: 4033206 - DNA, 25 bp, Homo sapien
tcgtcaattgttgagcgggccgtgc

SEQ ID NO: 4033207 - DNA, 25 bp, Homo sapien
tagacttccctgtgtggtggcagtc

SEQ ID NO: 4033208 - DNA, 25 bp, Homo sapien
gaatgggttgcaagaaaatgaccct

SEQ ID NO: 4033209 - DNA, 25 bp, Homo sapien
agtgtccctggctagtcatttagac

SEQ ID NO: 4033210 - DNA, 25 bp, Homo sapien
taatgtgaaaatcagcccagatttt

SEQ ID NO: 4033211 - DNA, 25 bp, Homo sapien
tagagtcttcctaggatatgagccc

SEQ ID NO: 4033212 - DNA, 25 bp, Homo sapien
ccttcgccctgaggaaaactgctgt

SEQ ID NO: 4033213 - DNA, 25 bp, Homo sapien
gacagattcccgtggcttgctcagc

SEQ ID NO: 4033214 - DNA, 25 bp, Homo sapien
tgtctgcatcctgacgtggcaccag

SEQ ID NO: 4033215 - DNA, 25 bp, Homo sapien
tgccggaccagcgaacagtgtgtgc

SEQ ID NO: 4033216 - DNA, 25 bp, Homo sapien
agaacctgcaaatgcatgccggacc

SEQ ID NO: 4033217 - DNA, 25 bp, Homo sapien
gaaacgtggcattcacgctcatggg

SEQ ID NO: 4033218 - DNA, 25 bp, Homo sapien
tgcacagaagaaacgggtaacagcc

SEQ ID NO: 4033219 - DNA, 25 bp, Homo sapien
agcagccttgcctgttagggcccag

SEQ ID NO: 4033220 - DNA, 25 bp, Homo sapien
catccgtgaagatgtggctgcctac

SEQ ID NO: 4033221 - DNA, 25 bp, Homo sapien
tgaccacgggagctagtgacggcat

SEQ ID NO: 4033222 - DNA, 25 bp, Homo sapien
tttacccacatgaagagcagccttg

SEQ ID NO: 4033223 - DNA, 25 bp, Homo sapien
gctggcaccagtacagggccttaga

SEQ ID NO: 4033224 - DNA, 25 bp, Homo sapien
agtgcacagcaagggtcggagttac

SEQ ID NO: 4033225 - DNA, 25 bp, Homo sapien
agtagacaccgacctgagggacaca

SEQ ID NO: 4033226 - DNA, 25 bp, Homo sapien
ttgtgctaagaacaacagggagcca

SEQ ID NO: 4033227 - DNA, 25 bp, Homo sapien
actggtagaggtttcagtcctgggt

SEQ ID NO: 4033228 - DNA, 25 bp, Homo sapien
caaagcctttcttacacgttaagct

SEQ ID NO: 4033229 - DNA, 25 bp, Homo sapien
cacgttaagctcttattggagccca

SEQ ID NO: 4033230 - DNA, 25 bp, Homo sapien
tcttacacgttaagctcttattgga

SEQ ID NO: 4033231 - DNA, 25 bp, Homo sapien
ctgtaaggctcttgtttgttgagtg

SEQ ID NO: 4033232 - DNA, 25 bp, Homo sapien
ctccagacatgttctactgcatgaa

SEQ ID NO: 4033233 - DNA, 25 bp, Homo sapien
aggagactggcatctgtgtcgtgcc

SEQ ID NO: 4033234 - DNA, 25 bp, Homo sapien
cagagggaaggcacttaccacttca

SEQ ID NO: 4033235 - DNA, 25 bp, Homo sapien
catctgtgtcgtgcccggcagtggc

SEQ ID NO: 4033236 - DNA, 25 bp, Homo sapien
aagcccttagcggtgtgaagcatcc

SEQ ID NO: 4033237 - DNA, 25 bp, Homo sapien
agaggccgctggtcacttcgtcatc

SEQ ID NO: 4033238 - DNA, 25 bp, Homo sapien
gaagcatccggtcctttgaacagaa

SEQ ID NO: 4033239 - DNA, 25 bp, Homo sapien
gaaatgtgtgacttaaccgtggtga

SEQ ID NO: 4033240 - DNA, 25 bp, Homo sapien
ccataacattgaagaggagacgctg

SEQ ID NO: 4033241 - DNA, 25 bp, Homo sapien
taaatgcagtctgtctcgtccaact

SEQ ID NO: 4033242 - DNA, 25 bp, Homo sapien
tcccaagggaggatcctgattggct

SEQ ID NO: 4033243 - DNA, 25 bp, Homo sapien
gctcgcctctgatccatgagaataa

SEQ ID NO: 4033244 - DNA, 25 bp, Homo sapien
cataaagagggtacttctctctccc

SEQ ID NO: 4033245 - DNA, 25 bp, Homo sapien
ttacataaagagggtacttctctct

SEQ ID NO: 4033246 - DNA, 25 bp, Homo sapien
tcccacccttgtatttaggatcatt

SEQ ID NO: 4033247 - DNA, 25 bp, Homo sapien
tgtatttaggatcattgcaggccat

SEQ ID NO: 4033248 - DNA, 25 bp, Homo sapien
cctcacaggacttgattagtgtcag

SEQ ID NO: 4033249 - DNA, 25 bp, Homo sapien
tatgctgttgaatcttacccaggct

SEQ ID NO: 4033250 - DNA, 25 bp, Homo sapien
gagtggataggtcaataatttaaac

SEQ ID NO: 4033251 - DNA, 25 bp, Homo sapien
cttggatacaaaactactatgctgt

SEQ ID NO: 4033252 - DNA, 25 bp, Homo sapien
tgggagttacagcactcaagacacc

SEQ ID NO: 4033253 - DNA, 25 bp, Homo sapien
caagactataagatgggcataggcc

SEQ ID NO: 4033254 - DNA, 25 bp, Homo sapien
cagaagtcaggctagcccagtgctt

SEQ ID NO: 4033255 - DNA, 25 bp, Homo sapien
ttgaacacgttctatgcagacatgg

SEQ ID NO: 4033256 - DNA, 25 bp, Homo sapien
ttatcgagtttcagaaacctttcac

SEQ ID NO: 4033257 - DNA, 25 bp, Homo sapien
cagaaacctttcacaagatggtaaa

SEQ ID NO: 4033258 - DNA, 25 bp, Homo sapien
acaccaaccgctttttattatcgag

SEQ ID NO: 4033259 - DNA, 25 bp, Homo sapien
ccgctttttattatcgagtttcaga

SEQ ID NO: 4033260 - DNA, 25 bp, Homo sapien
cagctccaaacccattgtgtgcaaa

SEQ ID NO: 4033261 - DNA, 25 bp, Homo sapien
ccaaacccattgtgtgcaaagccca

SEQ ID NO: 4033262 - DNA, 25 bp, Homo sapien
gctccaaacccattgtgtgcaaagc

SEQ ID NO: 4033263 - DNA, 25 bp, Homo sapien
tccaaacccattgtgtgcaaagccc

SEQ ID NO: 4033264 - DNA, 25 bp, Homo sapien
ttctatttgtagcagcttatgcagg

SEQ ID NO: 4033265 - DNA, 25 bp, Homo sapien
tattctatttgtagcagcttatgca

SEQ ID NO: 4033266 - DNA, 25 bp, Homo sapien
ctttattctatttgtagcagcttat

SEQ ID NO: 4033267 - DNA, 25 bp, Homo sapien
ttattctatttgtagcagcttatgc

SEQ ID NO: 4033268 - DNA, 25 bp, Homo sapien
aaaactgataaaaatcaagcacaga

SEQ ID NO: 4033269 - DNA, 25 bp, Homo sapien
caaagcttcaggacaaattgtacaa

SEQ ID NO: 4033270 - DNA, 25 bp, Homo sapien
gcacagataccaggattgaaactta

SEQ ID NO: 4033271 - DNA, 25 bp, Homo sapien
tgtacaaactttacaatgtgggatt

SEQ ID NO: 4033272 - DNA, 25 bp, Homo sapien
gttatacatagaccaacagatgtcc

SEQ ID NO: 4033273 - DNA, 25 bp, Homo sapien
tatacactctgtagatactatacca

SEQ ID NO: 4033274 - DNA, 25 bp, Homo sapien
ggattgataagacactccagctgga

SEQ ID NO: 4033275 - DNA, 25 bp, Homo sapien
tattctgctatggaacagtcaaaat

SEQ ID NO: 4033276 - DNA, 25 bp, Homo sapien
caattatgttaggaacttccggtct

SEQ ID NO: 4033277 - DNA, 25 bp, Homo sapien
tgagcctcgagtgctatcaaattcc

SEQ ID NO: 4033278 - DNA, 25 bp, Homo sapien
cattataggcttcacgcctctgacc

SEQ ID NO: 4033279 - DNA, 25 bp, Homo sapien
cttcatcagagctatcattataggc

SEQ ID NO: 4033280 - DNA, 25 bp, Homo sapien
tccttttgatacatagaatccagtg

SEQ ID NO: 4033281 - DNA, 25 bp, Homo sapien
ccttttgatacatagaatccagtgt

SEQ ID NO: 4033282 - DNA, 25 bp, Homo sapien
atattttcatcaactttccttttga

SEQ ID NO: 4033283 - DNA, 25 bp, Homo sapien
ttcatcaactttccttttgatacat

SEQ ID NO: 4033284 - DNA, 25 bp, Homo sapien
aacaaacttaccaggcatcgtggct

SEQ ID NO: 4033285 - DNA, 25 bp, Homo sapien
cgaactccaaacttggaagtcaact

SEQ ID NO: 4033286 - DNA, 25 bp, Homo sapien
aacaacaaacttaccaggcatcgtg

SEQ ID NO: 4033287 - DNA, 25 bp, Homo sapien
tggaagtcaactgttgtttaattta

SEQ ID NO: 4033288 - DNA, 25 bp, Homo sapien
gcatcccttcacctcgaactacacg

SEQ ID NO: 4033289 - DNA, 25 bp, Homo sapien
gattacgatactgcggcatcccttc

SEQ ID NO: 4033290 - DNA, 25 bp, Homo sapien
tttcaaagggattacgatactgcgg

SEQ ID NO: 4033291 - DNA, 25 bp, Homo sapien
tcacctcgaactacacgaacacacc

SEQ ID NO: 4033292 - DNA, 25 bp, Homo sapien
tgtcatgtgcaaatcattcccatct

SEQ ID NO: 4033293 - DNA, 25 bp, Homo sapien
aatctgacgtccatcaaggtgctta

SEQ ID NO: 4033294 - DNA, 25 bp, Homo sapien
gggtatttcaccacaatctgacgtc

SEQ ID NO: 4033295 - DNA, 25 bp, Homo sapien
gaactgaaatccacatagagcttca

SEQ ID NO: 4033296 - DNA, 25 bp, Homo sapien
tccctagtgccctaaaccgcattag

SEQ ID NO: 4033297 - DNA, 25 bp, Homo sapien
cagcattatgttccttgacttaatt

SEQ ID NO: 4033298 - DNA, 25 bp, Homo sapien
tgcaaatccaaagtgccactgtccc

SEQ ID NO: 4033299 - DNA, 25 bp, Homo sapien
taaaaattatggaggtacaccctgc

SEQ ID NO: 4033300 - DNA, 25 bp, Homo sapien
agatctaacctatttctcacaagca

SEQ ID NO: 4033301 - DNA, 25 bp, Homo sapien
gatctaacctatttctcacaagcaa

SEQ ID NO: 4033302 - DNA, 25 bp, Homo sapien
cccttaacttcaccagtgttcagtg

SEQ ID NO: 4033303 - DNA, 25 bp, Homo sapien
tgcccttaacttcaccagtgttcag

SEQ ID NO: 4033304 - DNA, 25 bp, Homo sapien
catgcctttgtctacgtggacttca

SEQ ID NO: 4033305 - DNA, 25 bp, Homo sapien
aagaacaatgtctccgggttccact

SEQ ID NO: 4033306 - DNA, 25 bp, Homo sapien
tacagcggtctttttcattaattac

SEQ ID NO: 4033307 - DNA, 25 bp, Homo sapien
cttccccagtgaatgtaattctctg

SEQ ID NO: 4033308 - DNA, 25 bp, Homo sapien
gagccagctgtctgatcatgatgcg

SEQ ID NO: 4033309 - DNA, 25 bp, Homo sapien
gacctcgacaagcactacacttttg

SEQ ID NO: 4033310 - DNA, 25 bp, Homo sapien
cattacaatcagagcacacagactg

SEQ ID NO: 4033311 - DNA, 25 bp, Homo sapien
tgcatctgttgtaccatccctggag

SEQ ID NO: 4033312 - DNA, 25 bp, Homo sapien
aagttgtagtttggttgtcttgcca

SEQ ID NO: 4033313 - DNA, 25 bp, Homo sapien
cactacagagcacattcttgctaag

SEQ ID NO: 4033314 - DNA, 25 bp, Homo sapien
cttgctaagttgtagtttggttgtc

SEQ ID NO: 4033315 - DNA, 25 bp, Homo sapien
ccactgcatgcactacagagcacat

SEQ ID NO: 4033316 - DNA, 25 bp, Homo sapien
agaatcggcttcaatcaaattttgc

SEQ ID NO: 4033317 - DNA, 25 bp, Homo sapien
gaaaagaatcggcttcaatcaaatt

SEQ ID NO: 4033318 - DNA, 25 bp, Homo sapien
aaagaaaagaatcggcttcaatcaa

SEQ ID NO: 4033319 - DNA, 25 bp, Homo sapien
ctggaaagaaaagaatcggcttcaa

SEQ ID NO: 4033320 - DNA, 25 bp, Homo sapien
ttgagtggatgcatcatgtcctctc

SEQ ID NO: 4033321 - DNA, 25 bp, Homo sapien
tataactcacgcttctcaggatttg

SEQ ID NO: 4033322 - DNA, 25 bp, Homo sapien
gaagaccttgctctccgtatctgtc

SEQ ID NO: 4033323 - DNA, 25 bp, Homo sapien
tctactctgattgcccatgaagccg

SEQ ID NO: 4033324 - DNA, 25 bp, Homo sapien
gctcctcagaatggtagtactctta

SEQ ID NO: 4033325 - DNA, 25 bp, Homo sapien
ggctgtgtgggcatagttggatttt

SEQ ID NO: 4033326 - DNA, 25 bp, Homo sapien
tacctttgacttgattctggttcta

SEQ ID NO: 4033327 - DNA, 25 bp, Homo sapien
gattctggttctatttaccacccac

SEQ ID NO: 4033328 - DNA, 25 bp, Homo sapien
tttgtctcctgcatttggattctta

SEQ ID NO: 4033329 - DNA, 25 bp, Homo sapien
caggatgatattccttggctaactt

SEQ ID NO: 4033330 - DNA, 25 bp, Homo sapien
gcatttggattcttatcaggatgat

SEQ ID NO: 4033331 - DNA, 25 bp, Homo sapien
tcaggatgatattccttggctaact

SEQ ID NO: 4033332 - DNA, 25 bp, Homo sapien
taaatcttcattcacggaggctcgt

SEQ ID NO: 4033333 - DNA, 25 bp, Homo sapien
cagactagcatttccggtaaggtaa

SEQ ID NO: 4033334 - DNA, 25 bp, Homo sapien
caaatctggatgctcttagcctggt

SEQ ID NO: 4033335 - DNA, 25 bp, Homo sapien
ggacattagcattacctgcccaaag

SEQ ID NO: 4033336 - DNA, 25 bp, Homo sapien
ccggcgctcgttcaaggagggagga

SEQ ID NO: 4033337 - DNA, 25 bp, Homo sapien
ttatttgctgcatctgcgggcgggc

SEQ ID NO: 4033338 - DNA, 25 bp, Homo sapien
gggatgcgctgagcacctcggtcca

SEQ ID NO: 4033339 - DNA, 25 bp, Homo sapien
ggaagggctcccatcgtgtttgcgc

SEQ ID NO: 4033340 - DNA, 25 bp, Homo sapien
agcttcgtgtcagccacgttagcca

SEQ ID NO: 4033341 - DNA, 25 bp, Homo sapien
cgggacgcccaggatgtcgtacagc

SEQ ID NO: 4033342 - DNA, 25 bp, Homo sapien
caggatgtcgtacagcttcgtgtca

SEQ ID NO: 4033343 - DNA, 25 bp, Homo sapien
ttcagctcgttctcgctggcgccgg

SEQ ID NO: 4033344 - DNA, 25 bp, Homo sapien
cagacagagcggagtcgggcccaca

SEQ ID NO: 4033345 - DNA, 25 bp, Homo sapien
tgacccagcgcacggtgcgccgtga

SEQ ID NO: 4033346 - DNA, 25 bp, Homo sapien
tgcgccgtgacgtcgctgtgcagag

SEQ ID NO: 4033347 - DNA, 25 bp, Homo sapien
ggctgaactttgacccagcgcacgg

SEQ ID NO: 4033348 - DNA, 25 bp, Homo sapien
gagggaattaacaggcctgcgcagc

SEQ ID NO: 4033349 - DNA, 25 bp, Homo sapien
gcgtgtttaacctcgcactggctgc

SEQ ID NO: 4033350 - DNA, 25 bp, Homo sapien
cagcagcttcgttagcttcgaaaga

SEQ ID NO: 4033351 - DNA, 25 bp, Homo sapien
gcctggcgcgcagatgtcgttatta

SEQ ID NO: 4033352 - DNA, 25 bp, Homo sapien
taagttcttgtttgttgatgtgcat

SEQ ID NO: 4033353 - DNA, 25 bp, Homo sapien
tgtgcttccatagaattgtcggcct

SEQ ID NO: 4033354 - DNA, 25 bp, Homo sapien
gcattgctttgtaggcacaccttgt

SEQ ID NO: 4033355 - DNA, 25 bp, Homo sapien
cacaccttgtgcttccatagaattg

SEQ ID NO: 4033356 - DNA, 25 bp, Homo sapien
cagcgacgccgcctccagagcgcac

SEQ ID NO: 4033357 - DNA, 25 bp, Homo sapien
agcgacgccgcctccagagcgcacc

SEQ ID NO: 4033358 - DNA, 25 bp, Homo sapien
tgcgtgcagcgacgccgcctccaga

SEQ ID NO: 4033359 - DNA, 25 bp, Homo sapien
agcctgcgtgcagcgacgccgcctc

SEQ ID NO: 4033360 - DNA, 25 bp, Homo sapien
ggtattgtctaagccccagggcttc

SEQ ID NO: 4033361 - DNA, 25 bp, Homo sapien
ggaaatgtggcattcttccctgccc

SEQ ID NO: 4033362 - DNA, 25 bp, Homo sapien
tgccctggggtattgtctaagcccc

SEQ ID NO: 4033363 - DNA, 25 bp, Homo sapien
ctaaggttgtggaaatgtggcattc

SEQ ID NO: 4033364 - DNA, 25 bp, Homo sapien
ggggtttgtcctctatgttgcctac

SEQ ID NO: 4033365 - DNA, 25 bp, Homo sapien
tctgcctggtcaggtccggtggact

SEQ ID NO: 4033366 - DNA, 25 bp, Homo sapien
agccatccatccacgtctgcctggt

SEQ ID NO: 4033367 - DNA, 25 bp, Homo sapien
cacgtctgcctggtcaggtccggtg

SEQ ID NO: 4033368 - DNA, 25 bp, Homo sapien
tccatccacgtctgcctggtcaggt

SEQ ID NO: 4033369 - DNA, 25 bp, Homo sapien
ctcgggtggcgccttcgctggttta

SEQ ID NO: 4033370 - DNA, 25 bp, Homo sapien
tctggcgggatctcccctggaagaa

SEQ ID NO: 4033371 - DNA, 25 bp, Homo sapien
tcagaagtggccgacagcccacagc

SEQ ID NO: 4033372 - DNA, 25 bp, Homo sapien
gtttatctgcggttcacttgcacct

SEQ ID NO: 4033373 - DNA, 25 bp, Homo sapien
tcggagagagagtgcacggccccaa

SEQ ID NO: 4033374 - DNA, 25 bp, Homo sapien
cattcagactattaactgatggttg

SEQ ID NO: 4033375 - DNA, 25 bp, Homo sapien
tcctctcacgagacccgtgacaaat

SEQ ID NO: 4033376 - DNA, 25 bp, Homo sapien
cgtgacaaatcgctggtcggagaga

SEQ ID NO: 4033377 - DNA, 25 bp, Homo sapien
tgctccacaatccatggagaccctg

SEQ ID NO: 4033378 - DNA, 25 bp, Homo sapien
ctgctccacaatccatggagaccct

SEQ ID NO: 4033379 - DNA, 25 bp, Homo sapien
tctgctccacaatccatggagaccc

SEQ ID NO: 4033380 - DNA, 25 bp, Homo sapien
tcctgcctccgtcgctatcccgagg

SEQ ID NO: 4033381 - DNA, 25 bp, Homo sapien
gaggaccctcacagctaaaccttct

SEQ ID NO: 4033382 - DNA, 25 bp, Homo sapien
tatcccgaggaccctcacagctaaa

SEQ ID NO: 4033383 - DNA, 25 bp, Homo sapien
gtcgctatcccgaggaccctcacag

SEQ ID NO: 4033384 - DNA, 25 bp, Homo sapien
tgatgtcctccatctgataggcaag

SEQ ID NO: 4033385 - DNA, 25 bp, Homo sapien
cctccatctgataggcaagggaact

SEQ ID NO: 4033386 - DNA, 25 bp, Homo sapien
agatctggggaggtgttcccagctg

SEQ ID NO: 4033387 - DNA, 25 bp, Homo sapien
tgtcctccatctgataggcaaggga

SEQ ID NO: 4033388 - DNA, 25 bp, Homo sapien
tcgatctggatgcaggtaagcctgg

SEQ ID NO: 4033389 - DNA, 25 bp, Homo sapien
caatatccctctggcgatggctgga

SEQ ID NO: 4033390 - DNA, 25 bp, Homo sapien
tgtccccttgccaaagctgattggg

SEQ ID NO: 4033391 - DNA, 25 bp, Homo sapien
cctctgtctgggatgcgttaggctg

SEQ ID NO: 4033392 - DNA, 25 bp, Homo sapien
agttgtaacctaggaccttggctgg

SEQ ID NO: 4033393 - DNA, 25 bp, Homo sapien
tggcagggactggagtcttgtcccc

SEQ ID NO: 4033394 - DNA, 25 bp, Homo sapien
agttggttggattcaggtctctgtc

SEQ ID NO: 4033395 - DNA, 25 bp, Homo sapien
gaccagccccggtatcctctgaata

SEQ ID NO: 4033396 - DNA, 25 bp, Homo sapien
acaaggagctggcttctaggatgcg

SEQ ID NO: 4033397 - DNA, 25 bp, Homo sapien
caggtctgtgtgtcgagtcctgggc

SEQ ID NO: 4033398 - DNA, 25 bp, Homo sapien
agtcctgggctgttcgggagaacaa

SEQ ID NO: 4033399 - DNA, 25 bp, Homo sapien
aagggtgtacgtgcaagctcatttc

SEQ ID NO: 4033400 - DNA, 25 bp, Homo sapien
ttctgccctgctagagcagtcccat

SEQ ID NO: 4033401 - DNA, 25 bp, Homo sapien
gcccctggagcatgcactgcactat

SEQ ID NO: 4033402 - DNA, 25 bp, Homo sapien
tcccatgaacgatgaaggaggatga

SEQ ID NO: 4033403 - DNA, 25 bp, Homo sapien
gcctggaactccatgatgggcaggc

SEQ ID NO: 4033404 - DNA, 25 bp, Homo sapien
cccagagcttggtagagacttcaca

SEQ ID NO: 4033405 - DNA, 25 bp, Homo sapien
ctctcctcgacatgtgaccagctga

SEQ ID NO: 4033406 - DNA, 25 bp, Homo sapien
taggagtggcccgcactgtgtgcct

SEQ ID NO: 4033407 - DNA, 25 bp, Homo sapien
cactgtgtgcctctcctcgacatgt

SEQ ID NO: 4033408 - DNA, 25 bp, Homo sapien
gagagatcacccgtgaaaatgaata

SEQ ID NO: 4033409 - DNA, 25 bp, Homo sapien
cgggtagaccagagatctgtatggc

SEQ ID NO: 4033410 - DNA, 25 bp, Homo sapien
gaaaatgaatactgccgggtagacc

SEQ ID NO: 4033411 - DNA, 25 bp, Homo sapien
tactgccgggtagaccagagatctg

SEQ ID NO: 4033412 - DNA, 25 bp, Homo sapien
ctccggaacccgttaggtcaagcat

SEQ ID NO: 4033413 - DNA, 25 bp, Homo sapien
cctgggttcatggtgggcacacgtg

SEQ ID NO: 4033414 - DNA, 25 bp, Homo sapien
ggaggtcggttagggattccagtga

SEQ ID NO: 4033415 - DNA, 25 bp, Homo sapien
ctcccagtgtggtcctgccttcctc

SEQ ID NO: 4033416 - DNA, 25 bp, Homo sapien
cgctcatccgggcttcctttctgtg

SEQ ID NO: 4033417 - DNA, 25 bp, Homo sapien
caggcagatcatttgcttgcaagga

SEQ ID NO: 4033418 - DNA, 25 bp, Homo sapien
aggcagatcatttgcttgcaaggat

SEQ ID NO: 4033419 - DNA, 25 bp, Homo sapien
gaaagccatgccctcgctcatccgg

SEQ ID NO: 4033420 - DNA, 25 bp, Homo sapien
aggatgaggccacctgatttgacca

SEQ ID NO: 4033421 - DNA, 25 bp, Homo sapien
gtcagaaacgttgtggacttgaaga

SEQ ID NO: 4033422 - DNA, 25 bp, Homo sapien
aggaatgagtcagaaacgttgtgga

SEQ ID NO: 4033423 - DNA, 25 bp, Homo sapien
ccacctgatttgaccaggaatgagt

SEQ ID NO: 4033424 - DNA, 25 bp, Homo sapien
tccgcctctcgagctcatgcccgtt

SEQ ID NO: 4033425 - DNA, 25 bp, Homo sapien
ttccgcctctcgagctcatgcccgt

SEQ ID NO: 4033426 - DNA, 25 bp, Homo sapien
gggcttagcagttgtggcagtagca

SEQ ID NO: 4033427 - DNA, 25 bp, Homo sapien
ccgaacgtcaggaagggaatcgtgc

SEQ ID NO: 4033428 - DNA, 25 bp, Homo sapien
ggcacaatgaaagtcccgaacgtca

SEQ ID NO: 4033429 - DNA, 25 bp, Homo sapien
aaggagatgcggatctgcttggcac

SEQ ID NO: 4033430 - DNA, 25 bp, Homo sapien
ggaatcgtgcggcttgtaaagccac

SEQ ID NO: 4033431 - DNA, 25 bp, Homo sapien
agaactgtcattaagagccgcaaag

SEQ ID NO: 4033432 - DNA, 25 bp, Homo sapien
tcagaactgtcattaagagccgcaa

SEQ ID NO: 4033433 - DNA, 25 bp, Homo sapien
cagaactgtcattaagagccgcaaa

SEQ ID NO: 4033434 - DNA, 25 bp, Homo sapien
gaactgtcattaagagccgcaaagg

SEQ ID NO: 4033435 - DNA, 25 bp, Homo sapien
ctttcaggcctgtgttggctgggtc

SEQ ID NO: 4033436 - DNA, 25 bp, Homo sapien
gcatcatgtttaaggtgaacttgga

SEQ ID NO: 4033437 - DNA, 25 bp, Homo sapien
cacacaatccaaagcgtgagacact

SEQ ID NO: 4033438 - DNA, 25 bp, Homo sapien
tccctgggcactgggtcgggtctgg

SEQ ID NO: 4033439 - DNA, 25 bp, Homo sapien
ggatgtggtcacacagagaacaaac

SEQ ID NO: 4033440 - DNA, 25 bp, Homo sapien
ggcccatggccatagccagagagaa

SEQ ID NO: 4033441 - DNA, 25 bp, Homo sapien
gtgacaccaggcaaccatggtttgg

SEQ ID NO: 4033442 - DNA, 25 bp, Homo sapien
catggtttgggccataaactatggg

SEQ ID NO: 4033443 - DNA, 25 bp, Homo sapien
caatttacagagacagaccagtggt

SEQ ID NO: 4033444 - DNA, 25 bp, Homo sapien
tgtgccctgatctgtgcctgatgct

SEQ ID NO: 4033445 - DNA, 25 bp, Homo sapien
taagctgtgttatggctggtgcact

SEQ ID NO: 4033446 - DNA, 25 bp, Homo sapien
gtgcactgtgcaccccgaaagaaca

SEQ ID NO: 4033447 - DNA, 25 bp, Homo sapien
tcttcctgcctagtatcgagcctgt

SEQ ID NO: 4033448 - DNA, 25 bp, Homo sapien
cttttaaaacgtacagctgggctgg

SEQ ID NO: 4033449 - DNA, 25 bp, Homo sapien
tagtaagaattcacggtgccaagga

SEQ ID NO: 4033450 - DNA, 25 bp, Homo sapien
ctcatatggcctggaagttcatctc

SEQ ID NO: 4033451 - DNA, 25 bp, Homo sapien
tctcatcagacattggcagaaccat

SEQ ID NO: 4033452 - DNA, 25 bp, Homo sapien
gacaaagacactgacataagcgctg

SEQ ID NO: 4033453 - DNA, 25 bp, Homo sapien
ggtttcctgcaatagatctgtgggc

SEQ ID NO: 4033454 - DNA, 25 bp, Homo sapien
gggtaccctgcgtgacagttaatac

SEQ ID NO: 4033455 - DNA, 25 bp, Homo sapien
tacaactgggtcttaattggcacag

SEQ ID NO: 4033456 - DNA, 25 bp, Homo sapien
gatacaagaaagcactctgaggcag

SEQ ID NO: 4033457 - DNA, 25 bp, Homo sapien
tcatgtcccagttaagaagcaatct

SEQ ID NO: 4033458 - DNA, 25 bp, Homo sapien
caataagttatagcgtccaggtcca

SEQ ID NO: 4033459 - DNA, 25 bp, Homo sapien
ggcatcaaaatattgacagagctgt

SEQ ID NO: 4033460 - DNA, 25 bp, Homo sapien
actggcagtgcttcctataaatgac

SEQ ID NO: 4033461 - DNA, 25 bp, Homo sapien
cttgttgctaaaacgaagaggcagc

SEQ ID NO: 4033462 - DNA, 25 bp, Homo sapien
caaggtcttcgtagttgtgatggga

SEQ ID NO: 4033463 - DNA, 25 bp, Homo sapien
ctggaaacagtatggtgccctggag

SEQ ID NO: 4033464 - DNA, 25 bp, Homo sapien
tggtagttgtccaattcttccgaca

SEQ ID NO: 4033465 - DNA, 25 bp, Homo sapien
ttagaagtcaatggatatggatgct

SEQ ID NO: 4033466 - DNA, 25 bp, Homo sapien
cagtggtggtcgtggatgcagcggg

SEQ ID NO: 4033467 - DNA, 25 bp, Homo sapien
gaggagcgccgcatcttctggtagt

SEQ ID NO: 4033468 - DNA, 25 bp, Homo sapien
tgttccatgagtcttagtgatttgt

SEQ ID NO: 4033469 - DNA, 25 bp, Homo sapien
gttccatgagtcttagtgatttgtt

SEQ ID NO: 4033470 - DNA, 25 bp, Homo sapien
gagtcttagtgatttgttcaaatac

SEQ ID NO: 4033471 - DNA, 25 bp, Homo sapien
catgagtcttagtgatttgttcaaa

SEQ ID NO: 4033472 - DNA, 25 bp, Homo sapien
tttggacaccattacagactaaaga

SEQ ID NO: 4033473 - DNA, 25 bp, Homo sapien
gcacaattttggacaccattacaga

SEQ ID NO: 4033474 - DNA, 25 bp, Homo sapien
ttttcatcccaagggtatgcacaat

SEQ ID NO: 4033475 - DNA, 25 bp, Homo sapien
gggtatgcacaattttggacaccat

SEQ ID NO: 4033476 - DNA, 25 bp, Homo sapien
gttgctatggcaaaagaaagtgctg

SEQ ID NO: 4033477 - DNA, 25 bp, Homo sapien
gcaaaagaaagtgctgcttgtgcag

SEQ ID NO: 4033478 - DNA, 25 bp, Homo sapien
tatggcaaaagaaagtgctgcttgt

SEQ ID NO: 4033479 - DNA, 25 bp, Homo sapien
tgctatggcaaaagaaagtgctgct

SEQ ID NO: 4033480 - DNA, 25 bp, Homo sapien
tcatagactgcaacgaagtttctct

SEQ ID NO: 4033481 - DNA, 25 bp, Homo sapien
gagcattcgaaacctgctaagccga

SEQ ID NO: 4033482 - DNA, 25 bp, Homo sapien
ctccacaaaggaagtaaagagcatt

SEQ ID NO: 4033483 - DNA, 25 bp, Homo sapien
tgcccacattcgaatcactccaatt

SEQ ID NO: 4033484 - DNA, 25 bp, Homo sapien
tgataatctaggaacctcaaataaa

SEQ ID NO: 4033485 - DNA, 25 bp, Homo sapien
ttgataatctaggaacctcaaataa

SEQ ID NO: 4033486 - DNA, 25 bp, Homo sapien
gataatctaggaacctcaaataaat

SEQ ID NO: 4033487 - DNA, 25 bp, Homo sapien
agacaacatgggacaccgaatgaca

SEQ ID NO: 4033488 - DNA, 25 bp, Homo sapien
gacaacatgggacaccgaatgacag

SEQ ID NO: 4033489 - DNA, 25 bp, Homo sapien
cagacaacatgggacaccgaatgac

SEQ ID NO: 4033490 - DNA, 25 bp, Homo sapien
acagacaacatgggacaccgaatga

SEQ ID NO: 4033491 - DNA, 25 bp, Homo sapien
tattctaatggagaatagtgccatc

SEQ ID NO: 4033492 - DNA, 25 bp, Homo sapien
gtttcagctgctctacatagttccc

SEQ ID NO: 4033493 - DNA, 25 bp, Homo sapien
tcccagcacttagtgatttttctaa

SEQ ID NO: 4033494 - DNA, 25 bp, Homo sapien
taatgattaaatcttctgtggtgaa

SEQ ID NO: 4033495 - DNA, 25 bp, Homo sapien
actgacattttagcactactgggcc

SEQ ID NO: 4033496 - DNA, 25 bp, Homo sapien
tcctttgtcagtaccacagtcttgg

SEQ ID NO: 4033497 - DNA, 25 bp, Homo sapien
cagtcttggttactgaagcttcaca

SEQ ID NO: 4033498 - DNA, 25 bp, Homo sapien
tactgggcctatcaatacattgaca

SEQ ID NO: 4033499 - DNA, 25 bp, Homo sapien
actaagtatggtgtcagctgtaggg

SEQ ID NO: 4033500 - DNA, 25 bp, Homo sapien
aagaattcaggttttcaccactaag

SEQ ID NO: 4033501 - DNA, 25 bp, Homo sapien
taacattgaataggacttagcttgc

SEQ ID NO: 4033502 - DNA, 25 bp, Homo sapien
ggctacaacttctagtataacattg

SEQ ID NO: 4033503 - DNA, 25 bp, Homo sapien
cagagtatcagttatggaaaatccc

SEQ ID NO: 4033504 - DNA, 25 bp, Homo sapien
tgtgtgcgtcaacatccgggcatca

SEQ ID NO: 4033505 - DNA, 25 bp, Homo sapien
ggtgaactcgtacccatggtgggct

SEQ ID NO: 4033506 - DNA, 25 bp, Homo sapien
tcttgtaggatacgtgaaacactca

SEQ ID NO: 4033507 - DNA, 25 bp, Homo sapien
catttctcatccataagcattaccc

SEQ ID NO: 4033508 - DNA, 25 bp, Homo sapien
cagtaacaggttataaaagtcagcc

SEQ ID NO: 4033509 - DNA, 25 bp, Homo sapien
aattaaaaggaagctcccagtatgt

SEQ ID NO: 4033510 - DNA, 25 bp, Homo sapien
tatgtctacccctgtgcagtaacag

SEQ ID NO: 4033511 - DNA, 25 bp, Homo sapien
tattccatcagctcccgagagctcg

SEQ ID NO: 4033512 - DNA, 25 bp, Homo sapien
ctcttgttctacctgactagagcgc

SEQ ID NO: 4033513 - DNA, 25 bp, Homo sapien
caaaaagatcatgcagttgtcttac

SEQ ID NO: 4033514 - DNA, 25 bp, Homo sapien
gcaaaaagatcatgcagttgtctta

SEQ ID NO: 4033515 - DNA, 25 bp, Homo sapien
aagatcatgcagttgtcttactgtt

SEQ ID NO: 4033516 - DNA, 25 bp, Homo sapien
aaaagatcatgcagttgtcttactg

SEQ ID NO: 4033517 - DNA, 25 bp, Homo sapien
tctgcattagggatatgtacacgcc

SEQ ID NO: 4033518 - DNA, 25 bp, Homo sapien
tgtaagcttggtgaagacaggaaca

SEQ ID NO: 4033519 - DNA, 25 bp, Homo sapien
tactggacagggctttacagttctc

SEQ ID NO: 4033520 - DNA, 25 bp, Homo sapien
gaacaataacttgcacatctgtttc

SEQ ID NO: 4033521 - DNA, 25 bp, Homo sapien
agtagggtgcacttatatatgtatc

SEQ ID NO: 4033522 - DNA, 25 bp, Homo sapien
cattggattccccataacctgtgag

SEQ ID NO: 4033523 - DNA, 25 bp, Homo sapien
gatcttgaaaagagtagaaagagct

SEQ ID NO: 4033524 - DNA, 25 bp, Homo sapien
caaaagatgccattaggttaaggat

SEQ ID NO: 4033525 - DNA, 25 bp, Homo sapien
cacagtaacgatctataagaggaga

SEQ ID NO: 4033526 - DNA, 25 bp, Homo sapien
caactctattctttgacgtggagca

SEQ ID NO: 4033527 - DNA, 25 bp, Homo sapien
taatgttcatcaaaggtcaactcta

SEQ ID NO: 4033528 - DNA, 25 bp, Homo sapien
gagggcttttcacgccacagtaacg

SEQ ID NO: 4033529 - DNA, 25 bp, Homo sapien
cactgggttgcaggaatatgcttga

SEQ ID NO: 4033530 - DNA, 25 bp, Homo sapien
ccattgctggttcgaacccaaatgc

SEQ ID NO: 4033531 - DNA, 25 bp, Homo sapien
aaatgacctccattgctggttcgaa

SEQ ID NO: 4033532 - DNA, 25 bp, Homo sapien
ccaaatgccacactgggttgcagga

SEQ ID NO: 4033533 - DNA, 25 bp, Homo sapien
cactaccagtactgttattaacaac

SEQ ID NO: 4033534 - DNA, 25 bp, Homo sapien
ttttgggccacggcaatcccttcca

SEQ ID NO: 4033535 - DNA, 25 bp, Homo sapien
ggcaatcccttccactaccagtact

SEQ ID NO: 4033536 - DNA, 25 bp, Homo sapien
tcccttccactaccagtactgttat

SEQ ID NO: 4033537 - DNA, 25 bp, Homo sapien
tgtcccgaactactgcgtgaactgg

SEQ ID NO: 4033538 - DNA, 25 bp, Homo sapien
ggttcaagttttgccttctaccagc

SEQ ID NO: 4033539 - DNA, 25 bp, Homo sapien
gagtttcatgaatctaggctagggt

SEQ ID NO: 4033540 - DNA, 25 bp, Homo sapien
gtatccactgaagagcgggcaccaa

SEQ ID NO: 4033541 - DNA, 25 bp, Homo sapien
tctacaatacaaggtgaaacggagt

SEQ ID NO: 4033542 - DNA, 25 bp, Homo sapien
tgaaacggagtttaacaggagatat

SEQ ID NO: 4033543 - DNA, 25 bp, Homo sapien
gaatcaatgtattgttgaatctaca

SEQ ID NO: 4033544 - DNA, 25 bp, Homo sapien
aaccagcatccacaaggaatcaatg

SEQ ID NO: 4033545 - DNA, 25 bp, Homo sapien
agtccttgagcccaggaaaaggaga

SEQ ID NO: 4033546 - DNA, 25 bp, Homo sapien
tccttgagcccaggaaaaggagaaa

SEQ ID NO: 4033547 - DNA, 25 bp, Homo sapien
gaaagaaacagcttaaataagaaca

SEQ ID NO: 4033548 - DNA, 25 bp, Homo sapien
aggagaaagaaacagcttaaataag

SEQ ID NO: 4033549 - DNA, 25 bp, Homo sapien
gaaaagttgggtgagatctgattgt

SEQ ID NO: 4033550 - DNA, 25 bp, Homo sapien
tttgaatggcatgctaaaaagtgtg

SEQ ID NO: 4033551 - DNA, 25 bp, Homo sapien
ggtgagatctgattgtaacaagttt

SEQ ID NO: 4033552 - DNA, 25 bp, Homo sapien
gctaaaaagtgtggacttctaacta

SEQ ID NO: 4033553 - DNA, 25 bp, Homo sapien
gagttcaattagagtccacatacta

SEQ ID NO: 4033554 - DNA, 25 bp, Homo sapien
catttcctataatgacagcagaaca

SEQ ID NO: 4033555 - DNA, 25 bp, Homo sapien
acagagttcaattagagtccacata

SEQ ID NO: 4033556 - DNA, 25 bp, Homo sapien
atttcctataatgacagcagaacag

SEQ ID NO: 4033557 - DNA, 25 bp, Homo sapien
tttgaggaccgagcagagccgctcc

SEQ ID NO: 4033558 - DNA, 25 bp, Homo sapien
ctttgaggaccgagcagagccgctc

SEQ ID NO: 4033559 - DNA, 25 bp, Homo sapien
ccgagcagagccgctccagggccat

SEQ ID NO: 4033560 - DNA, 25 bp, Homo sapien
ggaccgagcagagccgctccagggc

SEQ ID NO: 4033561 - DNA, 25 bp, Homo sapien
ctcatttaaggagggagcgcgagcg

SEQ ID NO: 4033562 - DNA, 25 bp, Homo sapien
cgcggggcgcccaggctcatttaag

SEQ ID NO: 4033563 - DNA, 25 bp, Homo sapien
gcgcttcgcgaagggctgaggtagc

SEQ ID NO: 4033564 - DNA, 25 bp, Homo sapien
gccccggcgcgggatccactgaagt

SEQ ID NO: 4033565 - DNA, 25 bp, Homo sapien
gggtagtgagggtgcctctcgccgt

SEQ ID NO: 4033566 - DNA, 25 bp, Homo sapien
tgcgcggcggcctcgtccgagaggc

SEQ ID NO: 4033567 - DNA, 25 bp, Homo sapien
gtgagggtgcctctcgccgtggctg

SEQ ID NO: 4033568 - DNA, 25 bp, Homo sapien
ccgccggctgccgttagggctggga

SEQ ID NO: 4033569 - DNA, 25 bp, Homo sapien
aggatatctgggttgtctctagagc

SEQ ID NO: 4033570 - DNA, 25 bp, Homo sapien
cacactcaatgctcagggaatcggg

SEQ ID NO: 4033571 - DNA, 25 bp, Homo sapien
ggctacatcagtgttgcagagcttc

SEQ ID NO: 4033572 - DNA, 25 bp, Homo sapien
ggctttgccatccacggtgacctca

SEQ ID NO: 4033573 - DNA, 25 bp, Homo sapien
tgaagtgcagatactcctttttgtg

SEQ ID NO: 4033574 - DNA, 25 bp, Homo sapien
agtgcagatactcctttttgtgtgt

SEQ ID NO: 4033575 - DNA, 25 bp, Homo sapien
aagtgcagatactcctttttgtgtg

SEQ ID NO: 4033576 - DNA, 25 bp, Homo sapien
gaagtgcagatactcctttttgtgt

SEQ ID NO: 4033577 - DNA, 25 bp, Homo sapien
gaggcaggagcttccttaggtgtca

SEQ ID NO: 4033578 - DNA, 25 bp, Homo sapien
tgctttggtttcagctttgggagag

SEQ ID NO: 4033579 - DNA, 25 bp, Homo sapien
tttggtttcagctttgggagaggca

SEQ ID NO: 4033580 - DNA, 25 bp, Homo sapien
ttttgctttggtttcagctttggga

SEQ ID NO: 4033581 - DNA, 25 bp, Homo sapien
tgtgctaccaagtcagagtacccga

SEQ ID NO: 4033582 - DNA, 25 bp, Homo sapien
taagaagcaagaccaagtcaagtgg

SEQ ID NO: 4033583 - DNA, 25 bp, Homo sapien
gtaactcaagtattagccccactga

SEQ ID NO: 4033584 - DNA, 25 bp, Homo sapien
agtgagacccctgacctgctgtgat

SEQ ID NO: 4033585 - DNA, 25 bp, Homo sapien
tgtacagcactacagaatagagaac

SEQ ID NO: 4033586 - DNA, 25 bp, Homo sapien
catcatcatgatgcaaataagatta

SEQ ID NO: 4033587 - DNA, 25 bp, Homo sapien
caaaaatgtacagcactacagaata

SEQ ID NO: 4033588 - DNA, 25 bp, Homo sapien
gagtacatgcaacacattccacaaa

SEQ ID NO: 4033589 - DNA, 25 bp, Homo sapien
aatactttccaataattaccatggg

SEQ ID NO: 4033590 - DNA, 25 bp, Homo sapien
taattaccatgggatacatcattta

SEQ ID NO: 4033591 - DNA, 25 bp, Homo sapien
caagccagaatttgtgtttcaacta

SEQ ID NO: 4033592 - DNA, 25 bp, Homo sapien
cagccattccattatgtaatattaa

SEQ ID NO: 4033593 - DNA, 25 bp, Homo sapien
tagcatcaaaatgaaaccggtgggc

SEQ ID NO: 4033594 - DNA, 25 bp, Homo sapien
aatgaaaccggtgggcttcttgtcg

SEQ ID NO: 4033595 - DNA, 25 bp, Homo sapien
gtgggcttcttgtcgtttttctcta

SEQ ID NO: 4033596 - DNA, 25 bp, Homo sapien
ttcttgtcgtttttctctatcatct

SEQ ID NO: 4033597 - DNA, 25 bp, Homo sapien
tcctaattcaacagtcctagtattt

SEQ ID NO: 4033598 - DNA, 25 bp, Homo sapien
gtctccagcaattagcagataatag

SEQ ID NO: 4033599 - DNA, 25 bp, Homo sapien
gtagaaagatgttatgaaaagactc

SEQ ID NO: 4033600 - DNA, 25 bp, Homo sapien
tctataaggatgaatcaatgattgc

SEQ ID NO: 4033601 - DNA, 25 bp, Homo sapien
gaaatcagtttaatgcaaagaatac

SEQ ID NO: 4033602 - DNA, 25 bp, Homo sapien
gggcattgattggaacccatatata

SEQ ID NO: 4033603 - DNA, 25 bp, Homo sapien
ctgctaatttacagtgatagcctct

SEQ ID NO: 4033604 - DNA, 25 bp, Homo sapien
tacaggcttgcatcatggtgcctgg

SEQ ID NO: 4033605 - DNA, 25 bp, Homo sapien
gatagctgataatcctagccaaaga

SEQ ID NO: 4033606 - DNA, 25 bp, Homo sapien
gagacattagtaacttccagggata

SEQ ID NO: 4033607 - DNA, 25 bp, Homo sapien
tgtccatggctttatcagtacatac

SEQ ID NO: 4033608 - DNA, 25 bp, Homo sapien
aatgccttttgatttccggttgatc

SEQ ID NO: 4033609 - DNA, 25 bp, Homo sapien
tgagagctatagcagtaagcagaac

SEQ ID NO: 4033610 - DNA, 25 bp, Homo sapien
gaaaacacagacaccgatgagagct

SEQ ID NO: 4033611 - DNA, 25 bp, Homo sapien
atgccaattattgccaagatgaaaa

SEQ ID NO: 4033612 - DNA, 25 bp, Homo sapien
caatattacttggtgtaagatacag

SEQ ID NO: 4033613 - DNA, 25 bp, Homo sapien
ctgtagataaaaacagaacaaatta

SEQ ID NO: 4033614 - DNA, 25 bp, Homo sapien
tgtagataaaaacagaacaaattaa

SEQ ID NO: 4033615 - DNA, 25 bp, Homo sapien
taagagactgttctatgtccgtggc

SEQ ID NO: 4033616 - DNA, 25 bp, Homo sapien
tatgctggtaaactggctctgaggt

SEQ ID NO: 4033617 - DNA, 25 bp, Homo sapien
tatatagtttcctactcatggtcca

SEQ ID NO: 4033618 - DNA, 25 bp, Homo sapien
gctactgagctgtatagaagtaccg

SEQ ID NO: 4033619 - DNA, 25 bp, Homo sapien
cttcgagggacattgtgagggtatg

SEQ ID NO: 4033620 - DNA, 25 bp, Homo sapien
tttggaatgattgcagtccactctt

SEQ ID NO: 4033621 - DNA, 25 bp, Homo sapien
tgagggtatggaatgacaattagct

SEQ ID NO: 4033622 - DNA, 25 bp, Homo sapien
gcagtccactcttgttttcgtatag

SEQ ID NO: 4033623 - DNA, 25 bp, Homo sapien
cagatggacggggaataccaacgta

SEQ ID NO: 4033624 - DNA, 25 bp, Homo sapien
tggacggggaataccaacgtagaga

SEQ ID NO: 4033625 - DNA, 25 bp, Homo sapien
ttttctccagatggacggggaatac

SEQ ID NO: 4033626 - DNA, 25 bp, Homo sapien
ggaataccaacgtagagatggtcaa

SEQ ID NO: 4033627 - DNA, 25 bp, Homo sapien
ctaaatgtgcggattggctgagttg

SEQ ID NO: 4033628 - DNA, 25 bp, Homo sapien
tagttggagagctaaatgtgcggat

SEQ ID NO: 4033629 - DNA, 25 bp, Homo sapien
cacgttgtatggtagttggagagct

SEQ ID NO: 4033630 - DNA, 25 bp, Homo sapien
ctaaaccaagcacgttgtatggtag

SEQ ID NO: 4033631 - DNA, 25 bp, Homo sapien
gaactgtttccaaagtacctgcacc

SEQ ID NO: 4033632 - DNA, 25 bp, Homo sapien
cacatcacccgtttaaagtgtacag

SEQ ID NO: 4033633 - DNA, 25 bp, Homo sapien
agtagcactgcactgagccttgacc

SEQ ID NO: 4033634 - DNA, 25 bp, Homo sapien
gaaactccatacacatgagaagcca

SEQ ID NO: 4033635 - DNA, 25 bp, Homo sapien
tttcaaagctgcgtatgttttccag

SEQ ID NO: 4033636 - DNA, 25 bp, Homo sapien
taatcacatgcttaggtagctgaga

SEQ ID NO: 4033637 - DNA, 25 bp, Homo sapien
gcaaagtcttctagatccccaaaaa

SEQ ID NO: 4033638 - DNA, 25 bp, Homo sapien
tggcttcctacttggcatacctggg

SEQ ID NO: 4033639 - DNA, 25 bp, Homo sapien
tagtttgcacccaaattagtttgca

SEQ ID NO: 4033640 - DNA, 25 bp, Homo sapien
taaggagagggttgcatcactttac

SEQ ID NO: 4033641 - DNA, 25 bp, Homo sapien
tgtgcaactatcaattctctcttgt

SEQ ID NO: 4033642 - DNA, 25 bp, Homo sapien
tcattcctagatacagaatactgga

SEQ ID NO: 4033643 - DNA, 25 bp, Homo sapien
tgaggtccttgatccatgagttaat

SEQ ID NO: 4033644 - DNA, 25 bp, Homo sapien
ctccattgaatggttgtggtactcc

SEQ ID NO: 4033645 - DNA, 25 bp, Homo sapien
gcaatcttaccccttacattgaggt

SEQ ID NO: 4033646 - DNA, 25 bp, Homo sapien
gaggaaatgcagatctacttctatg

SEQ ID NO: 4033647 - DNA, 25 bp, Homo sapien
ggtcagcagcaaagtcccattgttc

SEQ ID NO: 4033648 - DNA, 25 bp, Homo sapien
tagtattatcaatccttttaacttc

SEQ ID NO: 4033649 - DNA, 25 bp, Homo sapien
tgcctggcctagattgtctaatttg

SEQ ID NO: 4033650 - DNA, 25 bp, Homo sapien
cactcagtctagctaatagattgtc

SEQ ID NO: 4033651 - DNA, 25 bp, Homo sapien
caagatattgaagccaactttgctg

SEQ ID NO: 4033652 - DNA, 25 bp, Homo sapien
catacacgctgatataacaggtagg

SEQ ID NO: 4033653 - DNA, 25 bp, Homo sapien
aagaggaagacccactagctgaaga

SEQ ID NO: 4033654 - DNA, 25 bp, Homo sapien
gaagtattagattctagcgctagaa

SEQ ID NO: 4033655 - DNA, 25 bp, Homo sapien
gtgttctttgcccattaggtgactg

SEQ ID NO: 4033656 - DNA, 25 bp, Homo sapien
tgtaatttggagaacggcaagctgg

SEQ ID NO: 4033657 - DNA, 25 bp, Homo sapien
tgtcattacatagggactctaacct

SEQ ID NO: 4033658 - DNA, 25 bp, Homo sapien
gtggcatttcctcttactaactagc

SEQ ID NO: 4033659 - DNA, 25 bp, Homo sapien
caagctggtttcgagctctgagcta

SEQ ID NO: 4033660 - DNA, 25 bp, Homo sapien
tattaaaatcttcccggctatacaa

SEQ ID NO: 4033661 - DNA, 25 bp, Homo sapien
gaacccaatgccctgaatattctgg

SEQ ID NO: 4033662 - DNA, 25 bp, Homo sapien
caaaaaaggtgttccatgtatcaaa

SEQ ID NO: 4033663 - DNA, 25 bp, Homo sapien
aggaagtcacgagcgcctcttccag

SEQ ID NO: 4033664 - DNA, 25 bp, Homo sapien
ccgccataccatctaggaagtcacg

SEQ ID NO: 4033665 - DNA, 25 bp, Homo sapien
cataccatctaggaagtcacgagcg

SEQ ID NO: 4033666 - DNA, 25 bp, Homo sapien
taccatctaggaagtcacgagcgcc

SEQ ID NO: 4033667 - DNA, 25 bp, Homo sapien
caaggctatattttgagcccaagag

SEQ ID NO: 4033668 - DNA, 25 bp, Homo sapien
tcagaaattctagagcaactaagtg

SEQ ID NO: 4033669 - DNA, 25 bp, Homo sapien
ccaggctatttaccaagttattcag

SEQ ID NO: 4033670 - DNA, 25 bp, Homo sapien
ggctgcagtcagttataatcacagc

SEQ ID NO: 4033671 - DNA, 25 bp, Homo sapien
gaattcccattcaagattggaaggg

SEQ ID NO: 4033672 - DNA, 25 bp, Homo sapien
ctccactattatattgagccctggg

SEQ ID NO: 4033673 - DNA, 25 bp, Homo sapien
tggtctgagcaacccgaacctgtgg

SEQ ID NO: 4033674 - DNA, 25 bp, Homo sapien
gggaggttgcccacgctttgctgta

SEQ ID NO: 4033675 - DNA, 25 bp, Homo sapien
gctttgccagcgtattagaatgcca

SEQ ID NO: 4033676 - DNA, 25 bp, Homo sapien
gcctagtgccatcttagctgtcatg

SEQ ID NO: 4033677 - DNA, 25 bp, Homo sapien
tattcggccatcaaccacaaaactg

SEQ ID NO: 4033678 - DNA, 25 bp, Homo sapien
catgatgtcatagtgtaaggcatta

SEQ ID NO: 4033679 - DNA, 25 bp, Homo sapien
ctggcagtgctgcacagttcacaat

SEQ ID NO: 4033680 - DNA, 25 bp, Homo sapien
tcagaatcttatgccgccactgatc

SEQ ID NO: 4033681 - DNA, 25 bp, Homo sapien
cctggcagtgctgcacagttcacaa

SEQ ID NO: 4033682 - DNA, 25 bp, Homo sapien
gcactcctatcagaatcttatgccg

SEQ ID NO: 4033683 - DNA, 25 bp, Homo sapien
cagcaggatgcaccatggaaaatac

SEQ ID NO: 4033684 - DNA, 25 bp, Homo sapien
agcagtagctgaatgcctgggtccc

SEQ ID NO: 4033685 - DNA, 25 bp, Homo sapien
tatcaaaagacaggtcccaggacca

SEQ ID NO: 4033686 - DNA, 25 bp, Homo sapien
tgtttacaatgccacatgatgcctg

SEQ ID NO: 4033687 - DNA, 25 bp, Homo sapien
ttaagcctcatatatctttccagct

SEQ ID NO: 4033688 - DNA, 25 bp, Homo sapien
tcttctacaacctggagctgtactt

SEQ ID NO: 4033689 - DNA, 25 bp, Homo sapien
tagtatgaggcactgtatcttctac

SEQ ID NO: 4033690 - DNA, 25 bp, Homo sapien
atatctttccagctatgagactagt

SEQ ID NO: 4033691 - DNA, 25 bp, Homo sapien
tgtttgtcccactaatcatgatttt

SEQ ID NO: 4033692 - DNA, 25 bp, Homo sapien
tcatgaggactatctgtctacaggg

SEQ ID NO: 4033693 - DNA, 25 bp, Homo sapien
tatcagggtaaacctacaaaccaga

SEQ ID NO: 4033694 - DNA, 25 bp, Homo sapien
ctacagggattttgtactgtctttg

SEQ ID NO: 4033695 - DNA, 25 bp, Homo sapien
tatggccaaataagtcgtttatggg

SEQ ID NO: 4033696 - DNA, 25 bp, Homo sapien
taaatgaccaacaactcactagtct

SEQ ID NO: 4033697 - DNA, 25 bp, Homo sapien
cctagattcaaaaccagaggagttt

SEQ ID NO: 4033698 - DNA, 25 bp, Homo sapien
gatgcccattgcagatccctggcta

SEQ ID NO: 4033699 - DNA, 25 bp, Homo sapien
tgcctccaggttcaatgagtctcct

SEQ ID NO: 4033700 - DNA, 25 bp, Homo sapien
ggagttcaatactagttgccaatgt

SEQ ID NO: 4033701 - DNA, 25 bp, Homo sapien
tcccatgaccaagagataattgtgg

SEQ ID NO: 4033702 - DNA, 25 bp, Homo sapien
gccaatgtctagtttgcagtataag

SEQ ID NO: 4033703 - DNA, 25 bp, Homo sapien
gttgtatacatgatataaggtccag

SEQ ID NO: 4033704 - DNA, 25 bp, Homo sapien
ccatttgcatctacagttgtataca

SEQ ID NO: 4033705 - DNA, 25 bp, Homo sapien
cccatttgcatctacagttgtatac

SEQ ID NO: 4033706 - DNA, 25 bp, Homo sapien
tatacatgatataaggtccaggttg

SEQ ID NO: 4033707 - DNA, 25 bp, Homo sapien
gagcaataaatgacacaccagatac

SEQ ID NO: 4033708 - DNA, 25 bp, Homo sapien
atccaaggagttttattatactgat

SEQ ID NO: 4033709 - DNA, 25 bp, Homo sapien
ccagatacactgataaaagccatga

SEQ ID NO: 4033710 - DNA, 25 bp, Homo sapien
ccgggtagctcgggtacaggtgcac

SEQ ID NO: 4033711 - DNA, 25 bp, Homo sapien
ggctcagtgtagactagcttcagtg

SEQ ID NO: 4033712 - DNA, 25 bp, Homo sapien
tcagtgttcaaaactccaagggttc

SEQ ID NO: 4033713 - DNA, 25 bp, Homo sapien
cagcagaagcatgagaaggtaacca

SEQ ID NO: 4033714 - DNA, 25 bp, Homo sapien
tcagagaactaaggtcacaggacaa

SEQ ID NO: 4033715 - DNA, 25 bp, Homo sapien
gacagtcattagaacacagaccact

SEQ ID NO: 4033716 - DNA, 25 bp, Homo sapien
gaggacagtcattagaacacagacc

SEQ ID NO: 4033717 - DNA, 25 bp, Homo sapien
tgttatcttacgaggacagtcatta

SEQ ID NO: 4033718 - DNA, 25 bp, Homo sapien
tcattagaacacagaccactaagaa

SEQ ID NO: 4033719 - DNA, 25 bp, Homo sapien
taaagtgagctctaattttctccct

SEQ ID NO: 4033720 - DNA, 25 bp, Homo sapien
ctgtcaagatgctactattttgtga

SEQ ID NO: 4033721 - DNA, 25 bp, Homo sapien
tcataatcacaagcagaaaccaatt

SEQ ID NO: 4033722 - DNA, 25 bp, Homo sapien
tctccctaagatccattaatatact

SEQ ID NO: 4033723 - DNA, 25 bp, Homo sapien
tatacggctatgcagcaggtgaggc

SEQ ID NO: 4033724 - DNA, 25 bp, Homo sapien
tgttaaggagtgctacagaaggatg

SEQ ID NO: 4033725 - DNA, 25 bp, Homo sapien
ggttttaccactcaaatcctctgtg

SEQ ID NO: 4033726 - DNA, 25 bp, Homo sapien
ctcagactgcgtgggttctgggctc

SEQ ID NO: 4033727 - DNA, 25 bp, Homo sapien
caataaaagatgagagctagtaact

SEQ ID NO: 4033728 - DNA, 25 bp, Homo sapien
aaaagctttcccattaagtatctgc

SEQ ID NO: 4033729 - DNA, 25 bp, Homo sapien
aattctgtaatacgcaaggtccccg

SEQ ID NO: 4033730 - DNA, 25 bp, Homo sapien
caaaggtgaagatactgttacaatt

SEQ ID NO: 4033731 - DNA, 25 bp, Homo sapien
cttgagcatggaaagcagtggagtc

SEQ ID NO: 4033732 - DNA, 25 bp, Homo sapien
ctctgtgcgagggaagaacttgcag

SEQ ID NO: 4033733 - DNA, 25 bp, Homo sapien
gaagaacttgcagacttgagcatgg

SEQ ID NO: 4033734 - DNA, 25 bp, Homo sapien
aagcagtggagtcgcaggccctcat

SEQ ID NO: 4033735 - DNA, 25 bp, Homo sapien
catgtccttgctctttggaatatgt

SEQ ID NO: 4033736 - DNA, 25 bp, Homo sapien
tgtccttgctctttggaatatgtgg

SEQ ID NO: 4033737 - DNA, 25 bp, Homo sapien
ccttgctctttggaatatgtggaga

SEQ ID NO: 4033738 - DNA, 25 bp, Homo sapien
tccttgctctttggaatatgtggag

SEQ ID NO: 4033739 - DNA, 25 bp, Homo sapien
tatcctttacttagcactacaatgt

SEQ ID NO: 4033740 - DNA, 25 bp, Homo sapien
ctttacttagcactacaatgtccaa

SEQ ID NO: 4033741 - DNA, 25 bp, Homo sapien
attttttagtgtatgaatggcaaaa

SEQ ID NO: 4033742 - DNA, 25 bp, Homo sapien
tttttagtgtatgaatggcaaaatc

SEQ ID NO: 4033743 - DNA, 25 bp, Homo sapien
gcattattacaagggacgttctcca

SEQ ID NO: 4033744 - DNA, 25 bp, Homo sapien
gactttaaacattcgacgcgcctct

SEQ ID NO: 4033745 - DNA, 25 bp, Homo sapien
gatttaggtctgtcagctcccagta

SEQ ID NO: 4033746 - DNA, 25 bp, Homo sapien
gtcaaagaaggtggcaaccatggca

SEQ ID NO: 4033747 - DNA, 25 bp, Homo sapien
cctccagatggtaaagaaggtgaca

SEQ ID NO: 4033748 - DNA, 25 bp, Homo sapien
gaaggtgacagagatcaacccctac

SEQ ID NO: 4033749 - DNA, 25 bp, Homo sapien
tatgatctggcccatgaggtaagct

SEQ ID NO: 4033750 - DNA, 25 bp, Homo sapien
taaggaatgcatccctgtaacagct

SEQ ID NO: 4033751 - DNA, 25 bp, Homo sapien
tgcctggtatagcacagtacacatt

SEQ ID NO: 4033752 - DNA, 25 bp, Homo sapien
tgacagcagctgagtattacattta

SEQ ID NO: 4033753 - DNA, 25 bp, Homo sapien
tcttgccggtattagtaacattgct

SEQ ID NO: 4033754 - DNA, 25 bp, Homo sapien
tatcaggcagatggaaaatgacacc

SEQ ID NO: 4033755 - DNA, 25 bp, Homo sapien
gatagagcatattctggattctgaa

SEQ ID NO: 4033756 - DNA, 25 bp, Homo sapien
aatcaacgaagataaagaagactca

SEQ ID NO: 4033757 - DNA, 25 bp, Homo sapien
gacgtttattgaccacaacccagca

SEQ ID NO: 4033758 - DNA, 25 bp, Homo sapien
ccaatttcacctgactgacgtttat

SEQ ID NO: 4033759 - DNA, 25 bp, Homo sapien
caaacgtggcattacaagtcagtgg

SEQ ID NO: 4033760 - DNA, 25 bp, Homo sapien
tgaagtccatagtcagccctttggg

SEQ ID NO: 4033761 - DNA, 25 bp, Homo sapien
aaatatgtacaagggtttgcatccc

SEQ ID NO: 4033762 - DNA, 25 bp, Homo sapien
gactgataattaaggtaaggcacca

SEQ ID NO: 4033763 - DNA, 25 bp, Homo sapien
tggaacgtatggcaggtatgatagt

SEQ ID NO: 4033764 - DNA, 25 bp, Homo sapien
gaacgtatggcaggtatgatagttc

SEQ ID NO: 4033765 - DNA, 25 bp, Homo sapien
gctggaacgtatggcaggtatgata

SEQ ID NO: 4033766 - DNA, 25 bp, Homo sapien
cgtatggcaggtatgatagttctat

SEQ ID NO: 4033767 - DNA, 25 bp, Homo sapien
gcttagaccaaaggccaaggtagga

SEQ ID NO: 4033768 - DNA, 25 bp, Homo sapien
cctcgtgtagtataatgttggcagt

SEQ ID NO: 4033769 - DNA, 25 bp, Homo sapien
cagtgcgagactcttaaaaaaggtg

SEQ ID NO: 4033770 - DNA, 25 bp, Homo sapien
gcttccaacttttcctcgtgtagta

SEQ ID NO: 4033771 - DNA, 25 bp, Homo sapien
tttttgacatgcattgttaggtggt

SEQ ID NO: 4033772 - DNA, 25 bp, Homo sapien
taacttggggtatagtttcttcatg

SEQ ID NO: 4033773 - DNA, 25 bp, Homo sapien
tcatcctgttgttttgtagtctcaa

SEQ ID NO: 4033774 - DNA, 25 bp, Homo sapien
caggtttcggtatgctgttttccta

SEQ ID NO: 4033775 - DNA, 25 bp, Homo sapien
tcccactcattcatagcctgtaagg

SEQ ID NO: 4033776 - DNA, 25 bp, Homo sapien
tgtggcctgctagatctcggactac

SEQ ID NO: 4033777 - DNA, 25 bp, Homo sapien
cagtattctcggtcgtatcatgtaa

SEQ ID NO: 4033778 - DNA, 25 bp, Homo sapien
tctctccaccgacatggaaagtgtt

SEQ ID NO: 4033779 - DNA, 25 bp, Homo sapien
gtcacactgagtttccgtaatatca

SEQ ID NO: 4033780 - DNA, 25 bp, Homo sapien
ctaagtctcgtattgtttttatgag

SEQ ID NO: 4033781 - DNA, 25 bp, Homo sapien
tacactgggatacattattagagat

SEQ ID NO: 4033782 - DNA, 25 bp, Homo sapien
gatatgatatggcattcatgatgcc

SEQ ID NO: 4033783 - DNA, 25 bp, Homo sapien
gttcaattaagtcccatatgtctat

SEQ ID NO: 4033784 - DNA, 25 bp, Homo sapien
gctggtctgttcaccctgttgatta

SEQ ID NO: 4033785 - DNA, 25 bp, Homo sapien
ccttaatcattaatcagatctgtag

SEQ ID NO: 4033786 - DNA, 25 bp, Homo sapien
aaattctgaatataagtccttaatc

SEQ ID NO: 4033787 - DNA, 25 bp, Homo sapien
ttcatatttatgttctatcagttgt

SEQ ID NO: 4033788 - DNA, 25 bp, Homo sapien
cttgagaggttacgtttccaggaat

SEQ ID NO: 4033789 - DNA, 25 bp, Homo sapien
ttcaggtttgatgttagtttgttaa

SEQ ID NO: 4033790 - DNA, 25 bp, Homo sapien
tattagagggagtggtttatcaatt

SEQ ID NO: 4033791 - DNA, 25 bp, Homo sapien
tctcacattgagaagtccactgcta

SEQ ID NO: 4033792 - DNA, 25 bp, Homo sapien
tatttcttggtgaactatgtcttgc

SEQ ID NO: 4033793 - DNA, 25 bp, Homo sapien
gctgggcctcttatatttgaatgtg

SEQ ID NO: 4033794 - DNA, 25 bp, Homo sapien
tctcttataggcaactagacatcag

SEQ ID NO: 4033795 - DNA, 25 bp, Homo sapien
tctctgctttgcttgctctagtctc

SEQ ID NO: 4033796 - DNA, 25 bp, Homo sapien
gatatccatctcgttggtacacttg

SEQ ID NO: 4033797 - DNA, 25 bp, Homo sapien
tctattaccggagaattactgtttc

SEQ ID NO: 4033798 - DNA, 25 bp, Homo sapien
gggatgccataaccctttgctatta

SEQ ID NO: 4033799 - DNA, 25 bp, Homo sapien
tctgggtatgttcagtagcaaagac

SEQ ID NO: 4033800 - DNA, 25 bp, Homo sapien
gaagaagccacttcagaatactgag

SEQ ID NO: 4033801 - DNA, 25 bp, Homo sapien
gaagcgctttcagtgtcccaggtgg

SEQ ID NO: 4033802 - DNA, 25 bp, Homo sapien
gccatgatagcagtagggtttatat

SEQ ID NO: 4033803 - DNA, 25 bp, Homo sapien
caggcccctggtgaaatctgctgag

SEQ ID NO: 4033804 - DNA, 25 bp, Homo sapien
gatctgctacctttactcgcctttg

SEQ ID NO: 4033805 - DNA, 25 bp, Homo sapien
tatcctggccagtaggcagtgcgtg

SEQ ID NO: 4033806 - DNA, 25 bp, Homo sapien
cagaatattcggttaggttagacaa

SEQ ID NO: 4033807 - DNA, 25 bp, Homo sapien
gcatctccaagattttaacaataaa

SEQ ID NO: 4033808 - DNA, 25 bp, Homo sapien
aaatgatgtgtttggatagccatgg

SEQ ID NO: 4033809 - DNA, 25 bp, Homo sapien
aagggctgctgtctatgcatctcca

SEQ ID NO: 4033810 - DNA, 25 bp, Homo sapien
ccagtgactgttacttggtggtaaa

SEQ ID NO: 4033811 - DNA, 25 bp, Homo sapien
gcctaatttaatggaacaccccata

SEQ ID NO: 4033812 - DNA, 25 bp, Homo sapien
agcccttcagccctatgtccaagat

SEQ ID NO: 4033813 - DNA, 25 bp, Homo sapien
gacaacttctccgtaatgcaccaga

SEQ ID NO: 4033814 - DNA, 25 bp, Homo sapien
attatgacactaagccaggccttta

SEQ ID NO: 4033815 - DNA, 25 bp, Homo sapien
ctcatgttgtgccagtctagcttaa

SEQ ID NO: 4033816 - DNA, 25 bp, Homo sapien
ggaattaaagtcatcgctcatgttg

SEQ ID NO: 4033817 - DNA, 25 bp, Homo sapien
ccagtctagcttaattacaggtttc

SEQ ID NO: 4033818 - DNA, 25 bp, Homo sapien
aaagtcatcgctcatgttgtgccag

SEQ ID NO: 4033819 - DNA, 25 bp, Homo sapien
tccacagtggctcgactaatctaga

SEQ ID NO: 4033820 - DNA, 25 bp, Homo sapien
agaatagtggctagaaatgttccca

SEQ ID NO: 4033821 - DNA, 25 bp, Homo sapien
gcatgatattggataagctgtctga

SEQ ID NO: 4033822 - DNA, 25 bp, Homo sapien
cctttcattgatgagtcagggtcaa

SEQ ID NO: 4033823 - DNA, 25 bp, Homo sapien
aaagccccagagtgtgcccttattg

SEQ ID NO: 4033824 - DNA, 25 bp, Homo sapien
tagtctccaatatgaagggtaattg

SEQ ID NO: 4033825 - DNA, 25 bp, Homo sapien
gatagccatccatattgtagtctcc

SEQ ID NO: 4033826 - DNA, 25 bp, Homo sapien
ctttagtatgaccagagcgtctgga

SEQ ID NO: 4033827 - DNA, 25 bp, Homo sapien
ctgtcactaaaacggccggaagcta

SEQ ID NO: 4033828 - DNA, 25 bp, Homo sapien
tcatcagtaactgacaggcacttct

SEQ ID NO: 4033829 - DNA, 25 bp, Homo sapien
ttcatcagtaactgacaggcacttc

SEQ ID NO: 4033830 - DNA, 25 bp, Homo sapien
tgagctctgtcactaaaacggccgg

SEQ ID NO: 4033831 - DNA, 25 bp, Homo sapien
gctgtgttcacttaacaccactgta

SEQ ID NO: 4033832 - DNA, 25 bp, Homo sapien
taaggctaataaagtgaagctttgg

SEQ ID NO: 4033833 - DNA, 25 bp, Homo sapien
aaggctaataaagtgaagctttggg

SEQ ID NO: 4033834 - DNA, 25 bp, Homo sapien
actggctgtgttcacttaacaccac

SEQ ID NO: 4033835 - DNA, 25 bp, Homo sapien
cccagatctcactaagtagatggta

SEQ ID NO: 4033836 - DNA, 25 bp, Homo sapien
tttatcttcacagcctggcagtaaa

SEQ ID NO: 4033837 - DNA, 25 bp, Homo sapien
tttttatcttcacagcctggcagta

SEQ ID NO: 4033838 - DNA, 25 bp, Homo sapien
agtagatggtactcttttggcaatt

SEQ ID NO: 4033839 - DNA, 25 bp, Homo sapien
tcttgtatggtatattaaatttact

SEQ ID NO: 4033840 - DNA, 25 bp, Homo sapien
ttcttgtatggtatattaaatttac

SEQ ID NO: 4033841 - DNA, 25 bp, Homo sapien
gtgttcttgtatggtatattaaatt

SEQ ID NO: 4033842 - DNA, 25 bp, Homo sapien
caagagtccattaatagtcacaaaa

SEQ ID NO: 4033843 - DNA, 25 bp, Homo sapien
gtctcttcgtcagtacgatcctgca

SEQ ID NO: 4033844 - DNA, 25 bp, Homo sapien
gcaaaggtggctgctagtctcttcg

SEQ ID NO: 4033845 - DNA, 25 bp, Homo sapien
cagtacgatcctgcattcaaaataa

SEQ ID NO: 4033846 - DNA, 25 bp, Homo sapien
gctgctagtctcttcgtcagtacga

SEQ ID NO: 4033847 - DNA, 25 bp, Homo sapien
tcgccacttccctactactattctt

SEQ ID NO: 4033848 - DNA, 25 bp, Homo sapien
gaaggtgtatacattcatgggttac

SEQ ID NO: 4033849 - DNA, 25 bp, Homo sapien
acacattaaccatcgccacttccct

SEQ ID NO: 4033850 - DNA, 25 bp, Homo sapien
caattaattatggactatagtcaca

SEQ ID NO: 4033851 - DNA, 25 bp, Homo sapien
ctctggacctgaaaagtataactga

SEQ ID NO: 4033852 - DNA, 25 bp, Homo sapien
taaagcacaagggacccaagggaca

SEQ ID NO: 4033853 - DNA, 25 bp, Homo sapien
cagtccatcagaaacgacagaggcc

SEQ ID NO: 4033854 - DNA, 25 bp, Homo sapien
gaagctcaaagaagtccacatacga

SEQ ID NO: 4033855 - DNA, 25 bp, Homo sapien
tatcaaaacacatgggttacagcag

SEQ ID NO: 4033856 - DNA, 25 bp, Homo sapien
cctccatatggtaggctgcaaaaca

SEQ ID NO: 4033857 - DNA, 25 bp, Homo sapien
tactcattgatacaggaggaacttg

SEQ ID NO: 4033858 - DNA, 25 bp, Homo sapien
tgtccagttggtttcgatatcagag

SEQ ID NO: 4033859 - DNA, 25 bp, Homo sapien
aagtttgatcccaacgcaaagaagt

SEQ ID NO: 4033860 - DNA, 25 bp, Homo sapien
ttgatcccaacgcaaagaagttaaa

SEQ ID NO: 4033861 - DNA, 25 bp, Homo sapien
tgatcccaacgcaaagaagttaaaa

SEQ ID NO: 4033862 - DNA, 25 bp, Homo sapien
agccctttgtttaattccctcagag

SEQ ID NO: 4033863 - DNA, 25 bp, Homo sapien
cacttatgtgttccgtctgcatgga

SEQ ID NO: 4033864 - DNA, 25 bp, Homo sapien
aagcactacaagacctggccaagtg

SEQ ID NO: 4033865 - DNA, 25 bp, Homo sapien
caagcttactgttgccttagaatct

SEQ ID NO: 4033866 - DNA, 25 bp, Homo sapien
taacgaaacagcagccaattttcaa

SEQ ID NO: 4033867 - DNA, 25 bp, Homo sapien
ttaacgaaacagcagccaattttca

SEQ ID NO: 4033868 - DNA, 25 bp, Homo sapien
cctttagaggtggatattactgtca

SEQ ID NO: 4033869 - DNA, 25 bp, Homo sapien
tagctcgggctataggcgagagcca

SEQ ID NO: 4033870 - DNA, 25 bp, Homo sapien
gatatgacattatcaaacctcctgg

SEQ ID NO: 4033871 - DNA, 25 bp, Homo sapien
tgctcttgctataagcctgtcactg

SEQ ID NO: 4033872 - DNA, 25 bp, Homo sapien
ttttccaatatagtactgacagaga

SEQ ID NO: 4033873 - DNA, 25 bp, Homo sapien
ccatcatattttgaggtttttccaa

SEQ ID NO: 4033874 - DNA, 25 bp, Homo sapien
tttccaatatagtactgacagagaa

SEQ ID NO: 4033875 - DNA, 25 bp, Homo sapien
caaatgctgactgtccaaccaccat

SEQ ID NO: 4033876 - DNA, 25 bp, Homo sapien
aacaaagcattctaactgaactggg

SEQ ID NO: 4033877 - DNA, 25 bp, Homo sapien
tgaatgtggtatgctttccttgctg

SEQ ID NO: 4033878 - DNA, 25 bp, Homo sapien
caaaggaaactcctgtgagttgagg

SEQ ID NO: 4033879 - DNA, 25 bp, Homo sapien
ccttgctgtcaattctagtatcttt

SEQ ID NO: 4033880 - DNA, 25 bp, Homo sapien
tttccctgcaatccaaaattcaacg

SEQ ID NO: 4033881 - DNA, 25 bp, Homo sapien
gcaatccaaaattcaacgaactcac

SEQ ID NO: 4033882 - DNA, 25 bp, Homo sapien
ccaaaattcaacgaactcactaggg

SEQ ID NO: 4033883 - DNA, 25 bp, Homo sapien
cctgcaatccaaaattcaacgaact

SEQ ID NO: 4033884 - DNA, 25 bp, Homo sapien
gtggcattcaatgtcgtcaggaata

SEQ ID NO: 4033885 - DNA, 25 bp, Homo sapien
ggtggcattcaatgtcgtcaggaat

SEQ ID NO: 4033886 - DNA, 25 bp, Homo sapien
gcattcaatgtcgtcaggaataaat

SEQ ID NO: 4033887 - DNA, 25 bp, Homo sapien
tggcattcaatgtcgtcaggaataa

SEQ ID NO: 4033888 - DNA, 25 bp, Homo sapien
ccaagattctgatctccagcctgga

SEQ ID NO: 4033889 - DNA, 25 bp, Homo sapien
aagattctgatctccagcctggaga

SEQ ID NO: 4033890 - DNA, 25 bp, Homo sapien
tgagccaagattctgatctccagcc

SEQ ID NO: 4033891 - DNA, 25 bp, Homo sapien
agccaagattctgatctccagcctg

SEQ ID NO: 4033892 - DNA, 25 bp, Homo sapien
tacagagacatagacaagtgtgtac

SEQ ID NO: 4033893 - DNA, 25 bp, Homo sapien
taatagttactattcacagaggagt

SEQ ID NO: 4033894 - DNA, 25 bp, Homo sapien
agttggcattaaaaggaagcctcag

SEQ ID NO: 4033895 - DNA, 25 bp, Homo sapien
tttgtcaactgcagcttagccttcc

SEQ ID NO: 4033896 - DNA, 25 bp, Homo sapien
cacagcatgggtcaaaaaaactcaa

SEQ ID NO: 4033897 - DNA, 25 bp, Homo sapien
tttttgtttgcagaagatcaaccct

SEQ ID NO: 4033898 - DNA, 25 bp, Homo sapien
ggctgattttgctcatgagtattgg

SEQ ID NO: 4033899 - DNA, 25 bp, Homo sapien
tagtaagatgatatcagaaacgtgc

SEQ ID NO: 4033900 - DNA, 25 bp, Homo sapien
cctggtcttaatgaaataacctgtc

SEQ ID NO: 4033901 - DNA, 25 bp, Homo sapien
ttctgctagaataaccctggtctta

SEQ ID NO: 4033902 - DNA, 25 bp, Homo sapien
taacctgtctctaaggtttccgcac

SEQ ID NO: 4033903 - DNA, 25 bp, Homo sapien
ttcctgaatctagagcactgtagtg

SEQ ID NO: 4033904 - DNA, 25 bp, Homo sapien
tttttttccacgtcatatccaccaa

SEQ ID NO: 4033905 - DNA, 25 bp, Homo sapien
ttttccacgtcatatccaccaactg

SEQ ID NO: 4033906 - DNA, 25 bp, Homo sapien
tttttccacgtcatatccaccaact

SEQ ID NO: 4033907 - DNA, 25 bp, Homo sapien
ttttttttccacgtcatatccacca

SEQ ID NO: 4033908 - DNA, 25 bp, Homo sapien
gcagtcaactaggtattggagagat

SEQ ID NO: 4033909 - DNA, 25 bp, Homo sapien
gcgtggcagtcaactaggtattgga

SEQ ID NO: 4033910 - DNA, 25 bp, Homo sapien
aaatatctctgactgcgtggcagtc

SEQ ID NO: 4033911 - DNA, 25 bp, Homo sapien
ctgactgcgtggcagtcaactaggt

SEQ ID NO: 4033912 - DNA, 25 bp, Homo sapien
ttactcgccagaagcactataatta

SEQ ID NO: 4033913 - DNA, 25 bp, Homo sapien
tactcgccagaagcactataattaa

SEQ ID NO: 4033914 - DNA, 25 bp, Homo sapien
tgagctcccgacactgcactcaagc

SEQ ID NO: 4033915 - DNA, 25 bp, Homo sapien
gaagatagtagttgcctctccttta

SEQ ID NO: 4033916 - DNA, 25 bp, Homo sapien
ttttcaggctctagggacaaattga

SEQ ID NO: 4033917 - DNA, 25 bp, Homo sapien
tggaagaactctacactttttaggc

SEQ ID NO: 4033918 - DNA, 25 bp, Homo sapien
aactgggtgcctgcatgaatatccc

SEQ ID NO: 4033919 - DNA, 25 bp, Homo sapien
ccacaagtggaagcagtctgagcct

SEQ ID NO: 4033920 - DNA, 25 bp, Homo sapien
gcaaatgctggtaccgtgttccttg

SEQ ID NO: 4033921 - DNA, 25 bp, Homo sapien
tcgagatcctgctgttaaaaagaga

SEQ ID NO: 4033922 - DNA, 25 bp, Homo sapien
taacatctggtctgtcctggaaaag

SEQ ID NO: 4033923 - DNA, 25 bp, Homo sapien
tggcatgagatggtttgccagtatt

SEQ ID NO: 4033924 - DNA, 25 bp, Homo sapien
atgtgcatctttgcccatgagacag

SEQ ID NO: 4033925 - DNA, 25 bp, Homo sapien
cccatgagacaggtctcctgaatac

SEQ ID NO: 4033926 - DNA, 25 bp, Homo sapien
tgagcctatgtgcatctttgcccat

SEQ ID NO: 4033927 - DNA, 25 bp, Homo sapien
tgcccatgagacaggtctcctgaat

SEQ ID NO: 4033928 - DNA, 25 bp, Homo sapien
cctggtggcggcttacttaaatgca

SEQ ID NO: 4033929 - DNA, 25 bp, Homo sapien
gaatttcatgtagggccattccagt

SEQ ID NO: 4033930 - DNA, 25 bp, Homo sapien
ccaaatgcaggactcgcttaagaat

SEQ ID NO: 4033931 - DNA, 25 bp, Homo sapien
tgtgcagatgggtagcagtagccct

SEQ ID NO: 4033932 - DNA, 25 bp, Homo sapien
ggaacttgtaggtgcatttacaggg

SEQ ID NO: 4033933 - DNA, 25 bp, Homo sapien
gaagctaggtgacggttaaatgtgc

SEQ ID NO: 4033934 - DNA, 25 bp, Homo sapien
gattgggccatataattgttgaagc

SEQ ID NO: 4033935 - DNA, 25 bp, Homo sapien
ctttggtaactcaaaacaattccag

SEQ ID NO: 4033936 - DNA, 25 bp, Homo sapien
ggtcaatgctggatgccatgataaa

SEQ ID NO: 4033937 - DNA, 25 bp, Homo sapien
tggaattcgcattttacttgtagtg

SEQ ID NO: 4033938 - DNA, 25 bp, Homo sapien
tcaatgctggatgccatgataaatt

SEQ ID NO: 4033939 - DNA, 25 bp, Homo sapien
tgagaatgtggaattcgcattttac

SEQ ID NO: 4033940 - DNA, 25 bp, Homo sapien
accatgcccggacatcttttcactt

SEQ ID NO: 4033941 - DNA, 25 bp, Homo sapien
ttggtaccatatcaaagaatccatt

SEQ ID NO: 4033942 - DNA, 25 bp, Homo sapien
tttggtaccatatcaaagaatccat

SEQ ID NO: 4033943 - DNA, 25 bp, Homo sapien
tgttcttttggtaccatatcaaaga

SEQ ID NO: 4033944 - DNA, 25 bp, Homo sapien
ggtgacaggtacattctattagaag

SEQ ID NO: 4033945 - DNA, 25 bp, Homo sapien
gcgcaccgtgtgtgagcaaaagcag

SEQ ID NO: 4033946 - DNA, 25 bp, Homo sapien
tattagaagcatactcactgtctca

SEQ ID NO: 4033947 - DNA, 25 bp, Homo sapien
ccactgtgagtgacgtagaagacgg

SEQ ID NO: 4033948 - DNA, 25 bp, Homo sapien
agtctgagatcaaacggtaaggcca

SEQ ID NO: 4033949 - DNA, 25 bp, Homo sapien
tgagatcaaacggtaaggccacagc

SEQ ID NO: 4033950 - DNA, 25 bp, Homo sapien
ctatgcccacaaagcctcactcact

SEQ ID NO: 4033951 - DNA, 25 bp, Homo sapien
tcctatgcccacaaagcctcactca

SEQ ID NO: 4033952 - DNA, 25 bp, Homo sapien
gtataagtcaccaagaaatctgagg

SEQ ID NO: 4033953 - DNA, 25 bp, Homo sapien
gagtcactgcccctagcctatacta

SEQ ID NO: 4033954 - DNA, 25 bp, Homo sapien
cacagaaactgtaacactatacttt

SEQ ID NO: 4033955 - DNA, 25 bp, Homo sapien
ggtgagtaaattttgataacatctt

SEQ ID NO: 4033956 - DNA, 25 bp, Homo sapien
aagtatacaacttgggcctgaccca

SEQ ID NO: 4033957 - DNA, 25 bp, Homo sapien
ttaggctgccaatcaaggtcacgtg

SEQ ID NO: 4033958 - DNA, 25 bp, Homo sapien
taacgtcacatcactgcagaagctg

SEQ ID NO: 4033959 - DNA, 25 bp, Homo sapien
cattagatgcagtgagtgcccttcc

SEQ ID NO: 4033960 - DNA, 25 bp, Homo sapien
aagttcactattactagcatcaaag

SEQ ID NO: 4033961 - DNA, 25 bp, Homo sapien
tcaattcctcttggatacggccaca

SEQ ID NO: 4033962 - DNA, 25 bp, Homo sapien
ccaatttgtctctaaagcaagactc

SEQ ID NO: 4033963 - DNA, 25 bp, Homo sapien
aaggtcaaactacatcagattaaag

SEQ ID NO: 4033964 - DNA, 25 bp, Homo sapien
tctgaccttggttagcttccgagat

SEQ ID NO: 4033965 - DNA, 25 bp, Homo sapien
aaagtaataggtgatctcccatcca

SEQ ID NO: 4033966 - DNA, 25 bp, Homo sapien
caggtctgaccttggttagcttccg

SEQ ID NO: 4033967 - DNA, 25 bp, Homo sapien
agtaataggtgatctcccatccaag

SEQ ID NO: 4033968 - DNA, 25 bp, Homo sapien
caggaattcttgtgctacgagacca

SEQ ID NO: 4033969 - DNA, 25 bp, Homo sapien
taaccgggttgaaggtatcttatga

SEQ ID NO: 4033970 - DNA, 25 bp, Homo sapien
agtcactagagttccaagtagctgg

SEQ ID NO: 4033971 - DNA, 25 bp, Homo sapien
aaagacagattgataagggtggtcc

SEQ ID NO: 4033972 - DNA, 25 bp, Homo sapien
tatcaggaattagatcaccattgaa

SEQ ID NO: 4033973 - DNA, 25 bp, Homo sapien
ccaaaaatatcaggaattagatcac

SEQ ID NO: 4033974 - DNA, 25 bp, Homo sapien
aatatcaggaattagatcaccattg

SEQ ID NO: 4033975 - DNA, 25 bp, Homo sapien
aaaatatcaggaattagatcaccat

SEQ ID NO: 4033976 - DNA, 25 bp, Homo sapien
gaaaagtcctattgagtatggtcat

SEQ ID NO: 4033977 - DNA, 25 bp, Homo sapien
tgaaaagtcctattgagtatggtca

SEQ ID NO: 4033978 - DNA, 25 bp, Homo sapien
ttgaaaagtcctattgagtatggtc

SEQ ID NO: 4033979 - DNA, 25 bp, Homo sapien
taacagctcctaattcactcttggc

SEQ ID NO: 4033980 - DNA, 25 bp, Homo sapien
gaaggacatccatttgagaatctcc

SEQ ID NO: 4033981 - DNA, 25 bp, Homo sapien
tccccagggactacacttgttatca

SEQ ID NO: 4033982 - DNA, 25 bp, Homo sapien
tttgtccccagaagataacagctcc

SEQ ID NO: 4033983 - DNA, 25 bp, Homo sapien
ggtctgccaaaaagacgattaagtc

SEQ ID NO: 4033984 - DNA, 25 bp, Homo sapien
tctgccaaaaagacgattaagtcat

SEQ ID NO: 4033985 - DNA, 25 bp, Homo sapien
ctgccaaaaagacgattaagtcatt

SEQ ID NO: 4033986 - DNA, 25 bp, Homo sapien
gtctgccaaaaagacgattaagtca

SEQ ID NO: 4033987 - DNA, 25 bp, Homo sapien
accaaggatgcagggactcccattg

SEQ ID NO: 4033988 - DNA, 25 bp, Homo sapien
taaggctgtttggttcattacacag

SEQ ID NO: 4033989 - DNA, 25 bp, Homo sapien
tcttccccgaatctagcaatgctgt

SEQ ID NO: 4033990 - DNA, 25 bp, Homo sapien
gcaatgctgtcccttgtaaggctgt

SEQ ID NO: 4033991 - DNA, 25 bp, Homo sapien
gtagtttgagactgctttcccaagg

SEQ ID NO: 4033992 - DNA, 25 bp, Homo sapien
tgtgagctgtttagtgtttaggccc

SEQ ID NO: 4033993 - DNA, 25 bp, Homo sapien
ttctgtagtttgagactgctttccc

SEQ ID NO: 4033994 - DNA, 25 bp, Homo sapien
gctgtttagtgtttaggcccttgga

SEQ ID NO: 4033995 - DNA, 25 bp, Homo sapien
ggccacagggctgggagagaaggac

SEQ ID NO: 4033996 - DNA, 25 bp, Homo sapien
taaagggaaggccacagggctggga

SEQ ID NO: 4033997 - DNA, 25 bp, Homo sapien
ctaaagggaaggccacagggctggg

SEQ ID NO: 4033998 - DNA, 25 bp, Homo sapien
gaaggccacagggctgggagagaag

SEQ ID NO: 4033999 - DNA, 25 bp, Homo sapien
gcagaaggaccggccattgggcaat

SEQ ID NO: 4034000 - DNA, 25 bp, Homo sapien
aggcacacggacagcgaacagaggg

SEQ ID NO: 4034001 - DNA, 25 bp, Homo sapien
atgcagaaggaccggccattgggca

SEQ ID NO: 4034002 - DNA, 25 bp, Homo sapien
tttggggaacaccgggagaggcaca

SEQ ID NO: 4034003 - DNA, 25 bp, Homo sapien
tttcccgcagcacgaagagatccgt

SEQ ID NO: 4034004 - DNA, 25 bp, Homo sapien
gcttgtcggagttgaggtccccgaa

SEQ ID NO: 4034005 - DNA, 25 bp, Homo sapien
aagagctcggccgtgacgttgtgca

SEQ ID NO: 4034006 - DNA, 25 bp, Homo sapien
cgaaagccgcaagggtgccccaggc

SEQ ID NO: 4034007 - DNA, 25 bp, Homo sapien
cccttccgacgctaaaaaagcagtg

SEQ ID NO: 4034008 - DNA, 25 bp, Homo sapien
actagggctgcccttccgacgctaa

SEQ ID NO: 4034009 - DNA, 25 bp, Homo sapien
ggacgcgtaagagccgctgccggct

SEQ ID NO: 4034010 - DNA, 25 bp, Homo sapien
agcaccgcgttaccggccgagagag

SEQ ID NO: 4034011 - DNA, 25 bp, Homo sapien
tctggtaagtgttgtagaccccaaa

SEQ ID NO: 4034012 - DNA, 25 bp, Homo sapien
gatttcactataagatatcattatg

SEQ ID NO: 4034013 - DNA, 25 bp, Homo sapien
ccgtcttccgctttcttaaggtctg

SEQ ID NO: 4034014 - DNA, 25 bp, Homo sapien
gatgcagtcgtctctccgtcttccg

SEQ ID NO: 4034015 - DNA, 25 bp, Homo sapien
cctgtgatccatgcaagggagaaca

SEQ ID NO: 4034016 - DNA, 25 bp, Homo sapien
tgtcattggaccgtactgagggtac

SEQ ID NO: 4034017 - DNA, 25 bp, Homo sapien
aaaataggtgcatgtagccctgccc

SEQ ID NO: 4034018 - DNA, 25 bp, Homo sapien
tgccatagtgggagcaaaaaagctt

SEQ ID NO: 4034019 - DNA, 25 bp, Homo sapien
ttcttttctttacgaatggcgaata

SEQ ID NO: 4034020 - DNA, 25 bp, Homo sapien
tttacgaatggcgaatattggcccc

SEQ ID NO: 4034021 - DNA, 25 bp, Homo sapien
ttgtatggtttctgccgtgaggtct

SEQ ID NO: 4034022 - DNA, 25 bp, Homo sapien
atggtttctgccgtgaggtctgctg

SEQ ID NO: 4034023 - DNA, 25 bp, Homo sapien
ccacaggttgttcagcactatttta

SEQ ID NO: 4034024 - DNA, 25 bp, Homo sapien
aagagaagggacctcccagtagaga

SEQ ID NO: 4034025 - DNA, 25 bp, Homo sapien
ccaaaatgtggccacgaagttcgcc

SEQ ID NO: 4034026 - DNA, 25 bp, Homo sapien
cacagctggtaatcttcagagccca

SEQ ID NO: 4034027 - DNA, 25 bp, Homo sapien
ttccttcctcagatggttgagctgg

SEQ ID NO: 4034028 - DNA, 25 bp, Homo sapien
tggtctttggggacattcatcccat

SEQ ID NO: 4034029 - DNA, 25 bp, Homo sapien
ctctgtctcctggaccatggctaga

SEQ ID NO: 4034030 - DNA, 25 bp, Homo sapien
ccaccacttgtagggattgctgctc

SEQ ID NO: 4034031 - DNA, 25 bp, Homo sapien
atgtggcagaggtcccggtctgtga

SEQ ID NO: 4034032 - DNA, 25 bp, Homo sapien
tgtggcagaggtcccggtctgtgat

SEQ ID NO: 4034033 - DNA, 25 bp, Homo sapien
tggcagaggtcccggtctgtgatga

SEQ ID NO: 4034034 - DNA, 25 bp, Homo sapien
gatgtggcagaggtcccggtctgtg

SEQ ID NO: 4034035 - DNA, 25 bp, Homo sapien
tagcagctgtgtcaatgggctttgt

SEQ ID NO: 4034036 - DNA, 25 bp, Homo sapien
gaccatccctgttcctgagtttctt

SEQ ID NO: 4034037 - DNA, 25 bp, Homo sapien
ttcctgtcctcgaccatccctgttc

SEQ ID NO: 4034038 - DNA, 25 bp, Homo sapien
acagaagcagcttgactggactggg

SEQ ID NO: 4034039 - DNA, 25 bp, Homo sapien
tcatcccaagagtaatcatctctgg

SEQ ID NO: 4034040 - DNA, 25 bp, Homo sapien
cccaagagtaatcatctctggagct

SEQ ID NO: 4034041 - DNA, 25 bp, Homo sapien
ctataatcatcccaagagtaatcat

SEQ ID NO: 4034042 - DNA, 25 bp, Homo sapien
taatcatcccaagagtaatcatctc

SEQ ID NO: 4034043 - DNA, 25 bp, Homo sapien
ttctaggtgagtagtcatcaaagct

SEQ ID NO: 4034044 - DNA, 25 bp, Homo sapien
ctaggtgagtagtcatcaaagctgt

SEQ ID NO: 4034045 - DNA, 25 bp, Homo sapien
tcttctaggtgagtagtcatcaaag

SEQ ID NO: 4034046 - DNA, 25 bp, Homo sapien
ctcttctaggtgagtagtcatcaaa

SEQ ID NO: 4034047 - DNA, 25 bp, Homo sapien
cataatccccatttctatcacagcc

SEQ ID NO: 4034048 - DNA, 25 bp, Homo sapien
tcataatccccatttctatcacagc

SEQ ID NO: 4034049 - DNA, 25 bp, Homo sapien
aaaagcaatgtagggtgacaatttg

SEQ ID NO: 4034050 - DNA, 25 bp, Homo sapien
caatgtagggtgacaatttgggaag

SEQ ID NO: 4034051 - DNA, 25 bp, Homo sapien
aagcaatgtagggtgacaatttggg

SEQ ID NO: 4034052 - DNA, 25 bp, Homo sapien
agaaaagcaatgtagggtgacaatt

SEQ ID NO: 4034053 - DNA, 25 bp, Homo sapien
aaactggtattgttgaggctgccat

SEQ ID NO: 4034054 - DNA, 25 bp, Homo sapien
ttaccacacactctggatcacccat

SEQ ID NO: 4034055 - DNA, 25 bp, Homo sapien
gatgggctctgtctatatgaaggtc

SEQ ID NO: 4034056 - DNA, 25 bp, Homo sapien
tatgaaggtcatgaggaattaccac

SEQ ID NO: 4034057 - DNA, 25 bp, Homo sapien
tccctctagaggatggatgggctct

SEQ ID NO: 4034058 - DNA, 25 bp, Homo sapien
acataagatcacagctgaggttaac

SEQ ID NO: 4034059 - DNA, 25 bp, Homo sapien
ggattttgtaatcaacctataatta

SEQ ID NO: 4034060 - DNA, 25 bp, Homo sapien
cacagctgaggttaaccataatttc

SEQ ID NO: 4034061 - DNA, 25 bp, Homo sapien
aaacagagtaaatggtataattcaa

SEQ ID NO: 4034062 - DNA, 25 bp, Homo sapien
cacgccctcgatatagcagaatatt

SEQ ID NO: 4034063 - DNA, 25 bp, Homo sapien
actaatggcgcccatggtttccact

SEQ ID NO: 4034064 - DNA, 25 bp, Homo sapien
tgtcagtaatatgaacacgccctcg

SEQ ID NO: 4034065 - DNA, 25 bp, Homo sapien
tttgaaataacctgtgtgaatactt

SEQ ID NO: 4034066 - DNA, 25 bp, Homo sapien
tacctgtgtgatctgagttttctta

SEQ ID NO: 4034067 - DNA, 25 bp, Homo sapien
tatagaggcctactctttgatagtg

SEQ ID NO: 4034068 - DNA, 25 bp, Homo sapien
tatgttataaggattagctggtaag

SEQ ID NO: 4034069 - DNA, 25 bp, Homo sapien
cacataaagcatttactatgggaca

SEQ ID NO: 4034070 - DNA, 25 bp, Homo sapien
catcagcgctgtggttgtgaagcag

SEQ ID NO: 4034071 - DNA, 25 bp, Homo sapien
gctgagattagagctccccacttgg

SEQ ID NO: 4034072 - DNA, 25 bp, Homo sapien
cattgctttgaaccctctgcaggtg

SEQ ID NO: 4034073 - DNA, 25 bp, Homo sapien
tgcaaatatgttggcccatcagcgc

SEQ ID NO: 4034074 - DNA, 25 bp, Homo sapien
tcaaatcccagggaacagatcccgt

SEQ ID NO: 4034075 - DNA, 25 bp, Homo sapien
tacaagcatccgaaggagaaaaatt

SEQ ID NO: 4034076 - DNA, 25 bp, Homo sapien
tagacccctcctacagccaaatgat

SEQ ID NO: 4034077 - DNA, 25 bp, Homo sapien
aacacatcggtttactggacttgct

SEQ ID NO: 4034078 - DNA, 25 bp, Homo sapien
aaatatattagaaaatgctgaacca

SEQ ID NO: 4034079 - DNA, 25 bp, Homo sapien
tagaaaatgctgaaccacaaaatat

SEQ ID NO: 4034080 - DNA, 25 bp, Homo sapien
tacaaagagtcattaaatatattag

SEQ ID NO: 4034081 - DNA, 25 bp, Homo sapien
aaagttacagaacatacaaagagtc

SEQ ID NO: 4034082 - DNA, 25 bp, Homo sapien
tgccgctgcatgttgtatgatcaaa

SEQ ID NO: 4034083 - DNA, 25 bp, Homo sapien
acttctcttagtggtattgtcatgc

SEQ ID NO: 4034084 - DNA, 25 bp, Homo sapien
ggactgaattcttaccatactgcca

SEQ ID NO: 4034085 - DNA, 25 bp, Homo sapien
tagtatacagagctattctacagtt

SEQ ID NO: 4034086 - DNA, 25 bp, Homo sapien
aatatgttaaatttaggctcagcac

SEQ ID NO: 4034087 - DNA, 25 bp, Homo sapien
catgtctatgattgttcaaaaatat

SEQ ID NO: 4034088 - DNA, 25 bp, Homo sapien
aataggacatgtctatgattgttca

SEQ ID NO: 4034089 - DNA, 25 bp, Homo sapien
gttaaatttaggctcagcacagtag

SEQ ID NO: 4034090 - DNA, 25 bp, Homo sapien
aaaaacgtaagcatgaagtccatgg

SEQ ID NO: 4034091 - DNA, 25 bp, Homo sapien
gctgacacttcataactggagaaac

SEQ ID NO: 4034092 - DNA, 25 bp, Homo sapien
tgattagctgagcaaagttaccaga

SEQ ID NO: 4034093 - DNA, 25 bp, Homo sapien
aaaagatagtcgtgaagggtgaagc

SEQ ID NO: 4034094 - DNA, 25 bp, Homo sapien
catattcctgacttgtgtcttattg

SEQ ID NO: 4034095 - DNA, 25 bp, Homo sapien
ctctgaggactgcatattcctgact

SEQ ID NO: 4034096 - DNA, 25 bp, Homo sapien
ccctctgctcggttggttcttgtgc

SEQ ID NO: 4034097 - DNA, 25 bp, Homo sapien
ttcccctctgctcggttggttcttg

SEQ ID NO: 4034098 - DNA, 25 bp, Homo sapien
ctacgtggattcaccctgcaggctg

SEQ ID NO: 4034099 - DNA, 25 bp, Homo sapien
ccactttcagcacctctctttgcta

SEQ ID NO: 4034100 - DNA, 25 bp, Homo sapien
cactttcagcacctctctttgctac

SEQ ID NO: 4034101 - DNA, 25 bp, Homo sapien
tccactttcagcacctctctttgct

SEQ ID NO: 4034102 - DNA, 25 bp, Homo sapien
gtccagctcccctataagcatcata

SEQ ID NO: 4034103 - DNA, 25 bp, Homo sapien
cctataagcatcatatccaatcaga

SEQ ID NO: 4034104 - DNA, 25 bp, Homo sapien
tcccagtccagctcccctataagca

SEQ ID NO: 4034105 - DNA, 25 bp, Homo sapien
tctcgtcttgactgctccacatctt

SEQ ID NO: 4034106 - DNA, 25 bp, Homo sapien
gcgctttcgaggagacgcatccttg

SEQ ID NO: 4034107 - DNA, 25 bp, Homo sapien
agagcaagggcgctttcgaggagac

SEQ ID NO: 4034108 - DNA, 25 bp, Homo sapien
gctctgcctcgctccctgaggtgga

SEQ ID NO: 4034109 - DNA, 25 bp, Homo sapien
gacgcatccttgtgcgtgaggagat

SEQ ID NO: 4034110 - DNA, 25 bp, Homo sapien
tgtgaaaagaatgctgtatcttgtc

SEQ ID NO: 4034111 - DNA, 25 bp, Homo sapien
tccaacttaattaatgcttcatcac

SEQ ID NO: 4034112 - DNA, 25 bp, Homo sapien
tgagaaaccaatagactggatttcc

SEQ ID NO: 4034113 - DNA, 25 bp, Homo sapien
aatagactggatttcctccaggatc

SEQ ID NO: 4034114 - DNA, 25 bp, Homo sapien
caacttaattaatgcttcatcacca

SEQ ID NO: 4034115 - DNA, 25 bp, Homo sapien
cctgaaagtagatctggcttttcaa

SEQ ID NO: 4034116 - DNA, 25 bp, Homo sapien
gaaagtagatctggcttttcaatac

SEQ ID NO: 4034117 - DNA, 25 bp, Homo sapien
ctcctgaaagtagatctggcttttc

SEQ ID NO: 4034118 - DNA, 25 bp, Homo sapien
tagatctggcttttcaatacaaata

SEQ ID NO: 4034119 - DNA, 25 bp, Homo sapien
tgtgctgtcaatttggcatcagaga

SEQ ID NO: 4034120 - DNA, 25 bp, Homo sapien
tcagagatgtgctgcttaaccagtg

SEQ ID NO: 4034121 - DNA, 25 bp, Homo sapien
tatactctctggatcacacctttca

SEQ ID NO: 4034122 - DNA, 25 bp, Homo sapien
gcttaaccagtgatgttatactctc

SEQ ID NO: 4034123 - DNA, 25 bp, Homo sapien
atctggtggcttcttgctcctgcaa

SEQ ID NO: 4034124 - DNA, 25 bp, Homo sapien
ggtggcttcttgctcctgcaaccca

SEQ ID NO: 4034125 - DNA, 25 bp, Homo sapien
tctggtggcttcttgctcctgcaac

SEQ ID NO: 4034126 - DNA, 25 bp, Homo sapien
ttatctggtggcttcttgctcctgc

SEQ ID NO: 4034127 - DNA, 25 bp, Homo sapien
tgagcccagctcacttatctcatct

SEQ ID NO: 4034128 - DNA, 25 bp, Homo sapien
acttatctcatcttcctgcgttggg

SEQ ID NO: 4034129 - DNA, 25 bp, Homo sapien
aggaaactgcctccagagaccggaa

SEQ ID NO: 4034130 - DNA, 25 bp, Homo sapien
agagaggcagcccactcgtgagccc

SEQ ID NO: 4034131 - DNA, 25 bp, Homo sapien
ggaacaagacttggatctccttcca

SEQ ID NO: 4034132 - DNA, 25 bp, Homo sapien
tctccttccaaggtgtgcaagaggg

SEQ ID NO: 4034133 - DNA, 25 bp, Homo sapien
aacccagagttccacggagcatgaa

SEQ ID NO: 4034134 - DNA, 25 bp, Homo sapien
tgtgacatcacaaggtcacagggct

SEQ ID NO: 4034135 - DNA, 25 bp, Homo sapien
gatcaaacgaacaggctttagcttc

SEQ ID NO: 4034136 - DNA, 25 bp, Homo sapien
tggtaaacagtttacactgcagagc

SEQ ID NO: 4034137 - DNA, 25 bp, Homo sapien
tcagatcaaacgaacaggctttagc

SEQ ID NO: 4034138 - DNA, 25 bp, Homo sapien
gtttacactgcagagctactgccat

SEQ ID NO: 4034139 - DNA, 25 bp, Homo sapien
gtcctcacacttctcaacatgagtt

SEQ ID NO: 4034140 - DNA, 25 bp, Homo sapien
gttgcttgaaacaccgactttgatg

SEQ ID NO: 4034141 - DNA, 25 bp, Homo sapien
tcaacatgagttgcttgaaacaccg

SEQ ID NO: 4034142 - DNA, 25 bp, Homo sapien
cacacttctcaacatgagttgcttg

SEQ ID NO: 4034143 - DNA, 25 bp, Homo sapien
cacttctctggtgctctttctgcat

SEQ ID NO: 4034144 - DNA, 25 bp, Homo sapien
aggcctcctcatcatagcaggtgag

SEQ ID NO: 4034145 - DNA, 25 bp, Homo sapien
ggatgacctgatcaccacttctctg

SEQ ID NO: 4034146 - DNA, 25 bp, Homo sapien
caggtgaggatgacctgatcaccac

SEQ ID NO: 4034147 - DNA, 25 bp, Homo sapien
cctcatccaaacagtctccaagtct

SEQ ID NO: 4034148 - DNA, 25 bp, Homo sapien
tcagtgccctccaccacccacatca

SEQ ID NO: 4034149 - DNA, 25 bp, Homo sapien
agtgccctccaccacccacatcagc

SEQ ID NO: 4034150 - DNA, 25 bp, Homo sapien
tgccctccaccacccacatcagcag

SEQ ID NO: 4034151 - DNA, 25 bp, Homo sapien
gtgccctccaccacccacatcagca

SEQ ID NO: 4034152 - DNA, 25 bp, Homo sapien
tagtctttgcgtgagcaggcacact

SEQ ID NO: 4034153 - DNA, 25 bp, Homo sapien
gagacccaggctgtaaacgactgca

SEQ ID NO: 4034154 - DNA, 25 bp, Homo sapien
caatttggagatacagagacgtcag

SEQ ID NO: 4034155 - DNA, 25 bp, Homo sapien
gaagtctagccaggaggttttcact

SEQ ID NO: 4034156 - DNA, 25 bp, Homo sapien
ctgaaaatggtcttttgtctttcag

SEQ ID NO: 4034157 - DNA, 25 bp, Homo sapien
tgaaaatggtcttttgtctttcagt

SEQ ID NO: 4034158 - DNA, 25 bp, Homo sapien
agcgatgctcacatttgctgttacc

SEQ ID NO: 4034159 - DNA, 25 bp, Homo sapien
ttacctaagtgatgcggctggcctg

SEQ ID NO: 4034160 - DNA, 25 bp, Homo sapien
catttgctgttacctaagtgatgcg

SEQ ID NO: 4034161 - DNA, 25 bp, Homo sapien
cagcaaccagcgatgctcacatttg

SEQ ID NO: 4034162 - DNA, 25 bp, Homo sapien
ggcctgggacctccattaagcacca

SEQ ID NO: 4034163 - DNA, 25 bp, Homo sapien
gcttgtaatttgctgtctccggtga

SEQ ID NO: 4034164 - DNA, 25 bp, Homo sapien
ggtgctgagaagacccgtgatgctc

SEQ ID NO: 4034165 - DNA, 25 bp, Homo sapien
ttgaagcccatttgcggcatgcccc

SEQ ID NO: 4034166 - DNA, 25 bp, Homo sapien
tctgagctgcaagtgtggagacccg

SEQ ID NO: 4034167 - DNA, 25 bp, Homo sapien
tggagacccgggatggtgtcctgag

SEQ ID NO: 4034168 - DNA, 25 bp, Homo sapien
cgcttctgcaaatgcgaacattcat

SEQ ID NO: 4034169 - DNA, 25 bp, Homo sapien
tgagagcctggctcgcttctgcaaa

SEQ ID NO: 4034170 - DNA, 25 bp, Homo sapien
gctctgacacctgacactgggccat

SEQ ID NO: 4034171 - DNA, 25 bp, Homo sapien
ttgggctctgacacctgacactggg

SEQ ID NO: 4034172 - DNA, 25 bp, Homo sapien
tgcttgggctctgacacctgacact

SEQ ID NO: 4034173 - DNA, 25 bp, Homo sapien
gtgcttgggctctgacacctgacac

SEQ ID NO: 4034174 - DNA, 25 bp, Homo sapien
ctgggcaccctattcacttcccttt

SEQ ID NO: 4034175 - DNA, 25 bp, Homo sapien
tggaagcagaggctctcaaatcctt

SEQ ID NO: 4034176 - DNA, 25 bp, Homo sapien
catggaagcagaggctctcaaatcc

SEQ ID NO: 4034177 - DNA, 25 bp, Homo sapien
aagcagaggctctcaaatccttcct

SEQ ID NO: 4034178 - DNA, 25 bp, Homo sapien
gaagcagaggctctcaaatccttcc

SEQ ID NO: 4034179 - DNA, 25 bp, Homo sapien
cagaactgcaatgagctggcttaca

SEQ ID NO: 4034180 - DNA, 25 bp, Homo sapien
taccttggtatcagccagaactgca

SEQ ID NO: 4034181 - DNA, 25 bp, Homo sapien
gaaaactggccacgagaggcctcag

SEQ ID NO: 4034182 - DNA, 25 bp, Homo sapien
caacatccctggagtctgcggaagc

SEQ ID NO: 4034183 - DNA, 25 bp, Homo sapien
gacggagtcaggtcccaggcccttc

SEQ ID NO: 4034184 - DNA, 25 bp, Homo sapien
ccgtggaacgcagagcagagatgat

SEQ ID NO: 4034185 - DNA, 25 bp, Homo sapien
gtgcccctcagggacggagtcaggt

SEQ ID NO: 4034186 - DNA, 25 bp, Homo sapien
ctgctctgttccgtggaacgcagag

SEQ ID NO: 4034187 - DNA, 25 bp, Homo sapien
ttctctgagaactgccgctccccgc

SEQ ID NO: 4034188 - DNA, 25 bp, Homo sapien
tctctgagaactgccgctccccgcc

SEQ ID NO: 4034189 - DNA, 25 bp, Homo sapien
cttctctgagaactgccgctccccg

SEQ ID NO: 4034190 - DNA, 25 bp, Homo sapien
ctgtgcagtgagaagggccatgttc

SEQ ID NO: 4034191 - DNA, 25 bp, Homo sapien
tgttcgtgtggtgcggccatgcccc

SEQ ID NO: 4034192 - DNA, 25 bp, Homo sapien
aagggccatgttcgtgtggtgcggc

SEQ ID NO: 4034193 - DNA, 25 bp, Homo sapien
tgtggtgcggccatgccccacaggc

SEQ ID NO: 4034194 - DNA, 25 bp, Homo sapien
actgactgtcttagcttggactgcc

SEQ ID NO: 4034195 - DNA, 25 bp, Homo sapien
gctccaaatacagcaaggataagtg

SEQ ID NO: 4034196 - DNA, 25 bp, Homo sapien
gatttacagccaagcagtagggtga

SEQ ID NO: 4034197 - DNA, 25 bp, Homo sapien
caatagaagtatcgtaataggagag

SEQ ID NO: 4034198 - DNA, 25 bp, Homo sapien
tctcgtggtagaattgtgggattct

SEQ ID NO: 4034199 - DNA, 25 bp, Homo sapien
tgctctcggcattatgtatctctcg

SEQ ID NO: 4034200 - DNA, 25 bp, Homo sapien
aggccacatcctctcgtaaatgctc

SEQ ID NO: 4034201 - DNA, 25 bp, Homo sapien
gtatctctcgatcacagtacttctc

SEQ ID NO: 4034202 - DNA, 25 bp, Homo sapien
ttcttctcttctggacttggtatca

SEQ ID NO: 4034203 - DNA, 25 bp, Homo sapien
cttctcttctggacttggtatcaat

SEQ ID NO: 4034204 - DNA, 25 bp, Homo sapien
tcttctggacttggtatcaattaag

SEQ ID NO: 4034205 - DNA, 25 bp, Homo sapien
tctcttctggacttggtatcaatta

SEQ ID NO: 4034206 - DNA, 25 bp, Homo sapien
ggtcaccgacgatggagctcatgct

SEQ ID NO: 4034207 - DNA, 25 bp, Homo sapien
cgtatgaagtgaggtaagagtgccc

SEQ ID NO: 4034208 - DNA, 25 bp, Homo sapien
ggcatttttgccgtgcagctgcata

SEQ ID NO: 4034209 - DNA, 25 bp, Homo sapien
catgctctgcgtttgaggctgctgc

SEQ ID NO: 4034210 - DNA, 25 bp, Homo sapien
gaacagcgaatgtgatgcttctgcc

SEQ ID NO: 4034211 - DNA, 25 bp, Homo sapien
tctcccaatctggttgacagcagct

SEQ ID NO: 4034212 - DNA, 25 bp, Homo sapien
tcttgcaatactgggaacatgaagc

SEQ ID NO: 4034213 - DNA, 25 bp, Homo sapien
catgaagctgcttactgtcacgtca

SEQ ID NO: 4034214 - DNA, 25 bp, Homo sapien
cagaaaccacagcaatcacgttgaa

SEQ ID NO: 4034215 - DNA, 25 bp, Homo sapien
cactgggtgtctttggcgggcttta

SEQ ID NO: 4034216 - DNA, 25 bp, Homo sapien
tttgaagaccacaaccagaaaccac

SEQ ID NO: 4034217 - DNA, 25 bp, Homo sapien
cgttgaaacgaagcctataactggg

SEQ ID NO: 4034218 - DNA, 25 bp, Homo sapien
caatttaaaggtgtgtcgcgaccac

SEQ ID NO: 4034219 - DNA, 25 bp, Homo sapien
ttgacacatagggagctgtagccct

SEQ ID NO: 4034220 - DNA, 25 bp, Homo sapien
tgccaataagtgactgctaacccag

SEQ ID NO: 4034221 - DNA, 25 bp, Homo sapien
ccttagcgctggagtcatacatgca

SEQ ID NO: 4034222 - DNA, 25 bp, Homo sapien
ccccaaaaggcgccatgccgttcca

SEQ ID NO: 4034223 - DNA, 25 bp, Homo sapien
cacactcctctgtttttgcagtcat

SEQ ID NO: 4034224 - DNA, 25 bp, Homo sapien
aaaaggcgccatgccgttccacact

SEQ ID NO: 4034225 - DNA, 25 bp, Homo sapien
ccaaaaggcgccatgccgttccaca

SEQ ID NO: 4034226 - DNA, 25 bp, Homo sapien
atgagccgccgtcatagcaacacgc

SEQ ID NO: 4034227 - DNA, 25 bp, Homo sapien
gttaccatagaaaccactgcctgtg

SEQ ID NO: 4034228 - DNA, 25 bp, Homo sapien
tttccccagtctgagaagagagagc

SEQ ID NO: 4034229 - DNA, 25 bp, Homo sapien
cgtgccatcttgtctccgaagagga

SEQ ID NO: 4034230 - DNA, 25 bp, Homo sapien
tggactccatcatcttgtcctggcc

SEQ ID NO: 4034231 - DNA, 25 bp, Homo sapien
gactccatcatcttgtcctggcccc

SEQ ID NO: 4034232 - DNA, 25 bp, Homo sapien
ctccatcatcttgtcctggccccat

SEQ ID NO: 4034233 - DNA, 25 bp, Homo sapien
ctggactccatcatcttgtcctggc

SEQ ID NO: 4034234 - DNA, 25 bp, Homo sapien
ccagactgaagggtcattggccacc

SEQ ID NO: 4034235 - DNA, 25 bp, Homo sapien
cagagtgcaagtgggtaatacccac

SEQ ID NO: 4034236 - DNA, 25 bp, Homo sapien
cttctcatgttatggccagagtgca

SEQ ID NO: 4034237 - DNA, 25 bp, Homo sapien
atggcccagcccaaagtcaaggagt

SEQ ID NO: 4034238 - DNA, 25 bp, Homo sapien
tttggagttaagacaataatttgcc

SEQ ID NO: 4034239 - DNA, 25 bp, Homo sapien
catagcctgtcattaggttctctcc

SEQ ID NO: 4034240 - DNA, 25 bp, Homo sapien
gagttaagacaataatttgcctgca

SEQ ID NO: 4034241 - DNA, 25 bp, Homo sapien
agtaaaatgatccaattagatgcca

SEQ ID NO: 4034242 - DNA, 25 bp, Homo sapien
aaactccaagcttttcccactgtgg

SEQ ID NO: 4034243 - DNA, 25 bp, Homo sapien
cctttgtgctagtgcccagcggctc

SEQ ID NO: 4034244 - DNA, 25 bp, Homo sapien
cctcaggctccacaaactccaagct

SEQ ID NO: 4034245 - DNA, 25 bp, Homo sapien
taatttccagacgttccctttgtgc

SEQ ID NO: 4034246 - DNA, 25 bp, Homo sapien
tctccacatctgaagctgccaaaat

SEQ ID NO: 4034247 - DNA, 25 bp, Homo sapien
atttttctccacatctgaagctgcc

SEQ ID NO: 4034248 - DNA, 25 bp, Homo sapien
tctgaagctgccaaaatataaacag

SEQ ID NO: 4034249 - DNA, 25 bp, Homo sapien
ccacatctgaagctgccaaaatata

SEQ ID NO: 4034250 - DNA, 25 bp, Homo sapien
tccagggccgagggatgtccctgac

SEQ ID NO: 4034251 - DNA, 25 bp, Homo sapien
ggccgagggatgtccctgacatggg

SEQ ID NO: 4034252 - DNA, 25 bp, Homo sapien
ccagggccgagggatgtccctgaca

SEQ ID NO: 4034253 - DNA, 25 bp, Homo sapien
agggccgagggatgtccctgacatg

SEQ ID NO: 4034254 - DNA, 25 bp, Homo sapien
caaaatgaggcacacgttagctgtt

SEQ ID NO: 4034255 - DNA, 25 bp, Homo sapien
gaggcacacgttagctgtttccacc

SEQ ID NO: 4034256 - DNA, 25 bp, Homo sapien
aatgaggcacacgttagctgtttcc

SEQ ID NO: 4034257 - DNA, 25 bp, Homo sapien
ccaaaatgaggcacacgttagctgt

SEQ ID NO: 4034258 - DNA, 25 bp, Homo sapien
gcctgcgtccactgaaacggctttt

SEQ ID NO: 4034259 - DNA, 25 bp, Homo sapien
ctttcagcagcctgcgtccactgaa

SEQ ID NO: 4034260 - DNA, 25 bp, Homo sapien
tgcgtccactgaaacggcttttggg

SEQ ID NO: 4034261 - DNA, 25 bp, Homo sapien
gcagcctgcgtccactgaaacggct

SEQ ID NO: 4034262 - DNA, 25 bp, Homo sapien
gcaggtaccacagaggacaactagg

SEQ ID NO: 4034263 - DNA, 25 bp, Homo sapien
acagaggacaactaggcgctcagcc

SEQ ID NO: 4034264 - DNA, 25 bp, Homo sapien
ccttcactgaggaaacgataaggca

SEQ ID NO: 4034265 - DNA, 25 bp, Homo sapien
ggcgctcagcccacttatgcagctg

SEQ ID NO: 4034266 - DNA, 25 bp, Homo sapien
catgcggcaatgtttttcaccataa

SEQ ID NO: 4034267 - DNA, 25 bp, Homo sapien
ccatgcggcaatgtttttcaccata

SEQ ID NO: 4034268 - DNA, 25 bp, Homo sapien
tccatgcggcaatgtttttcaccat

SEQ ID NO: 4034269 - DNA, 25 bp, Homo sapien
atgcggcaatgtttttcaccataaa

SEQ ID NO: 4034270 - DNA, 25 bp, Homo sapien
tatgtgcacaggatcatcaaatccc

SEQ ID NO: 4034271 - DNA, 25 bp, Homo sapien
ctgtatgtgcacaggatcatcaaat

SEQ ID NO: 4034272 - DNA, 25 bp, Homo sapien
gtgcacaggatcatcaaatcccagc

SEQ ID NO: 4034273 - DNA, 25 bp, Homo sapien
tgtatgtgcacaggatcatcaaatc

SEQ ID NO: 4034274 - DNA, 25 bp, Homo sapien
aagaggtcgttcagtaggttccagt

SEQ ID NO: 4034275 - DNA, 25 bp, Homo sapien
ctgaagaggtcgttcagtaggttcc

SEQ ID NO: 4034276 - DNA, 25 bp, Homo sapien
tgaagaggtcgttcagtaggttcca

SEQ ID NO: 4034277 - DNA, 25 bp, Homo sapien
gaagaggtcgttcagtaggttccag

SEQ ID NO: 4034278 - DNA, 25 bp, Homo sapien
tctgggggcttcagcggtcccgcgg

SEQ ID NO: 4034279 - DNA, 25 bp, Homo sapien
tgggggcttcagcggtcccgcgggc

SEQ ID NO: 4034280 - DNA, 25 bp, Homo sapien
gctctgggggcttcagcggtcccgc

SEQ ID NO: 4034281 - DNA, 25 bp, Homo sapien
ctctgggggcttcagcggtcccgcg

SEQ ID NO: 4034282 - DNA, 25 bp, Homo sapien
tctgcttgaagtgatccaacaactc

SEQ ID NO: 4034283 - DNA, 25 bp, Homo sapien
tgctcttttagaacgattgaaactg

SEQ ID NO: 4034284 - DNA, 25 bp, Homo sapien
aatacattcttgatctatctgctgc

SEQ ID NO: 4034285 - DNA, 25 bp, Homo sapien
ccaacaactctctgactgtcttttg

SEQ ID NO: 4034286 - DNA, 25 bp, Homo sapien
tgattttccgtgacaccacttggtc

SEQ ID NO: 4034287 - DNA, 25 bp, Homo sapien
tcagcaccaagaaggtatgattttc

SEQ ID NO: 4034288 - DNA, 25 bp, Homo sapien
tgccagagacaacagtcagcaccaa

SEQ ID NO: 4034289 - DNA, 25 bp, Homo sapien
gaaggtatgattttccgtgacacca

SEQ ID NO: 4034290 - DNA, 25 bp, Homo sapien
gaagggtgctggaaccacggtgcag

SEQ ID NO: 4034291 - DNA, 25 bp, Homo sapien
tgggaagtgtcaaaaggcagaaggg

SEQ ID NO: 4034292 - DNA, 25 bp, Homo sapien
tgtcaaaaggcagaagggtgctgga

SEQ ID NO: 4034293 - DNA, 25 bp, Homo sapien
aaccacggtgcagacccaggactgt

SEQ ID NO: 4034294 - DNA, 25 bp, Homo sapien
tgcttctacctgtaaggaaatggta

SEQ ID NO: 4034295 - DNA, 25 bp, Homo sapien
gtaccaatttcctcaagctgcaaga

SEQ ID NO: 4034296 - DNA, 25 bp, Homo sapien
ggtaccaatttcctcaagctgcaag

SEQ ID NO: 4034297 - DNA, 25 bp, Homo sapien
ctgcttctacctgtaaggaaatggt

SEQ ID NO: 4034298 - DNA, 25 bp, Homo sapien
aagggcactgcttggcagaccagct

SEQ ID NO: 4034299 - DNA, 25 bp, Homo sapien
tctcttctgtgataccagttcctgg

SEQ ID NO: 4034300 - DNA, 25 bp, Homo sapien
gtttccatgtttcggtttaatcata

SEQ ID NO: 4034301 - DNA, 25 bp, Homo sapien
gtgataccagttcctggaattactg

SEQ ID NO: 4034302 - DNA, 25 bp, Homo sapien
atgtttccatgtttcggtttaatca

SEQ ID NO: 4034303 - DNA, 25 bp, Homo sapien
cacttgtcacccagtcaagatggaa

SEQ ID NO: 4034304 - DNA, 25 bp, Homo sapien
aggcaacaagggtctattggaggaa

SEQ ID NO: 4034305 - DNA, 25 bp, Homo sapien
aattgcaaggcgacatttcagggta

SEQ ID NO: 4034306 - DNA, 25 bp, Homo sapien
ccttctgataatgggcaaggaaacc

SEQ ID NO: 4034307 - DNA, 25 bp, Homo sapien
ctgaagactcctcctattcatctca

SEQ ID NO: 4034308 - DNA, 25 bp, Homo sapien
tggttttggtgaaaacacatgagga

SEQ ID NO: 4034309 - DNA, 25 bp, Homo sapien
ttcctcctctagaatcagccgccag

SEQ ID NO: 4034310 - DNA, 25 bp, Homo sapien
cagttttttaatccattagctgggt

SEQ ID NO: 4034311 - DNA, 25 bp, Homo sapien
aaggacttcaggcttgtcaaactca

SEQ ID NO: 4034312 - DNA, 25 bp, Homo sapien
ctctgcaaggacttcaggcttgtca

SEQ ID NO: 4034313 - DNA, 25 bp, Homo sapien
cttcaggcttgtcaaactcaatcac

SEQ ID NO: 4034314 - DNA, 25 bp, Homo sapien
ctggcttctctgcaaggacttcagg

SEQ ID NO: 4034315 - DNA, 25 bp, Homo sapien
gcggtgggcgatggtcagcacagtg

SEQ ID NO: 4034316 - DNA, 25 bp, Homo sapien
ccaggacgtgatcgcagttgagaac

SEQ ID NO: 4034317 - DNA, 25 bp, Homo sapien
agaactgtgttgaggcggtgggcga

SEQ ID NO: 4034318 - DNA, 25 bp, Homo sapien
tctttgatggtgttctgaaccaggg

SEQ ID NO: 4034319 - DNA, 25 bp, Homo sapien
gagtccatagaggcggtggcttcat

SEQ ID NO: 4034320 - DNA, 25 bp, Homo sapien
ggagtccatagaggcggtggcttca

SEQ ID NO: 4034321 - DNA, 25 bp, Homo sapien
tccatagaggcggtggcttcatcaa

SEQ ID NO: 4034322 - DNA, 25 bp, Homo sapien
catagaggcggtggcttcatcaagg

SEQ ID NO: 4034323 - DNA, 25 bp, Homo sapien
ttatccctcacaactttgtcttaag

SEQ ID NO: 4034324 - DNA, 25 bp, Homo sapien
aatggctcaattgctgtctctttgc

SEQ ID NO: 4034325 - DNA, 25 bp, Homo sapien
tgatcggtttttaaatggctcaatt

SEQ ID NO: 4034326 - DNA, 25 bp, Homo sapien
aagtgatcggtttttaaatggctca

SEQ ID NO: 4034327 - DNA, 25 bp, Homo sapien
acacaaagcagctgacgttccccta

SEQ ID NO: 4034328 - DNA, 25 bp, Homo sapien
cctgtaatttttctgggagtttcat

SEQ ID NO: 4034329 - DNA, 25 bp, Homo sapien
ctttgaattacggagaagagctcgg

SEQ ID NO: 4034330 - DNA, 25 bp, Homo sapien
ctgacgttcccctactgagaagttt

SEQ ID NO: 4034331 - DNA, 25 bp, Homo sapien
tctcatcggtgtgactctcaaaggg

SEQ ID NO: 4034332 - DNA, 25 bp, Homo sapien
agcatctcatcggtgtgactctcaa

SEQ ID NO: 4034333 - DNA, 25 bp, Homo sapien
tgtctctcatgaatgttctctccag

SEQ ID NO: 4034334 - DNA, 25 bp, Homo sapien
actctcaaagggatccaagttgtac

SEQ ID NO: 4034335 - DNA, 25 bp, Homo sapien
agaatgcagatatccacctcatcaa

SEQ ID NO: 4034336 - DNA, 25 bp, Homo sapien
gctccaccagacgaaacaaagccat

SEQ ID NO: 4034337 - DNA, 25 bp, Homo sapien
gaggtcttccaagctgagaatgcag

SEQ ID NO: 4034338 - DNA, 25 bp, Homo sapien
gaaacaaagccattcctaacgatga

SEQ ID NO: 4034339 - DNA, 25 bp, Homo sapien
ctgaaggtgatctccccacggctgg

SEQ ID NO: 4034340 - DNA, 25 bp, Homo sapien
tgtatgttcaagttcaggctgtcga

SEQ ID NO: 4034341 - DNA, 25 bp, Homo sapien
tatctcatctgatagtctctgaagg

SEQ ID NO: 4034342 - DNA, 25 bp, Homo sapien
caaggggggtgttgtctctgtatct

SEQ ID NO: 4034343 - DNA, 25 bp, Homo sapien
aggggatgagtgcattcaggaacac

SEQ ID NO: 4034344 - DNA, 25 bp, Homo sapien
ccctttcgcatctaaaaagatccag

SEQ ID NO: 4034345 - DNA, 25 bp, Homo sapien
tcacattcaacaacaagaacttcag

SEQ ID NO: 4034346 - DNA, 25 bp, Homo sapien
ccagtatttgcccaagtcctgccaa

SEQ ID NO: 4034347 - DNA, 25 bp, Homo sapien
gaagagggatgactcgtccgatttg

SEQ ID NO: 4034348 - DNA, 25 bp, Homo sapien
gcagctccacggaggtgaatttggc

SEQ ID NO: 4034349 - DNA, 25 bp, Homo sapien
tggcttgcgtctctgttcccgttcg

SEQ ID NO: 4034350 - DNA, 25 bp, Homo sapien
cacggaggtgaatttggcttgcgtc

SEQ ID NO: 4034351 - DNA, 25 bp, Homo sapien
tgttcccgttcgcacacacacttgg

SEQ ID NO: 4034352 - DNA, 25 bp, Homo sapien
gccaagcgcccagaagtaaagatat

SEQ ID NO: 4034353 - DNA, 25 bp, Homo sapien
gcaagacagcacaaacaggaggcct

SEQ ID NO: 4034354 - DNA, 25 bp, Homo sapien
taccgctgtgggcaactgagagtcc

SEQ ID NO: 4034355 - DNA, 25 bp, Homo sapien
tgaatggagcacacctcggaactgt

SEQ ID NO: 4034356 - DNA, 25 bp, Homo sapien
ggatgatgtatgacaatgacaggcc

SEQ ID NO: 4034357 - DNA, 25 bp, Homo sapien
ggccacagtgaaggtaaggatgttc

SEQ ID NO: 4034358 - DNA, 25 bp, Homo sapien
caatgacaggcctttggatgaagta

SEQ ID NO: 4034359 - DNA, 25 bp, Homo sapien
ggacatccattctcagcgcaaacca

SEQ ID NO: 4034360 - DNA, 25 bp, Homo sapien
tgagagcacagttaaagtagaggag

SEQ ID NO: 4034361 - DNA, 25 bp, Homo sapien
gagagcacagttaaagtagaggagg

SEQ ID NO: 4034362 - DNA, 25 bp, Homo sapien
ctgagagcacagttaaagtagagga

SEQ ID NO: 4034363 - DNA, 25 bp, Homo sapien
ggagagaatggcccagaggtgccag

SEQ ID NO: 4034364 - DNA, 25 bp, Homo sapien
gagagaatggcccagaggtgccagt

SEQ ID NO: 4034365 - DNA, 25 bp, Homo sapien
cagaggtgccagtcacccaaggatg

SEQ ID NO: 4034366 - DNA, 25 bp, Homo sapien
ccagaggtgccagtcacccaaggat

SEQ ID NO: 4034367 - DNA, 25 bp, Homo sapien
tccttcttgccataggcgtgaatga

SEQ ID NO: 4034368 - DNA, 25 bp, Homo sapien
tgccataggcgtgaatgatgcccag

SEQ ID NO: 4034369 - DNA, 25 bp, Homo sapien
taggcgtgaatgatgcccaggccct

SEQ ID NO: 4034370 - DNA, 25 bp, Homo sapien
gcagctctccttcttgccataggcg

SEQ ID NO: 4034371 - DNA, 25 bp, Homo sapien
cagggtgaccggctgacattctcca

SEQ ID NO: 4034372 - DNA, 25 bp, Homo sapien
gcaaggctggccacgactaaaagga

SEQ ID NO: 4034373 - DNA, 25 bp, Homo sapien
gatcacgagaataaacaccaccata

SEQ ID NO: 4034374 - DNA, 25 bp, Homo sapien
cagaaagttctctgcgtgaaacggc

SEQ ID NO: 4034375 - DNA, 25 bp, Homo sapien
ccagtgggagtcgtgtcaaagaaac

SEQ ID NO: 4034376 - DNA, 25 bp, Homo sapien
ctttggtgacgccaaacaccagcat

SEQ ID NO: 4034377 - DNA, 25 bp, Homo sapien
ttatcaaacaccgtgtcatgcagag

SEQ ID NO: 4034378 - DNA, 25 bp, Homo sapien
gaagcctttggtgacgccaaacacc

SEQ ID NO: 4034379 - DNA, 25 bp, Homo sapien
tcaaacaccgtgtcatgcagagagg

SEQ ID NO: 4034380 - DNA, 25 bp, Homo sapien
gtacacatgctgaccgatgtctgcc

SEQ ID NO: 4034381 - DNA, 25 bp, Homo sapien
cacatgctgaccgatgtctgccagc

SEQ ID NO: 4034382 - DNA, 25 bp, Homo sapien
cgcgccgacctcacacatggtcctg

SEQ ID NO: 4034383 - DNA, 25 bp, Homo sapien
tgctgaccgatgtctgccagcaccg

SEQ ID NO: 4034384 - DNA, 25 bp, Homo sapien
ccgtgagcccttgtccaaccagaga

SEQ ID NO: 4034385 - DNA, 25 bp, Homo sapien
gtgagcccttgtccaaccagagacc

SEQ ID NO: 4034386 - DNA, 25 bp, Homo sapien
gagcccttgtccaaccagagaccca

SEQ ID NO: 4034387 - DNA, 25 bp, Homo sapien
aggcagcgctgccaatcatcaggag

SEQ ID NO: 4034388 - DNA, 25 bp, Homo sapien
gggattcagtctggatgagctggtg

SEQ ID NO: 4034389 - DNA, 25 bp, Homo sapien
ccttcctggggggattcagtctgga

SEQ ID NO: 4034390 - DNA, 25 bp, Homo sapien
ttaatgtacgtgtgatatgttttcc

SEQ ID NO: 4034391 - DNA, 25 bp, Homo sapien
cagaagccttaatgtacgtgtgata

SEQ ID NO: 4034392 - DNA, 25 bp, Homo sapien
aacacaagtgccatggctctcacca

SEQ ID NO: 4034393 - DNA, 25 bp, Homo sapien
acaaacacaagtgccatggctctca

SEQ ID NO: 4034394 - DNA, 25 bp, Homo sapien
gacaaacacaagtgccatggctctc

SEQ ID NO: 4034395 - DNA, 25 bp, Homo sapien
ctgtggagacaaacacaagtgccat

SEQ ID NO: 4034396 - DNA, 25 bp, Homo sapien
gcatttgtcacaagcaccattgagg

SEQ ID NO: 4034397 - DNA, 25 bp, Homo sapien
acattgtaacatctctggaatctgg

SEQ ID NO: 4034398 - DNA, 25 bp, Homo sapien
gatgccagatctcatcgattcgaag

SEQ ID NO: 4034399 - DNA, 25 bp, Homo sapien
tctctggaatctggatgtgccttcc

SEQ ID NO: 4034400 - DNA, 25 bp, Homo sapien
ttgtgtctacaaattctgagcctgt

SEQ ID NO: 4034401 - DNA, 25 bp, Homo sapien
ttctgagcctgtttcagattctttt

SEQ ID NO: 4034402 - DNA, 25 bp, Homo sapien
gtgtctacaaattctgagcctgttt

SEQ ID NO: 4034403 - DNA, 25 bp, Homo sapien
tgtgtctacaaattctgagcctgtt

SEQ ID NO: 4034404 - DNA, 25 bp, Homo sapien
ttcaagccaaggacaataacaggga

SEQ ID NO: 4034405 - DNA, 25 bp, Homo sapien
attcaagccaaggacaataacaggg

SEQ ID NO: 4034406 - DNA, 25 bp, Homo sapien
tcaagccaaggacaataacagggat

SEQ ID NO: 4034407 - DNA, 25 bp, Homo sapien
aagccaaggacaataacagggatgg

SEQ ID NO: 4034408 - DNA, 25 bp, Homo sapien
ccattgctgcattgtaaaggtgttc

SEQ ID NO: 4034409 - DNA, 25 bp, Homo sapien
ctgcattgtaaaggtgttcaggatc

SEQ ID NO: 4034410 - DNA, 25 bp, Homo sapien
tccaccattgctgcattgtaaaggt

SEQ ID NO: 4034411 - DNA, 25 bp, Homo sapien
aggcttccaccattgctgcattgta

SEQ ID NO: 4034412 - DNA, 25 bp, Homo sapien
tctcctccattaactccttgtgggt

SEQ ID NO: 4034413 - DNA, 25 bp, Homo sapien
tcagttttgcatagcgccctctctc

SEQ ID NO: 4034414 - DNA, 25 bp, Homo sapien
cttgaactgcaatcctcgcaggttg

SEQ ID NO: 4034415 - DNA, 25 bp, Homo sapien
caatcctcgcaggttgtgaatcagt

SEQ ID NO: 4034416 - DNA, 25 bp, Homo sapien
gaagtaagtgatcgacaatgaactt

SEQ ID NO: 4034417 - DNA, 25 bp, Homo sapien
tgcagaagtaagtgatcgacaatga

SEQ ID NO: 4034418 - DNA, 25 bp, Homo sapien
cagaagtaagtgatcgacaatgaac

SEQ ID NO: 4034419 - DNA, 25 bp, Homo sapien
ctgcagaagtaagtgatcgacaatg

SEQ ID NO: 4034420 - DNA, 25 bp, Homo sapien
cccttcccccacacatctctgggga

SEQ ID NO: 4034421 - DNA, 25 bp, Homo sapien
ccccccttcccccacacatctctgg

SEQ ID NO: 4034422 - DNA, 25 bp, Homo sapien
cccccttcccccacacatctctggg

SEQ ID NO: 4034423 - DNA, 25 bp, Homo sapien
cttcccccacacatctctggggatt

SEQ ID NO: 4034424 - DNA, 25 bp, Homo sapien
aaggctggggaatcatgagtgtctc

SEQ ID NO: 4034425 - DNA, 25 bp, Homo sapien
ctggggaatcatgagtgtctcttgc

SEQ ID NO: 4034426 - DNA, 25 bp, Homo sapien
gctggggaatcatgagtgtctcttg

SEQ ID NO: 4034427 - DNA, 25 bp, Homo sapien
ggctggggaatcatgagtgtctctt

SEQ ID NO: 4034428 - DNA, 25 bp, Homo sapien
gtagagctgacggtcggagtagaca

SEQ ID NO: 4034429 - DNA, 25 bp, Homo sapien
ggacgactgtctttcccctgagcgt

SEQ ID NO: 4034430 - DNA, 25 bp, Homo sapien
agtagacagcgcgggccaggctaat

SEQ ID NO: 4034431 - DNA, 25 bp, Homo sapien
caggacgactgtctttcccctgagc

SEQ ID NO: 4034432 - DNA, 25 bp, Homo sapien
ccaaagggaattgtgtgagcagaga

SEQ ID NO: 4034433 - DNA, 25 bp, Homo sapien
cagcggcaacgagggcaaagctctt

SEQ ID NO: 4034434 - DNA, 25 bp, Homo sapien
ttcccatgaggattgaggggtgccc

SEQ ID NO: 4034435 - DNA, 25 bp, Homo sapien
gggctacgtcatttttatcaccaaa

SEQ ID NO: 4034436 - DNA, 25 bp, Homo sapien
acagacgcggactgtgtgctgatac

SEQ ID NO: 4034437 - DNA, 25 bp, Homo sapien
caggtctccataggggaggttgctc

SEQ ID NO: 4034438 - DNA, 25 bp, Homo sapien
ctcagtcaggtctccataggggagg

SEQ ID NO: 4034439 - DNA, 25 bp, Homo sapien
cacagacgcggactgtgtgctgata

SEQ ID NO: 4034440 - DNA, 25 bp, Homo sapien
ctgttggtgcaaagctcagaagtag

SEQ ID NO: 4034441 - DNA, 25 bp, Homo sapien
ggtctgcagaagtcgcctctcctga

SEQ ID NO: 4034442 - DNA, 25 bp, Homo sapien
tagtcagaccacatatgccctgttg

SEQ ID NO: 4034443 - DNA, 25 bp, Homo sapien
gagcagttttgggtactcagcctaa

SEQ ID NO: 4034444 - DNA, 25 bp, Homo sapien
ctgccctgggaatgaagtgccgatt

SEQ ID NO: 4034445 - DNA, 25 bp, Homo sapien
tctccaaagagtatgttttctctca

SEQ ID NO: 4034446 - DNA, 25 bp, Homo sapien
gctgtgaaacgtaggccaaagttcc

SEQ ID NO: 4034447 - DNA, 25 bp, Homo sapien
tccatgcctgctgtgaaacgtaggc

SEQ ID NO: 4034448 - DNA, 25 bp, Homo sapien
aacgtaggccaaagttccattgact

SEQ ID NO: 4034449 - DNA, 25 bp, Homo sapien
acattcccacatattcccaagatct

SEQ ID NO: 4034450 - DNA, 25 bp, Homo sapien
ccacattcccacatattcccaagat

SEQ ID NO: 4034451 - DNA, 25 bp, Homo sapien
tcccacattcccacatattcccaag

SEQ ID NO: 4034452 - DNA, 25 bp, Homo sapien
attcccacatattcccaagatcttc

SEQ ID NO: 4034453 - DNA, 25 bp, Homo sapien
tatgctgtgcagaaccgatttgagg

SEQ ID NO: 4034454 - DNA, 25 bp, Homo sapien
cttatgctgtgcagaaccgatttga

SEQ ID NO: 4034455 - DNA, 25 bp, Homo sapien
ttatgctgtgcagaaccgatttgag

SEQ ID NO: 4034456 - DNA, 25 bp, Homo sapien
gacagtatctgggtcttctggttgg

SEQ ID NO: 4034457 - DNA, 25 bp, Homo sapien
cagtggctcccttggctggtggact

SEQ ID NO: 4034458 - DNA, 25 bp, Homo sapien
ctcccatgtcaaggtggcatttgct

SEQ ID NO: 4034459 - DNA, 25 bp, Homo sapien
tggtggactcctctcactgtatgcc

SEQ ID NO: 4034460 - DNA, 25 bp, Homo sapien
ctccttagagagacattcgcttcag

SEQ ID NO: 4034461 - DNA, 25 bp, Homo sapien
gcaagattgcaatggaaaacttcat

SEQ ID NO: 4034462 - DNA, 25 bp, Homo sapien
gagagacattcgcttcagccattgc

SEQ ID NO: 4034463 - DNA, 25 bp, Homo sapien
cttagagagacattcgcttcagcca

SEQ ID NO: 4034464 - DNA, 25 bp, Homo sapien
aggatgtggcaggataatgtcagca

SEQ ID NO: 4034465 - DNA, 25 bp, Homo sapien
gggcagagtttccactttggacaaa

SEQ ID NO: 4034466 - DNA, 25 bp, Homo sapien
cacgggtgcggtgagtttgcgtctc

SEQ ID NO: 4034467 - DNA, 25 bp, Homo sapien
cacgatggctatggtggacacgatg

SEQ ID NO: 4034468 - DNA, 25 bp, Homo sapien
caccaaaattgctgaccttcggaaa

SEQ ID NO: 4034469 - DNA, 25 bp, Homo sapien
tcagcctgatgcaggtcagaaactc

SEQ ID NO: 4034470 - DNA, 25 bp, Homo sapien
tgaactcgcttgtctgtcaccaaaa

SEQ ID NO: 4034471 - DNA, 25 bp, Homo sapien
tgaccttcggaaagctgaattgagc

SEQ ID NO: 4034472 - DNA, 25 bp, Homo sapien
tacgccgcacaaaagaccattagga

SEQ ID NO: 4034473 - DNA, 25 bp, Homo sapien
gatatcccgatgagagctgtgggcc

SEQ ID NO: 4034474 - DNA, 25 bp, Homo sapien
ggtggctggcaaaggacaaaacaag

SEQ ID NO: 4034475 - DNA, 25 bp, Homo sapien
cagaatgaaaaaggcgtacgccgca

SEQ ID NO: 4034476 - DNA, 25 bp, Homo sapien
ctggaaagaaaagcgcaaaggttca

SEQ ID NO: 4034477 - DNA, 25 bp, Homo sapien
tggaaagaaaagcgcaaaggttcag

SEQ ID NO: 4034478 - DNA, 25 bp, Homo sapien
gcaaaaagggctatgcacagtccaa

SEQ ID NO: 4034479 - DNA, 25 bp, Homo sapien
gaagactttggtaaactcggtggca

SEQ ID NO: 4034480 - DNA, 25 bp, Homo sapien
ccttcaaccggatggccgtgcggta

SEQ ID NO: 4034481 - DNA, 25 bp, Homo sapien
caggcaagggcccaaaagaagactt

SEQ ID NO: 4034482 - DNA, 25 bp, Homo sapien
gctcgtagagaaagtaactaatgac

SEQ ID NO: 4034483 - DNA, 25 bp, Homo sapien
cagctcgtagagaaagtaactaatg

SEQ ID NO: 4034484 - DNA, 25 bp, Homo sapien
agctcgtagagaaagtaactaatga

SEQ ID NO: 4034485 - DNA, 25 bp, Homo sapien
tggccacgatgtccatcaacacgcg

SEQ ID NO: 4034486 - DNA, 25 bp, Homo sapien
ttctcaggacccacccttgctacct

SEQ ID NO: 4034487 - DNA, 25 bp, Homo sapien
caacacgcgtgtcctctggaatttc

SEQ ID NO: 4034488 - DNA, 25 bp, Homo sapien
cacccttgctacctcttcatcccaa

SEQ ID NO: 4034489 - DNA, 25 bp, Homo sapien
ggcagggtgtctacggtcagccttt

SEQ ID NO: 4034490 - DNA, 25 bp, Homo sapien
aaaatgtggcgaaggagagtagccc

SEQ ID NO: 4034491 - DNA, 25 bp, Homo sapien
tcaccggcgtgagccaggaaaatgt

SEQ ID NO: 4034492 - DNA, 25 bp, Homo sapien
agcctttgccggtagcctttcacca

SEQ ID NO: 4034493 - DNA, 25 bp, Homo sapien
ggtcgcactgggatcatggtcttca

SEQ ID NO: 4034494 - DNA, 25 bp, Homo sapien
tgagataaggtagggtccttcaccc

SEQ ID NO: 4034495 - DNA, 25 bp, Homo sapien
cttgcacagggtcgcactgggatca

SEQ ID NO: 4034496 - DNA, 25 bp, Homo sapien
gccggcctcgctggtccagatctga

SEQ ID NO: 4034497 - DNA, 25 bp, Homo sapien
ctggagccctgggcttttggcctgg

SEQ ID NO: 4034498 - DNA, 25 bp, Homo sapien
gagccctgggcttttggcctgggga

SEQ ID NO: 4034499 - DNA, 25 bp, Homo sapien
cctgggcttttggcctggggacact

SEQ ID NO: 4034500 - DNA, 25 bp, Homo sapien
ggcttttggcctggggacactttca

SEQ ID NO: 4034501 - DNA, 25 bp, Homo sapien
gagcagaaaaccctatggtgtggtt

SEQ ID NO: 4034502 - DNA, 25 bp, Homo sapien
tacgtcccttaatgctacgctgagg

SEQ ID NO: 4034503 - DNA, 25 bp, Homo sapien
ttgggagccggtccaatgaccaagg

SEQ ID NO: 4034504 - DNA, 25 bp, Homo sapien
gctttgacccctgagaactgttttc

SEQ ID NO: 4034505 - DNA, 25 bp, Homo sapien
catcagcttgtcttaagggctcctg

SEQ ID NO: 4034506 - DNA, 25 bp, Homo sapien
tttctaatggtaagggaccctggca

SEQ ID NO: 4034507 - DNA, 25 bp, Homo sapien
agcttgtcttaagggctcctgagtc

SEQ ID NO: 4034508 - DNA, 25 bp, Homo sapien
agatgtcatcagcttgtcttaaggg

SEQ ID NO: 4034509 - DNA, 25 bp, Homo sapien
tcagcgcgcataggaaattggtgct

SEQ ID NO: 4034510 - DNA, 25 bp, Homo sapien
taatttccttgagtgctccccaggg

SEQ ID NO: 4034511 - DNA, 25 bp, Homo sapien
tctgaggcggcttggaagcattgca

SEQ ID NO: 4034512 - DNA, 25 bp, Homo sapien
tccccagggcatgtgaagttttgat

SEQ ID NO: 4034513 - DNA, 25 bp, Homo sapien
cccaggtcccaggcacctgtggcag

SEQ ID NO: 4034514 - DNA, 25 bp, Homo sapien
tctcctgtctgtccccaggtcccag

SEQ ID NO: 4034515 - DNA, 25 bp, Homo sapien
cctgtggcagccagatcagaaagcc

SEQ ID NO: 4034516 - DNA, 25 bp, Homo sapien
aggtcccaggcacctgtggcagcca

SEQ ID NO: 4034517 - DNA, 25 bp, Homo sapien
ggaggggaggagggtcagcagtcat

SEQ ID NO: 4034518 - DNA, 25 bp, Homo sapien
tgggctgaggatgagagggagggga

SEQ ID NO: 4034519 - DNA, 25 bp, Homo sapien
ctgggctgaggatgagagggagggg

SEQ ID NO: 4034520 - DNA, 25 bp, Homo sapien
gagggaggggaggagggtcagcagt

SEQ ID NO: 4034521 - DNA, 25 bp, Homo sapien
ttctcttgtcccacccgcctgaagt

SEQ ID NO: 4034522 - DNA, 25 bp, Homo sapien
gacctcagattcagtttctcttgtc

SEQ ID NO: 4034523 - DNA, 25 bp, Homo sapien
tctccccaaggacctcagattcagt

SEQ ID NO: 4034524 - DNA, 25 bp, Homo sapien
ccaaggacctcagattcagtttctc

SEQ ID NO: 4034525 - DNA, 25 bp, Homo sapien
tcaaggaaaagacggcagctgcatc

SEQ ID NO: 4034526 - DNA, 25 bp, Homo sapien
cctcacccgtgatgagggcagtgtc

SEQ ID NO: 4034527 - DNA, 25 bp, Homo sapien
gccatctgctggtcgctcaaggaaa

SEQ ID NO: 4034528 - DNA, 25 bp, Homo sapien
gccatcaccgcatttttgggacgag

SEQ ID NO: 4034529 - DNA, 25 bp, Homo sapien
gagattccaaattccctgagggcag

SEQ ID NO: 4034530 - DNA, 25 bp, Homo sapien
gggcagggacaccatttcatcccca

SEQ ID NO: 4034531 - DNA, 25 bp, Homo sapien
gagagtgagaaatattggtttacta

SEQ ID NO: 4034532 - DNA, 25 bp, Homo sapien
tccccagcaccagtgcaggcaagag

SEQ ID NO: 4034533 - DNA, 25 bp, Homo sapien
ggttctaaggtcttgagagccatca

SEQ ID NO: 4034534 - DNA, 25 bp, Homo sapien
agcatttgcaacacttctaacacag

SEQ ID NO: 4034535 - DNA, 25 bp, Homo sapien
caagtagcctattccagggtttcca

SEQ ID NO: 4034536 - DNA, 25 bp, Homo sapien
taaaaggagaaccacatgatcactg

SEQ ID NO: 4034537 - DNA, 25 bp, Homo sapien
tgcacctgtgtgaacctctgagctc

SEQ ID NO: 4034538 - DNA, 25 bp, Homo sapien
gagaagttctcatctccaaacaaga

SEQ ID NO: 4034539 - DNA, 25 bp, Homo sapien
cttccaggagaagttctcatctcca

SEQ ID NO: 4034540 - DNA, 25 bp, Homo sapien
caagaaggtcgcagactgtgggcct

SEQ ID NO: 4034541 - DNA, 25 bp, Homo sapien
ttcttccgcagtacctccggccgat

SEQ ID NO: 4034542 - DNA, 25 bp, Homo sapien
aacaatgacccaggcttcttccgca

SEQ ID NO: 4034543 - DNA, 25 bp, Homo sapien
gtacctccggccgatcaaattctac

SEQ ID NO: 4034544 - DNA, 25 bp, Homo sapien
gccatgagggctgcgaacaatgacc

SEQ ID NO: 4034545 - DNA, 25 bp, Homo sapien
gcacagtggtgacacggtgggcaat

SEQ ID NO: 4034546 - DNA, 25 bp, Homo sapien
gccctggaaggcttcacggattgtg

SEQ ID NO: 4034547 - DNA, 25 bp, Homo sapien
ttcacggattgtgcgctggatcagg

SEQ ID NO: 4034548 - DNA, 25 bp, Homo sapien
atgacgagcacggtgcagccctgga

SEQ ID NO: 4034549 - DNA, 25 bp, Homo sapien
atctgtatgcagctttttggggaac

SEQ ID NO: 4034550 - DNA, 25 bp, Homo sapien
cttggagttgcgaagcacagccctg

SEQ ID NO: 4034551 - DNA, 25 bp, Homo sapien
tccaccacatctgtatgcagctttt

SEQ ID NO: 4034552 - DNA, 25 bp, Homo sapien
ttggagttgcgaagcacagccctgg

SEQ ID NO: 4034553 - DNA, 25 bp, Homo sapien
tgtgacggtcaaagggatctaggtt

SEQ ID NO: 4034554 - DNA, 25 bp, Homo sapien
aggcatcccagatctgctggtcagt

SEQ ID NO: 4034555 - DNA, 25 bp, Homo sapien
gacggtcaaagggatctaggttgaa

SEQ ID NO: 4034556 - DNA, 25 bp, Homo sapien
tctgctggtcagtgtgacggtcaaa

SEQ ID NO: 4034557 - DNA, 25 bp, Homo sapien
tcttgagggatcactgagagcttgg

SEQ ID NO: 4034558 - DNA, 25 bp, Homo sapien
gagcttggaccgcaagtcctccagg

SEQ ID NO: 4034559 - DNA, 25 bp, Homo sapien
gtcaatgagaatccggcctgccatg

SEQ ID NO: 4034560 - DNA, 25 bp, Homo sapien
gctgcaaatgtccacgccgtcaatg

SEQ ID NO: 4034561 - DNA, 25 bp, Homo sapien
catagtaggtgctcagtaaaaacct

SEQ ID NO: 4034562 - DNA, 25 bp, Homo sapien
ctttcggttcccaggcacatagtag

SEQ ID NO: 4034563 - DNA, 25 bp, Homo sapien
gcacatagtaggtgctcagtaaaaa

SEQ ID NO: 4034564 - DNA, 25 bp, Homo sapien
atagtaggtgctcagtaaaaaccta

SEQ ID NO: 4034565 - DNA, 25 bp, Homo sapien
accacttcgtggccgcggatggtca

SEQ ID NO: 4034566 - DNA, 25 bp, Homo sapien
ccgcggatggtcaggttgatgccgt

SEQ ID NO: 4034567 - DNA, 25 bp, Homo sapien
tggtcaggttgatgccgtgaagcac

SEQ ID NO: 4034568 - DNA, 25 bp, Homo sapien
cgtgaagcacggtgggtgtgttgtc

SEQ ID NO: 4034569 - DNA, 25 bp, Homo sapien
gaaatatgatttccccatgctgtgg

SEQ ID NO: 4034570 - DNA, 25 bp, Homo sapien
ctgaaatatgatttccccatgctgt

SEQ ID NO: 4034571 - DNA, 25 bp, Homo sapien
tatgatttccccatgctgtggccac

SEQ ID NO: 4034572 - DNA, 25 bp, Homo sapien
aatatgatttccccatgctgtggcc

SEQ ID NO: 4034573 - DNA, 25 bp, Homo sapien
ctggggacaacttgtgccttccatg

SEQ ID NO: 4034574 - DNA, 25 bp, Homo sapien
tgtgccttccatgtgtaaaggagct

SEQ ID NO: 4034575 - DNA, 25 bp, Homo sapien
tgtgtaaaggagcttccgagacaca

SEQ ID NO: 4034576 - DNA, 25 bp, Homo sapien
gtaaaggagcttccgagacacacat

SEQ ID NO: 4034577 - DNA, 25 bp, Homo sapien
agccgtgaactgtgcctctgtctcc

SEQ ID NO: 4034578 - DNA, 25 bp, Homo sapien
cttcatgtactgcagtatcctctct

SEQ ID NO: 4034579 - DNA, 25 bp, Homo sapien
gcagtatcctctctacagccgtgaa

SEQ ID NO: 4034580 - DNA, 25 bp, Homo sapien
tctccaagccaatccgggcagtggc

SEQ ID NO: 4034581 - DNA, 25 bp, Homo sapien
gcaagatcccaagccaattagagag

SEQ ID NO: 4034582 - DNA, 25 bp, Homo sapien
gggccttcacggatgccccttctgt

SEQ ID NO: 4034583 - DNA, 25 bp, Homo sapien
ccaggttcccttaggcactgccaag

SEQ ID NO: 4034584 - DNA, 25 bp, Homo sapien
tctgtggacagtgaaccttggccag

SEQ ID NO: 4034585 - DNA, 25 bp, Homo sapien
gaaatgccaaaagccacgaacaggg

SEQ ID NO: 4034586 - DNA, 25 bp, Homo sapien
tgcagcacgatgttgacagccatga

SEQ ID NO: 4034587 - DNA, 25 bp, Homo sapien
gaacagggcaacagccaaggtcaca

SEQ ID NO: 4034588 - DNA, 25 bp, Homo sapien
caacagcaggtagttattctgcgca

SEQ ID NO: 4034589 - DNA, 25 bp, Homo sapien
atggagctcaggccttgcagagaat

SEQ ID NO: 4034590 - DNA, 25 bp, Homo sapien
tggagctcaggccttgcagagaatt

SEQ ID NO: 4034591 - DNA, 25 bp, Homo sapien
acacaccgatggccttcttgaacat

SEQ ID NO: 4034592 - DNA, 25 bp, Homo sapien
cacaccgatggccttcttgaacatc

SEQ ID NO: 4034593 - DNA, 25 bp, Homo sapien
ccagtctcttgaacacaccgatggc

SEQ ID NO: 4034594 - DNA, 25 bp, Homo sapien
ctccagtctcttgaacacaccgatg

SEQ ID NO: 4034595 - DNA, 25 bp, Homo sapien
ttaacaggatatatggagacagcac

SEQ ID NO: 4034596 - DNA, 25 bp, Homo sapien
tgcgaagcagttcaaaagccggcct

SEQ ID NO: 4034597 - DNA, 25 bp, Homo sapien
tgacaatcaacaggacggcgatcac

SEQ ID NO: 4034598 - DNA, 25 bp, Homo sapien
caggaactgctctgaaaagatgggc

SEQ ID NO: 4034599 - DNA, 25 bp, Homo sapien
tagaaggacagttgaggattgtctg

SEQ ID NO: 4034600 - DNA, 25 bp, Homo sapien
tgagcccgtacaccagctggtagaa

SEQ ID NO: 4034601 - DNA, 25 bp, Homo sapien
tgccttcctcgtgaccttggtgaaa

SEQ ID NO: 4034602 - DNA, 25 bp, Homo sapien
gagcagggcgttgagcccgtacacc

SEQ ID NO: 4034603 - DNA, 25 bp, Homo sapien
aagctgaagatcgttaagaagacga

SEQ ID NO: 4034604 - DNA, 25 bp, Homo sapien
accagtagctcagccaccagaagct

SEQ ID NO: 4034605 - DNA, 25 bp, Homo sapien
agccctgctccaaccagtagctcag

SEQ ID NO: 4034606 - DNA, 25 bp, Homo sapien
gttaagaagacgatcagcaccacga

SEQ ID NO: 4034607 - DNA, 25 bp, Homo sapien
aactcaaggagccttcttccatctc

SEQ ID NO: 4034608 - DNA, 25 bp, Homo sapien
tcctgtgtgagctgatgctccggca

SEQ ID NO: 4034609 - DNA, 25 bp, Homo sapien
ctccagctgcctggatgtagtggtg

SEQ ID NO: 4034610 - DNA, 25 bp, Homo sapien
ggtggtagaccctccaactcaagga

SEQ ID NO: 4034611 - DNA, 25 bp, Homo sapien
tctgtctctggcttcgatcctgtgc

SEQ ID NO: 4034612 - DNA, 25 bp, Homo sapien
gccaatcacatgatctgcttccttc

SEQ ID NO: 4034613 - DNA, 25 bp, Homo sapien
gaaaagtggtatgcctgccaatcac

SEQ ID NO: 4034614 - DNA, 25 bp, Homo sapien
cgatcctgtgccagcttttcacttt

SEQ ID NO: 4034615 - DNA, 25 bp, Homo sapien
gcatttccgttgagagactcttcca

SEQ ID NO: 4034616 - DNA, 25 bp, Homo sapien
cagcatttccgttgagagactcttc

SEQ ID NO: 4034617 - DNA, 25 bp, Homo sapien
gagcctgactttctacctttggctt

SEQ ID NO: 4034618 - DNA, 25 bp, Homo sapien
catttccgttgagagactcttccag

SEQ ID NO: 4034619 - DNA, 25 bp, Homo sapien
cttctggataagttgggcatatttc

SEQ ID NO: 4034620 - DNA, 25 bp, Homo sapien
tgtgcatcttctggataagttgggc

SEQ ID NO: 4034621 - DNA, 25 bp, Homo sapien
tctggataagttgggcatatttccc

SEQ ID NO: 4034622 - DNA, 25 bp, Homo sapien
catcttctggataagttgggcatat

SEQ ID NO: 4034623 - DNA, 25 bp, Homo sapien
aaaaatgtgcttccccacgtgggcg

SEQ ID NO: 4034624 - DNA, 25 bp, Homo sapien
gtgggtcaccaggacgaccgtcttc

SEQ ID NO: 4034625 - DNA, 25 bp, Homo sapien
aggacgaccgtcttccccctgagtg

SEQ ID NO: 4034626 - DNA, 25 bp, Homo sapien
gagtgtcttcttaatgcactcctca

SEQ ID NO: 4034627 - DNA, 25 bp, Homo sapien
agaggttgaggccccgctctccaat

SEQ ID NO: 4034628 - DNA, 25 bp, Homo sapien
gtttctgccccccagagaggttgag

SEQ ID NO: 4034629 - DNA, 25 bp, Homo sapien
cgggccaggctgatcctctgtttct

SEQ ID NO: 4034630 - DNA, 25 bp, Homo sapien
ctgacggtcggaatagacggcgcgg

SEQ ID NO: 4034631 - DNA, 25 bp, Homo sapien
gggcagaagttccaggtcccgattc

SEQ ID NO: 4034632 - DNA, 25 bp, Homo sapien
gttccaggtcccgattcagggagca

SEQ ID NO: 4034633 - DNA, 25 bp, Homo sapien
gaagttccaggtcccgattcaggga

SEQ ID NO: 4034634 - DNA, 25 bp, Homo sapien
cagaagttccaggtcccgattcagg

SEQ ID NO: 4034635 - DNA, 25 bp, Homo sapien
tatgcgcctcccatgaggatgttct

SEQ ID NO: 4034636 - DNA, 25 bp, Homo sapien
gggccttgtcatatgcgcctcccat

SEQ ID NO: 4034637 - DNA, 25 bp, Homo sapien
atgttcccgctgacgatccaggcct

SEQ ID NO: 4034638 - DNA, 25 bp, Homo sapien
aggatgttctccctgatgttcccgc

SEQ ID NO: 4034639 - DNA, 25 bp, Homo sapien
tccaggatggctgacaacaggctgc

SEQ ID NO: 4034640 - DNA, 25 bp, Homo sapien
tgttgccgcagacccctaacatcat

SEQ ID NO: 4034641 - DNA, 25 bp, Homo sapien
ttaccactccccgtgttgccgcaga

SEQ ID NO: 4034642 - DNA, 25 bp, Homo sapien
tgacaacaggctgctcttaccactc

SEQ ID NO: 4034643 - DNA, 25 bp, Homo sapien
tgtcatggtataatgcagctgcccc

SEQ ID NO: 4034644 - DNA, 25 bp, Homo sapien
tacaatgcactctatcgggtcacgg

SEQ ID NO: 4034645 - DNA, 25 bp, Homo sapien
ccgcagggctagagatgatcaccaa

SEQ ID NO: 4034646 - DNA, 25 bp, Homo sapien
cccatggcggctcaactgtttagaa

SEQ ID NO: 4034647 - DNA, 25 bp, Homo sapien
tgcctgcgtggcctgaacaaggcta

SEQ ID NO: 4034648 - DNA, 25 bp, Homo sapien
gcctgcgtggcctgaacaaggctac

SEQ ID NO: 4034649 - DNA, 25 bp, Homo sapien
ccatgacaaggtggcctcctcaaag

SEQ ID NO: 4034650 - DNA, 25 bp, Homo sapien
gacatagaaaacagggctctcctgg

SEQ ID NO: 4034651 - DNA, 25 bp, Homo sapien
tgtctggacatagaaaacagggctc

SEQ ID NO: 4034652 - DNA, 25 bp, Homo sapien
ccccattgacgatcccgggacaggt

SEQ ID NO: 4034653 - DNA, 25 bp, Homo sapien
cactgacagccgaaggagattcaag

SEQ ID NO: 4034654 - DNA, 25 bp, Homo sapien
cgaaggagattcaaggaggccagca

SEQ ID NO: 4034655 - DNA, 25 bp, Homo sapien
tttgactgcaataggcacaaagaac

SEQ ID NO: 4034656 - DNA, 25 bp, Homo sapien
caaagaacactgacagccgaaggag

SEQ ID NO: 4034657 - DNA, 25 bp, Homo sapien
cattgacgctgtgagtttcagcttt

SEQ ID NO: 4034658 - DNA, 25 bp, Homo sapien
gatgaacaaggttatacttgtcagg

SEQ ID NO: 4034659 - DNA, 25 bp, Homo sapien
tggacaagcccgcacttctccaata

SEQ ID NO: 4034660 - DNA, 25 bp, Homo sapien
ccagaccgctgtggccactgtgggg

SEQ ID NO: 4034661 - DNA, 25 bp, Homo sapien
gagcagaaagtcagactttccatac

SEQ ID NO: 4034662 - DNA, 25 bp, Homo sapien
aggtttggagcagaaagtcagactt

SEQ ID NO: 4034663 - DNA, 25 bp, Homo sapien
catgccatcaccaggtttggagcag

SEQ ID NO: 4034664 - DNA, 25 bp, Homo sapien
tttggagcagaaagtcagactttcc

SEQ ID NO: 4034665 - DNA, 25 bp, Homo sapien
tgcgctggtcgctgacctcagatgt

SEQ ID NO: 4034666 - DNA, 25 bp, Homo sapien
acacggatgcgctggtcgctgacct

SEQ ID NO: 4034667 - DNA, 25 bp, Homo sapien
ttttaatcagcttaatgcaagtgag

SEQ ID NO: 4034668 - DNA, 25 bp, Homo sapien
cttcactggtcacacggatgcgctg

SEQ ID NO: 4034669 - DNA, 25 bp, Homo sapien
aatgctgcagatgaccagcgatgcg

SEQ ID NO: 4034670 - DNA, 25 bp, Homo sapien
gcagtgtatccaataatgaagtagg

SEQ ID NO: 4034671 - DNA, 25 bp, Homo sapien
cgatgcgcaggtgatcagtactagg

SEQ ID NO: 4034672 - DNA, 25 bp, Homo sapien
ccagtgggaaaaccaggagatagca

SEQ ID NO: 4034673 - DNA, 25 bp, Homo sapien
tagtttacatcaccggtgaagaagc

SEQ ID NO: 4034674 - DNA, 25 bp, Homo sapien
catcaccggtgaagaagctgatggc

SEQ ID NO: 4034675 - DNA, 25 bp, Homo sapien
caggtagtttacatcaccggtgaag

SEQ ID NO: 4034676 - DNA, 25 bp, Homo sapien
aaacaggtagtttacatcaccggtg

SEQ ID NO: 4034677 - DNA, 25 bp, Homo sapien
gcaagacagcaagttgatgggcaca

SEQ ID NO: 4034678 - DNA, 25 bp, Homo sapien
gacagcaagttgatgggcacagatg

SEQ ID NO: 4034679 - DNA, 25 bp, Homo sapien
ctgcaagacagcaagttgatgggca

SEQ ID NO: 4034680 - DNA, 25 bp, Homo sapien
cagcaagttgatgggcacagatgtc

SEQ ID NO: 4034681 - DNA, 25 bp, Homo sapien
ggaggaaacagctgctcggaacctg

SEQ ID NO: 4034682 - DNA, 25 bp, Homo sapien
tattacagacttaaattggatgagc

SEQ ID NO: 4034683 - DNA, 25 bp, Homo sapien
gatgtgtattacagacttaaattgg

SEQ ID NO: 4034684 - DNA, 25 bp, Homo sapien
gaaacagctgctcggaacctgatgg

SEQ ID NO: 4034685 - DNA, 25 bp, Homo sapien
ccaggatctttggtataatcaatat

SEQ ID NO: 4034686 - DNA, 25 bp, Homo sapien
cattccccaactgctcttctgaata

SEQ ID NO: 4034687 - DNA, 25 bp, Homo sapien
ctgtgcgttggttgatgatccaact

SEQ ID NO: 4034688 - DNA, 25 bp, Homo sapien
gagacttcacacattcggagagaaa

SEQ ID NO: 4034689 - DNA, 25 bp, Homo sapien
acctccccgtagctggtaccagtgc

SEQ ID NO: 4034690 - DNA, 25 bp, Homo sapien
tcccacctcccccattggtgcagtc

SEQ ID NO: 4034691 - DNA, 25 bp, Homo sapien
cacctcccccattggtgcagtctag

SEQ ID NO: 4034692 - DNA, 25 bp, Homo sapien
tcccccattggtgcagtctaggctg

SEQ ID NO: 4034693 - DNA, 25 bp, Homo sapien
cgaaaatcaaccttgttctctggaa

SEQ ID NO: 4034694 - DNA, 25 bp, Homo sapien
ggcccgagtacactggcaatgcaga

SEQ ID NO: 4034695 - DNA, 25 bp, Homo sapien
gaagctttttcaatccctcgccttg

SEQ ID NO: 4034696 - DNA, 25 bp, Homo sapien
gcccagaagtgcatcgaaaatcaac

SEQ ID NO: 4034697 - DNA, 25 bp, Homo sapien
ggtgttctcatctaagcgactccgt

SEQ ID NO: 4034698 - DNA, 25 bp, Homo sapien
gacatttttgtctgaggcatcatgg

SEQ ID NO: 4034699 - DNA, 25 bp, Homo sapien
tcatgagcggggtgagccatgacac

SEQ ID NO: 4034700 - DNA, 25 bp, Homo sapien
tccgtaagctttggatcatgagcgg

SEQ ID NO: 4034701 - DNA, 25 bp, Homo sapien
tcatacttcccccacggtgggacag

SEQ ID NO: 4034702 - DNA, 25 bp, Homo sapien
ggacggaagggaatcatggttctca

SEQ ID NO: 4034703 - DNA, 25 bp, Homo sapien
gttctcaaggcagcatcatacttcc

SEQ ID NO: 4034704 - DNA, 25 bp, Homo sapien
ctcggcttgggacggaagggaatca

SEQ ID NO: 4034705 - DNA, 25 bp, Homo sapien
tcacgaggccaccagaagagttggg

SEQ ID NO: 4034706 - DNA, 25 bp, Homo sapien
gaaaccatgtcatcgcctatgtcga

SEQ ID NO: 4034707 - DNA, 25 bp, Homo sapien
ggcacccagtatgtcctcttcctag

SEQ ID NO: 4034708 - DNA, 25 bp, Homo sapien
tgtcgatgccacgattcacgaggcc

SEQ ID NO: 4034709 - DNA, 25 bp, Homo sapien
cctcaggcccaaatcacttagtgaa

SEQ ID NO: 4034710 - DNA, 25 bp, Homo sapien
tgatgtatcaaacccctgctcataa

SEQ ID NO: 4034711 - DNA, 25 bp, Homo sapien
tgatcctgggcaatctcctttgatg

SEQ ID NO: 4034712 - DNA, 25 bp, Homo sapien
ttagatctcgccttgagcagccaga

SEQ ID NO: 4034713 - DNA, 25 bp, Homo sapien
tatagtatgatttgccaacctggtt

SEQ ID NO: 4034714 - DNA, 25 bp, Homo sapien
ttcagctatagtatgatttgccaac

SEQ ID NO: 4034715 - DNA, 25 bp, Homo sapien
ctttcagctatagtatgatttgcca

SEQ ID NO: 4034716 - DNA, 25 bp, Homo sapien
cagctatagtatgatttgccaacct

SEQ ID NO: 4034717 - DNA, 25 bp, Homo sapien
tgcaaagcaccatcctgggcgtcat

SEQ ID NO: 4034718 - DNA, 25 bp, Homo sapien
aaaggctgccagcatgtcatcagtg

SEQ ID NO: 4034719 - DNA, 25 bp, Homo sapien
ttctgaagggcacgtcgctgcaaag

SEQ ID NO: 4034720 - DNA, 25 bp, Homo sapien
gctctcctagagagcagcgcgaagc

SEQ ID NO: 4034721 - DNA, 25 bp, Homo sapien
tcatcagaccatctagttatcctag

SEQ ID NO: 4034722 - DNA, 25 bp, Homo sapien
aagcgccaccatacccttcaggttt

SEQ ID NO: 4034723 - DNA, 25 bp, Homo sapien
aaagcctatgtggaaagattgtacc

SEQ ID NO: 4034724 - DNA, 25 bp, Homo sapien
tccggcattataagaactcatcaga

SEQ ID NO: 4034725 - DNA, 25 bp, Homo sapien
cctttctcttgtttcctttgcgcta

SEQ ID NO: 4034726 - DNA, 25 bp, Homo sapien
ccagaagaggggctctgttcctttc

SEQ ID NO: 4034727 - DNA, 25 bp, Homo sapien
ttctgtatggtagcccagaggccag

SEQ ID NO: 4034728 - DNA, 25 bp, Homo sapien
ctgcttttctgtatggtagcccaga

SEQ ID NO: 4034729 - DNA, 25 bp, Homo sapien
tctaggcaggtaatggataagttcc

SEQ ID NO: 4034730 - DNA, 25 bp, Homo sapien
gaacagcttcatcgtaattatactt

SEQ ID NO: 4034731 - DNA, 25 bp, Homo sapien
gggtgaattcctagtagcaagggta

SEQ ID NO: 4034732 - DNA, 25 bp, Homo sapien
attcccttcattctaggcaggtaat

SEQ ID NO: 4034733 - DNA, 25 bp, Homo sapien
tctgaaatctcagtcgcataatgtg

SEQ ID NO: 4034734 - DNA, 25 bp, Homo sapien
ttgaactgactaaatgaaggtttag

SEQ ID NO: 4034735 - DNA, 25 bp, Homo sapien
tcattatgaattagtgtgaactaag

SEQ ID NO: 4034736 - DNA, 25 bp, Homo sapien
tgaaggtttagtacatcattatgaa

SEQ ID NO: 4034737 - DNA, 25 bp, Homo sapien
gagcggcctgtgctccgacaaatca

SEQ ID NO: 4034738 - DNA, 25 bp, Homo sapien
attcccagaaagagttgacgtcaac

SEQ ID NO: 4034739 - DNA, 25 bp, Homo sapien
atgaaaacacattctgggcttcaag

SEQ ID NO: 4034740 - DNA, 25 bp, Homo sapien
ctagtgagagttggttgagtgcttc

SEQ ID NO: 4034741 - DNA, 25 bp, Homo sapien
cgtacactgggaaaggacaacctat

SEQ ID NO: 4034742 - DNA, 25 bp, Homo sapien
gaaactgaaccactctctctcttat

SEQ ID NO: 4034743 - DNA, 25 bp, Homo sapien
caaagtagacaaaaacgtacactgg

SEQ ID NO: 4034744 - DNA, 25 bp, Homo sapien
aactcgaggttaggctaggtggctc

SEQ ID NO: 4034745 - DNA, 25 bp, Homo sapien
gtgcgtgactatacccactatatgt

SEQ ID NO: 4034746 - DNA, 25 bp, Homo sapien
tcaggtccgttgttgtcttctggga

SEQ ID NO: 4034747 - DNA, 25 bp, Homo sapien
ggtttgtgtacaccaagcatcacca

SEQ ID NO: 4034748 - DNA, 25 bp, Homo sapien
taatgcattccattgccctaacggg

SEQ ID NO: 4034749 - DNA, 25 bp, Homo sapien
aagaatggccaggtccgttggctca

SEQ ID NO: 4034750 - DNA, 25 bp, Homo sapien
tatagtaaatggacatgaaaaggtc

SEQ ID NO: 4034751 - DNA, 25 bp, Homo sapien
aaatgtttgcagatacccttttgtt

SEQ ID NO: 4034752 - DNA, 25 bp, Homo sapien
tcataatagataattgccactaaaa

SEQ ID NO: 4034753 - DNA, 25 bp, Homo sapien
agttctttggctattgggcctgttt

SEQ ID NO: 4034754 - DNA, 25 bp, Homo sapien
gctattgggcctgttttcattgaaa

SEQ ID NO: 4034755 - DNA, 25 bp, Homo sapien
tggctattgggcctgttttcattga

SEQ ID NO: 4034756 - DNA, 25 bp, Homo sapien
tctttggctattgggcctgttttca

SEQ ID NO: 4034757 - DNA, 25 bp, Homo sapien
tattcgaccttctttttgggacgca

SEQ ID NO: 4034758 - DNA, 25 bp, Homo sapien
tggccgcacttcttgcagcagttga

SEQ ID NO: 4034759 - DNA, 25 bp, Homo sapien
caggcgagcacagctcttgtggcac

SEQ ID NO: 4034760 - DNA, 25 bp, Homo sapien
cttctttttgggacgcaggttgttg

SEQ ID NO: 4034761 - DNA, 25 bp, Homo sapien
gtagtctaagagtgtgtggccatcc

SEQ ID NO: 4034762 - DNA, 25 bp, Homo sapien
gttgtagtctaagagtgtgtggcca

SEQ ID NO: 4034763 - DNA, 25 bp, Homo sapien
atgttgtagtctaagagtgtgtggc

SEQ ID NO: 4034764 - DNA, 25 bp, Homo sapien
tgtagtctaagagtgtgtggccatc

SEQ ID NO: 4034765 - DNA, 25 bp, Homo sapien
cagtggcatcactgggctcgacctc

SEQ ID NO: 4034766 - DNA, 25 bp, Homo sapien
ggtctggcctgtgagggtcttcaca

SEQ ID NO: 4034767 - DNA, 25 bp, Homo sapien
atggtctggcctgtgagggtcttca

SEQ ID NO: 4034768 - DNA, 25 bp, Homo sapien
gcatcactgggctcgacctcaaggg

SEQ ID NO: 4034769 - DNA, 25 bp, Homo sapien
tcagatgtagccatgactggagaaa

SEQ ID NO: 4034770 - DNA, 25 bp, Homo sapien
aaattacactgagaggtcttgttct

SEQ ID NO: 4034771 - DNA, 25 bp, Homo sapien
tagtaacctgtctcgcctcactttt

SEQ ID NO: 4034772 - DNA, 25 bp, Homo sapien
tcactttttagtgggcggctggtac

SEQ ID NO: 4034773 - DNA, 25 bp, Homo sapien
cttacagtctaggttccagccaggc

SEQ ID NO: 4034774 - DNA, 25 bp, Homo sapien
gatggacttgcccataggctgcttg

SEQ ID NO: 4034775 - DNA, 25 bp, Homo sapien
caaattggtcccatctagtggcagg

SEQ ID NO: 4034776 - DNA, 25 bp, Homo sapien
gacattatgactggccacctccagg

SEQ ID NO: 4034777 - DNA, 25 bp, Homo sapien
tattctagccagtaatggacttcag

SEQ ID NO: 4034778 - DNA, 25 bp, Homo sapien
gcaatttctagttattattctagcc

SEQ ID NO: 4034779 - DNA, 25 bp, Homo sapien
tttaggaaatcgaggcgagtggatc

SEQ ID NO: 4034780 - DNA, 25 bp, Homo sapien
tccaagtaatactacctaattgtta

SEQ ID NO: 4034781 - DNA, 25 bp, Homo sapien
aaaaagccatgtggtagcaagtacc

SEQ ID NO: 4034782 - DNA, 25 bp, Homo sapien
catatccaggagcagaactactaga

SEQ ID NO: 4034783 - DNA, 25 bp, Homo sapien
ttgaagcaaccaccaacgtgatagg

SEQ ID NO: 4034784 - DNA, 25 bp, Homo sapien
tagatgataccagtctgccagcacg

SEQ ID NO: 4034785 - DNA, 25 bp, Homo sapien
caaaatcagctatgtggccaggtaa

SEQ ID NO: 4034786 - DNA, 25 bp, Homo sapien
gaaatcctacactgtccactggaga

SEQ ID NO: 4034787 - DNA, 25 bp, Homo sapien
ccaggtaattcactgctgagggctt

SEQ ID NO: 4034788 - DNA, 25 bp, Homo sapien
tagttcacgagaaatccatgaccgt

SEQ ID NO: 4034789 - DNA, 25 bp, Homo sapien
agtacttcagttcctattgccatga

SEQ ID NO: 4034790 - DNA, 25 bp, Homo sapien
catgtttaagctcacattatttgaa

SEQ ID NO: 4034791 - DNA, 25 bp, Homo sapien
tgaagtaacatgtttaagctcacat

SEQ ID NO: 4034792 - DNA, 25 bp, Homo sapien
catcaagtagttttggttgtttcaa

SEQ ID NO: 4034793 - DNA, 25 bp, Homo sapien
caaatactgtgcatgacgatgcctt

SEQ ID NO: 4034794 - DNA, 25 bp, Homo sapien
aaatactgtgcatgacgatgccttc

SEQ ID NO: 4034795 - DNA, 25 bp, Homo sapien
tacaaatactgtgcatgacgatgcc

SEQ ID NO: 4034796 - DNA, 25 bp, Homo sapien
ttacaaatactgtgcatgacgatgc

SEQ ID NO: 4034797 - DNA, 25 bp, Homo sapien
caaagattaagctcaaaggtgtgac

SEQ ID NO: 4034798 - DNA, 25 bp, Homo sapien
gagagcaccttatagatgctttaaa

SEQ ID NO: 4034799 - DNA, 25 bp, Homo sapien
ggaactcatggcttcacaaaatagc

SEQ ID NO: 4034800 - DNA, 25 bp, Homo sapien
tctaacctttcaaagattaagctca

SEQ ID NO: 4034801 - DNA, 25 bp, Homo sapien
gcactatgtattgactcacaaaggg

SEQ ID NO: 4034802 - DNA, 25 bp, Homo sapien
tcaagatggcttgtcagttaaagga

SEQ ID NO: 4034803 - DNA, 25 bp, Homo sapien
tgcccatcttgggtgtatatacata

SEQ ID NO: 4034804 - DNA, 25 bp, Homo sapien
tattagtgttactacatgcaactgt

SEQ ID NO: 4034805 - DNA, 25 bp, Homo sapien
cagacagatgggtgccttattttct

SEQ ID NO: 4034806 - DNA, 25 bp, Homo sapien
gaaagagttttaggttggcagacag

SEQ ID NO: 4034807 - DNA, 25 bp, Homo sapien
tctagcttccacctaccgaaagagt

SEQ ID NO: 4034808 - DNA, 25 bp, Homo sapien
tgaaactgaagttttaaacactggc

SEQ ID NO: 4034809 - DNA, 25 bp, Homo sapien
ttcatgaatagatcgaggagtcgct

SEQ ID NO: 4034810 - DNA, 25 bp, Homo sapien
taatgctgtagcagtctgacggctc

SEQ ID NO: 4034811 - DNA, 25 bp, Homo sapien
caagatggccactctgacattgaag

SEQ ID NO: 4034812 - DNA, 25 bp, Homo sapien
gcattacagcatccagagagccttg

SEQ ID NO: 4034813 - DNA, 25 bp, Homo sapien
ggtgaactcctgtataaaatcggca

SEQ ID NO: 4034814 - DNA, 25 bp, Homo sapien
tagaactaatccgaggataccgcgg

SEQ ID NO: 4034815 - DNA, 25 bp, Homo sapien
cgttttgctaggactctccctgagg

SEQ ID NO: 4034816 - DNA, 25 bp, Homo sapien
taccgcggattgaatgtagttccaa

SEQ ID NO: 4034817 - DNA, 25 bp, Homo sapien
taccaactgatagcttaaatgaggg

SEQ ID NO: 4034818 - DNA, 25 bp, Homo sapien
cagtgtgacccaggtattctgtccc

SEQ ID NO: 4034819 - DNA, 25 bp, Homo sapien
ttccagaggcaacaaaagtgacaat

SEQ ID NO: 4034820 - DNA, 25 bp, Homo sapien
gattacccaagtggttaccaactga

SEQ ID NO: 4034821 - DNA, 25 bp, Homo sapien
tcaaagctccaagggtggaacccag

SEQ ID NO: 4034822 - DNA, 25 bp, Homo sapien
gaacggaggtattacaggacagcaa

SEQ ID NO: 4034823 - DNA, 25 bp, Homo sapien
taacacaatatagctacggaccaag

SEQ ID NO: 4034824 - DNA, 25 bp, Homo sapien
tgcagtaggaaccaaggacagccct

SEQ ID NO: 4034825 - DNA, 25 bp, Homo sapien
aaacgtctcgattctgctgcagcca

SEQ ID NO: 4034826 - DNA, 25 bp, Homo sapien
ttccctaagccaggcaggttccact

SEQ ID NO: 4034827 - DNA, 25 bp, Homo sapien
gactgagaacctcggaaacgtctcg

SEQ ID NO: 4034828 - DNA, 25 bp, Homo sapien
cagcagcccaaatgaaacatgactg

SEQ ID NO: 4034829 - DNA, 25 bp, Homo sapien
gactcccctccaggagtacagagaa

SEQ ID NO: 4034830 - DNA, 25 bp, Homo sapien
tggccgctggtaaacatgtgaacaa

SEQ ID NO: 4034831 - DNA, 25 bp, Homo sapien
acatgtgaacaagactcccctccag

SEQ ID NO: 4034832 - DNA, 25 bp, Homo sapien
tgtcctggccgctggtaaacatgtg

SEQ ID NO: 4034833 - DNA, 25 bp, Homo sapien
gctgagaaggaagtgcgctccctga

SEQ ID NO: 4034834 - DNA, 25 bp, Homo sapien
cccaaattcgcgtctgaggtcagga

SEQ ID NO: 4034835 - DNA, 25 bp, Homo sapien
cagattcactgggtagggtcctgcc

SEQ ID NO: 4034836 - DNA, 25 bp, Homo sapien
gagaagtcaggccacgcattgcgtt

SEQ ID NO: 4034837 - DNA, 25 bp, Homo sapien
aactcatttgacattgtggcaggta

SEQ ID NO: 4034838 - DNA, 25 bp, Homo sapien
taggtatcagattacaaatttgctc

SEQ ID NO: 4034839 - DNA, 25 bp, Homo sapien
gcaattatcactaccccatctctag

SEQ ID NO: 4034840 - DNA, 25 bp, Homo sapien
agaaagggtaggatgcaattatcac

SEQ ID NO: 4034841 - DNA, 25 bp, Homo sapien
tgccactgctttcagtccacctatt

SEQ ID NO: 4034842 - DNA, 25 bp, Homo sapien
gccactgctttcagtccacctattg

SEQ ID NO: 4034843 - DNA, 25 bp, Homo sapien
ccactgctttcagtccacctattgt

SEQ ID NO: 4034844 - DNA, 25 bp, Homo sapien
gctgccactgctttcagtccaccta

SEQ ID NO: 4034845 - DNA, 25 bp, Homo sapien
ggcaccaacgcgctccgtcgccaac

SEQ ID NO: 4034846 - DNA, 25 bp, Homo sapien
cgccgagaccgacgggacaccctgg

SEQ ID NO: 4034847 - DNA, 25 bp, Homo sapien
gtcctggcaccaacgcgctccgtcg

SEQ ID NO: 4034848 - DNA, 25 bp, Homo sapien
ctgtgggcggagagcgcgcctcgga

SEQ ID NO: 4034849 - DNA, 25 bp, Homo sapien
caaagctcatctgtgcggagcctgt

SEQ ID NO: 4034850 - DNA, 25 bp, Homo sapien
ttgggccaccgttgcttaatcgggc

SEQ ID NO: 4034851 - DNA, 25 bp, Homo sapien
gtttaaattgccatctcatcagcgc

SEQ ID NO: 4034852 - DNA, 25 bp, Homo sapien
gaaatgacagtgattccctcagaga

SEQ ID NO: 4034853 - DNA, 25 bp, Homo sapien
agggctcaagagactctcttacctc

SEQ ID NO: 4034854 - DNA, 25 bp, Homo sapien
ccagggctcaagagactctcttacc

SEQ ID NO: 4034855 - DNA, 25 bp, Homo sapien
tggcactgtctcagcccattgtaac

SEQ ID NO: 4034856 - DNA, 25 bp, Homo sapien
gcactgtctcagcccattgtaacct

SEQ ID NO: 4034857 - DNA, 25 bp, Homo sapien
tggtagtaaaatccagagggcttgt

SEQ ID NO: 4034858 - DNA, 25 bp, Homo sapien
tgaagctgtggtggtagtaaaatcc

SEQ ID NO: 4034859 - DNA, 25 bp, Homo sapien
taggacacatttggattagtgaagc

SEQ ID NO: 4034860 - DNA, 25 bp, Homo sapien
cagagggcttgttggtggaatggtt

SEQ ID NO: 4034861 - DNA, 25 bp, Homo sapien
gagaagcagggatcttgaggtaggt

SEQ ID NO: 4034862 - DNA, 25 bp, Homo sapien
cagggatcttgaggtaggtgagatg

SEQ ID NO: 4034863 - DNA, 25 bp, Homo sapien
tcttgaggtaggtgagatggttggg

SEQ ID NO: 4034864 - DNA, 25 bp, Homo sapien
gttgggcccttcatgtttgtttctc

SEQ ID NO: 4034865 - DNA, 25 bp, Homo sapien
gatgctcagcttcagagaccaatgc

SEQ ID NO: 4034866 - DNA, 25 bp, Homo sapien
agcttcagagaccaatgcacgtcca

SEQ ID NO: 4034867 - DNA, 25 bp, Homo sapien
agatgctcagcttcagagaccaatg

SEQ ID NO: 4034868 - DNA, 25 bp, Homo sapien
gctcagcttcagagaccaatgcacg

SEQ ID NO: 4034869 - DNA, 25 bp, Homo sapien
taaacccttggttagctcactgctg

SEQ ID NO: 4034870 - DNA, 25 bp, Homo sapien
gccaaggctgggactattaacacat

SEQ ID NO: 4034871 - DNA, 25 bp, Homo sapien
tatattcaagggttttcaagcggga

SEQ ID NO: 4034872 - DNA, 25 bp, Homo sapien
taactaatcaagtcaggaattgccg

SEQ ID NO: 4034873 - DNA, 25 bp, Homo sapien
gatcgcaagccctcgatgacttcct

SEQ ID NO: 4034874 - DNA, 25 bp, Homo sapien
gggaccccaggccttgatcgcaagc

SEQ ID NO: 4034875 - DNA, 25 bp, Homo sapien
tcgatgacttcctcgatagcaagcc

SEQ ID NO: 4034876 - DNA, 25 bp, Homo sapien
aggccttgatcgcaagccctcgatg

SEQ ID NO: 4034877 - DNA, 25 bp, Homo sapien
aagtctttcaggagtagtctacaca

SEQ ID NO: 4034878 - DNA, 25 bp, Homo sapien
tgaggcatcctttaaagaccccaag

SEQ ID NO: 4034879 - DNA, 25 bp, Homo sapien
tggcttgctgcatcgtgtggaaaca

SEQ ID NO: 4034880 - DNA, 25 bp, Homo sapien
tacagtctggagttcatgggtctaa

SEQ ID NO: 4034881 - DNA, 25 bp, Homo sapien
ggctccactgcctgctaggcttcat

SEQ ID NO: 4034882 - DNA, 25 bp, Homo sapien
ctgggctccactgcctgctaggctt

SEQ ID NO: 4034883 - DNA, 25 bp, Homo sapien
tgggctccactgcctgctaggcttc

SEQ ID NO: 4034884 - DNA, 25 bp, Homo sapien
gggctccactgcctgctaggcttca

SEQ ID NO: 4034885 - DNA, 25 bp, Homo sapien
gggaggcagcatcccaaacacagct

SEQ ID NO: 4034886 - DNA, 25 bp, Homo sapien
aggcagcatcccaaacacagctggg

SEQ ID NO: 4034887 - DNA, 25 bp, Homo sapien
gaggcagcatcccaaacacagctgg

SEQ ID NO: 4034888 - DNA, 25 bp, Homo sapien
agggaggcagcatcccaaacacagc

SEQ ID NO: 4034889 - DNA, 25 bp, Homo sapien
gaaaacccaacgatcatgcttagga

SEQ ID NO: 4034890 - DNA, 25 bp, Homo sapien
aaacccaacgatcatgcttaggaac

SEQ ID NO: 4034891 - DNA, 25 bp, Homo sapien
aaaacccaacgatcatgcttaggaa

SEQ ID NO: 4034892 - DNA, 25 bp, Homo sapien
tgaaaacccaacgatcatgcttagg

SEQ ID NO: 4034893 - DNA, 25 bp, Homo sapien
tcccttggcaaatagtacgtgctca

SEQ ID NO: 4034894 - DNA, 25 bp, Homo sapien
gaccatcggtgtcccttggcaaata

SEQ ID NO: 4034895 - DNA, 25 bp, Homo sapien
tgcaggcaggaccatcggtgtccct

SEQ ID NO: 4034896 - DNA, 25 bp, Homo sapien
gtgctcagtaaccatttcatcgttg

SEQ ID NO: 4034897 - DNA, 25 bp, Homo sapien
ttatttgtcgaccaagtcaatgcga

SEQ ID NO: 4034898 - DNA, 25 bp, Homo sapien
agtcaatgcgatgcacaaaaatgtc

SEQ ID NO: 4034899 - DNA, 25 bp, Homo sapien
tgtcgaccaagtcaatgcgatgcac

SEQ ID NO: 4034900 - DNA, 25 bp, Homo sapien
gaccaagtcaatgcgatgcacaaaa

SEQ ID NO: 4034901 - DNA, 25 bp, Homo sapien
gcttttatttggccccaagacagag

SEQ ID NO: 4034902 - DNA, 25 bp, Homo sapien
agagcatgcccaggatccggtgaga

SEQ ID NO: 4034903 - DNA, 25 bp, Homo sapien
ttgttggcattgccctggaaaccca

SEQ ID NO: 4034904 - DNA, 25 bp, Homo sapien
tcaccttgttcaacaggcacatggc

SEQ ID NO: 4034905 - DNA, 25 bp, Homo sapien
cctccttctgggaaccggcaggtga

SEQ ID NO: 4034906 - DNA, 25 bp, Homo sapien
ctagaacgtcctgtctcctccttct

SEQ ID NO: 4034907 - DNA, 25 bp, Homo sapien
gtctcctccttctgggaaccggcag

SEQ ID NO: 4034908 - DNA, 25 bp, Homo sapien
ggaaccggcaggtgacagtgagtga

SEQ ID NO: 4034909 - DNA, 25 bp, Homo sapien
atgggcagtgctgtcccttggcacc

SEQ ID NO: 4034910 - DNA, 25 bp, Homo sapien
gatgggcagtgctgtcccttggcac

SEQ ID NO: 4034911 - DNA, 25 bp, Homo sapien
tctgacaagtaacagacacgttagg

SEQ ID NO: 4034912 - DNA, 25 bp, Homo sapien
ccatcatctgacaagtaacagacac

SEQ ID NO: 4034913 - DNA, 25 bp, Homo sapien
caagtaacagacacgttaggtgacc

SEQ ID NO: 4034914 - DNA, 25 bp, Homo sapien
aacagacacgttaggtgacccagga

SEQ ID NO: 4034915 - DNA, 25 bp, Homo sapien
gcaacggaatacaggtggtccctgg

SEQ ID NO: 4034916 - DNA, 25 bp, Homo sapien
caaagtgttctaggaagcaacggaa

SEQ ID NO: 4034917 - DNA, 25 bp, Homo sapien
aaggcaaagtgttctaggaagcaac

SEQ ID NO: 4034918 - DNA, 25 bp, Homo sapien
tctaggaagcaacggaatacaggtg

SEQ ID NO: 4034919 - DNA, 25 bp, Homo sapien
tcctggcaactacaccttgccaggg

SEQ ID NO: 4034920 - DNA, 25 bp, Homo sapien
caactacaccttgccagggcttgca

SEQ ID NO: 4034921 - DNA, 25 bp, Homo sapien
gggcttcctggcaactacaccttgc

SEQ ID NO: 4034922 - DNA, 25 bp, Homo sapien
tggcaactacaccttgccagggctt

SEQ ID NO: 4034923 - DNA, 25 bp, Homo sapien
catctctagcggagagaggtccatc

SEQ ID NO: 4034924 - DNA, 25 bp, Homo sapien
ccacggacactaagctcaggagatg

SEQ ID NO: 4034925 - DNA, 25 bp, Homo sapien
tggcaagtgctcaaagcgagacaca

SEQ ID NO: 4034926 - DNA, 25 bp, Homo sapien
gacagtacacaatcagtggcagcag

SEQ ID NO: 4034927 - DNA, 25 bp, Homo sapien
tggaaagtgcactcctgaaggtcag

SEQ ID NO: 4034928 - DNA, 25 bp, Homo sapien
tggccctaagggtgactgcagtttc

SEQ ID NO: 4034929 - DNA, 25 bp, Homo sapien
catgtggtccgtggatcacctgcat

SEQ ID NO: 4034930 - DNA, 25 bp, Homo sapien
ttactggaaggtaaatctggccaca

SEQ ID NO: 4034931 - DNA, 25 bp, Homo sapien
gaaagtccggtcaagccatgtgcac

SEQ ID NO: 4034932 - DNA, 25 bp, Homo sapien
gctgtacaaactccacatcagggcg

SEQ ID NO: 4034933 - DNA, 25 bp, Homo sapien
tctagccaggaaaagtggtggcccc

SEQ ID NO: 4034934 - DNA, 25 bp, Homo sapien
tccacattaggaggcatcacggacg

SEQ ID NO: 4034935 - DNA, 25 bp, Homo sapien
tgagcttgagtttgatcagccagcc

SEQ ID NO: 4034936 - DNA, 25 bp, Homo sapien
cattcccatcaggtacaggtgtgag

SEQ ID NO: 4034937 - DNA, 25 bp, Homo sapien
taaaggctaaccatatccatttgtc

SEQ ID NO: 4034938 - DNA, 25 bp, Homo sapien
tacaactgcgtttacactgggaaat

SEQ ID NO: 4034939 - DNA, 25 bp, Homo sapien
tggcagaaagcgcatttagatcttt

SEQ ID NO: 4034940 - DNA, 25 bp, Homo sapien
tatgggtgggccaccaagatctggt

SEQ ID NO: 4034941 - DNA, 25 bp, Homo sapien
tccctcagctcgttggtttctgcag

SEQ ID NO: 4034942 - DNA, 25 bp, Homo sapien
ttcagaagggcttccctcagctcgt

SEQ ID NO: 4034943 - DNA, 25 bp, Homo sapien
cccacatttggcagggcactgagta

SEQ ID NO: 4034944 - DNA, 25 bp, Homo sapien
atccgggtcggaggctggtggctgg

SEQ ID NO: 4034945 - DNA, 25 bp, Homo sapien
tgaaggggctccctgaatccgggtc

SEQ ID NO: 4034946 - DNA, 25 bp, Homo sapien
gctgctgagggagccagtggcttga

SEQ ID NO: 4034947 - DNA, 25 bp, Homo sapien
tggcttccaaaggcaggatgcaaga

SEQ ID NO: 4034948 - DNA, 25 bp, Homo sapien
cttgaggctcaggatgccgctccct

SEQ ID NO: 4034949 - DNA, 25 bp, Homo sapien
ctggcttccaaaggcaggatgcaag

SEQ ID NO: 4034950 - DNA, 25 bp, Homo sapien
aggctcaggatgccgctccctggct

SEQ ID NO: 4034951 - DNA, 25 bp, Homo sapien
ctaatcgaggtccacttcttcccag

SEQ ID NO: 4034952 - DNA, 25 bp, Homo sapien
tgaagaaactcctctaatcgaggtc

SEQ ID NO: 4034953 - DNA, 25 bp, Homo sapien
tatgtcccccacgaacgtgtactgc

SEQ ID NO: 4034954 - DNA, 25 bp, Homo sapien
tcccagaggatcatcgggaaccata

SEQ ID NO: 4034955 - DNA, 25 bp, Homo sapien
gactgctcaactgcctaaaagcggg

SEQ ID NO: 4034956 - DNA, 25 bp, Homo sapien
aaagcaacggtcaggtcagcctaca

SEQ ID NO: 4034957 - DNA, 25 bp, Homo sapien
gggcctgcgtaaggatcccaaagca

SEQ ID NO: 4034958 - DNA, 25 bp, Homo sapien
gaacgttttatcagctggccctcaa

SEQ ID NO: 4034959 - DNA, 25 bp, Homo sapien
ttggtcccctatattgccttctgtg

SEQ ID NO: 4034960 - DNA, 25 bp, Homo sapien
gccttctgtggagccaaggaatata

SEQ ID NO: 4034961 - DNA, 25 bp, Homo sapien
cagtcttatgatactttggtcccct

SEQ ID NO: 4034962 - DNA, 25 bp, Homo sapien
gccacctatgaagtgggagtgcagc

SEQ ID NO: 4034963 - DNA, 25 bp, Homo sapien
tttgtcacaattatgccaccagttt

SEQ ID NO: 4034964 - DNA, 25 bp, Homo sapien
cagttttgtccgctaagtgtagtag

SEQ ID NO: 4034965 - DNA, 25 bp, Homo sapien
tctctgaaattatcatttgtcacaa

SEQ ID NO: 4034966 - DNA, 25 bp, Homo sapien
tttgtccgctaagtgtagtagaaac

SEQ ID NO: 4034967 - DNA, 25 bp, Homo sapien
tcatcatgagaagcaattctttctc

SEQ ID NO: 4034968 - DNA, 25 bp, Homo sapien
ctgtcatcatgagaagcaattcttt

SEQ ID NO: 4034969 - DNA, 25 bp, Homo sapien
agaagcaattctttctccaaagacc

SEQ ID NO: 4034970 - DNA, 25 bp, Homo sapien
gagaagcaattctttctccaaagac

SEQ ID NO: 4034971 - DNA, 25 bp, Homo sapien
gataatattccgagctcctggagct

SEQ ID NO: 4034972 - DNA, 25 bp, Homo sapien
taaagataatattccgagctcctgg

SEQ ID NO: 4034973 - DNA, 25 bp, Homo sapien
tcctggagctgggttaagaagtgct

SEQ ID NO: 4034974 - DNA, 25 bp, Homo sapien
caggagttaaagataatattccgag

SEQ ID NO: 4034975 - DNA, 25 bp, Homo sapien
tctccactgagggacaaatacagtg

SEQ ID NO: 4034976 - DNA, 25 bp, Homo sapien
gcaattccacgacaagaaaagaact

SEQ ID NO: 4034977 - DNA, 25 bp, Homo sapien
caaaaatattcaactgcaattgcaa

SEQ ID NO: 4034978 - DNA, 25 bp, Homo sapien
gacattaggatcacgccttgttctc

SEQ ID NO: 4034979 - DNA, 25 bp, Homo sapien
tgcacaaagttaggatggaacccac

SEQ ID NO: 4034980 - DNA, 25 bp, Homo sapien
acattttgttaatctaactgggtgt

SEQ ID NO: 4034981 - DNA, 25 bp, Homo sapien
catttttggcatttagttgcacaaa

SEQ ID NO: 4034982 - DNA, 25 bp, Homo sapien
tgatagaaagcagtgagctccatgg

SEQ ID NO: 4034983 - DNA, 25 bp, Homo sapien
caatcctgtatggtgcacgagaatc

SEQ ID NO: 4034984 - DNA, 25 bp, Homo sapien
tgagctggatcatactccggcttcc

SEQ ID NO: 4034985 - DNA, 25 bp, Homo sapien
aagaggctggacacttcacgaacat

SEQ ID NO: 4034986 - DNA, 25 bp, Homo sapien
gaagttatttctagacacagggcct

SEQ ID NO: 4034987 - DNA, 25 bp, Homo sapien
tagagtatctcgaaacctttgaacc

SEQ ID NO: 4034988 - DNA, 25 bp, Homo sapien
caatatgatcagaaggtcctgccga

SEQ ID NO: 4034989 - DNA, 25 bp, Homo sapien
cattttttaattccagcttgtaggg

SEQ ID NO: 4034990 - DNA, 25 bp, Homo sapien
tgtgtttcaaatccgttctccctgg

SEQ ID NO: 4034991 - DNA, 25 bp, Homo sapien
tgaggtacatggtttagcttccact

SEQ ID NO: 4034992 - DNA, 25 bp, Homo sapien
gaagctccccttgaaacaaaattga

SEQ ID NO: 4034993 - DNA, 25 bp, Homo sapien
tatttggaagcaagggttctggctg

SEQ ID NO: 4034994 - DNA, 25 bp, Homo sapien
aaaagtggaactctgggctggtgac

SEQ ID NO: 4034995 - DNA, 25 bp, Homo sapien
tgttgaatgtgactcctagccatga

SEQ ID NO: 4034996 - DNA, 25 bp, Homo sapien
taagctcagaaacaggagtcccagc

SEQ ID NO: 4034997 - DNA, 25 bp, Homo sapien
tctctagaaatattcagccctgtgg

SEQ ID NO: 4034998 - DNA, 25 bp, Homo sapien
tctgatgccaagaaggccaatgtcc

SEQ ID NO: 4034999 - DNA, 25 bp, Homo sapien
tgtagcccaggataaggtctatctt

SEQ ID NO: 4035000 - DNA, 25 bp, Homo sapien
gatttagcactgttacataatgtct

SEQ ID NO: 4035001 - DNA, 25 bp, Homo sapien
tctatgggtgctcataaagaatgtg

SEQ ID NO: 4035002 - DNA, 25 bp, Homo sapien
tatagatgtgtattagaacctggct

SEQ ID NO: 4035003 - DNA, 25 bp, Homo sapien
cttggtatctggacatttttaatgt

SEQ ID NO: 4035004 - DNA, 25 bp, Homo sapien
atttgaattggctgtacttggtatc

SEQ ID NO: 4035005 - DNA, 25 bp, Homo sapien
tcatttgaattggctgtacttggta

SEQ ID NO: 4035006 - DNA, 25 bp, Homo sapien
cataagaaagataatgcagtccaaa

SEQ ID NO: 4035007 - DNA, 25 bp, Homo sapien
gaagggtgcttatctgccccatagg

SEQ ID NO: 4035008 - DNA, 25 bp, Homo sapien
cgtgagtcctacagcataaacatga

SEQ ID NO: 4035009 - DNA, 25 bp, Homo sapien
ggacttccctgcatggtcatactga

SEQ ID NO: 4035010 - DNA, 25 bp, Homo sapien
tatgactttcagacattaacgtgag

SEQ ID NO: 4035011 - DNA, 25 bp, Homo sapien
accggggccgagatgacaccagtgc

SEQ ID NO: 4035012 - DNA, 25 bp, Homo sapien
gtaccggggccgagatgacaccagt

SEQ ID NO: 4035013 - DNA, 25 bp, Homo sapien
tgggtaccggggccgagatgacacc

SEQ ID NO: 4035014 - DNA, 25 bp, Homo sapien
tcttgggtaccggggccgagatgac

SEQ ID NO: 4035015 - DNA, 25 bp, Homo sapien
atgaggcgcacaagcacagagctgc

SEQ ID NO: 4035016 - DNA, 25 bp, Homo sapien
aggcgcacaagcacagagctgcagt

SEQ ID NO: 4035017 - DNA, 25 bp, Homo sapien
tgggcgcagggatgaggcgcacaag

SEQ ID NO: 4035018 - DNA, 25 bp, Homo sapien
cgcagggatgaggcgcacaagcaca

SEQ ID NO: 4035019 - DNA, 25 bp, Homo sapien
ctgtgcacgggaacaatgaaaagct

SEQ ID NO: 4035020 - DNA, 25 bp, Homo sapien
tgcacgggaacaatgaaaagcttgg

SEQ ID NO: 4035021 - DNA, 25 bp, Homo sapien
tgtgcacgggaacaatgaaaagctt

SEQ ID NO: 4035022 - DNA, 25 bp, Homo sapien
cacgggaacaatgaaaagcttggcc

SEQ ID NO: 4035023 - DNA, 25 bp, Homo sapien
taacacccacactagacgtgaccgt

SEQ ID NO: 4035024 - DNA, 25 bp, Homo sapien
acccacactagacgtgaccgttcta

SEQ ID NO: 4035025 - DNA, 25 bp, Homo sapien
acactagacgtgaccgttctagtcc

SEQ ID NO: 4035026 - DNA, 25 bp, Homo sapien
ttaacacccacactagacgtgaccg

SEQ ID NO: 4035027 - DNA, 25 bp, Homo sapien
cccccagttaaaagtcaatgatctt

SEQ ID NO: 4035028 - DNA, 25 bp, Homo sapien
tgcacgtgtgcttctgcattggcat

SEQ ID NO: 4035029 - DNA, 25 bp, Homo sapien
tggctgatgcacgtgtgcttctgca

SEQ ID NO: 4035030 - DNA, 25 bp, Homo sapien
ccttgaacctgatgtgctggctgat

SEQ ID NO: 4035031 - DNA, 25 bp, Homo sapien
cagccctagctacactggcgtcatc

SEQ ID NO: 4035032 - DNA, 25 bp, Homo sapien
gccctagctacactggcgtcatccg

SEQ ID NO: 4035033 - DNA, 25 bp, Homo sapien
tagctacactggcgtcatccgccat

SEQ ID NO: 4035034 - DNA, 25 bp, Homo sapien
cctagctacactggcgtcatccgcc

SEQ ID NO: 4035035 - DNA, 25 bp, Homo sapien
tgatgttttctcaaagaagaagcaa

SEQ ID NO: 4035036 - DNA, 25 bp, Homo sapien
ctcaaagaagaagcaactattaaca

SEQ ID NO: 4035037 - DNA, 25 bp, Homo sapien
ttgatgttttctcaaagaagaagca

SEQ ID NO: 4035038 - DNA, 25 bp, Homo sapien
tttctcaaagaagaagcaactatta

SEQ ID NO: 4035039 - DNA, 25 bp, Homo sapien
agttgttttctcctaattactctga

SEQ ID NO: 4035040 - DNA, 25 bp, Homo sapien
ccatgcttaactaccgagtatataa

SEQ ID NO: 4035041 - DNA, 25 bp, Homo sapien
tgtccaggtggtgtgcattcatagg

SEQ ID NO: 4035042 - DNA, 25 bp, Homo sapien
caccaccatgcttaactaccgagta

SEQ ID NO: 4035043 - DNA, 25 bp, Homo sapien
cattgctaagtagtatgcaactctg

SEQ ID NO: 4035044 - DNA, 25 bp, Homo sapien
catctaaactatctctggaggttcc

SEQ ID NO: 4035045 - DNA, 25 bp, Homo sapien
catcgttacatgtatcagccagtaa

SEQ ID NO: 4035046 - DNA, 25 bp, Homo sapien
gcatggtcttctctggatacttttg

SEQ ID NO: 4035047 - DNA, 25 bp, Homo sapien
tccaagctttagaagagccaataag

SEQ ID NO: 4035048 - DNA, 25 bp, Homo sapien
tacaaagacgctactgtgtgggtgt

SEQ ID NO: 4035049 - DNA, 25 bp, Homo sapien
ggataattctctaccctcactagct

SEQ ID NO: 4035050 - DNA, 25 bp, Homo sapien
ttaccatcacccaaatacaaagacg

SEQ ID NO: 4035051 - DNA, 25 bp, Homo sapien
tagctaatacctatcctgaagggtg

SEQ ID NO: 4035052 - DNA, 25 bp, Homo sapien
gggtatggaagctctaagccctttc

SEQ ID NO: 4035053 - DNA, 25 bp, Homo sapien
gaaggttagtttgatcatcagtgcc

SEQ ID NO: 4035054 - DNA, 25 bp, Homo sapien
ggcatccataggtagtagcttcagg

SEQ ID NO: 4035055 - DNA, 25 bp, Homo sapien
gagctgttagccttggtgtgcaaaa

SEQ ID NO: 4035056 - DNA, 25 bp, Homo sapien
tttgccctcctgatgcccacatgag

SEQ ID NO: 4035057 - DNA, 25 bp, Homo sapien
cagttacagagggatacttggctca

SEQ ID NO: 4035058 - DNA, 25 bp, Homo sapien
caaaatgggctgattgccaggaggt

SEQ ID NO: 4035059 - DNA, 25 bp, Homo sapien
tcagcctggcttgcgtgagtacact

SEQ ID NO: 4035060 - DNA, 25 bp, Homo sapien
catgtctcgtcatctagtggcccta

SEQ ID NO: 4035061 - DNA, 25 bp, Homo sapien
tacgcccagttaggagaaagcagcc

SEQ ID NO: 4035062 - DNA, 25 bp, Homo sapien
taggctggaactaaccttggcaagg

SEQ ID NO: 4035063 - DNA, 25 bp, Homo sapien
gacattcaccagttttgtacccaaa

SEQ ID NO: 4035064 - DNA, 25 bp, Homo sapien
tcagaattcctaaggagctaatggg

SEQ ID NO: 4035065 - DNA, 25 bp, Homo sapien
ggtaagaggaaaactcccacacatc

SEQ ID NO: 4035066 - DNA, 25 bp, Homo sapien
tgaaccagttttccaatccagctgg

SEQ ID NO: 4035067 - DNA, 25 bp, Homo sapien
tctctatttgcgaatgaggcaacag

SEQ ID NO: 4035068 - DNA, 25 bp, Homo sapien
gaagaattctaactcgtctcacccc

SEQ ID NO: 4035069 - DNA, 25 bp, Homo sapien
aggtgatcagaccactcggcatccc

SEQ ID NO: 4035070 - DNA, 25 bp, Homo sapien
acagctagccagtacctcccttttg

SEQ ID NO: 4035071 - DNA, 25 bp, Homo sapien
cctggcattttggtacctcagcctt

SEQ ID NO: 4035072 - DNA, 25 bp, Homo sapien
agcacctggacaccttttaccatga

SEQ ID NO: 4035073 - DNA, 25 bp, Homo sapien
tgtttcaggaagattccatgcttct

SEQ ID NO: 4035074 - DNA, 25 bp, Homo sapien
gactattaaataaggtccaatgacc

SEQ ID NO: 4035075 - DNA, 25 bp, Homo sapien
tactgctttctacgacaaatcttcc

SEQ ID NO: 4035076 - DNA, 25 bp, Homo sapien
cagctgaagtactgctttctacgac

SEQ ID NO: 4035077 - DNA, 25 bp, Homo sapien
gaagtactgctttctacgacaaatc

SEQ ID NO: 4035078 - DNA, 25 bp, Homo sapien
gctgaagtactgctttctacgacaa

SEQ ID NO: 4035079 - DNA, 25 bp, Homo sapien
gtgtggcaaggacagccaagaaaac

SEQ ID NO: 4035080 - DNA, 25 bp, Homo sapien
ttctgcatagcaaaggagtcattct

SEQ ID NO: 4035081 - DNA, 25 bp, Homo sapien
cagggctcttctgcatagcaaagga

SEQ ID NO: 4035082 - DNA, 25 bp, Homo sapien
agaaaacaggcattgggcaggtctg

SEQ ID NO: 4035083 - DNA, 25 bp, Homo sapien
caagtatcaagaacgaaggctctgg

SEQ ID NO: 4035084 - DNA, 25 bp, Homo sapien
tacctaggaggagcaacatactgtg

SEQ ID NO: 4035085 - DNA, 25 bp, Homo sapien
ccgcagacagggctcatcatatgag

SEQ ID NO: 4035086 - DNA, 25 bp, Homo sapien
gagtgccccgtctcctttaaggatg

SEQ ID NO: 4035087 - DNA, 25 bp, Homo sapien
aaacaggccctcgatacggccgcgg

SEQ ID NO: 4035088 - DNA, 25 bp, Homo sapien
atacggccgcggctctgctccagca

SEQ ID NO: 4035089 - DNA, 25 bp, Homo sapien
ctagcgcgccgagcacggctaggct

SEQ ID NO: 4035090 - DNA, 25 bp, Homo sapien
acggctaggctcacgccaaacaggc

SEQ ID NO: 4035091 - DNA, 25 bp, Homo sapien
ctggcgcagtgaactcgtccagcac

SEQ ID NO: 4035092 - DNA, 25 bp, Homo sapien
tggcgcagtgaactcgtccagcacc

SEQ ID NO: 4035093 - DNA, 25 bp, Homo sapien
ggcgcagtgaactcgtccagcaccg

SEQ ID NO: 4035094 - DNA, 25 bp, Homo sapien
gcgcagtgaactcgtccagcaccgc

SEQ ID NO: 4035095 - DNA, 25 bp, Homo sapien
gcggcgacgccccctcagcttgctg

SEQ ID NO: 4035096 - DNA, 25 bp, Homo sapien
cggcggcgacgccccctcagcttgc

SEQ ID NO: 4035097 - DNA, 25 bp, Homo sapien
ggcggcgacgccccctcagcttgct

SEQ ID NO: 4035098 - DNA, 25 bp, Homo sapien
cagcttggcaattgctggcagcgaa

SEQ ID NO: 4035099 - DNA, 25 bp, Homo sapien
agccagtcaggcggcgtcggccctt

SEQ ID NO: 4035100 - DNA, 25 bp, Homo sapien
ataccatcccgccacgaccgcagca

SEQ ID NO: 4035101 - DNA, 25 bp, Homo sapien
ctcaggcccggctataccatcccgc

SEQ ID NO: 4035102 - DNA, 25 bp, Homo sapien
aaccacatcctccagtctagctctt

SEQ ID NO: 4035103 - DNA, 25 bp, Homo sapien
cacatcctccagtctagctcttgtc

SEQ ID NO: 4035104 - DNA, 25 bp, Homo sapien
ctgcagttgctgtgttagtgactgg

SEQ ID NO: 4035105 - DNA, 25 bp, Homo sapien
tgtctgcagttgctgtgttagtgac

SEQ ID NO: 4035106 - DNA, 25 bp, Homo sapien
gcacataccatgctcacttatctgg

SEQ ID NO: 4035107 - DNA, 25 bp, Homo sapien
ttatttacccaaacactcgtcaagc

SEQ ID NO: 4035108 - DNA, 25 bp, Homo sapien
tggaatggactgtgaacctccactc

SEQ ID NO: 4035109 - DNA, 25 bp, Homo sapien
gaatggactgtgaacctccactccc

SEQ ID NO: 4035110 - DNA, 25 bp, Homo sapien
tttccggaagaacgtgcatcttgca

SEQ ID NO: 4035111 - DNA, 25 bp, Homo sapien
cggaagaacgtgcatcttgcaagaa

SEQ ID NO: 4035112 - DNA, 25 bp, Homo sapien
ttgcagtttccggaagaacgtgcat

SEQ ID NO: 4035113 - DNA, 25 bp, Homo sapien
cagtttccggaagaacgtgcatctt

SEQ ID NO: 4035114 - DNA, 25 bp, Homo sapien
caatcaccatacttatgagctacaa

SEQ ID NO: 4035115 - DNA, 25 bp, Homo sapien
gtaacaaagttttagagaggcacat

SEQ ID NO: 4035116 - DNA, 25 bp, Homo sapien
taacaaagttttagagaggcacatc

SEQ ID NO: 4035117 - DNA, 25 bp, Homo sapien
acccaatcaccatacttatgagcta

SEQ ID NO: 4035118 - DNA, 25 bp, Homo sapien
ctccactactgctggctttggtagt

SEQ ID NO: 4035119 - DNA, 25 bp, Homo sapien
tccactactgctggctttggtagtc

SEQ ID NO: 4035120 - DNA, 25 bp, Homo sapien
caagttttcccatggatgatgacca

SEQ ID NO: 4035121 - DNA, 25 bp, Homo sapien
gtgcatacaagttttcccatggatg

SEQ ID NO: 4035122 - DNA, 25 bp, Homo sapien
gcatacaagttttcccatggatgat

SEQ ID NO: 4035123 - DNA, 25 bp, Homo sapien
tacaagttttcccatggatgatgac

SEQ ID NO: 4035124 - DNA, 25 bp, Homo sapien
ccaggagtaaaagcagttcaaccag

SEQ ID NO: 4035125 - DNA, 25 bp, Homo sapien
tggtagctcctcatgggtttctgtc

SEQ ID NO: 4035126 - DNA, 25 bp, Homo sapien
ctctgccttaactttgtgttcaacc

SEQ ID NO: 4035127 - DNA, 25 bp, Homo sapien
ccttaactttgtgttcaaccaggag

SEQ ID NO: 4035128 - DNA, 25 bp, Homo sapien
tcttttgatcctgctgtcgatggca

SEQ ID NO: 4035129 - DNA, 25 bp, Homo sapien
aatttaaaagatgcatggccctctt

SEQ ID NO: 4035130 - DNA, 25 bp, Homo sapien
tccgttgctccggaaaggtcttcag

SEQ ID NO: 4035131 - DNA, 25 bp, Homo sapien
cagtatgaagtaggtagcgatcccc

SEQ ID NO: 4035132 - DNA, 25 bp, Homo sapien
gagagattttggatgctctttcaga

SEQ ID NO: 4035133 - DNA, 25 bp, Homo sapien
gcaggcatcaataagctcgaggtca

SEQ ID NO: 4035134 - DNA, 25 bp, Homo sapien
tgctcagactgagagattttggatg

SEQ ID NO: 4035135 - DNA, 25 bp, Homo sapien
tcatgtgcaatgatccagcctgtgt

SEQ ID NO: 4035136 - DNA, 25 bp, Homo sapien
cttgtacaggggctagttttctcag

SEQ ID NO: 4035137 - DNA, 25 bp, Homo sapien
ccttgtacaggggctagttttctca

SEQ ID NO: 4035138 - DNA, 25 bp, Homo sapien
tccttgtacaggggctagttttctc

SEQ ID NO: 4035139 - DNA, 25 bp, Homo sapien
cagcactgccctgtgggcccagagt

SEQ ID NO: 4035140 - DNA, 25 bp, Homo sapien
tcaggggcttgggaggcaatctgac

SEQ ID NO: 4035141 - DNA, 25 bp, Homo sapien
ctgtggcagcactgccctgtgggcc

SEQ ID NO: 4035142 - DNA, 25 bp, Homo sapien
cctgggctgtggcagcactgccctg

SEQ ID NO: 4035143 - DNA, 25 bp, Homo sapien
agtgtagccaatgtgagcttcttga

SEQ ID NO: 4035144 - DNA, 25 bp, Homo sapien
caccagtgtagccaatgtgagcttc

SEQ ID NO: 4035145 - DNA, 25 bp, Homo sapien
gcaggggccgtgtgtctcttgcctt

SEQ ID NO: 4035146 - DNA, 25 bp, Homo sapien
ccagtgtagccaatgtgagcttctt

SEQ ID NO: 4035147 - DNA, 25 bp, Homo sapien
gatgtgacatggtgaatcctcctta

SEQ ID NO: 4035148 - DNA, 25 bp, Homo sapien
gaagaatgccaaccaaactgaagtc

SEQ ID NO: 4035149 - DNA, 25 bp, Homo sapien
cctccatggagtgggtagctgagaa

SEQ ID NO: 4035150 - DNA, 25 bp, Homo sapien
tagggttagggtaccagtgacatgc

SEQ ID NO: 4035151 - DNA, 25 bp, Homo sapien
tgccttcaccctgcaccgactcaaa

SEQ ID NO: 4035152 - DNA, 25 bp, Homo sapien
tcattctcggatgcccttgccttca

SEQ ID NO: 4035153 - DNA, 25 bp, Homo sapien
tcaccctgcaccgactcaaatgcag

SEQ ID NO: 4035154 - DNA, 25 bp, Homo sapien
accctgcaccgactcaaatgcagaa

SEQ ID NO: 4035155 - DNA, 25 bp, Homo sapien
tccatcagacttggcccctattttc

SEQ ID NO: 4035156 - DNA, 25 bp, Homo sapien
acattcaagcccacgggatcaggca

SEQ ID NO: 4035157 - DNA, 25 bp, Homo sapien
acatccatgtacctattggaccagg

SEQ ID NO: 4035158 - DNA, 25 bp, Homo sapien
gccataaacatacatccatgtacct

SEQ ID NO: 4035159 - DNA, 25 bp, Homo sapien
ctgggcggcggacagggtcgagtgc

SEQ ID NO: 4035160 - DNA, 25 bp, Homo sapien
gacagggtcgagtgccctaaagtcc

SEQ ID NO: 4035161 - DNA, 25 bp, Homo sapien
gtgcgcgtccctcctcgacgccctg

SEQ ID NO: 4035162 - DNA, 25 bp, Homo sapien
tggcacgcccgggtgcgcgtccctc

SEQ ID NO: 4035163 - DNA, 25 bp, Homo sapien
ggcacagcgggtcgggggcggcctg

SEQ ID NO: 4035164 - DNA, 25 bp, Homo sapien
acgtctcggcggcaaaagaggcgcc

SEQ ID NO: 4035165 - DNA, 25 bp, Homo sapien
ctggcagagcacgtctcggcggcaa

SEQ ID NO: 4035166 - DNA, 25 bp, Homo sapien
cagagcacgtctcggcggcaaaaga

SEQ ID NO: 4035167 - DNA, 25 bp, Homo sapien
ccgggtgatgctggcccgtccagca

SEQ ID NO: 4035168 - DNA, 25 bp, Homo sapien
tcctgccgggcccgggtgatgctgg

SEQ ID NO: 4035169 - DNA, 25 bp, Homo sapien
cctggcatcgtcctgccgggcccgg

SEQ ID NO: 4035170 - DNA, 25 bp, Homo sapien
gatgctggcccgtccagcagaggct

SEQ ID NO: 4035171 - DNA, 25 bp, Homo sapien
aggggcatagtctttggcgctaact

SEQ ID NO: 4035172 - DNA, 25 bp, Homo sapien
tcaggagtaaggggcatagtctttg

SEQ ID NO: 4035173 - DNA, 25 bp, Homo sapien
taaggggcatagtctttggcgctaa

SEQ ID NO: 4035174 - DNA, 25 bp, Homo sapien
agtaaggggcatagtctttggcgct

SEQ ID NO: 4035175 - DNA, 25 bp, Homo sapien
gcatatcggatttggcagttgggcc

SEQ ID NO: 4035176 - DNA, 25 bp, Homo sapien
tgaatatgcatatcggatttggcag

SEQ ID NO: 4035177 - DNA, 25 bp, Homo sapien
gggacacgtgcacacgtacatgaat

SEQ ID NO: 4035178 - DNA, 25 bp, Homo sapien
tgggccatgagtcttggcttggcca

SEQ ID NO: 4035179 - DNA, 25 bp, Homo sapien
aagagatgagtatccctgggatgga

SEQ ID NO: 4035180 - DNA, 25 bp, Homo sapien
acttggatgtggagcggtacttgct

SEQ ID NO: 4035181 - DNA, 25 bp, Homo sapien
catttatgcagatatggcaggagcc

SEQ ID NO: 4035182 - DNA, 25 bp, Homo sapien
gtacttgcttgcagggtcacgtggg

SEQ ID NO: 4035183 - DNA, 25 bp, Homo sapien
gcaaatacatagtctctccctccaa

SEQ ID NO: 4035184 - DNA, 25 bp, Homo sapien
aaatacatagtctctccctccaaaa

SEQ ID NO: 4035185 - DNA, 25 bp, Homo sapien
ctctgcatcaccaatggcttttgca

SEQ ID NO: 4035186 - DNA, 25 bp, Homo sapien
tctgcatcaccaatggcttttgcaa

SEQ ID NO: 4035187 - DNA, 25 bp, Homo sapien
tctgagaccttggcggtgaccataa

SEQ ID NO: 4035188 - DNA, 25 bp, Homo sapien
gagaccttggcggtgaccataagcc

SEQ ID NO: 4035189 - DNA, 25 bp, Homo sapien
ccttggcggtgaccataagccacat

SEQ ID NO: 4035190 - DNA, 25 bp, Homo sapien
gaccttggcggtgaccataagccac

SEQ ID NO: 4035191 - DNA, 25 bp, Homo sapien
cactgttgtacgtattttcacattc

SEQ ID NO: 4035192 - DNA, 25 bp, Homo sapien
gtctgcagcactgttgtacgtattt

SEQ ID NO: 4035193 - DNA, 25 bp, Homo sapien
aatattcttagagtctgcagcactg

SEQ ID NO: 4035194 - DNA, 25 bp, Homo sapien
ctaaatattcttagagtctgcagca

SEQ ID NO: 4035195 - DNA, 25 bp, Homo sapien
tccacatcgacaaaggcagcaggca

SEQ ID NO: 4035196 - DNA, 25 bp, Homo sapien
tgttcttctcgtccacatcgacaaa

SEQ ID NO: 4035197 - DNA, 25 bp, Homo sapien
ttctcgtccacatcgacaaaggcag

SEQ ID NO: 4035198 - DNA, 25 bp, Homo sapien
ggattagctaatccatcctgttttg

SEQ ID NO: 4035199 - DNA, 25 bp, Homo sapien
ctgctgggacgtgtggttgccagga

SEQ ID NO: 4035200 - DNA, 25 bp, Homo sapien
aggagcaatgcaatcagcttcttgg

SEQ ID NO: 4035201 - DNA, 25 bp, Homo sapien
tccttctccccgttgctcccaatga

SEQ ID NO: 4035202 - DNA, 25 bp, Homo sapien
tccatccaagtggtttagggccctg

SEQ ID NO: 4035203 - DNA, 25 bp, Homo sapien
ctggaggtggggagccagatgctat

SEQ ID NO: 4035204 - DNA, 25 bp, Homo sapien
ggaggtggggagccagatgctatga

SEQ ID NO: 4035205 - DNA, 25 bp, Homo sapien
tggaggtggggagccagatgctatg

SEQ ID NO: 4035206 - DNA, 25 bp, Homo sapien
gaggtggggagccagatgctatgac

SEQ ID NO: 4035207 - DNA, 25 bp, Homo sapien
ctctagagttgaacctgaactttcc

SEQ ID NO: 4035208 - DNA, 25 bp, Homo sapien
ccaggatgagaacaggtgcctgctc

SEQ ID NO: 4035209 - DNA, 25 bp, Homo sapien
tctagagttgaacctgaactttccc

SEQ ID NO: 4035210 - DNA, 25 bp, Homo sapien
caggatgagaacaggtgcctgctct

SEQ ID NO: 4035211 - DNA, 25 bp, Homo sapien
gatgtcatcacacttatcacaattt

SEQ ID NO: 4035212 - DNA, 25 bp, Homo sapien
ccccattaaccttggctctgagggc

SEQ ID NO: 4035213 - DNA, 25 bp, Homo sapien
agggccagggatggtagtagtggag

SEQ ID NO: 4035214 - DNA, 25 bp, Homo sapien
cagccccattaaccttggctctgag

SEQ ID NO: 4035215 - DNA, 25 bp, Homo sapien
tggtagtagtggagagctcatgagc

SEQ ID NO: 4035216 - DNA, 25 bp, Homo sapien
cctctgtgactgcttccgatggcag

SEQ ID NO: 4035217 - DNA, 25 bp, Homo sapien
gactgaagctggcatgcctccatct

SEQ ID NO: 4035218 - DNA, 25 bp, Homo sapien
gggactgaagctggcatgcctccat

SEQ ID NO: 4035219 - DNA, 25 bp, Homo sapien
cagagaggcaagtgtcctctgtgac

SEQ ID NO: 4035220 - DNA, 25 bp, Homo sapien
gatggagacgtgttgttgctgacct

SEQ ID NO: 4035221 - DNA, 25 bp, Homo sapien
ggtccaggaatatgaggcaggcact

SEQ ID NO: 4035222 - DNA, 25 bp, Homo sapien
gctctgccagacaagctgagtaatt

SEQ ID NO: 4035223 - DNA, 25 bp, Homo sapien
gagtggacttaacctaccatgtgtc

SEQ ID NO: 4035224 - DNA, 25 bp, Homo sapien
tgggttcactacaaggcatatattg

SEQ ID NO: 4035225 - DNA, 25 bp, Homo sapien
taacttgtgcagcactcacacctgc

SEQ ID NO: 4035226 - DNA, 25 bp, Homo sapien
caggctctaggtcattgtgccaccc

SEQ ID NO: 4035227 - DNA, 25 bp, Homo sapien
tagacagactcttagtgcccagtgg

SEQ ID NO: 4035228 - DNA, 25 bp, Homo sapien
ggtaggtgggtctgaaggcgagcgg

SEQ ID NO: 4035229 - DNA, 25 bp, Homo sapien
ttggccagtgagaaaccgccatggt

SEQ ID NO: 4035230 - DNA, 25 bp, Homo sapien
ggcgagcgggcccagtgaaacggat

SEQ ID NO: 4035231 - DNA, 25 bp, Homo sapien
gccagggctgaacttgggggttggc

SEQ ID NO: 4035232 - DNA, 25 bp, Homo sapien
catgtaagcccctgggggtagcatg

SEQ ID NO: 4035233 - DNA, 25 bp, Homo sapien
ggttcctggctgcttacaattccca

SEQ ID NO: 4035234 - DNA, 25 bp, Homo sapien
tagcatggagcctttctgcagaccc

SEQ ID NO: 4035235 - DNA, 25 bp, Homo sapien
gcttacaattcccagatttatcact

SEQ ID NO: 4035236 - DNA, 25 bp, Homo sapien
gttcttctcaaccttgtgtagcttc

SEQ ID NO: 4035237 - DNA, 25 bp, Homo sapien
ttcttctcaaccttgtgtagcttct

SEQ ID NO: 4035238 - DNA, 25 bp, Homo sapien
tcttctcaaccttgtgtagcttctc

SEQ ID NO: 4035239 - DNA, 25 bp, Homo sapien
cttctcaaccttgtgtagcttctct

SEQ ID NO: 4035240 - DNA, 25 bp, Homo sapien
ggatgtcaaagtacagaatccagct

SEQ ID NO: 4035241 - DNA, 25 bp, Homo sapien
cttccagtcaggaaggtcgagacct

SEQ ID NO: 4035242 - DNA, 25 bp, Homo sapien
cccattcctctgcagtagtgattat

SEQ ID NO: 4035243 - DNA, 25 bp, Homo sapien
gaaatagtgtgctgatgtttggtgt

SEQ ID NO: 4035244 - DNA, 25 bp, Homo sapien
ggcctgggttgagccaggcctccgg

SEQ ID NO: 4035245 - DNA, 25 bp, Homo sapien
ctgatggccttgatgtcatgaccag

SEQ ID NO: 4035246 - DNA, 25 bp, Homo sapien
aggcctgggttgagccaggcctccg

SEQ ID NO: 4035247 - DNA, 25 bp, Homo sapien
gatggccttgatgtcatgaccaggc

SEQ ID NO: 4035248 - DNA, 25 bp, Homo sapien
agccagcgtgtccaccgtgctgagg

SEQ ID NO: 4035249 - DNA, 25 bp, Homo sapien
agagagccagcgtgtccaccgtgct

SEQ ID NO: 4035250 - DNA, 25 bp, Homo sapien
gtgctggagaccccgcctggtccca

SEQ ID NO: 4035251 - DNA, 25 bp, Homo sapien
agagccagcgtgtccaccgtgctga

SEQ ID NO: 4035252 - DNA, 25 bp, Homo sapien
cctcaaggtgagagtctggtgtagc

SEQ ID NO: 4035253 - DNA, 25 bp, Homo sapien
ttcacaccagaactaggtagccctt

SEQ ID NO: 4035254 - DNA, 25 bp, Homo sapien
gtgcaaattgggcatgatctgcctc

SEQ ID NO: 4035255 - DNA, 25 bp, Homo sapien
tgtgaagatgggcattgctgtctcc

SEQ ID NO: 4035256 - DNA, 25 bp, Homo sapien
tctattcccattgaatcttggccca

SEQ ID NO: 4035257 - DNA, 25 bp, Homo sapien
gaatcttggcccaatgatgcctatc

SEQ ID NO: 4035258 - DNA, 25 bp, Homo sapien
ggagggacatgaggaactctattcc

SEQ ID NO: 4035259 - DNA, 25 bp, Homo sapien
gcccaatgatgcctatcttggctat

SEQ ID NO: 4035260 - DNA, 25 bp, Homo sapien
gtatcaagagtcacaacacaggggt

SEQ ID NO: 4035261 - DNA, 25 bp, Homo sapien
tatcaagagtcacaacacaggggtt

SEQ ID NO: 4035262 - DNA, 25 bp, Homo sapien
atcaagagtcacaacacaggggttc

SEQ ID NO: 4035263 - DNA, 25 bp, Homo sapien
cggtatcaagagtcacaacacaggg

SEQ ID NO: 4035264 - DNA, 25 bp, Homo sapien
ggtgcaggagtcaatggttgaaggt

SEQ ID NO: 4035265 - DNA, 25 bp, Homo sapien
gagtcaatggttgaaggtgaagaaa

SEQ ID NO: 4035266 - DNA, 25 bp, Homo sapien
tgcaggagtcaatggttgaaggtga

SEQ ID NO: 4035267 - DNA, 25 bp, Homo sapien
caggagtcaatggttgaaggtgaag

SEQ ID NO: 4035268 - DNA, 25 bp, Homo sapien
gactgcacatctgtcgaggctgggc

SEQ ID NO: 4035269 - DNA, 25 bp, Homo sapien
ctgcacatctgtcgaggctgggcag

SEQ ID NO: 4035270 - DNA, 25 bp, Homo sapien
agactgcacatctgtcgaggctggg

SEQ ID NO: 4035271 - DNA, 25 bp, Homo sapien
actgcacatctgtcgaggctgggca

SEQ ID NO: 4035272 - DNA, 25 bp, Homo sapien
atgctgccacagcaaacacctgggc

SEQ ID NO: 4035273 - DNA, 25 bp, Homo sapien
tgggctgccactcccggccccctac

SEQ ID NO: 4035274 - DNA, 25 bp, Homo sapien
ggccccctacctcccaagccatctg

SEQ ID NO: 4035275 - DNA, 25 bp, Homo sapien
cccaagccatctggcccaggaccat

SEQ ID NO: 4035276 - DNA, 25 bp, Homo sapien
ctccagcatcgatgggaattctgac

SEQ ID NO: 4035277 - DNA, 25 bp, Homo sapien
gcatcgatgggaattctgacggcca

SEQ ID NO: 4035278 - DNA, 25 bp, Homo sapien
catcgatgggaattctgacggccat

SEQ ID NO: 4035279 - DNA, 25 bp, Homo sapien
cagcatcgatgggaattctgacggc

SEQ ID NO: 4035280 - DNA, 25 bp, Homo sapien
catctagttgtgtgcttacatcatc

SEQ ID NO: 4035281 - DNA, 25 bp, Homo sapien
tacgcatctgcttacatcatctagt

SEQ ID NO: 4035282 - DNA, 25 bp, Homo sapien
caatacatgggtgtaaggcagatac

SEQ ID NO: 4035283 - DNA, 25 bp, Homo sapien
gcagatactgccaagtgtttgcatc

SEQ ID NO: 4035284 - DNA, 25 bp, Homo sapien
tctttccttgtagcttggccctagg

SEQ ID NO: 4035285 - DNA, 25 bp, Homo sapien
ctgcccatgagtttgccaaaggtgt

SEQ ID NO: 4035286 - DNA, 25 bp, Homo sapien
gcccatgagtttgccaaaggtgtac

SEQ ID NO: 4035287 - DNA, 25 bp, Homo sapien
ttccttgtagcttggccctaggctg

SEQ ID NO: 4035288 - DNA, 25 bp, Homo sapien
gttgttacatgaacctgttcttgca

SEQ ID NO: 4035289 - DNA, 25 bp, Homo sapien
gttacatgaacctgttcttgcagca

SEQ ID NO: 4035290 - DNA, 25 bp, Homo sapien
tgttacatgaacctgttcttgcagc

SEQ ID NO: 4035291 - DNA, 25 bp, Homo sapien
ttacatgaacctgttcttgcagcat

SEQ ID NO: 4035292 - DNA, 25 bp, Homo sapien
tttgattctctcaataaactatggg

SEQ ID NO: 4035293 - DNA, 25 bp, Homo sapien
tgtaatatcatttgattctctcaat

SEQ ID NO: 4035294 - DNA, 25 bp, Homo sapien
tacagtctttctggctttttggcat

SEQ ID NO: 4035295 - DNA, 25 bp, Homo sapien
attctctcaataaactatgggccag

SEQ ID NO: 4035296 - DNA, 25 bp, Homo sapien
tcctggtgagttttccacttgcaca

SEQ ID NO: 4035297 - DNA, 25 bp, Homo sapien
aacagacctggacaaaagctgctcc

SEQ ID NO: 4035298 - DNA, 25 bp, Homo sapien
cttgcacagagttggtagatcacct

SEQ ID NO: 4035299 - DNA, 25 bp, Homo sapien
tgttaaacacttcacaggcacttgg

SEQ ID NO: 4035300 - DNA, 25 bp, Homo sapien
atcattcctacattctattttgcca

SEQ ID NO: 4035301 - DNA, 25 bp, Homo sapien
tgcctccagaggtataccggatggc

SEQ ID NO: 4035302 - DNA, 25 bp, Homo sapien
ggtataccggatggctgaagcatca

SEQ ID NO: 4035303 - DNA, 25 bp, Homo sapien
tccagaggtataccggatggctgaa

SEQ ID NO: 4035304 - DNA, 25 bp, Homo sapien
tcaagactgccaagcccttctctct

SEQ ID NO: 4035305 - DNA, 25 bp, Homo sapien
gccacagagagatgatcttggtgag

SEQ ID NO: 4035306 - DNA, 25 bp, Homo sapien
gactgccaagcccttctctctgggg

SEQ ID NO: 4035307 - DNA, 25 bp, Homo sapien
ccacagagagatgatcttggtgagg

SEQ ID NO: 4035308 - DNA, 25 bp, Homo sapien
agctgcctgcttcctttccagtaaa

SEQ ID NO: 4035309 - DNA, 25 bp, Homo sapien
gatgtagagaaccaatgcattttca

SEQ ID NO: 4035310 - DNA, 25 bp, Homo sapien
ctgatgtagagaaccaatgcatttt

SEQ ID NO: 4035311 - DNA, 25 bp, Homo sapien
ttccagtaaatgtcttggttctgtg

SEQ ID NO: 4035312 - DNA, 25 bp, Homo sapien
aaaacacaaggcgaaatatgcacca

SEQ ID NO: 4035313 - DNA, 25 bp, Homo sapien
tgcaccaggagatcttgttgtcaga

SEQ ID NO: 4035314 - DNA, 25 bp, Homo sapien
aacacaaggcgaaatatgcaccagg

SEQ ID NO: 4035315 - DNA, 25 bp, Homo sapien
cagaaccaaatagaggcttctcctc

SEQ ID NO: 4035316 - DNA, 25 bp, Homo sapien
gggcacattcttgcatgacactgtc

SEQ ID NO: 4035317 - DNA, 25 bp, Homo sapien
acattcttgcatgacactgtcatat

SEQ ID NO: 4035318 - DNA, 25 bp, Homo sapien
gcacattcttgcatgacactgtcat

SEQ ID NO: 4035319 - DNA, 25 bp, Homo sapien
ggcacattcttgcatgacactgtca

SEQ ID NO: 4035320 - DNA, 25 bp, Homo sapien
tttacagcaatgctatctgtacttg

SEQ ID NO: 4035321 - DNA, 25 bp, Homo sapien
gacagcaaccacaaggttcaggttt

SEQ ID NO: 4035322 - DNA, 25 bp, Homo sapien
aattctagatgtgattatctcctcc

SEQ ID NO: 4035323 - DNA, 25 bp, Homo sapien
cattgaatggaatcttgtgaaattc

SEQ ID NO: 4035324 - DNA, 25 bp, Homo sapien
aagagccgtactctgagtgggtgtc

SEQ ID NO: 4035325 - DNA, 25 bp, Homo sapien
cgtactctgagtgggtgtcctcact

SEQ ID NO: 4035326 - DNA, 25 bp, Homo sapien
tgggtgtcctcactccatttgtgct

SEQ ID NO: 4035327 - DNA, 25 bp, Homo sapien
cagagaagagccgtactctgagtgg

SEQ ID NO: 4035328 - DNA, 25 bp, Homo sapien
tgggtttggagtaaatatgtaatcg

SEQ ID NO: 4035329 - DNA, 25 bp, Homo sapien
tggttgttttatgcgatcatcaaaa

SEQ ID NO: 4035330 - DNA, 25 bp, Homo sapien
gggagtttttaagacatgttctgta

SEQ ID NO: 4035331 - DNA, 25 bp, Homo sapien
cgtctgcgtctgctatttggttgtt

SEQ ID NO: 4035332 - DNA, 25 bp, Homo sapien
gtacagcaggccatctggtgtcctt

SEQ ID NO: 4035333 - DNA, 25 bp, Homo sapien
tgtacagcaggccatctggtgtcct

SEQ ID NO: 4035334 - DNA, 25 bp, Homo sapien
tacagcaggccatctggtgtccttg

SEQ ID NO: 4035335 - DNA, 25 bp, Homo sapien
cttatcactgattaatttgctcgat

SEQ ID NO: 4035336 - DNA, 25 bp, Homo sapien
tcactgattaatttgctcgatatgg

SEQ ID NO: 4035337 - DNA, 25 bp, Homo sapien
attaatttgctcgatatggaaacag

SEQ ID NO: 4035338 - DNA, 25 bp, Homo sapien
tgattaatttgctcgatatggaaac

SEQ ID NO: 4035339 - DNA, 25 bp, Homo sapien
gcagcttctggttgactgaaggcag

SEQ ID NO: 4035340 - DNA, 25 bp, Homo sapien
tctgagcagcttctggttgactgaa

SEQ ID NO: 4035341 - DNA, 25 bp, Homo sapien
aatgtggcaagctttatcccgatgg

SEQ ID NO: 4035342 - DNA, 25 bp, Homo sapien
ggcaagctttatcccgatgggcttt

SEQ ID NO: 4035343 - DNA, 25 bp, Homo sapien
tgcatgcctaatgcaactgttcttg

SEQ ID NO: 4035344 - DNA, 25 bp, Homo sapien
ctagacatgcaaatccataagcatt

SEQ ID NO: 4035345 - DNA, 25 bp, Homo sapien
aaatttatatcaatgccgtgacata

SEQ ID NO: 4035346 - DNA, 25 bp, Homo sapien
ccagtttttatgacttatggatttc

SEQ ID NO: 4035347 - DNA, 25 bp, Homo sapien
cagaaaagtactcgggtccactcct

SEQ ID NO: 4035348 - DNA, 25 bp, Homo sapien
agagctgctccacggcttaccggat

SEQ ID NO: 4035349 - DNA, 25 bp, Homo sapien
taccggattgcatgcggagaagaaa

SEQ ID NO: 4035350 - DNA, 25 bp, Homo sapien
ccctatctatctctgtgggtcccgg

SEQ ID NO: 4035351 - DNA, 25 bp, Homo sapien
ctgaaaggaaccacaactgcagggg

SEQ ID NO: 4035352 - DNA, 25 bp, Homo sapien
tgggccaggaaaacgtttctctgaa

SEQ ID NO: 4035353 - DNA, 25 bp, Homo sapien
tcattcctgaatattgggccaggaa

SEQ ID NO: 4035354 - DNA, 25 bp, Homo sapien
ctgccgaagcaactgggtcagcctt

SEQ ID NO: 4035355 - DNA, 25 bp, Homo sapien
gaatgagcggaatcataggtcctgg

SEQ ID NO: 4035356 - DNA, 25 bp, Homo sapien
caggcagggtcgtttgggtcctcaa

SEQ ID NO: 4035357 - DNA, 25 bp, Homo sapien
tgaacacaggcgaatgcagtgctgg

SEQ ID NO: 4035358 - DNA, 25 bp, Homo sapien
aaacatacgctgcttcgggaactgc

SEQ ID NO: 4035359 - DNA, 25 bp, Homo sapien
tgctaacaagcagccgaggatacta

SEQ ID NO: 4035360 - DNA, 25 bp, Homo sapien
tggcgcgcacctttttacccagata

SEQ ID NO: 4035361 - DNA, 25 bp, Homo sapien
tagaaatacggaaacacagccagtt

SEQ ID NO: 4035362 - DNA, 25 bp, Homo sapien
gagcacgacggcattgacaagcatc

SEQ ID NO: 4035363 - DNA, 25 bp, Homo sapien
caggaatccggagaaggtcgagtac

SEQ ID NO: 4035364 - DNA, 25 bp, Homo sapien
ggccacccgtttagcatgaggctca

SEQ ID NO: 4035365 - DNA, 25 bp, Homo sapien
ggtatgctcggtcgcctttctccat

SEQ ID NO: 4035366 - DNA, 25 bp, Homo sapien
gattaggactccgttgctggcggcc

SEQ ID NO: 4035367 - DNA, 25 bp, Homo sapien
agaaagagaaaggcccgcttcagag

SEQ ID NO: 4035368 - DNA, 25 bp, Homo sapien
gagaaaggcccgcttcagaggcgca

SEQ ID NO: 4035369 - DNA, 25 bp, Homo sapien
aaagagaaaggcccgcttcagaggc

SEQ ID NO: 4035370 - DNA, 25 bp, Homo sapien
gaaaggcccgcttcagaggcgcaac

SEQ ID NO: 4035371 - DNA, 25 bp, Homo sapien
cgcaccgagcggcacaatgtatttc

SEQ ID NO: 4035372 - DNA, 25 bp, Homo sapien
caccgcctggttttgcccctgtggt

SEQ ID NO: 4035373 - DNA, 25 bp, Homo sapien
tggtggcaccgtcagccaagggcct

SEQ ID NO: 4035374 - DNA, 25 bp, Homo sapien
tgtgatttgtgattagaagtctcgc

SEQ ID NO: 4035375 - DNA, 25 bp, Homo sapien
cagggcccggcacgaggcgtcggct

SEQ ID NO: 4035376 - DNA, 25 bp, Homo sapien
cacctccggacagcccgagcacccc

SEQ ID NO: 4035377 - DNA, 25 bp, Homo sapien
ggcccggcacgaggcgtcggctgac

SEQ ID NO: 4035378 - DNA, 25 bp, Homo sapien
gccagggcccggcacgaggcgtcgg

SEQ ID NO: 4035379 - DNA, 25 bp, Homo sapien
ggcgatgaaagtgctgcgttctgaa

SEQ ID NO: 4035380 - DNA, 25 bp, Homo sapien
taaaactgtagatccctttgcgcgg

SEQ ID NO: 4035381 - DNA, 25 bp, Homo sapien
gcgttctgaatcaaagttgttccca

SEQ ID NO: 4035382 - DNA, 25 bp, Homo sapien
ccacgtggaagttaaaactgtagat

SEQ ID NO: 4035383 - DNA, 25 bp, Homo sapien
gctccgtctcattctgcccgcgggc

SEQ ID NO: 4035384 - DNA, 25 bp, Homo sapien
atcatggtgcgattactcatctcgg

SEQ ID NO: 4035385 - DNA, 25 bp, Homo sapien
ctgccagagcgcacagagatgccca

SEQ ID NO: 4035386 - DNA, 25 bp, Homo sapien
aagtagatgatcatggtgcgattac

SEQ ID NO: 4035387 - DNA, 25 bp, Homo sapien
cttcctcgcactccgggactagcgt

SEQ ID NO: 4035388 - DNA, 25 bp, Homo sapien
tgcccagccgcacttggatgcatag

SEQ ID NO: 4035389 - DNA, 25 bp, Homo sapien
actagcgtcccctccgcgctgtgtt

SEQ ID NO: 4035390 - DNA, 25 bp, Homo sapien
atgcatagccgctgctgctcggtcc

SEQ ID NO: 4035391 - DNA, 25 bp, Homo sapien
ccagaattttggagtgccttgaacc

SEQ ID NO: 4035392 - DNA, 25 bp, Homo sapien
aattcttattaagtcaactgcccac

SEQ ID NO: 4035393 - DNA, 25 bp, Homo sapien
gctgttgtggtaacacattgcatgc

SEQ ID NO: 4035394 - DNA, 25 bp, Homo sapien
actgcccaccttttaaagactgagg

SEQ ID NO: 4035395 - DNA, 25 bp, Homo sapien
caacattataccttttaggttgtca

SEQ ID NO: 4035396 - DNA, 25 bp, Homo sapien
tgtctgttccaatcaacattatacc

SEQ ID NO: 4035397 - DNA, 25 bp, Homo sapien
tataccttttaggttgtcattgtca

SEQ ID NO: 4035398 - DNA, 25 bp, Homo sapien
tccaatcaacattataccttttagg

SEQ ID NO: 4035399 - DNA, 25 bp, Homo sapien
ttacacagcatctttttgttcccac

SEQ ID NO: 4035400 - DNA, 25 bp, Homo sapien
cccagagctgtaataggtagagcca

SEQ ID NO: 4035401 - DNA, 25 bp, Homo sapien
tctctgccttgtatgtaacaggaat

SEQ ID NO: 4035402 - DNA, 25 bp, Homo sapien
ccaaatgtcaaagggatgatttgtc

SEQ ID NO: 4035403 - DNA, 25 bp, Homo sapien
tgtcttgtcaccactagtttccctt

SEQ ID NO: 4035404 - DNA, 25 bp, Homo sapien
aaggagtggagacagccttctctgc

SEQ ID NO: 4035405 - DNA, 25 bp, Homo sapien
cactgaagtggttaggtccaagggc

SEQ ID NO: 4035406 - DNA, 25 bp, Homo sapien
gctcccatatccatctgcagaggtg

SEQ ID NO: 4035407 - DNA, 25 bp, Homo sapien
tgtgcattgaggattaaattattca

SEQ ID NO: 4035408 - DNA, 25 bp, Homo sapien
ctgtgctacgtgatgaatttacagt

SEQ ID NO: 4035409 - DNA, 25 bp, Homo sapien
gtattaaaaacattgctgccgccta

SEQ ID NO: 4035410 - DNA, 25 bp, Homo sapien
ctacttcttccagctgggacttcag

SEQ ID NO: 4035411 - DNA, 25 bp, Homo sapien
acttcttccagctgggacttcagga

SEQ ID NO: 4035412 - DNA, 25 bp, Homo sapien
taattgctagtgacgttcaacatcc

SEQ ID NO: 4035413 - DNA, 25 bp, Homo sapien
tgttgacagtggtaaaatccttgtg

SEQ ID NO: 4035414 - DNA, 25 bp, Homo sapien
tcaaattatgttgcagtgaacgtcc

SEQ ID NO: 4035415 - DNA, 25 bp, Homo sapien
tggctatgatgtagactcccaccag

SEQ ID NO: 4035416 - DNA, 25 bp, Homo sapien
tgcaaaatggggtacctgtaaaata

SEQ ID NO: 4035417 - DNA, 25 bp, Homo sapien
ccaggagtccgcgaagctccgtgaa

SEQ ID NO: 4035418 - DNA, 25 bp, Homo sapien
cgcgaagctccgtgaaggcaaaggc

SEQ ID NO: 4035419 - DNA, 25 bp, Homo sapien
gagtccgcgaagctccgtgaaggca

SEQ ID NO: 4035420 - DNA, 25 bp, Homo sapien
gaagctccgtgaaggcaaaggccat

SEQ ID NO: 4035421 - DNA, 25 bp, Homo sapien
gtccatgccaaccacatgttggtgg

SEQ ID NO: 4035422 - DNA, 25 bp, Homo sapien
catgccaaccacatgttggtggaat

SEQ ID NO: 4035423 - DNA, 25 bp, Homo sapien
ccaaccacatgttggtggaattcag

SEQ ID NO: 4035424 - DNA, 25 bp, Homo sapien
aaccacatgttggtggaattcagtc

SEQ ID NO: 4035425 - DNA, 25 bp, Homo sapien
gcagctcttccattcatgaatgatg

SEQ ID NO: 4035426 - DNA, 25 bp, Homo sapien
gaatgatgcaatattgagctgtgat

SEQ ID NO: 4035427 - DNA, 25 bp, Homo sapien
aagcattggcagcttaactaaaagc

SEQ ID NO: 4035428 - DNA, 25 bp, Homo sapien
aaaagcatcctctctattttgctct

SEQ ID NO: 4035429 - DNA, 25 bp, Homo sapien
caatagcttgcaaacgcagcgtggc

SEQ ID NO: 4035430 - DNA, 25 bp, Homo sapien
ggctgtttttgttggcacatccctt

SEQ ID NO: 4035431 - DNA, 25 bp, Homo sapien
ccggcataaaggagtcagcgagcag

SEQ ID NO: 4035432 - DNA, 25 bp, Homo sapien
cccagcagaaaatctgcctgctgaa

SEQ ID NO: 4035433 - DNA, 25 bp, Homo sapien
aacatcgtggaaaagcaaaccatag

SEQ ID NO: 4035434 - DNA, 25 bp, Homo sapien
tcgtggaaaagcaaaccataggctt

SEQ ID NO: 4035435 - DNA, 25 bp, Homo sapien
catcgtggaaaagcaaaccataggc

SEQ ID NO: 4035436 - DNA, 25 bp, Homo sapien
aaagcaaaccataggcttttatcat

SEQ ID NO: 4035437 - DNA, 25 bp, Homo sapien
gggccttgacaaatgctcctatcca

SEQ ID NO: 4035438 - DNA, 25 bp, Homo sapien
aaagagtgcaggagcagtggtcagc

SEQ ID NO: 4035439 - DNA, 25 bp, Homo sapien
tgatcgatgatttctgagcgtgggt

SEQ ID NO: 4035440 - DNA, 25 bp, Homo sapien
gagtggcccatttgtgattcaggag

SEQ ID NO: 4035441 - DNA, 25 bp, Homo sapien
ggaggagcagaagcttccacccacg

SEQ ID NO: 4035442 - DNA, 25 bp, Homo sapien
aacgcttttgatgctgggagcagca

SEQ ID NO: 4035443 - DNA, 25 bp, Homo sapien
ccacccacgggatgacttcagatga

SEQ ID NO: 4035444 - DNA, 25 bp, Homo sapien
taacacactctatggccctccatgg

SEQ ID NO: 4035445 - DNA, 25 bp, Homo sapien
tgcaaaacgcaaggatgatccaaga

SEQ ID NO: 4035446 - DNA, 25 bp, Homo sapien
gatctagcagccctttgtcgggaaa

SEQ ID NO: 4035447 - DNA, 25 bp, Homo sapien
gaaagtaaccaacaagatcaggcct

SEQ ID NO: 4035448 - DNA, 25 bp, Homo sapien
cccttctgtgaagcagcggttctca

SEQ ID NO: 4035449 - DNA, 25 bp, Homo sapien
ccaagctcatgagggagtgtgagtc

SEQ ID NO: 4035450 - DNA, 25 bp, Homo sapien
tgagtcagaaccacctagctaagct

SEQ ID NO: 4035451 - DNA, 25 bp, Homo sapien
ggcagcttggaggaagatcccccca

SEQ ID NO: 4035452 - DNA, 25 bp, Homo sapien
cacagccagcattaacttacctgct

SEQ ID NO: 4035453 - DNA, 25 bp, Homo sapien
gtcctgcccacatgcggtttacagt

SEQ ID NO: 4035454 - DNA, 25 bp, Homo sapien
ggtcctgcccacatgcggtttacag

SEQ ID NO: 4035455 - DNA, 25 bp, Homo sapien
tagcgccagactgaaggtttttctg

SEQ ID NO: 4035456 - DNA, 25 bp, Homo sapien
ctctcagacaccagatgcacctgta

SEQ ID NO: 4035457 - DNA, 25 bp, Homo sapien
tctcagacaccagatgcacctgtag

SEQ ID NO: 4035458 - DNA, 25 bp, Homo sapien
agatgcacctgtagcgccagactga

SEQ ID NO: 4035459 - DNA, 25 bp, Homo sapien
taactgagcgcaaagctactctcct

SEQ ID NO: 4035460 - DNA, 25 bp, Homo sapien
ttctgtggcaggtaactgagcgcaa

SEQ ID NO: 4035461 - DNA, 25 bp, Homo sapien
gagcatgggcttccagaccaacaca

SEQ ID NO: 4035462 - DNA, 25 bp, Homo sapien
cagaccaacacaggcaggctgtctg

SEQ ID NO: 4035463 - DNA, 25 bp, Homo sapien
tgatgatgtctttggagctcacagt

SEQ ID NO: 4035464 - DNA, 25 bp, Homo sapien
caatgatgatgtctttggagctcac

SEQ ID NO: 4035465 - DNA, 25 bp, Homo sapien
aatgatgatgtctttggagctcaca

SEQ ID NO: 4035466 - DNA, 25 bp, Homo sapien
cacaatgatgatgtctttggagctc

SEQ ID NO: 4035467 - DNA, 25 bp, Homo sapien
gagtcacaggggtacttgcagaggt

SEQ ID NO: 4035468 - DNA, 25 bp, Homo sapien
tcacaggggtacttgcagaggtggt

SEQ ID NO: 4035469 - DNA, 25 bp, Homo sapien
gtcacaggggtacttgcagaggtgg

SEQ ID NO: 4035470 - DNA, 25 bp, Homo sapien
acaggggtacttgcagaggtggtga

SEQ ID NO: 4035471 - DNA, 25 bp, Homo sapien
agggccggctcgagccactttgctt

SEQ ID NO: 4035472 - DNA, 25 bp, Homo sapien
cagggccggctcgagccactttgct

SEQ ID NO: 4035473 - DNA, 25 bp, Homo sapien
agcagggccggctcgagccactttg

SEQ ID NO: 4035474 - DNA, 25 bp, Homo sapien
agggtgcattaggcaggcttcactg

SEQ ID NO: 4035475 - DNA, 25 bp, Homo sapien
cctgcgtctccgttgtagcgaacat

SEQ ID NO: 4035476 - DNA, 25 bp, Homo sapien
aagctcatcccaagatccctgcgtc

SEQ ID NO: 4035477 - DNA, 25 bp, Homo sapien
tgtagcgaacatctgtcctttctca

SEQ ID NO: 4035478 - DNA, 25 bp, Homo sapien
cattattggccagacaaagctcatc

SEQ ID NO: 4035479 - DNA, 25 bp, Homo sapien
atttacccatctgcgtctccacgaa

SEQ ID NO: 4035480 - DNA, 25 bp, Homo sapien
ggaggttcacgttgtcaaagaagcc

SEQ ID NO: 4035481 - DNA, 25 bp, Homo sapien
taaggattcaaagtaaggaggttca

SEQ ID NO: 4035482 - DNA, 25 bp, Homo sapien
gaaatctttcatcccatcgacaatg

SEQ ID NO: 4035483 - DNA, 25 bp, Homo sapien
taagaagcgaggactcagcgtgtcc

SEQ ID NO: 4035484 - DNA, 25 bp, Homo sapien
gtccctggcggcttcctccttgaag

SEQ ID NO: 4035485 - DNA, 25 bp, Homo sapien
ggactcagcgtgtccctggcggctt

SEQ ID NO: 4035486 - DNA, 25 bp, Homo sapien
gggcgcactttaagaagcgaggact

SEQ ID NO: 4035487 - DNA, 25 bp, Homo sapien
cgagccaattggtgtgtctccataa

SEQ ID NO: 4035488 - DNA, 25 bp, Homo sapien
aattggtgtgtctccataatgaggg

SEQ ID NO: 4035489 - DNA, 25 bp, Homo sapien
ctttcatgggccgagccaattggtg

SEQ ID NO: 4035490 - DNA, 25 bp, Homo sapien
catgggccgagccaattggtgtgtc

SEQ ID NO: 4035491 - DNA, 25 bp, Homo sapien
gctgcaggctctgagctctgctgcc

SEQ ID NO: 4035492 - DNA, 25 bp, Homo sapien
ggcggagaggcatctgctgcaggct

SEQ ID NO: 4035493 - DNA, 25 bp, Homo sapien
ctggcggagaggcatctgctgcagg

SEQ ID NO: 4035494 - DNA, 25 bp, Homo sapien
tgcaggctctgagctctgctgccca

SEQ ID NO: 4035495 - DNA, 25 bp, Homo sapien
aggccagggggtgggctgcagccag

SEQ ID NO: 4035496 - DNA, 25 bp, Homo sapien
ctgggaccgcagacacagcccagga

SEQ ID NO: 4035497 - DNA, 25 bp, Homo sapien
agcccaggacacctcaaggccaggg

SEQ ID NO: 4035498 - DNA, 25 bp, Homo sapien
aaggccagggggtgggctgcagcca

SEQ ID NO: 4035499 - DNA, 25 bp, Homo sapien
ttgggtcaaggccacatgggccagc

SEQ ID NO: 4035500 - DNA, 25 bp, Homo sapien
gggaaaggtagcagaacagacgagg

SEQ ID NO: 4035501 - DNA, 25 bp, Homo sapien
ccaatccataggtggaaagatggag

SEQ ID NO: 4035502 - DNA, 25 bp, Homo sapien
tgctctgcgggctgctgatggtttg

SEQ ID NO: 4035503 - DNA, 25 bp, Homo sapien
ttggaatggctgggtttgcccactg

SEQ ID NO: 4035504 - DNA, 25 bp, Homo sapien
atttggaatggctgggtttgcccac

SEQ ID NO: 4035505 - DNA, 25 bp, Homo sapien
tttggaatggctgggtttgcccact

SEQ ID NO: 4035506 - DNA, 25 bp, Homo sapien
catttggaatggctgggtttgccca

SEQ ID NO: 4035507 - DNA, 25 bp, Homo sapien
tcctggcagccgccatatagacctg

SEQ ID NO: 4035508 - DNA, 25 bp, Homo sapien
tggcagccgccatatagacctgaag

SEQ ID NO: 4035509 - DNA, 25 bp, Homo sapien
ctggcagccgccatatagacctgaa

SEQ ID NO: 4035510 - DNA, 25 bp, Homo sapien
gcagccgccatatagacctgaagaa

SEQ ID NO: 4035511 - DNA, 25 bp, Homo sapien
cgctacgtcccgctggaagccgaat

SEQ ID NO: 4035512 - DNA, 25 bp, Homo sapien
gtcccgctggaagccgaattcagct

SEQ ID NO: 4035513 - DNA, 25 bp, Homo sapien
agccgaattcagctggtgtggccag

SEQ ID NO: 4035514 - DNA, 25 bp, Homo sapien
ctggaagccgaattcagctggtgtg

SEQ ID NO: 4035515 - DNA, 25 bp, Homo sapien
tgggattccattcctccgtttctcg

SEQ ID NO: 4035516 - DNA, 25 bp, Homo sapien
ttcctccgtttctcggtctctctct

SEQ ID NO: 4035517 - DNA, 25 bp, Homo sapien
tctccccctaacaatcttatatctt

SEQ ID NO: 4035518 - DNA, 25 bp, Homo sapien
catctctccccctaacaatcttata

SEQ ID NO: 4035519 - DNA, 25 bp, Homo sapien
cctttgtgctaggagaggtgctgtc

SEQ ID NO: 4035520 - DNA, 25 bp, Homo sapien
tcctctccctttgtgctaggagagg

SEQ ID NO: 4035521 - DNA, 25 bp, Homo sapien
gaggtgctgtcttccaaaggagcag

SEQ ID NO: 4035522 - DNA, 25 bp, Homo sapien
gctaggagaggtgctgtcttccaaa

SEQ ID NO: 4035523 - DNA, 25 bp, Homo sapien
cactcatcactgagtaatgaagctg

SEQ ID NO: 4035524 - DNA, 25 bp, Homo sapien
tcatgttaggaaatatgggtcactc

SEQ ID NO: 4035525 - DNA, 25 bp, Homo sapien
catcactgagtaatgaagctgttac

SEQ ID NO: 4035526 - DNA, 25 bp, Homo sapien
catgttaggaaatatgggtcactca

SEQ ID NO: 4035527 - DNA, 25 bp, Homo sapien
cccattgtagggctggcttttaaca

SEQ ID NO: 4035528 - DNA, 25 bp, Homo sapien
cgcgatcggaaacgcgcttgcacag

SEQ ID NO: 4035529 - DNA, 25 bp, Homo sapien
gcttttaacaatggagtcgcccaca

SEQ ID NO: 4035530 - DNA, 25 bp, Homo sapien
cagaaacctgtcaactgtcctcgtc

SEQ ID NO: 4035531 - DNA, 25 bp, Homo sapien
caggccggtggaggtcggccagagg

SEQ ID NO: 4035532 - DNA, 25 bp, Homo sapien
gttggcaggccggtggaggtcggcc

SEQ ID NO: 4035533 - DNA, 25 bp, Homo sapien
gccggtggaggtcggccagaggcgt

SEQ ID NO: 4035534 - DNA, 25 bp, Homo sapien
ggcaggccggtggaggtcggccaga

SEQ ID NO: 4035535 - DNA, 25 bp, Homo sapien
cccataaacagtgtggggtctatag

SEQ ID NO: 4035536 - DNA, 25 bp, Homo sapien
gtctatagattcttttcgggggcca

SEQ ID NO: 4035537 - DNA, 25 bp, Homo sapien
cataaacagtgtggggtctatagat

SEQ ID NO: 4035538 - DNA, 25 bp, Homo sapien
cgggggccattaaacatgcttgaga

SEQ ID NO: 4035539 - DNA, 25 bp, Homo sapien
ttttttggccaggtcactagctgca

SEQ ID NO: 4035540 - DNA, 25 bp, Homo sapien
ctcttggctctgtcggctctggctc

SEQ ID NO: 4035541 - DNA, 25 bp, Homo sapien
caaaggaagtggcagggcgcttgga

SEQ ID NO: 4035542 - DNA, 25 bp, Homo sapien
tgaggtgatgagtaaaggtatcccc

SEQ ID NO: 4035543 - DNA, 25 bp, Homo sapien
gagggaccagcggaccaagaaattc

SEQ ID NO: 4035544 - DNA, 25 bp, Homo sapien
gagtgtcggagaacagcccctttgt

SEQ ID NO: 4035545 - DNA, 25 bp, Homo sapien
aattccctgccatgcgagtgtcgga

SEQ ID NO: 4035546 - DNA, 25 bp, Homo sapien
tcattgattgtgtcattgagggacc

SEQ ID NO: 4035547 - DNA, 25 bp, Homo sapien
gattgcgatgacacttgtcctccca

SEQ ID NO: 4035548 - DNA, 25 bp, Homo sapien
ttgcgatgacacttgtcctcccaag

SEQ ID NO: 4035549 - DNA, 25 bp, Homo sapien
ggattgcgatgacacttgtcctccc

SEQ ID NO: 4035550 - DNA, 25 bp, Homo sapien
tgcgatgacacttgtcctcccaagt

SEQ ID NO: 4035551 - DNA, 25 bp, Homo sapien
agccctgacatacaggatctggctc

SEQ ID NO: 4035552 - DNA, 25 bp, Homo sapien
tgggatcctgacaccttctccttct

SEQ ID NO: 4035553 - DNA, 25 bp, Homo sapien
gacatacaggatctggctcatttga

SEQ ID NO: 4035554 - DNA, 25 bp, Homo sapien
caaggaggggctgagtgttacaggc

SEQ ID NO: 4035555 - DNA, 25 bp, Homo sapien
cagctggtaggtggtcaagcagcag

SEQ ID NO: 4035556 - DNA, 25 bp, Homo sapien
ttgtgtcttcaagaccccagaaatc

SEQ ID NO: 4035557 - DNA, 25 bp, Homo sapien
gtgtcttcaagaccccagaaatcac

SEQ ID NO: 4035558 - DNA, 25 bp, Homo sapien
taggtggtcaagcagcagtgctctg

SEQ ID NO: 4035559 - DNA, 25 bp, Homo sapien
gaccactcactgctctcagatgtcg

SEQ ID NO: 4035560 - DNA, 25 bp, Homo sapien
aggcagaccactcactgctctcaga

SEQ ID NO: 4035561 - DNA, 25 bp, Homo sapien
cagaccactcactgctctcagatgt

SEQ ID NO: 4035562 - DNA, 25 bp, Homo sapien
cactcactgctctcagatgtcgggc

SEQ ID NO: 4035563 - DNA, 25 bp, Homo sapien
tgtaagtatgcaaagtgcggacagg

SEQ ID NO: 4035564 - DNA, 25 bp, Homo sapien
agtatgcaaagtgcggacaggagtt

SEQ ID NO: 4035565 - DNA, 25 bp, Homo sapien
aggaaactaatgtaagtatgcaaag

SEQ ID NO: 4035566 - DNA, 25 bp, Homo sapien
aactaatgtaagtatgcaaagtgcg

SEQ ID NO: 4035567 - DNA, 25 bp, Homo sapien
tgcgcccacacggctggcctgaaca

SEQ ID NO: 4035568 - DNA, 25 bp, Homo sapien
gcccacacggctggcctgaacatga

SEQ ID NO: 4035569 - DNA, 25 bp, Homo sapien
ctgtgcgcccacacggctggcctga

SEQ ID NO: 4035570 - DNA, 25 bp, Homo sapien
tgtgcgcccacacggctggcctgaa

SEQ ID NO: 4035571 - DNA, 25 bp, Homo sapien
tgcagcattgcttgtcggttgaggt

SEQ ID NO: 4035572 - DNA, 25 bp, Homo sapien
cagccccctggagtagaatctgtct

SEQ ID NO: 4035573 - DNA, 25 bp, Homo sapien
actggccattttggaacggtcttct

SEQ ID NO: 4035574 - DNA, 25 bp, Homo sapien
gactcaaggggctcaaggcgccact

SEQ ID NO: 4035575 - DNA, 25 bp, Homo sapien
tggctcggaggatgggtttcaggaa

SEQ ID NO: 4035576 - DNA, 25 bp, Homo sapien
ccagacgtgtggctcggaggatggg

SEQ ID NO: 4035577 - DNA, 25 bp, Homo sapien
acgtgtggctcggaggatgggtttc

SEQ ID NO: 4035578 - DNA, 25 bp, Homo sapien
gtgtggctcggaggatgggtttcag

SEQ ID NO: 4035579 - DNA, 25 bp, Homo sapien
ggctcctagcccgctcctgggccat

SEQ ID NO: 4035580 - DNA, 25 bp, Homo sapien
tggctcctagcccgctcctgggcca

SEQ ID NO: 4035581 - DNA, 25 bp, Homo sapien
taggcatctagcgtgtgcaggccca

SEQ ID NO: 4035582 - DNA, 25 bp, Homo sapien
catctagcgtgtgcaggcccatggg

SEQ ID NO: 4035583 - DNA, 25 bp, Homo sapien
agtaggcatctagcgtgtgcaggcc

SEQ ID NO: 4035584 - DNA, 25 bp, Homo sapien
ttagtaggcatctagcgtgtgcagg

SEQ ID NO: 4035585 - DNA, 25 bp, Homo sapien
tgtcctccacgggcacctttcatgt

SEQ ID NO: 4035586 - DNA, 25 bp, Homo sapien
tcctccacgggcacctttcatgtta

SEQ ID NO: 4035587 - DNA, 25 bp, Homo sapien
ccccagccggggcttgggcgagctg

SEQ ID NO: 4035588 - DNA, 25 bp, Homo sapien
gcttgggcgagctggcgcctctgtc

SEQ ID NO: 4035589 - DNA, 25 bp, Homo sapien
gcctgtcgtgcagatcagggaggac

SEQ ID NO: 4035590 - DNA, 25 bp, Homo sapien
tgtatgccaacagcacccactcggg

SEQ ID NO: 4035591 - DNA, 25 bp, Homo sapien
ccactgtatgccaacagcacccact

SEQ ID NO: 4035592 - DNA, 25 bp, Homo sapien
cccactcggggcctagcctgtcgtg

SEQ ID NO: 4035593 - DNA, 25 bp, Homo sapien
tgtggagtggagcaagaagggcgga

SEQ ID NO: 4035594 - DNA, 25 bp, Homo sapien
ctcgcataggagcaaagattctggt

SEQ ID NO: 4035595 - DNA, 25 bp, Homo sapien
caaagattctggtgtggagtggagc

SEQ ID NO: 4035596 - DNA, 25 bp, Homo sapien
gtggagcaagaagggcggagaaacg

SEQ ID NO: 4035597 - DNA, 25 bp, Homo sapien
tgtcagttcattgctgaagcacata

SEQ ID NO: 4035598 - DNA, 25 bp, Homo sapien
ttcattgctgaagcacatagagtgt

SEQ ID NO: 4035599 - DNA, 25 bp, Homo sapien
cacttgtcagttcattgctgaagca

SEQ ID NO: 4035600 - DNA, 25 bp, Homo sapien
ccacacacttgtcagttcattgctg

SEQ ID NO: 4035601 - DNA, 25 bp, Homo sapien
cagtcaggtgaagagcgccggaaac

SEQ ID NO: 4035602 - DNA, 25 bp, Homo sapien
cgccggaaacgctgagaggccccgg

SEQ ID NO: 4035603 - DNA, 25 bp, Homo sapien
aagagcgccggaaacgctgagaggc

SEQ ID NO: 4035604 - DNA, 25 bp, Homo sapien
tgaagagcgccggaaacgctgagag

SEQ ID NO: 4035605 - DNA, 25 bp, Homo sapien
gaagaaaaaatctccgggatgtgag

SEQ ID NO: 4035606 - DNA, 25 bp, Homo sapien
tggctggtcccttaacgatgatggc

SEQ ID NO: 4035607 - DNA, 25 bp, Homo sapien
cacaactgggccttgttagaagaaa

SEQ ID NO: 4035608 - DNA, 25 bp, Homo sapien
ggttctgacaccgtaggctgagcca

SEQ ID NO: 4035609 - DNA, 25 bp, Homo sapien
ggagcagaggcgccagacagcagca

SEQ ID NO: 4035610 - DNA, 25 bp, Homo sapien
gcagaggcgccagacagcagcacga

SEQ ID NO: 4035611 - DNA, 25 bp, Homo sapien
acggcagccgagaaactcctctccc

SEQ ID NO: 4035612 - DNA, 25 bp, Homo sapien
gtgcacacggcagccgagaaactcc

SEQ ID NO: 4035613 - DNA, 25 bp, Homo sapien
gaggttgggagctgaactgcgggtt

SEQ ID NO: 4035614 - DNA, 25 bp, Homo sapien
gatagttcaggggtgtgcagcaccc

SEQ ID NO: 4035615 - DNA, 25 bp, Homo sapien
ttggcagcgggtgttttctgctgca

SEQ ID NO: 4035616 - DNA, 25 bp, Homo sapien
cagggaggacaatcggggttcttca

SEQ ID NO: 4035617 - DNA, 25 bp, Homo sapien
tgatggaccgggctgctgctcgagg

SEQ ID NO: 4035618 - DNA, 25 bp, Homo sapien
ttgactcccactggacccatgaact

SEQ ID NO: 4035619 - DNA, 25 bp, Homo sapien
caccagggtgcctgatggaccgggc

SEQ ID NO: 4035620 - DNA, 25 bp, Homo sapien
tcctttgactcccactggacccatg

SEQ ID NO: 4035621 - DNA, 25 bp, Homo sapien
ctgtctgagccacgggacttccatt

SEQ ID NO: 4035622 - DNA, 25 bp, Homo sapien
tcatgtttgcaggagggtgtcccga

SEQ ID NO: 4035623 - DNA, 25 bp, Homo sapien
gaaaatcattcctgatgaagctgct

SEQ ID NO: 4035624 - DNA, 25 bp, Homo sapien
attaacattaatggggggctctggg

SEQ ID NO: 4035625 - DNA, 25 bp, Homo sapien
gccgtgccaggcagcgattggttct

SEQ ID NO: 4035626 - DNA, 25 bp, Homo sapien
cattttgatgctcgcggcgggacca

SEQ ID NO: 4035627 - DNA, 25 bp, Homo sapien
ggttgccagcaatcacggccatctg

SEQ ID NO: 4035628 - DNA, 25 bp, Homo sapien
gctgtaaacacccatacgcgactct

SEQ ID NO: 4035629 - DNA, 25 bp, Homo sapien
gcccctcaaactggtggggagcgtc

SEQ ID NO: 4035630 - DNA, 25 bp, Homo sapien
cctcaaactggtggggagcgtcctc

SEQ ID NO: 4035631 - DNA, 25 bp, Homo sapien
caaactggtggggagcgtcctcttc

SEQ ID NO: 4035632 - DNA, 25 bp, Homo sapien
ccctcaaactggtggggagcgtcct

SEQ ID NO: 4035633 - DNA, 25 bp, Homo sapien
tacagctctctaagggtacttctgg

SEQ ID NO: 4035634 - DNA, 25 bp, Homo sapien
ttaacaatggagtcagacaccccag

SEQ ID NO: 4035635 - DNA, 25 bp, Homo sapien
cactcatgaccaggtgtggctatgc

SEQ ID NO: 4035636 - DNA, 25 bp, Homo sapien
gaggcacccaagttatagtcgcaag

SEQ ID NO: 4035637 - DNA, 25 bp, Homo sapien
gtgttccatgacaggggcctgtggc

SEQ ID NO: 4035638 - DNA, 25 bp, Homo sapien
cactctgggcaggtgttccatgaca

SEQ ID NO: 4035639 - DNA, 25 bp, Homo sapien
ttctgggcactctgggcaggtgttc

SEQ ID NO: 4035640 - DNA, 25 bp, Homo sapien
cctgtggcccaagggtcctggtcca

SEQ ID NO: 4035641 - DNA, 25 bp, Homo sapien
ttgtcaccgccataaacctcattac

SEQ ID NO: 4035642 - DNA, 25 bp, Homo sapien
ctggctgccttgtcaccgccataaa

SEQ ID NO: 4035643 - DNA, 25 bp, Homo sapien
agccagccggagaacaatgcggccg

SEQ ID NO: 4035644 - DNA, 25 bp, Homo sapien
gggacagagccagccggagaacaat

SEQ ID NO: 4035645 - DNA, 25 bp, Homo sapien
aaggcatcagccggcttcgctgctg

SEQ ID NO: 4035646 - DNA, 25 bp, Homo sapien
ttacccaaggcatcagccggcttcg

SEQ ID NO: 4035647 - DNA, 25 bp, Homo sapien
caaggcatcagccggcttcgctgct

SEQ ID NO: 4035648 - DNA, 25 bp, Homo sapien
acccaaggcatcagccggcttcgct

SEQ ID NO: 4035649 - DNA, 25 bp, Homo sapien
tctgcggcggaaagtctaaaagcac

SEQ ID NO: 4035650 - DNA, 25 bp, Homo sapien
taaaagcacactagctgtagcagga

SEQ ID NO: 4035651 - DNA, 25 bp, Homo sapien
gatgtaatgttcaaatggccctccc

SEQ ID NO: 4035652 - DNA, 25 bp, Homo sapien
gcttataatagcagcgcctcatggc

SEQ ID NO: 4035653 - DNA, 25 bp, Homo sapien
actgtgcgtgctggctcatcgtgtg

SEQ ID NO: 4035654 - DNA, 25 bp, Homo sapien
gtgcgtgctggctcatcgtgtggtt

SEQ ID NO: 4035655 - DNA, 25 bp, Homo sapien
ctgtgcgtgctggctcatcgtgtgg

SEQ ID NO: 4035656 - DNA, 25 bp, Homo sapien
tgtgcgtgctggctcatcgtgtggt

SEQ ID NO: 4035657 - DNA, 25 bp, Homo sapien
gactcagtgcagtttggccgaatgc

SEQ ID NO: 4035658 - DNA, 25 bp, Homo sapien
gaggaaactctgatcgcctgcaggc

SEQ ID NO: 4035659 - DNA, 25 bp, Homo sapien
gcaatggcccaaccagagacaggga

SEQ ID NO: 4035660 - DNA, 25 bp, Homo sapien
gccgaatgcacctaggaatccaggg

SEQ ID NO: 4035661 - DNA, 25 bp, Homo sapien
tcacccgcattctgcaccagacaca

SEQ ID NO: 4035662 - DNA, 25 bp, Homo sapien
cgcattctgcaccagacacagtgcc

SEQ ID NO: 4035663 - DNA, 25 bp, Homo sapien
cccgcattctgcaccagacacagtg

SEQ ID NO: 4035664 - DNA, 25 bp, Homo sapien
gcattctgcaccagacacagtgcca

SEQ ID NO: 4035665 - DNA, 25 bp, Homo sapien
gaggccacagatgggatgcaggcgg

SEQ ID NO: 4035666 - DNA, 25 bp, Homo sapien
cgtggcacctctccctgtacttgtg

SEQ ID NO: 4035667 - DNA, 25 bp, Homo sapien
tttccatgggaacccgcaccctcca

SEQ ID NO: 4035668 - DNA, 25 bp, Homo sapien
cagatgggatgcaggcggtttccat

SEQ ID NO: 4035669 - DNA, 25 bp, Homo sapien
agcacagttcaataaccgtgaaaga

SEQ ID NO: 4035670 - DNA, 25 bp, Homo sapien
cacagttcaataaccgtgaaagaac

SEQ ID NO: 4035671 - DNA, 25 bp, Homo sapien
acacagagcagctctggacagctac

SEQ ID NO: 4035672 - DNA, 25 bp, Homo sapien
gcagctctggacagctactgcaatc

SEQ ID NO: 4035673 - DNA, 25 bp, Homo sapien
gtgctccacggcagagggactgttt

SEQ ID NO: 4035674 - DNA, 25 bp, Homo sapien
cagggtgctccacggcagagggact

SEQ ID NO: 4035675 - DNA, 25 bp, Homo sapien
gcagggtgctccacggcagagggac

SEQ ID NO: 4035676 - DNA, 25 bp, Homo sapien
gggtgctccacggcagagggactgt

SEQ ID NO: 4035677 - DNA, 25 bp, Homo sapien
gcagccatgttcgtgctcagcaggg

SEQ ID NO: 4035678 - DNA, 25 bp, Homo sapien
aagtagcccttgaggctgaagtggc

SEQ ID NO: 4035679 - DNA, 25 bp, Homo sapien
gctcagcaggggtgaagttgggtcc

SEQ ID NO: 4035680 - DNA, 25 bp, Homo sapien
agaagtagcccttgaggctgaagtg

SEQ ID NO: 4035681 - DNA, 25 bp, Homo sapien
caggctatgacgtggacacacctca

SEQ ID NO: 4035682 - DNA, 25 bp, Homo sapien
gagtgatggccaaggttccctctaa

SEQ ID NO: 4035683 - DNA, 25 bp, Homo sapien
ggtttgcctcatttacgcagatggc

SEQ ID NO: 4035684 - DNA, 25 bp, Homo sapien
gtttgcccgagtgggtgtgacaccc

SEQ ID NO: 4035685 - DNA, 25 bp, Homo sapien
tagattattaggagggaaccgaagc

SEQ ID NO: 4035686 - DNA, 25 bp, Homo sapien
tattgatgccaaccggatccaggtt

SEQ ID NO: 4035687 - DNA, 25 bp, Homo sapien
ttcagaatgcaaatgggccccgtca

SEQ ID NO: 4035688 - DNA, 25 bp, Homo sapien
caacgcaggtggcttggtcaacaat

SEQ ID NO: 4035689 - DNA, 25 bp, Homo sapien
cccaggacgcaagggccccttgaag

SEQ ID NO: 4035690 - DNA, 25 bp, Homo sapien
tccgggttgtctcctcgaggaggca

SEQ ID NO: 4035691 - DNA, 25 bp, Homo sapien
aagctgagaaaacaacgtgaagcac

SEQ ID NO: 4035692 - DNA, 25 bp, Homo sapien
agctgtagaagggtttctgcttttt

SEQ ID NO: 4035693 - DNA, 25 bp, Homo sapien
tgagtattggcgcacggctgctgac

SEQ ID NO: 4035694 - DNA, 25 bp, Homo sapien
ctatgagtattggcgcacggctgct

SEQ ID NO: 4035695 - DNA, 25 bp, Homo sapien
atgagtattggcgcacggctgctga

SEQ ID NO: 4035696 - DNA, 25 bp, Homo sapien
tatgagtattggcgcacggctgctg

SEQ ID NO: 4035697 - DNA, 25 bp, Homo sapien
aatgccaacttgcatttctcatcat

SEQ ID NO: 4035698 - DNA, 25 bp, Homo sapien
agagtacaatccaggcttccaccca

SEQ ID NO: 4035699 - DNA, 25 bp, Homo sapien
accaaagagtacaatccaggcttcc

SEQ ID NO: 4035700 - DNA, 25 bp, Homo sapien
gagcaccctggtctctcgttgatgg

SEQ ID NO: 4035701 - DNA, 25 bp, Homo sapien
cgttgatgggggctaagacatcccc

SEQ ID NO: 4035702 - DNA, 25 bp, Homo sapien
gctgtccagaccagcgacagtatca

SEQ ID NO: 4035703 - DNA, 25 bp, Homo sapien
cgacagtatcatgccccgggagctg

SEQ ID NO: 4035704 - DNA, 25 bp, Homo sapien
tccagaccagcgacagtatcatgcc

SEQ ID NO: 4035705 - DNA, 25 bp, Homo sapien
tcatgccccgggagctgcatgcagc

SEQ ID NO: 4035706 - DNA, 25 bp, Homo sapien
tttctgtacacagaacactagcaga

SEQ ID NO: 4035707 - DNA, 25 bp, Homo sapien
tttttctgtacacagaacactagca

SEQ ID NO: 4035708 - DNA, 25 bp, Homo sapien
cacagaacactagcagacttagaaa

SEQ ID NO: 4035709 - DNA, 25 bp, Homo sapien
gaacactagcagacttagaaaattt

SEQ ID NO: 4035710 - DNA, 25 bp, Homo sapien
caaatgaataggaaagctagttccc

SEQ ID NO: 4035711 - DNA, 25 bp, Homo sapien
gggccctccacatacttgcttcaaa

SEQ ID NO: 4035712 - DNA, 25 bp, Homo sapien
cctgaaaaccttgccatgatctggg

SEQ ID NO: 4035713 - DNA, 25 bp, Homo sapien
ggaaagtgcccatcaatcccctaga

SEQ ID NO: 4035714 - DNA, 25 bp, Homo sapien
gctgtgaatgcctgggaagaccgtc

SEQ ID NO: 4035715 - DNA, 25 bp, Homo sapien
gggcacagatcttgttccttggaaa

SEQ ID NO: 4035716 - DNA, 25 bp, Homo sapien
aaatggggccccatgggattccaag

SEQ ID NO: 4035717 - DNA, 25 bp, Homo sapien
tgggaagaccgtcacaccagcttcc

SEQ ID NO: 4035718 - DNA, 25 bp, Homo sapien
ttaaccctgagaccgtcggtgctga

SEQ ID NO: 4035719 - DNA, 25 bp, Homo sapien
taaccctgagaccgtcggtgctgac

SEQ ID NO: 4035720 - DNA, 25 bp, Homo sapien
cgaggaccatcaggcggcgtggtgc

SEQ ID NO: 4035721 - DNA, 25 bp, Homo sapien
ccatcaggcggcgtggtgcagcgga

SEQ ID NO: 4035722 - DNA, 25 bp, Homo sapien
gggaaccgaggaccatcaggcggcg

SEQ ID NO: 4035723 - DNA, 25 bp, Homo sapien
catcaggcggcgtggtgcagcggat

SEQ ID NO: 4035724 - DNA, 25 bp, Homo sapien
gggcactgtgagcagtcgtagatct

SEQ ID NO: 4035725 - DNA, 25 bp, Homo sapien
tggaagaagaacttctgagggcact

SEQ ID NO: 4035726 - DNA, 25 bp, Homo sapien
cactgtgagcagtcgtagatcttgt

SEQ ID NO: 4035727 - DNA, 25 bp, Homo sapien
gtgagcagtcgtagatcttgtcctc

SEQ ID NO: 4035728 - DNA, 25 bp, Homo sapien
cagagcccctgagacttgcctcggg

SEQ ID NO: 4035729 - DNA, 25 bp, Homo sapien
gctgggacagccattcgcctgggcc

SEQ ID NO: 4035730 - DNA, 25 bp, Homo sapien
tcgggctgggacagccattcgcctg

SEQ ID NO: 4035731 - DNA, 25 bp, Homo sapien
ctgagacttgcctcgggctgggaca

SEQ ID NO: 4035732 - DNA, 25 bp, Homo sapien
cgaagctgtgctcaatgaggtgaca

SEQ ID NO: 4035733 - DNA, 25 bp, Homo sapien
gggcatttgaaggtgccgcccatgc

SEQ ID NO: 4035734 - DNA, 25 bp, Homo sapien
ccggggagtcgaacatctggttgca

SEQ ID NO: 4035735 - DNA, 25 bp, Homo sapien
tctggttgcacagcttacactcgtg

SEQ ID NO: 4035736 - DNA, 25 bp, Homo sapien
agctcatgtgcagtaagatggggac

SEQ ID NO: 4035737 - DNA, 25 bp, Homo sapien
acacagcatgctgtgggcacaagct

SEQ ID NO: 4035738 - DNA, 25 bp, Homo sapien
acagcatgctgtgggcacaagctca

SEQ ID NO: 4035739 - DNA, 25 bp, Homo sapien
caagctcatgtgcagtaagatgggg

SEQ ID NO: 4035740 - DNA, 25 bp, Homo sapien
tgagagtattatctgggacagccaa

SEQ ID NO: 4035741 - DNA, 25 bp, Homo sapien
agagtattatctgggacagccaagg

SEQ ID NO: 4035742 - DNA, 25 bp, Homo sapien
tgccaggcatgtcagtgttggtgag

SEQ ID NO: 4035743 - DNA, 25 bp, Homo sapien
gccaggcatgtcagtgttggtgaga

SEQ ID NO: 4035744 - DNA, 25 bp, Homo sapien
aaaagaccccccaatgcatcccctg

SEQ ID NO: 4035745 - DNA, 25 bp, Homo sapien
tgcctcaaaagaccccccaatgcat

SEQ ID NO: 4035746 - DNA, 25 bp, Homo sapien
catcataattagagatggcctccag

SEQ ID NO: 4035747 - DNA, 25 bp, Homo sapien
ggctgcctcaaaagaccccccaatg

SEQ ID NO: 4035748 - DNA, 25 bp, Homo sapien
tccgagtgccgagcaattcatcagc

SEQ ID NO: 4035749 - DNA, 25 bp, Homo sapien
aattcatcagctggtcccccctgat

SEQ ID NO: 4035750 - DNA, 25 bp, Homo sapien
tttccgttctccgagtgccgagcaa

SEQ ID NO: 4035751 - DNA, 25 bp, Homo sapien
cgttctccgagtgccgagcaattca

SEQ ID NO: 4035752 - DNA, 25 bp, Homo sapien
tgctccaagactgagggcgtggaga

SEQ ID NO: 4035753 - DNA, 25 bp, Homo sapien
tcggcttgtaaaaacctcaactcca

SEQ ID NO: 4035754 - DNA, 25 bp, Homo sapien
aacctcaactccagtaacgctttct

SEQ ID NO: 4035755 - DNA, 25 bp, Homo sapien
ttctggaaccccacggaacaacagc

SEQ ID NO: 4035756 - DNA, 25 bp, Homo sapien
aaggcctcagagcccaaaaaccgca

SEQ ID NO: 4035757 - DNA, 25 bp, Homo sapien
cggggcccagcctggatgggattac

SEQ ID NO: 4035758 - DNA, 25 bp, Homo sapien
aaaaccgcagagatcggggcccagc

SEQ ID NO: 4035759 - DNA, 25 bp, Homo sapien
accgcagagatcggggcccagcctg

SEQ ID NO: 4035760 - DNA, 25 bp, Homo sapien
ctgagagctgattccacactgccag

SEQ ID NO: 4035761 - DNA, 25 bp, Homo sapien
tgccgcctgcccagatctgcgtcct

SEQ ID NO: 4035762 - DNA, 25 bp, Homo sapien
tccatgagattgaagatgacaggct

SEQ ID NO: 4035763 - DNA, 25 bp, Homo sapien
ctgcccagatctgcgtcctccatga

SEQ ID NO: 4035764 - DNA, 25 bp, Homo sapien
atctgcgtcctccatgagattgaag

SEQ ID NO: 4035765 - DNA, 25 bp, Homo sapien
caaaggtcattgagtttgtgacccc

SEQ ID NO: 4035766 - DNA, 25 bp, Homo sapien
taaacgccaaggctgaaccttaatg

SEQ ID NO: 4035767 - DNA, 25 bp, Homo sapien
gacccctgtgaaagagaattcattc

SEQ ID NO: 4035768 - DNA, 25 bp, Homo sapien
aggatagtcacctaactcctctgag

SEQ ID NO: 4035769 - DNA, 25 bp, Homo sapien
aaaagtcgctcttgacgataatggc

SEQ ID NO: 4035770 - DNA, 25 bp, Homo sapien
ttctcgcaaaagtcgctcttgacga

SEQ ID NO: 4035771 - DNA, 25 bp, Homo sapien
gggcttctcgcaaaagtcgctcttg

SEQ ID NO: 4035772 - DNA, 25 bp, Homo sapien
tcttgacgataatggctttaggagg

SEQ ID NO: 4035773 - DNA, 25 bp, Homo sapien
catcgaagccggtgacaactgccat

SEQ ID NO: 4035774 - DNA, 25 bp, Homo sapien
cagcaggttggcgattaacaaaata

SEQ ID NO: 4035775 - DNA, 25 bp, Homo sapien
aaatagcaatagcatcgaagccggt

SEQ ID NO: 4035776 - DNA, 25 bp, Homo sapien
caggttggcgattaacaaaatagca

SEQ ID NO: 4035777 - DNA, 25 bp, Homo sapien
ggcagtgacgacagctgtcaccagg

SEQ ID NO: 4035778 - DNA, 25 bp, Homo sapien
cagagtccccaaataggcaggagct

SEQ ID NO: 4035779 - DNA, 25 bp, Homo sapien
cacggcagtgacgacagctgtcacc

SEQ ID NO: 4035780 - DNA, 25 bp, Homo sapien
cccagagtccccaaataggcaggag

SEQ ID NO: 4035781 - DNA, 25 bp, Homo sapien
gctgcttttaatctatcagcacggc

SEQ ID NO: 4035782 - DNA, 25 bp, Homo sapien
cttttaatctatcagcacggcgccg

SEQ ID NO: 4035783 - DNA, 25 bp, Homo sapien
gcaggagttctaatacacttcattc

SEQ ID NO: 4035784 - DNA, 25 bp, Homo sapien
acccagcaggagttctaatacactt

SEQ ID NO: 4035785 - DNA, 25 bp, Homo sapien
gcatacgggcgaaccatttgtaacc

SEQ ID NO: 4035786 - DNA, 25 bp, Homo sapien
ctgcatacgggcgaaccatttgtaa

SEQ ID NO: 4035787 - DNA, 25 bp, Homo sapien
tcggcagaaatgcactgtccagctc

SEQ ID NO: 4035788 - DNA, 25 bp, Homo sapien
tcagtgcaaacccacacttcggcag

SEQ ID NO: 4035789 - DNA, 25 bp, Homo sapien
ggcttctccacctgctacagaggcc

SEQ ID NO: 4035790 - DNA, 25 bp, Homo sapien
atcaccagcggaggagacaggcttc

SEQ ID NO: 4035791 - DNA, 25 bp, Homo sapien
ccagacttccatcaccagcggagga

SEQ ID NO: 4035792 - DNA, 25 bp, Homo sapien
caaacagcactcatagccacctctg

SEQ ID NO: 4035793 - DNA, 25 bp, Homo sapien
gccactgcgatgctcccatgatgct

SEQ ID NO: 4035794 - DNA, 25 bp, Homo sapien
gatgctgacgcacagctccacaatg

SEQ ID NO: 4035795 - DNA, 25 bp, Homo sapien
gggagatacaaagctgccactgcga

SEQ ID NO: 4035796 - DNA, 25 bp, Homo sapien
ttctgtccagaaaacactatgcgct

SEQ ID NO: 4035797 - DNA, 25 bp, Homo sapien
cagaggtctctagggccccattgcc

SEQ ID NO: 4035798 - DNA, 25 bp, Homo sapien
cagcacaagtgtgtcagcagaggtc

SEQ ID NO: 4035799 - DNA, 25 bp, Homo sapien
ccccagcacaagtgtgtcagcagag

SEQ ID NO: 4035800 - DNA, 25 bp, Homo sapien
tcagcagaggtctctagggccccat

SEQ ID NO: 4035801 - DNA, 25 bp, Homo sapien
aggagggtcaaaggcatggccatgc

SEQ ID NO: 4035802 - DNA, 25 bp, Homo sapien
caggagggtcaaaggcatggccatg

SEQ ID NO: 4035803 - DNA, 25 bp, Homo sapien
ggagggtcaaaggcatggccatgca

SEQ ID NO: 4035804 - DNA, 25 bp, Homo sapien
tcctgctgcccgcattgaccactta

SEQ ID NO: 4035805 - DNA, 25 bp, Homo sapien
tcaaactccatacccagacatggaa

SEQ ID NO: 4035806 - DNA, 25 bp, Homo sapien
ttgctctctggaggaaattgccaga

SEQ ID NO: 4035807 - DNA, 25 bp, Homo sapien
tggccctcatcatatttcctgctgc

SEQ ID NO: 4035808 - DNA, 25 bp, Homo sapien
ctgtataccaagatagacactggga

SEQ ID NO: 4035809 - DNA, 25 bp, Homo sapien
caccttgattttggcaaattctttt

SEQ ID NO: 4035810 - DNA, 25 bp, Homo sapien
tccaccttgattttggcaaattctt

SEQ ID NO: 4035811 - DNA, 25 bp, Homo sapien
ctgggaggttcatgctccaccttga

SEQ ID NO: 4035812 - DNA, 25 bp, Homo sapien
ccaccttgattttggcaaattcttt

SEQ ID NO: 4035813 - DNA, 25 bp, Homo sapien
aatccaaatgcgatctggcagacag

SEQ ID NO: 4035814 - DNA, 25 bp, Homo sapien
tattaagcaaggctcgaggaatgcc

SEQ ID NO: 4035815 - DNA, 25 bp, Homo sapien
ctgaaagtgccccagagagtctccc

SEQ ID NO: 4035816 - DNA, 25 bp, Homo sapien
tctttgttgtcttgggtgatgaaaa

SEQ ID NO: 4035817 - DNA, 25 bp, Homo sapien
ataagaatttccgaggtgaggccca

SEQ ID NO: 4035818 - DNA, 25 bp, Homo sapien
gttgatgttcttattattacataag

SEQ ID NO: 4035819 - DNA, 25 bp, Homo sapien
tacataagaatttccgaggtgaggc

SEQ ID NO: 4035820 - DNA, 25 bp, Homo sapien
aagaatttccgaggtgaggcccagc

SEQ ID NO: 4035821 - DNA, 25 bp, Homo sapien
cagcattccctcttgcatgccagca

SEQ ID NO: 4035822 - DNA, 25 bp, Homo sapien
cattccctcttgcatgccagcacac

SEQ ID NO: 4035823 - DNA, 25 bp, Homo sapien
ggcagcattccctcttgcatgccag

SEQ ID NO: 4035824 - DNA, 25 bp, Homo sapien
cggcagcattccctcttgcatgcca

SEQ ID NO: 4035825 - DNA, 25 bp, Homo sapien
tgcacgagggaaattagagcattac

SEQ ID NO: 4035826 - DNA, 25 bp, Homo sapien
ctgcacgagggaaattagagcatta

SEQ ID NO: 4035827 - DNA, 25 bp, Homo sapien
cagtgtgccagctccgagcggcagg

SEQ ID NO: 4035828 - DNA, 25 bp, Homo sapien
gcgtgtggatcacagctcagagcca

SEQ ID NO: 4035829 - DNA, 25 bp, Homo sapien
acaactgcctcgctgcaggactgtt

SEQ ID NO: 4035830 - DNA, 25 bp, Homo sapien
gaatgtggcgtgtggatcacagctc

SEQ ID NO: 4035831 - DNA, 25 bp, Homo sapien
gttcccttcacagcacagtattcaa

SEQ ID NO: 4035832 - DNA, 25 bp, Homo sapien
tccacaacggtttacacaagcacaa

SEQ ID NO: 4035833 - DNA, 25 bp, Homo sapien
gaatccttaatggtgaggacagcac

SEQ ID NO: 4035834 - DNA, 25 bp, Homo sapien
gttttgatgagggacaagtagcccc

SEQ ID NO: 4035835 - DNA, 25 bp, Homo sapien
cattcctggtgggtgtaacttcacc

SEQ ID NO: 4035836 - DNA, 25 bp, Homo sapien
gaagttagggctggacaccattgat

SEQ ID NO: 4035837 - DNA, 25 bp, Homo sapien
tgagacaaggggctttgacactggt

SEQ ID NO: 4035838 - DNA, 25 bp, Homo sapien
tggaaggagctgatctaggagctgc

SEQ ID NO: 4035839 - DNA, 25 bp, Homo sapien
tgaggctatgaacatcgggggtcca

SEQ ID NO: 4035840 - DNA, 25 bp, Homo sapien
gatgcattattaacggcacattcct

SEQ ID NO: 4035841 - DNA, 25 bp, Homo sapien
gccataacgagagctgaacagaggt

SEQ ID NO: 4035842 - DNA, 25 bp, Homo sapien
cagctgagttccatagatgcattat

SEQ ID NO: 4035843 - DNA, 25 bp, Homo sapien
gtaggctccgcagaccttggcgtcc

SEQ ID NO: 4035844 - DNA, 25 bp, Homo sapien
cctgctgcgcctgcagccctaagcg

SEQ ID NO: 4035845 - DNA, 25 bp, Homo sapien
ggccctgctgcgcctgcagccctaa

SEQ ID NO: 4035846 - DNA, 25 bp, Homo sapien
tgctgcgcctgcagccctaagcgta

SEQ ID NO: 4035847 - DNA, 25 bp, Homo sapien
ctggccctgctgcgcctgcagccct

SEQ ID NO: 4035848 - DNA, 25 bp, Homo sapien
tgcgggcagcacctcctgacccggg

SEQ ID NO: 4035849 - DNA, 25 bp, Homo sapien
ctgcgggcagcacctcctgacccgg

SEQ ID NO: 4035850 - DNA, 25 bp, Homo sapien
gctggggctgcgggcagcacctcct

SEQ ID NO: 4035851 - DNA, 25 bp, Homo sapien
gggcagcacctcctgacccgggcat

SEQ ID NO: 4035852 - DNA, 25 bp, Homo sapien
gagagcaggcgatttttctagtcaa

SEQ ID NO: 4035853 - DNA, 25 bp, Homo sapien
ttctagtcaatatatggaaatggaa

SEQ ID NO: 4035854 - DNA, 25 bp, Homo sapien
taggtcttaattgagagcaggcgat

SEQ ID NO: 4035855 - DNA, 25 bp, Homo sapien
tgttgcatacatcccaaaagctata

SEQ ID NO: 4035856 - DNA, 25 bp, Homo sapien
aagagtttcaccgtagaagatgtcc

SEQ ID NO: 4035857 - DNA, 25 bp, Homo sapien
gagtttcaccgtagaagatgtccac

SEQ ID NO: 4035858 - DNA, 25 bp, Homo sapien
ctcgaagagtttcaccgtagaagat

SEQ ID NO: 4035859 - DNA, 25 bp, Homo sapien
cactcgaagagtttcaccgtagaag

SEQ ID NO: 4035860 - DNA, 25 bp, Homo sapien
gcacactcagcgagtttcgggtggg

SEQ ID NO: 4035861 - DNA, 25 bp, Homo sapien
ggcaggtcatgaaggtgtccataga

SEQ ID NO: 4035862 - DNA, 25 bp, Homo sapien
tgtccatagaccagggcacactcag

SEQ ID NO: 4035863 - DNA, 25 bp, Homo sapien
gggctgcacagaaccaggtcagctg

SEQ ID NO: 4035864 - DNA, 25 bp, Homo sapien
agtggagtcattcccaaggcccccg

SEQ ID NO: 4035865 - DNA, 25 bp, Homo sapien
agtgtcagttgcagcttgctgagca

SEQ ID NO: 4035866 - DNA, 25 bp, Homo sapien
gcagcggttgactgacaagtgtcag

SEQ ID NO: 4035867 - DNA, 25 bp, Homo sapien
aaggcccccgttgtcactggcaggc

SEQ ID NO: 4035868 - DNA, 25 bp, Homo sapien
aatcaaaagcaccattgaagagcct

SEQ ID NO: 4035869 - DNA, 25 bp, Homo sapien
gacacagcccggttcagcaacacgt

SEQ ID NO: 4035870 - DNA, 25 bp, Homo sapien
tcaaaagcaccattgaagagcctga

SEQ ID NO: 4035871 - DNA, 25 bp, Homo sapien
agagcctgacacagcccggttcagc

SEQ ID NO: 4035872 - DNA, 25 bp, Homo sapien
gttccatgccgcagtgaactggaat

SEQ ID NO: 4035873 - DNA, 25 bp, Homo sapien
ccggggttccatgccgcagtgaact

SEQ ID NO: 4035874 - DNA, 25 bp, Homo sapien
gggttccatgccgcagtgaactgga

SEQ ID NO: 4035875 - DNA, 25 bp, Homo sapien
cggggttccatgccgcagtgaactg

SEQ ID NO: 4035876 - DNA, 25 bp, Homo sapien
gttcctgggctccaggtcagctgac

SEQ ID NO: 4035877 - DNA, 25 bp, Homo sapien
ttcctgggctccaggtcagctgaca

SEQ ID NO: 4035878 - DNA, 25 bp, Homo sapien
tcctgggctccaggtcagctgacag

SEQ ID NO: 4035879 - DNA, 25 bp, Homo sapien
ctgggctccaggtcagctgacagcg

SEQ ID NO: 4035880 - DNA, 25 bp, Homo sapien
tcgttctcgaaggtcatctggcact

SEQ ID NO: 4035881 - DNA, 25 bp, Homo sapien
cacttgatgcactggtatgtctttt

SEQ ID NO: 4035882 - DNA, 25 bp, Homo sapien
aatcatgtggttggcaacgtggatt

SEQ ID NO: 4035883 - DNA, 25 bp, Homo sapien
tggcaacgtggatttggatctctct

SEQ ID NO: 4035884 - DNA, 25 bp, Homo sapien
tcttgcagatgcgacaggtgcccgt

SEQ ID NO: 4035885 - DNA, 25 bp, Homo sapien
tcgtcgacgaagacctcagggcagt

SEQ ID NO: 4035886 - DNA, 25 bp, Homo sapien
tctcaaacttgacactgcactcggg

SEQ ID NO: 4035887 - DNA, 25 bp, Homo sapien
cacacatagtgggtcgacgtggtca

SEQ ID NO: 4035888 - DNA, 25 bp, Homo sapien
gaggcaattcccagggctgccgaga

SEQ ID NO: 4035889 - DNA, 25 bp, Homo sapien
acagagccagcttctcgacagcacg

SEQ ID NO: 4035890 - DNA, 25 bp, Homo sapien
cagggctgccgagaaacaaggacag

SEQ ID NO: 4035891 - DNA, 25 bp, Homo sapien
ttctcgacagcacgcgggctgaggc

SEQ ID NO: 4035892 - DNA, 25 bp, Homo sapien
cacaacacttgcctggacctggcag

SEQ ID NO: 4035893 - DNA, 25 bp, Homo sapien
cagaggggaggctctcggccacttt

SEQ ID NO: 4035894 - DNA, 25 bp, Homo sapien
ttcctgtctgcagagggcacgccag

SEQ ID NO: 4035895 - DNA, 25 bp, Homo sapien
caggacatgataccccccatcagag

SEQ ID NO: 4035896 - DNA, 25 bp, Homo sapien
aagagcctcacagacgtaacccaga

SEQ ID NO: 4035897 - DNA, 25 bp, Homo sapien
acccagacgtaaccttggcccagag

SEQ ID NO: 4035898 - DNA, 25 bp, Homo sapien
tgctcttgtaaccccgaggaaataa

SEQ ID NO: 4035899 - DNA, 25 bp, Homo sapien
tggctgagtcttcagaagagcctca

SEQ ID NO: 4035900 - DNA, 25 bp, Homo sapien
ctgctccactcgagtgaaagcaaaa

SEQ ID NO: 4035901 - DNA, 25 bp, Homo sapien
gagcttcatgaagcaacaccgccaa

SEQ ID NO: 4035902 - DNA, 25 bp, Homo sapien
caagggcctgagcaaagggcgctct

SEQ ID NO: 4035903 - DNA, 25 bp, Homo sapien
aggagttggcgccttgtgaagtcat

SEQ ID NO: 4035904 - DNA, 25 bp, Homo sapien
ttgactccctttggagatcggcaga

SEQ ID NO: 4035905 - DNA, 25 bp, Homo sapien
agagcccacattcggccgtgttcgt

SEQ ID NO: 4035906 - DNA, 25 bp, Homo sapien
atcggcagagcccacattcggccgt

SEQ ID NO: 4035907 - DNA, 25 bp, Homo sapien
ctccctttggagatcggcagagccc

SEQ ID NO: 4035908 - DNA, 25 bp, Homo sapien
ctggaaacagctgcgctctaattac

SEQ ID NO: 4035909 - DNA, 25 bp, Homo sapien
ggactggaaacagctgcgctctaat

SEQ ID NO: 4035910 - DNA, 25 bp, Homo sapien
ctgggactggaaacagctgcgctct

SEQ ID NO: 4035911 - DNA, 25 bp, Homo sapien
tgggactggaaacagctgcgctcta

SEQ ID NO: 4035912 - DNA, 25 bp, Homo sapien
acaagatacaagcttgtttctacat

SEQ ID NO: 4035913 - DNA, 25 bp, Homo sapien
actggaaatctgttagcatctgcct

SEQ ID NO: 4035914 - DNA, 25 bp, Homo sapien
atgtaaagtgtaccaaaacatccct

SEQ ID NO: 4035915 - DNA, 25 bp, Homo sapien
gtaccaaaacatcccttttatcaca

SEQ ID NO: 4035916 - DNA, 25 bp, Homo sapien
ccccaagcatctcacaggtggtggt

SEQ ID NO: 4035917 - DNA, 25 bp, Homo sapien
agctcctgagccttcattcaggcca

SEQ ID NO: 4035918 - DNA, 25 bp, Homo sapien
acctccccaagcatctcacaggtgg

SEQ ID NO: 4035919 - DNA, 25 bp, Homo sapien
tggtgggaagggtggtctcctgcat

SEQ ID NO: 4035920 - DNA, 25 bp, Homo sapien
ggctaagagtaggtcctcatttcct

SEQ ID NO: 4035921 - DNA, 25 bp, Homo sapien
ggaataaattgccatgtcctctgtg

SEQ ID NO: 4035922 - DNA, 25 bp, Homo sapien
cacgcagtcattcccttgcagagca

SEQ ID NO: 4035923 - DNA, 25 bp, Homo sapien
ggatgggcgcaccacctttcagtga

SEQ ID NO: 4035924 - DNA, 25 bp, Homo sapien
gtgtggaagccgaaagcccagaaca

SEQ ID NO: 4035925 - DNA, 25 bp, Homo sapien
agagcctgtccagcatcaccaaggt

SEQ ID NO: 4035926 - DNA, 25 bp, Homo sapien
agcatcaccaaggtccctcgggccc

SEQ ID NO: 4035927 - DNA, 25 bp, Homo sapien
agcagagcctgtccagcatcaccaa

SEQ ID NO: 4035928 - DNA, 25 bp, Homo sapien
cccagcagagcctgtccagcatcac

SEQ ID NO: 4035929 - DNA, 25 bp, Homo sapien
tggtgatctcagccacgggacgcat

SEQ ID NO: 4035930 - DNA, 25 bp, Homo sapien
cagtaccctggaccgtgcagtggga

SEQ ID NO: 4035931 - DNA, 25 bp, Homo sapien
tgaaagccttacctacggtgcgggc

SEQ ID NO: 4035932 - DNA, 25 bp, Homo sapien
catgagcccgcggtgatgcgaatca

SEQ ID NO: 4035933 - DNA, 25 bp, Homo sapien
tgccagagttgtgcgttcacgcgtg

SEQ ID NO: 4035934 - DNA, 25 bp, Homo sapien
cttccccgttgcagattttactgta

SEQ ID NO: 4035935 - DNA, 25 bp, Homo sapien
tccccgttgcagattttactgtagc

SEQ ID NO: 4035936 - DNA, 25 bp, Homo sapien
ccgttgcagattttactgtagcgtt

SEQ ID NO: 4035937 - DNA, 25 bp, Homo sapien
ccccgttgcagattttactgtagcg

SEQ ID NO: 4035938 - DNA, 25 bp, Homo sapien
tgttctccaaatcagcagcgagcct

SEQ ID NO: 4035939 - DNA, 25 bp, Homo sapien
ccagggacgggagaagtgttctcca

SEQ ID NO: 4035940 - DNA, 25 bp, Homo sapien
ccgaggagccacttcgagtgggcca

SEQ ID NO: 4035941 - DNA, 25 bp, Homo sapien
agtctctgaacgctggaaccggtac

SEQ ID NO: 4035942 - DNA, 25 bp, Homo sapien
ggcaggtttccccttcagagtggac

SEQ ID NO: 4035943 - DNA, 25 bp, Homo sapien
gcaggtttccccttcagagtggact

SEQ ID NO: 4035944 - DNA, 25 bp, Homo sapien
aagggcaggtttccccttcagagtg

SEQ ID NO: 4035945 - DNA, 25 bp, Homo sapien
gggcaggtttccccttcagagtgga

SEQ ID NO: 4035946 - DNA, 25 bp, Homo sapien
gacagacacgctggaagaatcccat

SEQ ID NO: 4035947 - DNA, 25 bp, Homo sapien
ctgcctggccaatcagacagacacg

SEQ ID NO: 4035948 - DNA, 25 bp, Homo sapien
agacagacacgctggaagaatccca

SEQ ID NO: 4035949 - DNA, 25 bp, Homo sapien
aagtgccactgctatcgtctgaatg

SEQ ID NO: 4035950 - DNA, 25 bp, Homo sapien
ggttccatccctacgagtgcgatca

SEQ ID NO: 4035951 - DNA, 25 bp, Homo sapien
ttatcaggttcctacaccacgccag

SEQ ID NO: 4035952 - DNA, 25 bp, Homo sapien
atcttagtgcccgagaggctgcctt

SEQ ID NO: 4035953 - DNA, 25 bp, Homo sapien
gggtattcctagctcctgcgtcccc

SEQ ID NO: 4035954 - DNA, 25 bp, Homo sapien
ctcagggatgcgcttaggcaaggtt

SEQ ID NO: 4035955 - DNA, 25 bp, Homo sapien
gaatttctgactcccttccaatgct

SEQ ID NO: 4035956 - DNA, 25 bp, Homo sapien
caggcggtaatgaatttctcaggga

SEQ ID NO: 4035957 - DNA, 25 bp, Homo sapien
accagcatcaataaggacagctggg

SEQ ID NO: 4035958 - DNA, 25 bp, Homo sapien
ttaggaagcgggcaggagtgtcggt

SEQ ID NO: 4035959 - DNA, 25 bp, Homo sapien
ggtggataccaccagcatcaataag

SEQ ID NO: 4035960 - DNA, 25 bp, Homo sapien
gcaggagtgtcggtggataccacca

SEQ ID NO: 4035961 - DNA, 25 bp, Homo sapien
actgcgtttccaaaaggccttccag

SEQ ID NO: 4035962 - DNA, 25 bp, Homo sapien
tactgcgtttccaaaaggccttcca

SEQ ID NO: 4035963 - DNA, 25 bp, Homo sapien
ggccttccagaaattcagggtgcac

SEQ ID NO: 4035964 - DNA, 25 bp, Homo sapien
tgcgtttccaaaaggccttccagaa

SEQ ID NO: 4035965 - DNA, 25 bp, Homo sapien
ttaattctttaatctcacttgaggc

SEQ ID NO: 4035966 - DNA, 25 bp, Homo sapien
taatctcacttgaggcttcaagctg

SEQ ID NO: 4035967 - DNA, 25 bp, Homo sapien
taattgtatttaaaaggcggataca

SEQ ID NO: 4035968 - DNA, 25 bp, Homo sapien
gaggcttcaagctgttgctatgtcc

SEQ ID NO: 4035969 - DNA, 25 bp, Homo sapien
ctgtcagagtcctggggctgttttg

SEQ ID NO: 4035970 - DNA, 25 bp, Homo sapien
tcagagtcctggggctgttttgcat

SEQ ID NO: 4035971 - DNA, 25 bp, Homo sapien
agagtcctggggctgttttgcatta

SEQ ID NO: 4035972 - DNA, 25 bp, Homo sapien
gagtcctggggctgttttgcattac

SEQ ID NO: 4035973 - DNA, 25 bp, Homo sapien
tgctgacagtgatcgcaggtgtaaa

SEQ ID NO: 4035974 - DNA, 25 bp, Homo sapien
ccagagactcgaagtcctgctgaca

SEQ ID NO: 4035975 - DNA, 25 bp, Homo sapien
gcccggtggtccgtcaggtctgcca

SEQ ID NO: 4035976 - DNA, 25 bp, Homo sapien
caggtgtaaattgattcatcctcca

SEQ ID NO: 4035977 - DNA, 25 bp, Homo sapien
ttttctgatcgcactctggctctcc

SEQ ID NO: 4035978 - DNA, 25 bp, Homo sapien
tcttgacttgtcacgctgttcctgt

SEQ ID NO: 4035979 - DNA, 25 bp, Homo sapien
tgttcctgtcttccagcgcacggct

SEQ ID NO: 4035980 - DNA, 25 bp, Homo sapien
cagcgcacggctggttttctgatcg

SEQ ID NO: 4035981 - DNA, 25 bp, Homo sapien
gaagaatacagtccatgtcagctga

SEQ ID NO: 4035982 - DNA, 25 bp, Homo sapien
tgccaacaggaagaatacagtccat

SEQ ID NO: 4035983 - DNA, 25 bp, Homo sapien
caggaagaatacagtccatgtcagc

SEQ ID NO: 4035984 - DNA, 25 bp, Homo sapien
tacagtccatgtcagctgatggggt

SEQ ID NO: 4035985 - DNA, 25 bp, Homo sapien
ccagcagggcttcgcaaggtcatga

SEQ ID NO: 4035986 - DNA, 25 bp, Homo sapien
tcccagcagggcttcgcaaggtcat

SEQ ID NO: 4035987 - DNA, 25 bp, Homo sapien
agggcttcgcaaggtcatgagccag

SEQ ID NO: 4035988 - DNA, 25 bp, Homo sapien
agcagggcttcgcaaggtcatgagc

SEQ ID NO: 4035989 - DNA, 25 bp, Homo sapien
tcatccacttgctcaggtctgccgg

SEQ ID NO: 4035990 - DNA, 25 bp, Homo sapien
tgtttggagccccacaagtgggctg

SEQ ID NO: 4035991 - DNA, 25 bp, Homo sapien
agccccacaagtgggctgtaagaca

SEQ ID NO: 4035992 - DNA, 25 bp, Homo sapien
ggctttctgccgacttcccgtcagt

SEQ ID NO: 4035993 - DNA, 25 bp, Homo sapien
ccatcacttaactcggatttcaaac

SEQ ID NO: 4035994 - DNA, 25 bp, Homo sapien
cctcaaaccatcacttaactcggat

SEQ ID NO: 4035995 - DNA, 25 bp, Homo sapien
cacttaactcggatttcaaactgct

SEQ ID NO: 4035996 - DNA, 25 bp, Homo sapien
ccaggctcctcctcaaaccatcact

SEQ ID NO: 4035997 - DNA, 25 bp, Homo sapien
ctattgaaggcatggcaggcaagcc

SEQ ID NO: 4035998 - DNA, 25 bp, Homo sapien
gaaacatgggctccctcatcaaggg

SEQ ID NO: 4035999 - DNA, 25 bp, Homo sapien
tattgctcgtgctctcccaaaacac

SEQ ID NO: 4036000 - DNA, 25 bp, Homo sapien
gaaagactgctcataattattgctc

SEQ ID NO: 4036001 - DNA, 25 bp, Homo sapien
gaagacatttttgaggcgcactcga

SEQ ID NO: 4036002 - DNA, 25 bp, Homo sapien
gcaattacccttagtctcaaaagga

SEQ ID NO: 4036003 - DNA, 25 bp, Homo sapien
tcgagcgcgacgtggtcttcccgtt

SEQ ID NO: 4036004 - DNA, 25 bp, Homo sapien
tcttcccgttcgcagcgtggtgcaa

SEQ ID NO: 4036005 - DNA, 25 bp, Homo sapien
tcacagtgaagcacaaacccaggct

SEQ ID NO: 4036006 - DNA, 25 bp, Homo sapien
catcaactctgtgtggagggcattc

SEQ ID NO: 4036007 - DNA, 25 bp, Homo sapien
tataaattgccgagatgccttgccg

SEQ ID NO: 4036008 - DNA, 25 bp, Homo sapien
gagcgggtctcacagatatctcaga

SEQ ID NO: 4036009 - DNA, 25 bp, Homo sapien
tgtttgtgaaagtccgccgtgagag

SEQ ID NO: 4036010 - DNA, 25 bp, Homo sapien
caagactgggcgctttctaagacag

SEQ ID NO: 4036011 - DNA, 25 bp, Homo sapien
gagatatgctagaaccaccgggaaa

SEQ ID NO: 4036012 - DNA, 25 bp, Homo sapien
gaaagagtttgagccatgcccttcg

SEQ ID NO: 4036013 - DNA, 25 bp, Homo sapien
gaaccacagggaagcacagaatttt

SEQ ID NO: 4036014 - DNA, 25 bp, Homo sapien
tctgtgacgcaagagattgtcccca

SEQ ID NO: 4036015 - DNA, 25 bp, Homo sapien
gtgatgaatgccaagccctaacggg

SEQ ID NO: 4036016 - DNA, 25 bp, Homo sapien
tcagctgggtgaacgattccttaag

SEQ ID NO: 4036017 - DNA, 25 bp, Homo sapien
gggtgagtcacatcggggctgcttc

SEQ ID NO: 4036018 - DNA, 25 bp, Homo sapien
tcacatcggggctgcttccttgcac

SEQ ID NO: 4036019 - DNA, 25 bp, Homo sapien
ctgctgctcggggtgagtcacatcg

SEQ ID NO: 4036020 - DNA, 25 bp, Homo sapien
gagtcacatcggggctgcttccttg

SEQ ID NO: 4036021 - DNA, 25 bp, Homo sapien
tccaggacatgaggagcacctgcat

SEQ ID NO: 4036022 - DNA, 25 bp, Homo sapien
acagcaaggcttgatcagccacctg

SEQ ID NO: 4036023 - DNA, 25 bp, Homo sapien
gcaaggcttgatcagccacctgctt

SEQ ID NO: 4036024 - DNA, 25 bp, Homo sapien
ttccaggacatgaggagcacctgca

SEQ ID NO: 4036025 - DNA, 25 bp, Homo sapien
aagtgaaggtttgcagctccagcga

SEQ ID NO: 4036026 - DNA, 25 bp, Homo sapien
gtgaaggtttgcagctccagcgagc

SEQ ID NO: 4036027 - DNA, 25 bp, Homo sapien
ttaagtgaaggtttgcagctccagc

SEQ ID NO: 4036028 - DNA, 25 bp, Homo sapien
taagtgaaggtttgcagctccagcg

SEQ ID NO: 4036029 - DNA, 25 bp, Homo sapien
catctttgttcccagccaagaggct

SEQ ID NO: 4036030 - DNA, 25 bp, Homo sapien
tgggccaaggcacctccatctttgt

SEQ ID NO: 4036031 - DNA, 25 bp, Homo sapien
aaagcagaactcgaagtgggccaag

SEQ ID NO: 4036032 - DNA, 25 bp, Homo sapien
gctgcatcaggtacaaaaagaccaa

SEQ ID NO: 4036033 - DNA, 25 bp, Homo sapien
taatcctgtacggaggtgcggctgg

SEQ ID NO: 4036034 - DNA, 25 bp, Homo sapien
agggctcgcgcacagctggactctg

SEQ ID NO: 4036035 - DNA, 25 bp, Homo sapien
gcaatttcagcgctgagggctcgcg

SEQ ID NO: 4036036 - DNA, 25 bp, Homo sapien
gactctgccgtggacagtctgcagc

SEQ ID NO: 4036037 - DNA, 25 bp, Homo sapien
cgcggacacccccggatgggccagt

SEQ ID NO: 4036038 - DNA, 25 bp, Homo sapien
gcggcgcggacacccccggatgggc

SEQ ID NO: 4036039 - DNA, 25 bp, Homo sapien
ggcgcggcgcggacacccccggatg

SEQ ID NO: 4036040 - DNA, 25 bp, Homo sapien
gcgcggacacccccggatgggccag

SEQ ID NO: 4036041 - DNA, 25 bp, Homo sapien
ggaaaaggaacaagccagcatgtgg

SEQ ID NO: 4036042 - DNA, 25 bp, Homo sapien
gaaggagacgaagcctatgaatggc

SEQ ID NO: 4036043 - DNA, 25 bp, Homo sapien
aaggagacgaagcctatgaatggct

SEQ ID NO: 4036044 - DNA, 25 bp, Homo sapien
gaaaaggaacaagccagcatgtggt

SEQ ID NO: 4036045 - DNA, 25 bp, Homo sapien
cagtgggtcaggtttccacccagat

SEQ ID NO: 4036046 - DNA, 25 bp, Homo sapien
ggtcaggtttccacccagatggaaa

SEQ ID NO: 4036047 - DNA, 25 bp, Homo sapien
ggccagtgggtcaggtttccaccca

SEQ ID NO: 4036048 - DNA, 25 bp, Homo sapien
ttggagaaggcatttcctccccttc

SEQ ID NO: 4036049 - DNA, 25 bp, Homo sapien
catggaaactccacagggcacccgc

SEQ ID NO: 4036050 - DNA, 25 bp, Homo sapien
ccactggcaggcctaactggggcag

SEQ ID NO: 4036051 - DNA, 25 bp, Homo sapien
gacacggagtaagtggccactggca

SEQ ID NO: 4036052 - DNA, 25 bp, Homo sapien
cagggcacccgccagacacggagta

SEQ ID NO: 4036053 - DNA, 25 bp, Homo sapien
agcccccagacgcagcccagcaaag

SEQ ID NO: 4036054 - DNA, 25 bp, Homo sapien
cagacgcagcccagcaaaggcagca

SEQ ID NO: 4036055 - DNA, 25 bp, Homo sapien
ccccagacgcagcccagcaaaggca

SEQ ID NO: 4036056 - DNA, 25 bp, Homo sapien
ccagacgcagcccagcaaaggcagc

SEQ ID NO: 4036057 - DNA, 25 bp, Homo sapien
cacggtgaacaagaatggttcccta

SEQ ID NO: 4036058 - DNA, 25 bp, Homo sapien
gtgaagcggattgccccaggcactg

SEQ ID NO: 4036059 - DNA, 25 bp, Homo sapien
tggttccctacagactcagttccac

SEQ ID NO: 4036060 - DNA, 25 bp, Homo sapien
caggaaggtgaagcggattgcccca

SEQ ID NO: 4036061 - DNA, 25 bp, Homo sapien
cagtcaccacctgacgatttctgag

SEQ ID NO: 4036062 - DNA, 25 bp, Homo sapien
ccagtcaccacctgacgatttctga

SEQ ID NO: 4036063 - DNA, 25 bp, Homo sapien
tggagactctgcaggcagcattagc

SEQ ID NO: 4036064 - DNA, 25 bp, Homo sapien
ccctctctatggaggaagcccctgt

SEQ ID NO: 4036065 - DNA, 25 bp, Homo sapien
acgttggcttcagacaaggcccctc

SEQ ID NO: 4036066 - DNA, 25 bp, Homo sapien
agggcacctgcagccacaacagtgc

SEQ ID NO: 4036067 - DNA, 25 bp, Homo sapien
acggaggaatcccaggccagcgaga

SEQ ID NO: 4036068 - DNA, 25 bp, Homo sapien
ctgctgtcacggaggaatcccaggc

SEQ ID NO: 4036069 - DNA, 25 bp, Homo sapien
cccaggccagcgagaagtctgaggc

SEQ ID NO: 4036070 - DNA, 25 bp, Homo sapien
ggaatcccaggccagcgagaagtct

SEQ ID NO: 4036071 - DNA, 25 bp, Homo sapien
tcttaggaagatctggcctcggcca

SEQ ID NO: 4036072 - DNA, 25 bp, Homo sapien
tagttaagaagtgtgaccacccaag

SEQ ID NO: 4036073 - DNA, 25 bp, Homo sapien
tgcacccaggtatcaggacaaatag

SEQ ID NO: 4036074 - DNA, 25 bp, Homo sapien
tctgcaggtatcagggcattaatac

SEQ ID NO: 4036075 - DNA, 25 bp, Homo sapien
aggaaatctaggtagcctcgcccca

SEQ ID NO: 4036076 - DNA, 25 bp, Homo sapien
cccattttcaggaagaatgataatt

SEQ ID NO: 4036077 - DNA, 25 bp, Homo sapien
aagtccatgggtctcttttttaatg

SEQ ID NO: 4036078 - DNA, 25 bp, Homo sapien
gtggacaaaatcttaaaagtccatg

SEQ ID NO: 4036079 - DNA, 25 bp, Homo sapien
ccatggactgaagttagttctcacc

SEQ ID NO: 4036080 - DNA, 25 bp, Homo sapien
acctgcagcagggtgtaattgaagc

SEQ ID NO: 4036081 - DNA, 25 bp, Homo sapien
atccggcttatgaggagacctggga

SEQ ID NO: 4036082 - DNA, 25 bp, Homo sapien
gatgccttaggatcaaatcccaatc

SEQ ID NO: 4036083 - DNA, 25 bp, Homo sapien
tcccaatttaagaatctcgtttcat

SEQ ID NO: 4036084 - DNA, 25 bp, Homo sapien
cccaatttaagaatctcgtttcatt

SEQ ID NO: 4036085 - DNA, 25 bp, Homo sapien
caaaagctatgggttccatatgtcc

SEQ ID NO: 4036086 - DNA, 25 bp, Homo sapien
gctatgggttccatatgtccacaaa

SEQ ID NO: 4036087 - DNA, 25 bp, Homo sapien
atgggttccatatgtccacaaaatg

SEQ ID NO: 4036088 - DNA, 25 bp, Homo sapien
aaagctatgggttccatatgtccac

SEQ ID NO: 4036089 - DNA, 25 bp, Homo sapien
catgtctttcttcttttacagggta

SEQ ID NO: 4036090 - DNA, 25 bp, Homo sapien
ccatgtctttcttcttttacagggt

SEQ ID NO: 4036091 - DNA, 25 bp, Homo sapien
ttacagggtaaaatccatccttctc

SEQ ID NO: 4036092 - DNA, 25 bp, Homo sapien
atccatccttctccaggaagttttc

SEQ ID NO: 4036093 - DNA, 25 bp, Homo sapien
gacatgataaaatgaggatgcctga

SEQ ID NO: 4036094 - DNA, 25 bp, Homo sapien
gctgcaacagtggtcctcttcaggg

SEQ ID NO: 4036095 - DNA, 25 bp, Homo sapien
tcgatcccaaaattagtcacctgtg

SEQ ID NO: 4036096 - DNA, 25 bp, Homo sapien
tccaagttctttaaggacgcaacaa

SEQ ID NO: 4036097 - DNA, 25 bp, Homo sapien
caacgagtgttaagtgctcagaaca

SEQ ID NO: 4036098 - DNA, 25 bp, Homo sapien
tgaaccttgaatgaatcaacgagtg

SEQ ID NO: 4036099 - DNA, 25 bp, Homo sapien
gggtgctgtgaaccttgaatgaatc

SEQ ID NO: 4036100 - DNA, 25 bp, Homo sapien
gctcagaacagtcctcagtacctgg

SEQ ID NO: 4036101 - DNA, 25 bp, Homo sapien
ggatagggaatgacaacactgcaaa

SEQ ID NO: 4036102 - DNA, 25 bp, Homo sapien
cctttgggcccaagatggtctagaa

SEQ ID NO: 4036103 - DNA, 25 bp, Homo sapien
gacaaactggcctaagtgtgcagga

SEQ ID NO: 4036104 - DNA, 25 bp, Homo sapien
ttccaagcacctccaaggagcgagg

SEQ ID NO: 4036105 - DNA, 25 bp, Homo sapien
ccacaattagtgtctcggacggagt

SEQ ID NO: 4036106 - DNA, 25 bp, Homo sapien
gatcacctgataggatcgccttatg

SEQ ID NO: 4036107 - DNA, 25 bp, Homo sapien
caagattttgcacacttagacggga

SEQ ID NO: 4036108 - DNA, 25 bp, Homo sapien
cagtgtatcaggcaggaggatgctc

SEQ ID NO: 4036109 - DNA, 25 bp, Homo sapien
aaatccagaactcaatggctccagc

SEQ ID NO: 4036110 - DNA, 25 bp, Homo sapien
ttatgagaccccttctacccttcta

SEQ ID NO: 4036111 - DNA, 25 bp, Homo sapien
tgacatgattttcttatgagacccc

SEQ ID NO: 4036112 - DNA, 25 bp, Homo sapien
ttctacatgacgtcattcaggatcc

SEQ ID NO: 4036113 - DNA, 25 bp, Homo sapien
cagcgagggctgacaatacaatagc

SEQ ID NO: 4036114 - DNA, 25 bp, Homo sapien
caatctataacgctgggaggccgtc

SEQ ID NO: 4036115 - DNA, 25 bp, Homo sapien
tcaacttggtaactgagctccgaca

SEQ ID NO: 4036116 - DNA, 25 bp, Homo sapien
gacagccacatggagcaatcagcta

SEQ ID NO: 4036117 - DNA, 25 bp, Homo sapien
gctaggaacgctgtactcaagtgct

SEQ ID NO: 4036118 - DNA, 25 bp, Homo sapien
ggaactggtcctaacactgccttga

SEQ ID NO: 4036119 - DNA, 25 bp, Homo sapien
cactagcttaagagttggctaccga

SEQ ID NO: 4036120 - DNA, 25 bp, Homo sapien
caggtgccgttcacttcactacaga

SEQ ID NO: 4036121 - DNA, 25 bp, Homo sapien
gaacaagaccaacttctctcaggga

SEQ ID NO: 4036122 - DNA, 25 bp, Homo sapien
tgaacttttcagagcagaactgggc

SEQ ID NO: 4036123 - DNA, 25 bp, Homo sapien
tgggtctcgccgtctaacgtaagga

SEQ ID NO: 4036124 - DNA, 25 bp, Homo sapien
gtattatttcaagccgtacagccct

SEQ ID NO: 4036125 - DNA, 25 bp, Homo sapien
ttttttgcagcccggttggcggctg

SEQ ID NO: 4036126 - DNA, 25 bp, Homo sapien
cttcgcctgcttccgcctggacatg

SEQ ID NO: 4036127 - DNA, 25 bp, Homo sapien
tgcctgttgcaatgcggcagtccgg

SEQ ID NO: 4036128 - DNA, 25 bp, Homo sapien
cctccgcctgtctcttggaaacttt

SEQ ID NO: 4036129 - DNA, 25 bp, Homo sapien
gtgccccgggcatcgctcagcccgt

SEQ ID NO: 4036130 - DNA, 25 bp, Homo sapien
caggcgcgcccgtgccccgggcatc

SEQ ID NO: 4036131 - DNA, 25 bp, Homo sapien
cagccgatccccaggccggtgccaa

SEQ ID NO: 4036132 - DNA, 25 bp, Homo sapien
ctgcggtgctcagcgcgaggcgcgc

SEQ ID NO: 4036133 - DNA, 25 bp, Homo sapien
atcattatttgcagggttcttctca

SEQ ID NO: 4036134 - DNA, 25 bp, Homo sapien
tctcacaagacttggtcttgaagct

SEQ ID NO: 4036135 - DNA, 25 bp, Homo sapien
tcatcattatttgcagggttcttct

SEQ ID NO: 4036136 - DNA, 25 bp, Homo sapien
cttctcacaagacttggtcttgaag

SEQ ID NO: 4036137 - DNA, 25 bp, Homo sapien
ggctgcccgcgaaccgcgtgttcat

SEQ ID NO: 4036138 - DNA, 25 bp, Homo sapien
tgctcgcacgctcggcgggacttgt

SEQ ID NO: 4036139 - DNA, 25 bp, Homo sapien
gaaacacgcacttgtgcacgctgaa

SEQ ID NO: 4036140 - DNA, 25 bp, Homo sapien
gcgtgttcatctgcgtgctcgcacg

SEQ ID NO: 4036141 - DNA, 25 bp, Homo sapien
tgcagcaggacatgtaactcagagc

SEQ ID NO: 4036142 - DNA, 25 bp, Homo sapien
aggacatgtaactcagagccaagag

SEQ ID NO: 4036143 - DNA, 25 bp, Homo sapien
cagcaggacatgtaactcagagcca

SEQ ID NO: 4036144 - DNA, 25 bp, Homo sapien
gcaggacatgtaactcagagccaag

SEQ ID NO: 4036145 - DNA, 25 bp, Homo sapien
tagcacaaccccgaccaagattgtt

SEQ ID NO: 4036146 - DNA, 25 bp, Homo sapien
ccatccttctgtggatccggagtag

SEQ ID NO: 4036147 - DNA, 25 bp, Homo sapien
cactggctaagagtgtccttattcc

SEQ ID NO: 4036148 - DNA, 25 bp, Homo sapien
tggcttctgtactgagtcacactgg

SEQ ID NO: 4036149 - DNA, 25 bp, Homo sapien
gaggcacaggcattggtgatacagc

SEQ ID NO: 4036150 - DNA, 25 bp, Homo sapien
attggtgatacagcccagatccaag

SEQ ID NO: 4036151 - DNA, 25 bp, Homo sapien
caggcattggtgatacagcccagat

SEQ ID NO: 4036152 - DNA, 25 bp, Homo sapien
cacaggcattggtgatacagcccag

SEQ ID NO: 4036153 - DNA, 25 bp, Homo sapien
tgtggctccgtcacacttgctgtcg

SEQ ID NO: 4036154 - DNA, 25 bp, Homo sapien
ccataaagggagtcggtgtctgctt

SEQ ID NO: 4036155 - DNA, 25 bp, Homo sapien
gtcacacttgctgtcgctgactcga

SEQ ID NO: 4036156 - DNA, 25 bp, Homo sapien
atggcgcctccataaagggagtcgg

SEQ ID NO: 4036157 - DNA, 25 bp, Homo sapien
tgttctctatggaatcccagggcct

SEQ ID NO: 4036158 - DNA, 25 bp, Homo sapien
tgcttgtgttctctatggaatccca

SEQ ID NO: 4036159 - DNA, 25 bp, Homo sapien
gggatcagctacaagttgcttgtgt

SEQ ID NO: 4036160 - DNA, 25 bp, Homo sapien
gagtccagcttcacggggatcagct

SEQ ID NO: 4036161 - DNA, 25 bp, Homo sapien
actgcagggtacagggactgtgcct

SEQ ID NO: 4036162 - DNA, 25 bp, Homo sapien
caaactggtgaggagactgcagggt

SEQ ID NO: 4036163 - DNA, 25 bp, Homo sapien
cccgtagcttatgtcccctctgcct

SEQ ID NO: 4036164 - DNA, 25 bp, Homo sapien
aggcgtcccttcatcccgtagctta

SEQ ID NO: 4036165 - DNA, 25 bp, Homo sapien
ggactcaatttcaacagggactggg

SEQ ID NO: 4036166 - DNA, 25 bp, Homo sapien
gacacttagggcagacacaggtccg

SEQ ID NO: 4036167 - DNA, 25 bp, Homo sapien
tgaatcttgcggtccattgccaggc

SEQ ID NO: 4036168 - DNA, 25 bp, Homo sapien
tcctgcgacagccaacactggtggt

SEQ ID NO: 4036169 - DNA, 25 bp, Homo sapien
tgtgtcttcactctcaggcaggttc

SEQ ID NO: 4036170 - DNA, 25 bp, Homo sapien
aaaatgccagggtgcggctgccttc

SEQ ID NO: 4036171 - DNA, 25 bp, Homo sapien
caaggctgcgcaggtaatgtggctc

SEQ ID NO: 4036172 - DNA, 25 bp, Homo sapien
tcctaagggtttggcagtcccacca

SEQ ID NO: 4036173 - DNA, 25 bp, Homo sapien
tggtcctgtcggtgaccgtgaccgc

SEQ ID NO: 4036174 - DNA, 25 bp, Homo sapien
cgccatgcggtgagggaccactgtc

SEQ ID NO: 4036175 - DNA, 25 bp, Homo sapien
ccgtgaccgccatgcggtgagggac

SEQ ID NO: 4036176 - DNA, 25 bp, Homo sapien
gctggccggtgtcccgtccctcttc

SEQ ID NO: 4036177 - DNA, 25 bp, Homo sapien
actgacggatgttaacgccaaacat

SEQ ID NO: 4036178 - DNA, 25 bp, Homo sapien
cactgacggatgttaacgccaaaca

SEQ ID NO: 4036179 - DNA, 25 bp, Homo sapien
ttgtagcagtctgaaagggcctgga

SEQ ID NO: 4036180 - DNA, 25 bp, Homo sapien
gattagatgtccaacatttccggga

SEQ ID NO: 4036181 - DNA, 25 bp, Homo sapien
tccgggacaccgagtcagttgtata

SEQ ID NO: 4036182 - DNA, 25 bp, Homo sapien
ccataggcgatggaaggcttaagtg

SEQ ID NO: 4036183 - DNA, 25 bp, Homo sapien
tgctggctgaaggatccagcatctc

SEQ ID NO: 4036184 - DNA, 25 bp, Homo sapien
tcactgctggctgaaggatccagca

SEQ ID NO: 4036185 - DNA, 25 bp, Homo sapien
cactgctggctgaaggatccagcat

SEQ ID NO: 4036186 - DNA, 25 bp, Homo sapien
tggctgaaggatccagcatctccaa

SEQ ID NO: 4036187 - DNA, 25 bp, Homo sapien
agatgtagtgtcttcatagggttga

SEQ ID NO: 4036188 - DNA, 25 bp, Homo sapien
aagatgtagtgtcttcatagggttg

SEQ ID NO: 4036189 - DNA, 25 bp, Homo sapien
ttttgaagatgtagtgtcttcatag

SEQ ID NO: 4036190 - DNA, 25 bp, Homo sapien
gatgtagtgtcttcatagggttgac

SEQ ID NO: 4036191 - DNA, 25 bp, Homo sapien
gccaagagcatcattctcgcagttc

SEQ ID NO: 4036192 - DNA, 25 bp, Homo sapien
tcaggtcactccagtaccaccagcg

SEQ ID NO: 4036193 - DNA, 25 bp, Homo sapien
gacgctaccaccagtgacgccaaga

SEQ ID NO: 4036194 - DNA, 25 bp, Homo sapien
caccagtgacgccaagagcatcatt

SEQ ID NO: 4036195 - DNA, 25 bp, Homo sapien
agaagttggcagaaaaggtttatat

SEQ ID NO: 4036196 - DNA, 25 bp, Homo sapien
ccctcttggggtgaataagaagttg

SEQ ID NO: 4036197 - DNA, 25 bp, Homo sapien
tggcagaaaaggtttatatggctta

SEQ ID NO: 4036198 - DNA, 25 bp, Homo sapien
caccctcctttaagtagccctcttg

SEQ ID NO: 4036199 - DNA, 25 bp, Homo sapien
agcaggataatgaccagggcggtca

SEQ ID NO: 4036200 - DNA, 25 bp, Homo sapien
gcaggataatgaccagggcggtcat

SEQ ID NO: 4036201 - DNA, 25 bp, Homo sapien
cagcaggataatgaccagggcggtc

SEQ ID NO: 4036202 - DNA, 25 bp, Homo sapien
gcagcaggataatgaccagggcggt

SEQ ID NO: 4036203 - DNA, 25 bp, Homo sapien
tcgctagcgaccagaataatgcctg

SEQ ID NO: 4036204 - DNA, 25 bp, Homo sapien
tgatttctgtatccctcgctagcga

SEQ ID NO: 4036205 - DNA, 25 bp, Homo sapien
cctggaaggtagtgggcgctcaatc

SEQ ID NO: 4036206 - DNA, 25 bp, Homo sapien
cctctttgcgggcaggaatcctgtc

SEQ ID NO: 4036207 - DNA, 25 bp, Homo sapien
tgccgcccgacatgaactcgctgga

SEQ ID NO: 4036208 - DNA, 25 bp, Homo sapien
acatgaactcgctggagcaggcgga

SEQ ID NO: 4036209 - DNA, 25 bp, Homo sapien
ccgacatgaactcgctggagcaggc

SEQ ID NO: 4036210 - DNA, 25 bp, Homo sapien
agcaggcggaaggtagggtgggccg

SEQ ID NO: 4036211 - DNA, 25 bp, Homo sapien
atactgtgtatgcataatagccgca

SEQ ID NO: 4036212 - DNA, 25 bp, Homo sapien
aactggattttacgctgtggtagac

SEQ ID NO: 4036213 - DNA, 25 bp, Homo sapien
ccagaataacttgggagtggtgcca

SEQ ID NO: 4036214 - DNA, 25 bp, Homo sapien
caggctgtgacactagtgttgcaca

SEQ ID NO: 4036215 - DNA, 25 bp, Homo sapien
gccgccaatccacaccatgtacttg

SEQ ID NO: 4036216 - DNA, 25 bp, Homo sapien
tgctcaggggactcgatgattgtga

SEQ ID NO: 4036217 - DNA, 25 bp, Homo sapien
gggggctgactcctcgtactcctgc

SEQ ID NO: 4036218 - DNA, 25 bp, Homo sapien
gactcgatgattgtgatcttcatgg

SEQ ID NO: 4036219 - DNA, 25 bp, Homo sapien
cacggtggtgccgcaggacagcatc

SEQ ID NO: 4036220 - DNA, 25 bp, Homo sapien
acacggtggtgccgcaggacagcat

SEQ ID NO: 4036221 - DNA, 25 bp, Homo sapien
acggtggtgccgcaggacagcatca

SEQ ID NO: 4036222 - DNA, 25 bp, Homo sapien
cggtggtgccgcaggacagcatcat

SEQ ID NO: 4036223 - DNA, 25 bp, Homo sapien
acgagaacacggcggtggccagctc

SEQ ID NO: 4036224 - DNA, 25 bp, Homo sapien
ccgtcgggtggctcatagctcttct

SEQ ID NO: 4036225 - DNA, 25 bp, Homo sapien
tgtccggggtaacgtagcacagctt

SEQ ID NO: 4036226 - DNA, 25 bp, Homo sapien
cagggacgagaacacggcggtggcc

SEQ ID NO: 4036227 - DNA, 25 bp, Homo sapien
gttatcttctctctgctagtcttgg

SEQ ID NO: 4036228 - DNA, 25 bp, Homo sapien
ttatcttctctctgctagtcttggg

SEQ ID NO: 4036229 - DNA, 25 bp, Homo sapien
tgaaggtcttagacatgatccaagt

SEQ ID NO: 4036230 - DNA, 25 bp, Homo sapien
cttagacatgatccaagttatcttc

SEQ ID NO: 4036231 - DNA, 25 bp, Homo sapien
ttctccatgtcatcccggttcgtga

SEQ ID NO: 4036232 - DNA, 25 bp, Homo sapien
tctccatgtcatcccggttcgtgac

SEQ ID NO: 4036233 - DNA, 25 bp, Homo sapien
catgccctgctcgatgggatatttc

SEQ ID NO: 4036234 - DNA, 25 bp, Homo sapien
tgcgcgctccgtgcgccagttcccc

SEQ ID NO: 4036235 - DNA, 25 bp, Homo sapien
cctgcgcgctccgtgcgccagttcc

SEQ ID NO: 4036236 - DNA, 25 bp, Homo sapien
acccggcagacgacgcgccgtgcgc

SEQ ID NO: 4036237 - DNA, 25 bp, Homo sapien
caaccccgacccggcagacgacgcg

SEQ ID NO: 4036238 - DNA, 25 bp, Homo sapien
tattccagttctgcgtggtttgccc

SEQ ID NO: 4036239 - DNA, 25 bp, Homo sapien
tctaggcttaccgtggagcatggga

SEQ ID NO: 4036240 - DNA, 25 bp, Homo sapien
ccagatccctctgatgacgaatggg

SEQ ID NO: 4036241 - DNA, 25 bp, Homo sapien
catgaagttcacacggctctcacca

SEQ ID NO: 4036242 - DNA, 25 bp, Homo sapien
gaactgttggtgtaggatttcttaa

SEQ ID NO: 4036243 - DNA, 25 bp, Homo sapien
ttgcttctgacctaacatgttaaat

SEQ ID NO: 4036244 - DNA, 25 bp, Homo sapien
ttaaaacttgtgtggacttgaagag

SEQ ID NO: 4036245 - DNA, 25 bp, Homo sapien
ttcttaaaacttgtgtggacttgaa

SEQ ID NO: 4036246 - DNA, 25 bp, Homo sapien
taccctttggcttgatctaactatg

SEQ ID NO: 4036247 - DNA, 25 bp, Homo sapien
ccttgcacaccaggcaacatgcatt

SEQ ID NO: 4036248 - DNA, 25 bp, Homo sapien
aaatctgtctttagtgaaagggcaa

SEQ ID NO: 4036249 - DNA, 25 bp, Homo sapien
gtatttgaaaagttgagccacattt

SEQ ID NO: 4036250 - DNA, 25 bp, Homo sapien
acggggattcgccttgtcatccagg

SEQ ID NO: 4036251 - DNA, 25 bp, Homo sapien
agaaacggggattcgccttgtcatc

SEQ ID NO: 4036252 - DNA, 25 bp, Homo sapien
gaaacggggattcgccttgtcatcc

SEQ ID NO: 4036253 - DNA, 25 bp, Homo sapien
gtagaaacggggattcgccttgtca

SEQ ID NO: 4036254 - DNA, 25 bp, Homo sapien
ggtagctcttaactaattcgccagc

SEQ ID NO: 4036255 - DNA, 25 bp, Homo sapien
taatcactggaaactcaaagagtgg

SEQ ID NO: 4036256 - DNA, 25 bp, Homo sapien
tgcgaaggaatctcaggtagctctt

SEQ ID NO: 4036257 - DNA, 25 bp, Homo sapien
tgaagaaacttcaaccaatcatgtt

SEQ ID NO: 4036258 - DNA, 25 bp, Homo sapien
tcttcgaagtactaggtgacagctg

SEQ ID NO: 4036259 - DNA, 25 bp, Homo sapien
tgcatcattgtctcggctgggcctc

SEQ ID NO: 4036260 - DNA, 25 bp, Homo sapien
gggagtttccctgtgcatcattgtc

SEQ ID NO: 4036261 - DNA, 25 bp, Homo sapien
gctgggcctctgaaccggcttcatt

SEQ ID NO: 4036262 - DNA, 25 bp, Homo sapien
gtgaggtagtcaaagcacgatgtgc

SEQ ID NO: 4036263 - DNA, 25 bp, Homo sapien
gactttgcacattactggaaacaga

SEQ ID NO: 4036264 - DNA, 25 bp, Homo sapien
ttcttttgttgaaggcgctcaccac

SEQ ID NO: 4036265 - DNA, 25 bp, Homo sapien
gagaaggtccttgtggcttgacttt

SEQ ID NO: 4036266 - DNA, 25 bp, Homo sapien
tctagtaacaagaaagatgatggga

SEQ ID NO: 4036267 - DNA, 25 bp, Homo sapien
gccaagggcgctacttcctctagta

SEQ ID NO: 4036268 - DNA, 25 bp, Homo sapien
tacttcctctagtaacaagaaagat

SEQ ID NO: 4036269 - DNA, 25 bp, Homo sapien
tggccaagggcgctacttcctctag

SEQ ID NO: 4036270 - DNA, 25 bp, Homo sapien
tgggtgcctgccatttcggatagat

SEQ ID NO: 4036271 - DNA, 25 bp, Homo sapien
gtgcctgccatttcggatagatgat

SEQ ID NO: 4036272 - DNA, 25 bp, Homo sapien
ctgtgggtgcctgccatttcggata

SEQ ID NO: 4036273 - DNA, 25 bp, Homo sapien
agctgtgggtgcctgccatttcgga

SEQ ID NO: 4036274 - DNA, 25 bp, Homo sapien
gagggggcagcacagtggaagccct

SEQ ID NO: 4036275 - DNA, 25 bp, Homo sapien
ggggcagcacagtggaagccctcac

SEQ ID NO: 4036276 - DNA, 25 bp, Homo sapien
taagagggggcagcacagtggaagc

SEQ ID NO: 4036277 - DNA, 25 bp, Homo sapien
ttaagagggggcagcacagtggaag

SEQ ID NO: 4036278 - DNA, 25 bp, Homo sapien
ggcagggcacgccacttgtccagag

SEQ ID NO: 4036279 - DNA, 25 bp, Homo sapien
acagtcatctgcgatgagccgcttt

SEQ ID NO: 4036280 - DNA, 25 bp, Homo sapien
tcatctgcgatgagccgcttttcag

SEQ ID NO: 4036281 - DNA, 25 bp, Homo sapien
gtcatctgcgatgagccgcttttca

SEQ ID NO: 4036282 - DNA, 25 bp, Homo sapien
aaggcacctcgaatatctgcctgga

SEQ ID NO: 4036283 - DNA, 25 bp, Homo sapien
ctacattggcgtagtgcaaggtcaa

SEQ ID NO: 4036284 - DNA, 25 bp, Homo sapien
cattggcgtagtgcaaggtcaaaga

SEQ ID NO: 4036285 - DNA, 25 bp, Homo sapien
tacattggcgtagtgcaaggtcaaa

SEQ ID NO: 4036286 - DNA, 25 bp, Homo sapien
ttggcgtagtgcaaggtcaaagaca

SEQ ID NO: 4036287 - DNA, 25 bp, Homo sapien
agcccatacaagaaacaggctgcat

SEQ ID NO: 4036288 - DNA, 25 bp, Homo sapien
gagcagcccatacaagaaacaggct

SEQ ID NO: 4036289 - DNA, 25 bp, Homo sapien
tagagcagcccatacaagaaacagg

SEQ ID NO: 4036290 - DNA, 25 bp, Homo sapien
atacaagaaacaggctgcataaact

SEQ ID NO: 4036291 - DNA, 25 bp, Homo sapien
cgcctcagaagctcccggacgccca

SEQ ID NO: 4036292 - DNA, 25 bp, Homo sapien
ggcaacctccatgcggcctcgtcca

SEQ ID NO: 4036293 - DNA, 25 bp, Homo sapien
gggcgggcggcaacctccatgcggc

SEQ ID NO: 4036294 - DNA, 25 bp, Homo sapien
cggagaagccgcgcgcgcctcagaa

SEQ ID NO: 4036295 - DNA, 25 bp, Homo sapien
gcgggacttcctgcccctagagacg

SEQ ID NO: 4036296 - DNA, 25 bp, Homo sapien
tccgaggatcgcctggtttcagcca

SEQ ID NO: 4036297 - DNA, 25 bp, Homo sapien
ggaacctctacttcaaccaccactg

SEQ ID NO: 4036298 - DNA, 25 bp, Homo sapien
gctcggaccgtccaacagtctgtgg

SEQ ID NO: 4036299 - DNA, 25 bp, Homo sapien
tcccatttcattcctttgcctgtgg

SEQ ID NO: 4036300 - DNA, 25 bp, Homo sapien
caaactgtctttcagggtgactgta

SEQ ID NO: 4036301 - DNA, 25 bp, Homo sapien
tgcatgaagttactataaacatctg

SEQ ID NO: 4036302 - DNA, 25 bp, Homo sapien
tgtcgctccacatcctcgttagcat

SEQ ID NO: 4036303 - DNA, 25 bp, Homo sapien
cagcaatgaatcaagttcctgtcgc

SEQ ID NO: 4036304 - DNA, 25 bp, Homo sapien
ttgccatgaggtaactcagttccct

SEQ ID NO: 4036305 - DNA, 25 bp, Homo sapien
cttgccatgaggtaactcagttccc

SEQ ID NO: 4036306 - DNA, 25 bp, Homo sapien
ccatgaggtaactcagttccctcat

SEQ ID NO: 4036307 - DNA, 25 bp, Homo sapien
tgccatgaggtaactcagttccctc

SEQ ID NO: 4036308 - DNA, 25 bp, Homo sapien
atgaccgtcatactctctcattgcc

SEQ ID NO: 4036309 - DNA, 25 bp, Homo sapien
cgtcatactctctcattgcccttgt

SEQ ID NO: 4036310 - DNA, 25 bp, Homo sapien
gagtaatgaccgtcatactctctca

SEQ ID NO: 4036311 - DNA, 25 bp, Homo sapien
ctgtcttagagtaatgaccgtcata

SEQ ID NO: 4036312 - DNA, 25 bp, Homo sapien
agcacttagccaaaagatttcaaca

SEQ ID NO: 4036313 - DNA, 25 bp, Homo sapien
cagcacttagccaaaagatttcaac

SEQ ID NO: 4036314 - DNA, 25 bp, Homo sapien
gtgagacatcgtccctaaagaaaaa

SEQ ID NO: 4036315 - DNA, 25 bp, Homo sapien
atagtgagacatcgtccctaaagaa

SEQ ID NO: 4036316 - DNA, 25 bp, Homo sapien
tacctgtactgtaacatagggaaag

SEQ ID NO: 4036317 - DNA, 25 bp, Homo sapien
gaattttcatatgtaggagtccttg

SEQ ID NO: 4036318 - DNA, 25 bp, Homo sapien
agcaaataatcaccactagtatgtt

SEQ ID NO: 4036319 - DNA, 25 bp, Homo sapien
aggtgcccctttggtagttctgtgc

SEQ ID NO: 4036320 - DNA, 25 bp, Homo sapien
tagggaataccatcaaccgttcttc

SEQ ID NO: 4036321 - DNA, 25 bp, Homo sapien
gcccaaatttggttagaactactca

SEQ ID NO: 4036322 - DNA, 25 bp, Homo sapien
aactggcagtggcatttaaaaggaa

SEQ ID NO: 4036323 - DNA, 25 bp, Homo sapien
tggcctaaaaaactgtagtccagaa

SEQ ID NO: 4036324 - DNA, 25 bp, Homo sapien
aaaggtgacaacaaatctcctggac

SEQ ID NO: 4036325 - DNA, 25 bp, Homo sapien
aaaagtggacaaatacatgctgatt

SEQ ID NO: 4036326 - DNA, 25 bp, Homo sapien
ccctaaggtaatatctgttaacagt

SEQ ID NO: 4036327 - DNA, 25 bp, Homo sapien
ccctgtccctaaggtaatatctgtt

SEQ ID NO: 4036328 - DNA, 25 bp, Homo sapien
tgggttcaagtgattctcatgcctc

SEQ ID NO: 4036329 - DNA, 25 bp, Homo sapien
ggcatgatctcagcttgctgtgatc

SEQ ID NO: 4036330 - DNA, 25 bp, Homo sapien
gatctcagcttgctgtgatctctgc

SEQ ID NO: 4036331 - DNA, 25 bp, Homo sapien
ctcctgggttcaagtgattctcatg

SEQ ID NO: 4036332 - DNA, 25 bp, Homo sapien
tgctcaggacagttgcgcagggact

SEQ ID NO: 4036333 - DNA, 25 bp, Homo sapien
tttttcccagctcgccacagaatgg

SEQ ID NO: 4036334 - DNA, 25 bp, Homo sapien
taagtcatatgctacaacagggtca

SEQ ID NO: 4036335 - DNA, 25 bp, Homo sapien
tctgtagatagtcagcgctgcgcgg

SEQ ID NO: 4036336 - DNA, 25 bp, Homo sapien
aattcatgcttaactactgtgggag

SEQ ID NO: 4036337 - DNA, 25 bp, Homo sapien
tctatagtgctgtcgtcttgggcaa

SEQ ID NO: 4036338 - DNA, 25 bp, Homo sapien
gagttccacagactttgcatgctgg

SEQ ID NO: 4036339 - DNA, 25 bp, Homo sapien
tgaaaaatctctggtcatctccgag

SEQ ID NO: 4036340 - DNA, 25 bp, Homo sapien
ccagtattagctgcctatttcagac

SEQ ID NO: 4036341 - DNA, 25 bp, Homo sapien
tagtgttccaataagcatgtgatta

SEQ ID NO: 4036342 - DNA, 25 bp, Homo sapien
aagtaaatgtactcttagggtgcga

SEQ ID NO: 4036343 - DNA, 25 bp, Homo sapien
aaagaatcaccctcattgttgaaag

SEQ ID NO: 4036344 - DNA, 25 bp, Homo sapien
aaatagtttttcctgtactgctgaa

SEQ ID NO: 4036345 - DNA, 25 bp, Homo sapien
ttaaggtggtggtagcgggaagata

SEQ ID NO: 4036346 - DNA, 25 bp, Homo sapien
gaaaatagtttttcctgtactgctg

SEQ ID NO: 4036347 - DNA, 25 bp, Homo sapien
aaggtggtggtagcgggaagataat

SEQ ID NO: 4036348 - DNA, 25 bp, Homo sapien
tattcgtgaatactgtgtatcttgc

SEQ ID NO: 4036349 - DNA, 25 bp, Homo sapien
tcttgcagtgaacagtgtggaagct

SEQ ID NO: 4036350 - DNA, 25 bp, Homo sapien
catttcctcaaatgaccagcattgt

SEQ ID NO: 4036351 - DNA, 25 bp, Homo sapien
gaacagtgtggaagctgttcatttt

SEQ ID NO: 4036352 - DNA, 25 bp, Homo sapien
aaatctagcttggatctgtaggacc

SEQ ID NO: 4036353 - DNA, 25 bp, Homo sapien
tacctttacttgcattttgagcctc

SEQ ID NO: 4036354 - DNA, 25 bp, Homo sapien
ttttacaagtaattgccctccagtc

SEQ ID NO: 4036355 - DNA, 25 bp, Homo sapien
ggagatgtcgcactcagttttcaaa

SEQ ID NO: 4036356 - DNA, 25 bp, Homo sapien
gaaatggtaagtgtgacttgtgttt

SEQ ID NO: 4036357 - DNA, 25 bp, Homo sapien
tgcctgaacctgtggactagtgttt

SEQ ID NO: 4036358 - DNA, 25 bp, Homo sapien
tgctggaaccttatatctctccatg

SEQ ID NO: 4036359 - DNA, 25 bp, Homo sapien
tgcacagggcaaaacatgggctata

SEQ ID NO: 4036360 - DNA, 25 bp, Homo sapien
tccacagtggcgatgaggaccatgg

SEQ ID NO: 4036361 - DNA, 25 bp, Homo sapien
tattgaggactgagtatccaacggg

SEQ ID NO: 4036362 - DNA, 25 bp, Homo sapien
tccaacggggtgatcccgctgacag

SEQ ID NO: 4036363 - DNA, 25 bp, Homo sapien
ggatgatggatatgtcccgaaggtt

SEQ ID NO: 4036364 - DNA, 25 bp, Homo sapien
gcccgactggcttagggcacagaag

SEQ ID NO: 4036365 - DNA, 25 bp, Homo sapien
tggtttatgtctcaggtcccctccc

SEQ ID NO: 4036366 - DNA, 25 bp, Homo sapien
aggaagtgacaatgggagccgaccc

SEQ ID NO: 4036367 - DNA, 25 bp, Homo sapien
caaacactgcacagggtagcagcct

SEQ ID NO: 4036368 - DNA, 25 bp, Homo sapien
cttgggcactgagcgctttccactg

SEQ ID NO: 4036369 - DNA, 25 bp, Homo sapien
gtggtgggaccacgtctgggagtgt

SEQ ID NO: 4036370 - DNA, 25 bp, Homo sapien
tctgggagtgtggaggtcttgggca

SEQ ID NO: 4036371 - DNA, 25 bp, Homo sapien
ctttgtggtgccctcaggctggacc

SEQ ID NO: 4036372 - DNA, 25 bp, Homo sapien
ctgcctccgcttccgcaggctccag

SEQ ID NO: 4036373 - DNA, 25 bp, Homo sapien
tggctgcactgtgttattgttggga

SEQ ID NO: 4036374 - DNA, 25 bp, Homo sapien
tcagccagatgggtctgatggagga

SEQ ID NO: 4036375 - DNA, 25 bp, Homo sapien
gtatctgggtacaggtcaatctggc

SEQ ID NO: 4036376 - DNA, 25 bp, Homo sapien
cagaaatgtcgtgaggtcctgtggt

SEQ ID NO: 4036377 - DNA, 25 bp, Homo sapien
tcaggttctttgagctgcaagtacc

SEQ ID NO: 4036378 - DNA, 25 bp, Homo sapien
ttgagctgcaagtaccagaaaccca

SEQ ID NO: 4036379 - DNA, 25 bp, Homo sapien
gaataagttcaggttctttgagctg

SEQ ID NO: 4036380 - DNA, 25 bp, Homo sapien
ggagggtgctgcatgaataagttca

SEQ ID NO: 4036381 - DNA, 25 bp, Homo sapien
ggctggttccccataggaacaggga

SEQ ID NO: 4036382 - DNA, 25 bp, Homo sapien
cttcctggtagaggcggcaccagta

SEQ ID NO: 4036383 - DNA, 25 bp, Homo sapien
tctatggcattgtggcctagaggag

SEQ ID NO: 4036384 - DNA, 25 bp, Homo sapien
gcttcctggtagaggcggcaccagt

SEQ ID NO: 4036385 - DNA, 25 bp, Homo sapien
agaggtctatggcattgtggcctag

SEQ ID NO: 4036386 - DNA, 25 bp, Homo sapien
gttttggctgcagtttgagtctctc

SEQ ID NO: 4036387 - DNA, 25 bp, Homo sapien
tgtttcatggcctcatcttgagccc

SEQ ID NO: 4036388 - DNA, 25 bp, Homo sapien
agcttgactgtctgcttcgttttgg

SEQ ID NO: 4036389 - DNA, 25 bp, Homo sapien
ctgtttcatggcctcatcttgagcc

SEQ ID NO: 4036390 - DNA, 25 bp, Homo sapien
atgaagtcattggagcccgacagct

SEQ ID NO: 4036391 - DNA, 25 bp, Homo sapien
atttccatgaagtcattggagcccg

SEQ ID NO: 4036392 - DNA, 25 bp, Homo sapien
catgaagtcattggagcccgacagc

SEQ ID NO: 4036393 - DNA, 25 bp, Homo sapien
tccatgaagtcattggagcccgaca

SEQ ID NO: 4036394 - DNA, 25 bp, Homo sapien
gggaagatgaggaattgggctcctg

SEQ ID NO: 4036395 - DNA, 25 bp, Homo sapien
aattgggctcctgtgagggcctccc

SEQ ID NO: 4036396 - DNA, 25 bp, Homo sapien
tgggaagatgaggaattgggctcct

SEQ ID NO: 4036397 - DNA, 25 bp, Homo sapien
tgccctgtgcctggacttcgctggg

SEQ ID NO: 4036398 - DNA, 25 bp, Homo sapien
ccctgtgcctggacttcgctgggcc

SEQ ID NO: 4036399 - DNA, 25 bp, Homo sapien
ctgtgcctggacttcgctgggccca

SEQ ID NO: 4036400 - DNA, 25 bp, Homo sapien
cctgccctgtgcctggacttcgctg

SEQ ID NO: 4036401 - DNA, 25 bp, Homo sapien
ggctagggcattgcccaaccctgag

SEQ ID NO: 4036402 - DNA, 25 bp, Homo sapien
caactggccacatcatggctagggc

SEQ ID NO: 4036403 - DNA, 25 bp, Homo sapien
tgcacacggatttctcaactggcca

SEQ ID NO: 4036404 - DNA, 25 bp, Homo sapien
ctgcttggccgaagcaccctccgtt

SEQ ID NO: 4036405 - DNA, 25 bp, Homo sapien
ccgccttctagggcccggatccctg

SEQ ID NO: 4036406 - DNA, 25 bp, Homo sapien
ctggacccagggcaccctgatcggg

SEQ ID NO: 4036407 - DNA, 25 bp, Homo sapien
tgcagtgggtgatgccaccacccgc

SEQ ID NO: 4036408 - DNA, 25 bp, Homo sapien
caccctgatcggggtgctttgtctt

SEQ ID NO: 4036409 - DNA, 25 bp, Homo sapien
ggatcctcaacaagagtggcgcgcc

SEQ ID NO: 4036410 - DNA, 25 bp, Homo sapien
tgaagcccaagttcagcggcgtgga

SEQ ID NO: 4036411 - DNA, 25 bp, Homo sapien
catcgccctgatgagtaagctggac

SEQ ID NO: 4036412 - DNA, 25 bp, Homo sapien
taagctggacggcatcaacaggcac

SEQ ID NO: 4036413 - DNA, 25 bp, Homo sapien
gcctgcacgcttgggtaactgtaaa

SEQ ID NO: 4036414 - DNA, 25 bp, Homo sapien
gactgcaacgcagtgactctgggaa

SEQ ID NO: 4036415 - DNA, 25 bp, Homo sapien
aacctaaatagttgcgggcctgcgc

SEQ ID NO: 4036416 - DNA, 25 bp, Homo sapien
tagaaatccctctgatctgacaagc

SEQ ID NO: 4036417 - DNA, 25 bp, Homo sapien
tctagacaccaagggggagtaagct

SEQ ID NO: 4036418 - DNA, 25 bp, Homo sapien
cacgcacaagtgaggtctgtttttc

SEQ ID NO: 4036419 - DNA, 25 bp, Homo sapien
tctagcacggattggagactccctc

SEQ ID NO: 4036420 - DNA, 25 bp, Homo sapien
cacctcagtggcctgtgggcacgca

SEQ ID NO: 4036421 - DNA, 25 bp, Homo sapien
gattcttagctaggtgtccccatga

SEQ ID NO: 4036422 - DNA, 25 bp, Homo sapien
cggaagacttaaccggtggcctcat

SEQ ID NO: 4036423 - DNA, 25 bp, Homo sapien
gaaatgaccaaactgcccgtgactt

SEQ ID NO: 4036424 - DNA, 25 bp, Homo sapien
gaaggatctactccgcatgggtgca

SEQ ID NO: 4036425 - DNA, 25 bp, Homo sapien
gccccgggctgcaaattaagagtac

SEQ ID NO: 4036426 - DNA, 25 bp, Homo sapien
gaaaattgaacctgtctgcctgtgc

SEQ ID NO: 4036427 - DNA, 25 bp, Homo sapien
tctcaagatctagcagtgaccaggg

SEQ ID NO: 4036428 - DNA, 25 bp, Homo sapien
tcatggcaacaatgctggtaagggc

SEQ ID NO: 4036429 - DNA, 25 bp, Homo sapien
ctggcttattgaggaaatttcctaa

SEQ ID NO: 4036430 - DNA, 25 bp, Homo sapien
tgacagacacacgtatctaacaaac

SEQ ID NO: 4036431 - DNA, 25 bp, Homo sapien
ggacttccttacaatttctcctgag

SEQ ID NO: 4036432 - DNA, 25 bp, Homo sapien
agaagatcattaaccactgtatact

SEQ ID NO: 4036433 - DNA, 25 bp, Homo sapien
ataaagtaccagtgtttagctgctt

SEQ ID NO: 4036434 - DNA, 25 bp, Homo sapien
aagtaccagtgtttagctgcttttt

SEQ ID NO: 4036435 - DNA, 25 bp, Homo sapien
gaacgcttcttagtgatgatcctgt

SEQ ID NO: 4036436 - DNA, 25 bp, Homo sapien
ttcgtataacggaaaatctcactgg

SEQ ID NO: 4036437 - DNA, 25 bp, Homo sapien
ggtgcctaattacccatacaagggc

SEQ ID NO: 4036438 - DNA, 25 bp, Homo sapien
agaatgctgcacaggtatggcaaca

SEQ ID NO: 4036439 - DNA, 25 bp, Homo sapien
tacctaatacaagtccaacctctgg

SEQ ID NO: 4036440 - DNA, 25 bp, Homo sapien
tacaagtccaacctctggaacatcc

SEQ ID NO: 4036441 - DNA, 25 bp, Homo sapien
ccagctttattacctaatacaagtc

SEQ ID NO: 4036442 - DNA, 25 bp, Homo sapien
aagtccaacctctggaacatccaaa

SEQ ID NO: 4036443 - DNA, 25 bp, Homo sapien
ttaatatcttctgaaaagcatttct

SEQ ID NO: 4036444 - DNA, 25 bp, Homo sapien
aatatcttctgaaaagcatttctaa

SEQ ID NO: 4036445 - DNA, 25 bp, Homo sapien
tatcttctgaaaagcatttctaagt

SEQ ID NO: 4036446 - DNA, 25 bp, Homo sapien
cttctgaaaagcatttctaagttaa

SEQ ID NO: 4036447 - DNA, 25 bp, Homo sapien
gtccacactcagcaacatccgtctt

SEQ ID NO: 4036448 - DNA, 25 bp, Homo sapien
actcagcaacatccgtctttttagg

SEQ ID NO: 4036449 - DNA, 25 bp, Homo sapien
cagcaacatccgtctttttaggttc

SEQ ID NO: 4036450 - DNA, 25 bp, Homo sapien
caccaggtccacactcagcaacatc

SEQ ID NO: 4036451 - DNA, 25 bp, Homo sapien
gaaagtcaagctgccatccagaagc

SEQ ID NO: 4036452 - DNA, 25 bp, Homo sapien
gaagcataactgctgagagcccttc

SEQ ID NO: 4036453 - DNA, 25 bp, Homo sapien
gaagactacgcgcattatcaggtga

SEQ ID NO: 4036454 - DNA, 25 bp, Homo sapien
tatcaggtgatcattgtggctcttc

SEQ ID NO: 4036455 - DNA, 25 bp, Homo sapien
ttttcgaactccatacgtgcttacg

SEQ ID NO: 4036456 - DNA, 25 bp, Homo sapien
cgtgcttacgatatcacctggagtt

SEQ ID NO: 4036457 - DNA, 25 bp, Homo sapien
cccattgcttttcgaactccatacg

SEQ ID NO: 4036458 - DNA, 25 bp, Homo sapien
catacgtgcttacgatatcacctgg

SEQ ID NO: 4036459 - DNA, 25 bp, Homo sapien
tctggtgctcaaacgttcattctgg

SEQ ID NO: 4036460 - DNA, 25 bp, Homo sapien
ggtctggtgctcaaacgttcattct

SEQ ID NO: 4036461 - DNA, 25 bp, Homo sapien
tggtgctcaaacgttcattctgggc

SEQ ID NO: 4036462 - DNA, 25 bp, Homo sapien
ctggtgctcaaacgttcattctggg

SEQ ID NO: 4036463 - DNA, 25 bp, Homo sapien
acttcaactggaacgccaaaatttg

SEQ ID NO: 4036464 - DNA, 25 bp, Homo sapien
cttcaactggaacgccaaaatttgt

SEQ ID NO: 4036465 - DNA, 25 bp, Homo sapien
tgtgtcaagtgtcctagtatggcct

SEQ ID NO: 4036466 - DNA, 25 bp, Homo sapien
gctgtgtcaagtgtcctagtatggc

SEQ ID NO: 4036467 - DNA, 25 bp, Homo sapien
ttgctgtgtcaagtgtcctagtatg

SEQ ID NO: 4036468 - DNA, 25 bp, Homo sapien
ttttgctgtgtcaagtgtcctagta

SEQ ID NO: 4036469 - DNA, 25 bp, Homo sapien
aaacatccagtaaactatctgccat

SEQ ID NO: 4036470 - DNA, 25 bp, Homo sapien
cataagaactgtagggcccataatt

SEQ ID NO: 4036471 - DNA, 25 bp, Homo sapien
gagtcttccccataggttgaataga

SEQ ID NO: 4036472 - DNA, 25 bp, Homo sapien
aatcacttggaagatcagagtcttc

SEQ ID NO: 4036473 - DNA, 25 bp, Homo sapien
agtcataatgcggtgcataagaact

SEQ ID NO: 4036474 - DNA, 25 bp, Homo sapien
agtctcacagggcagtagcctggct

SEQ ID NO: 4036475 - DNA, 25 bp, Homo sapien
cacaggatggagaagtcccaacgtc

SEQ ID NO: 4036476 - DNA, 25 bp, Homo sapien
cctacaatgggatccacaggatgga

SEQ ID NO: 4036477 - DNA, 25 bp, Homo sapien
gtcccaacgtcgttgttccatctgg

SEQ ID NO: 4036478 - DNA, 25 bp, Homo sapien
ggatggagaagtcccaacgtcgttg

SEQ ID NO: 4036479 - DNA, 25 bp, Homo sapien
actgttcacaagccgcctggtcagc

SEQ ID NO: 4036480 - DNA, 25 bp, Homo sapien
tccagattccttcacgatgcggtca

SEQ ID NO: 4036481 - DNA, 25 bp, Homo sapien
acgatgcggtcaagctgctcctgct

SEQ ID NO: 4036482 - DNA, 25 bp, Homo sapien
ctgactgttcacaagccgcctggtc

SEQ ID NO: 4036483 - DNA, 25 bp, Homo sapien
ttctgcaagtcagccatgaagtcta

SEQ ID NO: 4036484 - DNA, 25 bp, Homo sapien
gcaagtcagccatgaagtctatgct

SEQ ID NO: 4036485 - DNA, 25 bp, Homo sapien
aagtcagccatgaagtctatgctct

SEQ ID NO: 4036486 - DNA, 25 bp, Homo sapien
ctgcaagtcagccatgaagtctatg

SEQ ID NO: 4036487 - DNA, 25 bp, Homo sapien
tcatgctggtctcaaactcctgacc

SEQ ID NO: 4036488 - DNA, 25 bp, Homo sapien
tcagatgatccgcccacctcagcct

SEQ ID NO: 4036489 - DNA, 25 bp, Homo sapien
gacggagtttttccatgttggtcat

SEQ ID NO: 4036490 - DNA, 25 bp, Homo sapien
cggagtttttccatgttggtcatgc

SEQ ID NO: 4036491 - DNA, 25 bp, Homo sapien
agtcccagggtagttaatgtcttgc

SEQ ID NO: 4036492 - DNA, 25 bp, Homo sapien
tgtcaaagatgggtaactggcttcc

SEQ ID NO: 4036493 - DNA, 25 bp, Homo sapien
tgagagtcttcctgcaaagaatggg

SEQ ID NO: 4036494 - DNA, 25 bp, Homo sapien
ttggagaccacagactaaacccttc

SEQ ID NO: 4036495 - DNA, 25 bp, Homo sapien
ttcattcctgagtgcaacagcttct

SEQ ID NO: 4036496 - DNA, 25 bp, Homo sapien
gaattttcattcctgagtgcaacag

SEQ ID NO: 4036497 - DNA, 25 bp, Homo sapien
aattttcattcctgagtgcaacagc

SEQ ID NO: 4036498 - DNA, 25 bp, Homo sapien
ttttcattcctgagtgcaacagctt

SEQ ID NO: 4036499 - DNA, 25 bp, Homo sapien
ctacctcctgaagtgagtccctgac

SEQ ID NO: 4036500 - DNA, 25 bp, Homo sapien
ggaaggatcgggcagcaacatgtac

SEQ ID NO: 4036501 - DNA, 25 bp, Homo sapien
aggatcgggcagcaacatgtaccat

SEQ ID NO: 4036502 - DNA, 25 bp, Homo sapien
tacctcctgaagtgagtccctgacc

SEQ ID NO: 4036503 - DNA, 25 bp, Homo sapien
ttccccttcatgttccagtacgatt

SEQ ID NO: 4036504 - DNA, 25 bp, Homo sapien
ccttcatgttccagtacgattgtaa

SEQ ID NO: 4036505 - DNA, 25 bp, Homo sapien
tccccttcatgttccagtacgattg

SEQ ID NO: 4036506 - DNA, 25 bp, Homo sapien
catgttccagtacgattgtaagttt

SEQ ID NO: 4036507 - DNA, 25 bp, Homo sapien
tagttcttctatggactgatagtca

SEQ ID NO: 4036508 - DNA, 25 bp, Homo sapien
gttcttctatggactgatagtcatt

SEQ ID NO: 4036509 - DNA, 25 bp, Homo sapien
tcttctatggactgatagtcattgt

SEQ ID NO: 4036510 - DNA, 25 bp, Homo sapien
tttagttcttctatggactgatagt

SEQ ID NO: 4036511 - DNA, 25 bp, Homo sapien
ctttcatggtactaaaatccattgg

SEQ ID NO: 4036512 - DNA, 25 bp, Homo sapien
ttcatggtactaaaatccattgggt

SEQ ID NO: 4036513 - DNA, 25 bp, Homo sapien
ttttctttcatggtactaaaatcca

SEQ ID NO: 4036514 - DNA, 25 bp, Homo sapien
ttctttcatggtactaaaatccatt

SEQ ID NO: 4036515 - DNA, 25 bp, Homo sapien
tagccaggagcaataaaatcagtca

SEQ ID NO: 4036516 - DNA, 25 bp, Homo sapien
aatcagtcacaggaaatgaaaagaa

SEQ ID NO: 4036517 - DNA, 25 bp, Homo sapien
gagcaataaaatcagtcacaggaaa

SEQ ID NO: 4036518 - DNA, 25 bp, Homo sapien
ggagtagccaggagcaataaaatca

SEQ ID NO: 4036519 - DNA, 25 bp, Homo sapien
caaagtttgagggcggtatatctca

SEQ ID NO: 4036520 - DNA, 25 bp, Homo sapien
ttgagggcggtatatctcacaaagg

SEQ ID NO: 4036521 - DNA, 25 bp, Homo sapien
gtttgagggcggtatatctcacaaa

SEQ ID NO: 4036522 - DNA, 25 bp, Homo sapien
aagtttgagggcggtatatctcaca

SEQ ID NO: 4036523 - DNA, 25 bp, Homo sapien
gtgtgagctactatactcggttaac

SEQ ID NO: 4036524 - DNA, 25 bp, Homo sapien
tgtgagctactatactcggttaact

SEQ ID NO: 4036525 - DNA, 25 bp, Homo sapien
tgagctactatactcggttaacttc

SEQ ID NO: 4036526 - DNA, 25 bp, Homo sapien
agctactatactcggttaacttctg

SEQ ID NO: 4036527 - DNA, 25 bp, Homo sapien
tctattagcaaagtggaaatatctg

SEQ ID NO: 4036528 - DNA, 25 bp, Homo sapien
gctaaacatttgtggcatgataagc

SEQ ID NO: 4036529 - DNA, 25 bp, Homo sapien
gtagcttaatctaggcactgaaatt

SEQ ID NO: 4036530 - DNA, 25 bp, Homo sapien
tcccttttaagaactcaacagtagc

SEQ ID NO: 4036531 - DNA, 25 bp, Homo sapien
catcagttgattcaaagcttcttga

SEQ ID NO: 4036532 - DNA, 25 bp, Homo sapien
tcttgaaggggtgtctgttctactt

SEQ ID NO: 4036533 - DNA, 25 bp, Homo sapien
cttcttgaaggggtgtctgttctac

SEQ ID NO: 4036534 - DNA, 25 bp, Homo sapien
ctctgcaattgtctcatcagttgat

SEQ ID NO: 4036535 - DNA, 25 bp, Homo sapien
aatcacaaagctccaacttagaagc

SEQ ID NO: 4036536 - DNA, 25 bp, Homo sapien
cacaaagctccaacttagaagctaa

SEQ ID NO: 4036537 - DNA, 25 bp, Homo sapien
tcaatcacaaagctccaacttagaa

SEQ ID NO: 4036538 - DNA, 25 bp, Homo sapien
caaagctccaacttagaagctaaaa

SEQ ID NO: 4036539 - DNA, 25 bp, Homo sapien
cattttcctgagctataatgatttc

SEQ ID NO: 4036540 - DNA, 25 bp, Homo sapien
ttcaggatagttaattcagagttat

SEQ ID NO: 4036541 - DNA, 25 bp, Homo sapien
caggatagttaattcagagttattc

SEQ ID NO: 4036542 - DNA, 25 bp, Homo sapien
ggatagttaattcagagttattcca

SEQ ID NO: 4036543 - DNA, 25 bp, Homo sapien
ggtctcgatctcgcttctttttatc

SEQ ID NO: 4036544 - DNA, 25 bp, Homo sapien
tctcgatctcgcttctttttatcct

SEQ ID NO: 4036545 - DNA, 25 bp, Homo sapien
gtctcgatctcgcttctttttatcc

SEQ ID NO: 4036546 - DNA, 25 bp, Homo sapien
ttatgtcccctatacgcatctcctt

SEQ ID NO: 4036547 - DNA, 25 bp, Homo sapien
cctatacgcatctccttcttgccca

SEQ ID NO: 4036548 - DNA, 25 bp, Homo sapien
gtcccctatacgcatctccttcttg

SEQ ID NO: 4036549 - DNA, 25 bp, Homo sapien
tttatgtcccctatacgcatctcct

SEQ ID NO: 4036550 - DNA, 25 bp, Homo sapien
ctacataacactagcaaaaagaatc

SEQ ID NO: 4036551 - DNA, 25 bp, Homo sapien
ctagcaaaaagaatctctccctgct

SEQ ID NO: 4036552 - DNA, 25 bp, Homo sapien
gcaaaaagaatctctccctgcttcc

SEQ ID NO: 4036553 - DNA, 25 bp, Homo sapien
tacataacactagcaaaaagaatct

SEQ ID NO: 4036554 - DNA, 25 bp, Homo sapien
tttgttaaacaagacgatggccgga

SEQ ID NO: 4036555 - DNA, 25 bp, Homo sapien
gacaaaggttgataagccacgtcaa

SEQ ID NO: 4036556 - DNA, 25 bp, Homo sapien
gagcacgtaagagacaaaggttgat

SEQ ID NO: 4036557 - DNA, 25 bp, Homo sapien
cgatggccggaacaaagagcacgta

SEQ ID NO: 4036558 - DNA, 25 bp, Homo sapien
ctttttccgctttctgtccttgtgt

SEQ ID NO: 4036559 - DNA, 25 bp, Homo sapien
tgcccgtggagagttcggtgacttc

SEQ ID NO: 4036560 - DNA, 25 bp, Homo sapien
tgtcatgatcgtttttgtcttcgaa

SEQ ID NO: 4036561 - DNA, 25 bp, Homo sapien
ttcgaagaggctggagtcgtgcccc

SEQ ID NO: 4036562 - DNA, 25 bp, Homo sapien
tgaggaccagcttcaagggcttctc

SEQ ID NO: 4036563 - DNA, 25 bp, Homo sapien
ctactttgaggaccagcttcaaggg

SEQ ID NO: 4036564 - DNA, 25 bp, Homo sapien
ctttgaggaccagcttcaagggctt

SEQ ID NO: 4036565 - DNA, 25 bp, Homo sapien
tactttgaggaccagcttcaagggc

SEQ ID NO: 4036566 - DNA, 25 bp, Homo sapien
aaggaaagcgcgtcgattaaaatcg

SEQ ID NO: 4036567 - DNA, 25 bp, Homo sapien
aggaaagcgcgtcgattaaaatcgg

SEQ ID NO: 4036568 - DNA, 25 bp, Homo sapien
cccgggttcgaatgccgcggccgca

SEQ ID NO: 4036569 - DNA, 25 bp, Homo sapien
aggacgcgcccccttcgccggcctg

SEQ ID NO: 4036570 - DNA, 25 bp, Homo sapien
atgccgcggccgcacggggggcagc

SEQ ID NO: 4036571 - DNA, 25 bp, Homo sapien
cggcaggacgcgcccccttcgccgg

SEQ ID NO: 4036572 - DNA, 25 bp, Homo sapien
tagaggtgtttgtccgacttgtgct

SEQ ID NO: 4036573 - DNA, 25 bp, Homo sapien
gtttgtccgacttgtgcttcttgtg

SEQ ID NO: 4036574 - DNA, 25 bp, Homo sapien
cgtagaggtgtttgtccgacttgtg

SEQ ID NO: 4036575 - DNA, 25 bp, Homo sapien
cctcgtagaggtgtttgtccgactt

SEQ ID NO: 4036576 - DNA, 25 bp, Homo sapien
tccgggccaggcgagcggagggcgg

SEQ ID NO: 4036577 - DNA, 25 bp, Homo sapien
gccgcttccggtccgggccaggcga

SEQ ID NO: 4036578 - DNA, 25 bp, Homo sapien
aggcccaggccgtgcggcgccgctt

SEQ ID NO: 4036579 - DNA, 25 bp, Homo sapien
gtgcggcgccgcttccggtccgggc

SEQ ID NO: 4036580 - DNA, 25 bp, Homo sapien
cccgcgccgcgaggcaggggggcgg

SEQ ID NO: 4036581 - DNA, 25 bp, Homo sapien
cggcgcgcgccgggcggcgcgatgc

SEQ ID NO: 4036582 - DNA, 25 bp, Homo sapien
ccgcgagaccccgcgccgcgaggca

SEQ ID NO: 4036583 - DNA, 25 bp, Homo sapien
gcgcgcgccgggcggcgcgatgccc

SEQ ID NO: 4036584 - DNA, 25 bp, Homo sapien
tctcgagaagacggcgcgcgagacc

SEQ ID NO: 4036585 - DNA, 25 bp, Homo sapien
ctctcgagaagacggcgcgcgagac

SEQ ID NO: 4036586 - DNA, 25 bp, Homo sapien
atgacaggttgttgacagtgcagct

SEQ ID NO: 4036587 - DNA, 25 bp, Homo sapien
gacaggttgttgacagtgcagcttc

SEQ ID NO: 4036588 - DNA, 25 bp, Homo sapien
aggttgttgacagtgcagcttccag

SEQ ID NO: 4036589 - DNA, 25 bp, Homo sapien
caggttgttgacagtgcagcttcca

SEQ ID NO: 4036590 - DNA, 25 bp, Homo sapien
tggagggcagcgagcccaagccatg

SEQ ID NO: 4036591 - DNA, 25 bp, Homo sapien
cacggctgccaaccccaaaagtcat

SEQ ID NO: 4036592 - DNA, 25 bp, Homo sapien
ggcagcgagcccaagccatgacact

SEQ ID NO: 4036593 - DNA, 25 bp, Homo sapien
tgacactcacggctgccaaccccaa

SEQ ID NO: 4036594 - DNA, 25 bp, Homo sapien
ggccaggccctatcctttgtccaat

SEQ ID NO: 4036595 - DNA, 25 bp, Homo sapien
tttgtccaatcagctttggacttgg

SEQ ID NO: 4036596 - DNA, 25 bp, Homo sapien
cagtgaaatatcctggatggctcct

SEQ ID NO: 4036597 - DNA, 25 bp, Homo sapien
ccacagagaatctgataggctctgc

SEQ ID NO: 4036598 - DNA, 25 bp, Homo sapien
cagagagaactggtgcagcttcaaa

SEQ ID NO: 4036599 - DNA, 25 bp, Homo sapien
gcggccgaggctctaatgaaagcca

SEQ ID NO: 4036600 - DNA, 25 bp, Homo sapien
tctttctgaggtcctgtaccgaggg

SEQ ID NO: 4036601 - DNA, 25 bp, Homo sapien
tctcccacaaaagaggcgcggccga

SEQ ID NO: 4036602 - DNA, 25 bp, Homo sapien
tgacttggttaccaagggtgcctgc

SEQ ID NO: 4036603 - DNA, 25 bp, Homo sapien
gcctacaactctcgtgctgtatgtg

SEQ ID NO: 4036604 - DNA, 25 bp, Homo sapien
tgcttttataaagatccgagtttgg

SEQ ID NO: 4036605 - DNA, 25 bp, Homo sapien
gctgtatgtgcttctgactgagtca

SEQ ID NO: 4036606 - DNA, 25 bp, Homo sapien
gatagggggatataagccatagatg

SEQ ID NO: 4036607 - DNA, 25 bp, Homo sapien
actgccaaaagtagagagggctgga

SEQ ID NO: 4036608 - DNA, 25 bp, Homo sapien
taaggaagatcagggcactgccaaa

SEQ ID NO: 4036609 - DNA, 25 bp, Homo sapien
caccttccttaaggaagatcagggc

SEQ ID NO: 4036610 - DNA, 25 bp, Homo sapien
gtggggggactctgatgtggctgtg

SEQ ID NO: 4036611 - DNA, 25 bp, Homo sapien
agggtggggggactctgatgtggct

SEQ ID NO: 4036612 - DNA, 25 bp, Homo sapien
ggggggactctgatgtggctgtggc

SEQ ID NO: 4036613 - DNA, 25 bp, Homo sapien
taggaagggtggggggactctgatg

SEQ ID NO: 4036614 - DNA, 25 bp, Homo sapien
gcagggcgcccttttggatggccat

SEQ ID NO: 4036615 - DNA, 25 bp, Homo sapien
cctatcgatctggaatcctggagca

SEQ ID NO: 4036616 - DNA, 25 bp, Homo sapien
tgtatacactgcttcggggctgcca

SEQ ID NO: 4036617 - DNA, 25 bp, Homo sapien
actcccctatcgatctggaatcctg

SEQ ID NO: 4036618 - DNA, 25 bp, Homo sapien
ctgggcactcccctatcgatctgga

SEQ ID NO: 4036619 - DNA, 25 bp, Homo sapien
cggtgaggaagtgaaggcacagtgc

SEQ ID NO: 4036620 - DNA, 25 bp, Homo sapien
aggaagtgaaggcacagtgctgtct

SEQ ID NO: 4036621 - DNA, 25 bp, Homo sapien
tgaggaagtgaaggcacagtgctgt

SEQ ID NO: 4036622 - DNA, 25 bp, Homo sapien
gaagtgaaggcacagtgctgtctgc

SEQ ID NO: 4036623 - DNA, 25 bp, Homo sapien
ctgagatttctgccgatgtctgtgt

SEQ ID NO: 4036624 - DNA, 25 bp, Homo sapien
gctccgaagtggacccacactcttt

SEQ ID NO: 4036625 - DNA, 25 bp, Homo sapien
tcaaacaccacttgcacaagtgatt

SEQ ID NO: 4036626 - DNA, 25 bp, Homo sapien
tgtactggctccgaagtggacccac

SEQ ID NO: 4036627 - DNA, 25 bp, Homo sapien
tcacagtcacttttagctctgcctg

SEQ ID NO: 4036628 - DNA, 25 bp, Homo sapien
tgatggttcgcagtttcgggaagaa

SEQ ID NO: 4036629 - DNA, 25 bp, Homo sapien
tcgcagtttcgggaagaagattatg

SEQ ID NO: 4036630 - DNA, 25 bp, Homo sapien
ggtgatggttcgcagtttcgggaag

SEQ ID NO: 4036631 - DNA, 25 bp, Homo sapien
tggttcgcagtttcgggaagaagat

SEQ ID NO: 4036632 - DNA, 25 bp, Homo sapien
cagcctggggcgaatcccacttgtt

SEQ ID NO: 4036633 - DNA, 25 bp, Homo sapien
tgcagcctggggcgaatcccacttg

SEQ ID NO: 4036634 - DNA, 25 bp, Homo sapien
cctgcagcctggggcgaatcccact

SEQ ID NO: 4036635 - DNA, 25 bp, Homo sapien
gcagcctggggcgaatcccacttgt

SEQ ID NO: 4036636 - DNA, 25 bp, Homo sapien
ccctttaaagccagtgggcggatgg

SEQ ID NO: 4036637 - DNA, 25 bp, Homo sapien
catcagccgtctcctggatacttgc

SEQ ID NO: 4036638 - DNA, 25 bp, Homo sapien
gataaatggcttcagcgttgctgcc

SEQ ID NO: 4036639 - DNA, 25 bp, Homo sapien
actctgatcccgctcactttgttct

SEQ ID NO: 4036640 - DNA, 25 bp, Homo sapien
ttgaaagggaccgagacactcagtt

SEQ ID NO: 4036641 - DNA, 25 bp, Homo sapien
gggaagtccagcctgagagttgtct

SEQ ID NO: 4036642 - DNA, 25 bp, Homo sapien
gagtacacgcctatgtgtggatgta

SEQ ID NO: 4036643 - DNA, 25 bp, Homo sapien
tcagttatctggtctgggaagtcca

SEQ ID NO: 4036644 - DNA, 25 bp, Homo sapien
aagagcttcatgtgagtgatgctgg

SEQ ID NO: 4036645 - DNA, 25 bp, Homo sapien
tcctctgtgaagcaggacataaaac

SEQ ID NO: 4036646 - DNA, 25 bp, Homo sapien
tctgtgaagcaggacataaaacagg

SEQ ID NO: 4036647 - DNA, 25 bp, Homo sapien
ggagagaggagcattcaagggaagc

SEQ ID NO: 4036648 - DNA, 25 bp, Homo sapien
aaggttagaattatcttggctcagg

SEQ ID NO: 4036649 - DNA, 25 bp, Homo sapien
aaaggttagaattatcttggctcag

SEQ ID NO: 4036650 - DNA, 25 bp, Homo sapien
ggttagaattatcttggctcaggac

SEQ ID NO: 4036651 - DNA, 25 bp, Homo sapien
aaaaggttagaattatcttggctca

SEQ ID NO: 4036652 - DNA, 25 bp, Homo sapien
tgtggaacccaatatgctcagccag

SEQ ID NO: 4036653 - DNA, 25 bp, Homo sapien
caccatcagattgccgtgtttggct

SEQ ID NO: 4036654 - DNA, 25 bp, Homo sapien
tcctgaaagcacgaaatggcttcca

SEQ ID NO: 4036655 - DNA, 25 bp, Homo sapien
ctcagccagacttccaatgtccttg

SEQ ID NO: 4036656 - DNA, 25 bp, Homo sapien
ttccacagtaccctcggcagcattt

SEQ ID NO: 4036657 - DNA, 25 bp, Homo sapien
tccacagtaccctcggcagcatttt

SEQ ID NO: 4036658 - DNA, 25 bp, Homo sapien
cagaaggcattcaggggccctggac

SEQ ID NO: 4036659 - DNA, 25 bp, Homo sapien
gtccagaaggcattcaggggccctg

SEQ ID NO: 4036660 - DNA, 25 bp, Homo sapien
cctggggagtccagaaggcattcag

SEQ ID NO: 4036661 - DNA, 25 bp, Homo sapien
gagtccagaaggcattcaggggccc

SEQ ID NO: 4036662 - DNA, 25 bp, Homo sapien
gaggtcacaggttccagaagggcag

SEQ ID NO: 4036663 - DNA, 25 bp, Homo sapien
aggtcacaggttccagaagggcagc

SEQ ID NO: 4036664 - DNA, 25 bp, Homo sapien
ctggaggtcacaggttccagaaggg

SEQ ID NO: 4036665 - DNA, 25 bp, Homo sapien
ggaggtcacaggttccagaagggca

SEQ ID NO: 4036666 - DNA, 25 bp, Homo sapien
cagtttggatagtcccagcacagct

SEQ ID NO: 4036667 - DNA, 25 bp, Homo sapien
gaaggatctgatcggctcagcttgg

SEQ ID NO: 4036668 - DNA, 25 bp, Homo sapien
cttgcctgtggtccagtttggatag

SEQ ID NO: 4036669 - DNA, 25 bp, Homo sapien
ggtaaagtgtctgcccttggtccag

SEQ ID NO: 4036670 - DNA, 25 bp, Homo sapien
ctgtttccagggagggtggagtagg

SEQ ID NO: 4036671 - DNA, 25 bp, Homo sapien
cagggagggtggagtagggaactat

SEQ ID NO: 4036672 - DNA, 25 bp, Homo sapien
cacatcgacggggaaccgttgccct

SEQ ID NO: 4036673 - DNA, 25 bp, Homo sapien
ggtggatgagcctcctttgtcagga

SEQ ID NO: 4036674 - DNA, 25 bp, Homo sapien
tgttcacatctgagtaggacccaag

SEQ ID NO: 4036675 - DNA, 25 bp, Homo sapien
tggatgagcctcctttgtcaggaaa

SEQ ID NO: 4036676 - DNA, 25 bp, Homo sapien
ctggaagccttttgcaccatggcat

SEQ ID NO: 4036677 - DNA, 25 bp, Homo sapien
ggaagccttttgcaccatggcattt

SEQ ID NO: 4036678 - DNA, 25 bp, Homo sapien
tgtgctggatcaggctgcacgcact

SEQ ID NO: 4036679 - DNA, 25 bp, Homo sapien
ggatcaggctgcacgcactggccca

SEQ ID NO: 4036680 - DNA, 25 bp, Homo sapien
gccataacaaatgttacccgcatgt

SEQ ID NO: 4036681 - DNA, 25 bp, Homo sapien
ggcagcttgctccatgctagaggga

SEQ ID NO: 4036682 - DNA, 25 bp, Homo sapien
catgtttttggtgggtctccttggc

SEQ ID NO: 4036683 - DNA, 25 bp, Homo sapien
cagcgagggcttacttcaattgact

SEQ ID NO: 4036684 - DNA, 25 bp, Homo sapien
catcaaagttgttatgcagggggcc

SEQ ID NO: 4036685 - DNA, 25 bp, Homo sapien
ccgttggcatgacatgtgtcaggtg

SEQ ID NO: 4036686 - DNA, 25 bp, Homo sapien
agggataaggagtcagaacttcagg

SEQ ID NO: 4036687 - DNA, 25 bp, Homo sapien
gacatgtgtcaggtggttggagggt

SEQ ID NO: 4036688 - DNA, 25 bp, Homo sapien
tgatttgctttaaggctggagaagg

SEQ ID NO: 4036689 - DNA, 25 bp, Homo sapien
atgatttgctttaaggctggagaag

SEQ ID NO: 4036690 - DNA, 25 bp, Homo sapien
gtcctcaggagtccgagtgctgcca

SEQ ID NO: 4036691 - DNA, 25 bp, Homo sapien
cgagcccaggcatggcattttccct

SEQ ID NO: 4036692 - DNA, 25 bp, Homo sapien
tctgtagatcgtaatgaggcccagg

SEQ ID NO: 4036693 - DNA, 25 bp, Homo sapien
cccagactgaggtccgagatgtggg

SEQ ID NO: 4036694 - DNA, 25 bp, Homo sapien
cagaggaaccaagggggatagctaa

SEQ ID NO: 4036695 - DNA, 25 bp, Homo sapien
gcagaggaaccaagggggatagcta

SEQ ID NO: 4036696 - DNA, 25 bp, Homo sapien
aagggggatagctaaagtccctcat

SEQ ID NO: 4036697 - DNA, 25 bp, Homo sapien
caagggggatagctaaagtccctca

SEQ ID NO: 4036698 - DNA, 25 bp, Homo sapien
gtttgcccagcatcacacaacctgt

SEQ ID NO: 4036699 - DNA, 25 bp, Homo sapien
tttgtggccattagcattaagcctt

SEQ ID NO: 4036700 - DNA, 25 bp, Homo sapien
tactgccattatgagtttgtggcca

SEQ ID NO: 4036701 - DNA, 25 bp, Homo sapien
tggcaatgccgtttgctcctttact

SEQ ID NO: 4036702 - DNA, 25 bp, Homo sapien
cagtaaagtctttggagataccctc

SEQ ID NO: 4036703 - DNA, 25 bp, Homo sapien
tctattgtagcagtaaagtctttgg

SEQ ID NO: 4036704 - DNA, 25 bp, Homo sapien
caagtgggcagtggcccttctgggt

SEQ ID NO: 4036705 - DNA, 25 bp, Homo sapien
gtggagtcatgctctattgtagcag

SEQ ID NO: 4036706 - DNA, 25 bp, Homo sapien
ggtcattgtcatagggtcccacacg

SEQ ID NO: 4036707 - DNA, 25 bp, Homo sapien
gaagactgttgcctgttccctcggg

SEQ ID NO: 4036708 - DNA, 25 bp, Homo sapien
gaatcaggctggtttccggaaggca

SEQ ID NO: 4036709 - DNA, 25 bp, Homo sapien
aatcagaagaatcagcccagggtcc

SEQ ID NO: 4036710 - DNA, 25 bp, Homo sapien
gctcctcataaaagctcagctggaa

SEQ ID NO: 4036711 - DNA, 25 bp, Homo sapien
tgacttgtgtcagataccggagagg

SEQ ID NO: 4036712 - DNA, 25 bp, Homo sapien
gctcagctggaacagtggaaattct

SEQ ID NO: 4036713 - DNA, 25 bp, Homo sapien
tggcagtttctctcaagtctgctcc

SEQ ID NO: 4036714 - DNA, 25 bp, Homo sapien
caagcgtggttttccaagatccagg

SEQ ID NO: 4036715 - DNA, 25 bp, Homo sapien
cagtggactgcagagtgcgaacgtc

SEQ ID NO: 4036716 - DNA, 25 bp, Homo sapien
tacctacacggttctctaacagagc

SEQ ID NO: 4036717 - DNA, 25 bp, Homo sapien
tatttaaggactatccctgagacca

SEQ ID NO: 4036718 - DNA, 25 bp, Homo sapien
gaagttcataactcccttgaggccg

SEQ ID NO: 4036719 - DNA, 25 bp, Homo sapien
gctggaattctggtctcccactcga

SEQ ID NO: 4036720 - DNA, 25 bp, Homo sapien
ccttcgccactggtgcagagcttaa

SEQ ID NO: 4036721 - DNA, 25 bp, Homo sapien
cagagcttaatcacggccatgggct

SEQ ID NO: 4036722 - DNA, 25 bp, Homo sapien
acttctctgggctgcatctcactgt

SEQ ID NO: 4036723 - DNA, 25 bp, Homo sapien
gccaggctctgtctgtggattccca

SEQ ID NO: 4036724 - DNA, 25 bp, Homo sapien
ctgtggattcccacttctctgggct

SEQ ID NO: 4036725 - DNA, 25 bp, Homo sapien
ctgtctgtggattcccacttctctg

SEQ ID NO: 4036726 - DNA, 25 bp, Homo sapien
caggctagagtctggtccttgccca

SEQ ID NO: 4036727 - DNA, 25 bp, Homo sapien
aagatgtggccccaaattctctgga

SEQ ID NO: 4036728 - DNA, 25 bp, Homo sapien
agtctggtccttgcccatctgcagg

SEQ ID NO: 4036729 - DNA, 25 bp, Homo sapien
gacctgatgtcctagatcctgtgca

SEQ ID NO: 4036730 - DNA, 25 bp, Homo sapien
ttcttgggatctcgtccactgccat

SEQ ID NO: 4036731 - DNA, 25 bp, Homo sapien
ttcagattcagttccatctgagctg

SEQ ID NO: 4036732 - DNA, 25 bp, Homo sapien
gggctccagcttgaccaggtaccat

SEQ ID NO: 4036733 - DNA, 25 bp, Homo sapien
gctgccgcctcacttccaacaccat

SEQ ID NO: 4036734 - DNA, 25 bp, Homo sapien
caggtaccatgatggcagctgccgc

SEQ ID NO: 4036735 - DNA, 25 bp, Homo sapien
tatttagaagtttagtgtggcgtgg

SEQ ID NO: 4036736 - DNA, 25 bp, Homo sapien
ttgtatatttagaagtttagtgtgg

SEQ ID NO: 4036737 - DNA, 25 bp, Homo sapien
gtatatttagaagtttagtgtggcg

SEQ ID NO: 4036738 - DNA, 25 bp, Homo sapien
tatatttagaagtttagtgtggcgt

SEQ ID NO: 4036739 - DNA, 25 bp, Homo sapien
tgtcaaacacaatgacgttgtaagt

SEQ ID NO: 4036740 - DNA, 25 bp, Homo sapien
gtcaaacacaatgacgttgtaagta

SEQ ID NO: 4036741 - DNA, 25 bp, Homo sapien
tcaggagccgttgtcaaacacaatg

SEQ ID NO: 4036742 - DNA, 25 bp, Homo sapien
gcccagatgttccccgaagcccctc

SEQ ID NO: 4036743 - DNA, 25 bp, Homo sapien
ctgcataatagaccgagcccagatg

SEQ ID NO: 4036744 - DNA, 25 bp, Homo sapien
tgcataatagaccgagcccagatgt

SEQ ID NO: 4036745 - DNA, 25 bp, Homo sapien
gcataatagaccgagcccagatgtt

SEQ ID NO: 4036746 - DNA, 25 bp, Homo sapien
ttaatgacatcctttctgagacgat

SEQ ID NO: 4036747 - DNA, 25 bp, Homo sapien
acgatgcttatcactcgtgctttca

SEQ ID NO: 4036748 - DNA, 25 bp, Homo sapien
tgagacgatgcttatcactcgtgct

SEQ ID NO: 4036749 - DNA, 25 bp, Homo sapien
tcctttctgagacgatgcttatcac

SEQ ID NO: 4036750 - DNA, 25 bp, Homo sapien
ggttttaatcagcaactcgggatca

SEQ ID NO: 4036751 - DNA, 25 bp, Homo sapien
tggtggccttaccagtcccatggta

SEQ ID NO: 4036752 - DNA, 25 bp, Homo sapien
aggtttttgaccacatctacatgtg

SEQ ID NO: 4036753 - DNA, 25 bp, Homo sapien
ttggttaaatagcatatggcctcag

SEQ ID NO: 4036754 - DNA, 25 bp, Homo sapien
gatgctgctgagcacgatcttcatg

SEQ ID NO: 4036755 - DNA, 25 bp, Homo sapien
gagtggcctcatgtttatccacagg

SEQ ID NO: 4036756 - DNA, 25 bp, Homo sapien
ctggagagtggcctcatgtttatcc

SEQ ID NO: 4036757 - DNA, 25 bp, Homo sapien
gctgctgagcacgatcttcatgctg

SEQ ID NO: 4036758 - DNA, 25 bp, Homo sapien
agttaggcccgttctcggaagccat

SEQ ID NO: 4036759 - DNA, 25 bp, Homo sapien
gcagttaggcccgttctcggaagcc

SEQ ID NO: 4036760 - DNA, 25 bp, Homo sapien
agagaggcgcagttaggcccgttct

SEQ ID NO: 4036761 - DNA, 25 bp, Homo sapien
ccccagaccgagagaggcgcagtta

SEQ ID NO: 4036762 - DNA, 25 bp, Homo sapien
gctcctcaggaaaggacacgtgagt

SEQ ID NO: 4036763 - DNA, 25 bp, Homo sapien
tgccctgatgggtgagctaaccaag

SEQ ID NO: 4036764 - DNA, 25 bp, Homo sapien
ctctctctgagagcgaaggcacagt

SEQ ID NO: 4036765 - DNA, 25 bp, Homo sapien
gaaatgccaccgttagaagttgcca

SEQ ID NO: 4036766 - DNA, 25 bp, Homo sapien
ttgtaaccaaaagggtctgcacggc

SEQ ID NO: 4036767 - DNA, 25 bp, Homo sapien
ggtgtaaagctagcctgctcctgga

SEQ ID NO: 4036768 - DNA, 25 bp, Homo sapien
ccagtgtgacacatcagtccgggtg

SEQ ID NO: 4036769 - DNA, 25 bp, Homo sapien
cgagcagctagatcaaggttcccaa

SEQ ID NO: 4036770 - DNA, 25 bp, Homo sapien
caaggacatactgcggcttcaggct

SEQ ID NO: 4036771 - DNA, 25 bp, Homo sapien
cagaacgctcgctccatctgagggt

SEQ ID NO: 4036772 - DNA, 25 bp, Homo sapien
ttcaggcttcgaccagcccagaacg

SEQ ID NO: 4036773 - DNA, 25 bp, Homo sapien
acccactcaaggacatactgcggct

SEQ ID NO: 4036774 - DNA, 25 bp, Homo sapien
agggtgtggcgtcaggagccggagc

SEQ ID NO: 4036775 - DNA, 25 bp, Homo sapien
tcagggtgtggcgtcaggagccgga

SEQ ID NO: 4036776 - DNA, 25 bp, Homo sapien
cagggtgtggcgtcaggagccggag

SEQ ID NO: 4036777 - DNA, 25 bp, Homo sapien
cagcgctacgtggtgagaaacttac

SEQ ID NO: 4036778 - DNA, 25 bp, Homo sapien
tgggcaatcaaagctgaaaccaggc

SEQ ID NO: 4036779 - DNA, 25 bp, Homo sapien
ggcaacacgggatgatcagcgctac

SEQ ID NO: 4036780 - DNA, 25 bp, Homo sapien
ttaacaaaagtctaccagcggcctc

SEQ ID NO: 4036781 - DNA, 25 bp, Homo sapien
ttgccactccaaaacagagttccag

SEQ ID NO: 4036782 - DNA, 25 bp, Homo sapien
caggtggaactggttttgccactcc

SEQ ID NO: 4036783 - DNA, 25 bp, Homo sapien
agagctaagggcattctaggccaag

SEQ ID NO: 4036784 - DNA, 25 bp, Homo sapien
gtgattgatagaacaggctgtggca

SEQ ID NO: 4036785 - DNA, 25 bp, Homo sapien
catctcgggtctggttctggtgctg

SEQ ID NO: 4036786 - DNA, 25 bp, Homo sapien
ctggataagtcatctctccaggcct

SEQ ID NO: 4036787 - DNA, 25 bp, Homo sapien
gctgtccctgtctcgccacgtgacc

SEQ ID NO: 4036788 - DNA, 25 bp, Homo sapien
tcagagcatgtcactttgacgtgga

SEQ ID NO: 4036789 - DNA, 25 bp, Homo sapien
cagacctcagttaagggcatcccag

SEQ ID NO: 4036790 - DNA, 25 bp, Homo sapien
ggtgtctcacattaaggttcccaaa

SEQ ID NO: 4036791 - DNA, 25 bp, Homo sapien
tagagtgatcacttgctgggccaag

SEQ ID NO: 4036792 - DNA, 25 bp, Homo sapien
cacttgaagtgtcttttccctggag

SEQ ID NO: 4036793 - DNA, 25 bp, Homo sapien
caaagtcacccagcgagttagagcc

SEQ ID NO: 4036794 - DNA, 25 bp, Homo sapien
ggtggacactgctctggacggtttt

SEQ ID NO: 4036795 - DNA, 25 bp, Homo sapien
cctggcatcaagaggacgtgggaca

SEQ ID NO: 4036796 - DNA, 25 bp, Homo sapien
caggagcacctctgtccaatacaga

SEQ ID NO: 4036797 - DNA, 25 bp, Homo sapien
cagggtgatgcctcggggcgtgggc

SEQ ID NO: 4036798 - DNA, 25 bp, Homo sapien
gggcgtgggcctccggagctggctc

SEQ ID NO: 4036799 - DNA, 25 bp, Homo sapien
cctgcagagtcacgaagtccttgcc

SEQ ID NO: 4036800 - DNA, 25 bp, Homo sapien
ggtattctcgcacagtgagctcctt

SEQ ID NO: 4036801 - DNA, 25 bp, Homo sapien
cagcgctttctggagcttcgcgaag

SEQ ID NO: 4036802 - DNA, 25 bp, Homo sapien
tcgcgaagtcggaatagcgccgttc

SEQ ID NO: 4036803 - DNA, 25 bp, Homo sapien
cagcgaagttcccagtcaggtgctt

SEQ ID NO: 4036804 - DNA, 25 bp, Homo sapien
ccaggacggccttgttgttgtcaaa

SEQ ID NO: 4036805 - DNA, 25 bp, Homo sapien
ggagcacacccagagtaaagttaac

SEQ ID NO: 4036806 - DNA, 25 bp, Homo sapien
gcacacccagagtaaagttaaccag

SEQ ID NO: 4036807 - DNA, 25 bp, Homo sapien
cacacccagagtaaagttaaccagg

SEQ ID NO: 4036808 - DNA, 25 bp, Homo sapien
gctgcggcggacggagcacacccag

SEQ ID NO: 4036809 - DNA, 25 bp, Homo sapien
cgagctgaagcgatctcaaagagca

SEQ ID NO: 4036810 - DNA, 25 bp, Homo sapien
gaagctcccgcgtggtcatgctgga

SEQ ID NO: 4036811 - DNA, 25 bp, Homo sapien
tcatgctggagttggagctcaggcc

SEQ ID NO: 4036812 - DNA, 25 bp, Homo sapien
gcagtttgacgtgcttccagcggca

SEQ ID NO: 4036813 - DNA, 25 bp, Homo sapien
gcaccctgtcagtgcacttccgagg

SEQ ID NO: 4036814 - DNA, 25 bp, Homo sapien
ctgcaccctgtcagtgcacttccga

SEQ ID NO: 4036815 - DNA, 25 bp, Homo sapien
ctggaaggacaacacccttaaggat

SEQ ID NO: 4036816 - DNA, 25 bp, Homo sapien
ggatctgcaccctgtcagtgcactt

SEQ ID NO: 4036817 - DNA, 25 bp, Homo sapien
tcccagggtgctctggacttgccat

SEQ ID NO: 4036818 - DNA, 25 bp, Homo sapien
gggtccttgccgtgcactgggttat

SEQ ID NO: 4036819 - DNA, 25 bp, Homo sapien
cttcctgctgggtccttgccgtgca

SEQ ID NO: 4036820 - DNA, 25 bp, Homo sapien
ttgccgtgcactgggttatgggtcc

SEQ ID NO: 4036821 - DNA, 25 bp, Homo sapien
acagaggccacactatctttctgag

SEQ ID NO: 4036822 - DNA, 25 bp, Homo sapien
ctttctgagggcctgcggaggactt

SEQ ID NO: 4036823 - DNA, 25 bp, Homo sapien
tccaagagctgactgccaagtccag

SEQ ID NO: 4036824 - DNA, 25 bp, Homo sapien
gggcctgcggaggacttttcatggg

SEQ ID NO: 4036825 - DNA, 25 bp, Homo sapien
tccgggaggagtgtcatatggcccc

SEQ ID NO: 4036826 - DNA, 25 bp, Homo sapien
tatggccccttcgagctcttggttc

SEQ ID NO: 4036827 - DNA, 25 bp, Homo sapien
gaggggctgccactttctaagttcc

SEQ ID NO: 4036828 - DNA, 25 bp, Homo sapien
ctcagctccggcgacaagccgaggg

SEQ ID NO: 4036829 - DNA, 25 bp, Homo sapien
aagttggtgaagctaggggtgcaga

SEQ ID NO: 4036830 - DNA, 25 bp, Homo sapien
ctgcttggagcagaggaccaccagc

SEQ ID NO: 4036831 - DNA, 25 bp, Homo sapien
gccagcttgtggaagtgtttggact

SEQ ID NO: 4036832 - DNA, 25 bp, Homo sapien
gtactgagagctgcgggaagttggt

SEQ ID NO: 4036833 - DNA, 25 bp, Homo sapien
ctgagctcctactatccaggcctgc

SEQ ID NO: 4036834 - DNA, 25 bp, Homo sapien
ctcctgggggaagtgctcaggcaca

SEQ ID NO: 4036835 - DNA, 25 bp, Homo sapien
gagctcctactatccaggcctgctg

SEQ ID NO: 4036836 - DNA, 25 bp, Homo sapien
gctcctactatccaggcctgctgat

SEQ ID NO: 4036837 - DNA, 25 bp, Homo sapien
ggaagaattttgaatgacacaatcc

SEQ ID NO: 4036838 - DNA, 25 bp, Homo sapien
ctggaagaattttgaatgacacaat

SEQ ID NO: 4036839 - DNA, 25 bp, Homo sapien
agaattttgaatgacacaatccaag

SEQ ID NO: 4036840 - DNA, 25 bp, Homo sapien
gaagaattttgaatgacacaatcca

SEQ ID NO: 4036841 - DNA, 25 bp, Homo sapien
ggtgtctttgaagttgtagtaactg

SEQ ID NO: 4036842 - DNA, 25 bp, Homo sapien
aagtagagatcaaaaggcaatgcag

SEQ ID NO: 4036843 - DNA, 25 bp, Homo sapien
agtagagatcaaaaggcaatgcaga

SEQ ID NO: 4036844 - DNA, 25 bp, Homo sapien
aaaggcaatgcagatagactgacag

SEQ ID NO: 4036845 - DNA, 25 bp, Homo sapien
atgtccccagtggggtttttcagtg

SEQ ID NO: 4036846 - DNA, 25 bp, Homo sapien
ctgtcccctcgtgaatgtgtctcat

SEQ ID NO: 4036847 - DNA, 25 bp, Homo sapien
cctgtcccctcgtgaatgtgtctca

SEQ ID NO: 4036848 - DNA, 25 bp, Homo sapien
tgtgccactgggcttttggcgttct

SEQ ID NO: 4036849 - DNA, 25 bp, Homo sapien
gcttttggcgttctgcacaaggcct

SEQ ID NO: 4036850 - DNA, 25 bp, Homo sapien
cactgggcttttggcgttctgcaca

SEQ ID NO: 4036851 - DNA, 25 bp, Homo sapien
gcacaaggcctacccgcagatgcca

SEQ ID NO: 4036852 - DNA, 25 bp, Homo sapien
tcaatgttgtatcaactggattttc

SEQ ID NO: 4036853 - DNA, 25 bp, Homo sapien
gaaggtgtatgttctctcgcagaag

SEQ ID NO: 4036854 - DNA, 25 bp, Homo sapien
tcagatgttggatttcctatatggg

SEQ ID NO: 4036855 - DNA, 25 bp, Homo sapien
ggaggagaaccatctccaggatgaa

SEQ ID NO: 4036856 - DNA, 25 bp, Homo sapien
cttttccaggttgtccaataactgc

SEQ ID NO: 4036857 - DNA, 25 bp, Homo sapien
ttttccaggttgtccaataactgca

SEQ ID NO: 4036858 - DNA, 25 bp, Homo sapien
tttccaggttgtccaataactgcat

SEQ ID NO: 4036859 - DNA, 25 bp, Homo sapien
ttccaggttgtccaataactgcatc

SEQ ID NO: 4036860 - DNA, 25 bp, Homo sapien
tagacccacaagaggcagttccatt

SEQ ID NO: 4036861 - DNA, 25 bp, Homo sapien
gcctttggaaacagctcgactttaa

SEQ ID NO: 4036862 - DNA, 25 bp, Homo sapien
cagaatttcaaacggcctcactagg

SEQ ID NO: 4036863 - DNA, 25 bp, Homo sapien
taggccgttccttcaaagcaaatgt

SEQ ID NO: 4036864 - DNA, 25 bp, Homo sapien
ccattgttgtaccaggacagcttca

SEQ ID NO: 4036865 - DNA, 25 bp, Homo sapien
gaaaaaggatgccagtctgagggcc

SEQ ID NO: 4036866 - DNA, 25 bp, Homo sapien
caagcctccttattcactccggtga

SEQ ID NO: 4036867 - DNA, 25 bp, Homo sapien
gagctgagactagcgcttcattcca

SEQ ID NO: 4036868 - DNA, 25 bp, Homo sapien
cactgattcagtgaacgtatgacag

SEQ ID NO: 4036869 - DNA, 25 bp, Homo sapien
aggccccggcactgattcagtgaac

SEQ ID NO: 4036870 - DNA, 25 bp, Homo sapien
cagtgaacgtatgacaggacagagc

SEQ ID NO: 4036871 - DNA, 25 bp, Homo sapien
ttagatgaagtcaggccccggcact

SEQ ID NO: 4036872 - DNA, 25 bp, Homo sapien
tagatgagaacggtgttgcctaagg

SEQ ID NO: 4036873 - DNA, 25 bp, Homo sapien
caagccaggcccgttgatttccaac

SEQ ID NO: 4036874 - DNA, 25 bp, Homo sapien
gccaggcccgttgatttccaactta

SEQ ID NO: 4036875 - DNA, 25 bp, Homo sapien
gcctaaggccacacttcaagccagg

SEQ ID NO: 4036876 - DNA, 25 bp, Homo sapien
cgattttgcgggtgttggtggctcc

SEQ ID NO: 4036877 - DNA, 25 bp, Homo sapien
tccttagttgaaaggtgcgccctgc

SEQ ID NO: 4036878 - DNA, 25 bp, Homo sapien
tgcgccctgctgtgacaggtattct

SEQ ID NO: 4036879 - DNA, 25 bp, Homo sapien
ggttctggccttgttaatggcgtgt

SEQ ID NO: 4036880 - DNA, 25 bp, Homo sapien
aatagtgcttgcctcgggaagtcgt

SEQ ID NO: 4036881 - DNA, 25 bp, Homo sapien
tctgtaggtcctgatgattgaacca

SEQ ID NO: 4036882 - DNA, 25 bp, Homo sapien
tattctgttggcacgttgttatcct

SEQ ID NO: 4036883 - DNA, 25 bp, Homo sapien
ttgaaccatgggtatcttcacaggg

SEQ ID NO: 4036884 - DNA, 25 bp, Homo sapien
tgaggaaaatacttgaaaaggtgga

SEQ ID NO: 4036885 - DNA, 25 bp, Homo sapien
aatacatgccaatatcaattaatag

SEQ ID NO: 4036886 - DNA, 25 bp, Homo sapien
ttactaacttagatatggatatgtg

SEQ ID NO: 4036887 - DNA, 25 bp, Homo sapien
aaattatgaaactgaggaaaatact

SEQ ID NO: 4036888 - DNA, 25 bp, Homo sapien
cagccatagtgtgtgtttagaccac

SEQ ID NO: 4036889 - DNA, 25 bp, Homo sapien
tagaccacagcggatgttgtagacc

SEQ ID NO: 4036890 - DNA, 25 bp, Homo sapien
tgttatcgaaatgttagcagcagct

SEQ ID NO: 4036891 - DNA, 25 bp, Homo sapien
gatctgtcagccagtactcccatta

SEQ ID NO: 4036892 - DNA, 25 bp, Homo sapien
gcctagaagtccaatcaccctgtaa

SEQ ID NO: 4036893 - DNA, 25 bp, Homo sapien
ggttttatactgctaagtgcttggt

SEQ ID NO: 4036894 - DNA, 25 bp, Homo sapien
agagactctgggtttagggctagcc

SEQ ID NO: 4036895 - DNA, 25 bp, Homo sapien
tctagctctgacagcctagaagtcc

SEQ ID NO: 4036896 - DNA, 25 bp, Homo sapien
ctcggtatctgcaggtttctcatcc

SEQ ID NO: 4036897 - DNA, 25 bp, Homo sapien
tgaagccagccctcggtatctgcag

SEQ ID NO: 4036898 - DNA, 25 bp, Homo sapien
atgaagccagccctcggtatctgca

SEQ ID NO: 4036899 - DNA, 25 bp, Homo sapien
agccctcggtatctgcaggtttctc

SEQ ID NO: 4036900 - DNA, 25 bp, Homo sapien
caggtggagcttgacgtctttttaa

SEQ ID NO: 4036901 - DNA, 25 bp, Homo sapien
tgctcattaagggatgccagggcca

SEQ ID NO: 4036902 - DNA, 25 bp, Homo sapien
actgttaaatgggagggcctcatcc

SEQ ID NO: 4036903 - DNA, 25 bp, Homo sapien
cagcctggtttgtcaagaggcacat

SEQ ID NO: 4036904 - DNA, 25 bp, Homo sapien
tatttatcggacacttactaggtgc

SEQ ID NO: 4036905 - DNA, 25 bp, Homo sapien
ggattcactaccctctatagctgga

SEQ ID NO: 4036906 - DNA, 25 bp, Homo sapien
gtgttgtcacccaaattcctgcttg

SEQ ID NO: 4036907 - DNA, 25 bp, Homo sapien
cagagtagggacgagagacctgcat

SEQ ID NO: 4036908 - DNA, 25 bp, Homo sapien
taaaagaactcacatcccatctgaa

SEQ ID NO: 4036909 - DNA, 25 bp, Homo sapien
tatattggagactcaactgcccttg

SEQ ID NO: 4036910 - DNA, 25 bp, Homo sapien
gggattgtcctttcaagcaccacag

SEQ ID NO: 4036911 - DNA, 25 bp, Homo sapien
taagaagaccaccacatagaatacc

SEQ ID NO: 4036912 - DNA, 25 bp, Homo sapien
gccaagtaattctgacctctgatgc

SEQ ID NO: 4036913 - DNA, 25 bp, Homo sapien
tgtggcttcttgatctagccaagta

SEQ ID NO: 4036914 - DNA, 25 bp, Homo sapien
tctgatgcttgttaaagctcagctg

SEQ ID NO: 4036915 - DNA, 25 bp, Homo sapien
cagcggcattatgatgctgtgtggc

SEQ ID NO: 4036916 - DNA, 25 bp, Homo sapien
ttgggtctgttaccgtgacggcgac

SEQ ID NO: 4036917 - DNA, 25 bp, Homo sapien
gaaccccatgggtggatatgcgtgc

SEQ ID NO: 4036918 - DNA, 25 bp, Homo sapien
gcgtgcttatatccaaacaatgctg

SEQ ID NO: 4036919 - DNA, 25 bp, Homo sapien
tgtcagattcaagggttggcacact

SEQ ID NO: 4036920 - DNA, 25 bp, Homo sapien
tcattatcaaacttcgagcagcagt

SEQ ID NO: 4036921 - DNA, 25 bp, Homo sapien
tgcccatctgcggatctggacagtt

SEQ ID NO: 4036922 - DNA, 25 bp, Homo sapien
tctgacttgctgaggcatgttcttc

SEQ ID NO: 4036923 - DNA, 25 bp, Homo sapien
tgtcagaagaaagctggcctggccg

SEQ ID NO: 4036924 - DNA, 25 bp, Homo sapien
tcaatcctggttgcatgttgaattc

SEQ ID NO: 4036925 - DNA, 25 bp, Homo sapien
tgtgcacaccccagacctattggaa

SEQ ID NO: 4036926 - DNA, 25 bp, Homo sapien
gacctattggaatctctgaagatgg

SEQ ID NO: 4036927 - DNA, 25 bp, Homo sapien
agggagattttaaagacgccagtgc

SEQ ID NO: 4036928 - DNA, 25 bp, Homo sapien
gactcaaacaccaatcttccttggg

SEQ ID NO: 4036929 - DNA, 25 bp, Homo sapien
ctcgaggctctgactagggaggccc

SEQ ID NO: 4036930 - DNA, 25 bp, Homo sapien
ttccttgggcttcctgaactgtgag

SEQ ID NO: 4036931 - DNA, 25 bp, Homo sapien
tgggacattgtagggcagctcgagg

SEQ ID NO: 4036932 - DNA, 25 bp, Homo sapien
gccatattcccaggcacttgcctga

SEQ ID NO: 4036933 - DNA, 25 bp, Homo sapien
cacttgcctgagtagagacgaagtc

SEQ ID NO: 4036934 - DNA, 25 bp, Homo sapien
aggaagtcaagcctgtccctataca

SEQ ID NO: 4036935 - DNA, 25 bp, Homo sapien
gaagtctcagctccttctacgtgag

SEQ ID NO: 4036936 - DNA, 25 bp, Homo sapien
catgctattttgggcgggaagactt

SEQ ID NO: 4036937 - DNA, 25 bp, Homo sapien
tccttggcatgccacagaagaattt

SEQ ID NO: 4036938 - DNA, 25 bp, Homo sapien
ttggcatgccacagaagaatttcct

SEQ ID NO: 4036939 - DNA, 25 bp, Homo sapien
ggcatgccacagaagaatttccttc

SEQ ID NO: 4036940 - DNA, 25 bp, Homo sapien
tttcaatggcaaacgtccagtgcat

SEQ ID NO: 4036941 - DNA, 25 bp, Homo sapien
tgctttcaatggcaaacgtccagtg

SEQ ID NO: 4036942 - DNA, 25 bp, Homo sapien
ctttcaatggcaaacgtccagtgca

SEQ ID NO: 4036943 - DNA, 25 bp, Homo sapien
gctttcaatggcaaacgtccagtgc

SEQ ID NO: 4036944 - DNA, 25 bp, Homo sapien
gagcactttgatcagcttattccag

SEQ ID NO: 4036945 - DNA, 25 bp, Homo sapien
ttattccagatacagcaagggctag

SEQ ID NO: 4036946 - DNA, 25 bp, Homo sapien
gagtcctgtctgttataagtggccc

SEQ ID NO: 4036947 - DNA, 25 bp, Homo sapien
cctgtactgatcaatacagagcact

SEQ ID NO: 4036948 - DNA, 25 bp, Homo sapien
agaagtttgccagcacagacaatta

SEQ ID NO: 4036949 - DNA, 25 bp, Homo sapien
agtttgccagcacagacaattaagc

SEQ ID NO: 4036950 - DNA, 25 bp, Homo sapien
tttcttaaaacctggacattcacca

SEQ ID NO: 4036951 - DNA, 25 bp, Homo sapien
gccagcacagacaattaagctttct

SEQ ID NO: 4036952 - DNA, 25 bp, Homo sapien
gatctgcggctgtcccagtgaatgt

SEQ ID NO: 4036953 - DNA, 25 bp, Homo sapien
gatactcagcattaccaggaggtgg

SEQ ID NO: 4036954 - DNA, 25 bp, Homo sapien
cactggttggcatcaccattccggg

SEQ ID NO: 4036955 - DNA, 25 bp, Homo sapien
gagaacccttcgactgtgcaccgtt

SEQ ID NO: 4036956 - DNA, 25 bp, Homo sapien
ggcgtgctgtctccggctgaggatg

SEQ ID NO: 4036957 - DNA, 25 bp, Homo sapien
aggctggaggcgtgctgtctccggc

SEQ ID NO: 4036958 - DNA, 25 bp, Homo sapien
tccccagtaccagagaatggcagca

SEQ ID NO: 4036959 - DNA, 25 bp, Homo sapien
gtcctctgctggcttgacgtggacg

SEQ ID NO: 4036960 - DNA, 25 bp, Homo sapien
catgcttggtggtagaagaaatcaa

SEQ ID NO: 4036961 - DNA, 25 bp, Homo sapien
cctcatgcttggtggtagaagaaat

SEQ ID NO: 4036962 - DNA, 25 bp, Homo sapien
ctcatgcttggtggtagaagaaatc

SEQ ID NO: 4036963 - DNA, 25 bp, Homo sapien
tgcttggtggtagaagaaatcaagt

SEQ ID NO: 4036964 - DNA, 25 bp, Homo sapien
caggagtctgtgacaagtgacaagg

SEQ ID NO: 4036965 - DNA, 25 bp, Homo sapien
ccagagcagttccatgagcagtttc

SEQ ID NO: 4036966 - DNA, 25 bp, Homo sapien
tgagaactgtctagggccaacctgt

SEQ ID NO: 4036967 - DNA, 25 bp, Homo sapien
aaggatagtacaatgaatgcccagc

SEQ ID NO: 4036968 - DNA, 25 bp, Homo sapien
ctataacaggttgagggagtttcct

SEQ ID NO: 4036969 - DNA, 25 bp, Homo sapien
ctgtggatttttgggcagatgccct

SEQ ID NO: 4036970 - DNA, 25 bp, Homo sapien
taatgccctggcgaaaaactccagt

SEQ ID NO: 4036971 - DNA, 25 bp, Homo sapien
ctgtgcatagaggtagctttacttt

SEQ ID NO: 4036972 - DNA, 25 bp, Homo sapien
tacaattgttatgggttggacgtcc

SEQ ID NO: 4036973 - DNA, 25 bp, Homo sapien
tgtgcttagatagggcccacctgtg

SEQ ID NO: 4036974 - DNA, 25 bp, Homo sapien
ggtgctggactcatttgaaggctca

SEQ ID NO: 4036975 - DNA, 25 bp, Homo sapien
gaaggctcattcatacacgtggctg

SEQ ID NO: 4036976 - DNA, 25 bp, Homo sapien
tgctccttttgcactgtgttttctt

SEQ ID NO: 4036977 - DNA, 25 bp, Homo sapien
ggcctctgctccttttgcactgtgt

SEQ ID NO: 4036978 - DNA, 25 bp, Homo sapien
ctttgaactgtgaggtgcacttggg

SEQ ID NO: 4036979 - DNA, 25 bp, Homo sapien
tgcacttggggcctctgctcctttt

SEQ ID NO: 4036980 - DNA, 25 bp, Homo sapien
tccagcatagacactgaatgggata

SEQ ID NO: 4036981 - DNA, 25 bp, Homo sapien
taatgcaagacctaatacattttag

SEQ ID NO: 4036982 - DNA, 25 bp, Homo sapien
caagctggtatgaacgacctccagc

SEQ ID NO: 4036983 - DNA, 25 bp, Homo sapien
taaaataatgcaagacctaatacat

SEQ ID NO: 4036984 - DNA, 25 bp, Homo sapien
gcttaggttcataagatcagatgag

SEQ ID NO: 4036985 - DNA, 25 bp, Homo sapien
gcacccggtattcccttgaagtctc

SEQ ID NO: 4036986 - DNA, 25 bp, Homo sapien
tgcttaggttcataagatcagatga

SEQ ID NO: 4036987 - DNA, 25 bp, Homo sapien
cttaggttcataagatcagatgaga

SEQ ID NO: 4036988 - DNA, 25 bp, Homo sapien
gatcttgtatactacaactttgctg

SEQ ID NO: 4036989 - DNA, 25 bp, Homo sapien
gtgttgatcttgtatactacaactt

SEQ ID NO: 4036990 - DNA, 25 bp, Homo sapien
ttgctgaatttattagcttcacttg

SEQ ID NO: 4036991 - DNA, 25 bp, Homo sapien
aactttacatattattcattgctag

SEQ ID NO: 4036992 - DNA, 25 bp, Homo sapien
cagctgaatggctgaggtgctcagt

SEQ ID NO: 4036993 - DNA, 25 bp, Homo sapien
tcagtgagggtttcttcattctggc

SEQ ID NO: 4036994 - DNA, 25 bp, Homo sapien
tggctgggccagaaccccctacact

SEQ ID NO: 4036995 - DNA, 25 bp, Homo sapien
cactttgtagcctctggtatcacca

SEQ ID NO: 4036996 - DNA, 25 bp, Homo sapien
gcatttagctgacttcttctgattt

SEQ ID NO: 4036997 - DNA, 25 bp, Homo sapien
gctccttagccgctcaggtctgaga

SEQ ID NO: 4036998 - DNA, 25 bp, Homo sapien
tttagacctgaaggctgcttactgc

SEQ ID NO: 4036999 - DNA, 25 bp, Homo sapien
tgcttactgcaaagtccagcagctc

SEQ ID NO: 4037000 - DNA, 25 bp, Homo sapien
gagcgcttccgcaacgtttgcagag

SEQ ID NO: 4037001 - DNA, 25 bp, Homo sapien
ggtataccagttctaagcctagagg

SEQ ID NO: 4037002 - DNA, 25 bp, Homo sapien
gatggtgcccagtcatagcagctcc

SEQ ID NO: 4037003 - DNA, 25 bp, Homo sapien
tgtcccagttaaggccatctcagag

SEQ ID NO: 4037004 - DNA, 25 bp, Homo sapien
catgtagaacccagccaaggtgtcc

SEQ ID NO: 4037005 - DNA, 25 bp, Homo sapien
ggcactgggagctgaacacatccct

SEQ ID NO: 4037006 - DNA, 25 bp, Homo sapien
ctgaacacatccctggacacggctg

SEQ ID NO: 4037007 - DNA, 25 bp, Homo sapien
ctggacacggctgtctcactggagg

SEQ ID NO: 4037008 - DNA, 25 bp, Homo sapien
ggagctgaacacatccctggacacg

SEQ ID NO: 4037009 - DNA, 25 bp, Homo sapien
tttgcagccacgacagggcacaatc

SEQ ID NO: 4037010 - DNA, 25 bp, Homo sapien
gccacgacagggcacaatctgaaga

SEQ ID NO: 4037011 - DNA, 25 bp, Homo sapien
aagaaaagtttgcagccacgacagg

SEQ ID NO: 4037012 - DNA, 25 bp, Homo sapien
cgacagggcacaatctgaagaagat

SEQ ID NO: 4037013 - DNA, 25 bp, Homo sapien
cataaatatcagcaagcagtaagta

SEQ ID NO: 4037014 - DNA, 25 bp, Homo sapien
gcaatcatcgggctccaagggagaa

SEQ ID NO: 4037015 - DNA, 25 bp, Homo sapien
aattggcaatatcgtggccctctca

SEQ ID NO: 4037016 - DNA, 25 bp, Homo sapien
ggctgacagcagtttaagccgctgc

SEQ ID NO: 4037017 - DNA, 25 bp, Homo sapien
tttaataagcacagccataactagg

SEQ ID NO: 4037018 - DNA, 25 bp, Homo sapien
tagatccaggggtaaacagcctcca

SEQ ID NO: 4037019 - DNA, 25 bp, Homo sapien
ctaggaaattggatttccaggagct

SEQ ID NO: 4037020 - DNA, 25 bp, Homo sapien
gcctccacagtcatgcttttaataa

SEQ ID NO: 4037021 - DNA, 25 bp, Homo sapien
tcccttctagtaatcataaacatat

SEQ ID NO: 4037022 - DNA, 25 bp, Homo sapien
tcatcccttctagtaatcataaaca

SEQ ID NO: 4037023 - DNA, 25 bp, Homo sapien
catcccttctagtaatcataaacat

SEQ ID NO: 4037024 - DNA, 25 bp, Homo sapien
atcccttctagtaatcataaacata

SEQ ID NO: 4037025 - DNA, 25 bp, Homo sapien
caagccactggccaatgatggcctg

SEQ ID NO: 4037026 - DNA, 25 bp, Homo sapien
tctcatcttgatacccatttgttgt

SEQ ID NO: 4037027 - DNA, 25 bp, Homo sapien
aacgagtcctcctcgaacaaacagc

SEQ ID NO: 4037028 - DNA, 25 bp, Homo sapien
ttgtaaaacgagtcctcctcgaaca

SEQ ID NO: 4037029 - DNA, 25 bp, Homo sapien
tccatctcgagcaggaactaggcag

SEQ ID NO: 4037030 - DNA, 25 bp, Homo sapien
tgctcgggccgtctgcatgctgatg

SEQ ID NO: 4037031 - DNA, 25 bp, Homo sapien
aggaattctggtcaccgcagctgct

SEQ ID NO: 4037032 - DNA, 25 bp, Homo sapien
ttagcgtcccaaccagtgtgtccag

SEQ ID NO: 4037033 - DNA, 25 bp, Homo sapien
ctgcatgttcaggactgatggttcc

SEQ ID NO: 4037034 - DNA, 25 bp, Homo sapien
ggctcctgcatgttcaggactgatg

SEQ ID NO: 4037035 - DNA, 25 bp, Homo sapien
gctcctgcatgttcaggactgatgg

SEQ ID NO: 4037036 - DNA, 25 bp, Homo sapien
gactgatggttcctggagccaggct

SEQ ID NO: 4037037 - DNA, 25 bp, Homo sapien
gttcaggactgatggttcctggagc

SEQ ID NO: 4037038 - DNA, 25 bp, Homo sapien
caggactgatggttcctggagccag

SEQ ID NO: 4037039 - DNA, 25 bp, Homo sapien
tcaggactgatggttcctggagcca

SEQ ID NO: 4037040 - DNA, 25 bp, Homo sapien
gactgatggttcctggagccaggct

SEQ ID NO: 4037041 - DNA, 25 bp, Homo sapien
gttcaggactgatggttcctggagc

SEQ ID NO: 4037042 - DNA, 25 bp, Homo sapien
caggactgatggttcctggagccta

SEQ ID NO: 4037043 - DNA, 25 bp, Homo sapien
ggactgatggttcctggagcctagg

SEQ ID NO: 4037044 - DNA, 25 bp, Homo sapien
tcaggactgatggttcctggagcct

SEQ ID NO: 4037045 - DNA, 25 bp, Homo sapien
tcagtgtctctttctgtttccaatt

SEQ ID NO: 4037046 - DNA, 25 bp, Homo sapien
cagtgtctctttctgtttccaattc

SEQ ID NO: 4037047 - DNA, 25 bp, Homo sapien
tcctctctggacttcagtgtctctt

SEQ ID NO: 4037048 - DNA, 25 bp, Homo sapien
tctctggacttcagtgtctctttct

SEQ ID NO: 4037049 - DNA, 25 bp, Homo sapien
ggaagccagatccacaccattgagg

SEQ ID NO: 4037050 - DNA, 25 bp, Homo sapien
tataacctgagtcaggaagagcctc

SEQ ID NO: 4037051 - DNA, 25 bp, Homo sapien
ttgaggatccccatattggagacag

SEQ ID NO: 4037052 - DNA, 25 bp, Homo sapien
tagttcttctcagaggtggcaactc

SEQ ID NO: 4037053 - DNA, 25 bp, Homo sapien
tccacaggagtcttcatgcagattg

SEQ ID NO: 4037054 - DNA, 25 bp, Homo sapien
catccacaggagtcttcatgcagat

SEQ ID NO: 4037055 - DNA, 25 bp, Homo sapien
ggagtcttcatgcagattgcttcac

SEQ ID NO: 4037056 - DNA, 25 bp, Homo sapien
cacaggagtcttcatgcagattgct

SEQ ID NO: 4037057 - DNA, 25 bp, Homo sapien
tgatggctcatcagacagctcccct

SEQ ID NO: 4037058 - DNA, 25 bp, Homo sapien
ctgatggctcatcagacagctcccc

SEQ ID NO: 4037059 - DNA, 25 bp, Homo sapien
ccaataactgatggctcatcagaca

SEQ ID NO: 4037060 - DNA, 25 bp, Homo sapien
gatggctcatcagacagctcccctg

SEQ ID NO: 4037061 - DNA, 25 bp, Homo sapien
ttttctctgaatgagagatctaaat

SEQ ID NO: 4037062 - DNA, 25 bp, Homo sapien
tttctctgaatgagagatctaaatc

SEQ ID NO: 4037063 - DNA, 25 bp, Homo sapien
cttttctctgaatgagagatctaaa

SEQ ID NO: 4037064 - DNA, 25 bp, Homo sapien
aaaccataggctgggattgcacaca

SEQ ID NO: 4037065 - DNA, 25 bp, Homo sapien
aaccataggctgggattgcacacag

SEQ ID NO: 4037066 - DNA, 25 bp, Homo sapien
accaggaggaaatcactattcccat

SEQ ID NO: 4037067 - DNA, 25 bp, Homo sapien
tgaccaggaggaaatcactattccc

SEQ ID NO: 4037068 - DNA, 25 bp, Homo sapien
tgtgaccaggaggaaatcactattc

SEQ ID NO: 4037069 - DNA, 25 bp, Homo sapien
ctgtgaccaggaggaaatcactatt

SEQ ID NO: 4037070 - DNA, 25 bp, Homo sapien
tcacattctgcttgtttgaggcagc

SEQ ID NO: 4037071 - DNA, 25 bp, Homo sapien
actggctggtgttgatcatggatgc

SEQ ID NO: 4037072 - DNA, 25 bp, Homo sapien
attcacattctgcttgtttgaggca

SEQ ID NO: 4037073 - DNA, 25 bp, Homo sapien
tggtgttgatcatggatgcattgtg

SEQ ID NO: 4037074 - DNA, 25 bp, Homo sapien
acgccaagacggagagagcaaagca

SEQ ID NO: 4037075 - DNA, 25 bp, Homo sapien
gccattagaggtgttgaggacgcca

SEQ ID NO: 4037076 - DNA, 25 bp, Homo sapien
catggtgacggttactctggcgcct

SEQ ID NO: 4037077 - DNA, 25 bp, Homo sapien
ctgcctggaggtgagtagaactgca

SEQ ID NO: 4037078 - DNA, 25 bp, Homo sapien
gacaagctacggatggccggcacaa

SEQ ID NO: 4037079 - DNA, 25 bp, Homo sapien
caagctacggatggccggcacaagc

SEQ ID NO: 4037080 - DNA, 25 bp, Homo sapien
gggaggacaagctacggatggccgg

SEQ ID NO: 4037081 - DNA, 25 bp, Homo sapien
gaggacaagctacggatggccggca

SEQ ID NO: 4037082 - DNA, 25 bp, Homo sapien
ggcccgatagagatcagctggcatt

SEQ ID NO: 4037083 - DNA, 25 bp, Homo sapien
tttgggcccgatagagatcagctgg

SEQ ID NO: 4037084 - DNA, 25 bp, Homo sapien
ccgatagagatcagctggcatttcg

SEQ ID NO: 4037085 - DNA, 25 bp, Homo sapien
agtttgggcccgatagagatcagct

SEQ ID NO: 4037086 - DNA, 25 bp, Homo sapien
ctgaaagagtggcaactgaatactc

SEQ ID NO: 4037087 - DNA, 25 bp, Homo sapien
gaaagagtggcaactgaatactctg

SEQ ID NO: 4037088 - DNA, 25 bp, Homo sapien
caacgccgtagatcgatttctattt

SEQ ID NO: 4037089 - DNA, 25 bp, Homo sapien
cggcccctgtaccaacgccgtagat

SEQ ID NO: 4037090 - DNA, 25 bp, Homo sapien
agtggacctgcttgtcccacagaga

SEQ ID NO: 4037091 - DNA, 25 bp, Homo sapien
ctgggcacgcccataggtgacccca

SEQ ID NO: 4037092 - DNA, 25 bp, Homo sapien
gctttatgggcccaatcccacagag

SEQ ID NO: 4037093 - DNA, 25 bp, Homo sapien
aggaagtagtgaggttgaaaagaga

SEQ ID NO: 4037094 - DNA, 25 bp, Homo sapien
gacaatacggcagaggaggctaaaa

SEQ ID NO: 4037095 - DNA, 25 bp, Homo sapien
aatacggcagaggaggctaaaagag

SEQ ID NO: 4037096 - DNA, 25 bp, Homo sapien
ctgacaatacggcagaggaggctaa

SEQ ID NO: 4037097 - DNA, 25 bp, Homo sapien
caatacggcagaggaggctaaaaga

SEQ ID NO: 4037098 - DNA, 25 bp, Homo sapien
taactatcacgatgtgggcatcagc

SEQ ID NO: 4037099 - DNA, 25 bp, Homo sapien
tgaaattaacatcacagcatgggat

SEQ ID NO: 4037100 - DNA, 25 bp, Homo sapien
ggccacgggcagtcgtgaaattaac

SEQ ID NO: 4037101 - DNA, 25 bp, Homo sapien
tttggaatggacacccatgagctgg

SEQ ID NO: 4037102 - DNA, 25 bp, Homo sapien
ggcctgtggttcataacaacttgag

SEQ ID NO: 4037103 - DNA, 25 bp, Homo sapien
caaccgtatacaagcactggagatg

SEQ ID NO: 4037104 - DNA, 25 bp, Homo sapien
tcagaggtctctgaccaggcctgtg

SEQ ID NO: 4037105 - DNA, 25 bp, Homo sapien
cagagacctgaatgaaccatgtgac

SEQ ID NO: 4037106 - DNA, 25 bp, Homo sapien
cacattattgcgtatagggggagcc

SEQ ID NO: 4037107 - DNA, 25 bp, Homo sapien
cattgcaatcagcttggaattggca

SEQ ID NO: 4037108 - DNA, 25 bp, Homo sapien
ggcaatttggagacattacttatgc

SEQ ID NO: 4037109 - DNA, 25 bp, Homo sapien
cagttttgactgtaggcaatttgga

SEQ ID NO: 4037110 - DNA, 25 bp, Homo sapien
gagattaaaggatgcccagaggcct

SEQ ID NO: 4037111 - DNA, 25 bp, Homo sapien
cctatttgccctggacctagaccaa

SEQ ID NO: 4037112 - DNA, 25 bp, Homo sapien
aggatcagccattgcatcaggcact

SEQ ID NO: 4037113 - DNA, 25 bp, Homo sapien
ggcaaccaggcaatacttagtaaag

SEQ ID NO: 4037114 - DNA, 25 bp, Homo sapien
gcagggcaggacccaggtatcctgc

SEQ ID NO: 4037115 - DNA, 25 bp, Homo sapien
tgagagctgaccaaggcgaggactt

SEQ ID NO: 4037116 - DNA, 25 bp, Homo sapien
gatcgactcagtatggccgttcata

SEQ ID NO: 4037117 - DNA, 25 bp, Homo sapien
ggccgttcatactgttgccttttcc

SEQ ID NO: 4037118 - DNA, 25 bp, Homo sapien
gcttggcaaatatgatcgactcagt

SEQ ID NO: 4037119 - DNA, 25 bp, Homo sapien
cagctccttcctctctgctcgagac

SEQ ID NO: 4037120 - DNA, 25 bp, Homo sapien
tcagctccttcctctctgctcgaga

SEQ ID NO: 4037121 - DNA, 25 bp, Homo sapien
gctccttcctctctgctcgagacat

SEQ ID NO: 4037122 - DNA, 25 bp, Homo sapien
agctccttcctctctgctcgagaca

SEQ ID NO: 4037123 - DNA, 25 bp, Homo sapien
tcctcctgggatgagctcatcggag

SEQ ID NO: 4037124 - DNA, 25 bp, Homo sapien
agccccttggttctcccactcactg

SEQ ID NO: 4037125 - DNA, 25 bp, Homo sapien
ttccctttgcccattccttggacag

SEQ ID NO: 4037126 - DNA, 25 bp, Homo sapien
ctctggtgaactcttccctttgccc

SEQ ID NO: 4037127 - DNA, 25 bp, Homo sapien
taagaacaaccagacatccagtgtc

SEQ ID NO: 4037128 - DNA, 25 bp, Homo sapien
accctccggacataagaacaaccag

SEQ ID NO: 4037129 - DNA, 25 bp, Homo sapien
ggagaaaacatgttcttgtttgcca

SEQ ID NO: 4037130 - DNA, 25 bp, Homo sapien
tctggagaactgttgcatgtgacca

SEQ ID NO: 4037131 - DNA, 25 bp, Homo sapien
gggcattccagagtccttatcatgg

SEQ ID NO: 4037132 - DNA, 25 bp, Homo sapien
ggtaggaggctgcacacttgtccag

SEQ ID NO: 4037133 - DNA, 25 bp, Homo sapien
gtccttcgcaaggtgaactgtgtgt

SEQ ID NO: 4037134 - DNA, 25 bp, Homo sapien
cagagattaggtgcagaagctaggt

SEQ ID NO: 4037135 - DNA, 25 bp, Homo sapien
gaggaggaggaggacgtctgtgggc

SEQ ID NO: 4037136 - DNA, 25 bp, Homo sapien
aggaggaggaggacgtctgtgggcg

SEQ ID NO: 4037137 - DNA, 25 bp, Homo sapien
ggaggaggaggacgtctgtgggcgc

SEQ ID NO: 4037138 - DNA, 25 bp, Homo sapien
ggaggaggaggaggacgtctgtggg

SEQ ID NO: 4037139 - DNA, 25 bp, Homo sapien
aaaagtggcatattaaatttctgaa

SEQ ID NO: 4037140 - DNA, 25 bp, Homo sapien
ctctctctcttgagcctaaatgcaa

SEQ ID NO: 4037141 - DNA, 25 bp, Homo sapien
tctgaaaacctttgtaatctgcagt

SEQ ID NO: 4037142 - DNA, 25 bp, Homo sapien
ctctcttgagcctaaatgcaagtgc

SEQ ID NO: 4037143 - DNA, 25 bp, Homo sapien
gcatccaattactctgaataagtga

SEQ ID NO: 4037144 - DNA, 25 bp, Homo sapien
cattgtacgtattaacccaagtcag

SEQ ID NO: 4037145 - DNA, 25 bp, Homo sapien
tattaacccaagtcagcatccaatt

SEQ ID NO: 4037146 - DNA, 25 bp, Homo sapien
tcatttaaggacattgtacgtatta

SEQ ID NO: 4037147 - DNA, 25 bp, Homo sapien
gctcagtcttagcttaggaaactgt

SEQ ID NO: 4037148 - DNA, 25 bp, Homo sapien
tcattcccagtttggttcagccagt

SEQ ID NO: 4037149 - DNA, 25 bp, Homo sapien
taggaaactgtttgccagtttcacc

SEQ ID NO: 4037150 - DNA, 25 bp, Homo sapien
catggatgctaggaggactgatttc

SEQ ID NO: 4037151 - DNA, 25 bp, Homo sapien
cattaacaaagtagcgggcggtgtc

SEQ ID NO: 4037152 - DNA, 25 bp, Homo sapien
ccgctgatgtgtggcccgtccgaat

SEQ ID NO: 4037153 - DNA, 25 bp, Homo sapien
gatttgttaccgctgatgtgtggcc

SEQ ID NO: 4037154 - DNA, 25 bp, Homo sapien
ttcattaacaaagtagcgggcggtg

SEQ ID NO: 4037155 - DNA, 25 bp, Homo sapien
ccaggagacaattgacattttcaca

SEQ ID NO: 4037156 - DNA, 25 bp, Homo sapien
catatggattgattgggttagcaaa

SEQ ID NO: 4037157 - DNA, 25 bp, Homo sapien
tgtgcttttcatatggattgattgg

SEQ ID NO: 4037158 - DNA, 25 bp, Homo sapien
tttcatatggattgattgggttagc

SEQ ID NO: 4037159 - DNA, 25 bp, Homo sapien
ggaggcaatgatttttgtgctctga

SEQ ID NO: 4037160 - DNA, 25 bp, Homo sapien
caaatttgtcacagttggagaggga

SEQ ID NO: 4037161 - DNA, 25 bp, Homo sapien
tagcacccaaatttgtcacagttgg

SEQ ID NO: 4037162 - DNA, 25 bp, Homo sapien
agggaggcaatgatttttgtgctct

SEQ ID NO: 4037163 - DNA, 25 bp, Homo sapien
ggagtctgtctccacattacttacc

SEQ ID NO: 4037164 - DNA, 25 bp, Homo sapien
taacaccttggagtctgtctccaca

SEQ ID NO: 4037165 - DNA, 25 bp, Homo sapien
caagtccttatgtaacaccttggag

SEQ ID NO: 4037166 - DNA, 25 bp, Homo sapien
ttgggcaagtccttatgtaacacct

SEQ ID NO: 4037167 - DNA, 25 bp, Homo sapien
ggttgcactcatcatgaaagcaaag

SEQ ID NO: 4037168 - DNA, 25 bp, Homo sapien
caagaagtcaaacctgacagaggtc

SEQ ID NO: 4037169 - DNA, 25 bp, Homo sapien
gcaaagtctttctgtctctcggcct

SEQ ID NO: 4037170 - DNA, 25 bp, Homo sapien
gctggactcatctgtggttgcactc

SEQ ID NO: 4037171 - DNA, 25 bp, Homo sapien
cagattacaactgcctagcagggca

SEQ ID NO: 4037172 - DNA, 25 bp, Homo sapien
taggaggccaccataggtcgcattc

SEQ ID NO: 4037173 - DNA, 25 bp, Homo sapien
cagaagaccaaagttaacgcttgca

SEQ ID NO: 4037174 - DNA, 25 bp, Homo sapien
tccaagaaagtgcatgtaacagtcc

SEQ ID NO: 4037175 - DNA, 25 bp, Homo sapien
gaagttggttccgttctcactgctt

SEQ ID NO: 4037176 - DNA, 25 bp, Homo sapien
tgctgtcctccacgaagcgggtgaa

SEQ ID NO: 4037177 - DNA, 25 bp, Homo sapien
taactcgtgacgatctccttgctgt

SEQ ID NO: 4037178 - DNA, 25 bp, Homo sapien
ggagagcgctgctgcatactgattc

SEQ ID NO: 4037179 - DNA, 25 bp, Homo sapien
gagggcctgcgtatggagagaaaag

SEQ ID NO: 4037180 - DNA, 25 bp, Homo sapien
cctgattgcccattggagggcctgc

SEQ ID NO: 4037181 - DNA, 25 bp, Homo sapien
gggagaaggtatccctccctgattg

SEQ ID NO: 4037182 - DNA, 25 bp, Homo sapien
gaaggtatccctccctgattgccca

SEQ ID NO: 4037183 - DNA, 25 bp, Homo sapien
cagggttgatggagcaggtatggtg

SEQ ID NO: 4037184 - DNA, 25 bp, Homo sapien
ttgatggagcaggtatggtgcagag

SEQ ID NO: 4037185 - DNA, 25 bp, Homo sapien
ggagcaggtatggtgcagagagagc

SEQ ID NO: 4037186 - DNA, 25 bp, Homo sapien
caatggcagtgggacagggttgatg

SEQ ID NO: 4037187 - DNA, 25 bp, Homo sapien
gattgcctttagtcgtgaaagctct

SEQ ID NO: 4037188 - DNA, 25 bp, Homo sapien
ccacaaatagtgcaagcaaagggtt

SEQ ID NO: 4037189 - DNA, 25 bp, Homo sapien
atagtgcaagcaaagggtttctctc

SEQ ID NO: 4037190 - DNA, 25 bp, Homo sapien
tctgcagggcactcgatgaggagaa

SEQ ID NO: 4037191 - DNA, 25 bp, Homo sapien
acagaggcccagacgggacgtgact

SEQ ID NO: 4037192 - DNA, 25 bp, Homo sapien
gaggcccagacgggacgtgactggt

SEQ ID NO: 4037193 - DNA, 25 bp, Homo sapien
cagaggcccagacgggacgtgactg

SEQ ID NO: 4037194 - DNA, 25 bp, Homo sapien
agaggcccagacgggacgtgactgg

SEQ ID NO: 4037195 - DNA, 25 bp, Homo sapien
tggaaaagccacgattgcaaactgt

SEQ ID NO: 4037196 - DNA, 25 bp, Homo sapien
gaaacatgcacgaagccgttgacct

SEQ ID NO: 4037197 - DNA, 25 bp, Homo sapien
cattggcaaactcgcttgggaccgc

SEQ ID NO: 4037198 - DNA, 25 bp, Homo sapien
tagtgcattttcaaggcgctctggc

SEQ ID NO: 4037199 - DNA, 25 bp, Homo sapien
tgtggaggagctgccgccgccgccg

SEQ ID NO: 4037200 - DNA, 25 bp, Homo sapien
ctgtggaggagctgccgccgccgcc

SEQ ID NO: 4037201 - DNA, 25 bp, Homo sapien
ctgctgctgctgcttggggcggtac

SEQ ID NO: 4037202 - DNA, 25 bp, Homo sapien
gtgccgctgccgcttttgttagcaa

SEQ ID NO: 4037203 - DNA, 25 bp, Homo sapien
ggaagtgccgctgccgcttttgtta

SEQ ID NO: 4037204 - DNA, 25 bp, Homo sapien
cgctggaagtgccgctgccgctttt

SEQ ID NO: 4037205 - DNA, 25 bp, Homo sapien
tgccgctgccgcttttgttagcaac

SEQ ID NO: 4037206 - DNA, 25 bp, Homo sapien
cgctgcagtccacttgatctgtttt

SEQ ID NO: 4037207 - DNA, 25 bp, Homo sapien
gttgtgttctgaaaggtcgctgcag

SEQ ID NO: 4037208 - DNA, 25 bp, Homo sapien
agtccacttgatctgttttgttaac

SEQ ID NO: 4037209 - DNA, 25 bp, Homo sapien
ctccatggactcttccctgtcaagt

SEQ ID NO: 4037210 - DNA, 25 bp, Homo sapien
tcttagtagggcgactcggttgacc

SEQ ID NO: 4037211 - DNA, 25 bp, Homo sapien
ttgctcttagtagggcgactcggtt

SEQ ID NO: 4037212 - DNA, 25 bp, Homo sapien
catccttgctcttagtagggcgact

SEQ ID NO: 4037213 - DNA, 25 bp, Homo sapien
ctcggcacagcaccggccacagacg

SEQ ID NO: 4037214 - DNA, 25 bp, Homo sapien
taagatccatttgtaaattaaacag

SEQ ID NO: 4037215 - DNA, 25 bp, Homo sapien
cagaaaaatctctaactccaagcta

SEQ ID NO: 4037216 - DNA, 25 bp, Homo sapien
aaatctctaactccaagctaacatc

SEQ ID NO: 4037217 - DNA, 25 bp, Homo sapien
gaaaaatctctaactccaagctaac

SEQ ID NO: 4037218 - DNA, 25 bp, Homo sapien
ctgaatcagataataggtagtttcc

SEQ ID NO: 4037219 - DNA, 25 bp, Homo sapien
gaatcagataataggtagtttccat

SEQ ID NO: 4037220 - DNA, 25 bp, Homo sapien
tgaatcagataataggtagtttcca

SEQ ID NO: 4037221 - DNA, 25 bp, Homo sapien
tccttaaggcgagatctaaactttg

SEQ ID NO: 4037222 - DNA, 25 bp, Homo sapien
catggacgaggcgttgcttttaaaa

SEQ ID NO: 4037223 - DNA, 25 bp, Homo sapien
taaaactgagctatgggaactacct

SEQ ID NO: 4037224 - DNA, 25 bp, Homo sapien
ggctttcctattgcagtgacgcgta

SEQ ID NO: 4037225 - DNA, 25 bp, Homo sapien
ggaccttgtcacctttgcatgggag

SEQ ID NO: 4037226 - DNA, 25 bp, Homo sapien
gctaagtgactagcaggattcaatt

SEQ ID NO: 4037227 - DNA, 25 bp, Homo sapien
tgaaggacatattatgatctggacc

SEQ ID NO: 4037228 - DNA, 25 bp, Homo sapien
taaaacagcttgacacatctaggtt

SEQ ID NO: 4037229 - DNA, 25 bp, Homo sapien
tacagttctcgctaaccttttgggc

SEQ ID NO: 4037230 - DNA, 25 bp, Homo sapien
taaatgaatggagtctaaatgggcc

SEQ ID NO: 4037231 - DNA, 25 bp, Homo sapien
tgtttctggcatagcagctgtacac

SEQ ID NO: 4037232 - DNA, 25 bp, Homo sapien
tgggcccagagatcaatgtgttgct

SEQ ID NO: 4037233 - DNA, 25 bp, Homo sapien
tagggagcccctaacagtttactgc

SEQ ID NO: 4037234 - DNA, 25 bp, Homo sapien
gacaatgtaccagcttttgcgaaga

SEQ ID NO: 4037235 - DNA, 25 bp, Homo sapien
gcatcatttctcctcgaaggccgag

SEQ ID NO: 4037236 - DNA, 25 bp, Homo sapien
cagttttccggtgcaaaaggtctca

SEQ ID NO: 4037237 - DNA, 25 bp, Homo sapien
cagaaactttaggaaagatgagtgt

SEQ ID NO: 4037238 - DNA, 25 bp, Homo sapien
agaaactttaggaaagatgagtgtg

SEQ ID NO: 4037239 - DNA, 25 bp, Homo sapien
gaaactttaggaaagatgagtgtga

SEQ ID NO: 4037240 - DNA, 25 bp, Homo sapien
ctgctgcggccttgggtcatctcac

SEQ ID NO: 4037241 - DNA, 25 bp, Homo sapien
gctgctgcggccttgggtcatctca

SEQ ID NO: 4037242 - DNA, 25 bp, Homo sapien
acccggaaaaatactcggcgcagct

SEQ ID NO: 4037243 - DNA, 25 bp, Homo sapien
cggaaaaatactcggcgcagctgct

SEQ ID NO: 4037244 - DNA, 25 bp, Homo sapien
catctaccccgcgtgctcgctttcg

SEQ ID NO: 4037245 - DNA, 25 bp, Homo sapien
tccatctaccccgcgtgctcgcttt

SEQ ID NO: 4037246 - DNA, 25 bp, Homo sapien
ccatctaccccgcgtgctcgctttc

SEQ ID NO: 4037247 - DNA, 25 bp, Homo sapien
ctccatctaccccgcgtgctcgctt

SEQ ID NO: 4037248 - DNA, 25 bp, Homo sapien
taaggattcaagcttgaggaaacac

SEQ ID NO: 4037249 - DNA, 25 bp, Homo sapien
gggctcttttcagcggactgagaaa

SEQ ID NO: 4037250 - DNA, 25 bp, Homo sapien
cggactgagaaatcgcagaggccgt

SEQ ID NO: 4037251 - DNA, 25 bp, Homo sapien
aggccgtgggtaaggattcaagctt

SEQ ID NO: 4037252 - DNA, 25 bp, Homo sapien
cacagttgtcgcctccatcggagaa

SEQ ID NO: 4037253 - DNA, 25 bp, Homo sapien
taaacttccttaccgctggcagcaa

SEQ ID NO: 4037254 - DNA, 25 bp, Homo sapien
gggcgcataccgaccagaaagattt

SEQ ID NO: 4037255 - DNA, 25 bp, Homo sapien
gataaattttgcgagccagaccccg

SEQ ID NO: 4037256 - DNA, 25 bp, Homo sapien
ccacttcggggtcggattggaaatg

SEQ ID NO: 4037257 - DNA, 25 bp, Homo sapien
tggaaatgttgaggcttcgcttgct

SEQ ID NO: 4037258 - DNA, 25 bp, Homo sapien
gtcggattggaaatgttgaggcttc

SEQ ID NO: 4037259 - DNA, 25 bp, Homo sapien
gaggcttcgcttgcttcctccgcga

SEQ ID NO: 4037260 - DNA, 25 bp, Homo sapien
cccggccccgggcgcagcgcgcatg

SEQ ID NO: 4037261 - DNA, 25 bp, Homo sapien
gccccgggcgcagcgcgcatgtgtc

SEQ ID NO: 4037262 - DNA, 25 bp, Homo sapien
cggccccgggcgcagcgcgcatgtg

SEQ ID NO: 4037263 - DNA, 25 bp, Homo sapien
gctccccggccccgggcgcagcgcg

SEQ ID NO: 4037264 - DNA, 25 bp, Homo sapien
gccgcgccgcccgacactgggttaa

SEQ ID NO: 4037265 - DNA, 25 bp, Homo sapien
gctggcccaataagccggccgcggg

SEQ ID NO: 4037266 - DNA, 25 bp, Homo sapien
ttagttcgtgatttgctgcagaccc

SEQ ID NO: 4037267 - DNA, 25 bp, Homo sapien
tctctccgcgcgctggcccaataag

SEQ ID NO: 4037268 - DNA, 25 bp, Homo sapien
ggtacgcggctcagcctagctcttt

SEQ ID NO: 4037269 - DNA, 25 bp, Homo sapien
cgaacctgagactcggtacgcggct

SEQ ID NO: 4037270 - DNA, 25 bp, Homo sapien
gcccgatccctctgccgggctcagg

SEQ ID NO: 4037271 - DNA, 25 bp, Homo sapien
aggcgcccgcgaacctgagactcgg

SEQ ID NO: 4037272 - DNA, 25 bp, Homo sapien
tcccgttctcgccaggtcctgatgg

SEQ ID NO: 4037273 - DNA, 25 bp, Homo sapien
ctctccctgctcgtccgttttccac

SEQ ID NO: 4037274 - DNA, 25 bp, Homo sapien
tcctgatgggtacagtagattttga

SEQ ID NO: 4037275 - DNA, 25 bp, Homo sapien
tacttatcttctgccctcgctcact

SEQ ID NO: 4037276 - DNA, 25 bp, Homo sapien
tacgggagcacgtgtaaatcccgca

SEQ ID NO: 4037277 - DNA, 25 bp, Homo sapien
aaagatggatctgcgcactcctggg

SEQ ID NO: 4037278 - DNA, 25 bp, Homo sapien
taaagagatccctcggcaaagatgg

SEQ ID NO: 4037279 - DNA, 25 bp, Homo sapien
tccataggtggtgcttcaaatgcca

SEQ ID NO: 4037280 - DNA, 25 bp, Homo sapien
tctggcctgaggaatggtcgtgctc

SEQ ID NO: 4037281 - DNA, 25 bp, Homo sapien
tgctcgcaggcacctctgtcaagta

SEQ ID NO: 4037282 - DNA, 25 bp, Homo sapien
aagtatcctattgatctgtgcttcc

SEQ ID NO: 4037283 - DNA, 25 bp, Homo sapien
ctgtcaagtatcctattgatctgtg

SEQ ID NO: 4037284 - DNA, 25 bp, Homo sapien
acagagctgggcgaatgggcatggc

SEQ ID NO: 4037285 - DNA, 25 bp, Homo sapien
gaatgggcatggcatagtccatgcc

SEQ ID NO: 4037286 - DNA, 25 bp, Homo sapien
ggcatggcatagtccatgcccttat

SEQ ID NO: 4037287 - DNA, 25 bp, Homo sapien
tgaacagagctgggcgaatgggcat

SEQ ID NO: 4037288 - DNA, 25 bp, Homo sapien
agatgtgtgctcaactcagggcctt

SEQ ID NO: 4037289 - DNA, 25 bp, Homo sapien
agagatgtgtgctcaactcagggcc

SEQ ID NO: 4037290 - DNA, 25 bp, Homo sapien
gagatgtgtgctcaactcagggcct

SEQ ID NO: 4037291 - DNA, 25 bp, Homo sapien
cgtgggcttgcatcttaaggactga

SEQ ID NO: 4037292 - DNA, 25 bp, Homo sapien
actgaatgcggctgagtcctctgga

SEQ ID NO: 4037293 - DNA, 25 bp, Homo sapien
aactgtcacataaactgtcaacagg

SEQ ID NO: 4037294 - DNA, 25 bp, Homo sapien
gatgccagcaccgtggagatgcaac

SEQ ID NO: 4037295 - DNA, 25 bp, Homo sapien
tcagagtggctggagtgctccccag

SEQ ID NO: 4037296 - DNA, 25 bp, Homo sapien
agagtggctggagtgctccccagca

SEQ ID NO: 4037297 - DNA, 25 bp, Homo sapien
tgtcagagtggctggagtgctcccc

SEQ ID NO: 4037298 - DNA, 25 bp, Homo sapien
gtcagagtggctggagtgctcccca

SEQ ID NO: 4037299 - DNA, 25 bp, Homo sapien
gcctggaaaaatggtgagttgagct

SEQ ID NO: 4037300 - DNA, 25 bp, Homo sapien
tgctggaacccagcctggaaaaatg

SEQ ID NO: 4037301 - DNA, 25 bp, Homo sapien
tcacatcttccctgctggaacccag

SEQ ID NO: 4037302 - DNA, 25 bp, Homo sapien
ggaaaaatggtgagttgagctcccc

SEQ ID NO: 4037303 - DNA, 25 bp, Homo sapien
agcaagttcaactgcttcatcagag

SEQ ID NO: 4037304 - DNA, 25 bp, Homo sapien
gcaagttcaactgcttcatcagaga

SEQ ID NO: 4037305 - DNA, 25 bp, Homo sapien
gcagcagctctctccggattagcgc

SEQ ID NO: 4037306 - DNA, 25 bp, Homo sapien
cctgagaaacgcaggctgtgatgga

SEQ ID NO: 4037307 - DNA, 25 bp, Homo sapien
gaaggtgccccagctaacatgagga

SEQ ID NO: 4037308 - DNA, 25 bp, Homo sapien
gattagcgctgggagtgctttgcct

SEQ ID NO: 4037309 - DNA, 25 bp, Homo sapien
ctaacaccaggagaatcaataaact

SEQ ID NO: 4037310 - DNA, 25 bp, Homo sapien
caccaggagaatcaataaactataa

SEQ ID NO: 4037311 - DNA, 25 bp, Homo sapien
ccaggagaatcaataaactataatt

SEQ ID NO: 4037312 - DNA, 25 bp, Homo sapien
aacaccaggagaatcaataaactat

SEQ ID NO: 4037313 - DNA, 25 bp, Homo sapien
tcgaagagtgcagcttgctgggaac

SEQ ID NO: 4037314 - DNA, 25 bp, Homo sapien
gggcagaggtttcagcatcccgcct

SEQ ID NO: 4037315 - DNA, 25 bp, Homo sapien
tcagcatcccgccttcgaagagtgc

SEQ ID NO: 4037316 - DNA, 25 bp, Homo sapien
gcctccgagtcacatttggatataa

SEQ ID NO: 4037317 - DNA, 25 bp, Homo sapien
cagggatgccccgttgatggagcta

SEQ ID NO: 4037318 - DNA, 25 bp, Homo sapien
gcagggatgccccgttgatggagct

SEQ ID NO: 4037319 - DNA, 25 bp, Homo sapien
ggatgccccgttgatggagctacaa

SEQ ID NO: 4037320 - DNA, 25 bp, Homo sapien
gggatgccccgttgatggagctaca

SEQ ID NO: 4037321 - DNA, 25 bp, Homo sapien
agtggtatcctctgatgggcctgta

SEQ ID NO: 4037322 - DNA, 25 bp, Homo sapien
gggcctgtactcttcaccaaatgtg

SEQ ID NO: 4037323 - DNA, 25 bp, Homo sapien
gatgggcctgtactcttcaccaaat

SEQ ID NO: 4037324 - DNA, 25 bp, Homo sapien
gtatcctctgatgggcctgtactct

SEQ ID NO: 4037325 - DNA, 25 bp, Homo sapien
gacagaatcaccattcttggcccca

SEQ ID NO: 4037326 - DNA, 25 bp, Homo sapien
aagaggtgtgggtcattcaaggaca

SEQ ID NO: 4037327 - DNA, 25 bp, Homo sapien
caaggacagaatcaccattcttggc

SEQ ID NO: 4037328 - DNA, 25 bp, Homo sapien
cttcaggacaccaaagaggtgtggg

SEQ ID NO: 4037329 - DNA, 25 bp, Homo sapien
tggcctggatgcaggcctttttggt

SEQ ID NO: 4037330 - DNA, 25 bp, Homo sapien
tccaccatctacacctggtattgga

SEQ ID NO: 4037331 - DNA, 25 bp, Homo sapien
tttggttccaccatctacacctggt

SEQ ID NO: 4037332 - DNA, 25 bp, Homo sapien
ccaagaattggcctggatgcaggcc

SEQ ID NO: 4037333 - DNA, 25 bp, Homo sapien
gctgtatgcagctgtatcatgggct

SEQ ID NO: 4037334 - DNA, 25 bp, Homo sapien
gcagctgtatcatgggctggaccac

SEQ ID NO: 4037335 - DNA, 25 bp, Homo sapien
gcttacaggcattgctgtatgcagc

SEQ ID NO: 4037336 - DNA, 25 bp, Homo sapien
ttacgatgcttgctgcttacaggca

SEQ ID NO: 4037337 - DNA, 25 bp, Homo sapien
gcttcaacttccagccaaactgtca

SEQ ID NO: 4037338 - DNA, 25 bp, Homo sapien
tgttgccaggagttctggggttcca

SEQ ID NO: 4037339 - DNA, 25 bp, Homo sapien
ggttgtctccgacagctatttcttt

SEQ ID NO: 4037340 - DNA, 25 bp, Homo sapien
gtgtggtcacactgttggttgtctc

SEQ ID NO: 4037341 - DNA, 25 bp, Homo sapien
gttgaggaccatgtcccattatcct

SEQ ID NO: 4037342 - DNA, 25 bp, Homo sapien
ttagcttcttttcagccgtgactcc

SEQ ID NO: 4037343 - DNA, 25 bp, Homo sapien
gactcctacttgaagacaagcatcc

SEQ ID NO: 4037344 - DNA, 25 bp, Homo sapien
agtgtgaggaccacgttgaggacca

SEQ ID NO: 4037345 - DNA, 25 bp, Homo sapien
cttccctgtgtagttcccagcccca

SEQ ID NO: 4037346 - DNA, 25 bp, Homo sapien
aatatcttctccagatagagcagcc

SEQ ID NO: 4037347 - DNA, 25 bp, Homo sapien
agccccaggaggtcagtatgtttta

SEQ ID NO: 4037348 - DNA, 25 bp, Homo sapien
tccccttccctgtgtagttcccagc

SEQ ID NO: 4037349 - DNA, 25 bp, Homo sapien
caagggctgtagcagctgcccaacc

SEQ ID NO: 4037350 - DNA, 25 bp, Homo sapien
tggactagaatgataacagtgattg

SEQ ID NO: 4037351 - DNA, 25 bp, Homo sapien
tgataacagtgattgtaatactcat

SEQ ID NO: 4037352 - DNA, 25 bp, Homo sapien
gaatgataacagtgattgtaatact

SEQ ID NO: 4037353 - DNA, 25 bp, Homo sapien
acacaactggactagaatgataaca

SEQ ID NO: 4037354 - DNA, 25 bp, Homo sapien
gggtatcagtgaaactcaccaaacc

SEQ ID NO: 4037355 - DNA, 25 bp, Homo sapien
tcagtgaaactcaccaaaccgttta

SEQ ID NO: 4037356 - DNA, 25 bp, Homo sapien
tctttaaattcctgatgggtatcag

SEQ ID NO: 4037357 - DNA, 25 bp, Homo sapien
taaattcctgatgggtatcagtgaa

SEQ ID NO: 4037358 - DNA, 25 bp, Homo sapien
ttacatcctgattcccatcaaagct

SEQ ID NO: 4037359 - DNA, 25 bp, Homo sapien
catcctgattcccatcaaagcttcc

SEQ ID NO: 4037360 - DNA, 25 bp, Homo sapien
cagggtctgctccactgaggtgaca

SEQ ID NO: 4037361 - DNA, 25 bp, Homo sapien
tctcctctgcatcttgcttgctgtg

SEQ ID NO: 4037362 - DNA, 25 bp, Homo sapien
ggaactcgaaatcagccaagaagcc

SEQ ID NO: 4037363 - DNA, 25 bp, Homo sapien
gaactcgaaatcagccaagaagcca

SEQ ID NO: 4037364 - DNA, 25 bp, Homo sapien
aactcgaaatcagccaagaagccag

SEQ ID NO: 4037365 - DNA, 25 bp, Homo sapien
gaggaagggaattggaatcttggaa

SEQ ID NO: 4037366 - DNA, 25 bp, Homo sapien
tccaactggtcagggatgcgccaat

SEQ ID NO: 4037367 - DNA, 25 bp, Homo sapien
gtctccaactggtcagggatgcgcc

SEQ ID NO: 4037368 - DNA, 25 bp, Homo sapien
ctggtcagggatgcgccaatgcact

SEQ ID NO: 4037369 - DNA, 25 bp, Homo sapien
agttgtccagacatttactgcattg

SEQ ID NO: 4037370 - DNA, 25 bp, Homo sapien
tgttcatggctatagttgtccagac

SEQ ID NO: 4037371 - DNA, 25 bp, Homo sapien
tacatgaacacctcatgttcatggc

SEQ ID NO: 4037372 - DNA, 25 bp, Homo sapien
cagaagcaacgggagcactggaagc

SEQ ID NO: 4037373 - DNA, 25 bp, Homo sapien
gttggagaggtgcacctttttggta

SEQ ID NO: 4037374 - DNA, 25 bp, Homo sapien
ttatggttaaatgttggagaggtgc

SEQ ID NO: 4037375 - DNA, 25 bp, Homo sapien
cagtaataaggtgttggggtgattt

SEQ ID NO: 4037376 - DNA, 25 bp, Homo sapien
tcagtaataaggtgttggggtgatt

SEQ ID NO: 4037377 - DNA, 25 bp, Homo sapien
tggtgggttagactttcagtaataa

SEQ ID NO: 4037378 - DNA, 25 bp, Homo sapien
gcctggtgggttagactttcagtaa

SEQ ID NO: 4037379 - DNA, 25 bp, Homo sapien
ctgctccttgataaagctaacaaaa

SEQ ID NO: 4037380 - DNA, 25 bp, Homo sapien
aaacagcggaccttattgatgtagc

SEQ ID NO: 4037381 - DNA, 25 bp, Homo sapien
ccttattgatgtagctgtttcctgc

SEQ ID NO: 4037382 - DNA, 25 bp, Homo sapien
agctaacaaaacagcggaccttatt

SEQ ID NO: 4037383 - DNA, 25 bp, Homo sapien
ctgtccagacaaaacaaacaagtat

SEQ ID NO: 4037384 - DNA, 25 bp, Homo sapien
tgtccagacaaaacaaacaagtatg

SEQ ID NO: 4037385 - DNA, 25 bp, Homo sapien
agacaaaacaaacaagtatgcagcc

SEQ ID NO: 4037386 - DNA, 25 bp, Homo sapien
tccagacaaaacaaacaagtatgca

SEQ ID NO: 4037387 - DNA, 25 bp, Homo sapien
gttctgatgttctgaggtttctcct

SEQ ID NO: 4037388 - DNA, 25 bp, Homo sapien
cattcacagctctagttctgatgtt

SEQ ID NO: 4037389 - DNA, 25 bp, Homo sapien
cagtggggctccatgccacacctgt

SEQ ID NO: 4037390 - DNA, 25 bp, Homo sapien
agtggggctccatgccacacctgtg

SEQ ID NO: 4037391 - DNA, 25 bp, Homo sapien
gtggcatcttgactctccctattta

SEQ ID NO: 4037392 - DNA, 25 bp, Homo sapien
cctgtgttttgctgcatcgcttcct

SEQ ID NO: 4037393 - DNA, 25 bp, Homo sapien
tgtggattccaagctcggagcttct

SEQ ID NO: 4037394 - DNA, 25 bp, Homo sapien
cctatttataggatgtttacctgga

SEQ ID NO: 4037395 - DNA, 25 bp, Homo sapien
gaagcaggtactggatccaaggcaa

SEQ ID NO: 4037396 - DNA, 25 bp, Homo sapien
tgtcttgtgcatggctcttcagagc

SEQ ID NO: 4037397 - DNA, 25 bp, Homo sapien
tcagagcacagcattggcttgcggc

SEQ ID NO: 4037398 - DNA, 25 bp, Homo sapien
ggatactctacccactaggtctgtg

SEQ ID NO: 4037399 - DNA, 25 bp, Homo sapien
gacaatcgtagttttggactcggga

SEQ ID NO: 4037400 - DNA, 25 bp, Homo sapien
caggctctagagctccaaaggagtc

SEQ ID NO: 4037401 - DNA, 25 bp, Homo sapien
tcagcatcctgacaatcgtagtttt

SEQ ID NO: 4037402 - DNA, 25 bp, Homo sapien
gactcgggatttaaaccagaacatc

SEQ ID NO: 4037403 - DNA, 25 bp, Homo sapien
tcacgtgcgatttttgacatactcc

SEQ ID NO: 4037404 - DNA, 25 bp, Homo sapien
gcgatttttgacatactcccacttt

SEQ ID NO: 4037405 - DNA, 25 bp, Homo sapien
ttcccttcacatagtctgtaactat

SEQ ID NO: 4037406 - DNA, 25 bp, Homo sapien
ctgtaactatgcttaaggcggaggt

SEQ ID NO: 4037407 - DNA, 25 bp, Homo sapien
cttctgtgaaggtcttagcttccag

SEQ ID NO: 4037408 - DNA, 25 bp, Homo sapien
gaatatctgaactgggcatcctcat

SEQ ID NO: 4037409 - DNA, 25 bp, Homo sapien
aggagaatatctgaactgggcatcc

SEQ ID NO: 4037410 - DNA, 25 bp, Homo sapien
aggtcttagcttccagggagagaag

SEQ ID NO: 4037411 - DNA, 25 bp, Homo sapien
taattatggctctataccgcaactg

SEQ ID NO: 4037412 - DNA, 25 bp, Homo sapien
ttatgctgagccaagaggacacacg

SEQ ID NO: 4037413 - DNA, 25 bp, Homo sapien
gtgaagctgaggcaagtccccaaag

SEQ ID NO: 4037414 - DNA, 25 bp, Homo sapien
ggaagcacagacatcaatagtaggt

SEQ ID NO: 4037415 - DNA, 25 bp, Homo sapien
cctttgaaaggtgcccttgtgtctc

SEQ ID NO: 4037416 - DNA, 25 bp, Homo sapien
tgtctcctttgcaacctacagaact

SEQ ID NO: 4037417 - DNA, 25 bp, Homo sapien
taagcacatctccttaacgttagag

SEQ ID NO: 4037418 - DNA, 25 bp, Homo sapien
ctttgcccaggcaaggtatggagtg

SEQ ID NO: 4037419 - DNA, 25 bp, Homo sapien
taaaggatacagtgatgtcgctggc

SEQ ID NO: 4037420 - DNA, 25 bp, Homo sapien
gggctttgatatgttattattccgc

SEQ ID NO: 4037421 - DNA, 25 bp, Homo sapien
tgtaccaggcagatgaggtaggttg

SEQ ID NO: 4037422 - DNA, 25 bp, Homo sapien
tttatttatgccttggctgtaccag

SEQ ID NO: 4037423 - DNA, 25 bp, Homo sapien
acaaggtgttagatatttattcctt

SEQ ID NO: 4037424 - DNA, 25 bp, Homo sapien
cagtggcttttgaaccgcaaaaggg

SEQ ID NO: 4037425 - DNA, 25 bp, Homo sapien
acagtggcttttgaaccgcaaaagg

SEQ ID NO: 4037426 - DNA, 25 bp, Homo sapien
ggtactgtccaagatccagcaaaca

SEQ ID NO: 4037427 - DNA, 25 bp, Homo sapien
ctagccggataatcttgccgaatgc

SEQ ID NO: 4037428 - DNA, 25 bp, Homo sapien
catgtcacgcagaggccaacgattt

SEQ ID NO: 4037429 - DNA, 25 bp, Homo sapien
aatgcttttcgccagggtactgtcc

SEQ ID NO: 4037430 - DNA, 25 bp, Homo sapien
gtagatggcaaagtgaggaattgcc

SEQ ID NO: 4037431 - DNA, 25 bp, Homo sapien
ctgaccctgtgactgaaaaatcaac

SEQ ID NO: 4037432 - DNA, 25 bp, Homo sapien
tgaccctgtgactgaaaaatcaacc

SEQ ID NO: 4037433 - DNA, 25 bp, Homo sapien
tttttgtagagttgcgtgtggtgta

SEQ ID NO: 4037434 - DNA, 25 bp, Homo sapien
tgacaccgtacttaacttccaccat

SEQ ID NO: 4037435 - DNA, 25 bp, Homo sapien
acaatgtgatagttgacaccgtact

SEQ ID NO: 4037436 - DNA, 25 bp, Homo sapien
tagttgacaccgtacttaacttcca

SEQ ID NO: 4037437 - DNA, 25 bp, Homo sapien
tgtgatagttgacaccgtacttaac

SEQ ID NO: 4037438 - DNA, 25 bp, Homo sapien
ctgcctgtctctattactcatagcc

SEQ ID NO: 4037439 - DNA, 25 bp, Homo sapien
ctctattactcatagccagcaggaa

SEQ ID NO: 4037440 - DNA, 25 bp, Homo sapien
tgtctctattactcatagccagcag

SEQ ID NO: 4037441 - DNA, 25 bp, Homo sapien
ctattactcatagccagcaggaaac

SEQ ID NO: 4037442 - DNA, 25 bp, Homo sapien
gctgcacgtatgagatatgcaagac

SEQ ID NO: 4037443 - DNA, 25 bp, Homo sapien
cccactttgctgcacgtatgagata

SEQ ID NO: 4037444 - DNA, 25 bp, Homo sapien
tgcaagacccccgacagctctgaga

SEQ ID NO: 4037445 - DNA, 25 bp, Homo sapien
agaccactgcggtggctgggcacaa

SEQ ID NO: 4037446 - DNA, 25 bp, Homo sapien
tttttgtgatttctgggagtgtggc

SEQ ID NO: 4037447 - DNA, 25 bp, Homo sapien
tccaggtctgctgcatttgactctt

SEQ ID NO: 4037448 - DNA, 25 bp, Homo sapien
ttccaggtctgctgcatttgactct

SEQ ID NO: 4037449 - DNA, 25 bp, Homo sapien
tggagcgagaaggtctcctgaggaa

SEQ ID NO: 4037450 - DNA, 25 bp, Homo sapien
gttaggaggagacgaagttccacaa

SEQ ID NO: 4037451 - DNA, 25 bp, Homo sapien
gagtttggagcaggactttccagga

SEQ ID NO: 4037452 - DNA, 25 bp, Homo sapien
cctgaggaagcatttgttgtgagcc

SEQ ID NO: 4037453 - DNA, 25 bp, Homo sapien
ctcattgtcacgtttcctgaggcag

SEQ ID NO: 4037454 - DNA, 25 bp, Homo sapien
cattgtcacgtttcctgaggcagct

SEQ ID NO: 4037455 - DNA, 25 bp, Homo sapien
gctcctcattgtcacgtttcctgag

SEQ ID NO: 4037456 - DNA, 25 bp, Homo sapien
tcctcattgtcacgtttcctgaggc

SEQ ID NO: 4037457 - DNA, 25 bp, Homo sapien
taaacatacactcaggaagggctgc

SEQ ID NO: 4037458 - DNA, 25 bp, Homo sapien
caactggccctgtttctgtttgtaa

SEQ ID NO: 4037459 - DNA, 25 bp, Homo sapien
tctaggataggaactcggaccgctt

SEQ ID NO: 4037460 - DNA, 25 bp, Homo sapien
ggaccgcttcaaaagctccggttgc

SEQ ID NO: 4037461 - DNA, 25 bp, Homo sapien
tcccgcttgatggaaaggcaataca

SEQ ID NO: 4037462 - DNA, 25 bp, Homo sapien
tcctctgttcattaaagcgggtaag

SEQ ID NO: 4037463 - DNA, 25 bp, Homo sapien
tctgaatccccataaaagataaggt

SEQ ID NO: 4037464 - DNA, 25 bp, Homo sapien
aagcaagtgaagtgattcggtcctc

SEQ ID NO: 4037465 - DNA, 25 bp, Homo sapien
ccctcatttggatgcacagtgaaca

SEQ ID NO: 4037466 - DNA, 25 bp, Homo sapien
tatttctgcgtgacaagccctcatt

SEQ ID NO: 4037467 - DNA, 25 bp, Homo sapien
gggtatccttagtcaactgccaagg

SEQ ID NO: 4037468 - DNA, 25 bp, Homo sapien
tgaactatgtctaccgtgaagtggg

SEQ ID NO: 4037469 - DNA, 25 bp, Homo sapien
tgaaatgaacgggtaacatgatgcg

SEQ ID NO: 4037470 - DNA, 25 bp, Homo sapien
taacatgatgcggtttggcaagact

SEQ ID NO: 4037471 - DNA, 25 bp, Homo sapien
tggccctgaaatgaacgggtaacat

SEQ ID NO: 4037472 - DNA, 25 bp, Homo sapien
ggcaagacttgcctgggtgccagtc

SEQ ID NO: 4037473 - DNA, 25 bp, Homo sapien
tcatccccagggaacctgtcagtgt

SEQ ID NO: 4037474 - DNA, 25 bp, Homo sapien
gctgtggtaaacaccgtcctcatcc

SEQ ID NO: 4037475 - DNA, 25 bp, Homo sapien
tcacacattctatcaggcacttaag

SEQ ID NO: 4037476 - DNA, 25 bp, Homo sapien
aaaagcatcttttgattgattcatc

SEQ ID NO: 4037477 - DNA, 25 bp, Homo sapien
caagtccattacttccatcattttc

SEQ ID NO: 4037478 - DNA, 25 bp, Homo sapien
acaagtccattacttccatcatttt

SEQ ID NO: 4037479 - DNA, 25 bp, Homo sapien
tacaagtccattacttccatcattt

SEQ ID NO: 4037480 - DNA, 25 bp, Homo sapien
taagatgcaggttgggagctatttc

SEQ ID NO: 4037481 - DNA, 25 bp, Homo sapien
ggttttcccgctgagagcttgagag

SEQ ID NO: 4037482 - DNA, 25 bp, Homo sapien
acagggctccaaggttttcccgctg

SEQ ID NO: 4037483 - DNA, 25 bp, Homo sapien
gcctaagatgcaggttgggagctat

SEQ ID NO: 4037484 - DNA, 25 bp, Homo sapien
tctttctgttaccttgagtctaacc

SEQ ID NO: 4037485 - DNA, 25 bp, Homo sapien
ggaaaatccacccaagaccttctca

SEQ ID NO: 4037486 - DNA, 25 bp, Homo sapien
cctcatgaggtctaactcttctgga

SEQ ID NO: 4037487 - DNA, 25 bp, Homo sapien
caagaccttctcaactgtggcacaa

SEQ ID NO: 4037488 - DNA, 25 bp, Homo sapien
tatctggactgtgctcaggagtgtc

SEQ ID NO: 4037489 - DNA, 25 bp, Homo sapien
gaatctgaaatccatatctggactg

SEQ ID NO: 4037490 - DNA, 25 bp, Homo sapien
agggatgaaccctgtcaacctgaat

SEQ ID NO: 4037491 - DNA, 25 bp, Homo sapien
cagctgggctaactgaatctggtgt

SEQ ID NO: 4037492 - DNA, 25 bp, Homo sapien
tatcttcatctagattcaccagttg

SEQ ID NO: 4037493 - DNA, 25 bp, Homo sapien
cacagtaaggttgaaaacgtaatat

SEQ ID NO: 4037494 - DNA, 25 bp, Homo sapien
ggcatcatgatatgtccctcccatt

SEQ ID NO: 4037495 - DNA, 25 bp, Homo sapien
aaactacatctcttctatacataca

SEQ ID NO: 4037496 - DNA, 25 bp, Homo sapien
cctagagtcttgctgggtgtgcatc

SEQ ID NO: 4037497 - DNA, 25 bp, Homo sapien
tgttaaaatgggagcaattccaggg

SEQ ID NO: 4037498 - DNA, 25 bp, Homo sapien
aatttgtgatagttttggtgagtcc

SEQ ID NO: 4037499 - DNA, 25 bp, Homo sapien
agtgaagtgagggacaaatttgtga

SEQ ID NO: 4037500 - DNA, 25 bp, Homo sapien
ggtcctgtcccaagggtagctgttc

SEQ ID NO: 4037501 - DNA, 25 bp, Homo sapien
gtcctgtcccaagggtagctgttct

SEQ ID NO: 4037502 - DNA, 25 bp, Homo sapien
agtctttctggggatcccagcattt

SEQ ID NO: 4037503 - DNA, 25 bp, Homo sapien
tctggggatcccagcatttcagtgg

SEQ ID NO: 4037504 - DNA, 25 bp, Homo sapien
tcagctgacgttggaaacaattatc

SEQ ID NO: 4037505 - DNA, 25 bp, Homo sapien
tgaatcttagtgcttctggaaggaa

SEQ ID NO: 4037506 - DNA, 25 bp, Homo sapien
gctatgatggttaattcatatacca

SEQ ID NO: 4037507 - DNA, 25 bp, Homo sapien
tcaaatattacttgtcactgctgag

SEQ ID NO: 4037508 - DNA, 25 bp, Homo sapien
cagtttgacaagttgaggtccagga

SEQ ID NO: 4037509 - DNA, 25 bp, Homo sapien
aatcacagtttgacaagttgaggtc

SEQ ID NO: 4037510 - DNA, 25 bp, Homo sapien
cacagtttgacaagttgaggtccag

SEQ ID NO: 4037511 - DNA, 25 bp, Homo sapien
tttgacaagttgaggtccaggaaaa

SEQ ID NO: 4037512 - DNA, 25 bp, Homo sapien
tgtggcttcacccttgggtgccacc

SEQ ID NO: 4037513 - DNA, 25 bp, Homo sapien
ctctgtggcttcacccttgggtgcc

SEQ ID NO: 4037514 - DNA, 25 bp, Homo sapien
tctgtggcttcacccttgggtgcca

SEQ ID NO: 4037515 - DNA, 25 bp, Homo sapien
gtggcttcacccttgggtgccaccc

SEQ ID NO: 4037516 - DNA, 25 bp, Homo sapien
tttatatgcagctgaaccgtatcta

SEQ ID NO: 4037517 - DNA, 25 bp, Homo sapien
gcagtgttgggcaggtactgtacaa

SEQ ID NO: 4037518 - DNA, 25 bp, Homo sapien
gtacttcgattatttttagtggaca

SEQ ID NO: 4037519 - DNA, 25 bp, Homo sapien
agttctttattactgtacttcgatt

SEQ ID NO: 4037520 - DNA, 25 bp, Homo sapien
cacttaggtgggacacttggagaaa

SEQ ID NO: 4037521 - DNA, 25 bp, Homo sapien
caattgggcttatttactgagcttc

SEQ ID NO: 4037522 - DNA, 25 bp, Homo sapien
gccactgaacaattaactaatcatg

SEQ ID NO: 4037523 - DNA, 25 bp, Homo sapien
ctaatcatgtatccacttccaattg

SEQ ID NO: 4037524 - DNA, 25 bp, Homo sapien
gggtacttgccgaagtaacagactg

SEQ ID NO: 4037525 - DNA, 25 bp, Homo sapien
ggtttctggcactctgtttgcatat

SEQ ID NO: 4037526 - DNA, 25 bp, Homo sapien
taacagactgtaggtgtgagtaggt

SEQ ID NO: 4037527 - DNA, 25 bp, Homo sapien
catatccatggtatggcagtgtccg

SEQ ID NO: 4037528 - DNA, 25 bp, Homo sapien
ccccatgtgcatagaaagacttgta

SEQ ID NO: 4037529 - DNA, 25 bp, Homo sapien
gctgtttatctctaagcatgccttc

SEQ ID NO: 4037530 - DNA, 25 bp, Homo sapien
tcagcaacttctccccgtgattcaa

SEQ ID NO: 4037531 - DNA, 25 bp, Homo sapien
tgtatctctcgcatcctcagcaact

SEQ ID NO: 4037532 - DNA, 25 bp, Homo sapien
taattgcaaataccagaacccatgt

SEQ ID NO: 4037533 - DNA, 25 bp, Homo sapien
tctgtctcgtgaggtgagtgatccc

SEQ ID NO: 4037534 - DNA, 25 bp, Homo sapien
gatccagcgtcttgtcataatcaca

SEQ ID NO: 4037535 - DNA, 25 bp, Homo sapien
gagtgatcccacgtgcattctaatg

SEQ ID NO: 4037536 - DNA, 25 bp, Homo sapien
cgaatacgatgactgggtcttgatt

SEQ ID NO: 4037537 - DNA, 25 bp, Homo sapien
gtcttgattcaaaggcactgtttgg

SEQ ID NO: 4037538 - DNA, 25 bp, Homo sapien
tttttcttcgaatacgatgactggg

SEQ ID NO: 4037539 - DNA, 25 bp, Homo sapien
ggtcttgattcaaaggcactgtttg

SEQ ID NO: 4037540 - DNA, 25 bp, Homo sapien
cgggtaccagccaccccctcaccat

SEQ ID NO: 4037541 - DNA, 25 bp, Homo sapien
tgtaacagctgtcaactttgagata

SEQ ID NO: 4037542 - DNA, 25 bp, Homo sapien
ctttgagatatctatattcttccca

SEQ ID NO: 4037543 - DNA, 25 bp, Homo sapien
ctactggctagatgtaacagctgtc

SEQ ID NO: 4037544 - DNA, 25 bp, Homo sapien
cagctgtcaactttgagatatctat

SEQ ID NO: 4037545 - DNA, 25 bp, Homo sapien
tggcatcctcttgcgagccagcctt

SEQ ID NO: 4037546 - DNA, 25 bp, Homo sapien
agccagcctttttctccggagaatc

SEQ ID NO: 4037547 - DNA, 25 bp, Homo sapien
cctttttctccggagaatctgatga

SEQ ID NO: 4037548 - DNA, 25 bp, Homo sapien
catcctcttgcgagccagccttttt

SEQ ID NO: 4037549 - DNA, 25 bp, Homo sapien
taaacagcactggcgtctgaaattt

SEQ ID NO: 4037550 - DNA, 25 bp, Homo sapien
aaacagcactggcgtctgaaatttc

SEQ ID NO: 4037551 - DNA, 25 bp, Homo sapien
ctaaacagcactggcgtctgaaatt

SEQ ID NO: 4037552 - DNA, 25 bp, Homo sapien
actgctaatgcctgcaatctttcca

SEQ ID NO: 4037553 - DNA, 25 bp, Homo sapien
cattcctccactgataagacggtga

SEQ ID NO: 4037554 - DNA, 25 bp, Homo sapien
gtttaaagataaccatttgctatgg

SEQ ID NO: 4037555 - DNA, 25 bp, Homo sapien
aatcccaaatgcctacactgctaat

SEQ ID NO: 4037556 - DNA, 25 bp, Homo sapien
taaagtccaactcccttatgtggca

SEQ ID NO: 4037557 - DNA, 25 bp, Homo sapien
tgggataaagtccaactcccttatg

SEQ ID NO: 4037558 - DNA, 25 bp, Homo sapien
cactgtctatgggataaagtccaac

SEQ ID NO: 4037559 - DNA, 25 bp, Homo sapien
ggctccccactgtctatgggataaa

SEQ ID NO: 4037560 - DNA, 25 bp, Homo sapien
tattggacaccgcttgtggcaaccc

SEQ ID NO: 4037561 - DNA, 25 bp, Homo sapien
ggcaacccgtcacattctcttgggc

SEQ ID NO: 4037562 - DNA, 25 bp, Homo sapien
aatgcattgcggtgttgtgcctagc

SEQ ID NO: 4037563 - DNA, 25 bp, Homo sapien
ccagcacgctgggtatgggctgcac

SEQ ID NO: 4037564 - DNA, 25 bp, Homo sapien
cacatcccttgtttgtagataatga

SEQ ID NO: 4037565 - DNA, 25 bp, Homo sapien
ccattgccaataggctggagccctg

SEQ ID NO: 4037566 - DNA, 25 bp, Homo sapien
taatgaagccactaggccagggata

SEQ ID NO: 4037567 - DNA, 25 bp, Homo sapien
gagtaccacctcatgagccattgcc

SEQ ID NO: 4037568 - DNA, 25 bp, Homo sapien
tccgtaggggtcttgcctgcttcaa

SEQ ID NO: 4037569 - DNA, 25 bp, Homo sapien
tctgaagttgaattgcaaaggtctc

SEQ ID NO: 4037570 - DNA, 25 bp, Homo sapien
gctaactgataacccctctgaagaa

SEQ ID NO: 4037571 - DNA, 25 bp, Homo sapien
caataaaagcgtcttctagttttgt

SEQ ID NO: 4037572 - DNA, 25 bp, Homo sapien
cagatgggagttgcacaagaactgg

SEQ ID NO: 4037573 - DNA, 25 bp, Homo sapien
tggggtatctgtaactaatgcacct

SEQ ID NO: 4037574 - DNA, 25 bp, Homo sapien
ggggtatctgtaactaatgcacctt

SEQ ID NO: 4037575 - DNA, 25 bp, Homo sapien
tgcacaagaactggggtatctgtaa

SEQ ID NO: 4037576 - DNA, 25 bp, Homo sapien
cataggcagatttagcaaggatttc

SEQ ID NO: 4037577 - DNA, 25 bp, Homo sapien
gataggaaactaccagggtgccatg

SEQ ID NO: 4037578 - DNA, 25 bp, Homo sapien
ccatatcgccaccaagagatgcttg

SEQ ID NO: 4037579 - DNA, 25 bp, Homo sapien
gcccgtgtacggtttatgattctga

SEQ ID NO: 4037580 - DNA, 25 bp, Homo sapien
caatgaccaaataggggcaaaagag

SEQ ID NO: 4037581 - DNA, 25 bp, Homo sapien
ccaaataggggcaaaagagaatcat

SEQ ID NO: 4037582 - DNA, 25 bp, Homo sapien
accaaataggggcaaaagagaatca

SEQ ID NO: 4037583 - DNA, 25 bp, Homo sapien
aacatcaatgaccaaataggggcaa

SEQ ID NO: 4037584 - DNA, 25 bp, Homo sapien
aatgaacttcactacttttctcaga

SEQ ID NO: 4037585 - DNA, 25 bp, Homo sapien
aagtccagaagttatagatgcaata

SEQ ID NO: 4037586 - DNA, 25 bp, Homo sapien
gaagttatagatgcaataacccttt

SEQ ID NO: 4037587 - DNA, 25 bp, Homo sapien
tctaatcaatgagcaccaagtccag

SEQ ID NO: 4037588 - DNA, 25 bp, Homo sapien
tcttcttcttcatagcaagcctgtg

SEQ ID NO: 4037589 - DNA, 25 bp, Homo sapien
ccagttgatttatgggccacacaca

SEQ ID NO: 4037590 - DNA, 25 bp, Homo sapien
tgtgcaaacaaagggaagtgcgtcc

SEQ ID NO: 4037591 - DNA, 25 bp, Homo sapien
catagcaagcctgtgtcggtggcag

SEQ ID NO: 4037592 - DNA, 25 bp, Homo sapien
ggccattggaatgcacagcttgccc

SEQ ID NO: 4037593 - DNA, 25 bp, Homo sapien
cattggaatgcacagcttgcccaga

SEQ ID NO: 4037594 - DNA, 25 bp, Homo sapien
atgtggtggccattggaatgcacag

SEQ ID NO: 4037595 - DNA, 25 bp, Homo sapien
gccattggaatgcacagcttgccca

SEQ ID NO: 4037596 - DNA, 25 bp, Homo sapien
ttttccatcccgtgtcatgtctagg

SEQ ID NO: 4037597 - DNA, 25 bp, Homo sapien
ggcactcgcatcattgcctcctcca

SEQ ID NO: 4037598 - DNA, 25 bp, Homo sapien
cagtgaggggcactcgcatcattgc

SEQ ID NO: 4037599 - DNA, 25 bp, Homo sapien
cccgtgtcatgtctagggccccagt

SEQ ID NO: 4037600 - DNA, 25 bp, Homo sapien
ggaataggtattattctcagttgca

SEQ ID NO: 4037601 - DNA, 25 bp, Homo sapien
tctcaataaacttatagttgtgttg

SEQ ID NO: 4037602 - DNA, 25 bp, Homo sapien
gtgttggaataggtattattctcag

SEQ ID NO: 4037603 - DNA, 25 bp, Homo sapien
acttatagttgtgttggaataggta

SEQ ID NO: 4037604 - DNA, 25 bp, Homo sapien
gatcaggatgcaagatggacttccc

SEQ ID NO: 4037605 - DNA, 25 bp, Homo sapien
tagcgtgctctcagctggaacaatg

SEQ ID NO: 4037606 - DNA, 25 bp, Homo sapien
aacagatgcttctcgtcccagggac

SEQ ID NO: 4037607 - DNA, 25 bp, Homo sapien
taatttccctctggcaagagacggc

SEQ ID NO: 4037608 - DNA, 25 bp, Homo sapien
cagcttccagtgagttagggataag

SEQ ID NO: 4037609 - DNA, 25 bp, Homo sapien
ggagacctctggcaccaagtctcag

SEQ ID NO: 4037610 - DNA, 25 bp, Homo sapien
cagggatactgaccactgcttggag

SEQ ID NO: 4037611 - DNA, 25 bp, Homo sapien
aagagacccacatggcaatgatcag

SEQ ID NO: 4037612 - DNA, 25 bp, Homo sapien
tacccacacaacatactgtgcatcg

SEQ ID NO: 4037613 - DNA, 25 bp, Homo sapien
catactgtgcatcggcaaaacacag

SEQ ID NO: 4037614 - DNA, 25 bp, Homo sapien
gcattcctttttttcgtgtagcctg

SEQ ID NO: 4037615 - DNA, 25 bp, Homo sapien
ttcgtgtagcctgatcggaggcagt

SEQ ID NO: 4037616 - DNA, 25 bp, Homo sapien
cagccagatcatccaaataaagcct

SEQ ID NO: 4037617 - DNA, 25 bp, Homo sapien
catatatgcttaaccaaagactggt

SEQ ID NO: 4037618 - DNA, 25 bp, Homo sapien
tccaaataaagcctagtgatcaatg

SEQ ID NO: 4037619 - DNA, 25 bp, Homo sapien
tatatgcttaaccaaagactggttc

SEQ ID NO: 4037620 - DNA, 25 bp, Homo sapien
tgctttgcctgggaccttactggta

SEQ ID NO: 4037621 - DNA, 25 bp, Homo sapien
gattcaaatctccacaagaacaggt

SEQ ID NO: 4037622 - DNA, 25 bp, Homo sapien
gagtgactgactgccctgctttgcc

SEQ ID NO: 4037623 - DNA, 25 bp, Homo sapien
cacaccaggatggtaggtcctttta

SEQ ID NO: 4037624 - DNA, 25 bp, Homo sapien
tgctctccttatactgagaactcct

SEQ ID NO: 4037625 - DNA, 25 bp, Homo sapien
tgtaaaagcttcagacttggatgca

SEQ ID NO: 4037626 - DNA, 25 bp, Homo sapien
cagtggaaagctgagtaataccttc

SEQ ID NO: 4037627 - DNA, 25 bp, Homo sapien
ttacaggtagcatttgataaaggtg

SEQ ID NO: 4037628 - DNA, 25 bp, Homo sapien
ctgcttaatatacaccagtgctggc

SEQ ID NO: 4037629 - DNA, 25 bp, Homo sapien
gtgctggcacttgcagatgctgttt

SEQ ID NO: 4037630 - DNA, 25 bp, Homo sapien
ctgtgctgcttaatatacaccagtg

SEQ ID NO: 4037631 - DNA, 25 bp, Homo sapien
ttccagattttactgtctttcaaat

SEQ ID NO: 4037632 - DNA, 25 bp, Homo sapien
taataagaaagaaagtgaaatattc

SEQ ID NO: 4037633 - DNA, 25 bp, Homo sapien
ctaataagaaagaaagtgaaatatt

SEQ ID NO: 4037634 - DNA, 25 bp, Homo sapien
gggtttaacttcctggagctgtgga

SEQ ID NO: 4037635 - DNA, 25 bp, Homo sapien
ttgggtttaacttcctggagctgtg

SEQ ID NO: 4037636 - DNA, 25 bp, Homo sapien
tgggtttaacttcctggagctgtgg

SEQ ID NO: 4037637 - DNA, 25 bp, Homo sapien
ccatgagggactgagcaggaattgt

SEQ ID NO: 4037638 - DNA, 25 bp, Homo sapien
gggactgagcaggaattgtgacatc

SEQ ID NO: 4037639 - DNA, 25 bp, Homo sapien
atatccatgagggactgagcaggaa

SEQ ID NO: 4037640 - DNA, 25 bp, Homo sapien
actgagcaggaattgtgacatccat

SEQ ID NO: 4037641 - DNA, 25 bp, Homo sapien
tatgcccacggtgtctttgaacacg

SEQ ID NO: 4037642 - DNA, 25 bp, Homo sapien
cagtcagtggtcacatttccccaat

SEQ ID NO: 4037643 - DNA, 25 bp, Homo sapien
ggattttgtagtttatatgcccacg

SEQ ID NO: 4037644 - DNA, 25 bp, Homo sapien
gacccattgtctcattagggaccac

SEQ ID NO: 4037645 - DNA, 25 bp, Homo sapien
aatcactacttaattccacaaacat

SEQ ID NO: 4037646 - DNA, 25 bp, Homo sapien
taaaggaaatcactacttaattcca

SEQ ID NO: 4037647 - DNA, 25 bp, Homo sapien
gaaatcactacttaattccacaaac

SEQ ID NO: 4037648 - DNA, 25 bp, Homo sapien
tcactacttaattccacaaacattt

SEQ ID NO: 4037649 - DNA, 25 bp, Homo sapien
ggtcgggcacacgagggtccataac

SEQ ID NO: 4037650 - DNA, 25 bp, Homo sapien
ttccctgagccggtcgggcacacga

SEQ ID NO: 4037651 - DNA, 25 bp, Homo sapien
tagaaactttgagccgtctgtctcc

SEQ ID NO: 4037652 - DNA, 25 bp, Homo sapien
cagtccaggaatggcactagaaact

SEQ ID NO: 4037653 - DNA, 25 bp, Homo sapien
cagccgcggatggctctgaaatcca

SEQ ID NO: 4037654 - DNA, 25 bp, Homo sapien
cgcggatggctctgaaatccacacg

SEQ ID NO: 4037655 - DNA, 25 bp, Homo sapien
aaatccacacggcttggtgcctcca

SEQ ID NO: 4037656 - DNA, 25 bp, Homo sapien
tcctggccgccccaacagccggcag

SEQ ID NO: 4037657 - DNA, 25 bp, Homo sapien
gtcccacagcttccttttctatcac

SEQ ID NO: 4037658 - DNA, 25 bp, Homo sapien
ctagagacccttttctggctgagga

SEQ ID NO: 4037659 - DNA, 25 bp, Homo sapien
aggagtcccacagcttccttttcta

SEQ ID NO: 4037660 - DNA, 25 bp, Homo sapien
acccttttctggctgaggagtccca

SEQ ID NO: 4037661 - DNA, 25 bp, Homo sapien
gcagcaaaaattgcatctaagtctt

SEQ ID NO: 4037662 - DNA, 25 bp, Homo sapien
tccaactggaattcagcagcaaaaa

SEQ ID NO: 4037663 - DNA, 25 bp, Homo sapien
catctgtttttgaagttccaactgg

SEQ ID NO: 4037664 - DNA, 25 bp, Homo sapien
cttttgtaagtatccactgtgccca

SEQ ID NO: 4037665 - DNA, 25 bp, Homo sapien
agaaacatccatagtagggctagaa

SEQ ID NO: 4037666 - DNA, 25 bp, Homo sapien
acagaaacatccatagtagggctag

SEQ ID NO: 4037667 - DNA, 25 bp, Homo sapien
cagaaacatccatagtagggctaga

SEQ ID NO: 4037668 - DNA, 25 bp, Homo sapien
gaatactaggagcagccttctttac

SEQ ID NO: 4037669 - DNA, 25 bp, Homo sapien
taactttatgaatactaggagcagc

SEQ ID NO: 4037670 - DNA, 25 bp, Homo sapien
tatgaatactaggagcagccttctt

SEQ ID NO: 4037671 - DNA, 25 bp, Homo sapien
ctttatgaatactaggagcagcctt

SEQ ID NO: 4037672 - DNA, 25 bp, Homo sapien
tccagcgtcagccttgcactttagc

SEQ ID NO: 4037673 - DNA, 25 bp, Homo sapien
gagttccagcgtcagccttgcactt

SEQ ID NO: 4037674 - DNA, 25 bp, Homo sapien
ctgaagagttccagcgtcagccttg

SEQ ID NO: 4037675 - DNA, 25 bp, Homo sapien
cagcgtcagccttgcactttagcaa

SEQ ID NO: 4037676 - DNA, 25 bp, Homo sapien
ctttgataaaacaccatttcctctt

SEQ ID NO: 4037677 - DNA, 25 bp, Homo sapien
caggtaaggtgctactcaagtcaca

SEQ ID NO: 4037678 - DNA, 25 bp, Homo sapien
cactttccttgacatgtagctctta

SEQ ID NO: 4037679 - DNA, 25 bp, Homo sapien
cataggatggattgtgccaggtaac

SEQ ID NO: 4037680 - DNA, 25 bp, Homo sapien
tggatagatagtgccttgtagctgg

SEQ ID NO: 4037681 - DNA, 25 bp, Homo sapien
tacaccgcaaagtctgtcctccatg

SEQ ID NO: 4037682 - DNA, 25 bp, Homo sapien
ttccaagctccggtgcaagtgcact

SEQ ID NO: 4037683 - DNA, 25 bp, Homo sapien
ccttatatttgggttggatatccac

SEQ ID NO: 4037684 - DNA, 25 bp, Homo sapien
ctgccttatatttgggttggatatc

SEQ ID NO: 4037685 - DNA, 25 bp, Homo sapien
acagctgttactggcgcttagagcc

SEQ ID NO: 4037686 - DNA, 25 bp, Homo sapien
ctcaaagagacggtacagctgttac

SEQ ID NO: 4037687 - DNA, 25 bp, Homo sapien
caaagagacggtacagctgttactg

SEQ ID NO: 4037688 - DNA, 25 bp, Homo sapien
agctgttactggcgcttagagccat

SEQ ID NO: 4037689 - DNA, 25 bp, Homo sapien
tttaagaacgaaaagccactcactg

SEQ ID NO: 4037690 - DNA, 25 bp, Homo sapien
gacttagaagtcttccacttcttcc

SEQ ID NO: 4037691 - DNA, 25 bp, Homo sapien
agaacgaaaagccactcactggaca

SEQ ID NO: 4037692 - DNA, 25 bp, Homo sapien
ttagaagtcttccacttcttcccac

SEQ ID NO: 4037693 - DNA, 25 bp, Homo sapien
tgtttttaaatccatcgacggtgtc

SEQ ID NO: 4037694 - DNA, 25 bp, Homo sapien
cgacggtgtcctaaaccagatttgg

SEQ ID NO: 4037695 - DNA, 25 bp, Homo sapien
tgattcacaacaaccaccgctagga

SEQ ID NO: 4037696 - DNA, 25 bp, Homo sapien
ccagatttggtcgtaagcagctgtg

SEQ ID NO: 4037697 - DNA, 25 bp, Homo sapien
gctcctccagcgagggcttcttgac

SEQ ID NO: 4037698 - DNA, 25 bp, Homo sapien
caaattatagggaggttgtgggact

SEQ ID NO: 4037699 - DNA, 25 bp, Homo sapien
tgcgtgtgtgaacagaagggatctt

SEQ ID NO: 4037700 - DNA, 25 bp, Homo sapien
tagttgtgtaggagccactctgcac

SEQ ID NO: 4037701 - DNA, 25 bp, Homo sapien
gcagagaagtaacaggcaggaagac

SEQ ID NO: 4037702 - DNA, 25 bp, Homo sapien
gaagtaacaggcaggaagacatgcc

SEQ ID NO: 4037703 - DNA, 25 bp, Homo sapien
gtaacaggcaggaagacatgccgcc

SEQ ID NO: 4037704 - DNA, 25 bp, Homo sapien
ctgcagagaagtaacaggcaggaag

SEQ ID NO: 4037705 - DNA, 25 bp, Homo sapien
cttcagcttggggtcccttaacagg

SEQ ID NO: 4037706 - DNA, 25 bp, Homo sapien
atagcttttgtggcaaaggcttgtc

SEQ ID NO: 4037707 - DNA, 25 bp, Homo sapien
tcagcttggggtcccttaacaggta

SEQ ID NO: 4037708 - DNA, 25 bp, Homo sapien
tagcttttgtggcaaaggcttgtct

SEQ ID NO: 4037709 - DNA, 25 bp, Homo sapien
ttggagtagaaatggcatgggccac

SEQ ID NO: 4037710 - DNA, 25 bp, Homo sapien
cctagtgccttgtgtggatggagct

SEQ ID NO: 4037711 - DNA, 25 bp, Homo sapien
tacggtacccctgtgcttcctagtg

SEQ ID NO: 4037712 - DNA, 25 bp, Homo sapien
gccatccgtgctgtttgccaaatct

SEQ ID NO: 4037713 - DNA, 25 bp, Homo sapien
tctcctaatattgtgctggcttctc

SEQ ID NO: 4037714 - DNA, 25 bp, Homo sapien
gctctctttccagatggattatggc

SEQ ID NO: 4037715 - DNA, 25 bp, Homo sapien
tgcctttctctttccggtctgtacc

SEQ ID NO: 4037716 - DNA, 25 bp, Homo sapien
gctgctaaaccctggtggctggctc

SEQ ID NO: 4037717 - DNA, 25 bp, Homo sapien
gctttgcaacatgcaactctgttat

SEQ ID NO: 4037718 - DNA, 25 bp, Homo sapien
gagattctgttgaattattcagggc

SEQ ID NO: 4037719 - DNA, 25 bp, Homo sapien
ttggggctttgcaacatgcaactct

SEQ ID NO: 4037720 - DNA, 25 bp, Homo sapien
aattattcagggctaaatcaagatg

SEQ ID NO: 4037721 - DNA, 25 bp, Homo sapien
tgctgctgtgtcttttccggcccct

SEQ ID NO: 4037722 - DNA, 25 bp, Homo sapien
taggagtgtcgctaaggtccaggct

SEQ ID NO: 4037723 - DNA, 25 bp, Homo sapien
aggctgcctggagctagcactgctg

SEQ ID NO: 4037724 - DNA, 25 bp, Homo sapien
ttagccactcagagtgaatgggagg

SEQ ID NO: 4037725 - DNA, 25 bp, Homo sapien
tcatcagaacacaatgcagcttgca

SEQ ID NO: 4037726 - DNA, 25 bp, Homo sapien
gacatgtgtcataaacagaggctta

SEQ ID NO: 4037727 - DNA, 25 bp, Homo sapien
cgaagtcatcagaacacaatgcagc

SEQ ID NO: 4037728 - DNA, 25 bp, Homo sapien
gacgtggtccatgaaatatgacatg

SEQ ID NO: 4037729 - DNA, 25 bp, Homo sapien
cgggtccaagaatgaatgaccactc

SEQ ID NO: 4037730 - DNA, 25 bp, Homo sapien
tgaatgaccactcagtacgctcagt

SEQ ID NO: 4037731 - DNA, 25 bp, Homo sapien
gaccactcagtacgctcagtgcaca

SEQ ID NO: 4037732 - DNA, 25 bp, Homo sapien
cttcctgatgcacgggtccaagaat

SEQ ID NO: 4037733 - DNA, 25 bp, Homo sapien
caggaactggcggtagacgcagtct

SEQ ID NO: 4037734 - DNA, 25 bp, Homo sapien
cctatcgggtgatgttgaagccaaa

SEQ ID NO: 4037735 - DNA, 25 bp, Homo sapien
ctgtagttgcctgattgcagattcc

SEQ ID NO: 4037736 - DNA, 25 bp, Homo sapien
tgctgtatgcacattatagttcaac

SEQ ID NO: 4037737 - DNA, 25 bp, Homo sapien
cttgggaacaccagcctctggcgtc

SEQ ID NO: 4037738 - DNA, 25 bp, Homo sapien
tcttgggaacaccagcctctggcgt

SEQ ID NO: 4037739 - DNA, 25 bp, Homo sapien
gccagaaaggccctgtagatgcaat

SEQ ID NO: 4037740 - DNA, 25 bp, Homo sapien
catgggaccagttctaaagccgtgg

SEQ ID NO: 4037741 - DNA, 25 bp, Homo sapien
catcctgagggcattgccaatggca

SEQ ID NO: 4037742 - DNA, 25 bp, Homo sapien
ccaatggcatgaagacatgggacca

SEQ ID NO: 4037743 - DNA, 25 bp, Homo sapien
acaaattactgcagtgtacataatg

SEQ ID NO: 4037744 - DNA, 25 bp, Homo sapien
aacaaattactgcagtgtacataat

SEQ ID NO: 4037745 - DNA, 25 bp, Homo sapien
ctccagttttatcacggatttgcct

SEQ ID NO: 4037746 - DNA, 25 bp, Homo sapien
ttgccttgtactgtcaacaaattac

SEQ ID NO: 4037747 - DNA, 25 bp, Homo sapien
tggatgatctttcatattctgtaga

SEQ ID NO: 4037748 - DNA, 25 bp, Homo sapien
gatgatctttcatattctgtagatt

SEQ ID NO: 4037749 - DNA, 25 bp, Homo sapien
ctggatgatctttcatattctgtag

SEQ ID NO: 4037750 - DNA, 25 bp, Homo sapien
ggatgatctttcatattctgtagat

SEQ ID NO: 4037751 - DNA, 25 bp, Homo sapien
tggatctctggggacgctgcagaaa

SEQ ID NO: 4037752 - DNA, 25 bp, Homo sapien
aaatcaaagcagatggcccaattgc

SEQ ID NO: 4037753 - DNA, 25 bp, Homo sapien
atcaaagcagatggcccaattgcat

SEQ ID NO: 4037754 - DNA, 25 bp, Homo sapien
ctctggggacgctgcagaaatcaaa

SEQ ID NO: 4037755 - DNA, 25 bp, Homo sapien
cattagcattctgatggtgaataat

SEQ ID NO: 4037756 - DNA, 25 bp, Homo sapien
ataatatctatctcatttctctcat

SEQ ID NO: 4037757 - DNA, 25 bp, Homo sapien
ccaggcaaggactttttcattagca

SEQ ID NO: 4037758 - DNA, 25 bp, Homo sapien
tctttccacgtgaaattacaactcc

SEQ ID NO: 4037759 - DNA, 25 bp, Homo sapien
tgaggccaaaacgaggtaacaataa

SEQ ID NO: 4037760 - DNA, 25 bp, Homo sapien
tctccatgcatggtgatgtagtgag

SEQ ID NO: 4037761 - DNA, 25 bp, Homo sapien
taacatagaggataaccaaggccca

SEQ ID NO: 4037762 - DNA, 25 bp, Homo sapien
caataactgagggttagtcgtctaa

SEQ ID NO: 4037763 - DNA, 25 bp, Homo sapien
caggttctgcctcaaccatgccatc

SEQ ID NO: 4037764 - DNA, 25 bp, Homo sapien
gactgtaataaaccccacttcctga

SEQ ID NO: 4037765 - DNA, 25 bp, Homo sapien
tccccttgctgcagtctgagcactg

SEQ ID NO: 4037766 - DNA, 25 bp, Homo sapien
agcactgtcggcatgcaactcggca

SEQ ID NO: 4037767 - DNA, 25 bp, Homo sapien
tggttcttatcaatggggcttcctt

SEQ ID NO: 4037768 - DNA, 25 bp, Homo sapien
ttctaccctctctacatcagcagtt

SEQ ID NO: 4037769 - DNA, 25 bp, Homo sapien
tcagcagttcctaatcctattccac

SEQ ID NO: 4037770 - DNA, 25 bp, Homo sapien
ctagaaggtggttcttatcaatggg

SEQ ID NO: 4037771 - DNA, 25 bp, Homo sapien
tcgaaaccatacagacatcaggcct

SEQ ID NO: 4037772 - DNA, 25 bp, Homo sapien
gcaacttaaatcctgcaaactccaa

SEQ ID NO: 4037773 - DNA, 25 bp, Homo sapien
aactccaaagtagaagcaggtccac

SEQ ID NO: 4037774 - DNA, 25 bp, Homo sapien
gcagtttccaatttatctgaagcaa

SEQ ID NO: 4037775 - DNA, 25 bp, Homo sapien
tcttggcagttcagagggttcctgt

SEQ ID NO: 4037776 - DNA, 25 bp, Homo sapien
tccctgccatctctcagctgtagcc

SEQ ID NO: 4037777 - DNA, 25 bp, Homo sapien
tcctgagtgtgctacttcatcaaca

SEQ ID NO: 4037778 - DNA, 25 bp, Homo sapien
gagatcctgagtgtgctacttcatc

SEQ ID NO: 4037779 - DNA, 25 bp, Homo sapien
gcctgagatcctgagtgtgctactt

SEQ ID NO: 4037780 - DNA, 25 bp, Homo sapien
ggtgttacctgctttctgtagagta

SEQ ID NO: 4037781 - DNA, 25 bp, Homo sapien
attgatccatactctctaatagccc

SEQ ID NO: 4037782 - DNA, 25 bp, Homo sapien
gagtagcaattgatccatactctct

SEQ ID NO: 4037783 - DNA, 25 bp, Homo sapien
tttctgtagagtagcaattgatcca

SEQ ID NO: 4037784 - DNA, 25 bp, Homo sapien
tgggatggaaagtaattcaagaccc

SEQ ID NO: 4037785 - DNA, 25 bp, Homo sapien
tgtacaaatgggatggaaagtaatt

SEQ ID NO: 4037786 - DNA, 25 bp, Homo sapien
tgctcttcctctcagctatggcacc

SEQ ID NO: 4037787 - DNA, 25 bp, Homo sapien
tggaaagtaattcaagacccttgtc

SEQ ID NO: 4037788 - DNA, 25 bp, Homo sapien
ccatccatctttgcttgtggagaac

SEQ ID NO: 4037789 - DNA, 25 bp, Homo sapien
ttgtggagaactcagatgactccat

SEQ ID NO: 4037790 - DNA, 25 bp, Homo sapien
tttgcttgtggagaactcagatgac

SEQ ID NO: 4037791 - DNA, 25 bp, Homo sapien
tctccatccatctttgcttgtggag

SEQ ID NO: 4037792 - DNA, 25 bp, Homo sapien
aacatctcgtggcttccatggttcc

SEQ ID NO: 4037793 - DNA, 25 bp, Homo sapien
aaacatctcgtggcttccatggttc

SEQ ID NO: 4037794 - DNA, 25 bp, Homo sapien
aaaacatctcgtggcttccatggtt

SEQ ID NO: 4037795 - DNA, 25 bp, Homo sapien
ccccagtcataatgactaactgtta

SEQ ID NO: 4037796 - DNA, 25 bp, Homo sapien
gattgatgaattgcttcactgcatc

SEQ ID NO: 4037797 - DNA, 25 bp, Homo sapien
tgttgcctcccctaagttacaagca

SEQ ID NO: 4037798 - DNA, 25 bp, Homo sapien
agcactacaagtgggactgacacct

SEQ ID NO: 4037799 - DNA, 25 bp, Homo sapien
tatcgtgcggagaaacagctgtttc

SEQ ID NO: 4037800 - DNA, 25 bp, Homo sapien
tggcttctgaggaatagcctccggg

SEQ ID NO: 4037801 - DNA, 25 bp, Homo sapien
gggtatcgtgcggagaaacagctgt

SEQ ID NO: 4037802 - DNA, 25 bp, Homo sapien
gtgctgggggtatcgtgcggagaaa

SEQ ID NO: 4037803 - DNA, 25 bp, Homo sapien
tggtctctaacatgatcctgggaac

SEQ ID NO: 4037804 - DNA, 25 bp, Homo sapien
ggtctctaacatgatcctgggaaca

SEQ ID NO: 4037805 - DNA, 25 bp, Homo sapien
cctggtctctaacatgatcctggga

SEQ ID NO: 4037806 - DNA, 25 bp, Homo sapien
gtctctaacatgatcctgggaacat

SEQ ID NO: 4037807 - DNA, 25 bp, Homo sapien
gcagcacaggtgagtaaaagtcaga

SEQ ID NO: 4037808 - DNA, 25 bp, Homo sapien
cagcacaggtgagtaaaagtcagac

SEQ ID NO: 4037809 - DNA, 25 bp, Homo sapien
gcacaggtgagtaaaagtcagacac

SEQ ID NO: 4037810 - DNA, 25 bp, Homo sapien
aagcagcacaggtgagtaaaagtca

SEQ ID NO: 4037811 - DNA, 25 bp, Homo sapien
tggatttgccactccatcttagaga

SEQ ID NO: 4037812 - DNA, 25 bp, Homo sapien
tgtggatttgccactccatcttaga

SEQ ID NO: 4037813 - DNA, 25 bp, Homo sapien
tccatcttagagagggccagccatg

SEQ ID NO: 4037814 - DNA, 25 bp, Homo sapien
ggatttgccactccatcttagagag

SEQ ID NO: 4037815 - DNA, 25 bp, Homo sapien
cactcggagtgacatttcagggaac

SEQ ID NO: 4037816 - DNA, 25 bp, Homo sapien
tccagagtaacccttctgggagtgc

SEQ ID NO: 4037817 - DNA, 25 bp, Homo sapien
cagggaactctggataatgcctatg

SEQ ID NO: 4037818 - DNA, 25 bp, Homo sapien
ccccaaaacatgcactcggagtgac

SEQ ID NO: 4037819 - DNA, 25 bp, Homo sapien
cccctaagagctcagtcatggactg

SEQ ID NO: 4037820 - DNA, 25 bp, Homo sapien
tgggcgttattggtttgagttgtgt

SEQ ID NO: 4037821 - DNA, 25 bp, Homo sapien
aaatgcaaacaccatggtactcccc

SEQ ID NO: 4037822 - DNA, 25 bp, Homo sapien
tctcttcgtctctgggcccctaaga

SEQ ID NO: 4037823 - DNA, 25 bp, Homo sapien
tgataacaaacacccttcagtgact

SEQ ID NO: 4037824 - DNA, 25 bp, Homo sapien
tctgataacaaacacccttcagtga

SEQ ID NO: 4037825 - DNA, 25 bp, Homo sapien
cttcatctgataacaaacacccttc

SEQ ID NO: 4037826 - DNA, 25 bp, Homo sapien
cagtgacttcctgttggtcctctgg

SEQ ID NO: 4037827 - DNA, 25 bp, Homo sapien
ggcacgatctcctcctattcagatt

SEQ ID NO: 4037828 - DNA, 25 bp, Homo sapien
tttcatcaggtgaacaattccttgt

SEQ ID NO: 4037829 - DNA, 25 bp, Homo sapien
catgttccttttcatcaggtgaaca

SEQ ID NO: 4037830 - DNA, 25 bp, Homo sapien
tcctagtgtgtccaggcacgatctc

SEQ ID NO: 4037831 - DNA, 25 bp, Homo sapien
gaggctctccacaaatgtgtccaca

SEQ ID NO: 4037832 - DNA, 25 bp, Homo sapien
catggtctgaggaggctctccacaa

SEQ ID NO: 4037833 - DNA, 25 bp, Homo sapien
gtctctgcgttcttcatgggcagga

SEQ ID NO: 4037834 - DNA, 25 bp, Homo sapien
tgggtctctgcgttcttcatgggca

SEQ ID NO: 4037835 - DNA, 25 bp, Homo sapien
ttcccaggtgggtcaacacaacttg

SEQ ID NO: 4037836 - DNA, 25 bp, Homo sapien
agaagcgtaggcgaaagacaggcaa

SEQ ID NO: 4037837 - DNA, 25 bp, Homo sapien
gcaagctttaaagcctgctgctgta

SEQ ID NO: 4037838 - DNA, 25 bp, Homo sapien
cgtaggcgaaagacaggcaagcttt

SEQ ID NO: 4037839 - DNA, 25 bp, Homo sapien
aagacaggcaagctttaaagcctgc

SEQ ID NO: 4037840 - DNA, 25 bp, Homo sapien
gttaagaggaaagttcaggctatag

SEQ ID NO: 4037841 - DNA, 25 bp, Homo sapien
tttcccagtactcttgccaggaagc

SEQ ID NO: 4037842 - DNA, 25 bp, Homo sapien
taagaggaaagttcaggctatagtt

SEQ ID NO: 4037843 - DNA, 25 bp, Homo sapien
ctatagtttcccagtactcttgcca

SEQ ID NO: 4037844 - DNA, 25 bp, Homo sapien
gcatctaccgtaccatgaaggcgcg

SEQ ID NO: 4037845 - DNA, 25 bp, Homo sapien
caggttgttaggctcttaggtcagc

SEQ ID NO: 4037846 - DNA, 25 bp, Homo sapien
gaggatggagttcctaccccattgt

SEQ ID NO: 4037847 - DNA, 25 bp, Homo sapien
atcgccatccaatagcccacagggt

SEQ ID NO: 4037848 - DNA, 25 bp, Homo sapien
tccacacagaaataacttgctggtc

SEQ ID NO: 4037849 - DNA, 25 bp, Homo sapien
ctgggctgtccacacagaaataact

SEQ ID NO: 4037850 - DNA, 25 bp, Homo sapien
ggactgggctgtccacacagaaata

SEQ ID NO: 4037851 - DNA, 25 bp, Homo sapien
ggctgtccacacagaaataacttgc

SEQ ID NO: 4037852 - DNA, 25 bp, Homo sapien
cagggcaaggcagaagtcatagaag

SEQ ID NO: 4037853 - DNA, 25 bp, Homo sapien
ggcaaggcagaagtcatagaagccc

SEQ ID NO: 4037854 - DNA, 25 bp, Homo sapien
tgtattggacctccagggcaaggca

SEQ ID NO: 4037855 - DNA, 25 bp, Homo sapien
ctgtattggacctccagggcaaggc

SEQ ID NO: 4037856 - DNA, 25 bp, Homo sapien
tatatagtatgagtaagggtcaaac

SEQ ID NO: 4037857 - DNA, 25 bp, Homo sapien
tgagagcttcaattctccacaacta

SEQ ID NO: 4037858 - DNA, 25 bp, Homo sapien
gaaagctttgcctaatcacagatca

SEQ ID NO: 4037859 - DNA, 25 bp, Homo sapien
tgatagtgtgcttcgaagagcagga

SEQ ID NO: 4037860 - DNA, 25 bp, Homo sapien
cagatggtgctcataattgggagac

SEQ ID NO: 4037861 - DNA, 25 bp, Homo sapien
aagtggactcttgcagatggtgctc

SEQ ID NO: 4037862 - DNA, 25 bp, Homo sapien
ggactcttgcagatggtgctcataa

SEQ ID NO: 4037863 - DNA, 25 bp, Homo sapien
tcttgcagatggtgctcataattgg

SEQ ID NO: 4037864 - DNA, 25 bp, Homo sapien
tgttaaggccacttgcaaagctgtc

SEQ ID NO: 4037865 - DNA, 25 bp, Homo sapien
gatgatattgatcaagtagattcct

SEQ ID NO: 4037866 - DNA, 25 bp, Homo sapien
cctttgtgaaaacctacattgatta

SEQ ID NO: 4037867 - DNA, 25 bp, Homo sapien
ttcctgacaagctgttaaggccact

SEQ ID NO: 4037868 - DNA, 25 bp, Homo sapien
gaatggaagatagatgaatgcagac

SEQ ID NO: 4037869 - DNA, 25 bp, Homo sapien
aatgcagacaacattctctgtgctg

SEQ ID NO: 4037870 - DNA, 25 bp, Homo sapien
aaccactcagtgattcatctcccag

SEQ ID NO: 4037871 - DNA, 25 bp, Homo sapien
ctgtgctgggtaaccactcagtgat

SEQ ID NO: 4037872 - DNA, 25 bp, Homo sapien
tcaaaaccccacaaacagcacttaa

SEQ ID NO: 4037873 - DNA, 25 bp, Homo sapien
ctcaaaaccccacaaacagcactta

SEQ ID NO: 4037874 - DNA, 25 bp, Homo sapien
tgctcaaaaccccacaaacagcact

SEQ ID NO: 4037875 - DNA, 25 bp, Homo sapien
gctcaaaaccccacaaacagcactt

SEQ ID NO: 4037876 - DNA, 25 bp, Homo sapien
ccatgagaatcttgcactggaatgg

SEQ ID NO: 4037877 - DNA, 25 bp, Homo sapien
aaccatgagaatcttgcactggaat

SEQ ID NO: 4037878 - DNA, 25 bp, Homo sapien
tgcactggaatggagttgtccaggg

SEQ ID NO: 4037879 - DNA, 25 bp, Homo sapien
ttgcactggaatggagttgtccagg

SEQ ID NO: 4037880 - DNA, 25 bp, Homo sapien
gcagatgtcagtgttgtgcaacttt

SEQ ID NO: 4037881 - DNA, 25 bp, Homo sapien
caactttcaggctgactgcttgcag

SEQ ID NO: 4037882 - DNA, 25 bp, Homo sapien
aatctcaaactgcatacaagcagca

SEQ ID NO: 4037883 - DNA, 25 bp, Homo sapien
tgcatacaagcagcagatgtcagtg

SEQ ID NO: 4037884 - DNA, 25 bp, Homo sapien
tctggtggcagagttcgagttctcc

SEQ ID NO: 4037885 - DNA, 25 bp, Homo sapien
caggttgagagactgacctgcacaa

SEQ ID NO: 4037886 - DNA, 25 bp, Homo sapien
tctgacttgggcctacattctggtg

SEQ ID NO: 4037887 - DNA, 25 bp, Homo sapien
tatagagtgatcactgttgttccag

SEQ ID NO: 4037888 - DNA, 25 bp, Homo sapien
ttgggagccttaagtacttgccact

SEQ ID NO: 4037889 - DNA, 25 bp, Homo sapien
ccttaagtacttgccacttaaccag

SEQ ID NO: 4037890 - DNA, 25 bp, Homo sapien
tctattagaaacattgctgaacttg

SEQ ID NO: 4037891 - DNA, 25 bp, Homo sapien
tgctgaacttgggagccttaagtac

SEQ ID NO: 4037892 - DNA, 25 bp, Homo sapien
tcagcaccatccttgcctttcccat

SEQ ID NO: 4037893 - DNA, 25 bp, Homo sapien
gctcagcaccatccttgcctttccc

SEQ ID NO: 4037894 - DNA, 25 bp, Homo sapien
ggctcagcaccatccttgcctttcc

SEQ ID NO: 4037895 - DNA, 25 bp, Homo sapien
caggctcagcaccatccttgccttt

SEQ ID NO: 4037896 - DNA, 25 bp, Homo sapien
gagagagcggcataagggagtcaca

SEQ ID NO: 4037897 - DNA, 25 bp, Homo sapien
ctcggaagttggctgttgcccaaat

SEQ ID NO: 4037898 - DNA, 25 bp, Homo sapien
aagttggctgttgcccaaatggcag

SEQ ID NO: 4037899 - DNA, 25 bp, Homo sapien
tgcttctccagaaacaaggttggcc

SEQ ID NO: 4037900 - DNA, 25 bp, Homo sapien
tccagggacagttgttcttccagaa

SEQ ID NO: 4037901 - DNA, 25 bp, Homo sapien
caatggacggttggctgtgatttcc

SEQ ID NO: 4037902 - DNA, 25 bp, Homo sapien
tccagaagcaaagtgcccaaggctc

SEQ ID NO: 4037903 - DNA, 25 bp, Homo sapien
actgaaatggtggtggccgctttgc

SEQ ID NO: 4037904 - DNA, 25 bp, Homo sapien
tcaagagcatttgggctgtctcttc

SEQ ID NO: 4037905 - DNA, 25 bp, Homo sapien
gcatttgggctgtctcttcactgaa

SEQ ID NO: 4037906 - DNA, 25 bp, Homo sapien
gacttttctgactacttcaagagca

SEQ ID NO: 4037907 - DNA, 25 bp, Homo sapien
gactacttcaagagcatttgggctg

SEQ ID NO: 4037908 - DNA, 25 bp, Homo sapien
cttcataactacatgcaataataat

SEQ ID NO: 4037909 - DNA, 25 bp, Homo sapien
cataactacatgcaataataatcac

SEQ ID NO: 4037910 - DNA, 25 bp, Homo sapien
tgttcttcataactacatgcaataa

SEQ ID NO: 4037911 - DNA, 25 bp, Homo sapien
gttcttcataactacatgcaataat

SEQ ID NO: 4037912 - DNA, 25 bp, Homo sapien
tttgttttgggatctttcagaatct

SEQ ID NO: 4037913 - DNA, 25 bp, Homo sapien
ggagcagaataacttgactcaggat

SEQ ID NO: 4037914 - DNA, 25 bp, Homo sapien
gcagaataacttgactcaggatggt

SEQ ID NO: 4037915 - DNA, 25 bp, Homo sapien
ttttgggatctttcagaatctctac

SEQ ID NO: 4037916 - DNA, 25 bp, Homo sapien
gcactatggacattgtggactgcat

SEQ ID NO: 4037917 - DNA, 25 bp, Homo sapien
gagagctccaacatgtatagtgact

SEQ ID NO: 4037918 - DNA, 25 bp, Homo sapien
tctataggtgccagtagcatgtctc

SEQ ID NO: 4037919 - DNA, 25 bp, Homo sapien
tatacacgtgtttccaaatgctcca

SEQ ID NO: 4037920 - DNA, 25 bp, Homo sapien
tgaatgcgtattatttcccaggagc

SEQ ID NO: 4037921 - DNA, 25 bp, Homo sapien
aaattctggaccacaaacttgggca

SEQ ID NO: 4037922 - DNA, 25 bp, Homo sapien
tcccaggagcatgtcaattacccca

SEQ ID NO: 4037923 - DNA, 25 bp, Homo sapien
gcttttatatatggccggaagtgtc

SEQ ID NO: 4037924 - DNA, 25 bp, Homo sapien
tatattgcctcagtgcatgttgccc

SEQ ID NO: 4037925 - DNA, 25 bp, Homo sapien
gcttgtatcttcactcgttaggaaa

SEQ ID NO: 4037926 - DNA, 25 bp, Homo sapien
tgttgattaattgcgcattccttct

SEQ ID NO: 4037927 - DNA, 25 bp, Homo sapien
ttcactcgttaggaaagagcaggct

SEQ ID NO: 4037928 - DNA, 25 bp, Homo sapien
gaaaggtctttatatcactctggga

SEQ ID NO: 4037929 - DNA, 25 bp, Homo sapien
cagatgcgttgagagaatgggcttc

SEQ ID NO: 4037930 - DNA, 25 bp, Homo sapien
tattaacatggctgaaccgcaaccg

SEQ ID NO: 4037931 - DNA, 25 bp, Homo sapien
gcttctccggagtgtattttatctt

SEQ ID NO: 4037932 - DNA, 25 bp, Homo sapien
tatgctgccttatggtatattatgc

SEQ ID NO: 4037933 - DNA, 25 bp, Homo sapien
gatgtaaataggctcttctacatgc

SEQ ID NO: 4037934 - DNA, 25 bp, Homo sapien
taaggtccactatcagttatgctgc

SEQ ID NO: 4037935 - DNA, 25 bp, Homo sapien
tatattatgcatgcgtgtctgcaca

SEQ ID NO: 4037936 - DNA, 25 bp, Homo sapien
attgatggagtttggttgtctggat

SEQ ID NO: 4037937 - DNA, 25 bp, Homo sapien
tgatggagtttggttgtctggattc

SEQ ID NO: 4037938 - DNA, 25 bp, Homo sapien
taagttcctcttgattgatggagtt

SEQ ID NO: 4037939 - DNA, 25 bp, Homo sapien
ggattaagttcctcttgattgatgg

SEQ ID NO: 4037940 - DNA, 25 bp, Homo sapien
tattccttgggtatcgaatttagca

SEQ ID NO: 4037941 - DNA, 25 bp, Homo sapien
ttgggtatcgaatttagcaacaaca

SEQ ID NO: 4037942 - DNA, 25 bp, Homo sapien
ctgatccctgtgctattccttgggt

SEQ ID NO: 4037943 - DNA, 25 bp, Homo sapien
ctgtgctattccttgggtatcgaat

SEQ ID NO: 4037944 - DNA, 25 bp, Homo sapien
aaatggaaagctgctcctccaaagc

SEQ ID NO: 4037945 - DNA, 25 bp, Homo sapien
cctgaagcacttccaggaacaattt

SEQ ID NO: 4037946 - DNA, 25 bp, Homo sapien
gatgcaaatccaaatcgagtgtgcg

SEQ ID NO: 4037947 - DNA, 25 bp, Homo sapien
cgagtgtgcggtgttctggcttcaa

SEQ ID NO: 4037948 - DNA, 25 bp, Homo sapien
tgcatcccatgctcaagtttggatc

SEQ ID NO: 4037949 - DNA, 25 bp, Homo sapien
catgctcaagtttggatcctctggt

SEQ ID NO: 4037950 - DNA, 25 bp, Homo sapien
gcatcccatgctcaagtttggatcc

SEQ ID NO: 4037951 - DNA, 25 bp, Homo sapien
tcaagtttggatcctctggtactgc

SEQ ID NO: 4037952 - DNA, 25 bp, Homo sapien
tgtttctgcctgagggacttctcag

SEQ ID NO: 4037953 - DNA, 25 bp, Homo sapien
cttgccagtcgccagttgtttctgc

SEQ ID NO: 4037954 - DNA, 25 bp, Homo sapien
ctggggaggacttgcccttgccagt

SEQ ID NO: 4037955 - DNA, 25 bp, Homo sapien
ttctgcctgagggacttctcagatc

SEQ ID NO: 4037956 - DNA, 25 bp, Homo sapien
cctgggaatgacaatggtttgggaa

SEQ ID NO: 4037957 - DNA, 25 bp, Homo sapien
catattcagaagttaggcttcatga

SEQ ID NO: 4037958 - DNA, 25 bp, Homo sapien
caccatcacccctgtagtgtacagg

SEQ ID NO: 4037959 - DNA, 25 bp, Homo sapien
tgatcatacccagaactaatggcca

SEQ ID NO: 4037960 - DNA, 25 bp, Homo sapien
gatggacatgagcacagcatggtca

SEQ ID NO: 4037961 - DNA, 25 bp, Homo sapien
catgggactgtgacctcatggctat

SEQ ID NO: 4037962 - DNA, 25 bp, Homo sapien
tcttcatgctgtggtcaagtagaca

SEQ ID NO: 4037963 - DNA, 25 bp, Homo sapien
tctctggagaccatgatcaaatttc

SEQ ID NO: 4037964 - DNA, 25 bp, Homo sapien
accccacaccatggatctactatgt

SEQ ID NO: 4037965 - DNA, 25 bp, Homo sapien
ttgcaagacaccaattagctcaccc

SEQ ID NO: 4037966 - DNA, 25 bp, Homo sapien
catggatctactatgtggaccacac

SEQ ID NO: 4037967 - DNA, 25 bp, Homo sapien
ttccattgcaagacaccaattagct

SEQ ID NO: 4037968 - DNA, 25 bp, Homo sapien
ttctagagttgctggcagccgtctt

SEQ ID NO: 4037969 - DNA, 25 bp, Homo sapien
tttctagagttgctggcagccgtct

SEQ ID NO: 4037970 - DNA, 25 bp, Homo sapien
tctagagttgctggcagccgtcttt

SEQ ID NO: 4037971 - DNA, 25 bp, Homo sapien
ctagagttgctggcagccgtctttt

SEQ ID NO: 4037972 - DNA, 25 bp, Homo sapien
ctttgtgaggtaagagggaacaagg

SEQ ID NO: 4037973 - DNA, 25 bp, Homo sapien
gaaagtcggaactgacagttgcagt

SEQ ID NO: 4037974 - DNA, 25 bp, Homo sapien
gaggcagggaaagtcggaactgaca

SEQ ID NO: 4037975 - DNA, 25 bp, Homo sapien
cagggaaagtcggaactgacagttg

SEQ ID NO: 4037976 - DNA, 25 bp, Homo sapien
agtcggaactgacagttgcagtggc

SEQ ID NO: 4037977 - DNA, 25 bp, Homo sapien
agtcaaatctaagtaatacagggct

SEQ ID NO: 4037978 - DNA, 25 bp, Homo sapien
ctgagactggcatgaagcagtcaaa

SEQ ID NO: 4037979 - DNA, 25 bp, Homo sapien
tcctgagactggcatgaagcagtca

SEQ ID NO: 4037980 - DNA, 25 bp, Homo sapien
aatctaagtaatacagggcttcttt

SEQ ID NO: 4037981 - DNA, 25 bp, Homo sapien
ctatggtagacattcctaactggcc

SEQ ID NO: 4037982 - DNA, 25 bp, Homo sapien
tggtagacattcctaactggccctc

SEQ ID NO: 4037983 - DNA, 25 bp, Homo sapien
tagacattcctaactggccctccat

SEQ ID NO: 4037984 - DNA, 25 bp, Homo sapien
tatggtagacattcctaactggccc

SEQ ID NO: 4037985 - DNA, 25 bp, Homo sapien
gaaggtccaaaacttgccgatgatt

SEQ ID NO: 4037986 - DNA, 25 bp, Homo sapien
ctgggcttttagacctgcagattga

SEQ ID NO: 4037987 - DNA, 25 bp, Homo sapien
aaacttgccgatgattggctgggct

SEQ ID NO: 4037988 - DNA, 25 bp, Homo sapien
ggctgggcttttagacctgcagatt

SEQ ID NO: 4037989 - DNA, 25 bp, Homo sapien
ttataaagagagtctgacggtagag

SEQ ID NO: 4037990 - DNA, 25 bp, Homo sapien
tagagtgccctttaacatgggaatc

SEQ ID NO: 4037991 - DNA, 25 bp, Homo sapien
aagagagtctgacggtagagtgccc

SEQ ID NO: 4037992 - DNA, 25 bp, Homo sapien
tctgacggtagagtgccctttaaca

SEQ ID NO: 4037993 - DNA, 25 bp, Homo sapien
ggacttctaaaatctcctgattcaa

SEQ ID NO: 4037994 - DNA, 25 bp, Homo sapien
tcaaagtgatgccaaaaggaccgct

SEQ ID NO: 4037995 - DNA, 25 bp, Homo sapien
aaaaggaccgctgtgtgcagagatg

SEQ ID NO: 4037996 - DNA, 25 bp, Homo sapien
tgcagagatgtgatcgtccaaacct

SEQ ID NO: 4037997 - DNA, 25 bp, Homo sapien
tgtgtttcatccaagacacccgtgg

SEQ ID NO: 4037998 - DNA, 25 bp, Homo sapien
ctgtgtttcatccaagacacccgtg

SEQ ID NO: 4037999 - DNA, 25 bp, Homo sapien
cacctttctttgtgatatgttccat

SEQ ID NO: 4038000 - DNA, 25 bp, Homo sapien
atccttacatcagtactacattatc

SEQ ID NO: 4038001 - DNA, 25 bp, Homo sapien
taagtctgaaaatcacgttgtgtaa

SEQ ID NO: 4038002 - DNA, 25 bp, Homo sapien
acagttatctggcatcatttgcaga

SEQ ID NO: 4038003 - DNA, 25 bp, Homo sapien
aatgcactatgattgcacgtgtgaa

SEQ ID NO: 4038004 - DNA, 25 bp, Homo sapien
ttcacatttctttcttgtgtgctcc

SEQ ID NO: 4038005 - DNA, 25 bp, Homo sapien
cacatttctttcttgtgtgctccat

SEQ ID NO: 4038006 - DNA, 25 bp, Homo sapien
tcttcacatttctttcttgtgtgct

SEQ ID NO: 4038007 - DNA, 25 bp, Homo sapien
catttctttcttgtgtgctccatga

SEQ ID NO: 4038008 - DNA, 25 bp, Homo sapien
cacgtaatgcagcatgactgatgaa

SEQ ID NO: 4038009 - DNA, 25 bp, Homo sapien
tagggcctcctaatgcacgtaatgc

SEQ ID NO: 4038010 - DNA, 25 bp, Homo sapien
tggcaggcacaacccaatatctagt

SEQ ID NO: 4038011 - DNA, 25 bp, Homo sapien
tcggattcataaatggatttctgcc

SEQ ID NO: 4038012 - DNA, 25 bp, Homo sapien
atcttgaaagtaaattgaggtgctg

SEQ ID NO: 4038013 - DNA, 25 bp, Homo sapien
ctgaatcttgaaagtaaattgaggt

SEQ ID NO: 4038014 - DNA, 25 bp, Homo sapien
tcttgaaagtaaattgaggtgctgc

SEQ ID NO: 4038015 - DNA, 25 bp, Homo sapien
gaatcttgaaagtaaattgaggtgc

SEQ ID NO: 4038016 - DNA, 25 bp, Homo sapien
ggcacacatataggtggaagagttg

SEQ ID NO: 4038017 - DNA, 25 bp, Homo sapien
tttggattgaagagggcacacatat

SEQ ID NO: 4038018 - DNA, 25 bp, Homo sapien
cacaaaatggctgtgtgtacatgaa

SEQ ID NO: 4038019 - DNA, 25 bp, Homo sapien
gaaacagtgaagaaactgagcttca

SEQ ID NO: 4038020 - DNA, 25 bp, Homo sapien
tacatgaattttggtggaaacagtg

SEQ ID NO: 4038021 - DNA, 25 bp, Homo sapien
atgctgacattgacacagagtagga

SEQ ID NO: 4038022 - DNA, 25 bp, Homo sapien
ccaagagcctgatgtcttagtggtc

SEQ ID NO: 4038023 - DNA, 25 bp, Homo sapien
gagcctgatgtcttagtggtctgga

SEQ ID NO: 4038024 - DNA, 25 bp, Homo sapien
cctgatgtcttagtggtctggaaga

SEQ ID NO: 4038025 - DNA, 25 bp, Homo sapien
tggaaaggaggcattggacctctag

SEQ ID NO: 4038026 - DNA, 25 bp, Homo sapien
ggaatggttttgactctcttctgtg

SEQ ID NO: 4038027 - DNA, 25 bp, Homo sapien
gaacgggcatgcagttagttctgcc

SEQ ID NO: 4038028 - DNA, 25 bp, Homo sapien
cacttggtaaggatgcaggcaggaa

SEQ ID NO: 4038029 - DNA, 25 bp, Homo sapien
tggtgcccagtcctgtcggagcgtc

SEQ ID NO: 4038030 - DNA, 25 bp, Homo sapien
gcagtgtagtggggaggagcaggga

SEQ ID NO: 4038031 - DNA, 25 bp, Homo sapien
gggattactgaaaccaacaatagga

SEQ ID NO: 4038032 - DNA, 25 bp, Homo sapien
gttaacatcgacattatgaccaggg

SEQ ID NO: 4038033 - DNA, 25 bp, Homo sapien
caaagaagcctatacagctagcaga

SEQ ID NO: 4038034 - DNA, 25 bp, Homo sapien
cacataagttaaaagcccaggagtt

SEQ ID NO: 4038035 - DNA, 25 bp, Homo sapien
gaccccagtggattatgttgcagac

SEQ ID NO: 4038036 - DNA, 25 bp, Homo sapien
tgcagctccatgcaaagcgttcagg

SEQ ID NO: 4038037 - DNA, 25 bp, Homo sapien
gcaaaacagctagatccatatggag

SEQ ID NO: 4038038 - DNA, 25 bp, Homo sapien
cagaatgagttcctatcaccaggct

SEQ ID NO: 4038039 - DNA, 25 bp, Homo sapien
cttctgttatgatcccatgggcagt

SEQ ID NO: 4038040 - DNA, 25 bp, Homo sapien
tcaccggggcttctgttatgatccc

SEQ ID NO: 4038041 - DNA, 25 bp, Homo sapien
tgttatgatcccatgggcagtttct

SEQ ID NO: 4038042 - DNA, 25 bp, Homo sapien
tcaatctgagaagactatcaccggg

SEQ ID NO: 4038043 - DNA, 25 bp, Homo sapien
gatgctttctgccaatcattagcct

SEQ ID NO: 4038044 - DNA, 25 bp, Homo sapien
tgtgcttggactcaagcctgtactc

SEQ ID NO: 4038045 - DNA, 25 bp, Homo sapien
catggcctgtagacccttgctcatt

SEQ ID NO: 4038046 - DNA, 25 bp, Homo sapien
ttgctcattctaggttgctttgtcc

SEQ ID NO: 4038047 - DNA, 25 bp, Homo sapien
cccagtccaatcctcatttagtgca

SEQ ID NO: 4038048 - DNA, 25 bp, Homo sapien
tctgaaattctatagcctgcagcca

SEQ ID NO: 4038049 - DNA, 25 bp, Homo sapien
cattcctttaccaactgtgagctca

SEQ ID NO: 4038050 - DNA, 25 bp, Homo sapien
cctcatttagtgcactggccccagt

SEQ ID NO: 4038051 - DNA, 25 bp, Homo sapien
gacgtgtgttgtttcagtagcctta

SEQ ID NO: 4038052 - DNA, 25 bp, Homo sapien
tgtgttgtttcagtagccttacccc

SEQ ID NO: 4038053 - DNA, 25 bp, Homo sapien
gtaagatgacgtgtgttgtttcagt

SEQ ID NO: 4038054 - DNA, 25 bp, Homo sapien
gatgacgtgtgttgtttcagtagcc

SEQ ID NO: 4038055 - DNA, 25 bp, Homo sapien
aactcaacagggcacgtgctggcct

SEQ ID NO: 4038056 - DNA, 25 bp, Homo sapien
ttcacagagcacaaaccagagcatg

SEQ ID NO: 4038057 - DNA, 25 bp, Homo sapien
aagccagtaaaccaggaaggaggag

SEQ ID NO: 4038058 - DNA, 25 bp, Homo sapien
cagagcatggattgattggagcacc

SEQ ID NO: 4038059 - DNA, 25 bp, Homo sapien
tttgacccattcctccttcacttta

SEQ ID NO: 4038060 - DNA, 25 bp, Homo sapien
caaaatccctaggtggccccatgga

SEQ ID NO: 4038061 - DNA, 25 bp, Homo sapien
ttggggagtgcaggaatttgaccca

SEQ ID NO: 4038062 - DNA, 25 bp, Homo sapien
cacaaaatccctaggtggccccatg

SEQ ID NO: 4038063 - DNA, 25 bp, Homo sapien
tttgtgtcccgccacatcctttact

SEQ ID NO: 4038064 - DNA, 25 bp, Homo sapien
cccagtagctgcaactctactcaaa

SEQ ID NO: 4038065 - DNA, 25 bp, Homo sapien
gtagctgcaactctactcaaagggc

SEQ ID NO: 4038066 - DNA, 25 bp, Homo sapien
tctctctaaacctttgtccatcaca

SEQ ID NO: 4038067 - DNA, 25 bp, Homo sapien
ctctccctctgtaatatgcctcgtt

SEQ ID NO: 4038068 - DNA, 25 bp, Homo sapien
ctccctctgtaatatgcctcgttca

SEQ ID NO: 4038069 - DNA, 25 bp, Homo sapien
tggaacaatgtggtcctctccctct

SEQ ID NO: 4038070 - DNA, 25 bp, Homo sapien
tccagaatctcatagctggcagggc

SEQ ID NO: 4038071 - DNA, 25 bp, Homo sapien
tcagcctgaatgatctgattgacag

SEQ ID NO: 4038072 - DNA, 25 bp, Homo sapien
cagcctgaatgatctgattgacagc

SEQ ID NO: 4038073 - DNA, 25 bp, Homo sapien
agcctgaatgatctgattgacagcc

SEQ ID NO: 4038074 - DNA, 25 bp, Homo sapien
tgattttccacctagtaaaccatgg

SEQ ID NO: 4038075 - DNA, 25 bp, Homo sapien
ttccacctagtaaaccatggattac

SEQ ID NO: 4038076 - DNA, 25 bp, Homo sapien
attttccacctagtaaaccatggat

SEQ ID NO: 4038077 - DNA, 25 bp, Homo sapien
ttgattttccacctagtaaaccatg

SEQ ID NO: 4038078 - DNA, 25 bp, Homo sapien
attctggctttagtacatgattggg

SEQ ID NO: 4038079 - DNA, 25 bp, Homo sapien
gaaaatgttcaagggtggattctgg

SEQ ID NO: 4038080 - DNA, 25 bp, Homo sapien
tggctttagtacatgattgggggag

SEQ ID NO: 4038081 - DNA, 25 bp, Homo sapien
tctggctttagtacatgattggggg

SEQ ID NO: 4038082 - DNA, 25 bp, Homo sapien
tcaatgttacatctaaagatgaaca

SEQ ID NO: 4038083 - DNA, 25 bp, Homo sapien
tatctcatatatcaatgttacatct

SEQ ID NO: 4038084 - DNA, 25 bp, Homo sapien
gggatcatggtgcttttccaattta

SEQ ID NO: 4038085 - DNA, 25 bp, Homo sapien
caaaggggatattgaccaacaaggc

SEQ ID NO: 4038086 - DNA, 25 bp, Homo sapien
tccagtgtgtcacgggccagtgcca

SEQ ID NO: 4038087 - DNA, 25 bp, Homo sapien
ctgtccagtgtgtcacgggccagtg

SEQ ID NO: 4038088 - DNA, 25 bp, Homo sapien
ccagaaagactgtgtattgaaaaac

SEQ ID NO: 4038089 - DNA, 25 bp, Homo sapien
gtccatcagctatggccagaaagac

SEQ ID NO: 4038090 - DNA, 25 bp, Homo sapien
acatgaatccgatgatcttctccag

SEQ ID NO: 4038091 - DNA, 25 bp, Homo sapien
caaaatgtagcttattagttctggg

SEQ ID NO: 4038092 - DNA, 25 bp, Homo sapien
tagttgttgtaagaatacgggctta

SEQ ID NO: 4038093 - DNA, 25 bp, Homo sapien
catggctattgcgtaggcttccaca

SEQ ID NO: 4038094 - DNA, 25 bp, Homo sapien
cctctccagtgcttttcctactcac

SEQ ID NO: 4038095 - DNA, 25 bp, Homo sapien
cccacacttcctctccagtgctttt

SEQ ID NO: 4038096 - DNA, 25 bp, Homo sapien
cacttcctctccagtgcttttccta

SEQ ID NO: 4038097 - DNA, 25 bp, Homo sapien
ttcctctccagtgcttttcctactc

SEQ ID NO: 4038098 - DNA, 25 bp, Homo sapien
aagctgtttgtccaattttgtttga

SEQ ID NO: 4038099 - DNA, 25 bp, Homo sapien
ccttggcgggagatgtcttctacat

SEQ ID NO: 4038100 - DNA, 25 bp, Homo sapien
atctaccaggatgacttttatcttg

SEQ ID NO: 4038101 - DNA, 25 bp, Homo sapien
tcttggcctgttcagatcctacaca

SEQ ID NO: 4038102 - DNA, 25 bp, Homo sapien
tccttaatacccctaaccaatggca

SEQ ID NO: 4038103 - DNA, 25 bp, Homo sapien
cttaatacccctaaccaatggcaat

SEQ ID NO: 4038104 - DNA, 25 bp, Homo sapien
atacccctaaccaatggcaatctct

SEQ ID NO: 4038105 - DNA, 25 bp, Homo sapien
taatacccctaaccaatggcaatct

SEQ ID NO: 4038106 - DNA, 25 bp, Homo sapien
taactctccattcatgcatagcaaa

SEQ ID NO: 4038107 - DNA, 25 bp, Homo sapien
ggcaggtggtgcatagacaccattc

SEQ ID NO: 4038108 - DNA, 25 bp, Homo sapien
tggtcctattttgcctccagcaatc

SEQ ID NO: 4038109 - DNA, 25 bp, Homo sapien
tcaaacttggcctattcaatcccaa

SEQ ID NO: 4038110 - DNA, 25 bp, Homo sapien
gttatattgaagtccagtgctgaaa

SEQ ID NO: 4038111 - DNA, 25 bp, Homo sapien
aacgataataacagctgttgcaaaa

SEQ ID NO: 4038112 - DNA, 25 bp, Homo sapien
ttatattgaagtccagtgctgaaaa

SEQ ID NO: 4038113 - DNA, 25 bp, Homo sapien
taataacagctgttgcaaaacaaaa

SEQ ID NO: 4038114 - DNA, 25 bp, Homo sapien
cagaaattatgctgcacgaaggcat

SEQ ID NO: 4038115 - DNA, 25 bp, Homo sapien
tcatacagcagtacaggttaatgca

SEQ ID NO: 4038116 - DNA, 25 bp, Homo sapien
tccatcaggtggtaatatattgcag

SEQ ID NO: 4038117 - DNA, 25 bp, Homo sapien
tctgactcgggaactaatgacccct

SEQ ID NO: 4038118 - DNA, 25 bp, Homo sapien
cagttgaaaacagacttcacttgca

SEQ ID NO: 4038119 - DNA, 25 bp, Homo sapien
caagcaatacttcatgggttttcaa

SEQ ID NO: 4038120 - DNA, 25 bp, Homo sapien
agaaaaagcgcaccaagtacttact

SEQ ID NO: 4038121 - DNA, 25 bp, Homo sapien
tcctctggaattgaccatcagtggc

SEQ ID NO: 4038122 - DNA, 25 bp, Homo sapien
cacatagtagctgtggagcgcacca

SEQ ID NO: 4038123 - DNA, 25 bp, Homo sapien
caacaactttgagggatccatattc

SEQ ID NO: 4038124 - DNA, 25 bp, Homo sapien
taggattctggtcagggttgacact

SEQ ID NO: 4038125 - DNA, 25 bp, Homo sapien
ggctgtttgaacactgatacctgtc

SEQ ID NO: 4038126 - DNA, 25 bp, Homo sapien
taagactgttgccagtggtaatttg

SEQ ID NO: 4038127 - DNA, 25 bp, Homo sapien
ttatagcttctgacaggacagatgc

SEQ ID NO: 4038128 - DNA, 25 bp, Homo sapien
gactgttgccagtggtaatttgcaa

SEQ ID NO: 4038129 - DNA, 25 bp, Homo sapien
tagcttctgacaggacagatgctgt

SEQ ID NO: 4038130 - DNA, 25 bp, Homo sapien
gggatagtggtcacactgctctcaa

SEQ ID NO: 4038131 - DNA, 25 bp, Homo sapien
tttgttgttgcatcaaaatacagtc

SEQ ID NO: 4038132 - DNA, 25 bp, Homo sapien
ctttgttgttgcatcaaaatacagt

SEQ ID NO: 4038133 - DNA, 25 bp, Homo sapien
ttgttgttgcatcaaaatacagtcc

SEQ ID NO: 4038134 - DNA, 25 bp, Homo sapien
tgttgttgcatcaaaatacagtcca

SEQ ID NO: 4038135 - DNA, 25 bp, Homo sapien
gaaacttgtcactcaaaacacggaa

SEQ ID NO: 4038136 - DNA, 25 bp, Homo sapien
tagtcatcagtatgtcccaggattc

SEQ ID NO: 4038137 - DNA, 25 bp, Homo sapien
cagagaggccagtttatagtcatca

SEQ ID NO: 4038138 - DNA, 25 bp, Homo sapien
tctaatagacacttgagaggaccgt

SEQ ID NO: 4038139 - DNA, 25 bp, Homo sapien
ctgcgataatacttgagtctgtgtc

SEQ ID NO: 4038140 - DNA, 25 bp, Homo sapien
tgggggctcccgatggcagggatgg

SEQ ID NO: 4038141 - DNA, 25 bp, Homo sapien
actgtatttgcgactggtgctgctg

SEQ ID NO: 4038142 - DNA, 25 bp, Homo sapien
ctgtatttgcgactggtgctgctga

SEQ ID NO: 4038143 - DNA, 25 bp, Homo sapien
ctgccgaggagaaggctgagactgg

SEQ ID NO: 4038144 - DNA, 25 bp, Homo sapien
tgccgaggagaaggctgagactggt

SEQ ID NO: 4038145 - DNA, 25 bp, Homo sapien
gccgaggagaaggctgagactggtg

SEQ ID NO: 4038146 - DNA, 25 bp, Homo sapien
atgtggtgctggaaatgctgctgct

SEQ ID NO: 4038147 - DNA, 25 bp, Homo sapien
tgattaatttgctgctggagatgct

SEQ ID NO: 4038148 - DNA, 25 bp, Homo sapien
ctgctgctggatttgctgatgcatt

SEQ ID NO: 4038149 - DNA, 25 bp, Homo sapien
tgcagctgctgttgattaatttgct

SEQ ID NO: 4038150 - DNA, 25 bp, Homo sapien
gctgctgctgcaattgcatctgatg

SEQ ID NO: 4038151 - DNA, 25 bp, Homo sapien
tgctgctgcaattgcatctgatgct

SEQ ID NO: 4038152 - DNA, 25 bp, Homo sapien
gctgctgcaattgcatctgatgctg

SEQ ID NO: 4038153 - DNA, 25 bp, Homo sapien
tgctgcaattgcatctgatgctgct

SEQ ID NO: 4038154 - DNA, 25 bp, Homo sapien
tctgctgaacagaacggatggtctg

SEQ ID NO: 4038155 - DNA, 25 bp, Homo sapien
tagattggtcgacgccagggtctgc

SEQ ID NO: 4038156 - DNA, 25 bp, Homo sapien
tcgttcccatggagcttatcagtgg

SEQ ID NO: 4038157 - DNA, 25 bp, Homo sapien
tcagtggagccccaatgttcgaggg

SEQ ID NO: 4038158 - DNA, 25 bp, Homo sapien
aggctggccctgtatgccgccaggg

SEQ ID NO: 4038159 - DNA, 25 bp, Homo sapien
acgaggctggccctgtatgccgcca

SEQ ID NO: 4038160 - DNA, 25 bp, Homo sapien
ttagaaacgaggctggccctgtatg

SEQ ID NO: 4038161 - DNA, 25 bp, Homo sapien
ccgccagggccttcaggtattcttt

SEQ ID NO: 4038162 - DNA, 25 bp, Homo sapien
aaatgcccggtgacaataatgagac

SEQ ID NO: 4038163 - DNA, 25 bp, Homo sapien
gagacgaagcccctaaggaagtatc

SEQ ID NO: 4038164 - DNA, 25 bp, Homo sapien
gagatttccattagtgaccccactg

SEQ ID NO: 4038165 - DNA, 25 bp, Homo sapien
ggaagtatctcccacaagcatggct

SEQ ID NO: 4038166 - DNA, 25 bp, Homo sapien
ttgatggagccttgatgggtctttg

SEQ ID NO: 4038167 - DNA, 25 bp, Homo sapien
aatgatcatgaggtttattgatgga

SEQ ID NO: 4038168 - DNA, 25 bp, Homo sapien
tgatcatgaggtttattgatggagc

SEQ ID NO: 4038169 - DNA, 25 bp, Homo sapien
tggagccttgatgggtctttgtctc

SEQ ID NO: 4038170 - DNA, 25 bp, Homo sapien
gtgtgtctctgaaaaacagggcata

SEQ ID NO: 4038171 - DNA, 25 bp, Homo sapien
tttgacctttaattgcagcctgtgt

SEQ ID NO: 4038172 - DNA, 25 bp, Homo sapien
ccaaggctgtcccacatagatgcta

SEQ ID NO: 4038173 - DNA, 25 bp, Homo sapien
tctctgaaaaacagggcatatgctg

SEQ ID NO: 4038174 - DNA, 25 bp, Homo sapien
tcttggataaccatgatgtgcccta

SEQ ID NO: 4038175 - DNA, 25 bp, Homo sapien
taaaatggagcaagctaggagtccc

SEQ ID NO: 4038176 - DNA, 25 bp, Homo sapien
tagtgccacaataccctgaccaatg

SEQ ID NO: 4038177 - DNA, 25 bp, Homo sapien
gagtcagatgcctttcagttagagc

SEQ ID NO: 4038178 - DNA, 25 bp, Homo sapien
catgtggacgatggaccgcatgatc

SEQ ID NO: 4038179 - DNA, 25 bp, Homo sapien
gatgtgtgaggcatactggcacctc

SEQ ID NO: 4038180 - DNA, 25 bp, Homo sapien
cctgccggtactgggacacttgtgt

SEQ ID NO: 4038181 - DNA, 25 bp, Homo sapien
aacgcgcagcatcggtcatgtggac

SEQ ID NO: 4038182 - DNA, 25 bp, Homo sapien
tcatccattagtttaccatccttct

SEQ ID NO: 4038183 - DNA, 25 bp, Homo sapien
catccattagtttaccatccttctc

SEQ ID NO: 4038184 - DNA, 25 bp, Homo sapien
tacacaagcctatgaattcttaact

SEQ ID NO: 4038185 - DNA, 25 bp, Homo sapien
gcctatgaattcttaactgttcctt

SEQ ID NO: 4038186 - DNA, 25 bp, Homo sapien
ttttgagtccttccgataaggctta

SEQ ID NO: 4038187 - DNA, 25 bp, Homo sapien
ccagaatctaattttatacacaagc

SEQ ID NO: 4038188 - DNA, 25 bp, Homo sapien
ccacacctagagcatttttcagatg

SEQ ID NO: 4038189 - DNA, 25 bp, Homo sapien
cacacctagagcatttttcagatgg

SEQ ID NO: 4038190 - DNA, 25 bp, Homo sapien
cccacacctagagcatttttcagat

SEQ ID NO: 4038191 - DNA, 25 bp, Homo sapien
aaccaacccatctaaatcaattgcg

SEQ ID NO: 4038192 - DNA, 25 bp, Homo sapien
ggacaaccaacccatctaaatcaat

SEQ ID NO: 4038193 - DNA, 25 bp, Homo sapien
ctcatggacaaccaacccatctaaa

SEQ ID NO: 4038194 - DNA, 25 bp, Homo sapien
aacccatctaaatcaattgcggaca

SEQ ID NO: 4038195 - DNA, 25 bp, Homo sapien
caatacccctttgttcaataccagg

SEQ ID NO: 4038196 - DNA, 25 bp, Homo sapien
cagcgatccagtacctgcatgtaaa

SEQ ID NO: 4038197 - DNA, 25 bp, Homo sapien
tgttcaataccaggcagcgatccag

SEQ ID NO: 4038198 - DNA, 25 bp, Homo sapien
agtacctgcatgtaaatagcactag

SEQ ID NO: 4038199 - DNA, 25 bp, Homo sapien
tatgcaacccactgctatgaagcac

SEQ ID NO: 4038200 - DNA, 25 bp, Homo sapien
gcacgccatcttgttccacgagatt

SEQ ID NO: 4038201 - DNA, 25 bp, Homo sapien
ttcttgagattgtaatggaagggag

SEQ ID NO: 4038202 - DNA, 25 bp, Homo sapien
caatggatcgctgagggcttgaaag

SEQ ID NO: 4038203 - DNA, 25 bp, Homo sapien
tggtggaatttcgaattcctcgtcc

SEQ ID NO: 4038204 - DNA, 25 bp, Homo sapien
tggaatttcgaattcctcgtcccca

SEQ ID NO: 4038205 - DNA, 25 bp, Homo sapien
gattggtggaatttcgaattcctcg

SEQ ID NO: 4038206 - DNA, 25 bp, Homo sapien
tgattggtggaatttcgaattcctc

SEQ ID NO: 4038207 - DNA, 25 bp, Homo sapien
agaacgcattgttcgcctcagccat

SEQ ID NO: 4038208 - DNA, 25 bp, Homo sapien
cagcgaagaacgcattgttcgcctc

SEQ ID NO: 4038209 - DNA, 25 bp, Homo sapien
tggcagcgaagaacgcattgttcgc

SEQ ID NO: 4038210 - DNA, 25 bp, Homo sapien
gaagaacgcattgttcgcctcagcc

SEQ ID NO: 4038211 - DNA, 25 bp, Homo sapien
tcatatagttattattatttccaaa

SEQ ID NO: 4038212 - DNA, 25 bp, Homo sapien
ttcatatagttattattatttccaa

SEQ ID NO: 4038213 - DNA, 25 bp, Homo sapien
attcatatagttattattatttcca

SEQ ID NO: 4038214 - DNA, 25 bp, Homo sapien
aacagattgttttacgttaatatgt

SEQ ID NO: 4038215 - DNA, 25 bp, Homo sapien
cagattgttttacgttaatatgtgg

SEQ ID NO: 4038216 - DNA, 25 bp, Homo sapien
gattgttttacgttaatatgtggca

SEQ ID NO: 4038217 - DNA, 25 bp, Homo sapien
tgttttacgttaatatgtggcataa

SEQ ID NO: 4038218 - DNA, 25 bp, Homo sapien
gtaatatggaaaggctctgtgagta

SEQ ID NO: 4038219 - DNA, 25 bp, Homo sapien
ggttcaaatggtctaaatcggcaca

SEQ ID NO: 4038220 - DNA, 25 bp, Homo sapien
ctccaaagggtgaaatgtgtatatc

SEQ ID NO: 4038221 - DNA, 25 bp, Homo sapien
aaacataggtttgatctccaaaggg

SEQ ID NO: 4038222 - DNA, 25 bp, Homo sapien
cgacaagctctcactgagcactcag

SEQ ID NO: 4038223 - DNA, 25 bp, Homo sapien
aatgcacatacaatgagtcatccga

SEQ ID NO: 4038224 - DNA, 25 bp, Homo sapien
tacaatgagtcatccgacaagctct

SEQ ID NO: 4038225 - DNA, 25 bp, Homo sapien
agtcatccgacaagctctcactgag

SEQ ID NO: 4038226 - DNA, 25 bp, Homo sapien
caaatgaactgtgccatgatggatc

SEQ ID NO: 4038227 - DNA, 25 bp, Homo sapien
gcacgtgaaggctcggttaactacc

SEQ ID NO: 4038228 - DNA, 25 bp, Homo sapien
tggcagaggccggactgcaaagtcc

SEQ ID NO: 4038229 - DNA, 25 bp, Homo sapien
tgatggatcaagtgtgccacgcacg

SEQ ID NO: 4038230 - DNA, 25 bp, Homo sapien
ttttatagagccctaggtggatggg

SEQ ID NO: 4038231 - DNA, 25 bp, Homo sapien
ctagggataggtgccttccgtggct

SEQ ID NO: 4038232 - DNA, 25 bp, Homo sapien
tgcaatgaacaacacagattctagc

SEQ ID NO: 4038233 - DNA, 25 bp, Homo sapien
ccttccgtggctgagcacaaactgc

SEQ ID NO: 4038234 - DNA, 25 bp, Homo sapien
caaaggaaaatagtcatggtataac

SEQ ID NO: 4038235 - DNA, 25 bp, Homo sapien
caattctgaagcagtttgaatgaca

SEQ ID NO: 4038236 - DNA, 25 bp, Homo sapien
catatccagtttgacagaattcttt

SEQ ID NO: 4038237 - DNA, 25 bp, Homo sapien
aacatgattcaaaaccatatccagt

SEQ ID NO: 4038238 - DNA, 25 bp, Homo sapien
agtaaatgttcagcggtaaaaacag

SEQ ID NO: 4038239 - DNA, 25 bp, Homo sapien
gttcagcggtaaaaacagaattgct

SEQ ID NO: 4038240 - DNA, 25 bp, Homo sapien
agtactttctaaagacaggtgacaa

SEQ ID NO: 4038241 - DNA, 25 bp, Homo sapien
aagaagtactttctaaagacaggtg

SEQ ID NO: 4038242 - DNA, 25 bp, Homo sapien
aaatggtattgggagccttccagaa

SEQ ID NO: 4038243 - DNA, 25 bp, Homo sapien
tcccagtgctgtacaagattccaat

SEQ ID NO: 4038244 - DNA, 25 bp, Homo sapien
tgtggaaatgttgctctctgctact

SEQ ID NO: 4038245 - DNA, 25 bp, Homo sapien
tatatacagagcagaggttattgtc

SEQ ID NO: 4038246 - DNA, 25 bp, Homo sapien
cttttagcccaaatatgacactgat

SEQ ID NO: 4038247 - DNA, 25 bp, Homo sapien
acaatactgctcacttttagcccaa

SEQ ID NO: 4038248 - DNA, 25 bp, Homo sapien
atgagattccatcacacttgcagca

SEQ ID NO: 4038249 - DNA, 25 bp, Homo sapien
acactgataaatgaagcgatgagat

SEQ ID NO: 4038250 - DNA, 25 bp, Homo sapien
tgtacgcggggccttatcacagatg

SEQ ID NO: 4038251 - DNA, 25 bp, Homo sapien
ttcctcaatcacagtttcaagtgag

SEQ ID NO: 4038252 - DNA, 25 bp, Homo sapien
tcaaatgaaggatgtacgcggggcc

SEQ ID NO: 4038253 - DNA, 25 bp, Homo sapien
cttcctcaatcacagtttcaagtga

SEQ ID NO: 4038254 - DNA, 25 bp, Homo sapien
ccctatggcttcaaacacatacctg

SEQ ID NO: 4038255 - DNA, 25 bp, Homo sapien
tccctatggcttcaaacacatacct

SEQ ID NO: 4038256 - DNA, 25 bp, Homo sapien
ggttctactgagctgaaaatatgtt

SEQ ID NO: 4038257 - DNA, 25 bp, Homo sapien
cctatggcttcaaacacatacctgc

SEQ ID NO: 4038258 - DNA, 25 bp, Homo sapien
catccaaaagctgatcagatttctt

SEQ ID NO: 4038259 - DNA, 25 bp, Homo sapien
gtacataatgtcacgttgcatacca

SEQ ID NO: 4038260 - DNA, 25 bp, Homo sapien
catgtaagtacataatgtcacgttg

SEQ ID NO: 4038261 - DNA, 25 bp, Homo sapien
acatccaaaagctgatcagatttct

SEQ ID NO: 4038262 - DNA, 25 bp, Homo sapien
tatgagtgcagtgatcaactgtgcg

SEQ ID NO: 4038263 - DNA, 25 bp, Homo sapien
gacactgttaccactagagtaccta

SEQ ID NO: 4038264 - DNA, 25 bp, Homo sapien
tgtgcgtacacagcttcagtggatg

SEQ ID NO: 4038265 - DNA, 25 bp, Homo sapien
gccatctgtgccgatgacactgtta

SEQ ID NO: 4038266 - DNA, 25 bp, Homo sapien
tcgtcttttatggagtatagagctg

SEQ ID NO: 4038267 - DNA, 25 bp, Homo sapien
tatcacagttggatatgaccagtgg

SEQ ID NO: 4038268 - DNA, 25 bp, Homo sapien
tgcatttacttagtgactgtcgtct

SEQ ID NO: 4038269 - DNA, 25 bp, Homo sapien
tatagagctgtttatcacagttgga

SEQ ID NO: 4038270 - DNA, 25 bp, Homo sapien
tggtcaattctgtccaatgtttctg

SEQ ID NO: 4038271 - DNA, 25 bp, Homo sapien
ttggtcaattctgtccaatgtttct

SEQ ID NO: 4038272 - DNA, 25 bp, Homo sapien
caaggatggtagctcggatggattc

SEQ ID NO: 4038273 - DNA, 25 bp, Homo sapien
agtgttcaaggatggtagctcggat

SEQ ID NO: 4038274 - DNA, 25 bp, Homo sapien
caaatgagtgttcaaggatggtagc

SEQ ID NO: 4038275 - DNA, 25 bp, Homo sapien
aacaagccaaatgagtgttcaagga

SEQ ID NO: 4038276 - DNA, 25 bp, Homo sapien
aataagtgttaatcactttatctcc

SEQ ID NO: 4038277 - DNA, 25 bp, Homo sapien
agccttgaaatcgttggtcggcagg

SEQ ID NO: 4038278 - DNA, 25 bp, Homo sapien
ccataaagccttgaaatcgttggtc

SEQ ID NO: 4038279 - DNA, 25 bp, Homo sapien
taaagccttgaaatcgttggtcggc

SEQ ID NO: 4038280 - DNA, 25 bp, Homo sapien
gttagaggatacagacaatgaagtc

SEQ ID NO: 4038281 - DNA, 25 bp, Homo sapien
ctggttagaggatacagacaatgaa

SEQ ID NO: 4038282 - DNA, 25 bp, Homo sapien
tggttagaggatacagacaatgaag

SEQ ID NO: 4038283 - DNA, 25 bp, Homo sapien
ttagaggatacagacaatgaagtcc

SEQ ID NO: 4038284 - DNA, 25 bp, Homo sapien
taaactatgaagaaaggctccgatg

SEQ ID NO: 4038285 - DNA, 25 bp, Homo sapien
aagcttcaccctaataatcatgcag

SEQ ID NO: 4038286 - DNA, 25 bp, Homo sapien
taccccactggcaattagaaatcgt

SEQ ID NO: 4038287 - DNA, 25 bp, Homo sapien
tagaaatcgttagccaaagccagga

SEQ ID NO: 4038288 - DNA, 25 bp, Homo sapien
ggcactcaaagcgaagactggaaaa

SEQ ID NO: 4038289 - DNA, 25 bp, Homo sapien
atgaaaaggattccgcagcaaaggc

SEQ ID NO: 4038290 - DNA, 25 bp, Homo sapien
aaagttgttacaagtgaggtggcac

SEQ ID NO: 4038291 - DNA, 25 bp, Homo sapien
tcataagtaaaagattggaggtccc

SEQ ID NO: 4038292 - DNA, 25 bp, Homo sapien
ttcagcaggctccttatttcctcct

SEQ ID NO: 4038293 - DNA, 25 bp, Homo sapien
gctccttatttcctcctgttatcca

SEQ ID NO: 4038294 - DNA, 25 bp, Homo sapien
ttatttcctcctgttatccaagcaa

SEQ ID NO: 4038295 - DNA, 25 bp, Homo sapien
tttcctcctgttatccaagcaatca

SEQ ID NO: 4038296 - DNA, 25 bp, Homo sapien
gcgatcgtgtttactaataacagca

SEQ ID NO: 4038297 - DNA, 25 bp, Homo sapien
aacagcaacaaacaatcacacgcca

SEQ ID NO: 4038298 - DNA, 25 bp, Homo sapien
acagcaacaaacaatcacacgccag

SEQ ID NO: 4038299 - DNA, 25 bp, Homo sapien
gggggctgcgatcgtgtttactaat

SEQ ID NO: 4038300 - DNA, 25 bp, Homo sapien
cctcgggctctcttcgcttttttgg

SEQ ID NO: 4038301 - DNA, 25 bp, Homo sapien
tcagtcctcgggctctcttcgcttt

SEQ ID NO: 4038302 - DNA, 25 bp, Homo sapien
ctctcttcgcttttttggggcagca

SEQ ID NO: 4038303 - DNA, 25 bp, Homo sapien
agtcctcgggctctcttcgcttttt

SEQ ID NO: 4038304 - DNA, 25 bp, Homo sapien
gaggtgggagggagcggaggggctg

SEQ ID NO: 4038305 - DNA, 25 bp, Homo sapien
ggagcggaggggctgaggagagcgc

SEQ ID NO: 4038306 - DNA, 25 bp, Homo sapien
agggagcggaggggctgaggagagc

SEQ ID NO: 4038307 - DNA, 25 bp, Homo sapien
gcggaggggctgaggagagcgccgg

SEQ ID NO: 4038308 - DNA, 25 bp, Homo sapien
gtagaacctcacatccatgccgaag

SEQ ID NO: 4038309 - DNA, 25 bp, Homo sapien
cttgctgtagccgtagtaccccagg

SEQ ID NO: 4038310 - DNA, 25 bp, Homo sapien
gggtagaacctcacatccatgccga

SEQ ID NO: 4038311 - DNA, 25 bp, Homo sapien
tagtaccccaggcactgcgcgaagt

SEQ ID NO: 4038312 - DNA, 25 bp, Homo sapien
gtggcgcgtgggactcgcggccgga

SEQ ID NO: 4038313 - DNA, 25 bp, Homo sapien
cgcggccacgcgagccgcgggagag

SEQ ID NO: 4038314 - DNA, 25 bp, Homo sapien
gggcaccgaggcagcgctgcgcgcg

SEQ ID NO: 4038315 - DNA, 25 bp, Homo sapien
gccgctagatccaccgtcgagggcg

SEQ ID NO: 4038316 - DNA, 25 bp, Homo sapien
ttcccaggtgaagcctcgtgtcggt

SEQ ID NO: 4038317 - DNA, 25 bp, Homo sapien
taggcagacttgaagcttcccaggt

SEQ ID NO: 4038318 - DNA, 25 bp, Homo sapien
aagttcacctgtaggatttcccaga

SEQ ID NO: 4038319 - DNA, 25 bp, Homo sapien
aacctgcacgagtgtctcccggtag

SEQ ID NO: 4038320 - DNA, 25 bp, Homo sapien
tgtatacatgccctgaaccatccca

SEQ ID NO: 4038321 - DNA, 25 bp, Homo sapien
cacacgtgtatacatgccctgaacc

SEQ ID NO: 4038322 - DNA, 25 bp, Homo sapien
gtatacatgccctgaaccatcccag

SEQ ID NO: 4038323 - DNA, 25 bp, Homo sapien
acgtgtatacatgccctgaaccatc

SEQ ID NO: 4038324 - DNA, 25 bp, Homo sapien
tgcaggacctaaagcgaatcaccat

SEQ ID NO: 4038325 - DNA, 25 bp, Homo sapien
acctgatgacacattaccagtgcag

SEQ ID NO: 4038326 - DNA, 25 bp, Homo sapien
ctgggagacctgatgacacattacc

SEQ ID NO: 4038327 - DNA, 25 bp, Homo sapien
attaccagtgcaggacctaaagcga

SEQ ID NO: 4038328 - DNA, 25 bp, Homo sapien
caggaattatagtgtgaaaaaaaat

SEQ ID NO: 4038329 - DNA, 25 bp, Homo sapien
aagaccaccggctgaacaatgaaag

SEQ ID NO: 4038330 - DNA, 25 bp, Homo sapien
gaagtccagacagtcttcagcagga

SEQ ID NO: 4038331 - DNA, 25 bp, Homo sapien
cttcacgataagcatcaaagccagg

SEQ ID NO: 4038332 - DNA, 25 bp, Homo sapien
cagtactttcttcgcaaatgggtgg

SEQ ID NO: 4038333 - DNA, 25 bp, Homo sapien
tttctttctgatcccctgagggtag

SEQ ID NO: 4038334 - DNA, 25 bp, Homo sapien
gcagccataaatctggagaggtcat

SEQ ID NO: 4038335 - DNA, 25 bp, Homo sapien
cctgagggtagctcattatatgccc

SEQ ID NO: 4038336 - DNA, 25 bp, Homo sapien
gtagctcattatatgcccctcccta

SEQ ID NO: 4038337 - DNA, 25 bp, Homo sapien
tgttgacgtccaccaagggctatac

SEQ ID NO: 4038338 - DNA, 25 bp, Homo sapien
ttttgttgacgtccaccaagggcta

SEQ ID NO: 4038339 - DNA, 25 bp, Homo sapien
tttgttgacgtccaccaagggctat

SEQ ID NO: 4038340 - DNA, 25 bp, Homo sapien
gttgacgtccaccaagggctatacc

SEQ ID NO: 4038341 - DNA, 25 bp, Homo sapien
gacatctggtaaagtctatgaaccc

SEQ ID NO: 4038342 - DNA, 25 bp, Homo sapien
gcagacttaacccaagagatgactt

SEQ ID NO: 4038343 - DNA, 25 bp, Homo sapien
ttcttaaggaaaatgctatgggctc

SEQ ID NO: 4038344 - DNA, 25 bp, Homo sapien
tatgacaaagctaaaagtggtgtgc

SEQ ID NO: 4038345 - DNA, 25 bp, Homo sapien
tatgcccgatttcagtttcccatgt

SEQ ID NO: 4038346 - DNA, 25 bp, Homo sapien
tcttccgcagggatatgcccgattt

SEQ ID NO: 4038347 - DNA, 25 bp, Homo sapien
agggatatgcccgatttcagtttcc

SEQ ID NO: 4038348 - DNA, 25 bp, Homo sapien
tccgcagggatatgcccgatttcag

SEQ ID NO: 4038349 - DNA, 25 bp, Homo sapien
tcagcgtgtagaggaggtgagtact

SEQ ID NO: 4038350 - DNA, 25 bp, Homo sapien
tctggggaagttgtcagcgtgtaga

SEQ ID NO: 4038351 - DNA, 25 bp, Homo sapien
tggtctggggaagttgtcagcgtgt

SEQ ID NO: 4038352 - DNA, 25 bp, Homo sapien
cgtgtagaggaggtgagtactgagc

SEQ ID NO: 4038353 - DNA, 25 bp, Homo sapien
tagtcacttgtgaaccactgaagcc

SEQ ID NO: 4038354 - DNA, 25 bp, Homo sapien
gatggccacaacttcctttacacgg

SEQ ID NO: 4038355 - DNA, 25 bp, Homo sapien
tgtccatgcacacagaagctttagg

SEQ ID NO: 4038356 - DNA, 25 bp, Homo sapien
tacacggtgaataacaagagcagct

SEQ ID NO: 4038357 - DNA, 25 bp, Homo sapien
gaattgttcctgtaggcattccttt

SEQ ID NO: 4038358 - DNA, 25 bp, Homo sapien
tatttggtgctatgccaaaatcatc

SEQ ID NO: 4038359 - DNA, 25 bp, Homo sapien
tatacagttctttcagactgtcctg

SEQ ID NO: 4038360 - DNA, 25 bp, Homo sapien
aagcagatgtgggtcagggagaaag

SEQ ID NO: 4038361 - DNA, 25 bp, Homo sapien
tggccagaatcactacattcatcgc

SEQ ID NO: 4038362 - DNA, 25 bp, Homo sapien
cattcatcgcagataccatgtgctg

SEQ ID NO: 4038363 - DNA, 25 bp, Homo sapien
tgtgctgtctattggataccctcat

SEQ ID NO: 4038364 - DNA, 25 bp, Homo sapien
catcgcagataccatgtgctgtcta

SEQ ID NO: 4038365 - DNA, 25 bp, Homo sapien
gacttcaatgaacacatcactctct

SEQ ID NO: 4038366 - DNA, 25 bp, Homo sapien
tttactctctttcaaagtgacataa

SEQ ID NO: 4038367 - DNA, 25 bp, Homo sapien
ggagctgattccagtacgcgattga

SEQ ID NO: 4038368 - DNA, 25 bp, Homo sapien
tccttgatggcaacatggcccacac

SEQ ID NO: 4038369 - DNA, 25 bp, Homo sapien
cacacattatctaacctccagacaa

SEQ ID NO: 4038370 - DNA, 25 bp, Homo sapien
gggaagttgtcctcaatgacctcca

SEQ ID NO: 4038371 - DNA, 25 bp, Homo sapien
ctggggggaagttgtcctcaatgac

SEQ ID NO: 4038372 - DNA, 25 bp, Homo sapien
ttgtgccaggtttgtgataggaatc

SEQ ID NO: 4038373 - DNA, 25 bp, Homo sapien
ctgattgtgccaggtttgtgatagg

SEQ ID NO: 4038374 - DNA, 25 bp, Homo sapien
tacagttccatgtacccacgtggct

SEQ ID NO: 4038375 - DNA, 25 bp, Homo sapien
gaccacttccagaccggacttacaa

SEQ ID NO: 4038376 - DNA, 25 bp, Homo sapien
tggattctgaacaatgaccacttcc

SEQ ID NO: 4038377 - DNA, 25 bp, Homo sapien
cttccgagaagatccaatggaggac

SEQ ID NO: 4038378 - DNA, 25 bp, Homo sapien
gatgctggaattgcctaacaaggat

SEQ ID NO: 4038379 - DNA, 25 bp, Homo sapien
tagaaagggcatgtctcctagccag

SEQ ID NO: 4038380 - DNA, 25 bp, Homo sapien
cagtatacagtaaaaagccatgaca

SEQ ID NO: 4038381 - DNA, 25 bp, Homo sapien
tcaactgacagccatgctcagatga

SEQ ID NO: 4038382 - DNA, 25 bp, Homo sapien
aatgtggaagttgtagcgctgcccc

SEQ ID NO: 4038383 - DNA, 25 bp, Homo sapien
taaaggtttccacacagcgttctgt

SEQ ID NO: 4038384 - DNA, 25 bp, Homo sapien
gatgtgaacaccactagaggatggt

SEQ ID NO: 4038385 - DNA, 25 bp, Homo sapien
tcaagccctgtaaagaccaatgtgg

SEQ ID NO: 4038386 - DNA, 25 bp, Homo sapien
cctctttaaattgagcagctggttt

SEQ ID NO: 4038387 - DNA, 25 bp, Homo sapien
tctcactgcttcagttcctctttaa

SEQ ID NO: 4038388 - DNA, 25 bp, Homo sapien
catctcagaatacagtaacatctca

SEQ ID NO: 4038389 - DNA, 25 bp, Homo sapien
aactctattagctttgaggctgaga

SEQ ID NO: 4038390 - DNA, 25 bp, Homo sapien
tacaggatagggagcgtcctcacaa

SEQ ID NO: 4038391 - DNA, 25 bp, Homo sapien
caatgggctggagctttcagctgat

SEQ ID NO: 4038392 - DNA, 25 bp, Homo sapien
gaattgtaagggtgttggcctacca

SEQ ID NO: 4038393 - DNA, 25 bp, Homo sapien
cctcacaattcagaaagcagttgtc

SEQ ID NO: 4038394 - DNA, 25 bp, Homo sapien
ccttttaggatgtagggacacccag

SEQ ID NO: 4038395 - DNA, 25 bp, Homo sapien
tggtcgaaggagatccccagatgca

SEQ ID NO: 4038396 - DNA, 25 bp, Homo sapien
gagaacagccctcaataagatctgg

SEQ ID NO: 4038397 - DNA, 25 bp, Homo sapien
tccccatctaggaaaagggcaatgg

SEQ ID NO: 4038398 - DNA, 25 bp, Homo sapien
tagtcccagtgtgcagtagcagaag

SEQ ID NO: 4038399 - DNA, 25 bp, Homo sapien
actgccctgctagccacagtcctct

SEQ ID NO: 4038400 - DNA, 25 bp, Homo sapien
cagtagcagaaggtaagacggcact

SEQ ID NO: 4038401 - DNA, 25 bp, Homo sapien
aaggtaagacggcactgccctgcta

SEQ ID NO: 4038402 - DNA, 25 bp, Homo sapien
tgtataaaacacagttgccaaaatc

SEQ ID NO: 4038403 - DNA, 25 bp, Homo sapien
tcactgttgcactgtataaaacaca

SEQ ID NO: 4038404 - DNA, 25 bp, Homo sapien
gccaaaatctgcttaaagactaggg

SEQ ID NO: 4038405 - DNA, 25 bp, Homo sapien
agttgccaaaatctgcttaaagact

SEQ ID NO: 4038406 - DNA, 25 bp, Homo sapien
tatggaacctctgcaacttgcaact

SEQ ID NO: 4038407 - DNA, 25 bp, Homo sapien
ggaacctctgcaacttgcaacttgt

SEQ ID NO: 4038408 - DNA, 25 bp, Homo sapien
ctatggaacctctgcaacttgcaac

SEQ ID NO: 4038409 - DNA, 25 bp, Homo sapien
tggaacctctgcaacttgcaacttg

SEQ ID NO: 4038410 - DNA, 25 bp, Homo sapien
gacaggtaatgcaggatttccatcc

SEQ ID NO: 4038411 - DNA, 25 bp, Homo sapien
gtaatgcaggatttccatcctgtgg

SEQ ID NO: 4038412 - DNA, 25 bp, Homo sapien
agtgagagacaggacaggtaatgca

SEQ ID NO: 4038413 - DNA, 25 bp, Homo sapien
gtgagagacaggacaggtaatgcag

SEQ ID NO: 4038414 - DNA, 25 bp, Homo sapien
taataccacttttgagcagttccat

SEQ ID NO: 4038415 - DNA, 25 bp, Homo sapien
tattatcttgtatggcagctggcat

SEQ ID NO: 4038416 - DNA, 25 bp, Homo sapien
caaccaaaatggactattatgtaag

SEQ ID NO: 4038417 - DNA, 25 bp, Homo sapien
tagatccctgaattaccccttgaaa

SEQ ID NO: 4038418 - DNA, 25 bp, Homo sapien
ggagccaccagggaacatgacttaa

SEQ ID NO: 4038419 - DNA, 25 bp, Homo sapien
taaactcaaccaatcgcatactgtg

SEQ ID NO: 4038420 - DNA, 25 bp, Homo sapien
ggtagtagctttctcgtccctctgc

SEQ ID NO: 4038421 - DNA, 25 bp, Homo sapien
gcaaatcaggtgctcatttcccatg

SEQ ID NO: 4038422 - DNA, 25 bp, Homo sapien
gatgctctagttaatactacaccct

SEQ ID NO: 4038423 - DNA, 25 bp, Homo sapien
aagagcccatgttccaataggtagc

SEQ ID NO: 4038424 - DNA, 25 bp, Homo sapien
gcaattctgtgagcttctgatatcc

SEQ ID NO: 4038425 - DNA, 25 bp, Homo sapien
aagctcaaagctctcagcaattctg

SEQ ID NO: 4038426 - DNA, 25 bp, Homo sapien
ctactccgtgccctgtattgactca

SEQ ID NO: 4038427 - DNA, 25 bp, Homo sapien
gccctgtattgactcatcagatgtt

SEQ ID NO: 4038428 - DNA, 25 bp, Homo sapien
gtgccctgtattgactcatcagatg

SEQ ID NO: 4038429 - DNA, 25 bp, Homo sapien
tccgtgccctgtattgactcatcag

SEQ ID NO: 4038430 - DNA, 25 bp, Homo sapien
cttctgaagtctcctcttggatcat

SEQ ID NO: 4038431 - DNA, 25 bp, Homo sapien
aattgtttggcaagtgttgagttgc

SEQ ID NO: 4038432 - DNA, 25 bp, Homo sapien
tctgaagtctcctcttggatcatca

SEQ ID NO: 4038433 - DNA, 25 bp, Homo sapien
ttttgacagctctaaattgtttggc

SEQ ID NO: 4038434 - DNA, 25 bp, Homo sapien
taggcaattcatcatagtttgtctt

SEQ ID NO: 4038435 - DNA, 25 bp, Homo sapien
cacattaggcaattcatcatagttt

SEQ ID NO: 4038436 - DNA, 25 bp, Homo sapien
acacattaggcaattcatcatagtt

SEQ ID NO: 4038437 - DNA, 25 bp, Homo sapien
cattaggcaattcatcatagtttgt

SEQ ID NO: 4038438 - DNA, 25 bp, Homo sapien
gataagtccaaaaggaacttccaca

SEQ ID NO: 4038439 - DNA, 25 bp, Homo sapien
ccatcatcttttaagataagtccaa

SEQ ID NO: 4038440 - DNA, 25 bp, Homo sapien
ggtgtactggagaagccatcatctt

SEQ ID NO: 4038441 - DNA, 25 bp, Homo sapien
ccaaaaggaacttccacattgtgca

SEQ ID NO: 4038442 - DNA, 25 bp, Homo sapien
cagctgaacaaaacatgagtgtgct

SEQ ID NO: 4038443 - DNA, 25 bp, Homo sapien
catgagtgtgctatctcctaggcca

SEQ ID NO: 4038444 - DNA, 25 bp, Homo sapien
caaaacatgagtgtgctatctccta

SEQ ID NO: 4038445 - DNA, 25 bp, Homo sapien
acttgatcaataacagctgaacaaa

SEQ ID NO: 4038446 - DNA, 25 bp, Homo sapien
taactcagactgacgttatctgtgc

SEQ ID NO: 4038447 - DNA, 25 bp, Homo sapien
taacaatcgagtctggtaggccatt

SEQ ID NO: 4038448 - DNA, 25 bp, Homo sapien
gatcagtcctcgaatgtcccctgtg

SEQ ID NO: 4038449 - DNA, 25 bp, Homo sapien
tttatattccccagctagaagttcc

SEQ ID NO: 4038450 - DNA, 25 bp, Homo sapien
gtgacaaccagtacaaccaagaagg

SEQ ID NO: 4038451 - DNA, 25 bp, Homo sapien
ccccagctgatgtctgcaggtagcc

SEQ ID NO: 4038452 - DNA, 25 bp, Homo sapien
caaccagtcactgcttgttgggcag

SEQ ID NO: 4038453 - DNA, 25 bp, Homo sapien
gacgggactcagaggagctcttgaa

SEQ ID NO: 4038454 - DNA, 25 bp, Homo sapien
ctgtaagatgtaaaaagcaagtcac

SEQ ID NO: 4038455 - DNA, 25 bp, Homo sapien
cctgtaagatgtaaaaagcaagtca

SEQ ID NO: 4038456 - DNA, 25 bp, Homo sapien
ggttcctactgtataacctggaatc

SEQ ID NO: 4038457 - DNA, 25 bp, Homo sapien
ccaggttcctactgtataacctgga

SEQ ID NO: 4038458 - DNA, 25 bp, Homo sapien
gttcctactgtataacctggaatcc

SEQ ID NO: 4038459 - DNA, 25 bp, Homo sapien
caggttcctactgtataacctggaa

SEQ ID NO: 4038460 - DNA, 25 bp, Homo sapien
cacttctctctagaaacacagcctc

SEQ ID NO: 4038461 - DNA, 25 bp, Homo sapien
acttctctctagaaacacagcctcc

SEQ ID NO: 4038462 - DNA, 25 bp, Homo sapien
cttctctctagaaacacagcctcca

SEQ ID NO: 4038463 - DNA, 25 bp, Homo sapien
ttctctctagaaacacagcctccag

SEQ ID NO: 4038464 - DNA, 25 bp, Homo sapien
ctcttattgtcaagacaacggccat

SEQ ID NO: 4038465 - DNA, 25 bp, Homo sapien
gctgcctcttattgtcaagacaacg

SEQ ID NO: 4038466 - DNA, 25 bp, Homo sapien
tgcctcttattgtcaagacaacggc

SEQ ID NO: 4038467 - DNA, 25 bp, Homo sapien
ctgctgcctcttattgtcaagacaa

SEQ ID NO: 4038468 - DNA, 25 bp, Homo sapien
atgtcctagactcatgagacactcc

SEQ ID NO: 4038469 - DNA, 25 bp, Homo sapien
gtcctagactcatgagacactccca

SEQ ID NO: 4038470 - DNA, 25 bp, Homo sapien
tgtcctagactcatgagacactccc

SEQ ID NO: 4038471 - DNA, 25 bp, Homo sapien
tcctagactcatgagacactcccac

SEQ ID NO: 4038472 - DNA, 25 bp, Homo sapien
gaggagggagaaatccatcggtttc

SEQ ID NO: 4038473 - DNA, 25 bp, Homo sapien
caaagtcgctttggccaattgtcaa

SEQ ID NO: 4038474 - DNA, 25 bp, Homo sapien
tctgtttgtgttggccctgctactg

SEQ ID NO: 4038475 - DNA, 25 bp, Homo sapien
gcttcctcacatttcatggtgtgca

SEQ ID NO: 4038476 - DNA, 25 bp, Homo sapien
ccaataactagatgtgtaattaact

SEQ ID NO: 4038477 - DNA, 25 bp, Homo sapien
atccacagtcacaccaataactaga

SEQ ID NO: 4038478 - DNA, 25 bp, Homo sapien
tcattaggaaaagctctatccacag

SEQ ID NO: 4038479 - DNA, 25 bp, Homo sapien
aggaaaagctctatccacagtcaca

SEQ ID NO: 4038480 - DNA, 25 bp, Homo sapien
agcatccccatttcgtacacgatca

SEQ ID NO: 4038481 - DNA, 25 bp, Homo sapien
gatgcagccacttctccgggactct

SEQ ID NO: 4038482 - DNA, 25 bp, Homo sapien
tcatccaaaacactgatgcagccac

SEQ ID NO: 4038483 - DNA, 25 bp, Homo sapien
taagtaggggcattcgccagcatcc

SEQ ID NO: 4038484 - DNA, 25 bp, Homo sapien
tgtttcaatgggctgcgttgaagcg

SEQ ID NO: 4038485 - DNA, 25 bp, Homo sapien
caaaacgccttttccaatcgcatat

SEQ ID NO: 4038486 - DNA, 25 bp, Homo sapien
cgtagacttgtcaacttatgaacta

SEQ ID NO: 4038487 - DNA, 25 bp, Homo sapien
tgaagcgggactgttcgtagacttg

SEQ ID NO: 4038488 - DNA, 25 bp, Homo sapien
ctgtatccatcaaatgggtgacttt

SEQ ID NO: 4038489 - DNA, 25 bp, Homo sapien
tatccatcaaatgggtgactttcca

SEQ ID NO: 4038490 - DNA, 25 bp, Homo sapien
aaatgggtgactttccaaaggcact

SEQ ID NO: 4038491 - DNA, 25 bp, Homo sapien
catcaaatgggtgactttccaaagg

SEQ ID NO: 4038492 - DNA, 25 bp, Homo sapien
atcagccaccacttctcgtcatgct

SEQ ID NO: 4038493 - DNA, 25 bp, Homo sapien
cagccaccacttctcgtcatgctga

SEQ ID NO: 4038494 - DNA, 25 bp, Homo sapien
gccaccacttctcgtcatgctgatg

SEQ ID NO: 4038495 - DNA, 25 bp, Homo sapien
agccaccacttctcgtcatgctgat

SEQ ID NO: 4038496 - DNA, 25 bp, Homo sapien
ttctggtcataggttcttggtctac

SEQ ID NO: 4038497 - DNA, 25 bp, Homo sapien
ggagcttccgcaggcttctggtcat

SEQ ID NO: 4038498 - DNA, 25 bp, Homo sapien
cttggtctacactggtttctgctga

SEQ ID NO: 4038499 - DNA, 25 bp, Homo sapien
tcagccaccccaggttgttccaaag

SEQ ID NO: 4038500 - DNA, 25 bp, Homo sapien
aagggaccgattggctttgggatca

SEQ ID NO: 4038501 - DNA, 25 bp, Homo sapien
tgggatcacaggcgatgacttcatt

SEQ ID NO: 4038502 - DNA, 25 bp, Homo sapien
tttgggatcacaggcgatgacttca

SEQ ID NO: 4038503 - DNA, 25 bp, Homo sapien
agggaccgattggctttgggatcac

SEQ ID NO: 4038504 - DNA, 25 bp, Homo sapien
ctttgcctgcttcctataagagtct

SEQ ID NO: 4038505 - DNA, 25 bp, Homo sapien
gggcagcttggagacacttcacagg

SEQ ID NO: 4038506 - DNA, 25 bp, Homo sapien
ggagacacttcacaggcgatattaa

SEQ ID NO: 4038507 - DNA, 25 bp, Homo sapien
tgagtccaggcagatgctagcttct

SEQ ID NO: 4038508 - DNA, 25 bp, Homo sapien
cacagcagggagtgtagcctgggaa

SEQ ID NO: 4038509 - DNA, 25 bp, Homo sapien
gggagtgtagcctgggaatgttcac

SEQ ID NO: 4038510 - DNA, 25 bp, Homo sapien
cagggagtgtagcctgggaatgttc

SEQ ID NO: 4038511 - DNA, 25 bp, Homo sapien
acagcagggagtgtagcctgggaat

SEQ ID NO: 4038512 - DNA, 25 bp, Homo sapien
catggtcaaactccaaacagagaaa

SEQ ID NO: 4038513 - DNA, 25 bp, Homo sapien
cctcatggtcaaactccaaacagag

SEQ ID NO: 4038514 - DNA, 25 bp, Homo sapien
caaagaccgacttctgcttctcatc

SEQ ID NO: 4038515 - DNA, 25 bp, Homo sapien
gaaagagaattgcaagttggcgtcc

SEQ ID NO: 4038516 - DNA, 25 bp, Homo sapien
gaatgtctactgactggttaaccaa

SEQ ID NO: 4038517 - DNA, 25 bp, Homo sapien
ggttaaccaatggtgacagctccat

SEQ ID NO: 4038518 - DNA, 25 bp, Homo sapien
taagcagaactacgagaaagagaat

SEQ ID NO: 4038519 - DNA, 25 bp, Homo sapien
cagcctctattgtgggaggtaaatc

SEQ ID NO: 4038520 - DNA, 25 bp, Homo sapien
cacaggcaactgataaaaaatccac

SEQ ID NO: 4038521 - DNA, 25 bp, Homo sapien
tggcacagcccatagccacaggcaa

SEQ ID NO: 4038522 - DNA, 25 bp, Homo sapien
agccacaggcaactgataaaaaatc

SEQ ID NO: 4038523 - DNA, 25 bp, Homo sapien
gcccatagccacaggcaactgataa

SEQ ID NO: 4038524 - DNA, 25 bp, Homo sapien
tttgattcaggaggcaaagttcacc

SEQ ID NO: 4038525 - DNA, 25 bp, Homo sapien
gttcaccccgaggatcacagtgcat

SEQ ID NO: 4038526 - DNA, 25 bp, Homo sapien
tgcattagggaggaacgaaagcctt

SEQ ID NO: 4038527 - DNA, 25 bp, Homo sapien
caggcctgtcaacacgtggaggtct

SEQ ID NO: 4038528 - DNA, 25 bp, Homo sapien
gctgaatctgtttccgaaaggtaat

SEQ ID NO: 4038529 - DNA, 25 bp, Homo sapien
aaatgatttctgaagtatcaatggg

SEQ ID NO: 4038530 - DNA, 25 bp, Homo sapien
tccgaaaggtaatcagttgggtgct

SEQ ID NO: 4038531 - DNA, 25 bp, Homo sapien
tgggtgcttatggacccatttatca

SEQ ID NO: 4038532 - DNA, 25 bp, Homo sapien
gaaggataatagaaattgacaggtc

SEQ ID NO: 4038533 - DNA, 25 bp, Homo sapien
cagaccttataagccacgcaagggt

SEQ ID NO: 4038534 - DNA, 25 bp, Homo sapien
tatatggttatttaagttcacttgg

SEQ ID NO: 4038535 - DNA, 25 bp, Homo sapien
acagcaagctgattgagagggccag

SEQ ID NO: 4038536 - DNA, 25 bp, Homo sapien
ctgtttaatttgcactctattggta

SEQ ID NO: 4038537 - DNA, 25 bp, Homo sapien
cattttcaacattgtacccagattt

SEQ ID NO: 4038538 - DNA, 25 bp, Homo sapien
ttttacttcccgatcacagtgacca

SEQ ID NO: 4038539 - DNA, 25 bp, Homo sapien
gaccattcccatattttgctcactg

SEQ ID NO: 4038540 - DNA, 25 bp, Homo sapien
aaatgtaacatattgcctttccaga

SEQ ID NO: 4038541 - DNA, 25 bp, Homo sapien
tattgcaaaaaccttgacggtggtc

SEQ ID NO: 4038542 - DNA, 25 bp, Homo sapien
cctcttaatggtgtggatgattcca

SEQ ID NO: 4038543 - DNA, 25 bp, Homo sapien
gaaagactgaagttgttggacagac

SEQ ID NO: 4038544 - DNA, 25 bp, Homo sapien
caatcaatgttgtgttcattatcta

SEQ ID NO: 4038545 - DNA, 25 bp, Homo sapien
tctatgctcacggaattaactttaa

SEQ ID NO: 4038546 - DNA, 25 bp, Homo sapien
tcaatgttgtgttcattatctatgc

SEQ ID NO: 4038547 - DNA, 25 bp, Homo sapien
cattatctatgctcacggaattaac

SEQ ID NO: 4038548 - DNA, 25 bp, Homo sapien
agccagcacagaagtgttagtgagc

SEQ ID NO: 4038549 - DNA, 25 bp, Homo sapien
acaaggtgcctgcttgaagccagca

SEQ ID NO: 4038550 - DNA, 25 bp, Homo sapien
agtgcctctatcacaaggtgcctgc

SEQ ID NO: 4038551 - DNA, 25 bp, Homo sapien
cagaagtgttagtgagcatcaccag

SEQ ID NO: 4038552 - DNA, 25 bp, Homo sapien
tgaggtaagccagtgagttacagag

SEQ ID NO: 4038553 - DNA, 25 bp, Homo sapien
agctgaggcacaagacccatgagaa

SEQ ID NO: 4038554 - DNA, 25 bp, Homo sapien
tatatagatattgatgaggtaagcc

SEQ ID NO: 4038555 - DNA, 25 bp, Homo sapien
gaaatcctaggatgccctctccctg

SEQ ID NO: 4038556 - DNA, 25 bp, Homo sapien
tcttgtcacattcctgataatgctg

SEQ ID NO: 4038557 - DNA, 25 bp, Homo sapien
gtcacattcctgataatgctgtaaa

SEQ ID NO: 4038558 - DNA, 25 bp, Homo sapien
cacattcctgataatgctgtaaaac

SEQ ID NO: 4038559 - DNA, 25 bp, Homo sapien
ctaactcctcaatcttgtcacattc

SEQ ID NO: 4038560 - DNA, 25 bp, Homo sapien
gaatagtattcacatttagacctgc

SEQ ID NO: 4038561 - DNA, 25 bp, Homo sapien
gcaggtgtaccaatcaatttcaatg

SEQ ID NO: 4038562 - DNA, 25 bp, Homo sapien
ctgataacgagatgataaagctgct

SEQ ID NO: 4038563 - DNA, 25 bp, Homo sapien
tttagacctgcatattaattggctg

SEQ ID NO: 4038564 - DNA, 25 bp, Homo sapien
gctgattatagcaggcaggatatag

SEQ ID NO: 4038565 - DNA, 25 bp, Homo sapien
gattatagcaggcaggatataggac

SEQ ID NO: 4038566 - DNA, 25 bp, Homo sapien
tataggacagaccaatgacctttaa

SEQ ID NO: 4038567 - DNA, 25 bp, Homo sapien
gcaggatataggacagaccaatgac

SEQ ID NO: 4038568 - DNA, 25 bp, Homo sapien
ttagtaaggcctctaggggtggcaa

SEQ ID NO: 4038569 - DNA, 25 bp, Homo sapien
gctcacgataaacctttagtaaggc

SEQ ID NO: 4038570 - DNA, 25 bp, Homo sapien
tagatggtgggtggtttcttgatca

SEQ ID NO: 4038571 - DNA, 25 bp, Homo sapien
tcatcactacgaatcagcagctcac

SEQ ID NO: 4038572 - DNA, 25 bp, Homo sapien
ggcagcagaagtgaaggggcagtag

SEQ ID NO: 4038573 - DNA, 25 bp, Homo sapien
gaagggcagcagaagtgaaggggca

SEQ ID NO: 4038574 - DNA, 25 bp, Homo sapien
gggcagcagaagtgaaggggcagta

SEQ ID NO: 4038575 - DNA, 25 bp, Homo sapien
ctggggaagggcagcagaagtgaag

SEQ ID NO: 4038576 - DNA, 25 bp, Homo sapien
aaccttctcccactggagagttctt

SEQ ID NO: 4038577 - DNA, 25 bp, Homo sapien
caaccttctcccactggagagttct

SEQ ID NO: 4038578 - DNA, 25 bp, Homo sapien
ccaaccttctcccactggagagttc

SEQ ID NO: 4038579 - DNA, 25 bp, Homo sapien
caatgttctcaaggcgagttgagta

SEQ ID NO: 4038580 - DNA, 25 bp, Homo sapien
caggtaaagtacatcgtggcctgta

SEQ ID NO: 4038581 - DNA, 25 bp, Homo sapien
tgtatctctttatcaagaacaatgt

SEQ ID NO: 4038582 - DNA, 25 bp, Homo sapien
tgttctcaaggcgagttgagtacat

SEQ ID NO: 4038583 - DNA, 25 bp, Homo sapien
ggtattcttgctagactgactcagc

SEQ ID NO: 4038584 - DNA, 25 bp, Homo sapien
tagactacacatgccagatgcggag

SEQ ID NO: 4038585 - DNA, 25 bp, Homo sapien
gcttagaggagtgcgaccagaatta

SEQ ID NO: 4038586 - DNA, 25 bp, Homo sapien
gaatttacagccaaggagcaagttg

SEQ ID NO: 4038587 - DNA, 25 bp, Homo sapien
ttctgatgactctgttgggaggaaa

SEQ ID NO: 4038588 - DNA, 25 bp, Homo sapien
gttctgatgactctgttgggaggaa

SEQ ID NO: 4038589 - DNA, 25 bp, Homo sapien
gacgttgaagaatgggatcagcccc

SEQ ID NO: 4038590 - DNA, 25 bp, Homo sapien
ggatactaaccagtcaaaagccact

SEQ ID NO: 4038591 - DNA, 25 bp, Homo sapien
caagttgatcaggacgatgtctctc

SEQ ID NO: 4038592 - DNA, 25 bp, Homo sapien
gatccagttgcccaaacaagttgat

SEQ ID NO: 4038593 - DNA, 25 bp, Homo sapien
tctgaacttcgaaggacctaaagct

SEQ ID NO: 4038594 - DNA, 25 bp, Homo sapien
ccaccctggttctgaacttcgaagg

SEQ ID NO: 4038595 - DNA, 25 bp, Homo sapien
gctagtgaaataagggcagccccac

SEQ ID NO: 4038596 - DNA, 25 bp, Homo sapien
ggtaaaaagctgagtgagctctgcc

SEQ ID NO: 4038597 - DNA, 25 bp, Homo sapien
cagtcctgttttgcaaggtaaattt

SEQ ID NO: 4038598 - DNA, 25 bp, Homo sapien
ccagctgcgaactctttccatagag

SEQ ID NO: 4038599 - DNA, 25 bp, Homo sapien
tctcaccatgcacagtcctgttttg

SEQ ID NO: 4038600 - DNA, 25 bp, Homo sapien
caccagctgcgaactctttccatag

SEQ ID NO: 4038601 - DNA, 25 bp, Homo sapien
gaagctctgtagtcaatttcaggct

SEQ ID NO: 4038602 - DNA, 25 bp, Homo sapien
tccccagtaagctgtgcaaagaggc

SEQ ID NO: 4038603 - DNA, 25 bp, Homo sapien
agcttagcacccctgggacagggca

SEQ ID NO: 4038604 - DNA, 25 bp, Homo sapien
tattttttcctcaccgcagttgcct

SEQ ID NO: 4038605 - DNA, 25 bp, Homo sapien
tggcgcctggcacaaagcaacggct

SEQ ID NO: 4038606 - DNA, 25 bp, Homo sapien
tgatactcttaatctcagatcccca

SEQ ID NO: 4038607 - DNA, 25 bp, Homo sapien
actctacatgcgtttcccaagccaa

SEQ ID NO: 4038608 - DNA, 25 bp, Homo sapien
tagttgggtggcattaaaccgtcta

SEQ ID NO: 4038609 - DNA, 25 bp, Homo sapien
tatgtgaatgttagcagagggacct

SEQ ID NO: 4038610 - DNA, 25 bp, Homo sapien
gccttcaatttacgggatcccagtg

SEQ ID NO: 4038611 - DNA, 25 bp, Homo sapien
ccttactggaggaccaagaccttgt

SEQ ID NO: 4038612 - DNA, 25 bp, Homo sapien
tactccgccagctgttgaaaaaagg

SEQ ID NO: 4038613 - DNA, 25 bp, Homo sapien
gcagacggggatccctggatgctca

SEQ ID NO: 4038614 - DNA, 25 bp, Homo sapien
tgaccaaggcgccttctgacttcag

SEQ ID NO: 4038615 - DNA, 25 bp, Homo sapien
agtatgaccaaggcgccttctgact

SEQ ID NO: 4038616 - DNA, 25 bp, Homo sapien
ccaaggcgccttctgacttcaggaa

SEQ ID NO: 4038617 - DNA, 25 bp, Homo sapien
gaagttgcaggaaagttccacaacg

SEQ ID NO: 4038618 - DNA, 25 bp, Homo sapien
tccacaacgtgtgaagacttctttt

SEQ ID NO: 4038619 - DNA, 25 bp, Homo sapien
gcagccgatattcactggagccaga

SEQ ID NO: 4038620 - DNA, 25 bp, Homo sapien
acagtctgctctgaggcttgtctgc

SEQ ID NO: 4038621 - DNA, 25 bp, Homo sapien
gattccttatagacttatcctcccc

SEQ ID NO: 4038622 - DNA, 25 bp, Homo sapien
tgagggtccgactctggagagaggc

SEQ ID NO: 4038623 - DNA, 25 bp, Homo sapien
ccagtgatcggagcttctcagggtg

SEQ ID NO: 4038624 - DNA, 25 bp, Homo sapien
tctgaagcctgaatcccaaagctgg

SEQ ID NO: 4038625 - DNA, 25 bp, Homo sapien
cagctgccaccgtggtgctcttgct

SEQ ID NO: 4038626 - DNA, 25 bp, Homo sapien
tggtgctcttgctggagtggcaccc

SEQ ID NO: 4038627 - DNA, 25 bp, Homo sapien
ccctcgcgctcttcttcaagcttct

SEQ ID NO: 4038628 - DNA, 25 bp, Homo sapien
gtgctcttgctggagtggcacccca

SEQ ID NO: 4038629 - DNA, 25 bp, Homo sapien
agagggacacagaggatccagtgcc

SEQ ID NO: 4038630 - DNA, 25 bp, Homo sapien
ggacacagaggatccagtgcccttg

SEQ ID NO: 4038631 - DNA, 25 bp, Homo sapien
gggacacagaggatccagtgccctt

SEQ ID NO: 4038632 - DNA, 25 bp, Homo sapien
gagggacacagaggatccagtgccc

SEQ ID NO: 4038633 - DNA, 25 bp, Homo sapien
gtcactatgcaacgggctgtagcct

SEQ ID NO: 4038634 - DNA, 25 bp, Homo sapien
tacctgtaaacaccagcccctatct

SEQ ID NO: 4038635 - DNA, 25 bp, Homo sapien
caaaacaagccctgtcactatgcaa

SEQ ID NO: 4038636 - DNA, 25 bp, Homo sapien
gccctgtcactatgcaacgggctgt

SEQ ID NO: 4038637 - DNA, 25 bp, Homo sapien
cccagcttgaaactagtaggtatat

SEQ ID NO: 4038638 - DNA, 25 bp, Homo sapien
cacccacatggatcggactcttggt

SEQ ID NO: 4038639 - DNA, 25 bp, Homo sapien
tctctcccaggtatacaactggcca

SEQ ID NO: 4038640 - DNA, 25 bp, Homo sapien
tacagaagacatgtagcaccaccca

SEQ ID NO: 4038641 - DNA, 25 bp, Homo sapien
agtcagcactcctctgactgattca

SEQ ID NO: 4038642 - DNA, 25 bp, Homo sapien
ctctgactgattcaccttcaccagg

SEQ ID NO: 4038643 - DNA, 25 bp, Homo sapien
tgggcagtcagcactcctctgactg

SEQ ID NO: 4038644 - DNA, 25 bp, Homo sapien
ggcagtcagcactcctctgactgat

SEQ ID NO: 4038645 - DNA, 25 bp, Homo sapien
tcagcccggaaaaccggaggatgga

SEQ ID NO: 4038646 - DNA, 25 bp, Homo sapien
cagcccggaaaaccggaggatggat

SEQ ID NO: 4038647 - DNA, 25 bp, Homo sapien
caccgcttgcggtctgcagagataa

SEQ ID NO: 4038648 - DNA, 25 bp, Homo sapien
gacagctcgaacctgagtcccagga

SEQ ID NO: 4038649 - DNA, 25 bp, Homo sapien
aaagttcaccaagtttagatcccag

SEQ ID NO: 4038650 - DNA, 25 bp, Homo sapien
tctagtgggcgcttcacaggcgcag

SEQ ID NO: 4038651 - DNA, 25 bp, Homo sapien
gcctcccagagcatgcccgaatccc

SEQ ID NO: 4038652 - DNA, 25 bp, Homo sapien
gagcaaggcagagcaccaggtcgct

SEQ ID NO: 4038653 - DNA, 25 bp, Homo sapien
tgcccgaatccccaagccgggcgtc

SEQ ID NO: 4038654 - DNA, 25 bp, Homo sapien
gcgtcctcgaagcggaaagcagcca

SEQ ID NO: 4038655 - DNA, 25 bp, Homo sapien
atgtttgcaagagattccagctggc

SEQ ID NO: 4038656 - DNA, 25 bp, Homo sapien
cagccgagtgctgataaggtccaga

SEQ ID NO: 4038657 - DNA, 25 bp, Homo sapien
cccgttggcgttgcttgggaagcat

SEQ ID NO: 4038658 - DNA, 25 bp, Homo sapien
tcttaaacttgtctgcccgttggcg

SEQ ID NO: 4038659 - DNA, 25 bp, Homo sapien
ctgacctgtgaatctccattgaaca

SEQ ID NO: 4038660 - DNA, 25 bp, Homo sapien
tgacctgtgaatctccattgaacat

SEQ ID NO: 4038661 - DNA, 25 bp, Homo sapien
accacccaagagagccaggcaagaa

SEQ ID NO: 4038662 - DNA, 25 bp, Homo sapien
caccacccaagagagccaggcaaga

SEQ ID NO: 4038663 - DNA, 25 bp, Homo sapien
tgacaccacccaagagagccaggca

SEQ ID NO: 4038664 - DNA, 25 bp, Homo sapien
acaccacccaagagagccaggcaag

SEQ ID NO: 4038665 - DNA, 25 bp, Homo sapien
ttgttgtcttatccccagccggaag

SEQ ID NO: 4038666 - DNA, 25 bp, Homo sapien
gctgaagtctgttgttgtcttatcc

SEQ ID NO: 4038667 - DNA, 25 bp, Homo sapien
tctgttgttgtcttatccccagccg

SEQ ID NO: 4038668 - DNA, 25 bp, Homo sapien
cagggccaacttcccggccacttgt

SEQ ID NO: 4038669 - DNA, 25 bp, Homo sapien
tctcaatatgttgcctggtctcgaa

SEQ ID NO: 4038670 - DNA, 25 bp, Homo sapien
agtctagctctttgcccaggctaca

SEQ ID NO: 4038671 - DNA, 25 bp, Homo sapien
ggtctcaatatgttgcctggtctcg

SEQ ID NO: 4038672 - DNA, 25 bp, Homo sapien
ctatgcccagcctataactttttat

SEQ ID NO: 4038673 - DNA, 25 bp, Homo sapien
cctgcccccattgatgctgatttat

SEQ ID NO: 4038674 - DNA, 25 bp, Homo sapien
ctgggctcctggtacatcacacacc

SEQ ID NO: 4038675 - DNA, 25 bp, Homo sapien
tgcctaaaggcacttgagtttcctg

SEQ ID NO: 4038676 - DNA, 25 bp, Homo sapien
agcaatgtccacctagagcactggg

SEQ ID NO: 4038677 - DNA, 25 bp, Homo sapien
tcaggtaggcggaatgaaccctcat

SEQ ID NO: 4038678 - DNA, 25 bp, Homo sapien
tcaggccccattgtctttagagaga

SEQ ID NO: 4038679 - DNA, 25 bp, Homo sapien
tatcactctctagaagtagcaggag

SEQ ID NO: 4038680 - DNA, 25 bp, Homo sapien
ggtgagccattaagggccctccaaa

SEQ ID NO: 4038681 - DNA, 25 bp, Homo sapien
tggcagttgagtatgtcaaggaccc

SEQ ID NO: 4038682 - DNA, 25 bp, Homo sapien
tagactgatggcagttgagtatgtc

SEQ ID NO: 4038683 - DNA, 25 bp, Homo sapien
tgtcaaggacccattgttgatgccc

SEQ ID NO: 4038684 - DNA, 25 bp, Homo sapien
gtaaacagtttagactgatggcagt

SEQ ID NO: 4038685 - DNA, 25 bp, Homo sapien
ccccactcagtgaggtttcggatct

SEQ ID NO: 4038686 - DNA, 25 bp, Homo sapien
ccgcccttgggctctcagtcccaca

SEQ ID NO: 4038687 - DNA, 25 bp, Homo sapien
gtgaggtttcggatctgctcccagg

SEQ ID NO: 4038688 - DNA, 25 bp, Homo sapien
tcagtgaggtttcggatctgctccc

SEQ ID NO: 4038689 - DNA, 25 bp, Homo sapien
ccggtgaccccaggtgacaattctg

SEQ ID NO: 4038690 - DNA, 25 bp, Homo sapien
cggtgaccccaggtgacaattctga

SEQ ID NO: 4038691 - DNA, 25 bp, Homo sapien
cccggtgaccccaggtgacaattct

SEQ ID NO: 4038692 - DNA, 25 bp, Homo sapien
ccttgtgcaacctgcatctggtaat

SEQ ID NO: 4038693 - DNA, 25 bp, Homo sapien
ttcatcttcagttggaccttgtgca

SEQ ID NO: 4038694 - DNA, 25 bp, Homo sapien
taatacagtcactccactgcacgtt

SEQ ID NO: 4038695 - DNA, 25 bp, Homo sapien
tacagtcactccactgcacgttctt

SEQ ID NO: 4038696 - DNA, 25 bp, Homo sapien
aatgaggaaactccctgcttggcca

SEQ ID NO: 4038697 - DNA, 25 bp, Homo sapien
cccagagcactacccacagagggtg

SEQ ID NO: 4038698 - DNA, 25 bp, Homo sapien
ggtggccgctagcaaggcctgggcc

SEQ ID NO: 4038699 - DNA, 25 bp, Homo sapien
tgagggtggccgctagcaaggcctg

SEQ ID NO: 4038700 - DNA, 25 bp, Homo sapien
cagagcagctgctgttccagcaaca

SEQ ID NO: 4038701 - DNA, 25 bp, Homo sapien
agtgaggctcagacagagcagctgc

SEQ ID NO: 4038702 - DNA, 25 bp, Homo sapien
ctggagccagaggaagtgaggctca

SEQ ID NO: 4038703 - DNA, 25 bp, Homo sapien
gctgctgttccagcaacagcagcaa

SEQ ID NO: 4038704 - DNA, 25 bp, Homo sapien
tgggcccttccgagagcaccttgac

SEQ ID NO: 4038705 - DNA, 25 bp, Homo sapien
ttgacctatattccgttctctccat

SEQ ID NO: 4038706 - DNA, 25 bp, Homo sapien
cagactctaagagtcccgggagaga

SEQ ID NO: 4038707 - DNA, 25 bp, Homo sapien
tctctccatgacagcagactctaag

SEQ ID NO: 4038708 - DNA, 25 bp, Homo sapien
aatgggataaacctacatgactcac

SEQ ID NO: 4038709 - DNA, 25 bp, Homo sapien
ttgtgcaaataatgggataaaccta

SEQ ID NO: 4038710 - DNA, 25 bp, Homo sapien
aagggcagatgccattgtggctggg

SEQ ID NO: 4038711 - DNA, 25 bp, Homo sapien
gtggctgggtgatactgcagcccac

SEQ ID NO: 4038712 - DNA, 25 bp, Homo sapien
ccggagaatgtgagccgaagaaaac

SEQ ID NO: 4038713 - DNA, 25 bp, Homo sapien
gagccgaagaaaacttctcctgcca

SEQ ID NO: 4038714 - DNA, 25 bp, Homo sapien
ctctgaatgtgaggagaatagggct

SEQ ID NO: 4038715 - DNA, 25 bp, Homo sapien
cacaaggaccgaattcccattccca

SEQ ID NO: 4038716 - DNA, 25 bp, Homo sapien
gtgatccttgggtatcacacctgta

SEQ ID NO: 4038717 - DNA, 25 bp, Homo sapien
agcactctgaatttagactcattcg

SEQ ID NO: 4038718 - DNA, 25 bp, Homo sapien
cacacctgtaaaaagcgatattaac

SEQ ID NO: 4038719 - DNA, 25 bp, Homo sapien
agaagtgatccttgggtatcacacc

SEQ ID NO: 4038720 - DNA, 25 bp, Homo sapien
tgttcactgtgctcatgatagaaga

SEQ ID NO: 4038721 - DNA, 25 bp, Homo sapien
tgcctctgggtgtgttcacaagtgt

SEQ ID NO: 4038722 - DNA, 25 bp, Homo sapien
catctgaaagggttgttttacttgt

SEQ ID NO: 4038723 - DNA, 25 bp, Homo sapien
taaatagaaagctgtagcctctggc

SEQ ID NO: 4038724 - DNA, 25 bp, Homo sapien
gatctgggagttggtaatctaatct

SEQ ID NO: 4038725 - DNA, 25 bp, Homo sapien
ggtaatctaatcttccatgctgtgg

SEQ ID NO: 4038726 - DNA, 25 bp, Homo sapien
gttggtaatctaatcttccatgctg

SEQ ID NO: 4038727 - DNA, 25 bp, Homo sapien
gggagttggtaatctaatcttccat

SEQ ID NO: 4038728 - DNA, 25 bp, Homo sapien
aaatggtctgggatctatccttcaa

SEQ ID NO: 4038729 - DNA, 25 bp, Homo sapien
caatagcgcggtcttggtcactaca

SEQ ID NO: 4038730 - DNA, 25 bp, Homo sapien
tagttcaatacaaatggcatatgcg

SEQ ID NO: 4038731 - DNA, 25 bp, Homo sapien
catgtgctaaagtggcctgtttctc

SEQ ID NO: 4038732 - DNA, 25 bp, Homo sapien
ccgcgctccggccagagggcgcccg

SEQ ID NO: 4038733 - DNA, 25 bp, Homo sapien
cccgcgctccggccagagggcgccc

SEQ ID NO: 4038734 - DNA, 25 bp, Homo sapien
ctgccccgcgctccggccagagggc

SEQ ID NO: 4038735 - DNA, 25 bp, Homo sapien
tgcactgccccgcgctccggccaga

SEQ ID NO: 4038736 - DNA, 25 bp, Homo sapien
tctgggatttgacgctattgtgaca

SEQ ID NO: 4038737 - DNA, 25 bp, Homo sapien
gtgttgtaacaacaggccacatgga

SEQ ID NO: 4038738 - DNA, 25 bp, Homo sapien
gccacatggagccttacgttcgata

SEQ ID NO: 4038739 - DNA, 25 bp, Homo sapien
tacagaacgtgaatttagagatgct

SEQ ID NO: 4038740 - DNA, 25 bp, Homo sapien
tacagacctgaagtgcattgggaaa

SEQ ID NO: 4038741 - DNA, 25 bp, Homo sapien
tcttcttggatagagtgctggctag

SEQ ID NO: 4038742 - DNA, 25 bp, Homo sapien
taagtttcttgacatccgtgagcct

SEQ ID NO: 4038743 - DNA, 25 bp, Homo sapien
tgctggctagagagaatcgggactt

SEQ ID NO: 4038744 - DNA, 25 bp, Homo sapien
tttagctagaagtgtgataccatac

SEQ ID NO: 4038745 - DNA, 25 bp, Homo sapien
gcgccttagaataggtttagctaga

SEQ ID NO: 4038746 - DNA, 25 bp, Homo sapien
accatccctggacaagtgcttcaga

SEQ ID NO: 4038747 - DNA, 25 bp, Homo sapien
ttatctgaatgataagcgccttaga

SEQ ID NO: 4038748 - DNA, 25 bp, Homo sapien
ggcattatgaagttaaccaagcaaa

SEQ ID NO: 4038749 - DNA, 25 bp, Homo sapien
gataactgctgatgtatcttgttcc

SEQ ID NO: 4038750 - DNA, 25 bp, Homo sapien
aaagatgacctttcttgtctagtgg

SEQ ID NO: 4038751 - DNA, 25 bp, Homo sapien
taaaatggcaatcaaatagtcacta

SEQ ID NO: 4038752 - DNA, 25 bp, Homo sapien
gcatttgtacaaccaggacctgttt

SEQ ID NO: 4038753 - DNA, 25 bp, Homo sapien
ttttggtagcccagctgaacatgtg

SEQ ID NO: 4038754 - DNA, 25 bp, Homo sapien
gaacagcccggattgttacagaatt

SEQ ID NO: 4038755 - DNA, 25 bp, Homo sapien
tcaaggtactccaacacatcagaag

SEQ ID NO: 4038756 - DNA, 25 bp, Homo sapien
tcatcttttcagtatatgtttctgt

SEQ ID NO: 4038757 - DNA, 25 bp, Homo sapien
cataatgctgtatatccataaacat

SEQ ID NO: 4038758 - DNA, 25 bp, Homo sapien
ctattctgatattgtcttatttttc

SEQ ID NO: 4038759 - DNA, 25 bp, Homo sapien
gtttctgtaatttcatcataatgct

SEQ ID NO: 4038760 - DNA, 25 bp, Homo sapien
tattgaccaaaaatgagtgagactc

SEQ ID NO: 4038761 - DNA, 25 bp, Homo sapien
taaatttagccattgattagatgtg

SEQ ID NO: 4038762 - DNA, 25 bp, Homo sapien
caagtttatgtgtagctgtgtaaca

SEQ ID NO: 4038763 - DNA, 25 bp, Homo sapien
tgttttactgatggatgatgttgag

SEQ ID NO: 4038764 - DNA, 25 bp, Homo sapien
tcagctttttaggagtgtttacagc

SEQ ID NO: 4038765 - DNA, 25 bp, Homo sapien
cagctttttaggagtgtttacagcc

SEQ ID NO: 4038766 - DNA, 25 bp, Homo sapien
gatgcattttgatgctttgtgcatt

SEQ ID NO: 4038767 - DNA, 25 bp, Homo sapien
ttcatgctgatgcattttgatgctt

SEQ ID NO: 4038768 - DNA, 25 bp, Homo sapien
gggttgtgcatctcttggttgcagc

SEQ ID NO: 4038769 - DNA, 25 bp, Homo sapien
cagtagatataaacttgccaaggca

SEQ ID NO: 4038770 - DNA, 25 bp, Homo sapien
tggttgcagcttgctaaataggcca

SEQ ID NO: 4038771 - DNA, 25 bp, Homo sapien
ggcaagcctttgtctgacgccaaaa

SEQ ID NO: 4038772 - DNA, 25 bp, Homo sapien
tggctgctgctacgggagtcgtact

SEQ ID NO: 4038773 - DNA, 25 bp, Homo sapien
gctgctacgggagtcgtactgcatc

SEQ ID NO: 4038774 - DNA, 25 bp, Homo sapien
tacgggagtcgtactgcatcgccat

SEQ ID NO: 4038775 - DNA, 25 bp, Homo sapien
gctacgggagtcgtactgcatcgcc

SEQ ID NO: 4038776 - DNA, 25 bp, Homo sapien
catatactaagttgcagaataccca

SEQ ID NO: 4038777 - DNA, 25 bp, Homo sapien
tcgtataatatcagaggccatagca

SEQ ID NO: 4038778 - DNA, 25 bp, Homo sapien
aatattccacgagtaatgagccctg

SEQ ID NO: 4038779 - DNA, 25 bp, Homo sapien
tcttccaagaagagcgatggttctg

SEQ ID NO: 4038780 - DNA, 25 bp, Homo sapien
cagatgccacagcatacattaaaag

SEQ ID NO: 4038781 - DNA, 25 bp, Homo sapien
cagatgaaatatctgatgcagaaca

SEQ ID NO: 4038782 - DNA, 25 bp, Homo sapien
gatgccacagcatacattaaaagat

SEQ ID NO: 4038783 - DNA, 25 bp, Homo sapien
atgccacagcatacattaaaagatc

SEQ ID NO: 4038784 - DNA, 25 bp, Homo sapien
ccataggagaatccgagtgaagaag

SEQ ID NO: 4038785 - DNA, 25 bp, Homo sapien
gaagatgctgcaattgtagacaaaa

SEQ ID NO: 4038786 - DNA, 25 bp, Homo sapien
tatgtttgctacagagataatgcag

SEQ ID NO: 4038787 - DNA, 25 bp, Homo sapien
tcacctggagtgatgattgatacag

SEQ ID NO: 4038788 - DNA, 25 bp, Homo sapien
gctcaaggttcttgcctaatatcta

SEQ ID NO: 4038789 - DNA, 25 bp, Homo sapien
aggatcctagtactgggctgggcac

SEQ ID NO: 4038790 - DNA, 25 bp, Homo sapien
cctgtggtccacaccacttgggaag

SEQ ID NO: 4038791 - DNA, 25 bp, Homo sapien
tatctatcggtaataggatcctagt

SEQ ID NO: 4038792 - DNA, 25 bp, Homo sapien
ttaggcacaccacatgcattacctc

SEQ ID NO: 4038793 - DNA, 25 bp, Homo sapien
ttgaaacttaactatgtgcctgcag

SEQ ID NO: 4038794 - DNA, 25 bp, Homo sapien
ctatgttagacccagtgaaggttgc

SEQ ID NO: 4038795 - DNA, 25 bp, Homo sapien
tgcctgcagttatgctgacatactt

SEQ ID NO: 4038796 - DNA, 25 bp, Homo sapien
gaatacacctatgagatagccaaag

SEQ ID NO: 4038797 - DNA, 25 bp, Homo sapien
cagttatcttagtttaccggtggag

SEQ ID NO: 4038798 - DNA, 25 bp, Homo sapien
ggtggagtatttcaacaccaaccac

SEQ ID NO: 4038799 - DNA, 25 bp, Homo sapien
tagtctctataatgcccatccagga

SEQ ID NO: 4038800 - DNA, 25 bp, Homo sapien
gtccagtgctcactccccacagtgt

SEQ ID NO: 4038801 - DNA, 25 bp, Homo sapien
ctatgtccagtgctcactccccaca

SEQ ID NO: 4038802 - DNA, 25 bp, Homo sapien
gtgctcactccccacagtgtccccc

SEQ ID NO: 4038803 - DNA, 25 bp, Homo sapien
tcactccccacagtgtcccccgtgt

SEQ ID NO: 4038804 - DNA, 25 bp, Homo sapien
gcagctgaccagatccctggactct

SEQ ID NO: 4038805 - DNA, 25 bp, Homo sapien
ggcagctgaccagatccctggactc

SEQ ID NO: 4038806 - DNA, 25 bp, Homo sapien
cagctgaccagatccctggactctc

SEQ ID NO: 4038807 - DNA, 25 bp, Homo sapien
tggctgtaatagagtgctgtctgaa

SEQ ID NO: 4038808 - DNA, 25 bp, Homo sapien
gtaatagagtgctgtctgaagctca

SEQ ID NO: 4038809 - DNA, 25 bp, Homo sapien
gctggctgtaatagagtgctgtctg

SEQ ID NO: 4038810 - DNA, 25 bp, Homo sapien
gctgtaatagagtgctgtctgaagc

SEQ ID NO: 4038811 - DNA, 25 bp, Homo sapien
cctgatgttggtggcttgccttctt

SEQ ID NO: 4038812 - DNA, 25 bp, Homo sapien
tccctccttagggcttcctgatgtt

SEQ ID NO: 4038813 - DNA, 25 bp, Homo sapien
ctccttagggcttcctgatgttggt

SEQ ID NO: 4038814 - DNA, 25 bp, Homo sapien
tctagctccctccttagggcttcct

SEQ ID NO: 4038815 - DNA, 25 bp, Homo sapien
ttcttccagctgagctcggttctgt

SEQ ID NO: 4038816 - DNA, 25 bp, Homo sapien
ttccagctgagctcggttctgttgt

SEQ ID NO: 4038817 - DNA, 25 bp, Homo sapien
tcttccagctgagctcggttctgtt

SEQ ID NO: 4038818 - DNA, 25 bp, Homo sapien
ccagctgagctcggttctgttgttt

SEQ ID NO: 4038819 - DNA, 25 bp, Homo sapien
ggctggtctggggaggagagtctct

SEQ ID NO: 4038820 - DNA, 25 bp, Homo sapien
tggtctggggaggagagtctctcaa

SEQ ID NO: 4038821 - DNA, 25 bp, Homo sapien
tcctgtaccaacactagggctggtc

SEQ ID NO: 4038822 - DNA, 25 bp, Homo sapien
acactagggctggtctggggaggag

SEQ ID NO: 4038823 - DNA, 25 bp, Homo sapien
tatcctggttcttaggagatatctg

SEQ ID NO: 4038824 - DNA, 25 bp, Homo sapien
cctggttcttaggagatatctgcaa

SEQ ID NO: 4038825 - DNA, 25 bp, Homo sapien
tagaagtgaactctttgcagaagag

SEQ ID NO: 4038826 - DNA, 25 bp, Homo sapien
acaatcttccatatggggaaaagag

SEQ ID NO: 4038827 - DNA, 25 bp, Homo sapien
tcacttccccccgacgctgccaagg

SEQ ID NO: 4038828 - DNA, 25 bp, Homo sapien
tgtcacttccccccgacgctgccaa

SEQ ID NO: 4038829 - DNA, 25 bp, Homo sapien
gtcacttccccccgacgctgccaag

SEQ ID NO: 4038830 - DNA, 25 bp, Homo sapien
cacttccccccgacgctgccaaggc

SEQ ID NO: 4038831 - DNA, 25 bp, Homo sapien
tcttgggacaatctgacaacgatga

SEQ ID NO: 4038832 - DNA, 25 bp, Homo sapien
tgtagaatttcacccatcatgcatg

SEQ ID NO: 4038833 - DNA, 25 bp, Homo sapien
cttaacgtcttgcaaccaggaatca

SEQ ID NO: 4038834 - DNA, 25 bp, Homo sapien
tcaagtgctgagagctcctgagctc

SEQ ID NO: 4038835 - DNA, 25 bp, Homo sapien
caaacactgattgggcaattccagc

SEQ ID NO: 4038836 - DNA, 25 bp, Homo sapien
acaactattttacacgcaggcccca

SEQ ID NO: 4038837 - DNA, 25 bp, Homo sapien
aagctataggctgggtaacgcaggc

SEQ ID NO: 4038838 - DNA, 25 bp, Homo sapien
caggccccaaattgaaagctatagg

SEQ ID NO: 4038839 - DNA, 25 bp, Homo sapien
cacaaagtaaaggatgtttcaaaat

SEQ ID NO: 4038840 - DNA, 25 bp, Homo sapien
gtaaaggatgtttcaaaatactcac

SEQ ID NO: 4038841 - DNA, 25 bp, Homo sapien
agtaaaggatgtttcaaaatactca

SEQ ID NO: 4038842 - DNA, 25 bp, Homo sapien
tcacaaagtaaaggatgtttcaaaa

SEQ ID NO: 4038843 - DNA, 25 bp, Homo sapien
tcatcatcatgatcacttgctatgt

SEQ ID NO: 4038844 - DNA, 25 bp, Homo sapien
aatctttgttgttcacatttctgga

SEQ ID NO: 4038845 - DNA, 25 bp, Homo sapien
catcatgatcacttgctatgtcttc

SEQ ID NO: 4038846 - DNA, 25 bp, Homo sapien
catcttgtttgaacccagctcatca

SEQ ID NO: 4038847 - DNA, 25 bp, Homo sapien
tttatcttcatcagaatcaatatct

SEQ ID NO: 4038848 - DNA, 25 bp, Homo sapien
tccaaacagtccccttttatcttca

SEQ ID NO: 4038849 - DNA, 25 bp, Homo sapien
tcatcagaatcaatatcttcaaaaa

SEQ ID NO: 4038850 - DNA, 25 bp, Homo sapien
cagaatcaatatcttcaaaaaaaaa

SEQ ID NO: 4038851 - DNA, 25 bp, Homo sapien
tccatgtcctgtgttttgcaccttg

SEQ ID NO: 4038852 - DNA, 25 bp, Homo sapien
tctcgtctattatggacttttctct

SEQ ID NO: 4038853 - DNA, 25 bp, Homo sapien
gggcttttcctcagctcaaatttgc

SEQ ID NO: 4038854 - DNA, 25 bp, Homo sapien
gctttcttgcccacttcaggattgt

SEQ ID NO: 4038855 - DNA, 25 bp, Homo sapien
catcttgaatcctattgggaggaat

SEQ ID NO: 4038856 - DNA, 25 bp, Homo sapien
cttgaatcctattgggaggaattaa

SEQ ID NO: 4038857 - DNA, 25 bp, Homo sapien
attataggtaataatttcacagctc

SEQ ID NO: 4038858 - DNA, 25 bp, Homo sapien
tgagatttagaattataggtaataa

SEQ ID NO: 4038859 - DNA, 25 bp, Homo sapien
ggtggctttgccgacctctgtcaga

SEQ ID NO: 4038860 - DNA, 25 bp, Homo sapien
ccagtagcaccggagccagggatct

SEQ ID NO: 4038861 - DNA, 25 bp, Homo sapien
gatctgcgcgcatatgtgaggatgc

SEQ ID NO: 4038862 - DNA, 25 bp, Homo sapien
gtccaggtgcgaccccagtagcacc

SEQ ID NO: 4038863 - DNA, 25 bp, Homo sapien
tcagcggctagtgcggagagacaca

SEQ ID NO: 4038864 - DNA, 25 bp, Homo sapien
ctggctcggtcagcggctagtgcgg

SEQ ID NO: 4038865 - DNA, 25 bp, Homo sapien
atagcgcgcctgctaaaggctgccg

SEQ ID NO: 4038866 - DNA, 25 bp, Homo sapien
agagacacagcggagatagcgcgcc

SEQ ID NO: 4038867 - DNA, 25 bp, Homo sapien
gagaaggaggcctcaacgtggccaa

SEQ ID NO: 4038868 - DNA, 25 bp, Homo sapien
caaagcaccttgatgatgcgctctg

SEQ ID NO: 4038869 - DNA, 25 bp, Homo sapien
atgatgcgctctgtccccggaggcg

SEQ ID NO: 4038870 - DNA, 25 bp, Homo sapien
gaaggaggcctcaacgtggccaaag

SEQ ID NO: 4038871 - DNA, 25 bp, Homo sapien
tggaagaactaaatacagataaaga

SEQ ID NO: 4038872 - DNA, 25 bp, Homo sapien
aactaaatacagataaagatgcatt

SEQ ID NO: 4038873 - DNA, 25 bp, Homo sapien
agaactaaatacagataaagatgca

SEQ ID NO: 4038874 - DNA, 25 bp, Homo sapien
ctaaatacagataaagatgcatttt

SEQ ID NO: 4038875 - DNA, 25 bp, Homo sapien
gatggcttcagagtaaaccagcttt

SEQ ID NO: 4038876 - DNA, 25 bp, Homo sapien
agagtaaaccagctttacatagcac

SEQ ID NO: 4038877 - DNA, 25 bp, Homo sapien
cagatagaatctggcatcaccctgg

SEQ ID NO: 4038878 - DNA, 25 bp, Homo sapien
gatagaatctggcatcaccctggag

SEQ ID NO: 4038879 - DNA, 25 bp, Homo sapien
gtatatgtgctgccgaagggagcac

SEQ ID NO: 4038880 - DNA, 25 bp, Homo sapien
gccatgctaatcaatgtattgttcc

SEQ ID NO: 4038881 - DNA, 25 bp, Homo sapien
aattttagtatatgtgctgccgaag

SEQ ID NO: 4038882 - DNA, 25 bp, Homo sapien
ggggccatgctaatcaatgtattgt

SEQ ID NO: 4038883 - DNA, 25 bp, Homo sapien
acaaataaaaggaggtattctggct

SEQ ID NO: 4038884 - DNA, 25 bp, Homo sapien
gtattctggctgagtgcctgtaatc

SEQ ID NO: 4038885 - DNA, 25 bp, Homo sapien
tgagtcagtagaatcccttgaaccg

SEQ ID NO: 4038886 - DNA, 25 bp, Homo sapien
tcagtagaatcccttgaaccgagag

SEQ ID NO: 4038887 - DNA, 25 bp, Homo sapien
tcaggaatgcaccaagtgagaaact

SEQ ID NO: 4038888 - DNA, 25 bp, Homo sapien
ttaggtacattaaggagaatagccc

SEQ ID NO: 4038889 - DNA, 25 bp, Homo sapien
tagcttgagtcgtcttcacaccatg

SEQ ID NO: 4038890 - DNA, 25 bp, Homo sapien
cagattctcaggttagtttgagccc

SEQ ID NO: 4038891 - DNA, 25 bp, Homo sapien
ggatactggcattctgtgtaaccaa

SEQ ID NO: 4038892 - DNA, 25 bp, Homo sapien
cgtgctgatactggaggacttggaa

SEQ ID NO: 4038893 - DNA, 25 bp, Homo sapien
ggtcatgccacctcagaacctggaa

SEQ ID NO: 4038894 - DNA, 25 bp, Homo sapien
ccagaagggtgactgaagttcgtgc

SEQ ID NO: 4038895 - DNA, 25 bp, Homo sapien
tctgagctctcaacaggtgacagga

SEQ ID NO: 4038896 - DNA, 25 bp, Homo sapien
taaccagcagtagtaatagacccag

SEQ ID NO: 4038897 - DNA, 25 bp, Homo sapien
caggcacaagctgtgacaggctcca

SEQ ID NO: 4038898 - DNA, 25 bp, Homo sapien
gaagaccagctctttatcgcttttc

SEQ ID NO: 4038899 - DNA, 25 bp, Homo sapien
tcgggatctctgtgccaaactagat

SEQ ID NO: 4038900 - DNA, 25 bp, Homo sapien
tttagcagctgtccgccttcgggat

SEQ ID NO: 4038901 - DNA, 25 bp, Homo sapien
cgccttcgggatctctgtgccaaac

SEQ ID NO: 4038902 - DNA, 25 bp, Homo sapien
taccatttagcagctgtccgccttc

SEQ ID NO: 4038903 - DNA, 25 bp, Homo sapien
gactcactggttatgtagcaatatg

SEQ ID NO: 4038904 - DNA, 25 bp, Homo sapien
aattttcctccgtgcactgctttag

SEQ ID NO: 4038905 - DNA, 25 bp, Homo sapien
gagtgtagtgctcacggcagccttc

SEQ ID NO: 4038906 - DNA, 25 bp, Homo sapien
ttagctgcatgagtgttggtatggt

SEQ ID NO: 4038907 - DNA, 25 bp, Homo sapien
ctgtacttttctactccaagtcttt

SEQ ID NO: 4038908 - DNA, 25 bp, Homo sapien
ttcatttactgtacttttctactcc

SEQ ID NO: 4038909 - DNA, 25 bp, Homo sapien
ttactgtacttttctactccaagtc

SEQ ID NO: 4038910 - DNA, 25 bp, Homo sapien
catttactgtacttttctactccaa

SEQ ID NO: 4038911 - DNA, 25 bp, Homo sapien
aaacagattaagacatttgccatga

SEQ ID NO: 4038912 - DNA, 25 bp, Homo sapien
ggagaggggagacctcattcagttc

SEQ ID NO: 4038913 - DNA, 25 bp, Homo sapien
cattcagttctacaacaacatctac

SEQ ID NO: 4038914 - DNA, 25 bp, Homo sapien
aacatctacatcaaacagattaaga

SEQ ID NO: 4038915 - DNA, 25 bp, Homo sapien
cctcatgaagcaaaacccagggttt

SEQ ID NO: 4038916 - DNA, 25 bp, Homo sapien
catttgtaagaacaggctcccctcg

SEQ ID NO: 4038917 - DNA, 25 bp, Homo sapien
gcagtgatcagtcagtcctcatgaa

SEQ ID NO: 4038918 - DNA, 25 bp, Homo sapien
cctcaggactctggctaatgggaga

SEQ ID NO: 4038919 - DNA, 25 bp, Homo sapien
gaggtaaagtgtcccagtgtctgca

SEQ ID NO: 4038920 - DNA, 25 bp, Homo sapien
cattaatgattgataagtggctgct

SEQ ID NO: 4038921 - DNA, 25 bp, Homo sapien
tcaactctttgtaggcttgcaatct

SEQ ID NO: 4038922 - DNA, 25 bp, Homo sapien
cagattatgtaggagactgtgctga

SEQ ID NO: 4038923 - DNA, 25 bp, Homo sapien
tggtgtgaacgcaaaatggcatcgc

SEQ ID NO: 4038924 - DNA, 25 bp, Homo sapien
taaacttgttcccataccctgcact

SEQ ID NO: 4038925 - DNA, 25 bp, Homo sapien
gagtcctgaaatagacaacacatgt

SEQ ID NO: 4038926 - DNA, 25 bp, Homo sapien
tggtggaagtatagacacagagatc

SEQ ID NO: 4038927 - DNA, 25 bp, Homo sapien
aaatgatgtgtacccaaacgtgagc

SEQ ID NO: 4038928 - DNA, 25 bp, Homo sapien
gtatgatacgcacaggagaaactcc

SEQ ID NO: 4038929 - DNA, 25 bp, Homo sapien
cccaggtttggaggtcctaggtcat

SEQ ID NO: 4038930 - DNA, 25 bp, Homo sapien
gatgtagctaatgaccgtggttccc

SEQ ID NO: 4038931 - DNA, 25 bp, Homo sapien
ccctatagccaccttttgggaatgt

SEQ ID NO: 4038932 - DNA, 25 bp, Homo sapien
gggatcaaccagctaagaaaagatt

SEQ ID NO: 4038933 - DNA, 25 bp, Homo sapien
tatgaaaacttatgacctcttcctt

SEQ ID NO: 4038934 - DNA, 25 bp, Homo sapien
aatatttttgggtgttcctggcagt

SEQ ID NO: 4038935 - DNA, 25 bp, Homo sapien
tgttcaattagaatagtgttctgca

SEQ ID NO: 4038936 - DNA, 25 bp, Homo sapien
tccagcagttttcaagtcaaattaa

SEQ ID NO: 4038937 - DNA, 25 bp, Homo sapien
tttattaatcactattgttccagca

SEQ ID NO: 4038938 - DNA, 25 bp, Homo sapien
tcagtataaacaaagttactaggta

SEQ ID NO: 4038939 - DNA, 25 bp, Homo sapien
aagtgcatggtgcaccagattcacc

SEQ ID NO: 4038940 - DNA, 25 bp, Homo sapien
ggtcagcttgaactaggccagagtc

SEQ ID NO: 4038941 - DNA, 25 bp, Homo sapien
ggcagtcagtcattgttcacacagt

SEQ ID NO: 4038942 - DNA, 25 bp, Homo sapien
cagagtctagcaggaaagtgcatgg

SEQ ID NO: 4038943 - DNA, 25 bp, Homo sapien
ttctttactgaaaggctgtactgag

SEQ ID NO: 4038944 - DNA, 25 bp, Homo sapien
tctttactgaaaggctgtactgagc

SEQ ID NO: 4038945 - DNA, 25 bp, Homo sapien
ctttactgaaaggctgtactgagcc

SEQ ID NO: 4038946 - DNA, 25 bp, Homo sapien
gcttcatcatgtacagaaggattcc

SEQ ID NO: 4038947 - DNA, 25 bp, Homo sapien
cttcatcatgtacagaaggattcca

SEQ ID NO: 4038948 - DNA, 25 bp, Homo sapien
attgttgtcgacatgtatgttttag

SEQ ID NO: 4038949 - DNA, 25 bp, Homo sapien
actatttgttggctcactaaatttc

SEQ ID NO: 4038950 - DNA, 25 bp, Homo sapien
tgttggctcactaaatttctataac

SEQ ID NO: 4038951 - DNA, 25 bp, Homo sapien
cccctaacttaataaagcacagtat

SEQ ID NO: 4038952 - DNA, 25 bp, Homo sapien
taagagaagagcctcaagaggcatc

SEQ ID NO: 4038953 - DNA, 25 bp, Homo sapien
cagcttatgcatgtgcctttttata

SEQ ID NO: 4038954 - DNA, 25 bp, Homo sapien
ttataaaggttgtaggctaacagct

SEQ ID NO: 4038955 - DNA, 25 bp, Homo sapien
tcgagttggcaccaagttataaagg

SEQ ID NO: 4038956 - DNA, 25 bp, Homo sapien
gcacaccttaacactgtcaacaact

SEQ ID NO: 4038957 - DNA, 25 bp, Homo sapien
agtgcacaccttaacactgtcaaca

SEQ ID NO: 4038958 - DNA, 25 bp, Homo sapien
caccttaacactgtcaacaacttta

SEQ ID NO: 4038959 - DNA, 25 bp, Homo sapien
ccttaacactgtcaacaactttact

SEQ ID NO: 4038960 - DNA, 25 bp, Homo sapien
gctgtatcaatcttgtagaaaactc

SEQ ID NO: 4038961 - DNA, 25 bp, Homo sapien
tatcaatcttgtagaaaactctcct

SEQ ID NO: 4038962 - DNA, 25 bp, Homo sapien
tgtatcaatcttgtagaaaactctc

SEQ ID NO: 4038963 - DNA, 25 bp, Homo sapien
gtatcaatcttgtagaaaactctcc

SEQ ID NO: 4038964 - DNA, 25 bp, Homo sapien
tcttgctgtattatgtcactaaaag

SEQ ID NO: 4038965 - DNA, 25 bp, Homo sapien
gtcctcttgctgtattatgtcacta

SEQ ID NO: 4038966 - DNA, 25 bp, Homo sapien
ttaccgaggcgtcctcttgctgtat

SEQ ID NO: 4038967 - DNA, 25 bp, Homo sapien
cgaggcgtcctcttgctgtattatg

SEQ ID NO: 4038968 - DNA, 25 bp, Homo sapien
cagctcacctgaggtgggatcaact

SEQ ID NO: 4038969 - DNA, 25 bp, Homo sapien
aaagacaggaatatcgaacaccaag

SEQ ID NO: 4038970 - DNA, 25 bp, Homo sapien
cacctgaggtgggatcaactagcgg

SEQ ID NO: 4038971 - DNA, 25 bp, Homo sapien
agacaggaatatcgaacaccaagcg

SEQ ID NO: 4038972 - DNA, 25 bp, Homo sapien
gctctgatggcatgccggaagctgc

SEQ ID NO: 4038973 - DNA, 25 bp, Homo sapien
ctcaagagggctacttaactacttt

SEQ ID NO: 4038974 - DNA, 25 bp, Homo sapien
actaaattttgcaatgaagcgggga

SEQ ID NO: 4038975 - DNA, 25 bp, Homo sapien
acagaagtccccctggacaactact

SEQ ID NO: 4038976 - DNA, 25 bp, Homo sapien
tcgctgatccacaaataaagccaga

SEQ ID NO: 4038977 - DNA, 25 bp, Homo sapien
tgatccacaaataaagccagactgt

SEQ ID NO: 4038978 - DNA, 25 bp, Homo sapien
gcccttctcgctgatccacaaataa

SEQ ID NO: 4038979 - DNA, 25 bp, Homo sapien
tccacaaataaagccagactgtgtc

SEQ ID NO: 4038980 - DNA, 25 bp, Homo sapien
taaacttaaatacgccatcttggta

SEQ ID NO: 4038981 - DNA, 25 bp, Homo sapien
atcagggatgtaaactgtaaactta

SEQ ID NO: 4038982 - DNA, 25 bp, Homo sapien
tcagggatgtaaactgtaaacttaa

SEQ ID NO: 4038983 - DNA, 25 bp, Homo sapien
aactgtaaacttaaatacgccatct

SEQ ID NO: 4038984 - DNA, 25 bp, Homo sapien
aagagttaaggcctaaatttgtgtg

SEQ ID NO: 4038985 - DNA, 25 bp, Homo sapien
gcccataaattaagagtgaatcctc

SEQ ID NO: 4038986 - DNA, 25 bp, Homo sapien
actaaatgtgcccataaattaagag

SEQ ID NO: 4038987 - DNA, 25 bp, Homo sapien
gcctaaatttgtgtgggaggaacta

SEQ ID NO: 4038988 - DNA, 25 bp, Homo sapien
ggtagcttctgcttcacaaccaagg

SEQ ID NO: 4038989 - DNA, 25 bp, Homo sapien
gagcgataagatggctgcacataga

SEQ ID NO: 4038990 - DNA, 25 bp, Homo sapien
cacatagacgcctggtagcttctgc

SEQ ID NO: 4038991 - DNA, 25 bp, Homo sapien
taagatggctgcacatagacgcctg

SEQ ID NO: 4038992 - DNA, 25 bp, Homo sapien
tcactttgagacaatgaacggcccc

SEQ ID NO: 4038993 - DNA, 25 bp, Homo sapien
aaccctgcaagccaagttctcacaa

SEQ ID NO: 4038994 - DNA, 25 bp, Homo sapien
gaacggcccctcaatgggcagctga

SEQ ID NO: 4038995 - DNA, 25 bp, Homo sapien
aatgacacatgcagatcaaaccacc

SEQ ID NO: 4038996 - DNA, 25 bp, Homo sapien
cataggctgtctgcgatgtctcatg

SEQ ID NO: 4038997 - DNA, 25 bp, Homo sapien
ggtctcataggctgtctgcgatgtc

SEQ ID NO: 4038998 - DNA, 25 bp, Homo sapien
ggctgtctgcgatgtctcatgcctg

SEQ ID NO: 4038999 - DNA, 25 bp, Homo sapien
aagatgaggtctcataggctgtctg

SEQ ID NO: 4039000 - DNA, 25 bp, Homo sapien
cagtcagcgtcttccttacatggag

SEQ ID NO: 4039001 - DNA, 25 bp, Homo sapien
gatccctaaggactggccttcctgg

SEQ ID NO: 4039002 - DNA, 25 bp, Homo sapien
tgcctacaaggcgacaaccaaatgg

SEQ ID NO: 4039003 - DNA, 25 bp, Homo sapien
gttccttcaactgtggatccctaag

SEQ ID NO: 4039004 - DNA, 25 bp, Homo sapien
tgtaggcttagttatgggcaaagca

SEQ ID NO: 4039005 - DNA, 25 bp, Homo sapien
ccaggtagaagggtccataggacgc

SEQ ID NO: 4039006 - DNA, 25 bp, Homo sapien
aggacgcatgcgtgccatttgttga

SEQ ID NO: 4039007 - DNA, 25 bp, Homo sapien
ttctttggtgcagttcgtggaggac

SEQ ID NO: 4039008 - DNA, 25 bp, Homo sapien
gatattagactagcctttcccacag

SEQ ID NO: 4039009 - DNA, 25 bp, Homo sapien
aaattagtgcccctcaagtctgatt

SEQ ID NO: 4039010 - DNA, 25 bp, Homo sapien
cttagaattgtgatgaccagaacga

SEQ ID NO: 4039011 - DNA, 25 bp, Homo sapien
tcccacagctgttctaaccgtagaa

SEQ ID NO: 4039012 - DNA, 25 bp, Homo sapien
aagtcagtggtgtatcatccaaatc

SEQ ID NO: 4039013 - DNA, 25 bp, Homo sapien
caaacaaagaaagtcagtggtgtat

SEQ ID NO: 4039014 - DNA, 25 bp, Homo sapien
caaagaaagtcagtggtgtatcatc

SEQ ID NO: 4039015 - DNA, 25 bp, Homo sapien
ccaaatcttctgtcttcggcattca

SEQ ID NO: 4039016 - DNA, 25 bp, Homo sapien
tcaaaggtcataaagtcagtgggtc

SEQ ID NO: 4039017 - DNA, 25 bp, Homo sapien
acaggcacgcaagagagacatttca

SEQ ID NO: 4039018 - DNA, 25 bp, Homo sapien
acaagtacagatcttccagccgaag

SEQ ID NO: 4039019 - DNA, 25 bp, Homo sapien
caagtcgtggataagaaagcatgtc

SEQ ID NO: 4039020 - DNA, 25 bp, Homo sapien
attcctacttgcaccaatcaaacgg

SEQ ID NO: 4039021 - DNA, 25 bp, Homo sapien
ctctgaattcctacttgcaccaatc

SEQ ID NO: 4039022 - DNA, 25 bp, Homo sapien
ctttaaagcagagctccttctctga

SEQ ID NO: 4039023 - DNA, 25 bp, Homo sapien
ttaaagcagagctccttctctgaat

SEQ ID NO: 4039024 - DNA, 25 bp, Homo sapien
gaaacccgtctctgagcactcaggg

SEQ ID NO: 4039025 - DNA, 25 bp, Homo sapien
gaccggcaccctcaccgcgggcgga

SEQ ID NO: 4039026 - DNA, 25 bp, Homo sapien
gcggcggcctcggaccggcaccctc

SEQ ID NO: 4039027 - DNA, 25 bp, Homo sapien
cggaaacccgtctctgagcactcag

SEQ ID NO: 4039028 - DNA, 25 bp, Homo sapien
aggtgcctgcaaacgcgcacaggtg

SEQ ID NO: 4039029 - DNA, 25 bp, Homo sapien
ctgtctcgaggtgatgcaaggcggg

SEQ ID NO: 4039030 - DNA, 25 bp, Homo sapien
cagctagctcgatgctggcccggga

SEQ ID NO: 4039031 - DNA, 25 bp, Homo sapien
cggccagcgcagcaggtgcctgcaa

SEQ ID NO: 4039032 - DNA, 25 bp, Homo sapien
aagatggacaaatgccgggcccgtg

SEQ ID NO: 4039033 - DNA, 25 bp, Homo sapien
gaggctggcggccagatttacagac

SEQ ID NO: 4039034 - DNA, 25 bp, Homo sapien
ctagaaagatggacaaatgccgggc

SEQ ID NO: 4039035 - DNA, 25 bp, Homo sapien
gcggccagatttacagacacctcag

SEQ ID NO: 4039036 - DNA, 25 bp, Homo sapien
cagcctgccgggcagtaagcctcac

SEQ ID NO: 4039037 - DNA, 25 bp, Homo sapien
acacctgcccgtcaaagacgttctt

SEQ ID NO: 4039038 - DNA, 25 bp, Homo sapien
tggctctcacacctgcccgtcaaag

SEQ ID NO: 4039039 - DNA, 25 bp, Homo sapien
ccgcggcccgacagcatctcccgcc

SEQ ID NO: 4039040 - DNA, 25 bp, Homo sapien
tccgccccctgctgcacgatcctgg

SEQ ID NO: 4039041 - DNA, 25 bp, Homo sapien
gtgacaccgcctcagtgtcttacac

SEQ ID NO: 4039042 - DNA, 25 bp, Homo sapien
tgacaccgcctcagtgtcttacact

SEQ ID NO: 4039043 - DNA, 25 bp, Homo sapien
gattggattcgtcatttttggcagg

SEQ ID NO: 4039044 - DNA, 25 bp, Homo sapien
taaactgtcaggtgtgaaggcttga

SEQ ID NO: 4039045 - DNA, 25 bp, Homo sapien
ggtcaacagatcagagtattccgca

SEQ ID NO: 4039046 - DNA, 25 bp, Homo sapien
agaagcttattgtggctcctcgagc

SEQ ID NO: 4039047 - DNA, 25 bp, Homo sapien
tattgtggcgcattggcaaagcctt

SEQ ID NO: 4039048 - DNA, 25 bp, Homo sapien
gactgccatgcatgcctctgcttgc

SEQ ID NO: 4039049 - DNA, 25 bp, Homo sapien
cagagcccgtattgcagggagttaa

SEQ ID NO: 4039050 - DNA, 25 bp, Homo sapien
gctcttagttctgctcatacacggg

SEQ ID NO: 4039051 - DNA, 25 bp, Homo sapien
aagggaggtgtagtcaagaatgcag

SEQ ID NO: 4039052 - DNA, 25 bp, Homo sapien
gggaggtgtagtcaagaatgcagtc

SEQ ID NO: 4039053 - DNA, 25 bp, Homo sapien
gaagggaggtgtagtcaagaatgca

SEQ ID NO: 4039054 - DNA, 25 bp, Homo sapien
ggaggtgtagtcaagaatgcagtca

SEQ ID NO: 4039055 - DNA, 25 bp, Homo sapien
cctgtccaattgctggtggaagagc

SEQ ID NO: 4039056 - DNA, 25 bp, Homo sapien
caggacctgtccaattgctggtgga

SEQ ID NO: 4039057 - DNA, 25 bp, Homo sapien
ttccaaaactgaattgtggagactg

SEQ ID NO: 4039058 - DNA, 25 bp, Homo sapien
gacctgtccaattgctggtggaaga

SEQ ID NO: 4039059 - DNA, 25 bp, Homo sapien
ggaacaacttctaactgacctgctg

SEQ ID NO: 4039060 - DNA, 25 bp, Homo sapien
tggtgtctccaactgtcgctgcctt

SEQ ID NO: 4039061 - DNA, 25 bp, Homo sapien
tccctatggaagataaactcgagag

SEQ ID NO: 4039062 - DNA, 25 bp, Homo sapien
taaatggcaatgctacgcttccagc

SEQ ID NO: 4039063 - DNA, 25 bp, Homo sapien
gggctccttgctatacttcctgtca

SEQ ID NO: 4039064 - DNA, 25 bp, Homo sapien
agtttgaatctcgttttaaatggca

SEQ ID NO: 4039065 - DNA, 25 bp, Homo sapien
ggccctttgaacaagctcactccat

SEQ ID NO: 4039066 - DNA, 25 bp, Homo sapien
taaaaattgtatgtggcagttcaca

SEQ ID NO: 4039067 - DNA, 25 bp, Homo sapien
gaatatgatacagaagcttgcagca

SEQ ID NO: 4039068 - DNA, 25 bp, Homo sapien
tccgcggcacagcaattatgtggtg

SEQ ID NO: 4039069 - DNA, 25 bp, Homo sapien
tggaggcagcgcaaataagcagaaa

SEQ ID NO: 4039070 - DNA, 25 bp, Homo sapien
ctgacaagtgtcgagcagacgcgga

SEQ ID NO: 4039071 - DNA, 25 bp, Homo sapien
ctgcttcggcgccacggggtcagca

SEQ ID NO: 4039072 - DNA, 25 bp, Homo sapien
tgcttcggcgccacggggtcagcat

SEQ ID NO: 4039073 - DNA, 25 bp, Homo sapien
tcttgcaaatgtatcacaagttggc

SEQ ID NO: 4039074 - DNA, 25 bp, Homo sapien
cctccatgccattattgcctccttt

SEQ ID NO: 4039075 - DNA, 25 bp, Homo sapien
tatttgatttgaataacagcttgga

SEQ ID NO: 4039076 - DNA, 25 bp, Homo sapien
gggcatgttatttgatttgaataac

SEQ ID NO: 4039077 - DNA, 25 bp, Homo sapien
tcatgagatccgaacaagcagaatg

SEQ ID NO: 4039078 - DNA, 25 bp, Homo sapien
tcggcatgatgaagagccggctgcc

SEQ ID NO: 4039079 - DNA, 25 bp, Homo sapien
caagcagaatgcgaagtaatgcttc

SEQ ID NO: 4039080 - DNA, 25 bp, Homo sapien
tcttcagtaacagcagcgttttttg

SEQ ID NO: 4039081 - DNA, 25 bp, Homo sapien
gcaagcaggcgagtggtggccacat

SEQ ID NO: 4039082 - DNA, 25 bp, Homo sapien
ggcaagcaggcgagtggtggccaca

SEQ ID NO: 4039083 - DNA, 25 bp, Homo sapien
ctggcaagcaggcgagtggtggcca

SEQ ID NO: 4039084 - DNA, 25 bp, Homo sapien
caagcaggcgagtggtggccacatg

SEQ ID NO: 4039085 - DNA, 25 bp, Homo sapien
tggccaagcacgcaagggaacacat

SEQ ID NO: 4039086 - DNA, 25 bp, Homo sapien
catggccaagcacgcaagggaacac

SEQ ID NO: 4039087 - DNA, 25 bp, Homo sapien
atggccaagcacgcaagggaacaca

SEQ ID NO: 4039088 - DNA, 25 bp, Homo sapien
aatgagtctgcgcagctcaaaggcc

SEQ ID NO: 4039089 - DNA, 25 bp, Homo sapien
aatacgatcccagcacgtgcgttgg

SEQ ID NO: 4039090 - DNA, 25 bp, Homo sapien
tcaaaggccggattcttgctcacgg

SEQ ID NO: 4039091 - DNA, 25 bp, Homo sapien
ttggagaagccaagagactcgctgg

SEQ ID NO: 4039092 - DNA, 25 bp, Homo sapien
cttctctgacaatttctctgcttga

SEQ ID NO: 4039093 - DNA, 25 bp, Homo sapien
tctctgacaatttctctgcttgagg

SEQ ID NO: 4039094 - DNA, 25 bp, Homo sapien
tctgacaatttctctgcttgagggc

SEQ ID NO: 4039095 - DNA, 25 bp, Homo sapien
cttcttctctgacaatttctctgct

SEQ ID NO: 4039096 - DNA, 25 bp, Homo sapien
gaatctttgggtgtctccccaggga

SEQ ID NO: 4039097 - DNA, 25 bp, Homo sapien
tcaggagaagatcgtggcaggatga

SEQ ID NO: 4039098 - DNA, 25 bp, Homo sapien
cactgactgactgtgatgccgatgg

SEQ ID NO: 4039099 - DNA, 25 bp, Homo sapien
cagaggaatgactgttgacacattt

SEQ ID NO: 4039100 - DNA, 25 bp, Homo sapien
tagagaggatctaacagccagagct

SEQ ID NO: 4039101 - DNA, 25 bp, Homo sapien
caagacacagtatagcacgcaggca

SEQ ID NO: 4039102 - DNA, 25 bp, Homo sapien
taagctcgtcattggctgttgcaag

SEQ ID NO: 4039103 - DNA, 25 bp, Homo sapien
ggaattcttactgacctggcggcta

SEQ ID NO: 4039104 - DNA, 25 bp, Homo sapien
gaggagtctcagtgtggtggttaat

SEQ ID NO: 4039105 - DNA, 25 bp, Homo sapien
gcaggatggagtagaacgagattct

SEQ ID NO: 4039106 - DNA, 25 bp, Homo sapien
ggctttggttttgtgctgtggaatc

SEQ ID NO: 4039107 - DNA, 25 bp, Homo sapien
ttgtgctgtggaatcaggagcatct

SEQ ID NO: 4039108 - DNA, 25 bp, Homo sapien
gaatgagccacatcatagctgtatg

SEQ ID NO: 4039109 - DNA, 25 bp, Homo sapien
aatgagccacatcatagctgtatgc

SEQ ID NO: 4039110 - DNA, 25 bp, Homo sapien
tcatagctgtatgcctgtccataat

SEQ ID NO: 4039111 - DNA, 25 bp, Homo sapien
tgtatgcctgtccataatctcccac

SEQ ID NO: 4039112 - DNA, 25 bp, Homo sapien
tagcaatgatggatgtggcagcttt

SEQ ID NO: 4039113 - DNA, 25 bp, Homo sapien
aatgatggatgtggcagctttgagc

SEQ ID NO: 4039114 - DNA, 25 bp, Homo sapien
gcaatgatggatgtggcagctttga

SEQ ID NO: 4039115 - DNA, 25 bp, Homo sapien
ctagcaatgatggatgtggcagctt

SEQ ID NO: 4039116 - DNA, 25 bp, Homo sapien
gatgggcagatacctgagtgaagac

SEQ ID NO: 4039117 - DNA, 25 bp, Homo sapien
ttcagagaccctatatcacctttga

SEQ ID NO: 4039118 - DNA, 25 bp, Homo sapien
agaataccttcagagaccctatatc

SEQ ID NO: 4039119 - DNA, 25 bp, Homo sapien
tgggcagatacctgagtgaagacac

SEQ ID NO: 4039120 - DNA, 25 bp, Homo sapien
gcggagactactgctgctaatgact

SEQ ID NO: 4039121 - DNA, 25 bp, Homo sapien
ctagtaatggtgttctatagaagaa

SEQ ID NO: 4039122 - DNA, 25 bp, Homo sapien
cattagaatttgtagcaggagttgc

SEQ ID NO: 4039123 - DNA, 25 bp, Homo sapien
ttttccatcccgtgggagtctagta

SEQ ID NO: 4039124 - DNA, 25 bp, Homo sapien
cttcttggtatgctttcagaagtat

SEQ ID NO: 4039125 - DNA, 25 bp, Homo sapien
ttggtatgctttcagaagtatttta

SEQ ID NO: 4039126 - DNA, 25 bp, Homo sapien
tcttggtatgctttcagaagtattt

SEQ ID NO: 4039127 - DNA, 25 bp, Homo sapien
caacttcttggtatgctttcagaag

SEQ ID NO: 4039128 - DNA, 25 bp, Homo sapien
tttacgtactttcttacatatacca

SEQ ID NO: 4039129 - DNA, 25 bp, Homo sapien
ttacgtactttcttacatataccat

SEQ ID NO: 4039130 - DNA, 25 bp, Homo sapien
tcgaagtctaagagtaccagattgc

SEQ ID NO: 4039131 - DNA, 25 bp, Homo sapien
ccagattgcacttccaaaagcctga

SEQ ID NO: 4039132 - DNA, 25 bp, Homo sapien
gaaaacaggtcatgatcgaagtcta

SEQ ID NO: 4039133 - DNA, 25 bp, Homo sapien
tgttctagggatgaaaaaggtgact

SEQ ID NO: 4039134 - DNA, 25 bp, Homo sapien
tgggaacatgagtgcacgcaaaacc

SEQ ID NO: 4039135 - DNA, 25 bp, Homo sapien
cattcagcaatagtgccagtttgac

SEQ ID NO: 4039136 - DNA, 25 bp, Homo sapien
gaacatgtgtaagaactggttttca

SEQ ID NO: 4039137 - DNA, 25 bp, Homo sapien
tctatctagtgcataaggaaatcat

SEQ ID NO: 4039138 - DNA, 25 bp, Homo sapien
catgacagtggctgggaatttgaca

SEQ ID NO: 4039139 - DNA, 25 bp, Homo sapien
caaaaaagtgctgcgtgcactggtc

SEQ ID NO: 4039140 - DNA, 25 bp, Homo sapien
caatggatccagtttggctcaccaa

SEQ ID NO: 4039141 - DNA, 25 bp, Homo sapien
tgacgccaagccctcttcaatggat

SEQ ID NO: 4039142 - DNA, 25 bp, Homo sapien
taaattattgagaaggtactgccca

SEQ ID NO: 4039143 - DNA, 25 bp, Homo sapien
caagattcttctcggagatggcagg

SEQ ID NO: 4039144 - DNA, 25 bp, Homo sapien
catacaggtgactgggtcccataag

SEQ ID NO: 4039145 - DNA, 25 bp, Homo sapien
gaggcccagtggtatagacagaatt

SEQ ID NO: 4039146 - DNA, 25 bp, Homo sapien
tgagcttgccaataccttcaccatc

SEQ ID NO: 4039147 - DNA, 25 bp, Homo sapien
tgcttgtagacagactggagggcat

SEQ ID NO: 4039148 - DNA, 25 bp, Homo sapien
agggcatggagagcttcgactgtta

SEQ ID NO: 4039149 - DNA, 25 bp, Homo sapien
aagtcatctctgtattgcttgtaga

SEQ ID NO: 4039150 - DNA, 25 bp, Homo sapien
ggtcactgaccacggtgaagcgaag

SEQ ID NO: 4039151 - DNA, 25 bp, Homo sapien
tcgacgtgagccacgccaatgtcct

SEQ ID NO: 4039152 - DNA, 25 bp, Homo sapien
tcccttcctgaaacatgtcggcaag

SEQ ID NO: 4039153 - DNA, 25 bp, Homo sapien
aggtcctgctcgtcctctggagggt

SEQ ID NO: 4039154 - DNA, 25 bp, Homo sapien
tctgcccaacagctatatcaaatgt

SEQ ID NO: 4039155 - DNA, 25 bp, Homo sapien
tacaaaatgcagagatcatgctccc

SEQ ID NO: 4039156 - DNA, 25 bp, Homo sapien
gctcccagggtaacattttgaatca

SEQ ID NO: 4039157 - DNA, 25 bp, Homo sapien
gatttgaattagtggcttgtgcgga

SEQ ID NO: 4039158 - DNA, 25 bp, Homo sapien
tacagggctcttgtgaagatcaaat

SEQ ID NO: 4039159 - DNA, 25 bp, Homo sapien
tgagatgatacaagtgaacagttgc

SEQ ID NO: 4039160 - DNA, 25 bp, Homo sapien
atcaaatgagatgatacaagtgaac

SEQ ID NO: 4039161 - DNA, 25 bp, Homo sapien
cttacagggctcttgtgaagatcaa

SEQ ID NO: 4039162 - DNA, 25 bp, Homo sapien
tacttctcagtgagaccagccttgc

SEQ ID NO: 4039163 - DNA, 25 bp, Homo sapien
cagattcactactgaggattcactg

SEQ ID NO: 4039164 - DNA, 25 bp, Homo sapien
tatccttcatgaaccagcttacgtg

SEQ ID NO: 4039165 - DNA, 25 bp, Homo sapien
tcccatgtctggaagaacgcttaca

SEQ ID NO: 4039166 - DNA, 25 bp, Homo sapien
gaggcagacaaataagactgaatag

SEQ ID NO: 4039167 - DNA, 25 bp, Homo sapien
caggacttgtccatgggaactgagc

SEQ ID NO: 4039168 - DNA, 25 bp, Homo sapien
cagaaacaaagcgaacacagaggca

SEQ ID NO: 4039169 - DNA, 25 bp, Homo sapien
taggctactgaatcgcagcccagga

SEQ ID NO: 4039170 - DNA, 25 bp, Homo sapien
tagtatagcttttaagatgtctctc

SEQ ID NO: 4039171 - DNA, 25 bp, Homo sapien
tctcttgtttttgtagtatagcttt

SEQ ID NO: 4039172 - DNA, 25 bp, Homo sapien
cttctattaggcatctcttgttttt

SEQ ID NO: 4039173 - DNA, 25 bp, Homo sapien
gttgttttctttatccacgtagatc

SEQ ID NO: 4039174 - DNA, 25 bp, Homo sapien
cacctacttagaatgtggcagagcc

SEQ ID NO: 4039175 - DNA, 25 bp, Homo sapien
gcttctgctttatcgagttggccaa

SEQ ID NO: 4039176 - DNA, 25 bp, Homo sapien
gaatccagcaatgttagcctcaaga

SEQ ID NO: 4039177 - DNA, 25 bp, Homo sapien
cagagaaggttaggagtttgcccaa

SEQ ID NO: 4039178 - DNA, 25 bp, Homo sapien
caaacagccgttggatagtgtcatc

SEQ ID NO: 4039179 - DNA, 25 bp, Homo sapien
gcaggaagactgtagaatcgacact

SEQ ID NO: 4039180 - DNA, 25 bp, Homo sapien
cattaaggcttagagctatgatctc

SEQ ID NO: 4039181 - DNA, 25 bp, Homo sapien
aagtgacacgggtgtctcttcagca

SEQ ID NO: 4039182 - DNA, 25 bp, Homo sapien
taatacaggtacaaggctgcagctg

SEQ ID NO: 4039183 - DNA, 25 bp, Homo sapien
tactaggattagcatagtatgatga

SEQ ID NO: 4039184 - DNA, 25 bp, Homo sapien
tgatggtctttgacttgaatatgct

SEQ ID NO: 4039185 - DNA, 25 bp, Homo sapien
taaatcaaatgactgccaaatgtca

SEQ ID NO: 4039186 - DNA, 25 bp, Homo sapien
gctgggtaataggtaagagaatttc

SEQ ID NO: 4039187 - DNA, 25 bp, Homo sapien
tttcttgtatacatgcatgattccc

SEQ ID NO: 4039188 - DNA, 25 bp, Homo sapien
catagatacaaataaagcctacctg

SEQ ID NO: 4039189 - DNA, 25 bp, Homo sapien
acctgctgatgaacaattatgttgt

SEQ ID NO: 4039190 - DNA, 25 bp, Homo sapien
taaaacaatcagactcaaccactgg

SEQ ID NO: 4039191 - DNA, 25 bp, Homo sapien
catacaaaggtgatgtctccagaat

SEQ ID NO: 4039192 - DNA, 25 bp, Homo sapien
cgtccgtggcagtaatctatctttt

SEQ ID NO: 4039193 - DNA, 25 bp, Homo sapien
tctccagaatctcaagctgtcaagg

SEQ ID NO: 4039194 - DNA, 25 bp, Homo sapien
ttaattatacatcacagacatgaag

SEQ ID NO: 4039195 - DNA, 25 bp, Homo sapien
caagtaatacgtagaagtactggga

SEQ ID NO: 4039196 - DNA, 25 bp, Homo sapien
ttatctaggacactacttctagtcc

SEQ ID NO: 4039197 - DNA, 25 bp, Homo sapien
gaaataactaggaactgtcagattc

SEQ ID NO: 4039198 - DNA, 25 bp, Homo sapien
cacgttgccaacatacacatggttc

SEQ ID NO: 4039199 - DNA, 25 bp, Homo sapien
gatgggtatctctatttcatggagg

SEQ ID NO: 4039200 - DNA, 25 bp, Homo sapien
cacatggttctattgcaggtctaag

SEQ ID NO: 4039201 - DNA, 25 bp, Homo sapien
cactgagatgctagccacgttgcca

SEQ ID NO: 4039202 - DNA, 25 bp, Homo sapien
tattcttggagataggacctggaat

SEQ ID NO: 4039203 - DNA, 25 bp, Homo sapien
tttgatattcttggagataggacct

SEQ ID NO: 4039204 - DNA, 25 bp, Homo sapien
gataggacctggaataatacagtca

SEQ ID NO: 4039205 - DNA, 25 bp, Homo sapien
tcttggagataggacctggaataat

SEQ ID NO: 4039206 - DNA, 25 bp, Homo sapien
ttcagaagatgccaagctttgttct

SEQ ID NO: 4039207 - DNA, 25 bp, Homo sapien
gatagtaaagacacatcatcttttc

SEQ ID NO: 4039208 - DNA, 25 bp, Homo sapien
ggttccaagtcctctgttatttctg

SEQ ID NO: 4039209 - DNA, 25 bp, Homo sapien
catctacactgccttcttgtgaaac

SEQ ID NO: 4039210 - DNA, 25 bp, Homo sapien
ccttcctatcttcaggaggaggaga

SEQ ID NO: 4039211 - DNA, 25 bp, Homo sapien
gggaacatgtggaacagtcagcata

SEQ ID NO: 4039212 - DNA, 25 bp, Homo sapien
tacctctggtgaaatttccttccta

SEQ ID NO: 4039213 - DNA, 25 bp, Homo sapien
taatttctatttctggtatatgctc

SEQ ID NO: 4039214 - DNA, 25 bp, Homo sapien
aaagataccttcttatctacaggtg

SEQ ID NO: 4039215 - DNA, 25 bp, Homo sapien
gttgtcttggtttaggtcttggtgc

SEQ ID NO: 4039216 - DNA, 25 bp, Homo sapien
ctacaggtgttaaacgttgtcttgg

SEQ ID NO: 4039217 - DNA, 25 bp, Homo sapien
tcactctgatgtggcatgatatcca

SEQ ID NO: 4039218 - DNA, 25 bp, Homo sapien
aaactagtgtgctaacagaggatgc

SEQ ID NO: 4039219 - DNA, 25 bp, Homo sapien
aagtcttcagttgttattgatccac

SEQ ID NO: 4039220 - DNA, 25 bp, Homo sapien
aacttctggctcttcgctgcgaatg

SEQ ID NO: 4039221 - DNA, 25 bp, Homo sapien
tgctggaggaagtctttgaacaact

SEQ ID NO: 4039222 - DNA, 25 bp, Homo sapien
aagtgttgatactccttttaatggc

SEQ ID NO: 4039223 - DNA, 25 bp, Homo sapien
gagtatcctttactttgctctcaag

SEQ ID NO: 4039224 - DNA, 25 bp, Homo sapien
tacaggcaccggctcaaacctaaat

SEQ ID NO: 4039225 - DNA, 25 bp, Homo sapien
gcaagacttccagaatggctaagta

SEQ ID NO: 4039226 - DNA, 25 bp, Homo sapien
gactctgacttaaggtatcgatcca

SEQ ID NO: 4039227 - DNA, 25 bp, Homo sapien
ttggcactgggaaatacatatgatc

SEQ ID NO: 4039228 - DNA, 25 bp, Homo sapien
tgtcatgtgccaacgaaatcagagg

SEQ ID NO: 4039229 - DNA, 25 bp, Homo sapien
agttcatttaagttgccatctgtgg

SEQ ID NO: 4039230 - DNA, 25 bp, Homo sapien
tgatagtccaataacggctgtttat

SEQ ID NO: 4039231 - DNA, 25 bp, Homo sapien
ttgtgttgatggaacagctctgtat

SEQ ID NO: 4039232 - DNA, 25 bp, Homo sapien
gaataattgcacatatacgtacgcg

SEQ ID NO: 4039233 - DNA, 25 bp, Homo sapien
tgatgtgtgacagcagtattgtgat

SEQ ID NO: 4039234 - DNA, 25 bp, Homo sapien
tgctctggccccttaaaatttgatg

SEQ ID NO: 4039235 - DNA, 25 bp, Homo sapien
cgataaagtcgaattgcttgatcca

SEQ ID NO: 4039236 - DNA, 25 bp, Homo sapien
taatcggaaccagtattccactgtg

SEQ ID NO: 4039237 - DNA, 25 bp, Homo sapien
aagcctttgccctttctcgataaag

SEQ ID NO: 4039238 - DNA, 25 bp, Homo sapien
ttttcgcctcgttctaagtggatgg

SEQ ID NO: 4039239 - DNA, 25 bp, Homo sapien
gctgtacaaaatattcggccgcttt

SEQ ID NO: 4039240 - DNA, 25 bp, Homo sapien
aaatttgtactgcttggtgccatag

SEQ ID NO: 4039241 - DNA, 25 bp, Homo sapien
tatattcgggatgaaggcctcgcac

SEQ ID NO: 4039242 - DNA, 25 bp, Homo sapien
gagatttcaaaatattgacatgaga

SEQ ID NO: 4039243 - DNA, 25 bp, Homo sapien
agatttcaaaatattgacatgagaa

SEQ ID NO: 4039244 - DNA, 25 bp, Homo sapien
agagatttcaaaatattgacatgag

SEQ ID NO: 4039245 - DNA, 25 bp, Homo sapien
caaatatcaccaacgtgaatatctg

SEQ ID NO: 4039246 - DNA, 25 bp, Homo sapien
ccaaccaaatatcaccaacgtgaat

SEQ ID NO: 4039247 - DNA, 25 bp, Homo sapien
ccaacgtgaatatctgccttgcttt

SEQ ID NO: 4039248 - DNA, 25 bp, Homo sapien
tatcaccaacgtgaatatctgcctt

SEQ ID NO: 4039249 - DNA, 25 bp, Homo sapien
gaacacttatatgctccccaaactt

SEQ ID NO: 4039250 - DNA, 25 bp, Homo sapien
actccaacagctgaagaacacttat

SEQ ID NO: 4039251 - DNA, 25 bp, Homo sapien
attttggttatggagaatatgcaaa

SEQ ID NO: 4039252 - DNA, 25 bp, Homo sapien
gaatatgcaaaactccaacagctga

SEQ ID NO: 4039253 - DNA, 25 bp, Homo sapien
tggaccaaaaaatcgtatatgttgt

SEQ ID NO: 4039254 - DNA, 25 bp, Homo sapien
tgtggaccaaaaaatcgtatatgtt

SEQ ID NO: 4039255 - DNA, 25 bp, Homo sapien
gaccaaaaaatcgtatatgttgtac

SEQ ID NO: 4039256 - DNA, 25 bp, Homo sapien
gtggaccaaaaaatcgtatatgttg

SEQ ID NO: 4039257 - DNA, 25 bp, Homo sapien
tctagtttatggatacgtgcagccc

SEQ ID NO: 4039258 - DNA, 25 bp, Homo sapien
actttgagttcataatcttgctgca

SEQ ID NO: 4039259 - DNA, 25 bp, Homo sapien
cgtgcagccctgatatcaagaagat

SEQ ID NO: 4039260 - DNA, 25 bp, Homo sapien
tccatcttacgggtcactgcctcaa

SEQ ID NO: 4039261 - DNA, 25 bp, Homo sapien
ttgcagctctctcatagagcgttct

SEQ ID NO: 4039262 - DNA, 25 bp, Homo sapien
tctcatagagcgttctagatcttta

SEQ ID NO: 4039263 - DNA, 25 bp, Homo sapien
ttgcaccgtttctgcatgagttgct

SEQ ID NO: 4039264 - DNA, 25 bp, Homo sapien
tcttgcaccgtttctgcatgagttg

SEQ ID NO: 4039265 - DNA, 25 bp, Homo sapien
gtaggagagcttcactcaattcatc

SEQ ID NO: 4039266 - DNA, 25 bp, Homo sapien
gagagcttcactcaattcatcagca

SEQ ID NO: 4039267 - DNA, 25 bp, Homo sapien
taagtaggagagcttcactcaattc

SEQ ID NO: 4039268 - DNA, 25 bp, Homo sapien
tataagtaggagagcttcactcaat

SEQ ID NO: 4039269 - DNA, 25 bp, Homo sapien
ctcttgaacgagtttttcattttga

SEQ ID NO: 4039270 - DNA, 25 bp, Homo sapien
cagatactgtaactgtagttctcta

SEQ ID NO: 4039271 - DNA, 25 bp, Homo sapien
gttctctattctcttgaacgagttt

SEQ ID NO: 4039272 - DNA, 25 bp, Homo sapien
gcttttgttccagatactgtaactg

SEQ ID NO: 4039273 - DNA, 25 bp, Homo sapien
aaggaaactgagctagcacctcgac

SEQ ID NO: 4039274 - DNA, 25 bp, Homo sapien
aataaagtccacacaattggaaagg

SEQ ID NO: 4039275 - DNA, 25 bp, Homo sapien
tagcacctcgacaaagacagcaggg

SEQ ID NO: 4039276 - DNA, 25 bp, Homo sapien
cagtcttgatctagtattgttctgg

SEQ ID NO: 4039277 - DNA, 25 bp, Homo sapien
cagctgttgctcctttaacttccat

SEQ ID NO: 4039278 - DNA, 25 bp, Homo sapien
cagtctcgagctgagcaatctgcac

SEQ ID NO: 4039279 - DNA, 25 bp, Homo sapien
cattgctcttcatgggcagcactga

SEQ ID NO: 4039280 - DNA, 25 bp, Homo sapien
tgtctgttaagtcagacttcaaggc

SEQ ID NO: 4039281 - DNA, 25 bp, Homo sapien
tcacgtgtgagcagcataacgaagt

SEQ ID NO: 4039282 - DNA, 25 bp, Homo sapien
tagatcatcttctaatatggaaaga

SEQ ID NO: 4039283 - DNA, 25 bp, Homo sapien
aaaaatgttagtgcaagcataaaac

SEQ ID NO: 4039284 - DNA, 25 bp, Homo sapien
gaagtctgcttttagtgtgacagga

SEQ ID NO: 4039285 - DNA, 25 bp, Homo sapien
ctgtcataaagtttatcatagtttt

SEQ ID NO: 4039286 - DNA, 25 bp, Homo sapien
tgtcataaagtttatcatagttttc

SEQ ID NO: 4039287 - DNA, 25 bp, Homo sapien
tcataaagtttatcatagttttcct

SEQ ID NO: 4039288 - DNA, 25 bp, Homo sapien
gtcataaagtttatcatagttttcc

SEQ ID NO: 4039289 - DNA, 25 bp, Homo sapien
ccatttgccatcaaagcatcgtggc

SEQ ID NO: 4039290 - DNA, 25 bp, Homo sapien
gcagcattttaaacgctgctcttta

SEQ ID NO: 4039291 - DNA, 25 bp, Homo sapien
aacgctgctctttaagttgcatgtt

SEQ ID NO: 4039292 - DNA, 25 bp, Homo sapien
catcgtggctgattctgagagttct

SEQ ID NO: 4039293 - DNA, 25 bp, Homo sapien
tctctactagctgtttatgaagctt

SEQ ID NO: 4039294 - DNA, 25 bp, Homo sapien
tactagctgtttatgaagcttaatc

SEQ ID NO: 4039295 - DNA, 25 bp, Homo sapien
ctctactagctgtttatgaagctta

SEQ ID NO: 4039296 - DNA, 25 bp, Homo sapien
tctactagctgtttatgaagcttaa

SEQ ID NO: 4039297 - DNA, 25 bp, Homo sapien
ttctacattgtcccgaatatttgac

SEQ ID NO: 4039298 - DNA, 25 bp, Homo sapien
caaagtgatatttctgttttaacat

SEQ ID NO: 4039299 - DNA, 25 bp, Homo sapien
aaagtgatatttctgttttaacata

SEQ ID NO: 4039300 - DNA, 25 bp, Homo sapien
tcaaagtgatatttctgttttaaca

SEQ ID NO: 4039301 - DNA, 25 bp, Homo sapien
aagtgatatttctgttttaacatac

SEQ ID NO: 4039302 - DNA, 25 bp, Homo sapien
gccaagtgctctaactcctctatct

SEQ ID NO: 4039303 - DNA, 25 bp, Homo sapien
atctgtagcttgctgttctcgaagc

SEQ ID NO: 4039304 - DNA, 25 bp, Homo sapien
tgctgttctcgaagctgaagaagag

SEQ ID NO: 4039305 - DNA, 25 bp, Homo sapien
cctctttgtgactgaataacgtttt

SEQ ID NO: 4039306 - DNA, 25 bp, Homo sapien
gcatcacactgtaatgagtctcagg

SEQ ID NO: 4039307 - DNA, 25 bp, Homo sapien
tgagtctcaggaaccggtataaacg

SEQ ID NO: 4039308 - DNA, 25 bp, Homo sapien
taaacgttggcttttcaggtgatca

SEQ ID NO: 4039309 - DNA, 25 bp, Homo sapien
ctctatcatgtctggcagcatcaca

SEQ ID NO: 4039310 - DNA, 25 bp, Homo sapien
tggcttcttcaagtaaactgttgcc

SEQ ID NO: 4039311 - DNA, 25 bp, Homo sapien
tatggagtttgcctgtaaccctggg

SEQ ID NO: 4039312 - DNA, 25 bp, Homo sapien
taactagccgtattaacttggtggc

SEQ ID NO: 4039313 - DNA, 25 bp, Homo sapien
actttctcttgcagctgctcaatca

SEQ ID NO: 4039314 - DNA, 25 bp, Homo sapien
tacgcccagtgttaatacgagattg

SEQ ID NO: 4039315 - DNA, 25 bp, Homo sapien
tgataattgaaaccactgggcaaca

SEQ ID NO: 4039316 - DNA, 25 bp, Homo sapien
tgacaaataacagtttcctaaggct

SEQ ID NO: 4039317 - DNA, 25 bp, Homo sapien
gcaacaatctgctttatagcactga

SEQ ID NO: 4039318 - DNA, 25 bp, Homo sapien
tttgatgtaactattactgcctgtg

SEQ ID NO: 4039319 - DNA, 25 bp, Homo sapien
gaaatttggccaggtatcacagtcc

SEQ ID NO: 4039320 - DNA, 25 bp, Homo sapien
caatggcctgtgcacaaaagtaagg

SEQ ID NO: 4039321 - DNA, 25 bp, Homo sapien
tggctactcggcctacagcatgtgg

SEQ ID NO: 4039322 - DNA, 25 bp, Homo sapien
catcagggagagctatgcataacat

SEQ ID NO: 4039323 - DNA, 25 bp, Homo sapien
gggttgttgaagtccacagagtaga

SEQ ID NO: 4039324 - DNA, 25 bp, Homo sapien
attcttcaatggttgtctcaccttt

SEQ ID NO: 4039325 - DNA, 25 bp, Homo sapien
atgccagtgggttgttgaagtccac

SEQ ID NO: 4039326 - DNA, 25 bp, Homo sapien
ggcctgcacatagcatgccagtggg

SEQ ID NO: 4039327 - DNA, 25 bp, Homo sapien
taggtatgatatactaacggcactc

SEQ ID NO: 4039328 - DNA, 25 bp, Homo sapien
aaaaacagatgctttggccatttgc

SEQ ID NO: 4039329 - DNA, 25 bp, Homo sapien
gaatctagtataacccaagcaaagt

SEQ ID NO: 4039330 - DNA, 25 bp, Homo sapien
gaaacagtagagactctttgaaatc

SEQ ID NO: 4039331 - DNA, 25 bp, Homo sapien
gccttgttccaaacaagattcaagg

SEQ ID NO: 4039332 - DNA, 25 bp, Homo sapien
taccataccctccaaattttactga

SEQ ID NO: 4039333 - DNA, 25 bp, Homo sapien
aaattgtacttatttacatcctgcc

SEQ ID NO: 4039334 - DNA, 25 bp, Homo sapien
caagattcaaggtggggtattcaat

SEQ ID NO: 4039335 - DNA, 25 bp, Homo sapien
taaaatgttctcatcatgcaaacgc

SEQ ID NO: 4039336 - DNA, 25 bp, Homo sapien
cctgcttgcgggcatgctgtttaag

SEQ ID NO: 4039337 - DNA, 25 bp, Homo sapien
tccagttcctcacgactgacacgtg

SEQ ID NO: 4039338 - DNA, 25 bp, Homo sapien
gtgacactgcctggcgagacttcat

SEQ ID NO: 4039339 - DNA, 25 bp, Homo sapien
attgtgaggttacttaaaatagtct

SEQ ID NO: 4039340 - DNA, 25 bp, Homo sapien
gataattaattgtgaggttacttaa

SEQ ID NO: 4039341 - DNA, 25 bp, Homo sapien
aaatgccaagataattaattgtgag

SEQ ID NO: 4039342 - DNA, 25 bp, Homo sapien
ccaagataattaattgtgaggttac

SEQ ID NO: 4039343 - DNA, 25 bp, Homo sapien
ctgcagtctcatcagttggaccaga

SEQ ID NO: 4039344 - DNA, 25 bp, Homo sapien
attccaaagaggtttagacctgtat

SEQ ID NO: 4039345 - DNA, 25 bp, Homo sapien
ccaaagaggtttagacctgtatctt

SEQ ID NO: 4039346 - DNA, 25 bp, Homo sapien
cagtctcatcagttggaccagacat

SEQ ID NO: 4039347 - DNA, 25 bp, Homo sapien
tattactcaaatattgtctgcttga

SEQ ID NO: 4039348 - DNA, 25 bp, Homo sapien
ctgcttgatgtacaaatgagtgggc

SEQ ID NO: 4039349 - DNA, 25 bp, Homo sapien
tgtgcctgggatgtcaatattactc

SEQ ID NO: 4039350 - DNA, 25 bp, Homo sapien
ctatctcagagagttattctaaggg

SEQ ID NO: 4039351 - DNA, 25 bp, Homo sapien
tcatggctgggatataacatttcaa

SEQ ID NO: 4039352 - DNA, 25 bp, Homo sapien
taaagggcggcctgtgattcaggcc

SEQ ID NO: 4039353 - DNA, 25 bp, Homo sapien
ttctccaggcggcagagcggaccct

SEQ ID NO: 4039354 - DNA, 25 bp, Homo sapien
tgctttcacgccagcagaactccag

SEQ ID NO: 4039355 - DNA, 25 bp, Homo sapien
gctaccgttgctatagcgccgacag

SEQ ID NO: 4039356 - DNA, 25 bp, Homo sapien
caggctcccgtagcctcctgggaaa

SEQ ID NO: 4039357 - DNA, 25 bp, Homo sapien
ctggccctgcagctagctaccgttg

SEQ ID NO: 4039358 - DNA, 25 bp, Homo sapien
tggccgagaggagcacgggagaaac

SEQ ID NO: 4039359 - DNA, 25 bp, Homo sapien
gatttatacttcaggcaccaggttg

SEQ ID NO: 4039360 - DNA, 25 bp, Homo sapien
gaacccataggcaggatgcatcttg

SEQ ID NO: 4039361 - DNA, 25 bp, Homo sapien
ccaggttgtggtttgtcgattgaac

SEQ ID NO: 4039362 - DNA, 25 bp, Homo sapien
cagtctgcggtttgtgctgtaaata

SEQ ID NO: 4039363 - DNA, 25 bp, Homo sapien
gccatcaatagcatgtcagcatctg

SEQ ID NO: 4039364 - DNA, 25 bp, Homo sapien
cgtggttgacctcacaaatagctct

SEQ ID NO: 4039365 - DNA, 25 bp, Homo sapien
tcaaatagtttaccttgagggaagc

SEQ ID NO: 4039366 - DNA, 25 bp, Homo sapien
cagcatctgtctgtaccgtggttga

SEQ ID NO: 4039367 - DNA, 25 bp, Homo sapien
tgtaaagccacagagtcggaagccc

SEQ ID NO: 4039368 - DNA, 25 bp, Homo sapien
gaagccccgaggaagaaattcagct

SEQ ID NO: 4039369 - DNA, 25 bp, Homo sapien
gactcttcatgtaaagccacagagt

SEQ ID NO: 4039370 - DNA, 25 bp, Homo sapien
acagagtcggaagccccgaggaaga

SEQ ID NO: 4039371 - DNA, 25 bp, Homo sapien
tgaaacctctgtgcagcagtccata

SEQ ID NO: 4039372 - DNA, 25 bp, Homo sapien
caggcattggcctgcaacatgcttg

SEQ ID NO: 4039373 - DNA, 25 bp, Homo sapien
gagcctgccattggtttccatcaag

SEQ ID NO: 4039374 - DNA, 25 bp, Homo sapien
gcagtccatattacttaacttccaa

SEQ ID NO: 4039375 - DNA, 25 bp, Homo sapien
ccatggaaatgtttgacgtttttgg

SEQ ID NO: 4039376 - DNA, 25 bp, Homo sapien
cataataacagtaggcataaaggag

SEQ ID NO: 4039377 - DNA, 25 bp, Homo sapien
attgttaccgctcataataacagta

SEQ ID NO: 4039378 - DNA, 25 bp, Homo sapien
taccgctcataataacagtaggcat

SEQ ID NO: 4039379 - DNA, 25 bp, Homo sapien
tttgtgacatatttcgtagctgatc

SEQ ID NO: 4039380 - DNA, 25 bp, Homo sapien
cgtagctgatcaaatgagcccctga

SEQ ID NO: 4039381 - DNA, 25 bp, Homo sapien
tgtttacagttgctttccaaggaca

SEQ ID NO: 4039382 - DNA, 25 bp, Homo sapien
agcccctgacacctgattgccgagt

SEQ ID NO: 4039383 - DNA, 25 bp, Homo sapien
cggttgacatgacccagaggagatg

SEQ ID NO: 4039384 - DNA, 25 bp, Homo sapien
tgggaggcgattgggctgcagggct

SEQ ID NO: 4039385 - DNA, 25 bp, Homo sapien
gctggagagcttggacggttgacat

SEQ ID NO: 4039386 - DNA, 25 bp, Homo sapien
ttaatgatgggaggcgattgggctg

SEQ ID NO: 4039387 - DNA, 25 bp, Homo sapien
taattttctgtccctatgggaattc

SEQ ID NO: 4039388 - DNA, 25 bp, Homo sapien
agaacctttgagaagcaagggcttt

SEQ ID NO: 4039389 - DNA, 25 bp, Homo sapien
gcagacatgaaaaaacgttatcctc

SEQ ID NO: 4039390 - DNA, 25 bp, Homo sapien
tgaaaaaacgttatcctccagagta

SEQ ID NO: 4039391 - DNA, 25 bp, Homo sapien
ggctttatgtgactgagcagcagac

SEQ ID NO: 4039392 - DNA, 25 bp, Homo sapien
tgttgttctttaggttgtaatgaag

SEQ ID NO: 4039393 - DNA, 25 bp, Homo sapien
ttgttgttctttaggttgtaatgaa

SEQ ID NO: 4039394 - DNA, 25 bp, Homo sapien
attgttgttctttaggttgtaatga

SEQ ID NO: 4039395 - DNA, 25 bp, Homo sapien
ggtctctgggttgcatcgccagact

SEQ ID NO: 4039396 - DNA, 25 bp, Homo sapien
tctgggttgcatcgccagactgtct

SEQ ID NO: 4039397 - DNA, 25 bp, Homo sapien
cttttccggtctctgggttgcatcg

SEQ ID NO: 4039398 - DNA, 25 bp, Homo sapien
tccggtctctgggttgcatcgccag

SEQ ID NO: 4039399 - DNA, 25 bp, Homo sapien
caaacgcgttccttccaggcaaaag

SEQ ID NO: 4039400 - DNA, 25 bp, Homo sapien
aagcaggagatgacacacaccatga

SEQ ID NO: 4039401 - DNA, 25 bp, Homo sapien
aaaagcaggagatgacacacaccat

SEQ ID NO: 4039402 - DNA, 25 bp, Homo sapien
gcgttccttccaggcaaaagcagga

SEQ ID NO: 4039403 - DNA, 25 bp, Homo sapien
acaagataatctcattgttcctcct

SEQ ID NO: 4039404 - DNA, 25 bp, Homo sapien
atctcattgttcctcctgctactta

SEQ ID NO: 4039405 - DNA, 25 bp, Homo sapien
cttgtaaggaacaagataatctcat

SEQ ID NO: 4039406 - DNA, 25 bp, Homo sapien
ctcattgttcctcctgctacttaaa

SEQ ID NO: 4039407 - DNA, 25 bp, Homo sapien
ttgatgcacaaaggggcaactccgt

SEQ ID NO: 4039408 - DNA, 25 bp, Homo sapien
tgatgccgggggatctaatgcttct

SEQ ID NO: 4039409 - DNA, 25 bp, Homo sapien
caaaggggcaactccgtgtagcagg

SEQ ID NO: 4039410 - DNA, 25 bp, Homo sapien
aactccgtgtagcaggaccttggtg

SEQ ID NO: 4039411 - DNA, 25 bp, Homo sapien
tcactgtgtttttgtacgtgatgga

SEQ ID NO: 4039412 - DNA, 25 bp, Homo sapien
ctgtgtttttgtacgtgatggattg

SEQ ID NO: 4039413 - DNA, 25 bp, Homo sapien
cactgtgtttttgtacgtgatggat

SEQ ID NO: 4039414 - DNA, 25 bp, Homo sapien
tgtttttgtacgtgatggattgtac

SEQ ID NO: 4039415 - DNA, 25 bp, Homo sapien
aatcggagaagaaaattacacatgg

SEQ ID NO: 4039416 - DNA, 25 bp, Homo sapien
taaaatcggagaagaaaattacaca

SEQ ID NO: 4039417 - DNA, 25 bp, Homo sapien
cacatggaattttaattttttccat

SEQ ID NO: 4039418 - DNA, 25 bp, Homo sapien
agaaaattacacatggaattttaat

SEQ ID NO: 4039419 - DNA, 25 bp, Homo sapien
gtgaaatagcaatggaatttgtctg

SEQ ID NO: 4039420 - DNA, 25 bp, Homo sapien
ctgaagtgtgtgttgtgaaatagca

SEQ ID NO: 4039421 - DNA, 25 bp, Homo sapien
agtttgctgaagtgtgtgttgtgaa

SEQ ID NO: 4039422 - DNA, 25 bp, Homo sapien
tgtgtgttgtgaaatagcaatggaa

SEQ ID NO: 4039423 - DNA, 25 bp, Homo sapien
tgatttctgaatggacaggatccct

SEQ ID NO: 4039424 - DNA, 25 bp, Homo sapien
gctgcctgaggaggttcctatgctt

SEQ ID NO: 4039425 - DNA, 25 bp, Homo sapien
taaagtcatcgaccctagtttgggc

SEQ ID NO: 4039426 - DNA, 25 bp, Homo sapien
tgggctcttgtacttcttctatcat

SEQ ID NO: 4039427 - DNA, 25 bp, Homo sapien
tacgaatgagatatggtgctcagct

SEQ ID NO: 4039428 - DNA, 25 bp, Homo sapien
tatggtgctcagcttcaaggagtta

SEQ ID NO: 4039429 - DNA, 25 bp, Homo sapien
gcagactaaattgggcccactgtat

SEQ ID NO: 4039430 - DNA, 25 bp, Homo sapien
aagagcagcagactaaattgggccc

SEQ ID NO: 4039431 - DNA, 25 bp, Homo sapien
tctgtcactagatgagttggcattt

SEQ ID NO: 4039432 - DNA, 25 bp, Homo sapien
tgggcaaatatcaacttgaattgta

SEQ ID NO: 4039433 - DNA, 25 bp, Homo sapien
ttgagtggcattaagcatcatccca

SEQ ID NO: 4039434 - DNA, 25 bp, Homo sapien
tgtatatcagtagctcattcccttg

SEQ ID NO: 4039435 - DNA, 25 bp, Homo sapien
taaatgcaaggtatcaccagtattg

SEQ ID NO: 4039436 - DNA, 25 bp, Homo sapien
cgtggagagtcttcaactgaggaat

SEQ ID NO: 4039437 - DNA, 25 bp, Homo sapien
tcgaggccggttgaccgagtcttcc

SEQ ID NO: 4039438 - DNA, 25 bp, Homo sapien
tgaggaatccttacttcgaggccgg

SEQ ID NO: 4039439 - DNA, 25 bp, Homo sapien
gacctgctcgcaaacttgattagac

SEQ ID NO: 4039440 - DNA, 25 bp, Homo sapien
agaggcctttgggaatacgaaggat

SEQ ID NO: 4039441 - DNA, 25 bp, Homo sapien
caaagagctaggacttatgtctccc

SEQ ID NO: 4039442 - DNA, 25 bp, Homo sapien
cagggccatcgcagtgggaaaacac

SEQ ID NO: 4039443 - DNA, 25 bp, Homo sapien
tactgcaactgaagaatcccaatac

SEQ ID NO: 4039444 - DNA, 25 bp, Homo sapien
ttcccatgaggaacacccatctgtc

SEQ ID NO: 4039445 - DNA, 25 bp, Homo sapien
tctgtccttgactggtaaatgtggg

SEQ ID NO: 4039446 - DNA, 25 bp, Homo sapien
tgtgggaaggttgttctctttcacc

SEQ ID NO: 4039447 - DNA, 25 bp, Homo sapien
gcaggtggtagactcgaacacagga

SEQ ID NO: 4039448 - DNA, 25 bp, Homo sapien
gcctccaacatgaaggcatctttgt

SEQ ID NO: 4039449 - DNA, 25 bp, Homo sapien
agcaggtggtagactcgaacacagg

SEQ ID NO: 4039450 - DNA, 25 bp, Homo sapien
caggtggtagactcgaacacaggag

SEQ ID NO: 4039451 - DNA, 25 bp, Homo sapien
ttcttccaccagtggagactgtctg

SEQ ID NO: 4039452 - DNA, 25 bp, Homo sapien
gagtccctgattggagtctcagtca

SEQ ID NO: 4039453 - DNA, 25 bp, Homo sapien
tctgtgtgtccaagtgagactgtag

SEQ ID NO: 4039454 - DNA, 25 bp, Homo sapien
gtggagactgtctgtgaaccctagt

SEQ ID NO: 4039455 - DNA, 25 bp, Homo sapien
ctattgaaaagccaacagcataact

SEQ ID NO: 4039456 - DNA, 25 bp, Homo sapien
cttcgactaggtgctttgagatttc

SEQ ID NO: 4039457 - DNA, 25 bp, Homo sapien
cataacttcgactaggtgctttgag

SEQ ID NO: 4039458 - DNA, 25 bp, Homo sapien
gccaacagcataacttcgactaggt

SEQ ID NO: 4039459 - DNA, 25 bp, Homo sapien
tctctgttccatatggccagccatg

SEQ ID NO: 4039460 - DNA, 25 bp, Homo sapien
tgtacaaaatcagtcgagtgctctc

SEQ ID NO: 4039461 - DNA, 25 bp, Homo sapien
gctctctgaagcattgaagtcaaca

SEQ ID NO: 4039462 - DNA, 25 bp, Homo sapien
caacatttagttgtacctgtgccag

SEQ ID NO: 4039463 - DNA, 25 bp, Homo sapien
gcgttgccaactggagctctgaggt

SEQ ID NO: 4039464 - DNA, 25 bp, Homo sapien
cagcatccgagcttaaacgtatggg

SEQ ID NO: 4039465 - DNA, 25 bp, Homo sapien
aacattccagcggtcgcccacatga

SEQ ID NO: 4039466 - DNA, 25 bp, Homo sapien
tagctttcgtacattgccccagcat

SEQ ID NO: 4039467 - DNA, 25 bp, Homo sapien
tgttcagtcaaataaagtgggtctt

SEQ ID NO: 4039468 - DNA, 25 bp, Homo sapien
ccttcctttcaagacagtggagttt

SEQ ID NO: 4039469 - DNA, 25 bp, Homo sapien
agtcatgtggtgaactctgcggaga

SEQ ID NO: 4039470 - DNA, 25 bp, Homo sapien
ccaagtgtgtctttaaggtgggaat

SEQ ID NO: 4039471 - DNA, 25 bp, Homo sapien
aattccatccatctcgcttaggagc

SEQ ID NO: 4039472 - DNA, 25 bp, Homo sapien
ccatccatctcgcttaggagctgca

SEQ ID NO: 4039473 - DNA, 25 bp, Homo sapien
atgaaaattccatccatctcgctta

SEQ ID NO: 4039474 - DNA, 25 bp, Homo sapien
atccatctcgcttaggagctgcagc

SEQ ID NO: 4039475 - DNA, 25 bp, Homo sapien
ctgtcactgaggagaaaggctgtcc

SEQ ID NO: 4039476 - DNA, 25 bp, Homo sapien
tgtcctggccctgtcagacaagtac

SEQ ID NO: 4039477 - DNA, 25 bp, Homo sapien
ttaagagggtaggcccaggctgtca

SEQ ID NO: 4039478 - DNA, 25 bp, Homo sapien
gctgtcctggccctgtcagacaagt

SEQ ID NO: 4039479 - DNA, 25 bp, Homo sapien
gcagcgcaggtggatggtccccaag

SEQ ID NO: 4039480 - DNA, 25 bp, Homo sapien
aggcagcgcaggtggatggtcccca

SEQ ID NO: 4039481 - DNA, 25 bp, Homo sapien
ggcagcgcaggtggatggtccccaa

SEQ ID NO: 4039482 - DNA, 25 bp, Homo sapien
aacttgttgtaggtaggcaggtcca

SEQ ID NO: 4039483 - DNA, 25 bp, Homo sapien
cagaaacttgttgtaggtaggcagg

SEQ ID NO: 4039484 - DNA, 25 bp, Homo sapien
gaaacttgttgtaggtaggcaggtc

SEQ ID NO: 4039485 - DNA, 25 bp, Homo sapien
ttacagaaacttgttgtaggtaggc

SEQ ID NO: 4039486 - DNA, 25 bp, Homo sapien
gcatctcatttattataacgaagct

SEQ ID NO: 4039487 - DNA, 25 bp, Homo sapien
tgctagtggaaacctttatgtcccg

SEQ ID NO: 4039488 - DNA, 25 bp, Homo sapien
cgtattatacatcacataaagcatc

SEQ ID NO: 4039489 - DNA, 25 bp, Homo sapien
tataacgaagctaatgatgctagtg

SEQ ID NO: 4039490 - DNA, 25 bp, Homo sapien
gtcacccagaccagtttgaatttca

SEQ ID NO: 4039491 - DNA, 25 bp, Homo sapien
cagtaaccatttatagtcacccaga

SEQ ID NO: 4039492 - DNA, 25 bp, Homo sapien
ggtaggagccaagacaaacagtaac

SEQ ID NO: 4039493 - DNA, 25 bp, Homo sapien
tttggagccactggaattgtaggcc

SEQ ID NO: 4039494 - DNA, 25 bp, Homo sapien
taatataaacacgtaggaatcttgg

SEQ ID NO: 4039495 - DNA, 25 bp, Homo sapien
ggaacagcaaactattaatttacca

SEQ ID NO: 4039496 - DNA, 25 bp, Homo sapien
tttatagccacagaagccatgaggg

SEQ ID NO: 4039497 - DNA, 25 bp, Homo sapien
cccagcatcctgtgaatttctccat

SEQ ID NO: 4039498 - DNA, 25 bp, Homo sapien
cacgtcgttagtgggccaaaggaga

SEQ ID NO: 4039499 - DNA, 25 bp, Homo sapien
cattggttaggaaggctcacgtcgt

SEQ ID NO: 4039500 - DNA, 25 bp, Homo sapien
tagctttcacagtagagcccatggg

SEQ ID NO: 4039501 - DNA, 25 bp, Homo sapien
ctgttgagccggaagtggtgcagca

SEQ ID NO: 4039502 - DNA, 25 bp, Homo sapien
gagtgtgttgctttgagatctgaaa

SEQ ID NO: 4039503 - DNA, 25 bp, Homo sapien
agagtgtgttgctttgagatctgaa

SEQ ID NO: 4039504 - DNA, 25 bp, Homo sapien
agtgtgttgctttgagatctgaaac

SEQ ID NO: 4039505 - DNA, 25 bp, Homo sapien
ttagaaaatgcctgccgtgcgtggc

SEQ ID NO: 4039506 - DNA, 25 bp, Homo sapien
tatttctgatagtgcttggcagccc

SEQ ID NO: 4039507 - DNA, 25 bp, Homo sapien
cactggtgcaatggtatcgttggag

SEQ ID NO: 4039508 - DNA, 25 bp, Homo sapien
tatcgttggagctgccaacttgttt

SEQ ID NO: 4039509 - DNA, 25 bp, Homo sapien
tcagtaatgacagacattgaatatg

SEQ ID NO: 4039510 - DNA, 25 bp, Homo sapien
aatcttgctagctttgctgtagtgg

SEQ ID NO: 4039511 - DNA, 25 bp, Homo sapien
acattgaatatgagtgacaggaacc

SEQ ID NO: 4039512 - DNA, 25 bp, Homo sapien
ctgtcagtgtaatatgacatgaagc

SEQ ID NO: 4039513 - DNA, 25 bp, Homo sapien
cagaccatattgtgagtgaagggcc

SEQ ID NO: 4039514 - DNA, 25 bp, Homo sapien
cctgattttggcaacgctgggtagt

SEQ ID NO: 4039515 - DNA, 25 bp, Homo sapien
tgaagggccagcgtttgttgcctga

SEQ ID NO: 4039516 - DNA, 25 bp, Homo sapien
caggagtctgtttagcagaccatat

SEQ ID NO: 4039517 - DNA, 25 bp, Homo sapien
gaagataatcttggcaacataaaac

SEQ ID NO: 4039518 - DNA, 25 bp, Homo sapien
tgaagataatcttggcaacataaaa

SEQ ID NO: 4039519 - DNA, 25 bp, Homo sapien
tactttgtaaatggggcaatgaagc

SEQ ID NO: 4039520 - DNA, 25 bp, Homo sapien
gtttactttgtaaatggggcaatga

SEQ ID NO: 4039521 - DNA, 25 bp, Homo sapien
tctggtttactttgtaaatggggca

SEQ ID NO: 4039522 - DNA, 25 bp, Homo sapien
tctgaatgattctgagacactttct

SEQ ID NO: 4039523 - DNA, 25 bp, Homo sapien
tcatatggactaggaattgggcagg

SEQ ID NO: 4039524 - DNA, 25 bp, Homo sapien
catacaagagggaagccgacttggg

SEQ ID NO: 4039525 - DNA, 25 bp, Homo sapien
aattgggcaggtgacatacaagagg

SEQ ID NO: 4039526 - DNA, 25 bp, Homo sapien
ctaggaattgggcaggtgacataca

SEQ ID NO: 4039527 - DNA, 25 bp, Homo sapien
gataaagcctgcgtggttcccagag

SEQ ID NO: 4039528 - DNA, 25 bp, Homo sapien
tcccagaggctgtgcatactgccta

SEQ ID NO: 4039529 - DNA, 25 bp, Homo sapien
gtacatccatccctctcagctagtg

SEQ ID NO: 4039530 - DNA, 25 bp, Homo sapien
gaaggagaaatctcactcttcagtg

SEQ ID NO: 4039531 - DNA, 25 bp, Homo sapien
ttgaggatagtgttagagaccagag

SEQ ID NO: 4039532 - DNA, 25 bp, Homo sapien
tcttttaggtgaaccctagtgcaac

SEQ ID NO: 4039533 - DNA, 25 bp, Homo sapien
aagcctgtgataatgatatcttggc

SEQ ID NO: 4039534 - DNA, 25 bp, Homo sapien
tgcaacaggttggaaagggctagtt

SEQ ID NO: 4039535 - DNA, 25 bp, Homo sapien
gatgaaataatctcctcaagttaca

SEQ ID NO: 4039536 - DNA, 25 bp, Homo sapien
tatattctgtatcaatcctttctga

SEQ ID NO: 4039537 - DNA, 25 bp, Homo sapien
aagttgcttatttcttcaatcaccc

SEQ ID NO: 4039538 - DNA, 25 bp, Homo sapien
tcaatcacccatagcaatgtttcca

SEQ ID NO: 4039539 - DNA, 25 bp, Homo sapien
ttaccgaacaattgtgaaattagta

SEQ ID NO: 4039540 - DNA, 25 bp, Homo sapien
gatgagattgtttgacagccgtttg

SEQ ID NO: 4039541 - DNA, 25 bp, Homo sapien
gcttgctgatgagattgtttgacag

SEQ ID NO: 4039542 - DNA, 25 bp, Homo sapien
tgctgatgagattgtttgacagccg

SEQ ID NO: 4039543 - DNA, 25 bp, Homo sapien
agattgtttgacagccgtttgctac

SEQ ID NO: 4039544 - DNA, 25 bp, Homo sapien
ctaacacttcataagttcaatcttt

SEQ ID NO: 4039545 - DNA, 25 bp, Homo sapien
accatgaccaccaaacgcctgaaat

SEQ ID NO: 4039546 - DNA, 25 bp, Homo sapien
gactgaaatagacagggaaaacctg

SEQ ID NO: 4039547 - DNA, 25 bp, Homo sapien
aaattatgactgaaatagacaggga

SEQ ID NO: 4039548 - DNA, 25 bp, Homo sapien
caggttcgagtttttccagagcaca

SEQ ID NO: 4039549 - DNA, 25 bp, Homo sapien
caaatctgggttaaacaggttcgag

SEQ ID NO: 4039550 - DNA, 25 bp, Homo sapien
cagagcacactgtttaggatttcag

SEQ ID NO: 4039551 - DNA, 25 bp, Homo sapien
tcaaccatctcggaaacagggtgtt

SEQ ID NO: 4039552 - DNA, 25 bp, Homo sapien
gccagtcgctggaatacgtcttgct

SEQ ID NO: 4039553 - DNA, 25 bp, Homo sapien
ggcagaaacaaaatcgtgccagtcg

SEQ ID NO: 4039554 - DNA, 25 bp, Homo sapien
taataccacgcagatgtaaacttct

SEQ ID NO: 4039555 - DNA, 25 bp, Homo sapien
tttacatgcatgtaataccacgcag

SEQ ID NO: 4039556 - DNA, 25 bp, Homo sapien
aattgagctgctttgaacttgtatg

SEQ ID NO: 4039557 - DNA, 25 bp, Homo sapien
actgcttggtatgcttcctggagga

SEQ ID NO: 4039558 - DNA, 25 bp, Homo sapien
cctaatccctttgattgagtgccag

SEQ ID NO: 4039559 - DNA, 25 bp, Homo sapien
gatagctctcattgaataactccag

SEQ ID NO: 4039560 - DNA, 25 bp, Homo sapien
tcttcagggactctgcccattagtc

SEQ ID NO: 4039561 - DNA, 25 bp, Homo sapien
taatatcccttttatggttgactgg

SEQ ID NO: 4039562 - DNA, 25 bp, Homo sapien
ttatttagcctctgtagctgtttta

SEQ ID NO: 4039563 - DNA, 25 bp, Homo sapien
ttgactggtcgatgttttaaaacaa

SEQ ID NO: 4039564 - DNA, 25 bp, Homo sapien
ccatggctggctagtgagagacccg

SEQ ID NO: 4039565 - DNA, 25 bp, Homo sapien
gagacccggggctagaaacttgata

SEQ ID NO: 4039566 - DNA, 25 bp, Homo sapien
acccatggctggctagtgagagacc

SEQ ID NO: 4039567 - DNA, 25 bp, Homo sapien
agaaacccatggctggctagtgaga

SEQ ID NO: 4039568 - DNA, 25 bp, Homo sapien
tgtctgctatctgtggcgtgaactt

SEQ ID NO: 4039569 - DNA, 25 bp, Homo sapien
tttgtctgctatctgtggcgtgaac

SEQ ID NO: 4039570 - DNA, 25 bp, Homo sapien
tctgctatctgtggcgtgaacttta

SEQ ID NO: 4039571 - DNA, 25 bp, Homo sapien
gctttgtctgctatctgtggcgtga

SEQ ID NO: 4039572 - DNA, 25 bp, Homo sapien
cttggaaaggcttgatgtagaccgc

SEQ ID NO: 4039573 - DNA, 25 bp, Homo sapien
tatgtaaccatctgccgaactgagg

SEQ ID NO: 4039574 - DNA, 25 bp, Homo sapien
cttgaccgagaagggaagtacgctt

SEQ ID NO: 4039575 - DNA, 25 bp, Homo sapien
gatgtagaccgctctttcagaaaac

SEQ ID NO: 4039576 - DNA, 25 bp, Homo sapien
tagtgaatctaggtatccctcagtg

SEQ ID NO: 4039577 - DNA, 25 bp, Homo sapien
caggatggttgtagctccatagaca

SEQ ID NO: 4039578 - DNA, 25 bp, Homo sapien
ttaaaggacttctgctagtgtctac

SEQ ID NO: 4039579 - DNA, 25 bp, Homo sapien
cctcatggctcctggaaactttagc

SEQ ID NO: 4039580 - DNA, 25 bp, Homo sapien
gctggattctcccaagctctgtggc

SEQ ID NO: 4039581 - DNA, 25 bp, Homo sapien
tgctaggtttcgttcccacagggaa

SEQ ID NO: 4039582 - DNA, 25 bp, Homo sapien
tacagttggttcttcgccactctgg

SEQ ID NO: 4039583 - DNA, 25 bp, Homo sapien
ggattttctccgtactccattgcag

SEQ ID NO: 4039584 - DNA, 25 bp, Homo sapien
ctctggtgtgggaagccagctttcc

SEQ ID NO: 4039585 - DNA, 25 bp, Homo sapien
tctgcatgcagccttgtactgggtc

SEQ ID NO: 4039586 - DNA, 25 bp, Homo sapien
ttggtgcatcctcccctggggggct

SEQ ID NO: 4039587 - DNA, 25 bp, Homo sapien
cagctttcctaccattctgcatgca

SEQ ID NO: 4039588 - DNA, 25 bp, Homo sapien
tagggaccgcatgccatttaatgag

SEQ ID NO: 4039589 - DNA, 25 bp, Homo sapien
tcaagtaattatgaagcgcccatgc

SEQ ID NO: 4039590 - DNA, 25 bp, Homo sapien
tccatggaactagagcatagctgtc

SEQ ID NO: 4039591 - DNA, 25 bp, Homo sapien
gatatcaggcaccaactctaatagg

SEQ ID NO: 4039592 - DNA, 25 bp, Homo sapien
ccataaatgtaggttccaactcctt

SEQ ID NO: 4039593 - DNA, 25 bp, Homo sapien
tgtaggttccaactccttccattac

SEQ ID NO: 4039594 - DNA, 25 bp, Homo sapien
taaatgtaggttccaactccttcca

SEQ ID NO: 4039595 - DNA, 25 bp, Homo sapien
ctagcacttaatagattctccataa

SEQ ID NO: 4039596 - DNA, 25 bp, Homo sapien
ctttgatacgtctagacctgatcca

SEQ ID NO: 4039597 - DNA, 25 bp, Homo sapien
cagtgagtatttgagggccaatctc

SEQ ID NO: 4039598 - DNA, 25 bp, Homo sapien
tccagtgagtatttgagggccaatc

SEQ ID NO: 4039599 - DNA, 25 bp, Homo sapien
cgtctagacctgatccagtgagtat

SEQ ID NO: 4039600 - DNA, 25 bp, Homo sapien
gaactggagtctatttttgactgtt

SEQ ID NO: 4039601 - DNA, 25 bp, Homo sapien
atagcaatgaggaactggagtctat

SEQ ID NO: 4039602 - DNA, 25 bp, Homo sapien
atttttgactgttgtagtgaccttt

SEQ ID NO: 4039603 - DNA, 25 bp, Homo sapien
tttttgactgttgtagtgacctttg

SEQ ID NO: 4039604 - DNA, 25 bp, Homo sapien
tcctctggtatgtgcatccccgaaa

SEQ ID NO: 4039605 - DNA, 25 bp, Homo sapien
tggtatgtgcatccccgaaagtaag

SEQ ID NO: 4039606 - DNA, 25 bp, Homo sapien
ccccgaaagtaagtgatatctatta

SEQ ID NO: 4039607 - DNA, 25 bp, Homo sapien
tgtgcatccccgaaagtaagtgata

SEQ ID NO: 4039608 - DNA, 25 bp, Homo sapien
cattagcacctccagtgagagatca

SEQ ID NO: 4039609 - DNA, 25 bp, Homo sapien
tttccactttgaattactcaggctc

SEQ ID NO: 4039610 - DNA, 25 bp, Homo sapien
gaacacttcactactcattagcacc

SEQ ID NO: 4039611 - DNA, 25 bp, Homo sapien
ccactgcacagcgtagcattttgaa

SEQ ID NO: 4039612 - DNA, 25 bp, Homo sapien
caaaggcatttgaaacgtggagaga

SEQ ID NO: 4039613 - DNA, 25 bp, Homo sapien
taactttccgctgtatacacgggag

SEQ ID NO: 4039614 - DNA, 25 bp, Homo sapien
tacacgggagctaacagatgtagct

SEQ ID NO: 4039615 - DNA, 25 bp, Homo sapien
gaatcaaaggccaaacaggactagc

SEQ ID NO: 4039616 - DNA, 25 bp, Homo sapien
gagccttccgttgctaagcctccgt

SEQ ID NO: 4039617 - DNA, 25 bp, Homo sapien
cttgactggataaagagccttccgt

SEQ ID NO: 4039618 - DNA, 25 bp, Homo sapien
ctaagcctccgttccttcgtagcat

SEQ ID NO: 4039619 - DNA, 25 bp, Homo sapien
ggataaagagccttccgttgctaag

SEQ ID NO: 4039620 - DNA, 25 bp, Homo sapien
cagtgaagggggaacgatgggcttt

SEQ ID NO: 4039621 - DNA, 25 bp, Homo sapien
atgggctttcccaatcaagatccca

SEQ ID NO: 4039622 - DNA, 25 bp, Homo sapien
tctcgttaatctacagtgaaggggg

SEQ ID NO: 4039623 - DNA, 25 bp, Homo sapien
tgggctttcccaatcaagatcccaa

SEQ ID NO: 4039624 - DNA, 25 bp, Homo sapien
tcaccaatgttcatggcccctttgg

SEQ ID NO: 4039625 - DNA, 25 bp, Homo sapien
tccctcacggtcacaaaagaactgc

SEQ ID NO: 4039626 - DNA, 25 bp, Homo sapien
tcacaaagaacagggttattctggt

SEQ ID NO: 4039627 - DNA, 25 bp, Homo sapien
tcttgaggttctgctatactttgac

SEQ ID NO: 4039628 - DNA, 25 bp, Homo sapien
acgagaagccaggagagtcataatg

SEQ ID NO: 4039629 - DNA, 25 bp, Homo sapien
tctggcacaactcccttgtgtgaag

SEQ ID NO: 4039630 - DNA, 25 bp, Homo sapien
tctgtgaactctcctggcagccctt

SEQ ID NO: 4039631 - DNA, 25 bp, Homo sapien
tgatgttggccagtattatagacga

SEQ ID NO: 4039632 - DNA, 25 bp, Homo sapien
tcgctgcaggcagagtgaaaacttg

SEQ ID NO: 4039633 - DNA, 25 bp, Homo sapien
ctgattatagcagtggacccaggca

SEQ ID NO: 4039634 - DNA, 25 bp, Homo sapien
tttctgatccctttggcttggccca

SEQ ID NO: 4039635 - DNA, 25 bp, Homo sapien
cccaccagttgggtagcttcactga

SEQ ID NO: 4039636 - DNA, 25 bp, Homo sapien
ctgggctatgtaagtatcacttctg

SEQ ID NO: 4039637 - DNA, 25 bp, Homo sapien
ggcccactgtcacttcgggaaagtg

SEQ ID NO: 4039638 - DNA, 25 bp, Homo sapien
ccactgtcacttcgggaaagtgtag

SEQ ID NO: 4039639 - DNA, 25 bp, Homo sapien
cacttcgggaaagtgtagcagtact

SEQ ID NO: 4039640 - DNA, 25 bp, Homo sapien
cgggaaagtgtagcagtacttgcca

SEQ ID NO: 4039641 - DNA, 25 bp, Homo sapien
catctccccgtgtgtccacttgctc

SEQ ID NO: 4039642 - DNA, 25 bp, Homo sapien
gatttctgcatctccccgtgtgtcc

SEQ ID NO: 4039643 - DNA, 25 bp, Homo sapien
agatggttaccaatgggttttgagt

SEQ ID NO: 4039644 - DNA, 25 bp, Homo sapien
cactgtatctttgggccacgtgacc

SEQ ID NO: 4039645 - DNA, 25 bp, Homo sapien
ccgtggatccaagatatgggtgttt

SEQ ID NO: 4039646 - DNA, 25 bp, Homo sapien
gtggccactctgagatgcccattca

SEQ ID NO: 4039647 - DNA, 25 bp, Homo sapien
ccttcaggcagaatgtaggcaaagg

SEQ ID NO: 4039648 - DNA, 25 bp, Homo sapien
ttcccaggatttggccgtggatcca

SEQ ID NO: 4039649 - DNA, 25 bp, Homo sapien
ctggcaaacggatccacgtctggcc

SEQ ID NO: 4039650 - DNA, 25 bp, Homo sapien
tggcaaacggatccacgtctggcca

SEQ ID NO: 4039651 - DNA, 25 bp, Homo sapien
ggcaaacggatccacgtctggccat

SEQ ID NO: 4039652 - DNA, 25 bp, Homo sapien
tgagggtgtgcaagatggatcattc

SEQ ID NO: 4039653 - DNA, 25 bp, Homo sapien
tgtgcaagatggatcattcgtgtct

SEQ ID NO: 4039654 - DNA, 25 bp, Homo sapien
ggatcattcgtgtcttatacttcat

SEQ ID NO: 4039655 - DNA, 25 bp, Homo sapien
cgataatagcatcctgccttgactg

SEQ ID NO: 4039656 - DNA, 25 bp, Homo sapien
ccttttcaagggcaggctgagtcca

SEQ ID NO: 4039657 - DNA, 25 bp, Homo sapien
tggttgataggcatgtgatgcccat

SEQ ID NO: 4039658 - DNA, 25 bp, Homo sapien
gagtccatgtggagcattatggttg

SEQ ID NO: 4039659 - DNA, 25 bp, Homo sapien
cttttcaagggcaggctgagtccat

SEQ ID NO: 4039660 - DNA, 25 bp, Homo sapien
cttgttattagtgcctctgtcttcg

SEQ ID NO: 4039661 - DNA, 25 bp, Homo sapien
tgcctctgtcttcgctgagctgaga

SEQ ID NO: 4039662 - DNA, 25 bp, Homo sapien
tagtgcctctgtcttcgctgagctg

SEQ ID NO: 4039663 - DNA, 25 bp, Homo sapien
attagtgcctctgtcttcgctgagc

SEQ ID NO: 4039664 - DNA, 25 bp, Homo sapien
gcccatctcggcaaataatattgag

SEQ ID NO: 4039665 - DNA, 25 bp, Homo sapien
tgacctccctttgtgcatggctgtg

SEQ ID NO: 4039666 - DNA, 25 bp, Homo sapien
catggctgtggagtgcttcgttaag

SEQ ID NO: 4039667 - DNA, 25 bp, Homo sapien
tattgagatgcggtaactgttccct

SEQ ID NO: 4039668 - DNA, 25 bp, Homo sapien
cagtaaggctaaaagagtggacaaa

SEQ ID NO: 4039669 - DNA, 25 bp, Homo sapien
tgtctctttaaaccagtacctagtg

SEQ ID NO: 4039670 - DNA, 25 bp, Homo sapien
caaattgggtgcctgcatgtaacag

SEQ ID NO: 4039671 - DNA, 25 bp, Homo sapien
aggccatcctggacattgatttttg

SEQ ID NO: 4039672 - DNA, 25 bp, Homo sapien
cacagatgccaaagcggcctttggg

SEQ ID NO: 4039673 - DNA, 25 bp, Homo sapien
caagtgaagaattaagccccagacc

SEQ ID NO: 4039674 - DNA, 25 bp, Homo sapien
tttgtaacacatccgtgcccctgga

SEQ ID NO: 4039675 - DNA, 25 bp, Homo sapien
gaggcttggctgtcgtttgtaacac

SEQ ID NO: 4039676 - DNA, 25 bp, Homo sapien
ccctctggaagaacagctcgtgctt

SEQ ID NO: 4039677 - DNA, 25 bp, Homo sapien
tgcttgcttaatagaccacaaaagt

SEQ ID NO: 4039678 - DNA, 25 bp, Homo sapien
gctcctggaagagtatactttgact

SEQ ID NO: 4039679 - DNA, 25 bp, Homo sapien
tgaagcatttgcgtcagtattctgc

SEQ ID NO: 4039680 - DNA, 25 bp, Homo sapien
tctttgcaagcaaaatctctgatct

SEQ ID NO: 4039681 - DNA, 25 bp, Homo sapien
ttatgttgtctttaaagccgaaagc

SEQ ID NO: 4039682 - DNA, 25 bp, Homo sapien
caaaatctctgatctcattatgttg

SEQ ID NO: 4039683 - DNA, 25 bp, Homo sapien
aagccgaaagcttcaggttttctgg

SEQ ID NO: 4039684 - DNA, 25 bp, Homo sapien
tttgagggcgaattccgtgagaagt

SEQ ID NO: 4039685 - DNA, 25 bp, Homo sapien
ccaataggagatggcaggaagttct

SEQ ID NO: 4039686 - DNA, 25 bp, Homo sapien
cgtgagaagtttttcaccagggatc

SEQ ID NO: 4039687 - DNA, 25 bp, Homo sapien
caccagggatctcaggtactgtcat

SEQ ID NO: 4039688 - DNA, 25 bp, Homo sapien
gagcttttgcctattgaaggtgcac

SEQ ID NO: 4039689 - DNA, 25 bp, Homo sapien
gtggttcacggcctgcactcattcc

SEQ ID NO: 4039690 - DNA, 25 bp, Homo sapien
tcccatgaatgcagttaatagccac

SEQ ID NO: 4039691 - DNA, 25 bp, Homo sapien
gccaccagaattgcagtggttcacg

SEQ ID NO: 4039692 - DNA, 25 bp, Homo sapien
tcagaacacccaatagtcctaggcc

SEQ ID NO: 4039693 - DNA, 25 bp, Homo sapien
ccatcctcgcatggcagcaagctaa

SEQ ID NO: 4039694 - DNA, 25 bp, Homo sapien
gcacccctctagtcgaaatattttg

SEQ ID NO: 4039695 - DNA, 25 bp, Homo sapien
cattaattgtgaacctgacctgcat

SEQ ID NO: 4039696 - DNA, 25 bp, Homo sapien
tgcgagcgtccacttctgacagagg

SEQ ID NO: 4039697 - DNA, 25 bp, Homo sapien
gacccacaactaactgggactccag

SEQ ID NO: 4039698 - DNA, 25 bp, Homo sapien
accaccatcatttgaatcagaccca

SEQ ID NO: 4039699 - DNA, 25 bp, Homo sapien
taaaacacctcaggtctgcgagcgt

SEQ ID NO: 4039700 - DNA, 25 bp, Homo sapien
gaagcagaaaccatctgtgatgtcg

SEQ ID NO: 4039701 - DNA, 25 bp, Homo sapien
ccgagcccacaaagaaggctctgtc

SEQ ID NO: 4039702 - DNA, 25 bp, Homo sapien
tctgtgatgtcgagaagtgaccgag

SEQ ID NO: 4039703 - DNA, 25 bp, Homo sapien
agaagtgaccgagcccacaaagaag

SEQ ID NO: 4039704 - DNA, 25 bp, Homo sapien
ttgaacaatccctgttcctcactga

SEQ ID NO: 4039705 - DNA, 25 bp, Homo sapien
atgcccctttgaacaatccctgttc

SEQ ID NO: 4039706 - DNA, 25 bp, Homo sapien
ctaacaagagactgagacctcccag

SEQ ID NO: 4039707 - DNA, 25 bp, Homo sapien
tcttcctgtgtcttatgctcctttc

SEQ ID NO: 4039708 - DNA, 25 bp, Homo sapien
tcttgagtactgtgggcaagagcca

SEQ ID NO: 4039709 - DNA, 25 bp, Homo sapien
cctcttgagtactgtgggcaagagc

SEQ ID NO: 4039710 - DNA, 25 bp, Homo sapien
ttcctcttgagtactgtgggcaaga

SEQ ID NO: 4039711 - DNA, 25 bp, Homo sapien
tttcctcttgagtactgtgggcaag

SEQ ID NO: 4039712 - DNA, 25 bp, Homo sapien
gtgactggatcatttgcctggcaag

SEQ ID NO: 4039713 - DNA, 25 bp, Homo sapien
ctgactcatttgtgactggatcatt

SEQ ID NO: 4039714 - DNA, 25 bp, Homo sapien
tatttatgtccaagacgatatggag

SEQ ID NO: 4039715 - DNA, 25 bp, Homo sapien
cattgcgatggtaatggcacatctc

SEQ ID NO: 4039716 - DNA, 25 bp, Homo sapien
aggagtcacctctttttggttgtgc

SEQ ID NO: 4039717 - DNA, 25 bp, Homo sapien
tgctgatcagggttcccaaaacggt

SEQ ID NO: 4039718 - DNA, 25 bp, Homo sapien
tagatgccctcgcttttggtggcct

SEQ ID NO: 4039719 - DNA, 25 bp, Homo sapien
ccttgcttgagggataggctgcctg

SEQ ID NO: 4039720 - DNA, 25 bp, Homo sapien
ctcagctcccatgagtggacaggga

SEQ ID NO: 4039721 - DNA, 25 bp, Homo sapien
tagagctgtggaagctccgaatcct

SEQ ID NO: 4039722 - DNA, 25 bp, Homo sapien
ctgaatatggaacactgtctttggg

SEQ ID NO: 4039723 - DNA, 25 bp, Homo sapien
gagcagggtcgcatttggacatgac

SEQ ID NO: 4039724 - DNA, 25 bp, Homo sapien
gactgaatatggaacactgtctttg

SEQ ID NO: 4039725 - DNA, 25 bp, Homo sapien
acatgactgaatatggaacactgtc

SEQ ID NO: 4039726 - DNA, 25 bp, Homo sapien
caaaatgccttgactcgggtacctt

SEQ ID NO: 4039727 - DNA, 25 bp, Homo sapien
acggccctggacgtctgctgctttg

SEQ ID NO: 4039728 - DNA, 25 bp, Homo sapien
cacccctgatgtaaccaaaatgcct

SEQ ID NO: 4039729 - DNA, 25 bp, Homo sapien
ggagacaaacccgtgcaactcgact

SEQ ID NO: 4039730 - DNA, 25 bp, Homo sapien
gtggatccacttctccacttagcag

SEQ ID NO: 4039731 - DNA, 25 bp, Homo sapien
gacacaagtcttcgtggatccactt

SEQ ID NO: 4039732 - DNA, 25 bp, Homo sapien
aagtcttcgtggatccacttctcca

SEQ ID NO: 4039733 - DNA, 25 bp, Homo sapien
gtttaacgacacaagtcttcgtgga

SEQ ID NO: 4039734 - DNA, 25 bp, Homo sapien
ccttgttagcggaaagcttagcatc

SEQ ID NO: 4039735 - DNA, 25 bp, Homo sapien
ccctccttgttagcggaaagcttag

SEQ ID NO: 4039736 - DNA, 25 bp, Homo sapien
gttagcggaaagcttagcatctagc

SEQ ID NO: 4039737 - DNA, 25 bp, Homo sapien
gacacaccctccttgttagcggaaa

SEQ ID NO: 4039738 - DNA, 25 bp, Homo sapien
tccatcctgcttaaggccacatgac

SEQ ID NO: 4039739 - DNA, 25 bp, Homo sapien
ctccatcctgcttaaggccacatga

SEQ ID NO: 4039740 - DNA, 25 bp, Homo sapien
gctccatcctgcttaaggccacatg

SEQ ID NO: 4039741 - DNA, 25 bp, Homo sapien
taatgccccatccggacagagtcca

SEQ ID NO: 4039742 - DNA, 25 bp, Homo sapien
cctggaacgccttgtgggagagcac

SEQ ID NO: 4039743 - DNA, 25 bp, Homo sapien
tcctgcaaagctgtgtatggttctg

SEQ ID NO: 4039744 - DNA, 25 bp, Homo sapien
ctccgatgacctggaacgccttgtg

SEQ ID NO: 4039745 - DNA, 25 bp, Homo sapien
aatcatgcccatgtcctccttgtac

SEQ ID NO: 4039746 - DNA, 25 bp, Homo sapien
tggaatcatgcccatgtcctccttg

SEQ ID NO: 4039747 - DNA, 25 bp, Homo sapien
gaatcatgcccatgtcctccttgta

SEQ ID NO: 4039748 - DNA, 25 bp, Homo sapien
ttggaatcatgcccatgtcctcctt

SEQ ID NO: 4039749 - DNA, 25 bp, Homo sapien
taggtgttaccttgtgaaagagtgt

SEQ ID NO: 4039750 - DNA, 25 bp, Homo sapien
gggagcattggaagtgtaggtgtta

SEQ ID NO: 4039751 - DNA, 25 bp, Homo sapien
attttttctgctaccaccactctgg

SEQ ID NO: 4039752 - DNA, 25 bp, Homo sapien
ccttgttcaccaagtccttggagga

SEQ ID NO: 4039753 - DNA, 25 bp, Homo sapien
gactgtttgaaggagctctgatgtc

SEQ ID NO: 4039754 - DNA, 25 bp, Homo sapien
gctgtaccgctgcaggtcaaagctg

SEQ ID NO: 4039755 - DNA, 25 bp, Homo sapien
tagccgtctgctccaggtggtcgtc

SEQ ID NO: 4039756 - DNA, 25 bp, Homo sapien
caggtggtcgtctccagctgtaccg

SEQ ID NO: 4039757 - DNA, 25 bp, Homo sapien
gagctcatctttcctagccgtctgc

SEQ ID NO: 4039758 - DNA, 25 bp, Homo sapien
gcatttacgcagtttgctgtgggtt

SEQ ID NO: 4039759 - DNA, 25 bp, Homo sapien
tagagctgacccttggtaggcggtt

SEQ ID NO: 4039760 - DNA, 25 bp, Homo sapien
gcggtttggagtcggcttgcgtgcc

SEQ ID NO: 4039761 - DNA, 25 bp, Homo sapien
ctgcaggtagagctgacccttggta

SEQ ID NO: 4039762 - DNA, 25 bp, Homo sapien
gaatgtctctaacgtctttactgtt

SEQ ID NO: 4039763 - DNA, 25 bp, Homo sapien
tctccctctgtacagatgcaaacat

SEQ ID NO: 4039764 - DNA, 25 bp, Homo sapien
gctctcgttgcagtcgtttctctcc

SEQ ID NO: 4039765 - DNA, 25 bp, Homo sapien
tgtcaaatgcagaggggtgacccat

SEQ ID NO: 4039766 - DNA, 25 bp, Homo sapien
cgttgcacggagattgctcagttat

SEQ ID NO: 4039767 - DNA, 25 bp, Homo sapien
cctgctgaaagttgggcttttctgg

SEQ ID NO: 4039768 - DNA, 25 bp, Homo sapien
tatatccaactgtccaggaagtgcc

SEQ ID NO: 4039769 - DNA, 25 bp, Homo sapien
tcccgttgcacggagattgctcagt

SEQ ID NO: 4039770 - DNA, 25 bp, Homo sapien
aaaccggcatgtgtgtttggttagg

SEQ ID NO: 4039771 - DNA, 25 bp, Homo sapien
tcccatcgcaaaccggcatgtgtgt

SEQ ID NO: 4039772 - DNA, 25 bp, Homo sapien
tgagcagcggtaaacggtcccatcg

SEQ ID NO: 4039773 - DNA, 25 bp, Homo sapien
aaacggtcccatcgcaaaccggcat

SEQ ID NO: 4039774 - DNA, 25 bp, Homo sapien
ctgaggccagcggtgcggggccgac

SEQ ID NO: 4039775 - DNA, 25 bp, Homo sapien
tttgcagatgttgcttgtttttcat

SEQ ID NO: 4039776 - DNA, 25 bp, Homo sapien
tgtttgcagatgttgcttgtttttc

SEQ ID NO: 4039777 - DNA, 25 bp, Homo sapien
gtttgcagatgttgcttgtttttca

SEQ ID NO: 4039778 - DNA, 25 bp, Homo sapien
tctggtttaacttcttccgccactc

SEQ ID NO: 4039779 - DNA, 25 bp, Homo sapien
ggcttccttcttggttactatcttc

SEQ ID NO: 4039780 - DNA, 25 bp, Homo sapien
ggttactatcttctgcctcgatggg

SEQ ID NO: 4039781 - DNA, 25 bp, Homo sapien
ccaatctgtctccaaagaggatcat

SEQ ID NO: 4039782 - DNA, 25 bp, Homo sapien
gaaccagctcttcgcttttaattgc

SEQ ID NO: 4039783 - DNA, 25 bp, Homo sapien
cagtgaaccagctcttcgcttttaa

SEQ ID NO: 4039784 - DNA, 25 bp, Homo sapien
ctcttcgcttttaattgctctttct

SEQ ID NO: 4039785 - DNA, 25 bp, Homo sapien
tcttcgcttttaattgctctttctt

SEQ ID NO: 4039786 - DNA, 25 bp, Homo sapien
gcctttgcgtacacaaaggagtctt

SEQ ID NO: 4039787 - DNA, 25 bp, Homo sapien
ctggaatctgcctttgcgtacacaa

SEQ ID NO: 4039788 - DNA, 25 bp, Homo sapien
ctggcatggagacgaacaggcaggt

SEQ ID NO: 4039789 - DNA, 25 bp, Homo sapien
gaatctgcctttgcgtacacaaagg

SEQ ID NO: 4039790 - DNA, 25 bp, Homo sapien
ccctcagtgatattgttatttgagc

SEQ ID NO: 4039791 - DNA, 25 bp, Homo sapien
agtgatattgttatttgagctgaag

SEQ ID NO: 4039792 - DNA, 25 bp, Homo sapien
ctcagtgatattgttatttgagctg

SEQ ID NO: 4039793 - DNA, 25 bp, Homo sapien
tcccctcagtgatattgttatttga

SEQ ID NO: 4039794 - DNA, 25 bp, Homo sapien
tagagaagcggccacggaagacctg

SEQ ID NO: 4039795 - DNA, 25 bp, Homo sapien
ttggtcctctgcttccggcctttcc

SEQ ID NO: 4039796 - DNA, 25 bp, Homo sapien
cgagcggcctgatggtgtcaccaga

SEQ ID NO: 4039797 - DNA, 25 bp, Homo sapien
ggtgtcaccagagcgcacttcttcc

SEQ ID NO: 4039798 - DNA, 25 bp, Homo sapien
tccgcaaaggaaatcattggtattt

SEQ ID NO: 4039799 - DNA, 25 bp, Homo sapien
gaaacttttgattagcgagtgatag

SEQ ID NO: 4039800 - DNA, 25 bp, Homo sapien
ttttctggcgacattttcagcttca

SEQ ID NO: 4039801 - DNA, 25 bp, Homo sapien
taaacagatcgatgccttttctggc

SEQ ID NO: 4039802 - DNA, 25 bp, Homo sapien
gggaagatgagaaaagtcctggtgg

SEQ ID NO: 4039803 - DNA, 25 bp, Homo sapien
ctggaaaagagatgggggtggaggg

SEQ ID NO: 4039804 - DNA, 25 bp, Homo sapien
tgagaaaagtcctggtgggtcctcc

SEQ ID NO: 4039805 - DNA, 25 bp, Homo sapien
agatgagaaaagtcctggtgggtcc

SEQ ID NO: 4039806 - DNA, 25 bp, Homo sapien
cttagcgagggcagatttccaggtg

SEQ ID NO: 4039807 - DNA, 25 bp, Homo sapien
taaggagaccataacttagcgaggg

SEQ ID NO: 4039808 - DNA, 25 bp, Homo sapien
cataacttagcgagggcagatttcc

SEQ ID NO: 4039809 - DNA, 25 bp, Homo sapien
actttggataaggagaccataactt

SEQ ID NO: 4039810 - DNA, 25 bp, Homo sapien
tcttgcagtatgtgtctccccctga

SEQ ID NO: 4039811 - DNA, 25 bp, Homo sapien
gggctcttgcagtatgtgtctcccc

SEQ ID NO: 4039812 - DNA, 25 bp, Homo sapien
gtgggctcttgcagtatgtgtctcc

SEQ ID NO: 4039813 - DNA, 25 bp, Homo sapien
gctcttgcagtatgtgtctccccct

SEQ ID NO: 4039814 - DNA, 25 bp, Homo sapien
cattgtcctcgtgtgcaacatagaa

SEQ ID NO: 4039815 - DNA, 25 bp, Homo sapien
tctgaccctcattgtcctcgtgtgc

SEQ ID NO: 4039816 - DNA, 25 bp, Homo sapien
gaccctcattgtcctcgtgtgcaac

SEQ ID NO: 4039817 - DNA, 25 bp, Homo sapien
ctttctgaccctcattgtcctcgtg

SEQ ID NO: 4039818 - DNA, 25 bp, Homo sapien
gagcagtggctgtatctgagtccag

SEQ ID NO: 4039819 - DNA, 25 bp, Homo sapien
gctgtatctgagtccagctgggctg

SEQ ID NO: 4039820 - DNA, 25 bp, Homo sapien
aaggagcagtggctgtatctgagtc

SEQ ID NO: 4039821 - DNA, 25 bp, Homo sapien
gctgggctgtgcgctttcctttttc

SEQ ID NO: 4039822 - DNA, 25 bp, Homo sapien
caagcagccaataatgacagtttct

SEQ ID NO: 4039823 - DNA, 25 bp, Homo sapien
ccaataatgacagtttctctcatgc

SEQ ID NO: 4039824 - DNA, 25 bp, Homo sapien
ttgcaagcagccaataatgacagtt

SEQ ID NO: 4039825 - DNA, 25 bp, Homo sapien
gcagccaataatgacagtttctctc

SEQ ID NO: 4039826 - DNA, 25 bp, Homo sapien
tcggggggtggccattggtcaaaga

SEQ ID NO: 4039827 - DNA, 25 bp, Homo sapien
gctcggggcgcttggcagaaaatgg

SEQ ID NO: 4039828 - DNA, 25 bp, Homo sapien
tcaaagagtgctcggggcgcttggc

SEQ ID NO: 4039829 - DNA, 25 bp, Homo sapien
tggtcaaagagtgctcggggcgctt

SEQ ID NO: 4039830 - DNA, 25 bp, Homo sapien
ctcctggggcctgcagagggtctgc

SEQ ID NO: 4039831 - DNA, 25 bp, Homo sapien
tggggcctgcagagggtctgcattg

SEQ ID NO: 4039832 - DNA, 25 bp, Homo sapien
gggcctgcagagggtctgcattgag

SEQ ID NO: 4039833 - DNA, 25 bp, Homo sapien
cctggggcctgcagagggtctgcat

SEQ ID NO: 4039834 - DNA, 25 bp, Homo sapien
ttcaggggatagtccttgggctgat

SEQ ID NO: 4039835 - DNA, 25 bp, Homo sapien
gcgaggaagatttagggacctgggc

SEQ ID NO: 4039836 - DNA, 25 bp, Homo sapien
ctgcgaggaagatttagggacctgg

SEQ ID NO: 4039837 - DNA, 25 bp, Homo sapien
gcatgcctggatttcaggggatagt

SEQ ID NO: 4039838 - DNA, 25 bp, Homo sapien
cctggaggtgagtgttcaataccac

SEQ ID NO: 4039839 - DNA, 25 bp, Homo sapien
gagcatcagattgaagccagcagaa

SEQ ID NO: 4039840 - DNA, 25 bp, Homo sapien
caagtgatataggaggctgcatagg

SEQ ID NO: 4039841 - DNA, 25 bp, Homo sapien
aagttcgcctccaaagagcatcaga

SEQ ID NO: 4039842 - DNA, 25 bp, Homo sapien
caccatatataatcaggtcagcagc

SEQ ID NO: 4039843 - DNA, 25 bp, Homo sapien
caaacaccatatataatcaggtcag

SEQ ID NO: 4039844 - DNA, 25 bp, Homo sapien
agcagccttctccaacagccctaac

SEQ ID NO: 4039845 - DNA, 25 bp, Homo sapien
atatataatcaggtcagcagccttc

SEQ ID NO: 4039846 - DNA, 25 bp, Homo sapien
cgcaaaagtgccttgtttgcagctg

SEQ ID NO: 4039847 - DNA, 25 bp, Homo sapien
gcagctgtggaaacattcgtcatcc

SEQ ID NO: 4039848 - DNA, 25 bp, Homo sapien
caggagtgaaaatggtacccgagaa

SEQ ID NO: 4039849 - DNA, 25 bp, Homo sapien
tatctgatacacacgctggcggtgc

SEQ ID NO: 4039850 - DNA, 25 bp, Homo sapien
tgaaagccattggatgccagaggac

SEQ ID NO: 4039851 - DNA, 25 bp, Homo sapien
tgtgactggcagtgaagttcactcc

SEQ ID NO: 4039852 - DNA, 25 bp, Homo sapien
gccacgggcacgtagtgaaagccat

SEQ ID NO: 4039853 - DNA, 25 bp, Homo sapien
ggatgccagaggacccattttcaaa

SEQ ID NO: 4039854 - DNA, 25 bp, Homo sapien
ctagcaacagccgttgacgcagttg

SEQ ID NO: 4039855 - DNA, 25 bp, Homo sapien
caacagccgttgacgcagttgccca

SEQ ID NO: 4039856 - DNA, 25 bp, Homo sapien
tcaagccaggaacaggggccaatga

SEQ ID NO: 4039857 - DNA, 25 bp, Homo sapien
cttctgctgggttctagcaacagcc

SEQ ID NO: 4039858 - DNA, 25 bp, Homo sapien
actcagtacctctttgcattggtgg

SEQ ID NO: 4039859 - DNA, 25 bp, Homo sapien
tgtgactcagtacctctttgcattg

SEQ ID NO: 4039860 - DNA, 25 bp, Homo sapien
ccagggaatccggactgtgactcag

SEQ ID NO: 4039861 - DNA, 25 bp, Homo sapien
gtcttccccaccaagtgtgaggaat

SEQ ID NO: 4039862 - DNA, 25 bp, Homo sapien
gaacagactgccgttgacccttggg

SEQ ID NO: 4039863 - DNA, 25 bp, Homo sapien
atggaacagactgccgttgaccctt

SEQ ID NO: 4039864 - DNA, 25 bp, Homo sapien
gactgccgttgacccttggggttga

SEQ ID NO: 4039865 - DNA, 25 bp, Homo sapien
cttggggttgacctcttgggaacag

SEQ ID NO: 4039866 - DNA, 25 bp, Homo sapien
tttccatccaagatccggacaactc

SEQ ID NO: 4039867 - DNA, 25 bp, Homo sapien
tccaagatccggacaactcccttcc

SEQ ID NO: 4039868 - DNA, 25 bp, Homo sapien
tgattttccatccaagatccggaca

SEQ ID NO: 4039869 - DNA, 25 bp, Homo sapien
gattttccatccaagatccggacaa

SEQ ID NO: 4039870 - DNA, 25 bp, Homo sapien
agaattgaattccatcaagggaaac

SEQ ID NO: 4039871 - DNA, 25 bp, Homo sapien
tgaattccatcaagggaaactgcaa

SEQ ID NO: 4039872 - DNA, 25 bp, Homo sapien
attgaattccatcaagggaaactgc

SEQ ID NO: 4039873 - DNA, 25 bp, Homo sapien
gaattgaattccatcaagggaaact

SEQ ID NO: 4039874 - DNA, 25 bp, Homo sapien
ttaacatgcattaagaacctgcagt

SEQ ID NO: 4039875 - DNA, 25 bp, Homo sapien
catgcattaagaacctgcagtgtat

SEQ ID NO: 4039876 - DNA, 25 bp, Homo sapien
cattaagaacctgcagtgtattttg

SEQ ID NO: 4039877 - DNA, 25 bp, Homo sapien
ttaagaacctgcagtgtattttgaa

SEQ ID NO: 4039878 - DNA, 25 bp, Homo sapien
tcttgtaaagttagctctgtagtct

SEQ ID NO: 4039879 - DNA, 25 bp, Homo sapien
caggaagcgtcttgtaaagttagct

SEQ ID NO: 4039880 - DNA, 25 bp, Homo sapien
aaagttagctctgtagtcttttggg

SEQ ID NO: 4039881 - DNA, 25 bp, Homo sapien
gaagcgtcttgtaaagttagctctg

SEQ ID NO: 4039882 - DNA, 25 bp, Homo sapien
caaagacaagaccattgtccatgac

SEQ ID NO: 4039883 - DNA, 25 bp, Homo sapien
gcaaagacaagaccattgtccatga

SEQ ID NO: 4039884 - DNA, 25 bp, Homo sapien
aaagacaagaccattgtccatgacc

SEQ ID NO: 4039885 - DNA, 25 bp, Homo sapien
tttcttcctgacagacattgtaata

SEQ ID NO: 4039886 - DNA, 25 bp, Homo sapien
cttcctgacagacattgtaatataa

SEQ ID NO: 4039887 - DNA, 25 bp, Homo sapien
atgctggtgattataacctttcttc

SEQ ID NO: 4039888 - DNA, 25 bp, Homo sapien
gaaatatgctggtgattataacctt

SEQ ID NO: 4039889 - DNA, 25 bp, Homo sapien
gatgttttataagggtggcccaaga

SEQ ID NO: 4039890 - DNA, 25 bp, Homo sapien
tctggatgttttataagggtggccc

SEQ ID NO: 4039891 - DNA, 25 bp, Homo sapien
catctggatgttttataagggtggc

SEQ ID NO: 4039892 - DNA, 25 bp, Homo sapien
tctgcatctggatgttttataaggg

SEQ ID NO: 4039893 - DNA, 25 bp, Homo sapien
tctatctgcgcacagaagagagcat

SEQ ID NO: 4039894 - DNA, 25 bp, Homo sapien
aattgactgaatgaggcctggcacc

SEQ ID NO: 4039895 - DNA, 25 bp, Homo sapien
gtttctgacagtatcaaaagaggat

SEQ ID NO: 4039896 - DNA, 25 bp, Homo sapien
gatttagctctgaacccttgccatg

SEQ ID NO: 4039897 - DNA, 25 bp, Homo sapien
cctctgtagacagcacatctgtgca

SEQ ID NO: 4039898 - DNA, 25 bp, Homo sapien
taacagccgcctcatggaaggagtc

SEQ ID NO: 4039899 - DNA, 25 bp, Homo sapien
gagtcatggaagacgttaggcccct

SEQ ID NO: 4039900 - DNA, 25 bp, Homo sapien
ttctcttggagcatatctggttctg

SEQ ID NO: 4039901 - DNA, 25 bp, Homo sapien
ccgatgtgtaggcaggcctggaaca

SEQ ID NO: 4039902 - DNA, 25 bp, Homo sapien
ccacagctggcctccgatgtgtagg

SEQ ID NO: 4039903 - DNA, 25 bp, Homo sapien
tggcctccgatgtgtaggcaggcct

SEQ ID NO: 4039904 - DNA, 25 bp, Homo sapien
ggcaggcctggaacagaatcaattg

SEQ ID NO: 4039905 - DNA, 25 bp, Homo sapien
taagcgtcaataacaattgtgccaa

SEQ ID NO: 4039906 - DNA, 25 bp, Homo sapien
caggcttaagcgtcaataacaattg

SEQ ID NO: 4039907 - DNA, 25 bp, Homo sapien
tttgccttcaggcttaagcgtcaat

SEQ ID NO: 4039908 - DNA, 25 bp, Homo sapien
caattgtgccaataataacaactca

SEQ ID NO: 4039909 - DNA, 25 bp, Homo sapien
caggacaactctgtgagggagctag

SEQ ID NO: 4039910 - DNA, 25 bp, Homo sapien
tgaggaacaagcctcgagagccaga

SEQ ID NO: 4039911 - DNA, 25 bp, Homo sapien
tgtgttcccattgtgagcctcagga

SEQ ID NO: 4039912 - DNA, 25 bp, Homo sapien
tgcttgacacggaagctggtgctcc

SEQ ID NO: 4039913 - DNA, 25 bp, Homo sapien
gaagagtctggagatgagggcatgg

SEQ ID NO: 4039914 - DNA, 25 bp, Homo sapien
ggttccagaacccaggagaagagca

SEQ ID NO: 4039915 - DNA, 25 bp, Homo sapien
agcaggttaggaaggtctggttcca

SEQ ID NO: 4039916 - DNA, 25 bp, Homo sapien
agaagagcaaagttgaccttccatc

SEQ ID NO: 4039917 - DNA, 25 bp, Homo sapien
gagattcggcccctaattgccatca

SEQ ID NO: 4039918 - DNA, 25 bp, Homo sapien
aggagccagagagattcggccccta

SEQ ID NO: 4039919 - DNA, 25 bp, Homo sapien
cggcccctaattgccatcatctgta

SEQ ID NO: 4039920 - DNA, 25 bp, Homo sapien
gcactaagtataaatctgcttaaaa

SEQ ID NO: 4039921 - DNA, 25 bp, Homo sapien
ccactgagaaggactctatccgtcc

SEQ ID NO: 4039922 - DNA, 25 bp, Homo sapien
agcttctagtttgcagatccatctt

SEQ ID NO: 4039923 - DNA, 25 bp, Homo sapien
gagagtcaagccaacttccttagaa

SEQ ID NO: 4039924 - DNA, 25 bp, Homo sapien
tccattgcaaagtgaccattcacaa

SEQ ID NO: 4039925 - DNA, 25 bp, Homo sapien
gaggtagtccaaccttgatttcagc

SEQ ID NO: 4039926 - DNA, 25 bp, Homo sapien
gaaagcttgagaagttgtggcatct

SEQ ID NO: 4039927 - DNA, 25 bp, Homo sapien
tgtggcatcttccatgcccatttcc

SEQ ID NO: 4039928 - DNA, 25 bp, Homo sapien
ctgctaggcctggagggcttgagaa

SEQ ID NO: 4039929 - DNA, 25 bp, Homo sapien
gacaggtgagtgacttccgttgcgc

SEQ ID NO: 4039930 - DNA, 25 bp, Homo sapien
gagtgacttccgttgcgcctgccct

SEQ ID NO: 4039931 - DNA, 25 bp, Homo sapien
ctgccctctggtccttccatgttgt

SEQ ID NO: 4039932 - DNA, 25 bp, Homo sapien
catgttgttttctaggtagacccca

SEQ ID NO: 4039933 - DNA, 25 bp, Homo sapien
agccagctgagaagcggctttgccg

SEQ ID NO: 4039934 - DNA, 25 bp, Homo sapien
ctttgccgggtgtccactagcggtt

SEQ ID NO: 4039935 - DNA, 25 bp, Homo sapien
cgttaacaaagagggcgaacgctag

SEQ ID NO: 4039936 - DNA, 25 bp, Homo sapien
tctgtgcgcccgcagagtgacgcag

SEQ ID NO: 4039937 - DNA, 25 bp, Homo sapien
tatacacggacatgcttacaagttg

SEQ ID NO: 4039938 - DNA, 25 bp, Homo sapien
tcgtacaatttggttcacacatatg

SEQ ID NO: 4039939 - DNA, 25 bp, Homo sapien
tcaaccggacaaacaaacctcacag

SEQ ID NO: 4039940 - DNA, 25 bp, Homo sapien
caaaggcagacacgtttattctcac

SEQ ID NO: 4039941 - DNA, 25 bp, Homo sapien
gagagccgataagaccagggcggcg

SEQ ID NO: 4039942 - DNA, 25 bp, Homo sapien
cagggcggcgtccagatggttctgg

SEQ ID NO: 4039943 - DNA, 25 bp, Homo sapien
ccgataagaccagggcggcgtccag

SEQ ID NO: 4039944 - DNA, 25 bp, Homo sapien
gatgaggagagagccgataagacca

SEQ ID NO: 4039945 - DNA, 25 bp, Homo sapien
tagtagcaaaagaggtgagattcag

SEQ ID NO: 4039946 - DNA, 25 bp, Homo sapien
gccgatcgtcaggaaggtgtcgcaa

SEQ ID NO: 4039947 - DNA, 25 bp, Homo sapien
aggtgggcgtcagagaaccgccacc

SEQ ID NO: 4039948 - DNA, 25 bp, Homo sapien
aaggtacaagcgctgtaccctccgg

SEQ ID NO: 4039949 - DNA, 25 bp, Homo sapien
ccggggcaaaaggccgtgcgtggtg

SEQ ID NO: 4039950 - DNA, 25 bp, Homo sapien
ggccgtgcgtggtgctcggcgtcct

SEQ ID NO: 4039951 - DNA, 25 bp, Homo sapien
ggcaaaaggccgtgcgtggtgctcg

SEQ ID NO: 4039952 - DNA, 25 bp, Homo sapien
gtggtgctcggcgtcctctcctttc

SEQ ID NO: 4039953 - DNA, 25 bp, Homo sapien
cctgggcacgggctggaaagctgtc

SEQ ID NO: 4039954 - DNA, 25 bp, Homo sapien
gggcacgggctggaaagctgtcttg

SEQ ID NO: 4039955 - DNA, 25 bp, Homo sapien
tgggcacgggctggaaagctgtctt

SEQ ID NO: 4039956 - DNA, 25 bp, Homo sapien
ctgggcacgggctggaaagctgtct

SEQ ID NO: 4039957 - DNA, 25 bp, Homo sapien
tccgggaagtcccagcaggtgcgga

SEQ ID NO: 4039958 - DNA, 25 bp, Homo sapien
gttgtccgggcttgtggcagtctcc

SEQ ID NO: 4039959 - DNA, 25 bp, Homo sapien
tgcagggcggaaggcgcgaccgctg

SEQ ID NO: 4039960 - DNA, 25 bp, Homo sapien
cagtctccgcgagggaccagatctt

SEQ ID NO: 4039961 - DNA, 25 bp, Homo sapien
tggagtccgaaatgggtcccaggcc

SEQ ID NO: 4039962 - DNA, 25 bp, Homo sapien
taagccctcagagctatcttccgag

SEQ ID NO: 4039963 - DNA, 25 bp, Homo sapien
tggagccagactcaggaccggtagt

SEQ ID NO: 4039964 - DNA, 25 bp, Homo sapien
ccgagtcgctatttttggagtccga

SEQ ID NO: 4039965 - DNA, 25 bp, Homo sapien
ggacagctcaggctcggtggccgcg

SEQ ID NO: 4039966 - DNA, 25 bp, Homo sapien
ctgcgaggcgcccaagtcatcttat

SEQ ID NO: 4039967 - DNA, 25 bp, Homo sapien
ctcgcgctcgctcccataagcgttt

SEQ ID NO: 4039968 - DNA, 25 bp, Homo sapien
tccagctctagctcgcgtttgccgt

SEQ ID NO: 4039969 - DNA, 25 bp, Homo sapien
ctccaaatcgatctcctcgtcctcg

SEQ ID NO: 4039970 - DNA, 25 bp, Homo sapien
ttgcggtgctcgttgagccaggcct

SEQ ID NO: 4039971 - DNA, 25 bp, Homo sapien
gtgcgggtgcggaaacgcggcagcc

SEQ ID NO: 4039972 - DNA, 25 bp, Homo sapien
cgaactggtactggccatacgggta

SEQ ID NO: 4039973 - DNA, 25 bp, Homo sapien
ggtccccgaactggtactggccata

SEQ ID NO: 4039974 - DNA, 25 bp, Homo sapien
ctggtactggccatacgggtagaag

SEQ ID NO: 4039975 - DNA, 25 bp, Homo sapien
agatgggcagctccgcggcgtaggg

SEQ ID NO: 4039976 - DNA, 25 bp, Homo sapien
cgggaagatgggcagctccgcggcg

SEQ ID NO: 4039977 - DNA, 25 bp, Homo sapien
cagctccgcggcgtagggcaggaag

SEQ ID NO: 4039978 - DNA, 25 bp, Homo sapien
ggcagctccgcggcgtagggcagga

SEQ ID NO: 4039979 - DNA, 25 bp, Homo sapien
tagggcgccccgtacacggacgaga

SEQ ID NO: 4039980 - DNA, 25 bp, Homo sapien
taaagcgggcggatgtattggtatc

SEQ ID NO: 4039981 - DNA, 25 bp, Homo sapien
ggaccccgaggcgttcagctccgag

SEQ ID NO: 4039982 - DNA, 25 bp, Homo sapien
agagcacgttggacagggaccccga

SEQ ID NO: 4039983 - DNA, 25 bp, Homo sapien
tccgaacagattggcggagattccc

SEQ ID NO: 4039984 - DNA, 25 bp, Homo sapien
tccgggctctgattgacatttctac

SEQ ID NO: 4039985 - DNA, 25 bp, Homo sapien
gctgtgctccgcgttcgcctattga

SEQ ID NO: 4039986 - DNA, 25 bp, Homo sapien
cgcctattgatctgctccgcggcgg

SEQ ID NO: 4039987 - DNA, 25 bp, Homo sapien
tttactcacacgatactccccgcga

SEQ ID NO: 4039988 - DNA, 25 bp, Homo sapien
ctctctctttactcacacgatactc

SEQ ID NO: 4039989 - DNA, 25 bp, Homo sapien
tttgctctccggtccgttcccttca

SEQ ID NO: 4039990 - DNA, 25 bp, Homo sapien
atactccccgcgacctttccagcct

SEQ ID NO: 4039991 - DNA, 25 bp, Homo sapien
ctgggctaagtaaggcagccaaaag

SEQ ID NO: 4039992 - DNA, 25 bp, Homo sapien
agccaaaagttgtggacacttaggg

SEQ ID NO: 4039993 - DNA, 25 bp, Homo sapien
ctaagtaaggcagccaaaagttgtg

SEQ ID NO: 4039994 - DNA, 25 bp, Homo sapien
taaggcagccaaaagttgtggacac

SEQ ID NO: 4039995 - DNA, 25 bp, Homo sapien
aagggtagggagccgccacaaatcg

SEQ ID NO: 4039996 - DNA, 25 bp, Homo sapien
acaaatcggtgaagcaggcccgcgc

SEQ ID NO: 4039997 - DNA, 25 bp, Homo sapien
ggagccgccacaaatcggtgaagca

SEQ ID NO: 4039998 - DNA, 25 bp, Homo sapien
gccacaaatcggtgaagcaggcccg

SEQ ID NO: 4039999 - DNA, 25 bp, Homo sapien
gggctcagagctttaggccgcggcg

SEQ ID NO: 4040000 - DNA, 25 bp, Homo sapien
gaaattcccagcattgccgcggctg

SEQ ID NO: 4040001 - DNA, 25 bp, Homo sapien
cttcacggattagggcgtgcagtcg

SEQ ID NO: 4040002 - DNA, 25 bp, Homo sapien
gcgtgcagtcgatagcggcattgaa

SEQ ID NO: 4040003 - DNA, 25 bp, Homo sapien
tgccttctcaggagcctcgccggag

SEQ ID NO: 4040004 - DNA, 25 bp, Homo sapien
tttgaaatatctcttcgacgcctga

SEQ ID NO: 4040005 - DNA, 25 bp, Homo sapien
tgttgggctcactttcacgcgaaga

SEQ ID NO: 4040006 - DNA, 25 bp, Homo sapien
cctcacagagagtggcatagggaat

SEQ ID NO: 4040007 - DNA, 25 bp, Homo sapien
agccgcgtcccaacgtggcgctggt

SEQ ID NO: 4040008 - DNA, 25 bp, Homo sapien
ctgtgggctgaactcgagggtccga

SEQ ID NO: 4040009 - DNA, 25 bp, Homo sapien
acgtcgagactcagcgtcccaggca

SEQ ID NO: 4040010 - DNA, 25 bp, Homo sapien
ccccaactcgacaggtccagtggag

SEQ ID NO: 4040011 - DNA, 25 bp, Homo sapien
gacacactcgcacagggaagaaaag

SEQ ID NO: 4040012 - DNA, 25 bp, Homo sapien
ggtgcacagaagtagatttgggaaa

SEQ ID NO: 4040013 - DNA, 25 bp, Homo sapien
taaatgggtcagagtgacacactcg

SEQ ID NO: 4040014 - DNA, 25 bp, Homo sapien
atttgggaaagtcgcgcgcacgaac

SEQ ID NO: 4040015 - DNA, 25 bp, Homo sapien
acattcccagcgcacaaagcgcttt

SEQ ID NO: 4040016 - DNA, 25 bp, Homo sapien
tttcaacattcccagcgcacaaagc

SEQ ID NO: 4040017 - DNA, 25 bp, Homo sapien
tcccagcgcacaaagcgctttggag

SEQ ID NO: 4040018 - DNA, 25 bp, Homo sapien
ccagcgcacaaagcgctttggagac

SEQ ID NO: 4040019 - DNA, 25 bp, Homo sapien
gctgcgcctcgcacttcacaagagg

SEQ ID NO: 4040020 - DNA, 25 bp, Homo sapien
atgcgcaccgggaacggctgcccga

SEQ ID NO: 4040021 - DNA, 25 bp, Homo sapien
ggtgctcacacgtccccgtcgaggg

SEQ ID NO: 4040022 - DNA, 25 bp, Homo sapien
atcgcacacgcttggcgcgcgtgcg

SEQ ID NO: 4040023 - DNA, 25 bp, Homo sapien
tgagagcgtggcctggcgtccgcac

SEQ ID NO: 4040024 - DNA, 25 bp, Homo sapien
ttagcagccgcggactcctgagagc

SEQ ID NO: 4040025 - DNA, 25 bp, Homo sapien
agcagccgcggactcctgagagcgt

SEQ ID NO: 4040026 - DNA, 25 bp, Homo sapien
gccgcggactcctgagagcgtggcc

SEQ ID NO: 4040027 - DNA, 25 bp, Homo sapien
gccaccagggactcggaggcccttc

SEQ ID NO: 4040028 - DNA, 25 bp, Homo sapien
ggtggaattcgtatttggccaggaa

SEQ ID NO: 4040029 - DNA, 25 bp, Homo sapien
tcgtatttggccaggaatccggact

SEQ ID NO: 4040030 - DNA, 25 bp, Homo sapien
tccggactccgatcatcccaggaga

SEQ ID NO: 4040031 - DNA, 25 bp, Homo sapien
cggtttgtccacaaaggccgtcgcg

SEQ ID NO: 4040032 - DNA, 25 bp, Homo sapien
cctctccggattcccgggctctggg

SEQ ID NO: 4040033 - DNA, 25 bp, Homo sapien
ggaggaagcgaccttgccgagctcc

SEQ ID NO: 4040034 - DNA, 25 bp, Homo sapien
ggccgtcgcgctcccctcattaaag

SEQ ID NO: 4040035 - DNA, 25 bp, Homo sapien
tgagattccaagtgacacgtcgcgg

SEQ ID NO: 4040036 - DNA, 25 bp, Homo sapien
gaaaattagtgcctgacaacgtcgt

SEQ ID NO: 4040037 - DNA, 25 bp, Homo sapien
gatggagcgccaccagaaaattagt

SEQ ID NO: 4040038 - DNA, 25 bp, Homo sapien
gcgggatcaaacacagccacattgt

SEQ ID NO: 4040039 - DNA, 25 bp, Homo sapien
aaggatccattatccctgctaatga

SEQ ID NO: 4040040 - DNA, 25 bp, Homo sapien
caaatattggggaagatttgggcaa

SEQ ID NO: 4040041 - DNA, 25 bp, Homo sapien
aatacaactggggtcaaggatccat

SEQ ID NO: 4040042 - DNA, 25 bp, Homo sapien
cttcacacttcccacaaatattggg

SEQ ID NO: 4040043 - DNA, 25 bp, Homo sapien
gggacatgcttgcaagtagacactg

SEQ ID NO: 4040044 - DNA, 25 bp, Homo sapien
tcctccaatgtgagggacctagcac

SEQ ID NO: 4040045 - DNA, 25 bp, Homo sapien
tgactccccggagactatccaggta

SEQ ID NO: 4040046 - DNA, 25 bp, Homo sapien
ccatgcttctggttagctgggcagc

SEQ ID NO: 4040047 - DNA, 25 bp, Homo sapien
gaccatgtgactgaacctgaggaga

SEQ ID NO: 4040048 - DNA, 25 bp, Homo sapien
cagctgtgatgccacgagaatactc

SEQ ID NO: 4040049 - DNA, 25 bp, Homo sapien
aatactcagatagcacacggacagg

SEQ ID NO: 4040050 - DNA, 25 bp, Homo sapien
aaaacaacttagactggcagtgcca

SEQ ID NO: 4040051 - DNA, 25 bp, Homo sapien
tctaatttgtcagttcccatgccat

SEQ ID NO: 4040052 - DNA, 25 bp, Homo sapien
ctctaatttgtcagttcccatgcca

SEQ ID NO: 4040053 - DNA, 25 bp, Homo sapien
actctaatttgtcagttcccatgcc

SEQ ID NO: 4040054 - DNA, 25 bp, Homo sapien
ctaatttgtcagttcccatgccatg

SEQ ID NO: 4040055 - DNA, 25 bp, Homo sapien
cctggagaggaaaaccgataaggag

SEQ ID NO: 4040056 - DNA, 25 bp, Homo sapien
tattttccgcaagaggagtaaggcc

SEQ ID NO: 4040057 - DNA, 25 bp, Homo sapien
gatcaggtcccatgatgcatccggt

SEQ ID NO: 4040058 - DNA, 25 bp, Homo sapien
tgcatccggttaagggaatgctgct

SEQ ID NO: 4040059 - DNA, 25 bp, Homo sapien
caagttgcttggcagggcacaggct

SEQ ID NO: 4040060 - DNA, 25 bp, Homo sapien
catgctgggatatgtgtgggttcta

SEQ ID NO: 4040061 - DNA, 25 bp, Homo sapien
gcactagacaagtcaagttgcttgg

SEQ ID NO: 4040062 - DNA, 25 bp, Homo sapien
actagacaagtcaagttgcttggca

SEQ ID NO: 4040063 - DNA, 25 bp, Homo sapien
caaggcatgccaggagattatttat

SEQ ID NO: 4040064 - DNA, 25 bp, Homo sapien
gccgagtcatcaaggcatgccagga

SEQ ID NO: 4040065 - DNA, 25 bp, Homo sapien
gtggaaggccgagtcatcaaggcat

SEQ ID NO: 4040066 - DNA, 25 bp, Homo sapien
tatggggttttgttgaacatcccac

SEQ ID NO: 4040067 - DNA, 25 bp, Homo sapien
ggatatcctcttcctgtaaagtgag

SEQ ID NO: 4040068 - DNA, 25 bp, Homo sapien
ttaatttcttcaggatatcctcttc

SEQ ID NO: 4040069 - DNA, 25 bp, Homo sapien
ttctttaatttcttcaggatatcct

SEQ ID NO: 4040070 - DNA, 25 bp, Homo sapien
ctttaatttcttcaggatatcctct

SEQ ID NO: 4040071 - DNA, 25 bp, Homo sapien
aaagggcaaactgtgagggtttcat

SEQ ID NO: 4040072 - DNA, 25 bp, Homo sapien
tgcctctctgtacctgctctatctg

SEQ ID NO: 4040073 - DNA, 25 bp, Homo sapien
ctgctctatctgtgccacacaagaa

SEQ ID NO: 4040074 - DNA, 25 bp, Homo sapien
tacctgctctatctgtgccacacaa

SEQ ID NO: 4040075 - DNA, 25 bp, Homo sapien
tctgtacctgctctatctgtgccac

SEQ ID NO: 4040076 - DNA, 25 bp, Homo sapien
tcagcccgagactgcaatgcccagg

SEQ ID NO: 4040077 - DNA, 25 bp, Homo sapien
gcctcttcagcagccagatcataaa

SEQ ID NO: 4040078 - DNA, 25 bp, Homo sapien
gccagatcataaatgaccagatagg

SEQ ID NO: 4040079 - DNA, 25 bp, Homo sapien
taattgcttttcgagctggcaggag

SEQ ID NO: 4040080 - DNA, 25 bp, Homo sapien
ggagggcaagtcttggataggtgga

SEQ ID NO: 4040081 - DNA, 25 bp, Homo sapien
gcgagtgcgtctgtgaccactggtg

SEQ ID NO: 4040082 - DNA, 25 bp, Homo sapien
tgcgtctgtgaccactggtggacag

SEQ ID NO: 4040083 - DNA, 25 bp, Homo sapien
ggcaagtcttggataggtggaggta

SEQ ID NO: 4040084 - DNA, 25 bp, Homo sapien
aggggagaaaacctgcaggaaggtg

SEQ ID NO: 4040085 - DNA, 25 bp, Homo sapien
tcggagtgggcgtcggtggaggtgg

SEQ ID NO: 4040086 - DNA, 25 bp, Homo sapien
gagggagtcggagtgggcgtcggtg

SEQ ID NO: 4040087 - DNA, 25 bp, Homo sapien
gggagtcggagtgggcgtcggtgga

SEQ ID NO: 4040088 - DNA, 25 bp, Homo sapien
tagggtccctgtcgttcttcatatc

SEQ ID NO: 4040089 - DNA, 25 bp, Homo sapien
catgcgccgtttcgatttattttga

SEQ ID NO: 4040090 - DNA, 25 bp, Homo sapien
tgtcgtctgtgcttgcagagccaca

SEQ ID NO: 4040091 - DNA, 25 bp, Homo sapien
gattaacttgttaggagtccgctta

SEQ ID NO: 4040092 - DNA, 25 bp, Homo sapien
gagctttgggggacagatcccaaat

SEQ ID NO: 4040093 - DNA, 25 bp, Homo sapien
ctttgggggacagatcccaaatatc

SEQ ID NO: 4040094 - DNA, 25 bp, Homo sapien
gctttgggggacagatcccaaatat

SEQ ID NO: 4040095 - DNA, 25 bp, Homo sapien
agctttgggggacagatcccaaata

SEQ ID NO: 4040096 - DNA, 25 bp, Homo sapien
taacctgactgacagttggacacag

SEQ ID NO: 4040097 - DNA, 25 bp, Homo sapien
ctgtcagagcccctggctatggtgg

SEQ ID NO: 4040098 - DNA, 25 bp, Homo sapien
cttggaggtctaacctgactgacag

SEQ ID NO: 4040099 - DNA, 25 bp, Homo sapien
cagctgtcagagcccctggctatgg

SEQ ID NO: 4040100 - DNA, 25 bp, Homo sapien
ctccatctcatgccactggcgtctc

SEQ ID NO: 4040101 - DNA, 25 bp, Homo sapien
tccatctcatgccactggcgtctcc

SEQ ID NO: 4040102 - DNA, 25 bp, Homo sapien
tctcatgccactggcgtctccacac

SEQ ID NO: 4040103 - DNA, 25 bp, Homo sapien
atctcatgccactggcgtctccaca

SEQ ID NO: 4040104 - DNA, 25 bp, Homo sapien
cgaatatgaacacttctgcatttag

SEQ ID NO: 4040105 - DNA, 25 bp, Homo sapien
aattacttggaagtgccgaatatga

SEQ ID NO: 4040106 - DNA, 25 bp, Homo sapien
gagttctttccaataatgtccccga

SEQ ID NO: 4040107 - DNA, 25 bp, Homo sapien
gaatccaggttttctgccagttcag

SEQ ID NO: 4040108 - DNA, 25 bp, Homo sapien
ggactctagacagccaccatgcatg

SEQ ID NO: 4040109 - DNA, 25 bp, Homo sapien
ctttctctaggactctagacagcca

SEQ ID NO: 4040110 - DNA, 25 bp, Homo sapien
gggaatagtctggtgttgttcctcc

SEQ ID NO: 4040111 - DNA, 25 bp, Homo sapien
caaagcctttctctaggactctaga

SEQ ID NO: 4040112 - DNA, 25 bp, Homo sapien
caataggttgagtgtggcccgaact

SEQ ID NO: 4040113 - DNA, 25 bp, Homo sapien
tctggtagccgaggaatgcagtgcc

SEQ ID NO: 4040114 - DNA, 25 bp, Homo sapien
gatttgaagtcagggatatggatcc

SEQ ID NO: 4040115 - DNA, 25 bp, Homo sapien
tgtagaaatgacttatcagctggca

SEQ ID NO: 4040116 - DNA, 25 bp, Homo sapien
tcccattaaaatgtggtcgcaaggt

SEQ ID NO: 4040117 - DNA, 25 bp, Homo sapien
actggtcttattgacttactctgcc

SEQ ID NO: 4040118 - DNA, 25 bp, Homo sapien
gccctgaaatttatccatcaagctg

SEQ ID NO: 4040119 - DNA, 25 bp, Homo sapien
caaggtggtatccaattctgcagaa

SEQ ID NO: 4040120 - DNA, 25 bp, Homo sapien
tattatcagcgccagggtccctggg

SEQ ID NO: 4040121 - DNA, 25 bp, Homo sapien
ccacaagcctctcgttgccagttta

SEQ ID NO: 4040122 - DNA, 25 bp, Homo sapien
tctcgttgccagtttattatcagcg

SEQ ID NO: 4040123 - DNA, 25 bp, Homo sapien
tgccagtttattatcagcgccaggg

SEQ ID NO: 4040124 - DNA, 25 bp, Homo sapien
cttaatgacaaatgtgtgaccaacc

SEQ ID NO: 4040125 - DNA, 25 bp, Homo sapien
ggcattcagctttgacttaatgaca

SEQ ID NO: 4040126 - DNA, 25 bp, Homo sapien
tgacaaatgtgtgaccaaccttaca

SEQ ID NO: 4040127 - DNA, 25 bp, Homo sapien
gtgtgaccaaccttacactgcttca

SEQ ID NO: 4040128 - DNA, 25 bp, Homo sapien
tggaataggaactacatcagcgatg

SEQ ID NO: 4040129 - DNA, 25 bp, Homo sapien
gacaggcctcgcaatgatgttgaaa

SEQ ID NO: 4040130 - DNA, 25 bp, Homo sapien
tgaacagaggaacgctgaagtcctt

SEQ ID NO: 4040131 - DNA, 25 bp, Homo sapien
agaatccgcctcttgcgggacaggc

SEQ ID NO: 4040132 - DNA, 25 bp, Homo sapien
ctctggaagatgttaaccagtggca

SEQ ID NO: 4040133 - DNA, 25 bp, Homo sapien
ctaagggaagatgtttctctggaag

SEQ ID NO: 4040134 - DNA, 25 bp, Homo sapien
tttctctggaagatgttaaccagtg

SEQ ID NO: 4040135 - DNA, 25 bp, Homo sapien
taagggaagatgtttctctggaaga

SEQ ID NO: 4040136 - DNA, 25 bp, Homo sapien
ctgcgccatttcctgcattcgcctc

SEQ ID NO: 4040137 - DNA, 25 bp, Homo sapien
cctgcgccatttcctgcattcgcct

SEQ ID NO: 4040138 - DNA, 25 bp, Homo sapien
gcgccatttcctgcattcgcctcat

SEQ ID NO: 4040139 - DNA, 25 bp, Homo sapien
tgcgccatttcctgcattcgcctca

SEQ ID NO: 4040140 - DNA, 25 bp, Homo sapien
cattggataaaatctcaggcctgga

SEQ ID NO: 4040141 - DNA, 25 bp, Homo sapien
gaaggactcctttgtgacacatggg

SEQ ID NO: 4040142 - DNA, 25 bp, Homo sapien
gcaaactaaagtcacagagcaggga

SEQ ID NO: 4040143 - DNA, 25 bp, Homo sapien
tacagattaaaggatagggtgcacc

SEQ ID NO: 4040144 - DNA, 25 bp, Homo sapien
accttgggccaaaatgatgtttaag

SEQ ID NO: 4040145 - DNA, 25 bp, Homo sapien
catttagatgacaaatgggcttcag

SEQ ID NO: 4040146 - DNA, 25 bp, Homo sapien
gcttcagggcgctgtcagaacttcc

SEQ ID NO: 4040147 - DNA, 25 bp, Homo sapien
ggcaggccccatgaatggaccttgg

SEQ ID NO: 4040148 - DNA, 25 bp, Homo sapien
tctggccattgtcatcggaataagg

SEQ ID NO: 4040149 - DNA, 25 bp, Homo sapien
ggtcattacgtgtgccctgattggc

SEQ ID NO: 4040150 - DNA, 25 bp, Homo sapien
cggaataagggctaagtgatgctgc

SEQ ID NO: 4040151 - DNA, 25 bp, Homo sapien
tgtcaaaacagcgagctggccgctc

SEQ ID NO: 4040152 - DNA, 25 bp, Homo sapien
tttgaatggagccagaaggctctgg

SEQ ID NO: 4040153 - DNA, 25 bp, Homo sapien
ctgaaaaggggattttgaatggagc

SEQ ID NO: 4040154 - DNA, 25 bp, Homo sapien
aaggctctgggagcctgcctttgcc

SEQ ID NO: 4040155 - DNA, 25 bp, Homo sapien
ctctgggagcctgcctttgccgtgc

SEQ ID NO: 4040156 - DNA, 25 bp, Homo sapien
ctgggattcgtgacagcttgactgc

SEQ ID NO: 4040157 - DNA, 25 bp, Homo sapien
gtgacagcttgactgcctgtgtctt

SEQ ID NO: 4040158 - DNA, 25 bp, Homo sapien
tgctgggattcgtgacagcttgact

SEQ ID NO: 4040159 - DNA, 25 bp, Homo sapien
gattcgtgacagcttgactgcctgt

SEQ ID NO: 4040160 - DNA, 25 bp, Homo sapien
tctaagctaacggtgcacaatagtg

SEQ ID NO: 4040161 - DNA, 25 bp, Homo sapien
ctctttttctaagctaacggtgcac

SEQ ID NO: 4040162 - DNA, 25 bp, Homo sapien
tgattttgtaatgtgaactaatgcc

SEQ ID NO: 4040163 - DNA, 25 bp, Homo sapien
gctaacggtgcacaatagtgtcaaa

SEQ ID NO: 4040164 - DNA, 25 bp, Homo sapien
gatcacaataacacatctgccacag

SEQ ID NO: 4040165 - DNA, 25 bp, Homo sapien
aaaggttgctggctcctcgtctagg

SEQ ID NO: 4040166 - DNA, 25 bp, Homo sapien
cgtctaggttatgtacaaggagcac

SEQ ID NO: 4040167 - DNA, 25 bp, Homo sapien
tacttttacactacaccagcagaat

SEQ ID NO: 4040168 - DNA, 25 bp, Homo sapien
ttcctagatgccgagcgtgagccat

SEQ ID NO: 4040169 - DNA, 25 bp, Homo sapien
ggatcaggcatttctttgaggacac

SEQ ID NO: 4040170 - DNA, 25 bp, Homo sapien
ggaactctcagcattccgcccaggt

SEQ ID NO: 4040171 - DNA, 25 bp, Homo sapien
gagccatgccatcttgagactacca

SEQ ID NO: 4040172 - DNA, 25 bp, Homo sapien
gatggagccctctacaaaagcaggt

SEQ ID NO: 4040173 - DNA, 25 bp, Homo sapien
ggtctctaggaaggacagtgcctcc

SEQ ID NO: 4040174 - DNA, 25 bp, Homo sapien
ccaaggcccgaagacactgaattct

SEQ ID NO: 4040175 - DNA, 25 bp, Homo sapien
gagctgaaagttcaaccaagaagag

SEQ ID NO: 4040176 - DNA, 25 bp, Homo sapien
ttttcagggatggttactagacgac

SEQ ID NO: 4040177 - DNA, 25 bp, Homo sapien
gctaagtcctggcatgcagaagtgt

SEQ ID NO: 4040178 - DNA, 25 bp, Homo sapien
tcaacaggctgagcgaagggacttg

SEQ ID NO: 4040179 - DNA, 25 bp, Homo sapien
ccaagctgttccttcatcagggctc

SEQ ID NO: 4040180 - DNA, 25 bp, Homo sapien
atgcccggcgcaatgaacttacttc

SEQ ID NO: 4040181 - DNA, 25 bp, Homo sapien
ctcggcctccatgcccggcgcaatg

SEQ ID NO: 4040182 - DNA, 25 bp, Homo sapien
ctccatgcccggcgcaatgaactta

SEQ ID NO: 4040183 - DNA, 25 bp, Homo sapien
ccatgcccggcgcaatgaacttact

SEQ ID NO: 4040184 - DNA, 25 bp, Homo sapien
gctgtggaactttgccataacccag

SEQ ID NO: 4040185 - DNA, 25 bp, Homo sapien
gtctgaatttctctgccggctgtgg

SEQ ID NO: 4040186 - DNA, 25 bp, Homo sapien
gccggctgtggaactttgccataac

SEQ ID NO: 4040187 - DNA, 25 bp, Homo sapien
ctgaatttctctgccggctgtggaa

SEQ ID NO: 4040188 - DNA, 25 bp, Homo sapien
gatgtttccacgaacctcttgccat

SEQ ID NO: 4040189 - DNA, 25 bp, Homo sapien
ggaagaggtgatgtttccacgaacc

SEQ ID NO: 4040190 - DNA, 25 bp, Homo sapien
ccggatctggacatttcaaactcct

SEQ ID NO: 4040191 - DNA, 25 bp, Homo sapien
tgcaaggctgtgctaggcacaccgg

SEQ ID NO: 4040192 - DNA, 25 bp, Homo sapien
tccaattctggagccgtgaccactt

SEQ ID NO: 4040193 - DNA, 25 bp, Homo sapien
gacccacgtgacttagctccattag

SEQ ID NO: 4040194 - DNA, 25 bp, Homo sapien
tataatgtatgtgcccagtccaatt

SEQ ID NO: 4040195 - DNA, 25 bp, Homo sapien
cacttaggcattgctgagcccagga

SEQ ID NO: 4040196 - DNA, 25 bp, Homo sapien
cggcaaggagcaagttcaaggtcca

SEQ ID NO: 4040197 - DNA, 25 bp, Homo sapien
gaagtcggcaaggagcaagttcaag

SEQ ID NO: 4040198 - DNA, 25 bp, Homo sapien
ccgtgaagtcggcaaggagcaagtt

SEQ ID NO: 4040199 - DNA, 25 bp, Homo sapien
aggtgctccgtgaagtcggcaagga

SEQ ID NO: 4040200 - DNA, 25 bp, Homo sapien
aaagatgttttatgcaagttctccc

SEQ ID NO: 4040201 - DNA, 25 bp, Homo sapien
gaaccctgggcagcccttgaggacc

SEQ ID NO: 4040202 - DNA, 25 bp, Homo sapien
tgaggaccggctgttatcagccatg

SEQ ID NO: 4040203 - DNA, 25 bp, Homo sapien
tcctagaaccctgggcagcccttga

SEQ ID NO: 4040204 - DNA, 25 bp, Homo sapien
ggacatctgtagccacctgagtgtc

SEQ ID NO: 4040205 - DNA, 25 bp, Homo sapien
aggacatctgtagccacctgagtgt

SEQ ID NO: 4040206 - DNA, 25 bp, Homo sapien
tcaatatgcagggattgaatgggta

SEQ ID NO: 4040207 - DNA, 25 bp, Homo sapien
ggctggcttgtgagagcatcaatat

SEQ ID NO: 4040208 - DNA, 25 bp, Homo sapien
ggaagagttattcccatgagtcaaa

SEQ ID NO: 4040209 - DNA, 25 bp, Homo sapien
ggtcctgtgctgaagtcacgtgctt

SEQ ID NO: 4040210 - DNA, 25 bp, Homo sapien
gagtgtagcgttccttttcatgtgc

SEQ ID NO: 4040211 - DNA, 25 bp, Homo sapien
gattcttgagtgtagcgttcctttt

SEQ ID NO: 4040212 - DNA, 25 bp, Homo sapien
ttcactatcagattcttgagtgtag

SEQ ID NO: 4040213 - DNA, 25 bp, Homo sapien
tatcagattcttgagtgtagcgttc

SEQ ID NO: 4040214 - DNA, 25 bp, Homo sapien
tgaatgaagggattgtgaggctttc

SEQ ID NO: 4040215 - DNA, 25 bp, Homo sapien
cacacatggttctaatatcatgcca

SEQ ID NO: 4040216 - DNA, 25 bp, Homo sapien
taaattcaggcgctcatgatgaaag

SEQ ID NO: 4040217 - DNA, 25 bp, Homo sapien
gcagtgctaactttctgactccaga

SEQ ID NO: 4040218 - DNA, 25 bp, Homo sapien
gcgccaaggtggacagacagagcca

SEQ ID NO: 4040219 - DNA, 25 bp, Homo sapien
cagcagtttagataatggcttctga

SEQ ID NO: 4040220 - DNA, 25 bp, Homo sapien
tgcatctacggctttcgcggccaaa

SEQ ID NO: 4040221 - DNA, 25 bp, Homo sapien
tctccagagggcgccaaggtggaca

SEQ ID NO: 4040222 - DNA, 25 bp, Homo sapien
ctctttctgtaagggtggcatccca

SEQ ID NO: 4040223 - DNA, 25 bp, Homo sapien
ctgcatacaagcactcacagggctg

SEQ ID NO: 4040224 - DNA, 25 bp, Homo sapien
tgaataccttcatgccagctcagaa

SEQ ID NO: 4040225 - DNA, 25 bp, Homo sapien
gaagaaacttgctgtttattatgct

SEQ ID NO: 4040226 - DNA, 25 bp, Homo sapien
gatataatttatcatcgccaagggt

SEQ ID NO: 4040227 - DNA, 25 bp, Homo sapien
agggttaaggagcaattccagtcct

SEQ ID NO: 4040228 - DNA, 25 bp, Homo sapien
ctcacaataggtccgcagtacagga

SEQ ID NO: 4040229 - DNA, 25 bp, Homo sapien
ggtccgcagtacaggaaaagtgtct

SEQ ID NO: 4040230 - DNA, 25 bp, Homo sapien
tgaatatagataaccttgatggttg

SEQ ID NO: 4040231 - DNA, 25 bp, Homo sapien
tgccagtagatactaaactgctgct

SEQ ID NO: 4040232 - DNA, 25 bp, Homo sapien
tgatggttgacctcgtcagagccag

SEQ ID NO: 4040233 - DNA, 25 bp, Homo sapien
aactgctgctggatgaatttatata

SEQ ID NO: 4040234 - DNA, 25 bp, Homo sapien
ctaagtgggaaaggtgaccacgatc

SEQ ID NO: 4040235 - DNA, 25 bp, Homo sapien
taagtgggaaaggtgaccacgatcc

SEQ ID NO: 4040236 - DNA, 25 bp, Homo sapien
cagaacatcagagctgctcttcatc

SEQ ID NO: 4040237 - DNA, 25 bp, Homo sapien
atcagaacatcagagctgctcttca

SEQ ID NO: 4040238 - DNA, 25 bp, Homo sapien
tcagaacatcagagctgctcttcat

SEQ ID NO: 4040239 - DNA, 25 bp, Homo sapien
catcagaacatcagagctgctcttc

SEQ ID NO: 4040240 - DNA, 25 bp, Homo sapien
tccagcaaggacatccctgtttctg

SEQ ID NO: 4040241 - DNA, 25 bp, Homo sapien
tttctgtgtctgctgattaagacgc

SEQ ID NO: 4040242 - DNA, 25 bp, Homo sapien
cagtccaaccagtctgacctccctt

SEQ ID NO: 4040243 - DNA, 25 bp, Homo sapien
ttcaaccctggccagtccaaccagt

SEQ ID NO: 4040244 - DNA, 25 bp, Homo sapien
tctgcagagattccaaggcagccac

SEQ ID NO: 4040245 - DNA, 25 bp, Homo sapien
taggagtcacgttccaaattgctgc

SEQ ID NO: 4040246 - DNA, 25 bp, Homo sapien
agccactgtgctctgtttaccaaca

SEQ ID NO: 4040247 - DNA, 25 bp, Homo sapien
tccagttccagcaccaaggcttctg

SEQ ID NO: 4040248 - DNA, 25 bp, Homo sapien
ttggtcctggtagcccatggtaccc

SEQ ID NO: 4040249 - DNA, 25 bp, Homo sapien
taagcagaagataacagaagcgact

SEQ ID NO: 4040250 - DNA, 25 bp, Homo sapien
atgaccagggcagtcaatggacaac

SEQ ID NO: 4040251 - DNA, 25 bp, Homo sapien
gaagcgacttggaacactcttggtc

SEQ ID NO: 4040252 - DNA, 25 bp, Homo sapien
agtgggcgattctctgtgggcatgg

SEQ ID NO: 4040253 - DNA, 25 bp, Homo sapien
agccatcagatgcccgccgtgtagc

SEQ ID NO: 4040254 - DNA, 25 bp, Homo sapien
tagctgtaaagtgggcgattctctg

SEQ ID NO: 4040255 - DNA, 25 bp, Homo sapien
cagatgcccgccgtgtagctgtaaa

SEQ ID NO: 4040256 - DNA, 25 bp, Homo sapien
ctgggttctgctgtactggcaggcc

SEQ ID NO: 4040257 - DNA, 25 bp, Homo sapien
tgctgggctcctttgcatcctgggt

SEQ ID NO: 4040258 - DNA, 25 bp, Homo sapien
gcatcctgggttctgctgtactggc

SEQ ID NO: 4040259 - DNA, 25 bp, Homo sapien
tggcctgctgggctcctttgcatcc

SEQ ID NO: 4040260 - DNA, 25 bp, Homo sapien
gatgactgagcaggaaacctgcaat

SEQ ID NO: 4040261 - DNA, 25 bp, Homo sapien
tgactgagcaggaaacctgcaatat

SEQ ID NO: 4040262 - DNA, 25 bp, Homo sapien
taggatgactgagcaggaaacctgc

SEQ ID NO: 4040263 - DNA, 25 bp, Homo sapien
gtagtaggatgactgagcaggaaac

SEQ ID NO: 4040264 - DNA, 25 bp, Homo sapien
tcactccaaattcccgctccacact

SEQ ID NO: 4040265 - DNA, 25 bp, Homo sapien
tggagctccactggctgtctgccat

SEQ ID NO: 4040266 - DNA, 25 bp, Homo sapien
acactggagctccactggctgtctg

SEQ ID NO: 4040267 - DNA, 25 bp, Homo sapien
tccaaattcccgctccacactggag

SEQ ID NO: 4040268 - DNA, 25 bp, Homo sapien
aaaccttctctcaggtcaccagtgc

SEQ ID NO: 4040269 - DNA, 25 bp, Homo sapien
cctccaaaccaatgatgtgggacac

SEQ ID NO: 4040270 - DNA, 25 bp, Homo sapien
ggtcaccagtgctagcgagaaattc

SEQ ID NO: 4040271 - DNA, 25 bp, Homo sapien
gacacagaccctactgaaagcttca

SEQ ID NO: 4040272 - DNA, 25 bp, Homo sapien
aataatttgcacaagctttcggttg

SEQ ID NO: 4040273 - DNA, 25 bp, Homo sapien
caagctttcggttgtgtgagctctt

SEQ ID NO: 4040274 - DNA, 25 bp, Homo sapien
ccttccatgattatcactgcggaca

SEQ ID NO: 4040275 - DNA, 25 bp, Homo sapien
tttgatacaatatttccttccatga

SEQ ID NO: 4040276 - DNA, 25 bp, Homo sapien
tacagtgtcgacagtctgtaatgcc

SEQ ID NO: 4040277 - DNA, 25 bp, Homo sapien
ggacagccagaagcgagggtaatta

SEQ ID NO: 4040278 - DNA, 25 bp, Homo sapien
tcttcagtctccgacaatgagtagc

SEQ ID NO: 4040279 - DNA, 25 bp, Homo sapien
ttgcccggccacaagaagcaggttt

SEQ ID NO: 4040280 - DNA, 25 bp, Homo sapien
cactttggtgatgggttgtagggac

SEQ ID NO: 4040281 - DNA, 25 bp, Homo sapien
gcaaaacctttgaactcgagtctga

SEQ ID NO: 4040282 - DNA, 25 bp, Homo sapien
tccctcggatggtgcactttggtga

SEQ ID NO: 4040283 - DNA, 25 bp, Homo sapien
tgaactttataaggtccgtactggc

SEQ ID NO: 4040284 - DNA, 25 bp, Homo sapien
ggtgaacggcggcacggctcggcca

SEQ ID NO: 4040285 - DNA, 25 bp, Homo sapien
ggctttggtgaacggcggcacggct

SEQ ID NO: 4040286 - DNA, 25 bp, Homo sapien
gaggctttggtgaacggcggcacgg

SEQ ID NO: 4040287 - DNA, 25 bp, Homo sapien
ggcggcacggctcggccatcagctt

SEQ ID NO: 4040288 - DNA, 25 bp, Homo sapien
aatcgtgaagaaagccccgtccagt

SEQ ID NO: 4040289 - DNA, 25 bp, Homo sapien
aatatccatgacaatcgtgttgggc

SEQ ID NO: 4040290 - DNA, 25 bp, Homo sapien
cgtccagttttgtgcggccagaggc

SEQ ID NO: 4040291 - DNA, 25 bp, Homo sapien
gctgtcaacaatccgaggcccaaat

SEQ ID NO: 4040292 - DNA, 25 bp, Homo sapien
cctttgtcaacaagcagagggactt

SEQ ID NO: 4040293 - DNA, 25 bp, Homo sapien
gagcaacgcgcctttgtcaacaagc

SEQ ID NO: 4040294 - DNA, 25 bp, Homo sapien
gcagagggactttgtgttggagcat

SEQ ID NO: 4040295 - DNA, 25 bp, Homo sapien
accagtggctcgagcaacgcgcctt

SEQ ID NO: 4040296 - DNA, 25 bp, Homo sapien
ttctcctctggttggtataagcagc

SEQ ID NO: 4040297 - DNA, 25 bp, Homo sapien
gcaaactgtctatacgtactgtcac

SEQ ID NO: 4040298 - DNA, 25 bp, Homo sapien
cagcattgggcaaagaactgcggaa

SEQ ID NO: 4040299 - DNA, 25 bp, Homo sapien
ggaaaccttggcctctgggacataa

SEQ ID NO: 4040300 - DNA, 25 bp, Homo sapien
aatgccggtgtctgaatatgagata

SEQ ID NO: 4040301 - DNA, 25 bp, Homo sapien
gtgtctgaatatgagattccaatat

SEQ ID NO: 4040302 - DNA, 25 bp, Homo sapien
gacacactcgtaatttggctttgaa

SEQ ID NO: 4040303 - DNA, 25 bp, Homo sapien
ttcatttgaaaaagcatagctcaga

SEQ ID NO: 4040304 - DNA, 25 bp, Homo sapien
gataaggagacaagtaattagtaca

SEQ ID NO: 4040305 - DNA, 25 bp, Homo sapien
caaaggtgtaggcatcagggaaaaa

SEQ ID NO: 4040306 - DNA, 25 bp, Homo sapien
tcgaggaggtcaatcactctacagt

SEQ ID NO: 4040307 - DNA, 25 bp, Homo sapien
tagaaataaaggagggttcatggaa

SEQ ID NO: 4040308 - DNA, 25 bp, Homo sapien
gcttgtgcgataacattctgcgtcc

SEQ ID NO: 4040309 - DNA, 25 bp, Homo sapien
agggctgttacaggccttaatggca

SEQ ID NO: 4040310 - DNA, 25 bp, Homo sapien
tatcagttgaaagtcagcttgtgcg

SEQ ID NO: 4040311 - DNA, 25 bp, Homo sapien
tttgagtgaatccaacaagggctgt

SEQ ID NO: 4040312 - DNA, 25 bp, Homo sapien
ccaaaatgcctaatcttgatatttt

SEQ ID NO: 4040313 - DNA, 25 bp, Homo sapien
ctccaaaatgcctaatcttgatatt

SEQ ID NO: 4040314 - DNA, 25 bp, Homo sapien
tcccactgacacttgctctcgatgc

SEQ ID NO: 4040315 - DNA, 25 bp, Homo sapien
ttgtctgacgtatacctggattttc

SEQ ID NO: 4040316 - DNA, 25 bp, Homo sapien
tttaaccaactgcagcttaaattgt

SEQ ID NO: 4040317 - DNA, 25 bp, Homo sapien
gttgcgccgaacgaactgctctcgg

SEQ ID NO: 4040318 - DNA, 25 bp, Homo sapien
gttcgcatttaaccaactgcagctt

SEQ ID NO: 4040319 - DNA, 25 bp, Homo sapien
tccagattaaatgctgttgcgccga

SEQ ID NO: 4040320 - DNA, 25 bp, Homo sapien
tggtggttgcatggcgctgcctctg

SEQ ID NO: 4040321 - DNA, 25 bp, Homo sapien
caagacccagtgtatgggctgctgc

SEQ ID NO: 4040322 - DNA, 25 bp, Homo sapien
tctgtccttgtggttgctaaactca

SEQ ID NO: 4040323 - DNA, 25 bp, Homo sapien
ttgctaaactcaagacccagtgtat

SEQ ID NO: 4040324 - DNA, 25 bp, Homo sapien
taccgggtgcatgtgaagatcaaat

SEQ ID NO: 4040325 - DNA, 25 bp, Homo sapien
tggccgccttctgcttttgacagct

SEQ ID NO: 4040326 - DNA, 25 bp, Homo sapien
cctgcattaagtgctttcccagtgg

SEQ ID NO: 4040327 - DNA, 25 bp, Homo sapien
ggccccaaacttaagtttgcctgca

SEQ ID NO: 4040328 - DNA, 25 bp, Homo sapien
ccactttttgatggcccatggaacg

SEQ ID NO: 4040329 - DNA, 25 bp, Homo sapien
ttttgatggcccatggaacgattgt

SEQ ID NO: 4040330 - DNA, 25 bp, Homo sapien
ttgatggcccatggaacgattgtcc

SEQ ID NO: 4040331 - DNA, 25 bp, Homo sapien
ttttatctattggccccaggcccac

SEQ ID NO: 4040332 - DNA, 25 bp, Homo sapien
taaaacacggattagagcaagtatg

SEQ ID NO: 4040333 - DNA, 25 bp, Homo sapien
cgggcgttgcaccagcagagtaaat

SEQ ID NO: 4040334 - DNA, 25 bp, Homo sapien
tttgcatacgccttgtcatcagcag

SEQ ID NO: 4040335 - DNA, 25 bp, Homo sapien
tagccgcggaatgagccgtgttgcc

SEQ ID NO: 4040336 - DNA, 25 bp, Homo sapien
catgtgcgtgagctgtcctctgtgc

SEQ ID NO: 4040337 - DNA, 25 bp, Homo sapien
tctgtgcacccaaagcgaaaggttc

SEQ ID NO: 4040338 - DNA, 25 bp, Homo sapien
aaacggctggtggacacatgtgcgt

SEQ ID NO: 4040339 - DNA, 25 bp, Homo sapien
caaattcatggagctgggaaacggc

SEQ ID NO: 4040340 - DNA, 25 bp, Homo sapien
atttctctaagaagattaccccgtg

SEQ ID NO: 4040341 - DNA, 25 bp, Homo sapien
ttgttgttgaagcaactaatttccc

SEQ ID NO: 4040342 - DNA, 25 bp, Homo sapien
agattaccccgtgcttgtttgttgt

SEQ ID NO: 4040343 - DNA, 25 bp, Homo sapien
tgttgaagcaactaatttccctaaa

SEQ ID NO: 4040344 - DNA, 25 bp, Homo sapien
ttctgttgaaggactgtcagcccac

SEQ ID NO: 4040345 - DNA, 25 bp, Homo sapien
gcccacatgtgatgatcttcttcca

SEQ ID NO: 4040346 - DNA, 25 bp, Homo sapien
gaggcccccacgctgttctgttgaa

SEQ ID NO: 4040347 - DNA, 25 bp, Homo sapien
ccacgtccaaaagcaggatctggga

SEQ ID NO: 4040348 - DNA, 25 bp, Homo sapien
gaaagcaggagtgttcagaaatcca

SEQ ID NO: 4040349 - DNA, 25 bp, Homo sapien
cataaaatactccaaggggaaagca

SEQ ID NO: 4040350 - DNA, 25 bp, Homo sapien
gaaatgtaaactgtggacagagcat

SEQ ID NO: 4040351 - DNA, 25 bp, Homo sapien
cagaaatccaaatggctgaaatgta

SEQ ID NO: 4040352 - DNA, 25 bp, Homo sapien
cattgttctcaatttgagcagactc

SEQ ID NO: 4040353 - DNA, 25 bp, Homo sapien
catgtgaaaaggaacggcgaatagg

SEQ ID NO: 4040354 - DNA, 25 bp, Homo sapien
tctcagccaacatcaaaatgcgcct

SEQ ID NO: 4040355 - DNA, 25 bp, Homo sapien
gaatagggcagtgttcgacattaca

SEQ ID NO: 4040356 - DNA, 25 bp, Homo sapien
atctgtggacttggctaaacctgtg

SEQ ID NO: 4040357 - DNA, 25 bp, Homo sapien
aaacctgtgccaaggatcatggcag

SEQ ID NO: 4040358 - DNA, 25 bp, Homo sapien
cagcaggtcgtctctggagaggaac

SEQ ID NO: 4040359 - DNA, 25 bp, Homo sapien
acagcaggtcgtctctggagaggaa

SEQ ID NO: 4040360 - DNA, 25 bp, Homo sapien
tcttcccaatcaattcccagagaga

SEQ ID NO: 4040361 - DNA, 25 bp, Homo sapien
atcttcccaatcaattcccagagag

SEQ ID NO: 4040362 - DNA, 25 bp, Homo sapien
gctccaagttcaccagcgtcagttg

SEQ ID NO: 4040363 - DNA, 25 bp, Homo sapien
agcgtcagttggcaatgctctctga

SEQ ID NO: 4040364 - DNA, 25 bp, Homo sapien
accagcgtcagttggcaatgctctc

SEQ ID NO: 4040365 - DNA, 25 bp, Homo sapien
caacaatgagggctccaagttcacc

SEQ ID NO: 4040366 - DNA, 25 bp, Homo sapien
ctggggatggcggtctaattactaa

SEQ ID NO: 4040367 - DNA, 25 bp, Homo sapien
ctttttggaaacgaatgtgacttgg

SEQ ID NO: 4040368 - DNA, 25 bp, Homo sapien
tggcggtctaattactaacatctga

SEQ ID NO: 4040369 - DNA, 25 bp, Homo sapien
tttggaaacgaatgtgacttggcag

SEQ ID NO: 4040370 - DNA, 25 bp, Homo sapien
cctgaatcggccaggccgcaggctg

SEQ ID NO: 4040371 - DNA, 25 bp, Homo sapien
tctggaagcacattaaccaggtggc

SEQ ID NO: 4040372 - DNA, 25 bp, Homo sapien
accaggtggcctgaatcggccaggc

SEQ ID NO: 4040373 - DNA, 25 bp, Homo sapien
atctggaagcacattaaccaggtgg

SEQ ID NO: 4040374 - DNA, 25 bp, Homo sapien
cattgtcaataacacagttcgttgc

SEQ ID NO: 4040375 - DNA, 25 bp, Homo sapien
tgctggaaccgcaaccactgagttt

SEQ ID NO: 4040376 - DNA, 25 bp, Homo sapien
gccactacagccagataacttcctt

SEQ ID NO: 4040377 - DNA, 25 bp, Homo sapien
tgatgttgaacatggaaaatccaca

SEQ ID NO: 4040378 - DNA, 25 bp, Homo sapien
tctgtcatcatagagcataatgcag

SEQ ID NO: 4040379 - DNA, 25 bp, Homo sapien
gcataatgcaggttgaaagagtttc

SEQ ID NO: 4040380 - DNA, 25 bp, Homo sapien
gggattctgggcttgtagtaactag

SEQ ID NO: 4040381 - DNA, 25 bp, Homo sapien
actaggtgttgtctatggttcttgc

SEQ ID NO: 4040382 - DNA, 25 bp, Homo sapien
agccttctgccgtcttatctttctc

SEQ ID NO: 4040383 - DNA, 25 bp, Homo sapien
tagcacagcactgtgatgggaaccc

SEQ ID NO: 4040384 - DNA, 25 bp, Homo sapien
agcacagcactgtgatgggaaccca

SEQ ID NO: 4040385 - DNA, 25 bp, Homo sapien
gcccagccttctgccgtcttatctt

SEQ ID NO: 4040386 - DNA, 25 bp, Homo sapien
gagagtacctgaaccaacacgcaat

SEQ ID NO: 4040387 - DNA, 25 bp, Homo sapien
cagtaaacacgtccctgagagtacc

SEQ ID NO: 4040388 - DNA, 25 bp, Homo sapien
tctgttgctttgaagtaagactctc

SEQ ID NO: 4040389 - DNA, 25 bp, Homo sapien
agccatggtttgctcaatggagctt

SEQ ID NO: 4040390 - DNA, 25 bp, Homo sapien
cccctttacccacacgaatagccat

SEQ ID NO: 4040391 - DNA, 25 bp, Homo sapien
cacatccccgcaagttttcaaaacg

SEQ ID NO: 4040392 - DNA, 25 bp, Homo sapien
aggcaggaccgtagcacccacatcc

SEQ ID NO: 4040393 - DNA, 25 bp, Homo sapien
cgtagcacccacatccccgcaagtt

SEQ ID NO: 4040394 - DNA, 25 bp, Homo sapien
ccaggcaggaccgtagcacccacat

SEQ ID NO: 4040395 - DNA, 25 bp, Homo sapien
tgtcaaaacatttactaatgcagac

SEQ ID NO: 4040396 - DNA, 25 bp, Homo sapien
aataaatggctaatgtcaaaacatt

SEQ ID NO: 4040397 - DNA, 25 bp, Homo sapien
taatgcagacaaagctgactgaaat

SEQ ID NO: 4040398 - DNA, 25 bp, Homo sapien
catctctgaaataaatggctaatgt

SEQ ID NO: 4040399 - DNA, 25 bp, Homo sapien
ggaggcggtctatcttcactgcgga

SEQ ID NO: 4040400 - DNA, 25 bp, Homo sapien
ttcactgcggatggcgaggtgcctt

SEQ ID NO: 4040401 - DNA, 25 bp, Homo sapien
cgttcctgtaggtttctgatggcag

SEQ ID NO: 4040402 - DNA, 25 bp, Homo sapien
cagcgaacctttgtcctgcaatgca

SEQ ID NO: 4040403 - DNA, 25 bp, Homo sapien
taaacaaccattctgtgtatgtttt

SEQ ID NO: 4040404 - DNA, 25 bp, Homo sapien
tttgacagctgtgaattttaaacaa

SEQ ID NO: 4040405 - DNA, 25 bp, Homo sapien
ttgtgtattcagattgtttctccat

SEQ ID NO: 4040406 - DNA, 25 bp, Homo sapien
taattttgtgtattcagattgtttc

SEQ ID NO: 4040407 - DNA, 25 bp, Homo sapien
ctattcacagtagtgatgttcgaac

SEQ ID NO: 4040408 - DNA, 25 bp, Homo sapien
gatgttcgaactctgcaacaatgtc

SEQ ID NO: 4040409 - DNA, 25 bp, Homo sapien
cctccacagaaggtgtcatgaaaga

SEQ ID NO: 4040410 - DNA, 25 bp, Homo sapien
cagctgggtactctgtcctctcacc

SEQ ID NO: 4040411 - DNA, 25 bp, Homo sapien
gaccgtcaactttcccaaatgcagg

SEQ ID NO: 4040412 - DNA, 25 bp, Homo sapien
cacttgctctcctggcgtctgcttg

SEQ ID NO: 4040413 - DNA, 25 bp, Homo sapien
caaacactgacaacagctataatga

SEQ ID NO: 4040414 - DNA, 25 bp, Homo sapien
tctgcttgctgcttactgtgactgc

SEQ ID NO: 4040415 - DNA, 25 bp, Homo sapien
caccaccagctggattgtacagaaa

SEQ ID NO: 4040416 - DNA, 25 bp, Homo sapien
agctggattgtacagaaaacctttc

SEQ ID NO: 4040417 - DNA, 25 bp, Homo sapien
tcagatttctctaaacggtaacacc

SEQ ID NO: 4040418 - DNA, 25 bp, Homo sapien
gtggtatcacatcaatcactgagca

SEQ ID NO: 4040419 - DNA, 25 bp, Homo sapien
taaggaggacccttgatgggctgat

SEQ ID NO: 4040420 - DNA, 25 bp, Homo sapien
tcattctggtagatgaggtcactcg

SEQ ID NO: 4040421 - DNA, 25 bp, Homo sapien
gattctctggaaagaaggtttgtct

SEQ ID NO: 4040422 - DNA, 25 bp, Homo sapien
tccctggcgggatagatgacttcat

SEQ ID NO: 4040423 - DNA, 25 bp, Homo sapien
cccctttgcagccatttctttcata

SEQ ID NO: 4040424 - DNA, 25 bp, Homo sapien
agacgggggtggcccttattctcag

SEQ ID NO: 4040425 - DNA, 25 bp, Homo sapien
ttcatataaccagggagaagacggg

SEQ ID NO: 4040426 - DNA, 25 bp, Homo sapien
aggcccacgtttgcttgtagaattt

SEQ ID NO: 4040427 - DNA, 25 bp, Homo sapien
gcaggtctgagctccgtttggatct

SEQ ID NO: 4040428 - DNA, 25 bp, Homo sapien
tgtccttccctttcgacagtgaacc

SEQ ID NO: 4040429 - DNA, 25 bp, Homo sapien
aggtgtgaatttcccgggcatttct

SEQ ID NO: 4040430 - DNA, 25 bp, Homo sapien
cagtgaaccggggtttcctgaatgc

SEQ ID NO: 4040431 - DNA, 25 bp, Homo sapien
atggatcatatttaaatgctttcca

SEQ ID NO: 4040432 - DNA, 25 bp, Homo sapien
aacccatggatcatatttaaatgct

SEQ ID NO: 4040433 - DNA, 25 bp, Homo sapien
cccatggatcatatttaaatgcttt

SEQ ID NO: 4040434 - DNA, 25 bp, Homo sapien
catggatcatatttaaatgctttcc

SEQ ID NO: 4040435 - DNA, 25 bp, Homo sapien
ctatgttgttccctgattgtgaagc

SEQ ID NO: 4040436 - DNA, 25 bp, Homo sapien
gcattttccactcagcgctccacta

SEQ ID NO: 4040437 - DNA, 25 bp, Homo sapien
tcagcgctccactattataatgtct

SEQ ID NO: 4040438 - DNA, 25 bp, Homo sapien
catcctgggatgctctcgacatggg

SEQ ID NO: 4040439 - DNA, 25 bp, Homo sapien
taagcttggaccgtaagaatgaggt

SEQ ID NO: 4040440 - DNA, 25 bp, Homo sapien
tcatggcaaatattgccccaggcta

SEQ ID NO: 4040441 - DNA, 25 bp, Homo sapien
atggcaaatattgccccaggctagg

SEQ ID NO: 4040442 - DNA, 25 bp, Homo sapien
cttggaccgtaagaatgaggtcttc

SEQ ID NO: 4040443 - DNA, 25 bp, Homo sapien
ctgctgtagttaagttgggccccat

SEQ ID NO: 4040444 - DNA, 25 bp, Homo sapien
ggcggctgctgtagttaagttgggc

SEQ ID NO: 4040445 - DNA, 25 bp, Homo sapien
cggctgctgtagttaagttgggccc

SEQ ID NO: 4040446 - DNA, 25 bp, Homo sapien
aggtggcggctgctgtagttaagtt

SEQ ID NO: 4040447 - DNA, 25 bp, Homo sapien
gaggattccctcatagcatttgaca

SEQ ID NO: 4040448 - DNA, 25 bp, Homo sapien
cagcatttgtgccaacgaggattcc

SEQ ID NO: 4040449 - DNA, 25 bp, Homo sapien
tgaagatagactgccaccctttgtg

SEQ ID NO: 4040450 - DNA, 25 bp, Homo sapien
tgggaacggttctcagggatgcccc

SEQ ID NO: 4040451 - DNA, 25 bp, Homo sapien
cagaactccacagagacactcaaga

SEQ ID NO: 4040452 - DNA, 25 bp, Homo sapien
tgaaacgtccatggcacccagaact

SEQ ID NO: 4040453 - DNA, 25 bp, Homo sapien
agagacactcaagaatggggatgac

SEQ ID NO: 4040454 - DNA, 25 bp, Homo sapien
ctggagggtgaaacgtccatggcac

SEQ ID NO: 4040455 - DNA, 25 bp, Homo sapien
cccctctgcagccaactgatgccat

SEQ ID NO: 4040456 - DNA, 25 bp, Homo sapien
tcccctctgcagccaactgatgcca

SEQ ID NO: 4040457 - DNA, 25 bp, Homo sapien
gtcccctctgcagccaactgatgcc

SEQ ID NO: 4040458 - DNA, 25 bp, Homo sapien
cacgggcgtttccatcagtgctggg

SEQ ID NO: 4040459 - DNA, 25 bp, Homo sapien
gggctggatccagtatttatgaaac

SEQ ID NO: 4040460 - DNA, 25 bp, Homo sapien
gcccaaagtaaacacagccccatct

SEQ ID NO: 4040461 - DNA, 25 bp, Homo sapien
tatgaaacccgtcacgcatagcttc

SEQ ID NO: 4040462 - DNA, 25 bp, Homo sapien
gacatacttgtgaagccaaaaatcc

SEQ ID NO: 4040463 - DNA, 25 bp, Homo sapien
tattccatggacatacttgtgaagc

SEQ ID NO: 4040464 - DNA, 25 bp, Homo sapien
cagaagtggagaacggacaaaatgg

SEQ ID NO: 4040465 - DNA, 25 bp, Homo sapien
gccaaaaatccagaagtggagaacg

SEQ ID NO: 4040466 - DNA, 25 bp, Homo sapien
taatctctatgtgaagagtcaggca

SEQ ID NO: 4040467 - DNA, 25 bp, Homo sapien
gccagagataaataggctgatgact

SEQ ID NO: 4040468 - DNA, 25 bp, Homo sapien
taaatatggtttctgaaggaggacc

SEQ ID NO: 4040469 - DNA, 25 bp, Homo sapien
ttaaaaagagattcatctcatcacc

SEQ ID NO: 4040470 - DNA, 25 bp, Homo sapien
gctgtaacctgctcatgggatctgt

SEQ ID NO: 4040471 - DNA, 25 bp, Homo sapien
tcaccaagctcttggtggtcattca

SEQ ID NO: 4040472 - DNA, 25 bp, Homo sapien
ggcctgaggcttcgtgaggaccaag

SEQ ID NO: 4040473 - DNA, 25 bp, Homo sapien
tccaggccttgattcagatgcatca

SEQ ID NO: 4040474 - DNA, 25 bp, Homo sapien
ttgttagggatgtcttcagctcttt

SEQ ID NO: 4040475 - DNA, 25 bp, Homo sapien
ggaattgttagggatgtcttcagct

SEQ ID NO: 4040476 - DNA, 25 bp, Homo sapien
ggatgtcttcagctctttctctgga

SEQ ID NO: 4040477 - DNA, 25 bp, Homo sapien
cggggaattgttagggatgtcttca

SEQ ID NO: 4040478 - DNA, 25 bp, Homo sapien
actcttaattgccactctcggaaag

SEQ ID NO: 4040479 - DNA, 25 bp, Homo sapien
tgcctactcttaattgccactctcg

SEQ ID NO: 4040480 - DNA, 25 bp, Homo sapien
taattgccactctcggaaagaagat

SEQ ID NO: 4040481 - DNA, 25 bp, Homo sapien
ctctcggaaagaagatatagaagga

SEQ ID NO: 4040482 - DNA, 25 bp, Homo sapien
tttgcaggcagggaccatgaccttt

SEQ ID NO: 4040483 - DNA, 25 bp, Homo sapien
tctctctttgcaggcagggaccatg

SEQ ID NO: 4040484 - DNA, 25 bp, Homo sapien
tgcaggcagggaccatgacctttcc

SEQ ID NO: 4040485 - DNA, 25 bp, Homo sapien
caggcagggaccatgacctttccat

SEQ ID NO: 4040486 - DNA, 25 bp, Homo sapien
gctcgcaacccagataatgagataa

SEQ ID NO: 4040487 - DNA, 25 bp, Homo sapien
tgagttgtccctaaggagctcgcaa

SEQ ID NO: 4040488 - DNA, 25 bp, Homo sapien
ccagagcctagtccagtgtctgagt

SEQ ID NO: 4040489 - DNA, 25 bp, Homo sapien
tagtccagtgtctgagttgtcccta

SEQ ID NO: 4040490 - DNA, 25 bp, Homo sapien
ttacattttatcagctgagatggaa

SEQ ID NO: 4040491 - DNA, 25 bp, Homo sapien
tggctcgtggccaaactaatctccc

SEQ ID NO: 4040492 - DNA, 25 bp, Homo sapien
caagcccacagcttacggccattgt

SEQ ID NO: 4040493 - DNA, 25 bp, Homo sapien
gcaatgggcttttatcagtatttct

SEQ ID NO: 4040494 - DNA, 25 bp, Homo sapien
caaaagaatgatgggctggaatcct

SEQ ID NO: 4040495 - DNA, 25 bp, Homo sapien
ggcaaaagaatgatgggctggaatc

SEQ ID NO: 4040496 - DNA, 25 bp, Homo sapien
ctggcaaaagaatgatgggctggaa

SEQ ID NO: 4040497 - DNA, 25 bp, Homo sapien
aaaagaatgatgggctggaatcctt

SEQ ID NO: 4040498 - DNA, 25 bp, Homo sapien
tccaacactgtgaggacaaacaagc

SEQ ID NO: 4040499 - DNA, 25 bp, Homo sapien
aatgactgtgaattaggctggatgc

SEQ ID NO: 4040500 - DNA, 25 bp, Homo sapien
gacagttccacgtgcttttttgaga

SEQ ID NO: 4040501 - DNA, 25 bp, Homo sapien
tccatgcacatgagacagttccacg

SEQ ID NO: 4040502 - DNA, 25 bp, Homo sapien
tggaggctggtcccggttatccgag

SEQ ID NO: 4040503 - DNA, 25 bp, Homo sapien
cgctttccgacaggtctccgctggg

SEQ ID NO: 4040504 - DNA, 25 bp, Homo sapien
tcccctgcagtctccgctttccgac

SEQ ID NO: 4040505 - DNA, 25 bp, Homo sapien
ttccgacaggtctccgctgggtctg

SEQ ID NO: 4040506 - DNA, 25 bp, Homo sapien
tttcataatctccaggcaattttcg

SEQ ID NO: 4040507 - DNA, 25 bp, Homo sapien
ctatgttgttacaaatttcataatc

SEQ ID NO: 4040508 - DNA, 25 bp, Homo sapien
cataatctccaggcaattttcgact

SEQ ID NO: 4040509 - DNA, 25 bp, Homo sapien
tgttgttacaaatttcataatctcc

SEQ ID NO: 4040510 - DNA, 25 bp, Homo sapien
aggccatgagggcttgtgacatatt

SEQ ID NO: 4040511 - DNA, 25 bp, Homo sapien
gacatattaacggtgcagcacaggt

SEQ ID NO: 4040512 - DNA, 25 bp, Homo sapien
ggagttttagccttacactggagga

SEQ ID NO: 4040513 - DNA, 25 bp, Homo sapien
tcccagcaagggaatagacgtttct

SEQ ID NO: 4040514 - DNA, 25 bp, Homo sapien
catctgggttacatatacttctagg

SEQ ID NO: 4040515 - DNA, 25 bp, Homo sapien
tcttcctatactgtatggagaaaca

SEQ ID NO: 4040516 - DNA, 25 bp, Homo sapien
ctaggtgtcttcctatactgtatgg

SEQ ID NO: 4040517 - DNA, 25 bp, Homo sapien
gggttacatatacttctaggtgtct

SEQ ID NO: 4040518 - DNA, 25 bp, Homo sapien
tatggcctagtcttgaaagtcacac

SEQ ID NO: 4040519 - DNA, 25 bp, Homo sapien
gcttctagggtggttcacttgcaca

SEQ ID NO: 4040520 - DNA, 25 bp, Homo sapien
tccaagagagaccatgagaccacag

SEQ ID NO: 4040521 - DNA, 25 bp, Homo sapien
gtgtccccacaacaaggcatatgct

SEQ ID NO: 4040522 - DNA, 25 bp, Homo sapien
cgtaagtcctagatttgcgtcgtga

SEQ ID NO: 4040523 - DNA, 25 bp, Homo sapien
gaatggcttgtctgcactctgaaag

SEQ ID NO: 4040524 - DNA, 25 bp, Homo sapien
catccgtatgaagagcgtaagtcct

SEQ ID NO: 4040525 - DNA, 25 bp, Homo sapien
catgtcatgagtcagaagagtgcag

SEQ ID NO: 4040526 - DNA, 25 bp, Homo sapien
cccgatatagagcaagaagtcaaca

SEQ ID NO: 4040527 - DNA, 25 bp, Homo sapien
agcacagtgcccgatatagagcaag

SEQ ID NO: 4040528 - DNA, 25 bp, Homo sapien
catactgtcctaaatgttgatggcg

SEQ ID NO: 4040529 - DNA, 25 bp, Homo sapien
gcgtgtatggtatctagcacagtgc

SEQ ID NO: 4040530 - DNA, 25 bp, Homo sapien
tgtgatcctgtgtggttcaatctga

SEQ ID NO: 4040531 - DNA, 25 bp, Homo sapien
tgtgtggttcaatctgatggaagcg

SEQ ID NO: 4040532 - DNA, 25 bp, Homo sapien
cctgtgtggttcaatctgatggaag

SEQ ID NO: 4040533 - DNA, 25 bp, Homo sapien
gatcctgtgtggttcaatctgatgg

SEQ ID NO: 4040534 - DNA, 25 bp, Homo sapien
tctaaagaacagagaggcgcatggc

SEQ ID NO: 4040535 - DNA, 25 bp, Homo sapien
tgagggcctcacactggtacacttg

SEQ ID NO: 4040536 - DNA, 25 bp, Homo sapien
ccacgaataagcatagccggcatta

SEQ ID NO: 4040537 - DNA, 25 bp, Homo sapien
cagggaagcccgtatctagtagaga

SEQ ID NO: 4040538 - DNA, 25 bp, Homo sapien
atttccacatatccatatgccaaac

SEQ ID NO: 4040539 - DNA, 25 bp, Homo sapien
tatccatatgccaaacaaatgtcat

SEQ ID NO: 4040540 - DNA, 25 bp, Homo sapien
cacatatccatatgccaaacaaatg

SEQ ID NO: 4040541 - DNA, 25 bp, Homo sapien
tccacatatccatatgccaaacaaa

SEQ ID NO: 4040542 - DNA, 25 bp, Homo sapien
caattaaagaacttaacatggccca

SEQ ID NO: 4040543 - DNA, 25 bp, Homo sapien
cctggaggcctgcttccacaatccc

SEQ ID NO: 4040544 - DNA, 25 bp, Homo sapien
gaggcctgcttccacaatcccaaag

SEQ ID NO: 4040545 - DNA, 25 bp, Homo sapien
agcctggaggcctgcttccacaatc

SEQ ID NO: 4040546 - DNA, 25 bp, Homo sapien
tggaggcctgcttccacaatcccaa

SEQ ID NO: 4040547 - DNA, 25 bp, Homo sapien
gaacgagtcgtattcaagtctcaac

SEQ ID NO: 4040548 - DNA, 25 bp, Homo sapien
ctttcctgtccaagatcaccacgaa

SEQ ID NO: 4040549 - DNA, 25 bp, Homo sapien
tattcaagtctcaacatggatctct

SEQ ID NO: 4040550 - DNA, 25 bp, Homo sapien
tcaccacgaacgagtcgtattcaag

SEQ ID NO: 4040551 - DNA, 25 bp, Homo sapien
caatgaactttgttagcagggttgg

SEQ ID NO: 4040552 - DNA, 25 bp, Homo sapien
gaaattgggatatggacatctctgg

SEQ ID NO: 4040553 - DNA, 25 bp, Homo sapien
gccagcaatgctcagtcttcgtgtt

SEQ ID NO: 4040554 - DNA, 25 bp, Homo sapien
tcagagacatatataggcgggatat

SEQ ID NO: 4040555 - DNA, 25 bp, Homo sapien
tcttccaagtgtctaaatgctgccc

SEQ ID NO: 4040556 - DNA, 25 bp, Homo sapien
tcttccaggccggagtcttgattgg

SEQ ID NO: 4040557 - DNA, 25 bp, Homo sapien
gaaaaacgtctctgacaggtgttct

SEQ ID NO: 4040558 - DNA, 25 bp, Homo sapien
catctccttgtagaaaaacgtctct

SEQ ID NO: 4040559 - DNA, 25 bp, Homo sapien
tatgattaaagagaccatctccttg

SEQ ID NO: 4040560 - DNA, 25 bp, Homo sapien
tccaagtccgcaggagcataaaagc

SEQ ID NO: 4040561 - DNA, 25 bp, Homo sapien
aattttgaagggcaggtcgaggcct

SEQ ID NO: 4040562 - DNA, 25 bp, Homo sapien
tgcaggtagggccaacgagaaatac

SEQ ID NO: 4040563 - DNA, 25 bp, Homo sapien
gaaatacagctgacagcaattgaag

SEQ ID NO: 4040564 - DNA, 25 bp, Homo sapien
taagtcactggtctaatatagccct

SEQ ID NO: 4040565 - DNA, 25 bp, Homo sapien
tacaagatgattccacaacgctttg

SEQ ID NO: 4040566 - DNA, 25 bp, Homo sapien
tagcctcttaaaattggatgcacat

SEQ ID NO: 4040567 - DNA, 25 bp, Homo sapien
tgcacatttagaaaaggctcttagc

SEQ ID NO: 4040568 - DNA, 25 bp, Homo sapien
tgaattcctaaaacatagaaagctg

SEQ ID NO: 4040569 - DNA, 25 bp, Homo sapien
gatgtgctccttcaagattcaagcc

SEQ ID NO: 4040570 - DNA, 25 bp, Homo sapien
caaaccatgtcccagttgatttccc

SEQ ID NO: 4040571 - DNA, 25 bp, Homo sapien
gggtctgaagctacagatggaaaag

SEQ ID NO: 4040572 - DNA, 25 bp, Homo sapien
tgacacatataagctgaatctccag

SEQ ID NO: 4040573 - DNA, 25 bp, Homo sapien
tccaggttgtgatgctgtgctatac

SEQ ID NO: 4040574 - DNA, 25 bp, Homo sapien
tgcatcaatgtcagtatccaggttg

SEQ ID NO: 4040575 - DNA, 25 bp, Homo sapien
aaatgatgccgggtgagtcaaaccc

SEQ ID NO: 4040576 - DNA, 25 bp, Homo sapien
acattcattcaatccaataaagaca

SEQ ID NO: 4040577 - DNA, 25 bp, Homo sapien
taaacattcattcaatccaataaag

SEQ ID NO: 4040578 - DNA, 25 bp, Homo sapien
cattcaatccaataaagacatttta

SEQ ID NO: 4040579 - DNA, 25 bp, Homo sapien
tcaggtataaacattcattcaatcc

SEQ ID NO: 4040580 - DNA, 25 bp, Homo sapien
atactaagcattttcagtaaaactg

SEQ ID NO: 4040581 - DNA, 25 bp, Homo sapien
tatatttggtgatactgtaaaatac

SEQ ID NO: 4040582 - DNA, 25 bp, Homo sapien
ctggcaatcaaatacagcttaacct

SEQ ID NO: 4040583 - DNA, 25 bp, Homo sapien
tcagtaaaactggcaatcaaataca

SEQ ID NO: 4040584 - DNA, 25 bp, Homo sapien
tatttaaaccactcgagcactttga

SEQ ID NO: 4040585 - DNA, 25 bp, Homo sapien
gattgaaacacatcacaggaaattt

SEQ ID NO: 4040586 - DNA, 25 bp, Homo sapien
tctgcgtgacaactgaggattttaa

SEQ ID NO: 4040587 - DNA, 25 bp, Homo sapien
aattggaaaagtattatagtctata

SEQ ID NO: 4040588 - DNA, 25 bp, Homo sapien
gaagtgcttcctctaactgcttacg

SEQ ID NO: 4040589 - DNA, 25 bp, Homo sapien
gaaatgttttagctaaccctaggca

SEQ ID NO: 4040590 - DNA, 25 bp, Homo sapien
tattacagcatacgaaatcacaggt

SEQ ID NO: 4040591 - DNA, 25 bp, Homo sapien
gagatcatctgtcacacccttaggc

SEQ ID NO: 4040592 - DNA, 25 bp, Homo sapien
tttcatttcaacatttccagtggca

SEQ ID NO: 4040593 - DNA, 25 bp, Homo sapien
tcatttcaacatttccagtggcatc

SEQ ID NO: 4040594 - DNA, 25 bp, Homo sapien
ttttcatttcaacatttccagtggc

SEQ ID NO: 4040595 - DNA, 25 bp, Homo sapien
atttttcatttcaacatttccagtg

SEQ ID NO: 4040596 - DNA, 25 bp, Homo sapien
ctcacaatgagtcatctgaattttc

SEQ ID NO: 4040597 - DNA, 25 bp, Homo sapien
gcactcacaatgagtcatctgaatt

SEQ ID NO: 4040598 - DNA, 25 bp, Homo sapien
gaactagcactcacaatgagtcatc

SEQ ID NO: 4040599 - DNA, 25 bp, Homo sapien
tagcactcacaatgagtcatctgaa

SEQ ID NO: 4040600 - DNA, 25 bp, Homo sapien
cagacaccttgatggactaaaaata

SEQ ID NO: 4040601 - DNA, 25 bp, Homo sapien
gaaagactttaccatgccccttgaa

SEQ ID NO: 4040602 - DNA, 25 bp, Homo sapien
aaattctatattcctaccagctggc

SEQ ID NO: 4040603 - DNA, 25 bp, Homo sapien
gttaaagaccgcatcaaatcagtag

SEQ ID NO: 4040604 - DNA, 25 bp, Homo sapien
tagccagtacagtagctccattatg

SEQ ID NO: 4040605 - DNA, 25 bp, Homo sapien
gtacagtagctccattatgaattgc

SEQ ID NO: 4040606 - DNA, 25 bp, Homo sapien
gccagtacagtagctccattatgaa

SEQ ID NO: 4040607 - DNA, 25 bp, Homo sapien
tccaatagccagtacagtagctcca

SEQ ID NO: 4040608 - DNA, 25 bp, Homo sapien
caaatgtattatggaagcatcacac

SEQ ID NO: 4040609 - DNA, 25 bp, Homo sapien
gcagaccagccttgggatgaatttc

SEQ ID NO: 4040610 - DNA, 25 bp, Homo sapien
catttggaggaaccccttagttcag

SEQ ID NO: 4040611 - DNA, 25 bp, Homo sapien
tcagaagtgaacttagctgacagca

SEQ ID NO: 4040612 - DNA, 25 bp, Homo sapien
taagataacgatgcacacctgtgtc

SEQ ID NO: 4040613 - DNA, 25 bp, Homo sapien
tatgcgaaactggatcggtgcagac

SEQ ID NO: 4040614 - DNA, 25 bp, Homo sapien
tgaagaacaagctctagggccatgt

SEQ ID NO: 4040615 - DNA, 25 bp, Homo sapien
cagcaaagcgatatgacagaagcaa

SEQ ID NO: 4040616 - DNA, 25 bp, Homo sapien
gaggtgacaaccacggcaacagaac

SEQ ID NO: 4040617 - DNA, 25 bp, Homo sapien
tgctaatcatgatcggccgttccct

SEQ ID NO: 4040618 - DNA, 25 bp, Homo sapien
gagtcaagacaccaaactaccgcta

SEQ ID NO: 4040619 - DNA, 25 bp, Homo sapien
cttaaatttggcgtagagcggaggt

SEQ ID NO: 4040620 - DNA, 25 bp, Homo sapien
caaaaagaagacagtacaagaaaag

SEQ ID NO: 4040621 - DNA, 25 bp, Homo sapien
ctgacaccaaaaagaagacagtaca

SEQ ID NO: 4040622 - DNA, 25 bp, Homo sapien
gacaccaaaaagaagacagtacaag

SEQ ID NO: 4040623 - DNA, 25 bp, Homo sapien
caccaaaaagaagacagtacaagaa

SEQ ID NO: 4040624 - DNA, 25 bp, Homo sapien
cctagcccacgggacgtctggtcgg

SEQ ID NO: 4040625 - DNA, 25 bp, Homo sapien
cgacgaagggaacaggcgtggacag

SEQ ID NO: 4040626 - DNA, 25 bp, Homo sapien
aagggctctactccggaaagccgtg

SEQ ID NO: 4040627 - DNA, 25 bp, Homo sapien
gaaagccgtgtcccggacgagagcc

SEQ ID NO: 4040628 - DNA, 25 bp, Homo sapien
actcgggcctactgcgagcccggga

SEQ ID NO: 4040629 - DNA, 25 bp, Homo sapien
taccgaccgttagcgccaggggctg

SEQ ID NO: 4040630 - DNA, 25 bp, Homo sapien
gacattggccggctggcagccacct

SEQ ID NO: 4040631 - DNA, 25 bp, Homo sapien
gacgctccctcgtggctggcgcgag

SEQ ID NO: 4040632 - DNA, 25 bp, Homo sapien
ctcggagaatgtagtctgaaccgct

SEQ ID NO: 4040633 - DNA, 25 bp, Homo sapien
ccaatcataggtgaaggaggtgtca

SEQ ID NO: 4040634 - DNA, 25 bp, Homo sapien
aggccagcgcccaatcataggtgaa

SEQ ID NO: 4040635 - DNA, 25 bp, Homo sapien
gaatgtagtctgaaccgctcaggcc

SEQ ID NO: 4040636 - DNA, 25 bp, Homo sapien
gaaggcgaggcggagacgtgcagac

SEQ ID NO: 4040637 - DNA, 25 bp, Homo sapien
tgcagacgtctgaggcctgtctctc

SEQ ID NO: 4040638 - DNA, 25 bp, Homo sapien
ggcgaggcggagacgtgcagacgtc

SEQ ID NO: 4040639 - DNA, 25 bp, Homo sapien
agacgtgcagacgtctgaggcctgt

SEQ ID NO: 4040640 - DNA, 25 bp, Homo sapien
gctgccggcgcagaggggcagtcat

SEQ ID NO: 4040641 - DNA, 25 bp, Homo sapien
tgctgccggcgcagaggggcagtca

SEQ ID NO: 4040642 - DNA, 25 bp, Homo sapien
ctgctgccggcgcagaggggcagtc

SEQ ID NO: 4040643 - DNA, 25 bp, Homo sapien
tctcctcgtacgtggtaagtgagcg

SEQ ID NO: 4040644 - DNA, 25 bp, Homo sapien
catttggtgtaaacgtaagctccgg

SEQ ID NO: 4040645 - DNA, 25 bp, Homo sapien
tcttgctcggatcgctgagctggcg

SEQ ID NO: 4040646 - DNA, 25 bp, Homo sapien
gttgctcgcaaaagagagccgcgtc

SEQ ID NO: 4040647 - DNA, 25 bp, Homo sapien
agcgtaccggaagaacgccacaagg

SEQ ID NO: 4040648 - DNA, 25 bp, Homo sapien
aggtgtccacctggttcgccaacgc

SEQ ID NO: 4040649 - DNA, 25 bp, Homo sapien
gagaataaaatgacgtggacgccgc

SEQ ID NO: 4040650 - DNA, 25 bp, Homo sapien
cattgacctggagaagaacgacgag

SEQ ID NO: 4040651 - DNA, 25 bp, Homo sapien
taaaccagaccgtgttgaaccgagc

SEQ ID NO: 4040652 - DNA, 25 bp, Homo sapien
tatcccggctacacgaactatggct

SEQ ID NO: 4040653 - DNA, 25 bp, Homo sapien
tgtccgacatttaacgcgggctgcg

SEQ ID NO: 4040654 - DNA, 25 bp, Homo sapien
aaaatgttgcggagccagtctcagc

SEQ ID NO: 4040655 - DNA, 25 bp, Homo sapien
gagctctccgcagccgtggcacgct

SEQ ID NO: 4040656 - DNA, 25 bp, Homo sapien
tgcaactccttgtcgacctgttttg

SEQ ID NO: 4040657 - DNA, 25 bp, Homo sapien
taatgaaggagcagcgcggtgctgg

SEQ ID NO: 4040658 - DNA, 25 bp, Homo sapien
tggccctgcccgctagatagggtcc

SEQ ID NO: 4040659 - DNA, 25 bp, Homo sapien
caggcgtcgtcttccacttcaattg

SEQ ID NO: 4040660 - DNA, 25 bp, Homo sapien
aagtctccacgcttgggtcatactg

SEQ ID NO: 4040661 - DNA, 25 bp, Homo sapien
aaaaagaccaggtgcgaccctccag

SEQ ID NO: 4040662 - DNA, 25 bp, Homo sapien
gacgcgagggccgtgaaaaagacca

SEQ ID NO: 4040663 - DNA, 25 bp, Homo sapien
tcccaacagcggacttctcccttgc

SEQ ID NO: 4040664 - DNA, 25 bp, Homo sapien
agatctcccaacagcggacttctcc

SEQ ID NO: 4040665 - DNA, 25 bp, Homo sapien
ttgccttcccaggacatcccgtgtt

SEQ ID NO: 4040666 - DNA, 25 bp, Homo sapien
tcccagatctcccaacagcggactt

SEQ ID NO: 4040667 - DNA, 25 bp, Homo sapien
tgtttgcacaaatgtttgcatcaat

SEQ ID NO: 4040668 - DNA, 25 bp, Homo sapien
catcaatctatttcatgtatatgac

SEQ ID NO: 4040669 - DNA, 25 bp, Homo sapien
tccctacctccattataaggtatgg

SEQ ID NO: 4040670 - DNA, 25 bp, Homo sapien
ttcattatctactttgatcctgaag

SEQ ID NO: 4040671 - DNA, 25 bp, Homo sapien
gatactggcttagccaggaccagca

SEQ ID NO: 4040672 - DNA, 25 bp, Homo sapien
tctccagaggtaagacttgcttgac

SEQ ID NO: 4040673 - DNA, 25 bp, Homo sapien
caaggtcacactgtgagatactggc

SEQ ID NO: 4040674 - DNA, 25 bp, Homo sapien
aactaggaatttctgccccaagcca

SEQ ID NO: 4040675 - DNA, 25 bp, Homo sapien
tcagccgacgaagaagacacatatt

SEQ ID NO: 4040676 - DNA, 25 bp, Homo sapien
cagccgacgaagaagacacatattt

SEQ ID NO: 4040677 - DNA, 25 bp, Homo sapien
ctggctagggtcacaagttctggga

SEQ ID NO: 4040678 - DNA, 25 bp, Homo sapien
ttctgcacgggtctggctagggtca

SEQ ID NO: 4040679 - DNA, 25 bp, Homo sapien
tctgcaggagatgctactttcacca

SEQ ID NO: 4040680 - DNA, 25 bp, Homo sapien
gaacatgcatctgtacttccgtgat

SEQ ID NO: 4040681 - DNA, 25 bp, Homo sapien
aaaggggtgctttcttggctatgcc

SEQ ID NO: 4040682 - DNA, 25 bp, Homo sapien
tggctatgcctggttttactgtccc

SEQ ID NO: 4040683 - DNA, 25 bp, Homo sapien
gctttcttggctatgcctggtttta

SEQ ID NO: 4040684 - DNA, 25 bp, Homo sapien
gggtgctttcttggctatgcctggt

SEQ ID NO: 4040685 - DNA, 25 bp, Homo sapien
gagaggcgctgctgaaaactccgca

SEQ ID NO: 4040686 - DNA, 25 bp, Homo sapien
ccgagtcagggcggcccggctgggc

SEQ ID NO: 4040687 - DNA, 25 bp, Homo sapien
agaggcgctgctgaaaactccgcat

SEQ ID NO: 4040688 - DNA, 25 bp, Homo sapien
cgggcagccacgtctccacgtggat

SEQ ID NO: 4040689 - DNA, 25 bp, Homo sapien
cagccacgtctccacgtggataagc

SEQ ID NO: 4040690 - DNA, 25 bp, Homo sapien
tttcctttggtgcaaggctgtccct

SEQ ID NO: 4040691 - DNA, 25 bp, Homo sapien
agtttcctttggtgcaaggctgtcc

SEQ ID NO: 4040692 - DNA, 25 bp, Homo sapien
ttttttctgcagactgggccagagc

SEQ ID NO: 4040693 - DNA, 25 bp, Homo sapien
gcttttttctgcagactgggccaga

SEQ ID NO: 4040694 - DNA, 25 bp, Homo sapien
tttttctgcagactgggccagagca

SEQ ID NO: 4040695 - DNA, 25 bp, Homo sapien
ttttctgcagactgggccagagcaa

SEQ ID NO: 4040696 - DNA, 25 bp, Homo sapien
ttttccagcccatccaattggttcc

SEQ ID NO: 4040697 - DNA, 25 bp, Homo sapien
gtgaacctcttcatacagtccccag

SEQ ID NO: 4040698 - DNA, 25 bp, Homo sapien
gttcctgaagtgagtgtgaacctct

SEQ ID NO: 4040699 - DNA, 25 bp, Homo sapien
cagtccccagctggcaatgctcagt

SEQ ID NO: 4040700 - DNA, 25 bp, Homo sapien
tatttggaggccggcattgcttgaa

SEQ ID NO: 4040701 - DNA, 25 bp, Homo sapien
gatatttggaggccggcattgcttg

SEQ ID NO: 4040702 - DNA, 25 bp, Homo sapien
agagatatttggaggccggcattgc

SEQ ID NO: 4040703 - DNA, 25 bp, Homo sapien
gagatatttggaggccggcattgct

SEQ ID NO: 4040704 - DNA, 25 bp, Homo sapien
gacagcgaggaccaagcctcagcct

SEQ ID NO: 4040705 - DNA, 25 bp, Homo sapien
acagcgaggaccaagcctcagcctt

SEQ ID NO: 4040706 - DNA, 25 bp, Homo sapien
ccagacagcgaggaccaagcctcag

SEQ ID NO: 4040707 - DNA, 25 bp, Homo sapien
agacagcgaggaccaagcctcagcc

SEQ ID NO: 4040708 - DNA, 25 bp, Homo sapien
taggaccagtggctgaagcagtact

SEQ ID NO: 4040709 - DNA, 25 bp, Homo sapien
gaccagtggctgaagcagtactcaa

SEQ ID NO: 4040710 - DNA, 25 bp, Homo sapien
cagtggctgaagcagtactcaaaat

SEQ ID NO: 4040711 - DNA, 25 bp, Homo sapien
tggctgaagcagtactcaaaatagg

SEQ ID NO: 4040712 - DNA, 25 bp, Homo sapien
tgcggcatggcccgctggcttgtcc

SEQ ID NO: 4040713 - DNA, 25 bp, Homo sapien
agcatcaccgggcagtgtgcgatgc

SEQ ID NO: 4040714 - DNA, 25 bp, Homo sapien
ggcagtgtgcgatgcggcatggccc

SEQ ID NO: 4040715 - DNA, 25 bp, Homo sapien
gcttgtccgggaatgtggcgtcccc

SEQ ID NO: 4040716 - DNA, 25 bp, Homo sapien
cagaggctcgggaaaatggggcgtt

SEQ ID NO: 4040717 - DNA, 25 bp, Homo sapien
agaggaggaacccaggcagagggca

SEQ ID NO: 4040718 - DNA, 25 bp, Homo sapien
agggcagaggctcgggaaaatgggg

SEQ ID NO: 4040719 - DNA, 25 bp, Homo sapien
agagggcagaggctcgggaaaatgg

SEQ ID NO: 4040720 - DNA, 25 bp, Homo sapien
cccagccttgactctagcatgctga

SEQ ID NO: 4040721 - DNA, 25 bp, Homo sapien
ctgagattggtgtacttggtacagt

SEQ ID NO: 4040722 - DNA, 25 bp, Homo sapien
gattggtgtacttggtacagtacca

SEQ ID NO: 4040723 - DNA, 25 bp, Homo sapien
ggtgtacttggtacagtaccagacc

SEQ ID NO: 4040724 - DNA, 25 bp, Homo sapien
ggttattgagatggcagcttcaatc

SEQ ID NO: 4040725 - DNA, 25 bp, Homo sapien
tattgagatggcagcttcaatcagc

SEQ ID NO: 4040726 - DNA, 25 bp, Homo sapien
ggtggttattgagatggcagcttca

SEQ ID NO: 4040727 - DNA, 25 bp, Homo sapien
ttgagatggcagcttcaatcagcag

SEQ ID NO: 4040728 - DNA, 25 bp, Homo sapien
tgctgcctttgatgcgagccagaac

SEQ ID NO: 4040729 - DNA, 25 bp, Homo sapien
tgaatgctgcctttgatgcgagcca

SEQ ID NO: 4040730 - DNA, 25 bp, Homo sapien
cctttgatgcgagccagaactgcct

SEQ ID NO: 4040731 - DNA, 25 bp, Homo sapien
tgcctttgatgcgagccagaactgc

SEQ ID NO: 4040732 - DNA, 25 bp, Homo sapien
ctctcaaaggatatttgctaaattt

SEQ ID NO: 4040733 - DNA, 25 bp, Homo sapien
cctctcaaaggatatttgctaaatt

SEQ ID NO: 4040734 - DNA, 25 bp, Homo sapien
aaggatatttgctaaatttgtccat

SEQ ID NO: 4040735 - DNA, 25 bp, Homo sapien
tcaaaggatatttgctaaatttgtc

SEQ ID NO: 4040736 - DNA, 25 bp, Homo sapien
gggtgtccacaaatcgagtgataga

SEQ ID NO: 4040737 - DNA, 25 bp, Homo sapien
tggggccttgaacatggcttctcca

SEQ ID NO: 4040738 - DNA, 25 bp, Homo sapien
gagtgatagagaatcttgacactgg

SEQ ID NO: 4040739 - DNA, 25 bp, Homo sapien
gagaatcttgacactggggccttga

SEQ ID NO: 4040740 - DNA, 25 bp, Homo sapien
ggcccatcacttctgagtgcacacg

SEQ ID NO: 4040741 - DNA, 25 bp, Homo sapien
gagtgcacacgcacacctgtgttcc

SEQ ID NO: 4040742 - DNA, 25 bp, Homo sapien
ctggcccatcacttctgagtgcaca

SEQ ID NO: 4040743 - DNA, 25 bp, Homo sapien
gtgcacacgcacacctgtgttccat

SEQ ID NO: 4040744 - DNA, 25 bp, Homo sapien
ctcttggctttcaatgcaggtctgc

SEQ ID NO: 4040745 - DNA, 25 bp, Homo sapien
accatcccactattcacaggctgct

SEQ ID NO: 4040746 - DNA, 25 bp, Homo sapien
cccattctaaatcagagctgttgga

SEQ ID NO: 4040747 - DNA, 25 bp, Homo sapien
agagcatgagccgtgagaggtagtg

SEQ ID NO: 4040748 - DNA, 25 bp, Homo sapien
atctcggcgcggcggtgaataattc

SEQ ID NO: 4040749 - DNA, 25 bp, Homo sapien
aaaggcagatttccgcgccgggcac

SEQ ID NO: 4040750 - DNA, 25 bp, Homo sapien
ccttccgctgcggtgttttatctcg

SEQ ID NO: 4040751 - DNA, 25 bp, Homo sapien
cccaggctcgtaatcaaaaggcaga

SEQ ID NO: 4040752 - DNA, 25 bp, Homo sapien
gtgtaagcaccttttatcaatctat

SEQ ID NO: 4040753 - DNA, 25 bp, Homo sapien
gaggactctgcaagtagggagttcc

SEQ ID NO: 4040754 - DNA, 25 bp, Homo sapien
ccattgttggaggtgtgtaagcacc

SEQ ID NO: 4040755 - DNA, 25 bp, Homo sapien
catcatcttggtctgaaatcttctc

SEQ ID NO: 4040756 - DNA, 25 bp, Homo sapien
tgtcccctcttggatacaaaggacc

SEQ ID NO: 4040757 - DNA, 25 bp, Homo sapien
tcttggatacaaaggaccactttgg

SEQ ID NO: 4040758 - DNA, 25 bp, Homo sapien
tgtctgtcccctcttggatacaaag

SEQ ID NO: 4040759 - DNA, 25 bp, Homo sapien
ccctcttggatacaaaggaccactt

SEQ ID NO: 4040760 - DNA, 25 bp, Homo sapien
agcacgttgcaggtggtactcgtta

SEQ ID NO: 4040761 - DNA, 25 bp, Homo sapien
cgttgcaggtggtactcgttaccat

SEQ ID NO: 4040762 - DNA, 25 bp, Homo sapien
gtggtactcgttaccatcttgtgag

SEQ ID NO: 4040763 - DNA, 25 bp, Homo sapien
catctgtacaatgagcacgttgcag

SEQ ID NO: 4040764 - DNA, 25 bp, Homo sapien
aggtatgtgttcataaaacaaaggc

SEQ ID NO: 4040765 - DNA, 25 bp, Homo sapien
gtataggtatgtgttcataaaacaa

SEQ ID NO: 4040766 - DNA, 25 bp, Homo sapien
ctgtgtgtccgggccagagaagatg

SEQ ID NO: 4040767 - DNA, 25 bp, Homo sapien
aagatgtgtctgtcagaagggtcag

SEQ ID NO: 4040768 - DNA, 25 bp, Homo sapien
gcttctcgggcgtcttggattcctt

SEQ ID NO: 4040769 - DNA, 25 bp, Homo sapien
aattaggaaggtcggtggcttctcg

SEQ ID NO: 4040770 - DNA, 25 bp, Homo sapien
taattaggaaggtcggtggcttctc

SEQ ID NO: 4040771 - DNA, 25 bp, Homo sapien
ctcgggcgtcttggattcctttaat

SEQ ID NO: 4040772 - DNA, 25 bp, Homo sapien
tgcgcagcatctgcggctcccctgg

SEQ ID NO: 4040773 - DNA, 25 bp, Homo sapien
cagggaaggccccaattcattggct

SEQ ID NO: 4040774 - DNA, 25 bp, Homo sapien
cccctccactctcttggctgaccag

SEQ ID NO: 4040775 - DNA, 25 bp, Homo sapien
cctccactctcttggctgaccaggg

SEQ ID NO: 4040776 - DNA, 25 bp, Homo sapien
tcatacgatgtccacatctgatcct

SEQ ID NO: 4040777 - DNA, 25 bp, Homo sapien
tggtcatacgatgtccacatctgat

SEQ ID NO: 4040778 - DNA, 25 bp, Homo sapien
cacatctggtcatacgatgtccaca

SEQ ID NO: 4040779 - DNA, 25 bp, Homo sapien
tcacatctggtcatacgatgtccac

SEQ ID NO: 4040780 - DNA, 25 bp, Homo sapien
gtgagaatggccttggatgatagaa

SEQ ID NO: 4040781 - DNA, 25 bp, Homo sapien
tcctggtagccttggtgagggcagt

SEQ ID NO: 4040782 - DNA, 25 bp, Homo sapien
gatgatagaaagaacacctcttcca

SEQ ID NO: 4040783 - DNA, 25 bp, Homo sapien
agtttcactgcggtattgactggag

SEQ ID NO: 4040784 - DNA, 25 bp, Homo sapien
ctttggttccaggaagtgttgtggc

SEQ ID NO: 4040785 - DNA, 25 bp, Homo sapien
agattggggcccgttgtctgccgtc

SEQ ID NO: 4040786 - DNA, 25 bp, Homo sapien
cgttgtctgccgtctgctgttcttc

SEQ ID NO: 4040787 - DNA, 25 bp, Homo sapien
aggaagtgttgtggctgtgagggca

SEQ ID NO: 4040788 - DNA, 25 bp, Homo sapien
ctgtaagccctggttgcttcaggga

SEQ ID NO: 4040789 - DNA, 25 bp, Homo sapien
gattggcaagtctgaggatccctgg

SEQ ID NO: 4040790 - DNA, 25 bp, Homo sapien
cttcagggaataccccaaaatcatg

SEQ ID NO: 4040791 - DNA, 25 bp, Homo sapien
tatcagtgttttgattggcaagtct

SEQ ID NO: 4040792 - DNA, 25 bp, Homo sapien
gattggaggcagttccatctggctt

SEQ ID NO: 4040793 - DNA, 25 bp, Homo sapien
gaagtagattggaggcagttccatc

SEQ ID NO: 4040794 - DNA, 25 bp, Homo sapien
gtagattggaggcagttccatctgg

SEQ ID NO: 4040795 - DNA, 25 bp, Homo sapien
tggaggcagttccatctggcttgtt

SEQ ID NO: 4040796 - DNA, 25 bp, Homo sapien
gggtcttagttgtcacactgaattg

SEQ ID NO: 4040797 - DNA, 25 bp, Homo sapien
tgccctgggtcttagttgtcacact

SEQ ID NO: 4040798 - DNA, 25 bp, Homo sapien
ccctgggtcttagttgtcacactga

SEQ ID NO: 4040799 - DNA, 25 bp, Homo sapien
ctgggtcttagttgtcacactgaat

SEQ ID NO: 4040800 - DNA, 25 bp, Homo sapien
caggtgcaggcgtgcaggctcaggc

SEQ ID NO: 4040801 - DNA, 25 bp, Homo sapien
caggcgtgcaggctcaggctgatac

SEQ ID NO: 4040802 - DNA, 25 bp, Homo sapien
tggcaggtgcaggcgtgcaggctca

SEQ ID NO: 4040803 - DNA, 25 bp, Homo sapien
gtgcaggcgtgcaggctcaggctga

SEQ ID NO: 4040804 - DNA, 25 bp, Homo sapien
gactcctgcacctgttgctcaggca

SEQ ID NO: 4040805 - DNA, 25 bp, Homo sapien
catggctgactcctgcacctgttgc

SEQ ID NO: 4040806 - DNA, 25 bp, Homo sapien
ggctgactcctgcacctgttgctca

SEQ ID NO: 4040807 - DNA, 25 bp, Homo sapien
ctgactcctgcacctgttgctcagg

SEQ ID NO: 4040808 - DNA, 25 bp, Homo sapien
tctggctggtccattgctcaatgca

SEQ ID NO: 4040809 - DNA, 25 bp, Homo sapien
tcctgagatggcacatgttcttgga

SEQ ID NO: 4040810 - DNA, 25 bp, Homo sapien
tccggactaactggtgggcaccttc

SEQ ID NO: 4040811 - DNA, 25 bp, Homo sapien
taaatgtagctgatgaaggtcctga

SEQ ID NO: 4040812 - DNA, 25 bp, Homo sapien
aagtgtagtgactggtataatatct

SEQ ID NO: 4040813 - DNA, 25 bp, Homo sapien
catcctcaaagtgtagtgactggta

SEQ ID NO: 4040814 - DNA, 25 bp, Homo sapien
tcaagctttgccacttccatcatca

SEQ ID NO: 4040815 - DNA, 25 bp, Homo sapien
atcatcattggcattcaggtgccca

SEQ ID NO: 4040816 - DNA, 25 bp, Homo sapien
agctggctagcctggcggccaccag

SEQ ID NO: 4040817 - DNA, 25 bp, Homo sapien
tttttcttgtcaaaggagctggcta

SEQ ID NO: 4040818 - DNA, 25 bp, Homo sapien
ccaccaggaccatgcaataagcttt

SEQ ID NO: 4040819 - DNA, 25 bp, Homo sapien
gcagaaattgcctctccagttcaaa

SEQ ID NO: 4040820 - DNA, 25 bp, Homo sapien
gcagctgcagattcagagagtcatc

SEQ ID NO: 4040821 - DNA, 25 bp, Homo sapien
ctgcagattcagagagtcatcagcc

SEQ ID NO: 4040822 - DNA, 25 bp, Homo sapien
gcagattcagagagtcatcagccat

SEQ ID NO: 4040823 - DNA, 25 bp, Homo sapien
gcacatcagcagctgcagattcaga

SEQ ID NO: 4040824 - DNA, 25 bp, Homo sapien
aactgtggccttctgggagcagaga

SEQ ID NO: 4040825 - DNA, 25 bp, Homo sapien
gatgaagagcctctgccatgaacca

SEQ ID NO: 4040826 - DNA, 25 bp, Homo sapien
tctttgttggtgtcagcaatcttcc

SEQ ID NO: 4040827 - DNA, 25 bp, Homo sapien
ggtgtcagcaatcttccagaggaag

SEQ ID NO: 4040828 - DNA, 25 bp, Homo sapien
tgttggtgtcagcaatcttccagag

SEQ ID NO: 4040829 - DNA, 25 bp, Homo sapien
ctagaatagtatatcctcgtaggtc

SEQ ID NO: 4040830 - DNA, 25 bp, Homo sapien
cctcgtaggtcctggggtattctgg

SEQ ID NO: 4040831 - DNA, 25 bp, Homo sapien
ggtcctggggtattctggctgcatc

SEQ ID NO: 4040832 - DNA, 25 bp, Homo sapien
tagaatagtatatcctcgtaggtcc

SEQ ID NO: 4040833 - DNA, 25 bp, Homo sapien
cacgtgttgcagaaccctgttaggg

SEQ ID NO: 4040834 - DNA, 25 bp, Homo sapien
cgtgttgcagaaccctgttagggtt

SEQ ID NO: 4040835 - DNA, 25 bp, Homo sapien
acgtgttgcagaaccctgttagggt

SEQ ID NO: 4040836 - DNA, 25 bp, Homo sapien
tgttgcagaaccctgttagggtttg

SEQ ID NO: 4040837 - DNA, 25 bp, Homo sapien
gagcctcaagagagctcatcagcat

SEQ ID NO: 4040838 - DNA, 25 bp, Homo sapien
gggcacagagcctcaagagagctca

SEQ ID NO: 4040839 - DNA, 25 bp, Homo sapien
cagagcctcaagagagctcatcagc

SEQ ID NO: 4040840 - DNA, 25 bp, Homo sapien
cacagagcctcaagagagctcatca

SEQ ID NO: 4040841 - DNA, 25 bp, Homo sapien
gctcaatacagtccacatttccagc

SEQ ID NO: 4040842 - DNA, 25 bp, Homo sapien
caatacagtccacatttccagccca

SEQ ID NO: 4040843 - DNA, 25 bp, Homo sapien
ggctcaatacagtccacatttccag

SEQ ID NO: 4040844 - DNA, 25 bp, Homo sapien
tcaatacagtccacatttccagccc

SEQ ID NO: 4040845 - DNA, 25 bp, Homo sapien
gcatagcaaatctactctgcactcg

SEQ ID NO: 4040846 - DNA, 25 bp, Homo sapien
aggcacaattgctgggcgctgggct

SEQ ID NO: 4040847 - DNA, 25 bp, Homo sapien
gaggctgttgattagaggcacaatt

SEQ ID NO: 4040848 - DNA, 25 bp, Homo sapien
gctaggcattcgttgtcaagcctgg

SEQ ID NO: 4040849 - DNA, 25 bp, Homo sapien
gaccttggcttcctttccagaaatg

SEQ ID NO: 4040850 - DNA, 25 bp, Homo sapien
tggcttcctttccagaaatgtccaa

SEQ ID NO: 4040851 - DNA, 25 bp, Homo sapien
tccagaaatgtccaacagttcacat

SEQ ID NO: 4040852 - DNA, 25 bp, Homo sapien
tgtccaacagttcacatttaattac

SEQ ID NO: 4040853 - DNA, 25 bp, Homo sapien
tttagacatcattttagcgcatatt

SEQ ID NO: 4040854 - DNA, 25 bp, Homo sapien
atcattttagcgcatattggctgca

SEQ ID NO: 4040855 - DNA, 25 bp, Homo sapien
gacatcattttagcgcatattggct

SEQ ID NO: 4040856 - DNA, 25 bp, Homo sapien
cattttagcgcatattggctgcaat

SEQ ID NO: 4040857 - DNA, 25 bp, Homo sapien
taataaattcatgagcgggtgccag

SEQ ID NO: 4040858 - DNA, 25 bp, Homo sapien
gaagtgctcatctcggcagcgctaa

SEQ ID NO: 4040859 - DNA, 25 bp, Homo sapien
gcttgccattaggagtgaagtgctc

SEQ ID NO: 4040860 - DNA, 25 bp, Homo sapien
gagcagggcccctggtgataaatca

SEQ ID NO: 4040861 - DNA, 25 bp, Homo sapien
ctggagcgctgcattcgacgccttc

SEQ ID NO: 4040862 - DNA, 25 bp, Homo sapien
tctggagcgctgcattcgacgcctt

SEQ ID NO: 4040863 - DNA, 25 bp, Homo sapien
tggagcgctgcattcgacgccttcc

SEQ ID NO: 4040864 - DNA, 25 bp, Homo sapien
gagcgctgcattcgacgccttccat

SEQ ID NO: 4040865 - DNA, 25 bp, Homo sapien
tgaggggtgtttgcctttaaggagc

SEQ ID NO: 4040866 - DNA, 25 bp, Homo sapien
ggtaaagttttgttgacattgagga

SEQ ID NO: 4040867 - DNA, 25 bp, Homo sapien
tggtaaagttttgttgacattgagg

SEQ ID NO: 4040868 - DNA, 25 bp, Homo sapien
aaagttttgttgacattgaggaaag

SEQ ID NO: 4040869 - DNA, 25 bp, Homo sapien
gagcaaagatattgtttttgcagat

SEQ ID NO: 4040870 - DNA, 25 bp, Homo sapien
tcagaacttgagaggagcaaagata

SEQ ID NO: 4040871 - DNA, 25 bp, Homo sapien
gcaaagatattgtttttgcagatga

SEQ ID NO: 4040872 - DNA, 25 bp, Homo sapien
aaagatattgtttttgcagatgaca

SEQ ID NO: 4040873 - DNA, 25 bp, Homo sapien
aagtcaagctgcagttggaaccttc

SEQ ID NO: 4040874 - DNA, 25 bp, Homo sapien
ctgaagtcaagctgcagttggaacc

SEQ ID NO: 4040875 - DNA, 25 bp, Homo sapien
tgaagtcaagctgcagttggaacct

SEQ ID NO: 4040876 - DNA, 25 bp, Homo sapien
gaagtcaagctgcagttggaacctt

SEQ ID NO: 4040877 - DNA, 25 bp, Homo sapien
tatggacacaaacgtagcaatctgg

SEQ ID NO: 4040878 - DNA, 25 bp, Homo sapien
gtagcaatgaagtaccagggcccag

SEQ ID NO: 4040879 - DNA, 25 bp, Homo sapien
tccagtgactaactgcaaggtggcg

SEQ ID NO: 4040880 - DNA, 25 bp, Homo sapien
gcctcaggagggtttcaagtccatt

SEQ ID NO: 4040881 - DNA, 25 bp, Homo sapien
tcttagcttttaggcagctgcacca

SEQ ID NO: 4040882 - DNA, 25 bp, Homo sapien
ccatgaccccttcttagcttttagg

SEQ ID NO: 4040883 - DNA, 25 bp, Homo sapien
agctgcaccatgtggcatccattcc

SEQ ID NO: 4040884 - DNA, 25 bp, Homo sapien
tggtatttcctgttaccccatgacc

SEQ ID NO: 4040885 - DNA, 25 bp, Homo sapien
tgaccctgacactcgagcttgcagc

SEQ ID NO: 4040886 - DNA, 25 bp, Homo sapien
tggcaacttcgctgctgaggagaat

SEQ ID NO: 4040887 - DNA, 25 bp, Homo sapien
gcttctggataggattccttcccag

SEQ ID NO: 4040888 - DNA, 25 bp, Homo sapien
aatacagatctgttcacgtggcaac

SEQ ID NO: 4040889 - DNA, 25 bp, Homo sapien
tcagtggccgcttccctccatgtgg

SEQ ID NO: 4040890 - DNA, 25 bp, Homo sapien
tttctaatcagtggccgcttccctc

SEQ ID NO: 4040891 - DNA, 25 bp, Homo sapien
ctttcagttgtgtggctcctccatc

SEQ ID NO: 4040892 - DNA, 25 bp, Homo sapien
atgtttctaatcagtggccgcttcc

SEQ ID NO: 4040893 - DNA, 25 bp, Homo sapien
tgttctcaggtgcagtctcattact

SEQ ID NO: 4040894 - DNA, 25 bp, Homo sapien
acacctgatggacattacacaccgc

SEQ ID NO: 4040895 - DNA, 25 bp, Homo sapien
ggacattacacaccgcagcctagga

SEQ ID NO: 4040896 - DNA, 25 bp, Homo sapien
ctgatcatcactggagttttgagat

SEQ ID NO: 4040897 - DNA, 25 bp, Homo sapien
catgttctgatatttccatgtggat

SEQ ID NO: 4040898 - DNA, 25 bp, Homo sapien
gccctttaagcaatgtaaaactcca

SEQ ID NO: 4040899 - DNA, 25 bp, Homo sapien
attaaacaagtgaattgcattcagg

SEQ ID NO: 4040900 - DNA, 25 bp, Homo sapien
taagcaatgtaaaactccatattga

SEQ ID NO: 4040901 - DNA, 25 bp, Homo sapien
caagatgtaaaacaccaacaatagc

SEQ ID NO: 4040902 - DNA, 25 bp, Homo sapien
aacagtggcaagatgtaaaacacca

SEQ ID NO: 4040903 - DNA, 25 bp, Homo sapien
ttggaagttgacaagggcaacagtg

SEQ ID NO: 4040904 - DNA, 25 bp, Homo sapien
gcttcatgcccttggaagttgacaa

SEQ ID NO: 4040905 - DNA, 25 bp, Homo sapien
ccaaagcaaaagctaccttctctgt

SEQ ID NO: 4040906 - DNA, 25 bp, Homo sapien
agcaaaagctaccttctctgtgaac

SEQ ID NO: 4040907 - DNA, 25 bp, Homo sapien
aagcaaaagctaccttctctgtgaa

SEQ ID NO: 4040908 - DNA, 25 bp, Homo sapien
aaagcaaaagctaccttctctgtga

SEQ ID NO: 4040909 - DNA, 25 bp, Homo sapien
acggtgccagcacgttcagcatctg

SEQ ID NO: 4040910 - DNA, 25 bp, Homo sapien
tccacggtgccagcacgttcagcat

SEQ ID NO: 4040911 - DNA, 25 bp, Homo sapien
ggtgccagcacgttcagcatctggt

SEQ ID NO: 4040912 - DNA, 25 bp, Homo sapien
gtgccagcacgttcagcatctggtg

SEQ ID NO: 4040913 - DNA, 25 bp, Homo sapien
caagtaggccataaactcctcagtg

SEQ ID NO: 4040914 - DNA, 25 bp, Homo sapien
tactctgcgccaactcaagtaggcc

SEQ ID NO: 4040915 - DNA, 25 bp, Homo sapien
ccatagcaggtttgtcccgggatcc

SEQ ID NO: 4040916 - DNA, 25 bp, Homo sapien
tgattaatggactgagtgcgtggcc

SEQ ID NO: 4040917 - DNA, 25 bp, Homo sapien
cattaaagtgattgtatccaatata

SEQ ID NO: 4040918 - DNA, 25 bp, Homo sapien
taaagtgattgtatccaatatatca

SEQ ID NO: 4040919 - DNA, 25 bp, Homo sapien
ttcattaaagtgattgtatccaata

SEQ ID NO: 4040920 - DNA, 25 bp, Homo sapien
aagtgattgtatccaatatatcaaa

SEQ ID NO: 4040921 - DNA, 25 bp, Homo sapien
tttagccccaatagctttgttgagc

SEQ ID NO: 4040922 - DNA, 25 bp, Homo sapien
catggatgtggtatgggatgttcct

SEQ ID NO: 4040923 - DNA, 25 bp, Homo sapien
tttgttgagctcagtatcagtgcac

SEQ ID NO: 4040924 - DNA, 25 bp, Homo sapien
ttttaaagtgcccaagaggctcact

SEQ ID NO: 4040925 - DNA, 25 bp, Homo sapien
ggactgggctgcgacccctcttctt

SEQ ID NO: 4040926 - DNA, 25 bp, Homo sapien
gaaggtgattgtgcattcctccagg

SEQ ID NO: 4040927 - DNA, 25 bp, Homo sapien
actgggctgcgacccctcttcttgg

SEQ ID NO: 4040928 - DNA, 25 bp, Homo sapien
tccaaatgtgactgaaggtgattgt

SEQ ID NO: 4040929 - DNA, 25 bp, Homo sapien
cacagcttgagcagtaagatggtat

SEQ ID NO: 4040930 - DNA, 25 bp, Homo sapien
aagatggtattgattgtgcaggtgc

SEQ ID NO: 4040931 - DNA, 25 bp, Homo sapien
caggtgccagaggatgcaaatgtcc

SEQ ID NO: 4040932 - DNA, 25 bp, Homo sapien
catcatctggactggcgacaagccg

SEQ ID NO: 4040933 - DNA, 25 bp, Homo sapien
tctccctgtcgacatgctgtttcct

SEQ ID NO: 4040934 - DNA, 25 bp, Homo sapien
caaagcaggcctcaatacctggggg

SEQ ID NO: 4040935 - DNA, 25 bp, Homo sapien
caatacctgggggagactcatgtct

SEQ ID NO: 4040936 - DNA, 25 bp, Homo sapien
gggagaggacacactcgatcttcag

SEQ ID NO: 4040937 - DNA, 25 bp, Homo sapien
gaagggcactagagaacacacaaaa

SEQ ID NO: 4040938 - DNA, 25 bp, Homo sapien
tgttcctgtcctttaaggccctgaa

SEQ ID NO: 4040939 - DNA, 25 bp, Homo sapien
agctcagtttcctcgtggcttcctg

SEQ ID NO: 4040940 - DNA, 25 bp, Homo sapien
gagcaatttggttcctaagctcagt

SEQ ID NO: 4040941 - DNA, 25 bp, Homo sapien
ggctggcatccactccaactggatg

SEQ ID NO: 4040942 - DNA, 25 bp, Homo sapien
gcatccactccaactggatgatgct

SEQ ID NO: 4040943 - DNA, 25 bp, Homo sapien
ttttcggctggcatccactccaact

SEQ ID NO: 4040944 - DNA, 25 bp, Homo sapien
tcggctggcatccactccaactgga

SEQ ID NO: 4040945 - DNA, 25 bp, Homo sapien
ggctgcagcacatccgtaatcctta

SEQ ID NO: 4040946 - DNA, 25 bp, Homo sapien
agcccggcggactagctcactatct

SEQ ID NO: 4040947 - DNA, 25 bp, Homo sapien
acagccgcgaatccaaagctgccgg

SEQ ID NO: 4040948 - DNA, 25 bp, Homo sapien
aagctgccggcctctcgtttctaag

SEQ ID NO: 4040949 - DNA, 25 bp, Homo sapien
tctgctctggacaaaagaccgagca

SEQ ID NO: 4040950 - DNA, 25 bp, Homo sapien
aaaagaccgagcagacacaatcatc

SEQ ID NO: 4040951 - DNA, 25 bp, Homo sapien
cattgtctgcatagcaggactgtaa

SEQ ID NO: 4040952 - DNA, 25 bp, Homo sapien
gaatgatggcatcgtcattgtctgc

SEQ ID NO: 4040953 - DNA, 25 bp, Homo sapien
agccacctcatccacgtgcagggac

SEQ ID NO: 4040954 - DNA, 25 bp, Homo sapien
cagtgacacctgtagcagccacctc

SEQ ID NO: 4040955 - DNA, 25 bp, Homo sapien
acagtgacacctgtagcagccacct

SEQ ID NO: 4040956 - DNA, 25 bp, Homo sapien
cacagtgacacctgtagcagccacc

SEQ ID NO: 4040957 - DNA, 25 bp, Homo sapien
aacaaacgccgcactcgagagctct

SEQ ID NO: 4040958 - DNA, 25 bp, Homo sapien
ttaacaaacgccgcactcgagagct

SEQ ID NO: 4040959 - DNA, 25 bp, Homo sapien
gagagctctcgcacgcctctcttcc

SEQ ID NO: 4040960 - DNA, 25 bp, Homo sapien
cactcgagagctctcgcacgcctct

SEQ ID NO: 4040961 - DNA, 25 bp, Homo sapien
tgaaagtcaagaggccccatggact

SEQ ID NO: 4040962 - DNA, 25 bp, Homo sapien
tctgaaagtcaagaggccccatgga

SEQ ID NO: 4040963 - DNA, 25 bp, Homo sapien
ctgaaagtcaagaggccccatggac

SEQ ID NO: 4040964 - DNA, 25 bp, Homo sapien
gaaagtcaagaggccccatggactg

SEQ ID NO: 4040965 - DNA, 25 bp, Homo sapien
ccgtctatcaaaattgggcaactac

SEQ ID NO: 4040966 - DNA, 25 bp, Homo sapien
cctgttttcccgtctatcaaaattg

SEQ ID NO: 4040967 - DNA, 25 bp, Homo sapien
ttttcccgtctatcaaaattgggca

SEQ ID NO: 4040968 - DNA, 25 bp, Homo sapien
tctatcaaaattgggcaactacttt

SEQ ID NO: 4040969 - DNA, 25 bp, Homo sapien
gatttgtcagcagccctgaaatatt

SEQ ID NO: 4040970 - DNA, 25 bp, Homo sapien
gcagccctgaaatattcatgaacag

SEQ ID NO: 4040971 - DNA, 25 bp, Homo sapien
gaacagctgtttcaatgattataac

SEQ ID NO: 4040972 - DNA, 25 bp, Homo sapien
tcatgaacagctgtttcaatgatta

SEQ ID NO: 4040973 - DNA, 25 bp, Homo sapien
agcacaacaggtctgaacaaaattc

SEQ ID NO: 4040974 - DNA, 25 bp, Homo sapien
atgggagagtagcccaagaagagga

SEQ ID NO: 4040975 - DNA, 25 bp, Homo sapien
gcatgggagagtagcccaagaagag

SEQ ID NO: 4040976 - DNA, 25 bp, Homo sapien
cacaacaggtctgaacaaaattcca

SEQ ID NO: 4040977 - DNA, 25 bp, Homo sapien
tgcattaagtccagccactgcaggc

SEQ ID NO: 4040978 - DNA, 25 bp, Homo sapien
catgttttaagttgtacgacaacca

SEQ ID NO: 4040979 - DNA, 25 bp, Homo sapien
accaaggctcggcaggtattaggca

SEQ ID NO: 4040980 - DNA, 25 bp, Homo sapien
ggccaatttggcaaccatgttttaa

SEQ ID NO: 4040981 - DNA, 25 bp, Homo sapien
aaccagttgcagggcgagatgcagg

SEQ ID NO: 4040982 - DNA, 25 bp, Homo sapien
ctctgcagggatctagcgcctgctg

SEQ ID NO: 4040983 - DNA, 25 bp, Homo sapien
cagttgcagggcgagatgcaggaca

SEQ ID NO: 4040984 - DNA, 25 bp, Homo sapien
gggatctagcgcctgctgtgtgaac

SEQ ID NO: 4040985 - DNA, 25 bp, Homo sapien
gaacagtgcctcgtatacagaagga

SEQ ID NO: 4040986 - DNA, 25 bp, Homo sapien
taccaggaccacttctaaagaaggc

SEQ ID NO: 4040987 - DNA, 25 bp, Homo sapien
gcattacagtttcagggcctactgg

SEQ ID NO: 4040988 - DNA, 25 bp, Homo sapien
caattgacagaaatataccaggacc

SEQ ID NO: 4040989 - DNA, 25 bp, Homo sapien
gccagcctttatgggcagttccagc

SEQ ID NO: 4040990 - DNA, 25 bp, Homo sapien
gggtgccagcctttatgggcagttc

SEQ ID NO: 4040991 - DNA, 25 bp, Homo sapien
tggagcagcaatcctcaggtgcagg

SEQ ID NO: 4040992 - DNA, 25 bp, Homo sapien
tctccctggcgggatcttcaggctg

SEQ ID NO: 4040993 - DNA, 25 bp, Homo sapien
gcttcagttcgttgtcttgtgggcc

SEQ ID NO: 4040994 - DNA, 25 bp, Homo sapien
ggcttcagttcgttgtcttgtgggc

SEQ ID NO: 4040995 - DNA, 25 bp, Homo sapien
gctcacaacatagtagtttgctttc

SEQ ID NO: 4040996 - DNA, 25 bp, Homo sapien
ggctgctcacaacatagtagtttgc

SEQ ID NO: 4040997 - DNA, 25 bp, Homo sapien
tggaggctgactaccaaccatggat

SEQ ID NO: 4040998 - DNA, 25 bp, Homo sapien
aaccatggataggtaaatgagtgcc

SEQ ID NO: 4040999 - DNA, 25 bp, Homo sapien
ccttctgagaagagacacgtcctct

SEQ ID NO: 4041000 - DNA, 25 bp, Homo sapien
gatcacacctcggtagagagagttc

SEQ ID NO: 4041001 - DNA, 25 bp, Homo sapien
aatattctagtccatgaaccagcgg

SEQ ID NO: 4041002 - DNA, 25 bp, Homo sapien
gaaccagcggttgcactagagcttg

SEQ ID NO: 4041003 - DNA, 25 bp, Homo sapien
taaatgcccaactccatagccaggt

SEQ ID NO: 4041004 - DNA, 25 bp, Homo sapien
ggaagccagcttcggtgactagtac

SEQ ID NO: 4041005 - DNA, 25 bp, Homo sapien
cagttgtccaaaaagttcgggcagc

SEQ ID NO: 4041006 - DNA, 25 bp, Homo sapien
cctggaagggcaacatttccaacag

SEQ ID NO: 4041007 - DNA, 25 bp, Homo sapien
tgtttctgcatcattcacctggaag

SEQ ID NO: 4041008 - DNA, 25 bp, Homo sapien
agccacgtgtcaggccttgttcatg

SEQ ID NO: 4041009 - DNA, 25 bp, Homo sapien
ttaatgcatagtctcaaactcaaac

SEQ ID NO: 4041010 - DNA, 25 bp, Homo sapien
ctgttaatgcatagtctcaaactca

SEQ ID NO: 4041011 - DNA, 25 bp, Homo sapien
taatgcatagtctcaaactcaaaca

SEQ ID NO: 4041012 - DNA, 25 bp, Homo sapien
caaatttggagttggtcctgtgttc

SEQ ID NO: 4041013 - DNA, 25 bp, Homo sapien
cccaaatttggagttggtcctgtgt

SEQ ID NO: 4041014 - DNA, 25 bp, Homo sapien
tcattcccaaatttggagttggtcc

SEQ ID NO: 4041015 - DNA, 25 bp, Homo sapien
cattcccaaatttggagttggtcct

SEQ ID NO: 4041016 - DNA, 25 bp, Homo sapien
ctgggggcacgttgccggtgcatag

SEQ ID NO: 4041017 - DNA, 25 bp, Homo sapien
gggctgcaagcctgcagtccgtctc

SEQ ID NO: 4041018 - DNA, 25 bp, Homo sapien
ggctgcaagcctgcagtccgtctca

SEQ ID NO: 4041019 - DNA, 25 bp, Homo sapien
cacgttgccggtgcataggtgtggg

SEQ ID NO: 4041020 - DNA, 25 bp, Homo sapien
tccatgcagtggagtttattcctgg

SEQ ID NO: 4041021 - DNA, 25 bp, Homo sapien
caaaggctctttttatgggtagttg

SEQ ID NO: 4041022 - DNA, 25 bp, Homo sapien
ctttttatgggtagttgcaacacag

SEQ ID NO: 4041023 - DNA, 25 bp, Homo sapien
cagaatatcactgtggtcaggcacc

SEQ ID NO: 4041024 - DNA, 25 bp, Homo sapien
catgaagaccttcaggaaaggaata

SEQ ID NO: 4041025 - DNA, 25 bp, Homo sapien
cctcgtgggctatgctccttggctt

SEQ ID NO: 4041026 - DNA, 25 bp, Homo sapien
tgaggacatgcctcgtgggctatgc

SEQ ID NO: 4041027 - DNA, 25 bp, Homo sapien
agccaagccacagcgccggtgctgt

SEQ ID NO: 4041028 - DNA, 25 bp, Homo sapien
aaattaataacagaacagatgtctt

SEQ ID NO: 4041029 - DNA, 25 bp, Homo sapien
gtttcattaattcgacgtgaatgaa

SEQ ID NO: 4041030 - DNA, 25 bp, Homo sapien
tcgacgtgaatgaagcctcatttct

SEQ ID NO: 4041031 - DNA, 25 bp, Homo sapien
taattcgacgtgaatgaagcctcat

SEQ ID NO: 4041032 - DNA, 25 bp, Homo sapien
ggtcccctgggaaacagcatctgtt

SEQ ID NO: 4041033 - DNA, 25 bp, Homo sapien
ccagctccacatatttctgggattg

SEQ ID NO: 4041034 - DNA, 25 bp, Homo sapien
cctgggaaacagcatctgttctgtc

SEQ ID NO: 4041035 - DNA, 25 bp, Homo sapien
tctgggattggtcccctgggaaaca

SEQ ID NO: 4041036 - DNA, 25 bp, Homo sapien
aattctagctacttgggaagttgag

SEQ ID NO: 4041037 - DNA, 25 bp, Homo sapien
taattctagctacttgggaagttga

SEQ ID NO: 4041038 - DNA, 25 bp, Homo sapien
gtaattctagctacttgggaagttg

SEQ ID NO: 4041039 - DNA, 25 bp, Homo sapien
tggaccgagagatcacacggagcca

SEQ ID NO: 4041040 - DNA, 25 bp, Homo sapien
tgagtggaccgagagatcacacgga

SEQ ID NO: 4041041 - DNA, 25 bp, Homo sapien
gctgagtggaccgagagatcacacg

SEQ ID NO: 4041042 - DNA, 25 bp, Homo sapien
cagctgagtggaccgagagatcaca

SEQ ID NO: 4041043 - DNA, 25 bp, Homo sapien
actcattttcagatctctctacgga

SEQ ID NO: 4041044 - DNA, 25 bp, Homo sapien
tggatggaaggttccaagcgagaac

SEQ ID NO: 4041045 - DNA, 25 bp, Homo sapien
tgtagcctttcctgcaattcctgcc

SEQ ID NO: 4041046 - DNA, 25 bp, Homo sapien
actggatggaaggttccaagcgaga

SEQ ID NO: 4041047 - DNA, 25 bp, Homo sapien
tgcggcatcatccacctctgagaac

SEQ ID NO: 4041048 - DNA, 25 bp, Homo sapien
gcatttctgcttctgcggcatcatc

SEQ ID NO: 4041049 - DNA, 25 bp, Homo sapien
aagctgaggagccttccaagagctc

SEQ ID NO: 4041050 - DNA, 25 bp, Homo sapien
gaggacaagctgaggagccttccaa

SEQ ID NO: 4041051 - DNA, 25 bp, Homo sapien
atcctttttgcacccacagccagat

SEQ ID NO: 4041052 - DNA, 25 bp, Homo sapien
gccttcaaaacctggtctcagtgca

SEQ ID NO: 4041053 - DNA, 25 bp, Homo sapien
acctggtctcagtgcatcctttttg

SEQ ID NO: 4041054 - DNA, 25 bp, Homo sapien
tgtaaatgccttcaaaacctggtct

SEQ ID NO: 4041055 - DNA, 25 bp, Homo sapien
cagggttgctcaaacagcagcagga

SEQ ID NO: 4041056 - DNA, 25 bp, Homo sapien
tctcagcccacatagtgatggttcc

SEQ ID NO: 4041057 - DNA, 25 bp, Homo sapien
gtcctgtagaaagagccctgaagaa

SEQ ID NO: 4041058 - DNA, 25 bp, Homo sapien
cccttggagccaatggagactgtct

SEQ ID NO: 4041059 - DNA, 25 bp, Homo sapien
gacccagccagaagcggaaacttaa

SEQ ID NO: 4041060 - DNA, 25 bp, Homo sapien
tggcctggcttaggttgttgacagt

SEQ ID NO: 4041061 - DNA, 25 bp, Homo sapien
aatgttccctgttacactgagagaa

SEQ ID NO: 4041062 - DNA, 25 bp, Homo sapien
taaagagtctcaagggtctgccagt

SEQ ID NO: 4041063 - DNA, 25 bp, Homo sapien
gttgacagttggaaagacatctttc

SEQ ID NO: 4041064 - DNA, 25 bp, Homo sapien
cttcgtgcagcagacgcagatcggc

SEQ ID NO: 4041065 - DNA, 25 bp, Homo sapien
gtgcagcagacgcagatcggctccg

SEQ ID NO: 4041066 - DNA, 25 bp, Homo sapien
tcgtgcagcagacgcagatcggctc

SEQ ID NO: 4041067 - DNA, 25 bp, Homo sapien
agcagacgcagatcggctccgcgag

SEQ ID NO: 4041068 - DNA, 25 bp, Homo sapien
tcagagaacaagatagaccctgcta

SEQ ID NO: 4041069 - DNA, 25 bp, Homo sapien
ggctatactgttatgcacaaaggaa

SEQ ID NO: 4041070 - DNA, 25 bp, Homo sapien
caactgagtcagcttaggatgttca

SEQ ID NO: 4041071 - DNA, 25 bp, Homo sapien
cattggcagttgcactctttggact

SEQ ID NO: 4041072 - DNA, 25 bp, Homo sapien
ccacccaataactggttggaggagg

SEQ ID NO: 4041073 - DNA, 25 bp, Homo sapien
tattacttgcatggccatttgctgc

SEQ ID NO: 4041074 - DNA, 25 bp, Homo sapien
gggattatcttgcttccaattcgtg

SEQ ID NO: 4041075 - DNA, 25 bp, Homo sapien
caacagtatgctgtcctgaaaagct

SEQ ID NO: 4041076 - DNA, 25 bp, Homo sapien
gttgctgcccctcattcaacattct

SEQ ID NO: 4041077 - DNA, 25 bp, Homo sapien
caatgggatttatagttgctgtaaa

SEQ ID NO: 4041078 - DNA, 25 bp, Homo sapien
tgaaatttctgggtcgtgctatgtt

SEQ ID NO: 4041079 - DNA, 25 bp, Homo sapien
ttgcaagtcctttggaagcaccagt

SEQ ID NO: 4041080 - DNA, 25 bp, Homo sapien
tatgctaggtgacttttaatggccc

SEQ ID NO: 4041081 - DNA, 25 bp, Homo sapien
ctgttattgtggcaatgtagcccaa

SEQ ID NO: 4041082 - DNA, 25 bp, Homo sapien
catcttgaggaacaactttctgtcc

SEQ ID NO: 4041083 - DNA, 25 bp, Homo sapien
tatcccgttgtcataggaaacccac

SEQ ID NO: 4041084 - DNA, 25 bp, Homo sapien
gcaacaatttacacagctggctgga

SEQ ID NO: 4041085 - DNA, 25 bp, Homo sapien
ggaagttaggcgatttcggcaacaa

SEQ ID NO: 4041086 - DNA, 25 bp, Homo sapien
tttagtcttgacacctgccggagca

SEQ ID NO: 4041087 - DNA, 25 bp, Homo sapien
tggagaagctcttggaggcctcttt

SEQ ID NO: 4041088 - DNA, 25 bp, Homo sapien
ctaaatcaactattatcaattttat

SEQ ID NO: 4041089 - DNA, 25 bp, Homo sapien
ccctaaatcaactattatcaatttt

SEQ ID NO: 4041090 - DNA, 25 bp, Homo sapien
cctaaatcaactattatcaatttta

SEQ ID NO: 4041091 - DNA, 25 bp, Homo sapien
aaatcaactattatcaattttatac

SEQ ID NO: 4041092 - DNA, 25 bp, Homo sapien
tgtggcatgcatttctgccacgtag

SEQ ID NO: 4041093 - DNA, 25 bp, Homo sapien
ccacgtagaaagataaagcatatgt

SEQ ID NO: 4041094 - DNA, 25 bp, Homo sapien
tctcagagttacttcctcgtaggca

SEQ ID NO: 4041095 - DNA, 25 bp, Homo sapien
tccgtgagattctgtgtttctcaga

SEQ ID NO: 4041096 - DNA, 25 bp, Homo sapien
gcacttcctgagtcattgtttgtgt

SEQ ID NO: 4041097 - DNA, 25 bp, Homo sapien
gccccagtgccctgatagctctgaa

SEQ ID NO: 4041098 - DNA, 25 bp, Homo sapien
atgagttcctgtagcggtcacccag

SEQ ID NO: 4041099 - DNA, 25 bp, Homo sapien
gctctgaagcatgcgctccagggtg

SEQ ID NO: 4041100 - DNA, 25 bp, Homo sapien
tcactcaaagcactctcgggtaatg

SEQ ID NO: 4041101 - DNA, 25 bp, Homo sapien
ggtaatgccgccagtgatagtgtct

SEQ ID NO: 4041102 - DNA, 25 bp, Homo sapien
agtgatagtgtctgtaagtccacca

SEQ ID NO: 4041103 - DNA, 25 bp, Homo sapien
ctctcgggtaatgccgccagtgata

SEQ ID NO: 4041104 - DNA, 25 bp, Homo sapien
tgcctgacgagatctggtaagcagt

SEQ ID NO: 4041105 - DNA, 25 bp, Homo sapien
tctggcattcccttgtgcctgacga

SEQ ID NO: 4041106 - DNA, 25 bp, Homo sapien
ttcccttgtgcctgacgagatctgg

SEQ ID NO: 4041107 - DNA, 25 bp, Homo sapien
tgacgagatctggtaagcagtggtc

SEQ ID NO: 4041108 - DNA, 25 bp, Homo sapien
ctggtcacagtcagcccagcaacag

SEQ ID NO: 4041109 - DNA, 25 bp, Homo sapien
tggtcacagtcagcccagcaacagg

SEQ ID NO: 4041110 - DNA, 25 bp, Homo sapien
gtcacagtcagcccagcaacagggc

SEQ ID NO: 4041111 - DNA, 25 bp, Homo sapien
cacagtcagcccagcaacagggcac

SEQ ID NO: 4041112 - DNA, 25 bp, Homo sapien
gcagtcacttggtggtaacaatccc

SEQ ID NO: 4041113 - DNA, 25 bp, Homo sapien
aaactgcctccttgtagtcgccttt

SEQ ID NO: 4041114 - DNA, 25 bp, Homo sapien
ccttgtagtcgcctttgacccctga

SEQ ID NO: 4041115 - DNA, 25 bp, Homo sapien
aaacctcttttcttgcaccacggca

SEQ ID NO: 4041116 - DNA, 25 bp, Homo sapien
tttataaccattccatgattttgct

SEQ ID NO: 4041117 - DNA, 25 bp, Homo sapien
gattacacgtgataatggatgatac

SEQ ID NO: 4041118 - DNA, 25 bp, Homo sapien
caatcacttttataaccattccatg

SEQ ID NO: 4041119 - DNA, 25 bp, Homo sapien
taaatcgtttattgattacacgtga

SEQ ID NO: 4041120 - DNA, 25 bp, Homo sapien
tgctttcatgtaactaactggcctt

SEQ ID NO: 4041121 - DNA, 25 bp, Homo sapien
tggtggtcatgacggtgatcaaggc

SEQ ID NO: 4041122 - DNA, 25 bp, Homo sapien
ggccttcgatggttcacttttccca

SEQ ID NO: 4041123 - DNA, 25 bp, Homo sapien
tcatgacggtgatcaaggctggccc

SEQ ID NO: 4041124 - DNA, 25 bp, Homo sapien
catggatgctgttgtgtaactgggc

SEQ ID NO: 4041125 - DNA, 25 bp, Homo sapien
gaccggaaatcccatacagtgctga

SEQ ID NO: 4041126 - DNA, 25 bp, Homo sapien
aaacaggccacatgtaatgccacca

SEQ ID NO: 4041127 - DNA, 25 bp, Homo sapien
tgattggatattcccctttaagacc

SEQ ID NO: 4041128 - DNA, 25 bp, Homo sapien
cctgggaatcccttttgccaagccg

SEQ ID NO: 4041129 - DNA, 25 bp, Homo sapien
tgccaagccgcctcttggacccctg

SEQ ID NO: 4041130 - DNA, 25 bp, Homo sapien
tcgtcagcttagaaggatttgcaca

SEQ ID NO: 4041131 - DNA, 25 bp, Homo sapien
acccctgaggtttactccaccgcag

SEQ ID NO: 4041132 - DNA, 25 bp, Homo sapien
aagctgaggtcacaaatacaaaact

SEQ ID NO: 4041133 - DNA, 25 bp, Homo sapien
aattccccagccatggtaagatgcc

SEQ ID NO: 4041134 - DNA, 25 bp, Homo sapien
ttcccaaagctgaggtcacaaatac

SEQ ID NO: 4041135 - DNA, 25 bp, Homo sapien
caattccccagccatggtaagatgc

SEQ ID NO: 4041136 - DNA, 25 bp, Homo sapien
ttctgaacctgcaatccctttcgca

SEQ ID NO: 4041137 - DNA, 25 bp, Homo sapien
gcaaaagaccccagtctttgctcct

SEQ ID NO: 4041138 - DNA, 25 bp, Homo sapien
aacctgcaatccctttcgcaaaaga

SEQ ID NO: 4041139 - DNA, 25 bp, Homo sapien
ctttcgcaaaagaccccagtctttg

SEQ ID NO: 4041140 - DNA, 25 bp, Homo sapien
tatgtgttctgtctggggtggcttc

SEQ ID NO: 4041141 - DNA, 25 bp, Homo sapien
ctctatgtgttctgtctggggtggc

SEQ ID NO: 4041142 - DNA, 25 bp, Homo sapien
tcacagctctatgtgttctgtctgg

SEQ ID NO: 4041143 - DNA, 25 bp, Homo sapien
cacagctctatgtgttctgtctggg

SEQ ID NO: 4041144 - DNA, 25 bp, Homo sapien
tgggtgttggcaccaatctgcagat

SEQ ID NO: 4041145 - DNA, 25 bp, Homo sapien
cctgggtgttggcaccaatctgcag

SEQ ID NO: 4041146 - DNA, 25 bp, Homo sapien
cgcctgggtgttggcaccaatctgc

SEQ ID NO: 4041147 - DNA, 25 bp, Homo sapien
gccgcctgggtgttggcaccaatct

SEQ ID NO: 4041148 - DNA, 25 bp, Homo sapien
gaatcaattagaattgccccaaagc

SEQ ID NO: 4041149 - DNA, 25 bp, Homo sapien
ctggaaacagaatcaattagaattg

SEQ ID NO: 4041150 - DNA, 25 bp, Homo sapien
cagaatcaattagaattgccccaaa

SEQ ID NO: 4041151 - DNA, 25 bp, Homo sapien
gaaacagaatcaattagaattgccc

SEQ ID NO: 4041152 - DNA, 25 bp, Homo sapien
catcttgctaagtctgatctcctct

SEQ ID NO: 4041153 - DNA, 25 bp, Homo sapien
ccattgcgagcaaagttggcccaga

SEQ ID NO: 4041154 - DNA, 25 bp, Homo sapien
caccatcttgctaagtctgatctcc

SEQ ID NO: 4041155 - DNA, 25 bp, Homo sapien
ttgcgagcaaagttggcccagaatt

SEQ ID NO: 4041156 - DNA, 25 bp, Homo sapien
tcatgtctgatgagaagcttggacg

SEQ ID NO: 4041157 - DNA, 25 bp, Homo sapien
agcttggacggtactgaaactcata

SEQ ID NO: 4041158 - DNA, 25 bp, Homo sapien
aactcatacatgtaggtgggtgctc

SEQ ID NO: 4041159 - DNA, 25 bp, Homo sapien
cgtggtctcctatcaccgtcttggg

SEQ ID NO: 4041160 - DNA, 25 bp, Homo sapien
gctatcaagtccaggaacaggtctt

SEQ ID NO: 4041161 - DNA, 25 bp, Homo sapien
ggttccgggccacaatcacagatgg

SEQ ID NO: 4041162 - DNA, 25 bp, Homo sapien
tcacagatgggacaccaaacatcac

SEQ ID NO: 4041163 - DNA, 25 bp, Homo sapien
cagtgtcgtctgttcctcctaagta

SEQ ID NO: 4041164 - DNA, 25 bp, Homo sapien
tcaatggtgaaccccataagccctg

SEQ ID NO: 4041165 - DNA, 25 bp, Homo sapien
gatttgggcaagtccttgtccctct

SEQ ID NO: 4041166 - DNA, 25 bp, Homo sapien
catttaattgctctatgatttgggc

SEQ ID NO: 4041167 - DNA, 25 bp, Homo sapien
tgcaactccccgctagggtggaaaa

SEQ ID NO: 4041168 - DNA, 25 bp, Homo sapien
gtccagttgcccttcggagagtgga

SEQ ID NO: 4041169 - DNA, 25 bp, Homo sapien
tgtcttctggtccagttgcccttcg

SEQ ID NO: 4041170 - DNA, 25 bp, Homo sapien
gttgcccttcggagagtggatagct

SEQ ID NO: 4041171 - DNA, 25 bp, Homo sapien
tctggtccagttgcccttcggagag

SEQ ID NO: 4041172 - DNA, 25 bp, Homo sapien
tcattgggaattaatgataagaaac

SEQ ID NO: 4041173 - DNA, 25 bp, Homo sapien
catttatgaatcattgggaattaat

SEQ ID NO: 4041174 - DNA, 25 bp, Homo sapien
gaatcattgggaattaatgataaga

SEQ ID NO: 4041175 - DNA, 25 bp, Homo sapien
ttatgaatcattgggaattaatgat

SEQ ID NO: 4041176 - DNA, 25 bp, Homo sapien
gatccctacagtggtcagtgacatg

SEQ ID NO: 4041177 - DNA, 25 bp, Homo sapien
tccctgtcgaaagagtagagcctga

SEQ ID NO: 4041178 - DNA, 25 bp, Homo sapien
cttaacataactgcctgggaaggct

SEQ ID NO: 4041179 - DNA, 25 bp, Homo sapien
ttaaggctgtgtccctagaatgacc

SEQ ID NO: 4041180 - DNA, 25 bp, Homo sapien
gtcaatggtaactcaagaagaagcc

SEQ ID NO: 4041181 - DNA, 25 bp, Homo sapien
tccgtggaaatgttaactcctgctg

SEQ ID NO: 4041182 - DNA, 25 bp, Homo sapien
tgataccccggtgaaaactgtgccc

SEQ ID NO: 4041183 - DNA, 25 bp, Homo sapien
tattgagcatagcacccgattaggt

SEQ ID NO: 4041184 - DNA, 25 bp, Homo sapien
gatgggggtggttgagtccctccaa

SEQ ID NO: 4041185 - DNA, 25 bp, Homo sapien
tcagagtgcagctcggagagggaag

SEQ ID NO: 4041186 - DNA, 25 bp, Homo sapien
gagtgcagctcggagagggaagcat

SEQ ID NO: 4041187 - DNA, 25 bp, Homo sapien
gcagctcggagagggaagcattcct

SEQ ID NO: 4041188 - DNA, 25 bp, Homo sapien
agcagcatcccatcaatcacagtgc

SEQ ID NO: 4041189 - DNA, 25 bp, Homo sapien
aatcaaccagccaaactcctgcttg

SEQ ID NO: 4041190 - DNA, 25 bp, Homo sapien
aagctcttcaggtgttttcagcagc

SEQ ID NO: 4041191 - DNA, 25 bp, Homo sapien
tgcttgttaattccgaccatgtagg

SEQ ID NO: 4041192 - DNA, 25 bp, Homo sapien
gcaacagaggtgtcaggttcttccc

SEQ ID NO: 4041193 - DNA, 25 bp, Homo sapien
aacagaggtgtcaggttcttcccgc

SEQ ID NO: 4041194 - DNA, 25 bp, Homo sapien
cagaggtgtcaggttcttcccgcat

SEQ ID NO: 4041195 - DNA, 25 bp, Homo sapien
gggcaacagaggtgtcaggttcttc

SEQ ID NO: 4041196 - DNA, 25 bp, Homo sapien
ccattcagatactgagagttgagaa

SEQ ID NO: 4041197 - DNA, 25 bp, Homo sapien
tcagattccccattcagatactgag

SEQ ID NO: 4041198 - DNA, 25 bp, Homo sapien
ttgagaaattgtcccaggaaactgt

SEQ ID NO: 4041199 - DNA, 25 bp, Homo sapien
agttgagaaattgtcccaggaaact

SEQ ID NO: 4041200 - DNA, 25 bp, Homo sapien
tgcacccagcagtgatagcaatttg

SEQ ID NO: 4041201 - DNA, 25 bp, Homo sapien
caatgtcgtctccaagagctcctct

SEQ ID NO: 4041202 - DNA, 25 bp, Homo sapien
ggttttgcacccagcagtgatagca

SEQ ID NO: 4041203 - DNA, 25 bp, Homo sapien
tttcaatgtcgtctccaagagctcc

SEQ ID NO: 4041204 - DNA, 25 bp, Homo sapien
ctcagccaagggcttgacatcacct

SEQ ID NO: 4041205 - DNA, 25 bp, Homo sapien
cactctcagaaatggcccggtggaa

SEQ ID NO: 4041206 - DNA, 25 bp, Homo sapien
accagaacagaagtgagggccacgc

SEQ ID NO: 4041207 - DNA, 25 bp, Homo sapien
gaacagaagtgagggccacgccact

SEQ ID NO: 4041208 - DNA, 25 bp, Homo sapien
aagcgtggggttgggcctggtgaca

SEQ ID NO: 4041209 - DNA, 25 bp, Homo sapien
cctcccgctgactctccaaagatgg

SEQ ID NO: 4041210 - DNA, 25 bp, Homo sapien
tcctcccgctgactctccaaagatg

SEQ ID NO: 4041211 - DNA, 25 bp, Homo sapien
agacactttctcctcccgctgactc

SEQ ID NO: 4041212 - DNA, 25 bp, Homo sapien
agagacactttctcctcccgctgac

SEQ ID NO: 4041213 - DNA, 25 bp, Homo sapien
agctggcaatgttgtcctggaccca

SEQ ID NO: 4041214 - DNA, 25 bp, Homo sapien
tccaaagctggcaatgttgtcctgg

SEQ ID NO: 4041215 - DNA, 25 bp, Homo sapien
atgttgtcctggacccagcgcaggg

SEQ ID NO: 4041216 - DNA, 25 bp, Homo sapien
tgggttccctccaaagctggcaatg

SEQ ID NO: 4041217 - DNA, 25 bp, Homo sapien
cagttcccccggctgtgttcatccc

SEQ ID NO: 4041218 - DNA, 25 bp, Homo sapien
gcagcaagggccagcccatcatagg

SEQ ID NO: 4041219 - DNA, 25 bp, Homo sapien
catcataggttgatgccgcacccac

SEQ ID NO: 4041220 - DNA, 25 bp, Homo sapien
caccacgttttcatgggcagcaagg

SEQ ID NO: 4041221 - DNA, 25 bp, Homo sapien
caggcgatattgaatggtcaccacc

SEQ ID NO: 4041222 - DNA, 25 bp, Homo sapien
taactgccccgccttgggatcttgg

SEQ ID NO: 4041223 - DNA, 25 bp, Homo sapien
ggagtgtaaatattgaggtaaagac

SEQ ID NO: 4041224 - DNA, 25 bp, Homo sapien
aatattgaggtaaagacagtcttca

SEQ ID NO: 4041225 - DNA, 25 bp, Homo sapien
ggtttgtaaatagctctgagagtaa

SEQ ID NO: 4041226 - DNA, 25 bp, Homo sapien
tgctggaaagcctccgaacacctgg

SEQ ID NO: 4041227 - DNA, 25 bp, Homo sapien
tactgatagttgttctctctgggtg

SEQ ID NO: 4041228 - DNA, 25 bp, Homo sapien
agggtctgctctgatgtctgtaggg

SEQ ID NO: 4041229 - DNA, 25 bp, Homo sapien
tctgggtggtggaatattgtatgtg

SEQ ID NO: 4041230 - DNA, 25 bp, Homo sapien
gagggtacgaggtggcattcttcac

SEQ ID NO: 4041231 - DNA, 25 bp, Homo sapien
ccagcactttgccatgcacggtgtc

SEQ ID NO: 4041232 - DNA, 25 bp, Homo sapien
ggctgtgcaaatccttctaagctga

SEQ ID NO: 4041233 - DNA, 25 bp, Homo sapien
caggctgcggtggagtaaacctcag

SEQ ID NO: 4041234 - DNA, 25 bp, Homo sapien
ttatagggaagggtcacatatacac

SEQ ID NO: 4041235 - DNA, 25 bp, Homo sapien
attatagggaagggtcacatataca

SEQ ID NO: 4041236 - DNA, 25 bp, Homo sapien
cattatagggaagggtcacatatac

SEQ ID NO: 4041237 - DNA, 25 bp, Homo sapien
tgtcctgggagaggtacccataagg

SEQ ID NO: 4041238 - DNA, 25 bp, Homo sapien
taaggcagtctaggaattagaagag

SEQ ID NO: 4041239 - DNA, 25 bp, Homo sapien
ggcaaggccttctgattgcgggcat

SEQ ID NO: 4041240 - DNA, 25 bp, Homo sapien
gattgcgggcatcatggaggagctg

SEQ ID NO: 4041241 - DNA, 25 bp, Homo sapien
cgcggaagcagcgagagtggccagg

SEQ ID NO: 4041242 - DNA, 25 bp, Homo sapien
cggaagcagcgagagtggccaggac

SEQ ID NO: 4041243 - DNA, 25 bp, Homo sapien
gccgcggaagcagcgagagtggcca

SEQ ID NO: 4041244 - DNA, 25 bp, Homo sapien
caagccgcggaagcagcgagagtgg

SEQ ID NO: 4041245 - DNA, 25 bp, Homo sapien
aattgcctaatcctctaattgggag

SEQ ID NO: 4041246 - DNA, 25 bp, Homo sapien
tgcgctgccaattgcctaatcctct

SEQ ID NO: 4041247 - DNA, 25 bp, Homo sapien
agagttaccgccctgcgctgccaat

SEQ ID NO: 4041248 - DNA, 25 bp, Homo sapien
cctaatcctctaattgggagagatc

SEQ ID NO: 4041249 - DNA, 25 bp, Homo sapien
ctggaaaactgtcatttacaagctg

SEQ ID NO: 4041250 - DNA, 25 bp, Homo sapien
gatcatcgtcaccaaggtcattttc

SEQ ID NO: 4041251 - DNA, 25 bp, Homo sapien
ggatcatcgtcaccaaggtcatttt

SEQ ID NO: 4041252 - DNA, 25 bp, Homo sapien
atcatcgtcaccaaggtcattttct

SEQ ID NO: 4041253 - DNA, 25 bp, Homo sapien
ccgacccttgatgcctagaatttga

SEQ ID NO: 4041254 - DNA, 25 bp, Homo sapien
tttccatggctgaggataccccgtc

SEQ ID NO: 4041255 - DNA, 25 bp, Homo sapien
ttggcattgctgatccgacccttga

SEQ ID NO: 4041256 - DNA, 25 bp, Homo sapien
ttccatggctgaggataccccgtca

SEQ ID NO: 4041257 - DNA, 25 bp, Homo sapien
tcaaacccgtgacatccaagacatc

SEQ ID NO: 4041258 - DNA, 25 bp, Homo sapien
caagacatccatacttggcttgcgg

SEQ ID NO: 4041259 - DNA, 25 bp, Homo sapien
cagctcaaacccgtgacatccaaga

SEQ ID NO: 4041260 - DNA, 25 bp, Homo sapien
ttggcttgcggctgaagccccaatg

SEQ ID NO: 4041261 - DNA, 25 bp, Homo sapien
tgttgccttccaagacaaattgcac

SEQ ID NO: 4041262 - DNA, 25 bp, Homo sapien
tccataaaatatcagcgaaagcagc

SEQ ID NO: 4041263 - DNA, 25 bp, Homo sapien
ttttgcaaggatccccatagaaagc

SEQ ID NO: 4041264 - DNA, 25 bp, Homo sapien
tatgacaactaataggccagccctc

SEQ ID NO: 4041265 - DNA, 25 bp, Homo sapien
ggagagagaggaaagttaaggaaga

SEQ ID NO: 4041266 - DNA, 25 bp, Homo sapien
aagaaaaagaaaggctggaggagag

SEQ ID NO: 4041267 - DNA, 25 bp, Homo sapien
gaggagagagaggaaagttaaggaa

SEQ ID NO: 4041268 - DNA, 25 bp, Homo sapien
gaaaaagaaaggctggaggagagag

SEQ ID NO: 4041269 - DNA, 25 bp, Homo sapien
atcagggggatggtgctggtccaaa

SEQ ID NO: 4041270 - DNA, 25 bp, Homo sapien
aggatcagggggatggtgctggtcc

SEQ ID NO: 4041271 - DNA, 25 bp, Homo sapien
ggatggtgctggtccaaaactccac

SEQ ID NO: 4041272 - DNA, 25 bp, Homo sapien
ggggatggtgctggtccaaaactcc

SEQ ID NO: 4041273 - DNA, 25 bp, Homo sapien
gctgcaggtactgctcagtcagatt

SEQ ID NO: 4041274 - DNA, 25 bp, Homo sapien
cagagacaggtcgttcccattagga

SEQ ID NO: 4041275 - DNA, 25 bp, Homo sapien
tgtccgaggctcatgttcaagtcca

SEQ ID NO: 4041276 - DNA, 25 bp, Homo sapien
ctttgagtctctgtccgaggctcat

SEQ ID NO: 4041277 - DNA, 25 bp, Homo sapien
ccggttcgagcaaaggtagcccagt

SEQ ID NO: 4041278 - DNA, 25 bp, Homo sapien
gttcgagcaaaggtagcccagtatt

SEQ ID NO: 4041279 - DNA, 25 bp, Homo sapien
cggttcgagcaaaggtagcccagta

SEQ ID NO: 4041280 - DNA, 25 bp, Homo sapien
ggttcgagcaaaggtagcccagtat

SEQ ID NO: 4041281 - DNA, 25 bp, Homo sapien
caaagcggacttcatcagcgtggtc

SEQ ID NO: 4041282 - DNA, 25 bp, Homo sapien
gacaaaagccggcttcgtgtcttca

SEQ ID NO: 4041283 - DNA, 25 bp, Homo sapien
cagcgtggtcggctttgacaaaagc

SEQ ID NO: 4041284 - DNA, 25 bp, Homo sapien
gccggtgccgaaactcatagaagta

SEQ ID NO: 4041285 - DNA, 25 bp, Homo sapien
gatatcgagctgtgatcagtgcagg

SEQ ID NO: 4041286 - DNA, 25 bp, Homo sapien
atatcgagctgtgatcagtgcaggg

SEQ ID NO: 4041287 - DNA, 25 bp, Homo sapien
gtctcggatttcagtcagggagtgc

SEQ ID NO: 4041288 - DNA, 25 bp, Homo sapien
agaacacatctccaagcaagtccag

SEQ ID NO: 4041289 - DNA, 25 bp, Homo sapien
aaagaacacatctccaagcaagtcc

SEQ ID NO: 4041290 - DNA, 25 bp, Homo sapien
ccagaagactgtctcggatttcagt

SEQ ID NO: 4041291 - DNA, 25 bp, Homo sapien
gttttgtatcagatggagggcaagg

SEQ ID NO: 4041292 - DNA, 25 bp, Homo sapien
caggatgttttgtatcagatggagg

SEQ ID NO: 4041293 - DNA, 25 bp, Homo sapien
aggatgttttgtatcagatggaggg

SEQ ID NO: 4041294 - DNA, 25 bp, Homo sapien
tttgtatcagatggagggcaaggga

SEQ ID NO: 4041295 - DNA, 25 bp, Homo sapien
ttgccctctttcagagagagtaaag

SEQ ID NO: 4041296 - DNA, 25 bp, Homo sapien
gagagagtaaaggtgatcactgtgt

SEQ ID NO: 4041297 - DNA, 25 bp, Homo sapien
taaaggtgatcactgtgtgcttggc

SEQ ID NO: 4041298 - DNA, 25 bp, Homo sapien
tgccctctttcagagagagtaaagg

SEQ ID NO: 4041299 - DNA, 25 bp, Homo sapien
tgatgtcttctgtggaaatgcccag

SEQ ID NO: 4041300 - DNA, 25 bp, Homo sapien
aatacctgatgtcttctgtggaaat

SEQ ID NO: 4041301 - DNA, 25 bp, Homo sapien
tacctgatgtcttctgtggaaatgc

SEQ ID NO: 4041302 - DNA, 25 bp, Homo sapien
cctgatgtcttctgtggaaatgccc

SEQ ID NO: 4041303 - DNA, 25 bp, Homo sapien
gaagccaaagctgcatcacggtttg

SEQ ID NO: 4041304 - DNA, 25 bp, Homo sapien
gccaaagctgcatcacggtttgagg

SEQ ID NO: 4041305 - DNA, 25 bp, Homo sapien
aagccaaagctgcatcacggtttga

SEQ ID NO: 4041306 - DNA, 25 bp, Homo sapien
caaagctgcatcacggtttgaggga

SEQ ID NO: 4041307 - DNA, 25 bp, Homo sapien
aatgctttctgagacaatagatcta

SEQ ID NO: 4041308 - DNA, 25 bp, Homo sapien
ttggagggttttgtcctcaggcacc

SEQ ID NO: 4041309 - DNA, 25 bp, Homo sapien
ccttggagggttttgtcctcaggca

SEQ ID NO: 4041310 - DNA, 25 bp, Homo sapien
ctccttggagggttttgtcctcagg

SEQ ID NO: 4041311 - DNA, 25 bp, Homo sapien
agcagctccttggagggttttgtcc

SEQ ID NO: 4041312 - DNA, 25 bp, Homo sapien
cgcattgttaccacagaaatgtgca

SEQ ID NO: 4041313 - DNA, 25 bp, Homo sapien
attgttaccacagaaatgtgcaacc

SEQ ID NO: 4041314 - DNA, 25 bp, Homo sapien
gttaccacagaaatgtgcaaccacc

SEQ ID NO: 4041315 - DNA, 25 bp, Homo sapien
ctgacgcattgttaccacagaaatg

SEQ ID NO: 4041316 - DNA, 25 bp, Homo sapien
gaaggtggcaaggtgttaacagtat

SEQ ID NO: 4041317 - DNA, 25 bp, Homo sapien
aggaaggtggcaaggtgttaacagt

SEQ ID NO: 4041318 - DNA, 25 bp, Homo sapien
ggtggcaaggtgttaacagtatacg

SEQ ID NO: 4041319 - DNA, 25 bp, Homo sapien
ggcaaggtgttaacagtatacgtac

SEQ ID NO: 4041320 - DNA, 25 bp, Homo sapien
tctcataatcatgggcctccaggta

SEQ ID NO: 4041321 - DNA, 25 bp, Homo sapien
gaataagcctttggccatgggagac

SEQ ID NO: 4041322 - DNA, 25 bp, Homo sapien
tccaggtaagggatgatggccaccc

SEQ ID NO: 4041323 - DNA, 25 bp, Homo sapien
tccatgatggctttgtggaataagc

SEQ ID NO: 4041324 - DNA, 25 bp, Homo sapien
gtccccaccgaagaactcgatgttc

SEQ ID NO: 4041325 - DNA, 25 bp, Homo sapien
tccccaccgaagaactcgatgttct

SEQ ID NO: 4041326 - DNA, 25 bp, Homo sapien
ccgaagaactcgatgttcttctgga

SEQ ID NO: 4041327 - DNA, 25 bp, Homo sapien
agaactcgatgttcttctggaccca

SEQ ID NO: 4041328 - DNA, 25 bp, Homo sapien
tgaggacaagaggcagggtgagaat

SEQ ID NO: 4041329 - DNA, 25 bp, Homo sapien
gaggacaagaggcagggtgagaatt

SEQ ID NO: 4041330 - DNA, 25 bp, Homo sapien
ctgaggacaagaggcagggtgagaa

SEQ ID NO: 4041331 - DNA, 25 bp, Homo sapien
tttgttcattgtcccggaaggctcg

SEQ ID NO: 4041332 - DNA, 25 bp, Homo sapien
gatctgggatgtccatcatttggag

SEQ ID NO: 4041333 - DNA, 25 bp, Homo sapien
tgtctatggctactgcactgctgcc

SEQ ID NO: 4041334 - DNA, 25 bp, Homo sapien
tccttcttaggttgctgggcactgt

SEQ ID NO: 4041335 - DNA, 25 bp, Homo sapien
ccagggcggacccatcaaagatgga

SEQ ID NO: 4041336 - DNA, 25 bp, Homo sapien
tattcctagccggtactggacgacc

SEQ ID NO: 4041337 - DNA, 25 bp, Homo sapien
gaggctgagccagtcttgaaggcac

SEQ ID NO: 4041338 - DNA, 25 bp, Homo sapien
agcacgtcctcataggcagccaggg

SEQ ID NO: 4041339 - DNA, 25 bp, Homo sapien
gttgatctaagagcagccactctga

SEQ ID NO: 4041340 - DNA, 25 bp, Homo sapien
gaatttcgggtaatgcaccttgagc

SEQ ID NO: 4041341 - DNA, 25 bp, Homo sapien
caggcgcatagatgttcaggtagag

SEQ ID NO: 4041342 - DNA, 25 bp, Homo sapien
gtcttctgacactccgaatttcggg

SEQ ID NO: 4041343 - DNA, 25 bp, Homo sapien
gcaagttatcccagggcgatgcagg

SEQ ID NO: 4041344 - DNA, 25 bp, Homo sapien
tcgtaaatcgcagggatcccagcgg

SEQ ID NO: 4041345 - DNA, 25 bp, Homo sapien
aacacgttcacaggcacagggcttc

SEQ ID NO: 4041346 - DNA, 25 bp, Homo sapien
tgcaggctgcgggttcgtaaatcgc

SEQ ID NO: 4041347 - DNA, 25 bp, Homo sapien
gctggcatatctgtgcagcacctgc

SEQ ID NO: 4041348 - DNA, 25 bp, Homo sapien
cactgctggcatatctgtgcagcac

SEQ ID NO: 4041349 - DNA, 25 bp, Homo sapien
tggcatatctgtgcagcacctgcat

SEQ ID NO: 4041350 - DNA, 25 bp, Homo sapien
ctgctggcatatctgtgcagcacct

SEQ ID NO: 4041351 - DNA, 25 bp, Homo sapien
cctcctttcccattggatatctcac

SEQ ID NO: 4041352 - DNA, 25 bp, Homo sapien
gagagccctcctttcccattggata

SEQ ID NO: 4041353 - DNA, 25 bp, Homo sapien
ccaccccatcttctgagagccctcc

SEQ ID NO: 4041354 - DNA, 25 bp, Homo sapien
ttctgagagccctcctttcccattg

SEQ ID NO: 4041355 - DNA, 25 bp, Homo sapien
ctgggtgcacccaattcccactcat

SEQ ID NO: 4041356 - DNA, 25 bp, Homo sapien
aaggacccagatagcccaaattagg

SEQ ID NO: 4041357 - DNA, 25 bp, Homo sapien
ggcctgggtgcacccaattcccact

SEQ ID NO: 4041358 - DNA, 25 bp, Homo sapien
ccaaattaggatctggcctgggtgc

SEQ ID NO: 4041359 - DNA, 25 bp, Homo sapien
taacaggcaaatgctgaataggcag

SEQ ID NO: 4041360 - DNA, 25 bp, Homo sapien
ggcagcagagttactgaagatcagc

SEQ ID NO: 4041361 - DNA, 25 bp, Homo sapien
tctgtgaacattgacggcggctgct

SEQ ID NO: 4041362 - DNA, 25 bp, Homo sapien
agagagcttcagttgggagccagaa

SEQ ID NO: 4041363 - DNA, 25 bp, Homo sapien
tccctgttctcccagattgctctgc

SEQ ID NO: 4041364 - DNA, 25 bp, Homo sapien
cctgttctcccagattgctctgctg

SEQ ID NO: 4041365 - DNA, 25 bp, Homo sapien
ccctgttctcccagattgctctgct

SEQ ID NO: 4041366 - DNA, 25 bp, Homo sapien
acctctgcaggccactatctcccat

SEQ ID NO: 4041367 - DNA, 25 bp, Homo sapien
caatatacttcatcactgtacccca

SEQ ID NO: 4041368 - DNA, 25 bp, Homo sapien
atcactgtaccccacctctgcaggc

SEQ ID NO: 4041369 - DNA, 25 bp, Homo sapien
gtaccccacctctgcaggccactat

SEQ ID NO: 4041370 - DNA, 25 bp, Homo sapien
gccttaggtcttttatggagattga

SEQ ID NO: 4041371 - DNA, 25 bp, Homo sapien
gcagcaatggatactgaacttgttc

SEQ ID NO: 4041372 - DNA, 25 bp, Homo sapien
gctgcaaccagcatgaagactatgt

SEQ ID NO: 4041373 - DNA, 25 bp, Homo sapien
gaacttgttcttctaactctgctgc

SEQ ID NO: 4041374 - DNA, 25 bp, Homo sapien
agactgtaccatgggagtacagatt

SEQ ID NO: 4041375 - DNA, 25 bp, Homo sapien
gtagactgtaccatgggagtacaga

SEQ ID NO: 4041376 - DNA, 25 bp, Homo sapien
tagactgtaccatgggagtacagat

SEQ ID NO: 4041377 - DNA, 25 bp, Homo sapien
gactgtaccatgggagtacagattc

SEQ ID NO: 4041378 - DNA, 25 bp, Homo sapien
ccagagaccactgtgtgtctggcac

SEQ ID NO: 4041379 - DNA, 25 bp, Homo sapien
cagagaccactgtgtgtctggcact

SEQ ID NO: 4041380 - DNA, 25 bp, Homo sapien
cactgggttggcagccaaattgact

SEQ ID NO: 4041381 - DNA, 25 bp, Homo sapien
gggttggcagccaaattgactctct

SEQ ID NO: 4041382 - DNA, 25 bp, Homo sapien
ataatggaagtcttggtggttacat

SEQ ID NO: 4041383 - DNA, 25 bp, Homo sapien
tttcaacagggaaggatcgcagcct

SEQ ID NO: 4041384 - DNA, 25 bp, Homo sapien
gcagccaaaattcctcatccttgtt

SEQ ID NO: 4041385 - DNA, 25 bp, Homo sapien
gcacgtggtttagcagccagcagca

SEQ ID NO: 4041386 - DNA, 25 bp, Homo sapien
ctgggattgtctgtctgttagcacg

SEQ ID NO: 4041387 - DNA, 25 bp, Homo sapien
cctttttgactgtgcatttggctgc

SEQ ID NO: 4041388 - DNA, 25 bp, Homo sapien
aatactgctttgatccttctgccga

SEQ ID NO: 4041389 - DNA, 25 bp, Homo sapien
cctcaaactaaatccttcctctttg

SEQ ID NO: 4041390 - DNA, 25 bp, Homo sapien
aaatccttcctctttgatctcagcc

SEQ ID NO: 4041391 - DNA, 25 bp, Homo sapien
ggcacagcataatggcaccagacac

SEQ ID NO: 4041392 - DNA, 25 bp, Homo sapien
ctggcacagcataatggcaccagac

SEQ ID NO: 4041393 - DNA, 25 bp, Homo sapien
cacagcataatggcaccagacactc

SEQ ID NO: 4041394 - DNA, 25 bp, Homo sapien
cagcataatggcaccagacactcat

SEQ ID NO: 4041395 - DNA, 25 bp, Homo sapien
gcagaaaacggagaaccctcgtaca

SEQ ID NO: 4041396 - DNA, 25 bp, Homo sapien
aggaaaaaacggatgctggcaagag

SEQ ID NO: 4041397 - DNA, 25 bp, Homo sapien
aagacaggaaaaaacggatgctggc

SEQ ID NO: 4041398 - DNA, 25 bp, Homo sapien
gacaggaaaaaacggatgctggcaa

SEQ ID NO: 4041399 - DNA, 25 bp, Homo sapien
agacggtcttccttcctacagctga

SEQ ID NO: 4041400 - DNA, 25 bp, Homo sapien
tctatggagaaggactctgcggttc

SEQ ID NO: 4041401 - DNA, 25 bp, Homo sapien
gacagctccttgtgcccagtcatgt

SEQ ID NO: 4041402 - DNA, 25 bp, Homo sapien
tacagctgacggttgcttcaccagg

SEQ ID NO: 4041403 - DNA, 25 bp, Homo sapien
tggtgtccaaaataatgagaattac

SEQ ID NO: 4041404 - DNA, 25 bp, Homo sapien
gtccaaaataatgagaattactcat

SEQ ID NO: 4041405 - DNA, 25 bp, Homo sapien
gtgtccaaaataatgagaattactc

SEQ ID NO: 4041406 - DNA, 25 bp, Homo sapien
ccagttggtgtccaaaataatgaga

SEQ ID NO: 4041407 - DNA, 25 bp, Homo sapien
tgagtgacaccgaaagaattctgag

SEQ ID NO: 4041408 - DNA, 25 bp, Homo sapien
gacctgattcatagtcatgtgcctg

SEQ ID NO: 4041409 - DNA, 25 bp, Homo sapien
aggagcatcaaaccttctgggcctc

SEQ ID NO: 4041410 - DNA, 25 bp, Homo sapien
tttgctagcgctattccaacacctg

SEQ ID NO: 4041411 - DNA, 25 bp, Homo sapien
actgagccccacaattgggcaaagg

SEQ ID NO: 4041412 - DNA, 25 bp, Homo sapien
tttcatctcagcgttgctgccccaa

SEQ ID NO: 4041413 - DNA, 25 bp, Homo sapien
caagagggatggaccaactgagccc

SEQ ID NO: 4041414 - DNA, 25 bp, Homo sapien
tggaatgatcccaagagggatggac

SEQ ID NO: 4041415 - DNA, 25 bp, Homo sapien
tgagtcacccgctctttcaaacagc

SEQ ID NO: 4041416 - DNA, 25 bp, Homo sapien
caaacagccagtagaggtggggatg

SEQ ID NO: 4041417 - DNA, 25 bp, Homo sapien
aacagccagtagaggtggggatgcg

SEQ ID NO: 4041418 - DNA, 25 bp, Homo sapien
agtcacccgctctttcaaacagcca

SEQ ID NO: 4041419 - DNA, 25 bp, Homo sapien
cttgtcaccaaaaccataggtaact

SEQ ID NO: 4041420 - DNA, 25 bp, Homo sapien
caaaaccataggtaacttgtcctcg

SEQ ID NO: 4041421 - DNA, 25 bp, Homo sapien
tcgaagaagtacaccccattcttca

SEQ ID NO: 4041422 - DNA, 25 bp, Homo sapien
ccataggtaacttgtcctcgaagaa

SEQ ID NO: 4041423 - DNA, 25 bp, Homo sapien
gaatgagaaaacctagctgcgtggc

SEQ ID NO: 4041424 - DNA, 25 bp, Homo sapien
aactattcagtctgatacacatggg

SEQ ID NO: 4041425 - DNA, 25 bp, Homo sapien
taaacgaagaaagactaagaggaca

SEQ ID NO: 4041426 - DNA, 25 bp, Homo sapien
gcctcaaaattaggaaagctaacag

SEQ ID NO: 4041427 - DNA, 25 bp, Homo sapien
cattacacctccagacttcacaaaa

SEQ ID NO: 4041428 - DNA, 25 bp, Homo sapien
cacctccagacttcacaaaactttt

SEQ ID NO: 4041429 - DNA, 25 bp, Homo sapien
tacacctccagacttcacaaaactt

SEQ ID NO: 4041430 - DNA, 25 bp, Homo sapien
agcctgtgtctgtccattacacctc

SEQ ID NO: 4041431 - DNA, 25 bp, Homo sapien
atattaagcacagcatacattagcc

SEQ ID NO: 4041432 - DNA, 25 bp, Homo sapien
gatattaagcacagcatacattagc

SEQ ID NO: 4041433 - DNA, 25 bp, Homo sapien
agatattaagcacagcatacattag

SEQ ID NO: 4041434 - DNA, 25 bp, Homo sapien
ctagatattaagcacagcatacatt

SEQ ID NO: 4041435 - DNA, 25 bp, Homo sapien
taactgcatttagcttagcacagcc

SEQ ID NO: 4041436 - DNA, 25 bp, Homo sapien
gttgctgctttagacctgggttcca

SEQ ID NO: 4041437 - DNA, 25 bp, Homo sapien
ggaaattactgacgccagccagctg

SEQ ID NO: 4041438 - DNA, 25 bp, Homo sapien
tagcacagcccaggagttacattag

SEQ ID NO: 4041439 - DNA, 25 bp, Homo sapien
agctataaacaacttggtggtcagc

SEQ ID NO: 4041440 - DNA, 25 bp, Homo sapien
gccaaaagaagagtggacatgccat

SEQ ID NO: 4041441 - DNA, 25 bp, Homo sapien
tggtggtcagcagccaaaagaagag

SEQ ID NO: 4041442 - DNA, 25 bp, Homo sapien
ataaacaacttggtggtcagcagcc

SEQ ID NO: 4041443 - DNA, 25 bp, Homo sapien
gcaaaatttaactcaagctatgtaa

SEQ ID NO: 4041444 - DNA, 25 bp, Homo sapien
agcaaaatttaactcaagctatgta

SEQ ID NO: 4041445 - DNA, 25 bp, Homo sapien
aaatttaactcaagctatgtaaatg

SEQ ID NO: 4041446 - DNA, 25 bp, Homo sapien
caaaatttaactcaagctatgtaaa

SEQ ID NO: 4041447 - DNA, 25 bp, Homo sapien
cacaaagatggtattgcaggatcct

SEQ ID NO: 4041448 - DNA, 25 bp, Homo sapien
ggtattactcaagacttctttctgt

SEQ ID NO: 4041449 - DNA, 25 bp, Homo sapien
gtatgtaccaacgtaatattcctga

SEQ ID NO: 4041450 - DNA, 25 bp, Homo sapien
tctttctgtatgtaccaacgtaata

SEQ ID NO: 4041451 - DNA, 25 bp, Homo sapien
tcaaaccatagcagaatcttaggta

SEQ ID NO: 4041452 - DNA, 25 bp, Homo sapien
tggtggggactctgaagcgtccaaa

SEQ ID NO: 4041453 - DNA, 25 bp, Homo sapien
taggtagcctaggttgaagacatga

SEQ ID NO: 4041454 - DNA, 25 bp, Homo sapien
tttattacaataatggaggctggga

SEQ ID NO: 4041455 - DNA, 25 bp, Homo sapien
ccatcattagaagactagctgagta

SEQ ID NO: 4041456 - DNA, 25 bp, Homo sapien
tgaaaaagttccatatgacctgata

SEQ ID NO: 4041457 - DNA, 25 bp, Homo sapien
tgcaaccaagcaattctacacaaag

SEQ ID NO: 4041458 - DNA, 25 bp, Homo sapien
gaaatgcatacaccatgcaaccaag

SEQ ID NO: 4041459 - DNA, 25 bp, Homo sapien
gtttacagtgtacataaaggagtta

SEQ ID NO: 4041460 - DNA, 25 bp, Homo sapien
ggagttatattataaatgccacacc

SEQ ID NO: 4041461 - DNA, 25 bp, Homo sapien
ctgagaaggaatggtttacagtgta

SEQ ID NO: 4041462 - DNA, 25 bp, Homo sapien
gttatattataaatgccacaccaac

SEQ ID NO: 4041463 - DNA, 25 bp, Homo sapien
tatgtcacagtttgatcagcaggag

SEQ ID NO: 4041464 - DNA, 25 bp, Homo sapien
tagcttctggctggaactcttgaat

SEQ ID NO: 4041465 - DNA, 25 bp, Homo sapien
cagctgggaacatcttctggcatga

SEQ ID NO: 4041466 - DNA, 25 bp, Homo sapien
caacatctgagcctagctgtagctt

SEQ ID NO: 4041467 - DNA, 25 bp, Homo sapien
cattgtggtggagcgcatcattctt

SEQ ID NO: 4041468 - DNA, 25 bp, Homo sapien
gtggagcgcatcattctttagcttc

SEQ ID NO: 4041469 - DNA, 25 bp, Homo sapien
tgtggtggagcgcatcattctttag

SEQ ID NO: 4041470 - DNA, 25 bp, Homo sapien
cctcattgtggtggagcgcatcatt

SEQ ID NO: 4041471 - DNA, 25 bp, Homo sapien
gcttgcaagagtgggtattaatccc

SEQ ID NO: 4041472 - DNA, 25 bp, Homo sapien
aactgtgcctttgtcctatgggtca

SEQ ID NO: 4041473 - DNA, 25 bp, Homo sapien
tttccagagcccatatgaaaggtct

SEQ ID NO: 4041474 - DNA, 25 bp, Homo sapien
gagaaaactgtcagcaggactcagg

SEQ ID NO: 4041475 - DNA, 25 bp, Homo sapien
ctggctgatacaacaaggacgatga

SEQ ID NO: 4041476 - DNA, 25 bp, Homo sapien
caaggacgatgataacattgtgtca

SEQ ID NO: 4041477 - DNA, 25 bp, Homo sapien
taacattgtgtcataggaacgtgaa

SEQ ID NO: 4041478 - DNA, 25 bp, Homo sapien
cataggaacgtgaaaagtagggaag

SEQ ID NO: 4041479 - DNA, 25 bp, Homo sapien
tataatacctagtcttttgtgcctg

SEQ ID NO: 4041480 - DNA, 25 bp, Homo sapien
ggatacaggtcccttaacaggcata

SEQ ID NO: 4041481 - DNA, 25 bp, Homo sapien
tccagtttgctggtaggcagtatca

SEQ ID NO: 4041482 - DNA, 25 bp, Homo sapien
tagcagcaattgatgagggttccag

SEQ ID NO: 4041483 - DNA, 25 bp, Homo sapien
aagtgaattaagtctcccaaagttg

SEQ ID NO: 4041484 - DNA, 25 bp, Homo sapien
tggttttcacctttgagggagcaga

SEQ ID NO: 4041485 - DNA, 25 bp, Homo sapien
ggttctctgtcctcgcaactcggat

SEQ ID NO: 4041486 - DNA, 25 bp, Homo sapien
caaagttggccagagactaagagtc

SEQ ID NO: 4041487 - DNA, 25 bp, Homo sapien
ggtaacgctttcatattaagccaag

SEQ ID NO: 4041488 - DNA, 25 bp, Homo sapien
tcactctattcaagccaaaggcatc

SEQ ID NO: 4041489 - DNA, 25 bp, Homo sapien
tggaatccatgactttaggtaacgc

SEQ ID NO: 4041490 - DNA, 25 bp, Homo sapien
aaggcatccctgtgggattctctag

SEQ ID NO: 4041491 - DNA, 25 bp, Homo sapien
tctggtaggtctgagagatgtgcac

SEQ ID NO: 4041492 - DNA, 25 bp, Homo sapien
tttataacagaaacacttagtgcag

SEQ ID NO: 4041493 - DNA, 25 bp, Homo sapien
gatgtgcacaagtatgagttaggga

SEQ ID NO: 4041494 - DNA, 25 bp, Homo sapien
taaaatgcctaattcactgcgtgca

SEQ ID NO: 4041495 - DNA, 25 bp, Homo sapien
taaaatgaggcaaacccacactggg

SEQ ID NO: 4041496 - DNA, 25 bp, Homo sapien
caacgcagtcttgcagggatacagg

SEQ ID NO: 4041497 - DNA, 25 bp, Homo sapien
gaatttagtgcaaagacggcctcca

SEQ ID NO: 4041498 - DNA, 25 bp, Homo sapien
tttgctggaaactcccggtcgcttg

SEQ ID NO: 4041499 - DNA, 25 bp, Homo sapien
agatctgtaaatgcaagccgcgcca

SEQ ID NO: 4041500 - DNA, 25 bp, Homo sapien
tatttttattcgagagctccctggg

SEQ ID NO: 4041501 - DNA, 25 bp, Homo sapien
gacagtgtccgccatattgatcaga

SEQ ID NO: 4041502 - DNA, 25 bp, Homo sapien
gacgggcacagttttatccaaggta

SEQ ID NO: 4041503 - DNA, 25 bp, Homo sapien
ccattatcaccagaatacatcttga

SEQ ID NO: 4041504 - DNA, 25 bp, Homo sapien
cattatcaccagaatacatcttgat

SEQ ID NO: 4041505 - DNA, 25 bp, Homo sapien
ggccattatcaccagaatacatctt

SEQ ID NO: 4041506 - DNA, 25 bp, Homo sapien
gccattatcaccagaatacatcttg

SEQ ID NO: 4041507 - DNA, 25 bp, Homo sapien
gggagctcctgccttagcatttctt

SEQ ID NO: 4041508 - DNA, 25 bp, Homo sapien
gcttgagcttgacatgaacgtgcat

SEQ ID NO: 4041509 - DNA, 25 bp, Homo sapien
tctagggcataatgatgaggacagg

SEQ ID NO: 4041510 - DNA, 25 bp, Homo sapien
gaagttatccagatccctgatgaat

SEQ ID NO: 4041511 - DNA, 25 bp, Homo sapien
cagtgaactctgcttcgataagctt

SEQ ID NO: 4041512 - DNA, 25 bp, Homo sapien
gctttgtggaatgttcctgtctctt

SEQ ID NO: 4041513 - DNA, 25 bp, Homo sapien
tccacccgcaatggtcctggaatgc

SEQ ID NO: 4041514 - DNA, 25 bp, Homo sapien
ccgcaatggtcctggaatgcagtga

SEQ ID NO: 4041515 - DNA, 25 bp, Homo sapien
tccaccgtagacgtgctcagtaagc

SEQ ID NO: 4041516 - DNA, 25 bp, Homo sapien
gctccaccgtagacgtgctcagtaa

SEQ ID NO: 4041517 - DNA, 25 bp, Homo sapien
ccaccgtagacgtgctcagtaagca

SEQ ID NO: 4041518 - DNA, 25 bp, Homo sapien
accgtagacgtgctcagtaagcaag

SEQ ID NO: 4041519 - DNA, 25 bp, Homo sapien
gctgtagggctcatgtgatgttctg

SEQ ID NO: 4041520 - DNA, 25 bp, Homo sapien
cttcactgggcttgtgcactgttcg

SEQ ID NO: 4041521 - DNA, 25 bp, Homo sapien
gcactgttcgttctgacagatcttc

SEQ ID NO: 4041522 - DNA, 25 bp, Homo sapien
caggactttgaagcatgttgtgagt

SEQ ID NO: 4041523 - DNA, 25 bp, Homo sapien
ctggttatggagcccagagtggcag

SEQ ID NO: 4041524 - DNA, 25 bp, Homo sapien
ggttatggagcccagagtggcagca

SEQ ID NO: 4041525 - DNA, 25 bp, Homo sapien
tggagcccagagtggcagcagtcca

SEQ ID NO: 4041526 - DNA, 25 bp, Homo sapien
agcccagagtggcagcagtccacag

SEQ ID NO: 4041527 - DNA, 25 bp, Homo sapien
gccttagggacattttgtgatcagt

SEQ ID NO: 4041528 - DNA, 25 bp, Homo sapien
atgaccagctgaagagccttaggga

SEQ ID NO: 4041529 - DNA, 25 bp, Homo sapien
gatcagtgggcgtcagcaagtccat

SEQ ID NO: 4041530 - DNA, 25 bp, Homo sapien
tttgtgatcagtgggcgtcagcaag

SEQ ID NO: 4041531 - DNA, 25 bp, Homo sapien
agggcctacatctgcatcacaaaag

SEQ ID NO: 4041532 - DNA, 25 bp, Homo sapien
cctctagccttagcccagggcctac

SEQ ID NO: 4041533 - DNA, 25 bp, Homo sapien
gcccagggcctacatctgcatcaca

SEQ ID NO: 4041534 - DNA, 25 bp, Homo sapien
ccagggcctacatctgcatcacaaa

SEQ ID NO: 4041535 - DNA, 25 bp, Homo sapien
tggaagaacaggtcagtcttgttca

SEQ ID NO: 4041536 - DNA, 25 bp, Homo sapien
ggaagaacaggtcagtcttgttcat

SEQ ID NO: 4041537 - DNA, 25 bp, Homo sapien
taagcggcgtgtctgggctctaact

SEQ ID NO: 4041538 - DNA, 25 bp, Homo sapien
catgtggagttgagttatagtggcc

SEQ ID NO: 4041539 - DNA, 25 bp, Homo sapien
cctgctggaggatcttaagcggcgt

SEQ ID NO: 4041540 - DNA, 25 bp, Homo sapien
gagaagcgcttgtttcccatgtgga

SEQ ID NO: 4041541 - DNA, 25 bp, Homo sapien
gctgagcagccacgggcccatctcc

SEQ ID NO: 4041542 - DNA, 25 bp, Homo sapien
cctgctgagcagccacgggcccatc

SEQ ID NO: 4041543 - DNA, 25 bp, Homo sapien
gagcagccacgggcccatctcccag

SEQ ID NO: 4041544 - DNA, 25 bp, Homo sapien
ctgctgagcagccacgggcccatct

SEQ ID NO: 4041545 - DNA, 25 bp, Homo sapien
ttgttcaaaatacgggatatattag

SEQ ID NO: 4041546 - DNA, 25 bp, Homo sapien
ttgttcctaacaagagaagactggt

SEQ ID NO: 4041547 - DNA, 25 bp, Homo sapien
tgtgctggacttaacataacacttt

SEQ ID NO: 4041548 - DNA, 25 bp, Homo sapien
taacattgttgggagctggctttca

SEQ ID NO: 4041549 - DNA, 25 bp, Homo sapien
cctctgaggagatcagtggagccgc

SEQ ID NO: 4041550 - DNA, 25 bp, Homo sapien
caatgtggccgggaactctgggcaa

SEQ ID NO: 4041551 - DNA, 25 bp, Homo sapien
tctgagcaaagattccagttggacc

SEQ ID NO: 4041552 - DNA, 25 bp, Homo sapien
gaggtagcgacttctccttggagag

SEQ ID NO: 4041553 - DNA, 25 bp, Homo sapien
gcttcactcaagctcaagtgctctc

SEQ ID NO: 4041554 - DNA, 25 bp, Homo sapien
tcaagctcaagtgctctcctagctg

SEQ ID NO: 4041555 - DNA, 25 bp, Homo sapien
cactcaagctcaagtgctctcctag

SEQ ID NO: 4041556 - DNA, 25 bp, Homo sapien
ctgcttcactcaagctcaagtgctc

SEQ ID NO: 4041557 - DNA, 25 bp, Homo sapien
ctgccgcatgtaaacactaccagca

SEQ ID NO: 4041558 - DNA, 25 bp, Homo sapien
caacacggtaatgccggttcccctg

SEQ ID NO: 4041559 - DNA, 25 bp, Homo sapien
ccagcatcaacacggtaatgccggt

SEQ ID NO: 4041560 - DNA, 25 bp, Homo sapien
cactaccagcatcaacacggtaatg

SEQ ID NO: 4041561 - DNA, 25 bp, Homo sapien
tttttgggacaggatagtgcctgct

SEQ ID NO: 4041562 - DNA, 25 bp, Homo sapien
cctgcttggtggtgcagctatccag

SEQ ID NO: 4041563 - DNA, 25 bp, Homo sapien
gcttggtggtgcagctatccagaga

SEQ ID NO: 4041564 - DNA, 25 bp, Homo sapien
gtggtgcagctatccagagagcccc

SEQ ID NO: 4041565 - DNA, 25 bp, Homo sapien
tatactgattgtcaccagggtgctg

SEQ ID NO: 4041566 - DNA, 25 bp, Homo sapien
ctgattgtcaccagggtgctgcttc

SEQ ID NO: 4041567 - DNA, 25 bp, Homo sapien
cagcacactcgtgaccagccgccag

SEQ ID NO: 4041568 - DNA, 25 bp, Homo sapien
gctgttatactgattgtcaccaggg

SEQ ID NO: 4041569 - DNA, 25 bp, Homo sapien
agggaccccctgtgtaatgccagtt

SEQ ID NO: 4041570 - DNA, 25 bp, Homo sapien
cctgtgtgccaggataagggacccc

SEQ ID NO: 4041571 - DNA, 25 bp, Homo sapien
ctgtgtaatgccagttccggagcat

SEQ ID NO: 4041572 - DNA, 25 bp, Homo sapien
gcctgtgtgccaggataagggaccc

SEQ ID NO: 4041573 - DNA, 25 bp, Homo sapien
tttctgggacagcagcgccaagctg

SEQ ID NO: 4041574 - DNA, 25 bp, Homo sapien
ggctcctaccttctgtcttgcgtca

SEQ ID NO: 4041575 - DNA, 25 bp, Homo sapien
ggctctgctactcactggcttgctg

SEQ ID NO: 4041576 - DNA, 25 bp, Homo sapien
tcttgcgtcacattcagcctagggc

SEQ ID NO: 4041577 - DNA, 25 bp, Homo sapien
tgttcacctcggtcatgttttggac

SEQ ID NO: 4041578 - DNA, 25 bp, Homo sapien
ggagggtacccactgacaggcctct

SEQ ID NO: 4041579 - DNA, 25 bp, Homo sapien
cgtgtgcttgtacagcaggctgtgc

SEQ ID NO: 4041580 - DNA, 25 bp, Homo sapien
cagctctggacttgttggacccaca

SEQ ID NO: 4041581 - DNA, 25 bp, Homo sapien
aatgagatttggctccgtcgtggat

SEQ ID NO: 4041582 - DNA, 25 bp, Homo sapien
tgtcatccatgtcgtaaccagcggc

SEQ ID NO: 4041583 - DNA, 25 bp, Homo sapien
ttctaatccacagtggtcctgcgtg

SEQ ID NO: 4041584 - DNA, 25 bp, Homo sapien
gagaaattctctccctgtgcatgac

SEQ ID NO: 4041585 - DNA, 25 bp, Homo sapien
tatgggccagttttgtgacctgcgc

SEQ ID NO: 4041586 - DNA, 25 bp, Homo sapien
tacgaagagcgtctttgccaaactc

SEQ ID NO: 4041587 - DNA, 25 bp, Homo sapien
tctgagcactgatagaggtccccaa

SEQ ID NO: 4041588 - DNA, 25 bp, Homo sapien
gatttagcaggccaagcagaaactg

SEQ ID NO: 4041589 - DNA, 25 bp, Homo sapien
tgccaggacgcagctgtctcccagg

SEQ ID NO: 4041590 - DNA, 25 bp, Homo sapien
ctgctgccaggacgcagctgtctcc

SEQ ID NO: 4041591 - DNA, 25 bp, Homo sapien
aggaactggacacatccctgccctc

SEQ ID NO: 4041592 - DNA, 25 bp, Homo sapien
agctcccactggcaggaactggaca

SEQ ID NO: 4041593 - DNA, 25 bp, Homo sapien
gctgtcaggccgcaagcctagagcg

SEQ ID NO: 4041594 - DNA, 25 bp, Homo sapien
agcccagggaacagggccggcgtgt

SEQ ID NO: 4041595 - DNA, 25 bp, Homo sapien
agcctagagcgcaggatcccagcag

SEQ ID NO: 4041596 - DNA, 25 bp, Homo sapien
aggccgcaagcctagagcgcaggat

SEQ ID NO: 4041597 - DNA, 25 bp, Homo sapien
ttttggcctttgtaagacacacagc

SEQ ID NO: 4041598 - DNA, 25 bp, Homo sapien
tacagactgcttcacggactctttg

SEQ ID NO: 4041599 - DNA, 25 bp, Homo sapien
gacgttgatctcctggtagcatgac

SEQ ID NO: 4041600 - DNA, 25 bp, Homo sapien
tatcaagcccctgtctaacctacga

SEQ ID NO: 4041601 - DNA, 25 bp, Homo sapien
taaagccgccgttttcatgaccaat

SEQ ID NO: 4041602 - DNA, 25 bp, Homo sapien
gttggatttccggtcccggctgaca

SEQ ID NO: 4041603 - DNA, 25 bp, Homo sapien
tgaagaagaccagtcacagccattt

SEQ ID NO: 4041604 - DNA, 25 bp, Homo sapien
tgtcccgccgagtactatgtattac

SEQ ID NO: 4041605 - DNA, 25 bp, Homo sapien
tctttcttctgtagccggcggttcc

SEQ ID NO: 4041606 - DNA, 25 bp, Homo sapien
tggtcccaagaatgaggccaattgc

SEQ ID NO: 4041607 - DNA, 25 bp, Homo sapien
tgtacaagcggccaagagcatcatg

SEQ ID NO: 4041608 - DNA, 25 bp, Homo sapien
actcacatgcccaggacgagcttgg

SEQ ID NO: 4041609 - DNA, 25 bp, Homo sapien
gctatgctctcagcaaaacaaatta

SEQ ID NO: 4041610 - DNA, 25 bp, Homo sapien
taaaaacaaatagctatgctctcag

SEQ ID NO: 4041611 - DNA, 25 bp, Homo sapien
caaatagctatgctctcagcaaaac

SEQ ID NO: 4041612 - DNA, 25 bp, Homo sapien
aaaacaaatagctatgctctcagca

SEQ ID NO: 4041613 - DNA, 25 bp, Homo sapien
caaggcaggtaggttcacaccttac

SEQ ID NO: 4041614 - DNA, 25 bp, Homo sapien
gggcataaaactgaggtctgtaacc

SEQ ID NO: 4041615 - DNA, 25 bp, Homo sapien
gtggataatactggattcttcccaa

SEQ ID NO: 4041616 - DNA, 25 bp, Homo sapien
gaataacacagctaggaaaacgcag

SEQ ID NO: 4041617 - DNA, 25 bp, Homo sapien
gaccaaacccacaggctttagcact

SEQ ID NO: 4041618 - DNA, 25 bp, Homo sapien
agcccttcaaggtttactctcccat

SEQ ID NO: 4041619 - DNA, 25 bp, Homo sapien
ctcccatcttgcaaggcccacatct

SEQ ID NO: 4041620 - DNA, 25 bp, Homo sapien
catcttgttcaaggaccaaacccac

SEQ ID NO: 4041621 - DNA, 25 bp, Homo sapien
tgaatgaaaaccataaaccaaagct

SEQ ID NO: 4041622 - DNA, 25 bp, Homo sapien
cctaatttacttcaccaatgaatga

SEQ ID NO: 4041623 - DNA, 25 bp, Homo sapien
aaaaccataaaccaaagcttgctgc

SEQ ID NO: 4041624 - DNA, 25 bp, Homo sapien
ctaatttacttcaccaatgaatgaa

SEQ ID NO: 4041625 - DNA, 25 bp, Homo sapien
catttgtgggacgtacgcatgaggc

SEQ ID NO: 4041626 - DNA, 25 bp, Homo sapien
tatacagcggcaatgcagtcaagcc

SEQ ID NO: 4041627 - DNA, 25 bp, Homo sapien
gcaggagcaccagagttcacggaaa

SEQ ID NO: 4041628 - DNA, 25 bp, Homo sapien
tcaagccggctttggactggaggct

SEQ ID NO: 4041629 - DNA, 25 bp, Homo sapien
acggggtcagaggacgcaccttccg

SEQ ID NO: 4041630 - DNA, 25 bp, Homo sapien
ggcagccagcatccttcgacgcagg

SEQ ID NO: 4041631 - DNA, 25 bp, Homo sapien
cgcaccttccgaggggaggaagctc

SEQ ID NO: 4041632 - DNA, 25 bp, Homo sapien
agcatccttcgacgcagggtcacgg

SEQ ID NO: 4041633 - DNA, 25 bp, Homo sapien
aagcggctcccacgagcctcgaagt

SEQ ID NO: 4041634 - DNA, 25 bp, Homo sapien
accagcatgcgctgtctctcatcag

SEQ ID NO: 4041635 - DNA, 25 bp, Homo sapien
gctggaggagttcgtccttacgctg

SEQ ID NO: 4041636 - DNA, 25 bp, Homo sapien
tcatcagcagacttggagaagcggc

SEQ ID NO: 4041637 - DNA, 25 bp, Homo sapien
ggactgttcaatgcaggtctgatgc

SEQ ID NO: 4041638 - DNA, 25 bp, Homo sapien
atgcaggtctgatgctatctgaccg

SEQ ID NO: 4041639 - DNA, 25 bp, Homo sapien
tcaatgcaggtctgatgctatctga

SEQ ID NO: 4041640 - DNA, 25 bp, Homo sapien
tgttcaatgcaggtctgatgctatc

SEQ ID NO: 4041641 - DNA, 25 bp, Homo sapien
aaacagtaccaaaaacagtccagag

SEQ ID NO: 4041642 - DNA, 25 bp, Homo sapien
cagtaccaaaaacagtccagagtca

SEQ ID NO: 4041643 - DNA, 25 bp, Homo sapien
gtaccaaaaacagtccagagtcaca

SEQ ID NO: 4041644 - DNA, 25 bp, Homo sapien
gagaaacagtaccaaaaacagtcca

SEQ ID NO: 4041645 - DNA, 25 bp, Homo sapien
ttcaactgagcgtgtcagctggagg

SEQ ID NO: 4041646 - DNA, 25 bp, Homo sapien
tggaggtcctgcagtaccagatggt

SEQ ID NO: 4041647 - DNA, 25 bp, Homo sapien
cagtaccagatggtatggaacctgg

SEQ ID NO: 4041648 - DNA, 25 bp, Homo sapien
gaatccgtccttctaaaatattgtc

SEQ ID NO: 4041649 - DNA, 25 bp, Homo sapien
ctaaatgtgccaagtaagagaggtt

SEQ ID NO: 4041650 - DNA, 25 bp, Homo sapien
tataccacaccaacactaaccaaaa

SEQ ID NO: 4041651 - DNA, 25 bp, Homo sapien
caagtaacaagtatactgatatgct

SEQ ID NO: 4041652 - DNA, 25 bp, Homo sapien
tcactttgaacatcaatggcctaaa

SEQ ID NO: 4041653 - DNA, 25 bp, Homo sapien
aaataacctagggtatggcaatgac

SEQ ID NO: 4041654 - DNA, 25 bp, Homo sapien
gctgggttgacagctatactaaacc

SEQ ID NO: 4041655 - DNA, 25 bp, Homo sapien
ggtgctataactggccatccacatg

SEQ ID NO: 4041656 - DNA, 25 bp, Homo sapien
caagacaatgcggtattggcaaaag

SEQ ID NO: 4041657 - DNA, 25 bp, Homo sapien
cagagcagagtaagaccaacaaggt

SEQ ID NO: 4041658 - DNA, 25 bp, Homo sapien
ttcccagtgatcttcttaaagcagc

SEQ ID NO: 4041659 - DNA, 25 bp, Homo sapien
gaaaaggttagattatccgccacag

SEQ ID NO: 4041660 - DNA, 25 bp, Homo sapien
aacaaggtcatatacccggcacaca

SEQ ID NO: 4041661 - DNA, 25 bp, Homo sapien
aatgccaagaatgttggtggtgtgc

SEQ ID NO: 4041662 - DNA, 25 bp, Homo sapien
caagaatgttggtggtgtgcatcac

SEQ ID NO: 4041663 - DNA, 25 bp, Homo sapien
cctgcgtaatgccaagaatgttggt

SEQ ID NO: 4041664 - DNA, 25 bp, Homo sapien
gagttgctggcctgcgtaatgccaa

SEQ ID NO: 4041665 - DNA, 25 bp, Homo sapien
aaccgaaaaactcggcagccagctc

SEQ ID NO: 4041666 - DNA, 25 bp, Homo sapien
caaccgaaaaactcggcagccagct

SEQ ID NO: 4041667 - DNA, 25 bp, Homo sapien
tcaaccgaaaaactcggcagccagc

SEQ ID NO: 4041668 - DNA, 25 bp, Homo sapien
gctacacatttaaggctgcttttca

SEQ ID NO: 4041669 - DNA, 25 bp, Homo sapien
taatggattacatagccaggtctca

SEQ ID NO: 4041670 - DNA, 25 bp, Homo sapien
ccaggtctcatctctaatattgcta

SEQ ID NO: 4041671 - DNA, 25 bp, Homo sapien
tggaatggctatctcaaaggtcttg

SEQ ID NO: 4041672 - DNA, 25 bp, Homo sapien
aattcaaacaccctgtacagctgtc

SEQ ID NO: 4041673 - DNA, 25 bp, Homo sapien
ttaaaattcaaacaccctgtacagc

SEQ ID NO: 4041674 - DNA, 25 bp, Homo sapien
aaacaccctgtacagctgtcgaaaa

SEQ ID NO: 4041675 - DNA, 25 bp, Homo sapien
tcaaacaccctgtacagctgtcgaa

SEQ ID NO: 4041676 - DNA, 25 bp, Homo sapien
gtatcactgtcgaccacctccacct

SEQ ID NO: 4041677 - DNA, 25 bp, Homo sapien
acaggtcaggagcatcagtatcact

SEQ ID NO: 4041678 - DNA, 25 bp, Homo sapien
caggagcatcagtatcactgtcgac

SEQ ID NO: 4041679 - DNA, 25 bp, Homo sapien
ctcctgtcccactggaacgtcttca

SEQ ID NO: 4041680 - DNA, 25 bp, Homo sapien
tatgtaagtatgagtacactttaaa

SEQ ID NO: 4041681 - DNA, 25 bp, Homo sapien
ttttttgtatgtaagtatgagtaca

SEQ ID NO: 4041682 - DNA, 25 bp, Homo sapien
tgtatgtaagtatgagtacacttta

SEQ ID NO: 4041683 - DNA, 25 bp, Homo sapien
ttttgtatgtaagtatgagtacact

SEQ ID NO: 4041684 - DNA, 25 bp, Homo sapien
tgtgttggtttaagcgaggtctccc

SEQ ID NO: 4041685 - DNA, 25 bp, Homo sapien
tattgtcggcaatattaagagacat

SEQ ID NO: 4041686 - DNA, 25 bp, Homo sapien
tgatgttcttccctgacacgattat

SEQ ID NO: 4041687 - DNA, 25 bp, Homo sapien
gctgctacaggaaccaaattctcat

SEQ ID NO: 4041688 - DNA, 25 bp, Homo sapien
gaggtgtcttgttctagccaggaac

SEQ ID NO: 4041689 - DNA, 25 bp, Homo sapien
tgttctagccaggaacgaagacagg

SEQ ID NO: 4041690 - DNA, 25 bp, Homo sapien
aggaggtgtcttgttctagccagga

SEQ ID NO: 4041691 - DNA, 25 bp, Homo sapien
tgtcttgttctagccaggaacgaag

SEQ ID NO: 4041692 - DNA, 25 bp, Homo sapien
cagtcgtcattgttgacagccagct

SEQ ID NO: 4041693 - DNA, 25 bp, Homo sapien
agtttccgcgcagcctgcatggagt

SEQ ID NO: 4041694 - DNA, 25 bp, Homo sapien
tgcatggagtcccaacagatggcac

SEQ ID NO: 4041695 - DNA, 25 bp, Homo sapien
aaagatgtccacagggcagtttccg

SEQ ID NO: 4041696 - DNA, 25 bp, Homo sapien
cgtagatagttcttgtgccgacgaa

SEQ ID NO: 4041697 - DNA, 25 bp, Homo sapien
ctgcataaagatgaccaggctggcc

SEQ ID NO: 4041698 - DNA, 25 bp, Homo sapien
gacgaattcgacgttgcacctcatg

SEQ ID NO: 4041699 - DNA, 25 bp, Homo sapien
cctcatgaaacaggtaacgcagctg

SEQ ID NO: 4041700 - DNA, 25 bp, Homo sapien
gccctctgttagagctccttctgag

SEQ ID NO: 4041701 - DNA, 25 bp, Homo sapien
ggcttgccctctgttagagctcctt

SEQ ID NO: 4041702 - DNA, 25 bp, Homo sapien
tctgttagagctccttctgaggaaa

SEQ ID NO: 4041703 - DNA, 25 bp, Homo sapien
ttgccctctgttagagctccttctg

SEQ ID NO: 4041704 - DNA, 25 bp, Homo sapien
ggagagtgagctccatgacaaagtc

SEQ ID NO: 4041705 - DNA, 25 bp, Homo sapien
tgtgaatatggtgcatgaggtccag

SEQ ID NO: 4041706 - DNA, 25 bp, Homo sapien
tgtgtaatagacatacgtccccttt

SEQ ID NO: 4041707 - DNA, 25 bp, Homo sapien
cttcccacgtcccttcgtggttgag

SEQ ID NO: 4041708 - DNA, 25 bp, Homo sapien
gtaatgaagagagaaaacaccttag

SEQ ID NO: 4041709 - DNA, 25 bp, Homo sapien
tgaagagagaaaacaccttagtaat

SEQ ID NO: 4041710 - DNA, 25 bp, Homo sapien
ctgtaatgaagagagaaaacacctt

SEQ ID NO: 4041711 - DNA, 25 bp, Homo sapien
aatgaagagagaaaacaccttagta

SEQ ID NO: 4041712 - DNA, 25 bp, Homo sapien
aatcacatgagcagtcctcactgtc

SEQ ID NO: 4041713 - DNA, 25 bp, Homo sapien
cgtaaaatcacatgagcagtcctca

SEQ ID NO: 4041714 - DNA, 25 bp, Homo sapien
acatgagcagtcctcactgtcacaa

SEQ ID NO: 4041715 - DNA, 25 bp, Homo sapien
atgagcagtcctcactgtcacaaga

SEQ ID NO: 4041716 - DNA, 25 bp, Homo sapien
caacagggacaggactcgaccgtgg

SEQ ID NO: 4041717 - DNA, 25 bp, Homo sapien
ccaaggtgtgcattccgtgggtgta

SEQ ID NO: 4041718 - DNA, 25 bp, Homo sapien
catcggcgtggtgggcgagaaggaa

SEQ ID NO: 4041719 - DNA, 25 bp, Homo sapien
ccggtgatggagcagacggccgcca

SEQ ID NO: 4041720 - DNA, 25 bp, Homo sapien
tggacattcagcacaccaaagatga

SEQ ID NO: 4041721 - DNA, 25 bp, Homo sapien
atattcaaatcgatccttgcagagc

SEQ ID NO: 4041722 - DNA, 25 bp, Homo sapien
agacaagtccggcaaaccagaggca

SEQ ID NO: 4041723 - DNA, 25 bp, Homo sapien
ttcaaatcgatccttgcagagctga

SEQ ID NO: 4041724 - DNA, 25 bp, Homo sapien
cacagcaagcggtatttactagaac

SEQ ID NO: 4041725 - DNA, 25 bp, Homo sapien
tctcactcactcgaagagggccaaa

SEQ ID NO: 4041726 - DNA, 25 bp, Homo sapien
gatgagcttagccaccaacatcaaa

SEQ ID NO: 4041727 - DNA, 25 bp, Homo sapien
gagggccaaacacaatacactggat

SEQ ID NO: 4041728 - DNA, 25 bp, Homo sapien
aaaagtctgagtatactgatactaa

SEQ ID NO: 4041729 - DNA, 25 bp, Homo sapien
tgtgaactttgtaaccaaagctaca

SEQ ID NO: 4041730 - DNA, 25 bp, Homo sapien
tactgacctggcacagtatctcgca

SEQ ID NO: 4041731 - DNA, 25 bp, Homo sapien
aaaaagtagataagctgttgtgaac

SEQ ID NO: 4041732 - DNA, 25 bp, Homo sapien
caccaacaggtgcttatttatgacc

SEQ ID NO: 4041733 - DNA, 25 bp, Homo sapien
tatagtgctgtcaaagcttcaagtc

SEQ ID NO: 4041734 - DNA, 25 bp, Homo sapien
tataaaatagttaggcctgcctggg

SEQ ID NO: 4041735 - DNA, 25 bp, Homo sapien
gaatggttctactcttctactggag

SEQ ID NO: 4041736 - DNA, 25 bp, Homo sapien
gcagtgttcgtgaaaaagttgaatc

SEQ ID NO: 4041737 - DNA, 25 bp, Homo sapien
ttaatatctagcaggacttgcactg

SEQ ID NO: 4041738 - DNA, 25 bp, Homo sapien
tagcaggacttgcactggcagaagg

SEQ ID NO: 4041739 - DNA, 25 bp, Homo sapien
cttggcaggcagtgttcgtgaaaaa

SEQ ID NO: 4041740 - DNA, 25 bp, Homo sapien
cgcttcctgatgaagcacagtggga

SEQ ID NO: 4041741 - DNA, 25 bp, Homo sapien
gctcccgcgagcaaggccgcgcccc

SEQ ID NO: 4041742 - DNA, 25 bp, Homo sapien
actctccctcagcagcgctcccgcg

SEQ ID NO: 4041743 - DNA, 25 bp, Homo sapien
tctccctcagcagcgctcccgcgag

SEQ ID NO: 4041744 - DNA, 25 bp, Homo sapien
ctcagcagcgctcccgcgagcaagg

SEQ ID NO: 4041745 - DNA, 25 bp, Homo sapien
tgaggcccgtgtaggtgcggaggct

SEQ ID NO: 4041746 - DNA, 25 bp, Homo sapien
ctcgggctggctgagcgcgcggtag

SEQ ID NO: 4041747 - DNA, 25 bp, Homo sapien
aggccgttagctggtccggctcgcc

SEQ ID NO: 4041748 - DNA, 25 bp, Homo sapien
aagcgctcgaggaagagcagcggca

SEQ ID NO: 4041749 - DNA, 25 bp, Homo sapien
cccaggcttccctgcgctgcggccg

SEQ ID NO: 4041750 - DNA, 25 bp, Homo sapien
cgggcctctgcggcggcctcgcgaa

SEQ ID NO: 4041751 - DNA, 25 bp, Homo sapien
gcctcgcgaacggcgcccacgggct

SEQ ID NO: 4041752 - DNA, 25 bp, Homo sapien
gcagcggcgacctctggcccccagg

SEQ ID NO: 4041753 - DNA, 25 bp, Homo sapien
tggcgggacgggcgcaggggcgcgg

SEQ ID NO: 4041754 - DNA, 25 bp, Homo sapien
cgccgccgcctagcgggcgtagccc

SEQ ID NO: 4041755 - DNA, 25 bp, Homo sapien
ccgccgcccccagcgggacgctggc

SEQ ID NO: 4041756 - DNA, 25 bp, Homo sapien
ccctgccggcgcggaagagcctggg

SEQ ID NO: 4041757 - DNA, 25 bp, Homo sapien
acaccgttgttctcaaggaaggaca

SEQ ID NO: 4041758 - DNA, 25 bp, Homo sapien
ttggcaataaccaaacaagccttct

SEQ ID NO: 4041759 - DNA, 25 bp, Homo sapien
gttcttggtaactgcatcttactcc

SEQ ID NO: 4041760 - DNA, 25 bp, Homo sapien
agccttcttaaccaatacttctagt

SEQ ID NO: 4041761 - DNA, 25 bp, Homo sapien
cagtggtcttcatcacatggcgaaa

SEQ ID NO: 4041762 - DNA, 25 bp, Homo sapien
gaaaatagccctgtgactggcacca

SEQ ID NO: 4041763 - DNA, 25 bp, Homo sapien
tgaggatggaaaagctaccccaagc

SEQ ID NO: 4041764 - DNA, 25 bp, Homo sapien
gttacaaagaacatgagtggcctcg

SEQ ID NO: 4041765 - DNA, 25 bp, Homo sapien
catttaggagttgcaccttggactc

SEQ ID NO: 4041766 - DNA, 25 bp, Homo sapien
gagtatgtgcccaagaatggtatca

SEQ ID NO: 4041767 - DNA, 25 bp, Homo sapien
aattcctatgactactgatcgagcc

SEQ ID NO: 4041768 - DNA, 25 bp, Homo sapien
tgcaacattcaccatcctaaggtgg

SEQ ID NO: 4041769 - DNA, 25 bp, Homo sapien
tgtacaaaaaagtatgagcagaacc

SEQ ID NO: 4041770 - DNA, 25 bp, Homo sapien
gtatgagcagaaccgaaagtaaata

SEQ ID NO: 4041771 - DNA, 25 bp, Homo sapien
gttgtacaaaaaagtatgagcagaa

SEQ ID NO: 4041772 - DNA, 25 bp, Homo sapien
gagcagaaccgaaagtaaataaaca

SEQ ID NO: 4041773 - DNA, 25 bp, Homo sapien
gaaaggtggcaatttagggatcgca

SEQ ID NO: 4041774 - DNA, 25 bp, Homo sapien
aacaatagaaaggtggcaatttagg

SEQ ID NO: 4041775 - DNA, 25 bp, Homo sapien
tggcaatttagggatcgcaaaagag

SEQ ID NO: 4041776 - DNA, 25 bp, Homo sapien
tagggatcgcaaaagagataaaacc

SEQ ID NO: 4041777 - DNA, 25 bp, Homo sapien
cactgtatatagctgtgctcacaga

SEQ ID NO: 4041778 - DNA, 25 bp, Homo sapien
tattctacactgtatatagctgtgc

SEQ ID NO: 4041779 - DNA, 25 bp, Homo sapien
tctaccacatttattctacactgta

SEQ ID NO: 4041780 - DNA, 25 bp, Homo sapien
ccacatttattctacactgtatata

SEQ ID NO: 4041781 - DNA, 25 bp, Homo sapien
gagcagttgcacaaataccagaatg

SEQ ID NO: 4041782 - DNA, 25 bp, Homo sapien
cactgttgactgctatttaaccatc

SEQ ID NO: 4041783 - DNA, 25 bp, Homo sapien
tccgctcatatttacacactgttga

SEQ ID NO: 4041784 - DNA, 25 bp, Homo sapien
ttttaatacagacaactccgctcat

SEQ ID NO: 4041785 - DNA, 25 bp, Homo sapien
aatgatgggtccatatcctggtgca

SEQ ID NO: 4041786 - DNA, 25 bp, Homo sapien
gggtccatatcctggtgcattgtca

SEQ ID NO: 4041787 - DNA, 25 bp, Homo sapien
gctcaacagctgagggagactagaa

SEQ ID NO: 4041788 - DNA, 25 bp, Homo sapien
ggagactagaaatgatgggtccata

SEQ ID NO: 4041789 - DNA, 25 bp, Homo sapien
agaaacaacttcttatgttccttag

SEQ ID NO: 4041790 - DNA, 25 bp, Homo sapien
gcagtaaaccagtcaaccattcgag

SEQ ID NO: 4041791 - DNA, 25 bp, Homo sapien
cacaggatttatagcttgagatact

SEQ ID NO: 4041792 - DNA, 25 bp, Homo sapien
tttaccaggacttatctaacagata

SEQ ID NO: 4041793 - DNA, 25 bp, Homo sapien
tgttgggagaagcatactactttct

SEQ ID NO: 4041794 - DNA, 25 bp, Homo sapien
ttatgtcaaataccaccagggccaa

SEQ ID NO: 4041795 - DNA, 25 bp, Homo sapien
gctaagagatctgtggatcacatac

SEQ ID NO: 4041796 - DNA, 25 bp, Homo sapien
ccagatacattaacagtcacagaga

SEQ ID NO: 4041797 - DNA, 25 bp, Homo sapien
ggcctgaatagcacaagctaagaga

SEQ ID NO: 4041798 - DNA, 25 bp, Homo sapien
ttccacagcccctatcttcttgtcc

SEQ ID NO: 4041799 - DNA, 25 bp, Homo sapien
tgttcctggcaattcttaggtagtg

SEQ ID NO: 4041800 - DNA, 25 bp, Homo sapien
taaagccaagatgtgttcctggcaa

SEQ ID NO: 4041801 - DNA, 25 bp, Homo sapien
tcttaggtagtgaacaccagcatca

SEQ ID NO: 4041802 - DNA, 25 bp, Homo sapien
cgacgggtagcgcaattcattcact

SEQ ID NO: 4041803 - DNA, 25 bp, Homo sapien
ggcttgtaccatcaaacccagctga

SEQ ID NO: 4041804 - DNA, 25 bp, Homo sapien
caattgaaatgaatagctaggatac

SEQ ID NO: 4041805 - DNA, 25 bp, Homo sapien
tgtgatgtgctaactgttaaaggca

SEQ ID NO: 4041806 - DNA, 25 bp, Homo sapien
taccaatgcaatcgtcaatgaccca

SEQ ID NO: 4041807 - DNA, 25 bp, Homo sapien
ctccaccagttaccaatgcaatcgt

SEQ ID NO: 4041808 - DNA, 25 bp, Homo sapien
tcaatgacccagtcttgcaaaactc

SEQ ID NO: 4041809 - DNA, 25 bp, Homo sapien
aaaactccatcctgacgacccagta

SEQ ID NO: 4041810 - DNA, 25 bp, Homo sapien
caaaggtacatgctatatcaatatg

SEQ ID NO: 4041811 - DNA, 25 bp, Homo sapien
gctgaggtactgtttatcacgtttc

SEQ ID NO: 4041812 - DNA, 25 bp, Homo sapien
taaaagggccattctcatcacgtca

SEQ ID NO: 4041813 - DNA, 25 bp, Homo sapien
tcaatatggcttatcactaatgggc

SEQ ID NO: 4041814 - DNA, 25 bp, Homo sapien
gatgcttaattgtcacctctgtgtg

SEQ ID NO: 4041815 - DNA, 25 bp, Homo sapien
tatgcctttgcgtggatctttaaac

SEQ ID NO: 4041816 - DNA, 25 bp, Homo sapien
gtttcacaggtgcaaaatctcctct

SEQ ID NO: 4041817 - DNA, 25 bp, Homo sapien
taaacattcactatagaggcaaggc

SEQ ID NO: 4041818 - DNA, 25 bp, Homo sapien
aataactagtaagttgatggtattc

SEQ ID NO: 4041819 - DNA, 25 bp, Homo sapien
aaagccaaataactagtaagttgat

SEQ ID NO: 4041820 - DNA, 25 bp, Homo sapien
gccaaataactagtaagttgatggt

SEQ ID NO: 4041821 - DNA, 25 bp, Homo sapien
tccaaaataagcatcctttttacaa

SEQ ID NO: 4041822 - DNA, 25 bp, Homo sapien
gcgttttagtccttcaacttcatct

SEQ ID NO: 4041823 - DNA, 25 bp, Homo sapien
tctcctgggttaagttcaccaccag

SEQ ID NO: 4041824 - DNA, 25 bp, Homo sapien
atcttctcctgggttaagttcacca

SEQ ID NO: 4041825 - DNA, 25 bp, Homo sapien
ctctgtcattaagcgttttagtcct

SEQ ID NO: 4041826 - DNA, 25 bp, Homo sapien
catatttcagcataataaggcaatc

SEQ ID NO: 4041827 - DNA, 25 bp, Homo sapien
agattcaacgggtacatgtacaagt

SEQ ID NO: 4041828 - DNA, 25 bp, Homo sapien
tatgcttgaattcatgtcaattccc

SEQ ID NO: 4041829 - DNA, 25 bp, Homo sapien
tcaaaacaagtatcaaagtgaaggg

SEQ ID NO: 4041830 - DNA, 25 bp, Homo sapien
ttgaagaaagttgttcccagctgca

SEQ ID NO: 4041831 - DNA, 25 bp, Homo sapien
tttgaagaaagttgttcccagctgc

SEQ ID NO: 4041832 - DNA, 25 bp, Homo sapien
agtttgaagaaagttgttcccagct

SEQ ID NO: 4041833 - DNA, 25 bp, Homo sapien
tgaagaaagttgttcccagctgcag

SEQ ID NO: 4041834 - DNA, 25 bp, Homo sapien
catgcgctgaaatctggctgcaaca

SEQ ID NO: 4041835 - DNA, 25 bp, Homo sapien
tcaaattcttccctcatgcgctgaa

SEQ ID NO: 4041836 - DNA, 25 bp, Homo sapien
tagccggtgctcatgtacaatcaga

SEQ ID NO: 4041837 - DNA, 25 bp, Homo sapien
acagagctgtccttctcgtagaggg

SEQ ID NO: 4041838 - DNA, 25 bp, Homo sapien
agcgattgggcggtaccacagacat

SEQ ID NO: 4041839 - DNA, 25 bp, Homo sapien
gggcttcgtctgctggatgtacttg

SEQ ID NO: 4041840 - DNA, 25 bp, Homo sapien
gatgtacttgttgccgaactgagtg

SEQ ID NO: 4041841 - DNA, 25 bp, Homo sapien
gccagccggtctgcgagcgattggg

SEQ ID NO: 4041842 - DNA, 25 bp, Homo sapien
cattaacaggacagcgcaagaggag

SEQ ID NO: 4041843 - DNA, 25 bp, Homo sapien
aagaggaggcgtaggcacgccggaa

SEQ ID NO: 4041844 - DNA, 25 bp, Homo sapien
gttatctgcaatcccctcagcggct

SEQ ID NO: 4041845 - DNA, 25 bp, Homo sapien
caggcagggtagactttccccgtgc

SEQ ID NO: 4041846 - DNA, 25 bp, Homo sapien
tggtgcttcccattgggtagggccg

SEQ ID NO: 4041847 - DNA, 25 bp, Homo sapien
ttggtgcttcccattgggtagggcc

SEQ ID NO: 4041848 - DNA, 25 bp, Homo sapien
tgcttcccattgggtagggccggga

SEQ ID NO: 4041849 - DNA, 25 bp, Homo sapien
cggaaagtcggtgaatgggagcgac

SEQ ID NO: 4041850 - DNA, 25 bp, Homo sapien
aaagtcggtgaatgggagcgacaca

SEQ ID NO: 4041851 - DNA, 25 bp, Homo sapien
gaaagtcggtgaatgggagcgacac

SEQ ID NO: 4041852 - DNA, 25 bp, Homo sapien
ctcggaaagtcggtgaatgggagcg

SEQ ID NO: 4041853 - DNA, 25 bp, Homo sapien
ggacccagtccaggattgcatgttg

SEQ ID NO: 4041854 - DNA, 25 bp, Homo sapien
gttctatgacccctgaatacttcag

SEQ ID NO: 4041855 - DNA, 25 bp, Homo sapien
gaaatttacgttgatgccttattcc

SEQ ID NO: 4041856 - DNA, 25 bp, Homo sapien
ggctccattcaggtttcattatttg

SEQ ID NO: 4041857 - DNA, 25 bp, Homo sapien
gccattaaaagtgataccaagtgtg

SEQ ID NO: 4041858 - DNA, 25 bp, Homo sapien
tatctgcagggatctaaggtgtcca

SEQ ID NO: 4041859 - DNA, 25 bp, Homo sapien
gcaggccacaaatagacactgtcgg

SEQ ID NO: 4041860 - DNA, 25 bp, Homo sapien
cagttgaatgtcaaacggactgata

SEQ ID NO: 4041861 - DNA, 25 bp, Homo sapien
gcatgggtggtaccctggacctgta

SEQ ID NO: 4041862 - DNA, 25 bp, Homo sapien
caatgtctgtactcctcaaaggaag

SEQ ID NO: 4041863 - DNA, 25 bp, Homo sapien
tggagtgcatataaggctgcctgtg

SEQ ID NO: 4041864 - DNA, 25 bp, Homo sapien
tatgaatctgccaggaccagtccat

SEQ ID NO: 4041865 - DNA, 25 bp, Homo sapien
tcaaccctacttatctggacatgga

SEQ ID NO: 4041866 - DNA, 25 bp, Homo sapien
taagcttagcgtatgttgttctgaa

SEQ ID NO: 4041867 - DNA, 25 bp, Homo sapien
gctgcctcttcgtaagcatgagatt

SEQ ID NO: 4041868 - DNA, 25 bp, Homo sapien
cccaaatgggtgaataggcatcact

SEQ ID NO: 4041869 - DNA, 25 bp, Homo sapien
tgaggcactattcttgctgctctcc

SEQ ID NO: 4041870 - DNA, 25 bp, Homo sapien
gaaagctgaggagagtaagcttcct

SEQ ID NO: 4041871 - DNA, 25 bp, Homo sapien
gaagttatttcgctctgaggcacta

SEQ ID NO: 4041872 - DNA, 25 bp, Homo sapien
cttcctgagatattgaaggagtgca

SEQ ID NO: 4041873 - DNA, 25 bp, Homo sapien
gaataatcagatggccatcagcaac

SEQ ID NO: 4041874 - DNA, 25 bp, Homo sapien
gactagccatagtcctcctgagcca

SEQ ID NO: 4041875 - DNA, 25 bp, Homo sapien
tatcactgaagaagggactagccat

SEQ ID NO: 4041876 - DNA, 25 bp, Homo sapien
gatggccatcagcaacaacagccaa

SEQ ID NO: 4041877 - DNA, 25 bp, Homo sapien
gaaagcaagcggtggattattcccc

SEQ ID NO: 4041878 - DNA, 25 bp, Homo sapien
gaggcattggaagaccggtcactac

SEQ ID NO: 4041879 - DNA, 25 bp, Homo sapien
taagtgtgctcccagatctatagat

SEQ ID NO: 4041880 - DNA, 25 bp, Homo sapien
taattcatgaccatagcaaggctga

SEQ ID NO: 4041881 - DNA, 25 bp, Homo sapien
caacagccataccttttgtctctat

SEQ ID NO: 4041882 - DNA, 25 bp, Homo sapien
taacataaaactgaccagcttaccc

SEQ ID NO: 4041883 - DNA, 25 bp, Homo sapien
ttttagaaaaactcatacgtgattg

SEQ ID NO: 4041884 - DNA, 25 bp, Homo sapien
actcatacgtgattgcagccgggca

SEQ ID NO: 4041885 - DNA, 25 bp, Homo sapien
aagaaatgttttagcaggtatgccc

SEQ ID NO: 4041886 - DNA, 25 bp, Homo sapien
tgcaccctagccagttaagaaatgt

SEQ ID NO: 4041887 - DNA, 25 bp, Homo sapien
accatactattttggagaccacaat

SEQ ID NO: 4041888 - DNA, 25 bp, Homo sapien
cccctatgcatatggtaacgaacca

SEQ ID NO: 4041889 - DNA, 25 bp, Homo sapien
ggcaattctgatttggtggtgattt

SEQ ID NO: 4041890 - DNA, 25 bp, Homo sapien
gggcaattctgatttggtggtgatt

SEQ ID NO: 4041891 - DNA, 25 bp, Homo sapien
aagcaaaattggactctgaagccct

SEQ ID NO: 4041892 - DNA, 25 bp, Homo sapien
aaaaacctagtattattcagcaaca

SEQ ID NO: 4041893 - DNA, 25 bp, Homo sapien
aaagcattcatcctattccataaaa

SEQ ID NO: 4041894 - DNA, 25 bp, Homo sapien
tattcagcaacagtactactactga

SEQ ID NO: 4041895 - DNA, 25 bp, Homo sapien
tccaaagcaaaccagcataggtttt

SEQ ID NO: 4041896 - DNA, 25 bp, Homo sapien
gggttcaccagggtgtgatccaaag

SEQ ID NO: 4041897 - DNA, 25 bp, Homo sapien
caaagcaaaccagcataggttttta

SEQ ID NO: 4041898 - DNA, 25 bp, Homo sapien
caccagggtgtgatccaaagcaaac

SEQ ID NO: 4041899 - DNA, 25 bp, Homo sapien
ttgcatcccgacaagcagtgatcac

SEQ ID NO: 4041900 - DNA, 25 bp, Homo sapien
ttcgaattgcatcccgacaagcagt

SEQ ID NO: 4041901 - DNA, 25 bp, Homo sapien
cgcatgattttgaacagtgtgttga

SEQ ID NO: 4041902 - DNA, 25 bp, Homo sapien
aggaagaagctgtccccactcgcat

SEQ ID NO: 4041903 - DNA, 25 bp, Homo sapien
gagactgtctcaaacctagaaacca

SEQ ID NO: 4041904 - DNA, 25 bp, Homo sapien
gatcaaagctcatagtcacctagca

SEQ ID NO: 4041905 - DNA, 25 bp, Homo sapien
gaaaccaacagtcagttttacagaa

SEQ ID NO: 4041906 - DNA, 25 bp, Homo sapien
tctaaagaagtcaaagcatcgaccc

SEQ ID NO: 4041907 - DNA, 25 bp, Homo sapien
gaggtttcccaacagctctgtgtga

SEQ ID NO: 4041908 - DNA, 25 bp, Homo sapien
gattgttacagcgaattttatatcc

SEQ ID NO: 4041909 - DNA, 25 bp, Homo sapien
gcagacgacctgctctttgaattgc

SEQ ID NO: 4041910 - DNA, 25 bp, Homo sapien
tgatttactgctttgaggtttccca

SEQ ID NO: 4041911 - DNA, 25 bp, Homo sapien
ccttggttactggtcaatggttgat

SEQ ID NO: 4041912 - DNA, 25 bp, Homo sapien
gaaatgagatctatactacacaaca

SEQ ID NO: 4041913 - DNA, 25 bp, Homo sapien
gctttgaaaatacggataagttcca

SEQ ID NO: 4041914 - DNA, 25 bp, Homo sapien
taaagtggcctggttgacaactcag

SEQ ID NO: 4041915 - DNA, 25 bp, Homo sapien
tttgggcatgactgactaaaccact

SEQ ID NO: 4041916 - DNA, 25 bp, Homo sapien
ggtgactgacccctatcctgaagct

SEQ ID NO: 4041917 - DNA, 25 bp, Homo sapien
tagaacgaagtattagggaaggcgc

SEQ ID NO: 4041918 - DNA, 25 bp, Homo sapien
catatcacaagttcaggctgccaga

SEQ ID NO: 4041919 - DNA, 25 bp, Homo sapien
atcagtagatcccatgagttcaaga

SEQ ID NO: 4041920 - DNA, 25 bp, Homo sapien
tatacatactatgacttaatctaag

SEQ ID NO: 4041921 - DNA, 25 bp, Homo sapien
ggatcagtagatcccatgagttcaa

SEQ ID NO: 4041922 - DNA, 25 bp, Homo sapien
gacttaatctaagacatgaagaggg

SEQ ID NO: 4041923 - DNA, 25 bp, Homo sapien
tacaagtgtaaactaccgtgcccaa

SEQ ID NO: 4041924 - DNA, 25 bp, Homo sapien
cgtgcccaacctgaagccatgattt

SEQ ID NO: 4041925 - DNA, 25 bp, Homo sapien
gctctacgcattgaaaaggcctaaa

SEQ ID NO: 4041926 - DNA, 25 bp, Homo sapien
tgggaccatgtccaaaggtaactgt

SEQ ID NO: 4041927 - DNA, 25 bp, Homo sapien
aattagaatgatcagccatatcagc

SEQ ID NO: 4041928 - DNA, 25 bp, Homo sapien
atgtccctcatcagacgagcatcct

SEQ ID NO: 4041929 - DNA, 25 bp, Homo sapien
cactgagcttctgatgcactgaatg

SEQ ID NO: 4041930 - DNA, 25 bp, Homo sapien
tcagctccgaccagcaaacttcgga

SEQ ID NO: 4041931 - DNA, 25 bp, Homo sapien
gacccaaactgaagaagaccaaagc

SEQ ID NO: 4041932 - DNA, 25 bp, Homo sapien
tggagaccatgaacactcaggaatg

SEQ ID NO: 4041933 - DNA, 25 bp, Homo sapien
gtgctcaggagctaaacacttcctt

SEQ ID NO: 4041934 - DNA, 25 bp, Homo sapien
cactatttaccagatacagagaccc

SEQ ID NO: 4041935 - DNA, 25 bp, Homo sapien
tccgcttctacttgaaggtcttcaa

SEQ ID NO: 4041936 - DNA, 25 bp, Homo sapien
ggatgatatcaccagccaaatcaat

SEQ ID NO: 4041937 - DNA, 25 bp, Homo sapien
taactagcacctttcgtaattcctc

SEQ ID NO: 4041938 - DNA, 25 bp, Homo sapien
gcaaaaaatgatgccattgactgga

SEQ ID NO: 4041939 - DNA, 25 bp, Homo sapien
ttatttttatatgcaggtggccgcc

SEQ ID NO: 4041940 - DNA, 25 bp, Homo sapien
gatgtgaaacacacttgaaatggag

SEQ ID NO: 4041941 - DNA, 25 bp, Homo sapien
tctgaatgtgagtgtcttctggtaa

SEQ ID NO: 4041942 - DNA, 25 bp, Homo sapien
ggtggccgccattccgtaaagatgt

SEQ ID NO: 4041943 - DNA, 25 bp, Homo sapien
tgcctctagatatgaaggtacagcc

SEQ ID NO: 4041944 - DNA, 25 bp, Homo sapien
gcctctagatatgaaggtacagcca

SEQ ID NO: 4041945 - DNA, 25 bp, Homo sapien
cagccaaggttaaagtccactggta

SEQ ID NO: 4041946 - DNA, 25 bp, Homo sapien
taatagcagtaacaccatgcagtgg

SEQ ID NO: 4041947 - DNA, 25 bp, Homo sapien
cattgaaagagaaaagcgagatact

SEQ ID NO: 4041948 - DNA, 25 bp, Homo sapien
catgcagtggcttgcaacacaggtt

SEQ ID NO: 4041949 - DNA, 25 bp, Homo sapien
gctgtcttgtcgattcaaatacatg

SEQ ID NO: 4041950 - DNA, 25 bp, Homo sapien
agaatcgagggagctgtcttgtcga

SEQ ID NO: 4041951 - DNA, 25 bp, Homo sapien
aagttaacataactgattggctcac

SEQ ID NO: 4041952 - DNA, 25 bp, Homo sapien
tccaggctggtcagcgcatacatgg

SEQ ID NO: 4041953 - DNA, 25 bp, Homo sapien
taaaggtgcatcctaactcttgtag

SEQ ID NO: 4041954 - DNA, 25 bp, Homo sapien
cctgcatgcactaagggtttaaaat

SEQ ID NO: 4041955 - DNA, 25 bp, Homo sapien
gagtctacatatatacctgcatgca

SEQ ID NO: 4041956 - DNA, 25 bp, Homo sapien
gaaatgaactgtgacttgcaaaggg

SEQ ID NO: 4041957 - DNA, 25 bp, Homo sapien
tgaatgctgggatgtaccacgtggc

SEQ ID NO: 4041958 - DNA, 25 bp, Homo sapien
tgtaacccacgaatgccttcaagtg

SEQ ID NO: 4041959 - DNA, 25 bp, Homo sapien
tgcaaaaatcaatactgctcggatg

SEQ ID NO: 4041960 - DNA, 25 bp, Homo sapien
cacaatagggatgcagatggaactg

SEQ ID NO: 4041961 - DNA, 25 bp, Homo sapien
tctaaataccagctgtgagtactgt

SEQ ID NO: 4041962 - DNA, 25 bp, Homo sapien
gcacaggtgcctctaaataccagct

SEQ ID NO: 4041963 - DNA, 25 bp, Homo sapien
caagatggcacaggtgcctctaaat

SEQ ID NO: 4041964 - DNA, 25 bp, Homo sapien
ataccagctgtgagtactgtcttac

SEQ ID NO: 4041965 - DNA, 25 bp, Homo sapien
gcctcgttcagtggactggccaatt

SEQ ID NO: 4041966 - DNA, 25 bp, Homo sapien
gaaatgcgtaattctgtatgagcag

SEQ ID NO: 4041967 - DNA, 25 bp, Homo sapien
ggattatgccccgatgcccatcagc

SEQ ID NO: 4041968 - DNA, 25 bp, Homo sapien
tgagcagtttgggtctcattcccca

SEQ ID NO: 4041969 - DNA, 25 bp, Homo sapien
tacagtaatgcattacaggacaaat

SEQ ID NO: 4041970 - DNA, 25 bp, Homo sapien
ttctatgggtatggtccactgtatc

SEQ ID NO: 4041971 - DNA, 25 bp, Homo sapien
catttcctactcagtcaccaaaaca

SEQ ID NO: 4041972 - DNA, 25 bp, Homo sapien
ttcagagaactcacctcattagtgc

SEQ ID NO: 4041973 - DNA, 25 bp, Homo sapien
catatttgctgatcctcccggtcag

SEQ ID NO: 4041974 - DNA, 25 bp, Homo sapien
atttgctgatcctcccggtcagtct

SEQ ID NO: 4041975 - DNA, 25 bp, Homo sapien
gatcctcccggtcagtctcaacatt

SEQ ID NO: 4041976 - DNA, 25 bp, Homo sapien
tgatcctcccggtcagtctcaacat

SEQ ID NO: 4041977 - DNA, 25 bp, Homo sapien
ctggtcacattaggacctacaccta

SEQ ID NO: 4041978 - DNA, 25 bp, Homo sapien
tggtcacattaggacctacacctac

SEQ ID NO: 4041979 - DNA, 25 bp, Homo sapien
cttctgactcagctctcggatcagg

SEQ ID NO: 4041980 - DNA, 25 bp, Homo sapien
cttggcattttcctcatagttacgg

SEQ ID NO: 4041981 - DNA, 25 bp, Homo sapien
ctcagctctcggatcaggtcctgct

SEQ ID NO: 4041982 - DNA, 25 bp, Homo sapien
tcatagttacggagttccagcaaca

SEQ ID NO: 4041983 - DNA, 25 bp, Homo sapien
caatcaaatggaaaacgtgactttt

SEQ ID NO: 4041984 - DNA, 25 bp, Homo sapien
gaactacaggatctcggtacaaata

SEQ ID NO: 4041985 - DNA, 25 bp, Homo sapien
aaccgcaagtataaccaggtatact

SEQ ID NO: 4041986 - DNA, 25 bp, Homo sapien
ccaggtatacttttaggtcatcaat

SEQ ID NO: 4041987 - DNA, 25 bp, Homo sapien
ccccatccactgagcagcagattaa

SEQ ID NO: 4041988 - DNA, 25 bp, Homo sapien
cccatccactgagcagcagattaac

SEQ ID NO: 4041989 - DNA, 25 bp, Homo sapien
tccccatccactgagcagcagatta

SEQ ID NO: 4041990 - DNA, 25 bp, Homo sapien
tttccccatccactgagcagcagat

SEQ ID NO: 4041991 - DNA, 25 bp, Homo sapien
catccatccggtaatctccctctac

SEQ ID NO: 4041992 - DNA, 25 bp, Homo sapien
cttaaagatgacctccccagttcgg

SEQ ID NO: 4041993 - DNA, 25 bp, Homo sapien
cagttcggtcacttcgagcatcaac

SEQ ID NO: 4041994 - DNA, 25 bp, Homo sapien
taccacaccggcaattgcagaagaa

SEQ ID NO: 4041995 - DNA, 25 bp, Homo sapien
tcccattggaccaaccagttatcag

SEQ ID NO: 4041996 - DNA, 25 bp, Homo sapien
caaaagcatgaatgctcatggcatg

SEQ ID NO: 4041997 - DNA, 25 bp, Homo sapien
tccatcagaattaaggtcaaaagca

SEQ ID NO: 4041998 - DNA, 25 bp, Homo sapien
tatcagttcattcactccatcagaa

SEQ ID NO: 4041999 - DNA, 25 bp, Homo sapien
tcgactgccatacatgggacaaaga

SEQ ID NO: 4042000 - DNA, 25 bp, Homo sapien
gaaagggcataaccaaatcgactgc

SEQ ID NO: 4042001 - DNA, 25 bp, Homo sapien
ccagtatcgggatgttttgtcataa

SEQ ID NO: 4042002 - DNA, 25 bp, Homo sapien
tgtcataaactccaactgtgccatt

SEQ ID NO: 4042003 - DNA, 25 bp, Homo sapien
caaggttaccatagttcgaggtgga

SEQ ID NO: 4042004 - DNA, 25 bp, Homo sapien
tatcttcctattagggttgttgtaa

SEQ ID NO: 4042005 - DNA, 25 bp, Homo sapien
tttcttaccataacatacagctctg

SEQ ID NO: 4042006 - DNA, 25 bp, Homo sapien
tctgacagtactgatctatcttgct

SEQ ID NO: 4042007 - DNA, 25 bp, Homo sapien
tcttccttaaaaactcggatatcaa

SEQ ID NO: 4042008 - DNA, 25 bp, Homo sapien
tatcaaaatcctcagatccaacaag

SEQ ID NO: 4042009 - DNA, 25 bp, Homo sapien
aaaactcggatatcaaaatcctcag

SEQ ID NO: 4042010 - DNA, 25 bp, Homo sapien
ctcggatatcaaaatcctcagatcc

SEQ ID NO: 4042011 - DNA, 25 bp, Homo sapien
ggccaaggaattaacattgtctcca

SEQ ID NO: 4042012 - DNA, 25 bp, Homo sapien
aaagtcacacaaggccaaggaatta

SEQ ID NO: 4042013 - DNA, 25 bp, Homo sapien
gccaaggaattaacattgtctccag

SEQ ID NO: 4042014 - DNA, 25 bp, Homo sapien
aggccaaggaattaacattgtctcc

SEQ ID NO: 4042015 - DNA, 25 bp, Homo sapien
agcacaattgcatttgccccatctg

SEQ ID NO: 4042016 - DNA, 25 bp, Homo sapien
attgccaccaataatcgcaagaggg

SEQ ID NO: 4042017 - DNA, 25 bp, Homo sapien
tgaaaccttgcagagcacaattgcc

SEQ ID NO: 4042018 - DNA, 25 bp, Homo sapien
tgcagagcacaattgccaccaataa

SEQ ID NO: 4042019 - DNA, 25 bp, Homo sapien
gaagggattctaccagcagacagcc

SEQ ID NO: 4042020 - DNA, 25 bp, Homo sapien
ttaactggcccacgcacatatggat

SEQ ID NO: 4042021 - DNA, 25 bp, Homo sapien
tcttagacacgataatatgcaggcc

SEQ ID NO: 4042022 - DNA, 25 bp, Homo sapien
tatgcaggcccacatattaattggg

SEQ ID NO: 4042023 - DNA, 25 bp, Homo sapien
ctataacagtcatacaacaaacaga

SEQ ID NO: 4042024 - DNA, 25 bp, Homo sapien
caagcgattagcaaccataaccaaa

SEQ ID NO: 4042025 - DNA, 25 bp, Homo sapien
gaccaaaataaatgatctgatctct

SEQ ID NO: 4042026 - DNA, 25 bp, Homo sapien
taagttccgagtacataaagcagat

SEQ ID NO: 4042027 - DNA, 25 bp, Homo sapien
tctgtagaacaaatccgaattattg

SEQ ID NO: 4042028 - DNA, 25 bp, Homo sapien
ctctctgtagaacaaatccgaatta

SEQ ID NO: 4042029 - DNA, 25 bp, Homo sapien
tattgtagacatcataagccaaaag

SEQ ID NO: 4042030 - DNA, 25 bp, Homo sapien
caaatccgaattattgtagacatca

SEQ ID NO: 4042031 - DNA, 25 bp, Homo sapien
ttcaatacgcctgcagtcagacagc

SEQ ID NO: 4042032 - DNA, 25 bp, Homo sapien
cactgacatgctggttccgtgtatg

SEQ ID NO: 4042033 - DNA, 25 bp, Homo sapien
ccgtgtatgaggattatgaataaaa

SEQ ID NO: 4042034 - DNA, 25 bp, Homo sapien
tagccaagctcagggttcaatacgc

SEQ ID NO: 4042035 - DNA, 25 bp, Homo sapien
cgcggccggcggagatcctgtggtt

SEQ ID NO: 4042036 - DNA, 25 bp, Homo sapien
cggccggcggagatcctgtggttcc

SEQ ID NO: 4042037 - DNA, 25 bp, Homo sapien
gcggccggcggagatcctgtggttc

SEQ ID NO: 4042038 - DNA, 25 bp, Homo sapien
gcgcggccggcggagatcctgtggt

SEQ ID NO: 4042039 - DNA, 25 bp, Homo sapien
ccaggcacgggtgagtcccgtcgta

SEQ ID NO: 4042040 - DNA, 25 bp, Homo sapien
cagtttcagggtgaacacaggcagc

SEQ ID NO: 4042041 - DNA, 25 bp, Homo sapien
gtagcgccctatggccaccattcgg

SEQ ID NO: 4042042 - DNA, 25 bp, Homo sapien
gggctgattttgtggcgcagtttca

SEQ ID NO: 4042043 - DNA, 25 bp, Homo sapien
gaagtgcagggacactacctgcgcg

SEQ ID NO: 4042044 - DNA, 25 bp, Homo sapien
gcagtaatttactcctgcgggttga

SEQ ID NO: 4042045 - DNA, 25 bp, Homo sapien
ccttctgtggctgcgcagtggagcc

SEQ ID NO: 4042046 - DNA, 25 bp, Homo sapien
tgcgggttgaactctactgacgagc

SEQ ID NO: 4042047 - DNA, 25 bp, Homo sapien
gagacacgtgtcatcctcacatcag

SEQ ID NO: 4042048 - DNA, 25 bp, Homo sapien
cagaggagacacgtgtcatcctcac

SEQ ID NO: 4042049 - DNA, 25 bp, Homo sapien
acagctgggactcccgaggatctag

SEQ ID NO: 4042050 - DNA, 25 bp, Homo sapien
tcttcagaggagacacgtgtcatcc

SEQ ID NO: 4042051 - DNA, 25 bp, Homo sapien
aaggagaaagagctttcctcttcct

SEQ ID NO: 4042052 - DNA, 25 bp, Homo sapien
cttaacttccctccagtgtagtgag

SEQ ID NO: 4042053 - DNA, 25 bp, Homo sapien
tcctaattcagtgactacagttccc

SEQ ID NO: 4042054 - DNA, 25 bp, Homo sapien
tttcagcagcagcaactatgcccag

SEQ ID NO: 4042055 - DNA, 25 bp, Homo sapien
tacataagataacgtaagcatgcga

SEQ ID NO: 4042056 - DNA, 25 bp, Homo sapien
agaaggcgtgctcacctgcagaaag

SEQ ID NO: 4042057 - DNA, 25 bp, Homo sapien
tgctgcatccgtcccaggaaccagc

SEQ ID NO: 4042058 - DNA, 25 bp, Homo sapien
gcttcgatgggaacagaacacttcg

SEQ ID NO: 4042059 - DNA, 25 bp, Homo sapien
acgtctttcaaagcttcgatgggaa

SEQ ID NO: 4042060 - DNA, 25 bp, Homo sapien
acacttcgttcaacaggaggccctg

SEQ ID NO: 4042061 - DNA, 25 bp, Homo sapien
aaagagtgcattctggcaagccagg

SEQ ID NO: 4042062 - DNA, 25 bp, Homo sapien
tgtaaaactgaatggcgctgtgcca

SEQ ID NO: 4042063 - DNA, 25 bp, Homo sapien
ctgtggatggaaatgtgagccgtta

SEQ ID NO: 4042064 - DNA, 25 bp, Homo sapien
tgtgccagatcatatgggagcagga

SEQ ID NO: 4042065 - DNA, 25 bp, Homo sapien
tcctcccaggctggatggggtctcc

SEQ ID NO: 4042066 - DNA, 25 bp, Homo sapien
ctcctcccaggctggatggggtctc

SEQ ID NO: 4042067 - DNA, 25 bp, Homo sapien
tcccaggctggatggggtctcctcc

SEQ ID NO: 4042068 - DNA, 25 bp, Homo sapien
aggctggatggggtctcctcctctc

SEQ ID NO: 4042069 - DNA, 25 bp, Homo sapien
tgcaaaggggcgtcggagaagtgca

SEQ ID NO: 4042070 - DNA, 25 bp, Homo sapien
ctgctgtgcctgatgtggggacagc

SEQ ID NO: 4042071 - DNA, 25 bp, Homo sapien
tgcgtctgcaaaggggcgtcggaga

SEQ ID NO: 4042072 - DNA, 25 bp, Homo sapien
tctgcaaaggggcgtcggagaagtg

SEQ ID NO: 4042073 - DNA, 25 bp, Homo sapien
tgcgccactggtaagggaagctctg

SEQ ID NO: 4042074 - DNA, 25 bp, Homo sapien
gggactccagtacttcgttagatgc

SEQ ID NO: 4042075 - DNA, 25 bp, Homo sapien
gacagaaggttctggctcgcagtct

SEQ ID NO: 4042076 - DNA, 25 bp, Homo sapien
ggctcaaggctgaactgctccacat

SEQ ID NO: 4042077 - DNA, 25 bp, Homo sapien
ttttcctcttccttgtaggtggctc

SEQ ID NO: 4042078 - DNA, 25 bp, Homo sapien
tgcatctcactcactgcccactgcg

SEQ ID NO: 4042079 - DNA, 25 bp, Homo sapien
cttccttgtaggtggctcctgcacg

SEQ ID NO: 4042080 - DNA, 25 bp, Homo sapien
tcactgcccactgcgttttcctctt

SEQ ID NO: 4042081 - DNA, 25 bp, Homo sapien
aatacaacactgagccatttgctgc

SEQ ID NO: 4042082 - DNA, 25 bp, Homo sapien
taaaaatacaacactgagccatttg

SEQ ID NO: 4042083 - DNA, 25 bp, Homo sapien
cttctcccagatgtaaatagaacaa

SEQ ID NO: 4042084 - DNA, 25 bp, Homo sapien
caacctgcacaacctggattttttt

SEQ ID NO: 4042085 - DNA, 25 bp, Homo sapien
tctcctgcgcctgcaccggctcctg

SEQ ID NO: 4042086 - DNA, 25 bp, Homo sapien
gtgtctcctgcgcctgcaccggctc

SEQ ID NO: 4042087 - DNA, 25 bp, Homo sapien
tgtctcctgcgcctgcaccggctcc

SEQ ID NO: 4042088 - DNA, 25 bp, Homo sapien
gtctcctgcgcctgcaccggctcct

SEQ ID NO: 4042089 - DNA, 25 bp, Homo sapien
ggggcactggagactcattgaccca

SEQ ID NO: 4042090 - DNA, 25 bp, Homo sapien
agggggcactggagactcattgacc

SEQ ID NO: 4042091 - DNA, 25 bp, Homo sapien
ggcactggagactcattgacccact

SEQ ID NO: 4042092 - DNA, 25 bp, Homo sapien
gggcactggagactcattgacccac

SEQ ID NO: 4042093 - DNA, 25 bp, Homo sapien
actcactgccaactgcgttttcctc

SEQ ID NO: 4042094 - DNA, 25 bp, Homo sapien
gcaagaagagtgagtgcggggccat

SEQ ID NO: 4042095 - DNA, 25 bp, Homo sapien
tcactgccaactgcgttttcctctt

SEQ ID NO: 4042096 - DNA, 25 bp, Homo sapien
tcactcactgccaactgcgttttcc

SEQ ID NO: 4042097 - DNA, 25 bp, Homo sapien
ggctcgaaatggaccccaactgctc

SEQ ID NO: 4042098 - DNA, 25 bp, Homo sapien
gcggctcgaaatggaccccaactgc

SEQ ID NO: 4042099 - DNA, 25 bp, Homo sapien
cggctcgaaatggaccccaactgct

SEQ ID NO: 4042100 - DNA, 25 bp, Homo sapien
cgcggctcgaaatggaccccaactg

SEQ ID NO: 4042101 - DNA, 25 bp, Homo sapien
agtggagcaggagcacttggggtac

SEQ ID NO: 4042102 - DNA, 25 bp, Homo sapien
gtggagcaggagcacttggggtaca

SEQ ID NO: 4042103 - DNA, 25 bp, Homo sapien
tggagcaggagcacttggggtacat

SEQ ID NO: 4042104 - DNA, 25 bp, Homo sapien
tagtggagcaggagcacttggggta

SEQ ID NO: 4042105 - DNA, 25 bp, Homo sapien
aatgaggcactagatgctcagagag

SEQ ID NO: 4042106 - DNA, 25 bp, Homo sapien
cctttctacaaatgaggcactagat

SEQ ID NO: 4042107 - DNA, 25 bp, Homo sapien
gccaccagagccatataatttttgt

SEQ ID NO: 4042108 - DNA, 25 bp, Homo sapien
tgggctgtgaaataagactccctga

SEQ ID NO: 4042109 - DNA, 25 bp, Homo sapien
taattattattcacatatttcacag

SEQ ID NO: 4042110 - DNA, 25 bp, Homo sapien
gtttaattattattcacatatttca

SEQ ID NO: 4042111 - DNA, 25 bp, Homo sapien
acatatttcacagaaaaaaaggaat

SEQ ID NO: 4042112 - DNA, 25 bp, Homo sapien
cacatatttcacagaaaaaaaggaa

SEQ ID NO: 4042113 - DNA, 25 bp, Homo sapien
gattttacgggtcactctatttgta

SEQ ID NO: 4042114 - DNA, 25 bp, Homo sapien
tacgggtcactctatttgtacttgg

SEQ ID NO: 4042115 - DNA, 25 bp, Homo sapien
atcctggattttacgggtcactcta

SEQ ID NO: 4042116 - DNA, 25 bp, Homo sapien
actctatttgtacttgggagcaggg

SEQ ID NO: 4042117 - DNA, 25 bp, Homo sapien
gcagcagctgcacttctccgatgcc

SEQ ID NO: 4042118 - DNA, 25 bp, Homo sapien
gcgcagcagctgcacttctccgatg

SEQ ID NO: 4042119 - DNA, 25 bp, Homo sapien
tctccgatgcccctttgcagatgca

SEQ ID NO: 4042120 - DNA, 25 bp, Homo sapien
aggcgcagcagctgcacttctccga

SEQ ID NO: 4042121 - DNA, 25 bp, Homo sapien
gacattggaatgggtcttcctttga

SEQ ID NO: 4042122 - DNA, 25 bp, Homo sapien
gaaaggagattgagaggtcagagca

SEQ ID NO: 4042123 - DNA, 25 bp, Homo sapien
ggaaaggagattgagaggtcagagc

SEQ ID NO: 4042124 - DNA, 25 bp, Homo sapien
cattggaatgggtcttcctttgaga

SEQ ID NO: 4042125 - DNA, 25 bp, Homo sapien
agattcctggagatggccccgcact

SEQ ID NO: 4042126 - DNA, 25 bp, Homo sapien
gagctggcgcaggtgcaggagacac

SEQ ID NO: 4042127 - DNA, 25 bp, Homo sapien
gcacttgcaggagctggcgcaggtg

SEQ ID NO: 4042128 - DNA, 25 bp, Homo sapien
aggagctggcgcaggtgcaggagac

SEQ ID NO: 4042129 - DNA, 25 bp, Homo sapien
cactctttgcacttgcaggagctgg

SEQ ID NO: 4042130 - DNA, 25 bp, Homo sapien
tccaatccggtagctcagagtcagg

SEQ ID NO: 4042131 - DNA, 25 bp, Homo sapien
cagcagtgggtcaatgagtgtccac

SEQ ID NO: 4042132 - DNA, 25 bp, Homo sapien
tcaactctgacatagaggaacaggg

SEQ ID NO: 4042133 - DNA, 25 bp, Homo sapien
ggagtcccctttacctctgatagca

SEQ ID NO: 4042134 - DNA, 25 bp, Homo sapien
cagcggcacaggagcagttggggtc

SEQ ID NO: 4042135 - DNA, 25 bp, Homo sapien
gcggcacaggagcagttggggtcca

SEQ ID NO: 4042136 - DNA, 25 bp, Homo sapien
agcggcacaggagcagttggggtcc

SEQ ID NO: 4042137 - DNA, 25 bp, Homo sapien
cggcacaggagcagttggggtccat

SEQ ID NO: 4042138 - DNA, 25 bp, Homo sapien
cccgaggcgagactagagttcccaa

SEQ ID NO: 4042139 - DNA, 25 bp, Homo sapien
tgcaacccgaggcgagactagagtt

SEQ ID NO: 4042140 - DNA, 25 bp, Homo sapien
acccgaggcgagactagagttccca

SEQ ID NO: 4042141 - DNA, 25 bp, Homo sapien
caacccgaggcgagactagagttcc

SEQ ID NO: 4042142 - DNA, 25 bp, Homo sapien
tggaatacaaacggagggtgcttgg

SEQ ID NO: 4042143 - DNA, 25 bp, Homo sapien
ctttggaatacaaacggagggtgct

SEQ ID NO: 4042144 - DNA, 25 bp, Homo sapien
ggagggtgcttggttttcccagcat

SEQ ID NO: 4042145 - DNA, 25 bp, Homo sapien
cggagggtgcttggttttcccagca

SEQ ID NO: 4042146 - DNA, 25 bp, Homo sapien
attgaccgcagggtctgcatgtcac

SEQ ID NO: 4042147 - DNA, 25 bp, Homo sapien
tttcaaaactgccatcctgcagtgg

SEQ ID NO: 4042148 - DNA, 25 bp, Homo sapien
ggtctgcatgtcacctaaagtcatc

SEQ ID NO: 4042149 - DNA, 25 bp, Homo sapien
ccgcagggtctgcatgtcacctaaa

SEQ ID NO: 4042150 - DNA, 25 bp, Homo sapien
gcaccagctcctgcaaatgcagaga

SEQ ID NO: 4042151 - DNA, 25 bp, Homo sapien
accagctcctgcaaatgcagagagt

SEQ ID NO: 4042152 - DNA, 25 bp, Homo sapien
atccagggacgtgatccagggactc

SEQ ID NO: 4042153 - DNA, 25 bp, Homo sapien
tgtgtagaccgccgggattccgagt

SEQ ID NO: 4042154 - DNA, 25 bp, Homo sapien
gcaaagctacacacagtggagcggg

SEQ ID NO: 4042155 - DNA, 25 bp, Homo sapien
cgccgatccagggacgtgatccagg

SEQ ID NO: 4042156 - DNA, 25 bp, Homo sapien
tttcccagccacagtacagactctt

SEQ ID NO: 4042157 - DNA, 25 bp, Homo sapien
ggactataaagagagccgccggctt

SEQ ID NO: 4042158 - DNA, 25 bp, Homo sapien
tgctcgcctggtaagggacacctag

SEQ ID NO: 4042159 - DNA, 25 bp, Homo sapien
tgggctccaccacgcttttcatctg

SEQ ID NO: 4042160 - DNA, 25 bp, Homo sapien
cctgaacaacagcaagatattcctg

SEQ ID NO: 4042161 - DNA, 25 bp, Homo sapien
agcaagatattcctgaaatgtcaca

SEQ ID NO: 4042162 - DNA, 25 bp, Homo sapien
aatgtcacaggagaccagattacag

SEQ ID NO: 4042163 - DNA, 25 bp, Homo sapien
gtcacaggagaccagattacagcca

SEQ ID NO: 4042164 - DNA, 25 bp, Homo sapien
cactaaagtgccttgctgatgggac

SEQ ID NO: 4042165 - DNA, 25 bp, Homo sapien
ccctggcttagtgtttggtggagac

SEQ ID NO: 4042166 - DNA, 25 bp, Homo sapien
tagagacggatgctagagaacccag

SEQ ID NO: 4042167 - DNA, 25 bp, Homo sapien
tgttgtccacagaatgtcatcgcac

SEQ ID NO: 4042168 - DNA, 25 bp, Homo sapien
ttgagtttccgtcctctacctccag

SEQ ID NO: 4042169 - DNA, 25 bp, Homo sapien
gaggtaggcaagttgctaaaatccc

SEQ ID NO: 4042170 - DNA, 25 bp, Homo sapien
ggaatgagtccaatgttcagaaaag

SEQ ID NO: 4042171 - DNA, 25 bp, Homo sapien
cagcccagagggtaaggacctgagc

SEQ ID NO: 4042172 - DNA, 25 bp, Homo sapien
ggtgctttaatctaaggcttcccag

SEQ ID NO: 4042173 - DNA, 25 bp, Homo sapien
tatctatgaattaggaggcaggccc

SEQ ID NO: 4042174 - DNA, 25 bp, Homo sapien
cagtctatggatgagtctgacccca

SEQ ID NO: 4042175 - DNA, 25 bp, Homo sapien
tatagagaactcacaatatgctggt

SEQ ID NO: 4042176 - DNA, 25 bp, Homo sapien
gatcttgtctgacgtggtcgccacg

SEQ ID NO: 4042177 - DNA, 25 bp, Homo sapien
cagagccgactctaaccaagtggga

SEQ ID NO: 4042178 - DNA, 25 bp, Homo sapien
tcgccacggtgttgccagttcctag

SEQ ID NO: 4042179 - DNA, 25 bp, Homo sapien
gaattctggaatcgctttctcccgg

SEQ ID NO: 4042180 - DNA, 25 bp, Homo sapien
cattgctgtgtgtggtataccaagg

SEQ ID NO: 4042181 - DNA, 25 bp, Homo sapien
aattataatggtagggacccagact

SEQ ID NO: 4042182 - DNA, 25 bp, Homo sapien
tactgccataaaaagcccaagtggg

SEQ ID NO: 4042183 - DNA, 25 bp, Homo sapien
gacttttgttagaatccgcacacct

SEQ ID NO: 4042184 - DNA, 25 bp, Homo sapien
tgttgtaattgacagctgacagata

SEQ ID NO: 4042185 - DNA, 25 bp, Homo sapien
tcaggaaagctgatactacccattc

SEQ ID NO: 4042186 - DNA, 25 bp, Homo sapien
ttcaaaagagaggagaacagaatca

SEQ ID NO: 4042187 - DNA, 25 bp, Homo sapien
cactgagggcagtactgctactaaa

SEQ ID NO: 4042188 - DNA, 25 bp, Homo sapien
cattctgaacgagcgggaaatgaca

SEQ ID NO: 4042189 - DNA, 25 bp, Homo sapien
aatgcattctgaacgagcgggaaat

SEQ ID NO: 4042190 - DNA, 25 bp, Homo sapien
ctgaacgagcgggaaatgacaggct

SEQ ID NO: 4042191 - DNA, 25 bp, Homo sapien
gaacgagcgggaaatgacaggcttt

SEQ ID NO: 4042192 - DNA, 25 bp, Homo sapien
gctggggctaaggcccttgattctg

SEQ ID NO: 4042193 - DNA, 25 bp, Homo sapien
agatttggagaggctgaatgtgttc

SEQ ID NO: 4042194 - DNA, 25 bp, Homo sapien
ttggagaggctgaatgtgttcccca

SEQ ID NO: 4042195 - DNA, 25 bp, Homo sapien
atttggagaggctgaatgtgttccc

SEQ ID NO: 4042196 - DNA, 25 bp, Homo sapien
ttcatgtaggaccagtaacccacag

SEQ ID NO: 4042197 - DNA, 25 bp, Homo sapien
tgcacccttcatgtaggaccagtaa

SEQ ID NO: 4042198 - DNA, 25 bp, Homo sapien
ccagtaacccacaggtcatcaccat

SEQ ID NO: 4042199 - DNA, 25 bp, Homo sapien
ccttcatgtaggaccagtaacccac

SEQ ID NO: 4042200 - DNA, 25 bp, Homo sapien
gggaaataccgtcactagctcttgg

SEQ ID NO: 4042201 - DNA, 25 bp, Homo sapien
tatttgtgtaatgggaaataccgtc

SEQ ID NO: 4042202 - DNA, 25 bp, Homo sapien
ataccgtcactagctcttgggccag

SEQ ID NO: 4042203 - DNA, 25 bp, Homo sapien
taatgggaaataccgtcactagctc

SEQ ID NO: 4042204 - DNA, 25 bp, Homo sapien
tataaggctggatgttcccttttac

SEQ ID NO: 4042205 - DNA, 25 bp, Homo sapien
gaatgccaactccttggtccctctg

SEQ ID NO: 4042206 - DNA, 25 bp, Homo sapien
tgcccactgactagtcttacctagc

SEQ ID NO: 4042207 - DNA, 25 bp, Homo sapien
ggacacttctaaccctggcctataa

SEQ ID NO: 4042208 - DNA, 25 bp, Homo sapien
tttgacgatggaggtcagtgacccc

SEQ ID NO: 4042209 - DNA, 25 bp, Homo sapien
tcttccagtcggagcagggcaagaa

SEQ ID NO: 4042210 - DNA, 25 bp, Homo sapien
ggcaagaagaccatagacatctact

SEQ ID NO: 4042211 - DNA, 25 bp, Homo sapien
gaagagctgaagtcgccatgagatg

SEQ ID NO: 4042212 - DNA, 25 bp, Homo sapien
ggcaaatctgcaatagtttcaccag

SEQ ID NO: 4042213 - DNA, 25 bp, Homo sapien
tccttgggccagagtacattggcta

SEQ ID NO: 4042214 - DNA, 25 bp, Homo sapien
tgcgccatcacacttagcttgaaag

SEQ ID NO: 4042215 - DNA, 25 bp, Homo sapien
cagtactggcttatataggaaccca

SEQ ID NO: 4042216 - DNA, 25 bp, Homo sapien
ttttttaccagtgctctacatgttc

SEQ ID NO: 4042217 - DNA, 25 bp, Homo sapien
tggtaaccaaccacagaaatgatcc

SEQ ID NO: 4042218 - DNA, 25 bp, Homo sapien
aaacttctctggtaaccaaccacag

SEQ ID NO: 4042219 - DNA, 25 bp, Homo sapien
tttttttttaccagtgctctacatg

SEQ ID NO: 4042220 - DNA, 25 bp, Homo sapien
tgatggccatttgattgacactgga

SEQ ID NO: 4042221 - DNA, 25 bp, Homo sapien
ataaaatctgatcggcttctccaca

SEQ ID NO: 4042222 - DNA, 25 bp, Homo sapien
gctgatagcggactctcaggccaca

SEQ ID NO: 4042223 - DNA, 25 bp, Homo sapien
ctcaagtgtaaatgactgatggcca

SEQ ID NO: 4042224 - DNA, 25 bp, Homo sapien
tcccgtccacgaaaggggtgagcgc

SEQ ID NO: 4042225 - DNA, 25 bp, Homo sapien
gggactgtccttgggtccgatgcgg

SEQ ID NO: 4042226 - DNA, 25 bp, Homo sapien
gactgtccttgggtccgatgcgggg

SEQ ID NO: 4042227 - DNA, 25 bp, Homo sapien
ggactgtccttgggtccgatgcggg

SEQ ID NO: 4042228 - DNA, 25 bp, Homo sapien
catcccgcgcccgagccccatctgg

SEQ ID NO: 4042229 - DNA, 25 bp, Homo sapien
cccgcgcccgagccccatctggctc

SEQ ID NO: 4042230 - DNA, 25 bp, Homo sapien
cccgagccccatctggctcgggctg

SEQ ID NO: 4042231 - DNA, 25 bp, Homo sapien
gcccgagccccatctggctcgggct

SEQ ID NO: 4042232 - DNA, 25 bp, Homo sapien
gttccatgcactggcggagcagctc

SEQ ID NO: 4042233 - DNA, 25 bp, Homo sapien
tccacgtgatttctcggcagcagcc

SEQ ID NO: 4042234 - DNA, 25 bp, Homo sapien
tttcagtttcgtgcagagcgcggag

SEQ ID NO: 4042235 - DNA, 25 bp, Homo sapien
ctctgagggtgagtgccgggcgtgc

SEQ ID NO: 4042236 - DNA, 25 bp, Homo sapien
gccctggagcgggaggtgcgggtgg

SEQ ID NO: 4042237 - DNA, 25 bp, Homo sapien
catgcgccccggcagtttggaggaa

SEQ ID NO: 4042238 - DNA, 25 bp, Homo sapien
ggtaagcggacagggcgccagtggc

SEQ ID NO: 4042239 - DNA, 25 bp, Homo sapien
tggctggccgatggatagctgggta

SEQ ID NO: 4042240 - DNA, 25 bp, Homo sapien
tcagtgccgtttgcgtccattttat

SEQ ID NO: 4042241 - DNA, 25 bp, Homo sapien
agtgccgtttgcgtccattttataa

SEQ ID NO: 4042242 - DNA, 25 bp, Homo sapien
tgccgtttgcgtccattttataagt

SEQ ID NO: 4042243 - DNA, 25 bp, Homo sapien
cttcagtgccgtttgcgtccatttt

SEQ ID NO: 4042244 - DNA, 25 bp, Homo sapien
agcagtttgaaaactggcagttccc

SEQ ID NO: 4042245 - DNA, 25 bp, Homo sapien
ctaaaaagcagtttgaaaactggca

SEQ ID NO: 4042246 - DNA, 25 bp, Homo sapien
agtttgaaaactggcagttcccagc

SEQ ID NO: 4042247 - DNA, 25 bp, Homo sapien
aaagcagtttgaaaactggcagttc

SEQ ID NO: 4042248 - DNA, 25 bp, Homo sapien
tatgctgaaggcctaaccctcggcg

SEQ ID NO: 4042249 - DNA, 25 bp, Homo sapien
cggcgcctcctaacgtgaccttatt

SEQ ID NO: 4042250 - DNA, 25 bp, Homo sapien
tatgagttcaattgtgcctccccac

SEQ ID NO: 4042251 - DNA, 25 bp, Homo sapien
taggatgggccttgaatccaatagg

SEQ ID NO: 4042252 - DNA, 25 bp, Homo sapien
ccaagccctggcagagccacagagt

SEQ ID NO: 4042253 - DNA, 25 bp, Homo sapien
cagctcccagtctgaggaaggtgct

SEQ ID NO: 4042254 - DNA, 25 bp, Homo sapien
gtgccaagaaacagctcccagtctg

SEQ ID NO: 4042255 - DNA, 25 bp, Homo sapien
actttggcttgggtgtgccaagccc

SEQ ID NO: 4042256 - DNA, 25 bp, Homo sapien
acctgcatccttcttccggggtcgc

SEQ ID NO: 4042257 - DNA, 25 bp, Homo sapien
tgcatccttcttccggggtcgcctt

SEQ ID NO: 4042258 - DNA, 25 bp, Homo sapien
tgcctggtgggcattgccttgctca

SEQ ID NO: 4042259 - DNA, 25 bp, Homo sapien
cctttgcctggtgggcattgccttg

SEQ ID NO: 4042260 - DNA, 25 bp, Homo sapien
attaacttcagaagtcgagagatgc

SEQ ID NO: 4042261 - DNA, 25 bp, Homo sapien
ttcagaagtcgagagatgctgcaga

SEQ ID NO: 4042262 - DNA, 25 bp, Homo sapien
cagagaaatctgagtcattgaggtg

SEQ ID NO: 4042263 - DNA, 25 bp, Homo sapien
aaatctgagtcattgaggtgagcac

SEQ ID NO: 4042264 - DNA, 25 bp, Homo sapien
cagaagcgcaactgaactagcagta

SEQ ID NO: 4042265 - DNA, 25 bp, Homo sapien
ctgaactagcagtatctccagcata

SEQ ID NO: 4042266 - DNA, 25 bp, Homo sapien
gaagcgcaactgaactagcagtatc

SEQ ID NO: 4042267 - DNA, 25 bp, Homo sapien
gcaactgaactagcagtatctccag

SEQ ID NO: 4042268 - DNA, 25 bp, Homo sapien
tcttctaagccttctttagcagtct

SEQ ID NO: 4042269 - DNA, 25 bp, Homo sapien
cagtttcttgacagatttaagttgc

SEQ ID NO: 4042270 - DNA, 25 bp, Homo sapien
aaaaagtttgatgacaccattaagg

SEQ ID NO: 4042271 - DNA, 25 bp, Homo sapien
ttgatgacaccattaaggtccacag

SEQ ID NO: 4042272 - DNA, 25 bp, Homo sapien
gaactctgagttacattccccgtat

SEQ ID NO: 4042273 - DNA, 25 bp, Homo sapien
ttgtctaaagtcatggaactctgag

SEQ ID NO: 4042274 - DNA, 25 bp, Homo sapien
gccctatttacgtggatttgtctaa

SEQ ID NO: 4042275 - DNA, 25 bp, Homo sapien
tatttcacagagacacaatcagagc

SEQ ID NO: 4042276 - DNA, 25 bp, Homo sapien
ccctggaccatttcttcatgggtag

SEQ ID NO: 4042277 - DNA, 25 bp, Homo sapien
catgggtagcatggatgctggacac

SEQ ID NO: 4042278 - DNA, 25 bp, Homo sapien
tcttcatgggtagcatggatgctgg

SEQ ID NO: 4042279 - DNA, 25 bp, Homo sapien
tgccctggaccatttcttcatgggt

SEQ ID NO: 4042280 - DNA, 25 bp, Homo sapien
tctgggatgtctaagatggctcgca

SEQ ID NO: 4042281 - DNA, 25 bp, Homo sapien
caccctgcccggagataatgagtca

SEQ ID NO: 4042282 - DNA, 25 bp, Homo sapien
caacgtgtagtgcttgtggccctac

SEQ ID NO: 4042283 - DNA, 25 bp, Homo sapien
aaacagtcttctagtggtgggaggc

SEQ ID NO: 4042284 - DNA, 25 bp, Homo sapien
ccagctgatgcgggattgcagctgc

SEQ ID NO: 4042285 - DNA, 25 bp, Homo sapien
aaccagctgatgcgggattgcagct

SEQ ID NO: 4042286 - DNA, 25 bp, Homo sapien
accagctgatgcgggattgcagctg

SEQ ID NO: 4042287 - DNA, 25 bp, Homo sapien
cagctgatgcgggattgcagctgcc

SEQ ID NO: 4042288 - DNA, 25 bp, Homo sapien
tggccttaagcaagtagctgtccct

SEQ ID NO: 4042289 - DNA, 25 bp, Homo sapien
ggccttaagcaagtagctgtccctt

SEQ ID NO: 4042290 - DNA, 25 bp, Homo sapien
ggtccaaggcccagtgatgctactc

SEQ ID NO: 4042291 - DNA, 25 bp, Homo sapien
gaacacatggtcagtaagaaacaga

SEQ ID NO: 4042292 - DNA, 25 bp, Homo sapien
ccaggaagcacgaaccatgctggcc

SEQ ID NO: 4042293 - DNA, 25 bp, Homo sapien
gagggtgactttgcaatgtggccca

SEQ ID NO: 4042294 - DNA, 25 bp, Homo sapien
atactgatgtgtgctccccgctgca

SEQ ID NO: 4042295 - DNA, 25 bp, Homo sapien
gatctgcggagaagaactagcccca

SEQ ID NO: 4042296 - DNA, 25 bp, Homo sapien
cccatcgtcatgtcttggagctgaa

SEQ ID NO: 4042297 - DNA, 25 bp, Homo sapien
tgggaaaattctagtccactctgtg

SEQ ID NO: 4042298 - DNA, 25 bp, Homo sapien
gctctgcccgccaggaaatgtggga

SEQ ID NO: 4042299 - DNA, 25 bp, Homo sapien
ggagcagcctgacctcagttcgagt

SEQ ID NO: 4042300 - DNA, 25 bp, Homo sapien
cgaagccatgcgagcagcagcagcc

SEQ ID NO: 4042301 - DNA, 25 bp, Homo sapien
ccccgaagccatgcgagcagcagca

SEQ ID NO: 4042302 - DNA, 25 bp, Homo sapien
ccatgatgagtgacacagggcctct

SEQ ID NO: 4042303 - DNA, 25 bp, Homo sapien
tcggaagccattgaggaacctgggt

SEQ ID NO: 4042304 - DNA, 25 bp, Homo sapien
tcctgacttcgtgggaccgagagca

SEQ ID NO: 4042305 - DNA, 25 bp, Homo sapien
tctgtgcgacgaggataatggaaac

SEQ ID NO: 4042306 - DNA, 25 bp, Homo sapien
tctgacagtgatgggctgtttctgg

SEQ ID NO: 4042307 - DNA, 25 bp, Homo sapien
cctgaagaacctcggagtaaaggca

SEQ ID NO: 4042308 - DNA, 25 bp, Homo sapien
ggcaagagttgcttcatccttgttg

SEQ ID NO: 4042309 - DNA, 25 bp, Homo sapien
gagttgggtttttggattcaatctg

SEQ ID NO: 4042310 - DNA, 25 bp, Homo sapien
agctgcacttccactgccgaggtct

SEQ ID NO: 4042311 - DNA, 25 bp, Homo sapien
ctgtgtaatagacgtttgaggctcc

SEQ ID NO: 4042312 - DNA, 25 bp, Homo sapien
ggctcctgaacaactctggctttgt

SEQ ID NO: 4042313 - DNA, 25 bp, Homo sapien
cttgcacccgattccaccctccgtt

SEQ ID NO: 4042314 - DNA, 25 bp, Homo sapien
tgctgaggccaagcccctgtgtgtg

SEQ ID NO: 4042315 - DNA, 25 bp, Homo sapien
tgggcacttgctgaggccaagcccc

SEQ ID NO: 4042316 - DNA, 25 bp, Homo sapien
ctcaggcgcagctgggcacttgctg

SEQ ID NO: 4042317 - DNA, 25 bp, Homo sapien
tcaggcgcagctgggcacttgctga

SEQ ID NO: 4042318 - DNA, 25 bp, Homo sapien
gttaaagtccagtaccagggctctg

SEQ ID NO: 4042319 - DNA, 25 bp, Homo sapien
tgtaaagagccccagcttcggagtc

SEQ ID NO: 4042320 - DNA, 25 bp, Homo sapien
tgccagctaagaggtaggcccaggc

SEQ ID NO: 4042321 - DNA, 25 bp, Homo sapien
aaaggtgtggcccattagaccagga

SEQ ID NO: 4042322 - DNA, 25 bp, Homo sapien
tagctcccgcaaggtgtctcagatt

SEQ ID NO: 4042323 - DNA, 25 bp, Homo sapien
cacttatttgtcagcagagtcccac

SEQ ID NO: 4042324 - DNA, 25 bp, Homo sapien
tacaatggtattaaagcctagctgg

SEQ ID NO: 4042325 - DNA, 25 bp, Homo sapien
cagtagtaccaaaccaagacttgct

SEQ ID NO: 4042326 - DNA, 25 bp, Homo sapien
ggaagtcgccatctgccaatgggca

SEQ ID NO: 4042327 - DNA, 25 bp, Homo sapien
gcctcttaagagtcatgccacataa

SEQ ID NO: 4042328 - DNA, 25 bp, Homo sapien
agctgatgcgcccatactggcagaa

SEQ ID NO: 4042329 - DNA, 25 bp, Homo sapien
tgcccatgttcaaagtcagtagctg

SEQ ID NO: 4042330 - DNA, 25 bp, Homo sapien
caggagagcctacagattgttgtca

SEQ ID NO: 4042331 - DNA, 25 bp, Homo sapien
gatgagcccgtttccctttatgaga

SEQ ID NO: 4042332 - DNA, 25 bp, Homo sapien
tccaggagctgccagaaataagtca

SEQ ID NO: 4042333 - DNA, 25 bp, Homo sapien
gaagggcctcaatagaatggtcaca

SEQ ID NO: 4042334 - DNA, 25 bp, Homo sapien
gcgttcttgttagcagtcccttcct

SEQ ID NO: 4042335 - DNA, 25 bp, Homo sapien
gtcccttcctgcataaatggggttg

SEQ ID NO: 4042336 - DNA, 25 bp, Homo sapien
aggtttgagatggaagcgttcttgt

SEQ ID NO: 4042337 - DNA, 25 bp, Homo sapien
tgagatggaagcgttcttgttagca

SEQ ID NO: 4042338 - DNA, 25 bp, Homo sapien
gaagggctccatttcactacctggg

SEQ ID NO: 4042339 - DNA, 25 bp, Homo sapien
gaggaaccaaacacgattcgggcca

SEQ ID NO: 4042340 - DNA, 25 bp, Homo sapien
catgccgagtgtgaagtgacacccc

SEQ ID NO: 4042341 - DNA, 25 bp, Homo sapien
tataggcagcatgaacggtccgatc

SEQ ID NO: 4042342 - DNA, 25 bp, Homo sapien
acaatctttccggtggcattgatgg

SEQ ID NO: 4042343 - DNA, 25 bp, Homo sapien
aatctttccggtggcattgatggtg

SEQ ID NO: 4042344 - DNA, 25 bp, Homo sapien
tctttccggtggcattgatggtgcc

SEQ ID NO: 4042345 - DNA, 25 bp, Homo sapien
ttccggtggcattgatggtgccttc

SEQ ID NO: 4042346 - DNA, 25 bp, Homo sapien
ggtgtttccgagagacttgcaggat

SEQ ID NO: 4042347 - DNA, 25 bp, Homo sapien
tgtttccgagagacttgcaggatga

SEQ ID NO: 4042348 - DNA, 25 bp, Homo sapien
ggaggtgtttccgagagacttgcag

SEQ ID NO: 4042349 - DNA, 25 bp, Homo sapien
actcagggaggtgtttccgagagac

SEQ ID NO: 4042350 - DNA, 25 bp, Homo sapien
atctggctcagggtccggtttcagt

SEQ ID NO: 4042351 - DNA, 25 bp, Homo sapien
tctggctcagggtccggtttcagtc

SEQ ID NO: 4042352 - DNA, 25 bp, Homo sapien
ctggctcagggtccggtttcagtct

SEQ ID NO: 4042353 - DNA, 25 bp, Homo sapien
catctggctcagggtccggtttcag

SEQ ID NO: 4042354 - DNA, 25 bp, Homo sapien
caacagcttcgcctgggagaacttg

SEQ ID NO: 4042355 - DNA, 25 bp, Homo sapien
tgccaacagcttcgcctgggagaac

SEQ ID NO: 4042356 - DNA, 25 bp, Homo sapien
tataggcttcacagtcagtttcttt

SEQ ID NO: 4042357 - DNA, 25 bp, Homo sapien
cttggtttctataggcttcacagtc

SEQ ID NO: 4042358 - DNA, 25 bp, Homo sapien
gttgcttttctattagttcctgctg

SEQ ID NO: 4042359 - DNA, 25 bp, Homo sapien
tagttcctgctgtcgagaaacctca

SEQ ID NO: 4042360 - DNA, 25 bp, Homo sapien
ctgctgtcgagaaacctcatcaagg

SEQ ID NO: 4042361 - DNA, 25 bp, Homo sapien
tctattagttcctgctgtcgagaaa

SEQ ID NO: 4042362 - DNA, 25 bp, Homo sapien
aggaaataattaaacaaggcacact

SEQ ID NO: 4042363 - DNA, 25 bp, Homo sapien
tgaggaaataattaaacaaggcaca

SEQ ID NO: 4042364 - DNA, 25 bp, Homo sapien
gaggaaataattaaacaaggcacac

SEQ ID NO: 4042365 - DNA, 25 bp, Homo sapien
cccacagagccccttgaactctctg

SEQ ID NO: 4042366 - DNA, 25 bp, Homo sapien
ccttgaactctctgttttctgaagc

SEQ ID NO: 4042367 - DNA, 25 bp, Homo sapien
tgaactctctgttttctgaagctta

SEQ ID NO: 4042368 - DNA, 25 bp, Homo sapien
gaactctctgttttctgaagcttac

SEQ ID NO: 4042369 - DNA, 25 bp, Homo sapien
catatagagatcgagggtcataaac

SEQ ID NO: 4042370 - DNA, 25 bp, Homo sapien
gggtcataaacctcctctggacatt

SEQ ID NO: 4042371 - DNA, 25 bp, Homo sapien
ctttcatatagagatcgagggtcat

SEQ ID NO: 4042372 - DNA, 25 bp, Homo sapien
tatagagatcgagggtcataaacct

SEQ ID NO: 4042373 - DNA, 25 bp, Homo sapien
ctggatcttcaggttttcgaacttt

SEQ ID NO: 4042374 - DNA, 25 bp, Homo sapien
tggatcttcaggttttcgaactttc

SEQ ID NO: 4042375 - DNA, 25 bp, Homo sapien
cttgcctccttttgcgccgttcatc

SEQ ID NO: 4042376 - DNA, 25 bp, Homo sapien
cttcttgcctccttttgcgccgttc

SEQ ID NO: 4042377 - DNA, 25 bp, Homo sapien
cctcagacacaaacctctttttgat

SEQ ID NO: 4042378 - DNA, 25 bp, Homo sapien
ctcagacacaaacctctttttgata

SEQ ID NO: 4042379 - DNA, 25 bp, Homo sapien
gaaacaaggagatttagctccatct

SEQ ID NO: 4042380 - DNA, 25 bp, Homo sapien
aaacaaggagatttagctccatctc

SEQ ID NO: 4042381 - DNA, 25 bp, Homo sapien
agaaacaaggagatttagctccatc

SEQ ID NO: 4042382 - DNA, 25 bp, Homo sapien
aacaaggagatttagctccatctca

SEQ ID NO: 4042383 - DNA, 25 bp, Homo sapien
acaccgctgcaccccagcttgagcg

SEQ ID NO: 4042384 - DNA, 25 bp, Homo sapien
gctgcaccccagcttgagcgacagg

SEQ ID NO: 4042385 - DNA, 25 bp, Homo sapien
accgctgcaccccagcttgagcgac

SEQ ID NO: 4042386 - DNA, 25 bp, Homo sapien
tcacaccgctgcaccccagcttgag

SEQ ID NO: 4042387 - DNA, 25 bp, Homo sapien
gagacattacactatcttgattcac

SEQ ID NO: 4042388 - DNA, 25 bp, Homo sapien
ttctgagacattacactatcttgat

SEQ ID NO: 4042389 - DNA, 25 bp, Homo sapien
cctgtttctgagacattacactatc

SEQ ID NO: 4042390 - DNA, 25 bp, Homo sapien
gtttctgagacattacactatcttg

SEQ ID NO: 4042391 - DNA, 25 bp, Homo sapien
tcaagtccagtctgtatagcaggga

SEQ ID NO: 4042392 - DNA, 25 bp, Homo sapien
ccatgaatggagaaagtgagactgg

SEQ ID NO: 4042393 - DNA, 25 bp, Homo sapien
ttttgacacagaagattaccgaatc

SEQ ID NO: 4042394 - DNA, 25 bp, Homo sapien
gaatctcagctattgaagacttagt

SEQ ID NO: 4042395 - DNA, 25 bp, Homo sapien
ttatctaatttacatgatcattgac

SEQ ID NO: 4042396 - DNA, 25 bp, Homo sapien
tatctaatttacatgatcattgacc

SEQ ID NO: 4042397 - DNA, 25 bp, Homo sapien
tatggatattatctaatttacatga

SEQ ID NO: 4042398 - DNA, 25 bp, Homo sapien
tattccttttatggatattatctaa

SEQ ID NO: 4042399 - DNA, 25 bp, Homo sapien
cagaggctcattactgaagcagaac

SEQ ID NO: 4042400 - DNA, 25 bp, Homo sapien
tgaaatcaactgacagacgctgttg

SEQ ID NO: 4042401 - DNA, 25 bp, Homo sapien
tctctggcagagaaaacgtgaactt

SEQ ID NO: 4042402 - DNA, 25 bp, Homo sapien
tctaatggttgggagagacattccg

SEQ ID NO: 4042403 - DNA, 25 bp, Homo sapien
tgtttgaagacaattcccatgttcc

SEQ ID NO: 4042404 - DNA, 25 bp, Homo sapien
caatacataggttcaatccactggg

SEQ ID NO: 4042405 - DNA, 25 bp, Homo sapien
gcttttctgagccaaacattcctag

SEQ ID NO: 4042406 - DNA, 25 bp, Homo sapien
taaatactaggatacggcaatgcca

SEQ ID NO: 4042407 - DNA, 25 bp, Homo sapien
taagccaagttagatggacacacat

SEQ ID NO: 4042408 - DNA, 25 bp, Homo sapien
tccaaccgcccagaatcagactaaa

SEQ ID NO: 4042409 - DNA, 25 bp, Homo sapien
gatcattcataactctactacagcc

SEQ ID NO: 4042410 - DNA, 25 bp, Homo sapien
ttttcacccgatgcaaactgctgct

SEQ ID NO: 4042411 - DNA, 25 bp, Homo sapien
aaccaaccacgaggagctgaagaat

SEQ ID NO: 4042412 - DNA, 25 bp, Homo sapien
taaaccaaccacgaggagctgaaga

SEQ ID NO: 4042413 - DNA, 25 bp, Homo sapien
aaaccaaccacgaggagctgaagaa

SEQ ID NO: 4042414 - DNA, 25 bp, Homo sapien
gggaattctattcaaacgccataca

SEQ ID NO: 4042415 - DNA, 25 bp, Homo sapien
tatcctgcgaaagcagtacttgatg

SEQ ID NO: 4042416 - DNA, 25 bp, Homo sapien
tggtagccatcaagcaagtatttgc

SEQ ID NO: 4042417 - DNA, 25 bp, Homo sapien
tgaactcacatgaatattcctaggt

SEQ ID NO: 4042418 - DNA, 25 bp, Homo sapien
ctgcaagaaagaggtgataagtacc

SEQ ID NO: 4042419 - DNA, 25 bp, Homo sapien
cctgtaacttactgacctgctggaa

SEQ ID NO: 4042420 - DNA, 25 bp, Homo sapien
gggatacgggctctaactgtgaaga

SEQ ID NO: 4042421 - DNA, 25 bp, Homo sapien
tctaggtaaattttcacaagtctct

SEQ ID NO: 4042422 - DNA, 25 bp, Homo sapien
tgtgatggtgcactacttaggaggc

SEQ ID NO: 4042423 - DNA, 25 bp, Homo sapien
aaagaaattaaggcctggtgcacta

SEQ ID NO: 4042424 - DNA, 25 bp, Homo sapien
gtgatggtgcactacttaggaggct

SEQ ID NO: 4042425 - DNA, 25 bp, Homo sapien
aattaaggcctggtgcactagctca

SEQ ID NO: 4042426 - DNA, 25 bp, Homo sapien
gatggagaccgcgtcagatcccata

SEQ ID NO: 4042427 - DNA, 25 bp, Homo sapien
tctccccagaggttggacattggtt

SEQ ID NO: 4042428 - DNA, 25 bp, Homo sapien
ccagtgacgctggtggtcatcagct

SEQ ID NO: 4042429 - DNA, 25 bp, Homo sapien
cttagaggaacttagaggaacactt

SEQ ID NO: 4042430 - DNA, 25 bp, Homo sapien
ttgtgcccaaaagaactacagcttc

SEQ ID NO: 4042431 - DNA, 25 bp, Homo sapien
cctaaaagctaaagtttcagtgcct

SEQ ID NO: 4042432 - DNA, 25 bp, Homo sapien
gcttcaaagtaaaggtgaactggga

SEQ ID NO: 4042433 - DNA, 25 bp, Homo sapien
gaatttggacacaatctagaaggtg

SEQ ID NO: 4042434 - DNA, 25 bp, Homo sapien
taatgaaagacactaatccacagat

SEQ ID NO: 4042435 - DNA, 25 bp, Homo sapien
aaacccatagttccatagagcatag

SEQ ID NO: 4042436 - DNA, 25 bp, Homo sapien
tccagaatgtactacgaaagaacag

SEQ ID NO: 4042437 - DNA, 25 bp, Homo sapien
gaggccgagtttaataacaatggaa

SEQ ID NO: 4042438 - DNA, 25 bp, Homo sapien
cgcacatccgagtgagtaacctgga

SEQ ID NO: 4042439 - DNA, 25 bp, Homo sapien
tccaagacctctggaacggagcctg

SEQ ID NO: 4042440 - DNA, 25 bp, Homo sapien
ttttctgcaaaacgggccagctggc

SEQ ID NO: 4042441 - DNA, 25 bp, Homo sapien
taatagaaaattcgcttggcacagc

SEQ ID NO: 4042442 - DNA, 25 bp, Homo sapien
cagagccgctcgctcttaaaaaaga

SEQ ID NO: 4042443 - DNA, 25 bp, Homo sapien
ggaggcgagacgacctcacctcggc

SEQ ID NO: 4042444 - DNA, 25 bp, Homo sapien
gagccgctcgctcttaaaaaagaaa

SEQ ID NO: 4042445 - DNA, 25 bp, Homo sapien
aggcgagacgacctcacctcggcgg

SEQ ID NO: 4042446 - DNA, 25 bp, Homo sapien
ggtcccgctgatcacgtgacacgat

SEQ ID NO: 4042447 - DNA, 25 bp, Homo sapien
ccggagagacttgattgggccattc

SEQ ID NO: 4042448 - DNA, 25 bp, Homo sapien
gtaccctgaaaacgagccggagaga

SEQ ID NO: 4042449 - DNA, 25 bp, Homo sapien
gcccgatggaaatccggtaccctga

SEQ ID NO: 4042450 - DNA, 25 bp, Homo sapien
ttataggaggtataccagcatactc

SEQ ID NO: 4042451 - DNA, 25 bp, Homo sapien
tgagaccgagattccctcttgttcc

SEQ ID NO: 4042452 - DNA, 25 bp, Homo sapien
ctggccctcagtgattattttcaag

SEQ ID NO: 4042453 - DNA, 25 bp, Homo sapien
catactctatgtgggcttctgcttt

SEQ ID NO: 4042454 - DNA, 25 bp, Homo sapien
attacctcatagtttaatgttcagt

SEQ ID NO: 4042455 - DNA, 25 bp, Homo sapien
ctcaaatagaaggtttgaaatacct

SEQ ID NO: 4042456 - DNA, 25 bp, Homo sapien
ggtttgaaataccttactcagcaag

SEQ ID NO: 4042457 - DNA, 25 bp, Homo sapien
cttactcagcaagtatattacctca

SEQ ID NO: 4042458 - DNA, 25 bp, Homo sapien
tcagagagggttagactagttggcc

SEQ ID NO: 4042459 - DNA, 25 bp, Homo sapien
gatctgtactatggctgaatgcaag

SEQ ID NO: 4042460 - DNA, 25 bp, Homo sapien
tataaagacagtgagtaccagaacc

SEQ ID NO: 4042461 - DNA, 25 bp, Homo sapien
caatagtaatttagtgcccaaagtc

SEQ ID NO: 4042462 - DNA, 25 bp, Homo sapien
gatggtcacttaggttactgccaaa

SEQ ID NO: 4042463 - DNA, 25 bp, Homo sapien
tgttcttacaaacagcactgcagtg

SEQ ID NO: 4042464 - DNA, 25 bp, Homo sapien
gagtattcccttgtatgcctgaaag

SEQ ID NO: 4042465 - DNA, 25 bp, Homo sapien
cacctaatgagtacctgaaatgacc

SEQ ID NO: 4042466 - DNA, 25 bp, Homo sapien
tagtctttgtctgtatccacctgcc

SEQ ID NO: 4042467 - DNA, 25 bp, Homo sapien
gaagatgcgtatataggcccttgct

SEQ ID NO: 4042468 - DNA, 25 bp, Homo sapien
ttttaccccaggacacatagtagtc

SEQ ID NO: 4042469 - DNA, 25 bp, Homo sapien
cataagtcctcaaccgggattgtcg

SEQ ID NO: 4042470 - DNA, 25 bp, Homo sapien
caccggtgtgtcaagcatggatatt

SEQ ID NO: 4042471 - DNA, 25 bp, Homo sapien
tgagaaaccatagcagacaatgccc

SEQ ID NO: 4042472 - DNA, 25 bp, Homo sapien
ttctcactggtcagagacaccggtg

SEQ ID NO: 4042473 - DNA, 25 bp, Homo sapien
tctaatccaacttgccagccctgag

SEQ ID NO: 4042474 - DNA, 25 bp, Homo sapien
tagaggacagtctgagaacacgtat

SEQ ID NO: 4042475 - DNA, 25 bp, Homo sapien
tttataatggtgtacctcagcagct

SEQ ID NO: 4042476 - DNA, 25 bp, Homo sapien
tagtctcaaaaactctagaggacag

SEQ ID NO: 4042477 - DNA, 25 bp, Homo sapien
caatttatgccaagtccttacagag

SEQ ID NO: 4042478 - DNA, 25 bp, Homo sapien
ggacccaggtcccactaatgcttgg

SEQ ID NO: 4042479 - DNA, 25 bp, Homo sapien
tatagatggagaggaactgaaaccc

SEQ ID NO: 4042480 - DNA, 25 bp, Homo sapien
gccctttggagtgggactggaccca

SEQ ID NO: 4042481 - DNA, 25 bp, Homo sapien
tctgggtctgcttgatcagtggaac

SEQ ID NO: 4042482 - DNA, 25 bp, Homo sapien
gactgcgatggacgccttagaagga

SEQ ID NO: 4042483 - DNA, 25 bp, Homo sapien
gcctgaccctataaaacaggtgtcc

SEQ ID NO: 4042484 - DNA, 25 bp, Homo sapien
cttagaaggagagagctttgcgctg

SEQ ID NO: 4042485 - DNA, 25 bp, Homo sapien
gagctttgcgctgtctttgtgagta

SEQ ID NO: 4042486 - DNA, 25 bp, Homo sapien
aatttgatgctgtggttggatattt

SEQ ID NO: 4042487 - DNA, 25 bp, Homo sapien
tggatatttagaggacattatcatg

SEQ ID NO: 4042488 - DNA, 25 bp, Homo sapien
ggatatttagaggacattatcatgg

SEQ ID NO: 4042489 - DNA, 25 bp, Homo sapien
ttgatgctgtggttggatatttaga

SEQ ID NO: 4042490 - DNA, 25 bp, Homo sapien
catggacaagtactacctggagttt

SEQ ID NO: 4042491 - DNA, 25 bp, Homo sapien
tttcatggacaagtactacctggag

SEQ ID NO: 4042492 - DNA, 25 bp, Homo sapien
tcatggacaagtactacctggagtt

SEQ ID NO: 4042493 - DNA, 25 bp, Homo sapien
aatttcatggacaagtactacctgg

SEQ ID NO: 4042494 - DNA, 25 bp, Homo sapien
tagatttctatgtctcctaccagga

SEQ ID NO: 4042495 - DNA, 25 bp, Homo sapien
aatatgccaccagtacacttccagg

SEQ ID NO: 4042496 - DNA, 25 bp, Homo sapien
tcctcattagcatctggtttaagtt

SEQ ID NO: 4042497 - DNA, 25 bp, Homo sapien
gaagtttgacctgggcttggtagca

SEQ ID NO: 4042498 - DNA, 25 bp, Homo sapien
tgttttccagtgaagggaggtacat

SEQ ID NO: 4042499 - DNA, 25 bp, Homo sapien
atgttttccagtgaagggaggtaca

SEQ ID NO: 4042500 - DNA, 25 bp, Homo sapien
gcattttaagaatgaccagggccag

SEQ ID NO: 4042501 - DNA, 25 bp, Homo sapien
gatcacatcttgtctcggctgtagg

SEQ ID NO: 4042502 - DNA, 25 bp, Homo sapien
tgtgtaagtgtggactaacccgccg

SEQ ID NO: 4042503 - DNA, 25 bp, Homo sapien
tgtccagcccagcatgagtagcagg

SEQ ID NO: 4042504 - DNA, 25 bp, Homo sapien
tctctgggttaggtagggactctgc

SEQ ID NO: 4042505 - DNA, 25 bp, Homo sapien
tgagagcttatgtctgacgggcaga

SEQ ID NO: 4042506 - DNA, 25 bp, Homo sapien
catgtgcctagtcagcaaggtcggg

SEQ ID NO: 4042507 - DNA, 25 bp, Homo sapien
cgatgttagcttcgcccaaagggag

SEQ ID NO: 4042508 - DNA, 25 bp, Homo sapien
taggcttatactacggcgggtctgg

SEQ ID NO: 4042509 - DNA, 25 bp, Homo sapien
agaaggcactcactccataggcgat

SEQ ID NO: 4042510 - DNA, 25 bp, Homo sapien
aaggcactcactccataggcgatca

SEQ ID NO: 4042511 - DNA, 25 bp, Homo sapien
aggcactcactccataggcgatcat

SEQ ID NO: 4042512 - DNA, 25 bp, Homo sapien
gaaggcactcactccataggcgatc

SEQ ID NO: 4042513 - DNA, 25 bp, Homo sapien
cggtggcgctgatgttaaagatcat

SEQ ID NO: 4042514 - DNA, 25 bp, Homo sapien
cggtgatgtagagaacggtggcgct

SEQ ID NO: 4042515 - DNA, 25 bp, Homo sapien
tggttataaggccgggtgcccctca

SEQ ID NO: 4042516 - DNA, 25 bp, Homo sapien
cgaggcagccgcgcgctggttataa

SEQ ID NO: 4042517 - DNA, 25 bp, Homo sapien
ctggctctgcagatcagcttaggtc

SEQ ID NO: 4042518 - DNA, 25 bp, Homo sapien
ggacaaagtcaagcctgtgtccttc

SEQ ID NO: 4042519 - DNA, 25 bp, Homo sapien
aaaaccgtgcacctaggcatggtgg

SEQ ID NO: 4042520 - DNA, 25 bp, Homo sapien
cccaaaaaaccgtgcacctaggcat

SEQ ID NO: 4042521 - DNA, 25 bp, Homo sapien
ccataggccggatacaggtggtacg

SEQ ID NO: 4042522 - DNA, 25 bp, Homo sapien
ggccagggaaccatgtacaacttca

SEQ ID NO: 4042523 - DNA, 25 bp, Homo sapien
cagaggaagacagcgacgaacatca

SEQ ID NO: 4042524 - DNA, 25 bp, Homo sapien
ggacgattgtcaccagccagaggaa

SEQ ID NO: 4042525 - DNA, 25 bp, Homo sapien
tagtggctaacagcatgaactctgg

SEQ ID NO: 4042526 - DNA, 25 bp, Homo sapien
aggctgttcccacacggcaggatgg

SEQ ID NO: 4042527 - DNA, 25 bp, Homo sapien
ctgtcaggctgttcccacacggcag

SEQ ID NO: 4042528 - DNA, 25 bp, Homo sapien
gagcatgggtagtggctaacagcat

SEQ ID NO: 4042529 - DNA, 25 bp, Homo sapien
tcagatctcccttggagctgcactc

SEQ ID NO: 4042530 - DNA, 25 bp, Homo sapien
gctgcactccctcagctcctcatag

SEQ ID NO: 4042531 - DNA, 25 bp, Homo sapien
ctgacagataaggcggtggtgctcc

SEQ ID NO: 4042532 - DNA, 25 bp, Homo sapien
ataaggcggtggtgctcccacagga

SEQ ID NO: 4042533 - DNA, 25 bp, Homo sapien
tgacaggtctctgtacaagctctgg

SEQ ID NO: 4042534 - DNA, 25 bp, Homo sapien
caaagtgggaattgtgtggccaccc

SEQ ID NO: 4042535 - DNA, 25 bp, Homo sapien
gatctgttattcacctgcaaagtgg

SEQ ID NO: 4042536 - DNA, 25 bp, Homo sapien
tgggcctcaaggacgcctactgact

SEQ ID NO: 4042537 - DNA, 25 bp, Homo sapien
ctcaggatccacctcaccagggatg

SEQ ID NO: 4042538 - DNA, 25 bp, Homo sapien
aggatccacctcaccagggatgctg

SEQ ID NO: 4042539 - DNA, 25 bp, Homo sapien
ctgtccatcaggggccagcctcagg

SEQ ID NO: 4042540 - DNA, 25 bp, Homo sapien
agcctcaggatccacctcaccaggg

SEQ ID NO: 4042541 - DNA, 25 bp, Homo sapien
gggatgcagggcgatcttgggggcg

SEQ ID NO: 4042542 - DNA, 25 bp, Homo sapien
gcagcgacggccacggggtagtgtc

SEQ ID NO: 4042543 - DNA, 25 bp, Homo sapien
atgcagggcgatcttgggggcgtcc

SEQ ID NO: 4042544 - DNA, 25 bp, Homo sapien
gctcgcagcgacggccacggggtag

SEQ ID NO: 4042545 - DNA, 25 bp, Homo sapien
gaggcgggagcgcacgaagcccagg

SEQ ID NO: 4042546 - DNA, 25 bp, Homo sapien
caggtccgggcgcagcgccgacacc

SEQ ID NO: 4042547 - DNA, 25 bp, Homo sapien
ttcggcgccctgcgcaggactgctg

SEQ ID NO: 4042548 - DNA, 25 bp, Homo sapien
cgccgacaccgaggcttcggcgccc

SEQ ID NO: 4042549 - DNA, 25 bp, Homo sapien
aggtgcggccgagatcccggctccg

SEQ ID NO: 4042550 - DNA, 25 bp, Homo sapien
gcccctccagcggtgggtgccggct

SEQ ID NO: 4042551 - DNA, 25 bp, Homo sapien
ccgaggtcgctacggccgccgtcgc

SEQ ID NO: 4042552 - DNA, 25 bp, Homo sapien
ggcggctccgcttgcctcccgaggt

SEQ ID NO: 4042553 - DNA, 25 bp, Homo sapien
cgacctgaacgcagcgccttagacc

SEQ ID NO: 4042554 - DNA, 25 bp, Homo sapien
gacctgaacgcagcgccttagaccg

SEQ ID NO: 4042555 - DNA, 25 bp, Homo sapien
cacgccgcgcacaggctgtttccag

SEQ ID NO: 4042556 - DNA, 25 bp, Homo sapien
gcacgccgcgcacaggctgtttcca

SEQ ID NO: 4042557 - DNA, 25 bp, Homo sapien
accagaagacctcggtaccgagagg

SEQ ID NO: 4042558 - DNA, 25 bp, Homo sapien
tcggtaccgagagggtgcccttctc

SEQ ID NO: 4042559 - DNA, 25 bp, Homo sapien
tagattcccttgagatgcttggagc

SEQ ID NO: 4042560 - DNA, 25 bp, Homo sapien
ccttgagatgcttggagcttgggat

SEQ ID NO: 4042561 - DNA, 25 bp, Homo sapien
ttggattagattcccttgagatgct

SEQ ID NO: 4042562 - DNA, 25 bp, Homo sapien
tgcttggagcttgggatgcagcccc

SEQ ID NO: 4042563 - DNA, 25 bp, Homo sapien
cgtgaccagctttccgacctcttcc

SEQ ID NO: 4042564 - DNA, 25 bp, Homo sapien
ctgagtcagccgtgaccagctttcc

SEQ ID NO: 4042565 - DNA, 25 bp, Homo sapien
agtcagccgtgaccagctttccgac

SEQ ID NO: 4042566 - DNA, 25 bp, Homo sapien
gtgaccagctttccgacctcttccc

SEQ ID NO: 4042567 - DNA, 25 bp, Homo sapien
cttttcgatattattgtgaatagaa

SEQ ID NO: 4042568 - DNA, 25 bp, Homo sapien
cgatattattgtgaatagaattatt

SEQ ID NO: 4042569 - DNA, 25 bp, Homo sapien
tttcgatattattgtgaatagaatt

SEQ ID NO: 4042570 - DNA, 25 bp, Homo sapien
acttttcgatattattgtgaataga

SEQ ID NO: 4042571 - DNA, 25 bp, Homo sapien
gttgctgacacccagaaagtcccac

SEQ ID NO: 4042572 - DNA, 25 bp, Homo sapien
ttcatgaatgttgggttctagctcc

SEQ ID NO: 4042573 - DNA, 25 bp, Homo sapien
ctgttctccaaacccatactacaca

SEQ ID NO: 4042574 - DNA, 25 bp, Homo sapien
catgaatgttgggttctagctccct

SEQ ID NO: 4042575 - DNA, 25 bp, Homo sapien
gctatggtgtgaaagactacctttg

SEQ ID NO: 4042576 - DNA, 25 bp, Homo sapien
tgacaatcaaattcatgctatggtg

SEQ ID NO: 4042577 - DNA, 25 bp, Homo sapien
ggctgtggtagcgtagcgctctctc

SEQ ID NO: 4042578 - DNA, 25 bp, Homo sapien
ttacctatgtgtcgtgtctgcttac

SEQ ID NO: 4042579 - DNA, 25 bp, Homo sapien
ggagtgagttgatagcacagaccct

SEQ ID NO: 4042580 - DNA, 25 bp, Homo sapien
cagacaggaccagggatttccatga

SEQ ID NO: 4042581 - DNA, 25 bp, Homo sapien
taacttgtctttggaccctgaggcc

SEQ ID NO: 4042582 - DNA, 25 bp, Homo sapien
ccatcacccgctaagagggagggag

SEQ ID NO: 4042583 - DNA, 25 bp, Homo sapien
ggtgctaggaacactccttcacaga

SEQ ID NO: 4042584 - DNA, 25 bp, Homo sapien
gggtgtggcgcagcatattcaggaa

SEQ ID NO: 4042585 - DNA, 25 bp, Homo sapien
tgggctgggttctacccaggtgcta

SEQ ID NO: 4042586 - DNA, 25 bp, Homo sapien
tagagagcaagacgctgtgctgccc

SEQ ID NO: 4042587 - DNA, 25 bp, Homo sapien
gcccactgtctatggtgtctgtgga

SEQ ID NO: 4042588 - DNA, 25 bp, Homo sapien
tcagcacggcccactgtctatggtg

SEQ ID NO: 4042589 - DNA, 25 bp, Homo sapien
gtgtctgtggatttatctggaattc

SEQ ID NO: 4042590 - DNA, 25 bp, Homo sapien
cacggcccactgtctatggtgtctg

SEQ ID NO: 4042591 - DNA, 25 bp, Homo sapien
gttttgcaagcacctcctaagccca

SEQ ID NO: 4042592 - DNA, 25 bp, Homo sapien
tcattgccagttgatctgggtcggc

SEQ ID NO: 4042593 - DNA, 25 bp, Homo sapien
ccagaagccaaaccagggtaacctg

SEQ ID NO: 4042594 - DNA, 25 bp, Homo sapien
tgggtcggccagttttgcaagcacc

SEQ ID NO: 4042595 - DNA, 25 bp, Homo sapien
ggggccctctttctagagtgtcagg

SEQ ID NO: 4042596 - DNA, 25 bp, Homo sapien
gaccaccatcagatcaatgaaggag

SEQ ID NO: 4042597 - DNA, 25 bp, Homo sapien
tcaggggtaggtaaccaccagggca

SEQ ID NO: 4042598 - DNA, 25 bp, Homo sapien
ggtgcttatacattgccacgaccac

SEQ ID NO: 4042599 - DNA, 25 bp, Homo sapien
tgggaatataggtgcccggccacca

SEQ ID NO: 4042600 - DNA, 25 bp, Homo sapien
ccacgccaccaatgggttttcacca

SEQ ID NO: 4042601 - DNA, 25 bp, Homo sapien
tgttcttgccccacgtggagctgag

SEQ ID NO: 4042602 - DNA, 25 bp, Homo sapien
tgaggacaaacttccccgaggtgct

SEQ ID NO: 4042603 - DNA, 25 bp, Homo sapien
aggtgctggagtcaatttcacagac

SEQ ID NO: 4042604 - DNA, 25 bp, Homo sapien
gggaagcttgtagccctgtccttgc

SEQ ID NO: 4042605 - DNA, 25 bp, Homo sapien
acctgggagagctttgcaaaaatgc

SEQ ID NO: 4042606 - DNA, 25 bp, Homo sapien
tgttgaagtgcacagctatagctca

SEQ ID NO: 4042607 - DNA, 25 bp, Homo sapien
tggctgcactctacaatgacctggg

SEQ ID NO: 4042608 - DNA, 25 bp, Homo sapien
tggacgcacagctcattcattcacg

SEQ ID NO: 4042609 - DNA, 25 bp, Homo sapien
aacaaacaactaaaatccaccagca

SEQ ID NO: 4042610 - DNA, 25 bp, Homo sapien
tacacaagggcatgagtcactaggg

SEQ ID NO: 4042611 - DNA, 25 bp, Homo sapien
tcacagtagggattatcccatcaca

SEQ ID NO: 4042612 - DNA, 25 bp, Homo sapien
gccacagaaggtaacctaatcacag

SEQ ID NO: 4042613 - DNA, 25 bp, Homo sapien
tggcaagattgattccaagtccata

SEQ ID NO: 4042614 - DNA, 25 bp, Homo sapien
aatatttggcaagattgattccaag

SEQ ID NO: 4042615 - DNA, 25 bp, Homo sapien
ccaagtccatatgggtggataacaa

SEQ ID NO: 4042616 - DNA, 25 bp, Homo sapien
gtccatatgggtggataacaagaac

SEQ ID NO: 4042617 - DNA, 25 bp, Homo sapien
taatacctgaaggttaacataaatg

SEQ ID NO: 4042618 - DNA, 25 bp, Homo sapien
ttaacataaatgacaacaggacaca

SEQ ID NO: 4042619 - DNA, 25 bp, Homo sapien
aatacctgaaggttaacataaatga

SEQ ID NO: 4042620 - DNA, 25 bp, Homo sapien
aacccatcccattctgaaaccaggt

SEQ ID NO: 4042621 - DNA, 25 bp, Homo sapien
attgctatcactcagaagcaccttt

SEQ ID NO: 4042622 - DNA, 25 bp, Homo sapien
gattgctatcactcagaagcacctt

SEQ ID NO: 4042623 - DNA, 25 bp, Homo sapien
agattgctatcactcagaagcacct

SEQ ID NO: 4042624 - DNA, 25 bp, Homo sapien
cccaggcataccagccagaagaaag

SEQ ID NO: 4042625 - DNA, 25 bp, Homo sapien
tatcccaggcataccagccagaaga

SEQ ID NO: 4042626 - DNA, 25 bp, Homo sapien
gcttatcccaggcataccagccaga

SEQ ID NO: 4042627 - DNA, 25 bp, Homo sapien
ttatcccaggcataccagccagaag

SEQ ID NO: 4042628 - DNA, 25 bp, Homo sapien
tgcgcccggccatagttctatattc

SEQ ID NO: 4042629 - DNA, 25 bp, Homo sapien
tgtctaaccatcaggtcccactctg

SEQ ID NO: 4042630 - DNA, 25 bp, Homo sapien
tcaaaacacaaccaactttagctaa

SEQ ID NO: 4042631 - DNA, 25 bp, Homo sapien
taaaaagcaacaagaccctccctga

SEQ ID NO: 4042632 - DNA, 25 bp, Homo sapien
tttttccagttcttcggcaaggcca

SEQ ID NO: 4042633 - DNA, 25 bp, Homo sapien
tccacaagctgacttgggttgggag

SEQ ID NO: 4042634 - DNA, 25 bp, Homo sapien
ccagttcttcggcaaggccacaggt

SEQ ID NO: 4042635 - DNA, 25 bp, Homo sapien
ggagctcatctgttcccttgacttc

SEQ ID NO: 4042636 - DNA, 25 bp, Homo sapien
atcccaaatcctaacagtgccaaaa

SEQ ID NO: 4042637 - DNA, 25 bp, Homo sapien
cagtaactaatgaacgagaattgtc

SEQ ID NO: 4042638 - DNA, 25 bp, Homo sapien
gaacgagaattgtcaccacccagaa

SEQ ID NO: 4042639 - DNA, 25 bp, Homo sapien
tcacaccagtgtcataactcagaag

SEQ ID NO: 4042640 - DNA, 25 bp, Homo sapien
aggcagcatggcaggctccagtcac

SEQ ID NO: 4042641 - DNA, 25 bp, Homo sapien
aatagtacagcaccgcgatgtcttc

SEQ ID NO: 4042642 - DNA, 25 bp, Homo sapien
gcaccgcgatgtcttcagcatgaag

SEQ ID NO: 4042643 - DNA, 25 bp, Homo sapien
tctaaaaatagtacagcaccgcgat

SEQ ID NO: 4042644 - DNA, 25 bp, Homo sapien
cccgcagggaagctggatctggctt

SEQ ID NO: 4042645 - DNA, 25 bp, Homo sapien
aagcagcccgcagggaagctggatc

SEQ ID NO: 4042646 - DNA, 25 bp, Homo sapien
gcagctcatctgagtcaatgagatc

SEQ ID NO: 4042647 - DNA, 25 bp, Homo sapien
cccacaagaagcagcccgcagggaa

SEQ ID NO: 4042648 - DNA, 25 bp, Homo sapien
caatgagtgatacagtcgtggtctc

SEQ ID NO: 4042649 - DNA, 25 bp, Homo sapien
tgagttaaactacatccacagaaga

SEQ ID NO: 4042650 - DNA, 25 bp, Homo sapien
cacatgctcaagaggccaacggtga

SEQ ID NO: 4042651 - DNA, 25 bp, Homo sapien
tgactgcaggcttcgagaggaaact

SEQ ID NO: 4042652 - DNA, 25 bp, Homo sapien
ctaggatgcaaaggaattagaaaca

SEQ ID NO: 4042653 - DNA, 25 bp, Homo sapien
aagctgtatgactggccagcaatgt

SEQ ID NO: 4042654 - DNA, 25 bp, Homo sapien
gacacttagtctgtaaaccctatga

SEQ ID NO: 4042655 - DNA, 25 bp, Homo sapien
aaaatgccaccaacatggccaagcg

SEQ ID NO: 4042656 - DNA, 25 bp, Homo sapien
aaccctatgagagcatgaacctcac

SEQ ID NO: 4042657 - DNA, 25 bp, Homo sapien
caggtttacacatgcccacaagagt

SEQ ID NO: 4042658 - DNA, 25 bp, Homo sapien
tcgttggctgagagggtccacagct

SEQ ID NO: 4042659 - DNA, 25 bp, Homo sapien
ccatatcgttggctgagagggtcca

SEQ ID NO: 4042660 - DNA, 25 bp, Homo sapien
catgctgtcgtcctccatatcgttg

SEQ ID NO: 4042661 - DNA, 25 bp, Homo sapien
gtcgtcctccatatcgttggctgag

SEQ ID NO: 4042662 - DNA, 25 bp, Homo sapien
cagcaggttgtcactttcatgacca

SEQ ID NO: 4042663 - DNA, 25 bp, Homo sapien
gcttaagctgcctagaagaacccac

SEQ ID NO: 4042664 - DNA, 25 bp, Homo sapien
caaggtgttctcgaacagactgtac

SEQ ID NO: 4042665 - DNA, 25 bp, Homo sapien
gagaagacttcttggtgatggaaag

SEQ ID NO: 4042666 - DNA, 25 bp, Homo sapien
agtcagggctgaacacagcttagat

SEQ ID NO: 4042667 - DNA, 25 bp, Homo sapien
cttccacaagaccagaaagagtcag

SEQ ID NO: 4042668 - DNA, 25 bp, Homo sapien
cagggctgaacacagcttagatgct

SEQ ID NO: 4042669 - DNA, 25 bp, Homo sapien
tctttcacttccacaagaccagaaa

SEQ ID NO: 4042670 - DNA, 25 bp, Homo sapien
cagcactgtgcagagtggtgcttcc

SEQ ID NO: 4042671 - DNA, 25 bp, Homo sapien
aaaataatgtcaaagctggattctt

SEQ ID NO: 4042672 - DNA, 25 bp, Homo sapien
ctgacaaaataatgtcaaagctgga

SEQ ID NO: 4042673 - DNA, 25 bp, Homo sapien
acaaaataatgtcaaagctggattc

SEQ ID NO: 4042674 - DNA, 25 bp, Homo sapien
tcaaagctggattctttgtgggcag

SEQ ID NO: 4042675 - DNA, 25 bp, Homo sapien
gatgttttccacagacacgcggccc

SEQ ID NO: 4042676 - DNA, 25 bp, Homo sapien
attgcaacagctgcttgatgttttc

SEQ ID NO: 4042677 - DNA, 25 bp, Homo sapien
ccggttaacgcttgaagcttatcca

SEQ ID NO: 4042678 - DNA, 25 bp, Homo sapien
gacacgcggccctcattgccggtta

SEQ ID NO: 4042679 - DNA, 25 bp, Homo sapien
agtgcagtactgacagacctaaaaa

SEQ ID NO: 4042680 - DNA, 25 bp, Homo sapien
gcagtgcagtactgacagacctaaa

SEQ ID NO: 4042681 - DNA, 25 bp, Homo sapien
ttgcagtgcagtactgacagaccta

SEQ ID NO: 4042682 - DNA, 25 bp, Homo sapien
tcttgcagtgcagtactgacagacc

SEQ ID NO: 4042683 - DNA, 25 bp, Homo sapien
gactgatgtcaattggccttctgga

SEQ ID NO: 4042684 - DNA, 25 bp, Homo sapien
tggatccacggcctccataatctgg

SEQ ID NO: 4042685 - DNA, 25 bp, Homo sapien
tgtagtaatcttatgtagtcccagc

SEQ ID NO: 4042686 - DNA, 25 bp, Homo sapien
cgtggtgacagaatctatggtagtc

SEQ ID NO: 4042687 - DNA, 25 bp, Homo sapien
gcacatgatgtcgaggaagaaccct

SEQ ID NO: 4042688 - DNA, 25 bp, Homo sapien
tttacggaggcttttatagggcaca

SEQ ID NO: 4042689 - DNA, 25 bp, Homo sapien
ccatgcctgataggaggacactcca

SEQ ID NO: 4042690 - DNA, 25 bp, Homo sapien
taccactggatcttatgggcacatg

SEQ ID NO: 4042691 - DNA, 25 bp, Homo sapien
tattctttgtagagatgcggtttcg

SEQ ID NO: 4042692 - DNA, 25 bp, Homo sapien
gtattctttgtagagatgcggtttc

SEQ ID NO: 4042693 - DNA, 25 bp, Homo sapien
tgcggtttcgccatgttgcccaggc

SEQ ID NO: 4042694 - DNA, 25 bp, Homo sapien
cacaacgattggctactggtaggac

SEQ ID NO: 4042695 - DNA, 25 bp, Homo sapien
aattatatcaactcaacacgctggg

SEQ ID NO: 4042696 - DNA, 25 bp, Homo sapien
ttacaatcgtgagctcaggtacccc

SEQ ID NO: 4042697 - DNA, 25 bp, Homo sapien
caggaacgtctccaggcatttggcg

SEQ ID NO: 4042698 - DNA, 25 bp, Homo sapien
cgtggtcccgtagctaccggtcgcg

SEQ ID NO: 4042699 - DNA, 25 bp, Homo sapien
ggagcgacgacttccgccctcctta

SEQ ID NO: 4042700 - DNA, 25 bp, Homo sapien
acgccttgcgcctctcgcgagagga

SEQ ID NO: 4042701 - DNA, 25 bp, Homo sapien
cgtgggcgacgtgcccgcttccaaa

SEQ ID NO: 4042702 - DNA, 25 bp, Homo sapien
cacataacctggtgttcacgagaac

SEQ ID NO: 4042703 - DNA, 25 bp, Homo sapien
ctttgaaaagtataaggtgccatcc

SEQ ID NO: 4042704 - DNA, 25 bp, Homo sapien
gagaacacactaaaggactcctgag

SEQ ID NO: 4042705 - DNA, 25 bp, Homo sapien
aaggtctgacgccacctcaaggtga

SEQ ID NO: 4042706 - DNA, 25 bp, Homo sapien
gaagttttcgcagtagctgttccag

SEQ ID NO: 4042707 - DNA, 25 bp, Homo sapien
ctcttgtgggtcttccactggatct

SEQ ID NO: 4042708 - DNA, 25 bp, Homo sapien
cttgtgggtcttccactggatcttt

SEQ ID NO: 4042709 - DNA, 25 bp, Homo sapien
cttgacatcctgtgaagttttcgca

SEQ ID NO: 4042710 - DNA, 25 bp, Homo sapien
tacaaactcaattaagccacgagat

SEQ ID NO: 4042711 - DNA, 25 bp, Homo sapien
tgtgctaaccataaattaactgcag

SEQ ID NO: 4042712 - DNA, 25 bp, Homo sapien
atccagagtgatgtgctaaccataa

SEQ ID NO: 4042713 - DNA, 25 bp, Homo sapien
tgtcagccctctcaggattgaagaa

SEQ ID NO: 4042714 - DNA, 25 bp, Homo sapien
ctactgttggttgagcttcttggca

SEQ ID NO: 4042715 - DNA, 25 bp, Homo sapien
agtgtttccagtgcacctgtaggga

SEQ ID NO: 4042716 - DNA, 25 bp, Homo sapien
cctgtagggaaccaactagacttct

SEQ ID NO: 4042717 - DNA, 25 bp, Homo sapien
catagatagattaccagggatgcag

SEQ ID NO: 4042718 - DNA, 25 bp, Homo sapien
agggctggcctgctagcgcttcaaa

SEQ ID NO: 4042719 - DNA, 25 bp, Homo sapien
gaatagcattagaccctggctgtcc

SEQ ID NO: 4042720 - DNA, 25 bp, Homo sapien
taattaggcagcctggagaaaacca

SEQ ID NO: 4042721 - DNA, 25 bp, Homo sapien
tcaagtgccatagcctttattcagg

SEQ ID NO: 4042722 - DNA, 25 bp, Homo sapien
cagaaaggaaaggatatttattgat

SEQ ID NO: 4042723 - DNA, 25 bp, Homo sapien
aggaaaggatatttattgattaaca

SEQ ID NO: 4042724 - DNA, 25 bp, Homo sapien
gaaaggatatttattgattaacaga

SEQ ID NO: 4042725 - DNA, 25 bp, Homo sapien
aaggatatttattgattaacagaag

SEQ ID NO: 4042726 - DNA, 25 bp, Homo sapien
tgacgtgaatagaaagatagccctt

SEQ ID NO: 4042727 - DNA, 25 bp, Homo sapien
taacagtatatagtcccacggtagc

SEQ ID NO: 4042728 - DNA, 25 bp, Homo sapien
caaaaacagccttgaccgtggcctg

SEQ ID NO: 4042729 - DNA, 25 bp, Homo sapien
taaaactccaactgcaaggctggca

SEQ ID NO: 4042730 - DNA, 25 bp, Homo sapien
gtctgtttccgagctggcctgggct

SEQ ID NO: 4042731 - DNA, 25 bp, Homo sapien
tgaggaggtctgtttccgagctggc

SEQ ID NO: 4042732 - DNA, 25 bp, Homo sapien
aggaggtctgtttccgagctggcct

SEQ ID NO: 4042733 - DNA, 25 bp, Homo sapien
tgttgaggaggtctgtttccgagct

SEQ ID NO: 4042734 - DNA, 25 bp, Homo sapien
tcagagctaggtcaaaagacccctg

SEQ ID NO: 4042735 - DNA, 25 bp, Homo sapien
ctcagaactcagagctaggtcaaaa

SEQ ID NO: 4042736 - DNA, 25 bp, Homo sapien
gctaggtcaaaagacccctgcccaa

SEQ ID NO: 4042737 - DNA, 25 bp, Homo sapien
gtcaaaagacccctgcccaataggc

SEQ ID NO: 4042738 - DNA, 25 bp, Homo sapien
tgtgcagggatacgagtaatgttcc

SEQ ID NO: 4042739 - DNA, 25 bp, Homo sapien
gtaatgttccgtgcccttgttcagc

SEQ ID NO: 4042740 - DNA, 25 bp, Homo sapien
cagcatagctggaggcttcggcgat

SEQ ID NO: 4042741 - DNA, 25 bp, Homo sapien
gccagtaggcactgcgcggcagcat

SEQ ID NO: 4042742 - DNA, 25 bp, Homo sapien
tgtggacgcgctggtaaatctgctc

SEQ ID NO: 4042743 - DNA, 25 bp, Homo sapien
ggtatagagtccttccccagcatca

SEQ ID NO: 4042744 - DNA, 25 bp, Homo sapien
ccatttccagcaggacccgcttgtg

SEQ ID NO: 4042745 - DNA, 25 bp, Homo sapien
tgctgctctgcgatggccagggtgg

SEQ ID NO: 4042746 - DNA, 25 bp, Homo sapien
cagcctcgaaggtaaagcgtgtggc

SEQ ID NO: 4042747 - DNA, 25 bp, Homo sapien
gatgtcccagaggtagatgttctcg

SEQ ID NO: 4042748 - DNA, 25 bp, Homo sapien
atcccggccatagcggcgcagtgag

SEQ ID NO: 4042749 - DNA, 25 bp, Homo sapien
gggccacgagacgagcttcacacgg

SEQ ID NO: 4042750 - DNA, 25 bp, Homo sapien
actgatgtcgttgaggcgggacccc

SEQ ID NO: 4042751 - DNA, 25 bp, Homo sapien
aggaggtcaggttctcccagactga

SEQ ID NO: 4042752 - DNA, 25 bp, Homo sapien
gacactccacagatagtgtcttgta

SEQ ID NO: 4042753 - DNA, 25 bp, Homo sapien
tagtgtcttgtaccactcctctgcc

SEQ ID NO: 4042754 - DNA, 25 bp, Homo sapien
cagagcccggtagcccaccccgtct

SEQ ID NO: 4042755 - DNA, 25 bp, Homo sapien
aaatgctacttcatcatgcagctcc

SEQ ID NO: 4042756 - DNA, 25 bp, Homo sapien
tgctacttcatcatgcagctccaga

SEQ ID NO: 4042757 - DNA, 25 bp, Homo sapien
ctccagagcccggtagcccaccccg

SEQ ID NO: 4042758 - DNA, 25 bp, Homo sapien
cacttgacgttgctgatctcagtca

SEQ ID NO: 4042759 - DNA, 25 bp, Homo sapien
cagtgaatatgatggccaccgcctg

SEQ ID NO: 4042760 - DNA, 25 bp, Homo sapien
gggagccgcgtaacacacttgacgt

SEQ ID NO: 4042761 - DNA, 25 bp, Homo sapien
ggtacgtgccgagtcatcagtgaat

SEQ ID NO: 4042762 - DNA, 25 bp, Homo sapien
ggccccttgctggaggatttccgga

SEQ ID NO: 4042763 - DNA, 25 bp, Homo sapien
gctggaggatttccggaacaccagc

SEQ ID NO: 4042764 - DNA, 25 bp, Homo sapien
cccttgctggaggatttccggaaca

SEQ ID NO: 4042765 - DNA, 25 bp, Homo sapien
cttgctggaggatttccggaacacc

SEQ ID NO: 4042766 - DNA, 25 bp, Homo sapien
gggcggtgccgcacagccttccctg

SEQ ID NO: 4042767 - DNA, 25 bp, Homo sapien
cctgcctgccacagggggcggtgcc

SEQ ID NO: 4042768 - DNA, 25 bp, Homo sapien
ctgcctgccacagggggcggtgccg

SEQ ID NO: 4042769 - DNA, 25 bp, Homo sapien
cacagggggcggtgccgcacagcct

SEQ ID NO: 4042770 - DNA, 25 bp, Homo sapien
gacagcctcgccgagatcatgaagt

SEQ ID NO: 4042771 - DNA, 25 bp, Homo sapien
tgctcctgtcttctagggggtcttc

SEQ ID NO: 4042772 - DNA, 25 bp, Homo sapien
tcttctagggggtcttcaccagttg

SEQ ID NO: 4042773 - DNA, 25 bp, Homo sapien
gatcatgaagttgatcccctctgct

SEQ ID NO: 4042774 - DNA, 25 bp, Homo sapien
agccccgagaccacagatgcacgat

SEQ ID NO: 4042775 - DNA, 25 bp, Homo sapien
aggcagcacgctggcgaggagcccc

SEQ ID NO: 4042776 - DNA, 25 bp, Homo sapien
ggtgacaacttcaacaatagcaggg

SEQ ID NO: 4042777 - DNA, 25 bp, Homo sapien
tccaagcctgggaccgagtcctcgg

SEQ ID NO: 4042778 - DNA, 25 bp, Homo sapien
cttcatcttcacgtagccttgcttg

SEQ ID NO: 4042779 - DNA, 25 bp, Homo sapien
gtagccttgcttgacgatgtcactg

SEQ ID NO: 4042780 - DNA, 25 bp, Homo sapien
cgatgtcactgaaattggtcgccat

SEQ ID NO: 4042781 - DNA, 25 bp, Homo sapien
gacgatgtcactgaaattggtcgcc

SEQ ID NO: 4042782 - DNA, 25 bp, Homo sapien
cacctgttccagacactctgtcggg

SEQ ID NO: 4042783 - DNA, 25 bp, Homo sapien
atcacctgttccagacactctgtcg

SEQ ID NO: 4042784 - DNA, 25 bp, Homo sapien
gcattgttctagcagctccttcgcc

SEQ ID NO: 4042785 - DNA, 25 bp, Homo sapien
acccgcctcagcattgttctagcag

SEQ ID NO: 4042786 - DNA, 25 bp, Homo sapien
taaaaatgacagggagattagagac

SEQ ID NO: 4042787 - DNA, 25 bp, Homo sapien
gtcagaacacgcctacaggaagcca

SEQ ID NO: 4042788 - DNA, 25 bp, Homo sapien
tcagacatagcacagcccggagtgt

SEQ ID NO: 4042789 - DNA, 25 bp, Homo sapien
ggttcatccaacatagctcagacat

SEQ ID NO: 4042790 - DNA, 25 bp, Homo sapien
tctccaagatgattagcaggctgac

SEQ ID NO: 4042791 - DNA, 25 bp, Homo sapien
gaattgggttgaagtagcccctgcc

SEQ ID NO: 4042792 - DNA, 25 bp, Homo sapien
gaatgcttgctactttgagaggacc

SEQ ID NO: 4042793 - DNA, 25 bp, Homo sapien
ctaagcacggtgtccagcagtcgct

SEQ ID NO: 4042794 - DNA, 25 bp, Homo sapien
caatactgctgcttacccagggaca

SEQ ID NO: 4042795 - DNA, 25 bp, Homo sapien
caccacaggtttccgcgcagggaga

SEQ ID NO: 4042796 - DNA, 25 bp, Homo sapien
agctccaaaatgctcctctccccag

SEQ ID NO: 4042797 - DNA, 25 bp, Homo sapien
tttccgcgcagggagagccagctcc

SEQ ID NO: 4042798 - DNA, 25 bp, Homo sapien
aggccaccacaggtttccgcgcagg

SEQ ID NO: 4042799 - DNA, 25 bp, Homo sapien
tcatgcccgcgtcacggcgcggctg

SEQ ID NO: 4042800 - DNA, 25 bp, Homo sapien
gctcatgcccgcgtcacggcgcggc

SEQ ID NO: 4042801 - DNA, 25 bp, Homo sapien
aggctcatgcccgcgtcacggcgcg

SEQ ID NO: 4042802 - DNA, 25 bp, Homo sapien
gagcaggctcatgcccgcgtcacgg

SEQ ID NO: 4042803 - DNA, 25 bp, Homo sapien
gcggggacggcgagggaggcgcggc

SEQ ID NO: 4042804 - DNA, 25 bp, Homo sapien
cgcagggctagggatcgggctccgg

SEQ ID NO: 4042805 - DNA, 25 bp, Homo sapien
cgcggccgcagggctagggatcggg

SEQ ID NO: 4042806 - DNA, 25 bp, Homo sapien
gggaggcgcggccgcagggctaggg

SEQ ID NO: 4042807 - DNA, 25 bp, Homo sapien
ttagcgatgcgtggagaagtcattc

SEQ ID NO: 4042808 - DNA, 25 bp, Homo sapien
tggagaagtcattccccacaaactt

SEQ ID NO: 4042809 - DNA, 25 bp, Homo sapien
gcgtggagaagtcattccccacaaa

SEQ ID NO: 4042810 - DNA, 25 bp, Homo sapien
cgatgcgtggagaagtcattcccca

SEQ ID NO: 4042811 - DNA, 25 bp, Homo sapien
gactggcgtggcaaggatttgctgc

SEQ ID NO: 4042812 - DNA, 25 bp, Homo sapien
tgcagccacaaagccgtgcaagccc

SEQ ID NO: 4042813 - DNA, 25 bp, Homo sapien
ctggcagacaggtgcgcgcataaca

SEQ ID NO: 4042814 - DNA, 25 bp, Homo sapien
ggtgcgcgcataacacctctgcagc

SEQ ID NO: 4042815 - DNA, 25 bp, Homo sapien
ttgaatcagccgtgcggtagcccct

SEQ ID NO: 4042816 - DNA, 25 bp, Homo sapien
gatgttccttcctggcgcctctgtt

SEQ ID NO: 4042817 - DNA, 25 bp, Homo sapien
caccctatctgggtttgatcgtcca

SEQ ID NO: 4042818 - DNA, 25 bp, Homo sapien
atggccagaccccagatgttccttc

SEQ ID NO: 4042819 - DNA, 25 bp, Homo sapien
gctagaataatcctggcaacgcttc

SEQ ID NO: 4042820 - DNA, 25 bp, Homo sapien
ggccacaccgagagaaaatcattta

SEQ ID NO: 4042821 - DNA, 25 bp, Homo sapien
gcaggcccgggtactgagaatttac

SEQ ID NO: 4042822 - DNA, 25 bp, Homo sapien
taaagggtcccatcaaaagagcaga

SEQ ID NO: 4042823 - DNA, 25 bp, Homo sapien
ccgcccacatctgccatactttcag

SEQ ID NO: 4042824 - DNA, 25 bp, Homo sapien
aagttacttgacattcctgagctct

SEQ ID NO: 4042825 - DNA, 25 bp, Homo sapien
gagctctggttcagcgtcaggtgca

SEQ ID NO: 4042826 - DNA, 25 bp, Homo sapien
ttcagcgtcaggtgcaggccgatgc

SEQ ID NO: 4042827 - DNA, 25 bp, Homo sapien
actggtcccagagtgagcctaggca

SEQ ID NO: 4042828 - DNA, 25 bp, Homo sapien
actgttgacgccatccctgggagag

SEQ ID NO: 4042829 - DNA, 25 bp, Homo sapien
ttgagtggctggttagcctggaccc

SEQ ID NO: 4042830 - DNA, 25 bp, Homo sapien
gatgaacagcgaagcctagagaggc

SEQ ID NO: 4042831 - DNA, 25 bp, Homo sapien
aggtcactggttccatcctcggcct

SEQ ID NO: 4042832 - DNA, 25 bp, Homo sapien
tcgtccaggtcactggttccatcct

SEQ ID NO: 4042833 - DNA, 25 bp, Homo sapien
tccaggtcactggttccatcctcgg

SEQ ID NO: 4042834 - DNA, 25 bp, Homo sapien
gtcctcgtccaggtcactggttcca

SEQ ID NO: 4042835 - DNA, 25 bp, Homo sapien
cgtgcctggttgtgggcctcgtcca

SEQ ID NO: 4042836 - DNA, 25 bp, Homo sapien
tccagcgaccgctgcagcttacgtg

SEQ ID NO: 4042837 - DNA, 25 bp, Homo sapien
gctccagttgcacttgcaggttctc

SEQ ID NO: 4042838 - DNA, 25 bp, Homo sapien
cagttgcacttgcaggttctcgctc

SEQ ID NO: 4042839 - DNA, 25 bp, Homo sapien
tcgtcctcagcctgggccagctcct

SEQ ID NO: 4042840 - DNA, 25 bp, Homo sapien
ctcgtcctcagcctgggccagctcc

SEQ ID NO: 4042841 - DNA, 25 bp, Homo sapien
gcctgggccagctccttcttgagct

SEQ ID NO: 4042842 - DNA, 25 bp, Homo sapien
tgggccagctccttcttgagctcct

SEQ ID NO: 4042843 - DNA, 25 bp, Homo sapien
tgccatgcacatgcttcaggtctgc

SEQ ID NO: 4042844 - DNA, 25 bp, Homo sapien
ttcacctcagcctcgtgctgctcca

SEQ ID NO: 4042845 - DNA, 25 bp, Homo sapien
cttcagcttgccatgcacatgcttc

SEQ ID NO: 4042846 - DNA, 25 bp, Homo sapien
tgctccacccgccggttggcatgtg

SEQ ID NO: 4042847 - DNA, 25 bp, Homo sapien
agggaatcagtatcagcttgggcgc

SEQ ID NO: 4042848 - DNA, 25 bp, Homo sapien
cagtatcagcttgggcgccatgcca

SEQ ID NO: 4042849 - DNA, 25 bp, Homo sapien
catgccagggagtcccacgaggtca

SEQ ID NO: 4042850 - DNA, 25 bp, Homo sapien
agtcccacgaggtcaggcagttcta

SEQ ID NO: 4042851 - DNA, 25 bp, Homo sapien
tgtggctccggtttggatgtgtaac

SEQ ID NO: 4042852 - DNA, 25 bp, Homo sapien
gatctaccctggagctgttggagca

SEQ ID NO: 4042853 - DNA, 25 bp, Homo sapien
tcttcaggggcgtatggcattgaaa

SEQ ID NO: 4042854 - DNA, 25 bp, Homo sapien
gatgtgtaactttcagatgctactg

SEQ ID NO: 4042855 - DNA, 25 bp, Homo sapien
actccgcagcgttttcggcctgcag

SEQ ID NO: 4042856 - DNA, 25 bp, Homo sapien
tcaggtcgcagtccagtgcgctggc

SEQ ID NO: 4042857 - DNA, 25 bp, Homo sapien
ttgttctcccgctcaaggcccagtt

SEQ ID NO: 4042858 - DNA, 25 bp, Homo sapien
ttgttcttctcgaagagcgcggcct

SEQ ID NO: 4042859 - DNA, 25 bp, Homo sapien
aggtcctcagacatgcggcccagct

SEQ ID NO: 4042860 - DNA, 25 bp, Homo sapien
cctggtgcgcctccttcaggatgct

SEQ ID NO: 4042861 - DNA, 25 bp, Homo sapien
tccggtccatgctggagcgtgcacc

SEQ ID NO: 4042862 - DNA, 25 bp, Homo sapien
tcagctcggccattttccggtccat

SEQ ID NO: 4042863 - DNA, 25 bp, Homo sapien
gcttctcaatgttcctgctcaacgc

SEQ ID NO: 4042864 - DNA, 25 bp, Homo sapien
gttcctgctcaacgccagtttatcc

SEQ ID NO: 4042865 - DNA, 25 bp, Homo sapien
tctcaatgttcctgctcaacgccag

SEQ ID NO: 4042866 - DNA, 25 bp, Homo sapien
aatgttcctgctcaacgccagttta

SEQ ID NO: 4042867 - DNA, 25 bp, Homo sapien
tggctgagctcagcatcaccttcca

SEQ ID NO: 4042868 - DNA, 25 bp, Homo sapien
atggctgagctcagcatcaccttcc

SEQ ID NO: 4042869 - DNA, 25 bp, Homo sapien
caatggctgagctcagcatcacctt

SEQ ID NO: 4042870 - DNA, 25 bp, Homo sapien
aatggctgagctcagcatcaccttc

SEQ ID NO: 4042871 - DNA, 25 bp, Homo sapien
ccgcagggcggtcaacttggaggcc

SEQ ID NO: 4042872 - DNA, 25 bp, Homo sapien
tcatccagccgtagccgcagggcgg

SEQ ID NO: 4042873 - DNA, 25 bp, Homo sapien
tctgggactcatccagccgtagccg

SEQ ID NO: 4042874 - DNA, 25 bp, Homo sapien
tcctggcggcctgagctgccccgcg

SEQ ID NO: 4042875 - DNA, 25 bp, Homo sapien
gctctgggcctcccctttcacctcc

SEQ ID NO: 4042876 - DNA, 25 bp, Homo sapien
ctcctggagctgcagagtgtcagcc

SEQ ID NO: 4042877 - DNA, 25 bp, Homo sapien
ggagctgcagagtgtcagccaccat

SEQ ID NO: 4042878 - DNA, 25 bp, Homo sapien
ctgctctgggcctcccctttcacct

SEQ ID NO: 4042879 - DNA, 25 bp, Homo sapien
ggaggccaggcctttactagcttgt

SEQ ID NO: 4042880 - DNA, 25 bp, Homo sapien
aggaggccaggcctttactagcttg

SEQ ID NO: 4042881 - DNA, 25 bp, Homo sapien
cgcccacttcgagactggagcgcga

SEQ ID NO: 4042882 - DNA, 25 bp, Homo sapien
ttcgagactggagcgcgaacgcccc

SEQ ID NO: 4042883 - DNA, 25 bp, Homo sapien
tttctcgcgccaattggcagtgcag

SEQ ID NO: 4042884 - DNA, 25 bp, Homo sapien
gggccgtcgcgcgtctggtcggcga

SEQ ID NO: 4042885 - DNA, 25 bp, Homo sapien
gctccttggtgagcgcgtccaggcg

SEQ ID NO: 4042886 - DNA, 25 bp, Homo sapien
gcggttgcgctcagcgcgcaccttg

SEQ ID NO: 4042887 - DNA, 25 bp, Homo sapien
ggtcttctccatctgcgccgcccgc

SEQ ID NO: 4042888 - DNA, 25 bp, Homo sapien
tccggcgacgggctgcccaggatgg

SEQ ID NO: 4042889 - DNA, 25 bp, Homo sapien
aaggagtcggcaggccccatgcgct

SEQ ID NO: 4042890 - DNA, 25 bp, Homo sapien
ggctctcccagtcgccgtcggccag

SEQ ID NO: 4042891 - DNA, 25 bp, Homo sapien
gggccctgagctcgaactcgcggtc

SEQ ID NO: 4042892 - DNA, 25 bp, Homo sapien
cggcgggcgcgatacaactgtgcat

SEQ ID NO: 4042893 - DNA, 25 bp, Homo sapien
aactgtgcatgatgacgccgtgccc

SEQ ID NO: 4042894 - DNA, 25 bp, Homo sapien
tgagctcgaactcgcggtcgggctc

SEQ ID NO: 4042895 - DNA, 25 bp, Homo sapien
tagtcgacccctcccaagccgctgg

SEQ ID NO: 4042896 - DNA, 25 bp, Homo sapien
ttagtcctcacttagtcgacccctc

SEQ ID NO: 4042897 - DNA, 25 bp, Homo sapien
ctcacttagtcgacccctcccaagc

SEQ ID NO: 4042898 - DNA, 25 bp, Homo sapien
aagccgctggccctgcgaaccgccc

SEQ ID NO: 4042899 - DNA, 25 bp, Homo sapien
gcagggcgccgtgctctgattggcc

SEQ ID NO: 4042900 - DNA, 25 bp, Homo sapien
gctctgggcagggcgccgtgctctg

SEQ ID NO: 4042901 - DNA, 25 bp, Homo sapien
cgcccgtccatcccgcattcgccat

SEQ ID NO: 4042902 - DNA, 25 bp, Homo sapien
ccattggcagtcgccgcggctctgg

SEQ ID NO: 4042903 - DNA, 25 bp, Homo sapien
gggtagagcgggcaccgtgcagctg

SEQ ID NO: 4042904 - DNA, 25 bp, Homo sapien
tgcggcggggtagagcgggcaccgt

SEQ ID NO: 4042905 - DNA, 25 bp, Homo sapien
ggctccgtacgtcccagccgctgcg

SEQ ID NO: 4042906 - DNA, 25 bp, Homo sapien
gtagagcgggcaccgtgcagctgcg

SEQ ID NO: 4042907 - DNA, 25 bp, Homo sapien
catgaaatgtctagaggtgatccac

SEQ ID NO: 4042908 - DNA, 25 bp, Homo sapien
tgaaatccaacacgtcctctaaggg

SEQ ID NO: 4042909 - DNA, 25 bp, Homo sapien
tgagcacattgctgttccccatggg

SEQ ID NO: 4042910 - DNA, 25 bp, Homo sapien
gatcttaaaggttcagctgggtcac

SEQ ID NO: 4042911 - DNA, 25 bp, Homo sapien
tgtgcagttgagtcaccgttggccc

SEQ ID NO: 4042912 - DNA, 25 bp, Homo sapien
cctgagggctgtcgtacagagcagc

SEQ ID NO: 4042913 - DNA, 25 bp, Homo sapien
tgaggctcagagcaacttggtgtct

SEQ ID NO: 4042914 - DNA, 25 bp, Homo sapien
tgtaacatgggtacgaatgatccta

SEQ ID NO: 4042915 - DNA, 25 bp, Homo sapien
tttcccagaacgaacactaggcggc

SEQ ID NO: 4042916 - DNA, 25 bp, Homo sapien
ggttttaaattcgaagctcaggcca

SEQ ID NO: 4042917 - DNA, 25 bp, Homo sapien
caagattgaatttgcccaggtaggc

SEQ ID NO: 4042918 - DNA, 25 bp, Homo sapien
gcggtgctcccaagacttccataga

SEQ ID NO: 4042919 - DNA, 25 bp, Homo sapien
ggccatagctgagggcatgcaccgt

SEQ ID NO: 4042920 - DNA, 25 bp, Homo sapien
aactgaggcaagctcttgatgcttc

SEQ ID NO: 4042921 - DNA, 25 bp, Homo sapien
aaagaataaaacaactgaggcaagc

SEQ ID NO: 4042922 - DNA, 25 bp, Homo sapien
gacgctggaccggttcactgtgcag

SEQ ID NO: 4042923 - DNA, 25 bp, Homo sapien
gcaaacactgtgtatagcatactaa

SEQ ID NO: 4042924 - DNA, 25 bp, Homo sapien
gatggaactatacattctaagcaga

SEQ ID NO: 4042925 - DNA, 25 bp, Homo sapien
tccccggctcaagtatctgtacaat

SEQ ID NO: 4042926 - DNA, 25 bp, Homo sapien
gaaagaaaagcgagttgcaaacact

SEQ ID NO: 4042927 - DNA, 25 bp, Homo sapien
tcatgtggcagttacctccagagcc

SEQ ID NO: 4042928 - DNA, 25 bp, Homo sapien
gactgcacagttgccaagactaggc

SEQ ID NO: 4042929 - DNA, 25 bp, Homo sapien
tctaatagttcgagctcatgtggca

SEQ ID NO: 4042930 - DNA, 25 bp, Homo sapien
aagactaggcccactgaggttcaag

SEQ ID NO: 4042931 - DNA, 25 bp, Homo sapien
tcttcagggcccctcttgagtagga

SEQ ID NO: 4042932 - DNA, 25 bp, Homo sapien
gaggagaccaggctttgaaggttcc

SEQ ID NO: 4042933 - DNA, 25 bp, Homo sapien
cacagcttgtcactggagtgtcttt

SEQ ID NO: 4042934 - DNA, 25 bp, Homo sapien
agaggagatgtacgggacctgaata

SEQ ID NO: 4042935 - DNA, 25 bp, Homo sapien
ggcattttgtgagttggttgttaaa

SEQ ID NO: 4042936 - DNA, 25 bp, Homo sapien
tgacagaccacatagatgacggtgg

SEQ ID NO: 4042937 - DNA, 25 bp, Homo sapien
gttaaacatagccactgttaagaat

SEQ ID NO: 4042938 - DNA, 25 bp, Homo sapien
ctacagatagcacttcatattggcc

SEQ ID NO: 4042939 - DNA, 25 bp, Homo sapien
tgacatttggttttcacctgtttcc

SEQ ID NO: 4042940 - DNA, 25 bp, Homo sapien
cccagacaagctcagactgggtgcc

SEQ ID NO: 4042941 - DNA, 25 bp, Homo sapien
ggcgccaggtagggatcatcccagg

SEQ ID NO: 4042942 - DNA, 25 bp, Homo sapien
gggcgccaggtagggatcatcccag

SEQ ID NO: 4042943 - DNA, 25 bp, Homo sapien
tgcccctagctcatagtaggtctct

SEQ ID NO: 4042944 - DNA, 25 bp, Homo sapien
ctctgcaaagtccgacggtgagaga

SEQ ID NO: 4042945 - DNA, 25 bp, Homo sapien
gagctgggcagccaactccgcccag

SEQ ID NO: 4042946 - DNA, 25 bp, Homo sapien
agtccgacggtgagagaggcaggca

SEQ ID NO: 4042947 - DNA, 25 bp, Homo sapien
gctccgcactctcttcagccatctg

SEQ ID NO: 4042948 - DNA, 25 bp, Homo sapien
tggctccgcactctcttcagccatc

SEQ ID NO: 4042949 - DNA, 25 bp, Homo sapien
ggctccgcactctcttcagccatct

SEQ ID NO: 4042950 - DNA, 25 bp, Homo sapien
gccatctgcagagagagtggtgcct

SEQ ID NO: 4042951 - DNA, 25 bp, Homo sapien
agataaaagctcagccccggaggag

SEQ ID NO: 4042952 - DNA, 25 bp, Homo sapien
tggtatgcttggcagttccaggcag

SEQ ID NO: 4042953 - DNA, 25 bp, Homo sapien
accctggtggcctgaaaagttctgc

SEQ ID NO: 4042954 - DNA, 25 bp, Homo sapien
aagttctgcggtgaatggctctggc

SEQ ID NO: 4042955 - DNA, 25 bp, Homo sapien
ccacagaaccgccgacctttcaaag

SEQ ID NO: 4042956 - DNA, 25 bp, Homo sapien
cacagaaccgccgacctttcaaagg

SEQ ID NO: 4042957 - DNA, 25 bp, Homo sapien
ccgccgacctttcaaaggaccagag

SEQ ID NO: 4042958 - DNA, 25 bp, Homo sapien
gccgacctttcaaaggaccagaggc

SEQ ID NO: 4042959 - DNA, 25 bp, Homo sapien
tgtaggcatcctgaagcctgcggga

SEQ ID NO: 4042960 - DNA, 25 bp, Homo sapien
ctgtaggcatcctgaagcctgcggg

SEQ ID NO: 4042961 - DNA, 25 bp, Homo sapien
tccaaaggctcagcagctcagtgtc

SEQ ID NO: 4042962 - DNA, 25 bp, Homo sapien
ttccaaaggctcagcagctcagtgt

SEQ ID NO: 4042963 - DNA, 25 bp, Homo sapien
cttccaaaggctcagcagctcagtg

SEQ ID NO: 4042964 - DNA, 25 bp, Homo sapien
cgtgcgtgaagcaagaactcctgga

SEQ ID NO: 4042965 - DNA, 25 bp, Homo sapien
agggagccatcattcctgcctggga

SEQ ID NO: 4042966 - DNA, 25 bp, Homo sapien
tagggacacagatgaccgacctggt

SEQ ID NO: 4042967 - DNA, 25 bp, Homo sapien
cacacacgggtagattgctggcctg

SEQ ID NO: 4042968 - DNA, 25 bp, Homo sapien
cgtgcccaaagtcatcccagtactt

SEQ ID NO: 4042969 - DNA, 25 bp, Homo sapien
tggctcgtgcccaaagtcatcccag

SEQ ID NO: 4042970 - DNA, 25 bp, Homo sapien
aatgtccctcaatggataacggcat

SEQ ID NO: 4042971 - DNA, 25 bp, Homo sapien
actgtggctcgtgcccaaagtcatc

SEQ ID NO: 4042972 - DNA, 25 bp, Homo sapien
agagtcctgtggttcgttctcccag

SEQ ID NO: 4042973 - DNA, 25 bp, Homo sapien
gagtcctgtggttcgttctcccaga

SEQ ID NO: 4042974 - DNA, 25 bp, Homo sapien
tctccaccgtctacatctttgcact

SEQ ID NO: 4042975 - DNA, 25 bp, Homo sapien
tgggcctctccaccgtctacatctt

SEQ ID NO: 4042976 - DNA, 25 bp, Homo sapien
ccgttgggcctctccaccgtctaca

SEQ ID NO: 4042977 - DNA, 25 bp, Homo sapien
cacttttcaactccttgcaaggtga

SEQ ID NO: 4042978 - DNA, 25 bp, Homo sapien
caagttgggtgtccatcgtccatct

SEQ ID NO: 4042979 - DNA, 25 bp, Homo sapien
tgtgatatgatgtccacatgacatg

SEQ ID NO: 4042980 - DNA, 25 bp, Homo sapien
tgatgtccacatgacatggatggga

SEQ ID NO: 4042981 - DNA, 25 bp, Homo sapien
cttgcaagttgggtgtccatcgtcc

SEQ ID NO: 4042982 - DNA, 25 bp, Homo sapien
gaggcggccgagtgggctgaatggg

SEQ ID NO: 4042983 - DNA, 25 bp, Homo sapien
cacccagagacgctccagaatggag

SEQ ID NO: 4042984 - DNA, 25 bp, Homo sapien
aatgatgaggccagttgaggtgcgg

SEQ ID NO: 4042985 - DNA, 25 bp, Homo sapien
ccgagtgggctgaatgggcgaggat

SEQ ID NO: 4042986 - DNA, 25 bp, Homo sapien
tgatccgatgttattctgctaatct

SEQ ID NO: 4042987 - DNA, 25 bp, Homo sapien
caaaattaaggggaactgcaggcta

SEQ ID NO: 4042988 - DNA, 25 bp, Homo sapien
ctaatcttttaaaggtgtcttgcgg

SEQ ID NO: 4042989 - DNA, 25 bp, Homo sapien
caggctagacagttttgatccgatg

SEQ ID NO: 4042990 - DNA, 25 bp, Homo sapien
ttcaggttccaaagcgggtagccga

SEQ ID NO: 4042991 - DNA, 25 bp, Homo sapien
gaaacagtgatttccgtctcaggcc

SEQ ID NO: 4042992 - DNA, 25 bp, Homo sapien
tgtagaagagatcgtcgcgcatgcc

SEQ ID NO: 4042993 - DNA, 25 bp, Homo sapien
gtcctcactggtgctgggcaaagcc

SEQ ID NO: 4042994 - DNA, 25 bp, Homo sapien
tcttggggcagcgaactgagccctg

SEQ ID NO: 4042995 - DNA, 25 bp, Homo sapien
agacaactctctccagcaatagctg

SEQ ID NO: 4042996 - DNA, 25 bp, Homo sapien
ttgagacaactctctccagcaatag

SEQ ID NO: 4042997 - DNA, 25 bp, Homo sapien
ttccgcgagctgcacctgctcatgg

SEQ ID NO: 4042998 - DNA, 25 bp, Homo sapien
ggtggcgtggacctctggccagttc

SEQ ID NO: 4042999 - DNA, 25 bp, Homo sapien
cactggaggaaggtggcgtggacct

SEQ ID NO: 4043000 - DNA, 25 bp, Homo sapien
ctcggcactggaggaaggtggcgtg

SEQ ID NO: 4043001 - DNA, 25 bp, Homo sapien
gaggaaggtggcgtggacctctggc

SEQ ID NO: 4043002 - DNA, 25 bp, Homo sapien
gctgcgggaaccctccttgaaggag

SEQ ID NO: 4043003 - DNA, 25 bp, Homo sapien
cacagccgagagacaccgtttcctt

SEQ ID NO: 4043004 - DNA, 25 bp, Homo sapien
ccccatggttcttgggtctgcccag

SEQ ID NO: 4043005 - DNA, 25 bp, Homo sapien
gaaaattcgagagaccagcgagcca

SEQ ID NO: 4043006 - DNA, 25 bp, Homo sapien
tcacacaggcagtggccgcgacttc

SEQ ID NO: 4043007 - DNA, 25 bp, Homo sapien
cacacaggcagtggccgcgacttcc

SEQ ID NO: 4043008 - DNA, 25 bp, Homo sapien
ctgtctgccctgactactgcctggg

SEQ ID NO: 4043009 - DNA, 25 bp, Homo sapien
gcagcctggtgactattaccctggg

SEQ ID NO: 4043010 - DNA, 25 bp, Homo sapien
agggcagcctggtgactattaccct

SEQ ID NO: 4043011 - DNA, 25 bp, Homo sapien
gtagagtcagcacccccggctgaga

SEQ ID NO: 4043012 - DNA, 25 bp, Homo sapien
tccggatggatccagggcggctact

SEQ ID NO: 4043013 - DNA, 25 bp, Homo sapien
tgagtgggcccgtgccgagggctgt

SEQ ID NO: 4043014 - DNA, 25 bp, Homo sapien
atccagggcggctactggtcccaga

SEQ ID NO: 4043015 - DNA, 25 bp, Homo sapien
gtggcgtctgacaagccggctccca

SEQ ID NO: 4043016 - DNA, 25 bp, Homo sapien
ggcgggggccacggctgccctggct

SEQ ID NO: 4043017 - DNA, 25 bp, Homo sapien
tgggcgggggccacggctgccctgg

SEQ ID NO: 4043018 - DNA, 25 bp, Homo sapien
cggatgggcgggggccacggctgcc

SEQ ID NO: 4043019 - DNA, 25 bp, Homo sapien
gtgagcagggaagggcggatgggcg

SEQ ID NO: 4043020 - DNA, 25 bp, Homo sapien
gctcctggcttgaccaggacccaag

SEQ ID NO: 4043021 - DNA, 25 bp, Homo sapien
gcgcaccctctcagcaaacttgagg

SEQ ID NO: 4043022 - DNA, 25 bp, Homo sapien
tctcgctagtgttcttctccacggg

SEQ ID NO: 4043023 - DNA, 25 bp, Homo sapien
ttgagggaatagagcgtctcgctag

SEQ ID NO: 4043024 - DNA, 25 bp, Homo sapien
ttgttgatgtgctgcgcctcccgca

SEQ ID NO: 4043025 - DNA, 25 bp, Homo sapien
ctgtaccaccatgagggtcttgctg

SEQ ID NO: 4043026 - DNA, 25 bp, Homo sapien
cactaagcgaatcctgcagcaggta

SEQ ID NO: 4043027 - DNA, 25 bp, Homo sapien
gagcgcagggcagcaatgacgtccc

SEQ ID NO: 4043028 - DNA, 25 bp, Homo sapien
ttggtgaactcggtcgtgcgattag

SEQ ID NO: 4043029 - DNA, 25 bp, Homo sapien
ccgtggtgcggaggcctgtgctgca

SEQ ID NO: 4043030 - DNA, 25 bp, Homo sapien
tgcgattagtgtggccaaactcaaa

SEQ ID NO: 4043031 - DNA, 25 bp, Homo sapien
ccgtcacgatgagcagcgcgtgcga

SEQ ID NO: 4043032 - DNA, 25 bp, Homo sapien
ctctagagcagtgtggctgtggtca

SEQ ID NO: 4043033 - DNA, 25 bp, Homo sapien
aacccagttgtgtcctctagagcag

SEQ ID NO: 4043034 - DNA, 25 bp, Homo sapien
caagggtgcgtgcttaggacacagc

SEQ ID NO: 4043035 - DNA, 25 bp, Homo sapien
cagagcctacattcaaacccagttg

SEQ ID NO: 4043036 - DNA, 25 bp, Homo sapien
ctgccgtctgggcacagccggatct

SEQ ID NO: 4043037 - DNA, 25 bp, Homo sapien
gatctccagtttttcctgaggctct

SEQ ID NO: 4043038 - DNA, 25 bp, Homo sapien
gcacttggaactcagtcagccctgg

SEQ ID NO: 4043039 - DNA, 25 bp, Homo sapien
tcagtcagccctggtacatacagct

SEQ ID NO: 4043040 - DNA, 25 bp, Homo sapien
gttgatacctgggttctcagcggtc

SEQ ID NO: 4043041 - DNA, 25 bp, Homo sapien
tctcctgcacctcggagaagagcag

SEQ ID NO: 4043042 - DNA, 25 bp, Homo sapien
ggtgtactcccagtcagacgccttc

SEQ ID NO: 4043043 - DNA, 25 bp, Homo sapien
cagcgctgacggtgatggtgtactc

SEQ ID NO: 4043044 - DNA, 25 bp, Homo sapien
ctccatcgtgtacgtcttgccggcg

SEQ ID NO: 4043045 - DNA, 25 bp, Homo sapien
gacattgaagccatcaatgcaagag

SEQ ID NO: 4043046 - DNA, 25 bp, Homo sapien
ccgtctggccgtacgcaaagatgca

SEQ ID NO: 4043047 - DNA, 25 bp, Homo sapien
tcgtgtacgtcttgccggcgcccgt

SEQ ID NO: 4043048 - DNA, 25 bp, Homo sapien
cagccacctccccaaccatgctgtc

SEQ ID NO: 4043049 - DNA, 25 bp, Homo sapien
ggaccaccagctacaagtccagcca

SEQ ID NO: 4043050 - DNA, 25 bp, Homo sapien
agggccgctgggaccaccagctaca

SEQ ID NO: 4043051 - DNA, 25 bp, Homo sapien
atgctgtccttcagcaacaccacat

SEQ ID NO: 4043052 - DNA, 25 bp, Homo sapien
tggagtcgtcgtcggcatcgaaagt

SEQ ID NO: 4043053 - DNA, 25 bp, Homo sapien
catcgaaagtcacagcattggtggc

SEQ ID NO: 4043054 - DNA, 25 bp, Homo sapien
gaagaccttgtccagctcgaaggac

SEQ ID NO: 4043055 - DNA, 25 bp, Homo sapien
tggccggacacgagcaatcactcgg

SEQ ID NO: 4043056 - DNA, 25 bp, Homo sapien
tccagcctttgttgggatccctgtg

SEQ ID NO: 4043057 - DNA, 25 bp, Homo sapien
tgagctggtcatgccgccatctact

SEQ ID NO: 4043058 - DNA, 25 bp, Homo sapien
cacgaccatagcctcgggctggaac

SEQ ID NO: 4043059 - DNA, 25 bp, Homo sapien
ccctgtgctcttggaatgaagagga

SEQ ID NO: 4043060 - DNA, 25 bp, Homo sapien
gccgcacgagctcattgtggcactt

SEQ ID NO: 4043061 - DNA, 25 bp, Homo sapien
tcgcggcggtacttgcgcagcagct

SEQ ID NO: 4043062 - DNA, 25 bp, Homo sapien
cagctcgcggcggtacttgcgcagc

SEQ ID NO: 4043063 - DNA, 25 bp, Homo sapien
ctttcagccgcacgagctcattgtg

SEQ ID NO: 4043064 - DNA, 25 bp, Homo sapien
gtgagggtccgcagtgccggctgca

SEQ ID NO: 4043065 - DNA, 25 bp, Homo sapien
agcagcagtgggaagccgcgcacct

SEQ ID NO: 4043066 - DNA, 25 bp, Homo sapien
ccattgtagtcgttggtgagggtcc

SEQ ID NO: 4043067 - DNA, 25 bp, Homo sapien
gcacctgccgcttgagcccattgta

SEQ ID NO: 4043068 - DNA, 25 bp, Homo sapien
gctagattctcgtgcacagccttca

SEQ ID NO: 4043069 - DNA, 25 bp, Homo sapien
tcctcaatggcccggttcttgtcct

SEQ ID NO: 4043070 - DNA, 25 bp, Homo sapien
gattctcgtgcacagccttcatctc

SEQ ID NO: 4043071 - DNA, 25 bp, Homo sapien
ctgctagattctcgtgcacagcctt

SEQ ID NO: 4043072 - DNA, 25 bp, Homo sapien
cccatgggcccgctccagctctgac

SEQ ID NO: 4043073 - DNA, 25 bp, Homo sapien
atgggcccgctccagctctgactcg

SEQ ID NO: 4043074 - DNA, 25 bp, Homo sapien
gggcccgctccagctctgactcgta

SEQ ID NO: 4043075 - DNA, 25 bp, Homo sapien
cccgctccagctctgactcgtacat

SEQ ID NO: 4043076 - DNA, 25 bp, Homo sapien
agctggtgtgagctctgcagctgct

SEQ ID NO: 4043077 - DNA, 25 bp, Homo sapien
ggagccgcgcggtcagctggtgtga

SEQ ID NO: 4043078 - DNA, 25 bp, Homo sapien
cctgcttggtcttggacgactccac

SEQ ID NO: 4043079 - DNA, 25 bp, Homo sapien
tggttccgggcctgggactcgctga

SEQ ID NO: 4043080 - DNA, 25 bp, Homo sapien
cagctgggacagcttgtcacggagc

SEQ ID NO: 4043081 - DNA, 25 bp, Homo sapien
gcaatggtctcgtggctgtcacgca

SEQ ID NO: 4043082 - DNA, 25 bp, Homo sapien
aggcagtccttgagtcgcagctcca

SEQ ID NO: 4043083 - DNA, 25 bp, Homo sapien
tgcacctctaggttcagctctgaca

SEQ ID NO: 4043084 - DNA, 25 bp, Homo sapien
agcatggggaccacggccattctgc

SEQ ID NO: 4043085 - DNA, 25 bp, Homo sapien
cagcatggggaccacggccattctg

SEQ ID NO: 4043086 - DNA, 25 bp, Homo sapien
tgctggctttgtgcgcagctcttgc

SEQ ID NO: 4043087 - DNA, 25 bp, Homo sapien
cagctcttgcagctcggcctcacag

SEQ ID NO: 4043088 - DNA, 25 bp, Homo sapien
agctcggcctcacagcgccgcatct

SEQ ID NO: 4043089 - DNA, 25 bp, Homo sapien
ctgcctcagtcgctcattctccacc

SEQ ID NO: 4043090 - DNA, 25 bp, Homo sapien
ggtgcttctccaagtcggtgccccc

SEQ ID NO: 4043091 - DNA, 25 bp, Homo sapien
ccggtgcttctccaagtcggtgccc

SEQ ID NO: 4043092 - DNA, 25 bp, Homo sapien
tcccggtgcttctccaagtcggtgc

SEQ ID NO: 4043093 - DNA, 25 bp, Homo sapien
gtcccggtgcttctccaagtcggtg

SEQ ID NO: 4043094 - DNA, 25 bp, Homo sapien
tgcagagagccagggccgagggggc

SEQ ID NO: 4043095 - DNA, 25 bp, Homo sapien
cagagagccagggccgagggggcgc

SEQ ID NO: 4043096 - DNA, 25 bp, Homo sapien
ctgcagagagccagggccgaggggg

SEQ ID NO: 4043097 - DNA, 25 bp, Homo sapien
gagagccagggccgagggggcgcat

SEQ ID NO: 4043098 - DNA, 25 bp, Homo sapien
aagagaggagggaacaagctcaaga

SEQ ID NO: 4043099 - DNA, 25 bp, Homo sapien
caagagaggagggaacaagctcaag

SEQ ID NO: 4043100 - DNA, 25 bp, Homo sapien
cctgggcctggctaatgagcttctc

SEQ ID NO: 4043101 - DNA, 25 bp, Homo sapien
aatgagcttctccttcaggtgttct

SEQ ID NO: 4043102 - DNA, 25 bp, Homo sapien
ttcctgggcctggctaatgagcttc

SEQ ID NO: 4043103 - DNA, 25 bp, Homo sapien
tgggcctggctaatgagcttctcct

SEQ ID NO: 4043104 - DNA, 25 bp, Homo sapien
tcagtctcaaagaatacgtaattcc

SEQ ID NO: 4043105 - DNA, 25 bp, Homo sapien
cctgacataagtgaactgacttcct

SEQ ID NO: 4043106 - DNA, 25 bp, Homo sapien
tcttcaaaaggttgaagtctccttc

SEQ ID NO: 4043107 - DNA, 25 bp, Homo sapien
actctccctaccctgacataagtga

SEQ ID NO: 4043108 - DNA, 25 bp, Homo sapien
ggagagtggggtttgccagtgtttg

SEQ ID NO: 4043109 - DNA, 25 bp, Homo sapien
tgccaggcactcagaccctgatgca

SEQ ID NO: 4043110 - DNA, 25 bp, Homo sapien
gatcatctccactgccgcccctgcc

SEQ ID NO: 4043111 - DNA, 25 bp, Homo sapien
cactcagaccctgatgcagggagag

SEQ ID NO: 4043112 - DNA, 25 bp, Homo sapien
gaggcgggatacccaccagccacct

SEQ ID NO: 4043113 - DNA, 25 bp, Homo sapien
ggaggcgggatacccaccagccacc

SEQ ID NO: 4043114 - DNA, 25 bp, Homo sapien
aggcgggatacccaccagccacctg

SEQ ID NO: 4043115 - DNA, 25 bp, Homo sapien
ctggggaaagcggatggaagatggc

SEQ ID NO: 4043116 - DNA, 25 bp, Homo sapien
agcttccagccagcaagggccgtcc

SEQ ID NO: 4043117 - DNA, 25 bp, Homo sapien
cgcagcttccagccagcaagggccg

SEQ ID NO: 4043118 - DNA, 25 bp, Homo sapien
cttccagccagcaagggccgtccat

SEQ ID NO: 4043119 - DNA, 25 bp, Homo sapien
gcagcttccagccagcaagggccgt

SEQ ID NO: 4043120 - DNA, 25 bp, Homo sapien
tgggcccgatacatacttgtggcca

SEQ ID NO: 4043121 - DNA, 25 bp, Homo sapien
gagggtcccgagtgccaccctgggc

SEQ ID NO: 4043122 - DNA, 25 bp, Homo sapien
caccctgggcccgatacatacttgt

SEQ ID NO: 4043123 - DNA, 25 bp, Homo sapien
tctctaagcccaacaggggagggtc

SEQ ID NO: 4043124 - DNA, 25 bp, Homo sapien
ggtccttccgccactgatgggcagt

SEQ ID NO: 4043125 - DNA, 25 bp, Homo sapien
aattcgaattctaaagccaggctgc

SEQ ID NO: 4043126 - DNA, 25 bp, Homo sapien
tctgctgaggaaaagcgggctctcc

SEQ ID NO: 4043127 - DNA, 25 bp, Homo sapien
tgatcctggctgtatgaccaccggc

SEQ ID NO: 4043128 - DNA, 25 bp, Homo sapien
tggaagctgtctcgaggattaaacg

SEQ ID NO: 4043129 - DNA, 25 bp, Homo sapien
aagttctctatgtctcttagtttcc

SEQ ID NO: 4043130 - DNA, 25 bp, Homo sapien
taaacgagatgatatatgcgaaggc

SEQ ID NO: 4043131 - DNA, 25 bp, Homo sapien
ttatttgtataatgaggctacctca

SEQ ID NO: 4043132 - DNA, 25 bp, Homo sapien
gaaaaatccatatcaagggacacca

SEQ ID NO: 4043133 - DNA, 25 bp, Homo sapien
tgctaaaaactacaagatattggtg

SEQ ID NO: 4043134 - DNA, 25 bp, Homo sapien
tattgataaggtgtcagtactaccc

SEQ ID NO: 4043135 - DNA, 25 bp, Homo sapien
tcggttacatttctacaactaacaa

SEQ ID NO: 4043136 - DNA, 25 bp, Homo sapien
gagatacttgtacactcatgtttat

SEQ ID NO: 4043137 - DNA, 25 bp, Homo sapien
acggagacagatggcgaatgaggag

SEQ ID NO: 4043138 - DNA, 25 bp, Homo sapien
ggagttactctttaatgaggcccaa

SEQ ID NO: 4043139 - DNA, 25 bp, Homo sapien
acagatggcgaatgaggagttactc

SEQ ID NO: 4043140 - DNA, 25 bp, Homo sapien
atgagcagtcaaacccacggagaca

SEQ ID NO: 4043141 - DNA, 25 bp, Homo sapien
aaggaggaggagacacaaagcatgt

SEQ ID NO: 4043142 - DNA, 25 bp, Homo sapien
gaaggaggaggagacacaaagcatg

SEQ ID NO: 4043143 - DNA, 25 bp, Homo sapien
gaggaggagacacaaagcatgtctt

SEQ ID NO: 4043144 - DNA, 25 bp, Homo sapien
aacttacaatcctggcagaaggagg

SEQ ID NO: 4043145 - DNA, 25 bp, Homo sapien
caggacatggcctgggactgttgtt

SEQ ID NO: 4043146 - DNA, 25 bp, Homo sapien
ggagggtcatcccaacagccacagc

SEQ ID NO: 4043147 - DNA, 25 bp, Homo sapien
tctagggacattcacaagaggacag

SEQ ID NO: 4043148 - DNA, 25 bp, Homo sapien
gtcaccagaccaagatgagcagcct

SEQ ID NO: 4043149 - DNA, 25 bp, Homo sapien
caatgcgacatttgtgagccccagt

SEQ ID NO: 4043150 - DNA, 25 bp, Homo sapien
ccagtaagtggtggacctaggaccg

SEQ ID NO: 4043151 - DNA, 25 bp, Homo sapien
ggaaagtccaagtctgagtcaaacc

SEQ ID NO: 4043152 - DNA, 25 bp, Homo sapien
ctaggaccggaactcgcatctggct

SEQ ID NO: 4043153 - DNA, 25 bp, Homo sapien
tcaataggcctgttggagtgatgaa

SEQ ID NO: 4043154 - DNA, 25 bp, Homo sapien
gcattgccaccttaatatacttacc

SEQ ID NO: 4043155 - DNA, 25 bp, Homo sapien
gatgaagacgtttggcaatgagaca

SEQ ID NO: 4043156 - DNA, 25 bp, Homo sapien
gacactggtgatgggtgcattgcca

SEQ ID NO: 4043157 - DNA, 25 bp, Homo sapien
gggcgaggctcagatacagccacag

SEQ ID NO: 4043158 - DNA, 25 bp, Homo sapien
cagaagtggggatgatgtggcagac

SEQ ID NO: 4043159 - DNA, 25 bp, Homo sapien
tggcagacaggcttggagaccttgg

SEQ ID NO: 4043160 - DNA, 25 bp, Homo sapien
aagtgggcgaggctcagatacagcc

SEQ ID NO: 4043161 - DNA, 25 bp, Homo sapien
tgcccatcccagcctccccaggtac

SEQ ID NO: 4043162 - DNA, 25 bp, Homo sapien
tggcctctgcccatcccagcctccc

SEQ ID NO: 4043163 - DNA, 25 bp, Homo sapien
tctgcccatcccagcctccccaggt

SEQ ID NO: 4043164 - DNA, 25 bp, Homo sapien
gcctctgcccatcccagcctcccca

SEQ ID NO: 4043165 - DNA, 25 bp, Homo sapien
cgtggcctgctggtcactgtcgcgg

SEQ ID NO: 4043166 - DNA, 25 bp, Homo sapien
ccagcctctcctgtaggaccaccag

SEQ ID NO: 4043167 - DNA, 25 bp, Homo sapien
gcctgctggtcactgtcgcggaggg

SEQ ID NO: 4043168 - DNA, 25 bp, Homo sapien
gggccagcctctcctgtaggaccac

SEQ ID NO: 4043169 - DNA, 25 bp, Homo sapien
tggtggccccgacaagctcgagcac

SEQ ID NO: 4043170 - DNA, 25 bp, Homo sapien
ctggtggccccgacaagctcgagca

SEQ ID NO: 4043171 - DNA, 25 bp, Homo sapien
ccccgacaagctcgagcacctcctg

SEQ ID NO: 4043172 - DNA, 25 bp, Homo sapien
cgacaagctcgagcacctcctgctg

SEQ ID NO: 4043173 - DNA, 25 bp, Homo sapien
gagcaaagtagtggctgatgagagg

SEQ ID NO: 4043174 - DNA, 25 bp, Homo sapien
acgagcaaagtagtggctgatgaga

SEQ ID NO: 4043175 - DNA, 25 bp, Homo sapien
gcaaagtagtggctgatgagagggc

SEQ ID NO: 4043176 - DNA, 25 bp, Homo sapien
ctacgagcaaagtagtggctgatga

SEQ ID NO: 4043177 - DNA, 25 bp, Homo sapien
agcttctcttctttcgtcccctgac

SEQ ID NO: 4043178 - DNA, 25 bp, Homo sapien
tctctacattcatggtgccaccagc

SEQ ID NO: 4043179 - DNA, 25 bp, Homo sapien
ctctacattcatggtgccaccagct

SEQ ID NO: 4043180 - DNA, 25 bp, Homo sapien
gggccggcgcctgtctcttccaaag

SEQ ID NO: 4043181 - DNA, 25 bp, Homo sapien
tggctcttgcaccccttgtcctgca

SEQ ID NO: 4043182 - DNA, 25 bp, Homo sapien
gctcttgcaccccttgtcctgcagg

SEQ ID NO: 4043183 - DNA, 25 bp, Homo sapien
tcttgcaccccttgtcctgcagggc

SEQ ID NO: 4043184 - DNA, 25 bp, Homo sapien
tctggctcttgcaccccttgtcctg

SEQ ID NO: 4043185 - DNA, 25 bp, Homo sapien
caagacacaaccagaatcctcacgt

SEQ ID NO: 4043186 - DNA, 25 bp, Homo sapien
cacaaccagaatcctcacgtgaagg

SEQ ID NO: 4043187 - DNA, 25 bp, Homo sapien
aaccagaatcctcacgtgaaggaga

SEQ ID NO: 4043188 - DNA, 25 bp, Homo sapien
tgccaagacacaaccagaatcctca

SEQ ID NO: 4043189 - DNA, 25 bp, Homo sapien
ccagagctccacttgagaagggcgg

SEQ ID NO: 4043190 - DNA, 25 bp, Homo sapien
taaacacgtagtctagaggcggcaa

SEQ ID NO: 4043191 - DNA, 25 bp, Homo sapien
aaatggtaataacaggaccgcctca

SEQ ID NO: 4043192 - DNA, 25 bp, Homo sapien
tcctcggctaagctgtgtgacggtc

SEQ ID NO: 4043193 - DNA, 25 bp, Homo sapien
ggtgacaactcaagactctgtctca

SEQ ID NO: 4043194 - DNA, 25 bp, Homo sapien
ctgtctcaaaaagaaaatagaaaat

SEQ ID NO: 4043195 - DNA, 25 bp, Homo sapien
ccaaggcaaaggttacgctatttct

SEQ ID NO: 4043196 - DNA, 25 bp, Homo sapien
atcgcgagcaggcttgtgagccatg

SEQ ID NO: 4043197 - DNA, 25 bp, Homo sapien
aggcaaaggttacgctatttctggc

SEQ ID NO: 4043198 - DNA, 25 bp, Homo sapien
cagccaaggcaaaggttacgctatt

SEQ ID NO: 4043199 - DNA, 25 bp, Homo sapien
tgtagggtgcatctcaggttttaac

SEQ ID NO: 4043200 - DNA, 25 bp, Homo sapien
cagcgcctctgtagggtgcatctca

SEQ ID NO: 4043201 - DNA, 25 bp, Homo sapien
gggaatttctgcagcgcctctgtag

SEQ ID NO: 4043202 - DNA, 25 bp, Homo sapien
gtgcatctcaggttttaactgctgg

SEQ ID NO: 4043203 - DNA, 25 bp, Homo sapien
agcccagtccacgctaagggctcgg

SEQ ID NO: 4043204 - DNA, 25 bp, Homo sapien
cgagctgcacttcgggcactggagt

SEQ ID NO: 4043205 - DNA, 25 bp, Homo sapien
gcactggagtcctcgtcaccgcaga

SEQ ID NO: 4043206 - DNA, 25 bp, Homo sapien
agtccacgctaagggctcggcactg

SEQ ID NO: 4043207 - DNA, 25 bp, Homo sapien
gctgtcagggtctctacagaagcac

SEQ ID NO: 4043208 - DNA, 25 bp, Homo sapien
tgctgtcagggtctctacagaagca

SEQ ID NO: 4043209 - DNA, 25 bp, Homo sapien
ctgctgtcagggtctctacagaagc

SEQ ID NO: 4043210 - DNA, 25 bp, Homo sapien
agagaccggagctagcccacacgct

SEQ ID NO: 4043211 - DNA, 25 bp, Homo sapien
cggagctagcccacacgctcttggc

SEQ ID NO: 4043212 - DNA, 25 bp, Homo sapien
gcctgggcagagaccggagctagcc

SEQ ID NO: 4043213 - DNA, 25 bp, Homo sapien
gggcagagaccggagctagcccaca

SEQ ID NO: 4043214 - DNA, 25 bp, Homo sapien
tctgactgggcttaggaaccggtga

SEQ ID NO: 4043215 - DNA, 25 bp, Homo sapien
gctctgactgggcttaggaaccggt

SEQ ID NO: 4043216 - DNA, 25 bp, Homo sapien
acagctctgactgggcttaggaacc

SEQ ID NO: 4043217 - DNA, 25 bp, Homo sapien
gacagctctgactgggcttaggaac

SEQ ID NO: 4043218 - DNA, 25 bp, Homo sapien
ctcaacctccccgggccggtgtgtg

SEQ ID NO: 4043219 - DNA, 25 bp, Homo sapien
ctggggctggggcggggcgagccat

SEQ ID NO: 4043220 - DNA, 25 bp, Homo sapien
aaagggcgggcggccgggctggctg

SEQ ID NO: 4043221 - DNA, 25 bp, Homo sapien
ggctggctggggctggggcggggcg

SEQ ID NO: 4043222 - DNA, 25 bp, Homo sapien
ctcccaggttccacgtcctgcgaga

SEQ ID NO: 4043223 - DNA, 25 bp, Homo sapien
ccaggttccacgtcctgcgagaggg

SEQ ID NO: 4043224 - DNA, 25 bp, Homo sapien
tcccaggttccacgtcctgcgagag

SEQ ID NO: 4043225 - DNA, 25 bp, Homo sapien
ggctcccaggttccacgtcctgcga

SEQ ID NO: 4043226 - DNA, 25 bp, Homo sapien
cagcctcctcggggcaccaggcagc

SEQ ID NO: 4043227 - DNA, 25 bp, Homo sapien
gctcagcagcctcctcggggcacca

SEQ ID NO: 4043228 - DNA, 25 bp, Homo sapien
agcagcctcctcggggcaccaggca

SEQ ID NO: 4043229 - DNA, 25 bp, Homo sapien
tcagcagcctcctcggggcaccagg

SEQ ID NO: 4043230 - DNA, 25 bp, Homo sapien
ggcaggatccaggcgtcgccgcagc

SEQ ID NO: 4043231 - DNA, 25 bp, Homo sapien
caggatccaggcgtcgccgcagcgc

SEQ ID NO: 4043232 - DNA, 25 bp, Homo sapien
ctcggccagcccgctcgcgcccctc

SEQ ID NO: 4043233 - DNA, 25 bp, Homo sapien
aggatccaggcgtcgccgcagcgcc

SEQ ID NO: 4043234 - DNA, 25 bp, Homo sapien
gtgtccttgcacgcgctggcgcaca

SEQ ID NO: 4043235 - DNA, 25 bp, Homo sapien
tgtccttgcacgcgctggcgcacat

SEQ ID NO: 4043236 - DNA, 25 bp, Homo sapien
cgtgtccttgcacgcgctggcgcac

SEQ ID NO: 4043237 - DNA, 25 bp, Homo sapien
caactccaaggtcatttctaaccca

SEQ ID NO: 4043238 - DNA, 25 bp, Homo sapien
cccgggaaaggtgcaagttttgctg

SEQ ID NO: 4043239 - DNA, 25 bp, Homo sapien
gcaagttttgctgaaacctggccat

SEQ ID NO: 4043240 - DNA, 25 bp, Homo sapien
acccagaaacttcgctgatgatttg

SEQ ID NO: 4043241 - DNA, 25 bp, Homo sapien
tgctccctgtgtcccttcctttcta

SEQ ID NO: 4043242 - DNA, 25 bp, Homo sapien
cttcctgctccctgtgtcccttcct

SEQ ID NO: 4043243 - DNA, 25 bp, Homo sapien
ctccctgtgtcccttcctttctaga

SEQ ID NO: 4043244 - DNA, 25 bp, Homo sapien
ccctgtgtcccttcctttctagaag

SEQ ID NO: 4043245 - DNA, 25 bp, Homo sapien
gagacagtatagagagatggctaaa

SEQ ID NO: 4043246 - DNA, 25 bp, Homo sapien
ttctttccagtatctgaccttgagc

SEQ ID NO: 4043247 - DNA, 25 bp, Homo sapien
cacccttcacttattgtcattggcc

SEQ ID NO: 4043248 - DNA, 25 bp, Homo sapien
gagagtagggctagtgtctaaccca

SEQ ID NO: 4043249 - DNA, 25 bp, Homo sapien
cctgtgtgcataagtgttttgattt

SEQ ID NO: 4043250 - DNA, 25 bp, Homo sapien
tgtgtgcataagtgttttgatttgg

SEQ ID NO: 4043251 - DNA, 25 bp, Homo sapien
ccctgtgtgcataagtgttttgatt

SEQ ID NO: 4043252 - DNA, 25 bp, Homo sapien
tccctgtgtgcataagtgttttgat

SEQ ID NO: 4043253 - DNA, 25 bp, Homo sapien
cgtggtcatactctggacctcggac

SEQ ID NO: 4043254 - DNA, 25 bp, Homo sapien
ctgagcagaagtgcgtctggggctg

SEQ ID NO: 4043255 - DNA, 25 bp, Homo sapien
gagcagaagtgcgtctggggctgct

SEQ ID NO: 4043256 - DNA, 25 bp, Homo sapien
tggacctcggactcccagaatgtgg

SEQ ID NO: 4043257 - DNA, 25 bp, Homo sapien
gaaaccagagtctgctaggaaggct

SEQ ID NO: 4043258 - DNA, 25 bp, Homo sapien
ctgtgaaaccagagtctgctaggaa

SEQ ID NO: 4043259 - DNA, 25 bp, Homo sapien
tgtgaaaccagagtctgctaggaag

SEQ ID NO: 4043260 - DNA, 25 bp, Homo sapien
tgaaaccagagtctgctaggaaggc

SEQ ID NO: 4043261 - DNA, 25 bp, Homo sapien
gtttccacaaatccggagcagagcc

SEQ ID NO: 4043262 - DNA, 25 bp, Homo sapien
gcccattcacctgaacaaggttcac

SEQ ID NO: 4043263 - DNA, 25 bp, Homo sapien
tcacctgaacaaggttcacccaggg

SEQ ID NO: 4043264 - DNA, 25 bp, Homo sapien
agtttccacaaatccggagcagagc

SEQ ID NO: 4043265 - DNA, 25 bp, Homo sapien
tctccgtggatacagctggtgaaca

SEQ ID NO: 4043266 - DNA, 25 bp, Homo sapien
tagacctgggaaccctgatcagttt

SEQ ID NO: 4043267 - DNA, 25 bp, Homo sapien
gggtcttgagattccacatgtctga

SEQ ID NO: 4043268 - DNA, 25 bp, Homo sapien
caatgagggcctagactttccttgg

SEQ ID NO: 4043269 - DNA, 25 bp, Homo sapien
tgctgccaatagcttttcccaagga

SEQ ID NO: 4043270 - DNA, 25 bp, Homo sapien
tgctcaaacctttgtcatcactgct

SEQ ID NO: 4043271 - DNA, 25 bp, Homo sapien
tgccaatagcttttcccaaggaggt

SEQ ID NO: 4043272 - DNA, 25 bp, Homo sapien
gaggaagcaattcatgagctatgct

SEQ ID NO: 4043273 - DNA, 25 bp, Homo sapien
ctgaggctcaagtggagggccatac

SEQ ID NO: 4043274 - DNA, 25 bp, Homo sapien
tggtgggccacactggcttgaagcc

SEQ ID NO: 4043275 - DNA, 25 bp, Homo sapien
aacttgcttgctgcgtggatgggat

SEQ ID NO: 4043276 - DNA, 25 bp, Homo sapien
aggtccgctaactcctggtgggcca

SEQ ID NO: 4043277 - DNA, 25 bp, Homo sapien
ggcaccgccatgtgtagctgcgtta

SEQ ID NO: 4043278 - DNA, 25 bp, Homo sapien
tacacagggcctcttactaaaactg

SEQ ID NO: 4043279 - DNA, 25 bp, Homo sapien
tgaagaacccttattttgaggctgg

SEQ ID NO: 4043280 - DNA, 25 bp, Homo sapien
cataaaaatctgtggcgtctctgtg

SEQ ID NO: 4043281 - DNA, 25 bp, Homo sapien
ccatagcctcgtgtctctgagatca

SEQ ID NO: 4043282 - DNA, 25 bp, Homo sapien
ctgaaagccatagcctcgtgtctct

SEQ ID NO: 4043283 - DNA, 25 bp, Homo sapien
aagccatagcctcgtgtctctgaga

SEQ ID NO: 4043284 - DNA, 25 bp, Homo sapien
tagcctcgtgtctctgagatcagga

SEQ ID NO: 4043285 - DNA, 25 bp, Homo sapien
gaatgcgatgttctgctgggaaacc

SEQ ID NO: 4043286 - DNA, 25 bp, Homo sapien
acagaagagggcttgcggcagacac

SEQ ID NO: 4043287 - DNA, 25 bp, Homo sapien
gcctggaaggcgctgttcagcccag

SEQ ID NO: 4043288 - DNA, 25 bp, Homo sapien
ccacctgggcggagatgcctggaag

SEQ ID NO: 4043289 - DNA, 25 bp, Homo sapien
cagcgtccactttcccaggggtcga

SEQ ID NO: 4043290 - DNA, 25 bp, Homo sapien
cagggcacatggctggtctggatgt

SEQ ID NO: 4043291 - DNA, 25 bp, Homo sapien
gggtcgatcataaaacaatttgcac

SEQ ID NO: 4043292 - DNA, 25 bp, Homo sapien
caggaaggaccgtggacccagcgtc

SEQ ID NO: 4043293 - DNA, 25 bp, Homo sapien
caatacgttttactgggttgtcctg

SEQ ID NO: 4043294 - DNA, 25 bp, Homo sapien
tctgtgccattttccgagcaatacg

SEQ ID NO: 4043295 - DNA, 25 bp, Homo sapien
gcctccaatctgagggtttcctggt

SEQ ID NO: 4043296 - DNA, 25 bp, Homo sapien
gtctgggcttccatgcagctgtcag

SEQ ID NO: 4043297 - DNA, 25 bp, Homo sapien
tgttgcaggtggaaacaaatggcct

SEQ ID NO: 4043298 - DNA, 25 bp, Homo sapien
aatgggcaggacctattggaattcc

SEQ ID NO: 4043299 - DNA, 25 bp, Homo sapien
gacatttgcaaaccttcaaaggcct

SEQ ID NO: 4043300 - DNA, 25 bp, Homo sapien
gattacccggatcacgtgacaagcc

SEQ ID NO: 4043301 - DNA, 25 bp, Homo sapien
caaaagtgagtaacggactgatccc

SEQ ID NO: 4043302 - DNA, 25 bp, Homo sapien
tcctggcagaggcagaaacgctagc

SEQ ID NO: 4043303 - DNA, 25 bp, Homo sapien
tgattgcccgcaaaggaaaaccgcg

SEQ ID NO: 4043304 - DNA, 25 bp, Homo sapien
gcaacatgacacgatctggaaagct

SEQ ID NO: 4043305 - DNA, 25 bp, Homo sapien
aaccactgtgcagggctatctttta

SEQ ID NO: 4043306 - DNA, 25 bp, Homo sapien
ccactgtgcagggctatcttttagt

SEQ ID NO: 4043307 - DNA, 25 bp, Homo sapien
tgtgcagggctatcttttagttttt

SEQ ID NO: 4043308 - DNA, 25 bp, Homo sapien
actgtgcagggctatcttttagttt

SEQ ID NO: 4043309 - DNA, 25 bp, Homo sapien
tgatgcaacttgtcgagctcaggcc

SEQ ID NO: 4043310 - DNA, 25 bp, Homo sapien
tgaggtcacgactacggaaaagcat

SEQ ID NO: 4043311 - DNA, 25 bp, Homo sapien
acagtcaggaaaaggtagggctctc

SEQ ID NO: 4043312 - DNA, 25 bp, Homo sapien
cagggactcgaacacttgatgcaac

SEQ ID NO: 4043313 - DNA, 25 bp, Homo sapien
cctccctttcctccggcatcttcac

SEQ ID NO: 4043314 - DNA, 25 bp, Homo sapien
cttctcctccctttcctccggcatc

SEQ ID NO: 4043315 - DNA, 25 bp, Homo sapien
tcctccctttcctccggcatcttca

SEQ ID NO: 4043316 - DNA, 25 bp, Homo sapien
tctcctccctttcctccggcatctt

SEQ ID NO: 4043317 - DNA, 25 bp, Homo sapien
tcatgcagatcctcaccgagtgctc

SEQ ID NO: 4043318 - DNA, 25 bp, Homo sapien
accgagtgctcttcgggctcggccg

SEQ ID NO: 4043319 - DNA, 25 bp, Homo sapien
tcaccgagtgctcttcgggctcggc

SEQ ID NO: 4043320 - DNA, 25 bp, Homo sapien
gggcccgggctcatgcagatcctca

SEQ ID NO: 4043321 - DNA, 25 bp, Homo sapien
cctcctttgggtgcgtgtgctggtc

SEQ ID NO: 4043322 - DNA, 25 bp, Homo sapien
ttcctctcccttgacgtcttgcgag

SEQ ID NO: 4043323 - DNA, 25 bp, Homo sapien
ccttgacgtcttgcgagctcttggc

SEQ ID NO: 4043324 - DNA, 25 bp, Homo sapien
cggtggcggcctcctttgggtgcgt

SEQ ID NO: 4043325 - DNA, 25 bp, Homo sapien
ccagttctttgagccgggcccggag

SEQ ID NO: 4043326 - DNA, 25 bp, Homo sapien
tccagcgcggccagttctttgagcc

SEQ ID NO: 4043327 - DNA, 25 bp, Homo sapien
ttgaagagctttggggtgcccgccc

SEQ ID NO: 4043328 - DNA, 25 bp, Homo sapien
cctgtcatagcgagggcagcgttga

SEQ ID NO: 4043329 - DNA, 25 bp, Homo sapien
tgaagaggttggtaaacccgtgcgc

SEQ ID NO: 4043330 - DNA, 25 bp, Homo sapien
tctgagactcaggataatgcaccaa

SEQ ID NO: 4043331 - DNA, 25 bp, Homo sapien
ggctttcttccggagtaacttctga

SEQ ID NO: 4043332 - DNA, 25 bp, Homo sapien
cacgttggccgtgcgccggttcccg

SEQ ID NO: 4043333 - DNA, 25 bp, Homo sapien
gatgatgtacatctcacggccgatc

SEQ ID NO: 4043334 - DNA, 25 bp, Homo sapien
ttatttctccaaacacagatccagc

SEQ ID NO: 4043335 - DNA, 25 bp, Homo sapien
agatttcccatcagggccgcccaag

SEQ ID NO: 4043336 - DNA, 25 bp, Homo sapien
gctttcagcgtcaccagcacagatt

SEQ ID NO: 4043337 - DNA, 25 bp, Homo sapien
cacatagtcgttgggcaggtagaca

SEQ ID NO: 4043338 - DNA, 25 bp, Homo sapien
caggtagacaacagagcgaagcctc

SEQ ID NO: 4043339 - DNA, 25 bp, Homo sapien
caaagatcatctgccggtcacagcc

SEQ ID NO: 4043340 - DNA, 25 bp, Homo sapien
cttcagcatgtcaaagatcatctgc

SEQ ID NO: 4043341 - DNA, 25 bp, Homo sapien
ctgaaagagtgcgactttgctaacg

SEQ ID NO: 4043342 - DNA, 25 bp, Homo sapien
gcgactttgctaacgatgttgtagt

SEQ ID NO: 4043343 - DNA, 25 bp, Homo sapien
atgttgtagttcacgtcgatggcga

SEQ ID NO: 4043344 - DNA, 25 bp, Homo sapien
tggcgaggtccagccgcatcttgtc

SEQ ID NO: 4043345 - DNA, 25 bp, Homo sapien
taccaggtcttgacgcggttctgca

SEQ ID NO: 4043346 - DNA, 25 bp, Homo sapien
tgcagctgcggtagtaggtctgtcc

SEQ ID NO: 4043347 - DNA, 25 bp, Homo sapien
attcatgtacttcaccgtgctgtcc

SEQ ID NO: 4043348 - DNA, 25 bp, Homo sapien
gagtgccaggtgtactcgtaccagg

SEQ ID NO: 4043349 - DNA, 25 bp, Homo sapien
ccccgatggtgatgagggtcttcac

SEQ ID NO: 4043350 - DNA, 25 bp, Homo sapien
cagagaaagcaaagacgcccgtgaa

SEQ ID NO: 4043351 - DNA, 25 bp, Homo sapien
tcacagcaaagtagtaacagcgaat

SEQ ID NO: 4043352 - DNA, 25 bp, Homo sapien
ctggaagacaatttcaaagagtgtc

SEQ ID NO: 4043353 - DNA, 25 bp, Homo sapien
agccgaggccctgataggccgatgc

SEQ ID NO: 4043354 - DNA, 25 bp, Homo sapien
ggccgatgcccagtaataaagacag

SEQ ID NO: 4043355 - DNA, 25 bp, Homo sapien
cacgccatcgtaaacccagtgagtg

SEQ ID NO: 4043356 - DNA, 25 bp, Homo sapien
ataaagacaggaattcaaatgcagg

SEQ ID NO: 4043357 - DNA, 25 bp, Homo sapien
cagaaggaacacagcgcatgaacac

SEQ ID NO: 4043358 - DNA, 25 bp, Homo sapien
ctgcagaaggaacacagcgcatgaa

SEQ ID NO: 4043359 - DNA, 25 bp, Homo sapien
aacacagcgcatgaacacagcggcg

SEQ ID NO: 4043360 - DNA, 25 bp, Homo sapien
gcgcatgaacacagcggcggaaggg

SEQ ID NO: 4043361 - DNA, 25 bp, Homo sapien
ggatggattccaggcggctgttaaa

SEQ ID NO: 4043362 - DNA, 25 bp, Homo sapien
ggcggctgttaaactcgaagaaggc

SEQ ID NO: 4043363 - DNA, 25 bp, Homo sapien
ctttgctgaggatggattccaggcg

SEQ ID NO: 4043364 - DNA, 25 bp, Homo sapien
ccaggcggctgttaaactcgaagaa

SEQ ID NO: 4043365 - DNA, 25 bp, Homo sapien
ggttcacaccgactttcaaatagag

SEQ ID NO: 4043366 - DNA, 25 bp, Homo sapien
gggttcacaccgactttcaaataga

SEQ ID NO: 4043367 - DNA, 25 bp, Homo sapien
cttgaagcggcgagacttcaggtag

SEQ ID NO: 4043368 - DNA, 25 bp, Homo sapien
agcggcgagacttcaggtagttatt

SEQ ID NO: 4043369 - DNA, 25 bp, Homo sapien
ttcaggtagttatttcgcatgtcct

SEQ ID NO: 4043370 - DNA, 25 bp, Homo sapien
agttatttcgcatgtcctttttgtc

SEQ ID NO: 4043371 - DNA, 25 bp, Homo sapien
agcgcacgggaatcagccaacagtt

SEQ ID NO: 4043372 - DNA, 25 bp, Homo sapien
tgatgtccccgcctctgacaaactg

SEQ ID NO: 4043373 - DNA, 25 bp, Homo sapien
gcataggtaatccatcagcagccag

SEQ ID NO: 4043374 - DNA, 25 bp, Homo sapien
caaactgcaggcgtgtctggaacac

SEQ ID NO: 4043375 - DNA, 25 bp, Homo sapien
cggtgtttgaacttgcagcagagca

SEQ ID NO: 4043376 - DNA, 25 bp, Homo sapien
gcatgtcgcaatagtgctcctcttc

SEQ ID NO: 4043377 - DNA, 25 bp, Homo sapien
ggcttcagcgggctttgtgtctgga

SEQ ID NO: 4043378 - DNA, 25 bp, Homo sapien
ctcttccactggctcggcttcagcg

SEQ ID NO: 4043379 - DNA, 25 bp, Homo sapien
gctgccccaaatgagctgtttctgg

SEQ ID NO: 4043380 - DNA, 25 bp, Homo sapien
gctggaatgctgaagggcctaacaa

SEQ ID NO: 4043381 - DNA, 25 bp, Homo sapien
caggtttctgagagggaatctcaac

SEQ ID NO: 4043382 - DNA, 25 bp, Homo sapien
gggcattttgtacccagtgttccca

SEQ ID NO: 4043383 - DNA, 25 bp, Homo sapien
tccccatccaggtagaccccctcca

SEQ ID NO: 4043384 - DNA, 25 bp, Homo sapien
ccatccccatccaggtagaccccct

SEQ ID NO: 4043385 - DNA, 25 bp, Homo sapien
catccccatccaggtagaccccctc

SEQ ID NO: 4043386 - DNA, 25 bp, Homo sapien
ccatccaggtagaccccctccagct

SEQ ID NO: 4043387 - DNA, 25 bp, Homo sapien
tgatggcgctatttgtgctggccgt

SEQ ID NO: 4043388 - DNA, 25 bp, Homo sapien
tcagaggtgacgtcagggtcaatga

SEQ ID NO: 4043389 - DNA, 25 bp, Homo sapien
ctcctggagccggtcgttgatgatg

SEQ ID NO: 4043390 - DNA, 25 bp, Homo sapien
actttctctgtccgctccttgaaga

SEQ ID NO: 4043391 - DNA, 25 bp, Homo sapien
gcagcgtctgtgtcccaccttctga

SEQ ID NO: 4043392 - DNA, 25 bp, Homo sapien
gaaaccacagacctaccgtaatcac

SEQ ID NO: 4043393 - DNA, 25 bp, Homo sapien
gccagagctgtgcagcgtctgtgtc

SEQ ID NO: 4043394 - DNA, 25 bp, Homo sapien
ctccttctgacatcagaaaccacag

SEQ ID NO: 4043395 - DNA, 25 bp, Homo sapien
cactggatttaacaggactcctggg

SEQ ID NO: 4043396 - DNA, 25 bp, Homo sapien
gcccagaggttgagcccactggatt

SEQ ID NO: 4043397 - DNA, 25 bp, Homo sapien
gacctttcagaagttcagcagcagg

SEQ ID NO: 4043398 - DNA, 25 bp, Homo sapien
ctggccgtggacacagctgggccca

SEQ ID NO: 4043399 - DNA, 25 bp, Homo sapien
actggcaaagtctgccttgcggtag

SEQ ID NO: 4043400 - DNA, 25 bp, Homo sapien
tctgccttgcggtagaaggttctaa

SEQ ID NO: 4043401 - DNA, 25 bp, Homo sapien
ggtagaaggttctaaaagcatccac

SEQ ID NO: 4043402 - DNA, 25 bp, Homo sapien
caccctccccgcagtctttcaattt

SEQ ID NO: 4043403 - DNA, 25 bp, Homo sapien
tgtccttcggggtggtggggtcaga

SEQ ID NO: 4043404 - DNA, 25 bp, Homo sapien
actctgctggtgacaacgccttgag

SEQ ID NO: 4043405 - DNA, 25 bp, Homo sapien
ggtgacaacgccttgagctcttcag

SEQ ID NO: 4043406 - DNA, 25 bp, Homo sapien
gggactctgctggtgacaacgcctt

SEQ ID NO: 4043407 - DNA, 25 bp, Homo sapien
tgctggtgacaacgccttgagctct

SEQ ID NO: 4043408 - DNA, 25 bp, Homo sapien
tataagggtgtctgatttggcagga

SEQ ID NO: 4043409 - DNA, 25 bp, Homo sapien
agacggtggcggcaacacggttgag

SEQ ID NO: 4043410 - DNA, 25 bp, Homo sapien
cttctgccatgagggggcagctatc

SEQ ID NO: 4043411 - DNA, 25 bp, Homo sapien
ccgaggctgagcttgggactataag

SEQ ID NO: 4043412 - DNA, 25 bp, Homo sapien
tctgggtgctgtttcgtggcaggca

SEQ ID NO: 4043413 - DNA, 25 bp, Homo sapien
agggacaggtctgccccaagtccaa

SEQ ID NO: 4043414 - DNA, 25 bp, Homo sapien
gatactgagaggctgggatagtatt

SEQ ID NO: 4043415 - DNA, 25 bp, Homo sapien
ctgagaggctgggatagtattcctc

SEQ ID NO: 4043416 - DNA, 25 bp, Homo sapien
caagctcagaggatactgagaggct

SEQ ID NO: 4043417 - DNA, 25 bp, Homo sapien
cctggccaggtatctggtcctggac

SEQ ID NO: 4043418 - DNA, 25 bp, Homo sapien
tctccttggcgaagctggagttgga

SEQ ID NO: 4043419 - DNA, 25 bp, Homo sapien
ggtcctggactaggcaattcagctc

SEQ ID NO: 4043420 - DNA, 25 bp, Homo sapien
tagggagatgctctaccaggttttg

SEQ ID NO: 4043421 - DNA, 25 bp, Homo sapien
agagtctcaggcagaggagtgaccc

SEQ ID NO: 4043422 - DNA, 25 bp, Homo sapien
gccagagagtctcaggcagaggagt

SEQ ID NO: 4043423 - DNA, 25 bp, Homo sapien
agtctcaggcagaggagtgaccctg

SEQ ID NO: 4043424 - DNA, 25 bp, Homo sapien
tctcaggcagaggagtgaccctggg

SEQ ID NO: 4043425 - DNA, 25 bp, Homo sapien
ttggtctccgcccagtcctggggct

SEQ ID NO: 4043426 - DNA, 25 bp, Homo sapien
cctccttggccttctcttcagcctc

SEQ ID NO: 4043427 - DNA, 25 bp, Homo sapien
tcctgaactggcagcctcggcctca

SEQ ID NO: 4043428 - DNA, 25 bp, Homo sapien
tggggctccttttcagcctcctctt

SEQ ID NO: 4043429 - DNA, 25 bp, Homo sapien
tagcctacaacctgtagagggcagt

SEQ ID NO: 4043430 - DNA, 25 bp, Homo sapien
caggacctacgggtcctaacagctg

SEQ ID NO: 4043431 - DNA, 25 bp, Homo sapien
ctgtagagggcagtgcacccaggac

SEQ ID NO: 4043432 - DNA, 25 bp, Homo sapien
gcatcctgggagtagcctacaacct

SEQ ID NO: 4043433 - DNA, 25 bp, Homo sapien
tcttcttcactctggcccacgccca

SEQ ID NO: 4043434 - DNA, 25 bp, Homo sapien
gcccacctgcgacaccacacagcta

SEQ ID NO: 4043435 - DNA, 25 bp, Homo sapien
gccgggtcccgtcttcttcactctg

SEQ ID NO: 4043436 - DNA, 25 bp, Homo sapien
acctgcgacaccacacagctatcca

SEQ ID NO: 4043437 - DNA, 25 bp, Homo sapien
agcagactgtccacctgaaatccca

SEQ ID NO: 4043438 - DNA, 25 bp, Homo sapien
cttcagcagactgtccacctgaaat

SEQ ID NO: 4043439 - DNA, 25 bp, Homo sapien
gccttagggagaggcagccacctac

SEQ ID NO: 4043440 - DNA, 25 bp, Homo sapien
gagccttagggagaggcagccacct

SEQ ID NO: 4043441 - DNA, 25 bp, Homo sapien
cggtcgggaccagtcaggatgccca

SEQ ID NO: 4043442 - DNA, 25 bp, Homo sapien
ggctgtggcgttcatcccaagcctg

SEQ ID NO: 4043443 - DNA, 25 bp, Homo sapien
cagaggagccagcaatccttcctgc

SEQ ID NO: 4043444 - DNA, 25 bp, Homo sapien
ttggatctctcggtcgggaccagtc

SEQ ID NO: 4043445 - DNA, 25 bp, Homo sapien
gatgtgggtggacgatcgaccatta

SEQ ID NO: 4043446 - DNA, 25 bp, Homo sapien
taacattgaaatatatggatgtggg

SEQ ID NO: 4043447 - DNA, 25 bp, Homo sapien
aatatatggatgtgggtggacgatc

SEQ ID NO: 4043448 - DNA, 25 bp, Homo sapien
tcgaccattactgggcagtagagca

SEQ ID NO: 4043449 - DNA, 25 bp, Homo sapien
ctcctcttcaatccgggacagctct

SEQ ID NO: 4043450 - DNA, 25 bp, Homo sapien
tctcctcttcaatccgggacagctc

SEQ ID NO: 4043451 - DNA, 25 bp, Homo sapien
ttctcctcttcaatccgggacagct

SEQ ID NO: 4043452 - DNA, 25 bp, Homo sapien
ccagggcggttcaacctcctctagg

SEQ ID NO: 4043453 - DNA, 25 bp, Homo sapien
caacctcctctaggacaaggtcagg

SEQ ID NO: 4043454 - DNA, 25 bp, Homo sapien
gctggtactgacatcctggtgggca

SEQ ID NO: 4043455 - DNA, 25 bp, Homo sapien
tcttcttcataagctggaaccacct

SEQ ID NO: 4043456 - DNA, 25 bp, Homo sapien
tcctgtcgaggtgctgacggtgcca

SEQ ID NO: 4043457 - DNA, 25 bp, Homo sapien
tgttgctgctcattggtgtccccaa

SEQ ID NO: 4043458 - DNA, 25 bp, Homo sapien
tggccaggcctagggagaacctctt

SEQ ID NO: 4043459 - DNA, 25 bp, Homo sapien
tgtgcacgcgtcctctcaaagagat

SEQ ID NO: 4043460 - DNA, 25 bp, Homo sapien
tcagagacctccagctcccatcacc

SEQ ID NO: 4043461 - DNA, 25 bp, Homo sapien
cagagacctccagctcccatcaccc

SEQ ID NO: 4043462 - DNA, 25 bp, Homo sapien
cacatcacatatcccaggggagtca

SEQ ID NO: 4043463 - DNA, 25 bp, Homo sapien
atcacatatcccaggggagtcaggc

SEQ ID NO: 4043464 - DNA, 25 bp, Homo sapien
ggtctgcacatcacatatcccaggg

SEQ ID NO: 4043465 - DNA, 25 bp, Homo sapien
tggtctgcacatcacatatcccagg

SEQ ID NO: 4043466 - DNA, 25 bp, Homo sapien
ctcccagttccaggtgcttctataa

SEQ ID NO: 4043467 - DNA, 25 bp, Homo sapien
taaagacgtccaattgcacccaaga

SEQ ID NO: 4043468 - DNA, 25 bp, Homo sapien
gtgcttctataaagacgtccaattg

SEQ ID NO: 4043469 - DNA, 25 bp, Homo sapien
cgtccaattgcacccaagaaaaaag

SEQ ID NO: 4043470 - DNA, 25 bp, Homo sapien
atgtagcactggctgcggcaaggcc

SEQ ID NO: 4043471 - DNA, 25 bp, Homo sapien
tagcactggctgcggcaaggccatc

SEQ ID NO: 4043472 - DNA, 25 bp, Homo sapien
gtagcactggctgcggcaaggccat

SEQ ID NO: 4043473 - DNA, 25 bp, Homo sapien
ccatgtagcactggctgcggcaagg

SEQ ID NO: 4043474 - DNA, 25 bp, Homo sapien
catgcacgggttattgactgtggca

SEQ ID NO: 4043475 - DNA, 25 bp, Homo sapien
cagtaagacctgtgtgaataaaagc

SEQ ID NO: 4043476 - DNA, 25 bp, Homo sapien
gtgaacccaatgatgcatgcacggg

SEQ ID NO: 4043477 - DNA, 25 bp, Homo sapien
ccagatttacttgtgcgtgaaccca

SEQ ID NO: 4043478 - DNA, 25 bp, Homo sapien
ctggcagggtccctggttggtggca

SEQ ID NO: 4043479 - DNA, 25 bp, Homo sapien
tggagctggtgcctccttgggttcc

SEQ ID NO: 4043480 - DNA, 25 bp, Homo sapien
tggcagggtccctggttggtggcag

SEQ ID NO: 4043481 - DNA, 25 bp, Homo sapien
agctggtgcctccttgggttcctcc

SEQ ID NO: 4043482 - DNA, 25 bp, Homo sapien
cagcttgggccccatttcctggggg

SEQ ID NO: 4043483 - DNA, 25 bp, Homo sapien
cctgcagcttgggccccatttcctg

SEQ ID NO: 4043484 - DNA, 25 bp, Homo sapien
gagggggtctcccgggcctgcagct

SEQ ID NO: 4043485 - DNA, 25 bp, Homo sapien
tgcagcttgggccccatttcctggg

SEQ ID NO: 4043486 - DNA, 25 bp, Homo sapien
caagacccacaagtctgttccagga

SEQ ID NO: 4043487 - DNA, 25 bp, Homo sapien
ctgaaccccgtcctagtctgggtgg

SEQ ID NO: 4043488 - DNA, 25 bp, Homo sapien
tagagacgccatcccttgagggctt

SEQ ID NO: 4043489 - DNA, 25 bp, Homo sapien
ggccagattcgagtcgctaacagga

SEQ ID NO: 4043490 - DNA, 25 bp, Homo sapien
tgtagcaactgcaggctcatctctc

SEQ ID NO: 4043491 - DNA, 25 bp, Homo sapien
gtagcaactgcaggctcatctctcc

SEQ ID NO: 4043492 - DNA, 25 bp, Homo sapien
ctgtagcaactgcaggctcatctct

SEQ ID NO: 4043493 - DNA, 25 bp, Homo sapien
agccacagaagcagccgcagcccag

SEQ ID NO: 4043494 - DNA, 25 bp, Homo sapien
ggggggctgaggaagcactctttcc

SEQ ID NO: 4043495 - DNA, 25 bp, Homo sapien
tgctccagccacagaagcagccgca

SEQ ID NO: 4043496 - DNA, 25 bp, Homo sapien
gggctgaggaagcactctttccaga

SEQ ID NO: 4043497 - DNA, 25 bp, Homo sapien
cctcaagggcctcattgggttcatc

SEQ ID NO: 4043498 - DNA, 25 bp, Homo sapien
ggcctcaagggcctcattgggttca

SEQ ID NO: 4043499 - DNA, 25 bp, Homo sapien
tcaagggcctcattgggttcatctg

SEQ ID NO: 4043500 - DNA, 25 bp, Homo sapien
tgggcctcaagggcctcattgggtt

SEQ ID NO: 4043501 - DNA, 25 bp, Homo sapien
tgtccccagtgctgccatgccccag

SEQ ID NO: 4043502 - DNA, 25 bp, Homo sapien
tgtgtccccagtgctgccatgcccc

SEQ ID NO: 4043503 - DNA, 25 bp, Homo sapien
ctgtgtccccagtgctgccatgccc

SEQ ID NO: 4043504 - DNA, 25 bp, Homo sapien
ccccagtgctgccatgccccaggat

SEQ ID NO: 4043505 - DNA, 25 bp, Homo sapien
agccaggtcagtaccctgcggctgg

SEQ ID NO: 4043506 - DNA, 25 bp, Homo sapien
tgtgaacaggctgcgggatcacctt

SEQ ID NO: 4043507 - DNA, 25 bp, Homo sapien
ttctctacgcccttcatgagccagg

SEQ ID NO: 4043508 - DNA, 25 bp, Homo sapien
atgctgtgaacaggctgcgggatca

SEQ ID NO: 4043509 - DNA, 25 bp, Homo sapien
agagcccgccctccacctgaagctc

SEQ ID NO: 4043510 - DNA, 25 bp, Homo sapien
gagggtagttgggaggcgggctggc

SEQ ID NO: 4043511 - DNA, 25 bp, Homo sapien
cccatccccagggctccctagctgg

SEQ ID NO: 4043512 - DNA, 25 bp, Homo sapien
agggctccctagctgggagggtagt

SEQ ID NO: 4043513 - DNA, 25 bp, Homo sapien
atatggtggaagtaagggcagcctc

SEQ ID NO: 4043514 - DNA, 25 bp, Homo sapien
tcagaaatctcagcgccctgggccc

SEQ ID NO: 4043515 - DNA, 25 bp, Homo sapien
tggaagtaagggcagcctccttggt

SEQ ID NO: 4043516 - DNA, 25 bp, Homo sapien
cctgggcccggagggatatggtgga

SEQ ID NO: 4043517 - DNA, 25 bp, Homo sapien
ttcctcctccttgaatgactcttcg

SEQ ID NO: 4043518 - DNA, 25 bp, Homo sapien
cctccttgaatgactcttcgggggg

SEQ ID NO: 4043519 - DNA, 25 bp, Homo sapien
tcctccttgaatgactcttcggggg

SEQ ID NO: 4043520 - DNA, 25 bp, Homo sapien
cctcctccttgaatgactcttcggg

SEQ ID NO: 4043521 - DNA, 25 bp, Homo sapien
caagcctcccaggcctacaacatcc

SEQ ID NO: 4043522 - DNA, 25 bp, Homo sapien
aaggtccaaggtggcctccaagcct

SEQ ID NO: 4043523 - DNA, 25 bp, Homo sapien
cccaaggtccaaggtggcctccaag

SEQ ID NO: 4043524 - DNA, 25 bp, Homo sapien
ggcctacaacatccccaggaggctg

SEQ ID NO: 4043525 - DNA, 25 bp, Homo sapien
tggactcggactctgtctcggcctc

SEQ ID NO: 4043526 - DNA, 25 bp, Homo sapien
ctcggcctcctcaggattcggttct

SEQ ID NO: 4043527 - DNA, 25 bp, Homo sapien
catggactcggactctgtctcggcc

SEQ ID NO: 4043528 - DNA, 25 bp, Homo sapien
ctcaggattcggttctggttccacc

SEQ ID NO: 4043529 - DNA, 25 bp, Homo sapien
aggcagcaccctctggacccagccc

SEQ ID NO: 4043530 - DNA, 25 bp, Homo sapien
gcttagatgccaaccgccagccagg

SEQ ID NO: 4043531 - DNA, 25 bp, Homo sapien
tgcttagatgccaaccgccagccag

SEQ ID NO: 4043532 - DNA, 25 bp, Homo sapien
ccgccagccaggaattgccttcttg

SEQ ID NO: 4043533 - DNA, 25 bp, Homo sapien
cagccaggaattgccttcttgctgc

SEQ ID NO: 4043534 - DNA, 25 bp, Homo sapien
gggggctgtggttaaagccaatgga

SEQ ID NO: 4043535 - DNA, 25 bp, Homo sapien
tcgggggctgtggttaaagccaatg

SEQ ID NO: 4043536 - DNA, 25 bp, Homo sapien
ggggctgtggttaaagccaatggaa

SEQ ID NO: 4043537 - DNA, 25 bp, Homo sapien
cgggggctgtggttaaagccaatgg

SEQ ID NO: 4043538 - DNA, 25 bp, Homo sapien
caccagggactttctatagggctct

SEQ ID NO: 4043539 - DNA, 25 bp, Homo sapien
gaggtctcagaacaccgagctgggt

SEQ ID NO: 4043540 - DNA, 25 bp, Homo sapien
aaaccggaggatttgcccttagcag

SEQ ID NO: 4043541 - DNA, 25 bp, Homo sapien
taggaactgcactacaaaggtggga

SEQ ID NO: 4043542 - DNA, 25 bp, Homo sapien
tacacacttgaactgctgctcgcgg

SEQ ID NO: 4043543 - DNA, 25 bp, Homo sapien
tgtggatccgctcatgccgagagag

SEQ ID NO: 4043544 - DNA, 25 bp, Homo sapien
tgtaggccttgttgcacacagggca

SEQ ID NO: 4043545 - DNA, 25 bp, Homo sapien
tgcaacaaggccacgtctaggaagc

SEQ ID NO: 4043546 - DNA, 25 bp, Homo sapien
aggacctcagacaaggcacagaaga

SEQ ID NO: 4043547 - DNA, 25 bp, Homo sapien
gctggtcagacagcccgagtcagta

SEQ ID NO: 4043548 - DNA, 25 bp, Homo sapien
tcacagagatggacaaggacctcag

SEQ ID NO: 4043549 - DNA, 25 bp, Homo sapien
gagagtaatggcttcagtttcccgc

SEQ ID NO: 4043550 - DNA, 25 bp, Homo sapien
tgagcaagcaggtaccactctaagc

SEQ ID NO: 4043551 - DNA, 25 bp, Homo sapien
tctgagcgcctgtaggtccgctgtg

SEQ ID NO: 4043552 - DNA, 25 bp, Homo sapien
gcaggttgcttgagcaagcaggtac

SEQ ID NO: 4043553 - DNA, 25 bp, Homo sapien
tgggcttctctgagcgcctgtaggt

SEQ ID NO: 4043554 - DNA, 25 bp, Homo sapien
tttattccggctccatccgcggcgg

SEQ ID NO: 4043555 - DNA, 25 bp, Homo sapien
accgatggccttgcggagacgggcg

SEQ ID NO: 4043556 - DNA, 25 bp, Homo sapien
ccaggtcggacaagccgggtgctcc

SEQ ID NO: 4043557 - DNA, 25 bp, Homo sapien
gctccgggcggttttcgagtcgcca

SEQ ID NO: 4043558 - DNA, 25 bp, Homo sapien
gcacattacagttctagggagcact

SEQ ID NO: 4043559 - DNA, 25 bp, Homo sapien
ttgataagtagctgaaagattccac

SEQ ID NO: 4043560 - DNA, 25 bp, Homo sapien
cagtgtcacctgaagcttattaaca

SEQ ID NO: 4043561 - DNA, 25 bp, Homo sapien
tagaacactgatctgcgaggaggct

SEQ ID NO: 4043562 - DNA, 25 bp, Homo sapien
aatgcttactctggttgttacacaa

SEQ ID NO: 4043563 - DNA, 25 bp, Homo sapien
cctgtctcggctgttgtgggttgca

SEQ ID NO: 4043564 - DNA, 25 bp, Homo sapien
tgggttgcaggttgggtgctgctgt

SEQ ID NO: 4043565 - DNA, 25 bp, Homo sapien
cagcctgggcatcctaatgcttact

SEQ ID NO: 4043566 - DNA, 25 bp, Homo sapien
gatgccattggcctcagatcagagt

SEQ ID NO: 4043567 - DNA, 25 bp, Homo sapien
tgttttaaatcatcacgccctggct

SEQ ID NO: 4043568 - DNA, 25 bp, Homo sapien
ggcctccaatgcactgtgacctctg

SEQ ID NO: 4043569 - DNA, 25 bp, Homo sapien
tatccctggtcgagccaggacacgg

SEQ ID NO: 4043570 - DNA, 25 bp, Homo sapien
agtcctcttcaggtgtcttctggat

SEQ ID NO: 4043571 - DNA, 25 bp, Homo sapien
tcagtcctcttcaggtgtcttctgg

SEQ ID NO: 4043572 - DNA, 25 bp, Homo sapien
cagtcctcttcaggtgtcttctgga

SEQ ID NO: 4043573 - DNA, 25 bp, Homo sapien
tcctcttcaggtgtcttctggattt

SEQ ID NO: 4043574 - DNA, 25 bp, Homo sapien
tggtgatggacagagaaatcttttt

SEQ ID NO: 4043575 - DNA, 25 bp, Homo sapien
gtgatggacagagaaatctttttac

SEQ ID NO: 4043576 - DNA, 25 bp, Homo sapien
ttacagtttcaaattatgttcaaca

SEQ ID NO: 4043577 - DNA, 25 bp, Homo sapien
cagtttcaaattatgttcaacaaat

SEQ ID NO: 4043578 - DNA, 25 bp, Homo sapien
gatggcctcgagaggcattaatgat

SEQ ID NO: 4043579 - DNA, 25 bp, Homo sapien
ttcttggaagtctctgctgtgactt

SEQ ID NO: 4043580 - DNA, 25 bp, Homo sapien
tcttggaagtctctgctgtgacttc

SEQ ID NO: 4043581 - DNA, 25 bp, Homo sapien
ttccaagatggcctcgagaggcatt

SEQ ID NO: 4043582 - DNA, 25 bp, Homo sapien
gacattgaagccttatactgctgtg

SEQ ID NO: 4043583 - DNA, 25 bp, Homo sapien
taggcagacattgaagccttatact

SEQ ID NO: 4043584 - DNA, 25 bp, Homo sapien
gaagccttatactgctgtgacactg

SEQ ID NO: 4043585 - DNA, 25 bp, Homo sapien
agaaccttctcgtgtcttcctccca

SEQ ID NO: 4043586 - DNA, 25 bp, Homo sapien
tcaatggagaatggaaggtggcaat

SEQ ID NO: 4043587 - DNA, 25 bp, Homo sapien
caatggagaatggaaggtggcaatg

SEQ ID NO: 4043588 - DNA, 25 bp, Homo sapien
gaaggaagcaggagtctcgctgagg

SEQ ID NO: 4043589 - DNA, 25 bp, Homo sapien
gcaggagtctcgctgagggggaggg

SEQ ID NO: 4043590 - DNA, 25 bp, Homo sapien
gctcccgctgacagtgcagaagcag

SEQ ID NO: 4043591 - DNA, 25 bp, Homo sapien
tctccataagaggagaaacatggga

SEQ ID NO: 4043592 - DNA, 25 bp, Homo sapien
gggctcttccataacaggagattct

SEQ ID NO: 4043593 - DNA, 25 bp, Homo sapien
agagtaagcccgttgagcgagcgct

SEQ ID NO: 4043594 - DNA, 25 bp, Homo sapien
ttggcacgaagagtcccaaggcctg

SEQ ID NO: 4043595 - DNA, 25 bp, Homo sapien
tgtcttggcacgaagagtcccaagg

SEQ ID NO: 4043596 - DNA, 25 bp, Homo sapien
ccttgtcttggcacgaagagtccca

SEQ ID NO: 4043597 - DNA, 25 bp, Homo sapien
tttattccttgtcttggcacgaaga

SEQ ID NO: 4043598 - DNA, 25 bp, Homo sapien
gagagctgggggagggggtgtcctg

SEQ ID NO: 4043599 - DNA, 25 bp, Homo sapien
cgaggggcccctggaggggagagct

SEQ ID NO: 4043600 - DNA, 25 bp, Homo sapien
agagctgggggagggggtgtcctgg

SEQ ID NO: 4043601 - DNA, 25 bp, Homo sapien
ggcagccgattcctcgagagcccgg

SEQ ID NO: 4043602 - DNA, 25 bp, Homo sapien
ccgaagacgcggaggtccatgccga

SEQ ID NO: 4043603 - DNA, 25 bp, Homo sapien
ttcgcaaacccttgagggcgcaggg

SEQ ID NO: 4043604 - DNA, 25 bp, Homo sapien
ttcagcctgtgtcccgggagccgct

SEQ ID NO: 4043605 - DNA, 25 bp, Homo sapien
gctccagacagggaattaggccccc

SEQ ID NO: 4043606 - DNA, 25 bp, Homo sapien
ctccagacagggaattaggccccca

SEQ ID NO: 4043607 - DNA, 25 bp, Homo sapien
tccagacagggaattaggcccccat

SEQ ID NO: 4043608 - DNA, 25 bp, Homo sapien
ttcccaaagcaagcaagaggccgtg

SEQ ID NO: 4043609 - DNA, 25 bp, Homo sapien
gcccattgtggcctaagaggctgcc

SEQ ID NO: 4043610 - DNA, 25 bp, Homo sapien
tcagactgtgaaccccacgaaggag

SEQ ID NO: 4043611 - DNA, 25 bp, Homo sapien
gggaaatggtactgtacagctggct

SEQ ID NO: 4043612 - DNA, 25 bp, Homo sapien
cctctgcgagtggtttcttgtgcac

SEQ ID NO: 4043613 - DNA, 25 bp, Homo sapien
tcccgatggcccttggaaactatgc

SEQ ID NO: 4043614 - DNA, 25 bp, Homo sapien
tgcactggcaccaagtgcgggtccg

SEQ ID NO: 4043615 - DNA, 25 bp, Homo sapien
tgtacagccggcaaatgtgtccttg

SEQ ID NO: 4043616 - DNA, 25 bp, Homo sapien
gggggattccaagcagccgccatct

SEQ ID NO: 4043617 - DNA, 25 bp, Homo sapien
aggggggattccaagcagccgccat

SEQ ID NO: 4043618 - DNA, 25 bp, Homo sapien
gggattccaagcagccgccatcttg

SEQ ID NO: 4043619 - DNA, 25 bp, Homo sapien
ggggattccaagcagccgccatctt

SEQ ID NO: 4043620 - DNA, 25 bp, Homo sapien
acagaggccattctcctccagctca

SEQ ID NO: 4043621 - DNA, 25 bp, Homo sapien
cagaggccattctcctccagctcac

SEQ ID NO: 4043622 - DNA, 25 bp, Homo sapien
gaatgccggcttcctgcgcatccac

SEQ ID NO: 4043623 - DNA, 25 bp, Homo sapien
gggtcctgcgtgtaggtcccagagg

SEQ ID NO: 4043624 - DNA, 25 bp, Homo sapien
tctggggacttcagctcccagactt

SEQ ID NO: 4043625 - DNA, 25 bp, Homo sapien
ttcagctcccagactttcttcctta

SEQ ID NO: 4043626 - DNA, 25 bp, Homo sapien
tggggtcacaggtcggccagcctga

SEQ ID NO: 4043627 - DNA, 25 bp, Homo sapien
gtcacaggtcggccagcctgaggac

SEQ ID NO: 4043628 - DNA, 25 bp, Homo sapien
tgtgggatggggtcacaggtcggcc

SEQ ID NO: 4043629 - DNA, 25 bp, Homo sapien
tgtttcctgcctgtgggatggggtc

SEQ ID NO: 4043630 - DNA, 25 bp, Homo sapien
ggactaaatggggaatctgcagcct

SEQ ID NO: 4043631 - DNA, 25 bp, Homo sapien
gaagaatggcgcacatcagtgcgtg

SEQ ID NO: 4043632 - DNA, 25 bp, Homo sapien
gaaggatctggaaggttaaggagaa

SEQ ID NO: 4043633 - DNA, 25 bp, Homo sapien
agaaaggcaagacgggtagaagaat

SEQ ID NO: 4043634 - DNA, 25 bp, Homo sapien
aacagcattgagatcctataggatt

SEQ ID NO: 4043635 - DNA, 25 bp, Homo sapien
ctatagagggactacattatgtctc

SEQ ID NO: 4043636 - DNA, 25 bp, Homo sapien
gagcatagttttacaggctacctgg

SEQ ID NO: 4043637 - DNA, 25 bp, Homo sapien
cacatgaacacagattgctgtttgt

SEQ ID NO: 4043638 - DNA, 25 bp, Homo sapien
cagtgagagtagagaaggaaaaaga

SEQ ID NO: 4043639 - DNA, 25 bp, Homo sapien
aggaaaaagaaatctgctactggtt

SEQ ID NO: 4043640 - DNA, 25 bp, Homo sapien
taaagctggtcaggtgaagcagtga

SEQ ID NO: 4043641 - DNA, 25 bp, Homo sapien
gaaaaagaaatctgctactggttgt

SEQ ID NO: 4043642 - DNA, 25 bp, Homo sapien
catcgctcataacctcctgggcagg

SEQ ID NO: 4043643 - DNA, 25 bp, Homo sapien
ggagagcgtctagctcctggcagct

SEQ ID NO: 4043644 - DNA, 25 bp, Homo sapien
tggctaagggaaggcggcaccaacc

SEQ ID NO: 4043645 - DNA, 25 bp, Homo sapien
ccatcagccaaaggcgtcctctgga

SEQ ID NO: 4043646 - DNA, 25 bp, Homo sapien
caggtatggtgtccgcagagctcag

SEQ ID NO: 4043647 - DNA, 25 bp, Homo sapien
agggcaggtatggtgtccgcagagc

SEQ ID NO: 4043648 - DNA, 25 bp, Homo sapien
gaaagcacagagtttagcgtctgat

SEQ ID NO: 4043649 - DNA, 25 bp, Homo sapien
gtccccaccaagtgtcaactcccca

SEQ ID NO: 4043650 - DNA, 25 bp, Homo sapien
tacacgatagaagatggtgtatgca

SEQ ID NO: 4043651 - DNA, 25 bp, Homo sapien
ctaggtttacacgatagaagatggt

SEQ ID NO: 4043652 - DNA, 25 bp, Homo sapien
gaagatggtgtatgcaggagcctca

SEQ ID NO: 4043653 - DNA, 25 bp, Homo sapien
tgcaggagcctcaacattagaagtt

SEQ ID NO: 4043654 - DNA, 25 bp, Homo sapien
gatctaattcagtagcggttacatc

SEQ ID NO: 4043655 - DNA, 25 bp, Homo sapien
ctagggactattacttagcagcttt

SEQ ID NO: 4043656 - DNA, 25 bp, Homo sapien
agggactattacttagcagctttgc

SEQ ID NO: 4043657 - DNA, 25 bp, Homo sapien
tcagtagcggttacatcatgtccat

SEQ ID NO: 4043658 - DNA, 25 bp, Homo sapien
tcaaatacatgccttaaggctggaa

SEQ ID NO: 4043659 - DNA, 25 bp, Homo sapien
ttatcaaatacatgccttaaggctg

SEQ ID NO: 4043660 - DNA, 25 bp, Homo sapien
caaatacatgccttaaggctggaag

SEQ ID NO: 4043661 - DNA, 25 bp, Homo sapien
tatcaaatacatgccttaaggctgg

SEQ ID NO: 4043662 - DNA, 25 bp, Homo sapien
ctttggaggtacgggactctgcttc

SEQ ID NO: 4043663 - DNA, 25 bp, Homo sapien
ttcatcaggttcagccccttcaaca

SEQ ID NO: 4043664 - DNA, 25 bp, Homo sapien
ttggaggtacgggactctgcttcct

SEQ ID NO: 4043665 - DNA, 25 bp, Homo sapien
catcaggttcagccccttcaacatc

SEQ ID NO: 4043666 - DNA, 25 bp, Homo sapien
taagttcatggtaaaggtatctccc

SEQ ID NO: 4043667 - DNA, 25 bp, Homo sapien
gaataagctccagcgttcatgcgcc

SEQ ID NO: 4043668 - DNA, 25 bp, Homo sapien
taacagaactacagcagagcaaact

SEQ ID NO: 4043669 - DNA, 25 bp, Homo sapien
tgttcaccggtgtccatgacaagca

SEQ ID NO: 4043670 - DNA, 25 bp, Homo sapien
gccagtagtaggaagtgcctcatcc

SEQ ID NO: 4043671 - DNA, 25 bp, Homo sapien
agccagtagtaggaagtgcctcatc

SEQ ID NO: 4043672 - DNA, 25 bp, Homo sapien
tgtgagccagtagtaggaagtgcct

SEQ ID NO: 4043673 - DNA, 25 bp, Homo sapien
tctgtgagccagtagtaggaagtgc

SEQ ID NO: 4043674 - DNA, 25 bp, Homo sapien
gcagctgaattcttagaccagagca

SEQ ID NO: 4043675 - DNA, 25 bp, Homo sapien
cttgcgatataaaggcaccccaaag

SEQ ID NO: 4043676 - DNA, 25 bp, Homo sapien
tgcagctgaattcttagaccagagc

SEQ ID NO: 4043677 - DNA, 25 bp, Homo sapien
gacctaagatcttgcgatataaagg

SEQ ID NO: 4043678 - DNA, 25 bp, Homo sapien
tctgagtagagtctgtctgagaagt

SEQ ID NO: 4043679 - DNA, 25 bp, Homo sapien
acagtttgaactctgccggcagctc

SEQ ID NO: 4043680 - DNA, 25 bp, Homo sapien
cgtcggatgcgacaatttgcatgga

SEQ ID NO: 4043681 - DNA, 25 bp, Homo sapien
gaactctgccggcagctcatcttct

SEQ ID NO: 4043682 - DNA, 25 bp, Homo sapien
tatttcctggacctttgtgaggcca

SEQ ID NO: 4043683 - DNA, 25 bp, Homo sapien
tggaaacgcgtcatctccggcatct

SEQ ID NO: 4043684 - DNA, 25 bp, Homo sapien
gccaatattagacgcagtgtgccct

SEQ ID NO: 4043685 - DNA, 25 bp, Homo sapien
caaagctccctggacagtgtggcaa

SEQ ID NO: 4043686 - DNA, 25 bp, Homo sapien
tgaatctggttccagccgtcatcca

SEQ ID NO: 4043687 - DNA, 25 bp, Homo sapien
tgagggtctcgatgtaattggtgcc

SEQ ID NO: 4043688 - DNA, 25 bp, Homo sapien
tatgctcgccgtgtgaagtctagca

SEQ ID NO: 4043689 - DNA, 25 bp, Homo sapien
catccagccgcatgggcatggtgca

SEQ ID NO: 4043690 - DNA, 25 bp, Homo sapien
gactgcactgggcttatactagaag

SEQ ID NO: 4043691 - DNA, 25 bp, Homo sapien
ctgcatgcagatggcccggaagtag

SEQ ID NO: 4043692 - DNA, 25 bp, Homo sapien
tctgtcttggaagaagcacacaacc

SEQ ID NO: 4043693 - DNA, 25 bp, Homo sapien
aaatggataccacgctaactctgac

SEQ ID NO: 4043694 - DNA, 25 bp, Homo sapien
tctgcagggcatgtgatatatgtgg

SEQ ID NO: 4043695 - DNA, 25 bp, Homo sapien
agtttaattcccagcgtcttcttgg

SEQ ID NO: 4043696 - DNA, 25 bp, Homo sapien
ctgcacttcgaaggtaaaatacttc

SEQ ID NO: 4043697 - DNA, 25 bp, Homo sapien
ggtctgcagggcatgtgatatatgt

SEQ ID NO: 4043698 - DNA, 25 bp, Homo sapien
gatagactcacatccggcactctga

SEQ ID NO: 4043699 - DNA, 25 bp, Homo sapien
cccatggtaagctctaagtggcaga

SEQ ID NO: 4043700 - DNA, 25 bp, Homo sapien
gactccgcagtctgtgctattaacc

SEQ ID NO: 4043701 - DNA, 25 bp, Homo sapien
tattaacctctatgacgtactgcct

SEQ ID NO: 4043702 - DNA, 25 bp, Homo sapien
ttcttttgatgtggccattccgtac

SEQ ID NO: 4043703 - DNA, 25 bp, Homo sapien
tgattcttttgatgtggccattccg

SEQ ID NO: 4043704 - DNA, 25 bp, Homo sapien
tgtcccttcaatctctagcaccagg

SEQ ID NO: 4043705 - DNA, 25 bp, Homo sapien
ttacatttgtcccttcaatctctag

SEQ ID NO: 4043706 - DNA, 25 bp, Homo sapien
ctctcttttctctgatttgtttttc

SEQ ID NO: 4043707 - DNA, 25 bp, Homo sapien
tttctctgatttgtttttctggctc

SEQ ID NO: 4043708 - DNA, 25 bp, Homo sapien
tctctgatttgtttttctggctcat

SEQ ID NO: 4043709 - DNA, 25 bp, Homo sapien
cttttctctgatttgtttttctggc

SEQ ID NO: 4043710 - DNA, 25 bp, Homo sapien
ctaagtggcgatattcctcctgtat

SEQ ID NO: 4043711 - DNA, 25 bp, Homo sapien
catgttcccaacctaagtggcgata

SEQ ID NO: 4043712 - DNA, 25 bp, Homo sapien
gccatctcatgttcccaacctaagt

SEQ ID NO: 4043713 - DNA, 25 bp, Homo sapien
tcccaacctaagtggcgatattcct

SEQ ID NO: 4043714 - DNA, 25 bp, Homo sapien
catttattgctcatggcggaagcag

SEQ ID NO: 4043715 - DNA, 25 bp, Homo sapien
cccctgcccatgagctggagatact

SEQ ID NO: 4043716 - DNA, 25 bp, Homo sapien
tctagatcacaaagagccgactgtt

SEQ ID NO: 4043717 - DNA, 25 bp, Homo sapien
ctatcaaagtgtggcctatgagtgc

SEQ ID NO: 4043718 - DNA, 25 bp, Homo sapien
cacaaaattagcttttaccgttgtg

SEQ ID NO: 4043719 - DNA, 25 bp, Homo sapien
cttttaccgttgtgaagattttgct

SEQ ID NO: 4043720 - DNA, 25 bp, Homo sapien
gaaatgagtgttctaaaggttttgc

SEQ ID NO: 4043721 - DNA, 25 bp, Homo sapien
gcttgaaatgagtgttctaaaggtt

SEQ ID NO: 4043722 - DNA, 25 bp, Homo sapien
tgtactctggcactagctctagctt

SEQ ID NO: 4043723 - DNA, 25 bp, Homo sapien
taaaaacctcagtaacgcagcaacg

SEQ ID NO: 4043724 - DNA, 25 bp, Homo sapien
gacagcccataactgagtcaagtga

SEQ ID NO: 4043725 - DNA, 25 bp, Homo sapien
tcaagtgacagctgggaagccaacc

SEQ ID NO: 4043726 - DNA, 25 bp, Homo sapien
tcccagatttgcagaggcttgctgc

SEQ ID NO: 4043727 - DNA, 25 bp, Homo sapien
gtcccagatttgcagaggcttgctg

SEQ ID NO: 4043728 - DNA, 25 bp, Homo sapien
ccgctctggaacgtgtttttgaaca

SEQ ID NO: 4043729 - DNA, 25 bp, Homo sapien
gatggagaggaagccgctctggaac

SEQ ID NO: 4043730 - DNA, 25 bp, Homo sapien
gcaacgctaagtccgcgatcttcag

SEQ ID NO: 4043731 - DNA, 25 bp, Homo sapien
tatttccccgccttcaatggaggcg

SEQ ID NO: 4043732 - DNA, 25 bp, Homo sapien
taggccccggagtagatacaggcac

SEQ ID NO: 4043733 - DNA, 25 bp, Homo sapien
taagctgcgagctcagaacggaaac

SEQ ID NO: 4043734 - DNA, 25 bp, Homo sapien
tcttgttccctgaaaccactttggc

SEQ ID NO: 4043735 - DNA, 25 bp, Homo sapien
tccctgaaaccactttggccttctc

SEQ ID NO: 4043736 - DNA, 25 bp, Homo sapien
gccttctctcctacatccttctcct

SEQ ID NO: 4043737 - DNA, 25 bp, Homo sapien
ccatcttgttccctgaaaccacttt

SEQ ID NO: 4043738 - DNA, 25 bp, Homo sapien
tcgggaagaagtcaacaggaagcca

SEQ ID NO: 4043739 - DNA, 25 bp, Homo sapien
ttttgtgtctgctcacggaacgtga

SEQ ID NO: 4043740 - DNA, 25 bp, Homo sapien
taataatatgtaactgccgccatgc

SEQ ID NO: 4043741 - DNA, 25 bp, Homo sapien
cccatgctttctgggtcgggaagaa

SEQ ID NO: 4043742 - DNA, 25 bp, Homo sapien
agggaaagacgtcattaatcaacct

SEQ ID NO: 4043743 - DNA, 25 bp, Homo sapien
ggagggaaagacgtcattaatcaac

SEQ ID NO: 4043744 - DNA, 25 bp, Homo sapien
ggaggagggaaagacgtcattaatc

SEQ ID NO: 4043745 - DNA, 25 bp, Homo sapien
gaggagggaaagacgtcattaatca

SEQ ID NO: 4043746 - DNA, 25 bp, Homo sapien
tccaggtccagcatagcaagtgggt

SEQ ID NO: 4043747 - DNA, 25 bp, Homo sapien
tactgaggaaggactatgcacctgg

SEQ ID NO: 4043748 - DNA, 25 bp, Homo sapien
cctggcatggcctgaaaacctcatt

SEQ ID NO: 4043749 - DNA, 25 bp, Homo sapien
tgagatgccggcagtggaattctag

SEQ ID NO: 4043750 - DNA, 25 bp, Homo sapien
tgagtggcgcgactcagaagcaagt

SEQ ID NO: 4043751 - DNA, 25 bp, Homo sapien
actaaaacagtcaatcccaagaggc

SEQ ID NO: 4043752 - DNA, 25 bp, Homo sapien
gaaatacaagttaaggtcctcatag

SEQ ID NO: 4043753 - DNA, 25 bp, Homo sapien
taatagcatgtgctgcaaggaatgg

SEQ ID NO: 4043754 - DNA, 25 bp, Homo sapien
ccaagttttccactagttgtcaaga

SEQ ID NO: 4043755 - DNA, 25 bp, Homo sapien
catccagtgatacaaagaggtggcc

SEQ ID NO: 4043756 - DNA, 25 bp, Homo sapien
gaggtggccaattgtgtctgaagta

SEQ ID NO: 4043757 - DNA, 25 bp, Homo sapien
agggcagcagcacataaatcataca

SEQ ID NO: 4043758 - DNA, 25 bp, Homo sapien
tctaaaggcaggatgttactcagtc

SEQ ID NO: 4043759 - DNA, 25 bp, Homo sapien
tctctctgggactaagcgcctgact

SEQ ID NO: 4043760 - DNA, 25 bp, Homo sapien
tcctctctgcaagggaacacatttg

SEQ ID NO: 4043761 - DNA, 25 bp, Homo sapien
gagcacctgggagaacctaagtcat

SEQ ID NO: 4043762 - DNA, 25 bp, Homo sapien
agtgcctcaatgaacgacatcagcg

SEQ ID NO: 4043763 - DNA, 25 bp, Homo sapien
ggtctgcgtcatacactcaatagct

SEQ ID NO: 4043764 - DNA, 25 bp, Homo sapien
gacatcagcgcttctctagttggtg

SEQ ID NO: 4043765 - DNA, 25 bp, Homo sapien
catgttacagaatgtctgggaggag

SEQ ID NO: 4043766 - DNA, 25 bp, Homo sapien
ggaagaatgcctgtgtcaaagctgc

SEQ ID NO: 4043767 - DNA, 25 bp, Homo sapien
tactgggtgcgtacatttaccatgg

SEQ ID NO: 4043768 - DNA, 25 bp, Homo sapien
gaatagcctaggtgccaagaccaga

SEQ ID NO: 4043769 - DNA, 25 bp, Homo sapien
tacatcaccgtcagagagacaggca

SEQ ID NO: 4043770 - DNA, 25 bp, Homo sapien
actattctcctccaggtacttttat

SEQ ID NO: 4043771 - DNA, 25 bp, Homo sapien
gactattctcctccaggtactttta

SEQ ID NO: 4043772 - DNA, 25 bp, Homo sapien
tattctcctccaggtacttttatta

SEQ ID NO: 4043773 - DNA, 25 bp, Homo sapien
ctgactattctcctccaggtacttt

SEQ ID NO: 4043774 - DNA, 25 bp, Homo sapien
tggagttaccgcttcaccaagaccc

SEQ ID NO: 4043775 - DNA, 25 bp, Homo sapien
ggaaaggaatggagttaccgcttca

SEQ ID NO: 4043776 - DNA, 25 bp, Homo sapien
cagtaggcacctcttgcctggtcca

SEQ ID NO: 4043777 - DNA, 25 bp, Homo sapien
aagaccctccagtaggcacctcttg

SEQ ID NO: 4043778 - DNA, 25 bp, Homo sapien
gcaggaaagacacgcagtggcacat

SEQ ID NO: 4043779 - DNA, 25 bp, Homo sapien
tacaggtttagccaaagagctcaca

SEQ ID NO: 4043780 - DNA, 25 bp, Homo sapien
agcaggcagcattggtatgagaacc

SEQ ID NO: 4043781 - DNA, 25 bp, Homo sapien
taagttcccacagaccaaacgacaa

SEQ ID NO: 4043782 - DNA, 25 bp, Homo sapien
gaatccacttggaggaaaactgcgg

SEQ ID NO: 4043783 - DNA, 25 bp, Homo sapien
taaaataggcgcacacatagggatg

SEQ ID NO: 4043784 - DNA, 25 bp, Homo sapien
gaagttctccttacaaggctgccaa

SEQ ID NO: 4043785 - DNA, 25 bp, Homo sapien
gggactgcctacaaaccatgttgct

SEQ ID NO: 4043786 - DNA, 25 bp, Homo sapien
tggttttattggcaagcatcaatgc

SEQ ID NO: 4043787 - DNA, 25 bp, Homo sapien
ttttattggcaagcatcaatgccgc

SEQ ID NO: 4043788 - DNA, 25 bp, Homo sapien
ggttggttggttttattggcaagca

SEQ ID NO: 4043789 - DNA, 25 bp, Homo sapien
ttggcaagcatcaatgccgcattac

SEQ ID NO: 4043790 - DNA, 25 bp, Homo sapien
agcattgtctgcacaaggctgggac

SEQ ID NO: 4043791 - DNA, 25 bp, Homo sapien
ctggaaagcacagcattgtctgcac

SEQ ID NO: 4043792 - DNA, 25 bp, Homo sapien
tgggactgctccttcaccacagggt

SEQ ID NO: 4043793 - DNA, 25 bp, Homo sapien
aagcacagcattgtctgcacaaggc

SEQ ID NO: 4043794 - DNA, 25 bp, Homo sapien
cctgaacacagtccctggagactca

SEQ ID NO: 4043795 - DNA, 25 bp, Homo sapien
tccctgaacacagtccctggagact

SEQ ID NO: 4043796 - DNA, 25 bp, Homo sapien
ctgaacacagtccctggagactcac

SEQ ID NO: 4043797 - DNA, 25 bp, Homo sapien
ccctgaacacagtccctggagactc

SEQ ID NO: 4043798 - DNA, 25 bp, Homo sapien
cagtctctgttgatggtcgtatcgc

SEQ ID NO: 4043799 - DNA, 25 bp, Homo sapien
agttttcccagcgtttccgtgaatg

SEQ ID NO: 4043800 - DNA, 25 bp, Homo sapien
tcgtatcgcagaagtttgtccagaa

SEQ ID NO: 4043801 - DNA, 25 bp, Homo sapien
tgtccagaagatctagggcctcagg

SEQ ID NO: 4043802 - DNA, 25 bp, Homo sapien
ccagaaccttggcaatgcgaacaag

SEQ ID NO: 4043803 - DNA, 25 bp, Homo sapien
tcttcagatacccatacagttcttc

SEQ ID NO: 4043804 - DNA, 25 bp, Homo sapien
ggatctaggtctatgtgatacttct

SEQ ID NO: 4043805 - DNA, 25 bp, Homo sapien
tcccaggatatcgttgaagtgtgga

SEQ ID NO: 4043806 - DNA, 25 bp, Homo sapien
ataaataagaaccagaaagcatttg

SEQ ID NO: 4043807 - DNA, 25 bp, Homo sapien
ccaaataaataagaaccagaaagca

SEQ ID NO: 4043808 - DNA, 25 bp, Homo sapien
aaataaataagaaccagaaagcatt

SEQ ID NO: 4043809 - DNA, 25 bp, Homo sapien
taaataagaaccagaaagcatttgc

SEQ ID NO: 4043810 - DNA, 25 bp, Homo sapien
ttgctaacatacagcccaaactcca

SEQ ID NO: 4043811 - DNA, 25 bp, Homo sapien
tcctgtccatggaagaatggttccc

SEQ ID NO: 4043812 - DNA, 25 bp, Homo sapien
ggttcccttcgaaagatcatgcttg

SEQ ID NO: 4043813 - DNA, 25 bp, Homo sapien
cacatgtccaagctataatcataca

SEQ ID NO: 4043814 - DNA, 25 bp, Homo sapien
aattctgccagaccccaatctatca

SEQ ID NO: 4043815 - DNA, 25 bp, Homo sapien
tgaggctacacgaacattgtactcc

SEQ ID NO: 4043816 - DNA, 25 bp, Homo sapien
cattgtactcctgagcaggatgata

SEQ ID NO: 4043817 - DNA, 25 bp, Homo sapien
cacgaggagctctggtcccttgaag

SEQ ID NO: 4043818 - DNA, 25 bp, Homo sapien
gtaatttctttctgaggccctccag

SEQ ID NO: 4043819 - DNA, 25 bp, Homo sapien
catggcactggacagctttttggtc

SEQ ID NO: 4043820 - DNA, 25 bp, Homo sapien
gcagattggtctgcgggtcatcaag

SEQ ID NO: 4043821 - DNA, 25 bp, Homo sapien
tggatatcaaaaataggagggaccc

SEQ ID NO: 4043822 - DNA, 25 bp, Homo sapien
tgtgaggtttcacatccctgtgcat

SEQ ID NO: 4043823 - DNA, 25 bp, Homo sapien
attgtgaggtttcacatccctgtgc

SEQ ID NO: 4043824 - DNA, 25 bp, Homo sapien
gacattgtgaggtttcacatccctg

SEQ ID NO: 4043825 - DNA, 25 bp, Homo sapien
catgacattgtgaggtttcacatcc

SEQ ID NO: 4043826 - DNA, 25 bp, Homo sapien
gattcccttgctgtggcagtaatcc

SEQ ID NO: 4043827 - DNA, 25 bp, Homo sapien
ccttgctgtggcagtaatccagagc

SEQ ID NO: 4043828 - DNA, 25 bp, Homo sapien
cccttgctgtggcagtaatccagag

SEQ ID NO: 4043829 - DNA, 25 bp, Homo sapien
ttcccttgctgtggcagtaatccag

SEQ ID NO: 4043830 - DNA, 25 bp, Homo sapien
aaaaagcgtgcttcagaaggcaccc

SEQ ID NO: 4043831 - DNA, 25 bp, Homo sapien
gataatagtaagcaacccctctacc

SEQ ID NO: 4043832 - DNA, 25 bp, Homo sapien
tgctctctctgcacactacagctgg

SEQ ID NO: 4043833 - DNA, 25 bp, Homo sapien
atacagtcccccaacgggcagcttg

SEQ ID NO: 4043834 - DNA, 25 bp, Homo sapien
ctgtgcccagccgaggaagatttct

SEQ ID NO: 4043835 - DNA, 25 bp, Homo sapien
tttaaaagagggggtgatgaggcca

SEQ ID NO: 4043836 - DNA, 25 bp, Homo sapien
tgtgcccagccgaggaagatttctt

SEQ ID NO: 4043837 - DNA, 25 bp, Homo sapien
gcccagccgaggaagatttctttaa

SEQ ID NO: 4043838 - DNA, 25 bp, Homo sapien
cctgagccagctagcctttaagact

SEQ ID NO: 4043839 - DNA, 25 bp, Homo sapien
taatggttcaaaggacagaccagca

SEQ ID NO: 4043840 - DNA, 25 bp, Homo sapien
attttgtacataagggtcccacgtg

SEQ ID NO: 4043841 - DNA, 25 bp, Homo sapien
ccacgtgggttttctagatgaccaa

SEQ ID NO: 4043842 - DNA, 25 bp, Homo sapien
tatggaccaacaagagctatgggag

SEQ ID NO: 4043843 - DNA, 25 bp, Homo sapien
gagacctaaagaatcacctggctaa

SEQ ID NO: 4043844 - DNA, 25 bp, Homo sapien
tcctctgggtatcaagaaacattct

SEQ ID NO: 4043845 - DNA, 25 bp, Homo sapien
gaagattcctcgatggaggcctcaa

SEQ ID NO: 4043846 - DNA, 25 bp, Homo sapien
tcatacatataaaaccggatatcaa

SEQ ID NO: 4043847 - DNA, 25 bp, Homo sapien
catataaaaccggatatcaaagtct

SEQ ID NO: 4043848 - DNA, 25 bp, Homo sapien
catacatataaaaccggatatcaaa

SEQ ID NO: 4043849 - DNA, 25 bp, Homo sapien
ataaaaccggatatcaaagtctgtc

SEQ ID NO: 4043850 - DNA, 25 bp, Homo sapien
cactggccaaactgataggtaaatg

SEQ ID NO: 4043851 - DNA, 25 bp, Homo sapien
cattattggtaatccagagacccac

SEQ ID NO: 4043852 - DNA, 25 bp, Homo sapien
caggcaacacctgacgtcttaggag

SEQ ID NO: 4043853 - DNA, 25 bp, Homo sapien
tgcagatggcaagagcttacaaaaa

SEQ ID NO: 4043854 - DNA, 25 bp, Homo sapien
tctacagagctgacaatgatacctc

SEQ ID NO: 4043855 - DNA, 25 bp, Homo sapien
ctacagagctgacaatgatacctcc

SEQ ID NO: 4043856 - DNA, 25 bp, Homo sapien
caaataccaaagctggtgtctttga

SEQ ID NO: 4043857 - DNA, 25 bp, Homo sapien
gcagatctctgcgaggacaactcag

SEQ ID NO: 4043858 - DNA, 25 bp, Homo sapien
gtattaccacttctctcaacgggag

SEQ ID NO: 4043859 - DNA, 25 bp, Homo sapien
caacgggagaatagtggagtaagcc

SEQ ID NO: 4043860 - DNA, 25 bp, Homo sapien
gattaaaaattcttcaccagcccga

SEQ ID NO: 4043861 - DNA, 25 bp, Homo sapien
atatccacaccccggtctactagta

SEQ ID NO: 4043862 - DNA, 25 bp, Homo sapien
gtgtgttaaacaactcccatatcca

SEQ ID NO: 4043863 - DNA, 25 bp, Homo sapien
atccacaccccggtctactagtata

SEQ ID NO: 4043864 - DNA, 25 bp, Homo sapien
gtgttaaacaactcccatatccaca

SEQ ID NO: 4043865 - DNA, 25 bp, Homo sapien
tttgttccaccacgaaggttctcca

SEQ ID NO: 4043866 - DNA, 25 bp, Homo sapien
ccagaatcttaacctctcgttttat

SEQ ID NO: 4043867 - DNA, 25 bp, Homo sapien
ttaatgatatttgttccaccacgaa

SEQ ID NO: 4043868 - DNA, 25 bp, Homo sapien
gggtcctttacagtgtcaatcagct

SEQ ID NO: 4043869 - DNA, 25 bp, Homo sapien
tggttgccaagaatgtagaaggaca

SEQ ID NO: 4043870 - DNA, 25 bp, Homo sapien
cacctgcaatgaacaatggttgcca

SEQ ID NO: 4043871 - DNA, 25 bp, Homo sapien
caaactaacaagtgctccaccaaga

SEQ ID NO: 4043872 - DNA, 25 bp, Homo sapien
taccctggtggcatccctaaaactc

SEQ ID NO: 4043873 - DNA, 25 bp, Homo sapien
gttttcgaaccagttggtaatcatc

SEQ ID NO: 4043874 - DNA, 25 bp, Homo sapien
cattgttggtgatattaatggcctc

SEQ ID NO: 4043875 - DNA, 25 bp, Homo sapien
taatggcctcaaatacttcactata

SEQ ID NO: 4043876 - DNA, 25 bp, Homo sapien
ttacaaccactctctcattgttggt

SEQ ID NO: 4043877 - DNA, 25 bp, Homo sapien
aggaagacacacacataaatgccag

SEQ ID NO: 4043878 - DNA, 25 bp, Homo sapien
aaaggaagacacacacataaatgcc

SEQ ID NO: 4043879 - DNA, 25 bp, Homo sapien
gtaaaaggaagacacacacataaat

SEQ ID NO: 4043880 - DNA, 25 bp, Homo sapien
ctgtaaaaggaagacacacacataa

SEQ ID NO: 4043881 - DNA, 25 bp, Homo sapien
gctcgggacgtgagcctcgtagtcc

SEQ ID NO: 4043882 - DNA, 25 bp, Homo sapien
cagtactcgcggctcctcagactgt

SEQ ID NO: 4043883 - DNA, 25 bp, Homo sapien
actgttcacctcggcgtagacccgg

SEQ ID NO: 4043884 - DNA, 25 bp, Homo sapien
cgtgagcctcgtagtcccagtactc

SEQ ID NO: 4043885 - DNA, 25 bp, Homo sapien
cgcggggcgtcgggcggaggaggca

SEQ ID NO: 4043886 - DNA, 25 bp, Homo sapien
gcggggcgtcgggcggaggaggcag

SEQ ID NO: 4043887 - DNA, 25 bp, Homo sapien
cagccaccggccgggaaaggggcag

SEQ ID NO: 4043888 - DNA, 25 bp, Homo sapien
ttgacctgctgtttgccacctggca

SEQ ID NO: 4043889 - DNA, 25 bp, Homo sapien
tagaaatagggtgtctctatattgc

SEQ ID NO: 4043890 - DNA, 25 bp, Homo sapien
gaaatagggtgtctctatattgccc

SEQ ID NO: 4043891 - DNA, 25 bp, Homo sapien
gacctgctgtttgccacctggcaac

SEQ ID NO: 4043892 - DNA, 25 bp, Homo sapien
atccctcaccacatagcccacaccc

SEQ ID NO: 4043893 - DNA, 25 bp, Homo sapien
tcatccctcaccacatagcccacac

SEQ ID NO: 4043894 - DNA, 25 bp, Homo sapien
ccctcaccacatagcccacacccat

SEQ ID NO: 4043895 - DNA, 25 bp, Homo sapien
ctcatccctcaccacatagcccaca

SEQ ID NO: 4043896 - DNA, 25 bp, Homo sapien
cacacctgcgggatgcctgaggatt

SEQ ID NO: 4043897 - DNA, 25 bp, Homo sapien
acacctgcgggatgcctgaggattc

SEQ ID NO: 4043898 - DNA, 25 bp, Homo sapien
accactctggtgcaacacactcctg

SEQ ID NO: 4043899 - DNA, 25 bp, Homo sapien
acaccactctggtgcaacacactcc

SEQ ID NO: 4043900 - DNA, 25 bp, Homo sapien
ggtgacccctcttattcagtcttgc

SEQ ID NO: 4043901 - DNA, 25 bp, Homo sapien
gggtgacccctcttattcagtcttg

SEQ ID NO: 4043902 - DNA, 25 bp, Homo sapien
cctgtgggtgacccctcttattcag

SEQ ID NO: 4043903 - DNA, 25 bp, Homo sapien
gtgggtgacccctcttattcagtct

SEQ ID NO: 4043904 - DNA, 25 bp, Homo sapien
gtggtggaatctctgagtatggcag

SEQ ID NO: 4043905 - DNA, 25 bp, Homo sapien
atgtggtggaatctctgagtatggc

SEQ ID NO: 4043906 - DNA, 25 bp, Homo sapien
tgtggtggaatctctgagtatggca

SEQ ID NO: 4043907 - DNA, 25 bp, Homo sapien
aacttaagctataaggtggagacac

SEQ ID NO: 4043908 - DNA, 25 bp, Homo sapien
caccagaacttaagctataaggtgg

SEQ ID NO: 4043909 - DNA, 25 bp, Homo sapien
catagacaccagaacttaagctata

SEQ ID NO: 4043910 - DNA, 25 bp, Homo sapien
caccatagacaccagaacttaagct

SEQ ID NO: 4043911 - DNA, 25 bp, Homo sapien
agctgcctgcggagctgtcgcctgc

SEQ ID NO: 4043912 - DNA, 25 bp, Homo sapien
gggacatttcaatccaggcctttgc

SEQ ID NO: 4043913 - DNA, 25 bp, Homo sapien
agcaatcctagaggaggagtccctt

SEQ ID NO: 4043914 - DNA, 25 bp, Homo sapien
gaggaggagtcccttccagatcaat

SEQ ID NO: 4043915 - DNA, 25 bp, Homo sapien
agaagggtgaggaatagatctcagg

SEQ ID NO: 4043916 - DNA, 25 bp, Homo sapien
taccacaacactcacgggcacaggg

SEQ ID NO: 4043917 - DNA, 25 bp, Homo sapien
gagaagggtgaggaatagatctcag

SEQ ID NO: 4043918 - DNA, 25 bp, Homo sapien
cacccactaccacaacactcacggg

SEQ ID NO: 4043919 - DNA, 25 bp, Homo sapien
cttccaacaccttagtgggaatggc

SEQ ID NO: 4043920 - DNA, 25 bp, Homo sapien
tcaatgaactcttccaacaccttag

SEQ ID NO: 4043921 - DNA, 25 bp, Homo sapien
atggctttggatggataggagaagg

SEQ ID NO: 4043922 - DNA, 25 bp, Homo sapien
ctggttaaatgtaatctcaatgaac

SEQ ID NO: 4043923 - DNA, 25 bp, Homo sapien
gcgctgaagggtagagttccagact

SEQ ID NO: 4043924 - DNA, 25 bp, Homo sapien
aggcatcccagatcaaagcacggcg

SEQ ID NO: 4043925 - DNA, 25 bp, Homo sapien
cagcctgatcgggagtctttgagtc

SEQ ID NO: 4043926 - DNA, 25 bp, Homo sapien
aagcacggcgctaacaaagttccag

SEQ ID NO: 4043927 - DNA, 25 bp, Homo sapien
gctgggtccgcacggagacaggcgg

SEQ ID NO: 4043928 - DNA, 25 bp, Homo sapien
tccgcacggagacaggcggggcagc

SEQ ID NO: 4043929 - DNA, 25 bp, Homo sapien
tggctgggtccgcacggagacaggc

SEQ ID NO: 4043930 - DNA, 25 bp, Homo sapien
aacctggctgggtccgcacggagac

SEQ ID NO: 4043931 - DNA, 25 bp, Homo sapien
gatgatgagtccgagagcgtcctct

SEQ ID NO: 4043932 - DNA, 25 bp, Homo sapien
tgcctgttatccagctgtgcgggct

SEQ ID NO: 4043933 - DNA, 25 bp, Homo sapien
agctcctgggcacacggcattggca

SEQ ID NO: 4043934 - DNA, 25 bp, Homo sapien
cgactcccatgaagggtcggagctg

SEQ ID NO: 4043935 - DNA, 25 bp, Homo sapien
tgccctgccgctctaagttggtgac

SEQ ID NO: 4043936 - DNA, 25 bp, Homo sapien
agttggtgaccgcttgtcttccctc

SEQ ID NO: 4043937 - DNA, 25 bp, Homo sapien
gaattgctggacttgcggcaaagtc

SEQ ID NO: 4043938 - DNA, 25 bp, Homo sapien
ttcgtggatacctgccccggcagag

SEQ ID NO: 4043939 - DNA, 25 bp, Homo sapien
cagccccagtgtgcaactatcaaaa

SEQ ID NO: 4043940 - DNA, 25 bp, Homo sapien
tcagtttactcttcagtttggtggg

SEQ ID NO: 4043941 - DNA, 25 bp, Homo sapien
tgttagccagcatttagttcacaag

SEQ ID NO: 4043942 - DNA, 25 bp, Homo sapien
tatgccatgggcttatccgtggcag

SEQ ID NO: 4043943 - DNA, 25 bp, Homo sapien
cctagtcgtgaatgcgtgatggtcc

SEQ ID NO: 4043944 - DNA, 25 bp, Homo sapien
taagggttgtacagacgcctcagga

SEQ ID NO: 4043945 - DNA, 25 bp, Homo sapien
caagtatgatccaacatggcccagt

SEQ ID NO: 4043946 - DNA, 25 bp, Homo sapien
ttcttcgggctgatacaacctgttc

SEQ ID NO: 4043947 - DNA, 25 bp, Homo sapien
cagaacccacagatcgaactgctgt

SEQ ID NO: 4043948 - DNA, 25 bp, Homo sapien
cagggcacgtctcaccaccgaagtt

SEQ ID NO: 4043949 - DNA, 25 bp, Homo sapien
acagatcgaactgctgtagctggca

SEQ ID NO: 4043950 - DNA, 25 bp, Homo sapien
ccgaagttcaggactcctctcagaa

SEQ ID NO: 4043951 - DNA, 25 bp, Homo sapien
tacaccaactttggaagggcaaaca

SEQ ID NO: 4043952 - DNA, 25 bp, Homo sapien
gcagcatcttagatctgaggaagta

SEQ ID NO: 4043953 - DNA, 25 bp, Homo sapien
gacccagtacaaaataggcactcaa

SEQ ID NO: 4043954 - DNA, 25 bp, Homo sapien
tgacggaatggttgacggcagaatt

SEQ ID NO: 4043955 - DNA, 25 bp, Homo sapien
gtgaccaaggcttactctcaacact

SEQ ID NO: 4043956 - DNA, 25 bp, Homo sapien
cacagagctccccatctagggaagg

SEQ ID NO: 4043957 - DNA, 25 bp, Homo sapien
caagtgctattcactccagagacag

SEQ ID NO: 4043958 - DNA, 25 bp, Homo sapien
tgagcgcatactgtctgccaagtgc

SEQ ID NO: 4043959 - DNA, 25 bp, Homo sapien
tggctgccgcattctgtcttctgga

SEQ ID NO: 4043960 - DNA, 25 bp, Homo sapien
gtttcctctttcgtgtggctgccgc

SEQ ID NO: 4043961 - DNA, 25 bp, Homo sapien
tcctcaggacactcatcgtcatgtg

SEQ ID NO: 4043962 - DNA, 25 bp, Homo sapien
ctttcacgaagattttcctcaggac

SEQ ID NO: 4043963 - DNA, 25 bp, Homo sapien
aacttgaatgtgcaaacaggcagag

SEQ ID NO: 4043964 - DNA, 25 bp, Homo sapien
gaacttgaatgtgcaaacaggcaga

SEQ ID NO: 4043965 - DNA, 25 bp, Homo sapien
ccagggtgtccactgcctctgtact

SEQ ID NO: 4043966 - DNA, 25 bp, Homo sapien
agggtgtccactgcctctgtacttc

SEQ ID NO: 4043967 - DNA, 25 bp, Homo sapien
cctctgtacttccagttttggtgta

SEQ ID NO: 4043968 - DNA, 25 bp, Homo sapien
ctgtacttccagttttggtgtaggg

SEQ ID NO: 4043969 - DNA, 25 bp, Homo sapien
actccattattaaattaagataggc

SEQ ID NO: 4043970 - DNA, 25 bp, Homo sapien
taggccctagattggattatccagg

SEQ ID NO: 4043971 - DNA, 25 bp, Homo sapien
caagcaaactccattattaaattaa

SEQ ID NO: 4043972 - DNA, 25 bp, Homo sapien
ttaagataggccctagattggatta

SEQ ID NO: 4043973 - DNA, 25 bp, Homo sapien
tctctgggaggaggaatgccttaac

SEQ ID NO: 4043974 - DNA, 25 bp, Homo sapien
gccttctctgggaggaggaatgcct

SEQ ID NO: 4043975 - DNA, 25 bp, Homo sapien
ccttctctgggaggaggaatgcctt

SEQ ID NO: 4043976 - DNA, 25 bp, Homo sapien
acgcagccttctctgggaggaggaa

SEQ ID NO: 4043977 - DNA, 25 bp, Homo sapien
ggttgccaaaatgcatcgctgtgtc

SEQ ID NO: 4043978 - DNA, 25 bp, Homo sapien
tattgactggatactctgtgtgagc

SEQ ID NO: 4043979 - DNA, 25 bp, Homo sapien
tatgcagcattctgccgaggaagca

SEQ ID NO: 4043980 - DNA, 25 bp, Homo sapien
tcttcaggagggctatgttgttgct

SEQ ID NO: 4043981 - DNA, 25 bp, Homo sapien
cattgcatttttccgttgcaaggcc

SEQ ID NO: 4043982 - DNA, 25 bp, Homo sapien
gaatggaggactcatcattgcattt

SEQ ID NO: 4043983 - DNA, 25 bp, Homo sapien
tttttccgttgcaaggcctgcagtc

SEQ ID NO: 4043984 - DNA, 25 bp, Homo sapien
ctgcattgaatggaggactcatcat

SEQ ID NO: 4043985 - DNA, 25 bp, Homo sapien
cccggcgatgttgcgggccccaaag

SEQ ID NO: 4043986 - DNA, 25 bp, Homo sapien
cgatgttgcgggccccaaaggcagg

SEQ ID NO: 4043987 - DNA, 25 bp, Homo sapien
cggcgatgttgcgggccccaaaggc

SEQ ID NO: 4043988 - DNA, 25 bp, Homo sapien
gcgatgttgcgggccccaaaggcag

SEQ ID NO: 4043989 - DNA, 25 bp, Homo sapien
ttctgaatggcggatgcgatgctga

SEQ ID NO: 4043990 - DNA, 25 bp, Homo sapien
tctgaatggcggatgcgatgctgag

SEQ ID NO: 4043991 - DNA, 25 bp, Homo sapien
ctgttctgaatggcggatgcgatgc

SEQ ID NO: 4043992 - DNA, 25 bp, Homo sapien
tgaatggcggatgcgatgctgagga

SEQ ID NO: 4043993 - DNA, 25 bp, Homo sapien
cacccacgggaactccatgctgctg

SEQ ID NO: 4043994 - DNA, 25 bp, Homo sapien
acggaagctttctggacgccacaac

SEQ ID NO: 4043995 - DNA, 25 bp, Homo sapien
tgggagtcctgcagcgacaccaccc

SEQ ID NO: 4043996 - DNA, 25 bp, Homo sapien
gaaaacggaagctttctggacgcca

SEQ ID NO: 4043997 - DNA, 25 bp, Homo sapien
tgcagcagtagaagccccctgctcc

SEQ ID NO: 4043998 - DNA, 25 bp, Homo sapien
tagtttgcaaaagagcagtattctc

SEQ ID NO: 4043999 - DNA, 25 bp, Homo sapien
gttgtagtttgcaaaagagcagtat

SEQ ID NO: 4044000 - DNA, 25 bp, Homo sapien
tgtagtttgcaaaagagcagtattc

SEQ ID NO: 4044001 - DNA, 25 bp, Homo sapien
aagaatagagaaggccgagcagcac

SEQ ID NO: 4044002 - DNA, 25 bp, Homo sapien
tggtggaagaatagagaaggccgag

SEQ ID NO: 4044003 - DNA, 25 bp, Homo sapien
tggaagaatagagaaggccgagcag

SEQ ID NO: 4044004 - DNA, 25 bp, Homo sapien
gaagaatagagaaggccgagcagca

SEQ ID NO: 4044005 - DNA, 25 bp, Homo sapien
gacccgccgcggacaccatgggcag

SEQ ID NO: 4044006 - DNA, 25 bp, Homo sapien
agagagacccgccgcggacaccatg

SEQ ID NO: 4044007 - DNA, 25 bp, Homo sapien
atccccagagagacccgccgcggac

SEQ ID NO: 4044008 - DNA, 25 bp, Homo sapien
agagacccgccgcggacaccatggg

SEQ ID NO: 4044009 - DNA, 25 bp, Homo sapien
gtcttatccctagtgcttggttctg

SEQ ID NO: 4044010 - DNA, 25 bp, Homo sapien
cttggttctgtgtggtaaagaggca

SEQ ID NO: 4044011 - DNA, 25 bp, Homo sapien
gaagagagggcagcttactcttgtc

SEQ ID NO: 4044012 - DNA, 25 bp, Homo sapien
aaagggctgctttttgactcgtgga

SEQ ID NO: 4044013 - DNA, 25 bp, Homo sapien
tcagagttcgtccatgaactgttcc

SEQ ID NO: 4044014 - DNA, 25 bp, Homo sapien
ctcaaggagaaatgaactcaggctg

SEQ ID NO: 4044015 - DNA, 25 bp, Homo sapien
ggctggcctgacacagtagagttca

SEQ ID NO: 4044016 - DNA, 25 bp, Homo sapien
gaatggtcctcagagttcgtccatg

SEQ ID NO: 4044017 - DNA, 25 bp, Homo sapien
aaatgccactggtgcttccgtgcga

SEQ ID NO: 4044018 - DNA, 25 bp, Homo sapien
tctgtgctgacgattccttggcgga

SEQ ID NO: 4044019 - DNA, 25 bp, Homo sapien
taaacgttgtcacctatgcatcgcc

SEQ ID NO: 4044020 - DNA, 25 bp, Homo sapien
aacgtggcgctcaacaaaattaagg

SEQ ID NO: 4044021 - DNA, 25 bp, Homo sapien
cgccccgaagattaccgaagagttg

SEQ ID NO: 4044022 - DNA, 25 bp, Homo sapien
aatgagctggctacatacacacagg

SEQ ID NO: 4044023 - DNA, 25 bp, Homo sapien
cataatctagtcgttttctgtcctc

SEQ ID NO: 4044024 - DNA, 25 bp, Homo sapien
tgggataccatctggtaccgccccg

SEQ ID NO: 4044025 - DNA, 25 bp, Homo sapien
catgctaatcatcttggcatccttc

SEQ ID NO: 4044026 - DNA, 25 bp, Homo sapien
atgctaatcatcttggcatccttcc

SEQ ID NO: 4044027 - DNA, 25 bp, Homo sapien
acattgacagggtcacttggtggta

SEQ ID NO: 4044028 - DNA, 25 bp, Homo sapien
ggtatctacttgtcatttggactgg

SEQ ID NO: 4044029 - DNA, 25 bp, Homo sapien
acaattttgtcgatcgtgaattcag

SEQ ID NO: 4044030 - DNA, 25 bp, Homo sapien
tcatttggactggtctggaggctcc

SEQ ID NO: 4044031 - DNA, 25 bp, Homo sapien
gatccgtctgctttctatcctccag

SEQ ID NO: 4044032 - DNA, 25 bp, Homo sapien
gtttgctgtcaatcggatccgtctg

SEQ ID NO: 4044033 - DNA, 25 bp, Homo sapien
aagctgtgatcgtctttgccccagg

SEQ ID NO: 4044034 - DNA, 25 bp, Homo sapien
gcctttggttaagctgtgatcgtct

SEQ ID NO: 4044035 - DNA, 25 bp, Homo sapien
ataaaagttataccatgggccaggc

SEQ ID NO: 4044036 - DNA, 25 bp, Homo sapien
tcttattgtgggctaggccctgagc

SEQ ID NO: 4044037 - DNA, 25 bp, Homo sapien
ccttgaataacactggttgatttga

SEQ ID NO: 4044038 - DNA, 25 bp, Homo sapien
gcatgagtccccacttatacgtgaa

SEQ ID NO: 4044039 - DNA, 25 bp, Homo sapien
atagtgatcgcacccaacacaggca

SEQ ID NO: 4044040 - DNA, 25 bp, Homo sapien
taagttctgtagtgcatctctcaac

SEQ ID NO: 4044041 - DNA, 25 bp, Homo sapien
tccagtagccccagaaatgctctag

SEQ ID NO: 4044042 - DNA, 25 bp, Homo sapien
caaacctggtactatgcgaccatgg

SEQ ID NO: 4044043 - DNA, 25 bp, Homo sapien
gtaccgcccgaattgactgctcctg

SEQ ID NO: 4044044 - DNA, 25 bp, Homo sapien
tgggtccaggagcttcaacgagcgt

SEQ ID NO: 4044045 - DNA, 25 bp, Homo sapien
ggctcctccgaatcacgcgagtgga

SEQ ID NO: 4044046 - DNA, 25 bp, Homo sapien
tcagaggcttatttccgagtggagt

SEQ ID NO: 4044047 - DNA, 25 bp, Homo sapien
caaactgggtcatcgcctgttcaca

SEQ ID NO: 4044048 - DNA, 25 bp, Homo sapien
gtttcactagccacaaagcacaggt

SEQ ID NO: 4044049 - DNA, 25 bp, Homo sapien
ggttgtacagaggatagcaccccac

SEQ ID NO: 4044050 - DNA, 25 bp, Homo sapien
aaaacagtcgcccagataaaggagg

SEQ ID NO: 4044051 - DNA, 25 bp, Homo sapien
cattagactgtttgcagggcatcac

SEQ ID NO: 4044052 - DNA, 25 bp, Homo sapien
cattattgcatagaagatccctgac

SEQ ID NO: 4044053 - DNA, 25 bp, Homo sapien
ggaacctggttaagcaagcactaat

SEQ ID NO: 4044054 - DNA, 25 bp, Homo sapien
gagatcaaggatgcaacctcaggtt

SEQ ID NO: 4044055 - DNA, 25 bp, Homo sapien
ctccagcctgagtgaagggagtaag

SEQ ID NO: 4044056 - DNA, 25 bp, Homo sapien
cagtgagcagtgagagcgccactga

SEQ ID NO: 4044057 - DNA, 25 bp, Homo sapien
agcctgagtgaagggagtaagaccc

SEQ ID NO: 4044058 - DNA, 25 bp, Homo sapien
tgagcagtgagagcgccactgaact

SEQ ID NO: 4044059 - DNA, 25 bp, Homo sapien
agagctctcaatgccgtaagtacct

SEQ ID NO: 4044060 - DNA, 25 bp, Homo sapien
gctccagggtcttgaactggtcaga

SEQ ID NO: 4044061 - DNA, 25 bp, Homo sapien
cagaataatctagctcaaacttggg

SEQ ID NO: 4044062 - DNA, 25 bp, Homo sapien
ctagctcaaacttgggagtcaaatg

SEQ ID NO: 4044063 - DNA, 25 bp, Homo sapien
ccagcacccatccatgaatcagcac

SEQ ID NO: 4044064 - DNA, 25 bp, Homo sapien
catccatgaatcagcacccattctc

SEQ ID NO: 4044065 - DNA, 25 bp, Homo sapien
gcagccatcccctgactgatcagca

SEQ ID NO: 4044066 - DNA, 25 bp, Homo sapien
catcccctgactgatcagcacccat

SEQ ID NO: 4044067 - DNA, 25 bp, Homo sapien
aaccaggacccatccccctgaccag

SEQ ID NO: 4044068 - DNA, 25 bp, Homo sapien
catccctcctaaccaggacccatcc

SEQ ID NO: 4044069 - DNA, 25 bp, Homo sapien
cccatccctccagactaccaccttt

SEQ ID NO: 4044070 - DNA, 25 bp, Homo sapien
atcccccgaaccagcacccatccct

SEQ ID NO: 4044071 - DNA, 25 bp, Homo sapien
gagcccttgaggcttgctgatgatg

SEQ ID NO: 4044072 - DNA, 25 bp, Homo sapien
ggtgagcccttgaggcttgctgatg

SEQ ID NO: 4044073 - DNA, 25 bp, Homo sapien
tggattcgcagtccatggtgagccc

SEQ ID NO: 4044074 - DNA, 25 bp, Homo sapien
gattcgcagtccatggtgagccctt

SEQ ID NO: 4044075 - DNA, 25 bp, Homo sapien
gcatctgcagaaccaacgtcaattg

SEQ ID NO: 4044076 - DNA, 25 bp, Homo sapien
atctgcagaaccaacgtcaattgac

SEQ ID NO: 4044077 - DNA, 25 bp, Homo sapien
catctgcagaaccaacgtcaattga

SEQ ID NO: 4044078 - DNA, 25 bp, Homo sapien
ctggcttggcaaagaggaatctgtg

SEQ ID NO: 4044079 - DNA, 25 bp, Homo sapien
tcaggagcctgctgaatatgtcagc

SEQ ID NO: 4044080 - DNA, 25 bp, Homo sapien
aatctgtgctcacaaggtggttctg

SEQ ID NO: 4044081 - DNA, 25 bp, Homo sapien
ggacgggacaggctgtgccacacac

SEQ ID NO: 4044082 - DNA, 25 bp, Homo sapien
cagagacccaaagagggagcagctg

SEQ ID NO: 4044083 - DNA, 25 bp, Homo sapien
actgaggtcacagctctggcaggca

SEQ ID NO: 4044084 - DNA, 25 bp, Homo sapien
gggggggcaccattgatcttctcca

SEQ ID NO: 4044085 - DNA, 25 bp, Homo sapien
aggagcctgcagagacccaaagagg

SEQ ID NO: 4044086 - DNA, 25 bp, Homo sapien
tgggtaatggcccataaataatgca

SEQ ID NO: 4044087 - DNA, 25 bp, Homo sapien
ggcgactctggacttggaggcagga

SEQ ID NO: 4044088 - DNA, 25 bp, Homo sapien
aaataatgcaccaggacaagacggg

SEQ ID NO: 4044089 - DNA, 25 bp, Homo sapien
gcagccggtgggagtgggcgactct

SEQ ID NO: 4044090 - DNA, 25 bp, Homo sapien
tccagagttaccaggatagcaaggg

SEQ ID NO: 4044091 - DNA, 25 bp, Homo sapien
tccatgagcctgctaaagtttccag

SEQ ID NO: 4044092 - DNA, 25 bp, Homo sapien
cactggagggggctctactgtcctc

SEQ ID NO: 4044093 - DNA, 25 bp, Homo sapien
ggaagtggagggacatttgcaaatg

SEQ ID NO: 4044094 - DNA, 25 bp, Homo sapien
tctgtggaagggcagcaagccatac

SEQ ID NO: 4044095 - DNA, 25 bp, Homo sapien
ctcccaaacatcacccctcctccgc

SEQ ID NO: 4044096 - DNA, 25 bp, Homo sapien
ccaaacatcacccctcctccgcaga

SEQ ID NO: 4044097 - DNA, 25 bp, Homo sapien
aaacatcacccctcctccgcagagt

SEQ ID NO: 4044098 - DNA, 25 bp, Homo sapien
tgctcccaaacatcacccctcctcc

SEQ ID NO: 4044099 - DNA, 25 bp, Homo sapien
gctgactcagtagtgactccgctgc

SEQ ID NO: 4044100 - DNA, 25 bp, Homo sapien
aagatgaagagagcccagcggcaca

SEQ ID NO: 4044101 - DNA, 25 bp, Homo sapien
tctgctgactcagtagtgactccgc

SEQ ID NO: 4044102 - DNA, 25 bp, Homo sapien
agatgaagagagcccagcggcacag

SEQ ID NO: 4044103 - DNA, 25 bp, Homo sapien
tggatcggttaattcacggccacag

SEQ ID NO: 4044104 - DNA, 25 bp, Homo sapien
ctggtggatcggttaattcacggcc

SEQ ID NO: 4044105 - DNA, 25 bp, Homo sapien
cagctggtggatcggttaattcacg

SEQ ID NO: 4044106 - DNA, 25 bp, Homo sapien
atcggttaattcacggccacagccc

SEQ ID NO: 4044107 - DNA, 25 bp, Homo sapien
accagggcgtctccgcaaaccagcc

SEQ ID NO: 4044108 - DNA, 25 bp, Homo sapien
aaaccagggcgtctccgcaaaccag

SEQ ID NO: 4044109 - DNA, 25 bp, Homo sapien
ggcgtctccgcaaaccagcccagag

SEQ ID NO: 4044110 - DNA, 25 bp, Homo sapien
agggcgtctccgcaaaccagcccag

SEQ ID NO: 4044111 - DNA, 25 bp, Homo sapien
gtcggcggcgccgaagccccgctcc

SEQ ID NO: 4044112 - DNA, 25 bp, Homo sapien
gcctgcgcgtctgtctcgtccgcat

SEQ ID NO: 4044113 - DNA, 25 bp, Homo sapien
tgcacccgcgcgtcggcggcgccga

SEQ ID NO: 4044114 - DNA, 25 bp, Homo sapien
ccccgcctgcgcgtctgtctcgtcc

SEQ ID NO: 4044115 - DNA, 25 bp, Homo sapien
atgtgggactagaaggagacccatg

SEQ ID NO: 4044116 - DNA, 25 bp, Homo sapien
ccttctggaggctttgtaaatcatg

SEQ ID NO: 4044117 - DNA, 25 bp, Homo sapien
tctggaggctttgtaaatcatgaat

SEQ ID NO: 4044118 - DNA, 25 bp, Homo sapien
gagacccatgggttgtcatgcccag

SEQ ID NO: 4044119 - DNA, 25 bp, Homo sapien
gagagaaataagagggtccagttcc

SEQ ID NO: 4044120 - DNA, 25 bp, Homo sapien
gtggcccatgtatcactgagcacca

SEQ ID NO: 4044121 - DNA, 25 bp, Homo sapien
gatccaagcagtagggatacaccag

SEQ ID NO: 4044122 - DNA, 25 bp, Homo sapien
caaccaggcactggtgtagcgtcgg

SEQ ID NO: 4044123 - DNA, 25 bp, Homo sapien
ctgggagagctcttgtctgcaccag

SEQ ID NO: 4044124 - DNA, 25 bp, Homo sapien
ctcctgtccctttagggaataagag

SEQ ID NO: 4044125 - DNA, 25 bp, Homo sapien
ggcccatttggtgtgtacagcttct

SEQ ID NO: 4044126 - DNA, 25 bp, Homo sapien
taagagatcaagaagtggaaaagca

SEQ ID NO: 4044127 - DNA, 25 bp, Homo sapien
gcagcaccttgaagactttacagag

SEQ ID NO: 4044128 - DNA, 25 bp, Homo sapien
tagccgggtggctgatcagcagcac

SEQ ID NO: 4044129 - DNA, 25 bp, Homo sapien
gggtggaaacaatgatagagattct

SEQ ID NO: 4044130 - DNA, 25 bp, Homo sapien
tgtgcatgcacagacccggctgtag

SEQ ID NO: 4044131 - DNA, 25 bp, Homo sapien
aatgccaagacgctccggtgagtgg

SEQ ID NO: 4044132 - DNA, 25 bp, Homo sapien
tccaaaaagccgtgacagggagcct

SEQ ID NO: 4044133 - DNA, 25 bp, Homo sapien
gacctggacattaaccggcctggaa

SEQ ID NO: 4044134 - DNA, 25 bp, Homo sapien
caggagacaggccagtagcagaaac

SEQ ID NO: 4044135 - DNA, 25 bp, Homo sapien
gacacccaggaatagaatgctctct

SEQ ID NO: 4044136 - DNA, 25 bp, Homo sapien
ggacacccaggaatagaatgctctc

SEQ ID NO: 4044137 - DNA, 25 bp, Homo sapien
aggacacccaggaatagaatgctct

SEQ ID NO: 4044138 - DNA, 25 bp, Homo sapien
gcacagcaagcatttgcgaggtgaa

SEQ ID NO: 4044139 - DNA, 25 bp, Homo sapien
cacagggaggctccgcaggagcaca

SEQ ID NO: 4044140 - DNA, 25 bp, Homo sapien
ggaagaacattgtcaggcgctgaga

SEQ ID NO: 4044141 - DNA, 25 bp, Homo sapien
tcaggcgctgagacgcgttctcagg

SEQ ID NO: 4044142 - DNA, 25 bp, Homo sapien
gcttccttgggccagagatccttct

SEQ ID NO: 4044143 - DNA, 25 bp, Homo sapien
attctgtatgcaggagactgaggcc

SEQ ID NO: 4044144 - DNA, 25 bp, Homo sapien
gaatggtgaggggataagcacccca

SEQ ID NO: 4044145 - DNA, 25 bp, Homo sapien
ccccattctgtatgcaggagactga

SEQ ID NO: 4044146 - DNA, 25 bp, Homo sapien
cacataggtggccaggagagttccg

SEQ ID NO: 4044147 - DNA, 25 bp, Homo sapien
tctaggttgtcatgagctgcgtggc

SEQ ID NO: 4044148 - DNA, 25 bp, Homo sapien
gataggaaacagaccctccttagag

SEQ ID NO: 4044149 - DNA, 25 bp, Homo sapien
tgcgtacttgaaggaccgaaggctg

SEQ ID NO: 4044150 - DNA, 25 bp, Homo sapien
tggccgctttgcttgcagcctactt

SEQ ID NO: 4044151 - DNA, 25 bp, Homo sapien
agccctttgtgccttcgaggaacgg

SEQ ID NO: 4044152 - DNA, 25 bp, Homo sapien
ttgaagcccttgatcccgctgacga

SEQ ID NO: 4044153 - DNA, 25 bp, Homo sapien
cgaggaacggttcgctggccgcttt

SEQ ID NO: 4044154 - DNA, 25 bp, Homo sapien
tttatttagtcaactggcccaaggc

SEQ ID NO: 4044155 - DNA, 25 bp, Homo sapien
cccaaaacgggagagagcagtgaaa

SEQ ID NO: 4044156 - DNA, 25 bp, Homo sapien
ccaaggcagcgaggcttctacagtc

SEQ ID NO: 4044157 - DNA, 25 bp, Homo sapien
gaagcccaggactgcgttgtatgct

SEQ ID NO: 4044158 - DNA, 25 bp, Homo sapien
tctccgcacaaagtaaagagcctaa

SEQ ID NO: 4044159 - DNA, 25 bp, Homo sapien
tctgaggctgagaggacacctatat

SEQ ID NO: 4044160 - DNA, 25 bp, Homo sapien
tacatcgggtcctcccatgtgtggt

SEQ ID NO: 4044161 - DNA, 25 bp, Homo sapien
agcctggtggcgtgttagtttctgc

SEQ ID NO: 4044162 - DNA, 25 bp, Homo sapien
tggtgtgctaggattaactcaggta

SEQ ID NO: 4044163 - DNA, 25 bp, Homo sapien
taataagctgtgtaactggtactcg

SEQ ID NO: 4044164 - DNA, 25 bp, Homo sapien
cagttttaaccaaagccagtggaca

SEQ ID NO: 4044165 - DNA, 25 bp, Homo sapien
tcgatagttacccaaagttcagtct

SEQ ID NO: 4044166 - DNA, 25 bp, Homo sapien
taaccagataaacctgctccagcat

SEQ ID NO: 4044167 - DNA, 25 bp, Homo sapien
aacatgccagcttagtagtaggaat

SEQ ID NO: 4044168 - DNA, 25 bp, Homo sapien
agaagttagttggtggttccccatg

SEQ ID NO: 4044169 - DNA, 25 bp, Homo sapien
taaactcagcttaaccagataaacc

SEQ ID NO: 4044170 - DNA, 25 bp, Homo sapien
atacaagaagtaggggagctgaagc

SEQ ID NO: 4044171 - DNA, 25 bp, Homo sapien
tacacatacaagaagtaggggagct

SEQ ID NO: 4044172 - DNA, 25 bp, Homo sapien
cacatacaagaagtaggggagctga

SEQ ID NO: 4044173 - DNA, 25 bp, Homo sapien
tgcatacacatacaagaagtagggg

SEQ ID NO: 4044174 - DNA, 25 bp, Homo sapien
gacaggaggctgatcccaacagtag

SEQ ID NO: 4044175 - DNA, 25 bp, Homo sapien
tatgaactcggtgcagtgagacctc

SEQ ID NO: 4044176 - DNA, 25 bp, Homo sapien
gaagacatggagctatgccctcaga

SEQ ID NO: 4044177 - DNA, 25 bp, Homo sapien
caggcggctgaggtgtataatcccc

SEQ ID NO: 4044178 - DNA, 25 bp, Homo sapien
tgtcccttccattacttgctgggcc

SEQ ID NO: 4044179 - DNA, 25 bp, Homo sapien
ccatgcagcactgtgcgaccgactg

SEQ ID NO: 4044180 - DNA, 25 bp, Homo sapien
gcagcactgtgcgaccgactggaat

SEQ ID NO: 4044181 - DNA, 25 bp, Homo sapien
agcactgtgcgaccgactggaataa

SEQ ID NO: 4044182 - DNA, 25 bp, Homo sapien
taaacgctgggtttttaatcagctc

SEQ ID NO: 4044183 - DNA, 25 bp, Homo sapien
catggttccagaacttaaacgctgg

SEQ ID NO: 4044184 - DNA, 25 bp, Homo sapien
tcaatgaaggtaataagaagacccc

SEQ ID NO: 4044185 - DNA, 25 bp, Homo sapien
cagtgtacaaattcatggttccaga

SEQ ID NO: 4044186 - DNA, 25 bp, Homo sapien
tttaaaaaataagctgctcgcttac

SEQ ID NO: 4044187 - DNA, 25 bp, Homo sapien
gatgaaagggaggagatccttttga

SEQ ID NO: 4044188 - DNA, 25 bp, Homo sapien
agggaggagatccttttgaagcatt

SEQ ID NO: 4044189 - DNA, 25 bp, Homo sapien
aaagatgaaagggaggagatccttt

SEQ ID NO: 4044190 - DNA, 25 bp, Homo sapien
tattggcctctgcaaaaaggtacag

SEQ ID NO: 4044191 - DNA, 25 bp, Homo sapien
ggctatttgggtaccggagctgatt

SEQ ID NO: 4044192 - DNA, 25 bp, Homo sapien
cttggatggcttccgtattggcctc

SEQ ID NO: 4044193 - DNA, 25 bp, Homo sapien
ggtacagcatggtgcaactgaagta

SEQ ID NO: 4044194 - DNA, 25 bp, Homo sapien
gccaacatgggaagacagttctaac

SEQ ID NO: 4044195 - DNA, 25 bp, Homo sapien
tgggaccccaaagagttctcatttc

SEQ ID NO: 4044196 - DNA, 25 bp, Homo sapien
cccactatgtgctaatgtaagaaac

SEQ ID NO: 4044197 - DNA, 25 bp, Homo sapien
ttaggacttagtctgaaaggccaac

SEQ ID NO: 4044198 - DNA, 25 bp, Homo sapien
gcaatggcctgagtcccgacataga

SEQ ID NO: 4044199 - DNA, 25 bp, Homo sapien
cttgttgtggatgtgcgcaatggcc

SEQ ID NO: 4044200 - DNA, 25 bp, Homo sapien
gaggttgtagcgattcccaggttca

SEQ ID NO: 4044201 - DNA, 25 bp, Homo sapien
ggtgctcattgaaggtgtgctgccc

SEQ ID NO: 4044202 - DNA, 25 bp, Homo sapien
aaaacagaactccttatgcttactc

SEQ ID NO: 4044203 - DNA, 25 bp, Homo sapien
aatgagcaaaacagaactccttatg

SEQ ID NO: 4044204 - DNA, 25 bp, Homo sapien
gcaaaacagaactccttatgcttac

SEQ ID NO: 4044205 - DNA, 25 bp, Homo sapien
gagcaaaacagaactccttatgctt

SEQ ID NO: 4044206 - DNA, 25 bp, Homo sapien
gtgctttatatggaagacgtagatg

SEQ ID NO: 4044207 - DNA, 25 bp, Homo sapien
ggaagacgtagatgagttttaagcc

SEQ ID NO: 4044208 - DNA, 25 bp, Homo sapien
gacgtagatgagttttaagccaaac

SEQ ID NO: 4044209 - DNA, 25 bp, Homo sapien
agaaagtgctttatatggaagacgt

SEQ ID NO: 4044210 - DNA, 25 bp, Homo sapien
gactggtgatcgagttttaagatag

SEQ ID NO: 4044211 - DNA, 25 bp, Homo sapien
gagttttaagataggaatccaaatc

SEQ ID NO: 4044212 - DNA, 25 bp, Homo sapien
aggaaagtgactggtgatcgagttt

SEQ ID NO: 4044213 - DNA, 25 bp, Homo sapien
ctgtaggttgctgcgcagatcagac

SEQ ID NO: 4044214 - DNA, 25 bp, Homo sapien
aatagcttgaaccagcgaaggggag

SEQ ID NO: 4044215 - DNA, 25 bp, Homo sapien
ctcatgtttcttggaaaggcactca

SEQ ID NO: 4044216 - DNA, 25 bp, Homo sapien
aggcactcaggatcaaatttcttaa

SEQ ID NO: 4044217 - DNA, 25 bp, Homo sapien
aatgggtcggggagcctcatgtttc

SEQ ID NO: 4044218 - DNA, 25 bp, Homo sapien
ctttagattaggagtgaatgggtcg

SEQ ID NO: 4044219 - DNA, 25 bp, Homo sapien
tcatgcaaaagaaccagcagcactc

SEQ ID NO: 4044220 - DNA, 25 bp, Homo sapien
ggtgggatcacatcacagaacccat

SEQ ID NO: 4044221 - DNA, 25 bp, Homo sapien
gaacccataatggtaatcacaaagg

SEQ ID NO: 4044222 - DNA, 25 bp, Homo sapien
ggaactctgggaaatcatgcaaaag

SEQ ID NO: 4044223 - DNA, 25 bp, Homo sapien
tatttgaataaatcaatcagtagct

SEQ ID NO: 4044224 - DNA, 25 bp, Homo sapien
taaggaaaggcgctaaatatttgaa

SEQ ID NO: 4044225 - DNA, 25 bp, Homo sapien
cacatttctaaggaaaggcgctaaa

SEQ ID NO: 4044226 - DNA, 25 bp, Homo sapien
gtagctgtgcatacataggccaccc

SEQ ID NO: 4044227 - DNA, 25 bp, Homo sapien
tacatgagtcataattatactcagc

SEQ ID NO: 4044228 - DNA, 25 bp, Homo sapien
tgtttttcagccactacaagtcgcc

SEQ ID NO: 4044229 - DNA, 25 bp, Homo sapien
agatcggcattaaaggccaggcacg

SEQ ID NO: 4044230 - DNA, 25 bp, Homo sapien
cccaagcagctacactgacttatct

SEQ ID NO: 4044231 - DNA, 25 bp, Homo sapien
catctacaggagataaactgcagcc

SEQ ID NO: 4044232 - DNA, 25 bp, Homo sapien
tcatctacaggagataaactgcagc

SEQ ID NO: 4044233 - DNA, 25 bp, Homo sapien
atctacaggagataaactgcagcca

SEQ ID NO: 4044234 - DNA, 25 bp, Homo sapien
tctacaggagataaactgcagccac

SEQ ID NO: 4044235 - DNA, 25 bp, Homo sapien
tatccgatgggaaatcagttcaagc

SEQ ID NO: 4044236 - DNA, 25 bp, Homo sapien
ccaggcatatacaaagccaggagct

SEQ ID NO: 4044237 - DNA, 25 bp, Homo sapien
ggcgtatgtgccagcattcttgcaa

SEQ ID NO: 4044238 - DNA, 25 bp, Homo sapien
tggtaggcctcaagatgtggaatgt

SEQ ID NO: 4044239 - DNA, 25 bp, Homo sapien
aagctgtaagtgtctggaaattaat

SEQ ID NO: 4044240 - DNA, 25 bp, Homo sapien
tgtaagtgtctggaaattaatggtt

SEQ ID NO: 4044241 - DNA, 25 bp, Homo sapien
ctgtaagtgtctggaaattaatggt

SEQ ID NO: 4044242 - DNA, 25 bp, Homo sapien
gctgtaagtgtctggaaattaatgg

SEQ ID NO: 4044243 - DNA, 25 bp, Homo sapien
gaagttgctgaaattcactctgacg

SEQ ID NO: 4044244 - DNA, 25 bp, Homo sapien
gagaactcccactactataccaagg

SEQ ID NO: 4044245 - DNA, 25 bp, Homo sapien
cgaacatcatgatcctgaaggagaa

SEQ ID NO: 4044246 - DNA, 25 bp, Homo sapien
tgaaggagaactcccactactatac

SEQ ID NO: 4044247 - DNA, 25 bp, Homo sapien
tctatcagcaggaggcacgtctagc

SEQ ID NO: 4044248 - DNA, 25 bp, Homo sapien
tgctggcagccgatagggtcataaa

SEQ ID NO: 4044249 - DNA, 25 bp, Homo sapien
gcactatattctaagacagagcggg

SEQ ID NO: 4044250 - DNA, 25 bp, Homo sapien
taaattggtctgactccgccttcag

SEQ ID NO: 4044251 - DNA, 25 bp, Homo sapien
tagcacttggctcggatcatggtgg

SEQ ID NO: 4044252 - DNA, 25 bp, Homo sapien
cctgagtgtttcacgagcagtgcaa

SEQ ID NO: 4044253 - DNA, 25 bp, Homo sapien
tgcaatgagtcgaacaaaggcatcc

SEQ ID NO: 4044254 - DNA, 25 bp, Homo sapien
tcagtacacagacgaaagaaccttg

SEQ ID NO: 4044255 - DNA, 25 bp, Homo sapien
tcggtcttcagtattccttgctggt

SEQ ID NO: 4044256 - DNA, 25 bp, Homo sapien
ggtcttcagtattccttgctggtgc

SEQ ID NO: 4044257 - DNA, 25 bp, Homo sapien
tcttcagtattccttgctggtgcat

SEQ ID NO: 4044258 - DNA, 25 bp, Homo sapien
catcggtcttcagtattccttgctg

SEQ ID NO: 4044259 - DNA, 25 bp, Homo sapien
cctacttatgttgaataaaaagcac

SEQ ID NO: 4044260 - DNA, 25 bp, Homo sapien
gagaaagctttggtactgtcgcggc

SEQ ID NO: 4044261 - DNA, 25 bp, Homo sapien
gatcgcactacttccatcagctggg

SEQ ID NO: 4044262 - DNA, 25 bp, Homo sapien
atgcatcataaagtttgggcctcca

SEQ ID NO: 4044263 - DNA, 25 bp, Homo sapien
ggcctccatgagcacgatcaatcat

SEQ ID NO: 4044264 - DNA, 25 bp, Homo sapien
tttcaatggtgtggaacagatctgc

SEQ ID NO: 4044265 - DNA, 25 bp, Homo sapien
tggagcattgcctctggaatgagca

SEQ ID NO: 4044266 - DNA, 25 bp, Homo sapien
tactaactgcatagcaaatgccaca

SEQ ID NO: 4044267 - DNA, 25 bp, Homo sapien
tcagtaacatgagcaacactccttt

SEQ ID NO: 4044268 - DNA, 25 bp, Homo sapien
tgcgctaggtgaagatcatactgct

SEQ ID NO: 4044269 - DNA, 25 bp, Homo sapien
cacagcctccacattatatttatat

SEQ ID NO: 4044270 - DNA, 25 bp, Homo sapien
gctgcatattaaccaaatgattgcg

SEQ ID NO: 4044271 - DNA, 25 bp, Homo sapien
gattgcgaattagcagctccacagc

SEQ ID NO: 4044272 - DNA, 25 bp, Homo sapien
tctgtttgttgcaccatggagaccc

SEQ ID NO: 4044273 - DNA, 25 bp, Homo sapien
cttttaggaccaagaggtggcattc

SEQ ID NO: 4044274 - DNA, 25 bp, Homo sapien
caccacttgtggcatctagtaagcc

SEQ ID NO: 4044275 - DNA, 25 bp, Homo sapien
cctgtagcgcagcagaaggtcagca

SEQ ID NO: 4044276 - DNA, 25 bp, Homo sapien
gagacttcgaagagcctgagcttga

SEQ ID NO: 4044277 - DNA, 25 bp, Homo sapien
ctgagcttgagggttcatggccaaa

SEQ ID NO: 4044278 - DNA, 25 bp, Homo sapien
tccaagagcagctatggcatcccga

SEQ ID NO: 4044279 - DNA, 25 bp, Homo sapien
taaatctgagctacatcatctgttg

SEQ ID NO: 4044280 - DNA, 25 bp, Homo sapien
gaagccaggaacattgcgtgcaaac

SEQ ID NO: 4044281 - DNA, 25 bp, Homo sapien
aatcccgtgggctgacttaagtcat

SEQ ID NO: 4044282 - DNA, 25 bp, Homo sapien
ttaagtcatttgtaggtaagaagcc

SEQ ID NO: 4044283 - DNA, 25 bp, Homo sapien
cgtgcaaactcttcgtaaacagcca

SEQ ID NO: 4044284 - DNA, 25 bp, Homo sapien
gcatccgttcagcttgatatgttaa

SEQ ID NO: 4044285 - DNA, 25 bp, Homo sapien
tcagcctgatttgctctggcatccg

SEQ ID NO: 4044286 - DNA, 25 bp, Homo sapien
gatatgttaaaacaacaggatcaca

SEQ ID NO: 4044287 - DNA, 25 bp, Homo sapien
cagtatctgcgtccttcttgcctag

SEQ ID NO: 4044288 - DNA, 25 bp, Homo sapien
gtcctgagctaattgagcagctgcc

SEQ ID NO: 4044289 - DNA, 25 bp, Homo sapien
aattgtcctgagctaattgagcagc

SEQ ID NO: 4044290 - DNA, 25 bp, Homo sapien
cctgagctaattgagcagctgcctg

SEQ ID NO: 4044291 - DNA, 25 bp, Homo sapien
tcctgagctaattgagcagctgcct

SEQ ID NO: 4044292 - DNA, 25 bp, Homo sapien
caaatatttgggtatctactatctg

SEQ ID NO: 4044293 - DNA, 25 bp, Homo sapien
acaaatatttgggtatctactatct

SEQ ID NO: 4044294 - DNA, 25 bp, Homo sapien
cacagacatgatgctttgcctcaca

SEQ ID NO: 4044295 - DNA, 25 bp, Homo sapien
caagcagtaatacgttttgtaccta

SEQ ID NO: 4044296 - DNA, 25 bp, Homo sapien
gcccagtgccatatatagacaaaga

SEQ ID NO: 4044297 - DNA, 25 bp, Homo sapien
taagaataagtggtaacgcccagtg

SEQ ID NO: 4044298 - DNA, 25 bp, Homo sapien
taattgatcgatccaccacaggatg

SEQ ID NO: 4044299 - DNA, 25 bp, Homo sapien
gccattccagctgtcaagttacgca

SEQ ID NO: 4044300 - DNA, 25 bp, Homo sapien
ggacagcccgttcaattgcctgacg

SEQ ID NO: 4044301 - DNA, 25 bp, Homo sapien
gagattcctccgaatccagggcaaa

SEQ ID NO: 4044302 - DNA, 25 bp, Homo sapien
gattcagagtaatgtgtggtgccaa

SEQ ID NO: 4044303 - DNA, 25 bp, Homo sapien
atgtcgtggtagctgtactgtggct

SEQ ID NO: 4044304 - DNA, 25 bp, Homo sapien
tggaaccgtggctgtacaagtggtg

SEQ ID NO: 4044305 - DNA, 25 bp, Homo sapien
cccgcaagggaatagacattgatgt

SEQ ID NO: 4044306 - DNA, 25 bp, Homo sapien
tccaggttttagctcattgatgtct

SEQ ID NO: 4044307 - DNA, 25 bp, Homo sapien
ttgatgtctaatgcaaggttcttgc

SEQ ID NO: 4044308 - DNA, 25 bp, Homo sapien
gagaacctcgatttcaaacttcaag

SEQ ID NO: 4044309 - DNA, 25 bp, Homo sapien
tcatctaaattcttcaggcgatctt

SEQ ID NO: 4044310 - DNA, 25 bp, Homo sapien
tgtagctcagctaatacattcataa

SEQ ID NO: 4044311 - DNA, 25 bp, Homo sapien
ctttaagtcatgctcctgatgtagc

SEQ ID NO: 4044312 - DNA, 25 bp, Homo sapien
tacattcataattgccattgtccaa

SEQ ID NO: 4044313 - DNA, 25 bp, Homo sapien
aagtcatgctcctgatgtagctcag

SEQ ID NO: 4044314 - DNA, 25 bp, Homo sapien
cataagcctctagcagcaatgattt

SEQ ID NO: 4044315 - DNA, 25 bp, Homo sapien
cacactacgaatgctagattctaag

SEQ ID NO: 4044316 - DNA, 25 bp, Homo sapien
gactttggcaacaaagggcactaca

SEQ ID NO: 4044317 - DNA, 25 bp, Homo sapien
agagcaattcttgttgtcctttaac

SEQ ID NO: 4044318 - DNA, 25 bp, Homo sapien
gcagctttatcagaggtcaggagca

SEQ ID NO: 4044319 - DNA, 25 bp, Homo sapien
tgtttttagctaatgtgatcattcc

SEQ ID NO: 4044320 - DNA, 25 bp, Homo sapien
cgatctgagaaattggctgcagctt

SEQ ID NO: 4044321 - DNA, 25 bp, Homo sapien
ttcctagccaatgtcccaagttctt

SEQ ID NO: 4044322 - DNA, 25 bp, Homo sapien
tccttaactctatacagcaacagca

SEQ ID NO: 4044323 - DNA, 25 bp, Homo sapien
gcactacagcgtaaccaagaatggg

SEQ ID NO: 4044324 - DNA, 25 bp, Homo sapien
gccaggaattcttttgcactacagc

SEQ ID NO: 4044325 - DNA, 25 bp, Homo sapien
gggaatattcccatccacaggttta

SEQ ID NO: 4044326 - DNA, 25 bp, Homo sapien
cagaaccatcttgttaaattcagga

SEQ ID NO: 4044327 - DNA, 25 bp, Homo sapien
tttctgtaggtctcattcagaacca

SEQ ID NO: 4044328 - DNA, 25 bp, Homo sapien
ttctgtaggtctcattcagaaccat

SEQ ID NO: 4044329 - DNA, 25 bp, Homo sapien
gtttggctcaatactgactctcttc

SEQ ID NO: 4044330 - DNA, 25 bp, Homo sapien
gactctcttcataaccagatactgt

SEQ ID NO: 4044331 - DNA, 25 bp, Homo sapien
ggaagtttgaatacaggctatgaaa

SEQ ID NO: 4044332 - DNA, 25 bp, Homo sapien
tcttcagcgtgtcaaggaagtttga

SEQ ID NO: 4044333 - DNA, 25 bp, Homo sapien
tttgtgtcatatttgactgtgagag

SEQ ID NO: 4044334 - DNA, 25 bp, Homo sapien
caagcaacgtatctatatttgtagt

SEQ ID NO: 4044335 - DNA, 25 bp, Homo sapien
aataaaagcaattttctcctggata

SEQ ID NO: 4044336 - DNA, 25 bp, Homo sapien
tctctcagtttgatctgtggccaca

SEQ ID NO: 4044337 - DNA, 25 bp, Homo sapien
cagttggcctggtgaccgtaaccgt

SEQ ID NO: 4044338 - DNA, 25 bp, Homo sapien
tggcacatctttcttaaagctgact

SEQ ID NO: 4044339 - DNA, 25 bp, Homo sapien
accgttttagcaacagtggtagttg

SEQ ID NO: 4044340 - DNA, 25 bp, Homo sapien
tggtagttgttgaggtggttaccat

SEQ ID NO: 4044341 - DNA, 25 bp, Homo sapien
ctaacttgaccagcaagaggagctt

SEQ ID NO: 4044342 - DNA, 25 bp, Homo sapien
aacttgaccagcaagaggagctttt

SEQ ID NO: 4044343 - DNA, 25 bp, Homo sapien
taacttgaccagcaagaggagcttt

SEQ ID NO: 4044344 - DNA, 25 bp, Homo sapien
acttgaccagcaagaggagcttttg

SEQ ID NO: 4044345 - DNA, 25 bp, Homo sapien
ctgagcctgggcctgagccagtgca

SEQ ID NO: 4044346 - DNA, 25 bp, Homo sapien
gcctgggcctgagccagtgcaatac

SEQ ID NO: 4044347 - DNA, 25 bp, Homo sapien
gagcctgggcctgagccagtgcaat

SEQ ID NO: 4044348 - DNA, 25 bp, Homo sapien
ctggaacctgggcctgagcctgggc

SEQ ID NO: 4044349 - DNA, 25 bp, Homo sapien
agccttgcattttcacaggaggatc

SEQ ID NO: 4044350 - DNA, 25 bp, Homo sapien
tcacaggaggatctctagactgctg

SEQ ID NO: 4044351 - DNA, 25 bp, Homo sapien
tagactgctgtccatactcaatata

SEQ ID NO: 4044352 - DNA, 25 bp, Homo sapien
ggttgtgatagagccttgcattttc

SEQ ID NO: 4044353 - DNA, 25 bp, Homo sapien
aatgatgtggaaattgcataaagtg

SEQ ID NO: 4044354 - DNA, 25 bp, Homo sapien
taaatgatgtggaaattgcataaag

SEQ ID NO: 4044355 - DNA, 25 bp, Homo sapien
ggaaattgcataaagtgactgatag

SEQ ID NO: 4044356 - DNA, 25 bp, Homo sapien
aattgcataaagtgactgatagaag

SEQ ID NO: 4044357 - DNA, 25 bp, Homo sapien
gaacatatcgtagagccagacctag

SEQ ID NO: 4044358 - DNA, 25 bp, Homo sapien
caattataccaccaaataggcaggc

SEQ ID NO: 4044359 - DNA, 25 bp, Homo sapien
gacctagtgccatgtaagtgaccag

SEQ ID NO: 4044360 - DNA, 25 bp, Homo sapien
ggatccaaaaggcttgcgtaaggct

SEQ ID NO: 4044361 - DNA, 25 bp, Homo sapien
tatatattcgctggaaatagctgtt

SEQ ID NO: 4044362 - DNA, 25 bp, Homo sapien
agctgtttgcttcatcatctatctc

SEQ ID NO: 4044363 - DNA, 25 bp, Homo sapien
tcaacagacatggttggatgtggtg

SEQ ID NO: 4044364 - DNA, 25 bp, Homo sapien
gatgtggtggatgattatatattcg

SEQ ID NO: 4044365 - DNA, 25 bp, Homo sapien
aaagggtcgttattcactgcaggga

SEQ ID NO: 4044366 - DNA, 25 bp, Homo sapien
cagggagtccaagagcaccagttcc

SEQ ID NO: 4044367 - DNA, 25 bp, Homo sapien
gctgattcagtccagaggtgcccag

SEQ ID NO: 4044368 - DNA, 25 bp, Homo sapien
gagcaccagttcctataccagtcag

SEQ ID NO: 4044369 - DNA, 25 bp, Homo sapien
caatgacaacatggaagtccttagg

SEQ ID NO: 4044370 - DNA, 25 bp, Homo sapien
actaggcagtaacggataatcccca

SEQ ID NO: 4044371 - DNA, 25 bp, Homo sapien
gaagcatacagtagcaacgctaact

SEQ ID NO: 4044372 - DNA, 25 bp, Homo sapien
gaaggccttaataagttcagtgacg

SEQ ID NO: 4044373 - DNA, 25 bp, Homo sapien
tcctccaataccactgaatgcagtg

SEQ ID NO: 4044374 - DNA, 25 bp, Homo sapien
gggcagctgaaccacctatactaag

SEQ ID NO: 4044375 - DNA, 25 bp, Homo sapien
tggaggaaaaccctgcatactctgg

SEQ ID NO: 4044376 - DNA, 25 bp, Homo sapien
cctatactaagagatgtcattccag

SEQ ID NO: 4044377 - DNA, 25 bp, Homo sapien
cacatcaggttcaaaggcagtgctt

SEQ ID NO: 4044378 - DNA, 25 bp, Homo sapien
gaagctacaaacaagacacatcagg

SEQ ID NO: 4044379 - DNA, 25 bp, Homo sapien
taacaagtcgttatgctctagcact

SEQ ID NO: 4044380 - DNA, 25 bp, Homo sapien
tctagcactgttgcttggcccgtga

SEQ ID NO: 4044381 - DNA, 25 bp, Homo sapien
tctaagctgctagcactaggaggac

SEQ ID NO: 4044382 - DNA, 25 bp, Homo sapien
ttctgatagctcctgagaaacactc

SEQ ID NO: 4044383 - DNA, 25 bp, Homo sapien
cataacattactgcaattggctacc

SEQ ID NO: 4044384 - DNA, 25 bp, Homo sapien
cttttggcataactccaggtggtgg

SEQ ID NO: 4044385 - DNA, 25 bp, Homo sapien
gagcacttttgggctggtctttttc

SEQ ID NO: 4044386 - DNA, 25 bp, Homo sapien
ggcaagtccgcccaaaatagaagga

SEQ ID NO: 4044387 - DNA, 25 bp, Homo sapien
cgcccaaaatagaaggacaccgtct

SEQ ID NO: 4044388 - DNA, 25 bp, Homo sapien
acattgtcgccaaagtttctggagg

SEQ ID NO: 4044389 - DNA, 25 bp, Homo sapien
aaaaagtcatacacgcctggataaa

SEQ ID NO: 4044390 - DNA, 25 bp, Homo sapien
aaaaaagtcatacacgcctggataa

SEQ ID NO: 4044391 - DNA, 25 bp, Homo sapien
aaaagtcatacacgcctggataaaa

SEQ ID NO: 4044392 - DNA, 25 bp, Homo sapien
caagtttgaggtattcacgacgtga

SEQ ID NO: 4044393 - DNA, 25 bp, Homo sapien
tggagtaccatttagcagcattgac

SEQ ID NO: 4044394 - DNA, 25 bp, Homo sapien
tgaagcaagtgcagcaaggtcaata

SEQ ID NO: 4044395 - DNA, 25 bp, Homo sapien
ctctcgaattttatctgtgagccac

SEQ ID NO: 4044396 - DNA, 25 bp, Homo sapien
catcaagtattcgagacaatttggc

SEQ ID NO: 4044397 - DNA, 25 bp, Homo sapien
tcctgggccacatcaagtattcgag

SEQ ID NO: 4044398 - DNA, 25 bp, Homo sapien
caagtcctgggccacatcaagtatt

SEQ ID NO: 4044399 - DNA, 25 bp, Homo sapien
ggccacatcaagtattcgagacaat

SEQ ID NO: 4044400 - DNA, 25 bp, Homo sapien
cctctcatgtaccattctgccattg

SEQ ID NO: 4044401 - DNA, 25 bp, Homo sapien
attctgccattgcatgcatgataag

SEQ ID NO: 4044402 - DNA, 25 bp, Homo sapien
ataagttggcgaattgagggagact

SEQ ID NO: 4044403 - DNA, 25 bp, Homo sapien
catgcatgataagttggcgaattga

SEQ ID NO: 4044404 - DNA, 25 bp, Homo sapien
cagttaattgtcctagagtggcaga

SEQ ID NO: 4044405 - DNA, 25 bp, Homo sapien
taactgaatgacctagaactaaggc

SEQ ID NO: 4044406 - DNA, 25 bp, Homo sapien
gcaggtagcctggttttcagaaaca

SEQ ID NO: 4044407 - DNA, 25 bp, Homo sapien
caatcacaagtgaggagatgcagct

SEQ ID NO: 4044408 - DNA, 25 bp, Homo sapien
ggagataagttcatggcgcaaggta

SEQ ID NO: 4044409 - DNA, 25 bp, Homo sapien
aatttgtagtaaggccaataccagc

SEQ ID NO: 4044410 - DNA, 25 bp, Homo sapien
cgcaaggtatgccaagaggtgttaa

SEQ ID NO: 4044411 - DNA, 25 bp, Homo sapien
tctggacagtgtttgatagggaagc

SEQ ID NO: 4044412 - DNA, 25 bp, Homo sapien
gctttcagaatatcagtggcaacag

SEQ ID NO: 4044413 - DNA, 25 bp, Homo sapien
tgtcatcctctggtggtgctttcag

SEQ ID NO: 4044414 - DNA, 25 bp, Homo sapien
catgtggcaatttctcgattgtcat

SEQ ID NO: 4044415 - DNA, 25 bp, Homo sapien
gaatatcagtggcaacagtatgaca

SEQ ID NO: 4044416 - DNA, 25 bp, Homo sapien
ttactgtcacgaatttgaaatccag

SEQ ID NO: 4044417 - DNA, 25 bp, Homo sapien
ggtctactgggaacacttccatacc

SEQ ID NO: 4044418 - DNA, 25 bp, Homo sapien
tccaaggtctatatatgaggtctac

SEQ ID NO: 4044419 - DNA, 25 bp, Homo sapien
gaaatccaggatggtccagttcata

SEQ ID NO: 4044420 - DNA, 25 bp, Homo sapien
atcactccagatcccactgcccgga

SEQ ID NO: 4044421 - DNA, 25 bp, Homo sapien
tcccactgcccggagcagaaatact

SEQ ID NO: 4044422 - DNA, 25 bp, Homo sapien
gaacgtcaatcaagacttctacatt

SEQ ID NO: 4044423 - DNA, 25 bp, Homo sapien
gttctttaagaacgtcaatcaagac

SEQ ID NO: 4044424 - DNA, 25 bp, Homo sapien
gtgacctcccgaacaccaaactgca

SEQ ID NO: 4044425 - DNA, 25 bp, Homo sapien
aaaacccttgcaacctgggcagctg

SEQ ID NO: 4044426 - DNA, 25 bp, Homo sapien
tcctgaatgagttcgagccatcatt

SEQ ID NO: 4044427 - DNA, 25 bp, Homo sapien
caaactgcacgattatattgcgaca

SEQ ID NO: 4044428 - DNA, 25 bp, Homo sapien
tttagctacccctccggaatcaggc

SEQ ID NO: 4044429 - DNA, 25 bp, Homo sapien
tcaggcaggatcctgtccattagaa

SEQ ID NO: 4044430 - DNA, 25 bp, Homo sapien
ttcagggtataaaagtggtgcgagc

SEQ ID NO: 4044431 - DNA, 25 bp, Homo sapien
tcagccaaagagctctccatcatgg

SEQ ID NO: 4044432 - DNA, 25 bp, Homo sapien
taagaacgcagaagatctggaagct

SEQ ID NO: 4044433 - DNA, 25 bp, Homo sapien
tctgcgcagcgtcttaagaaaagcg

SEQ ID NO: 4044434 - DNA, 25 bp, Homo sapien
tgacgtctgcgtcaatgtaagaacg

SEQ ID NO: 4044435 - DNA, 25 bp, Homo sapien
ggtgtaggacctctattgctatatc

SEQ ID NO: 4044436 - DNA, 25 bp, Homo sapien
gaagaattcaacagggcaaggccaa

SEQ ID NO: 4044437 - DNA, 25 bp, Homo sapien
aagaattcaacagggcaaggccaaa

SEQ ID NO: 4044438 - DNA, 25 bp, Homo sapien
aatttgagcactttactcagctggg

SEQ ID NO: 4044439 - DNA, 25 bp, Homo sapien
taatttgagcactttactcagctgg

SEQ ID NO: 4044440 - DNA, 25 bp, Homo sapien
cttctgatagtgcaatggattatca

SEQ ID NO: 4044441 - DNA, 25 bp, Homo sapien
ttatcaatggcataggacagcgtcg

SEQ ID NO: 4044442 - DNA, 25 bp, Homo sapien
gatagtgcaatggattatcaatggc

SEQ ID NO: 4044443 - DNA, 25 bp, Homo sapien
ggacagcgtcgagataaaatttggc

SEQ ID NO: 4044444 - DNA, 25 bp, Homo sapien
tttgtaatcagcaacgcacactcct

SEQ ID NO: 4044445 - DNA, 25 bp, Homo sapien
tgtaatcagcaacgcacactcctga

SEQ ID NO: 4044446 - DNA, 25 bp, Homo sapien
taatcagcaacgcacactcctgaat

SEQ ID NO: 4044447 - DNA, 25 bp, Homo sapien
atcagcaacgcacactcctgaatca

SEQ ID NO: 4044448 - DNA, 25 bp, Homo sapien
tgattttcattagcactaatcatca

SEQ ID NO: 4044449 - DNA, 25 bp, Homo sapien
atgattttcattagcactaatcatc

SEQ ID NO: 4044450 - DNA, 25 bp, Homo sapien
gattttcattagcactaatcatcat

SEQ ID NO: 4044451 - DNA, 25 bp, Homo sapien
aaatgattttcattagcactaatca

SEQ ID NO: 4044452 - DNA, 25 bp, Homo sapien
tttgccactgcttttaccatcgcca

SEQ ID NO: 4044453 - DNA, 25 bp, Homo sapien
cacatgcgaaaataggcagcgtaat

SEQ ID NO: 4044454 - DNA, 25 bp, Homo sapien
gcagcgtaataaatgcctgtctgcc

SEQ ID NO: 4044455 - DNA, 25 bp, Homo sapien
cctcaggaccgtgccgattcacaat

SEQ ID NO: 4044456 - DNA, 25 bp, Homo sapien
tggatttatagtccaacttcaaagc

SEQ ID NO: 4044457 - DNA, 25 bp, Homo sapien
ggaagttaagaaagaccatctctac

SEQ ID NO: 4044458 - DNA, 25 bp, Homo sapien
catgataataacatgaaagctgtct

SEQ ID NO: 4044459 - DNA, 25 bp, Homo sapien
gatatacacctataatttccagcta

SEQ ID NO: 4044460 - DNA, 25 bp, Homo sapien
gccaaatggagggaaggaccacttc

SEQ ID NO: 4044461 - DNA, 25 bp, Homo sapien
cacagaaaggtatcaaaggcagtct

SEQ ID NO: 4044462 - DNA, 25 bp, Homo sapien
gaaatgaggactagtccccagagaa

SEQ ID NO: 4044463 - DNA, 25 bp, Homo sapien
aataacctgccccactgtatcatgg

SEQ ID NO: 4044464 - DNA, 25 bp, Homo sapien
ccactgcacaggagggtgtgatggt

SEQ ID NO: 4044465 - DNA, 25 bp, Homo sapien
ctgcacaggagggtgtgatggtggc

SEQ ID NO: 4044466 - DNA, 25 bp, Homo sapien
acaggagggtgtgatggtggcccac

SEQ ID NO: 4044467 - DNA, 25 bp, Homo sapien
gcacaggagggtgtgatggtggccc

SEQ ID NO: 4044468 - DNA, 25 bp, Homo sapien
ccatgaccagcaagggcaagggtct

SEQ ID NO: 4044469 - DNA, 25 bp, Homo sapien
aagacaacccatgtgaagcagtcga

SEQ ID NO: 4044470 - DNA, 25 bp, Homo sapien
caaggctctgataaaggatactcca

SEQ ID NO: 4044471 - DNA, 25 bp, Homo sapien
tcatgaaaaacccagacatgaagtt

SEQ ID NO: 4044472 - DNA, 25 bp, Homo sapien
ggttaaattgtccaccaggtagctg

SEQ ID NO: 4044473 - DNA, 25 bp, Homo sapien
tgctggctggctcggtaatttttct

SEQ ID NO: 4044474 - DNA, 25 bp, Homo sapien
gatttgagacaaggccagcgagagc

SEQ ID NO: 4044475 - DNA, 25 bp, Homo sapien
tcttggttaaattgtccaccaggta

SEQ ID NO: 4044476 - DNA, 25 bp, Homo sapien
gagcccggcgcaaaatcaccattat

SEQ ID NO: 4044477 - DNA, 25 bp, Homo sapien
tctggtatctgtataatatcttcag

SEQ ID NO: 4044478 - DNA, 25 bp, Homo sapien
ttctttgtaattaggctatatctgg

SEQ ID NO: 4044479 - DNA, 25 bp, Homo sapien
tattcccctttagtcacctcagagg

SEQ ID NO: 4044480 - DNA, 25 bp, Homo sapien
ggtttgtggaaggaacattcatctc

SEQ ID NO: 4044481 - DNA, 25 bp, Homo sapien
aaggtttgtggaaggaacattcatc

SEQ ID NO: 4044482 - DNA, 25 bp, Homo sapien
aggtttgtggaaggaacattcatct

SEQ ID NO: 4044483 - DNA, 25 bp, Homo sapien
ttaaggtttgtggaaggaacattca

SEQ ID NO: 4044484 - DNA, 25 bp, Homo sapien
aaaactatcaactgaaagcctaaat

SEQ ID NO: 4044485 - DNA, 25 bp, Homo sapien
ttttctccaggcaatgaccaattct

SEQ ID NO: 4044486 - DNA, 25 bp, Homo sapien
tctccaggcaatgaccaattcttta

SEQ ID NO: 4044487 - DNA, 25 bp, Homo sapien
cataaagtggcaaaccatgtaataa

SEQ ID NO: 4044488 - DNA, 25 bp, Homo sapien
ttacttcaacattactgtaatattt

SEQ ID NO: 4044489 - DNA, 25 bp, Homo sapien
cattactgtaatatttattgtgaga

SEQ ID NO: 4044490 - DNA, 25 bp, Homo sapien
tacttcaacattactgtaatattta

SEQ ID NO: 4044491 - DNA, 25 bp, Homo sapien
ctgtaatatttattgtgagatatac

SEQ ID NO: 4044492 - DNA, 25 bp, Homo sapien
agttgactgatagcttggcaacttc

SEQ ID NO: 4044493 - DNA, 25 bp, Homo sapien
tggcaacttctaggtagtttctgca

SEQ ID NO: 4044494 - DNA, 25 bp, Homo sapien
taagatccttagaatggtaagtttc

SEQ ID NO: 4044495 - DNA, 25 bp, Homo sapien
cttctaagatccttagaatggtaag

SEQ ID NO: 4044496 - DNA, 25 bp, Homo sapien
tagtatctgtgagccctcttgggtg

SEQ ID NO: 4044497 - DNA, 25 bp, Homo sapien
taatctacaaagcttactcctcggg

SEQ ID NO: 4044498 - DNA, 25 bp, Homo sapien
actcctcggggagttagtatctgtg

SEQ ID NO: 4044499 - DNA, 25 bp, Homo sapien
ttaatctacaaagcttactcctcgg

SEQ ID NO: 4044500 - DNA, 25 bp, Homo sapien
gccttgaggcctacaagtgctcagc

SEQ ID NO: 4044501 - DNA, 25 bp, Homo sapien
tgaggcctacaagtgctcagctcac

SEQ ID NO: 4044502 - DNA, 25 bp, Homo sapien
ttgaggcctacaagtgctcagctca

SEQ ID NO: 4044503 - DNA, 25 bp, Homo sapien
cttgaggcctacaagtgctcagctc

SEQ ID NO: 4044504 - DNA, 25 bp, Homo sapien
agcgggacacttgtcctgggtgagc

SEQ ID NO: 4044505 - DNA, 25 bp, Homo sapien
gcgggacacttgtcctgggtgagca

SEQ ID NO: 4044506 - DNA, 25 bp, Homo sapien
cgggacacttgtcctgggtgagcag

SEQ ID NO: 4044507 - DNA, 25 bp, Homo sapien
tagcgggacacttgtcctgggtgag

SEQ ID NO: 4044508 - DNA, 25 bp, Homo sapien
ctactgcagacaccggaccgagtag

SEQ ID NO: 4044509 - DNA, 25 bp, Homo sapien
gcccaggcgcgcgagtggaacaaaa

SEQ ID NO: 4044510 - DNA, 25 bp, Homo sapien
gcgcgagtggaacaaaacctgtagc

SEQ ID NO: 4044511 - DNA, 25 bp, Homo sapien
ctgcagacaccggaccgagtaggtg

SEQ ID NO: 4044512 - DNA, 25 bp, Homo sapien
tggcagctccgagtacacggagaag

SEQ ID NO: 4044513 - DNA, 25 bp, Homo sapien
agagtggcagctccgagtacacgga

SEQ ID NO: 4044514 - DNA, 25 bp, Homo sapien
gcagctccgagtacacggagaagaa

SEQ ID NO: 4044515 - DNA, 25 bp, Homo sapien
gggagagtggcagctccgagtacac

SEQ ID NO: 4044516 - DNA, 25 bp, Homo sapien
tctctacaaaatggcgccggaggtc

SEQ ID NO: 4044517 - DNA, 25 bp, Homo sapien
ttaactccgcttgtttctctacaaa

SEQ ID NO: 4044518 - DNA, 25 bp, Homo sapien
tcggttaactccgcttgtttctcta

SEQ ID NO: 4044519 - DNA, 25 bp, Homo sapien
ttctctacaaaatggcgccggaggt

SEQ ID NO: 4044520 - DNA, 25 bp, Homo sapien
cccaggggaccggagtcagagccct

SEQ ID NO: 4044521 - DNA, 25 bp, Homo sapien
gggcttcacgtacttcccacctgcc

SEQ ID NO: 4044522 - DNA, 25 bp, Homo sapien
gagaggctgataacttcgatttggg

SEQ ID NO: 4044523 - DNA, 25 bp, Homo sapien
tgcgctcgaggcgagggccaatagg

SEQ ID NO: 4044524 - DNA, 25 bp, Homo sapien
gcaagccaggttgtgactagagttg

SEQ ID NO: 4044525 - DNA, 25 bp, Homo sapien
gccagaaagcaagccaggttgtgac

SEQ ID NO: 4044526 - DNA, 25 bp, Homo sapien
tccagtagacttcggggattcccaa

SEQ ID NO: 4044527 - DNA, 25 bp, Homo sapien
tgcatcctgggatgtgtagtcgcgc

SEQ ID NO: 4044528 - DNA, 25 bp, Homo sapien
cgcagaagtaatgcgtcttcgttcg

SEQ ID NO: 4044529 - DNA, 25 bp, Homo sapien
gaagtaatgcgtcttcgttcgtcgc

SEQ ID NO: 4044530 - DNA, 25 bp, Homo sapien
aatgcgtcttcgttcgtcgctgcgc

SEQ ID NO: 4044531 - DNA, 25 bp, Homo sapien
tcccatcgcagaagtaatgcgtctt

SEQ ID NO: 4044532 - DNA, 25 bp, Homo sapien
gaaggagcagtgcatgctgggggtt

SEQ ID NO: 4044533 - DNA, 25 bp, Homo sapien
tagaaggagcagtgcatgctggggg

SEQ ID NO: 4044534 - DNA, 25 bp, Homo sapien
ctagaaggagcagtgcatgctgggg

SEQ ID NO: 4044535 - DNA, 25 bp, Homo sapien
ggagcagtgcatgctgggggttgta

SEQ ID NO: 4044536 - DNA, 25 bp, Homo sapien
ttgttcataaaaagcctagcctcgg

SEQ ID NO: 4044537 - DNA, 25 bp, Homo sapien
tcatgcctcaaccagtcctgtggcc

SEQ ID NO: 4044538 - DNA, 25 bp, Homo sapien
gattttctggcaactggctgatcct

SEQ ID NO: 4044539 - DNA, 25 bp, Homo sapien
caactactgcatggccagccttgag

SEQ ID NO: 4044540 - DNA, 25 bp, Homo sapien
gaatcatgccataagcttctaggac

SEQ ID NO: 4044541 - DNA, 25 bp, Homo sapien
caggtggccacgttgaactggtatc

SEQ ID NO: 4044542 - DNA, 25 bp, Homo sapien
gtatcttcggaaaaggttgctcatg

SEQ ID NO: 4044543 - DNA, 25 bp, Homo sapien
tcatgtcagcagtgtaatgcccctg

SEQ ID NO: 4044544 - DNA, 25 bp, Homo sapien
caattcctctgatgtcccacatgat

SEQ ID NO: 4044545 - DNA, 25 bp, Homo sapien
ttgacaccaaggtcccaattcctct

SEQ ID NO: 4044546 - DNA, 25 bp, Homo sapien
cacatgatagaagctgccagcagag

SEQ ID NO: 4044547 - DNA, 25 bp, Homo sapien
ggccaacaccaattgacaccaaggt

SEQ ID NO: 4044548 - DNA, 25 bp, Homo sapien
ctgtgactctgaggagagggggtga

SEQ ID NO: 4044549 - DNA, 25 bp, Homo sapien
gactctgaggagagggggtgactca

SEQ ID NO: 4044550 - DNA, 25 bp, Homo sapien
gtgactctgaggagagggggtgact

SEQ ID NO: 4044551 - DNA, 25 bp, Homo sapien
actctgaggagagggggtgactcac

SEQ ID NO: 4044552 - DNA, 25 bp, Homo sapien
tcagagcagcagtagatgtgaggaa

SEQ ID NO: 4044553 - DNA, 25 bp, Homo sapien
ctccattcccatggaagtcacccca

SEQ ID NO: 4044554 - DNA, 25 bp, Homo sapien
cccatttcctgccatttctaaattg

SEQ ID NO: 4044555 - DNA, 25 bp, Homo sapien
ccatggaagtcaccccatttcctgc

SEQ ID NO: 4044556 - DNA, 25 bp, Homo sapien
cctgccatttctaaattggcctgca

SEQ ID NO: 4044557 - DNA, 25 bp, Homo sapien
ggcggcatcacctgtctctgactta

SEQ ID NO: 4044558 - DNA, 25 bp, Homo sapien
tcacctgtctctgacttaaggatgg

SEQ ID NO: 4044559 - DNA, 25 bp, Homo sapien
gtctctgacttaaggatggcagaga

SEQ ID NO: 4044560 - DNA, 25 bp, Homo sapien
ctgtctctgacttaaggatggcaga

SEQ ID NO: 4044561 - DNA, 25 bp, Homo sapien
caggggtgacacgtcataggtgctc

SEQ ID NO: 4044562 - DNA, 25 bp, Homo sapien
cattgcctgcaccttctcggttctt

SEQ ID NO: 4044563 - DNA, 25 bp, Homo sapien
acttttgcaggaaaggaagctcttt

SEQ ID NO: 4044564 - DNA, 25 bp, Homo sapien
tctcggttcttgagcctagacaggg

SEQ ID NO: 4044565 - DNA, 25 bp, Homo sapien
tgtcagcctgagcttctgagtagag

SEQ ID NO: 4044566 - DNA, 25 bp, Homo sapien
tagaggctgattggacagctggctc

SEQ ID NO: 4044567 - DNA, 25 bp, Homo sapien
ctggctctgacgcaaatctctgctc

SEQ ID NO: 4044568 - DNA, 25 bp, Homo sapien
ctactggcatttcagtgccccaggg

SEQ ID NO: 4044569 - DNA, 25 bp, Homo sapien
ctaagctaagattccattccaggtg

SEQ ID NO: 4044570 - DNA, 25 bp, Homo sapien
tccttgagtccttttcccatgacca

SEQ ID NO: 4044571 - DNA, 25 bp, Homo sapien
tcctccttgagtccttttcccatga

SEQ ID NO: 4044572 - DNA, 25 bp, Homo sapien
agctcctccttgagtccttttccca

SEQ ID NO: 4044573 - DNA, 25 bp, Homo sapien
cttgagtccttttcccatgaccaca

SEQ ID NO: 4044574 - DNA, 25 bp, Homo sapien
cttcttcctgtctgcaaagtctctg

SEQ ID NO: 4044575 - DNA, 25 bp, Homo sapien
ggccttcctccacatctactgacat

SEQ ID NO: 4044576 - DNA, 25 bp, Homo sapien
tggccttcctccacatctactgaca

SEQ ID NO: 4044577 - DNA, 25 bp, Homo sapien
ctctggccttcctccacatctactg

SEQ ID NO: 4044578 - DNA, 25 bp, Homo sapien
cttttactaggagttggagcctgac

SEQ ID NO: 4044579 - DNA, 25 bp, Homo sapien
cacttttactaggagttggagcctg

SEQ ID NO: 4044580 - DNA, 25 bp, Homo sapien
acttttactaggagttggagcctga

SEQ ID NO: 4044581 - DNA, 25 bp, Homo sapien
aagaaacagtgaagtaccccgatag

SEQ ID NO: 4044582 - DNA, 25 bp, Homo sapien
tccctttctcgagtatacacaagta

SEQ ID NO: 4044583 - DNA, 25 bp, Homo sapien
aacagtgaagtaccccgatagggag

SEQ ID NO: 4044584 - DNA, 25 bp, Homo sapien
tattaaccatcttccctttctcgag

SEQ ID NO: 4044585 - DNA, 25 bp, Homo sapien
aggacaagaggccagattccagctc

SEQ ID NO: 4044586 - DNA, 25 bp, Homo sapien
gtctctgtgcaatgactccacttac

SEQ ID NO: 4044587 - DNA, 25 bp, Homo sapien
ttctcctgactggtctgtctctgtg

SEQ ID NO: 4044588 - DNA, 25 bp, Homo sapien
gacaagaggccagattccagctcct

SEQ ID NO: 4044589 - DNA, 25 bp, Homo sapien
ccaggcctgatggacgtgcgttgct

SEQ ID NO: 4044590 - DNA, 25 bp, Homo sapien
gctgaggtggtcaaaacgggaatat

SEQ ID NO: 4044591 - DNA, 25 bp, Homo sapien
ttagatcggactgccctgagtggcg

SEQ ID NO: 4044592 - DNA, 25 bp, Homo sapien
gggtaacaattccagtgtgacatca

SEQ ID NO: 4044593 - DNA, 25 bp, Homo sapien
gaaggagcagacaaaatccagactg

SEQ ID NO: 4044594 - DNA, 25 bp, Homo sapien
atccagactggaagggaaacttcca

SEQ ID NO: 4044595 - DNA, 25 bp, Homo sapien
ggccagtgtggcaggctcaaatgct

SEQ ID NO: 4044596 - DNA, 25 bp, Homo sapien
cagtgacaacccagctgcctttttg

SEQ ID NO: 4044597 - DNA, 25 bp, Homo sapien
gaggtacaccctgattctgaccagc

SEQ ID NO: 4044598 - DNA, 25 bp, Homo sapien
tctctgggtagtcacgctagggctg

SEQ ID NO: 4044599 - DNA, 25 bp, Homo sapien
gagggtctgaaaggttctcagcctt

SEQ ID NO: 4044600 - DNA, 25 bp, Homo sapien
gggaggtacaccctgattctgacca

SEQ ID NO: 4044601 - DNA, 25 bp, Homo sapien
tatggggaaagctaacggaggaata

SEQ ID NO: 4044602 - DNA, 25 bp, Homo sapien
ggaaagctaacggaggaatactcac

SEQ ID NO: 4044603 - DNA, 25 bp, Homo sapien
gggaaagctaacggaggaatactca

SEQ ID NO: 4044604 - DNA, 25 bp, Homo sapien
agcaccgtggcacgggacggccctt

SEQ ID NO: 4044605 - DNA, 25 bp, Homo sapien
ttgtaaacattagacctggtgatgt

SEQ ID NO: 4044606 - DNA, 25 bp, Homo sapien
cgggctggcaccgtttgtaaacatt

SEQ ID NO: 4044607 - DNA, 25 bp, Homo sapien
cggcccttggcttcagagccgggct

SEQ ID NO: 4044608 - DNA, 25 bp, Homo sapien
tattagctatgggaaagaggctgac

SEQ ID NO: 4044609 - DNA, 25 bp, Homo sapien
tcagtgctaccgttggaagtggcca

SEQ ID NO: 4044610 - DNA, 25 bp, Homo sapien
gaatctacctgactatgcatttgca

SEQ ID NO: 4044611 - DNA, 25 bp, Homo sapien
ggctcctgaggaagctaccactggc

SEQ ID NO: 4044612 - DNA, 25 bp, Homo sapien
ctgccgccatccacggcactgccag

SEQ ID NO: 4044613 - DNA, 25 bp, Homo sapien
gaggggtcctctatgatgtgagact

SEQ ID NO: 4044614 - DNA, 25 bp, Homo sapien
ctctatgatgtgagacttcctgccg

SEQ ID NO: 4044615 - DNA, 25 bp, Homo sapien
gggtcctctatgatgtgagacttcc

SEQ ID NO: 4044616 - DNA, 25 bp, Homo sapien
aatgatcgtggactaagaatggccc

SEQ ID NO: 4044617 - DNA, 25 bp, Homo sapien
gaatggccccatagctctaagagat

SEQ ID NO: 4044618 - DNA, 25 bp, Homo sapien
tctaagagatgggttcctgcgacca

SEQ ID NO: 4044619 - DNA, 25 bp, Homo sapien
ggatgtcatcccaccagttggaatg

SEQ ID NO: 4044620 - DNA, 25 bp, Homo sapien
gaggactccgtagctgaccagcacc

SEQ ID NO: 4044621 - DNA, 25 bp, Homo sapien
cgttggctgtggtctggccgaagat

SEQ ID NO: 4044622 - DNA, 25 bp, Homo sapien
tgaccaagaggactccgtagctgac

SEQ ID NO: 4044623 - DNA, 25 bp, Homo sapien
cacaaagatggcgttggctgtggtc

SEQ ID NO: 4044624 - DNA, 25 bp, Homo sapien
tctcctgttggtagagcacttccta

SEQ ID NO: 4044625 - DNA, 25 bp, Homo sapien
ccaagatctaatgggagtaactgat

SEQ ID NO: 4044626 - DNA, 25 bp, Homo sapien
catcatgccacgattcgaatgtagg

SEQ ID NO: 4044627 - DNA, 25 bp, Homo sapien
ccaggtgtattgtccctagtccata

SEQ ID NO: 4044628 - DNA, 25 bp, Homo sapien
tcttccatctcagagagtttggctt

SEQ ID NO: 4044629 - DNA, 25 bp, Homo sapien
catctcagagagtttggcttgaatg

SEQ ID NO: 4044630 - DNA, 25 bp, Homo sapien
tccatctcagagagtttggcttgaa

SEQ ID NO: 4044631 - DNA, 25 bp, Homo sapien
ttccatctcagagagtttggcttga

SEQ ID NO: 4044632 - DNA, 25 bp, Homo sapien
gcggtagatctgtgtctggaaccca

SEQ ID NO: 4044633 - DNA, 25 bp, Homo sapien
ttctccagggatctggcggtagatc

SEQ ID NO: 4044634 - DNA, 25 bp, Homo sapien
ctggaaaagggtggaactcatggct

SEQ ID NO: 4044635 - DNA, 25 bp, Homo sapien
gtggcttcctggatagagacaagct

SEQ ID NO: 4044636 - DNA, 25 bp, Homo sapien
aagacgaagatgaagcaggcggcca

SEQ ID NO: 4044637 - DNA, 25 bp, Homo sapien
atgtcagggatgaagagcgccagca

SEQ ID NO: 4044638 - DNA, 25 bp, Homo sapien
atgactgagatcaccttgccgatgt

SEQ ID NO: 4044639 - DNA, 25 bp, Homo sapien
tcaccttgccgatgtcagggatgaa

SEQ ID NO: 4044640 - DNA, 25 bp, Homo sapien
tggatagagattcttacaggactca

SEQ ID NO: 4044641 - DNA, 25 bp, Homo sapien
ccatggatagagattcttacaggac

SEQ ID NO: 4044642 - DNA, 25 bp, Homo sapien
ggatagagattcttacaggactcac

SEQ ID NO: 4044643 - DNA, 25 bp, Homo sapien
catggatagagattcttacaggact

SEQ ID NO: 4044644 - DNA, 25 bp, Homo sapien
taggcaccgactcttttctacaggc

SEQ ID NO: 4044645 - DNA, 25 bp, Homo sapien
acaaagggcgcttctgacacctggc

SEQ ID NO: 4044646 - DNA, 25 bp, Homo sapien
caaaggaccatgttggaagcgctca

SEQ ID NO: 4044647 - DNA, 25 bp, Homo sapien
acctggcctgggatatgtagggacc

SEQ ID NO: 4044648 - DNA, 25 bp, Homo sapien
tagggtaggaggtgagcacgctcag

SEQ ID NO: 4044649 - DNA, 25 bp, Homo sapien
catgtcctccgagggataggacagg

SEQ ID NO: 4044650 - DNA, 25 bp, Homo sapien
aggctcgggcaacggccacggccat

SEQ ID NO: 4044651 - DNA, 25 bp, Homo sapien
gacaggagcacgtcaggatccacag

SEQ ID NO: 4044652 - DNA, 25 bp, Homo sapien
ggacaactgggtcagggcaaccctg

SEQ ID NO: 4044653 - DNA, 25 bp, Homo sapien
gcagggacaactgggtcagggcaac

SEQ ID NO: 4044654 - DNA, 25 bp, Homo sapien
cagggacaactgggtcagggcaacc

SEQ ID NO: 4044655 - DNA, 25 bp, Homo sapien
gacaactgggtcagggcaaccctgg

SEQ ID NO: 4044656 - DNA, 25 bp, Homo sapien
gtctatccgtggaaagaactcaggg

SEQ ID NO: 4044657 - DNA, 25 bp, Homo sapien
tgtgactggcctcatcgctttctaa

SEQ ID NO: 4044658 - DNA, 25 bp, Homo sapien
gctagaacagtattggcccaggcag

SEQ ID NO: 4044659 - DNA, 25 bp, Homo sapien
gcttaaaacacttcctcgatgactc

SEQ ID NO: 4044660 - DNA, 25 bp, Homo sapien
cccattttaggctgggttggtggct

SEQ ID NO: 4044661 - DNA, 25 bp, Homo sapien
gaggccgaggcaggagaattgcttg

SEQ ID NO: 4044662 - DNA, 25 bp, Homo sapien
catgcctgtaaccccagcactttgg

SEQ ID NO: 4044663 - DNA, 25 bp, Homo sapien
attcaagaccaggctaggcaacata

SEQ ID NO: 4044664 - DNA, 25 bp, Homo sapien
cagcgagggctatgaccatggcagc

SEQ ID NO: 4044665 - DNA, 25 bp, Homo sapien
tgtccccatgtagacagcgagggct

SEQ ID NO: 4044666 - DNA, 25 bp, Homo sapien
ggtcttcacttcaggctgctgcatg

SEQ ID NO: 4044667 - DNA, 25 bp, Homo sapien
caccccaggtcttcacttcaggctg

SEQ ID NO: 4044668 - DNA, 25 bp, Homo sapien
gttgaagacgggcacactgctgacg

SEQ ID NO: 4044669 - DNA, 25 bp, Homo sapien
agacgggcacactgctgacgtggca

SEQ ID NO: 4044670 - DNA, 25 bp, Homo sapien
ctgttgaagacgggcacactgctga

SEQ ID NO: 4044671 - DNA, 25 bp, Homo sapien
tgaagacgggcacactgctgacgtg

SEQ ID NO: 4044672 - DNA, 25 bp, Homo sapien
caccgtcatggtggggaaatgacct

SEQ ID NO: 4044673 - DNA, 25 bp, Homo sapien
aaatgacctcaaccccagtttccag

SEQ ID NO: 4044674 - DNA, 25 bp, Homo sapien
ctgtccaggtgaagggcaccgtcat

SEQ ID NO: 4044675 - DNA, 25 bp, Homo sapien
tgtccaggtgaagggcaccgtcatg

SEQ ID NO: 4044676 - DNA, 25 bp, Homo sapien
ctccttgctgggttccatcccaggg

SEQ ID NO: 4044677 - DNA, 25 bp, Homo sapien
tttcctccattctgcctgggttcct

SEQ ID NO: 4044678 - DNA, 25 bp, Homo sapien
caggatttcctccattctgcctggg

SEQ ID NO: 4044679 - DNA, 25 bp, Homo sapien
gggcaagtcctgaggcccctgttcc

SEQ ID NO: 4044680 - DNA, 25 bp, Homo sapien
gcagggaccttgcaactggcactgg

SEQ ID NO: 4044681 - DNA, 25 bp, Homo sapien
agggaccttgcaactggcactggca

SEQ ID NO: 4044682 - DNA, 25 bp, Homo sapien
cagcagggaccttgcaactggcact

SEQ ID NO: 4044683 - DNA, 25 bp, Homo sapien
gggaccttgcaactggcactggcac

SEQ ID NO: 4044684 - DNA, 25 bp, Homo sapien
ctgaaatccgaagcagatggtgggc

SEQ ID NO: 4044685 - DNA, 25 bp, Homo sapien
catggcattgaacacagccatccag

SEQ ID NO: 4044686 - DNA, 25 bp, Homo sapien
cagatggtgggcatggcattgaaca

SEQ ID NO: 4044687 - DNA, 25 bp, Homo sapien
tggtgggcatggcattgaacacagc

SEQ ID NO: 4044688 - DNA, 25 bp, Homo sapien
tccagcaactgggattccatagctt

SEQ ID NO: 4044689 - DNA, 25 bp, Homo sapien
aactgggattccatagcttcaaccc

SEQ ID NO: 4044690 - DNA, 25 bp, Homo sapien
tgggattccatagcttcaacccaca

SEQ ID NO: 4044691 - DNA, 25 bp, Homo sapien
cagcaactgggattccatagcttca

SEQ ID NO: 4044692 - DNA, 25 bp, Homo sapien
tggaaacacaggcaattcgaccctg

SEQ ID NO: 4044693 - DNA, 25 bp, Homo sapien
aagtcagccctgatgagctcatgag

SEQ ID NO: 4044694 - DNA, 25 bp, Homo sapien
ggcaattcgaccctgggattccacc

SEQ ID NO: 4044695 - DNA, 25 bp, Homo sapien
ctggctcatctgttggatgtaggtg

SEQ ID NO: 4044696 - DNA, 25 bp, Homo sapien
ccaggtacccacgacgctcaggaag

SEQ ID NO: 4044697 - DNA, 25 bp, Homo sapien
tacttgatgataacgatggctgtga

SEQ ID NO: 4044698 - DNA, 25 bp, Homo sapien
gatggctgtgacgtaccaggtaccc

SEQ ID NO: 4044699 - DNA, 25 bp, Homo sapien
gggtcatctctttatctggccagat

SEQ ID NO: 4044700 - DNA, 25 bp, Homo sapien
ggagagactaagtgtcctcatcccc

SEQ ID NO: 4044701 - DNA, 25 bp, Homo sapien
gaactgaactactcatggatgcaaa

SEQ ID NO: 4044702 - DNA, 25 bp, Homo sapien
tcagacaccgagacaggaaaccagt

SEQ ID NO: 4044703 - DNA, 25 bp, Homo sapien
ggtaggctgacagtctcaaagaccc

SEQ ID NO: 4044704 - DNA, 25 bp, Homo sapien
ccaagctgcaggtaagatgctggta

SEQ ID NO: 4044705 - DNA, 25 bp, Homo sapien
gtctgtgtaccaagggccgctggcc

SEQ ID NO: 4044706 - DNA, 25 bp, Homo sapien
tgaacttgcggtctgtgtaccaagg

SEQ ID NO: 4044707 - DNA, 25 bp, Homo sapien
ctgatggtgaacttgcggtctgtgt

SEQ ID NO: 4044708 - DNA, 25 bp, Homo sapien
ccctccggctctttcgccatcacag

SEQ ID NO: 4044709 - DNA, 25 bp, Homo sapien
tgctggtcgccaatgatgattagga

SEQ ID NO: 4044710 - DNA, 25 bp, Homo sapien
gccaaaggtgtagacagcgatggcc

SEQ ID NO: 4044711 - DNA, 25 bp, Homo sapien
agcgatggccacctcacatagcaca

SEQ ID NO: 4044712 - DNA, 25 bp, Homo sapien
tgattaggaaggcaatgcaggtgcc

SEQ ID NO: 4044713 - DNA, 25 bp, Homo sapien
gggtcacaggaaagaatactagaat

SEQ ID NO: 4044714 - DNA, 25 bp, Homo sapien
cttttgaggcaaagcgcccaactga

SEQ ID NO: 4044715 - DNA, 25 bp, Homo sapien
ctgacccgaagcctcccttttgagg

SEQ ID NO: 4044716 - DNA, 25 bp, Homo sapien
cagtgcgtgtatcacttactggcca

SEQ ID NO: 4044717 - DNA, 25 bp, Homo sapien
gttgacgacgatgaagatggcccca

SEQ ID NO: 4044718 - DNA, 25 bp, Homo sapien
ggaagttgagtaaccctgcacccag

SEQ ID NO: 4044719 - DNA, 25 bp, Homo sapien
gctcaagtcccactcgctgtagtca

SEQ ID NO: 4044720 - DNA, 25 bp, Homo sapien
gccccaagtgtggaagtggtgcctc

SEQ ID NO: 4044721 - DNA, 25 bp, Homo sapien
gccccgagagccttcttcctgcaag

SEQ ID NO: 4044722 - DNA, 25 bp, Homo sapien
agagccttcttcctgcaaggtctgt

SEQ ID NO: 4044723 - DNA, 25 bp, Homo sapien
cttcttcctgcaaggtctgtgggtt

SEQ ID NO: 4044724 - DNA, 25 bp, Homo sapien
ggccccgagagccttcttcctgcaa

SEQ ID NO: 4044725 - DNA, 25 bp, Homo sapien
tggggctgttagcttaggactcttc

SEQ ID NO: 4044726 - DNA, 25 bp, Homo sapien
gctgttagcttaggactcttctcaa

SEQ ID NO: 4044727 - DNA, 25 bp, Homo sapien
gagcaacacccacctgtttggggct

SEQ ID NO: 4044728 - DNA, 25 bp, Homo sapien
gtttggggctgttagcttaggactc

SEQ ID NO: 4044729 - DNA, 25 bp, Homo sapien
tccaagaatctcgagaggctctgag

SEQ ID NO: 4044730 - DNA, 25 bp, Homo sapien
cccagccctgaaaaaggatcttcag

SEQ ID NO: 4044731 - DNA, 25 bp, Homo sapien
tttgctctctggataaacacaattg

SEQ ID NO: 4044732 - DNA, 25 bp, Homo sapien
tgaaaaaggatcttcagtgttctca

SEQ ID NO: 4044733 - DNA, 25 bp, Homo sapien
ttcctgactctccaaccaaaatgtt

SEQ ID NO: 4044734 - DNA, 25 bp, Homo sapien
agtgattcgtccaaggtcacaaggc

SEQ ID NO: 4044735 - DNA, 25 bp, Homo sapien
ctacagagtgattcgtccaaggtca

SEQ ID NO: 4044736 - DNA, 25 bp, Homo sapien
tcctgactctccaaccaaaatgttt

SEQ ID NO: 4044737 - DNA, 25 bp, Homo sapien
ggctgtgccagaggcggttgctcct

SEQ ID NO: 4044738 - DNA, 25 bp, Homo sapien
gctgtgccagaggcggttgctcctt

SEQ ID NO: 4044739 - DNA, 25 bp, Homo sapien
gtgccagaggcggttgctccttctc

SEQ ID NO: 4044740 - DNA, 25 bp, Homo sapien
tgtgccagaggcggttgctccttct

SEQ ID NO: 4044741 - DNA, 25 bp, Homo sapien
gcggctctcacgcttactcatgaaa

SEQ ID NO: 4044742 - DNA, 25 bp, Homo sapien
tctcacgcttactcatgaaatggag

SEQ ID NO: 4044743 - DNA, 25 bp, Homo sapien
gaggaaactgagcggctctcacgct

SEQ ID NO: 4044744 - DNA, 25 bp, Homo sapien
tgagcggctctcacgcttactcatg

SEQ ID NO: 4044745 - DNA, 25 bp, Homo sapien
aagcctgatgcccacatgctcaggc

SEQ ID NO: 4044746 - DNA, 25 bp, Homo sapien
actaaggtcacagtgggtagctggc

SEQ ID NO: 4044747 - DNA, 25 bp, Homo sapien
ggccagcgatgtaggcccctcagat

SEQ ID NO: 4044748 - DNA, 25 bp, Homo sapien
cctcagatcccaactggagtgtgct

SEQ ID NO: 4044749 - DNA, 25 bp, Homo sapien
cccgatcccggcctaggactgggtg

SEQ ID NO: 4044750 - DNA, 25 bp, Homo sapien
ctggcgcaacagagggacgggcgtg

SEQ ID NO: 4044751 - DNA, 25 bp, Homo sapien
aaagggtctgagcttttccgcggtg

SEQ ID NO: 4044752 - DNA, 25 bp, Homo sapien
tctggctgggtaaaggcgcggcaga

SEQ ID NO: 4044753 - DNA, 25 bp, Homo sapien
aatgtgaagcttggacaacaccagc

SEQ ID NO: 4044754 - DNA, 25 bp, Homo sapien
gaagagcattaggaggtctggcctc

SEQ ID NO: 4044755 - DNA, 25 bp, Homo sapien
tggcctctttgccagtcccggtggc

SEQ ID NO: 4044756 - DNA, 25 bp, Homo sapien
cagccagctcgtgtttatcctctta

SEQ ID NO: 4044757 - DNA, 25 bp, Homo sapien
ggagccacggtctttcctgcaaggg

SEQ ID NO: 4044758 - DNA, 25 bp, Homo sapien
ctggagccacggtctttcctgcaag

SEQ ID NO: 4044759 - DNA, 25 bp, Homo sapien
tggagccacggtctttcctgcaagg

SEQ ID NO: 4044760 - DNA, 25 bp, Homo sapien
gaccccatcggtttagactctagaa

SEQ ID NO: 4044761 - DNA, 25 bp, Homo sapien
ttgaatgacgaaatgggcatccagt

SEQ ID NO: 4044762 - DNA, 25 bp, Homo sapien
acgaccccatcggtttagactctag

SEQ ID NO: 4044763 - DNA, 25 bp, Homo sapien
tatttgttgaatgacgaaatgggca

SEQ ID NO: 4044764 - DNA, 25 bp, Homo sapien
gcagagacaacatcccaactggaga

SEQ ID NO: 4044765 - DNA, 25 bp, Homo sapien
gatgccgagataaagtacagtttcc

SEQ ID NO: 4044766 - DNA, 25 bp, Homo sapien
cacgaggccgactactcatgacaga

SEQ ID NO: 4044767 - DNA, 25 bp, Homo sapien
cactatcattcaagaggatgccgag

SEQ ID NO: 4044768 - DNA, 25 bp, Homo sapien
cacagagatgcggccatcttttgtc

SEQ ID NO: 4044769 - DNA, 25 bp, Homo sapien
tgcagagaggaaagaacttgggtac

SEQ ID NO: 4044770 - DNA, 25 bp, Homo sapien
cagagaggaaagaacttgggtacct

SEQ ID NO: 4044771 - DNA, 25 bp, Homo sapien
gcagagaggaaagaacttgggtacc

SEQ ID NO: 4044772 - DNA, 25 bp, Homo sapien
ctgcagagaggaaagaacttgggta

SEQ ID NO: 4044773 - DNA, 25 bp, Homo sapien
ccagaatttgctgttagcttggaat

SEQ ID NO: 4044774 - DNA, 25 bp, Homo sapien
aaaaagacacctttagattcagcag

SEQ ID NO: 4044775 - DNA, 25 bp, Homo sapien
gaattctgatgcataaacagatggg

SEQ ID NO: 4044776 - DNA, 25 bp, Homo sapien
gctctatttcctcgcttaaaacctg

SEQ ID NO: 4044777 - DNA, 25 bp, Homo sapien
cgcatgccaatgatgcggtcagcca

SEQ ID NO: 4044778 - DNA, 25 bp, Homo sapien
gcggtcagccatgactttcacttct

SEQ ID NO: 4044779 - DNA, 25 bp, Homo sapien
ggagaccagttgagtccgcatgcca

SEQ ID NO: 4044780 - DNA, 25 bp, Homo sapien
gagaccagttgagtccgcatgccaa

SEQ ID NO: 4044781 - DNA, 25 bp, Homo sapien
tatgacaggcttattgggatgtaac

SEQ ID NO: 4044782 - DNA, 25 bp, Homo sapien
taaccccatcataattgcatctgta

SEQ ID NO: 4044783 - DNA, 25 bp, Homo sapien
tgcatttctgacttatgacaggctt

SEQ ID NO: 4044784 - DNA, 25 bp, Homo sapien
tcataattgcatctgtattaagaaa

SEQ ID NO: 4044785 - DNA, 25 bp, Homo sapien
tgttttcgcaaatctggggtgttca

SEQ ID NO: 4044786 - DNA, 25 bp, Homo sapien
cagcagcaatccgggccccattgag

SEQ ID NO: 4044787 - DNA, 25 bp, Homo sapien
gttcagaatggcagcagcaatccgg

SEQ ID NO: 4044788 - DNA, 25 bp, Homo sapien
gtgttcagaatggcagcagcaatcc

SEQ ID NO: 4044789 - DNA, 25 bp, Homo sapien
tctcccagcatgagagcatgtgtca

SEQ ID NO: 4044790 - DNA, 25 bp, Homo sapien
tcttcttggctcacggatttgttac

SEQ ID NO: 4044791 - DNA, 25 bp, Homo sapien
ctggtctttcatcttagggtaggga

SEQ ID NO: 4044792 - DNA, 25 bp, Homo sapien
tgctggaaaaacttaaggacaccga

SEQ ID NO: 4044793 - DNA, 25 bp, Homo sapien
tgtcaaagaacgcaaagagattcct

SEQ ID NO: 4044794 - DNA, 25 bp, Homo sapien
tgttcgatgaagtggcgcacagccc

SEQ ID NO: 4044795 - DNA, 25 bp, Homo sapien
catgtcaaagaacgcaaagagattc

SEQ ID NO: 4044796 - DNA, 25 bp, Homo sapien
gcaaacattaatgccctgttcgatg

SEQ ID NO: 4044797 - DNA, 25 bp, Homo sapien
ccagtggacaggttttatcagagtt

SEQ ID NO: 4044798 - DNA, 25 bp, Homo sapien
cagtggacaggttttatcagagttc

SEQ ID NO: 4044799 - DNA, 25 bp, Homo sapien
agtggacaggttttatcagagttcc

SEQ ID NO: 4044800 - DNA, 25 bp, Homo sapien
tgtcgccagtgagttcatcgtcctc

SEQ ID NO: 4044801 - DNA, 25 bp, Homo sapien
tcatgcgtcatcaatcccagaactg

SEQ ID NO: 4044802 - DNA, 25 bp, Homo sapien
cagaactgctaatcacgcaaatggg

SEQ ID NO: 4044803 - DNA, 25 bp, Homo sapien
tgtggacatttcacgcaggttcgag

SEQ ID NO: 4044804 - DNA, 25 bp, Homo sapien
ttccactgttccggacgcgggtcca

SEQ ID NO: 4044805 - DNA, 25 bp, Homo sapien
ccactgttccggacgcgggtccact

SEQ ID NO: 4044806 - DNA, 25 bp, Homo sapien
tccactgttccggacgcgggtccac

SEQ ID NO: 4044807 - DNA, 25 bp, Homo sapien
ttggtttgggcagaaagacatctcg

SEQ ID NO: 4044808 - DNA, 25 bp, Homo sapien
aatatcctccacagcgcctgtgaag

SEQ ID NO: 4044809 - DNA, 25 bp, Homo sapien
gggtcataataccgataaccttgta

SEQ ID NO: 4044810 - DNA, 25 bp, Homo sapien
agatgggtgtgtggtttccccaggt

SEQ ID NO: 4044811 - DNA, 25 bp, Homo sapien
gacagttatactggccatgtagcca

SEQ ID NO: 4044812 - DNA, 25 bp, Homo sapien
gaagcagtattgactcagcagtaag

SEQ ID NO: 4044813 - DNA, 25 bp, Homo sapien
gcctgggttggaatagtctctgaca

SEQ ID NO: 4044814 - DNA, 25 bp, Homo sapien
aataggacatctgcaaacttcacgg

SEQ ID NO: 4044815 - DNA, 25 bp, Homo sapien
ggctccgatccttaaggctccagtt

SEQ ID NO: 4044816 - DNA, 25 bp, Homo sapien
tccgatccttaaggctccagttcca

SEQ ID NO: 4044817 - DNA, 25 bp, Homo sapien
cagaaatggtctgcacagtgacaaa

SEQ ID NO: 4044818 - DNA, 25 bp, Homo sapien
aaactggctccgatccttaaggctc

SEQ ID NO: 4044819 - DNA, 25 bp, Homo sapien
gaaccacaatgtgcacgagttcaca

SEQ ID NO: 4044820 - DNA, 25 bp, Homo sapien
tgcacgagttcacatgttgggagcg

SEQ ID NO: 4044821 - DNA, 25 bp, Homo sapien
gaaagtgaaccacaatgtgcacgag

SEQ ID NO: 4044822 - DNA, 25 bp, Homo sapien
tttcaaaagaaagtgaaccacaatg

SEQ ID NO: 4044823 - DNA, 25 bp, Homo sapien
cggccactcttcaagacttcgctgt

SEQ ID NO: 4044824 - DNA, 25 bp, Homo sapien
gccactcttcaagacttcgctgttc

SEQ ID NO: 4044825 - DNA, 25 bp, Homo sapien
tcttcaagacttcgctgttctcacc

SEQ ID NO: 4044826 - DNA, 25 bp, Homo sapien
actcttcaagacttcgctgttctca

SEQ ID NO: 4044827 - DNA, 25 bp, Homo sapien
cttgcggacgctaggcagaacgtaa

SEQ ID NO: 4044828 - DNA, 25 bp, Homo sapien
acgctaggcagaacgtaaggctttc

SEQ ID NO: 4044829 - DNA, 25 bp, Homo sapien
cggacgctaggcagaacgtaaggct

SEQ ID NO: 4044830 - DNA, 25 bp, Homo sapien
taggcagaacgtaaggctttccatt

SEQ ID NO: 4044831 - DNA, 25 bp, Homo sapien
catttccacatgggtccaccaggag

SEQ ID NO: 4044832 - DNA, 25 bp, Homo sapien
cccatttccacatgggtccaccagg

SEQ ID NO: 4044833 - DNA, 25 bp, Homo sapien
ccatttccacatgggtccaccagga

SEQ ID NO: 4044834 - DNA, 25 bp, Homo sapien
tagtacagagcctggtgaggccagt

SEQ ID NO: 4044835 - DNA, 25 bp, Homo sapien
tactgggcaaactgtacggattcaa

SEQ ID NO: 4044836 - DNA, 25 bp, Homo sapien
cacagggctggtctaatgatgaaaa

SEQ ID NO: 4044837 - DNA, 25 bp, Homo sapien
taaaactacctatctcacagggctg

SEQ ID NO: 4044838 - DNA, 25 bp, Homo sapien
aatcaagcatggctgtggggggaga

SEQ ID NO: 4044839 - DNA, 25 bp, Homo sapien
acaaagcaaatcaagcatggctgtg

SEQ ID NO: 4044840 - DNA, 25 bp, Homo sapien
aaagcaaatcaagcatggctgtggg

SEQ ID NO: 4044841 - DNA, 25 bp, Homo sapien
gggagacaatgttaatcagtttaac

SEQ ID NO: 4044842 - DNA, 25 bp, Homo sapien
gagacaagtttataatccagatcac

SEQ ID NO: 4044843 - DNA, 25 bp, Homo sapien
gaagtacagattaaagaacacaggt

SEQ ID NO: 4044844 - DNA, 25 bp, Homo sapien
tctaaatataggagcagggatactc

SEQ ID NO: 4044845 - DNA, 25 bp, Homo sapien
tatcgctatgtttgcacagtaagaa

SEQ ID NO: 4044846 - DNA, 25 bp, Homo sapien
ttagttgtaaacaccattacacttg

SEQ ID NO: 4044847 - DNA, 25 bp, Homo sapien
caattagttgtaaacaccattacac

SEQ ID NO: 4044848 - DNA, 25 bp, Homo sapien
tagttgtaaacaccattacacttgg

SEQ ID NO: 4044849 - DNA, 25 bp, Homo sapien
tgtaaacaccattacacttggacca

SEQ ID NO: 4044850 - DNA, 25 bp, Homo sapien
ccggggaggacgcggccggagtgca

SEQ ID NO: 4044851 - DNA, 25 bp, Homo sapien
ggggaggacgcggccggagtgcagc

SEQ ID NO: 4044852 - DNA, 25 bp, Homo sapien
cggggaggacgcggccggagtgcag

SEQ ID NO: 4044853 - DNA, 25 bp, Homo sapien
cggcggcgatcccggggaggacgcg

SEQ ID NO: 4044854 - DNA, 25 bp, Homo sapien
acacacagggaaccggctcctgctg

SEQ ID NO: 4044855 - DNA, 25 bp, Homo sapien
gctgaaggtaaggacagggacttcc

SEQ ID NO: 4044856 - DNA, 25 bp, Homo sapien
agtgggcagccgcaggacggagcag

SEQ ID NO: 4044857 - DNA, 25 bp, Homo sapien
ggtggaccgtaggagggcagtgggc

SEQ ID NO: 4044858 - DNA, 25 bp, Homo sapien
gaacaacctagtcgcccatcgatgg

SEQ ID NO: 4044859 - DNA, 25 bp, Homo sapien
agatcacattaatgggttccccagg

SEQ ID NO: 4044860 - DNA, 25 bp, Homo sapien
aattatagataagaggcaggcacgg

SEQ ID NO: 4044861 - DNA, 25 bp, Homo sapien
aatacaggattaggagggcatgagc

SEQ ID NO: 4044862 - DNA, 25 bp, Homo sapien
gggtcctttaagctgtccacctgct

SEQ ID NO: 4044863 - DNA, 25 bp, Homo sapien
cctgagccacgggtcctttaagctg

SEQ ID NO: 4044864 - DNA, 25 bp, Homo sapien
ttggtcctgagccacgggtccttta

SEQ ID NO: 4044865 - DNA, 25 bp, Homo sapien
aggagcaaatgacagcactccttcc

SEQ ID NO: 4044866 - DNA, 25 bp, Homo sapien
tccaactttagcgtatatgctgcca

SEQ ID NO: 4044867 - DNA, 25 bp, Homo sapien
attccaactttagcgtatatgctgc

SEQ ID NO: 4044868 - DNA, 25 bp, Homo sapien
gaaaataggggacgcttcatgaatt

SEQ ID NO: 4044869 - DNA, 25 bp, Homo sapien
tcattccaactttagcgtatatgct

SEQ ID NO: 4044870 - DNA, 25 bp, Homo sapien
gcattttgttatgtcaggattgtaa

SEQ ID NO: 4044871 - DNA, 25 bp, Homo sapien
tcccaaactctgcacctctttgaat

SEQ ID NO: 4044872 - DNA, 25 bp, Homo sapien
gtcttttgaagagcgcattttgcat

SEQ ID NO: 4044873 - DNA, 25 bp, Homo sapien
acctttgactcggtgtcttttgaag

SEQ ID NO: 4044874 - DNA, 25 bp, Homo sapien
aaatttcttccaactgttgctgaag

SEQ ID NO: 4044875 - DNA, 25 bp, Homo sapien
gtctctgaacattgtcctaagtgac

SEQ ID NO: 4044876 - DNA, 25 bp, Homo sapien
cattgtcctaagtgacttctttgaa

SEQ ID NO: 4044877 - DNA, 25 bp, Homo sapien
actgttgctgaagataatttgacat

SEQ ID NO: 4044878 - DNA, 25 bp, Homo sapien
gtcttccatgctcctaggattctgg

SEQ ID NO: 4044879 - DNA, 25 bp, Homo sapien
taatgtgtcgcaactttgtggcagg

SEQ ID NO: 4044880 - DNA, 25 bp, Homo sapien
tcccagaagtaagatggaaacaagt

SEQ ID NO: 4044881 - DNA, 25 bp, Homo sapien
tctgttgttcggctgccaaagtctt

SEQ ID NO: 4044882 - DNA, 25 bp, Homo sapien
tgattctccttctgcaagatgctgc

SEQ ID NO: 4044883 - DNA, 25 bp, Homo sapien
gctttttattccaaactccactcag

SEQ ID NO: 4044884 - DNA, 25 bp, Homo sapien
tctgcacttctcctacaagtaaaga

SEQ ID NO: 4044885 - DNA, 25 bp, Homo sapien
ttctcctacaagtaaagagagtgag

SEQ ID NO: 4044886 - DNA, 25 bp, Homo sapien
ttgcagcctgtgagcaccagagcat

SEQ ID NO: 4044887 - DNA, 25 bp, Homo sapien
gcctgtgagcaccagagcatttttg

SEQ ID NO: 4044888 - DNA, 25 bp, Homo sapien
tgtgagcaccagagcatttttgatc

SEQ ID NO: 4044889 - DNA, 25 bp, Homo sapien
tgagcaccagagcatttttgatcat

SEQ ID NO: 4044890 - DNA, 25 bp, Homo sapien
tttggagcttccacgaactggttca

SEQ ID NO: 4044891 - DNA, 25 bp, Homo sapien
gagcttggagctggcggtgtttcag

SEQ ID NO: 4044892 - DNA, 25 bp, Homo sapien
gagcttccacgaactggttcaataa

SEQ ID NO: 4044893 - DNA, 25 bp, Homo sapien
gagtctttggagcttccacgaactg

SEQ ID NO: 4044894 - DNA, 25 bp, Homo sapien
catgtaggcttctatttgcatgcaa

SEQ ID NO: 4044895 - DNA, 25 bp, Homo sapien
taaggccatcctctttgttaaaggc

SEQ ID NO: 4044896 - DNA, 25 bp, Homo sapien
gaaatacagctcttagctccgagaa

SEQ ID NO: 4044897 - DNA, 25 bp, Homo sapien
tcatgtgtgaactacagcaggtaac

SEQ ID NO: 4044898 - DNA, 25 bp, Homo sapien
ctgtttctggaataacatctggaat

SEQ ID NO: 4044899 - DNA, 25 bp, Homo sapien
catctggaatagaacggggtcccat

SEQ ID NO: 4044900 - DNA, 25 bp, Homo sapien
ggatggagcgctctgaaatccccat

SEQ ID NO: 4044901 - DNA, 25 bp, Homo sapien
ataaatcccaaaaacaagaactcag

SEQ ID NO: 4044902 - DNA, 25 bp, Homo sapien
tcaagaacctccacttttctaggtg

SEQ ID NO: 4044903 - DNA, 25 bp, Homo sapien
ttccagagttgaatagcaacataac

SEQ ID NO: 4044904 - DNA, 25 bp, Homo sapien
gttgaatagcaacataaccttatga

SEQ ID NO: 4044905 - DNA, 25 bp, Homo sapien
caagaacctccacttttctaggtgt

SEQ ID NO: 4044906 - DNA, 25 bp, Homo sapien
caacagtgttgattgcaatctggtt

SEQ ID NO: 4044907 - DNA, 25 bp, Homo sapien
gaagttcattgtgcaacagtgttga

SEQ ID NO: 4044908 - DNA, 25 bp, Homo sapien
tgtgcagagaagttcattgtgcaac

SEQ ID NO: 4044909 - DNA, 25 bp, Homo sapien
cagtgttgattgcaatctggttgtg

SEQ ID NO: 4044910 - DNA, 25 bp, Homo sapien
cttaaacaaagtgtgaattctgctt

SEQ ID NO: 4044911 - DNA, 25 bp, Homo sapien
ttaaacaaagtgtgaattctgcttt

SEQ ID NO: 4044912 - DNA, 25 bp, Homo sapien
tctttgtaggtatttcaagggcacg

SEQ ID NO: 4044913 - DNA, 25 bp, Homo sapien
taaccagatgcgattttataccagc

SEQ ID NO: 4044914 - DNA, 25 bp, Homo sapien
gatgttgatgtagggattgctaacc

SEQ ID NO: 4044915 - DNA, 25 bp, Homo sapien
caagggcacgtttggagatgttgat

SEQ ID NO: 4044916 - DNA, 25 bp, Homo sapien
agtccattgggcattagcttgttgc

SEQ ID NO: 4044917 - DNA, 25 bp, Homo sapien
ttgagtccattgggcattagcttgt

SEQ ID NO: 4044918 - DNA, 25 bp, Homo sapien
gagtccattgggcattagcttgttg

SEQ ID NO: 4044919 - DNA, 25 bp, Homo sapien
tccattgggcattagcttgttgctt

SEQ ID NO: 4044920 - DNA, 25 bp, Homo sapien
ctttgcaagggtcggcagctttgcc

SEQ ID NO: 4044921 - DNA, 25 bp, Homo sapien
taagaagtaaagtgggattctgaaa

SEQ ID NO: 4044922 - DNA, 25 bp, Homo sapien
cattttccctttgcaagggtcggca

SEQ ID NO: 4044923 - DNA, 25 bp, Homo sapien
ccatggaatgttagccatgtatctc

SEQ ID NO: 4044924 - DNA, 25 bp, Homo sapien
tcattttgctctctgtaagcagaga

SEQ ID NO: 4044925 - DNA, 25 bp, Homo sapien
tgtaagcagagagcaattgttctcc

SEQ ID NO: 4044926 - DNA, 25 bp, Homo sapien
cattttgctctctgtaagcagagag

SEQ ID NO: 4044927 - DNA, 25 bp, Homo sapien
tcaccctgaggctgtggattcctgg

SEQ ID NO: 4044928 - DNA, 25 bp, Homo sapien
tgagccctgtagattcaccctgagg

SEQ ID NO: 4044929 - DNA, 25 bp, Homo sapien
accttgggggtctgagccctgtaga

SEQ ID NO: 4044930 - DNA, 25 bp, Homo sapien
cctgaggctgtggattcctgggaaa

SEQ ID NO: 4044931 - DNA, 25 bp, Homo sapien
gaccgggctctcctaatggttctgg

SEQ ID NO: 4044932 - DNA, 25 bp, Homo sapien
atgaagttagccagggaccgggctc

SEQ ID NO: 4044933 - DNA, 25 bp, Homo sapien
gacccctaaactgcggcatctcagg

SEQ ID NO: 4044934 - DNA, 25 bp, Homo sapien
gggacccctaaactgcggcatctca

SEQ ID NO: 4044935 - DNA, 25 bp, Homo sapien
aaagttctactgattagatatgggt

SEQ ID NO: 4044936 - DNA, 25 bp, Homo sapien
tgattcatgcgtactgaatgctgct

SEQ ID NO: 4044937 - DNA, 25 bp, Homo sapien
tctgcttacggcatatgattcatgc

SEQ ID NO: 4044938 - DNA, 25 bp, Homo sapien
tctggatttgagtgtaaaaacaggc

SEQ ID NO: 4044939 - DNA, 25 bp, Homo sapien
caggctggttgtacatagagctaaa

SEQ ID NO: 4044940 - DNA, 25 bp, Homo sapien
tgcaggagtgtcacgcctaagaggc

SEQ ID NO: 4044941 - DNA, 25 bp, Homo sapien
ccctgtaggtagtggaacgaagcga

SEQ ID NO: 4044942 - DNA, 25 bp, Homo sapien
gaagcgatgttccaaatttcatggg

SEQ ID NO: 4044943 - DNA, 25 bp, Homo sapien
tcagccgcaggtaactcctgacgag

SEQ ID NO: 4044944 - DNA, 25 bp, Homo sapien
tgcagatgtgaaggatgagtgacat

SEQ ID NO: 4044945 - DNA, 25 bp, Homo sapien
ttggcagcttccagtacacttttag

SEQ ID NO: 4044946 - DNA, 25 bp, Homo sapien
ggatgagtgacatcttgatgtcctt

SEQ ID NO: 4044947 - DNA, 25 bp, Homo sapien
tctttgataagtcccctcccttggc

SEQ ID NO: 4044948 - DNA, 25 bp, Homo sapien
agctcttgaatggaaccttcccaga

SEQ ID NO: 4044949 - DNA, 25 bp, Homo sapien
gaaccttcccagactaattcatttc

SEQ ID NO: 4044950 - DNA, 25 bp, Homo sapien
tgaatggaaccttcccagactaatt

SEQ ID NO: 4044951 - DNA, 25 bp, Homo sapien
tcttgaatggaaccttcccagacta

SEQ ID NO: 4044952 - DNA, 25 bp, Homo sapien
tctgaagccagctacatgaagaatt

SEQ ID NO: 4044953 - DNA, 25 bp, Homo sapien
ctgaagccagctacatgaagaattt

SEQ ID NO: 4044954 - DNA, 25 bp, Homo sapien
tgaagccagctacatgaagaatttt

SEQ ID NO: 4044955 - DNA, 25 bp, Homo sapien
aagccagctacatgaagaattttta

SEQ ID NO: 4044956 - DNA, 25 bp, Homo sapien
tcctgctggcagaacaagctctcaa

SEQ ID NO: 4044957 - DNA, 25 bp, Homo sapien
agaggtaaaattagaggcttcagcc

SEQ ID NO: 4044958 - DNA, 25 bp, Homo sapien
tcatctttgtttcgcagaggtaaaa

SEQ ID NO: 4044959 - DNA, 25 bp, Homo sapien
aagctctcaatttctcgctgtcgaa

SEQ ID NO: 4044960 - DNA, 25 bp, Homo sapien
ggccagcaattgtgaaggaagcagc

SEQ ID NO: 4044961 - DNA, 25 bp, Homo sapien
gaagcagcttgataaccccaggtga

SEQ ID NO: 4044962 - DNA, 25 bp, Homo sapien
taagagtgagacagctctgttctga

SEQ ID NO: 4044963 - DNA, 25 bp, Homo sapien
gctctgatagtctgtgccaggcctt

SEQ ID NO: 4044964 - DNA, 25 bp, Homo sapien
gagagtcatgtattcaccaccacag

SEQ ID NO: 4044965 - DNA, 25 bp, Homo sapien
tagtatcactaccacatgcatatcg

SEQ ID NO: 4044966 - DNA, 25 bp, Homo sapien
gatacagttctatcaccccaaggag

SEQ ID NO: 4044967 - DNA, 25 bp, Homo sapien
tatagtcagacctatgtccctccca

SEQ ID NO: 4044968 - DNA, 25 bp, Homo sapien
agatgcggcgatggagcacagacat

SEQ ID NO: 4044969 - DNA, 25 bp, Homo sapien
tgagtgaaagatgcggcgatggagc

SEQ ID NO: 4044970 - DNA, 25 bp, Homo sapien
tgactgagtgaaagatgcggcgatg

SEQ ID NO: 4044971 - DNA, 25 bp, Homo sapien
aaagatgcggcgatggagcacagac

SEQ ID NO: 4044972 - DNA, 25 bp, Homo sapien
ttctcatcctatgcctttcccttga

SEQ ID NO: 4044973 - DNA, 25 bp, Homo sapien
tttctgaaaccaaccaagccttgac

SEQ ID NO: 4044974 - DNA, 25 bp, Homo sapien
tgtgtaaccccccaaatgaagcagc

SEQ ID NO: 4044975 - DNA, 25 bp, Homo sapien
aaccaagccttgactggcttgactg

SEQ ID NO: 4044976 - DNA, 25 bp, Homo sapien
tgtataatctcagctttctgtccac

SEQ ID NO: 4044977 - DNA, 25 bp, Homo sapien
cataataatgtataatctcagcttt

SEQ ID NO: 4044978 - DNA, 25 bp, Homo sapien
gctttctgtccacttgtaaaaatgg

SEQ ID NO: 4044979 - DNA, 25 bp, Homo sapien
gtaaaaatgggaatagacttggaga

SEQ ID NO: 4044980 - DNA, 25 bp, Homo sapien
tgaaaacccgccgaatctgtaattg

SEQ ID NO: 4044981 - DNA, 25 bp, Homo sapien
gaactatgaaaacccgccgaatctg

SEQ ID NO: 4044982 - DNA, 25 bp, Homo sapien
cgccgaatctgtaattgtctggtaa

SEQ ID NO: 4044983 - DNA, 25 bp, Homo sapien
attgaagaactatgaaaacccgccg

SEQ ID NO: 4044984 - DNA, 25 bp, Homo sapien
gacttgttctagagacaaagaagaa

SEQ ID NO: 4044985 - DNA, 25 bp, Homo sapien
tgtcagctgagacatttagacttgt

SEQ ID NO: 4044986 - DNA, 25 bp, Homo sapien
gcagaagtttggaatcaaacaagca

SEQ ID NO: 4044987 - DNA, 25 bp, Homo sapien
gcatttaaggaaaccattaatcaga

SEQ ID NO: 4044988 - DNA, 25 bp, Homo sapien
ttggacttgacactgtttccttgga

SEQ ID NO: 4044989 - DNA, 25 bp, Homo sapien
gacttgacactgtttccttggatat

SEQ ID NO: 4044990 - DNA, 25 bp, Homo sapien
ccttggacttgacactgtttccttg

SEQ ID NO: 4044991 - DNA, 25 bp, Homo sapien
gacactgtttccttggatattgact

SEQ ID NO: 4044992 - DNA, 25 bp, Homo sapien
ttttcatcacattcagccgtccatc

SEQ ID NO: 4044993 - DNA, 25 bp, Homo sapien
gttagcttgtggtatgctgtttgaa

SEQ ID NO: 4044994 - DNA, 25 bp, Homo sapien
ttcatcacattcagccgtccatctg

SEQ ID NO: 4044995 - DNA, 25 bp, Homo sapien
caatagatacgcttgaaatagttag

SEQ ID NO: 4044996 - DNA, 25 bp, Homo sapien
caatccaatgttgaggaagtaagtg

SEQ ID NO: 4044997 - DNA, 25 bp, Homo sapien
taagtggtactaatatctgctgcca

SEQ ID NO: 4044998 - DNA, 25 bp, Homo sapien
tttatccaatccaatgttgaggaag

SEQ ID NO: 4044999 - DNA, 25 bp, Homo sapien
ggaagtaagtggtactaatatctgc

SEQ ID NO: 4045000 - DNA, 25 bp, Homo sapien
tggctcctgcatatccccagcaatt

SEQ ID NO: 4045001 - DNA, 25 bp, Homo sapien
tgcagagggagccagatatccttta

SEQ ID NO: 4045002 - DNA, 25 bp, Homo sapien
caattctcaggaaaaggtgggtgtt

SEQ ID NO: 4045003 - DNA, 25 bp, Homo sapien
tagtgtagtaacgaagaatggctcc

SEQ ID NO: 4045004 - DNA, 25 bp, Homo sapien
tcctttaatcagctcttttgagaat

SEQ ID NO: 4045005 - DNA, 25 bp, Homo sapien
tttgagaatttagccaatggaacac

SEQ ID NO: 4045006 - DNA, 25 bp, Homo sapien
accaagagcctccaacgatcgtttc

SEQ ID NO: 4045007 - DNA, 25 bp, Homo sapien
ccaacgatcgtttcccatctacatt

SEQ ID NO: 4045008 - DNA, 25 bp, Homo sapien
atggatgatgcttcccatgctgatg

SEQ ID NO: 4045009 - DNA, 25 bp, Homo sapien
ggtggacatcctatgtagaacagta

SEQ ID NO: 4045010 - DNA, 25 bp, Homo sapien
gctgctagtgtgaggaattcaatta

SEQ ID NO: 4045011 - DNA, 25 bp, Homo sapien
taatttactcaagaactaagctggg

SEQ ID NO: 4045012 - DNA, 25 bp, Homo sapien
taccactggagttgtcttaaggaat

SEQ ID NO: 4045013 - DNA, 25 bp, Homo sapien
agtctgaaggagcgcctctggactg

SEQ ID NO: 4045014 - DNA, 25 bp, Homo sapien
tctgaaggagcgcctctggactggt

SEQ ID NO: 4045015 - DNA, 25 bp, Homo sapien
ctgaaggagcgcctctggactggta

SEQ ID NO: 4045016 - DNA, 25 bp, Homo sapien
aaggagcgcctctggactggtagac

SEQ ID NO: 4045017 - DNA, 25 bp, Homo sapien
tggccttggaccatgtgtgctaaaa

SEQ ID NO: 4045018 - DNA, 25 bp, Homo sapien
ggccttggaccatgtgtgctaaaac

SEQ ID NO: 4045019 - DNA, 25 bp, Homo sapien
tggacagatggaccagcagcaaatg

SEQ ID NO: 4045020 - DNA, 25 bp, Homo sapien
gatggaccagcagcaaatgaaaacc

SEQ ID NO: 4045021 - DNA, 25 bp, Homo sapien
gattgtataaactgctggataactt

SEQ ID NO: 4045022 - DNA, 25 bp, Homo sapien
ggtattcagattgtataaactgctg

SEQ ID NO: 4045023 - DNA, 25 bp, Homo sapien
cagaggacgctgaatttcaggtcca

SEQ ID NO: 4045024 - DNA, 25 bp, Homo sapien
agaggacgctgaatttcaggtccat

SEQ ID NO: 4045025 - DNA, 25 bp, Homo sapien
gtcctcagggcctctatgggccttc

SEQ ID NO: 4045026 - DNA, 25 bp, Homo sapien
cctcagggcctctatgggccttcat

SEQ ID NO: 4045027 - DNA, 25 bp, Homo sapien
tcctcagggcctctatgggccttca

SEQ ID NO: 4045028 - DNA, 25 bp, Homo sapien
taagtgtcagagactgtgttaatgc

SEQ ID NO: 4045029 - DNA, 25 bp, Homo sapien
tgtcccatgagacatttgcaggtct

SEQ ID NO: 4045030 - DNA, 25 bp, Homo sapien
gagtcctcaagagtgtttggctagt

SEQ ID NO: 4045031 - DNA, 25 bp, Homo sapien
gacatgaacttctatagctcaatga

SEQ ID NO: 4045032 - DNA, 25 bp, Homo sapien
cacagcaggaattgaccagaaagga

SEQ ID NO: 4045033 - DNA, 25 bp, Homo sapien
ctttgtatgccacaagcaacttgcg

SEQ ID NO: 4045034 - DNA, 25 bp, Homo sapien
gcgtggacctagattgtctctttca

SEQ ID NO: 4045035 - DNA, 25 bp, Homo sapien
tgttttcagctaaaagccgaagcag

SEQ ID NO: 4045036 - DNA, 25 bp, Homo sapien
ctggaccgttgttccctgggtagag

SEQ ID NO: 4045037 - DNA, 25 bp, Homo sapien
tggaccgttgttccctgggtagaga

SEQ ID NO: 4045038 - DNA, 25 bp, Homo sapien
ttaatgagccttatacacagactca

SEQ ID NO: 4045039 - DNA, 25 bp, Homo sapien
tgtagggcttcaattttgtctaaac

SEQ ID NO: 4045040 - DNA, 25 bp, Homo sapien
tctaaacctccacattcttcaatca

SEQ ID NO: 4045041 - DNA, 25 bp, Homo sapien
ctcattttcaaggttttgtagggct

SEQ ID NO: 4045042 - DNA, 25 bp, Homo sapien
tcaacatttactaaacaattaacta

SEQ ID NO: 4045043 - DNA, 25 bp, Homo sapien
ggagccttccattgtagtaactttc

SEQ ID NO: 4045044 - DNA, 25 bp, Homo sapien
cctgagtcaaccacactgtttggca

SEQ ID NO: 4045045 - DNA, 25 bp, Homo sapien
gaacttgccccgtgataacagtgac

SEQ ID NO: 4045046 - DNA, 25 bp, Homo sapien
ttggcatccccatgaaaagcacttt

SEQ ID NO: 4045047 - DNA, 25 bp, Homo sapien
tctttaggtggatttatatgatgct

SEQ ID NO: 4045048 - DNA, 25 bp, Homo sapien
ctttaggtggatttatatgatgctt

SEQ ID NO: 4045049 - DNA, 25 bp, Homo sapien
tttaggtggatttatatgatgcttc

SEQ ID NO: 4045050 - DNA, 25 bp, Homo sapien
ttctttaggtggatttatatgatgc

SEQ ID NO: 4045051 - DNA, 25 bp, Homo sapien
tgtgcagatagaaaacgctgagact

SEQ ID NO: 4045052 - DNA, 25 bp, Homo sapien
gaaaaactggagtacactgaagcat

SEQ ID NO: 4045053 - DNA, 25 bp, Homo sapien
caacaggagcctttgatacagggtc

SEQ ID NO: 4045054 - DNA, 25 bp, Homo sapien
tgtttgcccacaaaaaccgagtgga

SEQ ID NO: 4045055 - DNA, 25 bp, Homo sapien
caagatgaaaattctcactattgtt

SEQ ID NO: 4045056 - DNA, 25 bp, Homo sapien
tcctcttttggtgatacgcctttta

SEQ ID NO: 4045057 - DNA, 25 bp, Homo sapien
gaaaattctcactattgttggtgta

SEQ ID NO: 4045058 - DNA, 25 bp, Homo sapien
caattgtgtcctcttttggtgatac

SEQ ID NO: 4045059 - DNA, 25 bp, Homo sapien
caccaccaagcctgccttacgggag

SEQ ID NO: 4045060 - DNA, 25 bp, Homo sapien
ccaagcctgccttacgggagctcct

SEQ ID NO: 4045061 - DNA, 25 bp, Homo sapien
aagcctgccttacgggagctcctga

SEQ ID NO: 4045062 - DNA, 25 bp, Homo sapien
caccaagcctgccttacgggagctc

SEQ ID NO: 4045063 - DNA, 25 bp, Homo sapien
caatcctagtcagactttaaaccaa

SEQ ID NO: 4045064 - DNA, 25 bp, Homo sapien
gcaatcctagtcagactttaaacca

SEQ ID NO: 4045065 - DNA, 25 bp, Homo sapien
tgcaatcctagtcagactttaaacc

SEQ ID NO: 4045066 - DNA, 25 bp, Homo sapien
gactcggtgtgtggttctcgttcat

SEQ ID NO: 4045067 - DNA, 25 bp, Homo sapien
aatgtgaagctctgtgttcataggg

SEQ ID NO: 4045068 - DNA, 25 bp, Homo sapien
aaaacttgggcagctaaaatgtggt

SEQ ID NO: 4045069 - DNA, 25 bp, Homo sapien
tctcgttcatgctggctaagactga

SEQ ID NO: 4045070 - DNA, 25 bp, Homo sapien
ggatggatttgtgtctagggagatg

SEQ ID NO: 4045071 - DNA, 25 bp, Homo sapien
gggatggatttgtgtctagggagat

SEQ ID NO: 4045072 - DNA, 25 bp, Homo sapien
tgggatggatttgtgtctagggaga

SEQ ID NO: 4045073 - DNA, 25 bp, Homo sapien
cagaagcctaatgctgataaagtaa

SEQ ID NO: 4045074 - DNA, 25 bp, Homo sapien
tcagaagcctaatgctgataaagta

SEQ ID NO: 4045075 - DNA, 25 bp, Homo sapien
aaaggtatccgaatgtttgtatatg

SEQ ID NO: 4045076 - DNA, 25 bp, Homo sapien
agtaaaggtatccgaatgtttgtat

SEQ ID NO: 4045077 - DNA, 25 bp, Homo sapien
tgatatccaaaggatgaccacgaag

SEQ ID NO: 4045078 - DNA, 25 bp, Homo sapien
ggtaccaataagagcctttctccag

SEQ ID NO: 4045079 - DNA, 25 bp, Homo sapien
agcagtggaaaaaatcgtaccatgc

SEQ ID NO: 4045080 - DNA, 25 bp, Homo sapien
ttgttcagagattggtaccaataag

SEQ ID NO: 4045081 - DNA, 25 bp, Homo sapien
cagtggaaaaaatcgtaccatgcag

SEQ ID NO: 4045082 - DNA, 25 bp, Homo sapien
cacttaactctgctgccgctttgaa

SEQ ID NO: 4045083 - DNA, 25 bp, Homo sapien
gaagttattcgttttacattctcta

SEQ ID NO: 4045084 - DNA, 25 bp, Homo sapien
tctgctgccgctttgaagttattcg

SEQ ID NO: 4045085 - DNA, 25 bp, Homo sapien
tgaatggatgaacacttaactctgc

SEQ ID NO: 4045086 - DNA, 25 bp, Homo sapien
cagtattggagggctgggtaagcat

SEQ ID NO: 4045087 - DNA, 25 bp, Homo sapien
acctccagtattggagggctgggta

SEQ ID NO: 4045088 - DNA, 25 bp, Homo sapien
tccagtattggagggctgggtaagc

SEQ ID NO: 4045089 - DNA, 25 bp, Homo sapien
cctccagtattggagggctgggtaa

SEQ ID NO: 4045090 - DNA, 25 bp, Homo sapien
actcagactctggctaaaatcaaag

SEQ ID NO: 4045091 - DNA, 25 bp, Homo sapien
tcagactctggctaaaatcaaagta

SEQ ID NO: 4045092 - DNA, 25 bp, Homo sapien
attcaagaagaagactcagactctg

SEQ ID NO: 4045093 - DNA, 25 bp, Homo sapien
tattcaagaagaagactcagactct

SEQ ID NO: 4045094 - DNA, 25 bp, Homo sapien
aacttcactttccacgatcaaggaa

SEQ ID NO: 4045095 - DNA, 25 bp, Homo sapien
gggcagagactaatctgccttcttg

SEQ ID NO: 4045096 - DNA, 25 bp, Homo sapien
ctctctgggcagagactaatctgcc

SEQ ID NO: 4045097 - DNA, 25 bp, Homo sapien
tttccacgatcaaggaagaagtccc

SEQ ID NO: 4045098 - DNA, 25 bp, Homo sapien
ctcatatgtgagcttgtttggttgg

SEQ ID NO: 4045099 - DNA, 25 bp, Homo sapien
tccttgtgtctcatatgtgagcttg

SEQ ID NO: 4045100 - DNA, 25 bp, Homo sapien
tgtgtctcatatgtgagcttgtttg

SEQ ID NO: 4045101 - DNA, 25 bp, Homo sapien
tgtctcatatgtgagcttgtttggt

SEQ ID NO: 4045102 - DNA, 25 bp, Homo sapien
catggcttctacaagcaacttgtac

SEQ ID NO: 4045103 - DNA, 25 bp, Homo sapien
gcagagtatactccatggcttctac

SEQ ID NO: 4045104 - DNA, 25 bp, Homo sapien
tccatggcttctacaagcaacttgt

SEQ ID NO: 4045105 - DNA, 25 bp, Homo sapien
gagggcagagtatactccatggctt

SEQ ID NO: 4045106 - DNA, 25 bp, Homo sapien
caagccaatagcttgatgagacaga

SEQ ID NO: 4045107 - DNA, 25 bp, Homo sapien
aagccaatagcttgatgagacagag

SEQ ID NO: 4045108 - DNA, 25 bp, Homo sapien
tctgctcattgacagccctttggtt

SEQ ID NO: 4045109 - DNA, 25 bp, Homo sapien
ctttctgctcattgacagccctttg

SEQ ID NO: 4045110 - DNA, 25 bp, Homo sapien
atctttctgctcattgacagccctt

SEQ ID NO: 4045111 - DNA, 25 bp, Homo sapien
tttctgctcattgacagccctttgg

SEQ ID NO: 4045112 - DNA, 25 bp, Homo sapien
tccagccaacatgggttccatagag

SEQ ID NO: 4045113 - DNA, 25 bp, Homo sapien
catgggttccatagagaaatatgga

SEQ ID NO: 4045114 - DNA, 25 bp, Homo sapien
aagaaaccctgacttccagccaaca

SEQ ID NO: 4045115 - DNA, 25 bp, Homo sapien
tgacttccagccaacatgggttcca

SEQ ID NO: 4045116 - DNA, 25 bp, Homo sapien
ttatcccagggatgacagccttgcc

SEQ ID NO: 4045117 - DNA, 25 bp, Homo sapien
tacataggctctatttcagaaacac

SEQ ID NO: 4045118 - DNA, 25 bp, Homo sapien
tacttggaagtggaaatccacagaa

SEQ ID NO: 4045119 - DNA, 25 bp, Homo sapien
cagcagctggtcagaagtagcctcc

SEQ ID NO: 4045120 - DNA, 25 bp, Homo sapien
ggaatgccatgataatgatctgaaa

SEQ ID NO: 4045121 - DNA, 25 bp, Homo sapien
ttttggatgaactttaaaccaatga

SEQ ID NO: 4045122 - DNA, 25 bp, Homo sapien
aattggactccaagctaatagtatt

SEQ ID NO: 4045123 - DNA, 25 bp, Homo sapien
gagtgtatacactccttttggcaag

SEQ ID NO: 4045124 - DNA, 25 bp, Homo sapien
tatagtctcatcattatgaagctgc

SEQ ID NO: 4045125 - DNA, 25 bp, Homo sapien
atcccttgttgggacccttcaccag

SEQ ID NO: 4045126 - DNA, 25 bp, Homo sapien
gatgtattcataagtgccgttatcc

SEQ ID NO: 4045127 - DNA, 25 bp, Homo sapien
gggtttcctaactgaaagcctgatg

SEQ ID NO: 4045128 - DNA, 25 bp, Homo sapien
tgacttcaagtcaatattcagagct

SEQ ID NO: 4045129 - DNA, 25 bp, Homo sapien
catgacttcaagtcaatattcagag

SEQ ID NO: 4045130 - DNA, 25 bp, Homo sapien
agtcaatattcagagcttcatctgc

SEQ ID NO: 4045131 - DNA, 25 bp, Homo sapien
cttcaagtcaatattcagagcttca

SEQ ID NO: 4045132 - DNA, 25 bp, Homo sapien
ctgaagcatcgccaggtactccgat

SEQ ID NO: 4045133 - DNA, 25 bp, Homo sapien
gcatgttgggaaggcccagagaacc

SEQ ID NO: 4045134 - DNA, 25 bp, Homo sapien
gagtgtatatagctgcatgttggga

SEQ ID NO: 4045135 - DNA, 25 bp, Homo sapien
cgatatgttgagtgtatatagctgc

SEQ ID NO: 4045136 - DNA, 25 bp, Homo sapien
tacttggcttggtgatcttttcccc

SEQ ID NO: 4045137 - DNA, 25 bp, Homo sapien
tcctcttcaaagtccctacttggct

SEQ ID NO: 4045138 - DNA, 25 bp, Homo sapien
aaagtccctacttggcttggtgatc

SEQ ID NO: 4045139 - DNA, 25 bp, Homo sapien
tttccccaacatcaacagaccacac

SEQ ID NO: 4045140 - DNA, 25 bp, Homo sapien
tctgactgttgacatatttgcccag

SEQ ID NO: 4045141 - DNA, 25 bp, Homo sapien
tttgcccagatgatggaggaactcc

SEQ ID NO: 4045142 - DNA, 25 bp, Homo sapien
cagttcatcagacacaatttccaga

SEQ ID NO: 4045143 - DNA, 25 bp, Homo sapien
tgtgggtgcctggaaaaaagtctcc

SEQ ID NO: 4045144 - DNA, 25 bp, Homo sapien
gttgggtagtaccaggtaatgctca

SEQ ID NO: 4045145 - DNA, 25 bp, Homo sapien
ttgggtagtaccaggtaatgctcac

SEQ ID NO: 4045146 - DNA, 25 bp, Homo sapien
tgggtagtaccaggtaatgctcact

SEQ ID NO: 4045147 - DNA, 25 bp, Homo sapien
gtctgcaggagtgaataagcactca

SEQ ID NO: 4045148 - DNA, 25 bp, Homo sapien
aaggaacttgggtgaactacagtct

SEQ ID NO: 4045149 - DNA, 25 bp, Homo sapien
gagaccttcccataagcaaaaggaa

SEQ ID NO: 4045150 - DNA, 25 bp, Homo sapien
cttgggtgaactacagtctgcagga

SEQ ID NO: 4045151 - DNA, 25 bp, Homo sapien
aagaaaagtctgtggcttccagtgc

SEQ ID NO: 4045152 - DNA, 25 bp, Homo sapien
ggtcaaaattaccagcaatggatgc

SEQ ID NO: 4045153 - DNA, 25 bp, Homo sapien
gcagaccatcagagacaatgccatg

SEQ ID NO: 4045154 - DNA, 25 bp, Homo sapien
gaacatgcgatatctcctgagtaac

SEQ ID NO: 4045155 - DNA, 25 bp, Homo sapien
cttggcagtaattaggacgcaggaa

SEQ ID NO: 4045156 - DNA, 25 bp, Homo sapien
gtaattaggacgcaggaacttttgc

SEQ ID NO: 4045157 - DNA, 25 bp, Homo sapien
aattaggacgcaggaacttttgcaa

SEQ ID NO: 4045158 - DNA, 25 bp, Homo sapien
gcagtaattaggacgcaggaacttt

SEQ ID NO: 4045159 - DNA, 25 bp, Homo sapien
tccggaaacaagtttcactgggtca

SEQ ID NO: 4045160 - DNA, 25 bp, Homo sapien
aacaagtttcactgggtcaaattga

SEQ ID NO: 4045161 - DNA, 25 bp, Homo sapien
aaacaagtttcactgggtcaaattg

SEQ ID NO: 4045162 - DNA, 25 bp, Homo sapien
ccacaggaacgtggcttgttttctg

SEQ ID NO: 4045163 - DNA, 25 bp, Homo sapien
tccattctggtgctcctgaccaaga

SEQ ID NO: 4045164 - DNA, 25 bp, Homo sapien
actgggtttacttgtggactggagc

SEQ ID NO: 4045165 - DNA, 25 bp, Homo sapien
gactggagcttcttattgcattgca

SEQ ID NO: 4045166 - DNA, 25 bp, Homo sapien
catcaacatttgtcccagattcact

SEQ ID NO: 4045167 - DNA, 25 bp, Homo sapien
agattcacttcctgtgatagctgtt

SEQ ID NO: 4045168 - DNA, 25 bp, Homo sapien
acttcctgtgatagctgttgtcttc

SEQ ID NO: 4045169 - DNA, 25 bp, Homo sapien
tcacttcctgtgatagctgttgtct

SEQ ID NO: 4045170 - DNA, 25 bp, Homo sapien
tccactgtctctgatacgtatcacc

SEQ ID NO: 4045171 - DNA, 25 bp, Homo sapien
ccactgtctctgatacgtatcacca

SEQ ID NO: 4045172 - DNA, 25 bp, Homo sapien
cactgtctctgatacgtatcaccat

SEQ ID NO: 4045173 - DNA, 25 bp, Homo sapien
tctggggacacaggactcccagtgg

SEQ ID NO: 4045174 - DNA, 25 bp, Homo sapien
ggttcctctggggacacaggactcc

SEQ ID NO: 4045175 - DNA, 25 bp, Homo sapien
aggactcccagtggcaacttatgtt

SEQ ID NO: 4045176 - DNA, 25 bp, Homo sapien
gactcccagtggcaacttatgttgc

SEQ ID NO: 4045177 - DNA, 25 bp, Homo sapien
tctcttctgcgtaatcacatcctct

SEQ ID NO: 4045178 - DNA, 25 bp, Homo sapien
ccaggaaatgattcatctctcttct

SEQ ID NO: 4045179 - DNA, 25 bp, Homo sapien
tcctcccttcagagcatcacagttt

SEQ ID NO: 4045180 - DNA, 25 bp, Homo sapien
gaggtagcccaccataggctccggt

SEQ ID NO: 4045181 - DNA, 25 bp, Homo sapien
catatctaatgtgctacattgcccg

SEQ ID NO: 4045182 - DNA, 25 bp, Homo sapien
cattgcccgaaatgaaagtctcaaa

SEQ ID NO: 4045183 - DNA, 25 bp, Homo sapien
ctgacaattactgaagcggctggga

SEQ ID NO: 4045184 - DNA, 25 bp, Homo sapien
gatttacgattcactctccatgtta

SEQ ID NO: 4045185 - DNA, 25 bp, Homo sapien
accaaggatgcaggtttgcatttcc

SEQ ID NO: 4045186 - DNA, 25 bp, Homo sapien
gcaatttcctcatcgcatttgctac

SEQ ID NO: 4045187 - DNA, 25 bp, Homo sapien
gttaagcaatttcctcatcgcattt

SEQ ID NO: 4045188 - DNA, 25 bp, Homo sapien
tttgctacaaggaaccaaggatgca

SEQ ID NO: 4045189 - DNA, 25 bp, Homo sapien
tacgttgcaacgtaatagttgtgta

SEQ ID NO: 4045190 - DNA, 25 bp, Homo sapien
tgtatatccgtttctctcgtttccc

SEQ ID NO: 4045191 - DNA, 25 bp, Homo sapien
tagttgtgtatatccgtttctctcg

SEQ ID NO: 4045192 - DNA, 25 bp, Homo sapien
tatttggctttagtactacgttgca

SEQ ID NO: 4045193 - DNA, 25 bp, Homo sapien
tctctatcttgactgcaaacgttgt

SEQ ID NO: 4045194 - DNA, 25 bp, Homo sapien
ctatcttgactgcaaacgttgtgca

SEQ ID NO: 4045195 - DNA, 25 bp, Homo sapien
cctgtcttgtcgtacttcatttgtg

SEQ ID NO: 4045196 - DNA, 25 bp, Homo sapien
tgtcttgtcgtacttcatttgtgtt

SEQ ID NO: 4045197 - DNA, 25 bp, Homo sapien
tgtggggctggcctaaatatcccca

SEQ ID NO: 4045198 - DNA, 25 bp, Homo sapien
aacatatcccaggtccctctctttt

SEQ ID NO: 4045199 - DNA, 25 bp, Homo sapien
gaggatcccccccaacatatcccag

SEQ ID NO: 4045200 - DNA, 25 bp, Homo sapien
ggctggcctaaatatccccagagct

SEQ ID NO: 4045201 - DNA, 25 bp, Homo sapien
ttctttcgcaggctcttcaatcaga

SEQ ID NO: 4045202 - DNA, 25 bp, Homo sapien
tagcctgatattcaaggcctcattg

SEQ ID NO: 4045203 - DNA, 25 bp, Homo sapien
tcttcaatcagaccgatgccatcac

SEQ ID NO: 4045204 - DNA, 25 bp, Homo sapien
tcaccccctagcctgatattcaagg

SEQ ID NO: 4045205 - DNA, 25 bp, Homo sapien
cctgaattgctacattgaaggacat

SEQ ID NO: 4045206 - DNA, 25 bp, Homo sapien
ttctccattactcccctgaattgct

SEQ ID NO: 4045207 - DNA, 25 bp, Homo sapien
cccctgaattgctacattgaaggac

SEQ ID NO: 4045208 - DNA, 25 bp, Homo sapien
ttactcccctgaattgctacattga

SEQ ID NO: 4045209 - DNA, 25 bp, Homo sapien
ctgtggtttttttaaaaagctgcat

SEQ ID NO: 4045210 - DNA, 25 bp, Homo sapien
gctgtggtttttttaaaaagctgca

SEQ ID NO: 4045211 - DNA, 25 bp, Homo sapien
tgctgtggtttttttaaaaagctgc

SEQ ID NO: 4045212 - DNA, 25 bp, Homo sapien
tgctccttttgctgtggttttttta

SEQ ID NO: 4045213 - DNA, 25 bp, Homo sapien
atgacattgtgcagtttgaaaaacg

SEQ ID NO: 4045214 - DNA, 25 bp, Homo sapien
gatctattgcacaacgtagtaccta

SEQ ID NO: 4045215 - DNA, 25 bp, Homo sapien
tgctaagcccatcacaggacaaata

SEQ ID NO: 4045216 - DNA, 25 bp, Homo sapien
ttgaaaaacgttgaggacagatatc

SEQ ID NO: 4045217 - DNA, 25 bp, Homo sapien
ttctactatttggtcagaagcttca

SEQ ID NO: 4045218 - DNA, 25 bp, Homo sapien
acatgattggttttaagagctcttc

SEQ ID NO: 4045219 - DNA, 25 bp, Homo sapien
gtaacatgattggttttaagagctc

SEQ ID NO: 4045220 - DNA, 25 bp, Homo sapien
tcaggcaatatcacaaaagctataa

SEQ ID NO: 4045221 - DNA, 25 bp, Homo sapien
taatctggtctaattcggtactgtg

SEQ ID NO: 4045222 - DNA, 25 bp, Homo sapien
gaagctagaggattgaataattctc

SEQ ID NO: 4045223 - DNA, 25 bp, Homo sapien
agtaactttttgaagccgtaatctg

SEQ ID NO: 4045224 - DNA, 25 bp, Homo sapien
tcggtactgtgagaagctagaggat

SEQ ID NO: 4045225 - DNA, 25 bp, Homo sapien
ctttccttatatagctgcttttact

SEQ ID NO: 4045226 - DNA, 25 bp, Homo sapien
ttactttcttcctctggctgctgct

SEQ ID NO: 4045227 - DNA, 25 bp, Homo sapien
ccttatatagctgcttttactttct

SEQ ID NO: 4045228 - DNA, 25 bp, Homo sapien
tccttatatagctgcttttactttc

SEQ ID NO: 4045229 - DNA, 25 bp, Homo sapien
tcaaagaagccacaattcttttcgt

SEQ ID NO: 4045230 - DNA, 25 bp, Homo sapien
tttagcagcttacacggattgaatg

SEQ ID NO: 4045231 - DNA, 25 bp, Homo sapien
ggattgaatgatgcctcaaagaagc

SEQ ID NO: 4045232 - DNA, 25 bp, Homo sapien
gcttacacggattgaatgatgcctc

SEQ ID NO: 4045233 - DNA, 25 bp, Homo sapien
aattgaagagggagctgctgattcc

SEQ ID NO: 4045234 - DNA, 25 bp, Homo sapien
gcaaagacctggacctgaggaggcc

SEQ ID NO: 4045235 - DNA, 25 bp, Homo sapien
aggaggccttagaatcaagccaagg

SEQ ID NO: 4045236 - DNA, 25 bp, Homo sapien
tccagatatggtttcagaattgaag

SEQ ID NO: 4045237 - DNA, 25 bp, Homo sapien
gcttagtatagctcagttgcaacat

SEQ ID NO: 4045238 - DNA, 25 bp, Homo sapien
tggcttagtatagctcagttgcaac

SEQ ID NO: 4045239 - DNA, 25 bp, Homo sapien
ggatggcttagtatagctcagttgc

SEQ ID NO: 4045240 - DNA, 25 bp, Homo sapien
gatggcttagtatagctcagttgca

SEQ ID NO: 4045241 - DNA, 25 bp, Homo sapien
aaaggcgatcatcgctgctaaaagc

SEQ ID NO: 4045242 - DNA, 25 bp, Homo sapien
taaaggcgatcatcgctgctaaaag

SEQ ID NO: 4045243 - DNA, 25 bp, Homo sapien
aggcgatcatcgctgctaaaagccc

SEQ ID NO: 4045244 - DNA, 25 bp, Homo sapien
ttaaaggcgatcatcgctgctaaaa

SEQ ID NO: 4045245 - DNA, 25 bp, Homo sapien
tagaatggccatggcacccttacat

SEQ ID NO: 4045246 - DNA, 25 bp, Homo sapien
tgagtgtagaatggccatggcaccc

SEQ ID NO: 4045247 - DNA, 25 bp, Homo sapien
tcatgagtgtagaatggccatggca

SEQ ID NO: 4045248 - DNA, 25 bp, Homo sapien
gtgtagaatggccatggcaccctta

SEQ ID NO: 4045249 - DNA, 25 bp, Homo sapien
tcaccaacactttcagatgactgag

SEQ ID NO: 4045250 - DNA, 25 bp, Homo sapien
gttggcctaacaactgccatgctgt

SEQ ID NO: 4045251 - DNA, 25 bp, Homo sapien
ctgttggcctaacaactgccatgct

SEQ ID NO: 4045252 - DNA, 25 bp, Homo sapien
tgctgtttgcttcaccaacactttc

SEQ ID NO: 4045253 - DNA, 25 bp, Homo sapien
catatctcagtcttaggcttcttca

SEQ ID NO: 4045254 - DNA, 25 bp, Homo sapien
gagtgcctattgtctctattcaaac

SEQ ID NO: 4045255 - DNA, 25 bp, Homo sapien
tgtcattttattgcctgcgagtgcc

SEQ ID NO: 4045256 - DNA, 25 bp, Homo sapien
tcagttattcagcagacaggctttc

SEQ ID NO: 4045257 - DNA, 25 bp, Homo sapien
ccagccttggagatatcctgccagg

SEQ ID NO: 4045258 - DNA, 25 bp, Homo sapien
ttaagtggggaatgatttcccagcc

SEQ ID NO: 4045259 - DNA, 25 bp, Homo sapien
ccaggtgtttattacggctccacgc

SEQ ID NO: 4045260 - DNA, 25 bp, Homo sapien
attacggctccacgcgagttccaaa

SEQ ID NO: 4045261 - DNA, 25 bp, Homo sapien
ggatcctgtgaaagttaatgctgca

SEQ ID NO: 4045262 - DNA, 25 bp, Homo sapien
tggatcctgtgaaagttaatgctgc

SEQ ID NO: 4045263 - DNA, 25 bp, Homo sapien
ctggatcctgtgaaagttaatgctg

SEQ ID NO: 4045264 - DNA, 25 bp, Homo sapien
tctggatcctgtgaaagttaatgct

SEQ ID NO: 4045265 - DNA, 25 bp, Homo sapien
ggaatgcgaatttgtctttgctcat

SEQ ID NO: 4045266 - DNA, 25 bp, Homo sapien
tgagcacctaacatgtaccaaggac

SEQ ID NO: 4045267 - DNA, 25 bp, Homo sapien
tagatccatgctgttataactatga

SEQ ID NO: 4045268 - DNA, 25 bp, Homo sapien
tatgatatagtgcattcagtctttc

SEQ ID NO: 4045269 - DNA, 25 bp, Homo sapien
agcctgggcaacaggccaactctat

SEQ ID NO: 4045270 - DNA, 25 bp, Homo sapien
tatgtgtgattgaaagtccagttgt

SEQ ID NO: 4045271 - DNA, 25 bp, Homo sapien
atgcacctctctgggaaaatatgtg

SEQ ID NO: 4045272 - DNA, 25 bp, Homo sapien
aatatgtgtgattgaaagtccagtt

SEQ ID NO: 4045273 - DNA, 25 bp, Homo sapien
aaaatatgtgtgattgaaagtccag

SEQ ID NO: 4045274 - DNA, 25 bp, Homo sapien
tatttcttgggaatatcaagccctg

SEQ ID NO: 4045275 - DNA, 25 bp, Homo sapien
tgtgtctatcaccagcccagaatgc

SEQ ID NO: 4045276 - DNA, 25 bp, Homo sapien
gaagccacagctagtacgggattgg

SEQ ID NO: 4045277 - DNA, 25 bp, Homo sapien
tcaagccctgcaatccttgtgtcta

SEQ ID NO: 4045278 - DNA, 25 bp, Homo sapien
tttccaatgtgtacctataactgat

SEQ ID NO: 4045279 - DNA, 25 bp, Homo sapien
ttccaatgtgtacctataactgatt

SEQ ID NO: 4045280 - DNA, 25 bp, Homo sapien
aaataagttaagatgggcagatcat

SEQ ID NO: 4045281 - DNA, 25 bp, Homo sapien
tgcgatttgccctcgcgaaagctcg

SEQ ID NO: 4045282 - DNA, 25 bp, Homo sapien
tttgccctcgcgaaagctcgtcaac

SEQ ID NO: 4045283 - DNA, 25 bp, Homo sapien
tcctccacacactgcgatttgccct

SEQ ID NO: 4045284 - DNA, 25 bp, Homo sapien
acacactgcgatttgccctcgcgaa

SEQ ID NO: 4045285 - DNA, 25 bp, Homo sapien
ctgaaggtgaacaagctccggctgg

SEQ ID NO: 4045286 - DNA, 25 bp, Homo sapien
tggccccacggacccttctgaatta

SEQ ID NO: 4045287 - DNA, 25 bp, Homo sapien
gctggccccacggacccttctgaat

SEQ ID NO: 4045288 - DNA, 25 bp, Homo sapien
ctggctggccccacggacccttctg

SEQ ID NO: 4045289 - DNA, 25 bp, Homo sapien
catgtcgctggcaactgcagctccg

SEQ ID NO: 4045290 - DNA, 25 bp, Homo sapien
acatgtcgctggcaactgcagctcc

SEQ ID NO: 4045291 - DNA, 25 bp, Homo sapien
tgatttctccaaccgtaagcgagcc

SEQ ID NO: 4045292 - DNA, 25 bp, Homo sapien
ccacaacagagaggtggccccggta

SEQ ID NO: 4045293 - DNA, 25 bp, Homo sapien
ccaaccgtaagcgagccgcggtgtg

SEQ ID NO: 4045294 - DNA, 25 bp, Homo sapien
ctcgtccacgcccacaacagagagg

SEQ ID NO: 4045295 - DNA, 25 bp, Homo sapien
tgaaggcttggttcaatcacccctg

SEQ ID NO: 4045296 - DNA, 25 bp, Homo sapien
gaaccttcaattcaggtatcctgcc

SEQ ID NO: 4045297 - DNA, 25 bp, Homo sapien
tctggcacacagtgttaattgttgc

SEQ ID NO: 4045298 - DNA, 25 bp, Homo sapien
tgccacaagctaagtccaccagtct

SEQ ID NO: 4045299 - DNA, 25 bp, Homo sapien
aatgaagtcctgagcgaagtgacac

SEQ ID NO: 4045300 - DNA, 25 bp, Homo sapien
ctgatttattctggtagtcatcccc

SEQ ID NO: 4045301 - DNA, 25 bp, Homo sapien
agtcctgagcgaagtgacacaaata

SEQ ID NO: 4045302 - DNA, 25 bp, Homo sapien
gatttattctggtagtcatccccaa

SEQ ID NO: 4045303 - DNA, 25 bp, Homo sapien
tgagtatgtatgtttcttattctgc

SEQ ID NO: 4045304 - DNA, 25 bp, Homo sapien
tatgtttcttattctgcctttgctc

SEQ ID NO: 4045305 - DNA, 25 bp, Homo sapien
ttattctgcctttgctcaaccctac

SEQ ID NO: 4045306 - DNA, 25 bp, Homo sapien
ctgtttttctacactgagtatgtat

SEQ ID NO: 4045307 - DNA, 25 bp, Homo sapien
actcagattcattgtctagacgttt

SEQ ID NO: 4045308 - DNA, 25 bp, Homo sapien
tcattgtctagacgtttctttcctg

SEQ ID NO: 4045309 - DNA, 25 bp, Homo sapien
tttcctgccccaatgctcagaagtc

SEQ ID NO: 4045310 - DNA, 25 bp, Homo sapien
tctttcctgccccaatgctcagaag

SEQ ID NO: 4045311 - DNA, 25 bp, Homo sapien
cactgtctgaccctcacataggtgt

SEQ ID NO: 4045312 - DNA, 25 bp, Homo sapien
aactcaggtgtaggaaaacagcatg

SEQ ID NO: 4045313 - DNA, 25 bp, Homo sapien
cctcacataggtgttctgcaggaag

SEQ ID NO: 4045314 - DNA, 25 bp, Homo sapien
ctaactcaggtgtaggaaaacagca

SEQ ID NO: 4045315 - DNA, 25 bp, Homo sapien
ccgtatttccttgagagactaatga

SEQ ID NO: 4045316 - DNA, 25 bp, Homo sapien
caatgtccgtatttccttgagagac

SEQ ID NO: 4045317 - DNA, 25 bp, Homo sapien
caagaaaccaatgtccgtatttcct

SEQ ID NO: 4045318 - DNA, 25 bp, Homo sapien
aaaccaatgtccgtatttccttgag

SEQ ID NO: 4045319 - DNA, 25 bp, Homo sapien
tcagaactgccgtctttcttgatag

SEQ ID NO: 4045320 - DNA, 25 bp, Homo sapien
gaactgccgtctttcttgatagatg

SEQ ID NO: 4045321 - DNA, 25 bp, Homo sapien
gccgtctttcttgatagatgtaaca

SEQ ID NO: 4045322 - DNA, 25 bp, Homo sapien
actgccgtctttcttgatagatgta

SEQ ID NO: 4045323 - DNA, 25 bp, Homo sapien
aatccatcatcatgactgatgggcc

SEQ ID NO: 4045324 - DNA, 25 bp, Homo sapien
agatatctcttcacccataaatcca

SEQ ID NO: 4045325 - DNA, 25 bp, Homo sapien
tatctccttccaagatatctcttca

SEQ ID NO: 4045326 - DNA, 25 bp, Homo sapien
ctcttcacccataaatccatcatca

SEQ ID NO: 4045327 - DNA, 25 bp, Homo sapien
gaggctatcagtgtcattaatgcag

SEQ ID NO: 4045328 - DNA, 25 bp, Homo sapien
aagtctggtcatggctagaaacaag

SEQ ID NO: 4045329 - DNA, 25 bp, Homo sapien
aatgcagcaggtcccatcatggtct

SEQ ID NO: 4045330 - DNA, 25 bp, Homo sapien
cctgagaagtctggtcatggctaga

SEQ ID NO: 4045331 - DNA, 25 bp, Homo sapien
aaatttatgcctgttcaccctccag

SEQ ID NO: 4045332 - DNA, 25 bp, Homo sapien
ttcaccctccagataccaggtccct

SEQ ID NO: 4045333 - DNA, 25 bp, Homo sapien
atttatgcctgttcaccctccagat

SEQ ID NO: 4045334 - DNA, 25 bp, Homo sapien
tcaccctccagataccaggtccctg

SEQ ID NO: 4045335 - DNA, 25 bp, Homo sapien
ttctctgtgtactccagtgaaaggg

SEQ ID NO: 4045336 - DNA, 25 bp, Homo sapien
taagagtttaaccaattgctgacac

SEQ ID NO: 4045337 - DNA, 25 bp, Homo sapien
ctgacactggatttcataatctggg

SEQ ID NO: 4045338 - DNA, 25 bp, Homo sapien
gcttattggatataaacaagttaac

SEQ ID NO: 4045339 - DNA, 25 bp, Homo sapien
gatttacaccaacttcaatgagaag

SEQ ID NO: 4045340 - DNA, 25 bp, Homo sapien
gtatcggttgttgaacacaatcgct

SEQ ID NO: 4045341 - DNA, 25 bp, Homo sapien
gaaatcctatttctagataacccta

SEQ ID NO: 4045342 - DNA, 25 bp, Homo sapien
tatttacatatgttaccagcccaaa

SEQ ID NO: 4045343 - DNA, 25 bp, Homo sapien
gcacctgggaccagtctggcagcat

SEQ ID NO: 4045344 - DNA, 25 bp, Homo sapien
aaagcacctgggaccagtctggcag

SEQ ID NO: 4045345 - DNA, 25 bp, Homo sapien
aagcacctgggaccagtctggcagc

SEQ ID NO: 4045346 - DNA, 25 bp, Homo sapien
ccaaagcacctgggaccagtctggc

SEQ ID NO: 4045347 - DNA, 25 bp, Homo sapien
aatgagggtctttcttatgtgtccg

SEQ ID NO: 4045348 - DNA, 25 bp, Homo sapien
agtatgtcaagtagcctgacagagt

SEQ ID NO: 4045349 - DNA, 25 bp, Homo sapien
cctgacagagtaaaatgagggtctt

SEQ ID NO: 4045350 - DNA, 25 bp, Homo sapien
tatgtgtccggtattttgctaggtc

SEQ ID NO: 4045351 - DNA, 25 bp, Homo sapien
agtagtagggatactatggtgttta

SEQ ID NO: 4045352 - DNA, 25 bp, Homo sapien
tgaagtagtagggatactatggtgt

SEQ ID NO: 4045353 - DNA, 25 bp, Homo sapien
cattcatccagtgaagtagtaggga

SEQ ID NO: 4045354 - DNA, 25 bp, Homo sapien
tccagtgaagtagtagggatactat

SEQ ID NO: 4045355 - DNA, 25 bp, Homo sapien
ccaagcctaagccaactgctaccat

SEQ ID NO: 4045356 - DNA, 25 bp, Homo sapien
tgccacagtttttggatcagttcat

SEQ ID NO: 4045357 - DNA, 25 bp, Homo sapien
ttgccacagtttttggatcagttca

SEQ ID NO: 4045358 - DNA, 25 bp, Homo sapien
gttcatccaagcctaagccaactgc

SEQ ID NO: 4045359 - DNA, 25 bp, Homo sapien
caggagatggaaccattttctttcc

SEQ ID NO: 4045360 - DNA, 25 bp, Homo sapien
cagttgcataacttggcaggagatg

SEQ ID NO: 4045361 - DNA, 25 bp, Homo sapien
ggttctgagctctgagtcatttctg

SEQ ID NO: 4045362 - DNA, 25 bp, Homo sapien
tacccaagcagtgtgggtggttctg

SEQ ID NO: 4045363 - DNA, 25 bp, Homo sapien
gaatacatcttggaatgtacctcca

SEQ ID NO: 4045364 - DNA, 25 bp, Homo sapien
aaaagaatacatcttggaatgtacc

SEQ ID NO: 4045365 - DNA, 25 bp, Homo sapien
atgaaaagaatacatcttggaatgt

SEQ ID NO: 4045366 - DNA, 25 bp, Homo sapien
aagaatacatcttggaatgtacctc

SEQ ID NO: 4045367 - DNA, 25 bp, Homo sapien
ccagtgcagctgtacgtctcttcct

SEQ ID NO: 4045368 - DNA, 25 bp, Homo sapien
ggcaagccagtgcagctgtacgtct

SEQ ID NO: 4045369 - DNA, 25 bp, Homo sapien
caagccagtgcagctgtacgtctct

SEQ ID NO: 4045370 - DNA, 25 bp, Homo sapien
gtgcagctgtacgtctcttccttct

SEQ ID NO: 4045371 - DNA, 25 bp, Homo sapien
cagttaggtcttcagatgatgggcc

SEQ ID NO: 4045372 - DNA, 25 bp, Homo sapien
cattttgtgggtccttaagtgggca

SEQ ID NO: 4045373 - DNA, 25 bp, Homo sapien
taaagctggtgctaggacacagatc

SEQ ID NO: 4045374 - DNA, 25 bp, Homo sapien
gactcgggcagcatggatctttctt

SEQ ID NO: 4045375 - DNA, 25 bp, Homo sapien
acagacatagtacaaacaatatttg

SEQ ID NO: 4045376 - DNA, 25 bp, Homo sapien
aagtataaaccacagacatagtaca

SEQ ID NO: 4045377 - DNA, 25 bp, Homo sapien
gaatttctcctcttactacacattg

SEQ ID NO: 4045378 - DNA, 25 bp, Homo sapien
cattgtctcgtatcccctactgtct

SEQ ID NO: 4045379 - DNA, 25 bp, Homo sapien
ttctactggctggaacggaacctca

SEQ ID NO: 4045380 - DNA, 25 bp, Homo sapien
gctaagtactatgcaaggtgttttc

SEQ ID NO: 4045381 - DNA, 25 bp, Homo sapien
tcaacatttcggtccctgcatgtcc

SEQ ID NO: 4045382 - DNA, 25 bp, Homo sapien
ttcaacatttcggtccctgcatgtc

SEQ ID NO: 4045383 - DNA, 25 bp, Homo sapien
caacatttcggtccctgcatgtcct

SEQ ID NO: 4045384 - DNA, 25 bp, Homo sapien
tgttcttcatcccataatgacgtgc

SEQ ID NO: 4045385 - DNA, 25 bp, Homo sapien
tcccataatgacgtgcatagttcat

SEQ ID NO: 4045386 - DNA, 25 bp, Homo sapien
catcccataatgacgtgcatagttc

SEQ ID NO: 4045387 - DNA, 25 bp, Homo sapien
tcttcatcccataatgacgtgcata

SEQ ID NO: 4045388 - DNA, 25 bp, Homo sapien
ctgttagttcttgtgatctctcttt

SEQ ID NO: 4045389 - DNA, 25 bp, Homo sapien
caataagcgtacattgttttttcat

SEQ ID NO: 4045390 - DNA, 25 bp, Homo sapien
caccagaagaatcataagtcttcat

SEQ ID NO: 4045391 - DNA, 25 bp, Homo sapien
taagcatgatgcgtccaggtgatat

SEQ ID NO: 4045392 - DNA, 25 bp, Homo sapien
tgttcatatttttctgtttttacta

SEQ ID NO: 4045393 - DNA, 25 bp, Homo sapien
ctgtttttactaatgcctttcctgt

SEQ ID NO: 4045394 - DNA, 25 bp, Homo sapien
catatttttctgtttttactaatgc

SEQ ID NO: 4045395 - DNA, 25 bp, Homo sapien
cttttgtgttcatatttttctgttt

SEQ ID NO: 4045396 - DNA, 25 bp, Homo sapien
caccaacctcaaaatattgtctagg

SEQ ID NO: 4045397 - DNA, 25 bp, Homo sapien
aataaatctttccaactctatgggc

SEQ ID NO: 4045398 - DNA, 25 bp, Homo sapien
aaatgccagtatcagtcatctaaaa

SEQ ID NO: 4045399 - DNA, 25 bp, Homo sapien
tgcttaagcataagtgctattgcct

SEQ ID NO: 4045400 - DNA, 25 bp, Homo sapien
cttgcttgagggcaaacagcatatt

SEQ ID NO: 4045401 - DNA, 25 bp, Homo sapien
atttgtgaatgcagagtcgagtcat

SEQ ID NO: 4045402 - DNA, 25 bp, Homo sapien
aagatatttgtgaatgcagagtcga

SEQ ID NO: 4045403 - DNA, 25 bp, Homo sapien
atatttgtgaatgcagagtcgagtc

SEQ ID NO: 4045404 - DNA, 25 bp, Homo sapien
agatatttgtgaatgcagagtcgag

SEQ ID NO: 4045405 - DNA, 25 bp, Homo sapien
atcttgcttaacaattcgagggact

SEQ ID NO: 4045406 - DNA, 25 bp, Homo sapien
cttgcttaacaattcgagggacttt

SEQ ID NO: 4045407 - DNA, 25 bp, Homo sapien
tatcttgcttaacaattcgagggac

SEQ ID NO: 4045408 - DNA, 25 bp, Homo sapien
tcttgcttaacaattcgagggactt

SEQ ID NO: 4045409 - DNA, 25 bp, Homo sapien
aaaggtagtcatacaatgtgagctg

SEQ ID NO: 4045410 - DNA, 25 bp, Homo sapien
cttcctggaaaaggtagtcatacaa

SEQ ID NO: 4045411 - DNA, 25 bp, Homo sapien
cctggaaaaggtagtcatacaatgt

SEQ ID NO: 4045412 - DNA, 25 bp, Homo sapien
gtcatacaatgtgagctgaagtcct

SEQ ID NO: 4045413 - DNA, 25 bp, Homo sapien
taacgtagtcacatgttgacttcag

SEQ ID NO: 4045414 - DNA, 25 bp, Homo sapien
ggaatcagcctaacactaaatgcaa

SEQ ID NO: 4045415 - DNA, 25 bp, Homo sapien
cactgtactggttataaattgccta

SEQ ID NO: 4045416 - DNA, 25 bp, Homo sapien
tagagaagaaaaacgcccaatgttg

SEQ ID NO: 4045417 - DNA, 25 bp, Homo sapien
taagtctaccaactttctacctctc

SEQ ID NO: 4045418 - DNA, 25 bp, Homo sapien
tctccccttgaagtaatagccacca

SEQ ID NO: 4045419 - DNA, 25 bp, Homo sapien
ccttgagaagagttaagtctaccaa

SEQ ID NO: 4045420 - DNA, 25 bp, Homo sapien
acaatggataaaagtcaccttctct

SEQ ID NO: 4045421 - DNA, 25 bp, Homo sapien
ttgccttacttatattagtgcccag

SEQ ID NO: 4045422 - DNA, 25 bp, Homo sapien
tcatcctttgaactgaaggtctcct

SEQ ID NO: 4045423 - DNA, 25 bp, Homo sapien
ccttgagcataggtgtttgccttac

SEQ ID NO: 4045424 - DNA, 25 bp, Homo sapien
gaccattaaagatcgactgcagctc

SEQ ID NO: 4045425 - DNA, 25 bp, Homo sapien
gttaacaatagtgcctacccatagg

SEQ ID NO: 4045426 - DNA, 25 bp, Homo sapien
aaaattaacatgcaactacaggcga

SEQ ID NO: 4045427 - DNA, 25 bp, Homo sapien
tacaggcgaatgtaagactgcagga

SEQ ID NO: 4045428 - DNA, 25 bp, Homo sapien
gaagaaactgatgctgcaattgaga

SEQ ID NO: 4045429 - DNA, 25 bp, Homo sapien
cttttcctgccaatgaaaactagga

SEQ ID NO: 4045430 - DNA, 25 bp, Homo sapien
ttttcctgccaatgaaaactaggag

SEQ ID NO: 4045431 - DNA, 25 bp, Homo sapien
gcttttcctgccaatgaaaactagg

SEQ ID NO: 4045432 - DNA, 25 bp, Homo sapien
tgcttttcctgccaatgaaaactag

SEQ ID NO: 4045433 - DNA, 25 bp, Homo sapien
ctggtgctgagaaaccctaaagagg

SEQ ID NO: 4045434 - DNA, 25 bp, Homo sapien
agtctggtgctgagaaaccctaaag

SEQ ID NO: 4045435 - DNA, 25 bp, Homo sapien
ggtgctgagaaaccctaaagaggac

SEQ ID NO: 4045436 - DNA, 25 bp, Homo sapien
ggagtctggtgctgagaaaccctaa

SEQ ID NO: 4045437 - DNA, 25 bp, Homo sapien
catcaagggtgaatctattagtctc

SEQ ID NO: 4045438 - DNA, 25 bp, Homo sapien
tttatcaactagaagggatttaaca

SEQ ID NO: 4045439 - DNA, 25 bp, Homo sapien
taacatgactgaaggataagcgctc

SEQ ID NO: 4045440 - DNA, 25 bp, Homo sapien
gattactcaaggttttatcaactag

SEQ ID NO: 4045441 - DNA, 25 bp, Homo sapien
taaggcatagtccatggcacactgg

SEQ ID NO: 4045442 - DNA, 25 bp, Homo sapien
cttaatcgtgattaaggcatagtcc

SEQ ID NO: 4045443 - DNA, 25 bp, Homo sapien
taaaaaagctcttaatcgtgattaa

SEQ ID NO: 4045444 - DNA, 25 bp, Homo sapien
tcgtgattaaggcatagtccatggc

SEQ ID NO: 4045445 - DNA, 25 bp, Homo sapien
gggatcaaggcctctaatcttatct

SEQ ID NO: 4045446 - DNA, 25 bp, Homo sapien
gattgaggtcttgttctaacagcag

SEQ ID NO: 4045447 - DNA, 25 bp, Homo sapien
tagggacctgattaaacagagacag

SEQ ID NO: 4045448 - DNA, 25 bp, Homo sapien
gaacagcctttgcacactgtgaaat

SEQ ID NO: 4045449 - DNA, 25 bp, Homo sapien
gaagtaggcgggagagattagtcca

SEQ ID NO: 4045450 - DNA, 25 bp, Homo sapien
gcgggagagattagtccaggtattt

SEQ ID NO: 4045451 - DNA, 25 bp, Homo sapien
gagattagtccaggtattttgagcg

SEQ ID NO: 4045452 - DNA, 25 bp, Homo sapien
ccaggtattttgagcgatagaaggg

SEQ ID NO: 4045453 - DNA, 25 bp, Homo sapien
ctggccttagctggggctgtgccat

SEQ ID NO: 4045454 - DNA, 25 bp, Homo sapien
ctttggtggcttcatcatcctccaa

SEQ ID NO: 4045455 - DNA, 25 bp, Homo sapien
ggtggcttcatcatcctccaatgac

SEQ ID NO: 4045456 - DNA, 25 bp, Homo sapien
tcatcatcctccaatgactttggca

SEQ ID NO: 4045457 - DNA, 25 bp, Homo sapien
cttcatcatcctccaatgactttgg

SEQ ID NO: 4045458 - DNA, 25 bp, Homo sapien
ttgcttttcgttttttagcatcttg

SEQ ID NO: 4045459 - DNA, 25 bp, Homo sapien
gctagacatggatactcaataattt

SEQ ID NO: 4045460 - DNA, 25 bp, Homo sapien
agctagacatggatactcaataatt

SEQ ID NO: 4045461 - DNA, 25 bp, Homo sapien
catacttcacaatggctttatgttg

SEQ ID NO: 4045462 - DNA, 25 bp, Homo sapien
tataacagcattcctcatacttcac

SEQ ID NO: 4045463 - DNA, 25 bp, Homo sapien
tatgttgtaacttctccctagcttc

SEQ ID NO: 4045464 - DNA, 25 bp, Homo sapien
gtactgcttctgtataacagcattc

SEQ ID NO: 4045465 - DNA, 25 bp, Homo sapien
caactgtaacagttggtggaagcca

SEQ ID NO: 4045466 - DNA, 25 bp, Homo sapien
caatgccagttgagctgtaataaaa

SEQ ID NO: 4045467 - DNA, 25 bp, Homo sapien
ggtggaagccattttaagtagcagt

SEQ ID NO: 4045468 - DNA, 25 bp, Homo sapien
tattgaaccattcccactaaatgca

SEQ ID NO: 4045469 - DNA, 25 bp, Homo sapien
gatcatcagcaatacttctccagtg

SEQ ID NO: 4045470 - DNA, 25 bp, Homo sapien
caggcctcatgttctcgatcatcag

SEQ ID NO: 4045471 - DNA, 25 bp, Homo sapien
ttcctcggcatccagtaagcttcct

SEQ ID NO: 4045472 - DNA, 25 bp, Homo sapien
cctcggcatccagtaagcttcctga

SEQ ID NO: 4045473 - DNA, 25 bp, Homo sapien
caagagtatcttcctggactggttt

SEQ ID NO: 4045474 - DNA, 25 bp, Homo sapien
tcaagagtatcttcctggactggtt

SEQ ID NO: 4045475 - DNA, 25 bp, Homo sapien
gtatcttcctggactggtttagcat

SEQ ID NO: 4045476 - DNA, 25 bp, Homo sapien
gagtatcttcctggactggtttagc

SEQ ID NO: 4045477 - DNA, 25 bp, Homo sapien
tgtggctaggctagaaaattccacc

SEQ ID NO: 4045478 - DNA, 25 bp, Homo sapien
tggctaggctagaaaattccaccat

SEQ ID NO: 4045479 - DNA, 25 bp, Homo sapien
cactgtggctaggctagaaaattcc

SEQ ID NO: 4045480 - DNA, 25 bp, Homo sapien
attcactgtggctaggctagaaaat

SEQ ID NO: 4045481 - DNA, 25 bp, Homo sapien
tttttactcttggagtttcttgcca

SEQ ID NO: 4045482 - DNA, 25 bp, Homo sapien
tgctgtgggctccaatctctgagaa

SEQ ID NO: 4045483 - DNA, 25 bp, Homo sapien
aaccctgcaggaaagctctatgttt

SEQ ID NO: 4045484 - DNA, 25 bp, Homo sapien
cttgccatttcttgtacagtgtcat

SEQ ID NO: 4045485 - DNA, 25 bp, Homo sapien
ggcttagtgaagaagctacagtcat

SEQ ID NO: 4045486 - DNA, 25 bp, Homo sapien
tatttgtgagcgtggcttagtgaag

SEQ ID NO: 4045487 - DNA, 25 bp, Homo sapien
tacagtcatactttctccaggatgt

SEQ ID NO: 4045488 - DNA, 25 bp, Homo sapien
tccaatatttgtgagcgtggcttag

SEQ ID NO: 4045489 - DNA, 25 bp, Homo sapien
tttcagccatgggtaggattatctg

SEQ ID NO: 4045490 - DNA, 25 bp, Homo sapien
gattacaggaacaggttgtgaccat

SEQ ID NO: 4045491 - DNA, 25 bp, Homo sapien
ccatgggtaggattatctgtgagca

SEQ ID NO: 4045492 - DNA, 25 bp, Homo sapien
caggttgtgaccatgcagagtcttc

SEQ ID NO: 4045493 - DNA, 25 bp, Homo sapien
gggacagacacttcttcaggatcat

SEQ ID NO: 4045494 - DNA, 25 bp, Homo sapien
gcctgaggcaggagtgacaatgatg

SEQ ID NO: 4045495 - DNA, 25 bp, Homo sapien
gcagatgctatggatgaggcatggg

SEQ ID NO: 4045496 - DNA, 25 bp, Homo sapien
ggcctgaggcaggagtgacaatgat

SEQ ID NO: 4045497 - DNA, 25 bp, Homo sapien
attaatcctattttgagtttcattt

SEQ ID NO: 4045498 - DNA, 25 bp, Homo sapien
tccttcactgaaggcatattagaaa

SEQ ID NO: 4045499 - DNA, 25 bp, Homo sapien
ctccttcactgaaggcatattagaa

SEQ ID NO: 4045500 - DNA, 25 bp, Homo sapien
gaggaatgacaaaattaatcctatt

SEQ ID NO: 4045501 - DNA, 25 bp, Homo sapien
gaatatgtgattataaagataccaa

SEQ ID NO: 4045502 - DNA, 25 bp, Homo sapien
cataaggctgtccttgtaaggagtg

SEQ ID NO: 4045503 - DNA, 25 bp, Homo sapien
ccagtctctgtcagtagggagtgag

SEQ ID NO: 4045504 - DNA, 25 bp, Homo sapien
taaaccgtctcaggtcataaggctg

SEQ ID NO: 4045505 - DNA, 25 bp, Homo sapien
tgccttgagggttccttgagttggt

SEQ ID NO: 4045506 - DNA, 25 bp, Homo sapien
gagggtgccttgagggttccttgag

SEQ ID NO: 4045507 - DNA, 25 bp, Homo sapien
tccttggagggtgccttgagggttc

SEQ ID NO: 4045508 - DNA, 25 bp, Homo sapien
cttggagggtgccttgagggttcct

SEQ ID NO: 4045509 - DNA, 25 bp, Homo sapien
tggtgatgatgatgcccattgccta

SEQ ID NO: 4045510 - DNA, 25 bp, Homo sapien
aagcctaatgatcatatttgctgct

SEQ ID NO: 4045511 - DNA, 25 bp, Homo sapien
taatgatcatatttgctgctgctga

SEQ ID NO: 4045512 - DNA, 25 bp, Homo sapien
tgatgatgcccattgcctaaaatga

SEQ ID NO: 4045513 - DNA, 25 bp, Homo sapien
ctagatctttctggctctaacctgt

SEQ ID NO: 4045514 - DNA, 25 bp, Homo sapien
gcacgcctcacttcgcagacgggat

SEQ ID NO: 4045515 - DNA, 25 bp, Homo sapien
cacgcctcacttcgcagacgggatg

SEQ ID NO: 4045516 - DNA, 25 bp, Homo sapien
gcagacagcgcaggtttcttcctcg

SEQ ID NO: 4045517 - DNA, 25 bp, Homo sapien
gttgaagagtgggaaatggccccag

SEQ ID NO: 4045518 - DNA, 25 bp, Homo sapien
acagcgcaggtttcttcctcgaggg

SEQ ID NO: 4045519 - DNA, 25 bp, Homo sapien
tgaagagtgggaaatggccccagat

SEQ ID NO: 4045520 - DNA, 25 bp, Homo sapien
ctgcggcggaaccaggaacaaaata

SEQ ID NO: 4045521 - DNA, 25 bp, Homo sapien
aaaatacgcttagtgagttgcccat

SEQ ID NO: 4045522 - DNA, 25 bp, Homo sapien
gaacaaaatacgcttagtgagttgc

SEQ ID NO: 4045523 - DNA, 25 bp, Homo sapien
caggaacaaaatacgcttagtgagt

SEQ ID NO: 4045524 - DNA, 25 bp, Homo sapien
cagccagatcccgccaggctctcca

SEQ ID NO: 4045525 - DNA, 25 bp, Homo sapien
tccagtgcctctgtgctgcctggag

SEQ ID NO: 4045526 - DNA, 25 bp, Homo sapien
gatcccgccaggctctccagtgcct

SEQ ID NO: 4045527 - DNA, 25 bp, Homo sapien
ctggagccaggcctgccttctccat

SEQ ID NO: 4045528 - DNA, 25 bp, Homo sapien
atgctggcaccaagtggaggcacat

SEQ ID NO: 4045529 - DNA, 25 bp, Homo sapien
tgctggcaccaagtggaggcacatc

SEQ ID NO: 4045530 - DNA, 25 bp, Homo sapien
tctcctggtaaggttgattagctct

SEQ ID NO: 4045531 - DNA, 25 bp, Homo sapien
gtaaggttgattagctctcggaagc

SEQ ID NO: 4045532 - DNA, 25 bp, Homo sapien
tagctctcggaagctgagcatatgt

SEQ ID NO: 4045533 - DNA, 25 bp, Homo sapien
ggaagctgagcatatgtttaaaatc

SEQ ID NO: 4045534 - DNA, 25 bp, Homo sapien
gcaacatctggatccctgggcttgg

SEQ ID NO: 4045535 - DNA, 25 bp, Homo sapien
cattttatgattagtctgcgacaga

SEQ ID NO: 4045536 - DNA, 25 bp, Homo sapien
tctgttcggcagaaggcagatgcca

SEQ ID NO: 4045537 - DNA, 25 bp, Homo sapien
tgtgcttgtggctatacaatgcccc

SEQ ID NO: 4045538 - DNA, 25 bp, Homo sapien
ctggatttacaggagtattcaaagc

SEQ ID NO: 4045539 - DNA, 25 bp, Homo sapien
tcaaagctttgaaagtccgtgaagg

SEQ ID NO: 4045540 - DNA, 25 bp, Homo sapien
tccgtgaaggcagtggatagtcaat

SEQ ID NO: 4045541 - DNA, 25 bp, Homo sapien
caaaaaacacgtgggcttattgcca

SEQ ID NO: 4045542 - DNA, 25 bp, Homo sapien
cttaatgaagggaaggtcttagact

SEQ ID NO: 4045543 - DNA, 25 bp, Homo sapien
gaagggaaggtcttagacttctctg

SEQ ID NO: 4045544 - DNA, 25 bp, Homo sapien
taatgaagggaaggtcttagacttc

SEQ ID NO: 4045545 - DNA, 25 bp, Homo sapien
tgaagggaaggtcttagacttctct

SEQ ID NO: 4045546 - DNA, 25 bp, Homo sapien
ttcagggcaaaactgtgcgcaagac

SEQ ID NO: 4045547 - DNA, 25 bp, Homo sapien
cagggcaaaactgtgcgcaagacat

SEQ ID NO: 4045548 - DNA, 25 bp, Homo sapien
cttcagggcaaaactgtgcgcaaga

SEQ ID NO: 4045549 - DNA, 25 bp, Homo sapien
tcagggcaaaactgtgcgcaagaca

SEQ ID NO: 4045550 - DNA, 25 bp, Homo sapien
gacagtctccatgtcttaaacctgg

SEQ ID NO: 4045551 - DNA, 25 bp, Homo sapien
gagcgccggttcctgttccatagtc

SEQ ID NO: 4045552 - DNA, 25 bp, Homo sapien
gaagactagccaagctctgacagtc

SEQ ID NO: 4045553 - DNA, 25 bp, Homo sapien
gctccttgtgcaatatgaagactag

SEQ ID NO: 4045554 - DNA, 25 bp, Homo sapien
cttggctttcatggactgttcatct

SEQ ID NO: 4045555 - DNA, 25 bp, Homo sapien
ctccttttcacttgcatatatccat

SEQ ID NO: 4045556 - DNA, 25 bp, Homo sapien
tccttttcacttgcatatatccatt

SEQ ID NO: 4045557 - DNA, 25 bp, Homo sapien
taatccaatctgatgccttgcctgt

SEQ ID NO: 4045558 - DNA, 25 bp, Homo sapien
tctccttttcacttgcatatatcca

SEQ ID NO: 4045559 - DNA, 25 bp, Homo sapien
ttcaaaacgtagctctaatgcagtc

SEQ ID NO: 4045560 - DNA, 25 bp, Homo sapien
gacactcttcttaaccagtctacgg

SEQ ID NO: 4045561 - DNA, 25 bp, Homo sapien
tggtcaatgtaggtgttttggtcaa

SEQ ID NO: 4045562 - DNA, 25 bp, Homo sapien
cttctatggcaacattggtcaatgt

SEQ ID NO: 4045563 - DNA, 25 bp, Homo sapien
tataataataagaaggacgaaaaca

SEQ ID NO: 4045564 - DNA, 25 bp, Homo sapien
acacagcaatagcaacgccaataaa

SEQ ID NO: 4045565 - DNA, 25 bp, Homo sapien
gtctgtgactatttcgaaggcaatg

SEQ ID NO: 4045566 - DNA, 25 bp, Homo sapien
gctatgtcctctacctgactttcag

SEQ ID NO: 4045567 - DNA, 25 bp, Homo sapien
caaactcggaagcatccctggaggt

SEQ ID NO: 4045568 - DNA, 25 bp, Homo sapien
gaatctgaaactctgacattgtctg

SEQ ID NO: 4045569 - DNA, 25 bp, Homo sapien
tgcaaacaatcatgggagtgcaggc

SEQ ID NO: 4045570 - DNA, 25 bp, Homo sapien
taaacttgaaagaaaattcctgatg

SEQ ID NO: 4045571 - DNA, 25 bp, Homo sapien
ccactagtttcaaatgcctaattta

SEQ ID NO: 4045572 - DNA, 25 bp, Homo sapien
tctttgttgccctggtataccacta

SEQ ID NO: 4045573 - DNA, 25 bp, Homo sapien
ttatccttcggatatctcttatcat

SEQ ID NO: 4045574 - DNA, 25 bp, Homo sapien
tctcgtcctctttttatccttcgga

SEQ ID NO: 4045575 - DNA, 25 bp, Homo sapien
actttatcttcagattggggtctgc

SEQ ID NO: 4045576 - DNA, 25 bp, Homo sapien
tgcatagccactatgatcatctcct

SEQ ID NO: 4045577 - DNA, 25 bp, Homo sapien
agtcatgggagtgactatcccatca

SEQ ID NO: 4045578 - DNA, 25 bp, Homo sapien
catgggagtgactatcccatcatac

SEQ ID NO: 4045579 - DNA, 25 bp, Homo sapien
gtcatgggagtgactatcccatcat

SEQ ID NO: 4045580 - DNA, 25 bp, Homo sapien
tcatgggagtgactatcccatcata

SEQ ID NO: 4045581 - DNA, 25 bp, Homo sapien
taccaacagtataaaggcgtttcta

SEQ ID NO: 4045582 - DNA, 25 bp, Homo sapien
taacatctaggataaggttcttgac

SEQ ID NO: 4045583 - DNA, 25 bp, Homo sapien
catctaggataaggttcttgactcc

SEQ ID NO: 4045584 - DNA, 25 bp, Homo sapien
acatctaggataaggttcttgactc

SEQ ID NO: 4045585 - DNA, 25 bp, Homo sapien
tctaacatctaggataaggttcttg

SEQ ID NO: 4045586 - DNA, 25 bp, Homo sapien
aaatattgttactgcttctatcacc

SEQ ID NO: 4045587 - DNA, 25 bp, Homo sapien
taagtgataaaatattgttactgct

SEQ ID NO: 4045588 - DNA, 25 bp, Homo sapien
tggttacaattgcaggcacagtctt

SEQ ID NO: 4045589 - DNA, 25 bp, Homo sapien
cttgatcaataatgcatactggtta

SEQ ID NO: 4045590 - DNA, 25 bp, Homo sapien
gaaactcaactttgttgtgttctga

SEQ ID NO: 4045591 - DNA, 25 bp, Homo sapien
tcttaaatactgtgtgcttattgcc

SEQ ID NO: 4045592 - DNA, 25 bp, Homo sapien
gcataatggcaatcacagtcaatgg

SEQ ID NO: 4045593 - DNA, 25 bp, Homo sapien
tttatcatagtctctgttacagtcc

SEQ ID NO: 4045594 - DNA, 25 bp, Homo sapien
gtcctgctagcccacagcatgaggg

SEQ ID NO: 4045595 - DNA, 25 bp, Homo sapien
gtgataggtctgatatttcccaaag

SEQ ID NO: 4045596 - DNA, 25 bp, Homo sapien
tacaaagaatgctcggtgacctggc

SEQ ID NO: 4045597 - DNA, 25 bp, Homo sapien
tactgtgtgcttagactgtaaatca

SEQ ID NO: 4045598 - DNA, 25 bp, Homo sapien
aaagctgctaaggcatttttctgca

SEQ ID NO: 4045599 - DNA, 25 bp, Homo sapien
acaaagctgctaaggcatttttctg

SEQ ID NO: 4045600 - DNA, 25 bp, Homo sapien
caaagctgctaaggcatttttctgc

SEQ ID NO: 4045601 - DNA, 25 bp, Homo sapien
caacaaagctgctaaggcatttttc

SEQ ID NO: 4045602 - DNA, 25 bp, Homo sapien
caaagcaggtaacagccttcttcaa

SEQ ID NO: 4045603 - DNA, 25 bp, Homo sapien
aagcaggtaacagccttcttcaaag

SEQ ID NO: 4045604 - DNA, 25 bp, Homo sapien
aaagcaggtaacagccttcttcaaa

SEQ ID NO: 4045605 - DNA, 25 bp, Homo sapien
agaaagtcaacgtaactttgatgac

SEQ ID NO: 4045606 - DNA, 25 bp, Homo sapien
ctggcacagacaaatcatgcttgta

SEQ ID NO: 4045607 - DNA, 25 bp, Homo sapien
actggcacagacaaatcatgcttgt

SEQ ID NO: 4045608 - DNA, 25 bp, Homo sapien
gacaacaccagaaagtcaacgtaac

SEQ ID NO: 4045609 - DNA, 25 bp, Homo sapien
ctgaatggctcccagacgcagtctg

SEQ ID NO: 4045610 - DNA, 25 bp, Homo sapien
aactgaatggctcccagacgcagtc

SEQ ID NO: 4045611 - DNA, 25 bp, Homo sapien
tgaatggctcccagacgcagtctgt

SEQ ID NO: 4045612 - DNA, 25 bp, Homo sapien
actgaatggctcccagacgcagtct

SEQ ID NO: 4045613 - DNA, 25 bp, Homo sapien
tggaataatccccttataaacaaga

SEQ ID NO: 4045614 - DNA, 25 bp, Homo sapien
aaattcatgccaccttttgagcttc

SEQ ID NO: 4045615 - DNA, 25 bp, Homo sapien
aaacaagaggtgcaaatttcaagtc

SEQ ID NO: 4045616 - DNA, 25 bp, Homo sapien
tcaaattcatgccaccttttgagct

SEQ ID NO: 4045617 - DNA, 25 bp, Homo sapien
gtaaaggtgtccagtaccatccatg

SEQ ID NO: 4045618 - DNA, 25 bp, Homo sapien
tgtacttaacatgtagcgcactcaa

SEQ ID NO: 4045619 - DNA, 25 bp, Homo sapien
caacattgctaagggatacatggaa

SEQ ID NO: 4045620 - DNA, 25 bp, Homo sapien
actgaccagttaggcagggatgtga

SEQ ID NO: 4045621 - DNA, 25 bp, Homo sapien
ggatgatcagaagtttcctttgtca

SEQ ID NO: 4045622 - DNA, 25 bp, Homo sapien
tgtagtactcagaaacccagttgtg

SEQ ID NO: 4045623 - DNA, 25 bp, Homo sapien
gccactgtcagtagggagctcttct

SEQ ID NO: 4045624 - DNA, 25 bp, Homo sapien
tgaagcccactctcaaaatttactg

SEQ ID NO: 4045625 - DNA, 25 bp, Homo sapien
ccaagtgacatatctccttggtggg

SEQ ID NO: 4045626 - DNA, 25 bp, Homo sapien
tgctctgagtcctactgtgtcacag

SEQ ID NO: 4045627 - DNA, 25 bp, Homo sapien
ctatgttgtaaacgctttgatgggt

SEQ ID NO: 4045628 - DNA, 25 bp, Homo sapien
tttccattctgtattgagagctcct

SEQ ID NO: 4045629 - DNA, 25 bp, Homo sapien
tctttgaacatatgctgtagactgc

SEQ ID NO: 4045630 - DNA, 25 bp, Homo sapien
gactgcattctaccagatgagtggg

SEQ ID NO: 4045631 - DNA, 25 bp, Homo sapien
aagctatagacttcctcctgtggac

SEQ ID NO: 4045632 - DNA, 25 bp, Homo sapien
ggaacaagctgtgagactaaacttt

SEQ ID NO: 4045633 - DNA, 25 bp, Homo sapien
gcagctattaaagctattagttact

SEQ ID NO: 4045634 - DNA, 25 bp, Homo sapien
tgatggaagtggcagctattaaagc

SEQ ID NO: 4045635 - DNA, 25 bp, Homo sapien
aagtgatggaagtggcagctattaa

SEQ ID NO: 4045636 - DNA, 25 bp, Homo sapien
tcgcagttaaagtgatggaagtggc

SEQ ID NO: 4045637 - DNA, 25 bp, Homo sapien
cacaaatagaattgctgcacttagg

SEQ ID NO: 4045638 - DNA, 25 bp, Homo sapien
aaatagaattgctgcacttaggata

SEQ ID NO: 4045639 - DNA, 25 bp, Homo sapien
ccacaaatagaattgctgcacttag

SEQ ID NO: 4045640 - DNA, 25 bp, Homo sapien
caaatagaattgctgcacttaggat

SEQ ID NO: 4045641 - DNA, 25 bp, Homo sapien
caggtcaagtgctacgtcgaggtct

SEQ ID NO: 4045642 - DNA, 25 bp, Homo sapien
cgtcgaggtctgcttgttccttaat

SEQ ID NO: 4045643 - DNA, 25 bp, Homo sapien
tcataacaggtcaagtgctacgtcg

SEQ ID NO: 4045644 - DNA, 25 bp, Homo sapien
tgctacgtcgaggtctgcttgttcc

SEQ ID NO: 4045645 - DNA, 25 bp, Homo sapien
gaaacacaaagcagtattgatttct

SEQ ID NO: 4045646 - DNA, 25 bp, Homo sapien
tcagcgtccttgcatgcctttcctt

SEQ ID NO: 4045647 - DNA, 25 bp, Homo sapien
agcgtccttgcatgcctttcctttt

SEQ ID NO: 4045648 - DNA, 25 bp, Homo sapien
caaagcagtattgatttctcttcat

SEQ ID NO: 4045649 - DNA, 25 bp, Homo sapien
tcaggaatttgctgaaacgttccat

SEQ ID NO: 4045650 - DNA, 25 bp, Homo sapien
taatatttgaccactcccataccct

SEQ ID NO: 4045651 - DNA, 25 bp, Homo sapien
cccataccctggattcatttcaaaa

SEQ ID NO: 4045652 - DNA, 25 bp, Homo sapien
caaaagcatcatcatccttcaggaa

SEQ ID NO: 4045653 - DNA, 25 bp, Homo sapien
gttttgctcaacagtctctttctgt

SEQ ID NO: 4045654 - DNA, 25 bp, Homo sapien
tctttactagtgttggaagcaatgt

SEQ ID NO: 4045655 - DNA, 25 bp, Homo sapien
atctttactagtgttggaagcaatg

SEQ ID NO: 4045656 - DNA, 25 bp, Homo sapien
gtctgacatttcaaagaggtcagtg

SEQ ID NO: 4045657 - DNA, 25 bp, Homo sapien
ctgtcaattgcagtgtctagaagca

SEQ ID NO: 4045658 - DNA, 25 bp, Homo sapien
actgtcaattgcagtgtctagaagc

SEQ ID NO: 4045659 - DNA, 25 bp, Homo sapien
gggaagagaaagcatcggcagtcct

SEQ ID NO: 4045660 - DNA, 25 bp, Homo sapien
gaagagaaagcatcggcagtcctcc

SEQ ID NO: 4045661 - DNA, 25 bp, Homo sapien
ggaagagaaagcatcggcagtcctc

SEQ ID NO: 4045662 - DNA, 25 bp, Homo sapien
ggggaagagaaagcatcggcagtcc

SEQ ID NO: 4045663 - DNA, 25 bp, Homo sapien
aacaaagggcccatgaactaaacat

SEQ ID NO: 4045664 - DNA, 25 bp, Homo sapien
tttcatggcctaacttgttttccac

SEQ ID NO: 4045665 - DNA, 25 bp, Homo sapien
ctttcatggcctaacttgttttcca

SEQ ID NO: 4045666 - DNA, 25 bp, Homo sapien
tcatggcctaacttgttttccactc

SEQ ID NO: 4045667 - DNA, 25 bp, Homo sapien
catggcctaacttgttttccactct

SEQ ID NO: 4045668 - DNA, 25 bp, Homo sapien
ctagcctggatgtcatagccatgtt

SEQ ID NO: 4045669 - DNA, 25 bp, Homo sapien
tgtgacattaggtagtgcaaggctg

SEQ ID NO: 4045670 - DNA, 25 bp, Homo sapien
gctagtccacttagcaatgtgacat

SEQ ID NO: 4045671 - DNA, 25 bp, Homo sapien
tgtcatagccatgtttggcatattc

SEQ ID NO: 4045672 - DNA, 25 bp, Homo sapien
agaaccacagaacggttacctgcag

SEQ ID NO: 4045673 - DNA, 25 bp, Homo sapien
tacctgcagagttcttatctggaac

SEQ ID NO: 4045674 - DNA, 25 bp, Homo sapien
tgggctgtggtttgggactgggcgt

SEQ ID NO: 4045675 - DNA, 25 bp, Homo sapien
gactgggcgttgtttgctgtccatg

SEQ ID NO: 4045676 - DNA, 25 bp, Homo sapien
tcccaacctcaagtggattgcctag

SEQ ID NO: 4045677 - DNA, 25 bp, Homo sapien
gatgatgtctcaatatatgcacaca

SEQ ID NO: 4045678 - DNA, 25 bp, Homo sapien
tccactgtcggagataactatttca

SEQ ID NO: 4045679 - DNA, 25 bp, Homo sapien
tcctcactctcgatttatgacccag

SEQ ID NO: 4045680 - DNA, 25 bp, Homo sapien
tgtcctggggtacttgtaaagccat

SEQ ID NO: 4045681 - DNA, 25 bp, Homo sapien
tggttacggcatccacaaggcagtg

SEQ ID NO: 4045682 - DNA, 25 bp, Homo sapien
aaagccatttctatggttacggcat

SEQ ID NO: 4045683 - DNA, 25 bp, Homo sapien
tttctatggttacggcatccacaag

SEQ ID NO: 4045684 - DNA, 25 bp, Homo sapien
taagtaggtttatttaacagctcac

SEQ ID NO: 4045685 - DNA, 25 bp, Homo sapien
ttaagtaggtttatttaacagctca

SEQ ID NO: 4045686 - DNA, 25 bp, Homo sapien
gatgacgtctaaagtgttgctggct

SEQ ID NO: 4045687 - DNA, 25 bp, Homo sapien
acgttgatgacgtctaaagtgttgc

SEQ ID NO: 4045688 - DNA, 25 bp, Homo sapien
tgatgacgtctaaagtgttgctggc

SEQ ID NO: 4045689 - DNA, 25 bp, Homo sapien
ctaaaacgttgatgacgtctaaagt

SEQ ID NO: 4045690 - DNA, 25 bp, Homo sapien
cccaactggctttaaaacagatgta

SEQ ID NO: 4045691 - DNA, 25 bp, Homo sapien
ctggctttaaaacagatgtagaaaa

SEQ ID NO: 4045692 - DNA, 25 bp, Homo sapien
gctttaaaacagatgtagaaaatgg

SEQ ID NO: 4045693 - DNA, 25 bp, Homo sapien
aacagatgtagaaaatggtattaaa

SEQ ID NO: 4045694 - DNA, 25 bp, Homo sapien
cctaacagcccaattcacatcaagc

SEQ ID NO: 4045695 - DNA, 25 bp, Homo sapien
cagcccaattcacatcaagcatttc

SEQ ID NO: 4045696 - DNA, 25 bp, Homo sapien
aacagcccaattcacatcaagcatt

SEQ ID NO: 4045697 - DNA, 25 bp, Homo sapien
taacagcccaattcacatcaagcat

SEQ ID NO: 4045698 - DNA, 25 bp, Homo sapien
gacacatctacctttgtggatgagg

SEQ ID NO: 4045699 - DNA, 25 bp, Homo sapien
cagacacagccgtcagaagcaaaag

SEQ ID NO: 4045700 - DNA, 25 bp, Homo sapien
gaaaccctctgaatagccagacaca

SEQ ID NO: 4045701 - DNA, 25 bp, Homo sapien
gatgaggatgacaaattgcctccag

SEQ ID NO: 4045702 - DNA, 25 bp, Homo sapien
ctgccacctttacaattagcaattg

SEQ ID NO: 4045703 - DNA, 25 bp, Homo sapien
tgccacctttacaattagcaattgc

SEQ ID NO: 4045704 - DNA, 25 bp, Homo sapien
gcagagcaatcctgatcaggtctac

SEQ ID NO: 4045705 - DNA, 25 bp, Homo sapien
tatgatgcctggtgttctactgctg

SEQ ID NO: 4045706 - DNA, 25 bp, Homo sapien
ggtgttctactgctgaaaacaaagg

SEQ ID NO: 4045707 - DNA, 25 bp, Homo sapien
agcagcagagcaatcctgatcaggt

SEQ ID NO: 4045708 - DNA, 25 bp, Homo sapien
tcaaagtggcttgccataaacaccc

SEQ ID NO: 4045709 - DNA, 25 bp, Homo sapien
aaagtggcttgccataaacacccca

SEQ ID NO: 4045710 - DNA, 25 bp, Homo sapien
aagtggcttgccataaacaccccag

SEQ ID NO: 4045711 - DNA, 25 bp, Homo sapien
gtggcttgccataaacaccccagca

SEQ ID NO: 4045712 - DNA, 25 bp, Homo sapien
agaagggcactctcgacgaaggcga

SEQ ID NO: 4045713 - DNA, 25 bp, Homo sapien
actctcgacgaaggcgactaatttt

SEQ ID NO: 4045714 - DNA, 25 bp, Homo sapien
cagaagggcactctcgacgaaggcg

SEQ ID NO: 4045715 - DNA, 25 bp, Homo sapien
tcgacgaaggcgactaattttgcca

SEQ ID NO: 4045716 - DNA, 25 bp, Homo sapien
ttgggagtggtgtaagacttcttct

SEQ ID NO: 4045717 - DNA, 25 bp, Homo sapien
agtggtgtaagacttcttcttcctt

SEQ ID NO: 4045718 - DNA, 25 bp, Homo sapien
ggagtggtgtaagacttcttcttcc

SEQ ID NO: 4045719 - DNA, 25 bp, Homo sapien
tgggagtggtgtaagacttcttctt

SEQ ID NO: 4045720 - DNA, 25 bp, Homo sapien
tgaatattgtagtcagacaaagtac

SEQ ID NO: 4045721 - DNA, 25 bp, Homo sapien
ttttgaatattgtagtcagacaaag

SEQ ID NO: 4045722 - DNA, 25 bp, Homo sapien
ttgaatattgtagtcagacaaagta

SEQ ID NO: 4045723 - DNA, 25 bp, Homo sapien
cttttgaatattgtagtcagacaaa

SEQ ID NO: 4045724 - DNA, 25 bp, Homo sapien
cgtatccgagggttcaacctcgagg

SEQ ID NO: 4045725 - DNA, 25 bp, Homo sapien
tatcgtatccgagggttcaacctcg

SEQ ID NO: 4045726 - DNA, 25 bp, Homo sapien
tttctatcgtatccgagggttcaac

SEQ ID NO: 4045727 - DNA, 25 bp, Homo sapien
ttacattttctatcgtatccgaggg

SEQ ID NO: 4045728 - DNA, 25 bp, Homo sapien
tgggcttcaacaaaataaactgatg

SEQ ID NO: 4045729 - DNA, 25 bp, Homo sapien
tgactctgcacattgactgtccaat

SEQ ID NO: 4045730 - DNA, 25 bp, Homo sapien
taaactgatgatgcttgactctgca

SEQ ID NO: 4045731 - DNA, 25 bp, Homo sapien
gaagtttaatttccactgtatgggc

SEQ ID NO: 4045732 - DNA, 25 bp, Homo sapien
tgcagagtaacatcatcattacata

SEQ ID NO: 4045733 - DNA, 25 bp, Homo sapien
gcagagtaacatcatcattacatat

SEQ ID NO: 4045734 - DNA, 25 bp, Homo sapien
ctgaattcgtcttgtctcctgaaat

SEQ ID NO: 4045735 - DNA, 25 bp, Homo sapien
gtgcagagtaacatcatcattacat

SEQ ID NO: 4045736 - DNA, 25 bp, Homo sapien
gcaaacattgatgtttaaagctttt

SEQ ID NO: 4045737 - DNA, 25 bp, Homo sapien
tatcttccaaaatatctctcttttc

SEQ ID NO: 4045738 - DNA, 25 bp, Homo sapien
atattttagagacaaaatgcaaaca

SEQ ID NO: 4045739 - DNA, 25 bp, Homo sapien
tggagcttttcatattttagagaca

SEQ ID NO: 4045740 - DNA, 25 bp, Homo sapien
tgtgatggctttaaaaacgtaaaca

SEQ ID NO: 4045741 - DNA, 25 bp, Homo sapien
ctgtgataaaccaatttgtgagatt

SEQ ID NO: 4045742 - DNA, 25 bp, Homo sapien
agtgctgaacttgaacagtttcatt

SEQ ID NO: 4045743 - DNA, 25 bp, Homo sapien
tgtgagattaaagtgctgaacttga

SEQ ID NO: 4045744 - DNA, 25 bp, Homo sapien
gtcatgagttgaaattggaatttta

SEQ ID NO: 4045745 - DNA, 25 bp, Homo sapien
gaaatggcctgtcgggtttgtctcc

SEQ ID NO: 4045746 - DNA, 25 bp, Homo sapien
taaaaagcttctagctctagcccaa

SEQ ID NO: 4045747 - DNA, 25 bp, Homo sapien
tagtgtgatacttgggcagtgaaac

SEQ ID NO: 4045748 - DNA, 25 bp, Homo sapien
gaaaagtccctcagacctgagagta

SEQ ID NO: 4045749 - DNA, 25 bp, Homo sapien
tcatttgagccacttgggcggatgg

SEQ ID NO: 4045750 - DNA, 25 bp, Homo sapien
ggatggtagcgccattcctctgtga

SEQ ID NO: 4045751 - DNA, 25 bp, Homo sapien
tgggaaaaggaccttgcagaggcat

SEQ ID NO: 4045752 - DNA, 25 bp, Homo sapien
taaaagtggtcgttgattccccatg

SEQ ID NO: 4045753 - DNA, 25 bp, Homo sapien
tcttatgtaagatcataggaagagc

SEQ ID NO: 4045754 - DNA, 25 bp, Homo sapien
gggctgacatccaagtgttcctctg

SEQ ID NO: 4045755 - DNA, 25 bp, Homo sapien
ttgtcttatgtaagatcataggaag

SEQ ID NO: 4045756 - DNA, 25 bp, Homo sapien
cttatgtaagatcataggaagagcc

SEQ ID NO: 4045757 - DNA, 25 bp, Homo sapien
atcttccagcctggaaccttcccag

SEQ ID NO: 4045758 - DNA, 25 bp, Homo sapien
ttggaagatgagtgaggttcattca

SEQ ID NO: 4045759 - DNA, 25 bp, Homo sapien
ggttcattcacaaacttcagagaca

SEQ ID NO: 4045760 - DNA, 25 bp, Homo sapien
taggagagtacaaagcaaaagttaa

SEQ ID NO: 4045761 - DNA, 25 bp, Homo sapien
tccttgtgtttgataggttctgtca

SEQ ID NO: 4045762 - DNA, 25 bp, Homo sapien
ggctcatcagctccttgtgtttgat

SEQ ID NO: 4045763 - DNA, 25 bp, Homo sapien
ggtagttctgaaggctcatcagctc

SEQ ID NO: 4045764 - DNA, 25 bp, Homo sapien
cctaataaggtagttctgaaggctc

SEQ ID NO: 4045765 - DNA, 25 bp, Homo sapien
cgaatgactgaattgctttgccttt

SEQ ID NO: 4045766 - DNA, 25 bp, Homo sapien
tatctctagcttgtttacattggga

SEQ ID NO: 4045767 - DNA, 25 bp, Homo sapien
ttttggtcgaatgactgaattgctt

SEQ ID NO: 4045768 - DNA, 25 bp, Homo sapien
tgctggtatctctagcttgtttaca

SEQ ID NO: 4045769 - DNA, 25 bp, Homo sapien
caacactggggatgtcataaaaggc

SEQ ID NO: 4045770 - DNA, 25 bp, Homo sapien
tgcctcaacactggggatgtcataa

SEQ ID NO: 4045771 - DNA, 25 bp, Homo sapien
gtgcctcaacactggggatgtcata

SEQ ID NO: 4045772 - DNA, 25 bp, Homo sapien
cctcaacactggggatgtcataaaa

SEQ ID NO: 4045773 - DNA, 25 bp, Homo sapien
tagcataagtgttgctatgcacagt

SEQ ID NO: 4045774 - DNA, 25 bp, Homo sapien
cacggtggccctttgttttccagtg

SEQ ID NO: 4045775 - DNA, 25 bp, Homo sapien
cagttaactggtctccaagattccc

SEQ ID NO: 4045776 - DNA, 25 bp, Homo sapien
cacacggtggccctttgttttccag

SEQ ID NO: 4045777 - DNA, 25 bp, Homo sapien
tatctgtttacattcacaccgttct

SEQ ID NO: 4045778 - DNA, 25 bp, Homo sapien
tgtatatctgtttacattcacaccg

SEQ ID NO: 4045779 - DNA, 25 bp, Homo sapien
tagcattctgcggagagccaagcac

SEQ ID NO: 4045780 - DNA, 25 bp, Homo sapien
cacaccgttcttagcattctgcgga

SEQ ID NO: 4045781 - DNA, 25 bp, Homo sapien
acacagcgaagagattttgagacct

SEQ ID NO: 4045782 - DNA, 25 bp, Homo sapien
tctggatgatccacatcatggggca

SEQ ID NO: 4045783 - DNA, 25 bp, Homo sapien
agattttgagacctctggatgatcc

SEQ ID NO: 4045784 - DNA, 25 bp, Homo sapien
gcgaagagattttgagacctctgga

SEQ ID NO: 4045785 - DNA, 25 bp, Homo sapien
cctacgagcctgtcatgggtttgct

SEQ ID NO: 4045786 - DNA, 25 bp, Homo sapien
accacagggtacctactgttctgga

SEQ ID NO: 4045787 - DNA, 25 bp, Homo sapien
ttttctccatgccagttagagccca

SEQ ID NO: 4045788 - DNA, 25 bp, Homo sapien
ctcgatgtttggtgtagcagcttca

SEQ ID NO: 4045789 - DNA, 25 bp, Homo sapien
aatatatcctccaggcatctgaaac

SEQ ID NO: 4045790 - DNA, 25 bp, Homo sapien
tctcagagcatcagtaaccaaatat

SEQ ID NO: 4045791 - DNA, 25 bp, Homo sapien
cagtcctgcaatttcccgtaaggga

SEQ ID NO: 4045792 - DNA, 25 bp, Homo sapien
agagtttcacacagcagtagaaggc

SEQ ID NO: 4045793 - DNA, 25 bp, Homo sapien
cagtgaagaaccatgtgggttttgc

SEQ ID NO: 4045794 - DNA, 25 bp, Homo sapien
agtgaagaaccatgtgggttttgct

SEQ ID NO: 4045795 - DNA, 25 bp, Homo sapien
tctgcaaaagtcaggtatcttccaa

SEQ ID NO: 4045796 - DNA, 25 bp, Homo sapien
agtggttcataactcgaggaaacat

SEQ ID NO: 4045797 - DNA, 25 bp, Homo sapien
ggttcataactcgaggaaacatctc

SEQ ID NO: 4045798 - DNA, 25 bp, Homo sapien
tggttcataactcgaggaaacatct

SEQ ID NO: 4045799 - DNA, 25 bp, Homo sapien
gttcataactcgaggaaacatctcc

SEQ ID NO: 4045800 - DNA, 25 bp, Homo sapien
ttttacatttcctggcacaatataa

SEQ ID NO: 4045801 - DNA, 25 bp, Homo sapien
tacatttcctggcacaatataagcc

SEQ ID NO: 4045802 - DNA, 25 bp, Homo sapien
gttgcaccttgtgctgggcacagac

SEQ ID NO: 4045803 - DNA, 25 bp, Homo sapien
gctgggcacagacaagagtctccat

SEQ ID NO: 4045804 - DNA, 25 bp, Homo sapien
tacgtagcgagcagttacgactgtg

SEQ ID NO: 4045805 - DNA, 25 bp, Homo sapien
ccctaagggcaaagtatctggtacg

SEQ ID NO: 4045806 - DNA, 25 bp, Homo sapien
agtctttgcaacaaccctaagggca

SEQ ID NO: 4045807 - DNA, 25 bp, Homo sapien
tgtgcctttatagagtaaggttctg

SEQ ID NO: 4045808 - DNA, 25 bp, Homo sapien
cagatattgggattgaccccttggg

SEQ ID NO: 4045809 - DNA, 25 bp, Homo sapien
tacagacagttgtcagaagcacaat

SEQ ID NO: 4045810 - DNA, 25 bp, Homo sapien
cattatgttaacctccggagggcca

SEQ ID NO: 4045811 - DNA, 25 bp, Homo sapien
gaaaaagcatatcggcccagtcata

SEQ ID NO: 4045812 - DNA, 25 bp, Homo sapien
tccacagctacattcacccatgctt

SEQ ID NO: 4045813 - DNA, 25 bp, Homo sapien
aatccacagctacattcacccatgc

SEQ ID NO: 4045814 - DNA, 25 bp, Homo sapien
cacagctacattcacccatgctttc

SEQ ID NO: 4045815 - DNA, 25 bp, Homo sapien
acagctacattcacccatgctttct

SEQ ID NO: 4045816 - DNA, 25 bp, Homo sapien
tgcatgtgacataaattccatgtag

SEQ ID NO: 4045817 - DNA, 25 bp, Homo sapien
ctgcatgtgacataaattccatgta

SEQ ID NO: 4045818 - DNA, 25 bp, Homo sapien
aatttgggatgggtatccaggagac

SEQ ID NO: 4045819 - DNA, 25 bp, Homo sapien
caatcttgatgacctcaaagatggt

SEQ ID NO: 4045820 - DNA, 25 bp, Homo sapien
gatgacctcaaagatggtcagttcc

SEQ ID NO: 4045821 - DNA, 25 bp, Homo sapien
cagttcccttacattggccttagtc

SEQ ID NO: 4045822 - DNA, 25 bp, Homo sapien
gtactgcgcttactgtccttgcaca

SEQ ID NO: 4045823 - DNA, 25 bp, Homo sapien
tccttgcacatttgatgatgaaaaa

SEQ ID NO: 4045824 - DNA, 25 bp, Homo sapien
gctgtttggataagcaaagtctaca

SEQ ID NO: 4045825 - DNA, 25 bp, Homo sapien
agctgcacttgtactgcgcttactg

SEQ ID NO: 4045826 - DNA, 25 bp, Homo sapien
ccaggcttgcttgacagccatctgc

SEQ ID NO: 4045827 - DNA, 25 bp, Homo sapien
aaacataattttgccccgatagttg

SEQ ID NO: 4045828 - DNA, 25 bp, Homo sapien
ttttgccccgatagttgaggacaag

SEQ ID NO: 4045829 - DNA, 25 bp, Homo sapien
cccgatagttgaggacaagcacaga

SEQ ID NO: 4045830 - DNA, 25 bp, Homo sapien
taattttgccccgatagttgaggac

SEQ ID NO: 4045831 - DNA, 25 bp, Homo sapien
tttccatatatgtttttattgctca

SEQ ID NO: 4045832 - DNA, 25 bp, Homo sapien
ctgcagcaagatttccatatatgtt

SEQ ID NO: 4045833 - DNA, 25 bp, Homo sapien
ttccatatatgtttttattgctcat

SEQ ID NO: 4045834 - DNA, 25 bp, Homo sapien
agatttccatatatgtttttattgc

SEQ ID NO: 4045835 - DNA, 25 bp, Homo sapien
gatgacagctctcgaactttagagg

SEQ ID NO: 4045836 - DNA, 25 bp, Homo sapien
gacctctgagttcattgaagccatg

SEQ ID NO: 4045837 - DNA, 25 bp, Homo sapien
tgtgatattcctcctagcaaccctc

SEQ ID NO: 4045838 - DNA, 25 bp, Homo sapien
taacatttggctttggtgacctctc

SEQ ID NO: 4045839 - DNA, 25 bp, Homo sapien
agatgactggtgctaaacttgcctc

SEQ ID NO: 4045840 - DNA, 25 bp, Homo sapien
gggagtgaccctagaatattacaga

SEQ ID NO: 4045841 - DNA, 25 bp, Homo sapien
caccgtactgtataatctaggaggc

SEQ ID NO: 4045842 - DNA, 25 bp, Homo sapien
tgtgcatcaccatgaagatcaggga

SEQ ID NO: 4045843 - DNA, 25 bp, Homo sapien
cgtagcgaatgatgttttctcgaac

SEQ ID NO: 4045844 - DNA, 25 bp, Homo sapien
caccaacagagtagagttcgcccag

SEQ ID NO: 4045845 - DNA, 25 bp, Homo sapien
tatgccgccgtagagttacaaacag

SEQ ID NO: 4045846 - DNA, 25 bp, Homo sapien
tcaacaccatttggaactggagcaa

SEQ ID NO: 4045847 - DNA, 25 bp, Homo sapien
aattaaggcgcccatactgagtcca

SEQ ID NO: 4045848 - DNA, 25 bp, Homo sapien
ggacataagcttcgacattgcaaga

SEQ ID NO: 4045849 - DNA, 25 bp, Homo sapien
cattgcaagactggacgacaccgtc

SEQ ID NO: 4045850 - DNA, 25 bp, Homo sapien
gattgtcaaggtgctagtgctgctc

SEQ ID NO: 4045851 - DNA, 25 bp, Homo sapien
tgactgacttttgtacaaaagatct

SEQ ID NO: 4045852 - DNA, 25 bp, Homo sapien
actgacttttgtacaaaagatcttc

SEQ ID NO: 4045853 - DNA, 25 bp, Homo sapien
gactgacttttgtacaaaagatctt

SEQ ID NO: 4045854 - DNA, 25 bp, Homo sapien
atgactgacttttgtacaaaagatc

SEQ ID NO: 4045855 - DNA, 25 bp, Homo sapien
taaccatctagcagtagagttctgt

SEQ ID NO: 4045856 - DNA, 25 bp, Homo sapien
tcaacatcatggtggattcctgtgg

SEQ ID NO: 4045857 - DNA, 25 bp, Homo sapien
tcctagactaacaccaaactgaatg

SEQ ID NO: 4045858 - DNA, 25 bp, Homo sapien
cataaaatattggagcaaggtccac

SEQ ID NO: 4045859 - DNA, 25 bp, Homo sapien
ttttcctgcataattcctactttcc

SEQ ID NO: 4045860 - DNA, 25 bp, Homo sapien
gatcaagccgtcagaggctccactg

SEQ ID NO: 4045861 - DNA, 25 bp, Homo sapien
tagcagtggttaatggcttggatca

SEQ ID NO: 4045862 - DNA, 25 bp, Homo sapien
tgctctggattgtgtggtccagcca

SEQ ID NO: 4045863 - DNA, 25 bp, Homo sapien
gctatagttatgaaccaaattctga

SEQ ID NO: 4045864 - DNA, 25 bp, Homo sapien
aatgctatagttatgaaccaaattc

SEQ ID NO: 4045865 - DNA, 25 bp, Homo sapien
ctatagttatgaaccaaattctgaa

SEQ ID NO: 4045866 - DNA, 25 bp, Homo sapien
tgctatagttatgaaccaaattctg

SEQ ID NO: 4045867 - DNA, 25 bp, Homo sapien
ttctctatgaaaggcattatttcaa

SEQ ID NO: 4045868 - DNA, 25 bp, Homo sapien
tagaaaggccagttgaagacagaac

SEQ ID NO: 4045869 - DNA, 25 bp, Homo sapien
gattctatgaaaggcattatttcag

SEQ ID NO: 4045870 - DNA, 25 bp, Homo sapien
tctagaaaggccagttgaagacaga

SEQ ID NO: 4045871 - DNA, 25 bp, Homo sapien
ttccctccaatatttgctcgccatt

SEQ ID NO: 4045872 - DNA, 25 bp, Homo sapien
cacccttcgtgctcctcagagattg

SEQ ID NO: 4045873 - DNA, 25 bp, Homo sapien
attgcacccttcgtgctcctcagag

SEQ ID NO: 4045874 - DNA, 25 bp, Homo sapien
tttgctcgccattgcacccttcgtg

SEQ ID NO: 4045875 - DNA, 25 bp, Homo sapien
gccacaactatccatttagttttgc

SEQ ID NO: 4045876 - DNA, 25 bp, Homo sapien
ctgttcccagaattgattgccacaa

SEQ ID NO: 4045877 - DNA, 25 bp, Homo sapien
ccagaattgattgccacaactatcc

SEQ ID NO: 4045878 - DNA, 25 bp, Homo sapien
tgattgccacaactatccatttagt

SEQ ID NO: 4045879 - DNA, 25 bp, Homo sapien
tctttctcgtaagccacaggaacac

SEQ ID NO: 4045880 - DNA, 25 bp, Homo sapien
ctctttctcgtaagccacaggaaca

SEQ ID NO: 4045881 - DNA, 25 bp, Homo sapien
ctttctcgtaagccacaggaacaca

SEQ ID NO: 4045882 - DNA, 25 bp, Homo sapien
tcaccagctaaaagagagttgtggg

SEQ ID NO: 4045883 - DNA, 25 bp, Homo sapien
tgtgacagagaagatataggacccc

SEQ ID NO: 4045884 - DNA, 25 bp, Homo sapien
tgccctaatgcaaacgtgatgacca

SEQ ID NO: 4045885 - DNA, 25 bp, Homo sapien
tgcatagtgtactcccataaaggga

SEQ ID NO: 4045886 - DNA, 25 bp, Homo sapien
gtaatagggtttggttatatgaggc

SEQ ID NO: 4045887 - DNA, 25 bp, Homo sapien
tagggtttggttatatgaggctgat

SEQ ID NO: 4045888 - DNA, 25 bp, Homo sapien
aatagggtttggttatatgaggctg

SEQ ID NO: 4045889 - DNA, 25 bp, Homo sapien
ggtttggttatatgaggctgatggg

SEQ ID NO: 4045890 - DNA, 25 bp, Homo sapien
gggatatagacagagcttctgatcc

SEQ ID NO: 4045891 - DNA, 25 bp, Homo sapien
tcgtatgggggtaagatagggtgat

SEQ ID NO: 4045892 - DNA, 25 bp, Homo sapien
aacatctctattacctttgttgttg

SEQ ID NO: 4045893 - DNA, 25 bp, Homo sapien
tgggggtaagatagggtgatgggat

SEQ ID NO: 4045894 - DNA, 25 bp, Homo sapien
cagaaaatgtattcctgaagattca

SEQ ID NO: 4045895 - DNA, 25 bp, Homo sapien
agaaaatgtattcctgaagattcag

SEQ ID NO: 4045896 - DNA, 25 bp, Homo sapien
ctgaggaagagtagttttctggaga

SEQ ID NO: 4045897 - DNA, 25 bp, Homo sapien
aagagtagttttctggagacctcaa

SEQ ID NO: 4045898 - DNA, 25 bp, Homo sapien
aggaagagtagttttctggagacct

SEQ ID NO: 4045899 - DNA, 25 bp, Homo sapien
tagttttctggagacctcaaatttc

SEQ ID NO: 4045900 - DNA, 25 bp, Homo sapien
ctattcaggtgccaagtaagtagtg

SEQ ID NO: 4045901 - DNA, 25 bp, Homo sapien
tattcaggtgccaagtaagtagtgg

SEQ ID NO: 4045902 - DNA, 25 bp, Homo sapien
attcaggtgccaagtaagtagtggt

SEQ ID NO: 4045903 - DNA, 25 bp, Homo sapien
ctatgaagcaaaactcatggatttc

SEQ ID NO: 4045904 - DNA, 25 bp, Homo sapien
tatgaagcaaaactcatggatttct

SEQ ID NO: 4045905 - DNA, 25 bp, Homo sapien
gaagcaaaactcatggatttctgat

SEQ ID NO: 4045906 - DNA, 25 bp, Homo sapien
tgaagcaaaactcatggatttctga

SEQ ID NO: 4045907 - DNA, 25 bp, Homo sapien
gtgaaattcggattgttgaccattt

SEQ ID NO: 4045908 - DNA, 25 bp, Homo sapien
gaaataatgtccgtttttgggatca

SEQ ID NO: 4045909 - DNA, 25 bp, Homo sapien
gaaattcggattgttgaccatttct

SEQ ID NO: 4045910 - DNA, 25 bp, Homo sapien
ccgtttttgggatcatctttgtcca

SEQ ID NO: 4045911 - DNA, 25 bp, Homo sapien
gaaacataaaacttgacgtcagcat

SEQ ID NO: 4045912 - DNA, 25 bp, Homo sapien
ctgaaacataaaacttgacgtcagc

SEQ ID NO: 4045913 - DNA, 25 bp, Homo sapien
tgaaacataaaacttgacgtcagca

SEQ ID NO: 4045914 - DNA, 25 bp, Homo sapien
cagaggctcctgccatcggtaaaag

SEQ ID NO: 4045915 - DNA, 25 bp, Homo sapien
tcctgccatcggtaaaagcttagtg

SEQ ID NO: 4045916 - DNA, 25 bp, Homo sapien
gaggctcctgccatcggtaaaagct

SEQ ID NO: 4045917 - DNA, 25 bp, Homo sapien
ggctcctgccatcggtaaaagctta

SEQ ID NO: 4045918 - DNA, 25 bp, Homo sapien
tttccaatttgagtatttacgggca

SEQ ID NO: 4045919 - DNA, 25 bp, Homo sapien
ttccaatttgagtatttacgggcat

SEQ ID NO: 4045920 - DNA, 25 bp, Homo sapien
tctgtggcttgaaatagcaaagtta

SEQ ID NO: 4045921 - DNA, 25 bp, Homo sapien
tggcttgaaatagcaaagttaagtg

SEQ ID NO: 4045922 - DNA, 25 bp, Homo sapien
agtgtggggttgtcaagtatattga

SEQ ID NO: 4045923 - DNA, 25 bp, Homo sapien
caagtatattgaaggaagatactgg

SEQ ID NO: 4045924 - DNA, 25 bp, Homo sapien
ccttcgtgtttggttctgagtgtgg

SEQ ID NO: 4045925 - DNA, 25 bp, Homo sapien
tccttcgtgtttggttctgagtgtg

SEQ ID NO: 4045926 - DNA, 25 bp, Homo sapien
tgtctccttttcagtacttgataga

SEQ ID NO: 4045927 - DNA, 25 bp, Homo sapien
cgtccagccagattaccattctctt

SEQ ID NO: 4045928 - DNA, 25 bp, Homo sapien
aagaatctggtttatccccagctgt

SEQ ID NO: 4045929 - DNA, 25 bp, Homo sapien
tgttcctccactcgtccagccagat

SEQ ID NO: 4045930 - DNA, 25 bp, Homo sapien
catttccccttctcccttcagcatc

SEQ ID NO: 4045931 - DNA, 25 bp, Homo sapien
tccccttctcccttcagcatcccac

SEQ ID NO: 4045932 - DNA, 25 bp, Homo sapien
tgagatagctccatttccccttctc

SEQ ID NO: 4045933 - DNA, 25 bp, Homo sapien
atttccccttctcccttcagcatcc

SEQ ID NO: 4045934 - DNA, 25 bp, Homo sapien
tgaagatgctcaaaacgtgtgattg

SEQ ID NO: 4045935 - DNA, 25 bp, Homo sapien
tgtcaataacgcaagtgaagccaat

SEQ ID NO: 4045936 - DNA, 25 bp, Homo sapien
gaaaacagtcaaaatccacagggca

SEQ ID NO: 4045937 - DNA, 25 bp, Homo sapien
ctagcttaccagtctgtgatttggc

SEQ ID NO: 4045938 - DNA, 25 bp, Homo sapien
ttaaaatgtcaccatccagaaataa

SEQ ID NO: 4045939 - DNA, 25 bp, Homo sapien
catacagtactttggtaccttgtta

SEQ ID NO: 4045940 - DNA, 25 bp, Homo sapien
taaattaggaagttgaaaaatgata

SEQ ID NO: 4045941 - DNA, 25 bp, Homo sapien
aatttcttaaacatacagtactttg

SEQ ID NO: 4045942 - DNA, 25 bp, Homo sapien
tccactttaggagccaatttggtca

SEQ ID NO: 4045943 - DNA, 25 bp, Homo sapien
gttttgcagaactttacacaggcta

SEQ ID NO: 4045944 - DNA, 25 bp, Homo sapien
catttggatgtgtttcttgcctgag

SEQ ID NO: 4045945 - DNA, 25 bp, Homo sapien
gacccatctatgcaatatgaggcac

SEQ ID NO: 4045946 - DNA, 25 bp, Homo sapien
tatacaaacatattcagcattaaca

SEQ ID NO: 4045947 - DNA, 25 bp, Homo sapien
ttagtcaaatatgagacagttgtat

SEQ ID NO: 4045948 - DNA, 25 bp, Homo sapien
agtcaaatatgagacagttgtatac

SEQ ID NO: 4045949 - DNA, 25 bp, Homo sapien
atgagacagttgtatacaaacatat

SEQ ID NO: 4045950 - DNA, 25 bp, Homo sapien
taaaaatgcctcatattcggatgcg

SEQ ID NO: 4045951 - DNA, 25 bp, Homo sapien
ctcatattcggatgcgaattcaggg

SEQ ID NO: 4045952 - DNA, 25 bp, Homo sapien
tactcgtgatatctgactgtggttc

SEQ ID NO: 4045953 - DNA, 25 bp, Homo sapien
ttaatagcaacaggtactcgtgata

SEQ ID NO: 4045954 - DNA, 25 bp, Homo sapien
tttggcccaaatatcaaataccgaa

SEQ ID NO: 4045955 - DNA, 25 bp, Homo sapien
tggcccaaatatcaaataccgaatg

SEQ ID NO: 4045956 - DNA, 25 bp, Homo sapien
ccgaatgtctaaggggttgtaccat

SEQ ID NO: 4045957 - DNA, 25 bp, Homo sapien
gcccaaatatcaaataccgaatgtc

SEQ ID NO: 4045958 - DNA, 25 bp, Homo sapien
agagtttgtattttcgtggcacttc

SEQ ID NO: 4045959 - DNA, 25 bp, Homo sapien
ccagagtttgtattttcgtggcact

SEQ ID NO: 4045960 - DNA, 25 bp, Homo sapien
tttccagagtttgtattttcgtggc

SEQ ID NO: 4045961 - DNA, 25 bp, Homo sapien
tccagagtttgtattttcgtggcac

SEQ ID NO: 4045962 - DNA, 25 bp, Homo sapien
aatctatcacgggagcacagctact

SEQ ID NO: 4045963 - DNA, 25 bp, Homo sapien
ttttcttccacgaggcgtgcagctt

SEQ ID NO: 4045964 - DNA, 25 bp, Homo sapien
aatgaagcttgagaccgtgtctgaa

SEQ ID NO: 4045965 - DNA, 25 bp, Homo sapien
ggtcattttcttccacgaggcgtgc

SEQ ID NO: 4045966 - DNA, 25 bp, Homo sapien
ttctgatattgatgacttgccttct

SEQ ID NO: 4045967 - DNA, 25 bp, Homo sapien
tctgatattgatgacttgccttctt

SEQ ID NO: 4045968 - DNA, 25 bp, Homo sapien
tatctttttgaatctctatagaagt

SEQ ID NO: 4045969 - DNA, 25 bp, Homo sapien
tgaatctctatagaagttgtagcaa

SEQ ID NO: 4045970 - DNA, 25 bp, Homo sapien
gtttaagagtttactgatccacttg

SEQ ID NO: 4045971 - DNA, 25 bp, Homo sapien
gcaatgttactatgatgtgtcctgg

SEQ ID NO: 4045972 - DNA, 25 bp, Homo sapien
tgtgtcctggtatgcttttatttgt

SEQ ID NO: 4045973 - DNA, 25 bp, Homo sapien
cttgatgtcttctatcagatttgaa

SEQ ID NO: 4045974 - DNA, 25 bp, Homo sapien
gagatcctgatacctctgtgtctaa

SEQ ID NO: 4045975 - DNA, 25 bp, Homo sapien
cctgatacctctgtgtctaattcca

SEQ ID NO: 4045976 - DNA, 25 bp, Homo sapien
ctctgagatcctgatacctctgtgt

SEQ ID NO: 4045977 - DNA, 25 bp, Homo sapien
tacctctgtgtctaattccataaac

SEQ ID NO: 4045978 - DNA, 25 bp, Homo sapien
cacgtacgtgctttggataaaacaa

SEQ ID NO: 4045979 - DNA, 25 bp, Homo sapien
tgttgggatccacgtacgtgctttg

SEQ ID NO: 4045980 - DNA, 25 bp, Homo sapien
ggatccacgtacgtgctttggataa

SEQ ID NO: 4045981 - DNA, 25 bp, Homo sapien
tacttcactgttgggatccacgtac

SEQ ID NO: 4045982 - DNA, 25 bp, Homo sapien
ggcttccttgttagtctattactca

SEQ ID NO: 4045983 - DNA, 25 bp, Homo sapien
tctattactcattcctaaagcacag

SEQ ID NO: 4045984 - DNA, 25 bp, Homo sapien
ttatactgaggcttccttgttagtc

SEQ ID NO: 4045985 - DNA, 25 bp, Homo sapien
tagtctattactcattcctaaagca

SEQ ID NO: 4045986 - DNA, 25 bp, Homo sapien
aatgaagtctatcataaccatagct

SEQ ID NO: 4045987 - DNA, 25 bp, Homo sapien
ataaccatagctgaatgaaagagac

SEQ ID NO: 4045988 - DNA, 25 bp, Homo sapien
tgccacatggtagtatctggattga

SEQ ID NO: 4045989 - DNA, 25 bp, Homo sapien
tcctggatggcttcatgctgttccc

SEQ ID NO: 4045990 - DNA, 25 bp, Homo sapien
ctgcgaagggcaccagagaaagcat

SEQ ID NO: 4045991 - DNA, 25 bp, Homo sapien
taaaatagctcaaatgttttcacaa

SEQ ID NO: 4045992 - DNA, 25 bp, Homo sapien
atagctcaaatgttttcacaaaatg

SEQ ID NO: 4045993 - DNA, 25 bp, Homo sapien
agctcaaatgttttcacaaaatgta

SEQ ID NO: 4045994 - DNA, 25 bp, Homo sapien
taataaaatagctcaaatgttttca

SEQ ID NO: 4045995 - DNA, 25 bp, Homo sapien
atctatattttccacatgtatgtat

SEQ ID NO: 4045996 - DNA, 25 bp, Homo sapien
ttaaacagcctatgattactgtgta

SEQ ID NO: 4045997 - DNA, 25 bp, Homo sapien
tctctcctacccaaaataatacata

SEQ ID NO: 4045998 - DNA, 25 bp, Homo sapien
tacatattgataaagcttccatcta

SEQ ID NO: 4045999 - DNA, 25 bp, Homo sapien
ttaaattatagtgtacagttcttga

SEQ ID NO: 4046000 - DNA, 25 bp, Homo sapien
taaattatagtgtacagttcttgaa

SEQ ID NO: 4046001 - DNA, 25 bp, Homo sapien
gtaagttattttgtgttgagatgat

SEQ ID NO: 4046002 - DNA, 25 bp, Homo sapien
tggctgaataatggatataagaatg

SEQ ID NO: 4046003 - DNA, 25 bp, Homo sapien
aataatggatataagaatgtttcct

SEQ ID NO: 4046004 - DNA, 25 bp, Homo sapien
agttattttgtgttgagatgataca

SEQ ID NO: 4046005 - DNA, 25 bp, Homo sapien
aaacaggggctgcttatcacgttat

SEQ ID NO: 4046006 - DNA, 25 bp, Homo sapien
caggggctgcttatcacgttattaa

SEQ ID NO: 4046007 - DNA, 25 bp, Homo sapien
gcttatcacgttattaataagcata

SEQ ID NO: 4046008 - DNA, 25 bp, Homo sapien
gggctgcttatcacgttattaataa

SEQ ID NO: 4046009 - DNA, 25 bp, Homo sapien
tcccatcgtctgcattaatgttgaa

SEQ ID NO: 4046010 - DNA, 25 bp, Homo sapien
tctctgtcaagtggtgttgccagcg

SEQ ID NO: 4046011 - DNA, 25 bp, Homo sapien
ttaatgttgaactgcctctccaggt

SEQ ID NO: 4046012 - DNA, 25 bp, Homo sapien
gtcagtgtgccggtcgatggaaaac

SEQ ID NO: 4046013 - DNA, 25 bp, Homo sapien
cgtattccactttcaagaatccata

SEQ ID NO: 4046014 - DNA, 25 bp, Homo sapien
tcatcgtattccactttcaagaatc

SEQ ID NO: 4046015 - DNA, 25 bp, Homo sapien
catcgtattccactttcaagaatcc

SEQ ID NO: 4046016 - DNA, 25 bp, Homo sapien
tattccactttcaagaatccataat

SEQ ID NO: 4046017 - DNA, 25 bp, Homo sapien
gtcttctttgcatacttattggctg

SEQ ID NO: 4046018 - DNA, 25 bp, Homo sapien
gagtcttctttgcatacttattggc

SEQ ID NO: 4046019 - DNA, 25 bp, Homo sapien
catacttattggctgtagtcttatt

SEQ ID NO: 4046020 - DNA, 25 bp, Homo sapien
ctttgcatacttattggctgtagtc

SEQ ID NO: 4046021 - DNA, 25 bp, Homo sapien
gactgtcgccgtgtctttaaagggc

SEQ ID NO: 4046022 - DNA, 25 bp, Homo sapien
ccaatcacggagtttagagcagcat

SEQ ID NO: 4046023 - DNA, 25 bp, Homo sapien
caatatggacattggctgcctctac

SEQ ID NO: 4046024 - DNA, 25 bp, Homo sapien
tatcagggtcacgagcagtcacttg

SEQ ID NO: 4046025 - DNA, 25 bp, Homo sapien
ctgggcatcagaagtgatttcaaaa

SEQ ID NO: 4046026 - DNA, 25 bp, Homo sapien
cagtgccaagaaccacatcttccgg

SEQ ID NO: 4046027 - DNA, 25 bp, Homo sapien
tcttagccttataatgccatcctgg

SEQ ID NO: 4046028 - DNA, 25 bp, Homo sapien
catcttccggtactgagaagtgata

SEQ ID NO: 4046029 - DNA, 25 bp, Homo sapien
catccagtgcaggaaattaacttac

SEQ ID NO: 4046030 - DNA, 25 bp, Homo sapien
tcatccagtgcaggaaattaactta

SEQ ID NO: 4046031 - DNA, 25 bp, Homo sapien
gagtcactgtaagtgtcgtggtccc

SEQ ID NO: 4046032 - DNA, 25 bp, Homo sapien
tatctttggcttggataacaaccag

SEQ ID NO: 4046033 - DNA, 25 bp, Homo sapien
aggccaccagagtgtccacccatat

SEQ ID NO: 4046034 - DNA, 25 bp, Homo sapien
taagtgtcgtggtcccagacaggcc

SEQ ID NO: 4046035 - DNA, 25 bp, Homo sapien
tctgatctctaaggcgagtaggaag

SEQ ID NO: 4046036 - DNA, 25 bp, Homo sapien
tccttccacaacattgggagtaggt

SEQ ID NO: 4046037 - DNA, 25 bp, Homo sapien
aactgaataatgaacagctcttgct

SEQ ID NO: 4046038 - DNA, 25 bp, Homo sapien
gagtaggaagtctctccaaggtttc

SEQ ID NO: 4046039 - DNA, 25 bp, Homo sapien
ttcctggtccactatcaacaatccc

SEQ ID NO: 4046040 - DNA, 25 bp, Homo sapien
cctggtccactatcaacaatcccat

SEQ ID NO: 4046041 - DNA, 25 bp, Homo sapien
gttcctggtccactatcaacaatcc

SEQ ID NO: 4046042 - DNA, 25 bp, Homo sapien
tgttcctggtccactatcaacaatc

SEQ ID NO: 4046043 - DNA, 25 bp, Homo sapien
aaatctgtaccaccagatcacaggg

SEQ ID NO: 4046044 - DNA, 25 bp, Homo sapien
tgattaccacatgacgtgcactgtg

SEQ ID NO: 4046045 - DNA, 25 bp, Homo sapien
tacaaggaggaatctagtagcaaat

SEQ ID NO: 4046046 - DNA, 25 bp, Homo sapien
tattatgtggtacgttccataccca

SEQ ID NO: 4046047 - DNA, 25 bp, Homo sapien
caaatataattcgaaatttaggcca

SEQ ID NO: 4046048 - DNA, 25 bp, Homo sapien
tataattcgaaatttaggccacaaa

SEQ ID NO: 4046049 - DNA, 25 bp, Homo sapien
aatataattcgaaatttaggccaca

SEQ ID NO: 4046050 - DNA, 25 bp, Homo sapien
ggcaaatataattcgaaatttaggc

SEQ ID NO: 4046051 - DNA, 25 bp, Homo sapien
tcgcagtgacgttagtgacagatgt

SEQ ID NO: 4046052 - DNA, 25 bp, Homo sapien
taaactgggtcatcagcgtcggtcg

SEQ ID NO: 4046053 - DNA, 25 bp, Homo sapien
ctttgcactgtttccataaactggg

SEQ ID NO: 4046054 - DNA, 25 bp, Homo sapien
tatactataaaccaactttgcactg

SEQ ID NO: 4046055 - DNA, 25 bp, Homo sapien
gaaatataacaaccaggattctctg

SEQ ID NO: 4046056 - DNA, 25 bp, Homo sapien
aataggaccctgagtaatacccagg

SEQ ID NO: 4046057 - DNA, 25 bp, Homo sapien
gcagaccacgaaggcaaattgaaat

SEQ ID NO: 4046058 - DNA, 25 bp, Homo sapien
tgttggtgtgtgataaataggaccc

SEQ ID NO: 4046059 - DNA, 25 bp, Homo sapien
gagtaagtcagcacaccaattctgc

SEQ ID NO: 4046060 - DNA, 25 bp, Homo sapien
ttggtgcagcgtaaaaatgtgccca

SEQ ID NO: 4046061 - DNA, 25 bp, Homo sapien
gctgacaccctgatcaggaaaacga

SEQ ID NO: 4046062 - DNA, 25 bp, Homo sapien
aaaaatgctggtgctgacaccctga

SEQ ID NO: 4046063 - DNA, 25 bp, Homo sapien
cacctgacctttcggcaggaagttc

SEQ ID NO: 4046064 - DNA, 25 bp, Homo sapien
gaaggcaatgcagatccggttgaca

SEQ ID NO: 4046065 - DNA, 25 bp, Homo sapien
gcagccttgccactctggaaggcaa

SEQ ID NO: 4046066 - DNA, 25 bp, Homo sapien
ccatgaatgctatgatttgcacctg

SEQ ID NO: 4046067 - DNA, 25 bp, Homo sapien
gaagggctcagagaaggctcggttg

SEQ ID NO: 4046068 - DNA, 25 bp, Homo sapien
tgaaatgctgaccataaaatatatc

SEQ ID NO: 4046069 - DNA, 25 bp, Homo sapien
tcagagaaggctcggttgaaatgct

SEQ ID NO: 4046070 - DNA, 25 bp, Homo sapien
gctcggttgaaatgctgaccataaa

SEQ ID NO: 4046071 - DNA, 25 bp, Homo sapien
tggtaataaatgtctttcattcagc

SEQ ID NO: 4046072 - DNA, 25 bp, Homo sapien
ataaatgtctttcattcagcaatac

SEQ ID NO: 4046073 - DNA, 25 bp, Homo sapien
ttagagataaggtggtaataaatgt

SEQ ID NO: 4046074 - DNA, 25 bp, Homo sapien
aaatgtctttcattcagcaatacac

SEQ ID NO: 4046075 - DNA, 25 bp, Homo sapien
aaagatgacttttaatagatctgtg

SEQ ID NO: 4046076 - DNA, 25 bp, Homo sapien
agatgacttttaatagatctgtgaa

SEQ ID NO: 4046077 - DNA, 25 bp, Homo sapien
tgacttttaatagatctgtgaaatt

SEQ ID NO: 4046078 - DNA, 25 bp, Homo sapien
gatgacttttaatagatctgtgaaa

SEQ ID NO: 4046079 - DNA, 25 bp, Homo sapien
ccagtccactgcttgagctgttagg

SEQ ID NO: 4046080 - DNA, 25 bp, Homo sapien
tatttgaaatatggtcccagctcca

SEQ ID NO: 4046081 - DNA, 25 bp, Homo sapien
gcacagtagcatgatagggtccatt

SEQ ID NO: 4046082 - DNA, 25 bp, Homo sapien
gggtccattaagaaactctggtgca

SEQ ID NO: 4046083 - DNA, 25 bp, Homo sapien
aggtctggccctccaagtacagaat

SEQ ID NO: 4046084 - DNA, 25 bp, Homo sapien
ctggccctccaagtacagaatacat

SEQ ID NO: 4046085 - DNA, 25 bp, Homo sapien
gcaggtctggccctccaagtacaga

SEQ ID NO: 4046086 - DNA, 25 bp, Homo sapien
ggtctggccctccaagtacagaata

SEQ ID NO: 4046087 - DNA, 25 bp, Homo sapien
catagagttgctaattgttccgtac

SEQ ID NO: 4046088 - DNA, 25 bp, Homo sapien
taatgtaggatttccatagagttgc

SEQ ID NO: 4046089 - DNA, 25 bp, Homo sapien
tactttgaaattcgtcgttctgaga

SEQ ID NO: 4046090 - DNA, 25 bp, Homo sapien
ctgagaatgagatgcagttggtaat

SEQ ID NO: 4046091 - DNA, 25 bp, Homo sapien
caccatttcgaaattgtgagatata

SEQ ID NO: 4046092 - DNA, 25 bp, Homo sapien
tcgaaattgtgagatataaacgtac

SEQ ID NO: 4046093 - DNA, 25 bp, Homo sapien
tttgattacaccatttcgaaattgt

SEQ ID NO: 4046094 - DNA, 25 bp, Homo sapien
tgagatataaacgtacagtaacaat

SEQ ID NO: 4046095 - DNA, 25 bp, Homo sapien
tatttgcattgaatatttacagctc

SEQ ID NO: 4046096 - DNA, 25 bp, Homo sapien
aatatttacagctcttactttccat

SEQ ID NO: 4046097 - DNA, 25 bp, Homo sapien
atatttacagctcttactttccatt

SEQ ID NO: 4046098 - DNA, 25 bp, Homo sapien
atatttgcattgaatatttacagct

SEQ ID NO: 4046099 - DNA, 25 bp, Homo sapien
ataggaaagatcttagatttgttcc

SEQ ID NO: 4046100 - DNA, 25 bp, Homo sapien
cataggaaagatcttagatttgttc

SEQ ID NO: 4046101 - DNA, 25 bp, Homo sapien
tggttacttctagtcatgcacaggg

SEQ ID NO: 4046102 - DNA, 25 bp, Homo sapien
tagtgacctatgttacctgaccttg

SEQ ID NO: 4046103 - DNA, 25 bp, Homo sapien
gaaatttccggagatatgacctaga

SEQ ID NO: 4046104 - DNA, 25 bp, Homo sapien
taaaatgcaatacggaacacctgga

SEQ ID NO: 4046105 - DNA, 25 bp, Homo sapien
cataggcaatgtggatctctgggag

SEQ ID NO: 4046106 - DNA, 25 bp, Homo sapien
actcataggcaatgtggatctctgg

SEQ ID NO: 4046107 - DNA, 25 bp, Homo sapien
taggcaatgtggatctctgggagca

SEQ ID NO: 4046108 - DNA, 25 bp, Homo sapien
tcataggcaatgtggatctctggga

SEQ ID NO: 4046109 - DNA, 25 bp, Homo sapien
tccaacccactttcatcctccttgt

SEQ ID NO: 4046110 - DNA, 25 bp, Homo sapien
ctccaacccactttcatcctccttg

SEQ ID NO: 4046111 - DNA, 25 bp, Homo sapien
tctccaacccactttcatcctcctt

SEQ ID NO: 4046112 - DNA, 25 bp, Homo sapien
ggtgataaaggttctctcaaaagct

SEQ ID NO: 4046113 - DNA, 25 bp, Homo sapien
tctaaaggtgataaaggttctctca

SEQ ID NO: 4046114 - DNA, 25 bp, Homo sapien
ttaggtaattatgcccattctaaag

SEQ ID NO: 4046115 - DNA, 25 bp, Homo sapien
tgcccattctaaaggtgataaaggt

SEQ ID NO: 4046116 - DNA, 25 bp, Homo sapien
tgccgatcacaagcatcagctatca

SEQ ID NO: 4046117 - DNA, 25 bp, Homo sapien
aattctaagcggcaggagggagttt

SEQ ID NO: 4046118 - DNA, 25 bp, Homo sapien
attccaattctaagcggcaggaggg

SEQ ID NO: 4046119 - DNA, 25 bp, Homo sapien
agggagtttgccgatcacaagcatc

SEQ ID NO: 4046120 - DNA, 25 bp, Homo sapien
aaagcggcgtgaagcctgacaaggt

SEQ ID NO: 4046121 - DNA, 25 bp, Homo sapien
ctgcttgagaaagcggcgtgaagcc

SEQ ID NO: 4046122 - DNA, 25 bp, Homo sapien
tgagaaagcggcgtgaagcctgaca

SEQ ID NO: 4046123 - DNA, 25 bp, Homo sapien
tagtgctgcttgagaaagcggcgtg

SEQ ID NO: 4046124 - DNA, 25 bp, Homo sapien
catgcaaatgggaatgggtaccaac

SEQ ID NO: 4046125 - DNA, 25 bp, Homo sapien
ctctctttctcgactgttcagtttc

SEQ ID NO: 4046126 - DNA, 25 bp, Homo sapien
gggaattctagaccaccaggaggaa

SEQ ID NO: 4046127 - DNA, 25 bp, Homo sapien
tcaggtgggaattctagaccaccag

SEQ ID NO: 4046128 - DNA, 25 bp, Homo sapien
gagttcaggtgggaattctagacca

SEQ ID NO: 4046129 - DNA, 25 bp, Homo sapien
gttctaatcagtgaatactctcctg

SEQ ID NO: 4046130 - DNA, 25 bp, Homo sapien
cagatactgcgatacttattggaca

SEQ ID NO: 4046131 - DNA, 25 bp, Homo sapien
gagatgactcttgtctgattccgct

SEQ ID NO: 4046132 - DNA, 25 bp, Homo sapien
ggtttttctataatgtcagccactg

SEQ ID NO: 4046133 - DNA, 25 bp, Homo sapien
ccttgttgaaactctagcatggaga

SEQ ID NO: 4046134 - DNA, 25 bp, Homo sapien
cccatttggaatccaccttgttgaa

SEQ ID NO: 4046135 - DNA, 25 bp, Homo sapien
tctagcatggagaagcgtgctttca

SEQ ID NO: 4046136 - DNA, 25 bp, Homo sapien
catttggaatccaccttgttgaaac

SEQ ID NO: 4046137 - DNA, 25 bp, Homo sapien
aagtactactgtataagaatttcac

SEQ ID NO: 4046138 - DNA, 25 bp, Homo sapien
tactactgtataagaatttcactca

SEQ ID NO: 4046139 - DNA, 25 bp, Homo sapien
tcttaagtactactgtataagaatt

SEQ ID NO: 4046140 - DNA, 25 bp, Homo sapien
ctactgtataagaatttcactcagg

SEQ ID NO: 4046141 - DNA, 25 bp, Homo sapien
cctttcctcttgagatatgtcctcc

SEQ ID NO: 4046142 - DNA, 25 bp, Homo sapien
tttcctcttgagatatgtcctccag

SEQ ID NO: 4046143 - DNA, 25 bp, Homo sapien
gtaataaatcccatattgtattcag

SEQ ID NO: 4046144 - DNA, 25 bp, Homo sapien
taataaatcccatattgtattcaga

SEQ ID NO: 4046145 - DNA, 25 bp, Homo sapien
cctaaacccatggttcagtggtaat

SEQ ID NO: 4046146 - DNA, 25 bp, Homo sapien
ttgacattccataaagctacggcag

SEQ ID NO: 4046147 - DNA, 25 bp, Homo sapien
cctcctcggagaatgaatgcaacta

SEQ ID NO: 4046148 - DNA, 25 bp, Homo sapien
gacctagataagatggtcaccaaga

SEQ ID NO: 4046149 - DNA, 25 bp, Homo sapien
tcacaaaagcctctggtgaggcaat

SEQ ID NO: 4046150 - DNA, 25 bp, Homo sapien
gggaacaccatctgtaatgctgatg

SEQ ID NO: 4046151 - DNA, 25 bp, Homo sapien
catctgtaatgctgatggattcaca

SEQ ID NO: 4046152 - DNA, 25 bp, Homo sapien
agcctctggtgaggcaatatgatca

SEQ ID NO: 4046153 - DNA, 25 bp, Homo sapien
gtaggagcacgggtgcacacgcagg

SEQ ID NO: 4046154 - DNA, 25 bp, Homo sapien
cagttaatagttctcactgaggaac

SEQ ID NO: 4046155 - DNA, 25 bp, Homo sapien
tggtaaatgcatatagagaaaagga

SEQ ID NO: 4046156 - DNA, 25 bp, Homo sapien
cacgcaggcagttgcttttcaccat

SEQ ID NO: 4046157 - DNA, 25 bp, Homo sapien
cagtgaattgttcccacaaggccaa

SEQ ID NO: 4046158 - DNA, 25 bp, Homo sapien
agtgcaattttctcacccgtcgcag

SEQ ID NO: 4046159 - DNA, 25 bp, Homo sapien
ccaggttgagacatgcgtgctgact

SEQ ID NO: 4046160 - DNA, 25 bp, Homo sapien
taagctgtgactgcgtagtccaacg

SEQ ID NO: 4046161 - DNA, 25 bp, Homo sapien
ggttctcataatgacatcaagctgt

SEQ ID NO: 4046162 - DNA, 25 bp, Homo sapien
tgacatcaagctgtctaccataaag

SEQ ID NO: 4046163 - DNA, 25 bp, Homo sapien
cgtcctgacttgcagccaagggttc

SEQ ID NO: 4046164 - DNA, 25 bp, Homo sapien
taccataaagagtatctgcacattt

SEQ ID NO: 4046165 - DNA, 25 bp, Homo sapien
gacaaacatttgattccaaacccag

SEQ ID NO: 4046166 - DNA, 25 bp, Homo sapien
gccaacaagaatcggttcaggtcca

SEQ ID NO: 4046167 - DNA, 25 bp, Homo sapien
gagactgattcatcggagccatgta

SEQ ID NO: 4046168 - DNA, 25 bp, Homo sapien
tcacccagactgtttagttccaaag

SEQ ID NO: 4046169 - DNA, 25 bp, Homo sapien
gggaaacagacatcatctaagcagc

SEQ ID NO: 4046170 - DNA, 25 bp, Homo sapien
catttacttacagctctgccacgtg

SEQ ID NO: 4046171 - DNA, 25 bp, Homo sapien
cacgtgtctatagcacgggaaacag

SEQ ID NO: 4046172 - DNA, 25 bp, Homo sapien
tcatcatgcagtgccgagcatttac

SEQ ID NO: 4046173 - DNA, 25 bp, Homo sapien
tccctcgcctcggagatgaggcggt

SEQ ID NO: 4046174 - DNA, 25 bp, Homo sapien
tccggagcccggcaagtttgtagcg

SEQ ID NO: 4046175 - DNA, 25 bp, Homo sapien
tccgtgcacgcaatctcgagttgcg

SEQ ID NO: 4046176 - DNA, 25 bp, Homo sapien
cacttgtgggaaagcctcgcgctgg

SEQ ID NO: 4046177 - DNA, 25 bp, Homo sapien
ggaccccgcagtgaaggcgcgcggc

SEQ ID NO: 4046178 - DNA, 25 bp, Homo sapien
ccgcagtgaaggcgcgcggctgcag

SEQ ID NO: 4046179 - DNA, 25 bp, Homo sapien
accccgcagtgaaggcgcgcggctg

SEQ ID NO: 4046180 - DNA, 25 bp, Homo sapien
cccgcagtgaaggcgcgcggctgca

SEQ ID NO: 4046181 - DNA, 25 bp, Homo sapien
gcctgcctgccaaatgtaactgtga

SEQ ID NO: 4046182 - DNA, 25 bp, Homo sapien
taacagcatgcggatgaggtacctg

SEQ ID NO: 4046183 - DNA, 25 bp, Homo sapien
gacggatctcattgggcagagcgca

SEQ ID NO: 4046184 - DNA, 25 bp, Homo sapien
tgtccgcaacccaaagtgcagctgg

SEQ ID NO: 4046185 - DNA, 25 bp, Homo sapien
gcagacccttctaattgattgtgac

SEQ ID NO: 4046186 - DNA, 25 bp, Homo sapien
cgtcctccatgaaaacgtcctgatt

SEQ ID NO: 4046187 - DNA, 25 bp, Homo sapien
ttgcagatacctcttgccatgctgt

SEQ ID NO: 4046188 - DNA, 25 bp, Homo sapien
tcattggtctcatcattaggaatcc

SEQ ID NO: 4046189 - DNA, 25 bp, Homo sapien
ggctttcaatctgcgtgaactcctt

SEQ ID NO: 4046190 - DNA, 25 bp, Homo sapien
tttcaatctgcgtgaactccttgtc

SEQ ID NO: 4046191 - DNA, 25 bp, Homo sapien
ctttcaatctgcgtgaactccttgt

SEQ ID NO: 4046192 - DNA, 25 bp, Homo sapien
ctggctttcaatctgcgtgaactcc

SEQ ID NO: 4046193 - DNA, 25 bp, Homo sapien
ctttagtggatctgcacggtcaaac

SEQ ID NO: 4046194 - DNA, 25 bp, Homo sapien
cacacatcaacatactcacactcct

SEQ ID NO: 4046195 - DNA, 25 bp, Homo sapien
tagtggatctgcacggtcaaacacc

SEQ ID NO: 4046196 - DNA, 25 bp, Homo sapien
ggtcaaacaccttcacccacacatc

SEQ ID NO: 4046197 - DNA, 25 bp, Homo sapien
cagaagaatcaaatgttttgttgca

SEQ ID NO: 4046198 - DNA, 25 bp, Homo sapien
atatgcacatctggtttttctgtta

SEQ ID NO: 4046199 - DNA, 25 bp, Homo sapien
aaatatgcacatctggtttttctgt

SEQ ID NO: 4046200 - DNA, 25 bp, Homo sapien
atattaagtgcagaagaatcaaatg

SEQ ID NO: 4046201 - DNA, 25 bp, Homo sapien
gattggatatatccgagaacacaga

SEQ ID NO: 4046202 - DNA, 25 bp, Homo sapien
tctgtgctgtctacttgcctcattc

SEQ ID NO: 4046203 - DNA, 25 bp, Homo sapien
aactcagctctccttcttctatggc

SEQ ID NO: 4046204 - DNA, 25 bp, Homo sapien
caatcctgcgggttcctgaaactca

SEQ ID NO: 4046205 - DNA, 25 bp, Homo sapien
agagcatccacagagccggtgaatc

SEQ ID NO: 4046206 - DNA, 25 bp, Homo sapien
cagagccggtgaatctggcggcttc

SEQ ID NO: 4046207 - DNA, 25 bp, Homo sapien
cctgaacagattctaaagggcagtg

SEQ ID NO: 4046208 - DNA, 25 bp, Homo sapien
tgaacagattctaaagggcagtgac

SEQ ID NO: 4046209 - DNA, 25 bp, Homo sapien
gaaccagagggtatttacctgaata

SEQ ID NO: 4046210 - DNA, 25 bp, Homo sapien
cctttggtcagctaaatttcctgct

SEQ ID NO: 4046211 - DNA, 25 bp, Homo sapien
tcgatgaagatgaaccagagggtat

SEQ ID NO: 4046212 - DNA, 25 bp, Homo sapien
taagaaagcgtcttgctcctttggt

SEQ ID NO: 4046213 - DNA, 25 bp, Homo sapien
gaatcatataaggtcatttgctcct

SEQ ID NO: 4046214 - DNA, 25 bp, Homo sapien
ctttccagaatcatataaggtcatt

SEQ ID NO: 4046215 - DNA, 25 bp, Homo sapien
tccagaatcatataaggtcatttgc

SEQ ID NO: 4046216 - DNA, 25 bp, Homo sapien
tctcttcccagccatactggattgt

SEQ ID NO: 4046217 - DNA, 25 bp, Homo sapien
gaaattccccatgttcatcagttga

SEQ ID NO: 4046218 - DNA, 25 bp, Homo sapien
tttgcatgtgctttatcctcctcct

SEQ ID NO: 4046219 - DNA, 25 bp, Homo sapien
cctgaaattccccatgttcatcagt

SEQ ID NO: 4046220 - DNA, 25 bp, Homo sapien
ctttgcatgtgctttatcctcctcc

SEQ ID NO: 4046221 - DNA, 25 bp, Homo sapien
catgtgtgtacaaggacaagtcaga

SEQ ID NO: 4046222 - DNA, 25 bp, Homo sapien
gagttgagggtacataacctcccag

SEQ ID NO: 4046223 - DNA, 25 bp, Homo sapien
tggcctgagttgagggtacataacc

SEQ ID NO: 4046224 - DNA, 25 bp, Homo sapien
aggacaagtcagaacccgcagtagg

SEQ ID NO: 4046225 - DNA, 25 bp, Homo sapien
taatatgcacataggagtgccagga

SEQ ID NO: 4046226 - DNA, 25 bp, Homo sapien
gtaatatgcacataggagtgccagg

SEQ ID NO: 4046227 - DNA, 25 bp, Homo sapien
aatatgcacataggagtgccaggaa

SEQ ID NO: 4046228 - DNA, 25 bp, Homo sapien
gctttgccctgtatttggaagccca

SEQ ID NO: 4046229 - DNA, 25 bp, Homo sapien
aacatcgtccttgaagtgcagagag

SEQ ID NO: 4046230 - DNA, 25 bp, Homo sapien
tctgagaagaatcatcccgtctgtt

SEQ ID NO: 4046231 - DNA, 25 bp, Homo sapien
tagacatcgcctgtgctttgccctg

SEQ ID NO: 4046232 - DNA, 25 bp, Homo sapien
ttattaaagtctgcataagcagttg

SEQ ID NO: 4046233 - DNA, 25 bp, Homo sapien
taagcagttgagttataacctccaa

SEQ ID NO: 4046234 - DNA, 25 bp, Homo sapien
gtaaagaggtgaacagttcatccat

SEQ ID NO: 4046235 - DNA, 25 bp, Homo sapien
ggtgaacagttcatccatctaatat

SEQ ID NO: 4046236 - DNA, 25 bp, Homo sapien
gagtctgaattcctaccctcaatgt

SEQ ID NO: 4046237 - DNA, 25 bp, Homo sapien
gcagagtctgaattcctaccctcaa

SEQ ID NO: 4046238 - DNA, 25 bp, Homo sapien
ggcagagtctgaattcctaccctca

SEQ ID NO: 4046239 - DNA, 25 bp, Homo sapien
ctttggcagagtctgaattcctacc

SEQ ID NO: 4046240 - DNA, 25 bp, Homo sapien
tgtgcttccactccccttttctctc

SEQ ID NO: 4046241 - DNA, 25 bp, Homo sapien
tcttagctctccagctcttgtgctt

SEQ ID NO: 4046242 - DNA, 25 bp, Homo sapien
ctcttagctctccagctcttgtgct

SEQ ID NO: 4046243 - DNA, 25 bp, Homo sapien
tagctctccagctcttgtgcttcca

SEQ ID NO: 4046244 - DNA, 25 bp, Homo sapien
taaaacaatctgcaagagatgaggt

SEQ ID NO: 4046245 - DNA, 25 bp, Homo sapien
tgacagtaaccttatggcttagaaa

SEQ ID NO: 4046246 - DNA, 25 bp, Homo sapien
gagattgcaaaggtcatcggaagat

SEQ ID NO: 4046247 - DNA, 25 bp, Homo sapien
tattcaggacaagattagtagttct

SEQ ID NO: 4046248 - DNA, 25 bp, Homo sapien
gtatctgttttcgtaccaatagcaa

SEQ ID NO: 4046249 - DNA, 25 bp, Homo sapien
gcttaagattgccttaattattcga

SEQ ID NO: 4046250 - DNA, 25 bp, Homo sapien
gttttcgtaccaatagcaagctgtt

SEQ ID NO: 4046251 - DNA, 25 bp, Homo sapien
taagattgccttaattattcgagct

SEQ ID NO: 4046252 - DNA, 25 bp, Homo sapien
tccctttcaatgtaagctaatgcag

SEQ ID NO: 4046253 - DNA, 25 bp, Homo sapien
atctttattaggaagactttcaaat

SEQ ID NO: 4046254 - DNA, 25 bp, Homo sapien
ctactttactaggatgttattaggc

SEQ ID NO: 4046255 - DNA, 25 bp, Homo sapien
gctgttggcactttagaatatcatc

SEQ ID NO: 4046256 - DNA, 25 bp, Homo sapien
tcccagacatgattgataggagaag

SEQ ID NO: 4046257 - DNA, 25 bp, Homo sapien
taggagaaggtcgtgaggcttttgc

SEQ ID NO: 4046258 - DNA, 25 bp, Homo sapien
ccagacatgattgataggagaaggt

SEQ ID NO: 4046259 - DNA, 25 bp, Homo sapien
agacatgattgataggagaaggtcg

SEQ ID NO: 4046260 - DNA, 25 bp, Homo sapien
agtttccgataccaaatacagccca

SEQ ID NO: 4046261 - DNA, 25 bp, Homo sapien
caagtttccgataccaaatacagcc

SEQ ID NO: 4046262 - DNA, 25 bp, Homo sapien
tttccgataccaaatacagcccaga

SEQ ID NO: 4046263 - DNA, 25 bp, Homo sapien
tgacaagtttccgataccaaataca

SEQ ID NO: 4046264 - DNA, 25 bp, Homo sapien
aaaattttgataatgttgcagcttg

SEQ ID NO: 4046265 - DNA, 25 bp, Homo sapien
gcatcttaatgtgcttaactgcaag

SEQ ID NO: 4046266 - DNA, 25 bp, Homo sapien
ttccacaactctccactaataagca

SEQ ID NO: 4046267 - DNA, 25 bp, Homo sapien
gcaagtgtccaaaatagttattgag

SEQ ID NO: 4046268 - DNA, 25 bp, Homo sapien
tttcaactttccatcctccacttct

SEQ ID NO: 4046269 - DNA, 25 bp, Homo sapien
tcttttcaactttccatcctccact

SEQ ID NO: 4046270 - DNA, 25 bp, Homo sapien
tattcttcctcaatgatggctttct

SEQ ID NO: 4046271 - DNA, 25 bp, Homo sapien
tcctcaatgatggctttctttgact

SEQ ID NO: 4046272 - DNA, 25 bp, Homo sapien
tctatcctagtcttactggttaaaa

SEQ ID NO: 4046273 - DNA, 25 bp, Homo sapien
cagtgtctttcagattctatcctag

SEQ ID NO: 4046274 - DNA, 25 bp, Homo sapien
gcagtgtctttcagattctatccta

SEQ ID NO: 4046275 - DNA, 25 bp, Homo sapien
ttcagattctatcctagtcttactg

SEQ ID NO: 4046276 - DNA, 25 bp, Homo sapien
tttcttgctgttccatggccaacat

SEQ ID NO: 4046277 - DNA, 25 bp, Homo sapien
ggctgattcaaaggtaaaacaaagc

SEQ ID NO: 4046278 - DNA, 25 bp, Homo sapien
gatagcatcttttgggctgattcaa

SEQ ID NO: 4046279 - DNA, 25 bp, Homo sapien
ttgctgttccatggccaacatcata

SEQ ID NO: 4046280 - DNA, 25 bp, Homo sapien
ctagattttcaacaatgcaggcttc

SEQ ID NO: 4046281 - DNA, 25 bp, Homo sapien
gattttcaacaatgcaggcttcatg

SEQ ID NO: 4046282 - DNA, 25 bp, Homo sapien
ttttcaacaatgcaggcttcatggt

SEQ ID NO: 4046283 - DNA, 25 bp, Homo sapien
tcaacaatgcaggcttcatggttac

SEQ ID NO: 4046284 - DNA, 25 bp, Homo sapien
cacagctgctagtcacagagtcaca

SEQ ID NO: 4046285 - DNA, 25 bp, Homo sapien
tcacagctgctagtcacagagtcac

SEQ ID NO: 4046286 - DNA, 25 bp, Homo sapien
ttgctgtaataatgatgattctcct

SEQ ID NO: 4046287 - DNA, 25 bp, Homo sapien
atttgctgtaataatgatgattctc

SEQ ID NO: 4046288 - DNA, 25 bp, Homo sapien
tttgctgtaataatgatgattctcc

SEQ ID NO: 4046289 - DNA, 25 bp, Homo sapien
atatttgctgtaataatgatgattc

SEQ ID NO: 4046290 - DNA, 25 bp, Homo sapien
tgtgtatgcataattggcactctgg

SEQ ID NO: 4046291 - DNA, 25 bp, Homo sapien
taagctttgccattgatcacaccag

SEQ ID NO: 4046292 - DNA, 25 bp, Homo sapien
tatagcaacagtatttgtgtatgca

SEQ ID NO: 4046293 - DNA, 25 bp, Homo sapien
caccagtcttattgtcagattcttc

SEQ ID NO: 4046294 - DNA, 25 bp, Homo sapien
gagaacaaagccttggctctagatt

SEQ ID NO: 4046295 - DNA, 25 bp, Homo sapien
gttttccctcagatatcgttgttat

SEQ ID NO: 4046296 - DNA, 25 bp, Homo sapien
cctcagatatcgttgttatttcttg

SEQ ID NO: 4046297 - DNA, 25 bp, Homo sapien
tggagaacaaagccttggctctaga

SEQ ID NO: 4046298 - DNA, 25 bp, Homo sapien
tctgatcttgtaaaaggataaggta

SEQ ID NO: 4046299 - DNA, 25 bp, Homo sapien
ctttttcgctttaacttattatctg

SEQ ID NO: 4046300 - DNA, 25 bp, Homo sapien
aaggataaggtagcacgctctcttt

SEQ ID NO: 4046301 - DNA, 25 bp, Homo sapien
ggtagcacgctctctttatctgcca

SEQ ID NO: 4046302 - DNA, 25 bp, Homo sapien
aatgccagctatttcgataattatc

SEQ ID NO: 4046303 - DNA, 25 bp, Homo sapien
tactttaaagtgcttagagccaagc

SEQ ID NO: 4046304 - DNA, 25 bp, Homo sapien
taatctcagtggtatgttatgaaga

SEQ ID NO: 4046305 - DNA, 25 bp, Homo sapien
gctaggcccatcgaaagcattcaat

SEQ ID NO: 4046306 - DNA, 25 bp, Homo sapien
caaccatgatttgaattgtgttaat

SEQ ID NO: 4046307 - DNA, 25 bp, Homo sapien
gcccatgtgcatgagagtctcaaat

SEQ ID NO: 4046308 - DNA, 25 bp, Homo sapien
gaacaccagcccatagtcaccagta

SEQ ID NO: 4046309 - DNA, 25 bp, Homo sapien
tgggaaacgtacaaattatcaacca

SEQ ID NO: 4046310 - DNA, 25 bp, Homo sapien
agactgcccgtctgttcccacagga

SEQ ID NO: 4046311 - DNA, 25 bp, Homo sapien
gctgatccctcccaagactgcccgt

SEQ ID NO: 4046312 - DNA, 25 bp, Homo sapien
aagacagcccacaggatagcgtcca

SEQ ID NO: 4046313 - DNA, 25 bp, Homo sapien
tgaggcacatttgaaccccctgctc

SEQ ID NO: 4046314 - DNA, 25 bp, Homo sapien
caaagattcaaattcatggctgctg

SEQ ID NO: 4046315 - DNA, 25 bp, Homo sapien
gattcaaattcatggctgctgattc

SEQ ID NO: 4046316 - DNA, 25 bp, Homo sapien
aagattcaaattcatggctgctgat

SEQ ID NO: 4046317 - DNA, 25 bp, Homo sapien
gccagaagttcctccacattgccat

SEQ ID NO: 4046318 - DNA, 25 bp, Homo sapien
gaaggttggatccattaggcactca

SEQ ID NO: 4046319 - DNA, 25 bp, Homo sapien
aagctcgtacttttgatttgtgatc

SEQ ID NO: 4046320 - DNA, 25 bp, Homo sapien
tttggcctgaacagaaggatgacac

SEQ ID NO: 4046321 - DNA, 25 bp, Homo sapien
aaatcctgagtgtctcaaaagctcg

SEQ ID NO: 4046322 - DNA, 25 bp, Homo sapien
tatttcaatgaaagtatctggggca

SEQ ID NO: 4046323 - DNA, 25 bp, Homo sapien
accatagtatttcaatgaaagtatc

SEQ ID NO: 4046324 - DNA, 25 bp, Homo sapien
ctaccatagtatttcaatgaaagta

SEQ ID NO: 4046325 - DNA, 25 bp, Homo sapien
tagtatttcaatgaaagtatctggg

SEQ ID NO: 4046326 - DNA, 25 bp, Homo sapien
gaggttcggagacatgctgctattg

SEQ ID NO: 4046327 - DNA, 25 bp, Homo sapien
gacttttatggtgccaatggctgcc

SEQ ID NO: 4046328 - DNA, 25 bp, Homo sapien
gggtcatcagggttgagtagaatat

SEQ ID NO: 4046329 - DNA, 25 bp, Homo sapien
caatcagaagcagaccagctctcac

SEQ ID NO: 4046330 - DNA, 25 bp, Homo sapien
agccttggctagaaattggattttg

SEQ ID NO: 4046331 - DNA, 25 bp, Homo sapien
gccttggctagaaattggattttgt

SEQ ID NO: 4046332 - DNA, 25 bp, Homo sapien
gatgcaatcactaaaacgctgtccc

SEQ ID NO: 4046333 - DNA, 25 bp, Homo sapien
ttccagatggtataaacagcttttt

SEQ ID NO: 4046334 - DNA, 25 bp, Homo sapien
ctgaaactggcgctgcattgctgat

SEQ ID NO: 4046335 - DNA, 25 bp, Homo sapien
cgctgtccccgtccagaattccaga

SEQ ID NO: 4046336 - DNA, 25 bp, Homo sapien
ccagagacctagagtcaaagaggag

SEQ ID NO: 4046337 - DNA, 25 bp, Homo sapien
gcaaagtgtgatcaatggccagaga

SEQ ID NO: 4046338 - DNA, 25 bp, Homo sapien
tcaaatatcagacccaccatggaag

SEQ ID NO: 4046339 - DNA, 25 bp, Homo sapien
accatggaaggcaaagtgtgatcaa

SEQ ID NO: 4046340 - DNA, 25 bp, Homo sapien
ccatagaggctcttggataacgctc

SEQ ID NO: 4046341 - DNA, 25 bp, Homo sapien
tctctataagtccagccccagtttc

SEQ ID NO: 4046342 - DNA, 25 bp, Homo sapien
acaaagtaagtcgagggcccatcat

SEQ ID NO: 4046343 - DNA, 25 bp, Homo sapien
gagggcccatcatctccatagaggc

SEQ ID NO: 4046344 - DNA, 25 bp, Homo sapien
ggtgagttttgcaaacttgtgcact

SEQ ID NO: 4046345 - DNA, 25 bp, Homo sapien
gaattttcaaggctgaacagctggg

SEQ ID NO: 4046346 - DNA, 25 bp, Homo sapien
tataatgcgagtagaaatgtgcctg

SEQ ID NO: 4046347 - DNA, 25 bp, Homo sapien
taatcacatataatgcgagtagaaa

SEQ ID NO: 4046348 - DNA, 25 bp, Homo sapien
tagctttcaataccactcaccagag

SEQ ID NO: 4046349 - DNA, 25 bp, Homo sapien
gagtctgagaactgtccacgtgatg

SEQ ID NO: 4046350 - DNA, 25 bp, Homo sapien
actgtccacgtgatgatagctttca

SEQ ID NO: 4046351 - DNA, 25 bp, Homo sapien
cacgtgatgatagctttcaatacca

SEQ ID NO: 4046352 - DNA, 25 bp, Homo sapien
aagccaccacgcctggcccacacag

SEQ ID NO: 4046353 - DNA, 25 bp, Homo sapien
tctgccccccactcggcctccaaaa

SEQ ID NO: 4046354 - DNA, 25 bp, Homo sapien
cctcgtgatctgccccccactcggc

SEQ ID NO: 4046355 - DNA, 25 bp, Homo sapien
gtaagccaccacgcctggcccacac

SEQ ID NO: 4046356 - DNA, 25 bp, Homo sapien
tcatagagcagaactgttgctacga

SEQ ID NO: 4046357 - DNA, 25 bp, Homo sapien
catagagcagaactgttgctacgat

SEQ ID NO: 4046358 - DNA, 25 bp, Homo sapien
tagagcagaactgttgctacgatat

SEQ ID NO: 4046359 - DNA, 25 bp, Homo sapien
agagcagaactgttgctacgatatc

SEQ ID NO: 4046360 - DNA, 25 bp, Homo sapien
tacctgagcatctgtaagtctgcta

SEQ ID NO: 4046361 - DNA, 25 bp, Homo sapien
tcctttattgttgaccccagagaaa

SEQ ID NO: 4046362 - DNA, 25 bp, Homo sapien
catctgtaagtctgctaaactgaac

SEQ ID NO: 4046363 - DNA, 25 bp, Homo sapien
tcagcttcctgccatacctgagcat

SEQ ID NO: 4046364 - DNA, 25 bp, Homo sapien
aatctaagttccctaaaatcagagc

SEQ ID NO: 4046365 - DNA, 25 bp, Homo sapien
cagagcctcatatgaaaggcttgca

SEQ ID NO: 4046366 - DNA, 25 bp, Homo sapien
cctcatatgaaaggcttgcaagctg

SEQ ID NO: 4046367 - DNA, 25 bp, Homo sapien
tatgaaaggcttgcaagctggtggt

SEQ ID NO: 4046368 - DNA, 25 bp, Homo sapien
ctttacccgaaaggagaagtctgag

SEQ ID NO: 4046369 - DNA, 25 bp, Homo sapien
aggatgttagtcctagagctgggtc

SEQ ID NO: 4046370 - DNA, 25 bp, Homo sapien
tgggtcaccctgactctttacccga

SEQ ID NO: 4046371 - DNA, 25 bp, Homo sapien
tctgctgctgtaggatgttagtcct

SEQ ID NO: 4046372 - DNA, 25 bp, Homo sapien
ggaagaagcagttatctctagagag

SEQ ID NO: 4046373 - DNA, 25 bp, Homo sapien
cacacaaggagtctggataatgcaa

SEQ ID NO: 4046374 - DNA, 25 bp, Homo sapien
tctcataagtgaaccaggaagaagc

SEQ ID NO: 4046375 - DNA, 25 bp, Homo sapien
tttgagagtttactgacacattgaa

SEQ ID NO: 4046376 - DNA, 25 bp, Homo sapien
ctaaattacattttccgtattgtct

SEQ ID NO: 4046377 - DNA, 25 bp, Homo sapien
tctctgaaagtcctattattcccct

SEQ ID NO: 4046378 - DNA, 25 bp, Homo sapien
tctcaataccgccttttttcttgac

SEQ ID NO: 4046379 - DNA, 25 bp, Homo sapien
attattcccctaggtattattctca

SEQ ID NO: 4046380 - DNA, 25 bp, Homo sapien
aacagtgacttcacgctagtgtcag

SEQ ID NO: 4046381 - DNA, 25 bp, Homo sapien
attaaaaacagtgacttcacgctag

SEQ ID NO: 4046382 - DNA, 25 bp, Homo sapien
gacttcacgctagtgtcagttgcaa

SEQ ID NO: 4046383 - DNA, 25 bp, Homo sapien
cgctagtgtcagttgcaaagtcgtc

SEQ ID NO: 4046384 - DNA, 25 bp, Homo sapien
ctttattacttctagcaaggcagaa

SEQ ID NO: 4046385 - DNA, 25 bp, Homo sapien
tagcaaggcagaaaatagctctttt

SEQ ID NO: 4046386 - DNA, 25 bp, Homo sapien
tcctttattacttctagcaaggcag

SEQ ID NO: 4046387 - DNA, 25 bp, Homo sapien
aaaatagctcttttgcatgcttctg

SEQ ID NO: 4046388 - DNA, 25 bp, Homo sapien
ctctagattatggttgatgttttca

SEQ ID NO: 4046389 - DNA, 25 bp, Homo sapien
gcccagagtctctagattatggttg

SEQ ID NO: 4046390 - DNA, 25 bp, Homo sapien
tcaaagtgaattcgatttccggaag

SEQ ID NO: 4046391 - DNA, 25 bp, Homo sapien
tgaattcgatttccggaaggcttct

SEQ ID NO: 4046392 - DNA, 25 bp, Homo sapien
ggaggtcagctccaaggttccattt

SEQ ID NO: 4046393 - DNA, 25 bp, Homo sapien
aataagttaatgtgatccggtgttc

SEQ ID NO: 4046394 - DNA, 25 bp, Homo sapien
tcagttcttgacagcttaggagtct

SEQ ID NO: 4046395 - DNA, 25 bp, Homo sapien
cttttgtattcggaaatcccaggag

SEQ ID NO: 4046396 - DNA, 25 bp, Homo sapien
ccattggtgcttaattaaattggga

SEQ ID NO: 4046397 - DNA, 25 bp, Homo sapien
tgtggacattttgacagcaccatgg

SEQ ID NO: 4046398 - DNA, 25 bp, Homo sapien
taaacattcagtagtgccggcatat

SEQ ID NO: 4046399 - DNA, 25 bp, Homo sapien
gccggcatatatgctcagataaaag

SEQ ID NO: 4046400 - DNA, 25 bp, Homo sapien
gcacagcaatgtgttggaccacctg

SEQ ID NO: 4046401 - DNA, 25 bp, Homo sapien
gaccacctggtttcatcacagccga

SEQ ID NO: 4046402 - DNA, 25 bp, Homo sapien
catacgatgcattcaccacagggtc

SEQ ID NO: 4046403 - DNA, 25 bp, Homo sapien
tacagctgtagaaggctgttcagcc

SEQ ID NO: 4046404 - DNA, 25 bp, Homo sapien
tctgtacctagacccaatagagtgc

SEQ ID NO: 4046405 - DNA, 25 bp, Homo sapien
taatgtggcagaacataaaagcttg

SEQ ID NO: 4046406 - DNA, 25 bp, Homo sapien
tgaattgcaccatatggcttccagt

SEQ ID NO: 4046407 - DNA, 25 bp, Homo sapien
catgaagtcttgattgttaccgtaa

SEQ ID NO: 4046408 - DNA, 25 bp, Homo sapien
cgtaaagatgtctaagatgatgaaa

SEQ ID NO: 4046409 - DNA, 25 bp, Homo sapien
tcaagctattgctgaagttctcaac

SEQ ID NO: 4046410 - DNA, 25 bp, Homo sapien
tgctgaagttctcaacaacgtaaag

SEQ ID NO: 4046411 - DNA, 25 bp, Homo sapien
aatgatacactttgtcagatacttc

SEQ ID NO: 4046412 - DNA, 25 bp, Homo sapien
caggtattgcatttcaatacgtgga

SEQ ID NO: 4046413 - DNA, 25 bp, Homo sapien
catttcaatacgtggattcaggatc

SEQ ID NO: 4046414 - DNA, 25 bp, Homo sapien
acacgttgagtatccaggtattgca

SEQ ID NO: 4046415 - DNA, 25 bp, Homo sapien
aatacgtggattcaggatcttcatg

SEQ ID NO: 4046416 - DNA, 25 bp, Homo sapien
atcgaagaattgctccaggcagttc

SEQ ID NO: 4046417 - DNA, 25 bp, Homo sapien
tttcttcatccacacgaatatcctc

SEQ ID NO: 4046418 - DNA, 25 bp, Homo sapien
ggcacttgaactggaatcgaagaat

SEQ ID NO: 4046419 - DNA, 25 bp, Homo sapien
tggaatcgaagaattgctccaggca

SEQ ID NO: 4046420 - DNA, 25 bp, Homo sapien
gcaatgttttgtgggcagggtggat

SEQ ID NO: 4046421 - DNA, 25 bp, Homo sapien
agagagtcagggaagggtggtggat

SEQ ID NO: 4046422 - DNA, 25 bp, Homo sapien
ggtgaagttaagagcaatgttttgt

SEQ ID NO: 4046423 - DNA, 25 bp, Homo sapien
agagtcagggaagggtggtggatta

SEQ ID NO: 4046424 - DNA, 25 bp, Homo sapien
gcatggccacaattccacctggtat

SEQ ID NO: 4046425 - DNA, 25 bp, Homo sapien
aaatctaaaatctctgaagctccag

SEQ ID NO: 4046426 - DNA, 25 bp, Homo sapien
cttcatgacaatgccgcatggccac

SEQ ID NO: 4046427 - DNA, 25 bp, Homo sapien
tacttgaagaatggttccttaaaca

SEQ ID NO: 4046428 - DNA, 25 bp, Homo sapien
tctccttgagtagaacgaaccaata

SEQ ID NO: 4046429 - DNA, 25 bp, Homo sapien
gaacggtggaagcaatcagcatctg

SEQ ID NO: 4046430 - DNA, 25 bp, Homo sapien
ggtgtcatggataccagggtctata

SEQ ID NO: 4046431 - DNA, 25 bp, Homo sapien
tgtatttatggcaacgtgaaggcac

SEQ ID NO: 4046432 - DNA, 25 bp, Homo sapien
ggctgcctgactattggcgtagagc

SEQ ID NO: 4046433 - DNA, 25 bp, Homo sapien
tccacatgcagaaatttctgagact

SEQ ID NO: 4046434 - DNA, 25 bp, Homo sapien
tggcgtagagccacagactctccct

SEQ ID NO: 4046435 - DNA, 25 bp, Homo sapien
ttctgagactcaagtcctgctgtct

SEQ ID NO: 4046436 - DNA, 25 bp, Homo sapien
tcctctgtaggctaggatagttccc

SEQ ID NO: 4046437 - DNA, 25 bp, Homo sapien
tctgtaggctaggatagttccccat

SEQ ID NO: 4046438 - DNA, 25 bp, Homo sapien
caagcatcacaagcattatttctcc

SEQ ID NO: 4046439 - DNA, 25 bp, Homo sapien
caaagcaaaagggtcacaagcatca

SEQ ID NO: 4046440 - DNA, 25 bp, Homo sapien
tgggtccagtgataccaagagataa

SEQ ID NO: 4046441 - DNA, 25 bp, Homo sapien
gggtccagtgataccaagagataag

SEQ ID NO: 4046442 - DNA, 25 bp, Homo sapien
cctagagttattgaagtctgacctt

SEQ ID NO: 4046443 - DNA, 25 bp, Homo sapien
accttctgtttgtaggtcagttgcc

SEQ ID NO: 4046444 - DNA, 25 bp, Homo sapien
tgtccaagttgaacagtaaaacgtc

SEQ ID NO: 4046445 - DNA, 25 bp, Homo sapien
gaattcagctagaacttaacacagc

SEQ ID NO: 4046446 - DNA, 25 bp, Homo sapien
catacgtgcaataaaatagggcagg

SEQ ID NO: 4046447 - DNA, 25 bp, Homo sapien
cagcattaataagagagaaggtggc

SEQ ID NO: 4046448 - DNA, 25 bp, Homo sapien
tcctttgccggtggaactatgagtc

SEQ ID NO: 4046449 - DNA, 25 bp, Homo sapien
tagggacattcctaccataggttgg

SEQ ID NO: 4046450 - DNA, 25 bp, Homo sapien
cactcttatcctctactctgggaaa

SEQ ID NO: 4046451 - DNA, 25 bp, Homo sapien
agatgactttaaactgctcttcctg

SEQ ID NO: 4046452 - DNA, 25 bp, Homo sapien
tgtgaagatgactttaaactgctct

SEQ ID NO: 4046453 - DNA, 25 bp, Homo sapien
ctgggaaagtcttcagtcaggaagg

SEQ ID NO: 4046454 - DNA, 25 bp, Homo sapien
agtaagcaagctttatcagaatctt

SEQ ID NO: 4046455 - DNA, 25 bp, Homo sapien
gaaagtaacataacatgaagcatgc

SEQ ID NO: 4046456 - DNA, 25 bp, Homo sapien
gaagcatgcacttttacctctttcc

SEQ ID NO: 4046457 - DNA, 25 bp, Homo sapien
caattcagtcacaagtatgtcatat

SEQ ID NO: 4046458 - DNA, 25 bp, Homo sapien
gaacaactttttatcctgagttaca

SEQ ID NO: 4046459 - DNA, 25 bp, Homo sapien
gagttacatttgacataacccaaca

SEQ ID NO: 4046460 - DNA, 25 bp, Homo sapien
gtaccaatcacttatctgaacaact

SEQ ID NO: 4046461 - DNA, 25 bp, Homo sapien
ggtctaaggtgcctaagctatttga

SEQ ID NO: 4046462 - DNA, 25 bp, Homo sapien
ttttcatcacatcgctgtgggggct

SEQ ID NO: 4046463 - DNA, 25 bp, Homo sapien
ctagtagatccgcatttgtttgatt

SEQ ID NO: 4046464 - DNA, 25 bp, Homo sapien
agatttttcatcacatcgctgtggg

SEQ ID NO: 4046465 - DNA, 25 bp, Homo sapien
atcacatcgctgtgggggctttgcc

SEQ ID NO: 4046466 - DNA, 25 bp, Homo sapien
tcggaagctttcagaccctgtatct

SEQ ID NO: 4046467 - DNA, 25 bp, Homo sapien
tttcggaagctttcagaccctgtat

SEQ ID NO: 4046468 - DNA, 25 bp, Homo sapien
tgtatctttaaacgtcctttgttca

SEQ ID NO: 4046469 - DNA, 25 bp, Homo sapien
ggctttcggaagctttcagaccctg

SEQ ID NO: 4046470 - DNA, 25 bp, Homo sapien
cttttcacatatcagctgggaactt

SEQ ID NO: 4046471 - DNA, 25 bp, Homo sapien
cagctgggaacttggtactcattta

SEQ ID NO: 4046472 - DNA, 25 bp, Homo sapien
gggtctgtcacttgccaacatcaga

SEQ ID NO: 4046473 - DNA, 25 bp, Homo sapien
cttgccaacatcagagacttacagc

SEQ ID NO: 4046474 - DNA, 25 bp, Homo sapien
tgtgctgagtcatgcttacaaggaa

SEQ ID NO: 4046475 - DNA, 25 bp, Homo sapien
tgatcagagcaggttacgtaggtaa

SEQ ID NO: 4046476 - DNA, 25 bp, Homo sapien
ggcaagaagctcatctcctaaaggt

SEQ ID NO: 4046477 - DNA, 25 bp, Homo sapien
tacaaggaaataaagctcaagcttc

SEQ ID NO: 4046478 - DNA, 25 bp, Homo sapien
tttgcataatggaatgacaaggtcc

SEQ ID NO: 4046479 - DNA, 25 bp, Homo sapien
agtgactgggttgtaattagtggca

SEQ ID NO: 4046480 - DNA, 25 bp, Homo sapien
gaatgacaaggtccattcactggca

SEQ ID NO: 4046481 - DNA, 25 bp, Homo sapien
ctgttcttcctaagtatcatttgca

SEQ ID NO: 4046482 - DNA, 25 bp, Homo sapien
aggctctcgatttcttgtttcactg

SEQ ID NO: 4046483 - DNA, 25 bp, Homo sapien
ttcactgtatccagactctttgcta

SEQ ID NO: 4046484 - DNA, 25 bp, Homo sapien
ccagactctttgctatggtcttcat

SEQ ID NO: 4046485 - DNA, 25 bp, Homo sapien
aaataacaaggctctcgatttcttg

SEQ ID NO: 4046486 - DNA, 25 bp, Homo sapien
ttccagcagtacagggagactgtct

SEQ ID NO: 4046487 - DNA, 25 bp, Homo sapien
tagcccagattcacctcagatttag

SEQ ID NO: 4046488 - DNA, 25 bp, Homo sapien
caaagtgctacttgtcctgaatggg

SEQ ID NO: 4046489 - DNA, 25 bp, Homo sapien
gctctagattgtgcctgtagcccag

SEQ ID NO: 4046490 - DNA, 25 bp, Homo sapien
cctgctttcagcaagcgagacttaa

SEQ ID NO: 4046491 - DNA, 25 bp, Homo sapien
gaggcatgaggatctttagcgctgt

SEQ ID NO: 4046492 - DNA, 25 bp, Homo sapien
tcctttcctgaagtaaaccatagcc

SEQ ID NO: 4046493 - DNA, 25 bp, Homo sapien
taaatctatcttgtatggaggcatg

SEQ ID NO: 4046494 - DNA, 25 bp, Homo sapien
aagaataaaattatagcttctgcag

SEQ ID NO: 4046495 - DNA, 25 bp, Homo sapien
gaataaaattatagcttctgcagca

SEQ ID NO: 4046496 - DNA, 25 bp, Homo sapien
aaaagaataaaattatagcttctgc

SEQ ID NO: 4046497 - DNA, 25 bp, Homo sapien
ataaaattatagcttctgcagcaac

SEQ ID NO: 4046498 - DNA, 25 bp, Homo sapien
ttgcatcatcaattaaatctagtaa

SEQ ID NO: 4046499 - DNA, 25 bp, Homo sapien
tcatcaattaaatctagtaattgaa

SEQ ID NO: 4046500 - DNA, 25 bp, Homo sapien
catcatcaattaaatctagtaattg

SEQ ID NO: 4046501 - DNA, 25 bp, Homo sapien
caattaaatctagtaattgaaacat

SEQ ID NO: 4046502 - DNA, 25 bp, Homo sapien
cgataaattattgatgagtatagtc

SEQ ID NO: 4046503 - DNA, 25 bp, Homo sapien
caagcatacaatgtgtgatgatgaa

SEQ ID NO: 4046504 - DNA, 25 bp, Homo sapien
agtcaccttattatgctaccaaaca

SEQ ID NO: 4046505 - DNA, 25 bp, Homo sapien
taactgggatatccactacctcagg

SEQ ID NO: 4046506 - DNA, 25 bp, Homo sapien
ggggttttctgtgagaatattgaca

SEQ ID NO: 4046507 - DNA, 25 bp, Homo sapien
tgctgtaattttttacagaaagtta

SEQ ID NO: 4046508 - DNA, 25 bp, Homo sapien
gtagaccttctgcactgctgtaatt

SEQ ID NO: 4046509 - DNA, 25 bp, Homo sapien
actgctgtaattttttacagaaagt

SEQ ID NO: 4046510 - DNA, 25 bp, Homo sapien
cagtagaccttctgcactgctgtaa

SEQ ID NO: 4046511 - DNA, 25 bp, Homo sapien
caggacagaggagtgctaagtgaag

SEQ ID NO: 4046512 - DNA, 25 bp, Homo sapien
ggcggcaggacagaggagtgctaag

SEQ ID NO: 4046513 - DNA, 25 bp, Homo sapien
gtgaagcggcgaaaagccccttata

SEQ ID NO: 4046514 - DNA, 25 bp, Homo sapien
gctaagtgaagcggcgaaaagcccc

SEQ ID NO: 4046515 - DNA, 25 bp, Homo sapien
ctaggtaactgcaccaaaatggatc

SEQ ID NO: 4046516 - DNA, 25 bp, Homo sapien
cagtcccatcttattgaagacacca

SEQ ID NO: 4046517 - DNA, 25 bp, Homo sapien
tattgaagacaccacttccgatcat

SEQ ID NO: 4046518 - DNA, 25 bp, Homo sapien
ccatctatatccagtcccatcttat

SEQ ID NO: 4046519 - DNA, 25 bp, Homo sapien
catttgtaagatctggaatattctt

SEQ ID NO: 4046520 - DNA, 25 bp, Homo sapien
tctcctctctgttggacatgtatca

SEQ ID NO: 4046521 - DNA, 25 bp, Homo sapien
cctctctgttggacatgtatcaact

SEQ ID NO: 4046522 - DNA, 25 bp, Homo sapien
tcctctctgttggacatgtatcaac

SEQ ID NO: 4046523 - DNA, 25 bp, Homo sapien
tctctgttggacatgtatcaactgc

SEQ ID NO: 4046524 - DNA, 25 bp, Homo sapien
gaaaataatcccactcaggtccaat

SEQ ID NO: 4046525 - DNA, 25 bp, Homo sapien
tatgactaggccagcttgtactaag

SEQ ID NO: 4046526 - DNA, 25 bp, Homo sapien
cccattctatgtcagggaccttgtc

SEQ ID NO: 4046527 - DNA, 25 bp, Homo sapien
tacacgttggatatgcaggttcctg

SEQ ID NO: 4046528 - DNA, 25 bp, Homo sapien
tccacactgagggtatgagcagtgt

SEQ ID NO: 4046529 - DNA, 25 bp, Homo sapien
gatgacatccacactgagggtatga

SEQ ID NO: 4046530 - DNA, 25 bp, Homo sapien
ggtgaacaggtgaacatcaggtaag

SEQ ID NO: 4046531 - DNA, 25 bp, Homo sapien
gaggagcagatgtccagaacaaaga

SEQ ID NO: 4046532 - DNA, 25 bp, Homo sapien
taaattaccaaatatccctctcatc

SEQ ID NO: 4046533 - DNA, 25 bp, Homo sapien
accaaatatccctctcatctttaca

SEQ ID NO: 4046534 - DNA, 25 bp, Homo sapien
aaatgtgacatcacatccacataaa

SEQ ID NO: 4046535 - DNA, 25 bp, Homo sapien
gacatcacatccacataaattacca

SEQ ID NO: 4046536 - DNA, 25 bp, Homo sapien
tcataaggatagacatgtggatcaa

SEQ ID NO: 4046537 - DNA, 25 bp, Homo sapien
tgtggatcaatggaagataactcag

SEQ ID NO: 4046538 - DNA, 25 bp, Homo sapien
cgatctatagactcgatgaactcta

SEQ ID NO: 4046539 - DNA, 25 bp, Homo sapien
tacttacaaagcagggaattgagac

SEQ ID NO: 4046540 - DNA, 25 bp, Homo sapien
gttgacacaacttcctcactaagct

SEQ ID NO: 4046541 - DNA, 25 bp, Homo sapien
gacacaacaggcctagcttttggta

SEQ ID NO: 4046542 - DNA, 25 bp, Homo sapien
acttggctaatggttgacacaacag

SEQ ID NO: 4046543 - DNA, 25 bp, Homo sapien
tttctccatatcagccgtaaagctg

SEQ ID NO: 4046544 - DNA, 25 bp, Homo sapien
tgagttcgaaagtactacctttctc

SEQ ID NO: 4046545 - DNA, 25 bp, Homo sapien
gtagcccctaatgattctttgtgtt

SEQ ID NO: 4046546 - DNA, 25 bp, Homo sapien
ttatcctatcaaaaacagcttttca

SEQ ID NO: 4046547 - DNA, 25 bp, Homo sapien
cagtaaagctatcaggtccctggct

SEQ ID NO: 4046548 - DNA, 25 bp, Homo sapien
agagttctgtagatacctgtaaggc

SEQ ID NO: 4046549 - DNA, 25 bp, Homo sapien
aattatgggtctgggtgctctcgtg

SEQ ID NO: 4046550 - DNA, 25 bp, Homo sapien
tgccagtggtttgttgaagtctccc

SEQ ID NO: 4046551 - DNA, 25 bp, Homo sapien
gaatacatgccacgtgtagatgaga

SEQ ID NO: 4046552 - DNA, 25 bp, Homo sapien
cacctcagccaaccaatctcagtag

SEQ ID NO: 4046553 - DNA, 25 bp, Homo sapien
acctcagccaaccaatctcagtagc

SEQ ID NO: 4046554 - DNA, 25 bp, Homo sapien
cctcagccaaccaatctcagtagct

SEQ ID NO: 4046555 - DNA, 25 bp, Homo sapien
ctagagactctgtggaatccttgga

SEQ ID NO: 4046556 - DNA, 25 bp, Homo sapien
caggttgaccacatctcagcagaca

SEQ ID NO: 4046557 - DNA, 25 bp, Homo sapien
aatccttggaggaataccacatggg

SEQ ID NO: 4046558 - DNA, 25 bp, Homo sapien
ggtctccatgatcccacactctgtg

SEQ ID NO: 4046559 - DNA, 25 bp, Homo sapien
aatatgagagaggagcagtgacaca

SEQ ID NO: 4046560 - DNA, 25 bp, Homo sapien
gggataaacgccattgcaatagcac

SEQ ID NO: 4046561 - DNA, 25 bp, Homo sapien
tgttcagtgtctcagaagtcagtgg

SEQ ID NO: 4046562 - DNA, 25 bp, Homo sapien
tccccaggagcttcaagagagttca

SEQ ID NO: 4046563 - DNA, 25 bp, Homo sapien
tctaccatctctccttcagtgccaa

SEQ ID NO: 4046564 - DNA, 25 bp, Homo sapien
tgccaatccaagcattctgatttaa

SEQ ID NO: 4046565 - DNA, 25 bp, Homo sapien
gaagactagatcaggctgctctacc

SEQ ID NO: 4046566 - DNA, 25 bp, Homo sapien
tgtaggtacttttgtctatgaagac

SEQ ID NO: 4046567 - DNA, 25 bp, Homo sapien
taagaattgctcctgcatcagacat

SEQ ID NO: 4046568 - DNA, 25 bp, Homo sapien
gcatatgtgtttgtcgccctattag

SEQ ID NO: 4046569 - DNA, 25 bp, Homo sapien
tcctagagttaggtctggtttaaga

SEQ ID NO: 4046570 - DNA, 25 bp, Homo sapien
ttgttcactgaacacctcctttata

SEQ ID NO: 4046571 - DNA, 25 bp, Homo sapien
tgggacaggagctgcatatctgagc

SEQ ID NO: 4046572 - DNA, 25 bp, Homo sapien
ctgggacaggagctgcatatctgag

SEQ ID NO: 4046573 - DNA, 25 bp, Homo sapien
ctttgagttttacatcaactctggg

SEQ ID NO: 4046574 - DNA, 25 bp, Homo sapien
cgtgagggtcacgacaattttccca

SEQ ID NO: 4046575 - DNA, 25 bp, Homo sapien
aactctggggctaatcatcccacac

SEQ ID NO: 4046576 - DNA, 25 bp, Homo sapien
tttacatcaactctggggctaatca

SEQ ID NO: 4046577 - DNA, 25 bp, Homo sapien
tgaaagatgtccgtaataaaaactg

SEQ ID NO: 4046578 - DNA, 25 bp, Homo sapien
tccaaatcgtaatggaagaagtcaa

SEQ ID NO: 4046579 - DNA, 25 bp, Homo sapien
gcattactatatgtcaagagtggac

SEQ ID NO: 4046580 - DNA, 25 bp, Homo sapien
gtcaaattaaccttgttgcagacga

SEQ ID NO: 4046581 - DNA, 25 bp, Homo sapien
gcatctttatctggtgacatttcca

SEQ ID NO: 4046582 - DNA, 25 bp, Homo sapien
agcatctttatctggtgacatttcc

SEQ ID NO: 4046583 - DNA, 25 bp, Homo sapien
tagcatctttatctggtgacatttc

SEQ ID NO: 4046584 - DNA, 25 bp, Homo sapien
attacaaagagggactttatttgtg

SEQ ID NO: 4046585 - DNA, 25 bp, Homo sapien
ccctattttttaagaccatcacaag

SEQ ID NO: 4046586 - DNA, 25 bp, Homo sapien
caaagagggactttatttgtgactt

SEQ ID NO: 4046587 - DNA, 25 bp, Homo sapien
ttttaagaccatcacaagactaaag

SEQ ID NO: 4046588 - DNA, 25 bp, Homo sapien
tcacccttatcatcaagactcactg

SEQ ID NO: 4046589 - DNA, 25 bp, Homo sapien
taagtagactccaagaatgaccctg

SEQ ID NO: 4046590 - DNA, 25 bp, Homo sapien
gaatggtgggacatacaagagagcc

SEQ ID NO: 4046591 - DNA, 25 bp, Homo sapien
gaccctgaatagaagatgcacctga

SEQ ID NO: 4046592 - DNA, 25 bp, Homo sapien
tatgaggattatctgagctcctggc

SEQ ID NO: 4046593 - DNA, 25 bp, Homo sapien
aaagctgcattgcatcaatattaca

SEQ ID NO: 4046594 - DNA, 25 bp, Homo sapien
gctgagccatgatacggaatattcc

SEQ ID NO: 4046595 - DNA, 25 bp, Homo sapien
atatcttctaactttactgctgagc

SEQ ID NO: 4046596 - DNA, 25 bp, Homo sapien
tccaactaagattgaagatatttct

SEQ ID NO: 4046597 - DNA, 25 bp, Homo sapien
tgctctctgcataactgtgctagac

SEQ ID NO: 4046598 - DNA, 25 bp, Homo sapien
tctgcataactgtgctagacgtttc

SEQ ID NO: 4046599 - DNA, 25 bp, Homo sapien
gcataactgtgctagacgtttctca

SEQ ID NO: 4046600 - DNA, 25 bp, Homo sapien
ctgtgctagacgtttctcatttggc

SEQ ID NO: 4046601 - DNA, 25 bp, Homo sapien
tgagaaggtggcacattgtgctctc

SEQ ID NO: 4046602 - DNA, 25 bp, Homo sapien
cagcggttgtaggttctgtgaaaaa

SEQ ID NO: 4046603 - DNA, 25 bp, Homo sapien
gacagaaacagcctttaggatgtga

SEQ ID NO: 4046604 - DNA, 25 bp, Homo sapien
tctgaagtactgacagaaacagcct

SEQ ID NO: 4046605 - DNA, 25 bp, Homo sapien
aatacattgctacgtcttttgacca

SEQ ID NO: 4046606 - DNA, 25 bp, Homo sapien
cttttgaccatattctgaccacata

SEQ ID NO: 4046607 - DNA, 25 bp, Homo sapien
tccttcacaatacattgctacgtct

SEQ ID NO: 4046608 - DNA, 25 bp, Homo sapien
catattctgaccacatattctagca

SEQ ID NO: 4046609 - DNA, 25 bp, Homo sapien
ctttgaatctactgtttgggcctcc

SEQ ID NO: 4046610 - DNA, 25 bp, Homo sapien
taattatttcgtctgccagatcaca

SEQ ID NO: 4046611 - DNA, 25 bp, Homo sapien
agatcacatctgctatagaccccta

SEQ ID NO: 4046612 - DNA, 25 bp, Homo sapien
cttccgttaagtggataatcaacac

SEQ ID NO: 4046613 - DNA, 25 bp, Homo sapien
ctgctatttgttggataggacctcc

SEQ ID NO: 4046614 - DNA, 25 bp, Homo sapien
taatctgtatcaatatgtctctgca

SEQ ID NO: 4046615 - DNA, 25 bp, Homo sapien
taggacctccattatatgagtgtgg

SEQ ID NO: 4046616 - DNA, 25 bp, Homo sapien
tgtcctaaatttctctaaagctctg

SEQ ID NO: 4046617 - DNA, 25 bp, Homo sapien
gccacaactgcagtcatcatttaca

SEQ ID NO: 4046618 - DNA, 25 bp, Homo sapien
ttagccacaactgcagtcatcattt

SEQ ID NO: 4046619 - DNA, 25 bp, Homo sapien
tcagtttctcagggactgtgaaatt

SEQ ID NO: 4046620 - DNA, 25 bp, Homo sapien
atcatttacatcaatcagtttctca

SEQ ID NO: 4046621 - DNA, 25 bp, Homo sapien
taacaattctcactgacgttggaat

SEQ ID NO: 4046622 - DNA, 25 bp, Homo sapien
tataactggatttgcaccgagtgcc

SEQ ID NO: 4046623 - DNA, 25 bp, Homo sapien
agtacaactgttagatccttgactg

SEQ ID NO: 4046624 - DNA, 25 bp, Homo sapien
aatcaaccagcaaagtgccacattg

SEQ ID NO: 4046625 - DNA, 25 bp, Homo sapien
tggactgtggccaccaatcgtgcca

SEQ ID NO: 4046626 - DNA, 25 bp, Homo sapien
ttggactgtggccaccaatcgtgcc

SEQ ID NO: 4046627 - DNA, 25 bp, Homo sapien
ggactgtggccaccaatcgtgccat

SEQ ID NO: 4046628 - DNA, 25 bp, Homo sapien
cttggactgtggccaccaatcgtgc

SEQ ID NO: 4046629 - DNA, 25 bp, Homo sapien
ggtgtcttgtaggtgccagcagccc

SEQ ID NO: 4046630 - DNA, 25 bp, Homo sapien
atccttggtgtcttgtaggtgccag

SEQ ID NO: 4046631 - DNA, 25 bp, Homo sapien
ccttggtgtcttgtaggtgccagca

SEQ ID NO: 4046632 - DNA, 25 bp, Homo sapien
tggtgtcttgtaggtgccagcagcc

SEQ ID NO: 4046633 - DNA, 25 bp, Homo sapien
actgcgcgcggcctaaagaattttt

SEQ ID NO: 4046634 - DNA, 25 bp, Homo sapien
tgcgcgcggcctaaagaatttttta

SEQ ID NO: 4046635 - DNA, 25 bp, Homo sapien
ctgcgcgcggcctaaagaatttttt

SEQ ID NO: 4046636 - DNA, 25 bp, Homo sapien
taagacgagatcatggcatgtttta

SEQ ID NO: 4046637 - DNA, 25 bp, Homo sapien
tctatatatgcactaatggtctttt

SEQ ID NO: 4046638 - DNA, 25 bp, Homo sapien
gatgtcaacgtatccaagtagcttt

SEQ ID NO: 4046639 - DNA, 25 bp, Homo sapien
ttttgaatattgttaaggccctgct

SEQ ID NO: 4046640 - DNA, 25 bp, Homo sapien
gcacagagttatctttggcccttcc

SEQ ID NO: 4046641 - DNA, 25 bp, Homo sapien
cacaccaccttgcagaaaaaggcag

SEQ ID NO: 4046642 - DNA, 25 bp, Homo sapien
ctatgctttcagtggggccaagcac

SEQ ID NO: 4046643 - DNA, 25 bp, Homo sapien
ggcagcagtgcttttatttcccaac

SEQ ID NO: 4046644 - DNA, 25 bp, Homo sapien
ttctaacttggccagttccatggac

SEQ ID NO: 4046645 - DNA, 25 bp, Homo sapien
aacctctgagttattgcttatggga

SEQ ID NO: 4046646 - DNA, 25 bp, Homo sapien
tccatggactctcgctttttcttca

SEQ ID NO: 4046647 - DNA, 25 bp, Homo sapien
ggagtaactccttctaacttggcca

SEQ ID NO: 4046648 - DNA, 25 bp, Homo sapien
actgccggtgcttggacgatggccc

SEQ ID NO: 4046649 - DNA, 25 bp, Homo sapien
cgatggccccttgatactgtttgta

SEQ ID NO: 4046650 - DNA, 25 bp, Homo sapien
cctgagcagttttacccaagcatga

SEQ ID NO: 4046651 - DNA, 25 bp, Homo sapien
tgtttgtaccatgctcagagtgctg

SEQ ID NO: 4046652 - DNA, 25 bp, Homo sapien
gaaactgcagatttattagttaaaa

SEQ ID NO: 4046653 - DNA, 25 bp, Homo sapien
tatcatacaaatcattagaaactgc

SEQ ID NO: 4046654 - DNA, 25 bp, Homo sapien
catctccacaatatcatacaaatca

SEQ ID NO: 4046655 - DNA, 25 bp, Homo sapien
gaacgtagcctttcattccttccat

SEQ ID NO: 4046656 - DNA, 25 bp, Homo sapien
ccctttgacaggaggtgctgacgct

SEQ ID NO: 4046657 - DNA, 25 bp, Homo sapien
aacaaggtgaagaccgatgcgctca

SEQ ID NO: 4046658 - DNA, 25 bp, Homo sapien
cagcaggtcattgtctactacgagg

SEQ ID NO: 4046659 - DNA, 25 bp, Homo sapien
gatgcgctcatctgctgctacctgg

SEQ ID NO: 4046660 - DNA, 25 bp, Homo sapien
ctggatttctgctttgtaaggcatc

SEQ ID NO: 4046661 - DNA, 25 bp, Homo sapien
tctgctttgtaaggcatcacacttt

SEQ ID NO: 4046662 - DNA, 25 bp, Homo sapien
gctttgtaaggcatcacacttttta

SEQ ID NO: 4046663 - DNA, 25 bp, Homo sapien
ctttttactccaaatcctgtgtgtt

SEQ ID NO: 4046664 - DNA, 25 bp, Homo sapien
ttgattccacaagaaatttaaaata

SEQ ID NO: 4046665 - DNA, 25 bp, Homo sapien
gtggccattttcaagatactgattc

SEQ ID NO: 4046666 - DNA, 25 bp, Homo sapien
cagtgtggccattttcaagatactg

SEQ ID NO: 4046667 - DNA, 25 bp, Homo sapien
tgattccacaagaaatttaaaatag

SEQ ID NO: 4046668 - DNA, 25 bp, Homo sapien
taacctaagaggtagcagatgggag

SEQ ID NO: 4046669 - DNA, 25 bp, Homo sapien
ggcaaatgtaggcatctaacctaag

SEQ ID NO: 4046670 - DNA, 25 bp, Homo sapien
aagtccctattttatcttcgtccag

SEQ ID NO: 4046671 - DNA, 25 bp, Homo sapien
aatgcagtcaccttatttccaagtc

SEQ ID NO: 4046672 - DNA, 25 bp, Homo sapien
tgaaggttgcttaaaggcccagaaa

SEQ ID NO: 4046673 - DNA, 25 bp, Homo sapien
gccatccagtaattgaagattccca

SEQ ID NO: 4046674 - DNA, 25 bp, Homo sapien
cattgggatgctgctgtttgtacac

SEQ ID NO: 4046675 - DNA, 25 bp, Homo sapien
gatactttcgattgccagcagcgac

SEQ ID NO: 4046676 - DNA, 25 bp, Homo sapien
ggcctgcaatcctcctatatggcat

SEQ ID NO: 4046677 - DNA, 25 bp, Homo sapien
ggatgactatcaggcctgcaatcct

SEQ ID NO: 4046678 - DNA, 25 bp, Homo sapien
ttttcaggatgactatcaggcctgc

SEQ ID NO: 4046679 - DNA, 25 bp, Homo sapien
caggatgactatcaggcctgcaatc

SEQ ID NO: 4046680 - DNA, 25 bp, Homo sapien
ttgcttatttttaacgagctgatgg

SEQ ID NO: 4046681 - DNA, 25 bp, Homo sapien
tatttttaacgagctgatgggccat

SEQ ID NO: 4046682 - DNA, 25 bp, Homo sapien
ttatttttaacgagctgatgggcca

SEQ ID NO: 4046683 - DNA, 25 bp, Homo sapien
gcttatttttaacgagctgatgggc

SEQ ID NO: 4046684 - DNA, 25 bp, Homo sapien
cagaatctagaatgcggaggtatcc

SEQ ID NO: 4046685 - DNA, 25 bp, Homo sapien
ctgttttagtgagagggtgtcaaag

SEQ ID NO: 4046686 - DNA, 25 bp, Homo sapien
ggcctcatggcccatatgtcctata

SEQ ID NO: 4046687 - DNA, 25 bp, Homo sapien
ggttaaagccatggcacctacaccg

SEQ ID NO: 4046688 - DNA, 25 bp, Homo sapien
gaattagggaacaccaagagagcca

SEQ ID NO: 4046689 - DNA, 25 bp, Homo sapien
gcttagactgtcctctggacaaggt

SEQ ID NO: 4046690 - DNA, 25 bp, Homo sapien
tagatctcacacttcatcaccggct

SEQ ID NO: 4046691 - DNA, 25 bp, Homo sapien
tggacaaggtattaaagtgagaatt

SEQ ID NO: 4046692 - DNA, 25 bp, Homo sapien
taaattccgagcaacactaaacctc

SEQ ID NO: 4046693 - DNA, 25 bp, Homo sapien
gataggaccgcctttgacagtttaa

SEQ ID NO: 4046694 - DNA, 25 bp, Homo sapien
taaattgtctgagtttcctgacagg

SEQ ID NO: 4046695 - DNA, 25 bp, Homo sapien
taaacctcctgttgcgaaaatgccc

SEQ ID NO: 4046696 - DNA, 25 bp, Homo sapien
tgacttctgctggtatcatctgaga

SEQ ID NO: 4046697 - DNA, 25 bp, Homo sapien
tctgagatcagtgatgtggctgaaa

SEQ ID NO: 4046698 - DNA, 25 bp, Homo sapien
tcacagagaattttagctagatcca

SEQ ID NO: 4046699 - DNA, 25 bp, Homo sapien
agaattttagctagatccatcagca

SEQ ID NO: 4046700 - DNA, 25 bp, Homo sapien
ctttttcatgtcacctcccgctgtg

SEQ ID NO: 4046701 - DNA, 25 bp, Homo sapien
acctcccgctgtgtctagacctccg

SEQ ID NO: 4046702 - DNA, 25 bp, Homo sapien
ctcccgctgtgtctagacctccgtt

SEQ ID NO: 4046703 - DNA, 25 bp, Homo sapien
cccgctgtgtctagacctccgttct

SEQ ID NO: 4046704 - DNA, 25 bp, Homo sapien
ggttcaacaatgagtacccactagt

SEQ ID NO: 4046705 - DNA, 25 bp, Homo sapien
tgtcagatctttagcgccttgaggg

SEQ ID NO: 4046706 - DNA, 25 bp, Homo sapien
caccaggcatcacgtctgaggcagg

SEQ ID NO: 4046707 - DNA, 25 bp, Homo sapien
gactaagttcatgatgtgctcacga

SEQ ID NO: 4046708 - DNA, 25 bp, Homo sapien
tttagttcaagtgacagtctcactc

SEQ ID NO: 4046709 - DNA, 25 bp, Homo sapien
catttagttcaagtgacagtctcac

SEQ ID NO: 4046710 - DNA, 25 bp, Homo sapien
atttagttcaagtgacagtctcact

SEQ ID NO: 4046711 - DNA, 25 bp, Homo sapien
ataatgtaatctgtctgttcttaga

SEQ ID NO: 4046712 - DNA, 25 bp, Homo sapien
tcatgtatataatgtaatctgtctg

SEQ ID NO: 4046713 - DNA, 25 bp, Homo sapien
tgtaatctgtctgttcttagaaatc

SEQ ID NO: 4046714 - DNA, 25 bp, Homo sapien
gtatataatgtaatctgtctgttct

SEQ ID NO: 4046715 - DNA, 25 bp, Homo sapien
actgattccgcagaggtttgacttc

SEQ ID NO: 4046716 - DNA, 25 bp, Homo sapien
cctcagcagccatcatagactgatt

SEQ ID NO: 4046717 - DNA, 25 bp, Homo sapien
tttcacagaatccatttagggtcgc

SEQ ID NO: 4046718 - DNA, 25 bp, Homo sapien
cttctggttgtcttggtgttcggtg

SEQ ID NO: 4046719 - DNA, 25 bp, Homo sapien
tacgaaagttagacaataaggctac

SEQ ID NO: 4046720 - DNA, 25 bp, Homo sapien
ggactctgatgacccaaaacaccgt

SEQ ID NO: 4046721 - DNA, 25 bp, Homo sapien
ggctacaattaagatcaagggactc

SEQ ID NO: 4046722 - DNA, 25 bp, Homo sapien
gagaactgtatacagcacacttgag

SEQ ID NO: 4046723 - DNA, 25 bp, Homo sapien
tgaatttctacccatctggcaacac

SEQ ID NO: 4046724 - DNA, 25 bp, Homo sapien
tcatcggagctcaggtacatgacag

SEQ ID NO: 4046725 - DNA, 25 bp, Homo sapien
agtctctactcttggaagaacaaag

SEQ ID NO: 4046726 - DNA, 25 bp, Homo sapien
gcctctggtgttttaatactgtgaa

SEQ ID NO: 4046727 - DNA, 25 bp, Homo sapien
gcctgtttatgatcaggtctttcca

SEQ ID NO: 4046728 - DNA, 25 bp, Homo sapien
ttcaatcccatggaattctgtctga

SEQ ID NO: 4046729 - DNA, 25 bp, Homo sapien
ccccttcgcagatgggtcaacattc

SEQ ID NO: 4046730 - DNA, 25 bp, Homo sapien
ctgattgggtcttgaggtttggatt

SEQ ID NO: 4046731 - DNA, 25 bp, Homo sapien
gctgtgacatctgcgttaccacttt

SEQ ID NO: 4046732 - DNA, 25 bp, Homo sapien
ggctgtgacatctgcgttaccactt

SEQ ID NO: 4046733 - DNA, 25 bp, Homo sapien
tgtgacatctgcgttaccacttttg

SEQ ID NO: 4046734 - DNA, 25 bp, Homo sapien
tgacatctgcgttaccacttttgac

SEQ ID NO: 4046735 - DNA, 25 bp, Homo sapien
tggcccctgcagaccaccagatttt

SEQ ID NO: 4046736 - DNA, 25 bp, Homo sapien
caaaatgtctcttagtcgacaaggc

SEQ ID NO: 4046737 - DNA, 25 bp, Homo sapien
aaatatgtggcgatgtctgcagtgc

SEQ ID NO: 4046738 - DNA, 25 bp, Homo sapien
tgcctggaagatgacaacacttgtc

SEQ ID NO: 4046739 - DNA, 25 bp, Homo sapien
gaaaatatttccaaggcaatgtgaa

SEQ ID NO: 4046740 - DNA, 25 bp, Homo sapien
ctgatgcactggtaatgacctctgg

SEQ ID NO: 4046741 - DNA, 25 bp, Homo sapien
tctgatgcactggtaatgacctctg

SEQ ID NO: 4046742 - DNA, 25 bp, Homo sapien
gaaggtttcaactcctctgatgcac

SEQ ID NO: 4046743 - DNA, 25 bp, Homo sapien
aggagtctctgcatgaaggcatcaa

SEQ ID NO: 4046744 - DNA, 25 bp, Homo sapien
acaatgtccacaagtgcgcttatgc

SEQ ID NO: 4046745 - DNA, 25 bp, Homo sapien
atgtccacaagtgcgcttatgctca

SEQ ID NO: 4046746 - DNA, 25 bp, Homo sapien
tctgcatgaaggcatcaacaatgtc

SEQ ID NO: 4046747 - DNA, 25 bp, Homo sapien
ggtactctttctcttttcttgtcat

SEQ ID NO: 4046748 - DNA, 25 bp, Homo sapien
gggtactctttctcttttcttgtca

SEQ ID NO: 4046749 - DNA, 25 bp, Homo sapien
cccaggtgtctgcaaaaatatcact

SEQ ID NO: 4046750 - DNA, 25 bp, Homo sapien
atggtgcattatagctgaagcatgg

SEQ ID NO: 4046751 - DNA, 25 bp, Homo sapien
tcaaacatctggaaatggtgcatta

SEQ ID NO: 4046752 - DNA, 25 bp, Homo sapien
acatctggaaatggtgcattatagc

SEQ ID NO: 4046753 - DNA, 25 bp, Homo sapien
gaagccaacgtcagtcactttagca

SEQ ID NO: 4046754 - DNA, 25 bp, Homo sapien
agagcttccaagcatttccctcgtg

SEQ ID NO: 4046755 - DNA, 25 bp, Homo sapien
caaactcgagtgctgctgtgggctg

SEQ ID NO: 4046756 - DNA, 25 bp, Homo sapien
gcaaagaattctccgcacttgagag

SEQ ID NO: 4046757 - DNA, 25 bp, Homo sapien
tgtcagcgggaatgtaatttagtcc

SEQ ID NO: 4046758 - DNA, 25 bp, Homo sapien
gcgggaatgtaatttagtccaacca

SEQ ID NO: 4046759 - DNA, 25 bp, Homo sapien
tactgtcagcgggaatgtaatttag

SEQ ID NO: 4046760 - DNA, 25 bp, Homo sapien
cagcgggaatgtaatttagtccaac

SEQ ID NO: 4046761 - DNA, 25 bp, Homo sapien
tgtgtggctgagttataaatacatt

SEQ ID NO: 4046762 - DNA, 25 bp, Homo sapien
ctgaaagcccatgtgccaagttttc

SEQ ID NO: 4046763 - DNA, 25 bp, Homo sapien
gccaagttttctgcctggaggaaga

SEQ ID NO: 4046764 - DNA, 25 bp, Homo sapien
cctggaggaagattgtgtggctgag

SEQ ID NO: 4046765 - DNA, 25 bp, Homo sapien
ttccaagttggtaacatttcagttg

SEQ ID NO: 4046766 - DNA, 25 bp, Homo sapien
tccaagttggtaacatttcagttga

SEQ ID NO: 4046767 - DNA, 25 bp, Homo sapien
ctctttccaagttggtaacatttca

SEQ ID NO: 4046768 - DNA, 25 bp, Homo sapien
ctttccaagttggtaacatttcagt

SEQ ID NO: 4046769 - DNA, 25 bp, Homo sapien
acaaaaacaaagtgtagactggaat

SEQ ID NO: 4046770 - DNA, 25 bp, Homo sapien
aatttgaaacaggttgttcaggagc

SEQ ID NO: 4046771 - DNA, 25 bp, Homo sapien
tcatgaagttagataatggtgttta

SEQ ID NO: 4046772 - DNA, 25 bp, Homo sapien
caaagtgtagactggaatgtattac

SEQ ID NO: 4046773 - DNA, 25 bp, Homo sapien
aacaggtaaagccaacagtacagcc

SEQ ID NO: 4046774 - DNA, 25 bp, Homo sapien
acaggtaaagccaacagtacagcca

SEQ ID NO: 4046775 - DNA, 25 bp, Homo sapien
gaggaaggtcatccagcagccatac

SEQ ID NO: 4046776 - DNA, 25 bp, Homo sapien
gggaggaaggtcatccagcagccat

SEQ ID NO: 4046777 - DNA, 25 bp, Homo sapien
actctgggaggaaggtcatccagca

SEQ ID NO: 4046778 - DNA, 25 bp, Homo sapien
ccactctgggaggaaggtcatccag

SEQ ID NO: 4046779 - DNA, 25 bp, Homo sapien
ccagagacacatctagggcgacggc

SEQ ID NO: 4046780 - DNA, 25 bp, Homo sapien
gagacacatctagggcgacggccag

SEQ ID NO: 4046781 - DNA, 25 bp, Homo sapien
acatctagggcgacggccagaattt

SEQ ID NO: 4046782 - DNA, 25 bp, Homo sapien
cacatctagggcgacggccagaatt

SEQ ID NO: 4046783 - DNA, 25 bp, Homo sapien
ctctgtgagaatgttctaatgttct

SEQ ID NO: 4046784 - DNA, 25 bp, Homo sapien
ttgcctgatcctttcgaaaggcagt

SEQ ID NO: 4046785 - DNA, 25 bp, Homo sapien
ttcagattgtaaggctctgtgagaa

SEQ ID NO: 4046786 - DNA, 25 bp, Homo sapien
aaggcagtgggttttcagattgtaa

SEQ ID NO: 4046787 - DNA, 25 bp, Homo sapien
ctttcagctttttcccaagagaaga

SEQ ID NO: 4046788 - DNA, 25 bp, Homo sapien
tttcagctttttcccaagagaagat

SEQ ID NO: 4046789 - DNA, 25 bp, Homo sapien
atccctgaagttctagccactcagg

SEQ ID NO: 4046790 - DNA, 25 bp, Homo sapien
catccctgaagttctagccactcag

SEQ ID NO: 4046791 - DNA, 25 bp, Homo sapien
gtcctgtggataagaggatgcccat

SEQ ID NO: 4046792 - DNA, 25 bp, Homo sapien
ctgaaggaggcccatagactgtcca

SEQ ID NO: 4046793 - DNA, 25 bp, Homo sapien
tgtggataagaggatgcccatgatc

SEQ ID NO: 4046794 - DNA, 25 bp, Homo sapien
tagactgtccactcatgtcctgtgg

SEQ ID NO: 4046795 - DNA, 25 bp, Homo sapien
gaattgaagacgcatagtcttctcc

SEQ ID NO: 4046796 - DNA, 25 bp, Homo sapien
tctgaattgaagacgcatagtcttc

SEQ ID NO: 4046797 - DNA, 25 bp, Homo sapien
gtctgaattgaagacgcatagtctt

SEQ ID NO: 4046798 - DNA, 25 bp, Homo sapien
tgaagacgcatagtcttctcctggg

SEQ ID NO: 4046799 - DNA, 25 bp, Homo sapien
cagagttgtgcgctccacaaggcca

SEQ ID NO: 4046800 - DNA, 25 bp, Homo sapien
gagaaaaaatcttggagcagagctg

SEQ ID NO: 4046801 - DNA, 25 bp, Homo sapien
tggagcagagctggtaatgtattta

SEQ ID NO: 4046802 - DNA, 25 bp, Homo sapien
tttaagatgccagaggtggtccctc

SEQ ID NO: 4046803 - DNA, 25 bp, Homo sapien
tcatgtagaattcaggtaagtcccc

SEQ ID NO: 4046804 - DNA, 25 bp, Homo sapien
tgtagaattcaggtaagtcccctaa

SEQ ID NO: 4046805 - DNA, 25 bp, Homo sapien
agagatcctctctgttcatgtagaa

SEQ ID NO: 4046806 - DNA, 25 bp, Homo sapien
gttcatgtagaattcaggtaagtcc

SEQ ID NO: 4046807 - DNA, 25 bp, Homo sapien
ttctaaggtgggagcgttcattgtc

SEQ ID NO: 4046808 - DNA, 25 bp, Homo sapien
gctttctaaggtgggagcgttcatt

SEQ ID NO: 4046809 - DNA, 25 bp, Homo sapien
cagagctttctaaggtgggagcgtt

SEQ ID NO: 4046810 - DNA, 25 bp, Homo sapien
taaggtgggagcgttcattgtcagt

SEQ ID NO: 4046811 - DNA, 25 bp, Homo sapien
actcaacaacaatattcaccagatg

SEQ ID NO: 4046812 - DNA, 25 bp, Homo sapien
gcaccaagctttaactcaacaacaa

SEQ ID NO: 4046813 - DNA, 25 bp, Homo sapien
gaggcaccaagctttaactcaacaa

SEQ ID NO: 4046814 - DNA, 25 bp, Homo sapien
actgaggcaccaagctttaactcaa

SEQ ID NO: 4046815 - DNA, 25 bp, Homo sapien
ggtgagacctggaagacgaatataa

SEQ ID NO: 4046816 - DNA, 25 bp, Homo sapien
tgagacctggaagacgaatataaat

SEQ ID NO: 4046817 - DNA, 25 bp, Homo sapien
gagacctggaagacgaatataaatt

SEQ ID NO: 4046818 - DNA, 25 bp, Homo sapien
ttaagaagagcctctgagttgtgtt

SEQ ID NO: 4046819 - DNA, 25 bp, Homo sapien
tgccgttttagatgaaggaggttta

SEQ ID NO: 4046820 - DNA, 25 bp, Homo sapien
catccatttgccgttttagatgaag

SEQ ID NO: 4046821 - DNA, 25 bp, Homo sapien
catttgccgttttagatgaaggagg

SEQ ID NO: 4046822 - DNA, 25 bp, Homo sapien
atccgttcatccatttgccgtttta

SEQ ID NO: 4046823 - DNA, 25 bp, Homo sapien
tccccaggcctttcatgtgtattct

SEQ ID NO: 4046824 - DNA, 25 bp, Homo sapien
tttcatgtgtattctggaaggaacg

SEQ ID NO: 4046825 - DNA, 25 bp, Homo sapien
tctggaaggaacgcccgcttccaaa

SEQ ID NO: 4046826 - DNA, 25 bp, Homo sapien
cagagaagtccccaggcctttcatg

SEQ ID NO: 4046827 - DNA, 25 bp, Homo sapien
taatcaaggctcagtcttgttcttt

SEQ ID NO: 4046828 - DNA, 25 bp, Homo sapien
gaataatcaaggctcagtcttgttc

SEQ ID NO: 4046829 - DNA, 25 bp, Homo sapien
cagacgcctttttgggttgaccctg

SEQ ID NO: 4046830 - DNA, 25 bp, Homo sapien
ctgaataatcaaggctcagtcttgt

SEQ ID NO: 4046831 - DNA, 25 bp, Homo sapien
gcaaggaggtgggttaggaggaagc

SEQ ID NO: 4046832 - DNA, 25 bp, Homo sapien
cagcaaggaggtgggttaggaggaa

SEQ ID NO: 4046833 - DNA, 25 bp, Homo sapien
ggttaggaggaagcccatgtatttc

SEQ ID NO: 4046834 - DNA, 25 bp, Homo sapien
gaggtgggttaggaggaagcccatg

SEQ ID NO: 4046835 - DNA, 25 bp, Homo sapien
aatgctcctttttccgacttgtccg

SEQ ID NO: 4046836 - DNA, 25 bp, Homo sapien
gggttgaatacacaatgccgatatc

SEQ ID NO: 4046837 - DNA, 25 bp, Homo sapien
tagaaggggttgaatacacaatgcc

SEQ ID NO: 4046838 - DNA, 25 bp, Homo sapien
gatatccaacaggaccaatgctcct

SEQ ID NO: 4046839 - DNA, 25 bp, Homo sapien
tgaaaaataccgcattttaagtcat

SEQ ID NO: 4046840 - DNA, 25 bp, Homo sapien
aataccgcattttaagtcattcacg

SEQ ID NO: 4046841 - DNA, 25 bp, Homo sapien
cattttaagtcattcacggaggcca

SEQ ID NO: 4046842 - DNA, 25 bp, Homo sapien
accgcattttaagtcattcacggag

SEQ ID NO: 4046843 - DNA, 25 bp, Homo sapien
cagagatgtgcgtttcactatcagc

SEQ ID NO: 4046844 - DNA, 25 bp, Homo sapien
agagatgtgcgtttcactatcagca

SEQ ID NO: 4046845 - DNA, 25 bp, Homo sapien
gagatgtgcgtttcactatcagcat

SEQ ID NO: 4046846 - DNA, 25 bp, Homo sapien
cttaacttgattgactggttctctt

SEQ ID NO: 4046847 - DNA, 25 bp, Homo sapien
ttaacttgattgactggttctcttc

SEQ ID NO: 4046848 - DNA, 25 bp, Homo sapien
aagtcatcatgtgattcttcacctt

SEQ ID NO: 4046849 - DNA, 25 bp, Homo sapien
tcaccttggtcatgtaaagaagtat

SEQ ID NO: 4046850 - DNA, 25 bp, Homo sapien
catgtgattcttcaccttggtcatg

SEQ ID NO: 4046851 - DNA, 25 bp, Homo sapien
ggtcatgtaaagaagtatgagttac

SEQ ID NO: 4046852 - DNA, 25 bp, Homo sapien
taacccagctggaaatacagatcta

SEQ ID NO: 4046853 - DNA, 25 bp, Homo sapien
aacccagctggaaatacagatctac

SEQ ID NO: 4046854 - DNA, 25 bp, Homo sapien
ttaacccagctggaaatacagatct

SEQ ID NO: 4046855 - DNA, 25 bp, Homo sapien
gaaccacttgctccttgggacaatg

SEQ ID NO: 4046856 - DNA, 25 bp, Homo sapien
agctgtttgctgtgggctgtactcc

SEQ ID NO: 4046857 - DNA, 25 bp, Homo sapien
tgtgggctgtactccagctctccct

SEQ ID NO: 4046858 - DNA, 25 bp, Homo sapien
tgctggctcagaaccacttgctcct

SEQ ID NO: 4046859 - DNA, 25 bp, Homo sapien
taatcttagcctggttagtagcact

SEQ ID NO: 4046860 - DNA, 25 bp, Homo sapien
aatcataaaggactttcacagatac

SEQ ID NO: 4046861 - DNA, 25 bp, Homo sapien
cttattggttagctgttgggatgtc

SEQ ID NO: 4046862 - DNA, 25 bp, Homo sapien
tctaccattatctatgagaatcata

SEQ ID NO: 4046863 - DNA, 25 bp, Homo sapien
atcatcatcgccgttgccctgatta

SEQ ID NO: 4046864 - DNA, 25 bp, Homo sapien
atcatcatcatcgccgttgccctga

SEQ ID NO: 4046865 - DNA, 25 bp, Homo sapien
atcatcgccgttgccctgattatct

SEQ ID NO: 4046866 - DNA, 25 bp, Homo sapien
tcatcatcgccgttgccctgattat

SEQ ID NO: 4046867 - DNA, 25 bp, Homo sapien
cagttggtagatgctttactgcaaa

SEQ ID NO: 4046868 - DNA, 25 bp, Homo sapien
aatggctctggttttaatcatgccc

SEQ ID NO: 4046869 - DNA, 25 bp, Homo sapien
tcaatgacaggtcgagatatcctga

SEQ ID NO: 4046870 - DNA, 25 bp, Homo sapien
actgagctgctgtcatgatggccat

SEQ ID NO: 4046871 - DNA, 25 bp, Homo sapien
gctgatcccagatgagcgggctgcc

SEQ ID NO: 4046872 - DNA, 25 bp, Homo sapien
ccctctctggggcaatacctttgca

SEQ ID NO: 4046873 - DNA, 25 bp, Homo sapien
ctctctggggcaatacctttgcatc

SEQ ID NO: 4046874 - DNA, 25 bp, Homo sapien
gatcccagatgagcgggctgcctcc

SEQ ID NO: 4046875 - DNA, 25 bp, Homo sapien
tagtgctgtggttgtccgtggtaca

SEQ ID NO: 4046876 - DNA, 25 bp, Homo sapien
ccgtggtacacagcgattgcactta

SEQ ID NO: 4046877 - DNA, 25 bp, Homo sapien
gaagctgagtggaaacttgtggtcc

SEQ ID NO: 4046878 - DNA, 25 bp, Homo sapien
tggtccaggcttggtattaacagtg

SEQ ID NO: 4046879 - DNA, 25 bp, Homo sapien
tcctcacttcgaattaacctttcag

SEQ ID NO: 4046880 - DNA, 25 bp, Homo sapien
tgcttgcctgtccagaactgtgaca

SEQ ID NO: 4046881 - DNA, 25 bp, Homo sapien
tatttgtagagaacttgcttgcctg

SEQ ID NO: 4046882 - DNA, 25 bp, Homo sapien
cctttcagcaaacgcaagtaaatat

SEQ ID NO: 4046883 - DNA, 25 bp, Homo sapien
tcctcctcaacttcattctttacat

SEQ ID NO: 4046884 - DNA, 25 bp, Homo sapien
ttgctcctcctcaacttcattcttt

SEQ ID NO: 4046885 - DNA, 25 bp, Homo sapien
acttcattctttacatgagattcca

SEQ ID NO: 4046886 - DNA, 25 bp, Homo sapien
tctggcttttcttttgctcctcctc

SEQ ID NO: 4046887 - DNA, 25 bp, Homo sapien
gcagcagatggccatgaagtaataa

SEQ ID NO: 4046888 - DNA, 25 bp, Homo sapien
aggtacagccttacatcccatttag

SEQ ID NO: 4046889 - DNA, 25 bp, Homo sapien
tacatgactgattgacataacagag

SEQ ID NO: 4046890 - DNA, 25 bp, Homo sapien
taagtgaaaatccaaccagcttcag

SEQ ID NO: 4046891 - DNA, 25 bp, Homo sapien
atttgatggagtcaactccagcagt

SEQ ID NO: 4046892 - DNA, 25 bp, Homo sapien
cagtatttgatggagtcaactccag

SEQ ID NO: 4046893 - DNA, 25 bp, Homo sapien
tcagtatttgatggagtcaactcca

SEQ ID NO: 4046894 - DNA, 25 bp, Homo sapien
tgatggagtcaactccagcagttat

SEQ ID NO: 4046895 - DNA, 25 bp, Homo sapien
tcaatttctgttttagccacagtct

SEQ ID NO: 4046896 - DNA, 25 bp, Homo sapien
cctaattgctgaacaagagggctcc

SEQ ID NO: 4046897 - DNA, 25 bp, Homo sapien
tcccaatgaccctgataatgggaca

SEQ ID NO: 4046898 - DNA, 25 bp, Homo sapien
cctgataatgggacatctttgtagt

SEQ ID NO: 4046899 - DNA, 25 bp, Homo sapien
aagactcataagacattcgggagaa

SEQ ID NO: 4046900 - DNA, 25 bp, Homo sapien
tcataagacattcgggagaaaagta

SEQ ID NO: 4046901 - DNA, 25 bp, Homo sapien
actgacttgaatctatggtggatat

SEQ ID NO: 4046902 - DNA, 25 bp, Homo sapien
ggtggatattagtgacatagtagaa

SEQ ID NO: 4046903 - DNA, 25 bp, Homo sapien
tgttagttcaccaagaagacaagtt

SEQ ID NO: 4046904 - DNA, 25 bp, Homo sapien
tgtaagaattacaaggtaatatttc

SEQ ID NO: 4046905 - DNA, 25 bp, Homo sapien
tacatttgacaaagtattcgaatgt

SEQ ID NO: 4046906 - DNA, 25 bp, Homo sapien
ccaagaagacaagttaatgtaagaa

SEQ ID NO: 4046907 - DNA, 25 bp, Homo sapien
gttcttttgtaggcatccaaagcca

SEQ ID NO: 4046908 - DNA, 25 bp, Homo sapien
cagtctcaaggatgattctggtgtt

SEQ ID NO: 4046909 - DNA, 25 bp, Homo sapien
agcagtctcaaggatgattctggtg

SEQ ID NO: 4046910 - DNA, 25 bp, Homo sapien
ttcttttgtaggcatccaaagccat

SEQ ID NO: 4046911 - DNA, 25 bp, Homo sapien
tctccaagtttctctgagaggagtc

SEQ ID NO: 4046912 - DNA, 25 bp, Homo sapien
tagaggcgtaagtgtactaattata

SEQ ID NO: 4046913 - DNA, 25 bp, Homo sapien
tctgtgctctggtaattagaggcgt

SEQ ID NO: 4046914 - DNA, 25 bp, Homo sapien
tgctctccaagtttctctgagagga

SEQ ID NO: 4046915 - DNA, 25 bp, Homo sapien
tcactgtatctagatcttctgtttc

SEQ ID NO: 4046916 - DNA, 25 bp, Homo sapien
aaatccatgttgagtatacagggtt

SEQ ID NO: 4046917 - DNA, 25 bp, Homo sapien
gttgagtatacagggttgtcagcag

SEQ ID NO: 4046918 - DNA, 25 bp, Homo sapien
tcattcactgtatctagatcttctg

SEQ ID NO: 4046919 - DNA, 25 bp, Homo sapien
ctgtatcaccacaaaattccacaga

SEQ ID NO: 4046920 - DNA, 25 bp, Homo sapien
caaaattccacagatgtcagcgcat

SEQ ID NO: 4046921 - DNA, 25 bp, Homo sapien
attccacagatgtcagcgcatccat

SEQ ID NO: 4046922 - DNA, 25 bp, Homo sapien
aaattccacagatgtcagcgcatcc

SEQ ID NO: 4046923 - DNA, 25 bp, Homo sapien
gagaaatgaaggggagtttttcatc

SEQ ID NO: 4046924 - DNA, 25 bp, Homo sapien
tgtttctccactgggagaaatgaag

SEQ ID NO: 4046925 - DNA, 25 bp, Homo sapien
agaaatgaaggggagtttttcatct

SEQ ID NO: 4046926 - DNA, 25 bp, Homo sapien
ccactgggagaaatgaaggggagtt

SEQ ID NO: 4046927 - DNA, 25 bp, Homo sapien
aaagcagccctggatgacatctctt

SEQ ID NO: 4046928 - DNA, 25 bp, Homo sapien
tggaaagcagccctggatgacatct

SEQ ID NO: 4046929 - DNA, 25 bp, Homo sapien
aaatggcatttggaaagcagccctg

SEQ ID NO: 4046930 - DNA, 25 bp, Homo sapien
aatggcatttggaaagcagccctgg

SEQ ID NO: 4046931 - DNA, 25 bp, Homo sapien
acaaccacttcttgtacagtaaagt

SEQ ID NO: 4046932 - DNA, 25 bp, Homo sapien
cacttcttgtacagtaaagttgagc

SEQ ID NO: 4046933 - DNA, 25 bp, Homo sapien
ggggacagcaaacaaccacttcttg

SEQ ID NO: 4046934 - DNA, 25 bp, Homo sapien
tctggggacagcaaacaaccacttc

SEQ ID NO: 4046935 - DNA, 25 bp, Homo sapien
catctgtggcatgtggcattgaggg

SEQ ID NO: 4046936 - DNA, 25 bp, Homo sapien
aggcaatgatagaacttggtgggtg

SEQ ID NO: 4046937 - DNA, 25 bp, Homo sapien
atctgtggcatgtggcattgagggg

SEQ ID NO: 4046938 - DNA, 25 bp, Homo sapien
tcatctgtggcatgtggcattgagg

SEQ ID NO: 4046939 - DNA, 25 bp, Homo sapien
cagggaattagacaggtcccaaatc

SEQ ID NO: 4046940 - DNA, 25 bp, Homo sapien
gaattagacaggtcccaaatcccca

SEQ ID NO: 4046941 - DNA, 25 bp, Homo sapien
acagggaattagacaggtcccaaat

SEQ ID NO: 4046942 - DNA, 25 bp, Homo sapien
cattcatctgttttacacagtggcc

SEQ ID NO: 4046943 - DNA, 25 bp, Homo sapien
ttcatctgttttacacagtggcctt

SEQ ID NO: 4046944 - DNA, 25 bp, Homo sapien
gggcagttcagcattcatctgtttt

SEQ ID NO: 4046945 - DNA, 25 bp, Homo sapien
cagggcagttcagcattcatctgtt

SEQ ID NO: 4046946 - DNA, 25 bp, Homo sapien
attgaaagcatgtggcaggatccag

SEQ ID NO: 4046947 - DNA, 25 bp, Homo sapien
tggctggattctctgtagtgaatga

SEQ ID NO: 4046948 - DNA, 25 bp, Homo sapien
catcaagttgtgaattgaaagcatg

SEQ ID NO: 4046949 - DNA, 25 bp, Homo sapien
ctggattctctgtagtgaatgagca

SEQ ID NO: 4046950 - DNA, 25 bp, Homo sapien
acaccatgcacacattcagccgcca

SEQ ID NO: 4046951 - DNA, 25 bp, Homo sapien
caccatgcacacattcagccgccat

SEQ ID NO: 4046952 - DNA, 25 bp, Homo sapien
caggtagatttggaaccctgtgact

SEQ ID NO: 4046953 - DNA, 25 bp, Homo sapien
gaggcaggtagatttggaaccctgt

SEQ ID NO: 4046954 - DNA, 25 bp, Homo sapien
tgcctggattcctcattaagaggca

SEQ ID NO: 4046955 - DNA, 25 bp, Homo sapien
gatttggaaccctgtgacttgctct

SEQ ID NO: 4046956 - DNA, 25 bp, Homo sapien
agatccagacatggagaaattcaga

SEQ ID NO: 4046957 - DNA, 25 bp, Homo sapien
tggaaagagggctgtaaccacaaga

SEQ ID NO: 4046958 - DNA, 25 bp, Homo sapien
caagagccaggcaagatccagacat

SEQ ID NO: 4046959 - DNA, 25 bp, Homo sapien
tgaggttttgctattgtctttggaa

SEQ ID NO: 4046960 - DNA, 25 bp, Homo sapien
tgtccagtgtaagcctcagtgtgtg

SEQ ID NO: 4046961 - DNA, 25 bp, Homo sapien
cacacatgaagtcgaagatgctcca

SEQ ID NO: 4046962 - DNA, 25 bp, Homo sapien
tcccaatagggatttaaggcctcag

SEQ ID NO: 4046963 - DNA, 25 bp, Homo sapien
catgaatgtgggtacaaacctctcc

SEQ ID NO: 4046964 - DNA, 25 bp, Homo sapien
gctgtctgttcacaaagaccataac

SEQ ID NO: 4046965 - DNA, 25 bp, Homo sapien
agacgaggcaacagccgcaaatcat

SEQ ID NO: 4046966 - DNA, 25 bp, Homo sapien
attctgctgcctcgtctggttctag

SEQ ID NO: 4046967 - DNA, 25 bp, Homo sapien
cagtttttcccagacgaggcaacag

SEQ ID NO: 4046968 - DNA, 25 bp, Homo sapien
cctgtaacatttatgactttaaaga

SEQ ID NO: 4046969 - DNA, 25 bp, Homo sapien
attctgcggagctgccctttatcca

SEQ ID NO: 4046970 - DNA, 25 bp, Homo sapien
attacttgcaattctgcggagctgc

SEQ ID NO: 4046971 - DNA, 25 bp, Homo sapien
tgcaattctgcggagctgcccttta

SEQ ID NO: 4046972 - DNA, 25 bp, Homo sapien
ccatcttcgatttctcatggattta

SEQ ID NO: 4046973 - DNA, 25 bp, Homo sapien
ttcgatttctcatggatttactgac

SEQ ID NO: 4046974 - DNA, 25 bp, Homo sapien
actatatatttgtgctgtcaagagg

SEQ ID NO: 4046975 - DNA, 25 bp, Homo sapien
tatatttgtgctgtcaagaggaaag

SEQ ID NO: 4046976 - DNA, 25 bp, Homo sapien
ttgagttgccgaaggtctccattgg

SEQ ID NO: 4046977 - DNA, 25 bp, Homo sapien
tgccaaaacagccagcttagagtag

SEQ ID NO: 4046978 - DNA, 25 bp, Homo sapien
tctgcttgcaacaatctctatacca

SEQ ID NO: 4046979 - DNA, 25 bp, Homo sapien
tataccatacatctggacaagcacc

SEQ ID NO: 4046980 - DNA, 25 bp, Homo sapien
gaaacgccgatcatgtgctttgctg

SEQ ID NO: 4046981 - DNA, 25 bp, Homo sapien
acgccgatcatgtgctttgctgaac

SEQ ID NO: 4046982 - DNA, 25 bp, Homo sapien
gcttgaaacgccgatcatgtgcttt

SEQ ID NO: 4046983 - DNA, 25 bp, Homo sapien
agaaatgcttgaaacgccgatcatg

SEQ ID NO: 4046984 - DNA, 25 bp, Homo sapien
ttttggtccagaaataattgtacta

SEQ ID NO: 4046985 - DNA, 25 bp, Homo sapien
ctcttgttgggtttccccacttgca

SEQ ID NO: 4046986 - DNA, 25 bp, Homo sapien
cacttgcataaacttaattttacac

SEQ ID NO: 4046987 - DNA, 25 bp, Homo sapien
gtccagaaataattgtactagaggg

SEQ ID NO: 4046988 - DNA, 25 bp, Homo sapien
gaagctctatcaaagccattggtat

SEQ ID NO: 4046989 - DNA, 25 bp, Homo sapien
gctctatcaaagccattggtattca

SEQ ID NO: 4046990 - DNA, 25 bp, Homo sapien
agctctatcaaagccattggtattc

SEQ ID NO: 4046991 - DNA, 25 bp, Homo sapien
tgaagctctatcaaagccattggta

SEQ ID NO: 4046992 - DNA, 25 bp, Homo sapien
actatgtaaggtcactgaagaagca

SEQ ID NO: 4046993 - DNA, 25 bp, Homo sapien
tgtccatgaagttgtcgttgtttcg

SEQ ID NO: 4046994 - DNA, 25 bp, Homo sapien
ttgtcgttgtttcggtccaatgtag

SEQ ID NO: 4046995 - DNA, 25 bp, Homo sapien
tggctgtccatgaagttgtcgttgt

SEQ ID NO: 4046996 - DNA, 25 bp, Homo sapien
catgaagttgtcgttgtttcggtcc

SEQ ID NO: 4046997 - DNA, 25 bp, Homo sapien
taattgccactgtatgtccctggta

SEQ ID NO: 4046998 - DNA, 25 bp, Homo sapien
gtactgcatgaagcaaatctgcacc

SEQ ID NO: 4046999 - DNA, 25 bp, Homo sapien
tctgcaccaataaccaaggatctgg

SEQ ID NO: 4047000 - DNA, 25 bp, Homo sapien
aaggggagcggaacagtgcatttct

SEQ ID NO: 4047001 - DNA, 25 bp, Homo sapien
agtagattagtcctttgtgctttcc

SEQ ID NO: 4047002 - DNA, 25 bp, Homo sapien
cactctctcatcagtaagacaagtc

SEQ ID NO: 4047003 - DNA, 25 bp, Homo sapien
ctccaatgtgagtagattagtcctt

SEQ ID NO: 4047004 - DNA, 25 bp, Homo sapien
gggatcttcactctctcatcagtaa

SEQ ID NO: 4047005 - DNA, 25 bp, Homo sapien
acagtcccagtgatgttgtgttccc

SEQ ID NO: 4047006 - DNA, 25 bp, Homo sapien
tgtagaaagtcatgcaaggtgtccc

SEQ ID NO: 4047007 - DNA, 25 bp, Homo sapien
catgcaaggtgtcccgctttctggg

SEQ ID NO: 4047008 - DNA, 25 bp, Homo sapien
cataattgataaatgttcttggcag

SEQ ID NO: 4047009 - DNA, 25 bp, Homo sapien
aaatgtcataaaagtttttgtgttg

SEQ ID NO: 4047010 - DNA, 25 bp, Homo sapien
gttgaaatgaattgtaacattcttt

SEQ ID NO: 4047011 - DNA, 25 bp, Homo sapien
tttgtgttgaaatgaattgtaacat

SEQ ID NO: 4047012 - DNA, 25 bp, Homo sapien
atgaattgtaacattcttttcaacc

SEQ ID NO: 4047013 - DNA, 25 bp, Homo sapien
ttcccatgtctgagatatctgcatg

SEQ ID NO: 4047014 - DNA, 25 bp, Homo sapien
gactggtgtctaatttcattccagc

SEQ ID NO: 4047015 - DNA, 25 bp, Homo sapien
agcattctgcactcagaacagtcac

SEQ ID NO: 4047016 - DNA, 25 bp, Homo sapien
tctgcactcagaacagtcaccaact

SEQ ID NO: 4047017 - DNA, 25 bp, Homo sapien
ctctcaatttccttggtagtacatt

SEQ ID NO: 4047018 - DNA, 25 bp, Homo sapien
tccttggtagtacatttctctgtcc

SEQ ID NO: 4047019 - DNA, 25 bp, Homo sapien
atttccttggtagtacatttctctg

SEQ ID NO: 4047020 - DNA, 25 bp, Homo sapien
ccaccccagcttggtttttctctat

SEQ ID NO: 4047021 - DNA, 25 bp, Homo sapien
gcttttgacacagctggtcccattt

SEQ ID NO: 4047022 - DNA, 25 bp, Homo sapien
taaataggaatttgctgaactgccc

SEQ ID NO: 4047023 - DNA, 25 bp, Homo sapien
gtttgactcagttcagggcccactt

SEQ ID NO: 4047024 - DNA, 25 bp, Homo sapien
cccatttgtcactgggctgacagct

SEQ ID NO: 4047025 - DNA, 25 bp, Homo sapien
gagctggtcttccaatccctgcatc

SEQ ID NO: 4047026 - DNA, 25 bp, Homo sapien
tatatctgatcacaccagctgtgca

SEQ ID NO: 4047027 - DNA, 25 bp, Homo sapien
gaaaccagagctggtcttccaatcc

SEQ ID NO: 4047028 - DNA, 25 bp, Homo sapien
actttctcagatactagaatgtgga

SEQ ID NO: 4047029 - DNA, 25 bp, Homo sapien
ctcttagcttcacaacaatcaccat

SEQ ID NO: 4047030 - DNA, 25 bp, Homo sapien
tgcattcacttatttcatggaaagt

SEQ ID NO: 4047031 - DNA, 25 bp, Homo sapien
tctcttagcttcacaacaatcacca

SEQ ID NO: 4047032 - DNA, 25 bp, Homo sapien
tatacttagctttgcattcacttat

SEQ ID NO: 4047033 - DNA, 25 bp, Homo sapien
tctgttatctctggatcctccacca

SEQ ID NO: 4047034 - DNA, 25 bp, Homo sapien
ctattctactctgttatctctggat

SEQ ID NO: 4047035 - DNA, 25 bp, Homo sapien
tctactctgttatctctggatcctc

SEQ ID NO: 4047036 - DNA, 25 bp, Homo sapien
tctctggccacactaggaagtccca

SEQ ID NO: 4047037 - DNA, 25 bp, Homo sapien
cgcatactggggtgtatcggcaaag

SEQ ID NO: 4047038 - DNA, 25 bp, Homo sapien
tgcccacatctggacgcatactggg

SEQ ID NO: 4047039 - DNA, 25 bp, Homo sapien
agagtgcaccagaataacgcacatg

SEQ ID NO: 4047040 - DNA, 25 bp, Homo sapien
agaataacgcacatgcccacatctg

SEQ ID NO: 4047041 - DNA, 25 bp, Homo sapien
agctctgtcatctgcattggcacag

SEQ ID NO: 4047042 - DNA, 25 bp, Homo sapien
gctctgtcatctgcattggcacagt

SEQ ID NO: 4047043 - DNA, 25 bp, Homo sapien
tctgtcatctgcattggcacagtag

SEQ ID NO: 4047044 - DNA, 25 bp, Homo sapien
ctctgtcatctgcattggcacagta

SEQ ID NO: 4047045 - DNA, 25 bp, Homo sapien
ccaagcctttctgttaacctgctgc

SEQ ID NO: 4047046 - DNA, 25 bp, Homo sapien
cccatagaataagtgaggaaagcca

SEQ ID NO: 4047047 - DNA, 25 bp, Homo sapien
tggcttgggaagaacccctggctcc

SEQ ID NO: 4047048 - DNA, 25 bp, Homo sapien
tcatttccggcgaatcccatagaat

SEQ ID NO: 4047049 - DNA, 25 bp, Homo sapien
tcacacataagcggaagacaccagt

SEQ ID NO: 4047050 - DNA, 25 bp, Homo sapien
agcggaagacaccagtgaattcctt

SEQ ID NO: 4047051 - DNA, 25 bp, Homo sapien
cacataagcggaagacaccagtgaa

SEQ ID NO: 4047052 - DNA, 25 bp, Homo sapien
cataagcggaagacaccagtgaatt

SEQ ID NO: 4047053 - DNA, 25 bp, Homo sapien
ctcccactcacccttgatgagttca

SEQ ID NO: 4047054 - DNA, 25 bp, Homo sapien
tgtctgatttaaaagaccttgatga

SEQ ID NO: 4047055 - DNA, 25 bp, Homo sapien
gtctgatttaaaagaccttgatgat

SEQ ID NO: 4047056 - DNA, 25 bp, Homo sapien
cactcacccttgatgagttcagcct

SEQ ID NO: 4047057 - DNA, 25 bp, Homo sapien
aaaaaacgcggagacaaggatcaga

SEQ ID NO: 4047058 - DNA, 25 bp, Homo sapien
gatcagacatttggctgcgtcaggc

SEQ ID NO: 4047059 - DNA, 25 bp, Homo sapien
cagcggcaggattctcaggcaaaaa

SEQ ID NO: 4047060 - DNA, 25 bp, Homo sapien
cactgagagccttcggttcttattg

SEQ ID NO: 4047061 - DNA, 25 bp, Homo sapien
ttttatggtcctctagctgtttgca

SEQ ID NO: 4047062 - DNA, 25 bp, Homo sapien
cagaggataccttgttttttatggt

SEQ ID NO: 4047063 - DNA, 25 bp, Homo sapien
tccttgagcacagaggataccttgt

SEQ ID NO: 4047064 - DNA, 25 bp, Homo sapien
tgttttttatggtcctctagctgtt

SEQ ID NO: 4047065 - DNA, 25 bp, Homo sapien
gtgtgttaaaagtatccctctggct

SEQ ID NO: 4047066 - DNA, 25 bp, Homo sapien
gcagggccctgttcatgtaaagcaa

SEQ ID NO: 4047067 - DNA, 25 bp, Homo sapien
caagggtgacctgctttccatggaa

SEQ ID NO: 4047068 - DNA, 25 bp, Homo sapien
tatcaggaaccgaaagatggccagt

SEQ ID NO: 4047069 - DNA, 25 bp, Homo sapien
ttgcaaaagccctcctggggcacac

SEQ ID NO: 4047070 - DNA, 25 bp, Homo sapien
tttgcaaaagccctcctggggcaca

SEQ ID NO: 4047071 - DNA, 25 bp, Homo sapien
ctttgcaaaagccctcctggggcac

SEQ ID NO: 4047072 - DNA, 25 bp, Homo sapien
aaataaattttgcccctcttctgct

SEQ ID NO: 4047073 - DNA, 25 bp, Homo sapien
tatatgctcctaatctgtcctccac

SEQ ID NO: 4047074 - DNA, 25 bp, Homo sapien
tcagagactccaactgcccagcccc

SEQ ID NO: 4047075 - DNA, 25 bp, Homo sapien
tgtcctccacactgcctgccaaata

SEQ ID NO: 4047076 - DNA, 25 bp, Homo sapien
taagcaattctccaagaggtgcaaa

SEQ ID NO: 4047077 - DNA, 25 bp, Homo sapien
gcagtttcaaatactcctgacctgg

SEQ ID NO: 4047078 - DNA, 25 bp, Homo sapien
gacctggttccacctgacatacaga

SEQ ID NO: 4047079 - DNA, 25 bp, Homo sapien
ttagctaaacccaagatctgtccag

SEQ ID NO: 4047080 - DNA, 25 bp, Homo sapien
catccatggtgacagggttacttac

SEQ ID NO: 4047081 - DNA, 25 bp, Homo sapien
atgaacacaacctgcaattatggaa

SEQ ID NO: 4047082 - DNA, 25 bp, Homo sapien
caaattcaattggagatctgtgcaa

SEQ ID NO: 4047083 - DNA, 25 bp, Homo sapien
gcgaaaatgtagttgtcatctctaa

SEQ ID NO: 4047084 - DNA, 25 bp, Homo sapien
cctttggcccaactgaacaggtgaa

SEQ ID NO: 4047085 - DNA, 25 bp, Homo sapien
ctcattctgagcttacggccccaag

SEQ ID NO: 4047086 - DNA, 25 bp, Homo sapien
gaagccaggaggttaacaccaagaa

SEQ ID NO: 4047087 - DNA, 25 bp, Homo sapien
gaccaaatggcatcgactctcagaa

SEQ ID NO: 4047088 - DNA, 25 bp, Homo sapien
ccttcattgtcagttcagcgttaga

SEQ ID NO: 4047089 - DNA, 25 bp, Homo sapien
taaggcgaaattacagctcagaact

SEQ ID NO: 4047090 - DNA, 25 bp, Homo sapien
gacatagaaatagggcgtctctcac

SEQ ID NO: 4047091 - DNA, 25 bp, Homo sapien
tatagagtgtccagagtttaaggcg

SEQ ID NO: 4047092 - DNA, 25 bp, Homo sapien
tgtttacacatcttctagattcttg

SEQ ID NO: 4047093 - DNA, 25 bp, Homo sapien
taaggccaaatttgtatcgttattg

SEQ ID NO: 4047094 - DNA, 25 bp, Homo sapien
gaacgccagacacagttcttaaggc

SEQ ID NO: 4047095 - DNA, 25 bp, Homo sapien
tctagattcttgagaacgccagaca

SEQ ID NO: 4047096 - DNA, 25 bp, Homo sapien
tactcaggtttgatgtctttgcggg

SEQ ID NO: 4047097 - DNA, 25 bp, Homo sapien
gcccctgccttcataaccgtagatt

SEQ ID NO: 4047098 - DNA, 25 bp, Homo sapien
gatgaagtcatcgacatccacgctg

SEQ ID NO: 4047099 - DNA, 25 bp, Homo sapien
tctgaatctgtggtggccgactcta

SEQ ID NO: 4047100 - DNA, 25 bp, Homo sapien
tctgtagccaccacatagaggaaag

SEQ ID NO: 4047101 - DNA, 25 bp, Homo sapien
gctggaagcccagataaagcaatct

SEQ ID NO: 4047102 - DNA, 25 bp, Homo sapien
gtgtggttggactctctgtagccac

SEQ ID NO: 4047103 - DNA, 25 bp, Homo sapien
taacataggaaaatagcatcagctg

SEQ ID NO: 4047104 - DNA, 25 bp, Homo sapien
tcactatgggcagaaggtacaagtc

SEQ ID NO: 4047105 - DNA, 25 bp, Homo sapien
gctcaggccggcgttcagaatgtag

SEQ ID NO: 4047106 - DNA, 25 bp, Homo sapien
ggatgccgccatcgctgatcactat

SEQ ID NO: 4047107 - DNA, 25 bp, Homo sapien
gaatgtaggcctctgcgttgcagga

SEQ ID NO: 4047108 - DNA, 25 bp, Homo sapien
catctaagtatctgcggaagccaca

SEQ ID NO: 4047109 - DNA, 25 bp, Homo sapien
ccggcttgccagtgaagggatttcc

SEQ ID NO: 4047110 - DNA, 25 bp, Homo sapien
agaaaatgatgtggccggcttgcca

SEQ ID NO: 4047111 - DNA, 25 bp, Homo sapien
ggatttggtagggaatttccattga

SEQ ID NO: 4047112 - DNA, 25 bp, Homo sapien
gaatgggcaagagcaaagcagaaaa

SEQ ID NO: 4047113 - DNA, 25 bp, Homo sapien
gttgctcacatgacccagcgcactt

SEQ ID NO: 4047114 - DNA, 25 bp, Homo sapien
cttagaatgatttgaagtttgttgc

SEQ ID NO: 4047115 - DNA, 25 bp, Homo sapien
tttgttgctcacatgacccagcgca

SEQ ID NO: 4047116 - DNA, 25 bp, Homo sapien
aatgatttgaagtttgttgctcaca

SEQ ID NO: 4047117 - DNA, 25 bp, Homo sapien
gagcgggttcaaagataaactctgt

SEQ ID NO: 4047118 - DNA, 25 bp, Homo sapien
taagggcgaaaaatacatcctacag

SEQ ID NO: 4047119 - DNA, 25 bp, Homo sapien
agtgctcattgatctgccacatggc

SEQ ID NO: 4047120 - DNA, 25 bp, Homo sapien
tgtgtgagacaaactgcagcaatga

SEQ ID NO: 4047121 - DNA, 25 bp, Homo sapien
taactagaagagacacgagctttat

SEQ ID NO: 4047122 - DNA, 25 bp, Homo sapien
cattccctggaaccctagattaatc

SEQ ID NO: 4047123 - DNA, 25 bp, Homo sapien
tgcctgccctatgcgactgtttgaa

SEQ ID NO: 4047124 - DNA, 25 bp, Homo sapien
tgccatgtacaaccaacagggccct

SEQ ID NO: 4047125 - DNA, 25 bp, Homo sapien
ttcatctgcccaaatagcaccattc

SEQ ID NO: 4047126 - DNA, 25 bp, Homo sapien
aacagcccaagatggacttaaatgt

SEQ ID NO: 4047127 - DNA, 25 bp, Homo sapien
taaatgttgaagaatcatccagtgt

SEQ ID NO: 4047128 - DNA, 25 bp, Homo sapien
tctgcccaaatagcaccattcctga

SEQ ID NO: 4047129 - DNA, 25 bp, Homo sapien
cctgctgagtcggctttgaagctcg

SEQ ID NO: 4047130 - DNA, 25 bp, Homo sapien
ctgctgagtcggctttgaagctcgg

SEQ ID NO: 4047131 - DNA, 25 bp, Homo sapien
gctgcctgctgagtcggctttgaag

SEQ ID NO: 4047132 - DNA, 25 bp, Homo sapien
tgcctgctgagtcggctttgaagct

SEQ ID NO: 4047133 - DNA, 25 bp, Homo sapien
tccattggccgtgtcatccttgtca

SEQ ID NO: 4047134 - DNA, 25 bp, Homo sapien
gaagataaatcttggtccattggcc

SEQ ID NO: 4047135 - DNA, 25 bp, Homo sapien
ctctgactgtgaaatttggattgtg

SEQ ID NO: 4047136 - DNA, 25 bp, Homo sapien
tcagggggtaggctgaagataaatc

SEQ ID NO: 4047137 - DNA, 25 bp, Homo sapien
tgacatcaaggaccctaatggccac

SEQ ID NO: 4047138 - DNA, 25 bp, Homo sapien
gttggaaagtggcttggtctgatca

SEQ ID NO: 4047139 - DNA, 25 bp, Homo sapien
aagtggcttggtctgatcactctca

SEQ ID NO: 4047140 - DNA, 25 bp, Homo sapien
gttgacatcaaggaccctaatggcc

SEQ ID NO: 4047141 - DNA, 25 bp, Homo sapien
tggtaaagtagaatcaaaaccatga

SEQ ID NO: 4047142 - DNA, 25 bp, Homo sapien
tcaaaaccatgaggagaatacttac

SEQ ID NO: 4047143 - DNA, 25 bp, Homo sapien
gtagaatcaaaaccatgaggagaat

SEQ ID NO: 4047144 - DNA, 25 bp, Homo sapien
ggtaaagtagaatcaaaaccatgag

SEQ ID NO: 4047145 - DNA, 25 bp, Homo sapien
cctctggattaatagtgaaaaatct

SEQ ID NO: 4047146 - DNA, 25 bp, Homo sapien
catcctctggattaatagtgaaaaa

SEQ ID NO: 4047147 - DNA, 25 bp, Homo sapien
aaaaatctgtcgaggtcagtgtgac

SEQ ID NO: 4047148 - DNA, 25 bp, Homo sapien
gtcagtgtgacgatcgatggaatac

SEQ ID NO: 4047149 - DNA, 25 bp, Homo sapien
gcaaatgaggcaattagaccaagac

SEQ ID NO: 4047150 - DNA, 25 bp, Homo sapien
atgcaaatgaggcaattagaccaag

SEQ ID NO: 4047151 - DNA, 25 bp, Homo sapien
aaatgaggcaattagaccaagacat

SEQ ID NO: 4047152 - DNA, 25 bp, Homo sapien
gaatgcaaatgaggcaattagacca

SEQ ID NO: 4047153 - DNA, 25 bp, Homo sapien
tcctagatgatgatgaaagcccaag

SEQ ID NO: 4047154 - DNA, 25 bp, Homo sapien
tggatatatgccctgtaatgagaca

SEQ ID NO: 4047155 - DNA, 25 bp, Homo sapien
gatcaataacgcatgatgggcaaga

SEQ ID NO: 4047156 - DNA, 25 bp, Homo sapien
gagtcccaggtagcttctcacctga

SEQ ID NO: 4047157 - DNA, 25 bp, Homo sapien
tcagcagcagttagacagagctggc

SEQ ID NO: 4047158 - DNA, 25 bp, Homo sapien
ctcctgctcggtggctgtatcattc

SEQ ID NO: 4047159 - DNA, 25 bp, Homo sapien
cattgtaaaggctgggttcgaactc

SEQ ID NO: 4047160 - DNA, 25 bp, Homo sapien
ttaaggactagcaatttatacatcg

SEQ ID NO: 4047161 - DNA, 25 bp, Homo sapien
gctcttaaaataaatccgtctgtac

SEQ ID NO: 4047162 - DNA, 25 bp, Homo sapien
aattccccatccaagctcttaaaat

SEQ ID NO: 4047163 - DNA, 25 bp, Homo sapien
caagctcttaaaataaatccgtctg

SEQ ID NO: 4047164 - DNA, 25 bp, Homo sapien
catccaagctcttaaaataaatccg

SEQ ID NO: 4047165 - DNA, 25 bp, Homo sapien
tctactgagatcttgacggtcacag

SEQ ID NO: 4047166 - DNA, 25 bp, Homo sapien
gctgcattttcttggacttcgtgga

SEQ ID NO: 4047167 - DNA, 25 bp, Homo sapien
gggccattgctgataaacttcgggt

SEQ ID NO: 4047168 - DNA, 25 bp, Homo sapien
acttcgggtcgatgtgcacgttggc

SEQ ID NO: 4047169 - DNA, 25 bp, Homo sapien
ctggcaagaatgaagagaagattga

SEQ ID NO: 4047170 - DNA, 25 bp, Homo sapien
aatgaagagaagattgacaaccaat

SEQ ID NO: 4047171 - DNA, 25 bp, Homo sapien
tgaagagaagattgacaaccaattc

SEQ ID NO: 4047172 - DNA, 25 bp, Homo sapien
ggcaagaatgaagagaagattgaca

SEQ ID NO: 4047173 - DNA, 25 bp, Homo sapien
tgacacaccaagtagaacatctccg

SEQ ID NO: 4047174 - DNA, 25 bp, Homo sapien
tctgggactcttaccagcagtggcc

SEQ ID NO: 4047175 - DNA, 25 bp, Homo sapien
gcagtggcccataagatgacatagg

SEQ ID NO: 4047176 - DNA, 25 bp, Homo sapien
taatgggtcattcgaagagcacaac

SEQ ID NO: 4047177 - DNA, 25 bp, Homo sapien
gaagcctgggatactagatactacc

SEQ ID NO: 4047178 - DNA, 25 bp, Homo sapien
ccatttagtcaaaggtgctgcgtga

SEQ ID NO: 4047179 - DNA, 25 bp, Homo sapien
gacatcaacactgctaaggctgaga

SEQ ID NO: 4047180 - DNA, 25 bp, Homo sapien
tgattttgctcccagttactccagg

SEQ ID NO: 4047181 - DNA, 25 bp, Homo sapien
aaccaaggtaatcccatcttccaat

SEQ ID NO: 4047182 - DNA, 25 bp, Homo sapien
tcttccaattccgatttaatgctcc

SEQ ID NO: 4047183 - DNA, 25 bp, Homo sapien
gaggtgttgatttctcaagtggtaa

SEQ ID NO: 4047184 - DNA, 25 bp, Homo sapien
cactttcatgatggagaggtgttga

SEQ ID NO: 4047185 - DNA, 25 bp, Homo sapien
tgcccattgggataacactacctac

SEQ ID NO: 4047186 - DNA, 25 bp, Homo sapien
tgaattccaggtcggcatgcctgag

SEQ ID NO: 4047187 - DNA, 25 bp, Homo sapien
tgatttcatctgtctgagccccaat

SEQ ID NO: 4047188 - DNA, 25 bp, Homo sapien
catgcctgagctatatgacagtgac

SEQ ID NO: 4047189 - DNA, 25 bp, Homo sapien
gccagtagtcagtattgagcgcatg

SEQ ID NO: 4047190 - DNA, 25 bp, Homo sapien
aggccataccactgacacgtctgat

SEQ ID NO: 4047191 - DNA, 25 bp, Homo sapien
ggtccattattgttgcttctccagg

SEQ ID NO: 4047192 - DNA, 25 bp, Homo sapien
tacaaagtcaggtcagcccctggtt

SEQ ID NO: 4047193 - DNA, 25 bp, Homo sapien
cagggacggctgcttctgacacaga

SEQ ID NO: 4047194 - DNA, 25 bp, Homo sapien
caacaatattgtatgtgactaagcc

SEQ ID NO: 4047195 - DNA, 25 bp, Homo sapien
ccctcctgtgtttcatagtccgttg

SEQ ID NO: 4047196 - DNA, 25 bp, Homo sapien
tgtgatttcaaacgattccatacca

SEQ ID NO: 4047197 - DNA, 25 bp, Homo sapien
gaatgtgttctacgaagggtgataa

SEQ ID NO: 4047198 - DNA, 25 bp, Homo sapien
gaggaggatcccacatggcctgctt

SEQ ID NO: 4047199 - DNA, 25 bp, Homo sapien
ccacatgtaagggagaaaaacaatg

SEQ ID NO: 4047200 - DNA, 25 bp, Homo sapien
tggcagctgtaagactatagatttc

SEQ ID NO: 4047201 - DNA, 25 bp, Homo sapien
cacttatggtattgcgaagagccca

SEQ ID NO: 4047202 - DNA, 25 bp, Homo sapien
tgcaaactttaacatccctccctgt

SEQ ID NO: 4047203 - DNA, 25 bp, Homo sapien
caggatggtccatgagttaactcca

SEQ ID NO: 4047204 - DNA, 25 bp, Homo sapien
taactctatattcgacactcccctt

SEQ ID NO: 4047205 - DNA, 25 bp, Homo sapien
tacatggaggtactgtcctagtgcc

SEQ ID NO: 4047206 - DNA, 25 bp, Homo sapien
ttgggagcctaatactgtacatgga

SEQ ID NO: 4047207 - DNA, 25 bp, Homo sapien
taatgaggccgactaaagagaaaaa

SEQ ID NO: 4047208 - DNA, 25 bp, Homo sapien
tcctagtgccaggacactgttttgt

SEQ ID NO: 4047209 - DNA, 25 bp, Homo sapien
caggataaaaactaccagccaggtg

SEQ ID NO: 4047210 - DNA, 25 bp, Homo sapien
aaaaccctaaggtgagaagatcctg

SEQ ID NO: 4047211 - DNA, 25 bp, Homo sapien
tatgagtgtgattgaacacgcatgc

SEQ ID NO: 4047212 - DNA, 25 bp, Homo sapien
gtgattagcaaatggcaaaaaccct

SEQ ID NO: 4047213 - DNA, 25 bp, Homo sapien
caacacacaatatagggaagccagg

SEQ ID NO: 4047214 - DNA, 25 bp, Homo sapien
tttccccttacagagatttcatcag

SEQ ID NO: 4047215 - DNA, 25 bp, Homo sapien
cactggaaggtttgcactaagtagc

SEQ ID NO: 4047216 - DNA, 25 bp, Homo sapien
gaagtggaggccaaattgcgtaaaa

SEQ ID NO: 4047217 - DNA, 25 bp, Homo sapien
ttttgctttgcaactttcttttgga

SEQ ID NO: 4047218 - DNA, 25 bp, Homo sapien
tcttttggattcataatctatttaa

SEQ ID NO: 4047219 - DNA, 25 bp, Homo sapien
caactttcttttggattcataatct

SEQ ID NO: 4047220 - DNA, 25 bp, Homo sapien
gctttgcaactttcttttggattca

SEQ ID NO: 4047221 - DNA, 25 bp, Homo sapien
ctcagtaaagcaggaataggttaga

SEQ ID NO: 4047222 - DNA, 25 bp, Homo sapien
actagattgcatcactactaccaag

SEQ ID NO: 4047223 - DNA, 25 bp, Homo sapien
gattcagggactgttatatccaggt

SEQ ID NO: 4047224 - DNA, 25 bp, Homo sapien
gatattttgtttccagggttgtaga

SEQ ID NO: 4047225 - DNA, 25 bp, Homo sapien
gacatcggtcagtgtgatcgtcact

SEQ ID NO: 4047226 - DNA, 25 bp, Homo sapien
tgtccctgagagtccgcccatatgt

SEQ ID NO: 4047227 - DNA, 25 bp, Homo sapien
gatcgtcactttggttgtccctgag

SEQ ID NO: 4047228 - DNA, 25 bp, Homo sapien
gcctccctgtccatgttgggtaggg

SEQ ID NO: 4047229 - DNA, 25 bp, Homo sapien
gaggatactgtacactaacttggcg

SEQ ID NO: 4047230 - DNA, 25 bp, Homo sapien
taacttggcgctatttccataagtg

SEQ ID NO: 4047231 - DNA, 25 bp, Homo sapien
gaagctgtcacctggattactgacg

SEQ ID NO: 4047232 - DNA, 25 bp, Homo sapien
aatagggttgtccttcgaggatact

SEQ ID NO: 4047233 - DNA, 25 bp, Homo sapien
caaattatgttcttgtttacaaagt

SEQ ID NO: 4047234 - DNA, 25 bp, Homo sapien
tcctacattggttggtgattaaaat

SEQ ID NO: 4047235 - DNA, 25 bp, Homo sapien
caacatctcctcagattttcaaatt

SEQ ID NO: 4047236 - DNA, 25 bp, Homo sapien
catgcacttgaaatgttcagtatat

SEQ ID NO: 4047237 - DNA, 25 bp, Homo sapien
accaggcctggaagcagagcaggcc

SEQ ID NO: 4047238 - DNA, 25 bp, Homo sapien
gcctggaagcagagcaggcctccca

SEQ ID NO: 4047239 - DNA, 25 bp, Homo sapien
caggcctggaagcagagcaggcctc

SEQ ID NO: 4047240 - DNA, 25 bp, Homo sapien
ctggaagcagagcaggcctcccaca

SEQ ID NO: 4047241 - DNA, 25 bp, Homo sapien
tgataggtctcgtgcaggaactccg

SEQ ID NO: 4047242 - DNA, 25 bp, Homo sapien
ggacctctcaggcacgttggcatga

SEQ ID NO: 4047243 - DNA, 25 bp, Homo sapien
cttgacaatgaattccgacggtggc

SEQ ID NO: 4047244 - DNA, 25 bp, Homo sapien
catcaacgtgtactgggctctctct

SEQ ID NO: 4047245 - DNA, 25 bp, Homo sapien
tcccatcaccagagtcaatatctga

SEQ ID NO: 4047246 - DNA, 25 bp, Homo sapien
caccagagtcaatatctgaatgaag

SEQ ID NO: 4047247 - DNA, 25 bp, Homo sapien
catcaccagagtcaatatctgaatg

SEQ ID NO: 4047248 - DNA, 25 bp, Homo sapien
ttcccatcaccagagtcaatatctg

SEQ ID NO: 4047249 - DNA, 25 bp, Homo sapien
agtggggaaactcacttacaagtga

SEQ ID NO: 4047250 - DNA, 25 bp, Homo sapien
agaccattttgttttcagtcctctt

SEQ ID NO: 4047251 - DNA, 25 bp, Homo sapien
cattttgttttcagtcctctttgtt

SEQ ID NO: 4047252 - DNA, 25 bp, Homo sapien
aagaccattttgttttcagtcctct

SEQ ID NO: 4047253 - DNA, 25 bp, Homo sapien
accattttgttttcagtcctctttg

SEQ ID NO: 4047254 - DNA, 25 bp, Homo sapien
ttgttcttctatttaccctgctgca

SEQ ID NO: 4047255 - DNA, 25 bp, Homo sapien
gttcttctatttaccctgctgcaca

SEQ ID NO: 4047256 - DNA, 25 bp, Homo sapien
ctttgttcttctatttaccctgctg

SEQ ID NO: 4047257 - DNA, 25 bp, Homo sapien
ttcttctatttaccctgctgcacac

SEQ ID NO: 4047258 - DNA, 25 bp, Homo sapien
cccacaagcacggggtcaggcccgg

SEQ ID NO: 4047259 - DNA, 25 bp, Homo sapien
cctgcccacaagcacggggtcaggc

SEQ ID NO: 4047260 - DNA, 25 bp, Homo sapien
cacaagcacggggtcaggcccggtg

SEQ ID NO: 4047261 - DNA, 25 bp, Homo sapien
tgcccacaagcacggggtcaggccc

SEQ ID NO: 4047262 - DNA, 25 bp, Homo sapien
ccagacccagccacgcttggagcgc

SEQ ID NO: 4047263 - DNA, 25 bp, Homo sapien
cccgccgctctggggcaaaggcatg

SEQ ID NO: 4047264 - DNA, 25 bp, Homo sapien
ccacgcttggagcgctgtagcacct

SEQ ID NO: 4047265 - DNA, 25 bp, Homo sapien
ttggagcgctgtagcacctgcccct

SEQ ID NO: 4047266 - DNA, 25 bp, Homo sapien
caccagggcggcttgtaaacagtag

SEQ ID NO: 4047267 - DNA, 25 bp, Homo sapien
accagggcggcttgtaaacagtagt

SEQ ID NO: 4047268 - DNA, 25 bp, Homo sapien
caactgtacggtggtcttgctgagg

SEQ ID NO: 4047269 - DNA, 25 bp, Homo sapien
ttttggttacgtggtaggcacagga

SEQ ID NO: 4047270 - DNA, 25 bp, Homo sapien
tggcctcccggacgcgtcacgcaga

SEQ ID NO: 4047271 - DNA, 25 bp, Homo sapien
ccttccaccaactgtacggtggtct

SEQ ID NO: 4047272 - DNA, 25 bp, Homo sapien
ctggttgagctcatcacgtcagggc

SEQ ID NO: 4047273 - DNA, 25 bp, Homo sapien
ttgggatggaatgtctctgctggtt

SEQ ID NO: 4047274 - DNA, 25 bp, Homo sapien
gatggaatgtctctgctggttgagc

SEQ ID NO: 4047275 - DNA, 25 bp, Homo sapien
ggctgcccacgtccccagttagctt

SEQ ID NO: 4047276 - DNA, 25 bp, Homo sapien
tgactcagctactcaacaccagtga

SEQ ID NO: 4047277 - DNA, 25 bp, Homo sapien
tctggcaaagatccatccacgaagc

SEQ ID NO: 4047278 - DNA, 25 bp, Homo sapien
gaggataagccagtaatgcctttca

SEQ ID NO: 4047279 - DNA, 25 bp, Homo sapien
aagatcctaccttgcttagcctgga

SEQ ID NO: 4047280 - DNA, 25 bp, Homo sapien
ttgccagtccttaacttctgccttg

SEQ ID NO: 4047281 - DNA, 25 bp, Homo sapien
cttgggttctggacttcttcattgg

SEQ ID NO: 4047282 - DNA, 25 bp, Homo sapien
tctgccttgggttctggacttcttc

SEQ ID NO: 4047283 - DNA, 25 bp, Homo sapien
cttattgccagtccttaacttctgc

SEQ ID NO: 4047284 - DNA, 25 bp, Homo sapien
gctgaaaacttattcttctctaagg

SEQ ID NO: 4047285 - DNA, 25 bp, Homo sapien
tgaaaacttattcttctctaaggaa

SEQ ID NO: 4047286 - DNA, 25 bp, Homo sapien
ctgaaaacttattcttctctaagga

SEQ ID NO: 4047287 - DNA, 25 bp, Homo sapien
cattaagaatattaccacggcccac

SEQ ID NO: 4047288 - DNA, 25 bp, Homo sapien
catgaaaattaataggaggctgccc

SEQ ID NO: 4047289 - DNA, 25 bp, Homo sapien
tgagagcagatagcccgtcagaagc

SEQ ID NO: 4047290 - DNA, 25 bp, Homo sapien
tgtgcaaagccaccagctcgaaagg

SEQ ID NO: 4047291 - DNA, 25 bp, Homo sapien
aaaaggttatggtatatgctgctcc

SEQ ID NO: 4047292 - DNA, 25 bp, Homo sapien
tcttctcaggtgcaaagtacacagc

SEQ ID NO: 4047293 - DNA, 25 bp, Homo sapien
cccctgatttctagacttggagcaa

SEQ ID NO: 4047294 - DNA, 25 bp, Homo sapien
taaagtaggcagcaaataaggcccc

SEQ ID NO: 4047295 - DNA, 25 bp, Homo sapien
cctaggttgaactctgaggatacac

SEQ ID NO: 4047296 - DNA, 25 bp, Homo sapien
agtagctaccaagtgacatctcatg

SEQ ID NO: 4047297 - DNA, 25 bp, Homo sapien
gggccatggctcattaaacaacacc

SEQ ID NO: 4047298 - DNA, 25 bp, Homo sapien
tcagcctagttcaaaacgaggaggt

SEQ ID NO: 4047299 - DNA, 25 bp, Homo sapien
taacctttagaagtgtgggttgcag

SEQ ID NO: 4047300 - DNA, 25 bp, Homo sapien
ttaacctttagaagtgtgggttgca

SEQ ID NO: 4047301 - DNA, 25 bp, Homo sapien
cataggcatccttgtttatcccaga

SEQ ID NO: 4047302 - DNA, 25 bp, Homo sapien
caaatgggattctgtagtgttgacc

SEQ ID NO: 4047303 - DNA, 25 bp, Homo sapien
tgttgacctgtgagtatgctgacct

SEQ ID NO: 4047304 - DNA, 25 bp, Homo sapien
cattattattacagaaaggagatgt

SEQ ID NO: 4047305 - DNA, 25 bp, Homo sapien
ttagtgccttcctgataagatgtcc

SEQ ID NO: 4047306 - DNA, 25 bp, Homo sapien
tctcagcaaccccaaggtctaagtt

SEQ ID NO: 4047307 - DNA, 25 bp, Homo sapien
gatgtccacgacagaaaggcttgcc

SEQ ID NO: 4047308 - DNA, 25 bp, Homo sapien
tgcccttgtatctccaggatggctg

SEQ ID NO: 4047309 - DNA, 25 bp, Homo sapien
tgactgaccgctgctctgctgagat

SEQ ID NO: 4047310 - DNA, 25 bp, Homo sapien
ctaaggcacagcaggtttttcttcc

SEQ ID NO: 4047311 - DNA, 25 bp, Homo sapien
gattgctcggggctttgaagttcca

SEQ ID NO: 4047312 - DNA, 25 bp, Homo sapien
catgactgaccgctgctctgctgag

SEQ ID NO: 4047313 - DNA, 25 bp, Homo sapien
tgttcttcttccattctgcagccat

SEQ ID NO: 4047314 - DNA, 25 bp, Homo sapien
ggcctgttcttcttccattctgcag

SEQ ID NO: 4047315 - DNA, 25 bp, Homo sapien
caacccatgtaaaggggcctgttct

SEQ ID NO: 4047316 - DNA, 25 bp, Homo sapien
cacaacccatgtaaaggggcctgtt

SEQ ID NO: 4047317 - DNA, 25 bp, Homo sapien
tactaagacagacctattgccattt

SEQ ID NO: 4047318 - DNA, 25 bp, Homo sapien
gtcatatgttctactaagacagacc

SEQ ID NO: 4047319 - DNA, 25 bp, Homo sapien
tcgttttggaaacgtcatatgttct

SEQ ID NO: 4047320 - DNA, 25 bp, Homo sapien
cctgcctgcaggatgtcgttttgga

SEQ ID NO: 4047321 - DNA, 25 bp, Homo sapien
gcttctgaactgtttacttggccct

SEQ ID NO: 4047322 - DNA, 25 bp, Homo sapien
cccgagaagacgagagtgccaagac

SEQ ID NO: 4047323 - DNA, 25 bp, Homo sapien
cttggcccttgggaccgtccgcatc

SEQ ID NO: 4047324 - DNA, 25 bp, Homo sapien
aggctgttccacttccccgagaaga

SEQ ID NO: 4047325 - DNA, 25 bp, Homo sapien
cagtatttacaaatcctgagtcgga

SEQ ID NO: 4047326 - DNA, 25 bp, Homo sapien
ttaatgcatcatgactcctccacgg

SEQ ID NO: 4047327 - DNA, 25 bp, Homo sapien
tgtttcgcgggacgctgctatccca

SEQ ID NO: 4047328 - DNA, 25 bp, Homo sapien
ttttatctaggcttcccgaatgcag

SEQ ID NO: 4047329 - DNA, 25 bp, Homo sapien
gagttcctggattgacacctgacat

SEQ ID NO: 4047330 - DNA, 25 bp, Homo sapien
ggagttcctggattgacacctgaca

SEQ ID NO: 4047331 - DNA, 25 bp, Homo sapien
tggtattcttcaaggtctaagaact

SEQ ID NO: 4047332 - DNA, 25 bp, Homo sapien
ttggagttcctggattgacacctga

SEQ ID NO: 4047333 - DNA, 25 bp, Homo sapien
ctgggtggtgcattgcagtgttcag

SEQ ID NO: 4047334 - DNA, 25 bp, Homo sapien
ctgagaccaccagatcttcagtgaa

SEQ ID NO: 4047335 - DNA, 25 bp, Homo sapien
gagaccaccagatcttcagtgaact

SEQ ID NO: 4047336 - DNA, 25 bp, Homo sapien
ggtggtgcattgcagtgttcagtgc

SEQ ID NO: 4047337 - DNA, 25 bp, Homo sapien
gatttcagttggattgcctgttacc

SEQ ID NO: 4047338 - DNA, 25 bp, Homo sapien
ttcagttggattgcctgttaccacc

SEQ ID NO: 4047339 - DNA, 25 bp, Homo sapien
aggcaagtgtggagagcatgctcac

SEQ ID NO: 4047340 - DNA, 25 bp, Homo sapien
cacagggcccggaaggcaagtgtgg

SEQ ID NO: 4047341 - DNA, 25 bp, Homo sapien
cccaagaagcgcttgctgagcactt

SEQ ID NO: 4047342 - DNA, 25 bp, Homo sapien
agtggcccaaagaggggcacctcca

SEQ ID NO: 4047343 - DNA, 25 bp, Homo sapien
tcaagtggcccaaagaggggcacct

SEQ ID NO: 4047344 - DNA, 25 bp, Homo sapien
tggcccaaagaggggcacctccagc

SEQ ID NO: 4047345 - DNA, 25 bp, Homo sapien
aatatttcatgggacatcccaccta

SEQ ID NO: 4047346 - DNA, 25 bp, Homo sapien
tcccacctagtaatgacaaatactg

SEQ ID NO: 4047347 - DNA, 25 bp, Homo sapien
caaatactgacttaacaacttctgt

SEQ ID NO: 4047348 - DNA, 25 bp, Homo sapien
tttaaatgtatctatctaaggatac

SEQ ID NO: 4047349 - DNA, 25 bp, Homo sapien
tcattggttagttttgttcttcaaa

SEQ ID NO: 4047350 - DNA, 25 bp, Homo sapien
cttttccatcaagaagaagcttaac

SEQ ID NO: 4047351 - DNA, 25 bp, Homo sapien
agtgcgatcaagaacaagtcctttc

SEQ ID NO: 4047352 - DNA, 25 bp, Homo sapien
cccattggatacttgctgccaattt

SEQ ID NO: 4047353 - DNA, 25 bp, Homo sapien
ttcacccattggatacttgctgcca

SEQ ID NO: 4047354 - DNA, 25 bp, Homo sapien
cacccattggatacttgctgccaat

SEQ ID NO: 4047355 - DNA, 25 bp, Homo sapien
cttcacccattggatacttgctgcc

SEQ ID NO: 4047356 - DNA, 25 bp, Homo sapien
atgacaacacgaaggaatgtcacag

SEQ ID NO: 4047357 - DNA, 25 bp, Homo sapien
cacccatctgattggtcactcaaca

SEQ ID NO: 4047358 - DNA, 25 bp, Homo sapien
caacaaatgacaacacgaaggaatg

SEQ ID NO: 4047359 - DNA, 25 bp, Homo sapien
cactcaacaaatgacaacacgaagg

SEQ ID NO: 4047360 - DNA, 25 bp, Homo sapien
taagctctgattgtgtggaaggctc

SEQ ID NO: 4047361 - DNA, 25 bp, Homo sapien
ttgtgtggaaggctcagtacgtgca

SEQ ID NO: 4047362 - DNA, 25 bp, Homo sapien
gctcagtacgtgcagagccatatcc

SEQ ID NO: 4047363 - DNA, 25 bp, Homo sapien
gctcccttttgctaagctctgattg

SEQ ID NO: 4047364 - DNA, 25 bp, Homo sapien
aatggaaagagttgtcaatgaaggg

SEQ ID NO: 4047365 - DNA, 25 bp, Homo sapien
gaaagagttgtcaatgaagggagca

SEQ ID NO: 4047366 - DNA, 25 bp, Homo sapien
agagttgtcaatgaagggagcagca

SEQ ID NO: 4047367 - DNA, 25 bp, Homo sapien
atggaaagagttgtcaatgaaggga

SEQ ID NO: 4047368 - DNA, 25 bp, Homo sapien
gttgcatgtgagagaacaagactta

SEQ ID NO: 4047369 - DNA, 25 bp, Homo sapien
ggtaaagcatatttcgtaagctagg

SEQ ID NO: 4047370 - DNA, 25 bp, Homo sapien
tacatggaacacttcacttatacac

SEQ ID NO: 4047371 - DNA, 25 bp, Homo sapien
ggaggataatcacaatacatggaac

SEQ ID NO: 4047372 - DNA, 25 bp, Homo sapien
tcctggacccagattagacctctac

SEQ ID NO: 4047373 - DNA, 25 bp, Homo sapien
cccaaatggatttgacacagtggcc

SEQ ID NO: 4047374 - DNA, 25 bp, Homo sapien
ccttactgcctgtacagaggatgat

SEQ ID NO: 4047375 - DNA, 25 bp, Homo sapien
gatgatgcccaacgtctatctgtaa

SEQ ID NO: 4047376 - DNA, 25 bp, Homo sapien
gagtccattgtcaccatggtaatta

SEQ ID NO: 4047377 - DNA, 25 bp, Homo sapien
caccatggtaattactgcacaatac

SEQ ID NO: 4047378 - DNA, 25 bp, Homo sapien
caaagcgccgatggacgggcgtaga

SEQ ID NO: 4047379 - DNA, 25 bp, Homo sapien
acgggcgtagagagagtccattgtc

SEQ ID NO: 4047380 - DNA, 25 bp, Homo sapien
ctgacggccaatggacggtcaggag

SEQ ID NO: 4047381 - DNA, 25 bp, Homo sapien
cagccgctgaatccggcattgtcca

SEQ ID NO: 4047382 - DNA, 25 bp, Homo sapien
gccaatggacggtcaggaggctcag

SEQ ID NO: 4047383 - DNA, 25 bp, Homo sapien
gcagccgctgaatccggcattgtcc

SEQ ID NO: 4047384 - DNA, 25 bp, Homo sapien
agactagaggccttgaaaagccggg

SEQ ID NO: 4047385 - DNA, 25 bp, Homo sapien
aaacacgccttgtccaatgccggtc

SEQ ID NO: 4047386 - DNA, 25 bp, Homo sapien
cccgggcacttgacaactgaagcca

SEQ ID NO: 4047387 - DNA, 25 bp, Homo sapien
tgtgctgccaccataaattctgggt

SEQ ID NO: 4047388 - DNA, 25 bp, Homo sapien
tcatctagcatatgagcaaacctcc

SEQ ID NO: 4047389 - DNA, 25 bp, Homo sapien
actacacgccatcggtattattgcg

SEQ ID NO: 4047390 - DNA, 25 bp, Homo sapien
tagaagctccagttttacgtgccat

SEQ ID NO: 4047391 - DNA, 25 bp, Homo sapien
taacaactgaggtactagaagctcc

SEQ ID NO: 4047392 - DNA, 25 bp, Homo sapien
tacctcctgcttcagtaagtactgc

SEQ ID NO: 4047393 - DNA, 25 bp, Homo sapien
ttcagtaagtactgctgttcctgag

SEQ ID NO: 4047394 - DNA, 25 bp, Homo sapien
cctcctgcttcagtaagtactgctg

SEQ ID NO: 4047395 - DNA, 25 bp, Homo sapien
tcagtaagtactgctgttcctgagc

SEQ ID NO: 4047396 - DNA, 25 bp, Homo sapien
tgtgcttggatcatgagtgtggaaa

SEQ ID NO: 4047397 - DNA, 25 bp, Homo sapien
gtgcttggatcatgagtgtggaaat

SEQ ID NO: 4047398 - DNA, 25 bp, Homo sapien
atgacagaaaaatggccctgtttgt

SEQ ID NO: 4047399 - DNA, 25 bp, Homo sapien
gccatcttcaagaggacactgcatg

SEQ ID NO: 4047400 - DNA, 25 bp, Homo sapien
gctctcagggtgatgtgtaggcaca

SEQ ID NO: 4047401 - DNA, 25 bp, Homo sapien
atgtgcagaagaccttggcggccag

SEQ ID NO: 4047402 - DNA, 25 bp, Homo sapien
tttcagagtcaagatggtcctcaga

SEQ ID NO: 4047403 - DNA, 25 bp, Homo sapien
tttatcagtcattctgttcttatgt

SEQ ID NO: 4047404 - DNA, 25 bp, Homo sapien
aggttatgaaaagcagaaactctgt

SEQ ID NO: 4047405 - DNA, 25 bp, Homo sapien
gttatgaaaagcagaaactctgtca

SEQ ID NO: 4047406 - DNA, 25 bp, Homo sapien
ctgtgaggttatgaaaagcagaaac

SEQ ID NO: 4047407 - DNA, 25 bp, Homo sapien
tatgaaaagcagaaactctgtcatc

SEQ ID NO: 4047408 - DNA, 25 bp, Homo sapien
aaataccgatacctgagcatcctct

SEQ ID NO: 4047409 - DNA, 25 bp, Homo sapien
tttgcaacatagacacctgagctgg

SEQ ID NO: 4047410 - DNA, 25 bp, Homo sapien
aagtgagcttgggtacaaataccga

SEQ ID NO: 4047411 - DNA, 25 bp, Homo sapien
tcttttgcaacatagacacctgagc

SEQ ID NO: 4047412 - DNA, 25 bp, Homo sapien
ttatcatcatcattagtgtgatcta

SEQ ID NO: 4047413 - DNA, 25 bp, Homo sapien
tcatcatcattagtgtgatctatgt

SEQ ID NO: 4047414 - DNA, 25 bp, Homo sapien
tcatcattagtgtgatctatgttgg

SEQ ID NO: 4047415 - DNA, 25 bp, Homo sapien
atcattagtgtgatctatgttggcc

SEQ ID NO: 4047416 - DNA, 25 bp, Homo sapien
gcctggttccaatctatgcagtggg

SEQ ID NO: 4047417 - DNA, 25 bp, Homo sapien
caggacagcataggagtgattgact

SEQ ID NO: 4047418 - DNA, 25 bp, Homo sapien
ggatccacgtttgtctccctgcaaa

SEQ ID NO: 4047419 - DNA, 25 bp, Homo sapien
taagtggcattgagccaggacagca

SEQ ID NO: 4047420 - DNA, 25 bp, Homo sapien
cttcctggtagaaccattccctgtt

SEQ ID NO: 4047421 - DNA, 25 bp, Homo sapien
tagaaccattccctgtttcaaaggc

SEQ ID NO: 4047422 - DNA, 25 bp, Homo sapien
tggtagaaccattccctgtttcaaa

SEQ ID NO: 4047423 - DNA, 25 bp, Homo sapien
ccaatggcattgattcaaaaatatc

SEQ ID NO: 4047424 - DNA, 25 bp, Homo sapien
tcttgtttagttgaggtcatcttct

SEQ ID NO: 4047425 - DNA, 25 bp, Homo sapien
tgtcagcttcttgtttagttggggt

SEQ ID NO: 4047426 - DNA, 25 bp, Homo sapien
cttccttcttgtttagttgaggtca

SEQ ID NO: 4047427 - DNA, 25 bp, Homo sapien
tatgctgttcaaatatattgccctt

SEQ ID NO: 4047428 - DNA, 25 bp, Homo sapien
atgaacagatccatcatctgttctt

SEQ ID NO: 4047429 - DNA, 25 bp, Homo sapien
catgaacagatccatcatctgttct

SEQ ID NO: 4047430 - DNA, 25 bp, Homo sapien
ccatgaacagatccatcatctgttc

SEQ ID NO: 4047431 - DNA, 25 bp, Homo sapien
gaccgactcctaggcatgcaaacaa

SEQ ID NO: 4047432 - DNA, 25 bp, Homo sapien
aagactacgaggagcacagtgaccg

SEQ ID NO: 4047433 - DNA, 25 bp, Homo sapien
ggctctgagcctaataaacttggaa

SEQ ID NO: 4047434 - DNA, 25 bp, Homo sapien
gatgaatattagaaccaactctgcc

SEQ ID NO: 4047435 - DNA, 25 bp, Homo sapien
gggacccaagcatagcagtccagtt

SEQ ID NO: 4047436 - DNA, 25 bp, Homo sapien
gccagtgactcttccatggaattta

SEQ ID NO: 4047437 - DNA, 25 bp, Homo sapien
tctctagggttgcttaattcaaacg

SEQ ID NO: 4047438 - DNA, 25 bp, Homo sapien
gaatttctcccacagagtctaataa

SEQ ID NO: 4047439 - DNA, 25 bp, Homo sapien
ccaatggtaagtgaacgtcagttta

SEQ ID NO: 4047440 - DNA, 25 bp, Homo sapien
aaacactttgtcttactttccactg

SEQ ID NO: 4047441 - DNA, 25 bp, Homo sapien
ctttgtcttactttccactgagtta

SEQ ID NO: 4047442 - DNA, 25 bp, Homo sapien
agtgaacgtcagtttacaaaacact

SEQ ID NO: 4047443 - DNA, 25 bp, Homo sapien
gaggcaactgtactcacttaagaca

SEQ ID NO: 4047444 - DNA, 25 bp, Homo sapien
tcttcatcaactgtctacgcattcc

SEQ ID NO: 4047445 - DNA, 25 bp, Homo sapien
tcagagctgcaaagaacttcattgc

SEQ ID NO: 4047446 - DNA, 25 bp, Homo sapien
gtactcacttaagacaaaaaacaca

SEQ ID NO: 4047447 - DNA, 25 bp, Homo sapien
cagtacttatttctttaatggagtt

SEQ ID NO: 4047448 - DNA, 25 bp, Homo sapien
aacagtacttatttctttaatggag

SEQ ID NO: 4047449 - DNA, 25 bp, Homo sapien
atggagttttcctcttaattataat

SEQ ID NO: 4047450 - DNA, 25 bp, Homo sapien
ttttcctcttaattataatatagca

SEQ ID NO: 4047451 - DNA, 25 bp, Homo sapien
aatttgtgtagcctggaatatgcaa

SEQ ID NO: 4047452 - DNA, 25 bp, Homo sapien
tgcaatttaatcataagccataatt

SEQ ID NO: 4047453 - DNA, 25 bp, Homo sapien
gacactatcaaacaggagcaaatat

SEQ ID NO: 4047454 - DNA, 25 bp, Homo sapien
cctcctgaactttcatgacactatc

SEQ ID NO: 4047455 - DNA, 25 bp, Homo sapien
ggtgtcacggtagtctcactgatat

SEQ ID NO: 4047456 - DNA, 25 bp, Homo sapien
tatactccagtgcacgaggaacaat

SEQ ID NO: 4047457 - DNA, 25 bp, Homo sapien
tatccattcccttccacttggagtc

SEQ ID NO: 4047458 - DNA, 25 bp, Homo sapien
gtgtttaccgaagatcaaactgcta

SEQ ID NO: 4047459 - DNA, 25 bp, Homo sapien
cagacaaggcttgtaagtaacaaaa

SEQ ID NO: 4047460 - DNA, 25 bp, Homo sapien
tagcttgaaccacagctagattgaa

SEQ ID NO: 4047461 - DNA, 25 bp, Homo sapien
ctagattgaattcggtctctcctga

SEQ ID NO: 4047462 - DNA, 25 bp, Homo sapien
agagggccagacaaggcttgtaagt

SEQ ID NO: 4047463 - DNA, 25 bp, Homo sapien
ttttaactcctaccagtgcaccagg

SEQ ID NO: 4047464 - DNA, 25 bp, Homo sapien
gcgtttcccatatgagggtccccaa

SEQ ID NO: 4047465 - DNA, 25 bp, Homo sapien
caggcattcacaggcaaggttccag

SEQ ID NO: 4047466 - DNA, 25 bp, Homo sapien
ctcctgggagcgcagtactggcatt

SEQ ID NO: 4047467 - DNA, 25 bp, Homo sapien
agtcccggtcccattcacaagtcag

SEQ ID NO: 4047468 - DNA, 25 bp, Homo sapien
cagggcaagcgctgcggtgtcagtc

SEQ ID NO: 4047469 - DNA, 25 bp, Homo sapien
cttgagggtggacgcaacctccgag

SEQ ID NO: 4047470 - DNA, 25 bp, Homo sapien
cattcacaagtcagcggcggctgcg

SEQ ID NO: 4047471 - DNA, 25 bp, Homo sapien
actgaagttgggctccagggacgca

SEQ ID NO: 4047472 - DNA, 25 bp, Homo sapien
gatgctaacccctggattcgtggcc

SEQ ID NO: 4047473 - DNA, 25 bp, Homo sapien
gaggctgccgctgtgagggaaggaa

SEQ ID NO: 4047474 - DNA, 25 bp, Homo sapien
ctgcgagaggcagcgagatgggcct

SEQ ID NO: 4047475 - DNA, 25 bp, Homo sapien
tccttctcggatgtttgtggatcac

SEQ ID NO: 4047476 - DNA, 25 bp, Homo sapien
ggtgctctatctttgtgccattgaa

SEQ ID NO: 4047477 - DNA, 25 bp, Homo sapien
tatttggagaagagtgccacagtca

SEQ ID NO: 4047478 - DNA, 25 bp, Homo sapien
gaattcatcccatgggcctgcctct

SEQ ID NO: 4047479 - DNA, 25 bp, Homo sapien
caacttcaggtgtcttttctggctc

SEQ ID NO: 4047480 - DNA, 25 bp, Homo sapien
tcactcaacttcaggtgtcttttct

SEQ ID NO: 4047481 - DNA, 25 bp, Homo sapien
tcaacttcaggtgtcttttctggct

SEQ ID NO: 4047482 - DNA, 25 bp, Homo sapien
actcaacttcaggtgtcttttctgg

SEQ ID NO: 4047483 - DNA, 25 bp, Homo sapien
tgcccacgacctgcagcacattttg

SEQ ID NO: 4047484 - DNA, 25 bp, Homo sapien
aaatcctgtctgttaatgtacagct

SEQ ID NO: 4047485 - DNA, 25 bp, Homo sapien
ctgcagcatctagtttttccattag

SEQ ID NO: 4047486 - DNA, 25 bp, Homo sapien
agcttcacagtgctgacgggctgcc

SEQ ID NO: 4047487 - DNA, 25 bp, Homo sapien
tgctaaaacgctgacaagccggagg

SEQ ID NO: 4047488 - DNA, 25 bp, Homo sapien
taaaacgctgacaagccggaggtgc

SEQ ID NO: 4047489 - DNA, 25 bp, Homo sapien
aaacgctgacaagccggaggtgcct

SEQ ID NO: 4047490 - DNA, 25 bp, Homo sapien
ctgggtgctaaaacgctgacaagcc

SEQ ID NO: 4047491 - DNA, 25 bp, Homo sapien
ctttccatgagtaaccttgctctgc

SEQ ID NO: 4047492 - DNA, 25 bp, Homo sapien
gagttgcatctttccatgagtaacc

SEQ ID NO: 4047493 - DNA, 25 bp, Homo sapien
gcatctttccatgagtaaccttgct

SEQ ID NO: 4047494 - DNA, 25 bp, Homo sapien
ctttcactgagttgcatctttccat

SEQ ID NO: 4047495 - DNA, 25 bp, Homo sapien
gaaaaccacatctagttctcatctc

SEQ ID NO: 4047496 - DNA, 25 bp, Homo sapien
tcatctccagcgtggtgagaagcga

SEQ ID NO: 4047497 - DNA, 25 bp, Homo sapien
gaacccatgtgaacagggctctgca

SEQ ID NO: 4047498 - DNA, 25 bp, Homo sapien
gaagccggacttccagattcaaagg

SEQ ID NO: 4047499 - DNA, 25 bp, Homo sapien
tggaaatgccagtcgcaccactcca

SEQ ID NO: 4047500 - DNA, 25 bp, Homo sapien
gaagtgatgcactctggaatggaaa

SEQ ID NO: 4047501 - DNA, 25 bp, Homo sapien
cgaacagcctcaggaatgtaaggtt

SEQ ID NO: 4047502 - DNA, 25 bp, Homo sapien
tgtgagaagccttcgacgaacagcc

SEQ ID NO: 4047503 - DNA, 25 bp, Homo sapien
catgtctgctgatcatcccaacagc

SEQ ID NO: 4047504 - DNA, 25 bp, Homo sapien
taaaatccgagagcattcgctggga

SEQ ID NO: 4047505 - DNA, 25 bp, Homo sapien
ggccttttgctttagaccaagtgaa

SEQ ID NO: 4047506 - DNA, 25 bp, Homo sapien
gttcaagaggcacccttggcctgga

SEQ ID NO: 4047507 - DNA, 25 bp, Homo sapien
tgctctgaatgctcatcagagttgg

SEQ ID NO: 4047508 - DNA, 25 bp, Homo sapien
gggcagcccaagaccatttgccatt

SEQ ID NO: 4047509 - DNA, 25 bp, Homo sapien
gggggcagcccaagaccatttgcca

SEQ ID NO: 4047510 - DNA, 25 bp, Homo sapien
aaaaatgctctgaatgctcatcaga

SEQ ID NO: 4047511 - DNA, 25 bp, Homo sapien
aggctgatagaagttggcagattgg

SEQ ID NO: 4047512 - DNA, 25 bp, Homo sapien
tcagacgacgactaaggctgataga

SEQ ID NO: 4047513 - DNA, 25 bp, Homo sapien
agacgacgactaaggctgatagaag

SEQ ID NO: 4047514 - DNA, 25 bp, Homo sapien
ctgatagaagttggcagattggaga

SEQ ID NO: 4047515 - DNA, 25 bp, Homo sapien
cattacatcctagcaggactgcata

SEQ ID NO: 4047516 - DNA, 25 bp, Homo sapien
ggaataccaccaagataaagtacca

SEQ ID NO: 4047517 - DNA, 25 bp, Homo sapien
attttcattacatcctagcaggact

SEQ ID NO: 4047518 - DNA, 25 bp, Homo sapien
cagcctgaggtgtagagcgagaccg

SEQ ID NO: 4047519 - DNA, 25 bp, Homo sapien
tcaaaatcattaagcctgtcactgt

SEQ ID NO: 4047520 - DNA, 25 bp, Homo sapien
aaatcattaagcctgtcactgttcg

SEQ ID NO: 4047521 - DNA, 25 bp, Homo sapien
ttcaaaatcattaagcctgtcactg

SEQ ID NO: 4047522 - DNA, 25 bp, Homo sapien
cattaagcctgtcactgttcgtggg

SEQ ID NO: 4047523 - DNA, 25 bp, Homo sapien
tgagtcacaggctgtacccctacag

SEQ ID NO: 4047524 - DNA, 25 bp, Homo sapien
ctctgagtcacaggctgtaccccta

SEQ ID NO: 4047525 - DNA, 25 bp, Homo sapien
ctgagcatatgacaattgcctctga

SEQ ID NO: 4047526 - DNA, 25 bp, Homo sapien
gagcatatgacaattgcctctgagt

SEQ ID NO: 4047527 - DNA, 25 bp, Homo sapien
tggcaattatactgctaaggagtct

SEQ ID NO: 4047528 - DNA, 25 bp, Homo sapien
gaatgacaagtctagcagccagttt

SEQ ID NO: 4047529 - DNA, 25 bp, Homo sapien
tgctgtttgctctcttgattattaa

SEQ ID NO: 4047530 - DNA, 25 bp, Homo sapien
tctgagggacagatagagttgatgc

SEQ ID NO: 4047531 - DNA, 25 bp, Homo sapien
taatgacaaccttcccatgagtccc

SEQ ID NO: 4047532 - DNA, 25 bp, Homo sapien
gagagtagaccgcatccaaagttgg

SEQ ID NO: 4047533 - DNA, 25 bp, Homo sapien
ccaaagttggtgctcacggaagtct

SEQ ID NO: 4047534 - DNA, 25 bp, Homo sapien
aactgcaggttgtgaggttgccaga

SEQ ID NO: 4047535 - DNA, 25 bp, Homo sapien
tctcaggaagtgctgcatgagggca

SEQ ID NO: 4047536 - DNA, 25 bp, Homo sapien
aatggatagatttgacggagcaccc

SEQ ID NO: 4047537 - DNA, 25 bp, Homo sapien
tccataggtcaattctccctcgtca

SEQ ID NO: 4047538 - DNA, 25 bp, Homo sapien
caccctgacttctgaaggcactgag

SEQ ID NO: 4047539 - DNA, 25 bp, Homo sapien
gagcctgaaaactgacaccctgact

SEQ ID NO: 4047540 - DNA, 25 bp, Homo sapien
cattgctattatcccagcatccact

SEQ ID NO: 4047541 - DNA, 25 bp, Homo sapien
ggagttcattgctattatcccagca

SEQ ID NO: 4047542 - DNA, 25 bp, Homo sapien
ttcctaaaccgtaggagttcattgc

SEQ ID NO: 4047543 - DNA, 25 bp, Homo sapien
ccgtaggagttcattgctattatcc

SEQ ID NO: 4047544 - DNA, 25 bp, Homo sapien
gtacgacatgacattttacagggct

SEQ ID NO: 4047545 - DNA, 25 bp, Homo sapien
cattaagaaccctactggtatagct

SEQ ID NO: 4047546 - DNA, 25 bp, Homo sapien
ccatgagaggcttttattggaagca

SEQ ID NO: 4047547 - DNA, 25 bp, Homo sapien
ccaaagtcacaaggagtacgacatg

SEQ ID NO: 4047548 - DNA, 25 bp, Homo sapien
gagagcttcagaaactgccgctttg

SEQ ID NO: 4047549 - DNA, 25 bp, Homo sapien
cataagtgagagctaagaggtttct

SEQ ID NO: 4047550 - DNA, 25 bp, Homo sapien
cgctttgattcctgcccaagctgga

SEQ ID NO: 4047551 - DNA, 25 bp, Homo sapien
ggctcattggtttcctgtgcataag

SEQ ID NO: 4047552 - DNA, 25 bp, Homo sapien
caagagaaagggatagcccaaagcc

SEQ ID NO: 4047553 - DNA, 25 bp, Homo sapien
ccaaagccatgccactcagtatgcg

SEQ ID NO: 4047554 - DNA, 25 bp, Homo sapien
gccactcagtatgcgcaagtctaag

SEQ ID NO: 4047555 - DNA, 25 bp, Homo sapien
tatgcgcaagtctaagtcttcatca

SEQ ID NO: 4047556 - DNA, 25 bp, Homo sapien
gattgttttgtgcatcaattaacag

SEQ ID NO: 4047557 - DNA, 25 bp, Homo sapien
cttttgaaggattgttttgtgcatc

SEQ ID NO: 4047558 - DNA, 25 bp, Homo sapien
ttgaaggattgttttgtgcatcaat

SEQ ID NO: 4047559 - DNA, 25 bp, Homo sapien
gaaggattgttttgtgcatcaatta

SEQ ID NO: 4047560 - DNA, 25 bp, Homo sapien
ggtaacctcatcacttaaagcaagg

SEQ ID NO: 4047561 - DNA, 25 bp, Homo sapien
gcgaaaatttttggagggtgacatg

SEQ ID NO: 4047562 - DNA, 25 bp, Homo sapien
gaaaatttttggagggtgacatgga

SEQ ID NO: 4047563 - DNA, 25 bp, Homo sapien
tcacaaggtaacctcatcacttaaa

SEQ ID NO: 4047564 - DNA, 25 bp, Homo sapien
taaatgggctcctgtacaccttgta

SEQ ID NO: 4047565 - DNA, 25 bp, Homo sapien
aaatgggctcctgtacaccttgtag

SEQ ID NO: 4047566 - DNA, 25 bp, Homo sapien
ggtggaacctccatcaataaatcaa

SEQ ID NO: 4047567 - DNA, 25 bp, Homo sapien
aatctggggaaatgggatgaatgtc

SEQ ID NO: 4047568 - DNA, 25 bp, Homo sapien
ctggggaaatgggatgaatgtcagg

SEQ ID NO: 4047569 - DNA, 25 bp, Homo sapien
gaaatctggggaaatgggatgaatg

SEQ ID NO: 4047570 - DNA, 25 bp, Homo sapien
gtgggagactcaacaaagagtgagt

SEQ ID NO: 4047571 - DNA, 25 bp, Homo sapien
gactcaacaaagagtgagtacagct

SEQ ID NO: 4047572 - DNA, 25 bp, Homo sapien
tcaacaaagagtgagtacagctgaa

SEQ ID NO: 4047573 - DNA, 25 bp, Homo sapien
tgggagactcaacaaagagtgagta

SEQ ID NO: 4047574 - DNA, 25 bp, Homo sapien
cacagatccggaactaacttgtaag

SEQ ID NO: 4047575 - DNA, 25 bp, Homo sapien
taaggcacagatccggaactaactt

SEQ ID NO: 4047576 - DNA, 25 bp, Homo sapien
atttggttgataaggcacagatccg

SEQ ID NO: 4047577 - DNA, 25 bp, Homo sapien
gagaggatatgggtttggcaccata

SEQ ID NO: 4047578 - DNA, 25 bp, Homo sapien
ttacccaaagctcggcgttcgtgat

SEQ ID NO: 4047579 - DNA, 25 bp, Homo sapien
agttacccaaagctcggcgttcgtg

SEQ ID NO: 4047580 - DNA, 25 bp, Homo sapien
agagttacccaaagctcggcgttcg

SEQ ID NO: 4047581 - DNA, 25 bp, Homo sapien
tgagagttacccaaagctcggcgtt

SEQ ID NO: 4047582 - DNA, 25 bp, Homo sapien
caaggccataactccacatccatca

SEQ ID NO: 4047583 - DNA, 25 bp, Homo sapien
cggcctgggagtgttattagagaaa

SEQ ID NO: 4047584 - DNA, 25 bp, Homo sapien
ctctgtgattgattaaagacacccc

SEQ ID NO: 4047585 - DNA, 25 bp, Homo sapien
ccagtgaagacttttgatttccata

SEQ ID NO: 4047586 - DNA, 25 bp, Homo sapien
caagttactgggttgaggtagccat

SEQ ID NO: 4047587 - DNA, 25 bp, Homo sapien
ttactgggttgaggtagccattgga

SEQ ID NO: 4047588 - DNA, 25 bp, Homo sapien
gttgaggtagccattggagaatgaa

SEQ ID NO: 4047589 - DNA, 25 bp, Homo sapien
ctagcaagttactgggttgaggtag

SEQ ID NO: 4047590 - DNA, 25 bp, Homo sapien
ggaagagctttgttcttcgaaattc

SEQ ID NO: 4047591 - DNA, 25 bp, Homo sapien
ttgttcttcgaaattcttgatgttg

SEQ ID NO: 4047592 - DNA, 25 bp, Homo sapien
gctttgttcttcgaaattcttgatg

SEQ ID NO: 4047593 - DNA, 25 bp, Homo sapien
caatggaagagctttgttcttcgaa

SEQ ID NO: 4047594 - DNA, 25 bp, Homo sapien
ttcccacattcctgcaggctctcat

SEQ ID NO: 4047595 - DNA, 25 bp, Homo sapien
cccacattcctgcaggctctcattt

SEQ ID NO: 4047596 - DNA, 25 bp, Homo sapien
cttcccacattcctgcaggctctca

SEQ ID NO: 4047597 - DNA, 25 bp, Homo sapien
tcccacattcctgcaggctctcatt

SEQ ID NO: 4047598 - DNA, 25 bp, Homo sapien
aagaggagcagaacccatacaaggg

SEQ ID NO: 4047599 - DNA, 25 bp, Homo sapien
ggatgacatcgctcattatttgagg

SEQ ID NO: 4047600 - DNA, 25 bp, Homo sapien
tcagttctagaactctcagctgtgt

SEQ ID NO: 4047601 - DNA, 25 bp, Homo sapien
cataacacagttctggatgatgagt

SEQ ID NO: 4047602 - DNA, 25 bp, Homo sapien
agaaatgcagtagccaggcccttca

SEQ ID NO: 4047603 - DNA, 25 bp, Homo sapien
gaaatgcagtagccaggcccttcat

SEQ ID NO: 4047604 - DNA, 25 bp, Homo sapien
tccagaaatgcagtagccaggccct

SEQ ID NO: 4047605 - DNA, 25 bp, Homo sapien
ccagaaatgcagtagccaggccctt

SEQ ID NO: 4047606 - DNA, 25 bp, Homo sapien
catatcagcatatcttgtgaagcga

SEQ ID NO: 4047607 - DNA, 25 bp, Homo sapien
gagccgagtgcctctcatatcagca

SEQ ID NO: 4047608 - DNA, 25 bp, Homo sapien
aattagccatctaatagctaacagg

SEQ ID NO: 4047609 - DNA, 25 bp, Homo sapien
tctactcctaatatgagccgagtgc

SEQ ID NO: 4047610 - DNA, 25 bp, Homo sapien
gccattatggaagggaaatcattgc

SEQ ID NO: 4047611 - DNA, 25 bp, Homo sapien
gtgtctaagacactctcatctgcag

SEQ ID NO: 4047612 - DNA, 25 bp, Homo sapien
tcagcacatcccagaataaggcatt

SEQ ID NO: 4047613 - DNA, 25 bp, Homo sapien
tcacatagtttttcagccaccacac

SEQ ID NO: 4047614 - DNA, 25 bp, Homo sapien
ttagggcctctaacagtattaaagc

SEQ ID NO: 4047615 - DNA, 25 bp, Homo sapien
cagtattaaagcagtggcagccgct

SEQ ID NO: 4047616 - DNA, 25 bp, Homo sapien
taacagtattaaagcagtggcagcc

SEQ ID NO: 4047617 - DNA, 25 bp, Homo sapien
tggcagccgctgcacgcagacatga

SEQ ID NO: 4047618 - DNA, 25 bp, Homo sapien
taagtacaacactgagccagcccat

SEQ ID NO: 4047619 - DNA, 25 bp, Homo sapien
ccctgcctgtgtcggagaacattct

SEQ ID NO: 4047620 - DNA, 25 bp, Homo sapien
cattcttagccacgtggaggagacc

SEQ ID NO: 4047621 - DNA, 25 bp, Homo sapien
gtgagatttagactgcaggcccctg

SEQ ID NO: 4047622 - DNA, 25 bp, Homo sapien
gataccatcgtctttggccatggag

SEQ ID NO: 4047623 - DNA, 25 bp, Homo sapien
caatcaaggaaaaagcgagctcggg

SEQ ID NO: 4047624 - DNA, 25 bp, Homo sapien
gagctaagtctcacggcactgtgca

SEQ ID NO: 4047625 - DNA, 25 bp, Homo sapien
tggctacctggtgtcttaagagaac

SEQ ID NO: 4047626 - DNA, 25 bp, Homo sapien
tgaacccttcgagagggcagtggct

SEQ ID NO: 4047627 - DNA, 25 bp, Homo sapien
ccgaggtaaccttgaagctagtgtc

SEQ ID NO: 4047628 - DNA, 25 bp, Homo sapien
ggatttgcacaacttcacttctgag

SEQ ID NO: 4047629 - DNA, 25 bp, Homo sapien
ggtttcctatagaggcagtggctgc

SEQ ID NO: 4047630 - DNA, 25 bp, Homo sapien
aggagaatcttaatgcttggcggtc

SEQ ID NO: 4047631 - DNA, 25 bp, Homo sapien
gggctgcagccacctagctgtctgt

SEQ ID NO: 4047632 - DNA, 25 bp, Homo sapien
taaaggattgtagcctggctccaca

SEQ ID NO: 4047633 - DNA, 25 bp, Homo sapien
gccacctagctgtctgtcttcattt

SEQ ID NO: 4047634 - DNA, 25 bp, Homo sapien
cctatcgatgggcattttgtcatta

SEQ ID NO: 4047635 - DNA, 25 bp, Homo sapien
agctgtttaagctgtcccaagggaa

SEQ ID NO: 4047636 - DNA, 25 bp, Homo sapien
gctgtttaagctgtcccaagggaaa

SEQ ID NO: 4047637 - DNA, 25 bp, Homo sapien
tttcatttccagtcctatcgatggg

SEQ ID NO: 4047638 - DNA, 25 bp, Homo sapien
acagtgtgtgccatccattagggaa

SEQ ID NO: 4047639 - DNA, 25 bp, Homo sapien
cgtggcccattgaatgttcagcagc

SEQ ID NO: 4047640 - DNA, 25 bp, Homo sapien
tgtgccatccattagggaatcgtgg

SEQ ID NO: 4047641 - DNA, 25 bp, Homo sapien
cattagggaatcgtggcccattgaa

SEQ ID NO: 4047642 - DNA, 25 bp, Homo sapien
ggcatacagcgacagctgcattctc

SEQ ID NO: 4047643 - DNA, 25 bp, Homo sapien
ccaaggcatacagcgacagctgcat

SEQ ID NO: 4047644 - DNA, 25 bp, Homo sapien
aaggcatacagcgacagctgcattc

SEQ ID NO: 4047645 - DNA, 25 bp, Homo sapien
ccccaaggcatacagcgacagctgc

SEQ ID NO: 4047646 - DNA, 25 bp, Homo sapien
ggaagcccatgccttcacgaatgta

SEQ ID NO: 4047647 - DNA, 25 bp, Homo sapien
gtcttagatgaacacttcctgcatg

SEQ ID NO: 4047648 - DNA, 25 bp, Homo sapien
gtgaagatgacatgcctggaagccc

SEQ ID NO: 4047649 - DNA, 25 bp, Homo sapien
catgtgtgtagatctgtaggtgcag

SEQ ID NO: 4047650 - DNA, 25 bp, Homo sapien
gtggaagcacagattcacaggccat

SEQ ID NO: 4047651 - DNA, 25 bp, Homo sapien
ctgtggaagcacagattcacaggcc

SEQ ID NO: 4047652 - DNA, 25 bp, Homo sapien
tgtggaagcacagattcacaggcca

SEQ ID NO: 4047653 - DNA, 25 bp, Homo sapien
gctacactattttttcggagaccca

SEQ ID NO: 4047654 - DNA, 25 bp, Homo sapien
cctccccaagattcacagggtttct

SEQ ID NO: 4047655 - DNA, 25 bp, Homo sapien
tcttcgaggacttagagctacacta

SEQ ID NO: 4047656 - DNA, 25 bp, Homo sapien
aagtttcagtccaacagattcttta

SEQ ID NO: 4047657 - DNA, 25 bp, Homo sapien
aatggagtacgggaatcttgcaaga

SEQ ID NO: 4047658 - DNA, 25 bp, Homo sapien
taatgtctccatttgagcatggtca

SEQ ID NO: 4047659 - DNA, 25 bp, Homo sapien
caagatggtgctgtccgtactttga

SEQ ID NO: 4047660 - DNA, 25 bp, Homo sapien
aaaaggatgcgtaagagcaatggag

SEQ ID NO: 4047661 - DNA, 25 bp, Homo sapien
cgagtccgcatgtgtgttgatgcac

SEQ ID NO: 4047662 - DNA, 25 bp, Homo sapien
tgcacggattagcaggcagatgcat

SEQ ID NO: 4047663 - DNA, 25 bp, Homo sapien
ctttgaaaggtgatttgtggaggac

SEQ ID NO: 4047664 - DNA, 25 bp, Homo sapien
caggaattccattagcgagtccgca

SEQ ID NO: 4047665 - DNA, 25 bp, Homo sapien
atgtcttacaaagggataacgttgg

SEQ ID NO: 4047666 - DNA, 25 bp, Homo sapien
gataacgttggttggggatactcac

SEQ ID NO: 4047667 - DNA, 25 bp, Homo sapien
ggataacgttggttggggatactca

SEQ ID NO: 4047668 - DNA, 25 bp, Homo sapien
tgatgtcttacaaagggataacgtt

SEQ ID NO: 4047669 - DNA, 25 bp, Homo sapien
agacctcatcaatcaacctatccat

SEQ ID NO: 4047670 - DNA, 25 bp, Homo sapien
aacctatccatcaatgtatgggtac

SEQ ID NO: 4047671 - DNA, 25 bp, Homo sapien
caatcaacctatccatcaatgtatg

SEQ ID NO: 4047672 - DNA, 25 bp, Homo sapien
tggcagtaatctcaacctttgcctt

SEQ ID NO: 4047673 - DNA, 25 bp, Homo sapien
tacagacatttccatcatcgccatc

SEQ ID NO: 4047674 - DNA, 25 bp, Homo sapien
gacatttccatcatcgccatcattg

SEQ ID NO: 4047675 - DNA, 25 bp, Homo sapien
aatacagacatttccatcatcgcca

SEQ ID NO: 4047676 - DNA, 25 bp, Homo sapien
ctccttcacaaatacagacatttcc

SEQ ID NO: 4047677 - DNA, 25 bp, Homo sapien
ggttttgctctgaaccacatcgaaa

SEQ ID NO: 4047678 - DNA, 25 bp, Homo sapien
tgcagattggtctagaaagtcagtt

SEQ ID NO: 4047679 - DNA, 25 bp, Homo sapien
gtaactctttactaagccttggaga

SEQ ID NO: 4047680 - DNA, 25 bp, Homo sapien
agtcagtttcaaagtgccttcttgg

SEQ ID NO: 4047681 - DNA, 25 bp, Homo sapien
gatacttcacgtatccgagagctca

SEQ ID NO: 4047682 - DNA, 25 bp, Homo sapien
gagagctcaggtctgctgaaaacca

SEQ ID NO: 4047683 - DNA, 25 bp, Homo sapien
taatctgccattattctcctggagg

SEQ ID NO: 4047684 - DNA, 25 bp, Homo sapien
aggcagccacggagatgagcctata

SEQ ID NO: 4047685 - DNA, 25 bp, Homo sapien
tcttgttcatattcactgataccca

SEQ ID NO: 4047686 - DNA, 25 bp, Homo sapien
tgttcttgttcatattcactgatac

SEQ ID NO: 4047687 - DNA, 25 bp, Homo sapien
gtcctgttcttgttcatattcactg

SEQ ID NO: 4047688 - DNA, 25 bp, Homo sapien
tcctgttcttgttcatattcactga

SEQ ID NO: 4047689 - DNA, 25 bp, Homo sapien
tatgttgtgaatgtaggttctttga

SEQ ID NO: 4047690 - DNA, 25 bp, Homo sapien
ttatgttgtgaatgtaggttctttg

SEQ ID NO: 4047691 - DNA, 25 bp, Homo sapien
tttatgttgtgaatgtaggttcttt

SEQ ID NO: 4047692 - DNA, 25 bp, Homo sapien
ctttatgttgtgaatgtaggttctt

SEQ ID NO: 4047693 - DNA, 25 bp, Homo sapien
aaaattcaccatcacagtagagaac

SEQ ID NO: 4047694 - DNA, 25 bp, Homo sapien
catcccatggtccagtcaaattgac

SEQ ID NO: 4047695 - DNA, 25 bp, Homo sapien
gcatcccatggtccagtcaaattga

SEQ ID NO: 4047696 - DNA, 25 bp, Homo sapien
ccatctttggctgacagtcattgaa

SEQ ID NO: 4047697 - DNA, 25 bp, Homo sapien
tagagaatgctgatggtaaaaagac

SEQ ID NO: 4047698 - DNA, 25 bp, Homo sapien
tgacagtcattgaacacagtagaga

SEQ ID NO: 4047699 - DNA, 25 bp, Homo sapien
tgctgatggtaaaaagaccttcctc

SEQ ID NO: 4047700 - DNA, 25 bp, Homo sapien
ttttatcctgtagggacaactggac

SEQ ID NO: 4047701 - DNA, 25 bp, Homo sapien
gagagaagcttttatcctgtaggga

SEQ ID NO: 4047702 - DNA, 25 bp, Homo sapien
gacagtcagctctactgcttgaagc

SEQ ID NO: 4047703 - DNA, 25 bp, Homo sapien
caactggactagaggacagtcagct

SEQ ID NO: 4047704 - DNA, 25 bp, Homo sapien
ctgggaagtaaattctggaatgggc

SEQ ID NO: 4047705 - DNA, 25 bp, Homo sapien
catcaaagatagctgggaagtaaat

SEQ ID NO: 4047706 - DNA, 25 bp, Homo sapien
tggacccaagatatgctccatgtct

SEQ ID NO: 4047707 - DNA, 25 bp, Homo sapien
tggaatgggctttagcacgaaagat

SEQ ID NO: 4047708 - DNA, 25 bp, Homo sapien
ggactgtaagtcataggtctcacac

SEQ ID NO: 4047709 - DNA, 25 bp, Homo sapien
aaaaagtttatggaggccgcatgcg

SEQ ID NO: 4047710 - DNA, 25 bp, Homo sapien
tctgaagggcatctagtttgaggca

SEQ ID NO: 4047711 - DNA, 25 bp, Homo sapien
catcagtttgaaaggagcacctctc

SEQ ID NO: 4047712 - DNA, 25 bp, Homo sapien
tacgtacagagttatggttttgcag

SEQ ID NO: 4047713 - DNA, 25 bp, Homo sapien
ttttagggatgctccgaatggctat

SEQ ID NO: 4047714 - DNA, 25 bp, Homo sapien
aaaagtgtcttacacctagtggagc

SEQ ID NO: 4047715 - DNA, 25 bp, Homo sapien
tgcagaaggtgtgataactgattct

SEQ ID NO: 4047716 - DNA, 25 bp, Homo sapien
gggtaaacatccatagcaaagacat

SEQ ID NO: 4047717 - DNA, 25 bp, Homo sapien
gaatgaattcggtatttgtgttttc

SEQ ID NO: 4047718 - DNA, 25 bp, Homo sapien
gccataacccaagaatgaattcggt

SEQ ID NO: 4047719 - DNA, 25 bp, Homo sapien
cttctttaggcagcgtaggggtagc

SEQ ID NO: 4047720 - DNA, 25 bp, Homo sapien
cgtaggggtagcaggaacactttca

SEQ ID NO: 4047721 - DNA, 25 bp, Homo sapien
tatgcagttacatttccgctgcctt

SEQ ID NO: 4047722 - DNA, 25 bp, Homo sapien
ttacatttccgctgccttcctcggg

SEQ ID NO: 4047723 - DNA, 25 bp, Homo sapien
cctggggctccaaacagcttctcat

SEQ ID NO: 4047724 - DNA, 25 bp, Homo sapien
ggaactcccccagctttgcctcaga

SEQ ID NO: 4047725 - DNA, 25 bp, Homo sapien
gccacttagtgtccgtttccattgg

SEQ ID NO: 4047726 - DNA, 25 bp, Homo sapien
cggttaaggctgacaaagcgttttg

SEQ ID NO: 4047727 - DNA, 25 bp, Homo sapien
ttgtttgccacttagtgtccgtttc

SEQ ID NO: 4047728 - DNA, 25 bp, Homo sapien
gcatcttcccggttaaggctgacaa

SEQ ID NO: 4047729 - DNA, 25 bp, Homo sapien
ttttctatatacatccccacaattg

SEQ ID NO: 4047730 - DNA, 25 bp, Homo sapien
tatacatccccacaattggttttac

SEQ ID NO: 4047731 - DNA, 25 bp, Homo sapien
ctcttcctcaagcttttctatatac

SEQ ID NO: 4047732 - DNA, 25 bp, Homo sapien
caattggttttacataaatcggtat

SEQ ID NO: 4047733 - DNA, 25 bp, Homo sapien
tccactgggcctgctaagaacacag

SEQ ID NO: 4047734 - DNA, 25 bp, Homo sapien
cctcacactggaattgatagcagcc

SEQ ID NO: 4047735 - DNA, 25 bp, Homo sapien
cactgggcctgctaagaacacaggt

SEQ ID NO: 4047736 - DNA, 25 bp, Homo sapien
agagaaaacctcacactggaattga

SEQ ID NO: 4047737 - DNA, 25 bp, Homo sapien
ggcattttgtcctttgaatcagaga

SEQ ID NO: 4047738 - DNA, 25 bp, Homo sapien
tcaagggcattttgtcctttgaatc

SEQ ID NO: 4047739 - DNA, 25 bp, Homo sapien
ttttgtcctttgaatcagagatgct

SEQ ID NO: 4047740 - DNA, 25 bp, Homo sapien
agggcattttgtcctttgaatcaga

SEQ ID NO: 4047741 - DNA, 25 bp, Homo sapien
gcagctttcctcatagggggtcatg

SEQ ID NO: 4047742 - DNA, 25 bp, Homo sapien
tcatgtttcccttttgcacacagcc

SEQ ID NO: 4047743 - DNA, 25 bp, Homo sapien
cagccaagtcgaattctgagataca

SEQ ID NO: 4047744 - DNA, 25 bp, Homo sapien
ctgagatacacgagagaggtcccaa

SEQ ID NO: 4047745 - DNA, 25 bp, Homo sapien
tcatgggagaaaagtgaccccagtg

SEQ ID NO: 4047746 - DNA, 25 bp, Homo sapien
gtgaccccagtggacacaggtgctc

SEQ ID NO: 4047747 - DNA, 25 bp, Homo sapien
gccccaagtggtctgggctatgatg

SEQ ID NO: 4047748 - DNA, 25 bp, Homo sapien
ggtctgggctatgatgatccaagaa

SEQ ID NO: 4047749 - DNA, 25 bp, Homo sapien
ttttaccctctgaagactgatctgc

SEQ ID NO: 4047750 - DNA, 25 bp, Homo sapien
acttttaccctctgaagactgatct

SEQ ID NO: 4047751 - DNA, 25 bp, Homo sapien
cttttaccctctgaagactgatctg

SEQ ID NO: 4047752 - DNA, 25 bp, Homo sapien
catattgattcggaattatcggcca

SEQ ID NO: 4047753 - DNA, 25 bp, Homo sapien
ccatctgggatgttattgctcttca

SEQ ID NO: 4047754 - DNA, 25 bp, Homo sapien
tcttcagaggtagatcatattctga

SEQ ID NO: 4047755 - DNA, 25 bp, Homo sapien
caaatacctcattgaagatgccatc

SEQ ID NO: 4047756 - DNA, 25 bp, Homo sapien
tgtaggacatcagatacagataggg

SEQ ID NO: 4047757 - DNA, 25 bp, Homo sapien
tgatgaatttatgccccaagagctg

SEQ ID NO: 4047758 - DNA, 25 bp, Homo sapien
tgcaaaaacagacgctgaacagtta

SEQ ID NO: 4047759 - DNA, 25 bp, Homo sapien
cagcctagcctagttgatttaatca

SEQ ID NO: 4047760 - DNA, 25 bp, Homo sapien
gattctcccatggtgcaggcaggac

SEQ ID NO: 4047761 - DNA, 25 bp, Homo sapien
gacagtgccacagtggaggcaccag

SEQ ID NO: 4047762 - DNA, 25 bp, Homo sapien
catgaaatgggctgctccaaattgc

SEQ ID NO: 4047763 - DNA, 25 bp, Homo sapien
gggacattgtgtctcggccatgaaa

SEQ ID NO: 4047764 - DNA, 25 bp, Homo sapien
tacatgcaagtaggtcaagattttc

SEQ ID NO: 4047765 - DNA, 25 bp, Homo sapien
aaagttctggtatctaagagccccg

SEQ ID NO: 4047766 - DNA, 25 bp, Homo sapien
cttgggtgaggcgtaaagttctggt

SEQ ID NO: 4047767 - DNA, 25 bp, Homo sapien
ctaagagccccgtgaagtgatctcc

SEQ ID NO: 4047768 - DNA, 25 bp, Homo sapien
ccccaccatcttgcatccatgtctc

SEQ ID NO: 4047769 - DNA, 25 bp, Homo sapien
cccaccatcttgcatccatgtctct

SEQ ID NO: 4047770 - DNA, 25 bp, Homo sapien
ctctatgaagcccttctcctctgaa

SEQ ID NO: 4047771 - DNA, 25 bp, Homo sapien
ctatcatcgtagctggttctcacct

SEQ ID NO: 4047772 - DNA, 25 bp, Homo sapien
aaaacgcctacccatgctatcatcg

SEQ ID NO: 4047773 - DNA, 25 bp, Homo sapien
tctctaagaggccattgtgattctt

SEQ ID NO: 4047774 - DNA, 25 bp, Homo sapien
gtacccagctgatgccctttacaga

SEQ ID NO: 4047775 - DNA, 25 bp, Homo sapien
caaatcactgggctattaaaggcat

SEQ ID NO: 4047776 - DNA, 25 bp, Homo sapien
gggtctggcacttatgctcaggctt

SEQ ID NO: 4047777 - DNA, 25 bp, Homo sapien
gatatcaaagtctcgggttcaagtg

SEQ ID NO: 4047778 - DNA, 25 bp, Homo sapien
gcaccctctgtaccacgcatcaggg

SEQ ID NO: 4047779 - DNA, 25 bp, Homo sapien
catcaggggttttgcagtggtcagc

SEQ ID NO: 4047780 - DNA, 25 bp, Homo sapien
tctgtaccacgcatcaggggttttg

SEQ ID NO: 4047781 - DNA, 25 bp, Homo sapien
taccacgcatcaggggttttgcagt

SEQ ID NO: 4047782 - DNA, 25 bp, Homo sapien
ttcacatggagatgcctgtctgctc

SEQ ID NO: 4047783 - DNA, 25 bp, Homo sapien
ctcagatacttttgtagtgaaggaa

SEQ ID NO: 4047784 - DNA, 25 bp, Homo sapien
ccaccgcaagcagtattaatcaaag

SEQ ID NO: 4047785 - DNA, 25 bp, Homo sapien
ttgagcagtgtacaaccaccgcaag

SEQ ID NO: 4047786 - DNA, 25 bp, Homo sapien
gtggtacctccagatcaaaacatgt

SEQ ID NO: 4047787 - DNA, 25 bp, Homo sapien
ctagtggtacctccagatcaaaaca

SEQ ID NO: 4047788 - DNA, 25 bp, Homo sapien
ggtacctccagatcaaaacatgtct

SEQ ID NO: 4047789 - DNA, 25 bp, Homo sapien
tagtggtacctccagatcaaaacat

SEQ ID NO: 4047790 - DNA, 25 bp, Homo sapien
gtcatgtcattaacgtgacaaaatg

SEQ ID NO: 4047791 - DNA, 25 bp, Homo sapien
ttccttttgtcatgtcattaacgtg

SEQ ID NO: 4047792 - DNA, 25 bp, Homo sapien
ctggatcaaacgcaagagtcacttt

SEQ ID NO: 4047793 - DNA, 25 bp, Homo sapien
tggatcaaacgcaagagtcactttt

SEQ ID NO: 4047794 - DNA, 25 bp, Homo sapien
agctgccccttgactggccctcgag

SEQ ID NO: 4047795 - DNA, 25 bp, Homo sapien
ccttgactggccctcgagcaaaggc

SEQ ID NO: 4047796 - DNA, 25 bp, Homo sapien
ttgactggccctcgagcaaaggctc

SEQ ID NO: 4047797 - DNA, 25 bp, Homo sapien
actggccctcgagcaaaggctccat

SEQ ID NO: 4047798 - DNA, 25 bp, Homo sapien
gctgcttatgatagaccaacttcag

SEQ ID NO: 4047799 - DNA, 25 bp, Homo sapien
cttatgatagaccaacttcagaacc

SEQ ID NO: 4047800 - DNA, 25 bp, Homo sapien
tgctgctgcttatgatagaccaact

SEQ ID NO: 4047801 - DNA, 25 bp, Homo sapien
gctgctgctgcttatgatagaccaa

SEQ ID NO: 4047802 - DNA, 25 bp, Homo sapien
gaaaggagaccaacaacaatttgct

SEQ ID NO: 4047803 - DNA, 25 bp, Homo sapien
gacatcaagtctaggggctgttgca

SEQ ID NO: 4047804 - DNA, 25 bp, Homo sapien
gctggatctctgaatggacatcaag

SEQ ID NO: 4047805 - DNA, 25 bp, Homo sapien
ggattactgggaaccgctaagtcca

SEQ ID NO: 4047806 - DNA, 25 bp, Homo sapien
tcatgtcaaaggcactaggcccacc

SEQ ID NO: 4047807 - DNA, 25 bp, Homo sapien
accaaacactcaggccaagcaggag

SEQ ID NO: 4047808 - DNA, 25 bp, Homo sapien
tgtgaggacactacagggaggaccc

SEQ ID NO: 4047809 - DNA, 25 bp, Homo sapien
ggagctggcccaagttcatgtcaaa

SEQ ID NO: 4047810 - DNA, 25 bp, Homo sapien
tgtggatttgtggtgaacagagtca

SEQ ID NO: 4047811 - DNA, 25 bp, Homo sapien
aaagcctgaatgttagagccttatt

SEQ ID NO: 4047812 - DNA, 25 bp, Homo sapien
tccccacgttgctaatgatagaaat

SEQ ID NO: 4047813 - DNA, 25 bp, Homo sapien
cagagtcaggcttaactctttcttc

SEQ ID NO: 4047814 - DNA, 25 bp, Homo sapien
ggtgggtcagacaatacagggagaa

SEQ ID NO: 4047815 - DNA, 25 bp, Homo sapien
tgggtcagacaatacagggagaaag

SEQ ID NO: 4047816 - DNA, 25 bp, Homo sapien
tggagtggtgggtcagacaatacag

SEQ ID NO: 4047817 - DNA, 25 bp, Homo sapien
gagtggtgggtcagacaatacaggg

SEQ ID NO: 4047818 - DNA, 25 bp, Homo sapien
tgacggtcactcagcaaaaagggct

SEQ ID NO: 4047819 - DNA, 25 bp, Homo sapien
aaaagggctgttctggtctgcccca

SEQ ID NO: 4047820 - DNA, 25 bp, Homo sapien
cctgctgtaaggaagtccaggagaa

SEQ ID NO: 4047821 - DNA, 25 bp, Homo sapien
tccaggagaatctgacggtcactca

SEQ ID NO: 4047822 - DNA, 25 bp, Homo sapien
aatatttttatacgggcatgcctgg

SEQ ID NO: 4047823 - DNA, 25 bp, Homo sapien
tccatgtgattagggtttgtagctc

SEQ ID NO: 4047824 - DNA, 25 bp, Homo sapien
tattttatctacctttctactctct

SEQ ID NO: 4047825 - DNA, 25 bp, Homo sapien
ttgttaacgtaggtatacatgagcc

SEQ ID NO: 4047826 - DNA, 25 bp, Homo sapien
taggacagagagtcgagccttttct

SEQ ID NO: 4047827 - DNA, 25 bp, Homo sapien
tggtctggtgatatggaaatgtctc

SEQ ID NO: 4047828 - DNA, 25 bp, Homo sapien
tcttttcacccgtgagactccaggt

SEQ ID NO: 4047829 - DNA, 25 bp, Homo sapien
ttaacaccacacgaaaattgccatt

SEQ ID NO: 4047830 - DNA, 25 bp, Homo sapien
gggaagcaacacacttcttacgtgg

SEQ ID NO: 4047831 - DNA, 25 bp, Homo sapien
gcaacacacttcttacgtggcagca

SEQ ID NO: 4047832 - DNA, 25 bp, Homo sapien
aacacacttcttacgtggcagcagc

SEQ ID NO: 4047833 - DNA, 25 bp, Homo sapien
aagcaacacacttcttacgtggcag

SEQ ID NO: 4047834 - DNA, 25 bp, Homo sapien
tatgtcagtctgtatctctcaccag

SEQ ID NO: 4047835 - DNA, 25 bp, Homo sapien
tctcaacacctctcatactatgtca

SEQ ID NO: 4047836 - DNA, 25 bp, Homo sapien
caaaattaacttagatgttgcctcc

SEQ ID NO: 4047837 - DNA, 25 bp, Homo sapien
tgttgcctcctgtaagcagcttctc

SEQ ID NO: 4047838 - DNA, 25 bp, Homo sapien
ctgtggccacattagggtaccctct

SEQ ID NO: 4047839 - DNA, 25 bp, Homo sapien
tcaggtcatggcatgacaggctagc

SEQ ID NO: 4047840 - DNA, 25 bp, Homo sapien
tttgctgtggccacattagggtacc

SEQ ID NO: 4047841 - DNA, 25 bp, Homo sapien
tgacaggctagccattagctggaca

SEQ ID NO: 4047842 - DNA, 25 bp, Homo sapien
gctccaattcttgtgaatacaccat

SEQ ID NO: 4047843 - DNA, 25 bp, Homo sapien
cattgtctgagttcttctacacccc

SEQ ID NO: 4047844 - DNA, 25 bp, Homo sapien
tgagttcttctacacccctggtcac

SEQ ID NO: 4047845 - DNA, 25 bp, Homo sapien
ttcttggtaaccatcacagagctcc

SEQ ID NO: 4047846 - DNA, 25 bp, Homo sapien
ctcctctttaacgagctgcattgag

SEQ ID NO: 4047847 - DNA, 25 bp, Homo sapien
tcctctttaacgagctgcattgagc

SEQ ID NO: 4047848 - DNA, 25 bp, Homo sapien
tcactcctctttaacgagctgcatt

SEQ ID NO: 4047849 - DNA, 25 bp, Homo sapien
actcctctttaacgagctgcattga

SEQ ID NO: 4047850 - DNA, 25 bp, Homo sapien
catttgttcatctgcagaagtgtta

SEQ ID NO: 4047851 - DNA, 25 bp, Homo sapien
ttgggtctacattgatggagcatca

SEQ ID NO: 4047852 - DNA, 25 bp, Homo sapien
caggagcaaatcatcattggctttt

SEQ ID NO: 4047853 - DNA, 25 bp, Homo sapien
atcaaatccttgcatgccatggagg

SEQ ID NO: 4047854 - DNA, 25 bp, Homo sapien
ggtgcagacgccaaattgataccca

SEQ ID NO: 4047855 - DNA, 25 bp, Homo sapien
aatgtttgaaacgtctgtacctagc

SEQ ID NO: 4047856 - DNA, 25 bp, Homo sapien
tagaagctagtgcacatctgagaag

SEQ ID NO: 4047857 - DNA, 25 bp, Homo sapien
aaattgatacccaggtgctgatctg

SEQ ID NO: 4047858 - DNA, 25 bp, Homo sapien
cgatggcacccataatgagctctga

SEQ ID NO: 4047859 - DNA, 25 bp, Homo sapien
tgagctctgacaacactaagccggt

SEQ ID NO: 4047860 - DNA, 25 bp, Homo sapien
tgatctctcaagcttcgatggcacc

SEQ ID NO: 4047861 - DNA, 25 bp, Homo sapien
gaactgtctggtctaggaaccgcaa

SEQ ID NO: 4047862 - DNA, 25 bp, Homo sapien
tcatgagagactgctccacaaagct

SEQ ID NO: 4047863 - DNA, 25 bp, Homo sapien
tcaattcatgagagactgctccaca

SEQ ID NO: 4047864 - DNA, 25 bp, Homo sapien
aattcatgagagactgctccacaaa

SEQ ID NO: 4047865 - DNA, 25 bp, Homo sapien
atgagagactgctccacaaagcttg

SEQ ID NO: 4047866 - DNA, 25 bp, Homo sapien
tgcaaacactacaggaatatgggac

SEQ ID NO: 4047867 - DNA, 25 bp, Homo sapien
tactgcaaagatcattggaacccac

SEQ ID NO: 4047868 - DNA, 25 bp, Homo sapien
gccacgagtgcgctgagacatttta

SEQ ID NO: 4047869 - DNA, 25 bp, Homo sapien
caagggaccagattggaccagaggc

SEQ ID NO: 4047870 - DNA, 25 bp, Homo sapien
cctgtgctctgtcaagtgctcattt

SEQ ID NO: 4047871 - DNA, 25 bp, Homo sapien
gctcatttagcaagatgcaattttc

SEQ ID NO: 4047872 - DNA, 25 bp, Homo sapien
gctctgtcaagtgctcatttagcaa

SEQ ID NO: 4047873 - DNA, 25 bp, Homo sapien
tgctcatttagcaagatgcaatttt

SEQ ID NO: 4047874 - DNA, 25 bp, Homo sapien
tctctcaacgggtagaaaagtggct

SEQ ID NO: 4047875 - DNA, 25 bp, Homo sapien
gaaaatcgaagcattctctcaacgg

SEQ ID NO: 4047876 - DNA, 25 bp, Homo sapien
agtggctagactccctgcactctca

SEQ ID NO: 4047877 - DNA, 25 bp, Homo sapien
cattgttgcatgaaaatcgaagcat

SEQ ID NO: 4047878 - DNA, 25 bp, Homo sapien
tgaagttgctcatgttgagcatctc

SEQ ID NO: 4047879 - DNA, 25 bp, Homo sapien
tctccctggtctgaagttgctcatg

SEQ ID NO: 4047880 - DNA, 25 bp, Homo sapien
tgctctccctggtctgaagttgctc

SEQ ID NO: 4047881 - DNA, 25 bp, Homo sapien
tggtctgaagttgctcatgttgagc

SEQ ID NO: 4047882 - DNA, 25 bp, Homo sapien
ttgatcagaactgagacccatgtcc

SEQ ID NO: 4047883 - DNA, 25 bp, Homo sapien
tggatcactatggatcatccctttg

SEQ ID NO: 4047884 - DNA, 25 bp, Homo sapien
tcattgatcagaactgagacccatg

SEQ ID NO: 4047885 - DNA, 25 bp, Homo sapien
gtggagcctgcatagtgacttggat

SEQ ID NO: 4047886 - DNA, 25 bp, Homo sapien
cttcagcaatgactgcttcacatcc

SEQ ID NO: 4047887 - DNA, 25 bp, Homo sapien
tccttcagcaatgactgcttcacat

SEQ ID NO: 4047888 - DNA, 25 bp, Homo sapien
ttcagcaatgactgcttcacatcct

SEQ ID NO: 4047889 - DNA, 25 bp, Homo sapien
ccttcagcaatgactgcttcacatc

SEQ ID NO: 4047890 - DNA, 25 bp, Homo sapien
cctgaatgaggtgcctagaaggaca

SEQ ID NO: 4047891 - DNA, 25 bp, Homo sapien
taagggtgacatgccattacaaaga

SEQ ID NO: 4047892 - DNA, 25 bp, Homo sapien
gtgttttataacatcgtcaacctga

SEQ ID NO: 4047893 - DNA, 25 bp, Homo sapien
ttgaaaggtgaaaattggagcacac

SEQ ID NO: 4047894 - DNA, 25 bp, Homo sapien
cttcctgttgcatccagcgtttcta

SEQ ID NO: 4047895 - DNA, 25 bp, Homo sapien
catccagcgtttctagaaacactcc

SEQ ID NO: 4047896 - DNA, 25 bp, Homo sapien
ctgttgcatccagcgtttctagaaa

SEQ ID NO: 4047897 - DNA, 25 bp, Homo sapien
ttgcatccagcgtttctagaaacac

SEQ ID NO: 4047898 - DNA, 25 bp, Homo sapien
ggcttcctaattcctcaggtacctc

SEQ ID NO: 4047899 - DNA, 25 bp, Homo sapien
gaccaggcttcctaattcctcaggt

SEQ ID NO: 4047900 - DNA, 25 bp, Homo sapien
ccactacctatgaccaggcttccta

SEQ ID NO: 4047901 - DNA, 25 bp, Homo sapien
tgagccccactacctatgaccaggc

SEQ ID NO: 4047902 - DNA, 25 bp, Homo sapien
cgacaacgtgcatatgttcctccaa

SEQ ID NO: 4047903 - DNA, 25 bp, Homo sapien
atgttcctccaaattaaatgggagc

SEQ ID NO: 4047904 - DNA, 25 bp, Homo sapien
ttccgacaacgtgcatatgttcctc

SEQ ID NO: 4047905 - DNA, 25 bp, Homo sapien
atatgttcctccaaattaaatggga

SEQ ID NO: 4047906 - DNA, 25 bp, Homo sapien
gaggactgggaattcacaggtgggc

SEQ ID NO: 4047907 - DNA, 25 bp, Homo sapien
ttgccagcatactgggggtgctgca

SEQ ID NO: 4047908 - DNA, 25 bp, Homo sapien
gcaggaggactgggaattcacaggt

SEQ ID NO: 4047909 - DNA, 25 bp, Homo sapien
caggaggactgggaattcacaggtg

SEQ ID NO: 4047910 - DNA, 25 bp, Homo sapien
gactcagccatccataaacatcggg

SEQ ID NO: 4047911 - DNA, 25 bp, Homo sapien
tgaattccacagaacgggccacaaa

SEQ ID NO: 4047912 - DNA, 25 bp, Homo sapien
catccttcagtggactttagaatgg

SEQ ID NO: 4047913 - DNA, 25 bp, Homo sapien
actcttgtagtgcagaatgaattcc

SEQ ID NO: 4047914 - DNA, 25 bp, Homo sapien
ggacttagagccgaaatcctgctca

SEQ ID NO: 4047915 - DNA, 25 bp, Homo sapien
caggccattagctcgggcagctgga

SEQ ID NO: 4047916 - DNA, 25 bp, Homo sapien
cctgctcatgtcagaccctgcttgt

SEQ ID NO: 4047917 - DNA, 25 bp, Homo sapien
aacattctgctaggcctgtgtagag

SEQ ID NO: 4047918 - DNA, 25 bp, Homo sapien
tgccctggatcccagtgactacacg

SEQ ID NO: 4047919 - DNA, 25 bp, Homo sapien
ccagtgactacacggcttgcaaggc

SEQ ID NO: 4047920 - DNA, 25 bp, Homo sapien
gtgactacacggcttgcaaggccct

SEQ ID NO: 4047921 - DNA, 25 bp, Homo sapien
gatcccagtgactacacggcttgca

SEQ ID NO: 4047922 - DNA, 25 bp, Homo sapien
ccccgcttcaattctgggattgtgg

SEQ ID NO: 4047923 - DNA, 25 bp, Homo sapien
ctgggattgtggcatcctgtcctcc

SEQ ID NO: 4047924 - DNA, 25 bp, Homo sapien
gattgtggcatcctgtcctcctctc

SEQ ID NO: 4047925 - DNA, 25 bp, Homo sapien
taccaccccgcttcaattctgggat

SEQ ID NO: 4047926 - DNA, 25 bp, Homo sapien
tcagcagcagtttacccccaagcat

SEQ ID NO: 4047927 - DNA, 25 bp, Homo sapien
ccccttggcccctgatgcccctcac

SEQ ID NO: 4047928 - DNA, 25 bp, Homo sapien
cctcagcagcagtttacccccaagc

SEQ ID NO: 4047929 - DNA, 25 bp, Homo sapien
tgcccctcacatctcctccttgcct

SEQ ID NO: 4047930 - DNA, 25 bp, Homo sapien
tatcaagaagaagaggcttgctgtg

SEQ ID NO: 4047931 - DNA, 25 bp, Homo sapien
gctgaaggtaccatagcctttactt

SEQ ID NO: 4047932 - DNA, 25 bp, Homo sapien
aattgattgcgtccaaatgcaacca

SEQ ID NO: 4047933 - DNA, 25 bp, Homo sapien
gagcaaggcaaatactgccccaaat

SEQ ID NO: 4047934 - DNA, 25 bp, Homo sapien
ataggagaaagtcagtgagcagcac

SEQ ID NO: 4047935 - DNA, 25 bp, Homo sapien
cttcctgataggagaaagtcagtga

SEQ ID NO: 4047936 - DNA, 25 bp, Homo sapien
aggagaaagtcagtgagcagcacac

SEQ ID NO: 4047937 - DNA, 25 bp, Homo sapien
cctgataggagaaagtcagtgagca

SEQ ID NO: 4047938 - DNA, 25 bp, Homo sapien
tagtgtagcaatcacccaaatagtg

SEQ ID NO: 4047939 - DNA, 25 bp, Homo sapien
atattgaatagtgtgaggtctgggc

SEQ ID NO: 4047940 - DNA, 25 bp, Homo sapien
gtctccaatgtgcattattccacaa

SEQ ID NO: 4047941 - DNA, 25 bp, Homo sapien
taagacagtggtctccaggtccatc

SEQ ID NO: 4047942 - DNA, 25 bp, Homo sapien
cactcattgagtcaccatgaatggg

SEQ ID NO: 4047943 - DNA, 25 bp, Homo sapien
tcctggccaaatgttcagtaaacgg

SEQ ID NO: 4047944 - DNA, 25 bp, Homo sapien
gatgcattctatccccaagctgatg

SEQ ID NO: 4047945 - DNA, 25 bp, Homo sapien
taccagaaggctttgagcgttcgat

SEQ ID NO: 4047946 - DNA, 25 bp, Homo sapien
tcgcctctacattggcctctcccct

SEQ ID NO: 4047947 - DNA, 25 bp, Homo sapien
ccctgctctcgcctctacattggcc

SEQ ID NO: 4047948 - DNA, 25 bp, Homo sapien
ccactcccgcatgctctcgttgctg

SEQ ID NO: 4047949 - DNA, 25 bp, Homo sapien
gcatgctctcgttgctgccctgctc

SEQ ID NO: 4047950 - DNA, 25 bp, Homo sapien
gtatcaaaaatgtatgttactgccc

SEQ ID NO: 4047951 - DNA, 25 bp, Homo sapien
tatcaaaaatgtatgttactgccca

SEQ ID NO: 4047952 - DNA, 25 bp, Homo sapien
ctgtatcaaaaatgtatgttactgc

SEQ ID NO: 4047953 - DNA, 25 bp, Homo sapien
caaaaatgtatgttactgcccaata

SEQ ID NO: 4047954 - DNA, 25 bp, Homo sapien
catgtctgacttgggatcatcctct

SEQ ID NO: 4047955 - DNA, 25 bp, Homo sapien
tttgctcttttatctcccatgtgtt

SEQ ID NO: 4047956 - DNA, 25 bp, Homo sapien
gaatgtcggtgataaagtaaagcct

SEQ ID NO: 4047957 - DNA, 25 bp, Homo sapien
gtaaagccttcatgtctgacttggg

SEQ ID NO: 4047958 - DNA, 25 bp, Homo sapien
ggtagactctggcttacaaaggaac

SEQ ID NO: 4047959 - DNA, 25 bp, Homo sapien
tactgtgtcccctggatttccctct

SEQ ID NO: 4047960 - DNA, 25 bp, Homo sapien
tagactctggcttacaaaggaacac

SEQ ID NO: 4047961 - DNA, 25 bp, Homo sapien
ccaacactactgtgtcccctggatt

SEQ ID NO: 4047962 - DNA, 25 bp, Homo sapien
gaactcgggggctcctaactctctc

SEQ ID NO: 4047963 - DNA, 25 bp, Homo sapien
ctgctaacatcacctcggtgacgaa

SEQ ID NO: 4047964 - DNA, 25 bp, Homo sapien
tctccccgactcatgcaggccacag

SEQ ID NO: 4047965 - DNA, 25 bp, Homo sapien
catcacctcggtgacgaattgtggg

SEQ ID NO: 4047966 - DNA, 25 bp, Homo sapien
tgcagaatccattccccagcaatag

SEQ ID NO: 4047967 - DNA, 25 bp, Homo sapien
tccccagcaatagggacagctgctt

SEQ ID NO: 4047968 - DNA, 25 bp, Homo sapien
gaatccattccccagcaatagggac

SEQ ID NO: 4047969 - DNA, 25 bp, Homo sapien
gccggcatgcagaatccattcccca

SEQ ID NO: 4047970 - DNA, 25 bp, Homo sapien
gcatctctggaatcgtgggatatcc

SEQ ID NO: 4047971 - DNA, 25 bp, Homo sapien
tcgtgggatatccaggaaggtctgt

SEQ ID NO: 4047972 - DNA, 25 bp, Homo sapien
tgctaaaggatccttaggatttcct

SEQ ID NO: 4047973 - DNA, 25 bp, Homo sapien
catttgcataagcatctctggaatc

SEQ ID NO: 4047974 - DNA, 25 bp, Homo sapien
cgaggagaccttctggagccattct

SEQ ID NO: 4047975 - DNA, 25 bp, Homo sapien
tgtgctagcaagatcccaggaacag

SEQ ID NO: 4047976 - DNA, 25 bp, Homo sapien
cattcttaatggctggaccctccag

SEQ ID NO: 4047977 - DNA, 25 bp, Homo sapien
gatcaacagccgatagagcactggt

SEQ ID NO: 4047978 - DNA, 25 bp, Homo sapien
gagcagctgcacaattgatgatcag

SEQ ID NO: 4047979 - DNA, 25 bp, Homo sapien
cacactcggtctctaagattccctt

SEQ ID NO: 4047980 - DNA, 25 bp, Homo sapien
caattgatgatcagagtggaaatct

SEQ ID NO: 4047981 - DNA, 25 bp, Homo sapien
aatctgtgaacacactcggtctcta

SEQ ID NO: 4047982 - DNA, 25 bp, Homo sapien
cacagaagcaattgggaatatcgtt

SEQ ID NO: 4047983 - DNA, 25 bp, Homo sapien
tggactaagctggttgacacagaag

SEQ ID NO: 4047984 - DNA, 25 bp, Homo sapien
cgagtcaggcaagattgatggacta

SEQ ID NO: 4047985 - DNA, 25 bp, Homo sapien
gattgatggactaagctggttgaca

SEQ ID NO: 4047986 - DNA, 25 bp, Homo sapien
aggggaaatgtttattgcactcaaa

SEQ ID NO: 4047987 - DNA, 25 bp, Homo sapien
tgtcacaggtcatgcaaatttctct

SEQ ID NO: 4047988 - DNA, 25 bp, Homo sapien
aggtggtaatgccagaagcagccat

SEQ ID NO: 4047989 - DNA, 25 bp, Homo sapien
gcttttgaagactgtaaaccattcc

SEQ ID NO: 4047990 - DNA, 25 bp, Homo sapien
ctaaaagattctgagggaaatggga

SEQ ID NO: 4047991 - DNA, 25 bp, Homo sapien
agctgtaactcctgcaaattcttct

SEQ ID NO: 4047992 - DNA, 25 bp, Homo sapien
aagctgtaactcctgcaaattcttc

SEQ ID NO: 4047993 - DNA, 25 bp, Homo sapien
tatactgattagtgatttgtcccat

SEQ ID NO: 4047994 - DNA, 25 bp, Homo sapien
tggtcattccagaccaagatttgca

SEQ ID NO: 4047995 - DNA, 25 bp, Homo sapien
tatttccaggagacgaagtttctcg

SEQ ID NO: 4047996 - DNA, 25 bp, Homo sapien
ttctcgtggccgcttaggttggtca

SEQ ID NO: 4047997 - DNA, 25 bp, Homo sapien
tcctgagctggtaccaggaggtttc

SEQ ID NO: 4047998 - DNA, 25 bp, Homo sapien
gaaggatatctgaggactgaatgag

SEQ ID NO: 4047999 - DNA, 25 bp, Homo sapien
gctttcaacatgagaatccgcccag

SEQ ID NO: 4048000 - DNA, 25 bp, Homo sapien
ttaaaatagcagtcgataagcagag

SEQ ID NO: 4048001 - DNA, 25 bp, Homo sapien
catggatgaactgtaagagcccttt

SEQ ID NO: 4048002 - DNA, 25 bp, Homo sapien
ttcatggatgaactgtaagagccct

SEQ ID NO: 4048003 - DNA, 25 bp, Homo sapien
tcatggatgaactgtaagagccctt

SEQ ID NO: 4048004 - DNA, 25 bp, Homo sapien
tcagagttatcgagcccgccaactt

SEQ ID NO: 4048005 - DNA, 25 bp, Homo sapien
caaaaggttggctgaacactgtcca

SEQ ID NO: 4048006 - DNA, 25 bp, Homo sapien
gccaacttttatatccaccaaggta

SEQ ID NO: 4048007 - DNA, 25 bp, Homo sapien
gcatttaagggaatgatatttcccc

SEQ ID NO: 4048008 - DNA, 25 bp, Homo sapien
tctggtgcagatgttgccgtgctga

SEQ ID NO: 4048009 - DNA, 25 bp, Homo sapien
tttttatagtgcattcatgactggg

SEQ ID NO: 4048010 - DNA, 25 bp, Homo sapien
tgcttcagacgtccgtattttccaa

SEQ ID NO: 4048011 - DNA, 25 bp, Homo sapien
gatgttgccgtgctgagagctgctt

SEQ ID NO: 4048012 - DNA, 25 bp, Homo sapien
ttaaggtcctttttgcacatcggca

SEQ ID NO: 4048013 - DNA, 25 bp, Homo sapien
tgcacatcggcatccgccgaaatgc

SEQ ID NO: 4048014 - DNA, 25 bp, Homo sapien
ctttttgcacatcggcatccgccga

SEQ ID NO: 4048015 - DNA, 25 bp, Homo sapien
ggtcctttttgcacatcggcatccg

SEQ ID NO: 4048016 - DNA, 25 bp, Homo sapien
gctcagagattggtctgccctgaag

SEQ ID NO: 4048017 - DNA, 25 bp, Homo sapien
gtggtgctcagagattggtctgccc

SEQ ID NO: 4048018 - DNA, 25 bp, Homo sapien
tggtctgccctgaagtagtcaggga

SEQ ID NO: 4048019 - DNA, 25 bp, Homo sapien
gattggtctgccctgaagtagtcag

SEQ ID NO: 4048020 - DNA, 25 bp, Homo sapien
agctggtacagggagtgtcctctaa

SEQ ID NO: 4048021 - DNA, 25 bp, Homo sapien
gccgacagtcttgtgagcctctgtg

SEQ ID NO: 4048022 - DNA, 25 bp, Homo sapien
cctcattgtttctgtcaggtgtcac

SEQ ID NO: 4048023 - DNA, 25 bp, Homo sapien
gagtgaagttcagcagccgacagtc

SEQ ID NO: 4048024 - DNA, 25 bp, Homo sapien
catagagtgggttaagggacctgag

SEQ ID NO: 4048025 - DNA, 25 bp, Homo sapien
tacatagagtgggttaagggacctg

SEQ ID NO: 4048026 - DNA, 25 bp, Homo sapien
gaaaaaccaggtgtccatccctctc

SEQ ID NO: 4048027 - DNA, 25 bp, Homo sapien
gggttaagggacctgaggcctgcag

SEQ ID NO: 4048028 - DNA, 25 bp, Homo sapien
tggtcctgctacgacaattccctgc

SEQ ID NO: 4048029 - DNA, 25 bp, Homo sapien
ggctgttgtagctctaaaccatgaa

SEQ ID NO: 4048030 - DNA, 25 bp, Homo sapien
cagagccacgtttgctatcactgag

SEQ ID NO: 4048031 - DNA, 25 bp, Homo sapien
cctttgtcatactgaagagttccag

SEQ ID NO: 4048032 - DNA, 25 bp, Homo sapien
tgaaaactgaaaaccactctgcagg

SEQ ID NO: 4048033 - DNA, 25 bp, Homo sapien
cagccaagatgcaaggagaactccc

SEQ ID NO: 4048034 - DNA, 25 bp, Homo sapien
tctagagcagtagagagactggtct

SEQ ID NO: 4048035 - DNA, 25 bp, Homo sapien
tccatatgttgcaaatcgtgtcaag

SEQ ID NO: 4048036 - DNA, 25 bp, Homo sapien
tggcgaccagggacaggcgatggga

SEQ ID NO: 4048037 - DNA, 25 bp, Homo sapien
tgtggcgaccagggacaggcgatgg

SEQ ID NO: 4048038 - DNA, 25 bp, Homo sapien
ctgtggcgaccagggacaggcgatg

SEQ ID NO: 4048039 - DNA, 25 bp, Homo sapien
gtggcgaccagggacaggcgatggg

SEQ ID NO: 4048040 - DNA, 25 bp, Homo sapien
tgacccttggcccacgaatgacaga

SEQ ID NO: 4048041 - DNA, 25 bp, Homo sapien
agaaagaggccatgacctccttgtg

SEQ ID NO: 4048042 - DNA, 25 bp, Homo sapien
gaatgacagattcccccagagcact

SEQ ID NO: 4048043 - DNA, 25 bp, Homo sapien
gccatgacctccttgtgacccttgg

SEQ ID NO: 4048044 - DNA, 25 bp, Homo sapien
tgtcagattccacgcctgtgagctc

SEQ ID NO: 4048045 - DNA, 25 bp, Homo sapien
cttgtcagattccacgcctgtgagc

SEQ ID NO: 4048046 - DNA, 25 bp, Homo sapien
cagattccacgcctgtgagctcagc

SEQ ID NO: 4048047 - DNA, 25 bp, Homo sapien
tcagattccacgcctgtgagctcag

SEQ ID NO: 4048048 - DNA, 25 bp, Homo sapien
ccagccagccagattggtgtatttt

SEQ ID NO: 4048049 - DNA, 25 bp, Homo sapien
atgccccaggacaagccagtctctg

SEQ ID NO: 4048050 - DNA, 25 bp, Homo sapien
tgctgtgacccaacttgatgtgcca

SEQ ID NO: 4048051 - DNA, 25 bp, Homo sapien
aagtgtgggctagtagaaactgagc

SEQ ID NO: 4048052 - DNA, 25 bp, Homo sapien
tggcataatgaagccctgattaccg

SEQ ID NO: 4048053 - DNA, 25 bp, Homo sapien
ccacaaaaccgtgccagggactctt

SEQ ID NO: 4048054 - DNA, 25 bp, Homo sapien
gccagaggcccgcttttaatgaact

SEQ ID NO: 4048055 - DNA, 25 bp, Homo sapien
gactctttagggctgatcctgctgc

SEQ ID NO: 4048056 - DNA, 25 bp, Homo sapien
tgcctcagcttgcaggaaacacgcg

SEQ ID NO: 4048057 - DNA, 25 bp, Homo sapien
gaaaaaggagttctttgcagcctga

SEQ ID NO: 4048058 - DNA, 25 bp, Homo sapien
tgagatggctcctgttccttgaagg

SEQ ID NO: 4048059 - DNA, 25 bp, Homo sapien
actagaccctagacccactgagagg

SEQ ID NO: 4048060 - DNA, 25 bp, Homo sapien
gccaagggcagaggcaaggtcaagc

SEQ ID NO: 4048061 - DNA, 25 bp, Homo sapien
caagggcagaggcaaggtcaagctc

SEQ ID NO: 4048062 - DNA, 25 bp, Homo sapien
agggcagaggcaaggtcaagctcac

SEQ ID NO: 4048063 - DNA, 25 bp, Homo sapien
ctatagatggccaagggcagaggca

SEQ ID NO: 4048064 - DNA, 25 bp, Homo sapien
cctccactctcagagtgagagcccc

SEQ ID NO: 4048065 - DNA, 25 bp, Homo sapien
actctcagagtgagagccccccatc

SEQ ID NO: 4048066 - DNA, 25 bp, Homo sapien
agagccccccatcttgtggggtgag

SEQ ID NO: 4048067 - DNA, 25 bp, Homo sapien
tcagagtgagagccccccatcttgt

SEQ ID NO: 4048068 - DNA, 25 bp, Homo sapien
tagaggggtcaggggcaaatggccc

SEQ ID NO: 4048069 - DNA, 25 bp, Homo sapien
ctagaggggtcaggggcaaatggcc

SEQ ID NO: 4048070 - DNA, 25 bp, Homo sapien
agaggggtcaggggcaaatggcccg

SEQ ID NO: 4048071 - DNA, 25 bp, Homo sapien
tgacccatgactggcccaaggagag

SEQ ID NO: 4048072 - DNA, 25 bp, Homo sapien
ctgactgacccatgactggcccaag

SEQ ID NO: 4048073 - DNA, 25 bp, Homo sapien
gagagcaagtggcaggtaccactca

SEQ ID NO: 4048074 - DNA, 25 bp, Homo sapien
gcaggtaccactcagacctttccat

SEQ ID NO: 4048075 - DNA, 25 bp, Homo sapien
ggcaataggaatatgaggaaatagg

SEQ ID NO: 4048076 - DNA, 25 bp, Homo sapien
tatgaggaaatagggcaccgttgta

SEQ ID NO: 4048077 - DNA, 25 bp, Homo sapien
ttatggggcaataggaatatgagga

SEQ ID NO: 4048078 - DNA, 25 bp, Homo sapien
aaatagggcaccgttgtacttctct

SEQ ID NO: 4048079 - DNA, 25 bp, Homo sapien
caaggtccatcccatgtttgtatcc

SEQ ID NO: 4048080 - DNA, 25 bp, Homo sapien
ctgagacatctggagcacgtcgatg

SEQ ID NO: 4048081 - DNA, 25 bp, Homo sapien
gatgaccaaggtccatcccatgttt

SEQ ID NO: 4048082 - DNA, 25 bp, Homo sapien
gagcacgtcgatgaccaaggtccat

SEQ ID NO: 4048083 - DNA, 25 bp, Homo sapien
ctgcagtgtccttgtcaagactcac

SEQ ID NO: 4048084 - DNA, 25 bp, Homo sapien
cataaagggccgtctctggtaaaag

SEQ ID NO: 4048085 - DNA, 25 bp, Homo sapien
taagtggtccataaagggccgtctc

SEQ ID NO: 4048086 - DNA, 25 bp, Homo sapien
aagggccgtctctggtaaaaggctg

SEQ ID NO: 4048087 - DNA, 25 bp, Homo sapien
gggaagcagctaagtggtccataaa

SEQ ID NO: 4048088 - DNA, 25 bp, Homo sapien
aggtccttgtaggatggcacgagca

SEQ ID NO: 4048089 - DNA, 25 bp, Homo sapien
tccttgtaggatggcacgagcattt

SEQ ID NO: 4048090 - DNA, 25 bp, Homo sapien
tggaggtccttgtaggatggcacga

SEQ ID NO: 4048091 - DNA, 25 bp, Homo sapien
aagtggaggtccttgtaggatggca

SEQ ID NO: 4048092 - DNA, 25 bp, Homo sapien
caaaagcaaatagggtcatgccagg

SEQ ID NO: 4048093 - DNA, 25 bp, Homo sapien
gatgcaagaaagctctggcaaaagc

SEQ ID NO: 4048094 - DNA, 25 bp, Homo sapien
tcaggaagcaaaaggttgtcttgaa

SEQ ID NO: 4048095 - DNA, 25 bp, Homo sapien
tgacaattcgctcaagcaagatggg

SEQ ID NO: 4048096 - DNA, 25 bp, Homo sapien
taggagcagtttcagcaagtccctc

SEQ ID NO: 4048097 - DNA, 25 bp, Homo sapien
aggagcagtttcagcaagtccctca

SEQ ID NO: 4048098 - DNA, 25 bp, Homo sapien
ggagcagtttcagcaagtccctcac

SEQ ID NO: 4048099 - DNA, 25 bp, Homo sapien
aataggagcagtttcagcaagtccc

SEQ ID NO: 4048100 - DNA, 25 bp, Homo sapien
gaagacaagacccatttagctcatt

SEQ ID NO: 4048101 - DNA, 25 bp, Homo sapien
tccacagcaaggtgtcagatctcag

SEQ ID NO: 4048102 - DNA, 25 bp, Homo sapien
tttccagtatggcgggatgctgcat

SEQ ID NO: 4048103 - DNA, 25 bp, Homo sapien
cagtatggcgggatgctgcatgcac

SEQ ID NO: 4048104 - DNA, 25 bp, Homo sapien
actctggaaaggagtcgtgccgctt

SEQ ID NO: 4048105 - DNA, 25 bp, Homo sapien
catgaatgttgcaggccttatacca

SEQ ID NO: 4048106 - DNA, 25 bp, Homo sapien
gggtttgcacctgctggattgataa

SEQ ID NO: 4048107 - DNA, 25 bp, Homo sapien
gacaagagtgtcacaggtattactc

SEQ ID NO: 4048108 - DNA, 25 bp, Homo sapien
gagggtctgctccatgttgtcggta

SEQ ID NO: 4048109 - DNA, 25 bp, Homo sapien
gggtctgctccatgttgtcggtatc

SEQ ID NO: 4048110 - DNA, 25 bp, Homo sapien
tctgctccatgttgtcggtatcttc

SEQ ID NO: 4048111 - DNA, 25 bp, Homo sapien
ggtctgctccatgttgtcggtatct

SEQ ID NO: 4048112 - DNA, 25 bp, Homo sapien
aaccaaatactctatcagatgattt

SEQ ID NO: 4048113 - DNA, 25 bp, Homo sapien
ccaaatactctatcagatgattttg

SEQ ID NO: 4048114 - DNA, 25 bp, Homo sapien
taaaaccaaatactctatcagatga

SEQ ID NO: 4048115 - DNA, 25 bp, Homo sapien
tttattaaaaccaaatactctatca

SEQ ID NO: 4048116 - DNA, 25 bp, Homo sapien
tccacccagtgcgtcaagttaacgg

SEQ ID NO: 4048117 - DNA, 25 bp, Homo sapien
caacctgagggagaataattcagcc

SEQ ID NO: 4048118 - DNA, 25 bp, Homo sapien
gtgatgacatactcctaactctgtg

SEQ ID NO: 4048119 - DNA, 25 bp, Homo sapien
ctattggtaacacataacagggcct

SEQ ID NO: 4048120 - DNA, 25 bp, Homo sapien
gttcaaggtggataagatgccctcc

SEQ ID NO: 4048121 - DNA, 25 bp, Homo sapien
ccatggtaggaatgttcaaggtgga

SEQ ID NO: 4048122 - DNA, 25 bp, Homo sapien
cactgttttccatggtaggaatgtt

SEQ ID NO: 4048123 - DNA, 25 bp, Homo sapien
cttgtgctatgtgcaagccactgtt

SEQ ID NO: 4048124 - DNA, 25 bp, Homo sapien
taaagcctcccttttatcatcttct

SEQ ID NO: 4048125 - DNA, 25 bp, Homo sapien
caactaaagcctcccttttatcatc

SEQ ID NO: 4048126 - DNA, 25 bp, Homo sapien
tttctgcttaccaactaaagcctcc

SEQ ID NO: 4048127 - DNA, 25 bp, Homo sapien
ggtgcctttctgcttaccaactaaa

SEQ ID NO: 4048128 - DNA, 25 bp, Homo sapien
ggcaccgaaaacaagagtatactca

SEQ ID NO: 4048129 - DNA, 25 bp, Homo sapien
caatacaggctaggcaccgaaaaca

SEQ ID NO: 4048130 - DNA, 25 bp, Homo sapien
aaggcagggtagaattcattctaca

SEQ ID NO: 4048131 - DNA, 25 bp, Homo sapien
tctacaattgaagcaaagcacccaa

SEQ ID NO: 4048132 - DNA, 25 bp, Homo sapien
tagagtgaaagtcacagttgtcagc

SEQ ID NO: 4048133 - DNA, 25 bp, Homo sapien
cttattacacttcctgcaaatgctc

SEQ ID NO: 4048134 - DNA, 25 bp, Homo sapien
ttagagtgaaagtcacagttgtcag

SEQ ID NO: 4048135 - DNA, 25 bp, Homo sapien
aataagggacgtgggttctgtctct

SEQ ID NO: 4048136 - DNA, 25 bp, Homo sapien
catgactgatcattttgctccctct

SEQ ID NO: 4048137 - DNA, 25 bp, Homo sapien
tcatgactgatcattttgctccctc

SEQ ID NO: 4048138 - DNA, 25 bp, Homo sapien
gacatgggaggataacttcctgttt

SEQ ID NO: 4048139 - DNA, 25 bp, Homo sapien
cagggacatgggaggataacttcct

SEQ ID NO: 4048140 - DNA, 25 bp, Homo sapien
tgggctttgcagttagcaccagctc

SEQ ID NO: 4048141 - DNA, 25 bp, Homo sapien
gttgagatactgcaatgggctttgc

SEQ ID NO: 4048142 - DNA, 25 bp, Homo sapien
cacttctttcctcctatcagtgatg

SEQ ID NO: 4048143 - DNA, 25 bp, Homo sapien
ctttcctcctatcagtgatgaaatt

SEQ ID NO: 4048144 - DNA, 25 bp, Homo sapien
ttcctcctatcagtgatgaaattat

SEQ ID NO: 4048145 - DNA, 25 bp, Homo sapien
ttctttcctcctatcagtgatgaaa

SEQ ID NO: 4048146 - DNA, 25 bp, Homo sapien
ccccattaggatggatgacgttaac

SEQ ID NO: 4048147 - DNA, 25 bp, Homo sapien
cttacccccattaggatggatgacg

SEQ ID NO: 4048148 - DNA, 25 bp, Homo sapien
tggatgacgttaactaatgaagaat

SEQ ID NO: 4048149 - DNA, 25 bp, Homo sapien
taggatggatgacgttaactaatga

SEQ ID NO: 4048150 - DNA, 25 bp, Homo sapien
actccgctacgctgtattgatctca

SEQ ID NO: 4048151 - DNA, 25 bp, Homo sapien
gataataacacttctattaggatca

SEQ ID NO: 4048152 - DNA, 25 bp, Homo sapien
tattaggatcactccgctacgctgt

SEQ ID NO: 4048153 - DNA, 25 bp, Homo sapien
gaaaataaagcaggcggcatggtga

SEQ ID NO: 4048154 - DNA, 25 bp, Homo sapien
gacttgaatcctgtgcaaaggccaa

SEQ ID NO: 4048155 - DNA, 25 bp, Homo sapien
cgggcagccctgtttgacatgactt

SEQ ID NO: 4048156 - DNA, 25 bp, Homo sapien
gagtcctgctgcatagcaccgctga

SEQ ID NO: 4048157 - DNA, 25 bp, Homo sapien
gcaccgctgatggttgtgacttgaa

SEQ ID NO: 4048158 - DNA, 25 bp, Homo sapien
gctcctttaatcatgaggcatcctt

SEQ ID NO: 4048159 - DNA, 25 bp, Homo sapien
aatcatgaggcatcctttgtctgac

SEQ ID NO: 4048160 - DNA, 25 bp, Homo sapien
cctttaatcatgaggcatcctttgt

SEQ ID NO: 4048161 - DNA, 25 bp, Homo sapien
ctctcagctcctttaatcatgaggc

SEQ ID NO: 4048162 - DNA, 25 bp, Homo sapien
caaccactggacgagcatctctgaa

SEQ ID NO: 4048163 - DNA, 25 bp, Homo sapien
ttccacacaaccactggacgagcat

SEQ ID NO: 4048164 - DNA, 25 bp, Homo sapien
tctcccttccacacaaccactggac

SEQ ID NO: 4048165 - DNA, 25 bp, Homo sapien
acacaaccactggacgagcatctct

SEQ ID NO: 4048166 - DNA, 25 bp, Homo sapien
atcaatgaagtccaactcttcagct

SEQ ID NO: 4048167 - DNA, 25 bp, Homo sapien
caatgaagtccaactcttcagcttg

SEQ ID NO: 4048168 - DNA, 25 bp, Homo sapien
aatgaagtccaactcttcagcttgc

SEQ ID NO: 4048169 - DNA, 25 bp, Homo sapien
atgaagtccaactcttcagcttgct

SEQ ID NO: 4048170 - DNA, 25 bp, Homo sapien
ggctctctcgagcacctcttcatcc

SEQ ID NO: 4048171 - DNA, 25 bp, Homo sapien
cacaagccctgtgcgctctggggag

SEQ ID NO: 4048172 - DNA, 25 bp, Homo sapien
gggagttttaagagaccgataagca

SEQ ID NO: 4048173 - DNA, 25 bp, Homo sapien
tcccactctggcgacatcgcattag

SEQ ID NO: 4048174 - DNA, 25 bp, Homo sapien
aggttgtctgatcatcatgcccatg

SEQ ID NO: 4048175 - DNA, 25 bp, Homo sapien
tgagtgagagacccaaattggtgtt

SEQ ID NO: 4048176 - DNA, 25 bp, Homo sapien
tggtgttgcaggttgtctgatcatc

SEQ ID NO: 4048177 - DNA, 25 bp, Homo sapien
tgcttttccatctaagggagtcagc

SEQ ID NO: 4048178 - DNA, 25 bp, Homo sapien
taaatgataaccttcatctccttct

SEQ ID NO: 4048179 - DNA, 25 bp, Homo sapien
agagaggctctctgttgataaagcc

SEQ ID NO: 4048180 - DNA, 25 bp, Homo sapien
tccacgattagaatttgaaaggttc

SEQ ID NO: 4048181 - DNA, 25 bp, Homo sapien
gataaagccccctaaataaatgata

SEQ ID NO: 4048182 - DNA, 25 bp, Homo sapien
gcatcttatgaatgtcaccaccagg

SEQ ID NO: 4048183 - DNA, 25 bp, Homo sapien
ggtgtggacccattcattagtttga

SEQ ID NO: 4048184 - DNA, 25 bp, Homo sapien
cctcatcttgagtgacagtagctgc

SEQ ID NO: 4048185 - DNA, 25 bp, Homo sapien
cagtagctgcttagacatgttccac

SEQ ID NO: 4048186 - DNA, 25 bp, Homo sapien
tttgcaaaattcatacgtatcactt

SEQ ID NO: 4048187 - DNA, 25 bp, Homo sapien
atacgtatcacttgttttgtatgtc

SEQ ID NO: 4048188 - DNA, 25 bp, Homo sapien
gttttgtatgtctgattgtcagctc

SEQ ID NO: 4048189 - DNA, 25 bp, Homo sapien
tgttttgtatgtctgattgtcagct

SEQ ID NO: 4048190 - DNA, 25 bp, Homo sapien
atgacacaaatacccctctggcttc

SEQ ID NO: 4048191 - DNA, 25 bp, Homo sapien
ttgtccccttgttcgcctatatgtg

SEQ ID NO: 4048192 - DNA, 25 bp, Homo sapien
aacagccaacactgtacgagttagc

SEQ ID NO: 4048193 - DNA, 25 bp, Homo sapien
tacgagttagccacaaagacagggt

SEQ ID NO: 4048194 - DNA, 25 bp, Homo sapien
atagagacagagccagggtcactcc

SEQ ID NO: 4048195 - DNA, 25 bp, Homo sapien
gaaatagagacagagccagggtcac

SEQ ID NO: 4048196 - DNA, 25 bp, Homo sapien
tcactcccagcttcccccggtcctg

SEQ ID NO: 4048197 - DNA, 25 bp, Homo sapien
ttcaacacaagttttagaaatagag

SEQ ID NO: 4048198 - DNA, 25 bp, Homo sapien
atgtggtttccccagacagtttcca

SEQ ID NO: 4048199 - DNA, 25 bp, Homo sapien
tgtggtttccccagacagtttccat

SEQ ID NO: 4048200 - DNA, 25 bp, Homo sapien
catgcccacggcattatcaaagcct

SEQ ID NO: 4048201 - DNA, 25 bp, Homo sapien
agcctaatgggccctcaaagaccac

SEQ ID NO: 4048202 - DNA, 25 bp, Homo sapien
ttcagagagttccaagccacaagtt

SEQ ID NO: 4048203 - DNA, 25 bp, Homo sapien
caagccacaagttgacccagaggtg

SEQ ID NO: 4048204 - DNA, 25 bp, Homo sapien
aacttggagaacttgcaacagagaa

SEQ ID NO: 4048205 - DNA, 25 bp, Homo sapien
aattcttcttctgttgggtcagagt

SEQ ID NO: 4048206 - DNA, 25 bp, Homo sapien
ggagaacttgcaacagagaattctt

SEQ ID NO: 4048207 - DNA, 25 bp, Homo sapien
tgttgggtcagagtccaaagtgagc

SEQ ID NO: 4048208 - DNA, 25 bp, Homo sapien
tcctttggccacgaagtctcaatac

SEQ ID NO: 4048209 - DNA, 25 bp, Homo sapien
tctttgagaatcataaccatgtgaa

SEQ ID NO: 4048210 - DNA, 25 bp, Homo sapien
gtctcaatacatcccagagctttta

SEQ ID NO: 4048211 - DNA, 25 bp, Homo sapien
cccatctttgggattaggtatgtca

SEQ ID NO: 4048212 - DNA, 25 bp, Homo sapien
catgaagtggtttcgaatgttgata

SEQ ID NO: 4048213 - DNA, 25 bp, Homo sapien
gaagtggtttcgaatgttgataatc

SEQ ID NO: 4048214 - DNA, 25 bp, Homo sapien
ggttgattcatgaagtggtttcgaa

SEQ ID NO: 4048215 - DNA, 25 bp, Homo sapien
cagctcctggttgattcatgaagtg

SEQ ID NO: 4048216 - DNA, 25 bp, Homo sapien
gtcttcatggatggctttaaacaac

SEQ ID NO: 4048217 - DNA, 25 bp, Homo sapien
tcacatggtcttcatggatggcttt

SEQ ID NO: 4048218 - DNA, 25 bp, Homo sapien
tggatggctttaaacaacgagattt

SEQ ID NO: 4048219 - DNA, 25 bp, Homo sapien
ttattacacaaataatgcatgttca

SEQ ID NO: 4048220 - DNA, 25 bp, Homo sapien
tcttcctcatatggatgttgactga

SEQ ID NO: 4048221 - DNA, 25 bp, Homo sapien
cttcacatattaatcgtctcatcca

SEQ ID NO: 4048222 - DNA, 25 bp, Homo sapien
cttcctcatatggatgttgactgag

SEQ ID NO: 4048223 - DNA, 25 bp, Homo sapien
catattaatcgtctcatccaataga

SEQ ID NO: 4048224 - DNA, 25 bp, Homo sapien
ttgatttaaagtcaacgctggggac

SEQ ID NO: 4048225 - DNA, 25 bp, Homo sapien
tgttgaaattgtcttatctcatgca

SEQ ID NO: 4048226 - DNA, 25 bp, Homo sapien
gttgaaattgtcttatctcatgcat

SEQ ID NO: 4048227 - DNA, 25 bp, Homo sapien
gactcttcttcgatgagctgttgaa

SEQ ID NO: 4048228 - DNA, 25 bp, Homo sapien
caatgaatcacaagtagaaaagcga

SEQ ID NO: 4048229 - DNA, 25 bp, Homo sapien
tagaaaagcgataaactgcctctct

SEQ ID NO: 4048230 - DNA, 25 bp, Homo sapien
tgcctctctgttgcaagttccacaa

SEQ ID NO: 4048231 - DNA, 25 bp, Homo sapien
aaactgcctctctgttgcaagttcc

SEQ ID NO: 4048232 - DNA, 25 bp, Homo sapien
gcttccagacgtgctgctctgaccc

SEQ ID NO: 4048233 - DNA, 25 bp, Homo sapien
ctctgtctgccacagatgccctctc

SEQ ID NO: 4048234 - DNA, 25 bp, Homo sapien
tgtctgcttccagacgtgctgctct

SEQ ID NO: 4048235 - DNA, 25 bp, Homo sapien
gtctgcttccagacgtgctgctctg

SEQ ID NO: 4048236 - DNA, 25 bp, Homo sapien
tttgtgaatccaaccatcattacag

SEQ ID NO: 4048237 - DNA, 25 bp, Homo sapien
tcctcctccgtgtgaaaagcatgta

SEQ ID NO: 4048238 - DNA, 25 bp, Homo sapien
tgtcacctctatcagcctggctatc

SEQ ID NO: 4048239 - DNA, 25 bp, Homo sapien
caaagtgaagggttcccatcactgt

SEQ ID NO: 4048240 - DNA, 25 bp, Homo sapien
gctacacacccgacaatttgagatt

SEQ ID NO: 4048241 - DNA, 25 bp, Homo sapien
catgttaaaacgctctccccacaga

SEQ ID NO: 4048242 - DNA, 25 bp, Homo sapien
taagccctcacaagcggaagaaaag

SEQ ID NO: 4048243 - DNA, 25 bp, Homo sapien
ttaatcaggcccttaatgcggtgcc

SEQ ID NO: 4048244 - DNA, 25 bp, Homo sapien
atctgtatctcacatcaggctgccc

SEQ ID NO: 4048245 - DNA, 25 bp, Homo sapien
ccaagcaagggtgggattttaggca

SEQ ID NO: 4048246 - DNA, 25 bp, Homo sapien
gggggaccctggagcatagattaca

SEQ ID NO: 4048247 - DNA, 25 bp, Homo sapien
cccgagtctacgtagcgagatctga

SEQ ID NO: 4048248 - DNA, 25 bp, Homo sapien
tattaagttgttcaattgcatggga

SEQ ID NO: 4048249 - DNA, 25 bp, Homo sapien
tgtcttatcaaattttcgcagctta

SEQ ID NO: 4048250 - DNA, 25 bp, Homo sapien
caaattttcgcagcttattaagttg

SEQ ID NO: 4048251 - DNA, 25 bp, Homo sapien
caattgcatgggaaatgattagtgt

SEQ ID NO: 4048252 - DNA, 25 bp, Homo sapien
caacaactgctttcggatcttctgg

SEQ ID NO: 4048253 - DNA, 25 bp, Homo sapien
gggggctcccactttgttatagaga

SEQ ID NO: 4048254 - DNA, 25 bp, Homo sapien
gctcccactttgttatagagacatt

SEQ ID NO: 4048255 - DNA, 25 bp, Homo sapien
ccaacaactgctttcggatcttctg

SEQ ID NO: 4048256 - DNA, 25 bp, Homo sapien
cttgatgccagcagcaagcttcgaa

SEQ ID NO: 4048257 - DNA, 25 bp, Homo sapien
gcttcgaaacatgttcaagatgaca

SEQ ID NO: 4048258 - DNA, 25 bp, Homo sapien
gacatgattgataacaagaaggctt

SEQ ID NO: 4048259 - DNA, 25 bp, Homo sapien
caagatgacatgattgataacaaga

SEQ ID NO: 4048260 - DNA, 25 bp, Homo sapien
gagttccagccctgtacattccagg

SEQ ID NO: 4048261 - DNA, 25 bp, Homo sapien
gcaataatggcttggctctcccgag

SEQ ID NO: 4048262 - DNA, 25 bp, Homo sapien
tatttgtgtgccgaacaccagggct

SEQ ID NO: 4048263 - DNA, 25 bp, Homo sapien
cccgaggtgcagaggacttgcaaac

SEQ ID NO: 4048264 - DNA, 25 bp, Homo sapien
tcagcccaatacagaggcagccgct

SEQ ID NO: 4048265 - DNA, 25 bp, Homo sapien
tctccaagagcaccaaccttcaaag

SEQ ID NO: 4048266 - DNA, 25 bp, Homo sapien
cagcccaatacagaggcagccgctg

SEQ ID NO: 4048267 - DNA, 25 bp, Homo sapien
tccaagagcaccaaccttcaaagga

SEQ ID NO: 4048268 - DNA, 25 bp, Homo sapien
accgggggcaagattgaacggcaat

SEQ ID NO: 4048269 - DNA, 25 bp, Homo sapien
gaacggcaatggatccattctgaag

SEQ ID NO: 4048270 - DNA, 25 bp, Homo sapien
gggcaagattgaacggcaatggatc

SEQ ID NO: 4048271 - DNA, 25 bp, Homo sapien
gattgaacggcaatggatccattct

SEQ ID NO: 4048272 - DNA, 25 bp, Homo sapien
cctttcttggtgataaagctacaac

SEQ ID NO: 4048273 - DNA, 25 bp, Homo sapien
caacagtctggtgtgtttcttggct

SEQ ID NO: 4048274 - DNA, 25 bp, Homo sapien
tcttggtgataaagctacaacagtc

SEQ ID NO: 4048275 - DNA, 25 bp, Homo sapien
agctacaacagtctggtgtgtttct

SEQ ID NO: 4048276 - DNA, 25 bp, Homo sapien
cccccttgtctcttggtgcatcaga

SEQ ID NO: 4048277 - DNA, 25 bp, Homo sapien
tagcaaggtcgtaggagaatattgg

SEQ ID NO: 4048278 - DNA, 25 bp, Homo sapien
ttggctgcccccttgtctcttggtg

SEQ ID NO: 4048279 - DNA, 25 bp, Homo sapien
ctaggcaaagtagcaaggtcgtagg

SEQ ID NO: 4048280 - DNA, 25 bp, Homo sapien
gctgaacagcggagggaacatggca

SEQ ID NO: 4048281 - DNA, 25 bp, Homo sapien
actgcaagaaaatcaatatccacca

SEQ ID NO: 4048282 - DNA, 25 bp, Homo sapien
gaaaatcaatatccaccaactgttc

SEQ ID NO: 4048283 - DNA, 25 bp, Homo sapien
ccttgggctgaacagcggagggaac

SEQ ID NO: 4048284 - DNA, 25 bp, Homo sapien
tgtgcccttcttgagggacatgtgc

SEQ ID NO: 4048285 - DNA, 25 bp, Homo sapien
aagcagcggacttcctccttccagg

SEQ ID NO: 4048286 - DNA, 25 bp, Homo sapien
gcagctgtgcccttcttgagggaca

SEQ ID NO: 4048287 - DNA, 25 bp, Homo sapien
tcttgagggacatgtgcccagagga

SEQ ID NO: 4048288 - DNA, 25 bp, Homo sapien
tgtgcccaagaacctaggctctggg

SEQ ID NO: 4048289 - DNA, 25 bp, Homo sapien
gttgggaaagtgagtcactggagtc

SEQ ID NO: 4048290 - DNA, 25 bp, Homo sapien
tgactgtgcccaagaacctaggctc

SEQ ID NO: 4048291 - DNA, 25 bp, Homo sapien
agcactgactgtgcccaagaaccta

SEQ ID NO: 4048292 - DNA, 25 bp, Homo sapien
acatccatcagggactgccaatcgg

SEQ ID NO: 4048293 - DNA, 25 bp, Homo sapien
cagggactgccaatcggtagaaggc

SEQ ID NO: 4048294 - DNA, 25 bp, Homo sapien
tccatcagggactgccaatcggtag

SEQ ID NO: 4048295 - DNA, 25 bp, Homo sapien
gccaatcggtagaaggcacctgcat

SEQ ID NO: 4048296 - DNA, 25 bp, Homo sapien
cagagcaacacattccaaacatcca

SEQ ID NO: 4048297 - DNA, 25 bp, Homo sapien
tgactaggaggagcccatgtccttt

SEQ ID NO: 4048298 - DNA, 25 bp, Homo sapien
gcatctgactaggaggagcccatgt

SEQ ID NO: 4048299 - DNA, 25 bp, Homo sapien
gggatggtccactgggctctccgat

SEQ ID NO: 4048300 - DNA, 25 bp, Homo sapien
cagccaggaggtcctgtagagactc

SEQ ID NO: 4048301 - DNA, 25 bp, Homo sapien
gccaggaggtcctgtagagactcat

SEQ ID NO: 4048302 - DNA, 25 bp, Homo sapien
ccaggaggtcctgtagagactcatc

SEQ ID NO: 4048303 - DNA, 25 bp, Homo sapien
tgccagccaggaggtcctgtagaga

SEQ ID NO: 4048304 - DNA, 25 bp, Homo sapien
tgtgctaagggcaagctttgcccac

SEQ ID NO: 4048305 - DNA, 25 bp, Homo sapien
aaatcgcaggagcatctgtgatctc

SEQ ID NO: 4048306 - DNA, 25 bp, Homo sapien
gaaaagcttagagtcagcaaatgcc

SEQ ID NO: 4048307 - DNA, 25 bp, Homo sapien
aagacaatattggtgactcagtccc

SEQ ID NO: 4048308 - DNA, 25 bp, Homo sapien
cgcaatgctggagatcgtctggatc

SEQ ID NO: 4048309 - DNA, 25 bp, Homo sapien
caatgcctccgcaatgctggagatc

SEQ ID NO: 4048310 - DNA, 25 bp, Homo sapien
tctgagaataatgctgtcccaatgc

SEQ ID NO: 4048311 - DNA, 25 bp, Homo sapien
ggatctgcggttggaacagcccgtt

SEQ ID NO: 4048312 - DNA, 25 bp, Homo sapien
tccggttgggcaatttacatgcagc

SEQ ID NO: 4048313 - DNA, 25 bp, Homo sapien
aagagacctctctacaggcaactcg

SEQ ID NO: 4048314 - DNA, 25 bp, Homo sapien
tggcagctcagcactaaaatcctgg

SEQ ID NO: 4048315 - DNA, 25 bp, Homo sapien
aatcctggtgcctctgtcataatca

SEQ ID NO: 4048316 - DNA, 25 bp, Homo sapien
gtgcagacaatcacggctggcattt

SEQ ID NO: 4048317 - DNA, 25 bp, Homo sapien
tagtgtgcagacaatcacggctggc

SEQ ID NO: 4048318 - DNA, 25 bp, Homo sapien
tatagtgtgcagacaatcacggctg

SEQ ID NO: 4048319 - DNA, 25 bp, Homo sapien
agtgtgcagacaatcacggctggca

SEQ ID NO: 4048320 - DNA, 25 bp, Homo sapien
tcattaaatctatagaaactgcctc

SEQ ID NO: 4048321 - DNA, 25 bp, Homo sapien
ttttcattaaatctatagaaactgc

SEQ ID NO: 4048322 - DNA, 25 bp, Homo sapien
attcttttcattaaatctatagaaa

SEQ ID NO: 4048323 - DNA, 25 bp, Homo sapien
ttcttttcattaaatctatagaaac

SEQ ID NO: 4048324 - DNA, 25 bp, Homo sapien
ggattcctggcgacatcaccctcgg

SEQ ID NO: 4048325 - DNA, 25 bp, Homo sapien
tgccatgggattcctggcgacatca

SEQ ID NO: 4048326 - DNA, 25 bp, Homo sapien
ccatgggattcctggcgacatcacc

SEQ ID NO: 4048327 - DNA, 25 bp, Homo sapien
caaagctgccatgggattcctggcg

SEQ ID NO: 4048328 - DNA, 25 bp, Homo sapien
taaagcaccaaaggacatctgaggg

SEQ ID NO: 4048329 - DNA, 25 bp, Homo sapien
tatacctgggagatcgatgagtcac

SEQ ID NO: 4048330 - DNA, 25 bp, Homo sapien
gcttcccagggtagatggagtctca

SEQ ID NO: 4048331 - DNA, 25 bp, Homo sapien
aatggcagaagagccgcgtcagtcc

SEQ ID NO: 4048332 - DNA, 25 bp, Homo sapien
gccagcaagcttgaaagccccagtg

SEQ ID NO: 4048333 - DNA, 25 bp, Homo sapien
gcccattggctgtgctaaaagaatc

SEQ ID NO: 4048334 - DNA, 25 bp, Homo sapien
tgacatccaaaattgccagcaagct

SEQ ID NO: 4048335 - DNA, 25 bp, Homo sapien
ggcttgccgcttgggaaagagaaca

SEQ ID NO: 4048336 - DNA, 25 bp, Homo sapien
agcactcggggaagatgcttggcct

SEQ ID NO: 4048337 - DNA, 25 bp, Homo sapien
cactcggggaagatgcttggcctca

SEQ ID NO: 4048338 - DNA, 25 bp, Homo sapien
tagggagcactcggggaagatgctt

SEQ ID NO: 4048339 - DNA, 25 bp, Homo sapien
ggagcactcggggaagatgcttggc

SEQ ID NO: 4048340 - DNA, 25 bp, Homo sapien
aattgatcaccccatatctggtctg

SEQ ID NO: 4048341 - DNA, 25 bp, Homo sapien
tcaccccatatctggtctgctggac

SEQ ID NO: 4048342 - DNA, 25 bp, Homo sapien
cttttaccttcaaacaattgatcac

SEQ ID NO: 4048343 - DNA, 25 bp, Homo sapien
tttaccttcaaacaattgatcaccc

SEQ ID NO: 4048344 - DNA, 25 bp, Homo sapien
caaggcaaagcatcgtactctctgg

SEQ ID NO: 4048345 - DNA, 25 bp, Homo sapien
tgtgctctcaataaagtaccaaggc

SEQ ID NO: 4048346 - DNA, 25 bp, Homo sapien
aaatagcagtgtctcgggaagccgg

SEQ ID NO: 4048347 - DNA, 25 bp, Homo sapien
cacccacgggcatttatcaggcaca

SEQ ID NO: 4048348 - DNA, 25 bp, Homo sapien
aactcgggatgctcagattctgatg

SEQ ID NO: 4048349 - DNA, 25 bp, Homo sapien
tcagaaggccttggtccatgctggg

SEQ ID NO: 4048350 - DNA, 25 bp, Homo sapien
tgctgctaagcaactcgggatgctc

SEQ ID NO: 4048351 - DNA, 25 bp, Homo sapien
taagcaactcgggatgctcagattc

SEQ ID NO: 4048352 - DNA, 25 bp, Homo sapien
ctaacggcttgtcctggtagaagtg

SEQ ID NO: 4048353 - DNA, 25 bp, Homo sapien
caagatggctgtttgaggaaggttc

SEQ ID NO: 4048354 - DNA, 25 bp, Homo sapien
gatattcgtggacacatctgggccc

SEQ ID NO: 4048355 - DNA, 25 bp, Homo sapien
ggtagaagtgcactttgagtgatat

SEQ ID NO: 4048356 - DNA, 25 bp, Homo sapien
tgaaacaaccccggcctattgttga

SEQ ID NO: 4048357 - DNA, 25 bp, Homo sapien
caaccccggcctattgttgactctc

SEQ ID NO: 4048358 - DNA, 25 bp, Homo sapien
acaaccccggcctattgttgactct

SEQ ID NO: 4048359 - DNA, 25 bp, Homo sapien
aagatgaaacaaccccggcctattg

SEQ ID NO: 4048360 - DNA, 25 bp, Homo sapien
aggaaggcatgcacgagccatgagc

SEQ ID NO: 4048361 - DNA, 25 bp, Homo sapien
ggaggaggaaggcatgcacgagcca

SEQ ID NO: 4048362 - DNA, 25 bp, Homo sapien
gaaggcatgcacgagccatgagcac

SEQ ID NO: 4048363 - DNA, 25 bp, Homo sapien
aggcatgcacgagccatgagcacag

SEQ ID NO: 4048364 - DNA, 25 bp, Homo sapien
tgtggagatgtacttgagtccaaag

SEQ ID NO: 4048365 - DNA, 25 bp, Homo sapien
ggtttccttctgcagtaggaggata

SEQ ID NO: 4048366 - DNA, 25 bp, Homo sapien
gaggataaaggtccttgccctgccc

SEQ ID NO: 4048367 - DNA, 25 bp, Homo sapien
tgccaccacgggcaaggatgcccca

SEQ ID NO: 4048368 - DNA, 25 bp, Homo sapien
ctatgtaggaagcttgtaccaattg

SEQ ID NO: 4048369 - DNA, 25 bp, Homo sapien
tgtaggaagcttgtaccaattgctg

SEQ ID NO: 4048370 - DNA, 25 bp, Homo sapien
tatgtaggaagcttgtaccaattgc

SEQ ID NO: 4048371 - DNA, 25 bp, Homo sapien
gtaggaagcttgtaccaattgctgc

SEQ ID NO: 4048372 - DNA, 25 bp, Homo sapien
acgctcggcaggagaccgggtgctc

SEQ ID NO: 4048373 - DNA, 25 bp, Homo sapien
gcggcaggcggtgccactttgcaga

SEQ ID NO: 4048374 - DNA, 25 bp, Homo sapien
aaacctgaaggcctcgagctgagga

SEQ ID NO: 4048375 - DNA, 25 bp, Homo sapien
gcagaagcgcaaactgaggccagag

SEQ ID NO: 4048376 - DNA, 25 bp, Homo sapien
tgtgtcaacactcagatggactcgc

SEQ ID NO: 4048377 - DNA, 25 bp, Homo sapien
ctgagccgctgaatgtgtcaacact

SEQ ID NO: 4048378 - DNA, 25 bp, Homo sapien
agatggactcgctctttctttgtaa

SEQ ID NO: 4048379 - DNA, 25 bp, Homo sapien
tgagccgctgaatgtgtcaacactc

SEQ ID NO: 4048380 - DNA, 25 bp, Homo sapien
catggcctccagcactagacactgt

SEQ ID NO: 4048381 - DNA, 25 bp, Homo sapien
cttgagaggtatctggagcctttga

SEQ ID NO: 4048382 - DNA, 25 bp, Homo sapien
tgagaggtatctggagcctttgatt

SEQ ID NO: 4048383 - DNA, 25 bp, Homo sapien
gagaggtatctggagcctttgattt

SEQ ID NO: 4048384 - DNA, 25 bp, Homo sapien
cccgtgcagatggtgattgtgatcg

SEQ ID NO: 4048385 - DNA, 25 bp, Homo sapien
tggtgattgtgatcgtgactatgac

SEQ ID NO: 4048386 - DNA, 25 bp, Homo sapien
cagatggtgattgtgatcgtgacta

SEQ ID NO: 4048387 - DNA, 25 bp, Homo sapien
tgtgatcgtgactatgactgtgttc

SEQ ID NO: 4048388 - DNA, 25 bp, Homo sapien
ggtggtccctgaccctctgggctgc

SEQ ID NO: 4048389 - DNA, 25 bp, Homo sapien
tccctgaccctctgggctgcagttt

SEQ ID NO: 4048390 - DNA, 25 bp, Homo sapien
tggtccctgaccctctgggctgcag

SEQ ID NO: 4048391 - DNA, 25 bp, Homo sapien
agggtggtccctgaccctctgggct

SEQ ID NO: 4048392 - DNA, 25 bp, Homo sapien
cttccacttcctcacggtcatcatc

SEQ ID NO: 4048393 - DNA, 25 bp, Homo sapien
tcctcacggtcatcatcccctccat

SEQ ID NO: 4048394 - DNA, 25 bp, Homo sapien
acttcctcacggtcatcatcccctc

SEQ ID NO: 4048395 - DNA, 25 bp, Homo sapien
tccacttcctcacggtcatcatccc

SEQ ID NO: 4048396 - DNA, 25 bp, Homo sapien
aggcagaataaggctccaaggtgtg

SEQ ID NO: 4048397 - DNA, 25 bp, Homo sapien
gcagaataaggctccaaggtgtggc

SEQ ID NO: 4048398 - DNA, 25 bp, Homo sapien
ggcagaataaggctccaaggtgtgg

SEQ ID NO: 4048399 - DNA, 25 bp, Homo sapien
tgtcccaccccagagggctgtgctg

SEQ ID NO: 4048400 - DNA, 25 bp, Homo sapien
accccagagggctgtgctgcttcca

SEQ ID NO: 4048401 - DNA, 25 bp, Homo sapien
ctgctttcggctggggtgtcccacc

SEQ ID NO: 4048402 - DNA, 25 bp, Homo sapien
tgctttcggctggggtgtcccaccc

SEQ ID NO: 4048403 - DNA, 25 bp, Homo sapien
cattcctttgtttatggaccacagg

SEQ ID NO: 4048404 - DNA, 25 bp, Homo sapien
gaccacaggaacagtcgttttcagg

SEQ ID NO: 4048405 - DNA, 25 bp, Homo sapien
cctttgtttatggaccacaggaaca

SEQ ID NO: 4048406 - DNA, 25 bp, Homo sapien
gaacagtcgttttcagggcagagtc

SEQ ID NO: 4048407 - DNA, 25 bp, Homo sapien
tccatcctcaggtggtgggaagcct

SEQ ID NO: 4048408 - DNA, 25 bp, Homo sapien
tggtgggaagcctgggactctcctc

SEQ ID NO: 4048409 - DNA, 25 bp, Homo sapien
agggccagaagccctggtccatcct

SEQ ID NO: 4048410 - DNA, 25 bp, Homo sapien
tggaaggctcttttgccacaggcca

SEQ ID NO: 4048411 - DNA, 25 bp, Homo sapien
tctggaaactgctgagaacgaccga

SEQ ID NO: 4048412 - DNA, 25 bp, Homo sapien
ccaaatctacctggcaacagcttga

SEQ ID NO: 4048413 - DNA, 25 bp, Homo sapien
gggaatttctgaacatggaaatcac

SEQ ID NO: 4048414 - DNA, 25 bp, Homo sapien
atcctcagaccctctgaatgtctgg

SEQ ID NO: 4048415 - DNA, 25 bp, Homo sapien
tggccctcagggttaagacagttgg

SEQ ID NO: 4048416 - DNA, 25 bp, Homo sapien
tcagggttaagacagttggattttc

SEQ ID NO: 4048417 - DNA, 25 bp, Homo sapien
tgtaagatctggagtgaagggctgg

SEQ ID NO: 4048418 - DNA, 25 bp, Homo sapien
taagatctggagtgaagggctggcc

SEQ ID NO: 4048419 - DNA, 25 bp, Homo sapien
ggtaccacctccagtccagtgatgg

SEQ ID NO: 4048420 - DNA, 25 bp, Homo sapien
tctgtgtaggtccactcttgtctga

SEQ ID NO: 4048421 - DNA, 25 bp, Homo sapien
tatcttgctatcctgaatccctctg

SEQ ID NO: 4048422 - DNA, 25 bp, Homo sapien
taaaacaagtcccagctatggtgtg

SEQ ID NO: 4048423 - DNA, 25 bp, Homo sapien
caatgccaccatgcagagacagtta

SEQ ID NO: 4048424 - DNA, 25 bp, Homo sapien
caaactgtaatggactcctgcatgt

SEQ ID NO: 4048425 - DNA, 25 bp, Homo sapien
gaagaaaatactcctcccaccaatg

SEQ ID NO: 4048426 - DNA, 25 bp, Homo sapien
tcctgcatgtttggccagatcagtc

SEQ ID NO: 4048427 - DNA, 25 bp, Homo sapien
tcacattgcgttcagggattccctg

SEQ ID NO: 4048428 - DNA, 25 bp, Homo sapien
tgtggatgtgtgcaggtgacatgga

SEQ ID NO: 4048429 - DNA, 25 bp, Homo sapien
cttgagttcccaagagtcaccagga

SEQ ID NO: 4048430 - DNA, 25 bp, Homo sapien
tccctgttcctctgagtgttgtgga

SEQ ID NO: 4048431 - DNA, 25 bp, Homo sapien
ctagacatccacttgttcatcaggt

SEQ ID NO: 4048432 - DNA, 25 bp, Homo sapien
catccacttgttcatcaggttcata

SEQ ID NO: 4048433 - DNA, 25 bp, Homo sapien
gacatccacttgttcatcaggttca

SEQ ID NO: 4048434 - DNA, 25 bp, Homo sapien
tagacatccacttgttcatcaggtt

SEQ ID NO: 4048435 - DNA, 25 bp, Homo sapien
tgcaagaggtcatctgccaagcctg

SEQ ID NO: 4048436 - DNA, 25 bp, Homo sapien
cttagtccagaaaggaatgggacca

SEQ ID NO: 4048437 - DNA, 25 bp, Homo sapien
catcctgagtccacataaggtgctc

SEQ ID NO: 4048438 - DNA, 25 bp, Homo sapien
aaggtggcccacctgcatttgccaa

SEQ ID NO: 4048439 - DNA, 25 bp, Homo sapien
cacattctcacatcggagggtcagg

SEQ ID NO: 4048440 - DNA, 25 bp, Homo sapien
aggctgacatgttcttacgctaaag

SEQ ID NO: 4048441 - DNA, 25 bp, Homo sapien
gaggttttcacaggaccagggctaa

SEQ ID NO: 4048442 - DNA, 25 bp, Homo sapien
gggtatacatgctctatgcaagaca

SEQ ID NO: 4048443 - DNA, 25 bp, Homo sapien
ggactctcaaggatccagctgttag

SEQ ID NO: 4048444 - DNA, 25 bp, Homo sapien
cttttccggtgagaggactaagtca

SEQ ID NO: 4048445 - DNA, 25 bp, Homo sapien
gagcttctttccgtaggactctcaa

SEQ ID NO: 4048446 - DNA, 25 bp, Homo sapien
gaagccggcagaatcgttactcata

SEQ ID NO: 4048447 - DNA, 25 bp, Homo sapien
cgtgctggtggcgagtgccgtcata

SEQ ID NO: 4048448 - DNA, 25 bp, Homo sapien
cgagtgccgtcataggtgtggtcat

SEQ ID NO: 4048449 - DNA, 25 bp, Homo sapien
cataggtgtggtcatcatcctctcc

SEQ ID NO: 4048450 - DNA, 25 bp, Homo sapien
tgccgtcataggtgtggtcatcatc

SEQ ID NO: 4048451 - DNA, 25 bp, Homo sapien
aaatgaaaatacacctccggctagc

SEQ ID NO: 4048452 - DNA, 25 bp, Homo sapien
tgatggcttgtaccaccaggaaaga

SEQ ID NO: 4048453 - DNA, 25 bp, Homo sapien
tggcttgtagcaccctgatggcttg

SEQ ID NO: 4048454 - DNA, 25 bp, Homo sapien
tggatagtcagtgccttacaggagt

SEQ ID NO: 4048455 - DNA, 25 bp, Homo sapien
aatatagtcttagaccccaagtgcc

SEQ ID NO: 4048456 - DNA, 25 bp, Homo sapien
aatagtccattaatatagtcttaga

SEQ ID NO: 4048457 - DNA, 25 bp, Homo sapien
tgccttgaaagtggggtgcaatcca

SEQ ID NO: 4048458 - DNA, 25 bp, Homo sapien
gcaatccaaaattcgaatagtccat

SEQ ID NO: 4048459 - DNA, 25 bp, Homo sapien
tgatggtgtccagccatgtgctgcc

SEQ ID NO: 4048460 - DNA, 25 bp, Homo sapien
acattcctaaggagatgccgcctgt

SEQ ID NO: 4048461 - DNA, 25 bp, Homo sapien
tgctcaaagtgaacaagtcaggccc

SEQ ID NO: 4048462 - DNA, 25 bp, Homo sapien
cacaaagacttaggatcccacaggc

SEQ ID NO: 4048463 - DNA, 25 bp, Homo sapien
tgttcccaggagtaccagatggagt

SEQ ID NO: 4048464 - DNA, 25 bp, Homo sapien
tagaacgcacctcaaagtgacgccc

SEQ ID NO: 4048465 - DNA, 25 bp, Homo sapien
gacatttttggaggctgccctttgg

SEQ ID NO: 4048466 - DNA, 25 bp, Homo sapien
gagagacgggttgtttgtaccctga

SEQ ID NO: 4048467 - DNA, 25 bp, Homo sapien
cgtgctggcgatgacgccatcgtga

SEQ ID NO: 4048468 - DNA, 25 bp, Homo sapien
tcgtgatagtccacaagagccatca

SEQ ID NO: 4048469 - DNA, 25 bp, Homo sapien
ccatcattgggtccccgtgtatggg

SEQ ID NO: 4048470 - DNA, 25 bp, Homo sapien
ccgtgtatgggtgtggtgaggtccc

SEQ ID NO: 4048471 - DNA, 25 bp, Homo sapien
aaggagggttgatacagagtaaggc

SEQ ID NO: 4048472 - DNA, 25 bp, Homo sapien
gccacacacaagcaacaggcatcgc

SEQ ID NO: 4048473 - DNA, 25 bp, Homo sapien
aagcaacaggcatcgcccagaagag

SEQ ID NO: 4048474 - DNA, 25 bp, Homo sapien
tgttcacagccaccacgaggaacat

SEQ ID NO: 4048475 - DNA, 25 bp, Homo sapien
ctcagacagctttggtgcacacaca

SEQ ID NO: 4048476 - DNA, 25 bp, Homo sapien
caagttcctagagatacccctggca

SEQ ID NO: 4048477 - DNA, 25 bp, Homo sapien
ggtttcgtggacatttgctcagaca

SEQ ID NO: 4048478 - DNA, 25 bp, Homo sapien
tcacttagagcttgtgcacgtacac

SEQ ID NO: 4048479 - DNA, 25 bp, Homo sapien
tctccaagaaatccaaggttgcagg

SEQ ID NO: 4048480 - DNA, 25 bp, Homo sapien
cggtggagagacagtaagcttcatc

SEQ ID NO: 4048481 - DNA, 25 bp, Homo sapien
tcatcgtctgaggaagtgaatcttc

SEQ ID NO: 4048482 - DNA, 25 bp, Homo sapien
gatcaggccgggtatctctgggctt

SEQ ID NO: 4048483 - DNA, 25 bp, Homo sapien
ccatctgaactgtgtggtggagtag

SEQ ID NO: 4048484 - DNA, 25 bp, Homo sapien
accatctgaactgtgtggtggagta

SEQ ID NO: 4048485 - DNA, 25 bp, Homo sapien
ggatccaccatattaaaccatcaaa

SEQ ID NO: 4048486 - DNA, 25 bp, Homo sapien
cattcaccgttatttccaaggatcc

SEQ ID NO: 4048487 - DNA, 25 bp, Homo sapien
ccataatttccaccattcagcgata

SEQ ID NO: 4048488 - DNA, 25 bp, Homo sapien
cccatgaagggcgttattctaacta

SEQ ID NO: 4048489 - DNA, 25 bp, Homo sapien
tctggcaaggataccacaccaaaaa

SEQ ID NO: 4048490 - DNA, 25 bp, Homo sapien
tctcctccagtctgtaatagttctt

SEQ ID NO: 4048491 - DNA, 25 bp, Homo sapien
agtcaagtatgcatttctggcaagg

SEQ ID NO: 4048492 - DNA, 25 bp, Homo sapien
ccttgtctaacacgatcttgatgct

SEQ ID NO: 4048493 - DNA, 25 bp, Homo sapien
catgtgaacacttgagggagctccc

SEQ ID NO: 4048494 - DNA, 25 bp, Homo sapien
tgactgacatttgcaagagcttgcc

SEQ ID NO: 4048495 - DNA, 25 bp, Homo sapien
ccgtcactcgggtctaatggtgcat

SEQ ID NO: 4048496 - DNA, 25 bp, Homo sapien
tctgactgatatattccccaggcgg

SEQ ID NO: 4048497 - DNA, 25 bp, Homo sapien
gcagctctgcggtgtactgacttca

SEQ ID NO: 4048498 - DNA, 25 bp, Homo sapien
aaaagtcagcgagaggtagagcagc

SEQ ID NO: 4048499 - DNA, 25 bp, Homo sapien
tgtgcaacaaaaaagtcagcgagag

SEQ ID NO: 4048500 - DNA, 25 bp, Homo sapien
gtactgacttcatgtccccatggaa

SEQ ID NO: 4048501 - DNA, 25 bp, Homo sapien
cccagtgctctaaggacaaggccct

SEQ ID NO: 4048502 - DNA, 25 bp, Homo sapien
ctctaaggacaaggccctgttgtgc

SEQ ID NO: 4048503 - DNA, 25 bp, Homo sapien
tgctctaaggacaaggccctgttgt

SEQ ID NO: 4048504 - DNA, 25 bp, Homo sapien
ctctggctctacagggatgccagcc

SEQ ID NO: 4048505 - DNA, 25 bp, Homo sapien
gacagcaggctctcttagacccata

SEQ ID NO: 4048506 - DNA, 25 bp, Homo sapien
aaaatcatgggtacgtggtctcagg

SEQ ID NO: 4048507 - DNA, 25 bp, Homo sapien
tgccaatggcacaagaactggtcca

SEQ ID NO: 4048508 - DNA, 25 bp, Homo sapien
tacactccacgttaggaaacacgga

SEQ ID NO: 4048509 - DNA, 25 bp, Homo sapien
tctatggctcgaggcatttccctgg

SEQ ID NO: 4048510 - DNA, 25 bp, Homo sapien
tcagtaattccaagagcaaagctcc

SEQ ID NO: 4048511 - DNA, 25 bp, Homo sapien
cagacagtacgggagccttggaagc

SEQ ID NO: 4048512 - DNA, 25 bp, Homo sapien
cagagcctttatttgcaaatcccaa

SEQ ID NO: 4048513 - DNA, 25 bp, Homo sapien
ttccctgacatggagttggcagcag

SEQ ID NO: 4048514 - DNA, 25 bp, Homo sapien
caggcaccaaaagcgacttccctga

SEQ ID NO: 4048515 - DNA, 25 bp, Homo sapien
caaaagcgacttccctgacatggag

SEQ ID NO: 4048516 - DNA, 25 bp, Homo sapien
agcgacttccctgacatggagttgg

SEQ ID NO: 4048517 - DNA, 25 bp, Homo sapien
taggaaaatcaagctggccagacac

SEQ ID NO: 4048518 - DNA, 25 bp, Homo sapien
gattggtacacagctccagcgtggt

SEQ ID NO: 4048519 - DNA, 25 bp, Homo sapien
tgtcatttacccacgagggccagag

SEQ ID NO: 4048520 - DNA, 25 bp, Homo sapien
cactagcaaaggagatgagaccatt

SEQ ID NO: 4048521 - DNA, 25 bp, Homo sapien
tgcttccgattctctggagttaata

SEQ ID NO: 4048522 - DNA, 25 bp, Homo sapien
tatgggcaatgcttccgattctctg

SEQ ID NO: 4048523 - DNA, 25 bp, Homo sapien
tctctggagttaatattcgatcccg

SEQ ID NO: 4048524 - DNA, 25 bp, Homo sapien
atattcgatcccgattttgttcaaa

SEQ ID NO: 4048525 - DNA, 25 bp, Homo sapien
gatggtgaattgcttccaggtattc

SEQ ID NO: 4048526 - DNA, 25 bp, Homo sapien
aaggctgcctttgatgagccactcc

SEQ ID NO: 4048527 - DNA, 25 bp, Homo sapien
gaaaaggctgcctttgatgagccac

SEQ ID NO: 4048528 - DNA, 25 bp, Homo sapien
gagccactcctcatggagatggtga

SEQ ID NO: 4048529 - DNA, 25 bp, Homo sapien
ctgccagggaaacacaagcagtctg

SEQ ID NO: 4048530 - DNA, 25 bp, Homo sapien
ggaaacacaagcagtctgtcgggag

SEQ ID NO: 4048531 - DNA, 25 bp, Homo sapien
cagggaaacacaagcagtctgtcgg

SEQ ID NO: 4048532 - DNA, 25 bp, Homo sapien
acaagcagtctgtcgggagtggaca

SEQ ID NO: 4048533 - DNA, 25 bp, Homo sapien
taacaagtctcaggattggtccgaa

SEQ ID NO: 4048534 - DNA, 25 bp, Homo sapien
caagtctcaggattggtccgaaggt

SEQ ID NO: 4048535 - DNA, 25 bp, Homo sapien
gtctcaggattggtccgaaggtaaa

SEQ ID NO: 4048536 - DNA, 25 bp, Homo sapien
aacaagtctcaggattggtccgaag

SEQ ID NO: 4048537 - DNA, 25 bp, Homo sapien
ttcctcaagatccagtcaaaccatt

SEQ ID NO: 4048538 - DNA, 25 bp, Homo sapien
cagaactacatagtccacttctggc

SEQ ID NO: 4048539 - DNA, 25 bp, Homo sapien
gatccagtcaaaccattccgacaga

SEQ ID NO: 4048540 - DNA, 25 bp, Homo sapien
tatcaaatcaacagacacgtccatg

SEQ ID NO: 4048541 - DNA, 25 bp, Homo sapien
catgcagtgacaaggaccctaagca

SEQ ID NO: 4048542 - DNA, 25 bp, Homo sapien
cccaaaaggatcttgagacggctct

SEQ ID NO: 4048543 - DNA, 25 bp, Homo sapien
gcacaatgctgcaagggccatggca

SEQ ID NO: 4048544 - DNA, 25 bp, Homo sapien
tgaaaggagtcaccaagggtaccag

SEQ ID NO: 4048545 - DNA, 25 bp, Homo sapien
tgagagaaatctagatgcctcctgc

SEQ ID NO: 4048546 - DNA, 25 bp, Homo sapien
tttggccttgatgagagaaatctag

SEQ ID NO: 4048547 - DNA, 25 bp, Homo sapien
gatgagagaaatctagatgcctcct

SEQ ID NO: 4048548 - DNA, 25 bp, Homo sapien
agagaaatctagatgcctcctgcca

SEQ ID NO: 4048549 - DNA, 25 bp, Homo sapien
gggcctccagcgttgacatccgaac

SEQ ID NO: 4048550 - DNA, 25 bp, Homo sapien
ctatctagacagcgtggtcggggag

SEQ ID NO: 4048551 - DNA, 25 bp, Homo sapien
tatctagacagcgtggtcggggagg

SEQ ID NO: 4048552 - DNA, 25 bp, Homo sapien
ctccagcgttgacatccgaacagct

SEQ ID NO: 4048553 - DNA, 25 bp, Homo sapien
caaaaatgtatcttgcgctgtgaat

SEQ ID NO: 4048554 - DNA, 25 bp, Homo sapien
tatcttgcgctgtgaatcgacctct

SEQ ID NO: 4048555 - DNA, 25 bp, Homo sapien
tgaatcgacctctccatcaaccgta

SEQ ID NO: 4048556 - DNA, 25 bp, Homo sapien
tctccatcaaccgtacagatgacac

SEQ ID NO: 4048557 - DNA, 25 bp, Homo sapien
taagtctgtagcgtaagaccccagc

SEQ ID NO: 4048558 - DNA, 25 bp, Homo sapien
ctgaggacgagtatgcctgtccagc

SEQ ID NO: 4048559 - DNA, 25 bp, Homo sapien
gagaggcatcgtggtacatcaggcc

SEQ ID NO: 4048560 - DNA, 25 bp, Homo sapien
catggtgagctgcacataagtctgt

SEQ ID NO: 4048561 - DNA, 25 bp, Homo sapien
cacttggacacaggctccgttaaca

SEQ ID NO: 4048562 - DNA, 25 bp, Homo sapien
ggattgtggccacggacatttctcc

SEQ ID NO: 4048563 - DNA, 25 bp, Homo sapien
ggccacggacatttctccacttgga

SEQ ID NO: 4048564 - DNA, 25 bp, Homo sapien
cagaggattgtggccacggacattt

SEQ ID NO: 4048565 - DNA, 25 bp, Homo sapien
acttgcaatattgccctcgacacag

SEQ ID NO: 4048566 - DNA, 25 bp, Homo sapien
gaattccaggcatgtcgtcttccca

SEQ ID NO: 4048567 - DNA, 25 bp, Homo sapien
gtctgtcgcgttggagaagaattcc

SEQ ID NO: 4048568 - DNA, 25 bp, Homo sapien
ctcgacgtctgtcgcgttggagaag

SEQ ID NO: 4048569 - DNA, 25 bp, Homo sapien
tggctatacgctaggaccacctggg

SEQ ID NO: 4048570 - DNA, 25 bp, Homo sapien
aaaatctctacagggatgccacagc

SEQ ID NO: 4048571 - DNA, 25 bp, Homo sapien
aagtgtcctgcctccttaacgagag

SEQ ID NO: 4048572 - DNA, 25 bp, Homo sapien
gaaggtattccaggcagcggttctc

SEQ ID NO: 4048573 - DNA, 25 bp, Homo sapien
catttgggatcatacttcatatact

SEQ ID NO: 4048574 - DNA, 25 bp, Homo sapien
tctgtgccatctctagtttagttaa

SEQ ID NO: 4048575 - DNA, 25 bp, Homo sapien
cctgagaggcaacccggatcgtgct

SEQ ID NO: 4048576 - DNA, 25 bp, Homo sapien
gacacctttaacactctggacatct

SEQ ID NO: 4048577 - DNA, 25 bp, Homo sapien
cagttaggccctccactcatggttc

SEQ ID NO: 4048578 - DNA, 25 bp, Homo sapien
tggtaacagaggtggccttctagga

SEQ ID NO: 4048579 - DNA, 25 bp, Homo sapien
tccccacaacacaatgagcgttttt

SEQ ID NO: 4048580 - DNA, 25 bp, Homo sapien
gcccaaatctacctgaaggatacaa

SEQ ID NO: 4048581 - DNA, 25 bp, Homo sapien
tgtgctcctatctgtgcagactctg

SEQ ID NO: 4048582 - DNA, 25 bp, Homo sapien
cactgattttttctctttttcctgt

SEQ ID NO: 4048583 - DNA, 25 bp, Homo sapien
tttaaataactctcctctgccctaa

SEQ ID NO: 4048584 - DNA, 25 bp, Homo sapien
tgccctaatttgctacatgaccaca

SEQ ID NO: 4048585 - DNA, 25 bp, Homo sapien
tttgctacatgaccacaaaaacact

SEQ ID NO: 4048586 - DNA, 25 bp, Homo sapien
taactctcctctgccctaatttgct

SEQ ID NO: 4048587 - DNA, 25 bp, Homo sapien
cattttccattttgggcgccctccg

SEQ ID NO: 4048588 - DNA, 25 bp, Homo sapien
cctccgagattggaggcgcgcacca

SEQ ID NO: 4048589 - DNA, 25 bp, Homo sapien
ccccagtgtgctcgagttctttcac

SEQ ID NO: 4048590 - DNA, 25 bp, Homo sapien
gtctcgccgatgtgccaccctgggc

SEQ ID NO: 4048591 - DNA, 25 bp, Homo sapien
gcgtctctcaacagccatatggcgg

SEQ ID NO: 4048592 - DNA, 25 bp, Homo sapien
ggaatgttcagagcgtgtccgtcct

SEQ ID NO: 4048593 - DNA, 25 bp, Homo sapien
cagaatcggcttaaggcagctccca

SEQ ID NO: 4048594 - DNA, 25 bp, Homo sapien
cccaaggtcgaaagaatcgggacag

SEQ ID NO: 4048595 - DNA, 25 bp, Homo sapien
cctgaggccgggctcccgcgacttc

SEQ ID NO: 4048596 - DNA, 25 bp, Homo sapien
ctgaggccgggctcccgcgacttcc

SEQ ID NO: 4048597 - DNA, 25 bp, Homo sapien
ggcctgaggccgggctcccgcgact

SEQ ID NO: 4048598 - DNA, 25 bp, Homo sapien
tgaggccgggctcccgcgacttccc

SEQ ID NO: 4048599 - DNA, 25 bp, Homo sapien
tggcccttaaagagacccggtcgca

SEQ ID NO: 4048600 - DNA, 25 bp, Homo sapien
ccttcttgtgcgagtcggcgcggac

SEQ ID NO: 4048601 - DNA, 25 bp, Homo sapien
tagtccagccgttgggcgccgcctg

SEQ ID NO: 4048602 - DNA, 25 bp, Homo sapien
gccgggcgagcggatccagaggccc

SEQ ID NO: 4048603 - DNA, 25 bp, Homo sapien
agaggttcgccgctggcagccagaa

SEQ ID NO: 4048604 - DNA, 25 bp, Homo sapien
gagaaatactcgaagggagaggttc

SEQ ID NO: 4048605 - DNA, 25 bp, Homo sapien
aagggagaggttcgccgctggcagc

SEQ ID NO: 4048606 - DNA, 25 bp, Homo sapien
cagcaagaggagaaatactcgaagg

SEQ ID NO: 4048607 - DNA, 25 bp, Homo sapien
taggacgctggcagaacgcacccat

SEQ ID NO: 4048608 - DNA, 25 bp, Homo sapien
ctaggacgctggcagaacgcaccca

SEQ ID NO: 4048609 - DNA, 25 bp, Homo sapien
gctaggacgctggcagaacgcaccc

SEQ ID NO: 4048610 - DNA, 25 bp, Homo sapien
tggatggcaaataataccagcgact

SEQ ID NO: 4048611 - DNA, 25 bp, Homo sapien
aacttggcaacactcggaggatgga

SEQ ID NO: 4048612 - DNA, 25 bp, Homo sapien
tgaacaccttctgtaatcagacacc

SEQ ID NO: 4048613 - DNA, 25 bp, Homo sapien
ccagcgactgaagggttaattaatg

SEQ ID NO: 4048614 - DNA, 25 bp, Homo sapien
ctggcagtcaccactaggcagggag

SEQ ID NO: 4048615 - DNA, 25 bp, Homo sapien
gtgctctccgtaaataaacttcagg

SEQ ID NO: 4048616 - DNA, 25 bp, Homo sapien
tcctgtatatctgccacacacctag

SEQ ID NO: 4048617 - DNA, 25 bp, Homo sapien
gattaaggccatttttgtgagtgat

SEQ ID NO: 4048618 - DNA, 25 bp, Homo sapien
gctggtggtagcaaagcaggtaata

SEQ ID NO: 4048619 - DNA, 25 bp, Homo sapien
aaagtagcaccaacaagatttgctg

SEQ ID NO: 4048620 - DNA, 25 bp, Homo sapien
ggagtccaagacagcttctgaagtt

SEQ ID NO: 4048621 - DNA, 25 bp, Homo sapien
taacagtagattggtagggaaggac

SEQ ID NO: 4048622 - DNA, 25 bp, Homo sapien
ccaccagttgaggttgtgaatccag

SEQ ID NO: 4048623 - DNA, 25 bp, Homo sapien
taggcattaagttagcaggacccga

SEQ ID NO: 4048624 - DNA, 25 bp, Homo sapien
gagaatggacctgggttagagaccc

SEQ ID NO: 4048625 - DNA, 25 bp, Homo sapien
ccagatagggattctaaatggctac

SEQ ID NO: 4048626 - DNA, 25 bp, Homo sapien
cccccaacaaggaatgtagaatatt

SEQ ID NO: 4048627 - DNA, 25 bp, Homo sapien
tacccccaacaaggaatgtagaata

SEQ ID NO: 4048628 - DNA, 25 bp, Homo sapien
tattacccccaacaaggaatgtaga

SEQ ID NO: 4048629 - DNA, 25 bp, Homo sapien
acccccaacaaggaatgtagaatat

SEQ ID NO: 4048630 - DNA, 25 bp, Homo sapien
cagcactgactagagtgtgagcccc

SEQ ID NO: 4048631 - DNA, 25 bp, Homo sapien
ggctgtgttacactggtgactcata

SEQ ID NO: 4048632 - DNA, 25 bp, Homo sapien
tataatgtggctgttaaaaaatctt

SEQ ID NO: 4048633 - DNA, 25 bp, Homo sapien
tgtgagccccgtcctcaagttgctt

SEQ ID NO: 4048634 - DNA, 25 bp, Homo sapien
agcagtatgctgtcttgccgacggg

SEQ ID NO: 4048635 - DNA, 25 bp, Homo sapien
ggagcaatccgagtaccctagcaag

SEQ ID NO: 4048636 - DNA, 25 bp, Homo sapien
tgttcaatcccagcggtccttacca

SEQ ID NO: 4048637 - DNA, 25 bp, Homo sapien
ggaccatggttagggcagtgacact

SEQ ID NO: 4048638 - DNA, 25 bp, Homo sapien
ccagagcgttggctttacctgcaga

SEQ ID NO: 4048639 - DNA, 25 bp, Homo sapien
cattcactccagaatatcaggcctg

SEQ ID NO: 4048640 - DNA, 25 bp, Homo sapien
ccaattctggccatgtttcaggaaa

SEQ ID NO: 4048641 - DNA, 25 bp, Homo sapien
gaagaaggagcacaatgagcctgca

SEQ ID NO: 4048642 - DNA, 25 bp, Homo sapien
cagcggggtccgctttcctgcgagc

SEQ ID NO: 4048643 - DNA, 25 bp, Homo sapien
ggccccgcggtgacttcatcgccct

SEQ ID NO: 4048644 - DNA, 25 bp, Homo sapien
cgggactgggtgaggcggccccgcg

SEQ ID NO: 4048645 - DNA, 25 bp, Homo sapien
ctgcgagcgggtagtgcgggccggg

SEQ ID NO: 4048646 - DNA, 25 bp, Homo sapien
tggaccctcaggacagtgaacttcc

SEQ ID NO: 4048647 - DNA, 25 bp, Homo sapien
gagttctggacccatgtttggagca

SEQ ID NO: 4048648 - DNA, 25 bp, Homo sapien
taggcctcacaaaagagccagagtt

SEQ ID NO: 4048649 - DNA, 25 bp, Homo sapien
gcgtgtgaatctcttaccctgaaaa

SEQ ID NO: 4048650 - DNA, 25 bp, Homo sapien
ttatgcgacgcatggaaggcaccag

SEQ ID NO: 4048651 - DNA, 25 bp, Homo sapien
ccattttacacccaaagacaggagg

SEQ ID NO: 4048652 - DNA, 25 bp, Homo sapien
ttttgggaccagacataactcacgt

SEQ ID NO: 4048653 - DNA, 25 bp, Homo sapien
cattctcttagagggaaccacgtca

SEQ ID NO: 4048654 - DNA, 25 bp, Homo sapien
tcagcaaagctgactaaggtggtct

SEQ ID NO: 4048655 - DNA, 25 bp, Homo sapien
tatgcatcccaaagaaaacacgcca

SEQ ID NO: 4048656 - DNA, 25 bp, Homo sapien
tacgcgtgactgactttcctgataa

SEQ ID NO: 4048657 - DNA, 25 bp, Homo sapien
ccaccccaggtgtctagatagcaag

SEQ ID NO: 4048658 - DNA, 25 bp, Homo sapien
aaatagatacacagttcaaggaccc

SEQ ID NO: 4048659 - DNA, 25 bp, Homo sapien
atagatacacagttcaaggacccat

SEQ ID NO: 4048660 - DNA, 25 bp, Homo sapien
aatagatacacagttcaaggaccca

SEQ ID NO: 4048661 - DNA, 25 bp, Homo sapien
agttgccagtgattcaaactcagca

SEQ ID NO: 4048662 - DNA, 25 bp, Homo sapien
tactgttacgtttgtggagtaggaa

SEQ ID NO: 4048663 - DNA, 25 bp, Homo sapien
tccttactgttacgtttgtggagta

SEQ ID NO: 4048664 - DNA, 25 bp, Homo sapien
gttgccagtgattcaaactcagcag

SEQ ID NO: 4048665 - DNA, 25 bp, Homo sapien
cagaaagggattagacctcagtcca

SEQ ID NO: 4048666 - DNA, 25 bp, Homo sapien
tgacagtcaggcagtggcacaaaga

SEQ ID NO: 4048667 - DNA, 25 bp, Homo sapien
cacatgttcctgagccagatgccag

SEQ ID NO: 4048668 - DNA, 25 bp, Homo sapien
gaatctacaagaaaaggtacgcctg

SEQ ID NO: 4048669 - DNA, 25 bp, Homo sapien
gtcccagaagcacccgacatagggt

SEQ ID NO: 4048670 - DNA, 25 bp, Homo sapien
tttcaactgagtcacgaagctgtcc

SEQ ID NO: 4048671 - DNA, 25 bp, Homo sapien
tagggtggaggtcagacacattccc

SEQ ID NO: 4048672 - DNA, 25 bp, Homo sapien
cacagatgtaactgcaaacttgaag

SEQ ID NO: 4048673 - DNA, 25 bp, Homo sapien
aatatcgtcccaccagaacactgag

SEQ ID NO: 4048674 - DNA, 25 bp, Homo sapien
gagcctcacggcacaaaggatatta

SEQ ID NO: 4048675 - DNA, 25 bp, Homo sapien
catttacaaaaccaccgaggagcct

SEQ ID NO: 4048676 - DNA, 25 bp, Homo sapien
tgagctgggaaaacttgggcaacaa

SEQ ID NO: 4048677 - DNA, 25 bp, Homo sapien
cagctgtgagctggcctggctgccc

SEQ ID NO: 4048678 - DNA, 25 bp, Homo sapien
ccagctgtgagctggcctggctgcc

SEQ ID NO: 4048679 - DNA, 25 bp, Homo sapien
ctgtgagctggcctggctgccctct

SEQ ID NO: 4048680 - DNA, 25 bp, Homo sapien
agctgtgagctggcctggctgccct

SEQ ID NO: 4048681 - DNA, 25 bp, Homo sapien
tacagttatgacactgaggcgccca

SEQ ID NO: 4048682 - DNA, 25 bp, Homo sapien
gaggcgcccaaagcgacaattagtg

SEQ ID NO: 4048683 - DNA, 25 bp, Homo sapien
caacaactcccaagaatgatgtcta

SEQ ID NO: 4048684 - DNA, 25 bp, Homo sapien
tgctttttggtgagggctaaacaca

SEQ ID NO: 4048685 - DNA, 25 bp, Homo sapien
caaacgctgaggaacgtgggcctcc

SEQ ID NO: 4048686 - DNA, 25 bp, Homo sapien
tacacacgacaaggtggctcagagt

SEQ ID NO: 4048687 - DNA, 25 bp, Homo sapien
gactcaacactgacttggagcaggt

SEQ ID NO: 4048688 - DNA, 25 bp, Homo sapien
tgccgactgaccgttccaatgctgt

SEQ ID NO: 4048689 - DNA, 25 bp, Homo sapien
tccgtgcgggctcggatgtagtcat

SEQ ID NO: 4048690 - DNA, 25 bp, Homo sapien
gcgctggatctcagggcgactgtcc

SEQ ID NO: 4048691 - DNA, 25 bp, Homo sapien
gaatgtgttcactgcatatgccgca

SEQ ID NO: 4048692 - DNA, 25 bp, Homo sapien
tgctggcggacgctgactctccatt

SEQ ID NO: 4048693 - DNA, 25 bp, Homo sapien
cagcaatttctgctccggctctatg

SEQ ID NO: 4048694 - DNA, 25 bp, Homo sapien
aaaaggaaagcgctgagtccagtgt

SEQ ID NO: 4048695 - DNA, 25 bp, Homo sapien
gccagtacgattgaagcaataaaga

SEQ ID NO: 4048696 - DNA, 25 bp, Homo sapien
tatggtttaaagcagccagtacgat

SEQ ID NO: 4048697 - DNA, 25 bp, Homo sapien
ccacaccagtgggatatctcgtcag

SEQ ID NO: 4048698 - DNA, 25 bp, Homo sapien
gcctcttctgaaggcgtggcctgcc

SEQ ID NO: 4048699 - DNA, 25 bp, Homo sapien
ggagaacaggatgataatagggaga

SEQ ID NO: 4048700 - DNA, 25 bp, Homo sapien
caaatagaatgacataacatgtgct

SEQ ID NO: 4048701 - DNA, 25 bp, Homo sapien
acaggatcgtgttctcaagtgacca

SEQ ID NO: 4048702 - DNA, 25 bp, Homo sapien
tcaagttcatgtaaggtatatgccc

SEQ ID NO: 4048703 - DNA, 25 bp, Homo sapien
tgttgggcaaacacacagcctttat

SEQ ID NO: 4048704 - DNA, 25 bp, Homo sapien
tctagaacggatcccaaagaacagg

SEQ ID NO: 4048705 - DNA, 25 bp, Homo sapien
tctgggggatcctcatgtgcaggtt

SEQ ID NO: 4048706 - DNA, 25 bp, Homo sapien
caggttgagactgaacataatcagc

SEQ ID NO: 4048707 - DNA, 25 bp, Homo sapien
cagtcaccacaaacgcactgcagct

SEQ ID NO: 4048708 - DNA, 25 bp, Homo sapien
acaaacgcactgcagctcacaaact

SEQ ID NO: 4048709 - DNA, 25 bp, Homo sapien
gatggtctctatgcagatgaatgca

SEQ ID NO: 4048710 - DNA, 25 bp, Homo sapien
gcagatgaatgcaatcagggccaag

SEQ ID NO: 4048711 - DNA, 25 bp, Homo sapien
agatgaatgcaatcagggccaagat

SEQ ID NO: 4048712 - DNA, 25 bp, Homo sapien
tctatgcagatgaatgcaatcaggg

SEQ ID NO: 4048713 - DNA, 25 bp, Homo sapien
ggttgtcagatttccacaactgtgg

SEQ ID NO: 4048714 - DNA, 25 bp, Homo sapien
gatattaacaggttgtcagatttcc

SEQ ID NO: 4048715 - DNA, 25 bp, Homo sapien
actgtggcaaattatgattggcagc

SEQ ID NO: 4048716 - DNA, 25 bp, Homo sapien
aactgtggcaaattatgattggcag

SEQ ID NO: 4048717 - DNA, 25 bp, Homo sapien
caccctcctatgaacatgagtcagg

SEQ ID NO: 4048718 - DNA, 25 bp, Homo sapien
tatcacctggtgtcctgcagactcc

SEQ ID NO: 4048719 - DNA, 25 bp, Homo sapien
caaatctattgaagagtatatccca

SEQ ID NO: 4048720 - DNA, 25 bp, Homo sapien
gagcaggtatggtccgtcctcagca

SEQ ID NO: 4048721 - DNA, 25 bp, Homo sapien
ggagggtcaatgagggcttaggcag

SEQ ID NO: 4048722 - DNA, 25 bp, Homo sapien
ctcaggtggtcttagaggaaaaacg

SEQ ID NO: 4048723 - DNA, 25 bp, Homo sapien
agaggctttaggaggcttcccagtc

SEQ ID NO: 4048724 - DNA, 25 bp, Homo sapien
atcgagacaaaaagtgctgctggga

SEQ ID NO: 4048725 - DNA, 25 bp, Homo sapien
agagtggtgggccccgcagacatac

SEQ ID NO: 4048726 - DNA, 25 bp, Homo sapien
ggtgggccccgcagacatacagctt

SEQ ID NO: 4048727 - DNA, 25 bp, Homo sapien
ctttgggtcttctcatactaagccc

SEQ ID NO: 4048728 - DNA, 25 bp, Homo sapien
cagctccaaatggacacaagtgtgg

SEQ ID NO: 4048729 - DNA, 25 bp, Homo sapien
ttttatatgattccttgcacatgcc

SEQ ID NO: 4048730 - DNA, 25 bp, Homo sapien
acatttccttactataggccgggca

SEQ ID NO: 4048731 - DNA, 25 bp, Homo sapien
ccaggaatatcccagagtaatactt

SEQ ID NO: 4048732 - DNA, 25 bp, Homo sapien
aaaaccaaaacaccatgccaccgtg

SEQ ID NO: 4048733 - DNA, 25 bp, Homo sapien
gagtcgactcagaggaacccgagtt

SEQ ID NO: 4048734 - DNA, 25 bp, Homo sapien
tacagatgtccacaacagaggagtc

SEQ ID NO: 4048735 - DNA, 25 bp, Homo sapien
agttcttagggcatgagcgaacccc

SEQ ID NO: 4048736 - DNA, 25 bp, Homo sapien
gacacagacccgaaagaggagttct

SEQ ID NO: 4048737 - DNA, 25 bp, Homo sapien
gatgccaatgccaagatgacacagt

SEQ ID NO: 4048738 - DNA, 25 bp, Homo sapien
ttttggatactacgttctatggttc

SEQ ID NO: 4048739 - DNA, 25 bp, Homo sapien
gatactacgttctatggttctaaga

SEQ ID NO: 4048740 - DNA, 25 bp, Homo sapien
ggaattatcagattgtaaagcagct

SEQ ID NO: 4048741 - DNA, 25 bp, Homo sapien
tctgctcctggcaactcaggccaac

SEQ ID NO: 4048742 - DNA, 25 bp, Homo sapien
cccaaaggaacccaggtatctgctc

SEQ ID NO: 4048743 - DNA, 25 bp, Homo sapien
ggaacccaggtatctgctcctggca

SEQ ID NO: 4048744 - DNA, 25 bp, Homo sapien
aggtatctgctcctggcaactcagg

SEQ ID NO: 4048745 - DNA, 25 bp, Homo sapien
agaacataagtattccttattatcc

SEQ ID NO: 4048746 - DNA, 25 bp, Homo sapien
gaacataagtattccttattatcca

SEQ ID NO: 4048747 - DNA, 25 bp, Homo sapien
cataagtattccttattatccaaat

SEQ ID NO: 4048748 - DNA, 25 bp, Homo sapien
tacagtagaacataagtattcctta

SEQ ID NO: 4048749 - DNA, 25 bp, Homo sapien
cagcagcgtgttattgtggggaaca

SEQ ID NO: 4048750 - DNA, 25 bp, Homo sapien
aggctggcagatttacgtggagaga

SEQ ID NO: 4048751 - DNA, 25 bp, Homo sapien
tgttattgtggggaacaagagcttc

SEQ ID NO: 4048752 - DNA, 25 bp, Homo sapien
catctgtaggctgggcaaacggcag

SEQ ID NO: 4048753 - DNA, 25 bp, Homo sapien
gatacagcagggaacttgaaagcca

SEQ ID NO: 4048754 - DNA, 25 bp, Homo sapien
tgccagaccctggtttagacacggg

SEQ ID NO: 4048755 - DNA, 25 bp, Homo sapien
tctgagcctattccggtgcaggagg

SEQ ID NO: 4048756 - DNA, 25 bp, Homo sapien
gaaggtctcttttgagcgggaacca

SEQ ID NO: 4048757 - DNA, 25 bp, Homo sapien
cacatataacctctcagagtttaag

SEQ ID NO: 4048758 - DNA, 25 bp, Homo sapien
acatataacctctcagagtttaagt

SEQ ID NO: 4048759 - DNA, 25 bp, Homo sapien
ccacatataacctctcagagtttaa

SEQ ID NO: 4048760 - DNA, 25 bp, Homo sapien
catataacctctcagagtttaagtt

SEQ ID NO: 4048761 - DNA, 25 bp, Homo sapien
gagggcggagcggacaggtaggccc

SEQ ID NO: 4048762 - DNA, 25 bp, Homo sapien
aggtgctcaggtaggaggcgcacac

SEQ ID NO: 4048763 - DNA, 25 bp, Homo sapien
aggtaggcccgaaggcaggtgctca

SEQ ID NO: 4048764 - DNA, 25 bp, Homo sapien
acccagcccagtaacgccacagact

SEQ ID NO: 4048765 - DNA, 25 bp, Homo sapien
gctgcagagtggtcccgggacccca

SEQ ID NO: 4048766 - DNA, 25 bp, Homo sapien
ggcaggctctggccgaaggcggggt

SEQ ID NO: 4048767 - DNA, 25 bp, Homo sapien
caggctctggccgaaggcggggtcc

SEQ ID NO: 4048768 - DNA, 25 bp, Homo sapien
tgcagagtggtcccgggaccccacg

SEQ ID NO: 4048769 - DNA, 25 bp, Homo sapien
cgagcgcgccgcgcaggtagtcggg

SEQ ID NO: 4048770 - DNA, 25 bp, Homo sapien
cacttgggcgaccttgaggcggccg

SEQ ID NO: 4048771 - DNA, 25 bp, Homo sapien
aggtagtcggggtcgcagcgcaggc

SEQ ID NO: 4048772 - DNA, 25 bp, Homo sapien
gggcgaccttgaggcggccgagcgc

SEQ ID NO: 4048773 - DNA, 25 bp, Homo sapien
atcatggaggtgctcgaggcctcgc

SEQ ID NO: 4048774 - DNA, 25 bp, Homo sapien
tgctggcgcccgagatcatggaggt

SEQ ID NO: 4048775 - DNA, 25 bp, Homo sapien
tcggtggtgggctggtacgggctgc

SEQ ID NO: 4048776 - DNA, 25 bp, Homo sapien
gcctcgccctcgaagccgtccagct

SEQ ID NO: 4048777 - DNA, 25 bp, Homo sapien
gggccgcctcgcgcggctggctccc

SEQ ID NO: 4048778 - DNA, 25 bp, Homo sapien
actcagcggggccgccgcatcgccg

SEQ ID NO: 4048779 - DNA, 25 bp, Homo sapien
ggcggactcagcggggccgccgcat

SEQ ID NO: 4048780 - DNA, 25 bp, Homo sapien
cgccgcccgactgactgcccgcggc

SEQ ID NO: 4048781 - DNA, 25 bp, Homo sapien
gttgggaatcccacacggatcctta

SEQ ID NO: 4048782 - DNA, 25 bp, Homo sapien
tgcagacttccaaagggtgttgttg

SEQ ID NO: 4048783 - DNA, 25 bp, Homo sapien
tgtagctgtgcctccgggtgtctac

SEQ ID NO: 4048784 - DNA, 25 bp, Homo sapien
caaaacctggtatcgtggtgccttc

SEQ ID NO: 4048785 - DNA, 25 bp, Homo sapien
ctgctcagcagccgcctcgcttctc

SEQ ID NO: 4048786 - DNA, 25 bp, Homo sapien
ctcagcagccgcctcgcttctccct

SEQ ID NO: 4048787 - DNA, 25 bp, Homo sapien
ttctctctccatggcagaggaagtg

SEQ ID NO: 4048788 - DNA, 25 bp, Homo sapien
cagccgcctcgcttctccctggctg

SEQ ID NO: 4048789 - DNA, 25 bp, Homo sapien
ctgccctgggccaccccactcagac

SEQ ID NO: 4048790 - DNA, 25 bp, Homo sapien
tgccctgggccaccccactcagaca

SEQ ID NO: 4048791 - DNA, 25 bp, Homo sapien
cctgggccaccccactcagacaccc

SEQ ID NO: 4048792 - DNA, 25 bp, Homo sapien
gggccaccccactcagacaccccat

SEQ ID NO: 4048793 - DNA, 25 bp, Homo sapien
gatgctgagattcactgaggttaac

SEQ ID NO: 4048794 - DNA, 25 bp, Homo sapien
catccagcatccctataaaggagat

SEQ ID NO: 4048795 - DNA, 25 bp, Homo sapien
caagtcgacctgaaacaagttccca

SEQ ID NO: 4048796 - DNA, 25 bp, Homo sapien
tgtcacacaatttattcagggctgg

SEQ ID NO: 4048797 - DNA, 25 bp, Homo sapien
ttcccaggactagaaagcaaggttc

SEQ ID NO: 4048798 - DNA, 25 bp, Homo sapien
tgaggtcactcattttactcccggg

SEQ ID NO: 4048799 - DNA, 25 bp, Homo sapien
taaggtcatgatgtacagagcagtc

SEQ ID NO: 4048800 - DNA, 25 bp, Homo sapien
taaatttagtatacagacgacagtg

SEQ ID NO: 4048801 - DNA, 25 bp, Homo sapien
gtacgagccaattaaccagagtgca

SEQ ID NO: 4048802 - DNA, 25 bp, Homo sapien
tttccacaagtcataaggcagggct

SEQ ID NO: 4048803 - DNA, 25 bp, Homo sapien
tcagaaaggcaagttgatactcagc

SEQ ID NO: 4048804 - DNA, 25 bp, Homo sapien
taggccagcctgtgatagtaaaaac

SEQ ID NO: 4048805 - DNA, 25 bp, Homo sapien
cccaaaaaactgatagcatgtgcca

SEQ ID NO: 4048806 - DNA, 25 bp, Homo sapien
tatccttaacaaagggtctgacatg

SEQ ID NO: 4048807 - DNA, 25 bp, Homo sapien
catgccccagagtccaagggttatc

SEQ ID NO: 4048808 - DNA, 25 bp, Homo sapien
tcacactcggacaagccaatgaagt

SEQ ID NO: 4048809 - DNA, 25 bp, Homo sapien
gtttgttaccatagagtctggcttt

SEQ ID NO: 4048810 - DNA, 25 bp, Homo sapien
taccatagagtctggctttcgagtc

SEQ ID NO: 4048811 - DNA, 25 bp, Homo sapien
ggctttcgagtcattctatccagtt

SEQ ID NO: 4048812 - DNA, 25 bp, Homo sapien
gagtcattctatccagttcttcctg

SEQ ID NO: 4048813 - DNA, 25 bp, Homo sapien
tagaacataggagccactggaggcc

SEQ ID NO: 4048814 - DNA, 25 bp, Homo sapien
gaagggaatactaccagcccagagt

SEQ ID NO: 4048815 - DNA, 25 bp, Homo sapien
tgggccactagaccagactctgagt

SEQ ID NO: 4048816 - DNA, 25 bp, Homo sapien
agtgacttgactgctctctggcggg

SEQ ID NO: 4048817 - DNA, 25 bp, Homo sapien
catccttgcagcactactcaaccac

SEQ ID NO: 4048818 - DNA, 25 bp, Homo sapien
atccttgcagcactactcaaccaca

SEQ ID NO: 4048819 - DNA, 25 bp, Homo sapien
cagcactactcaaccacaagagtca

SEQ ID NO: 4048820 - DNA, 25 bp, Homo sapien
ttgcagcactactcaaccacaagag

SEQ ID NO: 4048821 - DNA, 25 bp, Homo sapien
ttggctgtgctctgcaccccaccag

SEQ ID NO: 4048822 - DNA, 25 bp, Homo sapien
agcaccaggacttccaggagagcct

SEQ ID NO: 4048823 - DNA, 25 bp, Homo sapien
tcaacagactgttgaagaagctggc

SEQ ID NO: 4048824 - DNA, 25 bp, Homo sapien
gagcctgtctttttactcaacagac

SEQ ID NO: 4048825 - DNA, 25 bp, Homo sapien
tttttactgacgtgcctggggagga

SEQ ID NO: 4048826 - DNA, 25 bp, Homo sapien
cactggctggccctccccgaccctg

SEQ ID NO: 4048827 - DNA, 25 bp, Homo sapien
acacccacaacactgggccttgacc

SEQ ID NO: 4048828 - DNA, 25 bp, Homo sapien
caacactgggccttgaccctctgtt

SEQ ID NO: 4048829 - DNA, 25 bp, Homo sapien
cacaacactgggccttgaccctctg

SEQ ID NO: 4048830 - DNA, 25 bp, Homo sapien
acccacaacactgggccttgaccct

SEQ ID NO: 4048831 - DNA, 25 bp, Homo sapien
agaagctctcgtgggagtggctggt

SEQ ID NO: 4048832 - DNA, 25 bp, Homo sapien
tctcgtgggagtggctggttgcttg

SEQ ID NO: 4048833 - DNA, 25 bp, Homo sapien
agctctcgtgggagtggctggttgc

SEQ ID NO: 4048834 - DNA, 25 bp, Homo sapien
tggctggttgcttggcaaggagtga

SEQ ID NO: 4048835 - DNA, 25 bp, Homo sapien
gagagggacaaactggctattaacc

SEQ ID NO: 4048836 - DNA, 25 bp, Homo sapien
agagagggacaaactggctattaac

SEQ ID NO: 4048837 - DNA, 25 bp, Homo sapien
gagggacaaactggctattaaccaa

SEQ ID NO: 4048838 - DNA, 25 bp, Homo sapien
ggacaaactggctattaaccaaggc

SEQ ID NO: 4048839 - DNA, 25 bp, Homo sapien
ccactgggcagatgataggtggacc

SEQ ID NO: 4048840 - DNA, 25 bp, Homo sapien
cagatgataggtggacccaggacac

SEQ ID NO: 4048841 - DNA, 25 bp, Homo sapien
gacccaggacacatctaacaataat

SEQ ID NO: 4048842 - DNA, 25 bp, Homo sapien
gataggtggacccaggacacatcta

SEQ ID NO: 4048843 - DNA, 25 bp, Homo sapien
ttgcttcattaggaacacctgctca

SEQ ID NO: 4048844 - DNA, 25 bp, Homo sapien
tgctgccaactctttgtcgtggacc

SEQ ID NO: 4048845 - DNA, 25 bp, Homo sapien
tctgctgccaactctttgtcgtgga

SEQ ID NO: 4048846 - DNA, 25 bp, Homo sapien
ctgccaactctttgtcgtggaccag

SEQ ID NO: 4048847 - DNA, 25 bp, Homo sapien
cgccccatctttataggcttctttt

SEQ ID NO: 4048848 - DNA, 25 bp, Homo sapien
gccaccacgccccatctttataggc

SEQ ID NO: 4048849 - DNA, 25 bp, Homo sapien
ccttaaagcaattgtctttgactac

SEQ ID NO: 4048850 - DNA, 25 bp, Homo sapien
tataggcttctttttgcattaaaaa

SEQ ID NO: 4048851 - DNA, 25 bp, Homo sapien
gggaggtttcacaataaagtcttca

SEQ ID NO: 4048852 - DNA, 25 bp, Homo sapien
tcttttcattgtcccagcctgcagg

SEQ ID NO: 4048853 - DNA, 25 bp, Homo sapien
gcttcacggttgtaaaattttcatg

SEQ ID NO: 4048854 - DNA, 25 bp, Homo sapien
taaagtcttcatatgcatcttccgg

SEQ ID NO: 4048855 - DNA, 25 bp, Homo sapien
gtataatccatcagaacatcgcagg

SEQ ID NO: 4048856 - DNA, 25 bp, Homo sapien
tctgcctagaagagcaaggacacag

SEQ ID NO: 4048857 - DNA, 25 bp, Homo sapien
tcctgggtaggacacttctcacaag

SEQ ID NO: 4048858 - DNA, 25 bp, Homo sapien
gagcatactcagatcacattcagga

SEQ ID NO: 4048859 - DNA, 25 bp, Homo sapien
tatcttgtagactggttcattaact

SEQ ID NO: 4048860 - DNA, 25 bp, Homo sapien
taactttgctggcatgggaagatgt

SEQ ID NO: 4048861 - DNA, 25 bp, Homo sapien
aattctttcaacagttatcttgtag

SEQ ID NO: 4048862 - DNA, 25 bp, Homo sapien
ctcctgtgggttgtttctctaagaa

SEQ ID NO: 4048863 - DNA, 25 bp, Homo sapien
taatcaagagggtgcttagccaggg

SEQ ID NO: 4048864 - DNA, 25 bp, Homo sapien
gacacacttttgaactcgagcagct

SEQ ID NO: 4048865 - DNA, 25 bp, Homo sapien
aactgactgattgttctcacaggcc

SEQ ID NO: 4048866 - DNA, 25 bp, Homo sapien
tatgtgaagccacagcctagggttc

SEQ ID NO: 4048867 - DNA, 25 bp, Homo sapien
tagcgaaagcccatgctgacagaga

SEQ ID NO: 4048868 - DNA, 25 bp, Homo sapien
tatcgaggacaatcaatcccggtgg

SEQ ID NO: 4048869 - DNA, 25 bp, Homo sapien
catgattgagatactgccgtgagcc

SEQ ID NO: 4048870 - DNA, 25 bp, Homo sapien
gcagagaacctgagcacctagtggg

SEQ ID NO: 4048871 - DNA, 25 bp, Homo sapien
tgtggtgaagtggaaaccgtatgtt

SEQ ID NO: 4048872 - DNA, 25 bp, Homo sapien
tatacaacaagtcgaggtttttctc

SEQ ID NO: 4048873 - DNA, 25 bp, Homo sapien
tatacttatacaacaagtcgaggtt

SEQ ID NO: 4048874 - DNA, 25 bp, Homo sapien
tgaacaatatacttatacaacaagt

SEQ ID NO: 4048875 - DNA, 25 bp, Homo sapien
ctgatgtgtaaatcaaggcagctcc

SEQ ID NO: 4048876 - DNA, 25 bp, Homo sapien
ggttagcccaggaaaacactctcag

SEQ ID NO: 4048877 - DNA, 25 bp, Homo sapien
cactctcagagtatcaaggtacaca

SEQ ID NO: 4048878 - DNA, 25 bp, Homo sapien
ggaaccacggcaccaactgctattg

SEQ ID NO: 4048879 - DNA, 25 bp, Homo sapien
tgggtgccaacaggctaatgggcca

SEQ ID NO: 4048880 - DNA, 25 bp, Homo sapien
atctctttgaagatgccccatttgg

SEQ ID NO: 4048881 - DNA, 25 bp, Homo sapien
tatctctttgaagatgccccatttg

SEQ ID NO: 4048882 - DNA, 25 bp, Homo sapien
tctctttgaagatgccccatttgga

SEQ ID NO: 4048883 - DNA, 25 bp, Homo sapien
ctctttgaagatgccccatttggaa

SEQ ID NO: 4048884 - DNA, 25 bp, Homo sapien
ctccgcaggtgtgactggataaagt

SEQ ID NO: 4048885 - DNA, 25 bp, Homo sapien
cgcaggtgtgactggataaagtcca

SEQ ID NO: 4048886 - DNA, 25 bp, Homo sapien
tcatccctgtaatcgtgctccttct

SEQ ID NO: 4048887 - DNA, 25 bp, Homo sapien
caggtgtgactggataaagtccaaa

SEQ ID NO: 4048888 - DNA, 25 bp, Homo sapien
tcagcacattgtcacccagaggcag

SEQ ID NO: 4048889 - DNA, 25 bp, Homo sapien
aacattttcttcatcggagcctgag

SEQ ID NO: 4048890 - DNA, 25 bp, Homo sapien
gcaacattttcttcatcggagcctg

SEQ ID NO: 4048891 - DNA, 25 bp, Homo sapien
ttcttcatcggagcctgaggtcaga

SEQ ID NO: 4048892 - DNA, 25 bp, Homo sapien
ttcttcaggttccatatagtcttga

SEQ ID NO: 4048893 - DNA, 25 bp, Homo sapien
tggggaaccttgacaaccttcttca

SEQ ID NO: 4048894 - DNA, 25 bp, Homo sapien
tccatatagtcttgaaaatctttca

SEQ ID NO: 4048895 - DNA, 25 bp, Homo sapien
caggttccatatagtcttgaaaatc

SEQ ID NO: 4048896 - DNA, 25 bp, Homo sapien
ttcactgtcaggctaaacgcgatgg

SEQ ID NO: 4048897 - DNA, 25 bp, Homo sapien
gctaaacgcgatggcttatgtctgt

SEQ ID NO: 4048898 - DNA, 25 bp, Homo sapien
cggcctacagcatctctttaattaa

SEQ ID NO: 4048899 - DNA, 25 bp, Homo sapien
agctcattcatataccttcactgtc

SEQ ID NO: 4048900 - DNA, 25 bp, Homo sapien
cgtaaaacactagcccatttctgca

SEQ ID NO: 4048901 - DNA, 25 bp, Homo sapien
ctcattttttctggtggaattttca

SEQ ID NO: 4048902 - DNA, 25 bp, Homo sapien
ttatcaatgtgctcacgtaaaacac

SEQ ID NO: 4048903 - DNA, 25 bp, Homo sapien
tgtgctcacgtaaaacactagccca

SEQ ID NO: 4048904 - DNA, 25 bp, Homo sapien
ggcaaggattcagcagaaactgcaa

SEQ ID NO: 4048905 - DNA, 25 bp, Homo sapien
ctgcaacaaaaatgacgagggtctc

SEQ ID NO: 4048906 - DNA, 25 bp, Homo sapien
caggcctttgtggtacaagtctcca

SEQ ID NO: 4048907 - DNA, 25 bp, Homo sapien
cagaatccacacgttgcagcgcgtg

SEQ ID NO: 4048908 - DNA, 25 bp, Homo sapien
gagcaacagctaagtgtcccattcc

SEQ ID NO: 4048909 - DNA, 25 bp, Homo sapien
gaaccaggcagagtaacaatggtcc

SEQ ID NO: 4048910 - DNA, 25 bp, Homo sapien
caccaacttcggattctctactaga

SEQ ID NO: 4048911 - DNA, 25 bp, Homo sapien
taaactgtcacaaagagattcagga

SEQ ID NO: 4048912 - DNA, 25 bp, Homo sapien
tccttgtagtttagtcatgagggtt

SEQ ID NO: 4048913 - DNA, 25 bp, Homo sapien
catctcggtcctcatcatggacact

SEQ ID NO: 4048914 - DNA, 25 bp, Homo sapien
ctcggtcctcatcatggacactgag

SEQ ID NO: 4048915 - DNA, 25 bp, Homo sapien
tagtttagtcatgagggttgtttta

SEQ ID NO: 4048916 - DNA, 25 bp, Homo sapien
gcgacctggggcaacgccccgccgc

SEQ ID NO: 4048917 - DNA, 25 bp, Homo sapien
cccagcgacctggggcaacgccccg

SEQ ID NO: 4048918 - DNA, 25 bp, Homo sapien
agcgacctggggcaacgccccgccg

SEQ ID NO: 4048919 - DNA, 25 bp, Homo sapien
ccagcgacctggggcaacgccccgc

SEQ ID NO: 4048920 - DNA, 25 bp, Homo sapien
tggacacttcgctcagaatggagga

SEQ ID NO: 4048921 - DNA, 25 bp, Homo sapien
acctggcgcgggtggacacttcgct

SEQ ID NO: 4048922 - DNA, 25 bp, Homo sapien
tgttcttgccggacggcagcttgga

SEQ ID NO: 4048923 - DNA, 25 bp, Homo sapien
caggatgttcttgccggacggcagc

SEQ ID NO: 4048924 - DNA, 25 bp, Homo sapien
tcctcactggtcaggtcgccggcgg

SEQ ID NO: 4048925 - DNA, 25 bp, Homo sapien
gcccgttgggacctagcagcagctt

SEQ ID NO: 4048926 - DNA, 25 bp, Homo sapien
ccgcgggcccgttgggacctagcag

SEQ ID NO: 4048927 - DNA, 25 bp, Homo sapien
tcctcctcactggtcaggtcgccgg

SEQ ID NO: 4048928 - DNA, 25 bp, Homo sapien
cgtgtcctctaggtctgcgatggcc

SEQ ID NO: 4048929 - DNA, 25 bp, Homo sapien
cacgggttgcgaggccgccgaggtg

SEQ ID NO: 4048930 - DNA, 25 bp, Homo sapien
gcccgccgaccttgccgcggcgact

SEQ ID NO: 4048931 - DNA, 25 bp, Homo sapien
ccacgggctcccacgggttgcgagg

SEQ ID NO: 4048932 - DNA, 25 bp, Homo sapien
aacaaatgtttgatcttatgaagga

SEQ ID NO: 4048933 - DNA, 25 bp, Homo sapien
cacattccttctcatgagagtttag

SEQ ID NO: 4048934 - DNA, 25 bp, Homo sapien
atgggaaccttagttaaatagcttg

SEQ ID NO: 4048935 - DNA, 25 bp, Homo sapien
aatattgatttagtgtatgggaacc

SEQ ID NO: 4048936 - DNA, 25 bp, Homo sapien
tcagtaaagtttttgcgaattcttc

SEQ ID NO: 4048937 - DNA, 25 bp, Homo sapien
tggtcagcttgtggtatttgtgagc

SEQ ID NO: 4048938 - DNA, 25 bp, Homo sapien
tgtggtatttgtgagcaaggtccac

SEQ ID NO: 4048939 - DNA, 25 bp, Homo sapien
cacagccttccgtccttgctgaaag

SEQ ID NO: 4048940 - DNA, 25 bp, Homo sapien
ctcaaaatataggctgcacaatgag

SEQ ID NO: 4048941 - DNA, 25 bp, Homo sapien
aaaatataggctgcacaatgaggaa

SEQ ID NO: 4048942 - DNA, 25 bp, Homo sapien
caaaatataggctgcacaatgagga

SEQ ID NO: 4048943 - DNA, 25 bp, Homo sapien
ggtcagctagatcaaaactcaaaat

SEQ ID NO: 4048944 - DNA, 25 bp, Homo sapien
gtctctctgaagcacttgtgcataa

SEQ ID NO: 4048945 - DNA, 25 bp, Homo sapien
aatgtgaggatagaacaagggcttc

SEQ ID NO: 4048946 - DNA, 25 bp, Homo sapien
caataggagcaaattaatatctaac

SEQ ID NO: 4048947 - DNA, 25 bp, Homo sapien
aataattatgccttacaataggagc

SEQ ID NO: 4048948 - DNA, 25 bp, Homo sapien
tttattagaaggtctgaccctcatc

SEQ ID NO: 4048949 - DNA, 25 bp, Homo sapien
tcagaggcaaggtttatcatttaag

SEQ ID NO: 4048950 - DNA, 25 bp, Homo sapien
cagaggcaaggtttatcatttaaga

SEQ ID NO: 4048951 - DNA, 25 bp, Homo sapien
ttagaaggtctgaccctcatcagag

SEQ ID NO: 4048952 - DNA, 25 bp, Homo sapien
cattactgagtcgttgtcttctacg

SEQ ID NO: 4048953 - DNA, 25 bp, Homo sapien
actgagtcgttgtcttctacgtggg

SEQ ID NO: 4048954 - DNA, 25 bp, Homo sapien
tccaggggtagtagattcattactg

SEQ ID NO: 4048955 - DNA, 25 bp, Homo sapien
gtagattcattactgagtcgttgtc

SEQ ID NO: 4048956 - DNA, 25 bp, Homo sapien
ggcaagagtgcaagagcttgctaaa

SEQ ID NO: 4048957 - DNA, 25 bp, Homo sapien
gtcttcagcttccacaatgactttg

SEQ ID NO: 4048958 - DNA, 25 bp, Homo sapien
tttgtgacgatcacattggtatggg

SEQ ID NO: 4048959 - DNA, 25 bp, Homo sapien
ctaaagtttcggctattcagggatt

SEQ ID NO: 4048960 - DNA, 25 bp, Homo sapien
caactgggagttgctagaaaactga

SEQ ID NO: 4048961 - DNA, 25 bp, Homo sapien
gagttgctagaaaactgactacttc

SEQ ID NO: 4048962 - DNA, 25 bp, Homo sapien
tgagcacctatacgtcaacatttcg

SEQ ID NO: 4048963 - DNA, 25 bp, Homo sapien
acatttcggaacaactgggagttgc

SEQ ID NO: 4048964 - DNA, 25 bp, Homo sapien
ttattatatctgaacataatgtaaa

SEQ ID NO: 4048965 - DNA, 25 bp, Homo sapien
tatttattatatctgaacataatgt

SEQ ID NO: 4048966 - DNA, 25 bp, Homo sapien
tatatctgaacataatgtaaatgga

SEQ ID NO: 4048967 - DNA, 25 bp, Homo sapien
attatatctgaacataatgtaaatg

SEQ ID NO: 4048968 - DNA, 25 bp, Homo sapien
tggcaatgtgaactgggtgtttaaa

SEQ ID NO: 4048969 - DNA, 25 bp, Homo sapien
ctgttactggtaactgctgctttat

SEQ ID NO: 4048970 - DNA, 25 bp, Homo sapien
gctgctttatatttttggcaatgtg

SEQ ID NO: 4048971 - DNA, 25 bp, Homo sapien
tgtgaactgggtgtttaaaaacatg

SEQ ID NO: 4048972 - DNA, 25 bp, Homo sapien
catggactggatttgcgctctttaa

SEQ ID NO: 4048973 - DNA, 25 bp, Homo sapien
tctccctgtaacaagcatggactgg

SEQ ID NO: 4048974 - DNA, 25 bp, Homo sapien
tcgaccaatccgatctgcatggaga

SEQ ID NO: 4048975 - DNA, 25 bp, Homo sapien
gactccatgggacttataactctgt

SEQ ID NO: 4048976 - DNA, 25 bp, Homo sapien
cagtgctcttcaagattattctcct

SEQ ID NO: 4048977 - DNA, 25 bp, Homo sapien
ctcctagacttagagataatttctc

SEQ ID NO: 4048978 - DNA, 25 bp, Homo sapien
aaaggatattctcctagacttagag

SEQ ID NO: 4048979 - DNA, 25 bp, Homo sapien
ctctttcaagctgttctattctgtg

SEQ ID NO: 4048980 - DNA, 25 bp, Homo sapien
ctgcgattcagttaaggcttgaatc

SEQ ID NO: 4048981 - DNA, 25 bp, Homo sapien
aggcttgaatcatgagtggaagccc

SEQ ID NO: 4048982 - DNA, 25 bp, Homo sapien
ttttgcagttgtgaagcacaaatgt

SEQ ID NO: 4048983 - DNA, 25 bp, Homo sapien
gcagttgtgaagcacaaatgtggca

SEQ ID NO: 4048984 - DNA, 25 bp, Homo sapien
gactttcatgaagcagtaatgccag

SEQ ID NO: 4048985 - DNA, 25 bp, Homo sapien
ttggagagtactatcccaaaagtag

SEQ ID NO: 4048986 - DNA, 25 bp, Homo sapien
gaaacaatgtggtacttggagagta

SEQ ID NO: 4048987 - DNA, 25 bp, Homo sapien
tgaccaagagtaagcatgatgctaa

SEQ ID NO: 4048988 - DNA, 25 bp, Homo sapien
caatgcatgcatccacagtcttcgt

SEQ ID NO: 4048989 - DNA, 25 bp, Homo sapien
ttagcactggaaagagtctcatgtg

SEQ ID NO: 4048990 - DNA, 25 bp, Homo sapien
tcacaaccactgcaagtttagcact

SEQ ID NO: 4048991 - DNA, 25 bp, Homo sapien
atccagtccgcccacagatacgaag

SEQ ID NO: 4048992 - DNA, 25 bp, Homo sapien
caggtgtcgtgcaattttttagcca

SEQ ID NO: 4048993 - DNA, 25 bp, Homo sapien
caagagtgagtccaataaatgagca

SEQ ID NO: 4048994 - DNA, 25 bp, Homo sapien
gcaaatagggcgaattatctcaggt

SEQ ID NO: 4048995 - DNA, 25 bp, Homo sapien
tagccattcattagcatgtggaaaa

SEQ ID NO: 4048996 - DNA, 25 bp, Homo sapien
cagacacacagagtactacacactg

SEQ ID NO: 4048997 - DNA, 25 bp, Homo sapien
gaggattgttgacacagacacacag

SEQ ID NO: 4048998 - DNA, 25 bp, Homo sapien
tgaagaccacaactgataactctgg

SEQ ID NO: 4048999 - DNA, 25 bp, Homo sapien
cacagagtactacacactgaagacc

SEQ ID NO: 4049000 - DNA, 25 bp, Homo sapien
tctctcacaagtgtttgtccggtcc

SEQ ID NO: 4049001 - DNA, 25 bp, Homo sapien
gtaatacaacctgtttctctcacaa

SEQ ID NO: 4049002 - DNA, 25 bp, Homo sapien
ctgaataaccgtgacagaactgtaa

SEQ ID NO: 4049003 - DNA, 25 bp, Homo sapien
tgacagaactgtaatacaacctgtt

SEQ ID NO: 4049004 - DNA, 25 bp, Homo sapien
tcattagataagaaccaagttaagt

SEQ ID NO: 4049005 - DNA, 25 bp, Homo sapien
gaatcattagataagaaccaagtta

SEQ ID NO: 4049006 - DNA, 25 bp, Homo sapien
gtttgaatcattagataagaaccaa

SEQ ID NO: 4049007 - DNA, 25 bp, Homo sapien
tgaatcattagataagaaccaagtt

SEQ ID NO: 4049008 - DNA, 25 bp, Homo sapien
ttttctctgcaatagctcctaatgt

SEQ ID NO: 4049009 - DNA, 25 bp, Homo sapien
taccatgctatgttcacttgacttt

SEQ ID NO: 4049010 - DNA, 25 bp, Homo sapien
tcctaatgtatataaggctgcttct

SEQ ID NO: 4049011 - DNA, 25 bp, Homo sapien
ttttaccatgctatgttcacttgac

SEQ ID NO: 4049012 - DNA, 25 bp, Homo sapien
gaatgaatagtgaccaaagcttcct

SEQ ID NO: 4049013 - DNA, 25 bp, Homo sapien
tgtgaaaaagcattgtccatttgat

SEQ ID NO: 4049014 - DNA, 25 bp, Homo sapien
ctccaataataagttcaggtcagtc

SEQ ID NO: 4049015 - DNA, 25 bp, Homo sapien
tccatttgatactttagacactcca

SEQ ID NO: 4049016 - DNA, 25 bp, Homo sapien
cttgtgttttctttgtgtcttcact

SEQ ID NO: 4049017 - DNA, 25 bp, Homo sapien
tgttttctttgtgtcttcactttcc

SEQ ID NO: 4049018 - DNA, 25 bp, Homo sapien
tgtgttttctttgtgtcttcacttt

SEQ ID NO: 4049019 - DNA, 25 bp, Homo sapien
gttttctttgtgtcttcactttcca

SEQ ID NO: 4049020 - DNA, 25 bp, Homo sapien
cttgtctatattctttttccttata

SEQ ID NO: 4049021 - DNA, 25 bp, Homo sapien
gcttgtctatattctttttccttat

SEQ ID NO: 4049022 - DNA, 25 bp, Homo sapien
gaaaatttcaggctagggcctacac

SEQ ID NO: 4049023 - DNA, 25 bp, Homo sapien
cgaagatacatgaggagagggcaaa

SEQ ID NO: 4049024 - DNA, 25 bp, Homo sapien
cagtaaatacctattgaggctagac

SEQ ID NO: 4049025 - DNA, 25 bp, Homo sapien
gactggctagaaagacgacatatta

SEQ ID NO: 4049026 - DNA, 25 bp, Homo sapien
cagacacgtaacctttccaaggcgg

SEQ ID NO: 4049027 - DNA, 25 bp, Homo sapien
acagacacgtaacctttccaaggcg

SEQ ID NO: 4049028 - DNA, 25 bp, Homo sapien
cacaggtaacagacacgtaaccttt

SEQ ID NO: 4049029 - DNA, 25 bp, Homo sapien
caggttccacaggtaacagacacgt

SEQ ID NO: 4049030 - DNA, 25 bp, Homo sapien
gaattccttgtgcagagcttaggtg

SEQ ID NO: 4049031 - DNA, 25 bp, Homo sapien
attccttgtgcagagcttaggtggc

SEQ ID NO: 4049032 - DNA, 25 bp, Homo sapien
aattccttgtgcagagcttaggtgg

SEQ ID NO: 4049033 - DNA, 25 bp, Homo sapien
tgaattccttgtgcagagcttaggt

SEQ ID NO: 4049034 - DNA, 25 bp, Homo sapien
ctgcgtgggagcaggacactggtta

SEQ ID NO: 4049035 - DNA, 25 bp, Homo sapien
ctggttagccgcgcgggccactcgt

SEQ ID NO: 4049036 - DNA, 25 bp, Homo sapien
ctggccctgggaaacgacctcaccg

SEQ ID NO: 4049037 - DNA, 25 bp, Homo sapien
tcaggtgctgtgtgacatgcggccc

SEQ ID NO: 4049038 - DNA, 25 bp, Homo sapien
cggtaagacatcctggccggcccaa

SEQ ID NO: 4049039 - DNA, 25 bp, Homo sapien
tactgccaggctttacacgtctcta

SEQ ID NO: 4049040 - DNA, 25 bp, Homo sapien
tggcacctgctcataaaggccccgt

SEQ ID NO: 4049041 - DNA, 25 bp, Homo sapien
tctcacgtgggctaagggcctgacg

SEQ ID NO: 4049042 - DNA, 25 bp, Homo sapien
cctgccacgacgcacgacagggttt

SEQ ID NO: 4049043 - DNA, 25 bp, Homo sapien
agcggaggccgtggcgtctaccctc

SEQ ID NO: 4049044 - DNA, 25 bp, Homo sapien
tttccaagcgcggtaaggcaggaca

SEQ ID NO: 4049045 - DNA, 25 bp, Homo sapien
gtctaccctcaagcgggagcttccg

SEQ ID NO: 4049046 - DNA, 25 bp, Homo sapien
caaggtgtcttacgcttccgcgggt

SEQ ID NO: 4049047 - DNA, 25 bp, Homo sapien
cccgccgcccctgcaaggtgtctta

SEQ ID NO: 4049048 - DNA, 25 bp, Homo sapien
ggtgtcttacgcttccgcgggtgcc

SEQ ID NO: 4049049 - DNA, 25 bp, Homo sapien
ccctgcaaggtgtcttacgcttccg

SEQ ID NO: 4049050 - DNA, 25 bp, Homo sapien
cggagttcagtccaggaggacttct

SEQ ID NO: 4049051 - DNA, 25 bp, Homo sapien
caccagggggcttccggagttcagt

SEQ ID NO: 4049052 - DNA, 25 bp, Homo sapien
gcttccggagttcagtccaggagga

SEQ ID NO: 4049053 - DNA, 25 bp, Homo sapien
tccggagttcagtccaggaggactt

SEQ ID NO: 4049054 - DNA, 25 bp, Homo sapien
ggcaattacagtttcaatcattaac

SEQ ID NO: 4049055 - DNA, 25 bp, Homo sapien
gaattttacagactaaagcacaacc

SEQ ID NO: 4049056 - DNA, 25 bp, Homo sapien
gcacaacccgaaggcaattacagtt

SEQ ID NO: 4049057 - DNA, 25 bp, Homo sapien
cacactacttaaggtgcttgcttac

SEQ ID NO: 4049058 - DNA, 25 bp, Homo sapien
gctgaagtttgtgacatgccactgt

SEQ ID NO: 4049059 - DNA, 25 bp, Homo sapien
aaagttgctgaagtttgtgacatgc

SEQ ID NO: 4049060 - DNA, 25 bp, Homo sapien
agttgctgaagtttgtgacatgcca

SEQ ID NO: 4049061 - DNA, 25 bp, Homo sapien
actggaaagttgctgaagtttgtga

SEQ ID NO: 4049062 - DNA, 25 bp, Homo sapien
gattctcaaaggacaccctactgct

SEQ ID NO: 4049063 - DNA, 25 bp, Homo sapien
tatattaaatatcgccagaccgcta

SEQ ID NO: 4049064 - DNA, 25 bp, Homo sapien
cagatgcagttagcttactgagtca

SEQ ID NO: 4049065 - DNA, 25 bp, Homo sapien
taaacagtagtgtggttgaccaaac

SEQ ID NO: 4049066 - DNA, 25 bp, Homo sapien
taacgtcaagccaaagtccttggac

SEQ ID NO: 4049067 - DNA, 25 bp, Homo sapien
gaataaatatcctaacctgagcaac

SEQ ID NO: 4049068 - DNA, 25 bp, Homo sapien
tatgatggcatcaatacactccaac

SEQ ID NO: 4049069 - DNA, 25 bp, Homo sapien
tatgtaacaacaggtgagtcttctc

SEQ ID NO: 4049070 - DNA, 25 bp, Homo sapien
agcaatggtatgtggctcagcagct

SEQ ID NO: 4049071 - DNA, 25 bp, Homo sapien
ccccaagaatgcagcaatggtatgt

SEQ ID NO: 4049072 - DNA, 25 bp, Homo sapien
agaatgcagcaatggtatgtggctc

SEQ ID NO: 4049073 - DNA, 25 bp, Homo sapien
gcagcaatggtatgtggctcagcag

SEQ ID NO: 4049074 - DNA, 25 bp, Homo sapien
gaccacagagacatgaattttgatt

SEQ ID NO: 4049075 - DNA, 25 bp, Homo sapien
aggagaccacagagacatgaatttt

SEQ ID NO: 4049076 - DNA, 25 bp, Homo sapien
cacagagacatgaattttgattagc

SEQ ID NO: 4049077 - DNA, 25 bp, Homo sapien
agaccacagagacatgaattttgat

SEQ ID NO: 4049078 - DNA, 25 bp, Homo sapien
gacaggtgtggaatcatctcctaga

SEQ ID NO: 4049079 - DNA, 25 bp, Homo sapien
caggtgtggaatcatctcctagata

SEQ ID NO: 4049080 - DNA, 25 bp, Homo sapien
acaggtgtggaatcatctcctagat

SEQ ID NO: 4049081 - DNA, 25 bp, Homo sapien
aggtgtggaatcatctcctagatac

SEQ ID NO: 4049082 - DNA, 25 bp, Homo sapien
cataatcatctttcaccattacaga

SEQ ID NO: 4049083 - DNA, 25 bp, Homo sapien
gaagccagtgagacaagacttcaac

SEQ ID NO: 4049084 - DNA, 25 bp, Homo sapien
aagccagtgagacaagacttcaact

SEQ ID NO: 4049085 - DNA, 25 bp, Homo sapien
gccagtgagacaagacttcaacttt

SEQ ID NO: 4049086 - DNA, 25 bp, Homo sapien
ttattaattgcatcatattcactgt

SEQ ID NO: 4049087 - DNA, 25 bp, Homo sapien
gagaccaatatttgcacatatcaca

SEQ ID NO: 4049088 - DNA, 25 bp, Homo sapien
taatcagagaccaactaaaacctag

SEQ ID NO: 4049089 - DNA, 25 bp, Homo sapien
cagatgttctagtcaaaatatgtat

SEQ ID NO: 4049090 - DNA, 25 bp, Homo sapien
cattatctggattgtccatgctaga

SEQ ID NO: 4049091 - DNA, 25 bp, Homo sapien
gcccgtaacattaagtacaacacta

SEQ ID NO: 4049092 - DNA, 25 bp, Homo sapien
tggatatctaccctgttgtttatga

SEQ ID NO: 4049093 - DNA, 25 bp, Homo sapien
tatcaacagcccgtaacattaagta

SEQ ID NO: 4049094 - DNA, 25 bp, Homo sapien
taatttggttaatttgcaatgtaac

SEQ ID NO: 4049095 - DNA, 25 bp, Homo sapien
catccttgttaattgtatccaaacc

SEQ ID NO: 4049096 - DNA, 25 bp, Homo sapien
taaggatcgacatcttaccactcga

SEQ ID NO: 4049097 - DNA, 25 bp, Homo sapien
catattcttcagctaaggatcgaca

SEQ ID NO: 4049098 - DNA, 25 bp, Homo sapien
tcttaccactcgaagaaatgcagaa

SEQ ID NO: 4049099 - DNA, 25 bp, Homo sapien
caagcaaaataaggaaattaattca

SEQ ID NO: 4049100 - DNA, 25 bp, Homo sapien
atcaagcaaaataaggaaattaatt

SEQ ID NO: 4049101 - DNA, 25 bp, Homo sapien
ctatcaagcaaaataaggaaattaa

SEQ ID NO: 4049102 - DNA, 25 bp, Homo sapien
agcaaaataaggaaattaattcaag

SEQ ID NO: 4049103 - DNA, 25 bp, Homo sapien
taattctttctctgaaatggactct

SEQ ID NO: 4049104 - DNA, 25 bp, Homo sapien
taattttaattctttctctgaaatg

SEQ ID NO: 4049105 - DNA, 25 bp, Homo sapien
tttaattctttctctgaaatggact

SEQ ID NO: 4049106 - DNA, 25 bp, Homo sapien
attctttctctgaaatggactctgg

SEQ ID NO: 4049107 - DNA, 25 bp, Homo sapien
tatcacaagctatcccattaggcag

SEQ ID NO: 4049108 - DNA, 25 bp, Homo sapien
gaaatgacagctccctctaaagaag

SEQ ID NO: 4049109 - DNA, 25 bp, Homo sapien
caaagggtgcggcacaaagccaatc

SEQ ID NO: 4049110 - DNA, 25 bp, Homo sapien
gagataaatacagattctgttccag

SEQ ID NO: 4049111 - DNA, 25 bp, Homo sapien
ttggcaacatgattacccacagcgg

SEQ ID NO: 4049112 - DNA, 25 bp, Homo sapien
gcaatttggcaacatgattacccac

SEQ ID NO: 4049113 - DNA, 25 bp, Homo sapien
acatgattacccacagcggcagcat

SEQ ID NO: 4049114 - DNA, 25 bp, Homo sapien
cagcaatttggcaacatgattaccc

SEQ ID NO: 4049115 - DNA, 25 bp, Homo sapien
caactgtgaacatcccttgtggcac

SEQ ID NO: 4049116 - DNA, 25 bp, Homo sapien
tcattgagacccatccctgtgatag

SEQ ID NO: 4049117 - DNA, 25 bp, Homo sapien
ttgcaccatgccctaactatacgag

SEQ ID NO: 4049118 - DNA, 25 bp, Homo sapien
gatacctggatagcaagatgtctag

SEQ ID NO: 4049119 - DNA, 25 bp, Homo sapien
tgcctgaatctgcaatcatatcagg

SEQ ID NO: 4049120 - DNA, 25 bp, Homo sapien
aaggcacgagctaaaatccaaaatg

SEQ ID NO: 4049121 - DNA, 25 bp, Homo sapien
tgcctcgaacaggtaaatttccttg

SEQ ID NO: 4049122 - DNA, 25 bp, Homo sapien
tcctttaaggcacgagctaaaatcc

SEQ ID NO: 4049123 - DNA, 25 bp, Homo sapien
taaatatatcttcaatactgcttgg

SEQ ID NO: 4049124 - DNA, 25 bp, Homo sapien
tttatgcagcgatcatcattaaata

SEQ ID NO: 4049125 - DNA, 25 bp, Homo sapien
tgatatttatgcagcgatcatcatt

SEQ ID NO: 4049126 - DNA, 25 bp, Homo sapien
aatatatcttcaatactgcttggga

SEQ ID NO: 4049127 - DNA, 25 bp, Homo sapien
agttgtatttagtgctgtgttcaca

SEQ ID NO: 4049128 - DNA, 25 bp, Homo sapien
catcttctggagccccattttcatt

SEQ ID NO: 4049129 - DNA, 25 bp, Homo sapien
ctgagttgtatttagtgctgtgttc

SEQ ID NO: 4049130 - DNA, 25 bp, Homo sapien
gagttgtatttagtgctgtgttcac

SEQ ID NO: 4049131 - DNA, 25 bp, Homo sapien
tcaaatctctgaagtcctctttttc

SEQ ID NO: 4049132 - DNA, 25 bp, Homo sapien
aaatctctgaagtcctctttttctt

SEQ ID NO: 4049133 - DNA, 25 bp, Homo sapien
tctctgaagtcctctttttctttat

SEQ ID NO: 4049134 - DNA, 25 bp, Homo sapien
atctctgaagtcctctttttcttta

SEQ ID NO: 4049135 - DNA, 25 bp, Homo sapien
ttagctatgatcacaatccatggag

SEQ ID NO: 4049136 - DNA, 25 bp, Homo sapien
aatatttagctatgatcacaatcca

SEQ ID NO: 4049137 - DNA, 25 bp, Homo sapien
gctatgatcacaatccatggagtat

SEQ ID NO: 4049138 - DNA, 25 bp, Homo sapien
gatcacaatccatggagtatgactg

SEQ ID NO: 4049139 - DNA, 25 bp, Homo sapien
ctctaatgcattatctggatgagat

SEQ ID NO: 4049140 - DNA, 25 bp, Homo sapien
ccatatgatccaaatcataggactg

SEQ ID NO: 4049141 - DNA, 25 bp, Homo sapien
atggcttatctagtcgtagatcctc

SEQ ID NO: 4049142 - DNA, 25 bp, Homo sapien
tagtcgtagatcctctaatgcatta

SEQ ID NO: 4049143 - DNA, 25 bp, Homo sapien
catataaccaactagtccatatgtc

SEQ ID NO: 4049144 - DNA, 25 bp, Homo sapien
cttttataatgatcctcatataacc

SEQ ID NO: 4049145 - DNA, 25 bp, Homo sapien
cctcatataaccaactagtccatat

SEQ ID NO: 4049146 - DNA, 25 bp, Homo sapien
tgttcttttataatgatcctcatat

SEQ ID NO: 4049147 - DNA, 25 bp, Homo sapien
gggaattccagaggacatctgctaa

SEQ ID NO: 4049148 - DNA, 25 bp, Homo sapien
gacatctgctaagcgtagtgaagtg

SEQ ID NO: 4049149 - DNA, 25 bp, Homo sapien
ccagaggacatctgctaagcgtagt

SEQ ID NO: 4049150 - DNA, 25 bp, Homo sapien
ctacagatcaaaagaggaatctggg

SEQ ID NO: 4049151 - DNA, 25 bp, Homo sapien
caggaagctgagttgcaactacaac

SEQ ID NO: 4049152 - DNA, 25 bp, Homo sapien
gaagctgagttgcaactacaacagt

SEQ ID NO: 4049153 - DNA, 25 bp, Homo sapien
ctgagttgcaactacaacagtaaac

SEQ ID NO: 4049154 - DNA, 25 bp, Homo sapien
tcaggaagctgagttgcaactacaa

SEQ ID NO: 4049155 - DNA, 25 bp, Homo sapien
gagggatcattgtctagaaggtttt

SEQ ID NO: 4049156 - DNA, 25 bp, Homo sapien
gggatcattgtctagaaggttttct

SEQ ID NO: 4049157 - DNA, 25 bp, Homo sapien
gatcattgtctagaaggttttctgg

SEQ ID NO: 4049158 - DNA, 25 bp, Homo sapien
agggatcattgtctagaaggttttc

SEQ ID NO: 4049159 - DNA, 25 bp, Homo sapien
tccacaaaacttccagagacatcgc

SEQ ID NO: 4049160 - DNA, 25 bp, Homo sapien
gagacatcgctatttaattcttgta

SEQ ID NO: 4049161 - DNA, 25 bp, Homo sapien
ttccagagacatcgctatttaattc

SEQ ID NO: 4049162 - DNA, 25 bp, Homo sapien
caaaacttccagagacatcgctatt

SEQ ID NO: 4049163 - DNA, 25 bp, Homo sapien
gccgatactgcttctttgaaggaag

SEQ ID NO: 4049164 - DNA, 25 bp, Homo sapien
cttgccgatactgcttctttgaagg

SEQ ID NO: 4049165 - DNA, 25 bp, Homo sapien
gatactgcttctttgaaggaagaaa

SEQ ID NO: 4049166 - DNA, 25 bp, Homo sapien
ccgatactgcttctttgaaggaaga

SEQ ID NO: 4049167 - DNA, 25 bp, Homo sapien
ttaatgccctatttgccagatgctg

SEQ ID NO: 4049168 - DNA, 25 bp, Homo sapien
ggtgaagctaagactcaggccttgc

SEQ ID NO: 4049169 - DNA, 25 bp, Homo sapien
tacaagagcttaggaagtgcccata

SEQ ID NO: 4049170 - DNA, 25 bp, Homo sapien
tttccactgagagtcgagtcaccct

SEQ ID NO: 4049171 - DNA, 25 bp, Homo sapien
tgtttccagcatcttctccgctgac

SEQ ID NO: 4049172 - DNA, 25 bp, Homo sapien
ttgtttccagcatcttctccgctga

SEQ ID NO: 4049173 - DNA, 25 bp, Homo sapien
catcaataattgtaaacgaaccaat

SEQ ID NO: 4049174 - DNA, 25 bp, Homo sapien
ctgatttccatcaataattgtaaac

SEQ ID NO: 4049175 - DNA, 25 bp, Homo sapien
tcaataattgtaaacgaaccaatac

SEQ ID NO: 4049176 - DNA, 25 bp, Homo sapien
tccatcaataattgtaaacgaacca

SEQ ID NO: 4049177 - DNA, 25 bp, Homo sapien
taggcaaacatgagcagattctaaa

SEQ ID NO: 4049178 - DNA, 25 bp, Homo sapien
attaggcaaacatgagcagattcta

SEQ ID NO: 4049179 - DNA, 25 bp, Homo sapien
tattaggcaaacatgagcagattct

SEQ ID NO: 4049180 - DNA, 25 bp, Homo sapien
tttattaggcaaacatgagcagatt

SEQ ID NO: 4049181 - DNA, 25 bp, Homo sapien
gctgggactacaggcacaagccact

SEQ ID NO: 4049182 - DNA, 25 bp, Homo sapien
tgggactacaggcacaagccactgt

SEQ ID NO: 4049183 - DNA, 25 bp, Homo sapien
ggactacaggcacaagccactgtac

SEQ ID NO: 4049184 - DNA, 25 bp, Homo sapien
tctcgcctcagcctctagagttgct

SEQ ID NO: 4049185 - DNA, 25 bp, Homo sapien
actgtatgctccataagggcccaga

SEQ ID NO: 4049186 - DNA, 25 bp, Homo sapien
tgtatgctccataagggcccagaca

SEQ ID NO: 4049187 - DNA, 25 bp, Homo sapien
gtatgctccataagggcccagacag

SEQ ID NO: 4049188 - DNA, 25 bp, Homo sapien
atgctccataagggcccagacagct

SEQ ID NO: 4049189 - DNA, 25 bp, Homo sapien
tagaagaaccagatggaccgtaaac

SEQ ID NO: 4049190 - DNA, 25 bp, Homo sapien
atcaaagtatggcacgtagaagaca

SEQ ID NO: 4049191 - DNA, 25 bp, Homo sapien
ttttctccatcaaagtatggcacgt

SEQ ID NO: 4049192 - DNA, 25 bp, Homo sapien
cagatggaccgtaaacgcctgtttt

SEQ ID NO: 4049193 - DNA, 25 bp, Homo sapien
tgctggcccaactaacgtgaagtaa

SEQ ID NO: 4049194 - DNA, 25 bp, Homo sapien
ggacttaaatggaatgccctcagca

SEQ ID NO: 4049195 - DNA, 25 bp, Homo sapien
tgagtacctccgaaaaagccagaag

SEQ ID NO: 4049196 - DNA, 25 bp, Homo sapien
gcctcaagacacagaagacgctcaa

SEQ ID NO: 4049197 - DNA, 25 bp, Homo sapien
agctgccggtcgtacttctgctcct

SEQ ID NO: 4049198 - DNA, 25 bp, Homo sapien
gctgccggtcgtacttctgctcctt

SEQ ID NO: 4049199 - DNA, 25 bp, Homo sapien
tgccggtcgtacttctgctccttga

SEQ ID NO: 4049200 - DNA, 25 bp, Homo sapien
gccggtcgtacttctgctccttgag

SEQ ID NO: 4049201 - DNA, 25 bp, Homo sapien
gagcgccgccaccagctccacaagc

SEQ ID NO: 4049202 - DNA, 25 bp, Homo sapien
agcgccgccaccagctccacaagcg

SEQ ID NO: 4049203 - DNA, 25 bp, Homo sapien
cggaaaacagccgagcccctgcgga

SEQ ID NO: 4049204 - DNA, 25 bp, Homo sapien
gcctgccgcgcggaaaacagccgag

SEQ ID NO: 4049205 - DNA, 25 bp, Homo sapien
gagcggtctgagtttgtacattttg

SEQ ID NO: 4049206 - DNA, 25 bp, Homo sapien
ggatattagtccctgatctaatgta

SEQ ID NO: 4049207 - DNA, 25 bp, Homo sapien
cataattcagcccagaagctttgta

SEQ ID NO: 4049208 - DNA, 25 bp, Homo sapien
cagtaacttctgaggaggacataat

SEQ ID NO: 4049209 - DNA, 25 bp, Homo sapien
gacaatattgaacgagggacccagc

SEQ ID NO: 4049210 - DNA, 25 bp, Homo sapien
tcactgtgcatcttcgagcccatca

SEQ ID NO: 4049211 - DNA, 25 bp, Homo sapien
ttagagaggacttgcatacacacac

SEQ ID NO: 4049212 - DNA, 25 bp, Homo sapien
agtaaagagtgtccttcccacgcca

SEQ ID NO: 4049213 - DNA, 25 bp, Homo sapien
ctcggaggacgatgagaggatccac

SEQ ID NO: 4049214 - DNA, 25 bp, Homo sapien
cgatgagaggatccacatggtgaac

SEQ ID NO: 4049215 - DNA, 25 bp, Homo sapien
gacgatgagaggatccacatggtga

SEQ ID NO: 4049216 - DNA, 25 bp, Homo sapien
cggaggacgatgagaggatccacat

SEQ ID NO: 4049217 - DNA, 25 bp, Homo sapien
cggctcgctccgaccagggcttccc

SEQ ID NO: 4049218 - DNA, 25 bp, Homo sapien
cactcgcggtttcctggagatccac

SEQ ID NO: 4049219 - DNA, 25 bp, Homo sapien
ggctcctaggcactcgcggtttcct

SEQ ID NO: 4049220 - DNA, 25 bp, Homo sapien
ggtttcctggagatccaccgtctcc

SEQ ID NO: 4049221 - DNA, 25 bp, Homo sapien
gccactatgcccgaagcagattatt

SEQ ID NO: 4049222 - DNA, 25 bp, Homo sapien
tattattgggcaaacaccctgacat

SEQ ID NO: 4049223 - DNA, 25 bp, Homo sapien
accctgacatttggagcactcccat

SEQ ID NO: 4049224 - DNA, 25 bp, Homo sapien
ctctgcagacatgcctggtgatggt

SEQ ID NO: 4049225 - DNA, 25 bp, Homo sapien
cagtccataaagttggtgtccaggc

SEQ ID NO: 4049226 - DNA, 25 bp, Homo sapien
tctgctggttgatccgggtccttct

SEQ ID NO: 4049227 - DNA, 25 bp, Homo sapien
gggcacgctgtctgctggttgatcc

SEQ ID NO: 4049228 - DNA, 25 bp, Homo sapien
gacagtcgccttcaggggcacgctg

SEQ ID NO: 4049229 - DNA, 25 bp, Homo sapien
cttgacatggtccagtgggtgaaaa

SEQ ID NO: 4049230 - DNA, 25 bp, Homo sapien
ccgtagatgctactatcaatgatga

SEQ ID NO: 4049231 - DNA, 25 bp, Homo sapien
aatgtgcaatcatgtgaccgtagat

SEQ ID NO: 4049232 - DNA, 25 bp, Homo sapien
gctactatcaatgatgatgacaatg

SEQ ID NO: 4049233 - DNA, 25 bp, Homo sapien
atgtgaccgtagatgctactatcaa

SEQ ID NO: 4049234 - DNA, 25 bp, Homo sapien
gtgggcatgcccttcatgcggccca

SEQ ID NO: 4049235 - DNA, 25 bp, Homo sapien
tccacgttgcagcgacacacgatca

SEQ ID NO: 4049236 - DNA, 25 bp, Homo sapien
cagggtgcctacaaggatgcccact

SEQ ID NO: 4049237 - DNA, 25 bp, Homo sapien
atgcccactgccgacagcttcgtgg

SEQ ID NO: 4049238 - DNA, 25 bp, Homo sapien
ggattatgtgttcacgtggctccac

SEQ ID NO: 4049239 - DNA, 25 bp, Homo sapien
ccacccaatgcagggccaaggtgag

SEQ ID NO: 4049240 - DNA, 25 bp, Homo sapien
gattatgtgttcacgtggctccacc

SEQ ID NO: 4049241 - DNA, 25 bp, Homo sapien
tggctccacccaatgcagggccaag

SEQ ID NO: 4049242 - DNA, 25 bp, Homo sapien
ggtccactcacgatcaagccatggt

SEQ ID NO: 4049243 - DNA, 25 bp, Homo sapien
cactggccagatcggggtccttgct

SEQ ID NO: 4049244 - DNA, 25 bp, Homo sapien
agggaccgtgcccactggccagatc

SEQ ID NO: 4049245 - DNA, 25 bp, Homo sapien
gtctggaggcgccaatcccgttgca

SEQ ID NO: 4049246 - DNA, 25 bp, Homo sapien
gcagaggtattgggagggcacaggg

SEQ ID NO: 4049247 - DNA, 25 bp, Homo sapien
cagaggtattgggagggcacagggg

SEQ ID NO: 4049248 - DNA, 25 bp, Homo sapien
ggcctttaggaagtggatcaccagg

SEQ ID NO: 4049249 - DNA, 25 bp, Homo sapien
aggggtgcagaagcgctcagtctcg

SEQ ID NO: 4049250 - DNA, 25 bp, Homo sapien
ccaggggtgcagaagcgctcagtct

SEQ ID NO: 4049251 - DNA, 25 bp, Homo sapien
ggtgcagaagcgctcagtctcggct

SEQ ID NO: 4049252 - DNA, 25 bp, Homo sapien
tcagagaggaacattgaacccagct

SEQ ID NO: 4049253 - DNA, 25 bp, Homo sapien
tgactttggcggagctcactgctgc

SEQ ID NO: 4049254 - DNA, 25 bp, Homo sapien
cagcccatgagcctcgccttataga

SEQ ID NO: 4049255 - DNA, 25 bp, Homo sapien
tgcccaccggaggagtagatccatt

SEQ ID NO: 4049256 - DNA, 25 bp, Homo sapien
ctctgagtcattgactagggagaac

SEQ ID NO: 4049257 - DNA, 25 bp, Homo sapien
actgggcggtgtgcacctccccgga

SEQ ID NO: 4049258 - DNA, 25 bp, Homo sapien
caagcaccgtgtaggtgtccccagg

SEQ ID NO: 4049259 - DNA, 25 bp, Homo sapien
cagagccagccctctgagtcattga

SEQ ID NO: 4049260 - DNA, 25 bp, Homo sapien
accaccacctcatgacttggagctg

SEQ ID NO: 4049261 - DNA, 25 bp, Homo sapien
ttggggggtggcatcactctctcca

SEQ ID NO: 4049262 - DNA, 25 bp, Homo sapien
actggcctcgtagctctcctggtcc

SEQ ID NO: 4049263 - DNA, 25 bp, Homo sapien
cacagtcaccgtggcggtggctcca

SEQ ID NO: 4049264 - DNA, 25 bp, Homo sapien
aggaggcccaggtcactgtgcgggc

SEQ ID NO: 4049265 - DNA, 25 bp, Homo sapien
tggcaaaatccatgaggcggaaggc

SEQ ID NO: 4049266 - DNA, 25 bp, Homo sapien
cttgcagagtctgagtctaacatgc

SEQ ID NO: 4049267 - DNA, 25 bp, Homo sapien
tgttagcatggccaccagagtcccg

SEQ ID NO: 4049268 - DNA, 25 bp, Homo sapien
tgtgtctcccctctcaatggcaaaa

SEQ ID NO: 4049269 - DNA, 25 bp, Homo sapien
gatatctgtgactgcgacttcgact

SEQ ID NO: 4049270 - DNA, 25 bp, Homo sapien
gggcgtgatcattgatatctgtgac

SEQ ID NO: 4049271 - DNA, 25 bp, Homo sapien
gactgcgacttcgacttcacacgtg

SEQ ID NO: 4049272 - DNA, 25 bp, Homo sapien
gacttcgacttcacacgtgctgctg

SEQ ID NO: 4049273 - DNA, 25 bp, Homo sapien
gctcagggctcaggagctgatacac

SEQ ID NO: 4049274 - DNA, 25 bp, Homo sapien
gatgttctggcctgctcggagtggg

SEQ ID NO: 4049275 - DNA, 25 bp, Homo sapien
gctgatacacaacgtgggaattggg

SEQ ID NO: 4049276 - DNA, 25 bp, Homo sapien
ccagcgtcacactgcctgaagtggg

SEQ ID NO: 4049277 - DNA, 25 bp, Homo sapien
gggagggcagataggcacgttgtca

SEQ ID NO: 4049278 - DNA, 25 bp, Homo sapien
catagtcctcgccatgggaattctg

SEQ ID NO: 4049279 - DNA, 25 bp, Homo sapien
actgagctcagggatgctgactgtg

SEQ ID NO: 4049280 - DNA, 25 bp, Homo sapien
gggaattctgagcccgcacctggag

SEQ ID NO: 4049281 - DNA, 25 bp, Homo sapien
gctctccaggtgatagtgcacatca

SEQ ID NO: 4049282 - DNA, 25 bp, Homo sapien
tgcattcacttcaaagggtcccggg

SEQ ID NO: 4049283 - DNA, 25 bp, Homo sapien
tctggtcacgtagaggtttccctct

SEQ ID NO: 4049284 - DNA, 25 bp, Homo sapien
tccagctctctggtcacgtagaggt

SEQ ID NO: 4049285 - DNA, 25 bp, Homo sapien
tatgatggagacttccacggtggca

SEQ ID NO: 4049286 - DNA, 25 bp, Homo sapien
cacccaggtgctctctatgatggag

SEQ ID NO: 4049287 - DNA, 25 bp, Homo sapien
gagattctctgccaggtggataggc

SEQ ID NO: 4049288 - DNA, 25 bp, Homo sapien
accaacagctggtaggtcctctcca

SEQ ID NO: 4049289 - DNA, 25 bp, Homo sapien
cgaagatccgagttggctgtgcctg

SEQ ID NO: 4049290 - DNA, 25 bp, Homo sapien
caggatgtggaatcgaagatccgag

SEQ ID NO: 4049291 - DNA, 25 bp, Homo sapien
tgtggaatcgaagatccgagttggc

SEQ ID NO: 4049292 - DNA, 25 bp, Homo sapien
tggctcaggatgtggaatcgaagat

SEQ ID NO: 4049293 - DNA, 25 bp, Homo sapien
tgaagcctcaaggaagaggaagggg

SEQ ID NO: 4049294 - DNA, 25 bp, Homo sapien
ctgaagcctcaaggaagaggaaggg

SEQ ID NO: 4049295 - DNA, 25 bp, Homo sapien
gcctcaaggaagaggaaggggatgc

SEQ ID NO: 4049296 - DNA, 25 bp, Homo sapien
aagcctcaaggaagaggaaggggat

SEQ ID NO: 4049297 - DNA, 25 bp, Homo sapien
ggtcattctcatccttcacgtgcac

SEQ ID NO: 4049298 - DNA, 25 bp, Homo sapien
aggcctggtaccccggctcagccga

SEQ ID NO: 4049299 - DNA, 25 bp, Homo sapien
taccccggctcagccgagctctgta

SEQ ID NO: 4049300 - DNA, 25 bp, Homo sapien
tcattctcatccttcacgtgcacaa

SEQ ID NO: 4049301 - DNA, 25 bp, Homo sapien
ccagaatctggatccatagcaaatg

SEQ ID NO: 4049302 - DNA, 25 bp, Homo sapien
gagtcccctgacagcacgatctggc

SEQ ID NO: 4049303 - DNA, 25 bp, Homo sapien
atgggccctcagttgccttgcctga

SEQ ID NO: 4049304 - DNA, 25 bp, Homo sapien
ggatccatagcaaatgggccctcag

SEQ ID NO: 4049305 - DNA, 25 bp, Homo sapien
tcagccccctcacggggcagcggca

SEQ ID NO: 4049306 - DNA, 25 bp, Homo sapien
cagccccctcacggggcagcggcaa

SEQ ID NO: 4049307 - DNA, 25 bp, Homo sapien
cttcagccccctcacggggcagcgg

SEQ ID NO: 4049308 - DNA, 25 bp, Homo sapien
ttcagccccctcacggggcagcggc

SEQ ID NO: 4049309 - DNA, 25 bp, Homo sapien
tccaccatagttttctggaacttcc

SEQ ID NO: 4049310 - DNA, 25 bp, Homo sapien
caggctctatcttcctgcgtgggca

SEQ ID NO: 4049311 - DNA, 25 bp, Homo sapien
ccaggctctatcttcctgcgtgggc

SEQ ID NO: 4049312 - DNA, 25 bp, Homo sapien
accaggctctatcttcctgcgtggg

SEQ ID NO: 4049313 - DNA, 25 bp, Homo sapien
gcagccacagccaggcagggaccat

SEQ ID NO: 4049314 - DNA, 25 bp, Homo sapien
ctgggggacggagacacaaagcagc

SEQ ID NO: 4049315 - DNA, 25 bp, Homo sapien
tgggggacggagacacaaagcagcc

SEQ ID NO: 4049316 - DNA, 25 bp, Homo sapien
caaagcagccacagccaggcaggga

SEQ ID NO: 4049317 - DNA, 25 bp, Homo sapien
ggtccagctgccaagcaagaagaga

SEQ ID NO: 4049318 - DNA, 25 bp, Homo sapien
tggtccagctgccaagcaagaagag

SEQ ID NO: 4049319 - DNA, 25 bp, Homo sapien
cttggtccagctgccaagcaagaag

SEQ ID NO: 4049320 - DNA, 25 bp, Homo sapien
ttggtccagctgccaagcaagaaga

SEQ ID NO: 4049321 - DNA, 25 bp, Homo sapien
aatagctaccgcactgaagagcctc

SEQ ID NO: 4049322 - DNA, 25 bp, Homo sapien
atcaggaaatagcctttattacaaa

SEQ ID NO: 4049323 - DNA, 25 bp, Homo sapien
gtaaacaaatagctaccgcactgaa

SEQ ID NO: 4049324 - DNA, 25 bp, Homo sapien
cacacccgggctgtgaaaaaaggca

SEQ ID NO: 4049325 - DNA, 25 bp, Homo sapien
ctgcttgggacgcatatgagcctgc

SEQ ID NO: 4049326 - DNA, 25 bp, Homo sapien
ggacgcatatgagcctgcgcatgca

SEQ ID NO: 4049327 - DNA, 25 bp, Homo sapien
gcatatgagcctgcgcatgcatctc

SEQ ID NO: 4049328 - DNA, 25 bp, Homo sapien
gtgcccggctggcagctccgaggga

SEQ ID NO: 4049329 - DNA, 25 bp, Homo sapien
gaagcgcttcgcctttttgccaagg

SEQ ID NO: 4049330 - DNA, 25 bp, Homo sapien
gaaccgagaggtcgtggcaggactt

SEQ ID NO: 4049331 - DNA, 25 bp, Homo sapien
ctgttacgagctacgatgcggccca

SEQ ID NO: 4049332 - DNA, 25 bp, Homo sapien
gatttggcgcgaaaggccatcttgc

SEQ ID NO: 4049333 - DNA, 25 bp, Homo sapien
aacagcgcctggacattgtggtgca

SEQ ID NO: 4049334 - DNA, 25 bp, Homo sapien
tgcttgccgtcgtgcgttggcttct

SEQ ID NO: 4049335 - DNA, 25 bp, Homo sapien
tctttgctgtccctgcgcaggcgta

SEQ ID NO: 4049336 - DNA, 25 bp, Homo sapien
tggcgcacgacaccttcaaacagcg

SEQ ID NO: 4049337 - DNA, 25 bp, Homo sapien
gagaatttgcaaggtcctccccgaa

SEQ ID NO: 4049338 - DNA, 25 bp, Homo sapien
tactgagggtactgggcactgctgc

SEQ ID NO: 4049339 - DNA, 25 bp, Homo sapien
gcgtcacccagtaggcagagtgcct

SEQ ID NO: 4049340 - DNA, 25 bp, Homo sapien
aaacagtggccctcaaaaggagatc

SEQ ID NO: 4049341 - DNA, 25 bp, Homo sapien
agctgcccttgtccgtcactgagta

SEQ ID NO: 4049342 - DNA, 25 bp, Homo sapien
gagacctcacgagagcgcaccaggt

SEQ ID NO: 4049343 - DNA, 25 bp, Homo sapien
catcatctgtttgccgtgcacgccg

SEQ ID NO: 4049344 - DNA, 25 bp, Homo sapien
tctgaggccttctcgaagctgccct

SEQ ID NO: 4049345 - DNA, 25 bp, Homo sapien
atgcccccgacacgagcctggcact

SEQ ID NO: 4049346 - DNA, 25 bp, Homo sapien
cactcccagacctctaacccaactc

SEQ ID NO: 4049347 - DNA, 25 bp, Homo sapien
tcccagacctctaacccaactcact

SEQ ID NO: 4049348 - DNA, 25 bp, Homo sapien
atctgcccaacagtcctcatgcccc

SEQ ID NO: 4049349 - DNA, 25 bp, Homo sapien
tctccgtccactacaatggagcgat

SEQ ID NO: 4049350 - DNA, 25 bp, Homo sapien
gagtgatgcctcttctccgtccact

SEQ ID NO: 4049351 - DNA, 25 bp, Homo sapien
tgctcccaaatgtcgtagaccatga

SEQ ID NO: 4049352 - DNA, 25 bp, Homo sapien
aatgtcgtagaccatgagtgatgcc

SEQ ID NO: 4049353 - DNA, 25 bp, Homo sapien
tcgtccaccggcatgctgcggcggt

SEQ ID NO: 4049354 - DNA, 25 bp, Homo sapien
acaccgccgaagatgcgcgccaggg

SEQ ID NO: 4049355 - DNA, 25 bp, Homo sapien
aagatgcgcgccagggcgctcttgc

SEQ ID NO: 4049356 - DNA, 25 bp, Homo sapien
taaacgctctcgtctgagtcgctgc

SEQ ID NO: 4049357 - DNA, 25 bp, Homo sapien
tcgcacacagacacgctcaggacta

SEQ ID NO: 4049358 - DNA, 25 bp, Homo sapien
gacacgctcaggactaggatccgga

SEQ ID NO: 4049359 - DNA, 25 bp, Homo sapien
acgcactcgtagtccggactcggac

SEQ ID NO: 4049360 - DNA, 25 bp, Homo sapien
taggatccggattaggaggccacgc

SEQ ID NO: 4049361 - DNA, 25 bp, Homo sapien
ccagagccgcctatttaagcctcca

SEQ ID NO: 4049362 - DNA, 25 bp, Homo sapien
ctgctgcgggggctgacgtgtctgt

SEQ ID NO: 4049363 - DNA, 25 bp, Homo sapien
gctccagagccgcctatttaagcct

SEQ ID NO: 4049364 - DNA, 25 bp, Homo sapien
agccgcctatttaagcctccacccg

SEQ ID NO: 4049365 - DNA, 25 bp, Homo sapien
tgtgagggttggtgtcaccccatga

SEQ ID NO: 4049366 - DNA, 25 bp, Homo sapien
tgagggttggtgtcaccccatgagc

SEQ ID NO: 4049367 - DNA, 25 bp, Homo sapien
cttcagtgtgagggttggtgtcacc

SEQ ID NO: 4049368 - DNA, 25 bp, Homo sapien
tcagtgtgagggttggtgtcacccc

SEQ ID NO: 4049369 - DNA, 25 bp, Homo sapien
cccctgtacccttgtgtcctcagat

SEQ ID NO: 4049370 - DNA, 25 bp, Homo sapien
cagatagcatctggggttccagaaa

SEQ ID NO: 4049371 - DNA, 25 bp, Homo sapien
actggcccaggatgcacagatggtg

SEQ ID NO: 4049372 - DNA, 25 bp, Homo sapien
ttcaccatcccctgtacccttgtgt

SEQ ID NO: 4049373 - DNA, 25 bp, Homo sapien
caggctgaggggtcaaaggccaggc

SEQ ID NO: 4049374 - DNA, 25 bp, Homo sapien
gaccaggataccagtatgcaggctg

SEQ ID NO: 4049375 - DNA, 25 bp, Homo sapien
caagaaaacaacggtaacagccctg

SEQ ID NO: 4049376 - DNA, 25 bp, Homo sapien
gattcaagaaaacaacggtaacagc

SEQ ID NO: 4049377 - DNA, 25 bp, Homo sapien
agcgggctgacaggcactgattcac

SEQ ID NO: 4049378 - DNA, 25 bp, Homo sapien
aggagcgggctgacaggcactgatt

SEQ ID NO: 4049379 - DNA, 25 bp, Homo sapien
gggctgacaggcactgattcacaac

SEQ ID NO: 4049380 - DNA, 25 bp, Homo sapien
tcaggagcgggctgacaggcactga

SEQ ID NO: 4049381 - DNA, 25 bp, Homo sapien
gggcagctgccacccgctccttatc

SEQ ID NO: 4049382 - DNA, 25 bp, Homo sapien
agaggtgggtgttctccagggcagc

SEQ ID NO: 4049383 - DNA, 25 bp, Homo sapien
gccacccgctccttatctgcaagtt

SEQ ID NO: 4049384 - DNA, 25 bp, Homo sapien
ctccaagaggtgggtgttctccagg

SEQ ID NO: 4049385 - DNA, 25 bp, Homo sapien
caggaccccacatattgatcaggct

SEQ ID NO: 4049386 - DNA, 25 bp, Homo sapien
tgaagcctgacacactctggtcctg

SEQ ID NO: 4049387 - DNA, 25 bp, Homo sapien
taacccatactgaggagtctctggc

SEQ ID NO: 4049388 - DNA, 25 bp, Homo sapien
gagtcaaagctaggctctggccaga

SEQ ID NO: 4049389 - DNA, 25 bp, Homo sapien
ctgaggcatgggtccccggagtaat

SEQ ID NO: 4049390 - DNA, 25 bp, Homo sapien
catgggtccccggagtaatgtgcac

SEQ ID NO: 4049391 - DNA, 25 bp, Homo sapien
tccccggagtaatgtgcacgtccat

SEQ ID NO: 4049392 - DNA, 25 bp, Homo sapien
tctgaggcatgggtccccggagtaa

SEQ ID NO: 4049393 - DNA, 25 bp, Homo sapien
tgggagggagataaccagggcctga

SEQ ID NO: 4049394 - DNA, 25 bp, Homo sapien
ggagggagataaccagggcctgaac

SEQ ID NO: 4049395 - DNA, 25 bp, Homo sapien
ctgggagggagataaccagggcctg

SEQ ID NO: 4049396 - DNA, 25 bp, Homo sapien
agggagataaccagggcctgaacac

SEQ ID NO: 4049397 - DNA, 25 bp, Homo sapien
cagcagtagaccctcaatgcctggt

SEQ ID NO: 4049398 - DNA, 25 bp, Homo sapien
tctgatgtcctatccatgttcatgc

SEQ ID NO: 4049399 - DNA, 25 bp, Homo sapien
catcctcagcagtagaccctcaatg

SEQ ID NO: 4049400 - DNA, 25 bp, Homo sapien
cccactctgatgtcctatccatgtt

SEQ ID NO: 4049401 - DNA, 25 bp, Homo sapien
gcgcagaagcttgaccttgatggac

SEQ ID NO: 4049402 - DNA, 25 bp, Homo sapien
agggagcgcagaagcttgaccttga

SEQ ID NO: 4049403 - DNA, 25 bp, Homo sapien
aaacgctgaggaagggagcgcagaa

SEQ ID NO: 4049404 - DNA, 25 bp, Homo sapien
cttgaaacgctgaggaagggagcgc

SEQ ID NO: 4049405 - DNA, 25 bp, Homo sapien
ctgcagtgcggaatggttggtgtga

SEQ ID NO: 4049406 - DNA, 25 bp, Homo sapien
gcggaatggttggtgtgaaagccac

SEQ ID NO: 4049407 - DNA, 25 bp, Homo sapien
cagtgcggaatggttggtgtgaaag

SEQ ID NO: 4049408 - DNA, 25 bp, Homo sapien
aagccacagccactgtactctcggg

SEQ ID NO: 4049409 - DNA, 25 bp, Homo sapien
gatacccttcggtgttcgtgagcat

SEQ ID NO: 4049410 - DNA, 25 bp, Homo sapien
tgttttgggcaaatcatccaacttc

SEQ ID NO: 4049411 - DNA, 25 bp, Homo sapien
tctgactctctggaacaactcgctc

SEQ ID NO: 4049412 - DNA, 25 bp, Homo sapien
gagagatgtcaagagtcaaccaccc

SEQ ID NO: 4049413 - DNA, 25 bp, Homo sapien
tagcgtcagtggatgctccgggtca

SEQ ID NO: 4049414 - DNA, 25 bp, Homo sapien
gaacccgcacctgctctactacgtt

SEQ ID NO: 4049415 - DNA, 25 bp, Homo sapien
tccgggtcattgatggagcgaatca

SEQ ID NO: 4049416 - DNA, 25 bp, Homo sapien
tctactacgttcaactcctctagcg

SEQ ID NO: 4049417 - DNA, 25 bp, Homo sapien
gaacgccctgctgggatgcggctcc

SEQ ID NO: 4049418 - DNA, 25 bp, Homo sapien
acttagaaccctctgccaggaacgc

SEQ ID NO: 4049419 - DNA, 25 bp, Homo sapien
gctgctcgatatcactgctcccccc

SEQ ID NO: 4049420 - DNA, 25 bp, Homo sapien
tgcgcccttgcccacttagaaccct

SEQ ID NO: 4049421 - DNA, 25 bp, Homo sapien
ccgcccgcgcccagcagcggcggat

SEQ ID NO: 4049422 - DNA, 25 bp, Homo sapien
cgcgtgcgtcgatgctgtcgggaac

SEQ ID NO: 4049423 - DNA, 25 bp, Homo sapien
cgaagatctcgcgtgcgtcgatgct

SEQ ID NO: 4049424 - DNA, 25 bp, Homo sapien
atctcgcgtgcgtcgatgctgtcgg

SEQ ID NO: 4049425 - DNA, 25 bp, Homo sapien
aagatctcgcgtgcgtcgatgctgt

SEQ ID NO: 4049426 - DNA, 25 bp, Homo sapien
ctccccagagcgctggtagatgagg

SEQ ID NO: 4049427 - DNA, 25 bp, Homo sapien
gccgctccccagagcgctggtagat

SEQ ID NO: 4049428 - DNA, 25 bp, Homo sapien
gcctgccgtcacaggccgctcccca

SEQ ID NO: 4049429 - DNA, 25 bp, Homo sapien
ctcgcctgccgtcacaggccgctcc

SEQ ID NO: 4049430 - DNA, 25 bp, Homo sapien
accaccgctgatcctagcaggcgtg

SEQ ID NO: 4049431 - DNA, 25 bp, Homo sapien
gctgaaacgtagaggccagaaccag

SEQ ID NO: 4049432 - DNA, 25 bp, Homo sapien
acacgccgcgttgtgggttctcggc

SEQ ID NO: 4049433 - DNA, 25 bp, Homo sapien
cctgaggtgcgagagaagcggtgac

SEQ ID NO: 4049434 - DNA, 25 bp, Homo sapien
gggatcctagtgtctcgggacctcc

SEQ ID NO: 4049435 - DNA, 25 bp, Homo sapien
gctggccgggagctcccgtatccag

SEQ ID NO: 4049436 - DNA, 25 bp, Homo sapien
atcctagtgtctcgggacctcccgg

SEQ ID NO: 4049437 - DNA, 25 bp, Homo sapien
tatccaggacggttggtcgcctctg

SEQ ID NO: 4049438 - DNA, 25 bp, Homo sapien
gtttgtcaagtggataaatgaccat

SEQ ID NO: 4049439 - DNA, 25 bp, Homo sapien
agcttggaccggcaggggctcgtga

SEQ ID NO: 4049440 - DNA, 25 bp, Homo sapien
accggcaggggctcgtgaaatgttt

SEQ ID NO: 4049441 - DNA, 25 bp, Homo sapien
ggagtacggcgtccccacagcttgg

SEQ ID NO: 4049442 - DNA, 25 bp, Homo sapien
ccagagcctggtctacagggaaagt

SEQ ID NO: 4049443 - DNA, 25 bp, Homo sapien
tagaattcacgactcttcagactgt

SEQ ID NO: 4049444 - DNA, 25 bp, Homo sapien
tggacatcctgatgaagacacatgt

SEQ ID NO: 4049445 - DNA, 25 bp, Homo sapien
caggtgtccaaggttttatagctcc

SEQ ID NO: 4049446 - DNA, 25 bp, Homo sapien
gccattcattcatacttccgtccat

SEQ ID NO: 4049447 - DNA, 25 bp, Homo sapien
attcacttcgccattcattcatact

SEQ ID NO: 4049448 - DNA, 25 bp, Homo sapien
ctcaggcatgatggcccatacttgt

SEQ ID NO: 4049449 - DNA, 25 bp, Homo sapien
catacttccgtccatccattcagaa

SEQ ID NO: 4049450 - DNA, 25 bp, Homo sapien
caggttgggtatcgccaacaccagc

SEQ ID NO: 4049451 - DNA, 25 bp, Homo sapien
actggatgtacaaagaggcctcttc

SEQ ID NO: 4049452 - DNA, 25 bp, Homo sapien
tctggtgtgggccacactggatgta

SEQ ID NO: 4049453 - DNA, 25 bp, Homo sapien
aagcaggagtggacccggaaatcag

SEQ ID NO: 4049454 - DNA, 25 bp, Homo sapien
cctgaggctccctgaaggcccctcc

SEQ ID NO: 4049455 - DNA, 25 bp, Homo sapien
caggcagaggggattccaggcctca

SEQ ID NO: 4049456 - DNA, 25 bp, Homo sapien
atgcctctgtattctctcttccctg

SEQ ID NO: 4049457 - DNA, 25 bp, Homo sapien
ggattccaggcctcatgcctctgta

SEQ ID NO: 4049458 - DNA, 25 bp, Homo sapien
catcgtgggcgctgcttcttcgtac

SEQ ID NO: 4049459 - DNA, 25 bp, Homo sapien
gaacggtacaagtggctgcgcttca

SEQ ID NO: 4049460 - DNA, 25 bp, Homo sapien
ctcgatgtacgtcagcacgcgggaa

SEQ ID NO: 4049461 - DNA, 25 bp, Homo sapien
tctgtacctgaacgtgtacgcgccg

SEQ ID NO: 4049462 - DNA, 25 bp, Homo sapien
ttatgggaggtcgacccagactgcc

SEQ ID NO: 4049463 - DNA, 25 bp, Homo sapien
tgcctgttgtgtgggacctgcactg

SEQ ID NO: 4049464 - DNA, 25 bp, Homo sapien
ggcaggttgtgacatggagcaaact

SEQ ID NO: 4049465 - DNA, 25 bp, Homo sapien
gccactccaaagtctatacacaggg

SEQ ID NO: 4049466 - DNA, 25 bp, Homo sapien
caaagagcaagaacccttttgaggg

SEQ ID NO: 4049467 - DNA, 25 bp, Homo sapien
ctgggtgatcatcatggatcccccg

SEQ ID NO: 4049468 - DNA, 25 bp, Homo sapien
atcccccgccgacaaagagcaagaa

SEQ ID NO: 4049469 - DNA, 25 bp, Homo sapien
tgctggcagagcacattggtgacct

SEQ ID NO: 4049470 - DNA, 25 bp, Homo sapien
gacagaatagctgttgcagcacaca

SEQ ID NO: 4049471 - DNA, 25 bp, Homo sapien
tatggccgacagaatagctgttgca

SEQ ID NO: 4049472 - DNA, 25 bp, Homo sapien
ccaggtatggccgacagaatagctg

SEQ ID NO: 4049473 - DNA, 25 bp, Homo sapien
ctgccagcatccaggtatggccgac

SEQ ID NO: 4049474 - DNA, 25 bp, Homo sapien
gactggtgttaaacttctgacttcg

SEQ ID NO: 4049475 - DNA, 25 bp, Homo sapien
tggtgttaaacttctgacttcgtga

SEQ ID NO: 4049476 - DNA, 25 bp, Homo sapien
cggcgtcttgcactgtcggctaggc

SEQ ID NO: 4049477 - DNA, 25 bp, Homo sapien
gagacggcgtcttgcactgtcggct

SEQ ID NO: 4049478 - DNA, 25 bp, Homo sapien
catggtagctcagatactaaagacg

SEQ ID NO: 4049479 - DNA, 25 bp, Homo sapien
tgagaagtccttgtacgattattgg

SEQ ID NO: 4049480 - DNA, 25 bp, Homo sapien
gggcaacatctcagtgttactgaag

SEQ ID NO: 4049481 - DNA, 25 bp, Homo sapien
taaatgggttgttaactctaccaga

SEQ ID NO: 4049482 - DNA, 25 bp, Homo sapien
agccaggacccagacccacttattt

SEQ ID NO: 4049483 - DNA, 25 bp, Homo sapien
tttttatggtgatcactaccaccgg

SEQ ID NO: 4049484 - DNA, 25 bp, Homo sapien
ggccaggaggctaagttaaccttca

SEQ ID NO: 4049485 - DNA, 25 bp, Homo sapien
tatttagagttattttggtccacca

SEQ ID NO: 4049486 - DNA, 25 bp, Homo sapien
catctcaaaaaaacacgaggccggg

SEQ ID NO: 4049487 - DNA, 25 bp, Homo sapien
tggagggcacctgtagttacttggg

SEQ ID NO: 4049488 - DNA, 25 bp, Homo sapien
atggtggagggcacctgtagttact

SEQ ID NO: 4049489 - DNA, 25 bp, Homo sapien
agggcacctgtagttacttgggaag

SEQ ID NO: 4049490 - DNA, 25 bp, Homo sapien
ggatttaatttacacccagccatgt

SEQ ID NO: 4049491 - DNA, 25 bp, Homo sapien
atgttttatgatgaccccacctggc

SEQ ID NO: 4049492 - DNA, 25 bp, Homo sapien
gtgtatgctctatgacagaactgct

SEQ ID NO: 4049493 - DNA, 25 bp, Homo sapien
gaattactacaacaagagtggtcga

SEQ ID NO: 4049494 - DNA, 25 bp, Homo sapien
ccatttgttaaagtgtgaactctgt

SEQ ID NO: 4049495 - DNA, 25 bp, Homo sapien
tgcacatatgtctcacatgtcatta

SEQ ID NO: 4049496 - DNA, 25 bp, Homo sapien
tagaaaataccaagacaagctgggc

SEQ ID NO: 4049497 - DNA, 25 bp, Homo sapien
tgttcactgcacatatgtctcacat

SEQ ID NO: 4049498 - DNA, 25 bp, Homo sapien
caccccttgctgcagtgaatctagg

SEQ ID NO: 4049499 - DNA, 25 bp, Homo sapien
ctacaactgagttacgtggccaccc

SEQ ID NO: 4049500 - DNA, 25 bp, Homo sapien
gaccagccgggcatgatgatgctca

SEQ ID NO: 4049501 - DNA, 25 bp, Homo sapien
tggaagccccattaggtgacttgtg

SEQ ID NO: 4049502 - DNA, 25 bp, Homo sapien
catgagtttggttggagatattctc

SEQ ID NO: 4049503 - DNA, 25 bp, Homo sapien
ccttttaaatgctagtaatcagcac

SEQ ID NO: 4049504 - DNA, 25 bp, Homo sapien
tattaactctgtactctgccctaga

SEQ ID NO: 4049505 - DNA, 25 bp, Homo sapien
aaaagggatactggagcttcttcat

SEQ ID NO: 4049506 - DNA, 25 bp, Homo sapien
actgaagtctgaataaggtcattgc

SEQ ID NO: 4049507 - DNA, 25 bp, Homo sapien
ccctgagggaatcgctttttaagtg

SEQ ID NO: 4049508 - DNA, 25 bp, Homo sapien
aaacaataatgcgtcattaaaggcc

SEQ ID NO: 4049509 - DNA, 25 bp, Homo sapien
catgtttacacactcagtgccctaa

SEQ ID NO: 4049510 - DNA, 25 bp, Homo sapien
gctaagggctttcggtccaccagta

SEQ ID NO: 4049511 - DNA, 25 bp, Homo sapien
taaaacttgccttaagctaccagat

SEQ ID NO: 4049512 - DNA, 25 bp, Homo sapien
tttctgtcatttagcaccatgctgc

SEQ ID NO: 4049513 - DNA, 25 bp, Homo sapien
tctccagtagtacaggctttgaaaa

SEQ ID NO: 4049514 - DNA, 25 bp, Homo sapien
gaactcttatttactcatgtatctg

SEQ ID NO: 4049515 - DNA, 25 bp, Homo sapien
gtgcaccgtccaagtattctcttag

SEQ ID NO: 4049516 - DNA, 25 bp, Homo sapien
attctcttagtgcttgctgcttaac

SEQ ID NO: 4049517 - DNA, 25 bp, Homo sapien
gctcttactgcttattgaactctta

SEQ ID NO: 4049518 - DNA, 25 bp, Homo sapien
ccagagctgatgctttgggataggc

SEQ ID NO: 4049519 - DNA, 25 bp, Homo sapien
tgtcgcatcatcaaaaacgtccagg

SEQ ID NO: 4049520 - DNA, 25 bp, Homo sapien
tctctacagtgaacaggtgagtggt

SEQ ID NO: 4049521 - DNA, 25 bp, Homo sapien
gtttattgaaatagcatccctcggt

SEQ ID NO: 4049522 - DNA, 25 bp, Homo sapien
tgtcacccacaatgtggaaagcggg

SEQ ID NO: 4049523 - DNA, 25 bp, Homo sapien
ccatgtctggacaaggagaatgcgg

SEQ ID NO: 4049524 - DNA, 25 bp, Homo sapien
gccctgccaacttagtagaggccag

SEQ ID NO: 4049525 - DNA, 25 bp, Homo sapien
agaacagttcagaggagacccatgg

SEQ ID NO: 4049526 - DNA, 25 bp, Homo sapien
tacccctaggatcttgcaggcctgt

SEQ ID NO: 4049527 - DNA, 25 bp, Homo sapien
caacaagatgggaggtaacggatcc

SEQ ID NO: 4049528 - DNA, 25 bp, Homo sapien
gaagccctagaaataaactgcctgg

SEQ ID NO: 4049529 - DNA, 25 bp, Homo sapien
tgagattctctcactcaagagggcc

SEQ ID NO: 4049530 - DNA, 25 bp, Homo sapien
tgctcagtcccttcatgggtcttgc

SEQ ID NO: 4049531 - DNA, 25 bp, Homo sapien
ggtcttgctaatggaaagtagcata

SEQ ID NO: 4049532 - DNA, 25 bp, Homo sapien
gtcttgctaatggaaagtagcatat

SEQ ID NO: 4049533 - DNA, 25 bp, Homo sapien
tagcaacttgtgatacatagatgac

SEQ ID NO: 4049534 - DNA, 25 bp, Homo sapien
agcaacttgtgatacatagatgaca

SEQ ID NO: 4049535 - DNA, 25 bp, Homo sapien
gaaagactaggtaggaccgtgcact

SEQ ID NO: 4049536 - DNA, 25 bp, Homo sapien
ttcatgaattcaggctgtggcggcc

SEQ ID NO: 4049537 - DNA, 25 bp, Homo sapien
tcagggaagaaccacatacacggca

SEQ ID NO: 4049538 - DNA, 25 bp, Homo sapien
tatagccaggtttgtgtggcgctcc

SEQ ID NO: 4049539 - DNA, 25 bp, Homo sapien
gatgtagtacttgctagcccgcgtg

SEQ ID NO: 4049540 - DNA, 25 bp, Homo sapien
tgggccgcgcatgcacaattacgtc

SEQ ID NO: 4049541 - DNA, 25 bp, Homo sapien
caaatagcgggcgaagtcaaagggt

SEQ ID NO: 4049542 - DNA, 25 bp, Homo sapien
cacataagccagatgtcagcggccg

SEQ ID NO: 4049543 - DNA, 25 bp, Homo sapien
cgctgcgcatagagtaagaggccca

SEQ ID NO: 4049544 - DNA, 25 bp, Homo sapien
agcaatgcgtccctgcgtaggcgca

SEQ ID NO: 4049545 - DNA, 25 bp, Homo sapien
gcgccgtcgcgctgcgcatagagta

SEQ ID NO: 4049546 - DNA, 25 bp, Homo sapien
ctgcacccgcgtcgggtaactggaa

SEQ ID NO: 4049547 - DNA, 25 bp, Homo sapien
tcccggccgtgtcgcaccgccggga

SEQ ID NO: 4049548 - DNA, 25 bp, Homo sapien
gggctccagcgaccgacggttgagc

SEQ ID NO: 4049549 - DNA, 25 bp, Homo sapien
accgacggttgagccccttgcgttg

SEQ ID NO: 4049550 - DNA, 25 bp, Homo sapien
ggttgagccccttgcgttgttctcc

SEQ ID NO: 4049551 - DNA, 25 bp, Homo sapien
catcccctcaatgtcgggccctggg

SEQ ID NO: 4049552 - DNA, 25 bp, Homo sapien
tgaagggacaagaagttcacccatg

SEQ ID NO: 4049553 - DNA, 25 bp, Homo sapien
gcctccctcgcgctgaggccgaatc

SEQ ID NO: 4049554 - DNA, 25 bp, Homo sapien
aggactgcgacccagggccgggcag

SEQ ID NO: 4049555 - DNA, 25 bp, Homo sapien
tggaccgggcccgagccaaatgcag

SEQ ID NO: 4049556 - DNA, 25 bp, Homo sapien
ggcgcagccccggacgccctggcct

SEQ ID NO: 4049557 - DNA, 25 bp, Homo sapien
cgagccaaatgcagcgttggcagga

SEQ ID NO: 4049558 - DNA, 25 bp, Homo sapien
gctcggccctcggaagtggcgcagc

SEQ ID NO: 4049559 - DNA, 25 bp, Homo sapien
caaagtacctgaggcagaatcccca

SEQ ID NO: 4049560 - DNA, 25 bp, Homo sapien
catgagtgaaactgtaagggctggc

SEQ ID NO: 4049561 - DNA, 25 bp, Homo sapien
gcaatagccgcagaaggaaccctaa

SEQ ID NO: 4049562 - DNA, 25 bp, Homo sapien
tgtaagccccgcttctgggatggga

SEQ ID NO: 4049563 - DNA, 25 bp, Homo sapien
ttgcgccatttgagacccacagagc

SEQ ID NO: 4049564 - DNA, 25 bp, Homo sapien
ccaggccgccattgggatcggtcag

SEQ ID NO: 4049565 - DNA, 25 bp, Homo sapien
cagagcgcgcgaacgtctgttggtc

SEQ ID NO: 4049566 - DNA, 25 bp, Homo sapien
aggctggtgagctcgttctcctcga

SEQ ID NO: 4049567 - DNA, 25 bp, Homo sapien
tcagatttcgcagcgcatcctccag

SEQ ID NO: 4049568 - DNA, 25 bp, Homo sapien
gctcagccagttcttcatcccggag

SEQ ID NO: 4049569 - DNA, 25 bp, Homo sapien
ttcacctccgacagagagggcaccg

SEQ ID NO: 4049570 - DNA, 25 bp, Homo sapien
ccgagccgcacttcagatttcgcag

SEQ ID NO: 4049571 - DNA, 25 bp, Homo sapien
ctaggggaatggaacgtgccgtcac

SEQ ID NO: 4049572 - DNA, 25 bp, Homo sapien
catcctgaccctagcccggccgcac

SEQ ID NO: 4049573 - DNA, 25 bp, Homo sapien
ccccatcctgaccctagcccggccg

SEQ ID NO: 4049574 - DNA, 25 bp, Homo sapien
atggaacgtgccgtcacgggggact

SEQ ID NO: 4049575 - DNA, 25 bp, Homo sapien
gatcagctgcgggtcgctgcggtgg

SEQ ID NO: 4049576 - DNA, 25 bp, Homo sapien
cagaatcgcagctgcacgatcagct

SEQ ID NO: 4049577 - DNA, 25 bp, Homo sapien
ctgctgggctaggatgcaactcaaa

SEQ ID NO: 4049578 - DNA, 25 bp, Homo sapien
agctccagttgcagcggcaccgagt

SEQ ID NO: 4049579 - DNA, 25 bp, Homo sapien
ctgcagcacgtccgggctcccgccg

SEQ ID NO: 4049580 - DNA, 25 bp, Homo sapien
tgcagcacgtccgggctcccgccgc

SEQ ID NO: 4049581 - DNA, 25 bp, Homo sapien
agcacgtccgggctcccgccgctct

SEQ ID NO: 4049582 - DNA, 25 bp, Homo sapien
gcagcacgtccgggctcccgccgct

SEQ ID NO: 4049583 - DNA, 25 bp, Homo sapien
tagggtgcagttaccccagagtacc

SEQ ID NO: 4049584 - DNA, 25 bp, Homo sapien
aacaagccgtctgggtaggcggcca

SEQ ID NO: 4049585 - DNA, 25 bp, Homo sapien
caaaagagagggacttcgaagcaca

SEQ ID NO: 4049586 - DNA, 25 bp, Homo sapien
gaccaggatctgtcacagggagcac

SEQ ID NO: 4049587 - DNA, 25 bp, Homo sapien
gatggagcaaaggacgttagtgcac

SEQ ID NO: 4049588 - DNA, 25 bp, Homo sapien
gagaacacacgcctatcctcaaggt

SEQ ID NO: 4049589 - DNA, 25 bp, Homo sapien
tcatacacagactcgagaacacacg

SEQ ID NO: 4049590 - DNA, 25 bp, Homo sapien
aattagtagaaaggagtgagccggc

SEQ ID NO: 4049591 - DNA, 25 bp, Homo sapien
tgcagagccctgtacactgccacct

SEQ ID NO: 4049592 - DNA, 25 bp, Homo sapien
gaccaccttgtccagcgaggactcc

SEQ ID NO: 4049593 - DNA, 25 bp, Homo sapien
gtgcgcgtaggcatccgacaggacc

SEQ ID NO: 4049594 - DNA, 25 bp, Homo sapien
gactccacaaacaggtatgcgctgc

SEQ ID NO: 4049595 - DNA, 25 bp, Homo sapien
cagtagcctcaagtcccacatggtt

SEQ ID NO: 4049596 - DNA, 25 bp, Homo sapien
tccccaccactggttggcatacttg

SEQ ID NO: 4049597 - DNA, 25 bp, Homo sapien
catctcacaggaagccccttgagct

SEQ ID NO: 4049598 - DNA, 25 bp, Homo sapien
gcatacttgggacaggagttcacca

SEQ ID NO: 4049599 - DNA, 25 bp, Homo sapien
tccaggtcgggcttgtgtaccagac

SEQ ID NO: 4049600 - DNA, 25 bp, Homo sapien
aacgctgcgactctggttgagccaa

SEQ ID NO: 4049601 - DNA, 25 bp, Homo sapien
tcttcacttcgaagggcacctgtag

SEQ ID NO: 4049602 - DNA, 25 bp, Homo sapien
tgccttctgagtagacttgagccca

SEQ ID NO: 4049603 - DNA, 25 bp, Homo sapien
gctccgctctactccgccgcttccg

SEQ ID NO: 4049604 - DNA, 25 bp, Homo sapien
aggctccgctctactccgccgcttc

SEQ ID NO: 4049605 - DNA, 25 bp, Homo sapien
ccaggctccgctctactccgccgct

SEQ ID NO: 4049606 - DNA, 25 bp, Homo sapien
cgccaggctccgctctactccgccg

SEQ ID NO: 4049607 - DNA, 25 bp, Homo sapien
gagtgccgcggagaaaaaccgctct

SEQ ID NO: 4049608 - DNA, 25 bp, Homo sapien
tctggacaacagtaccctagtgggc

SEQ ID NO: 4049609 - DNA, 25 bp, Homo sapien
tctaaaaggataggatgcgagttcc

SEQ ID NO: 4049610 - DNA, 25 bp, Homo sapien
cagaattcgaacctagcagtccgga

SEQ ID NO: 4049611 - DNA, 25 bp, Homo sapien
tgaagcagaaccagagccggaactg

SEQ ID NO: 4049612 - DNA, 25 bp, Homo sapien
atgccccgggttgcccagagcttca

SEQ ID NO: 4049613 - DNA, 25 bp, Homo sapien
tctaaagaggctgaaccggagccgg

SEQ ID NO: 4049614 - DNA, 25 bp, Homo sapien
gctggaacccgaggctgaagcagaa

SEQ ID NO: 4049615 - DNA, 25 bp, Homo sapien
agaaagggaccttgagtagacaaag

SEQ ID NO: 4049616 - DNA, 25 bp, Homo sapien
cacttggcagcatatgtaggtacca

SEQ ID NO: 4049617 - DNA, 25 bp, Homo sapien
tgacttctctccacatagggagggc

SEQ ID NO: 4049618 - DNA, 25 bp, Homo sapien
catatgtaggtaccagctcaacccc

SEQ ID NO: 4049619 - DNA, 25 bp, Homo sapien
caggagggcgactcagtttgccaga

SEQ ID NO: 4049620 - DNA, 25 bp, Homo sapien
cagtgacttacacaaaaggcgctct

SEQ ID NO: 4049621 - DNA, 25 bp, Homo sapien
aagaaacacctaggccgtggacgca

SEQ ID NO: 4049622 - DNA, 25 bp, Homo sapien
gagactggagtactgggacaaccaa

SEQ ID NO: 4049623 - DNA, 25 bp, Homo sapien
gggccgcaggtggtccacatcctca

SEQ ID NO: 4049624 - DNA, 25 bp, Homo sapien
cgcaggtggtccacatcctcatagg

SEQ ID NO: 4049625 - DNA, 25 bp, Homo sapien
ctgccggtagcgtgccaagtcctgc

SEQ ID NO: 4049626 - DNA, 25 bp, Homo sapien
cagctgctgccggtagcgtgccaag

SEQ ID NO: 4049627 - DNA, 25 bp, Homo sapien
gcagcctccgttaagcacctggttt

SEQ ID NO: 4049628 - DNA, 25 bp, Homo sapien
tcccatatgatgtccagaaggagcc

SEQ ID NO: 4049629 - DNA, 25 bp, Homo sapien
tcacccaggtcagattcccgggagg

SEQ ID NO: 4049630 - DNA, 25 bp, Homo sapien
cccatcagggtagccgctgagttaa

SEQ ID NO: 4049631 - DNA, 25 bp, Homo sapien
gatgtcgcagaatgcgcacgatgcc

SEQ ID NO: 4049632 - DNA, 25 bp, Homo sapien
tcgcagaatgcgcacgatgccgtcc

SEQ ID NO: 4049633 - DNA, 25 bp, Homo sapien
aatgcgcacgatgccgtccaggtac

SEQ ID NO: 4049634 - DNA, 25 bp, Homo sapien
ctggcgatgtcgcagaatgcgcacg

SEQ ID NO: 4049635 - DNA, 25 bp, Homo sapien
gatggtgtagtagagcagtgcagcg

SEQ ID NO: 4049636 - DNA, 25 bp, Homo sapien
ctgacggaaggacatgcgcgcggcg

SEQ ID NO: 4049637 - DNA, 25 bp, Homo sapien
gcgcgcggcgcggtggatggtgtag

SEQ ID NO: 4049638 - DNA, 25 bp, Homo sapien
tagtagagcagtgcagcgcgccaca

SEQ ID NO: 4049639 - DNA, 25 bp, Homo sapien
gatccacagaggctcacatacatga

SEQ ID NO: 4049640 - DNA, 25 bp, Homo sapien
gaatagtggttagtgccctgcaccc

SEQ ID NO: 4049641 - DNA, 25 bp, Homo sapien
gccatgtgtcctcaagtcaagtcca

SEQ ID NO: 4049642 - DNA, 25 bp, Homo sapien
cctgggtgcccatatcatcttgaac

SEQ ID NO: 4049643 - DNA, 25 bp, Homo sapien
tcccaggcccctttcatgcctaccc

SEQ ID NO: 4049644 - DNA, 25 bp, Homo sapien
ggcccctttcatgcctacccatctg

SEQ ID NO: 4049645 - DNA, 25 bp, Homo sapien
atgcctacccatctgcccggatacc

SEQ ID NO: 4049646 - DNA, 25 bp, Homo sapien
ctctgtaagcagagggcgggaggtg

SEQ ID NO: 4049647 - DNA, 25 bp, Homo sapien
atgccctccaaccagtactggcggg

SEQ ID NO: 4049648 - DNA, 25 bp, Homo sapien
cgccaatgtgggccggctgttctcc

SEQ ID NO: 4049649 - DNA, 25 bp, Homo sapien
ctgcaggtggcagtgctctgagcca

SEQ ID NO: 4049650 - DNA, 25 bp, Homo sapien
gtggcagtgctctgagccatggcca

SEQ ID NO: 4049651 - DNA, 25 bp, Homo sapien
ggcagtgctctgagccatggccacc

SEQ ID NO: 4049652 - DNA, 25 bp, Homo sapien
gcaggtggcagtgctctgagccatg

SEQ ID NO: 4049653 - DNA, 25 bp, Homo sapien
tctgcatgtatttgcgcacaatcga

SEQ ID NO: 4049654 - DNA, 25 bp, Homo sapien
tgtatttgcgcacaatcgaccatat

SEQ ID NO: 4049655 - DNA, 25 bp, Homo sapien
gcgcacaatcgaccatatctggcac

SEQ ID NO: 4049656 - DNA, 25 bp, Homo sapien
tttgcgcacaatcgaccatatctgg

SEQ ID NO: 4049657 - DNA, 25 bp, Homo sapien
ggcctcgcagtacttttccagcaca

SEQ ID NO: 4049658 - DNA, 25 bp, Homo sapien
aatgggactggaagaacttgtctcg

SEQ ID NO: 4049659 - DNA, 25 bp, Homo sapien
agtactatttacagagtaggtgctc

SEQ ID NO: 4049660 - DNA, 25 bp, Homo sapien
tgctctcactgcgacgcatgtggcc

SEQ ID NO: 4049661 - DNA, 25 bp, Homo sapien
cccgccggccagtactatttacaga

SEQ ID NO: 4049662 - DNA, 25 bp, Homo sapien
taggtgctctcactgcgacgcatgt

SEQ ID NO: 4049663 - DNA, 25 bp, Homo sapien
cagggatgggggactggtaggcggg

SEQ ID NO: 4049664 - DNA, 25 bp, Homo sapien
ggatgggggactggtaggcgggctg

SEQ ID NO: 4049665 - DNA, 25 bp, Homo sapien
gatgggggactggtaggcgggctgg

SEQ ID NO: 4049666 - DNA, 25 bp, Homo sapien
gcagggatgggggactggtaggcgg

SEQ ID NO: 4049667 - DNA, 25 bp, Homo sapien
cccctgagtccagcaccattctgtc

SEQ ID NO: 4049668 - DNA, 25 bp, Homo sapien
gatcatacgcctgagcccctgagtc

SEQ ID NO: 4049669 - DNA, 25 bp, Homo sapien
ctgatcatacgcctgagcccctgag

SEQ ID NO: 4049670 - DNA, 25 bp, Homo sapien
agcccctgagtccagcaccattctg

SEQ ID NO: 4049671 - DNA, 25 bp, Homo sapien
atccagccgggtcactccaactccc

SEQ ID NO: 4049672 - DNA, 25 bp, Homo sapien
gggtcacatccagccgggtcactcc

SEQ ID NO: 4049673 - DNA, 25 bp, Homo sapien
ctccaactccccacactgtcgacct

SEQ ID NO: 4049674 - DNA, 25 bp, Homo sapien
ctgggggtcacatccagccgggtca

SEQ ID NO: 4049675 - DNA, 25 bp, Homo sapien
cacagaagggcatgtggagaccagc

SEQ ID NO: 4049676 - DNA, 25 bp, Homo sapien
cagaagggcatgtggagaccagcat

SEQ ID NO: 4049677 - DNA, 25 bp, Homo sapien
gacacagaagggcatgtggagacca

SEQ ID NO: 4049678 - DNA, 25 bp, Homo sapien
gggacacagaagggcatgtggagac

SEQ ID NO: 4049679 - DNA, 25 bp, Homo sapien
gctcccttgcctgctcagtgactca

SEQ ID NO: 4049680 - DNA, 25 bp, Homo sapien
gagctcccttgcctgctcagtgact

SEQ ID NO: 4049681 - DNA, 25 bp, Homo sapien
gctgagctcccttgcctgctcagtg

SEQ ID NO: 4049682 - DNA, 25 bp, Homo sapien
tggagaggctccagctgctgagctc

SEQ ID NO: 4049683 - DNA, 25 bp, Homo sapien
ctctactggactctttccatcagga

SEQ ID NO: 4049684 - DNA, 25 bp, Homo sapien
ctactggactctttccatcaggata

SEQ ID NO: 4049685 - DNA, 25 bp, Homo sapien
tcctctctcctacatcatcaatctc

SEQ ID NO: 4049686 - DNA, 25 bp, Homo sapien
actggactctttccatcaggataaa

SEQ ID NO: 4049687 - DNA, 25 bp, Homo sapien
tcgaaattaccagaatacgcctgtt

SEQ ID NO: 4049688 - DNA, 25 bp, Homo sapien
gtctcgggtccttccgccaagaatg

SEQ ID NO: 4049689 - DNA, 25 bp, Homo sapien
tagtgtcccactgcttcggcgactt

SEQ ID NO: 4049690 - DNA, 25 bp, Homo sapien
tattcctggagcaaactcttaacca

SEQ ID NO: 4049691 - DNA, 25 bp, Homo sapien
gtgacctgcagccaataagtggtgg

SEQ ID NO: 4049692 - DNA, 25 bp, Homo sapien
gagccgtcgccgatgacgtacgtcc

SEQ ID NO: 4049693 - DNA, 25 bp, Homo sapien
tgaactccccgaaggcaggaatggg

SEQ ID NO: 4049694 - DNA, 25 bp, Homo sapien
cactgttggagtctaggtccgtgtc

SEQ ID NO: 4049695 - DNA, 25 bp, Homo sapien
caaggccacagcgagttgctgggct

SEQ ID NO: 4049696 - DNA, 25 bp, Homo sapien
gagactcttgctcacggcctgggcg

SEQ ID NO: 4049697 - DNA, 25 bp, Homo sapien
caggacgggagccaggatactttaa

SEQ ID NO: 4049698 - DNA, 25 bp, Homo sapien
gcctcgggaacgcagtctgcacaga

SEQ ID NO: 4049699 - DNA, 25 bp, Homo sapien
gcagcagggctcgggcgcaggaccc

SEQ ID NO: 4049700 - DNA, 25 bp, Homo sapien
tctgcgagcagcagggctcgggcgc

SEQ ID NO: 4049701 - DNA, 25 bp, Homo sapien
cagcagggctcgggcgcaggacccc

SEQ ID NO: 4049702 - DNA, 25 bp, Homo sapien
ggctgaagaggacgcggcggctcgc

SEQ ID NO: 4049703 - DNA, 25 bp, Homo sapien
taggctgaagaggacgcggcggctc

SEQ ID NO: 4049704 - DNA, 25 bp, Homo sapien
ggctcgcgcggggcgacggcggcag

SEQ ID NO: 4049705 - DNA, 25 bp, Homo sapien
ggcggctcgcgcggggcgacggcgg

SEQ ID NO: 4049706 - DNA, 25 bp, Homo sapien
aagtccccgcgcaggcccaagaggg

SEQ ID NO: 4049707 - DNA, 25 bp, Homo sapien
caagagggcggagacgtggtcctcg

SEQ ID NO: 4049708 - DNA, 25 bp, Homo sapien
cgggacaagtccccgcgcaggccca

SEQ ID NO: 4049709 - DNA, 25 bp, Homo sapien
cccaagagggcggagacgtggtcct

SEQ ID NO: 4049710 - DNA, 25 bp, Homo sapien
ccaaggaggcgcgtcagccccgtcc

SEQ ID NO: 4049711 - DNA, 25 bp, Homo sapien
ctgcaggggcaccaaggaggcgcgt

SEQ ID NO: 4049712 - DNA, 25 bp, Homo sapien
gggcaccaaggaggcgcgtcagccc

SEQ ID NO: 4049713 - DNA, 25 bp, Homo sapien
aggaggcgcgtcagccccgtcctcc

SEQ ID NO: 4049714 - DNA, 25 bp, Homo sapien
agcaccggcgcgcagtgcgcgttct

SEQ ID NO: 4049715 - DNA, 25 bp, Homo sapien
aaattgttgccgcaggccagccacc

SEQ ID NO: 4049716 - DNA, 25 bp, Homo sapien
agctccctcagggcgagcagcaccg

SEQ ID NO: 4049717 - DNA, 25 bp, Homo sapien
ggtcgcggaggtttagcagctccct

SEQ ID NO: 4049718 - DNA, 25 bp, Homo sapien
agggtctcgcgccagccctctctcc

SEQ ID NO: 4049719 - DNA, 25 bp, Homo sapien
gagcacgtcggggtagggtctcgcg

SEQ ID NO: 4049720 - DNA, 25 bp, Homo sapien
gtctgcccgcccaagaagctctcac

SEQ ID NO: 4049721 - DNA, 25 bp, Homo sapien
agccactgagactctcgcccgtctg

SEQ ID NO: 4049722 - DNA, 25 bp, Homo sapien
ggtactggagcaccacggcacgctc

SEQ ID NO: 4049723 - DNA, 25 bp, Homo sapien
gccgcctgggtcctctcgtcggctc

SEQ ID NO: 4049724 - DNA, 25 bp, Homo sapien
gggcagcatcgtgccgcaggcgctc

SEQ ID NO: 4049725 - DNA, 25 bp, Homo sapien
aggcggccttgcatcagcgcgctca

SEQ ID NO: 4049726 - DNA, 25 bp, Homo sapien
aggcgggtgcaggtcgcctctcacc

SEQ ID NO: 4049727 - DNA, 25 bp, Homo sapien
caatcaggcgggtgcaggtcgcctc

SEQ ID NO: 4049728 - DNA, 25 bp, Homo sapien
tcaggcgggtgcaggtcgcctctca

SEQ ID NO: 4049729 - DNA, 25 bp, Homo sapien
gggaggcaatcaggcgggtgcaggt

SEQ ID NO: 4049730 - DNA, 25 bp, Homo sapien
agaagtcccggcagaagcgccccgt

SEQ ID NO: 4049731 - DNA, 25 bp, Homo sapien
ggagctcagggctcgacagccattg

SEQ ID NO: 4049732 - DNA, 25 bp, Homo sapien
cgcgagggcagatccgcgaacaggg

SEQ ID NO: 4049733 - DNA, 25 bp, Homo sapien
ctcgacagccattggcgcgagggca

SEQ ID NO: 4049734 - DNA, 25 bp, Homo sapien
agcgcctccaacaccaagcggtaga

SEQ ID NO: 4049735 - DNA, 25 bp, Homo sapien
aagcggtagatcctcctctgcaact

SEQ ID NO: 4049736 - DNA, 25 bp, Homo sapien
ggtagatcctcctctgcaactcgtc

SEQ ID NO: 4049737 - DNA, 25 bp, Homo sapien
aacaccaagcggtagatcctcctct

SEQ ID NO: 4049738 - DNA, 25 bp, Homo sapien
cagtaggtagggcacgtaatgaggg

SEQ ID NO: 4049739 - DNA, 25 bp, Homo sapien
tgagtgctgacttgtggttgagggc

SEQ ID NO: 4049740 - DNA, 25 bp, Homo sapien
ggcacgtaatgaggggccattgatt

SEQ ID NO: 4049741 - DNA, 25 bp, Homo sapien
ttgagggcggccagtaggtagggca

SEQ ID NO: 4049742 - DNA, 25 bp, Homo sapien
ctcgggagaatcggatcagagcatc

SEQ ID NO: 4049743 - DNA, 25 bp, Homo sapien
cgggagaatcggatcagagcatcac

SEQ ID NO: 4049744 - DNA, 25 bp, Homo sapien
tcgggagaatcggatcagagcatca

SEQ ID NO: 4049745 - DNA, 25 bp, Homo sapien
ccagttctgacagtgccatgccatg

SEQ ID NO: 4049746 - DNA, 25 bp, Homo sapien
tgcactcgctgttgcagtgactcac

SEQ ID NO: 4049747 - DNA, 25 bp, Homo sapien
tgcccagttctgacagtgccatgcc

SEQ ID NO: 4049748 - DNA, 25 bp, Homo sapien
tgccatgccatgcactcgctgttgc

SEQ ID NO: 4049749 - DNA, 25 bp, Homo sapien
aggctggccacacgaatgttctctt

SEQ ID NO: 4049750 - DNA, 25 bp, Homo sapien
caggctggccacacgaatgttctct

SEQ ID NO: 4049751 - DNA, 25 bp, Homo sapien
taataggagccagacgggtctgtgt

SEQ ID NO: 4049752 - DNA, 25 bp, Homo sapien
gccagacgggtctgtgttgggccca

SEQ ID NO: 4049753 - DNA, 25 bp, Homo sapien
ctggcattggtgagtaataggagcc

SEQ ID NO: 4049754 - DNA, 25 bp, Homo sapien
tgagtaataggagccagacgggtct

SEQ ID NO: 4049755 - DNA, 25 bp, Homo sapien
tccagctgctcaatgttctccaagg

SEQ ID NO: 4049756 - DNA, 25 bp, Homo sapien
tggccacaaatgttgcctccagctg

SEQ ID NO: 4049757 - DNA, 25 bp, Homo sapien
gctcaatgttctccaaggtcagaag

SEQ ID NO: 4049758 - DNA, 25 bp, Homo sapien
gggctccagctgggacacatcagcc

SEQ ID NO: 4049759 - DNA, 25 bp, Homo sapien
ggccccaactccaggctccccatca

SEQ ID NO: 4049760 - DNA, 25 bp, Homo sapien
cccaactccaggctccccatcattt

SEQ ID NO: 4049761 - DNA, 25 bp, Homo sapien
ccaactccaggctccccatcatttc

SEQ ID NO: 4049762 - DNA, 25 bp, Homo sapien
tcaggccccaactccaggctcccca

SEQ ID NO: 4049763 - DNA, 25 bp, Homo sapien
tgggcccatagctggaccacgttgt

SEQ ID NO: 4049764 - DNA, 25 bp, Homo sapien
ggcgcaaaccactatgcagcgtgtg

SEQ ID NO: 4049765 - DNA, 25 bp, Homo sapien
tcaggccctgcaaggaggttctgca

SEQ ID NO: 4049766 - DNA, 25 bp, Homo sapien
cacgttgtactgtggcgggcagcaa

SEQ ID NO: 4049767 - DNA, 25 bp, Homo sapien
ctggagcaacccacgggcctggctc

SEQ ID NO: 4049768 - DNA, 25 bp, Homo sapien
cccgtaggggctctagagtctgtaa

SEQ ID NO: 4049769 - DNA, 25 bp, Homo sapien
tagagtctgtaaggcctgggacatg

SEQ ID NO: 4049770 - DNA, 25 bp, Homo sapien
cctgcagttgcttgtgctgggcaac

SEQ ID NO: 4049771 - DNA, 25 bp, Homo sapien
tgcacgccttccaggtatgactgca

SEQ ID NO: 4049772 - DNA, 25 bp, Homo sapien
cagtctgcacgccttccaggtatga

SEQ ID NO: 4049773 - DNA, 25 bp, Homo sapien
agtctgcacgccttccaggtatgac

SEQ ID NO: 4049774 - DNA, 25 bp, Homo sapien
tctgcacgccttccaggtatgactg

SEQ ID NO: 4049775 - DNA, 25 bp, Homo sapien
ctcgcggctgcggtactggcctagc

SEQ ID NO: 4049776 - DNA, 25 bp, Homo sapien
tgctccggccggtagaagatgcctg

SEQ ID NO: 4049777 - DNA, 25 bp, Homo sapien
cgcgattccagggagcaggtacgct

SEQ ID NO: 4049778 - DNA, 25 bp, Homo sapien
agcaggtacgctgcacctcgcggct

SEQ ID NO: 4049779 - DNA, 25 bp, Homo sapien
cagccagtcccatctttgttgccat

SEQ ID NO: 4049780 - DNA, 25 bp, Homo sapien
atctttgttgccatcattcctcccc

SEQ ID NO: 4049781 - DNA, 25 bp, Homo sapien
agtcccatctttgttgccatcattc

SEQ ID NO: 4049782 - DNA, 25 bp, Homo sapien
ttgttgccatcattcctcccctagt

SEQ ID NO: 4049783 - DNA, 25 bp, Homo sapien
ggctgcatctcatccttggctgctg

SEQ ID NO: 4049784 - DNA, 25 bp, Homo sapien
gggacaacgccggctgcatctcatc

SEQ ID NO: 4049785 - DNA, 25 bp, Homo sapien
aacgccggctgcatctcatccttgg

SEQ ID NO: 4049786 - DNA, 25 bp, Homo sapien
gccggctgcatctcatccttggctg

SEQ ID NO: 4049787 - DNA, 25 bp, Homo sapien
caagcaggcagagtagatgcccctg

SEQ ID NO: 4049788 - DNA, 25 bp, Homo sapien
tgtcaagcgagacagagtgggcaca

SEQ ID NO: 4049789 - DNA, 25 bp, Homo sapien
gcacctgggaggctttgcctgctag

SEQ ID NO: 4049790 - DNA, 25 bp, Homo sapien
tctgtctaagcccttctgagaggag

SEQ ID NO: 4049791 - DNA, 25 bp, Homo sapien
ctccagcgtgcagctgaattcctct

SEQ ID NO: 4049792 - DNA, 25 bp, Homo sapien
gaccttggccttgagaacagccctc

SEQ ID NO: 4049793 - DNA, 25 bp, Homo sapien
ttctccctccaaaaatgaccttggc

SEQ ID NO: 4049794 - DNA, 25 bp, Homo sapien
tccagctgactccagcgtgcagctg

SEQ ID NO: 4049795 - DNA, 25 bp, Homo sapien
tactgtgaggacaagacgagcgaaa

SEQ ID NO: 4049796 - DNA, 25 bp, Homo sapien
tagtctctgagcactgtactgtgag

SEQ ID NO: 4049797 - DNA, 25 bp, Homo sapien
gcaaggaaagttccgatggcgtccc

SEQ ID NO: 4049798 - DNA, 25 bp, Homo sapien
ggtaaacacgtttgcattggctgaa

SEQ ID NO: 4049799 - DNA, 25 bp, Homo sapien
cacagaaccgaggagctgccattac

SEQ ID NO: 4049800 - DNA, 25 bp, Homo sapien
gcacttctgtgctcgcagagcaggg

SEQ ID NO: 4049801 - DNA, 25 bp, Homo sapien
ggtccagccctgatgattggcccca

SEQ ID NO: 4049802 - DNA, 25 bp, Homo sapien
ccgtggagccaaagtgtttgcttct

SEQ ID NO: 4049803 - DNA, 25 bp, Homo sapien
catgcctaaggctagctctgatgtg

SEQ ID NO: 4049804 - DNA, 25 bp, Homo sapien
tgggtgggtcaccttgctggaacta

SEQ ID NO: 4049805 - DNA, 25 bp, Homo sapien
ctcccttgggaaggccgcgttgcat

SEQ ID NO: 4049806 - DNA, 25 bp, Homo sapien
ttttgcagcaaaaggaaattgtaat

SEQ ID NO: 4049807 - DNA, 25 bp, Homo sapien
gaaccgcgcggagatcaagaatggc

SEQ ID NO: 4049808 - DNA, 25 bp, Homo sapien
taccggagcgcgatctgttattcac

SEQ ID NO: 4049809 - DNA, 25 bp, Homo sapien
agaatgaccactccacttgcaggcg

SEQ ID NO: 4049810 - DNA, 25 bp, Homo sapien
tccgcggaacgtggtgaagattgcc

SEQ ID NO: 4049811 - DNA, 25 bp, Homo sapien
ttgcgccacctagttgacgcccggg

SEQ ID NO: 4049812 - DNA, 25 bp, Homo sapien
ggtcatcagccgtaatgggctccag

SEQ ID NO: 4049813 - DNA, 25 bp, Homo sapien
tgggctgcagagtaacagtcctgaa

SEQ ID NO: 4049814 - DNA, 25 bp, Homo sapien
gacatgatctttgccagggaggtca

SEQ ID NO: 4049815 - DNA, 25 bp, Homo sapien
catgaacctcatggatgcctccgtg

SEQ ID NO: 4049816 - DNA, 25 bp, Homo sapien
tacaggtggtgtgctacgtgaacat

SEQ ID NO: 4049817 - DNA, 25 bp, Homo sapien
ccctggataggctgctggtgcacct

SEQ ID NO: 4049818 - DNA, 25 bp, Homo sapien
ccctgtggaacgcaaggtgagtgtc

SEQ ID NO: 4049819 - DNA, 25 bp, Homo sapien
tgtgcccgagagttccgcaaactgg

SEQ ID NO: 4049820 - DNA, 25 bp, Homo sapien
tgttgtacttctccagaaacgcgcc

SEQ ID NO: 4049821 - DNA, 25 bp, Homo sapien
tgtacgtactgcaggctctcatgct

SEQ ID NO: 4049822 - DNA, 25 bp, Homo sapien
ggtctgctggccctggacaacatgt

SEQ ID NO: 4049823 - DNA, 25 bp, Homo sapien
taggatttacagcacagacctaggc

SEQ ID NO: 4049824 - DNA, 25 bp, Homo sapien
tggagcccggccttaggtctgagag

SEQ ID NO: 4049825 - DNA, 25 bp, Homo sapien
gaaagaggctactgccaggcggtgt

SEQ ID NO: 4049826 - DNA, 25 bp, Homo sapien
cctgtggcggcaacacgtaggtagc

SEQ ID NO: 4049827 - DNA, 25 bp, Homo sapien
ccagggttggagactgggggagtca

SEQ ID NO: 4049828 - DNA, 25 bp, Homo sapien
gcagtagagggaggcaaaaagcaac

SEQ ID NO: 4049829 - DNA, 25 bp, Homo sapien
gggggagtcaaggaggctgtgctgc

SEQ ID NO: 4049830 - DNA, 25 bp, Homo sapien
ctgcagtagagggaggcaaaaagca

SEQ ID NO: 4049831 - DNA, 25 bp, Homo sapien
cggccatgttgatgccagggcacgt

SEQ ID NO: 4049832 - DNA, 25 bp, Homo sapien
cagagtgttagggtcaggtcagccc

SEQ ID NO: 4049833 - DNA, 25 bp, Homo sapien
cttggaagcgtctgacggcggccat

SEQ ID NO: 4049834 - DNA, 25 bp, Homo sapien
cacgaagcgggactggacacaggac

SEQ ID NO: 4049835 - DNA, 25 bp, Homo sapien
accaagccgttgtctgtgagttctg

SEQ ID NO: 4049836 - DNA, 25 bp, Homo sapien
ctgcagtgactcagcgccaagtgct

SEQ ID NO: 4049837 - DNA, 25 bp, Homo sapien
gcccttgtcactgagtcggctgcag

SEQ ID NO: 4049838 - DNA, 25 bp, Homo sapien
gcaacaggctaagggacagctgcct

SEQ ID NO: 4049839 - DNA, 25 bp, Homo sapien
aggtaaatgccactggagcccacag

SEQ ID NO: 4049840 - DNA, 25 bp, Homo sapien
gggagaggtaaatgccactggagcc

SEQ ID NO: 4049841 - DNA, 25 bp, Homo sapien
ggtaggggagaggtaaatgccactg

SEQ ID NO: 4049842 - DNA, 25 bp, Homo sapien
agaggtaaatgccactggagcccac

SEQ ID NO: 4049843 - DNA, 25 bp, Homo sapien
cagatcctcagcctacccgcacccc

SEQ ID NO: 4049844 - DNA, 25 bp, Homo sapien
tccaagcaaaaagtgggttggccca

SEQ ID NO: 4049845 - DNA, 25 bp, Homo sapien
caagcaaaaagtgggttggcccaga

SEQ ID NO: 4049846 - DNA, 25 bp, Homo sapien
tcagcccccagatcctcagcctacc

SEQ ID NO: 4049847 - DNA, 25 bp, Homo sapien
cttggctaaactggcatcagtcagc

SEQ ID NO: 4049848 - DNA, 25 bp, Homo sapien
ttggctaaactggcatcagtcagct

SEQ ID NO: 4049849 - DNA, 25 bp, Homo sapien
tggctaaactggcatcagtcagctt

SEQ ID NO: 4049850 - DNA, 25 bp, Homo sapien
tggacaggcgtccttggtacctgag

SEQ ID NO: 4049851 - DNA, 25 bp, Homo sapien
tctggacaggcgtccttggtacctg

SEQ ID NO: 4049852 - DNA, 25 bp, Homo sapien
tggctctggacaggcgtccttggta

SEQ ID NO: 4049853 - DNA, 25 bp, Homo sapien
gctctggacaggcgtccttggtacc

SEQ ID NO: 4049854 - DNA, 25 bp, Homo sapien
cttaaatactcctacagagacttgg

SEQ ID NO: 4049855 - DNA, 25 bp, Homo sapien
ttgcccttaaatactcctacagaga

SEQ ID NO: 4049856 - DNA, 25 bp, Homo sapien
gcccttaaatactcctacagagact

SEQ ID NO: 4049857 - DNA, 25 bp, Homo sapien
tcctccaagacctcgagggtcccac

SEQ ID NO: 4049858 - DNA, 25 bp, Homo sapien
gagctccctgcaccacgccaggcgc

SEQ ID NO: 4049859 - DNA, 25 bp, Homo sapien
cgccaggcgcaggactgagaggtgg

SEQ ID NO: 4049860 - DNA, 25 bp, Homo sapien
cctgcaccacgccaggcgcaggact

SEQ ID NO: 4049861 - DNA, 25 bp, Homo sapien
tgcaccacgccaggcgcaggactga

SEQ ID NO: 4049862 - DNA, 25 bp, Homo sapien
agctgggatggagccccgtgcatac

SEQ ID NO: 4049863 - DNA, 25 bp, Homo sapien
tcaatgaagagcagtgggccaggct

SEQ ID NO: 4049864 - DNA, 25 bp, Homo sapien
cttcaatgaagagcagtgggccagg

SEQ ID NO: 4049865 - DNA, 25 bp, Homo sapien
ggccagctgggatggagccccgtgc

SEQ ID NO: 4049866 - DNA, 25 bp, Homo sapien
ccgccctcggccatgtcgaggctct

SEQ ID NO: 4049867 - DNA, 25 bp, Homo sapien
tcccgccctcggccatgtcgaggct

SEQ ID NO: 4049868 - DNA, 25 bp, Homo sapien
ccctcggccatgtcgaggctctgca

SEQ ID NO: 4049869 - DNA, 25 bp, Homo sapien
gccctcggccatgtcgaggctctgc

SEQ ID NO: 4049870 - DNA, 25 bp, Homo sapien
caagagcgccccatcagtcagttct

SEQ ID NO: 4049871 - DNA, 25 bp, Homo sapien
cgccccatcagtcagttctgagcag

SEQ ID NO: 4049872 - DNA, 25 bp, Homo sapien
gagcgccccatcagtcagttctgag

SEQ ID NO: 4049873 - DNA, 25 bp, Homo sapien
cggctcacggccaagagcgccccat

SEQ ID NO: 4049874 - DNA, 25 bp, Homo sapien
ctggaagcacagggtagccacagcc

SEQ ID NO: 4049875 - DNA, 25 bp, Homo sapien
tggaagcacagggtagccacagcct

SEQ ID NO: 4049876 - DNA, 25 bp, Homo sapien
aggtccagggcacgcagcctgccag

SEQ ID NO: 4049877 - DNA, 25 bp, Homo sapien
cctcggggggcaagccagtgccact

SEQ ID NO: 4049878 - DNA, 25 bp, Homo sapien
gggcaagccagtgccactcaggtcc

SEQ ID NO: 4049879 - DNA, 25 bp, Homo sapien
ctgtggagaggtcccggcagctgtg

SEQ ID NO: 4049880 - DNA, 25 bp, Homo sapien
ctaatcgcagcaggttgcagaagga

SEQ ID NO: 4049881 - DNA, 25 bp, Homo sapien
taatcgcagcaggttgcagaaggag

SEQ ID NO: 4049882 - DNA, 25 bp, Homo sapien
atcgcagcaggttgcagaaggagaa

SEQ ID NO: 4049883 - DNA, 25 bp, Homo sapien
aatcgcagcaggttgcagaaggaga

SEQ ID NO: 4049884 - DNA, 25 bp, Homo sapien
tcaggctgggcctagctcgaaggtg

SEQ ID NO: 4049885 - DNA, 25 bp, Homo sapien
gtgaggtggcagtatgccaaggaga

SEQ ID NO: 4049886 - DNA, 25 bp, Homo sapien
ggtcagccaggtctcgcaggccagc

SEQ ID NO: 4049887 - DNA, 25 bp, Homo sapien
ccaggtctcgcaggccagccaggtt

SEQ ID NO: 4049888 - DNA, 25 bp, Homo sapien
tctgtgccatctctggctgagccag

SEQ ID NO: 4049889 - DNA, 25 bp, Homo sapien
gaagaggctattgcagccactgagg

SEQ ID NO: 4049890 - DNA, 25 bp, Homo sapien
tgggcccaggtggtaagcaacagat

SEQ ID NO: 4049891 - DNA, 25 bp, Homo sapien
agcagtgtgcccgaggtgaagaggc

SEQ ID NO: 4049892 - DNA, 25 bp, Homo sapien
ccagagagccatccaggttggtcag

SEQ ID NO: 4049893 - DNA, 25 bp, Homo sapien
ctcttgatggccgagagggaggcag

SEQ ID NO: 4049894 - DNA, 25 bp, Homo sapien
cccaggctcttgatggccgagaggg

SEQ ID NO: 4049895 - DNA, 25 bp, Homo sapien
gacacggggatgttgtatcgcacat

SEQ ID NO: 4049896 - DNA, 25 bp, Homo sapien
ctgggggtagccctctggcttcaga

SEQ ID NO: 4049897 - DNA, 25 bp, Homo sapien
cagcaggcctgggggtagccctctg

SEQ ID NO: 4049898 - DNA, 25 bp, Homo sapien
gcctgggggtagccctctggcttca

SEQ ID NO: 4049899 - DNA, 25 bp, Homo sapien
ggcttcagagggtgctgggcattgg

SEQ ID NO: 4049900 - DNA, 25 bp, Homo sapien
ccgtgccaaggaagttgagctggct

SEQ ID NO: 4049901 - DNA, 25 bp, Homo sapien
tcggggatctcaggtgaaaggtagg

SEQ ID NO: 4049902 - DNA, 25 bp, Homo sapien
caatggatcggggatctcaggtgaa

SEQ ID NO: 4049903 - DNA, 25 bp, Homo sapien
aggtctcctcgtgggcaatggatcg

SEQ ID NO: 4049904 - DNA, 25 bp, Homo sapien
cacaggtctcctcgtgggcaatgga

SEQ ID NO: 4049905 - DNA, 25 bp, Homo sapien
gccctgcccaacttgggctcctctg

SEQ ID NO: 4049906 - DNA, 25 bp, Homo sapien
ctgcccaacttgggctcctctgact

SEQ ID NO: 4049907 - DNA, 25 bp, Homo sapien
ccctgcccaacttgggctcctctga

SEQ ID NO: 4049908 - DNA, 25 bp, Homo sapien
cctgcccaacttgggctcctctgac

SEQ ID NO: 4049909 - DNA, 25 bp, Homo sapien
gagctccttagggaactatgtctta

SEQ ID NO: 4049910 - DNA, 25 bp, Homo sapien
tgtcacagcgctgagcacacgatag

SEQ ID NO: 4049911 - DNA, 25 bp, Homo sapien
tgtacccagagccaagtatgtatga

SEQ ID NO: 4049912 - DNA, 25 bp, Homo sapien
tgagcagggccacgagtaagctgaa

SEQ ID NO: 4049913 - DNA, 25 bp, Homo sapien
gcaggaagctcagaatatatgtgag

SEQ ID NO: 4049914 - DNA, 25 bp, Homo sapien
cccaactcacgagggaggcctcttt

SEQ ID NO: 4049915 - DNA, 25 bp, Homo sapien
ctttctgatctgacagaggcaggaa

SEQ ID NO: 4049916 - DNA, 25 bp, Homo sapien
attctgggcagcacggtaccaagcc

SEQ ID NO: 4049917 - DNA, 25 bp, Homo sapien
taccagtgaggcctagaatgatttg

SEQ ID NO: 4049918 - DNA, 25 bp, Homo sapien
tcctcaggaagtcatgcttggtcct

SEQ ID NO: 4049919 - DNA, 25 bp, Homo sapien
cactggttgttaagatgcgctccca

SEQ ID NO: 4049920 - DNA, 25 bp, Homo sapien
ccagcaagacctagcctgggaggct

SEQ ID NO: 4049921 - DNA, 25 bp, Homo sapien
gagatggagcggacatcttccagaa

SEQ ID NO: 4049922 - DNA, 25 bp, Homo sapien
gaggagacagccacttcaagggaag

SEQ ID NO: 4049923 - DNA, 25 bp, Homo sapien
gatgacagggcagctatcttctggg

SEQ ID NO: 4049924 - DNA, 25 bp, Homo sapien
gagggcctgttctcgcggagatgac

SEQ ID NO: 4049925 - DNA, 25 bp, Homo sapien
aggggcagcgactccgccatcgcat

SEQ ID NO: 4049926 - DNA, 25 bp, Homo sapien
ggggcagcgactccgccatcgcatc

SEQ ID NO: 4049927 - DNA, 25 bp, Homo sapien
gggcagcgactccgccatcgcatcc

SEQ ID NO: 4049928 - DNA, 25 bp, Homo sapien
gcagcgactccgccatcgcatccct

SEQ ID NO: 4049929 - DNA, 25 bp, Homo sapien
tgcatacacacacggctaatactgc

SEQ ID NO: 4049930 - DNA, 25 bp, Homo sapien
tattttgctccgtgcgttcaaggag

SEQ ID NO: 4049931 - DNA, 25 bp, Homo sapien
tcctgcactgcagtccagggtccag

SEQ ID NO: 4049932 - DNA, 25 bp, Homo sapien
taatactgctcaaggcatggctcct

SEQ ID NO: 4049933 - DNA, 25 bp, Homo sapien
ggccaggacccttgcttagtcccag

SEQ ID NO: 4049934 - DNA, 25 bp, Homo sapien
gacccttgcttagtcccagtgcctg

SEQ ID NO: 4049935 - DNA, 25 bp, Homo sapien
agcccactcttcaacgtccttctca

SEQ ID NO: 4049936 - DNA, 25 bp, Homo sapien
aggtcatctccgagcccactcttca

SEQ ID NO: 4049937 - DNA, 25 bp, Homo sapien
gggttgatggggttcaggtgggcag

SEQ ID NO: 4049938 - DNA, 25 bp, Homo sapien
ggggttgatggggttcaggtgggca

SEQ ID NO: 4049939 - DNA, 25 bp, Homo sapien
gttgatggggttcaggtgggcagtg

SEQ ID NO: 4049940 - DNA, 25 bp, Homo sapien
aagacttgcggttgccgcgggaacg

SEQ ID NO: 4049941 - DNA, 25 bp, Homo sapien
tgatgtatcactgggtaaactggag

SEQ ID NO: 4049942 - DNA, 25 bp, Homo sapien
tggtcactgactgcaccagaaggtc

SEQ ID NO: 4049943 - DNA, 25 bp, Homo sapien
cgttccctagcagctaaggcacgag

SEQ ID NO: 4049944 - DNA, 25 bp, Homo sapien
cagcagactcttcatactagcatga

SEQ ID NO: 4049945 - DNA, 25 bp, Homo sapien
ctctgctgcggcgattgtgtgtggt

SEQ ID NO: 4049946 - DNA, 25 bp, Homo sapien
ctcactgctactgggacagaggggt

SEQ ID NO: 4049947 - DNA, 25 bp, Homo sapien
tgcggcgattgtgtgtggtgtcctc

SEQ ID NO: 4049948 - DNA, 25 bp, Homo sapien
gctgggaggagcgaaggaaaccaag

SEQ ID NO: 4049949 - DNA, 25 bp, Homo sapien
gggtgagctgggaggagcgaaggaa

SEQ ID NO: 4049950 - DNA, 25 bp, Homo sapien
gaggtggcagtcaagactaagacct

SEQ ID NO: 4049951 - DNA, 25 bp, Homo sapien
caagactaagacctggaagggcacc

SEQ ID NO: 4049952 - DNA, 25 bp, Homo sapien
caaattcccgcagcgtgtggcagaa

SEQ ID NO: 4049953 - DNA, 25 bp, Homo sapien
ggcaagtccgatactcaagcgcaaa

SEQ ID NO: 4049954 - DNA, 25 bp, Homo sapien
tcttgttgcgctcacggtatgtggc

SEQ ID NO: 4049955 - DNA, 25 bp, Homo sapien
gaactgcatgatgcgcacttcacgg

SEQ ID NO: 4049956 - DNA, 25 bp, Homo sapien
cagtaagtcctgcttattgtctgag

SEQ ID NO: 4049957 - DNA, 25 bp, Homo sapien
gggacagtaagtcctgcttattgtc

SEQ ID NO: 4049958 - DNA, 25 bp, Homo sapien
tcctgcttattgtctgagggagggt

SEQ ID NO: 4049959 - DNA, 25 bp, Homo sapien
taagtcctgcttattgtctgaggga

SEQ ID NO: 4049960 - DNA, 25 bp, Homo sapien
ctattgcagacacggcggtgcacta

SEQ ID NO: 4049961 - DNA, 25 bp, Homo sapien
ggccagctcatgcttggccaagctc

SEQ ID NO: 4049962 - DNA, 25 bp, Homo sapien
ttagcatggcaacacggcgggcaca

SEQ ID NO: 4049963 - DNA, 25 bp, Homo sapien
ggcggtgcactatccttagcatggc

SEQ ID NO: 4049964 - DNA, 25 bp, Homo sapien
cccacaccctgtagacaagacatgg

SEQ ID NO: 4049965 - DNA, 25 bp, Homo sapien
tctcatagactagtgcaagagacac

SEQ ID NO: 4049966 - DNA, 25 bp, Homo sapien
tgtagacaagacatggcccgaggct

SEQ ID NO: 4049967 - DNA, 25 bp, Homo sapien
agcaagggggtgcacatactgtccc

SEQ ID NO: 4049968 - DNA, 25 bp, Homo sapien
tgtagcagtgactgtcgacgcaccg

SEQ ID NO: 4049969 - DNA, 25 bp, Homo sapien
agcagtgactgtcgacgcaccgtgt

SEQ ID NO: 4049970 - DNA, 25 bp, Homo sapien
gactgtcgacgcaccgtgtccttca

SEQ ID NO: 4049971 - DNA, 25 bp, Homo sapien
atggtgtagcagtgactgtcgacgc

SEQ ID NO: 4049972 - DNA, 25 bp, Homo sapien
caggatgcagcggaaggtggcattc

SEQ ID NO: 4049973 - DNA, 25 bp, Homo sapien
ccaccgctaggagggtagccaggat

SEQ ID NO: 4049974 - DNA, 25 bp, Homo sapien
agttgcccaccgctaggagggtagc

SEQ ID NO: 4049975 - DNA, 25 bp, Homo sapien
ttctgtaccagctgttccataccca

SEQ ID NO: 4049976 - DNA, 25 bp, Homo sapien
cccagagttgtagacgagcagcgag

SEQ ID NO: 4049977 - DNA, 25 bp, Homo sapien
catcaggaagttctcggctgggccc

SEQ ID NO: 4049978 - DNA, 25 bp, Homo sapien
agcgaggccgccaatggaggcaaga

SEQ ID NO: 4049979 - DNA, 25 bp, Homo sapien
ctgggcttcctcaatcttctgccgc

SEQ ID NO: 4049980 - DNA, 25 bp, Homo sapien
acccctcagtcatctaggggaggcc

SEQ ID NO: 4049981 - DNA, 25 bp, Homo sapien
ccccaacacccatagctgggtgacc

SEQ ID NO: 4049982 - DNA, 25 bp, Homo sapien
ctcagtcatctaggggaggccccag

SEQ ID NO: 4049983 - DNA, 25 bp, Homo sapien
ggcctgaggcattggtcttgacccc

SEQ ID NO: 4049984 - DNA, 25 bp, Homo sapien
ttgagcagagcagccttaatgacat

SEQ ID NO: 4049985 - DNA, 25 bp, Homo sapien
ttaggccgatgttgatggcgttgct

SEQ ID NO: 4049986 - DNA, 25 bp, Homo sapien
ttgctgacagcaaactcatcaaagt

SEQ ID NO: 4049987 - DNA, 25 bp, Homo sapien
actgtggtcattgtccggcggccct

SEQ ID NO: 4049988 - DNA, 25 bp, Homo sapien
cacgagactcaaagaggtgttccag

SEQ ID NO: 4049989 - DNA, 25 bp, Homo sapien
tcagctcacgccagaaaagttttac

SEQ ID NO: 4049990 - DNA, 25 bp, Homo sapien
aaagcggcttgcagagactccatgg

SEQ ID NO: 4049991 - DNA, 25 bp, Homo sapien
cagtcgggccgtgtccactgagaca

SEQ ID NO: 4049992 - DNA, 25 bp, Homo sapien
ctttcccagcctccacagactctac

SEQ ID NO: 4049993 - DNA, 25 bp, Homo sapien
tgagggagctgggatgtctttccca

SEQ ID NO: 4049994 - DNA, 25 bp, Homo sapien
gggcagccagaggtagaggtggagg

SEQ ID NO: 4049995 - DNA, 25 bp, Homo sapien
gggtactcccgagagcaggggcagt

SEQ ID NO: 4049996 - DNA, 25 bp, Homo sapien
tggtatcagtggctccttgggctct

SEQ ID NO: 4049997 - DNA, 25 bp, Homo sapien
ggtcttcatcctcccctagatctga

SEQ ID NO: 4049998 - DNA, 25 bp, Homo sapien
ccccaatagagagcctgggtgcacg

SEQ ID NO: 4049999 - DNA, 25 bp, Homo sapien
tagatctgaaaagtccaggtcccca

SEQ ID NO: 4050000 - DNA, 25 bp, Homo sapien
aaagggaaggagctgtcagtgccat

SEQ ID NO: 4050001 - DNA, 25 bp, Homo sapien
aagggaaggagctgtcagtgccatg

SEQ ID NO: 4050002 - DNA, 25 bp, Homo sapien
gggaaggagctgtcagtgccatgcc

SEQ ID NO: 4050003 - DNA, 25 bp, Homo sapien
gaaggagctgtcagtgccatgcccc

SEQ ID NO: 4050004 - DNA, 25 bp, Homo sapien
ttctgctgccgccacattctccagg

SEQ ID NO: 4050005 - DNA, 25 bp, Homo sapien
ctgggccagcgcaacctgcttctct

SEQ ID NO: 4050006 - DNA, 25 bp, Homo sapien
gtccacccgcctcattgggcatggc

SEQ ID NO: 4050007 - DNA, 25 bp, Homo sapien
acccgcctcattgggcatggccccg

SEQ ID NO: 4050008 - DNA, 25 bp, Homo sapien
agatgctcctctcgctggaggtgtc

SEQ ID NO: 4050009 - DNA, 25 bp, Homo sapien
tgtagatgctcctctcgctggaggt

SEQ ID NO: 4050010 - DNA, 25 bp, Homo sapien
tagatgctcctctcgctggaggtgt

SEQ ID NO: 4050011 - DNA, 25 bp, Homo sapien
atgctcctctcgctggaggtgtcag

SEQ ID NO: 4050012 - DNA, 25 bp, Homo sapien
ccacagagatggtaggaaaaaggtt

SEQ ID NO: 4050013 - DNA, 25 bp, Homo sapien
gcttggagaccggagggagggccca

SEQ ID NO: 4050014 - DNA, 25 bp, Homo sapien
ctgaagcttggagaccggagggagg

SEQ ID NO: 4050015 - DNA, 25 bp, Homo sapien
tggagaccggagggagggcccacag

SEQ ID NO: 4050016 - DNA, 25 bp, Homo sapien
gaagcttggagaccggagggagggc

SEQ ID NO: 4050017 - DNA, 25 bp, Homo sapien
cagggcggggccggtggaagaggtg

SEQ ID NO: 4050018 - DNA, 25 bp, Homo sapien
gaggcggggcctgtcagcagggcgg

SEQ ID NO: 4050019 - DNA, 25 bp, Homo sapien
agaggtggggcctaccggtgaggcg

SEQ ID NO: 4050020 - DNA, 25 bp, Homo sapien
tggaggcggggcctgtcagcagggc

SEQ ID NO: 4050021 - DNA, 25 bp, Homo sapien
cgccttccagagaacggcggctcct

SEQ ID NO: 4050022 - DNA, 25 bp, Homo sapien
cagaagaaggctttcgtcgttcccg

SEQ ID NO: 4050023 - DNA, 25 bp, Homo sapien
cttccagagaacggcggctcctctt

SEQ ID NO: 4050024 - DNA, 25 bp, Homo sapien
cctcctcagaagaaggctttcgtcg

SEQ ID NO: 4050025 - DNA, 25 bp, Homo sapien
gcttcttcgatgtctccatcctcca

SEQ ID NO: 4050026 - DNA, 25 bp, Homo sapien
cagcgcctggggcttcttcgatgtc

SEQ ID NO: 4050027 - DNA, 25 bp, Homo sapien
ctcgtagagcacaagctgcgtgcgc

SEQ ID NO: 4050028 - DNA, 25 bp, Homo sapien
tgcatccgtcacatcgtagaaggag

SEQ ID NO: 4050029 - DNA, 25 bp, Homo sapien
cgtgcgcaggtcgacgtcagtgccc

SEQ ID NO: 4050030 - DNA, 25 bp, Homo sapien
tgctgctccagtgcatccgtcacat

SEQ ID NO: 4050031 - DNA, 25 bp, Homo sapien
ctggagggcggggataagaaggcaa

SEQ ID NO: 4050032 - DNA, 25 bp, Homo sapien
tggagggcggggataagaaggcaag

SEQ ID NO: 4050033 - DNA, 25 bp, Homo sapien
tacaccaacaactcagggtcagcgc

SEQ ID NO: 4050034 - DNA, 25 bp, Homo sapien
gaccgtgtacaccaacaactcaggg

SEQ ID NO: 4050035 - DNA, 25 bp, Homo sapien
tgagggtgaccgtgtacaccaacaa

SEQ ID NO: 4050036 - DNA, 25 bp, Homo sapien
aactcagggtcagcgccattcttct

SEQ ID NO: 4050037 - DNA, 25 bp, Homo sapien
gccacacagaaagtggagcagtcat

SEQ ID NO: 4050038 - DNA, 25 bp, Homo sapien
tggagcagtcatgggggaacaggta

SEQ ID NO: 4050039 - DNA, 25 bp, Homo sapien
taggagagagggctctgagcggtgg

SEQ ID NO: 4050040 - DNA, 25 bp, Homo sapien
tggggggagaaagggacagtctctg

SEQ ID NO: 4050041 - DNA, 25 bp, Homo sapien
cagagttcactgcacggatgaacag

SEQ ID NO: 4050042 - DNA, 25 bp, Homo sapien
ggatgaacagcggtgcgttgttttc

SEQ ID NO: 4050043 - DNA, 25 bp, Homo sapien
gcgttgttttcggagtattctacaa

SEQ ID NO: 4050044 - DNA, 25 bp, Homo sapien
ggagtattctacaaacaccaacagc

SEQ ID NO: 4050045 - DNA, 25 bp, Homo sapien
actgaatagtgtcactgtgggccac

SEQ ID NO: 4050046 - DNA, 25 bp, Homo sapien
caggctggcacacaatgtgtacagc

SEQ ID NO: 4050047 - DNA, 25 bp, Homo sapien
cactgaatagtgtcactgtgggcca

SEQ ID NO: 4050048 - DNA, 25 bp, Homo sapien
agcagcacccacacggatcaggcag

SEQ ID NO: 4050049 - DNA, 25 bp, Homo sapien
gctctggtagttgtggtcggcagca

SEQ ID NO: 4050050 - DNA, 25 bp, Homo sapien
ctcagcccctctgaatgcacaaatt

SEQ ID NO: 4050051 - DNA, 25 bp, Homo sapien
tctgaatgcacaaattcaggcacca

SEQ ID NO: 4050052 - DNA, 25 bp, Homo sapien
gagtttagggaagcttgggctacac

SEQ ID NO: 4050053 - DNA, 25 bp, Homo sapien
gtttagggaagcttgggctacacac

SEQ ID NO: 4050054 - DNA, 25 bp, Homo sapien
gcaccatgggggagtttagggaagc

SEQ ID NO: 4050055 - DNA, 25 bp, Homo sapien
ttagggaagcttgggctacacactt

SEQ ID NO: 4050056 - DNA, 25 bp, Homo sapien
cggagctcaggaccactggagctat

SEQ ID NO: 4050057 - DNA, 25 bp, Homo sapien
ggagctcaggaccactggagctata

SEQ ID NO: 4050058 - DNA, 25 bp, Homo sapien
tagcgttgaccctcacagagagctg

SEQ ID NO: 4050059 - DNA, 25 bp, Homo sapien
caagatagcgttgaccctcacagag

SEQ ID NO: 4050060 - DNA, 25 bp, Homo sapien
gatcagcgtgggcttccgccctttg

SEQ ID NO: 4050061 - DNA, 25 bp, Homo sapien
cagagagctgggtccgaaggatcag

SEQ ID NO: 4050062 - DNA, 25 bp, Homo sapien
gcctccctggccccatcagttctga

SEQ ID NO: 4050063 - DNA, 25 bp, Homo sapien
cttgcctccctggccccatcagttc

SEQ ID NO: 4050064 - DNA, 25 bp, Homo sapien
cctccctggccccatcagttctgac

SEQ ID NO: 4050065 - DNA, 25 bp, Homo sapien
ttgcctccctggccccatcagttct

SEQ ID NO: 4050066 - DNA, 25 bp, Homo sapien
gacacttgcagagcacaatcctcca

SEQ ID NO: 4050067 - DNA, 25 bp, Homo sapien
gtagtatccggagggagacacttgc

SEQ ID NO: 4050068 - DNA, 25 bp, Homo sapien
cttccagggacagctcggtgtccag

SEQ ID NO: 4050069 - DNA, 25 bp, Homo sapien
tgatctcttcatagaagccctccag

SEQ ID NO: 4050070 - DNA, 25 bp, Homo sapien
gactacgggaggaaccagctgttga

SEQ ID NO: 4050071 - DNA, 25 bp, Homo sapien
tatttgggttgagcacatcacagtg

SEQ ID NO: 4050072 - DNA, 25 bp, Homo sapien
ggcacccacttataggactacggga

SEQ ID NO: 4050073 - DNA, 25 bp, Homo sapien
caactgtacataggacgaagcaatg

SEQ ID NO: 4050074 - DNA, 25 bp, Homo sapien
ggcagagttgctagccccagggaat

SEQ ID NO: 4050075 - DNA, 25 bp, Homo sapien
aggaacttatattcttcaccggagc

SEQ ID NO: 4050076 - DNA, 25 bp, Homo sapien
ttcaccggagctcagtagtgtcctc

SEQ ID NO: 4050077 - DNA, 25 bp, Homo sapien
gcattgtggtaacctagtgtgccac

SEQ ID NO: 4050078 - DNA, 25 bp, Homo sapien
agagtcctggcccggaaacagcgcg

SEQ ID NO: 4050079 - DNA, 25 bp, Homo sapien
aacagcgcgccggaaagggctgcct

SEQ ID NO: 4050080 - DNA, 25 bp, Homo sapien
aggtggtagtgcgcctcccagagtc

SEQ ID NO: 4050081 - DNA, 25 bp, Homo sapien
gagcttgtggaggtggtagtgcgcc

SEQ ID NO: 4050082 - DNA, 25 bp, Homo sapien
ttgagcggcgctcccagcaggcggt

SEQ ID NO: 4050083 - DNA, 25 bp, Homo sapien
cgcggctccggaaagttggcacatg

SEQ ID NO: 4050084 - DNA, 25 bp, Homo sapien
catgcgaaggggtcggtgtcttcca

SEQ ID NO: 4050085 - DNA, 25 bp, Homo sapien
accgcgggtatctgcgcgcccaagg

SEQ ID NO: 4050086 - DNA, 25 bp, Homo sapien
gcacactgtagctccgcggttcggg

SEQ ID NO: 4050087 - DNA, 25 bp, Homo sapien
agcttctactcaaagcacactgtag

SEQ ID NO: 4050088 - DNA, 25 bp, Homo sapien
tactcaaagcacactgtagctccgc

SEQ ID NO: 4050089 - DNA, 25 bp, Homo sapien
tgcagcttctactcaaagcacactg

SEQ ID NO: 4050090 - DNA, 25 bp, Homo sapien
caaatgcagctggtctgatgactga

SEQ ID NO: 4050091 - DNA, 25 bp, Homo sapien
aaggaacccttggagaagcagtggc

SEQ ID NO: 4050092 - DNA, 25 bp, Homo sapien
cacagatctgtatcactgggatagc

SEQ ID NO: 4050093 - DNA, 25 bp, Homo sapien
taaggataacactgaggagtgcgca

SEQ ID NO: 4050094 - DNA, 25 bp, Homo sapien
agcggcaggacaaggaggtcttcca

SEQ ID NO: 4050095 - DNA, 25 bp, Homo sapien
tctgcttcaccaagagcaagccacg

SEQ ID NO: 4050096 - DNA, 25 bp, Homo sapien
tccagcagaacatgaagcggcggct

SEQ ID NO: 4050097 - DNA, 25 bp, Homo sapien
tcattgccagtacaaagccagctgc

SEQ ID NO: 4050098 - DNA, 25 bp, Homo sapien
taatggtgtgactcaggtcatggca

SEQ ID NO: 4050099 - DNA, 25 bp, Homo sapien
gtgactcaggtcatggcaacctctg

SEQ ID NO: 4050100 - DNA, 25 bp, Homo sapien
tggtgtgactcaggtcatggcaacc

SEQ ID NO: 4050101 - DNA, 25 bp, Homo sapien
tgtaatggtgtgactcaggtcatgg

SEQ ID NO: 4050102 - DNA, 25 bp, Homo sapien
gtgcccggccctgtgctaggtgttg

SEQ ID NO: 4050103 - DNA, 25 bp, Homo sapien
tattttcgtttctttgatgaaaata

SEQ ID NO: 4050104 - DNA, 25 bp, Homo sapien
gaaaataatgttcaatttcttgagc

SEQ ID NO: 4050105 - DNA, 25 bp, Homo sapien
tgtgcccggccctgtgctaggtgtt

SEQ ID NO: 4050106 - DNA, 25 bp, Homo sapien
atccagttcaacagaggcagccggc

SEQ ID NO: 4050107 - DNA, 25 bp, Homo sapien
agccggctgtagctcaaggcctcgg

SEQ ID NO: 4050108 - DNA, 25 bp, Homo sapien
cctgggttgaagtagtaattgggct

SEQ ID NO: 4050109 - DNA, 25 bp, Homo sapien
ggtagagccctcgaaacttgacatg

SEQ ID NO: 4050110 - DNA, 25 bp, Homo sapien
cacgtgggatcatgcgacctgtctc

SEQ ID NO: 4050111 - DNA, 25 bp, Homo sapien
tgccttagagccagggaagccgttg

SEQ ID NO: 4050112 - DNA, 25 bp, Homo sapien
taaagggacctcaaatcgcacagct

SEQ ID NO: 4050113 - DNA, 25 bp, Homo sapien
tgctggcagcgggtgaacgtataac

SEQ ID NO: 4050114 - DNA, 25 bp, Homo sapien
cgaacccgaggcatcgtggtgccat

SEQ ID NO: 4050115 - DNA, 25 bp, Homo sapien
gaaggctgtccgacttcacggttcc

SEQ ID NO: 4050116 - DNA, 25 bp, Homo sapien
cggtaggccctgcaacaaggccagg

SEQ ID NO: 4050117 - DNA, 25 bp, Homo sapien
cgaggccgccgtctgttcgaaggct

SEQ ID NO: 4050118 - DNA, 25 bp, Homo sapien
tcgactgtcttcagcgcggttcaca

SEQ ID NO: 4050119 - DNA, 25 bp, Homo sapien
tgccctggcactaagactggcacct

SEQ ID NO: 4050120 - DNA, 25 bp, Homo sapien
tcttcccaggcctgaattgcagttc

SEQ ID NO: 4050121 - DNA, 25 bp, Homo sapien
ccacctttaggagggcgtgatggaa

SEQ ID NO: 4050122 - DNA, 25 bp, Homo sapien
cgagacattgctcccagcgaggaag

SEQ ID NO: 4050123 - DNA, 25 bp, Homo sapien
tccacccagaggtgcgcatggctga

SEQ ID NO: 4050124 - DNA, 25 bp, Homo sapien
tatgtccagaagcatcccacttatg

SEQ ID NO: 4050125 - DNA, 25 bp, Homo sapien
tggcactagaaaggctcagctcaca

SEQ ID NO: 4050126 - DNA, 25 bp, Homo sapien
ctgatgggcacatgcattctgggct

SEQ ID NO: 4050127 - DNA, 25 bp, Homo sapien
tctgggctatctccaattaaaatga

SEQ ID NO: 4050128 - DNA, 25 bp, Homo sapien
attaaaatgagacttggcgggtggg

SEQ ID NO: 4050129 - DNA, 25 bp, Homo sapien
gactgatatgtaccctctgatgggc

SEQ ID NO: 4050130 - DNA, 25 bp, Homo sapien
ccctctggatgagcaggtccatgca

SEQ ID NO: 4050131 - DNA, 25 bp, Homo sapien
tatttcctggcgaagggcagtgtaa

SEQ ID NO: 4050132 - DNA, 25 bp, Homo sapien
aggtccatgcatcggccatatttcc

SEQ ID NO: 4050133 - DNA, 25 bp, Homo sapien
cctcttgtaggtactttcccaggat

SEQ ID NO: 4050134 - DNA, 25 bp, Homo sapien
ctgtacaggcgctcctgggtgtgcc

SEQ ID NO: 4050135 - DNA, 25 bp, Homo sapien
acccagctgtacaggcgctcctggg

SEQ ID NO: 4050136 - DNA, 25 bp, Homo sapien
catccttgaagccggtgatggccag

SEQ ID NO: 4050137 - DNA, 25 bp, Homo sapien
ctgggtgtgccggtcatccttgaag

SEQ ID NO: 4050138 - DNA, 25 bp, Homo sapien
tggctttggggtccttttgcctgat

SEQ ID NO: 4050139 - DNA, 25 bp, Homo sapien
caggaagcagtgacatttctgtgca

SEQ ID NO: 4050140 - DNA, 25 bp, Homo sapien
aggaagcagtgacatttctgtgcat

SEQ ID NO: 4050141 - DNA, 25 bp, Homo sapien
ctcaaagaacatgcagaagccatcg

SEQ ID NO: 4050142 - DNA, 25 bp, Homo sapien
tctccgtggtatagatgatgctgtc

SEQ ID NO: 4050143 - DNA, 25 bp, Homo sapien
tgaggataacccctaggctgtccac

SEQ ID NO: 4050144 - DNA, 25 bp, Homo sapien
gcctgaggttgtccatctccgtggt

SEQ ID NO: 4050145 - DNA, 25 bp, Homo sapien
actgtttgcaattgaccatgtccca

SEQ ID NO: 4050146 - DNA, 25 bp, Homo sapien
tcagatttctgtgtgaggttgattg

SEQ ID NO: 4050147 - DNA, 25 bp, Homo sapien
gctgtcagtggctggaattcccact

SEQ ID NO: 4050148 - DNA, 25 bp, Homo sapien
cttcagggtgccagctctttttggg

SEQ ID NO: 4050149 - DNA, 25 bp, Homo sapien
tccatggagtcctgtcactgcagtc

SEQ ID NO: 4050150 - DNA, 25 bp, Homo sapien
tgtccaggattggtacacaagccac

SEQ ID NO: 4050151 - DNA, 25 bp, Homo sapien
cctggatgggccgagtgtactgctc

SEQ ID NO: 4050152 - DNA, 25 bp, Homo sapien
gagtatgtgctagggttgccagccc

SEQ ID NO: 4050153 - DNA, 25 bp, Homo sapien
accctggcccttctgtcaccacatg

SEQ ID NO: 4050154 - DNA, 25 bp, Homo sapien
tagtgtctctactgaactccaccag

SEQ ID NO: 4050155 - DNA, 25 bp, Homo sapien
ttctttagtgtctctactgaactcc

SEQ ID NO: 4050156 - DNA, 25 bp, Homo sapien
gtgaccctggcccttctgtcaccac

SEQ ID NO: 4050157 - DNA, 25 bp, Homo sapien
ttgtatgcttcacattgtgcaaggg

SEQ ID NO: 4050158 - DNA, 25 bp, Homo sapien
agggatggaatgtggtattcctcca

SEQ ID NO: 4050159 - DNA, 25 bp, Homo sapien
gcttcacattgtgcaagggcttctg

SEQ ID NO: 4050160 - DNA, 25 bp, Homo sapien
gatggaatgtggtattcctccacct

SEQ ID NO: 4050161 - DNA, 25 bp, Homo sapien
taaaaacagtttgccaagtctcagg

SEQ ID NO: 4050162 - DNA, 25 bp, Homo sapien
atgtgatccagtacactctctgagg

SEQ ID NO: 4050163 - DNA, 25 bp, Homo sapien
gcagggtttgtccatatgtgatcca

SEQ ID NO: 4050164 - DNA, 25 bp, Homo sapien
gaatgtgtcggaacatctggccatc

SEQ ID NO: 4050165 - DNA, 25 bp, Homo sapien
tacacagtgatctctgccgtccact

SEQ ID NO: 4050166 - DNA, 25 bp, Homo sapien
ggtggttgcgtaccagtggcttcca

SEQ ID NO: 4050167 - DNA, 25 bp, Homo sapien
tgatgatctgttgtggggaatacac

SEQ ID NO: 4050168 - DNA, 25 bp, Homo sapien
gggaatacacagtgatctctgccgt

SEQ ID NO: 4050169 - DNA, 25 bp, Homo sapien
tccatgggtgccaaagtccttggct

SEQ ID NO: 4050170 - DNA, 25 bp, Homo sapien
cagagctcatatacctcggaaatgg

SEQ ID NO: 4050171 - DNA, 25 bp, Homo sapien
gctccagatgagtcttcaaagcaac

SEQ ID NO: 4050172 - DNA, 25 bp, Homo sapien
ttgattggctcgtaggtgatgtccc

SEQ ID NO: 4050173 - DNA, 25 bp, Homo sapien
tagcgtgctctcgatgcgaagctgg

SEQ ID NO: 4050174 - DNA, 25 bp, Homo sapien
gcagagtccgggtacttgaccagca

SEQ ID NO: 4050175 - DNA, 25 bp, Homo sapien
tacagtcggcttccgtctagcgtgc

SEQ ID NO: 4050176 - DNA, 25 bp, Homo sapien
agagcggtttcacggactccaggct

SEQ ID NO: 4050177 - DNA, 25 bp, Homo sapien
tcaatgtgtgttacaggcttcctgg

SEQ ID NO: 4050178 - DNA, 25 bp, Homo sapien
gaaagcagccatctggccctagcct

SEQ ID NO: 4050179 - DNA, 25 bp, Homo sapien
aagctcttctgtaaccatccaaagg

SEQ ID NO: 4050180 - DNA, 25 bp, Homo sapien
taaagaacggcaaccatggcctgga

SEQ ID NO: 4050181 - DNA, 25 bp, Homo sapien
ggctgggctttctacacccctggct

SEQ ID NO: 4050182 - DNA, 25 bp, Homo sapien
gggctgggctttctacacccctggc

SEQ ID NO: 4050183 - DNA, 25 bp, Homo sapien
tgggctgggctttctacacccctgg

SEQ ID NO: 4050184 - DNA, 25 bp, Homo sapien
cggtaccaccttacggcttcagtga

SEQ ID NO: 4050185 - DNA, 25 bp, Homo sapien
accaccttacggcttcagtgagtgc

SEQ ID NO: 4050186 - DNA, 25 bp, Homo sapien
atccggtaccaccttacggcttcag

SEQ ID NO: 4050187 - DNA, 25 bp, Homo sapien
ccttacggcttcagtgagtgcaggg

SEQ ID NO: 4050188 - DNA, 25 bp, Homo sapien
gggcaggaagcagtagtgcacctcc

SEQ ID NO: 4050189 - DNA, 25 bp, Homo sapien
agccacagcaggttgtcttcagtca

SEQ ID NO: 4050190 - DNA, 25 bp, Homo sapien
aatgaagcggaactcgctgcactcg

SEQ ID NO: 4050191 - DNA, 25 bp, Homo sapien
ctgcactcgcactcgatgagggcca

SEQ ID NO: 4050192 - DNA, 25 bp, Homo sapien
agggtttgctaatacacttccatgt

SEQ ID NO: 4050193 - DNA, 25 bp, Homo sapien
tgtacgccagtagttcagagatgct

SEQ ID NO: 4050194 - DNA, 25 bp, Homo sapien
ggccgtacgcgtagatggtgtttcc

SEQ ID NO: 4050195 - DNA, 25 bp, Homo sapien
tctgcaggccgtacgcgtagatggt

SEQ ID NO: 4050196 - DNA, 25 bp, Homo sapien
aatctggaagctgttgtaaagatta

SEQ ID NO: 4050197 - DNA, 25 bp, Homo sapien
caggttcctcactggcaaagtggag

SEQ ID NO: 4050198 - DNA, 25 bp, Homo sapien
ttcctagcgtactaccaaatacaag

SEQ ID NO: 4050199 - DNA, 25 bp, Homo sapien
cgcctggccgacagccagctaagtt

SEQ ID NO: 4050200 - DNA, 25 bp, Homo sapien
caccactcccagaaaacaagagcat

SEQ ID NO: 4050201 - DNA, 25 bp, Homo sapien
tagtgatgtaaagccatgttactga

SEQ ID NO: 4050202 - DNA, 25 bp, Homo sapien
gagggtcatctcagcaaccaatata

SEQ ID NO: 4050203 - DNA, 25 bp, Homo sapien
cacttattacatttgcccattaaga

SEQ ID NO: 4050204 - DNA, 25 bp, Homo sapien
tagtgcacgtgcctaaatgtggaac

SEQ ID NO: 4050205 - DNA, 25 bp, Homo sapien
aaggcatcagctgcaaacccaatgc

SEQ ID NO: 4050206 - DNA, 25 bp, Homo sapien
caaacccaatgcttgctcatacagc

SEQ ID NO: 4050207 - DNA, 25 bp, Homo sapien
tctctgtcgataaatagcctctggc

SEQ ID NO: 4050208 - DNA, 25 bp, Homo sapien
tcctacaacggatcttaagaacttg

SEQ ID NO: 4050209 - DNA, 25 bp, Homo sapien
tacgttctcctacaacggatcttaa

SEQ ID NO: 4050210 - DNA, 25 bp, Homo sapien
gttctagctaggaagagcagatact

SEQ ID NO: 4050211 - DNA, 25 bp, Homo sapien
ggaagagcagatacttgtataccct

SEQ ID NO: 4050212 - DNA, 25 bp, Homo sapien
ccccattcgccgctttggtgctttt

SEQ ID NO: 4050213 - DNA, 25 bp, Homo sapien
ttagccccaatccttggccacagcg

SEQ ID NO: 4050214 - DNA, 25 bp, Homo sapien
gccgctttggtgcttttggcgcccc

SEQ ID NO: 4050215 - DNA, 25 bp, Homo sapien
cattcgccgctttggtgcttttggc

SEQ ID NO: 4050216 - DNA, 25 bp, Homo sapien
gcgggcttgtgacccggccaataac

SEQ ID NO: 4050217 - DNA, 25 bp, Homo sapien
ggcgggcgggcttgtgacccggcca

SEQ ID NO: 4050218 - DNA, 25 bp, Homo sapien
ggcgggcttgtgacccggccaataa

SEQ ID NO: 4050219 - DNA, 25 bp, Homo sapien
cgggcgggcttgtgacccggccaat

SEQ ID NO: 4050220 - DNA, 25 bp, Homo sapien
atttacatataattagatgcacaca

SEQ ID NO: 4050221 - DNA, 25 bp, Homo sapien
ttacatataattagatgcacacatt

SEQ ID NO: 4050222 - DNA, 25 bp, Homo sapien
tttacatataattagatgcacacat

SEQ ID NO: 4050223 - DNA, 25 bp, Homo sapien
acctcttaacatttgctggtgggag

SEQ ID NO: 4050224 - DNA, 25 bp, Homo sapien
cactcaaggagacgcggtcagctgg

SEQ ID NO: 4050225 - DNA, 25 bp, Homo sapien
tgtctcaagccatactattccgcta

SEQ ID NO: 4050226 - DNA, 25 bp, Homo sapien
ctttgtcttgtgatctgggtcagga

SEQ ID NO: 4050227 - DNA, 25 bp, Homo sapien
aaattaggcacttggccagagcagc

SEQ ID NO: 4050228 - DNA, 25 bp, Homo sapien
gccgcacttggcagggcggtcttcc

SEQ ID NO: 4050229 - DNA, 25 bp, Homo sapien
cagagcagcagcttaaatatgaggc

SEQ ID NO: 4050230 - DNA, 25 bp, Homo sapien
tacaaaaggtgtctttattgaggtc

SEQ ID NO: 4050231 - DNA, 25 bp, Homo sapien
tcttcaccttggcatcgtaggtgcc

SEQ ID NO: 4050232 - DNA, 25 bp, Homo sapien
gagcccgtgtatctgctggtgtccg

SEQ ID NO: 4050233 - DNA, 25 bp, Homo sapien
cgtagccactgtcgtccaggatgtc

SEQ ID NO: 4050234 - DNA, 25 bp, Homo sapien
tcttgtaggcgctcacgtagccact

SEQ ID NO: 4050235 - DNA, 25 bp, Homo sapien
ccattccgtggccacccgagaccag

SEQ ID NO: 4050236 - DNA, 25 bp, Homo sapien
caccccattccgtggccacccgaga

SEQ ID NO: 4050237 - DNA, 25 bp, Homo sapien
ccacaccccattccgtggccacccg

SEQ ID NO: 4050238 - DNA, 25 bp, Homo sapien
attccgtggccacccgagaccagca

SEQ ID NO: 4050239 - DNA, 25 bp, Homo sapien
agtgacgcccacattggctggctct

SEQ ID NO: 4050240 - DNA, 25 bp, Homo sapien
cccacattggctggctctttgcctg

SEQ ID NO: 4050241 - DNA, 25 bp, Homo sapien
tcatagttgatgacccgagcagact

SEQ ID NO: 4050242 - DNA, 25 bp, Homo sapien
gaatctcttggtcgccagctcttcc

SEQ ID NO: 4050243 - DNA, 25 bp, Homo sapien
gcatgtgggcaccatgagggttccc

SEQ ID NO: 4050244 - DNA, 25 bp, Homo sapien
acaggcatgtgggcaccatgagggt

SEQ ID NO: 4050245 - DNA, 25 bp, Homo sapien
tgtgggcaccatgagggttcccctt

SEQ ID NO: 4050246 - DNA, 25 bp, Homo sapien
ctgacaggcatgtgggcaccatgag

SEQ ID NO: 4050247 - DNA, 25 bp, Homo sapien
gatataaggtttgccctggaagaac

SEQ ID NO: 4050248 - DNA, 25 bp, Homo sapien
caaattatgcaattgcgtttctttc

SEQ ID NO: 4050249 - DNA, 25 bp, Homo sapien
aactctggagggcaatagatataag

SEQ ID NO: 4050250 - DNA, 25 bp, Homo sapien
caatagatataaggtttgccctgga

SEQ ID NO: 4050251 - DNA, 25 bp, Homo sapien
cctcctgggaacatgagaagcaggg

SEQ ID NO: 4050252 - DNA, 25 bp, Homo sapien
cccacctcctgggaacatgagaagc

SEQ ID NO: 4050253 - DNA, 25 bp, Homo sapien
gaagcaggggctgcttagggctcac

SEQ ID NO: 4050254 - DNA, 25 bp, Homo sapien
cttcttgatgtcctccctggttcca

SEQ ID NO: 4050255 - DNA, 25 bp, Homo sapien
gtccctgtcacggactttccgtcag

SEQ ID NO: 4050256 - DNA, 25 bp, Homo sapien
tcagccaccttgcagtccttgcaca

SEQ ID NO: 4050257 - DNA, 25 bp, Homo sapien
ttgccattcatctcttgcccactgg

SEQ ID NO: 4050258 - DNA, 25 bp, Homo sapien
tggagaagacgatgtccacatcggt

SEQ ID NO: 4050259 - DNA, 25 bp, Homo sapien
agaaagactgttagggcagcagctg

SEQ ID NO: 4050260 - DNA, 25 bp, Homo sapien
tggctctcagcagggttcagcagat

SEQ ID NO: 4050261 - DNA, 25 bp, Homo sapien
cgggaggcacggtcttgtcactaat

SEQ ID NO: 4050262 - DNA, 25 bp, Homo sapien
atgatgcccacagggaacagagtgg

SEQ ID NO: 4050263 - DNA, 25 bp, Homo sapien
cagcatctctgtaagggtcatgagg

SEQ ID NO: 4050264 - DNA, 25 bp, Homo sapien
tagggcataaccgtggcttcctggc

SEQ ID NO: 4050265 - DNA, 25 bp, Homo sapien
tgtgaagcctggagacggttgctaa

SEQ ID NO: 4050266 - DNA, 25 bp, Homo sapien
gaagctccatgccaagctggcttgg

SEQ ID NO: 4050267 - DNA, 25 bp, Homo sapien
caagggtaacgtccaggggagcttg

SEQ ID NO: 4050268 - DNA, 25 bp, Homo sapien
gggagcttggatgccacagggtgct

SEQ ID NO: 4050269 - DNA, 25 bp, Homo sapien
tgcttggcccaagcactgggcggat

SEQ ID NO: 4050270 - DNA, 25 bp, Homo sapien
aagcactgggcggatcctgcgtgca

SEQ ID NO: 4050271 - DNA, 25 bp, Homo sapien
ggttgcaggccgcagccccatgggt

SEQ ID NO: 4050272 - DNA, 25 bp, Homo sapien
gtggcgctgggttgcaggccgcagc

SEQ ID NO: 4050273 - DNA, 25 bp, Homo sapien
cttggtcatctcagcgcggtcaggt

SEQ ID NO: 4050274 - DNA, 25 bp, Homo sapien
catctcagcgcggtcaggtggcgct

SEQ ID NO: 4050275 - DNA, 25 bp, Homo sapien
atggagtggccacacccgtgaactg

SEQ ID NO: 4050276 - DNA, 25 bp, Homo sapien
ccctcatcgtgcaggatactgattg

SEQ ID NO: 4050277 - DNA, 25 bp, Homo sapien
catctgggtctcctatgggcttcta

SEQ ID NO: 4050278 - DNA, 25 bp, Homo sapien
ggagtcatcaatcagccggaccagg

SEQ ID NO: 4050279 - DNA, 25 bp, Homo sapien
acgacgcaggaatggaccgatggac

SEQ ID NO: 4050280 - DNA, 25 bp, Homo sapien
cctgaagtgtgcgttcggaaggaca

SEQ ID NO: 4050281 - DNA, 25 bp, Homo sapien
ctcgcggctgctcctgaagtgtgcg

SEQ ID NO: 4050282 - DNA, 25 bp, Homo sapien
ttcggaaggacagaacgacgcagga

SEQ ID NO: 4050283 - DNA, 25 bp, Homo sapien
cgggcttctggatggcccgtggccc

SEQ ID NO: 4050284 - DNA, 25 bp, Homo sapien
aggccggccgctctaactcggccct

SEQ ID NO: 4050285 - DNA, 25 bp, Homo sapien
tttattggagcatcacagccggtgg

SEQ ID NO: 4050286 - DNA, 25 bp, Homo sapien
tgttgcatagagagtcaggccggcc

SEQ ID NO: 4050287 - DNA, 25 bp, Homo sapien
aaagtgcactcggtgcggcaaggat

SEQ ID NO: 4050288 - DNA, 25 bp, Homo sapien
ggcggccagagcggcgctgcccagg

SEQ ID NO: 4050289 - DNA, 25 bp, Homo sapien
tgccgcgccagcgtgggctgtcggc

SEQ ID NO: 4050290 - DNA, 25 bp, Homo sapien
cgcctgccgcgccagcgtgggctgt

SEQ ID NO: 4050291 - DNA, 25 bp, Homo sapien
gcgctgcccaggcgcgtctgcgcca

SEQ ID NO: 4050292 - DNA, 25 bp, Homo sapien
cggactctgccgacgccgagtggta

SEQ ID NO: 4050293 - DNA, 25 bp, Homo sapien
cgccgagtggtaggcgccggcaggg

SEQ ID NO: 4050294 - DNA, 25 bp, Homo sapien
tccgcggaatccgtcgacgagctgg

SEQ ID NO: 4050295 - DNA, 25 bp, Homo sapien
tggaatctcgtccacggactctgcc

SEQ ID NO: 4050296 - DNA, 25 bp, Homo sapien
tcccctccctcgagttcccagagca

SEQ ID NO: 4050297 - DNA, 25 bp, Homo sapien
ccctccctcgagttcccagagcagg

SEQ ID NO: 4050298 - DNA, 25 bp, Homo sapien
tgccttcccctccctcgagttccca

SEQ ID NO: 4050299 - DNA, 25 bp, Homo sapien
cctccctcgagttcccagagcagga

SEQ ID NO: 4050300 - DNA, 25 bp, Homo sapien
ccgacgccggatccgaggtctcaga

SEQ ID NO: 4050301 - DNA, 25 bp, Homo sapien
cgaggtctcagacgttcgcacttta

SEQ ID NO: 4050302 - DNA, 25 bp, Homo sapien
gacgttcgcactttatacacgcgcc

SEQ ID NO: 4050303 - DNA, 25 bp, Homo sapien
ttcgcactttatacacgcgcctctt

SEQ ID NO: 4050304 - DNA, 25 bp, Homo sapien
tagaggcttctttctatcccactcc

SEQ ID NO: 4050305 - DNA, 25 bp, Homo sapien
ccaaaagaagcagaggcgagcgcca

SEQ ID NO: 4050306 - DNA, 25 bp, Homo sapien
aagcagaggcgagcgccagggtaga

SEQ ID NO: 4050307 - DNA, 25 bp, Homo sapien
ctatcccactccacctggaccggag

SEQ ID NO: 4050308 - DNA, 25 bp, Homo sapien
cggatccggggaggcagggcgagag

SEQ ID NO: 4050309 - DNA, 25 bp, Homo sapien
ggtcggatccggggaggcagggcga

SEQ ID NO: 4050310 - DNA, 25 bp, Homo sapien
gatccggggaggcagggcgagagtg

SEQ ID NO: 4050311 - DNA, 25 bp, Homo sapien
ctggggtcggatccggggaggcagg

SEQ ID NO: 4050312 - DNA, 25 bp, Homo sapien
aagagggtggtggaggttccgcttg

SEQ ID NO: 4050313 - DNA, 25 bp, Homo sapien
gtggtggaggttccgcttggccacg

SEQ ID NO: 4050314 - DNA, 25 bp, Homo sapien
tggaggttccgcttggccacgggtg

SEQ ID NO: 4050315 - DNA, 25 bp, Homo sapien
gggtggtggaggttccgcttggcca

SEQ ID NO: 4050316 - DNA, 25 bp, Homo sapien
tatgtctgaaggtccgcatgtagaa

SEQ ID NO: 4050317 - DNA, 25 bp, Homo sapien
ctgaaggtccgcatgtagaactcca

SEQ ID NO: 4050318 - DNA, 25 bp, Homo sapien
gctctgggcgcatatgtctgaaggt

SEQ ID NO: 4050319 - DNA, 25 bp, Homo sapien
ggcgcatatgtctgaaggtccgcat

SEQ ID NO: 4050320 - DNA, 25 bp, Homo sapien
gcccccatgggtctataggcccagt

SEQ ID NO: 4050321 - DNA, 25 bp, Homo sapien
catgggtctataggcccagtttaga

SEQ ID NO: 4050322 - DNA, 25 bp, Homo sapien
gcccagtttagagaggctcagccag

SEQ ID NO: 4050323 - DNA, 25 bp, Homo sapien
ggcccagtttagagaggctcagcca

SEQ ID NO: 4050324 - DNA, 25 bp, Homo sapien
agaggaccagccacgatccaggctg

SEQ ID NO: 4050325 - DNA, 25 bp, Homo sapien
ggatccagcctctgaaccaattgtt

SEQ ID NO: 4050326 - DNA, 25 bp, Homo sapien
gagaaacaggcctgagtgtgcatcc

SEQ ID NO: 4050327 - DNA, 25 bp, Homo sapien
tgcacatgcggtggtctccctgcca

SEQ ID NO: 4050328 - DNA, 25 bp, Homo sapien
gcttatgggcaagccctgatcttca

SEQ ID NO: 4050329 - DNA, 25 bp, Homo sapien
ttcacagcaaccctgagggtgcaga

SEQ ID NO: 4050330 - DNA, 25 bp, Homo sapien
agacgcgacccctgagagcaaaggg

SEQ ID NO: 4050331 - DNA, 25 bp, Homo sapien
aggtggtggaacaaacagagccgca

SEQ ID NO: 4050332 - DNA, 25 bp, Homo sapien
tcataggtggtgagcttgtgccaca

SEQ ID NO: 4050333 - DNA, 25 bp, Homo sapien
tggtgggcggtgctgcacgatgtac

SEQ ID NO: 4050334 - DNA, 25 bp, Homo sapien
gacatgactcgagctccctgtgaac

SEQ ID NO: 4050335 - DNA, 25 bp, Homo sapien
aatgggccgcatcttgggaggacat

SEQ ID NO: 4050336 - DNA, 25 bp, Homo sapien
cacgaaccacacatccgtgtgattc

SEQ ID NO: 4050337 - DNA, 25 bp, Homo sapien
gaacacgaaccacacatccgtgtga

SEQ ID NO: 4050338 - DNA, 25 bp, Homo sapien
ggcctgggtctccacgggggcggca

SEQ ID NO: 4050339 - DNA, 25 bp, Homo sapien
aaccacacatccgtgtgattcttca

SEQ ID NO: 4050340 - DNA, 25 bp, Homo sapien
tcaaagtgtcggttggtgcgcagac

SEQ ID NO: 4050341 - DNA, 25 bp, Homo sapien
gacgcccagtaaagcggatgcaaca

SEQ ID NO: 4050342 - DNA, 25 bp, Homo sapien
accaggagcaggacgcccagtaaag

SEQ ID NO: 4050343 - DNA, 25 bp, Homo sapien
gggttgacaaagaactccacgaaga

SEQ ID NO: 4050344 - DNA, 25 bp, Homo sapien
tcgcccacacagttgttgagccact

SEQ ID NO: 4050345 - DNA, 25 bp, Homo sapien
cgaaaccgcacacgcacttgttgca

SEQ ID NO: 4050346 - DNA, 25 bp, Homo sapien
ggtagttccgctcgcccacacagtt

SEQ ID NO: 4050347 - DNA, 25 bp, Homo sapien
cacgcacttgttgcaggcgctgcag

SEQ ID NO: 4050348 - DNA, 25 bp, Homo sapien
catgtgcgtgctggcttcggttgaa

SEQ ID NO: 4050349 - DNA, 25 bp, Homo sapien
catagctcttgtcccgcacgttggc

SEQ ID NO: 4050350 - DNA, 25 bp, Homo sapien
cttcaatgacatgtgcgtgctggct

SEQ ID NO: 4050351 - DNA, 25 bp, Homo sapien
cgcatagctcttgtcccgcacgttg

SEQ ID NO: 4050352 - DNA, 25 bp, Homo sapien
gcaccacaaggtggccagcaaagat

SEQ ID NO: 4050353 - DNA, 25 bp, Homo sapien
tgctggatcgatggagacggcggtc

SEQ ID NO: 4050354 - DNA, 25 bp, Homo sapien
aggtggccagcaaagatggcgccca

SEQ ID NO: 4050355 - DNA, 25 bp, Homo sapien
acggcggtcaggtgcaccacaaggt

SEQ ID NO: 4050356 - DNA, 25 bp, Homo sapien
agcagtgcctgctgtcgccacctag

SEQ ID NO: 4050357 - DNA, 25 bp, Homo sapien
ctggcccagcaggttaaagactcac

SEQ ID NO: 4050358 - DNA, 25 bp, Homo sapien
taggtgcccaatcgcagggtcctgg

SEQ ID NO: 4050359 - DNA, 25 bp, Homo sapien
gctgggagtcctgccccgttccttg

SEQ ID NO: 4050360 - DNA, 25 bp, Homo sapien
gacagcatggctagtctctgaagct

SEQ ID NO: 4050361 - DNA, 25 bp, Homo sapien
gacacggattcggacacttgctacc

SEQ ID NO: 4050362 - DNA, 25 bp, Homo sapien
gctgagtgtctggaatggcctgcca

SEQ ID NO: 4050363 - DNA, 25 bp, Homo sapien
ggagaaccccttgcagacacggatt

SEQ ID NO: 4050364 - DNA, 25 bp, Homo sapien
cgccttctgtctgagttcccttgag

SEQ ID NO: 4050365 - DNA, 25 bp, Homo sapien
ataaaccaggctccgccctaatgtg

SEQ ID NO: 4050366 - DNA, 25 bp, Homo sapien
tctgctcagtgctaaggtccctttc

SEQ ID NO: 4050367 - DNA, 25 bp, Homo sapien
tccctgcttgcaaccctacagtggg

SEQ ID NO: 4050368 - DNA, 25 bp, Homo sapien
gcaagagtccctagcactgaagaga

SEQ ID NO: 4050369 - DNA, 25 bp, Homo sapien
ctactgaggtcttttgttgtgacag

SEQ ID NO: 4050370 - DNA, 25 bp, Homo sapien
ccccagggtcattcattcagctgtc

SEQ ID NO: 4050371 - DNA, 25 bp, Homo sapien
ggcaaacatttactccctgcctgct

SEQ ID NO: 4050372 - DNA, 25 bp, Homo sapien
catgtggagtgccaaccagcagttt

SEQ ID NO: 4050373 - DNA, 25 bp, Homo sapien
gaggaagtattgtctcagctgagac

SEQ ID NO: 4050374 - DNA, 25 bp, Homo sapien
tgcaagaatgcaagaatgagggtct

SEQ ID NO: 4050375 - DNA, 25 bp, Homo sapien
tccagaaggcttacctgaggaagta

SEQ ID NO: 4050376 - DNA, 25 bp, Homo sapien
tagaaggaacattaagatctgtgca

SEQ ID NO: 4050377 - DNA, 25 bp, Homo sapien
tctttgttaactatccttcaattca

SEQ ID NO: 4050378 - DNA, 25 bp, Homo sapien
tttaaaaaacatgcctatagaagga

SEQ ID NO: 4050379 - DNA, 25 bp, Homo sapien
catgcctatagaaggaacattaaga

SEQ ID NO: 4050380 - DNA, 25 bp, Homo sapien
cacttctcaggggacctgagagagc

SEQ ID NO: 4050381 - DNA, 25 bp, Homo sapien
acttctcaggggacctgagagagcc

SEQ ID NO: 4050382 - DNA, 25 bp, Homo sapien
ctcacttctcaggggacctgagaga

SEQ ID NO: 4050383 - DNA, 25 bp, Homo sapien
ttctcaggggacctgagagagcctg

SEQ ID NO: 4050384 - DNA, 25 bp, Homo sapien
aggaaggagagcatataggctggtc

SEQ ID NO: 4050385 - DNA, 25 bp, Homo sapien
atggaaggaaggagagcatataggc

SEQ ID NO: 4050386 - DNA, 25 bp, Homo sapien
tggaaggaaggagagcatataggct

SEQ ID NO: 4050387 - DNA, 25 bp, Homo sapien
gaaggaaggagagcatataggctgg

SEQ ID NO: 4050388 - DNA, 25 bp, Homo sapien
gcaggagctgctcggtcccgtgcag

SEQ ID NO: 4050389 - DNA, 25 bp, Homo sapien
caggagctgctcggtcccgtgcagc

SEQ ID NO: 4050390 - DNA, 25 bp, Homo sapien
aggagctgctcggtcccgtgcagct

SEQ ID NO: 4050391 - DNA, 25 bp, Homo sapien
ggctcttaggcttatcgccgccaac

SEQ ID NO: 4050392 - DNA, 25 bp, Homo sapien
ccaggctcttaggcttatcgccgcc

SEQ ID NO: 4050393 - DNA, 25 bp, Homo sapien
tcttaggcttatcgccgccaaccac

SEQ ID NO: 4050394 - DNA, 25 bp, Homo sapien
gccaaccacccttagaccgccctca

SEQ ID NO: 4050395 - DNA, 25 bp, Homo sapien
caggagtcatctttgtgaaggacac

SEQ ID NO: 4050396 - DNA, 25 bp, Homo sapien
acaggagtcatctttgtgaaggaca

SEQ ID NO: 4050397 - DNA, 25 bp, Homo sapien
cacaggagtcatctttgtgaaggac

SEQ ID NO: 4050398 - DNA, 25 bp, Homo sapien
aggtattttaggcatgcccactcac

SEQ ID NO: 4050399 - DNA, 25 bp, Homo sapien
ccaaggctctcaacccggctttggg

SEQ ID NO: 4050400 - DNA, 25 bp, Homo sapien
gatggactaattactccctacttca

SEQ ID NO: 4050401 - DNA, 25 bp, Homo sapien
gctctgaacacaattagcatcagga

SEQ ID NO: 4050402 - DNA, 25 bp, Homo sapien
gggaacaaggatcccaaagccgatc

SEQ ID NO: 4050403 - DNA, 25 bp, Homo sapien
ccaggccacaatctggagcgggtga

SEQ ID NO: 4050404 - DNA, 25 bp, Homo sapien
agctccacccattccggcgggatcg

SEQ ID NO: 4050405 - DNA, 25 bp, Homo sapien
cacactcttctcaggggccgtcttg

SEQ ID NO: 4050406 - DNA, 25 bp, Homo sapien
tccagagggagaaacagtagagaga

SEQ ID NO: 4050407 - DNA, 25 bp, Homo sapien
gagggagaaacagtagagagagcat

SEQ ID NO: 4050408 - DNA, 25 bp, Homo sapien
ctccagagggagaaacagtagagag

SEQ ID NO: 4050409 - DNA, 25 bp, Homo sapien
cagagggagaaacagtagagagagc

SEQ ID NO: 4050410 - DNA, 25 bp, Homo sapien
tctcccccacggtggacagaaaatc

SEQ ID NO: 4050411 - DNA, 25 bp, Homo sapien
ggtgcccagaaggaggatctgccct

SEQ ID NO: 4050412 - DNA, 25 bp, Homo sapien
gctatcctttgctcagggaaacggg

SEQ ID NO: 4050413 - DNA, 25 bp, Homo sapien
tccttcctgaggtccaaatgcaagt

SEQ ID NO: 4050414 - DNA, 25 bp, Homo sapien
agtagatcctcagtaaatgtttgct

SEQ ID NO: 4050415 - DNA, 25 bp, Homo sapien
gtaaatgtttgctgacttgaaaaca

SEQ ID NO: 4050416 - DNA, 25 bp, Homo sapien
cagtaaatgtttgctgacttgaaaa

SEQ ID NO: 4050417 - DNA, 25 bp, Homo sapien
ctcagtaaatgtttgctgacttgaa

SEQ ID NO: 4050418 - DNA, 25 bp, Homo sapien
tagctcaactaacggatgcgcatca

SEQ ID NO: 4050419 - DNA, 25 bp, Homo sapien
aaactcatgggtttatgcaagcctc

SEQ ID NO: 4050420 - DNA, 25 bp, Homo sapien
tgtaaacaaccgtgcccagtcggga

SEQ ID NO: 4050421 - DNA, 25 bp, Homo sapien
tgagatttaacagatgcccagttga

SEQ ID NO: 4050422 - DNA, 25 bp, Homo sapien
cagcatcgctctcctacagtgtttg

SEQ ID NO: 4050423 - DNA, 25 bp, Homo sapien
tagattggcagaactaggatggccc

SEQ ID NO: 4050424 - DNA, 25 bp, Homo sapien
ggccctcaactgacttcccggtatg

SEQ ID NO: 4050425 - DNA, 25 bp, Homo sapien
caactgttcttgtagatccctgtag

SEQ ID NO: 4050426 - DNA, 25 bp, Homo sapien
tcagaccctcgcggtagggacggtc

SEQ ID NO: 4050427 - DNA, 25 bp, Homo sapien
cggaggccgtgccagatgggccctg

SEQ ID NO: 4050428 - DNA, 25 bp, Homo sapien
ccaaagtcagccagaggttcgggcc

SEQ ID NO: 4050429 - DNA, 25 bp, Homo sapien
catcccggacggagactgggccggt

SEQ ID NO: 4050430 - DNA, 25 bp, Homo sapien
tatttgcataccagcggtgagggac

SEQ ID NO: 4050431 - DNA, 25 bp, Homo sapien
taacaatagctactgcctagggctg

SEQ ID NO: 4050432 - DNA, 25 bp, Homo sapien
aaagaagtgctctcccttgcctggg

SEQ ID NO: 4050433 - DNA, 25 bp, Homo sapien
gaatcgcttaatgagggctcccggg

SEQ ID NO: 4050434 - DNA, 25 bp, Homo sapien
ccaggtttctgaccaaggcgggttg

SEQ ID NO: 4050435 - DNA, 25 bp, Homo sapien
ggctagcgccagtacacttgctgct

SEQ ID NO: 4050436 - DNA, 25 bp, Homo sapien
cagttgctatatctgtggtgcccag

SEQ ID NO: 4050437 - DNA, 25 bp, Homo sapien
gttcccaatgggtgaggctagcgcc

SEQ ID NO: 4050438 - DNA, 25 bp, Homo sapien
ggacacaagtgcttacaaacacagg

SEQ ID NO: 4050439 - DNA, 25 bp, Homo sapien
ggcacacaaggtcatgtacccaagg

SEQ ID NO: 4050440 - DNA, 25 bp, Homo sapien
tctccctttaggtgggtctggctcc

SEQ ID NO: 4050441 - DNA, 25 bp, Homo sapien
gcatagggagtgacacaaccaaatg

SEQ ID NO: 4050442 - DNA, 25 bp, Homo sapien
ggagacctaggtgcttcctctgaca

SEQ ID NO: 4050443 - DNA, 25 bp, Homo sapien
tcccgaacaagcgtgagtggcatgt

SEQ ID NO: 4050444 - DNA, 25 bp, Homo sapien
tcccaggcaggttttgtggccgcga

SEQ ID NO: 4050445 - DNA, 25 bp, Homo sapien
cggttgtgcgtgtcctcaggtgtcc

SEQ ID NO: 4050446 - DNA, 25 bp, Homo sapien
gcctgaaggcctgcggcgccgcttc

SEQ ID NO: 4050447 - DNA, 25 bp, Homo sapien
ctgcctgaaggcctgcggcgccgct

SEQ ID NO: 4050448 - DNA, 25 bp, Homo sapien
tgcctgaaggcctgcggcgccgctt

SEQ ID NO: 4050449 - DNA, 25 bp, Homo sapien
gatagtgcctctgcaaactaaggag

SEQ ID NO: 4050450 - DNA, 25 bp, Homo sapien
ctcaggattgtttctcggcaccagt

SEQ ID NO: 4050451 - DNA, 25 bp, Homo sapien
tgagggctaaatcccaagtgtctct

SEQ ID NO: 4050452 - DNA, 25 bp, Homo sapien
aacgctctaccctgcagcttggaga

SEQ ID NO: 4050453 - DNA, 25 bp, Homo sapien
tgtttggagggggtcactgactggc

SEQ ID NO: 4050454 - DNA, 25 bp, Homo sapien
ccgtgtgacagggtggcaactcctg

SEQ ID NO: 4050455 - DNA, 25 bp, Homo sapien
cagtgtggccgtgtgacagggtggc

SEQ ID NO: 4050456 - DNA, 25 bp, Homo sapien
tttcttctaaaatgcggcaggtgct

SEQ ID NO: 4050457 - DNA, 25 bp, Homo sapien
tgagccacaggcttgtcacagacca

SEQ ID NO: 4050458 - DNA, 25 bp, Homo sapien
tgggcagccgctaggacagcgtact

SEQ ID NO: 4050459 - DNA, 25 bp, Homo sapien
ccagggttctcaggtcagggagtta

SEQ ID NO: 4050460 - DNA, 25 bp, Homo sapien
catcagcggctgtaaccacagggct

SEQ ID NO: 4050461 - DNA, 25 bp, Homo sapien
tggcgctgggcgatacattcagcga

SEQ ID NO: 4050462 - DNA, 25 bp, Homo sapien
atgtagttgtcgattttggcgcggt

SEQ ID NO: 4050463 - DNA, 25 bp, Homo sapien
tgttgcgacactcctgctccttgag

SEQ ID NO: 4050464 - DNA, 25 bp, Homo sapien
cagcgatccacacgatgttgcgaca

SEQ ID NO: 4050465 - DNA, 25 bp, Homo sapien
tgcaccctcgaagagcagcttgtac

SEQ ID NO: 4050466 - DNA, 25 bp, Homo sapien
aagaatcggtcctccagcgtcttgt

SEQ ID NO: 4050467 - DNA, 25 bp, Homo sapien
cttgtctccagggttgctacctgca

SEQ ID NO: 4050468 - DNA, 25 bp, Homo sapien
ctcgtgctcaaagaatcggtcctcc

SEQ ID NO: 4050469 - DNA, 25 bp, Homo sapien
atcggccacgttcttgacctgttca

SEQ ID NO: 4050470 - DNA, 25 bp, Homo sapien
gcttggcacggtcctctttggacag

SEQ ID NO: 4050471 - DNA, 25 bp, Homo sapien
gttcatagtcgtcagcccgagccag

SEQ ID NO: 4050472 - DNA, 25 bp, Homo sapien
gaaagagcttggcacggtcctcttt

SEQ ID NO: 4050473 - DNA, 25 bp, Homo sapien
ctgtgccgaaagaattgatggtgat

SEQ ID NO: 4050474 - DNA, 25 bp, Homo sapien
cccagtagggtgcagaacttgtaga

SEQ ID NO: 4050475 - DNA, 25 bp, Homo sapien
gtgcagaacttgtagaaggactcca

SEQ ID NO: 4050476 - DNA, 25 bp, Homo sapien
gggcacatggcatcagccgtagtcc

SEQ ID NO: 4050477 - DNA, 25 bp, Homo sapien
atcagccgtagtcccgcccagtagg

SEQ ID NO: 4050478 - DNA, 25 bp, Homo sapien
ggttattgcctacacggacgtcagc

SEQ ID NO: 4050479 - DNA, 25 bp, Homo sapien
gaaagcttttcataccgaggtctga

SEQ ID NO: 4050480 - DNA, 25 bp, Homo sapien
aatctgtaccaatcccaggagaggc

SEQ ID NO: 4050481 - DNA, 25 bp, Homo sapien
tggatgatcttacgggccccatggg

SEQ ID NO: 4050482 - DNA, 25 bp, Homo sapien
gcaatagcttaggtagggcggttcc

SEQ ID NO: 4050483 - DNA, 25 bp, Homo sapien
gaggacctagctatgcctcgccaga

SEQ ID NO: 4050484 - DNA, 25 bp, Homo sapien
caagcttgggaacctacgagggaca

SEQ ID NO: 4050485 - DNA, 25 bp, Homo sapien
cagtctatgctacagcctggtggga

SEQ ID NO: 4050486 - DNA, 25 bp, Homo sapien
ttcatctcgtcaaggtcctgctctg

SEQ ID NO: 4050487 - DNA, 25 bp, Homo sapien
tgatctcgatgttcatctcgtcaag

SEQ ID NO: 4050488 - DNA, 25 bp, Homo sapien
tcgatgttcatctcgtcaaggtcct

SEQ ID NO: 4050489 - DNA, 25 bp, Homo sapien
gatgttcatctcgtcaaggtcctgc

SEQ ID NO: 4050490 - DNA, 25 bp, Homo sapien
ctgagcttctcctgcctccttgctc

SEQ ID NO: 4050491 - DNA, 25 bp, Homo sapien
tcagggtcgccccccagcgggtcca

SEQ ID NO: 4050492 - DNA, 25 bp, Homo sapien
caccactgcccacctcccatgacca

SEQ ID NO: 4050493 - DNA, 25 bp, Homo sapien
cctgatgcgctgatgctgacaccac

SEQ ID NO: 4050494 - DNA, 25 bp, Homo sapien
ctgatgcgctgatgctgacaccact

SEQ ID NO: 4050495 - DNA, 25 bp, Homo sapien
tgacaccactgcccacctcccatga

SEQ ID NO: 4050496 - DNA, 25 bp, Homo sapien
acttgggcacgagctcagcgatgga

SEQ ID NO: 4050497 - DNA, 25 bp, Homo sapien
tcgaagctgcctagtgggtggcact

SEQ ID NO: 4050498 - DNA, 25 bp, Homo sapien
ccagaatggcattgtagagctcagc

SEQ ID NO: 4050499 - DNA, 25 bp, Homo sapien
tgtctgagcaatgttcacggcctcc

SEQ ID NO: 4050500 - DNA, 25 bp, Homo sapien
ggactgggacacgagctaactaccc

SEQ ID NO: 4050501 - DNA, 25 bp, Homo sapien
gctgactcatgggtgctgcggataa

SEQ ID NO: 4050502 - DNA, 25 bp, Homo sapien
gaacagtgttctaacaggacacagg

SEQ ID NO: 4050503 - DNA, 25 bp, Homo sapien
gcaatagcaaggagcccatcaaggt

SEQ ID NO: 4050504 - DNA, 25 bp, Homo sapien
cagtctgtcaccaaagatgaactca

SEQ ID NO: 4050505 - DNA, 25 bp, Homo sapien
gcagtagccacaactatcctccagt

SEQ ID NO: 4050506 - DNA, 25 bp, Homo sapien
gcagtaagccccattccacagttag

SEQ ID NO: 4050507 - DNA, 25 bp, Homo sapien
tatgagggagctaaatgaggcctag

SEQ ID NO: 4050508 - DNA, 25 bp, Homo sapien
ccaggtgccctccccgtgcagtcca

SEQ ID NO: 4050509 - DNA, 25 bp, Homo sapien
tgccctccccgtgcagtccaggtgc

SEQ ID NO: 4050510 - DNA, 25 bp, Homo sapien
gtgccctccccgtgcagtccaggtg

SEQ ID NO: 4050511 - DNA, 25 bp, Homo sapien
aggtgccctccccgtgcagtccagg

SEQ ID NO: 4050512 - DNA, 25 bp, Homo sapien
gcgagtggctcataggcatggttcc

SEQ ID NO: 4050513 - DNA, 25 bp, Homo sapien
taatgaagtctaggaagctggcgag

SEQ ID NO: 4050514 - DNA, 25 bp, Homo sapien
tcatgtggcggaactccaccaccat

SEQ ID NO: 4050515 - DNA, 25 bp, Homo sapien
ggtcatcgatgactgacaccgtcag

SEQ ID NO: 4050516 - DNA, 25 bp, Homo sapien
catgctcactatccccagccatgtc

SEQ ID NO: 4050517 - DNA, 25 bp, Homo sapien
aacctctctgacttaggtcctgcca

SEQ ID NO: 4050518 - DNA, 25 bp, Homo sapien
ggccttaaactctccgctactccta

SEQ ID NO: 4050519 - DNA, 25 bp, Homo sapien
tttttaaaacacaaggcagaccatg

SEQ ID NO: 4050520 - DNA, 25 bp, Homo sapien
catcactgtcccttgtgttattctt

SEQ ID NO: 4050521 - DNA, 25 bp, Homo sapien
tcagatctttcctcacacgccccct

SEQ ID NO: 4050522 - DNA, 25 bp, Homo sapien
ttcttcttagcagtacttatcccac

SEQ ID NO: 4050523 - DNA, 25 bp, Homo sapien
tattcttcttagcagtacttatccc

SEQ ID NO: 4050524 - DNA, 25 bp, Homo sapien
tctttgaggctcaggagaccatgct

SEQ ID NO: 4050525 - DNA, 25 bp, Homo sapien
tgactccactattccctgggactgg

SEQ ID NO: 4050526 - DNA, 25 bp, Homo sapien
tctactctaactggaaacacatggg

SEQ ID NO: 4050527 - DNA, 25 bp, Homo sapien
gacagatttcagtcccagatgagct

SEQ ID NO: 4050528 - DNA, 25 bp, Homo sapien
ctcagggacaagtccctctggcatc

SEQ ID NO: 4050529 - DNA, 25 bp, Homo sapien
tctggcatcccttgtggcaccatcc

SEQ ID NO: 4050530 - DNA, 25 bp, Homo sapien
cctctggcatcccttgtggcaccat

SEQ ID NO: 4050531 - DNA, 25 bp, Homo sapien
atcactcagggacaagtccctctgg

SEQ ID NO: 4050532 - DNA, 25 bp, Homo sapien
agacacgatgatcccaaagacctta

SEQ ID NO: 4050533 - DNA, 25 bp, Homo sapien
cgcgaagacacgatgatcccaaaga

SEQ ID NO: 4050534 - DNA, 25 bp, Homo sapien
gcaggccaacgcgaagacacgatga

SEQ ID NO: 4050535 - DNA, 25 bp, Homo sapien
caacgcgaagacacgatgatcccaa

SEQ ID NO: 4050536 - DNA, 25 bp, Homo sapien
gcctctatccccgcctttcgcggcc

SEQ ID NO: 4050537 - DNA, 25 bp, Homo sapien
agcctctatccccgcctttcgcggc

SEQ ID NO: 4050538 - DNA, 25 bp, Homo sapien
tagccattgtccacgttaaagtaaa

SEQ ID NO: 4050539 - DNA, 25 bp, Homo sapien
agtaaagctccgggaagaacgacat

SEQ ID NO: 4050540 - DNA, 25 bp, Homo sapien
aggttgaggtagtcggcctggctga

SEQ ID NO: 4050541 - DNA, 25 bp, Homo sapien
agcgtctcgcactgcaccaggttga

SEQ ID NO: 4050542 - DNA, 25 bp, Homo sapien
gctgacgctgcgtcctcagcgggct

SEQ ID NO: 4050543 - DNA, 25 bp, Homo sapien
cgaatcgcgactccccaggtcagct

SEQ ID NO: 4050544 - DNA, 25 bp, Homo sapien
ggagaaccaggaccggccggcacga

SEQ ID NO: 4050545 - DNA, 25 bp, Homo sapien
tgacgctgcgtcctcagcgggctgt

SEQ ID NO: 4050546 - DNA, 25 bp, Homo sapien
tggctctgagcggtgcccggcttcc

SEQ ID NO: 4050547 - DNA, 25 bp, Homo sapien
ccgcagggatttgactgggccttct

SEQ ID NO: 4050548 - DNA, 25 bp, Homo sapien
gcctgcgcgctaaaaagaggaagtt

SEQ ID NO: 4050549 - DNA, 25 bp, Homo sapien
gctttccccggtttgctgcacttga

SEQ ID NO: 4050550 - DNA, 25 bp, Homo sapien
tagccccgaccctgacgttggccag

SEQ ID NO: 4050551 - DNA, 25 bp, Homo sapien
catcctttattcgagtttccttgcc

SEQ ID NO: 4050552 - DNA, 25 bp, Homo sapien
tggtcccatcctttattcgagtttc

SEQ ID NO: 4050553 - DNA, 25 bp, Homo sapien
ctagccccgaccctgacgttggcca

SEQ ID NO: 4050554 - DNA, 25 bp, Homo sapien
cggctgcagggattcatggcagtac

SEQ ID NO: 4050555 - DNA, 25 bp, Homo sapien
ggtgcggctgcagggattcatggca

SEQ ID NO: 4050556 - DNA, 25 bp, Homo sapien
ctaggtgcggctgcagggattcatg

SEQ ID NO: 4050557 - DNA, 25 bp, Homo sapien
gcggctgcagggattcatggcagta

SEQ ID NO: 4050558 - DNA, 25 bp, Homo sapien
gcagtagcacgtggcacatgggtca

SEQ ID NO: 4050559 - DNA, 25 bp, Homo sapien
cccaggcaggactcatgcagcctta

SEQ ID NO: 4050560 - DNA, 25 bp, Homo sapien
ggcattgaagaagcggcagtagcac

SEQ ID NO: 4050561 - DNA, 25 bp, Homo sapien
gcagccttacgcagcgacgtgagga

SEQ ID NO: 4050562 - DNA, 25 bp, Homo sapien
tcccaacctgtgcaggatggcagtg

SEQ ID NO: 4050563 - DNA, 25 bp, Homo sapien
tgtcccaacctgtgcaggatggcag

SEQ ID NO: 4050564 - DNA, 25 bp, Homo sapien
ctgtcccaacctgtgcaggatggca

SEQ ID NO: 4050565 - DNA, 25 bp, Homo sapien
catgggaaggggtggtcggtagtgt

SEQ ID NO: 4050566 - DNA, 25 bp, Homo sapien
tgcaacagatcctcttctgcctgtt

SEQ ID NO: 4050567 - DNA, 25 bp, Homo sapien
gcctcctgcaacagatcctcttctg

SEQ ID NO: 4050568 - DNA, 25 bp, Homo sapien
tcctgcaacagatcctcttctgcct

SEQ ID NO: 4050569 - DNA, 25 bp, Homo sapien
aaggcctgagcctcctgcaacagat

SEQ ID NO: 4050570 - DNA, 25 bp, Homo sapien
ttgtcttcttcagtggggcccgcag

SEQ ID NO: 4050571 - DNA, 25 bp, Homo sapien
gtcttcttcagtggggcccgcaggc

SEQ ID NO: 4050572 - DNA, 25 bp, Homo sapien
ctgcagttgtcttcttcagtggggc

SEQ ID NO: 4050573 - DNA, 25 bp, Homo sapien
gcagttgtcttcttcagtggggccc

SEQ ID NO: 4050574 - DNA, 25 bp, Homo sapien
tgggctcctcgcgtggcaggcagtg

SEQ ID NO: 4050575 - DNA, 25 bp, Homo sapien
gggctcctcgcgtggcaggcagtgc

SEQ ID NO: 4050576 - DNA, 25 bp, Homo sapien
ctgggctcctcgcgtggcaggcagt

SEQ ID NO: 4050577 - DNA, 25 bp, Homo sapien
gctcctcgcgtggcaggcagtgcca

SEQ ID NO: 4050578 - DNA, 25 bp, Homo sapien
cttccaagaattcgggtcaaggaca

SEQ ID NO: 4050579 - DNA, 25 bp, Homo sapien
gatgcttactcaacccctatgtggc

SEQ ID NO: 4050580 - DNA, 25 bp, Homo sapien
caggcggccctgaaagcttaattta

SEQ ID NO: 4050581 - DNA, 25 bp, Homo sapien
ttagcaataacaaggcaggcggccc

SEQ ID NO: 4050582 - DNA, 25 bp, Homo sapien
aggcccccgcctctttttctgtgag

SEQ ID NO: 4050583 - DNA, 25 bp, Homo sapien
cctgaatggattttgtcactgttac

SEQ ID NO: 4050584 - DNA, 25 bp, Homo sapien
tgccttcagcatgtcctgaatggat

SEQ ID NO: 4050585 - DNA, 25 bp, Homo sapien
gcccagccatcaccttattgccttc

SEQ ID NO: 4050586 - DNA, 25 bp, Homo sapien
acaaactggaacagccagggtgagt

SEQ ID NO: 4050587 - DNA, 25 bp, Homo sapien
actgactcccaaggtacaaactgga

SEQ ID NO: 4050588 - DNA, 25 bp, Homo sapien
ttccagctcggacataacattgggg

SEQ ID NO: 4050589 - DNA, 25 bp, Homo sapien
ccagggtgagtgccagcacacagga

SEQ ID NO: 4050590 - DNA, 25 bp, Homo sapien
ggagcagaggtacaagaaaagtcta

SEQ ID NO: 4050591 - DNA, 25 bp, Homo sapien
ttgtttgattagcaaatttggtggg

SEQ ID NO: 4050592 - DNA, 25 bp, Homo sapien
gctgctccggagacctgaaaagaga

SEQ ID NO: 4050593 - DNA, 25 bp, Homo sapien
tgaatttttgacagaggcctgggct

SEQ ID NO: 4050594 - DNA, 25 bp, Homo sapien
aggaagactgggctgatcttcagac

SEQ ID NO: 4050595 - DNA, 25 bp, Homo sapien
agcattagcaaaggcccaagggagg

SEQ ID NO: 4050596 - DNA, 25 bp, Homo sapien
agtcctggagagacggtgccccacg

SEQ ID NO: 4050597 - DNA, 25 bp, Homo sapien
cacagagcagcctccgagaagagcc

SEQ ID NO: 4050598 - DNA, 25 bp, Homo sapien
tgtgacgttggagatcattaacctg

SEQ ID NO: 4050599 - DNA, 25 bp, Homo sapien
tctgtgtgacgttggagatcattaa

SEQ ID NO: 4050600 - DNA, 25 bp, Homo sapien
tggagatcattaacctgtggaccct

SEQ ID NO: 4050601 - DNA, 25 bp, Homo sapien
cgttggagatcattaacctgtggac

SEQ ID NO: 4050602 - DNA, 25 bp, Homo sapien
atcctgggctctcaagagcctgggc

SEQ ID NO: 4050603 - DNA, 25 bp, Homo sapien
cagcatcctgggctctcaagagcct

SEQ ID NO: 4050604 - DNA, 25 bp, Homo sapien
gctggtggctgccatccccccagga

SEQ ID NO: 4050605 - DNA, 25 bp, Homo sapien
tggctgccatccccccaggacagga

SEQ ID NO: 4050606 - DNA, 25 bp, Homo sapien
caagtcccttctggttgaggaccct

SEQ ID NO: 4050607 - DNA, 25 bp, Homo sapien
caggaaagtgggcatagggaagagg

SEQ ID NO: 4050608 - DNA, 25 bp, Homo sapien
tcatcactgtgggaacaaaaaggag

SEQ ID NO: 4050609 - DNA, 25 bp, Homo sapien
tggggctgactttacacaatggatt

SEQ ID NO: 4050610 - DNA, 25 bp, Homo sapien
gtgtccgaaggtcatcctaagtggg

SEQ ID NO: 4050611 - DNA, 25 bp, Homo sapien
cagcgacgctgaggctggctgaaat

SEQ ID NO: 4050612 - DNA, 25 bp, Homo sapien
ggtgccaggcggcttctggactccc

SEQ ID NO: 4050613 - DNA, 25 bp, Homo sapien
caaccagcctaagccagcagtagca

SEQ ID NO: 4050614 - DNA, 25 bp, Homo sapien
agaaagggcggcctgcctctacagc

SEQ ID NO: 4050615 - DNA, 25 bp, Homo sapien
ttttagggtctgcgtgagaaagcct

SEQ ID NO: 4050616 - DNA, 25 bp, Homo sapien
cgttttagggtctgcgtgagaaagc

SEQ ID NO: 4050617 - DNA, 25 bp, Homo sapien
gttttagggtctgcgtgagaaagcc

SEQ ID NO: 4050618 - DNA, 25 bp, Homo sapien
atatttagtagatatggggtttcac

SEQ ID NO: 4050619 - DNA, 25 bp, Homo sapien
cacctcagcctactgagtagctggg

SEQ ID NO: 4050620 - DNA, 25 bp, Homo sapien
cccgggctcatgccattctcccacc

SEQ ID NO: 4050621 - DNA, 25 bp, Homo sapien
tcccgggctcatgccattctcccac

SEQ ID NO: 4050622 - DNA, 25 bp, Homo sapien
gagtgacttgagcttgtctgagact

SEQ ID NO: 4050623 - DNA, 25 bp, Homo sapien
ttatttttcatgtgggagtgacttg

SEQ ID NO: 4050624 - DNA, 25 bp, Homo sapien
ttttcatgtgggagtgacttgagct

SEQ ID NO: 4050625 - DNA, 25 bp, Homo sapien
catgtgggagtgacttgagcttgtc

SEQ ID NO: 4050626 - DNA, 25 bp, Homo sapien
ctctccttcaggagtttcccggtct

SEQ ID NO: 4050627 - DNA, 25 bp, Homo sapien
agtctgggggactcctgctctcctc

SEQ ID NO: 4050628 - DNA, 25 bp, Homo sapien
cgcgctctcccgagtgtccaggatg

SEQ ID NO: 4050629 - DNA, 25 bp, Homo sapien
gatgttttccgtggctcacccagcc

SEQ ID NO: 4050630 - DNA, 25 bp, Homo sapien
gagttcattcttgtggtcgcccctt

SEQ ID NO: 4050631 - DNA, 25 bp, Homo sapien
gccgagttcattcttgtggtcgccc

SEQ ID NO: 4050632 - DNA, 25 bp, Homo sapien
tcattcttgtggtcgcccctttcct

SEQ ID NO: 4050633 - DNA, 25 bp, Homo sapien
caagcccgcatcctgctagcaggaa

SEQ ID NO: 4050634 - DNA, 25 bp, Homo sapien
taggtgggacccctacagacatgga

SEQ ID NO: 4050635 - DNA, 25 bp, Homo sapien
gacccctacagacatggacagcagg

SEQ ID NO: 4050636 - DNA, 25 bp, Homo sapien
gattctgctgcagtggtactgagca

SEQ ID NO: 4050637 - DNA, 25 bp, Homo sapien
tactgagcagtggtactgctgcatg

SEQ ID NO: 4050638 - DNA, 25 bp, Homo sapien
cagatcgatgagctgtatgaggcat

SEQ ID NO: 4050639 - DNA, 25 bp, Homo sapien
tcgatgagctgtatgaggcatactg

SEQ ID NO: 4050640 - DNA, 25 bp, Homo sapien
tgagctgtatgaggcatactgtgtc

SEQ ID NO: 4050641 - DNA, 25 bp, Homo sapien
gatcgatgagctgtatgaggcatac

SEQ ID NO: 4050642 - DNA, 25 bp, Homo sapien
caagctctaccctcggtacaacagg

SEQ ID NO: 4050643 - DNA, 25 bp, Homo sapien
tacagtcggactctgagccacatca

SEQ ID NO: 4050644 - DNA, 25 bp, Homo sapien
caggccctaccctcaatatcatagg

SEQ ID NO: 4050645 - DNA, 25 bp, Homo sapien
agtccacagactctggcccttcaga

SEQ ID NO: 4050646 - DNA, 25 bp, Homo sapien
aatcgatggagtgttccctctactc

SEQ ID NO: 4050647 - DNA, 25 bp, Homo sapien
gcaatcgatggagtgttccctctac

SEQ ID NO: 4050648 - DNA, 25 bp, Homo sapien
tcgatggagtgttccctctactctc

SEQ ID NO: 4050649 - DNA, 25 bp, Homo sapien
cgatggagtgttccctctactctcc

SEQ ID NO: 4050650 - DNA, 25 bp, Homo sapien
tttgtctcgcccacagagcgggggt

SEQ ID NO: 4050651 - DNA, 25 bp, Homo sapien
gctgaaccccagacatatgacatga

SEQ ID NO: 4050652 - DNA, 25 bp, Homo sapien
aaaaagatgggttggcatgtgggaa

SEQ ID NO: 4050653 - DNA, 25 bp, Homo sapien
taagcttgggaaggactccagtgcc

SEQ ID NO: 4050654 - DNA, 25 bp, Homo sapien
ggaagcaagcaagctgaatccccag

SEQ ID NO: 4050655 - DNA, 25 bp, Homo sapien
agggaggactgaggtcagactggtg

SEQ ID NO: 4050656 - DNA, 25 bp, Homo sapien
ggactgaggtcagactggtggagga

SEQ ID NO: 4050657 - DNA, 25 bp, Homo sapien
caattaaggaatggaacagaagcct

SEQ ID NO: 4050658 - DNA, 25 bp, Homo sapien
cctttagacccagctgaaatgagat

SEQ ID NO: 4050659 - DNA, 25 bp, Homo sapien
caagggcaggaaacacatcgtgagt

SEQ ID NO: 4050660 - DNA, 25 bp, Homo sapien
caggaagctacacacaccaagtatt

SEQ ID NO: 4050661 - DNA, 25 bp, Homo sapien
accttacatgtcttcgtgtcacttg

SEQ ID NO: 4050662 - DNA, 25 bp, Homo sapien
gcacacacatggctccctgtagtct

SEQ ID NO: 4050663 - DNA, 25 bp, Homo sapien
acacacatggctccctgtagtctcg

SEQ ID NO: 4050664 - DNA, 25 bp, Homo sapien
cacatggctccctgtagtctcgacc

SEQ ID NO: 4050665 - DNA, 25 bp, Homo sapien
tggcacacacatggctccctgtagt

SEQ ID NO: 4050666 - DNA, 25 bp, Homo sapien
cataagaggcaaatgggataacttg

SEQ ID NO: 4050667 - DNA, 25 bp, Homo sapien
ataccaggaactatttgggctgagg

SEQ ID NO: 4050668 - DNA, 25 bp, Homo sapien
agtcctaatgtgtacataagaggca

SEQ ID NO: 4050669 - DNA, 25 bp, Homo sapien
gaagcatctgtttggtaattttcct

SEQ ID NO: 4050670 - DNA, 25 bp, Homo sapien
gaagaagctgctccctagatattgg

SEQ ID NO: 4050671 - DNA, 25 bp, Homo sapien
gcattctcacaacggaacggtcaga

SEQ ID NO: 4050672 - DNA, 25 bp, Homo sapien
tccagtgacttgcaaggtgacccaa

SEQ ID NO: 4050673 - DNA, 25 bp, Homo sapien
gggattccacaactcagcgctagct

SEQ ID NO: 4050674 - DNA, 25 bp, Homo sapien
ggactgaaggtctccgcccacagag

SEQ ID NO: 4050675 - DNA, 25 bp, Homo sapien
gcatcaagtctggttttccgccacc

SEQ ID NO: 4050676 - DNA, 25 bp, Homo sapien
tatgaacgtgttaaagcatcaagtc

SEQ ID NO: 4050677 - DNA, 25 bp, Homo sapien
tacacagcgctaaatacagaaactc

SEQ ID NO: 4050678 - DNA, 25 bp, Homo sapien
cgcttttaggtggccctcttctagg

SEQ ID NO: 4050679 - DNA, 25 bp, Homo sapien
ccgcttttaggtggccctcttctag

SEQ ID NO: 4050680 - DNA, 25 bp, Homo sapien
aaggacagcccttccagtcgtcgct

SEQ ID NO: 4050681 - DNA, 25 bp, Homo sapien
ccgggccttactctggggcgggcag

SEQ ID NO: 4050682 - DNA, 25 bp, Homo sapien
ccgctgagcaaggacagcccttcca

SEQ ID NO: 4050683 - DNA, 25 bp, Homo sapien
tccagtcgtcgctcgcgggcacgga

SEQ ID NO: 4050684 - DNA, 25 bp, Homo sapien
tgtaagacattcggagggcgggtcg

SEQ ID NO: 4050685 - DNA, 25 bp, Homo sapien
acattcggagggcgggtcgggcctg

SEQ ID NO: 4050686 - DNA, 25 bp, Homo sapien
ctgtaagacattcggagggcgggtc

SEQ ID NO: 4050687 - DNA, 25 bp, Homo sapien
gaataaggtcaagcggactggatcc

SEQ ID NO: 4050688 - DNA, 25 bp, Homo sapien
cagcagctagggaataaggtcaagc

SEQ ID NO: 4050689 - DNA, 25 bp, Homo sapien
gctagggaataaggtcaagcggact

SEQ ID NO: 4050690 - DNA, 25 bp, Homo sapien
gtcaagcggactggatccggcaccg

SEQ ID NO: 4050691 - DNA, 25 bp, Homo sapien
ctcgcggcgcgtcccgtgacgccat

SEQ ID NO: 4050692 - DNA, 25 bp, Homo sapien
gcgcgtgcggcgtgacgacgcgact

SEQ ID NO: 4050693 - DNA, 25 bp, Homo sapien
gcagagcccacgagcgacccggcga

SEQ ID NO: 4050694 - DNA, 25 bp, Homo sapien
gcgacccggcgagggcgcgtgcggc

SEQ ID NO: 4050695 - DNA, 25 bp, Homo sapien
tgagacactatctccgcgtcccggc

SEQ ID NO: 4050696 - DNA, 25 bp, Homo sapien
gagacactatctccgcgtcccggct

SEQ ID NO: 4050697 - DNA, 25 bp, Homo sapien
tgccgtatgggtgtcgggccctggc

SEQ ID NO: 4050698 - DNA, 25 bp, Homo sapien
gctaagccaggtcccggtgccgtat

SEQ ID NO: 4050699 - DNA, 25 bp, Homo sapien
cctggccgtcgcgtctcgggctgcc

SEQ ID NO: 4050700 - DNA, 25 bp, Homo sapien
tagcttaagggttcggaccgactgc

SEQ ID NO: 4050701 - DNA, 25 bp, Homo sapien
tccgtctccgccgagtggcgcaggc

SEQ ID NO: 4050702 - DNA, 25 bp, Homo sapien
ctgctcggcggtcgctcccagtccg

SEQ ID NO: 4050703 - DNA, 25 bp, Homo sapien
gcggtcgctcccagtccgcgcgtcg

SEQ ID NO: 4050704 - DNA, 25 bp, Homo sapien
tctccgccgagtggcgcaggcggcg

SEQ ID NO: 4050705 - DNA, 25 bp, Homo sapien
gggaccccagagctgccgagagctc

SEQ ID NO: 4050706 - DNA, 25 bp, Homo sapien
cagagctgccgagagctccctctgc

SEQ ID NO: 4050707 - DNA, 25 bp, Homo sapien
gagctgccgagagctccctctgcaa

SEQ ID NO: 4050708 - DNA, 25 bp, Homo sapien
gctgccgagagctccctctgcaagg

SEQ ID NO: 4050709 - DNA, 25 bp, Homo sapien
tacagcaggtgtataatcgagccag

SEQ ID NO: 4050710 - DNA, 25 bp, Homo sapien
gaattgatatgttagggtaacccag

SEQ ID NO: 4050711 - DNA, 25 bp, Homo sapien
gaaattcccatatgccaggaatcat

SEQ ID NO: 4050712 - DNA, 25 bp, Homo sapien
tttcccgggttagtactgtgctcca

SEQ ID NO: 4050713 - DNA, 25 bp, Homo sapien
cttgtggctgacttaaggccctggg

SEQ ID NO: 4050714 - DNA, 25 bp, Homo sapien
cctctagagactgctttttttgctt

SEQ ID NO: 4050715 - DNA, 25 bp, Homo sapien
agttccttggtggaagccacttgtg

SEQ ID NO: 4050716 - DNA, 25 bp, Homo sapien
gccacttgtggctgacttaaggccc

SEQ ID NO: 4050717 - DNA, 25 bp, Homo sapien
tgtactaagaggaactgagtatttg

SEQ ID NO: 4050718 - DNA, 25 bp, Homo sapien
gtgggtatgttttgtactaagagga

SEQ ID NO: 4050719 - DNA, 25 bp, Homo sapien
gagtgggtatgttttgtactaagag

SEQ ID NO: 4050720 - DNA, 25 bp, Homo sapien
agaggaactgagtatttgaaagcag

SEQ ID NO: 4050721 - DNA, 25 bp, Homo sapien
aggagtcggaggttgtgttcagccg

SEQ ID NO: 4050722 - DNA, 25 bp, Homo sapien
caatcatgtagcagaatggcaccca

SEQ ID NO: 4050723 - DNA, 25 bp, Homo sapien
gattatgagtggttcacagcagccc

SEQ ID NO: 4050724 - DNA, 25 bp, Homo sapien
tatggcatgctacgatcaggttctg

SEQ ID NO: 4050725 - DNA, 25 bp, Homo sapien
gatggaaacggagacattgacccct

SEQ ID NO: 4050726 - DNA, 25 bp, Homo sapien
tccgggagaagatgcagagccgcag

SEQ ID NO: 4050727 - DNA, 25 bp, Homo sapien
cccgcatggacctgccactggcggg

SEQ ID NO: 4050728 - DNA, 25 bp, Homo sapien
gtccgcgcgcggctctccgagccct

SEQ ID NO: 4050729 - DNA, 25 bp, Homo sapien
tcttctggtgctgtcccctcaggtg

SEQ ID NO: 4050730 - DNA, 25 bp, Homo sapien
attctcctcgaaatggttacagatt

SEQ ID NO: 4050731 - DNA, 25 bp, Homo sapien
cattctcctcgaaatggttacagat

SEQ ID NO: 4050732 - DNA, 25 bp, Homo sapien
aattgtcagttctactccattctcc

SEQ ID NO: 4050733 - DNA, 25 bp, Homo sapien
ttacagattcgacctttcttccctc

SEQ ID NO: 4050734 - DNA, 25 bp, Homo sapien
cagttgaatgcggagctcaggagcc

SEQ ID NO: 4050735 - DNA, 25 bp, Homo sapien
gcctcccagaggacccttgcttggg

SEQ ID NO: 4050736 - DNA, 25 bp, Homo sapien
ggtaggcaggcacctgattccccac

SEQ ID NO: 4050737 - DNA, 25 bp, Homo sapien
gactgttgttcagacctatcgccaa

SEQ ID NO: 4050738 - DNA, 25 bp, Homo sapien
tcagctcctctaaggaccctgaggg

SEQ ID NO: 4050739 - DNA, 25 bp, Homo sapien
cctccacgtgtgcttgaatgcagga

SEQ ID NO: 4050740 - DNA, 25 bp, Homo sapien
aggtctcaagaaatcagggagccag

SEQ ID NO: 4050741 - DNA, 25 bp, Homo sapien
gggcagctgttggaatacccctgat

SEQ ID NO: 4050742 - DNA, 25 bp, Homo sapien
tgtgtcccttagaacggcccctgag

SEQ ID NO: 4050743 - DNA, 25 bp, Homo sapien
caggatctggccttggaaccgagcc

SEQ ID NO: 4050744 - DNA, 25 bp, Homo sapien
tcaaacgcaggccaaaactcgaggc

SEQ ID NO: 4050745 - DNA, 25 bp, Homo sapien
catgcttatgtgcactggaggtgga

SEQ ID NO: 4050746 - DNA, 25 bp, Homo sapien
gagtgtggagcggtatctgtcctgc

SEQ ID NO: 4050747 - DNA, 25 bp, Homo sapien
tgtggagcggtatctgtcctgcgtg

SEQ ID NO: 4050748 - DNA, 25 bp, Homo sapien
tggagcggtatctgtcctgcgtgac

SEQ ID NO: 4050749 - DNA, 25 bp, Homo sapien
agcggtatctgtcctgcgtgacgtc

SEQ ID NO: 4050750 - DNA, 25 bp, Homo sapien
tcacatcggagttggctcagaccct

SEQ ID NO: 4050751 - DNA, 25 bp, Homo sapien
agaaagtgcaaggcccaggccatga

SEQ ID NO: 4050752 - DNA, 25 bp, Homo sapien
tcagaaagtgcaaggcccaggccat

SEQ ID NO: 4050753 - DNA, 25 bp, Homo sapien
catcagaaagtgcaaggcccaggcc

SEQ ID NO: 4050754 - DNA, 25 bp, Homo sapien
cctgggactagtgaccaagagttgg

SEQ ID NO: 4050755 - DNA, 25 bp, Homo sapien
tcaatggagcctgggactagtgacc

SEQ ID NO: 4050756 - DNA, 25 bp, Homo sapien
ccaccgctgcaggtcaatggagcct

SEQ ID NO: 4050757 - DNA, 25 bp, Homo sapien
aagaaaccaccgctgcaggtcaatg

SEQ ID NO: 4050758 - DNA, 25 bp, Homo sapien
gcttggacccgagcacagagggacg

SEQ ID NO: 4050759 - DNA, 25 bp, Homo sapien
cttggacccgagcacagagggacgt

SEQ ID NO: 4050760 - DNA, 25 bp, Homo sapien
agagggacgtgcagggtggctcata

SEQ ID NO: 4050761 - DNA, 25 bp, Homo sapien
gggtggctcatactcatactggaag

SEQ ID NO: 4050762 - DNA, 25 bp, Homo sapien
tggggaagagctaacaaggacccca

SEQ ID NO: 4050763 - DNA, 25 bp, Homo sapien
cccatccaaggctacccatgctccc

SEQ ID NO: 4050764 - DNA, 25 bp, Homo sapien
caaccccatccaaggctacccatgc

SEQ ID NO: 4050765 - DNA, 25 bp, Homo sapien
catccaaggctacccatgctccctc

SEQ ID NO: 4050766 - DNA, 25 bp, Homo sapien
ctggtagctccggtcctgggaaaag

SEQ ID NO: 4050767 - DNA, 25 bp, Homo sapien
tgatgctggtaccactttcctcgga

SEQ ID NO: 4050768 - DNA, 25 bp, Homo sapien
gcagggcaaccctacaaactccttg

SEQ ID NO: 4050769 - DNA, 25 bp, Homo sapien
aaaaggcggccgattcttgcagggc

SEQ ID NO: 4050770 - DNA, 25 bp, Homo sapien
cagctgagtggcctgcgagctcaga

SEQ ID NO: 4050771 - DNA, 25 bp, Homo sapien
gcctgcgagctcagacaggactgca

SEQ ID NO: 4050772 - DNA, 25 bp, Homo sapien
agcccgggaacctgactgacaggcg

SEQ ID NO: 4050773 - DNA, 25 bp, Homo sapien
actgacaggcggcagtgagtgcctg

SEQ ID NO: 4050774 - DNA, 25 bp, Homo sapien
ggagaggctatgagggtcagagata

SEQ ID NO: 4050775 - DNA, 25 bp, Homo sapien
atgagggtcagagataggtcctgca

SEQ ID NO: 4050776 - DNA, 25 bp, Homo sapien
gctatgagggtcagagataggtcct

SEQ ID NO: 4050777 - DNA, 25 bp, Homo sapien
ggaggagaggctatgagggtcagag

SEQ ID NO: 4050778 - DNA, 25 bp, Homo sapien
ttatcagcactgtggacctgggccc

SEQ ID NO: 4050779 - DNA, 25 bp, Homo sapien
agtcttatcagcactgtggacctgg

SEQ ID NO: 4050780 - DNA, 25 bp, Homo sapien
gttcaggaagtcttatcagcactgt

SEQ ID NO: 4050781 - DNA, 25 bp, Homo sapien
ctggggggttcaggaagtcttatca

SEQ ID NO: 4050782 - DNA, 25 bp, Homo sapien
cagcattgagctggggacagtgtac

SEQ ID NO: 4050783 - DNA, 25 bp, Homo sapien
tgagctggggacagtgtacacagct

SEQ ID NO: 4050784 - DNA, 25 bp, Homo sapien
ctgtgggacatgaactctgtaggac

SEQ ID NO: 4050785 - DNA, 25 bp, Homo sapien
tcctgtgggatatgacccttgccca

SEQ ID NO: 4050786 - DNA, 25 bp, Homo sapien
tactctcatgtcctgtgggatatga

SEQ ID NO: 4050787 - DNA, 25 bp, Homo sapien
taggacaggcccgtttactctcatg

SEQ ID NO: 4050788 - DNA, 25 bp, Homo sapien
cctgacatctcccaagcaaatcccc

SEQ ID NO: 4050789 - DNA, 25 bp, Homo sapien
gacagggggtgctgtgcaagggccc

SEQ ID NO: 4050790 - DNA, 25 bp, Homo sapien
ctgtgcaagggccctccagtgtcag

SEQ ID NO: 4050791 - DNA, 25 bp, Homo sapien
tggccttgcatcgtgaggcagccca

SEQ ID NO: 4050792 - DNA, 25 bp, Homo sapien
cgtggccttgcatcgtgaggcagcc

SEQ ID NO: 4050793 - DNA, 25 bp, Homo sapien
cgcatttcatccagaagctgggaca

SEQ ID NO: 4050794 - DNA, 25 bp, Homo sapien
tccagaagctgggacagtgataggc

SEQ ID NO: 4050795 - DNA, 25 bp, Homo sapien
gtcctcccgcatttcatccagaagc

SEQ ID NO: 4050796 - DNA, 25 bp, Homo sapien
ttcatccagaagctgggacagtgat

SEQ ID NO: 4050797 - DNA, 25 bp, Homo sapien
tattgaggaagcataaggttaaggc

SEQ ID NO: 4050798 - DNA, 25 bp, Homo sapien
taggatcactggtcaagctctacag

SEQ ID NO: 4050799 - DNA, 25 bp, Homo sapien
gggaccatgggatgagtcaaggctt

SEQ ID NO: 4050800 - DNA, 25 bp, Homo sapien
ggaagacagcttattgaggaagcat

SEQ ID NO: 4050801 - DNA, 25 bp, Homo sapien
ctgcattggacgaggtggactctga

SEQ ID NO: 4050802 - DNA, 25 bp, Homo sapien
gacgaggtggactctgaaaggtgct

SEQ ID NO: 4050803 - DNA, 25 bp, Homo sapien
ggacgaggtggactctgaaaggtgc

SEQ ID NO: 4050804 - DNA, 25 bp, Homo sapien
cattggacgaggtggactctgaaag

SEQ ID NO: 4050805 - DNA, 25 bp, Homo sapien
tagatacaccatcccctcaccaaac

SEQ ID NO: 4050806 - DNA, 25 bp, Homo sapien
tgctgaggcctgtctacctagatac

SEQ ID NO: 4050807 - DNA, 25 bp, Homo sapien
gaggcctgtctacctagatacacca

SEQ ID NO: 4050808 - DNA, 25 bp, Homo sapien
atcccctcaccaaacaacacgtggc

SEQ ID NO: 4050809 - DNA, 25 bp, Homo sapien
aaggcagtcatagagctttttctga

SEQ ID NO: 4050810 - DNA, 25 bp, Homo sapien
tttctgaacatctaagtcttggttg

SEQ ID NO: 4050811 - DNA, 25 bp, Homo sapien
ggcagtcatagagctttttctgaac

SEQ ID NO: 4050812 - DNA, 25 bp, Homo sapien
tcaaggcagtcatagagctttttct

SEQ ID NO: 4050813 - DNA, 25 bp, Homo sapien
ctcctaccccataggcgtctgccag

SEQ ID NO: 4050814 - DNA, 25 bp, Homo sapien
taccccataggcgtctgccagcgcc

SEQ ID NO: 4050815 - DNA, 25 bp, Homo sapien
ccccataggcgtctgccagcgccgg

SEQ ID NO: 4050816 - DNA, 25 bp, Homo sapien
ataggcgtctgccagcgccggccag

SEQ ID NO: 4050817 - DNA, 25 bp, Homo sapien
ccacctggagatagaactctgcggg

SEQ ID NO: 4050818 - DNA, 25 bp, Homo sapien
caggcacccgtagccggggctgctc

SEQ ID NO: 4050819 - DNA, 25 bp, Homo sapien
gtccacctggagatagaactctgcg

SEQ ID NO: 4050820 - DNA, 25 bp, Homo sapien
caaccaggcacccgtagccggggct

SEQ ID NO: 4050821 - DNA, 25 bp, Homo sapien
tcagaatcgtcacgaagagtcatgc

SEQ ID NO: 4050822 - DNA, 25 bp, Homo sapien
cggtaacccgcccaaggcagtctca

SEQ ID NO: 4050823 - DNA, 25 bp, Homo sapien
cgtcacgaagagtcatgcccggtaa

SEQ ID NO: 4050824 - DNA, 25 bp, Homo sapien
gggtctcagaatcgtcacgaagagt

SEQ ID NO: 4050825 - DNA, 25 bp, Homo sapien
tggacatgaaccccgcagtcctgca

SEQ ID NO: 4050826 - DNA, 25 bp, Homo sapien
gcagccggccctctgtcccgcggaa

SEQ ID NO: 4050827 - DNA, 25 bp, Homo sapien
cgcggaagccgaactccttctcctc

SEQ ID NO: 4050828 - DNA, 25 bp, Homo sapien
catgaaccccgcagtcctgcagcag

SEQ ID NO: 4050829 - DNA, 25 bp, Homo sapien
ctccagagccgcgcggggcctctca

SEQ ID NO: 4050830 - DNA, 25 bp, Homo sapien
tccagagccgcgcggggcctctcac

SEQ ID NO: 4050831 - DNA, 25 bp, Homo sapien
tggccccgacgtcggacgtatcagg

SEQ ID NO: 4050832 - DNA, 25 bp, Homo sapien
gtcccgtcagacacaagcagcgtgg

SEQ ID NO: 4050833 - DNA, 25 bp, Homo sapien
gcatcggacactgtgggtcccgtca

SEQ ID NO: 4050834 - DNA, 25 bp, Homo sapien
gcgtcaccaggcatcggacactgtg

SEQ ID NO: 4050835 - DNA, 25 bp, Homo sapien
ggcgagcggcgtcaatcccaccacc

SEQ ID NO: 4050836 - DNA, 25 bp, Homo sapien
cggcgagcggcgtcaatcccaccac

SEQ ID NO: 4050837 - DNA, 25 bp, Homo sapien
tcgtggactggagggtgtctctgac

SEQ ID NO: 4050838 - DNA, 25 bp, Homo sapien
tcccgaatccagggccgtaggacca

SEQ ID NO: 4050839 - DNA, 25 bp, Homo sapien
ggactggagggtgtctctgacccca

SEQ ID NO: 4050840 - DNA, 25 bp, Homo sapien
aatccagggccgtaggaccagcctc

SEQ ID NO: 4050841 - DNA, 25 bp, Homo sapien
gcggcgtcactctgacagcggccag

SEQ ID NO: 4050842 - DNA, 25 bp, Homo sapien
acggctacacccagcggatgcaacg

SEQ ID NO: 4050843 - DNA, 25 bp, Homo sapien
ctgtgtgcagactcccgctggtcca

SEQ ID NO: 4050844 - DNA, 25 bp, Homo sapien
tgcacgggatgctggcccgtttact

SEQ ID NO: 4050845 - DNA, 25 bp, Homo sapien
gaaaccatttcagcaccgtgtgacc

SEQ ID NO: 4050846 - DNA, 25 bp, Homo sapien
tgtggtaccggtagggaacagaaca

SEQ ID NO: 4050847 - DNA, 25 bp, Homo sapien
cacagtgcacggtcttgtaaggcca

SEQ ID NO: 4050848 - DNA, 25 bp, Homo sapien
tgggccgttcgtcaagattcctgtg

SEQ ID NO: 4050849 - DNA, 25 bp, Homo sapien
aatgtttaattttgacaaagcagtt

SEQ ID NO: 4050850 - DNA, 25 bp, Homo sapien
ccttctgcagccactggtgactggg

SEQ ID NO: 4050851 - DNA, 25 bp, Homo sapien
aaaaggctagggtggcccttctgca

SEQ ID NO: 4050852 - DNA, 25 bp, Homo sapien
tgacaaagcagttaaaaggctaggg

SEQ ID NO: 4050853 - DNA, 25 bp, Homo sapien
ttgggtccaaccctgtcctttgcag

SEQ ID NO: 4050854 - DNA, 25 bp, Homo sapien
ctctgggattgggtccaaccctgtc

SEQ ID NO: 4050855 - DNA, 25 bp, Homo sapien
ttgcagccatgtggcgatcctcagc

SEQ ID NO: 4050856 - DNA, 25 bp, Homo sapien
ctttgcagccatgtggcgatcctca

SEQ ID NO: 4050857 - DNA, 25 bp, Homo sapien
aggcagcagtaccagctcacgcagc

SEQ ID NO: 4050858 - DNA, 25 bp, Homo sapien
gctcagcacggtggctctgggctct

SEQ ID NO: 4050859 - DNA, 25 bp, Homo sapien
tttgggccgagaaaagatcttgatg

SEQ ID NO: 4050860 - DNA, 25 bp, Homo sapien
tcagtcgtccatcttcacgaagact

SEQ ID NO: 4050861 - DNA, 25 bp, Homo sapien
tggtcagtgtttccagccgctggtt

SEQ ID NO: 4050862 - DNA, 25 bp, Homo sapien
tccggctggctctgcttgcgggcct

SEQ ID NO: 4050863 - DNA, 25 bp, Homo sapien
cgctggttctcaggcatgcgcgtgt

SEQ ID NO: 4050864 - DNA, 25 bp, Homo sapien
tggagcagcttggtcagtgtttcca

SEQ ID NO: 4050865 - DNA, 25 bp, Homo sapien
caccctgagtgtcgggcagtgagac

SEQ ID NO: 4050866 - DNA, 25 bp, Homo sapien
tccacaggtgtccttcaccctgagt

SEQ ID NO: 4050867 - DNA, 25 bp, Homo sapien
ctgagtgtcgggcagtgagacctac

SEQ ID NO: 4050868 - DNA, 25 bp, Homo sapien
tccttcaccctgagtgtcgggcagt

SEQ ID NO: 4050869 - DNA, 25 bp, Homo sapien
cgtggcattgtagtgctcctgggcc

SEQ ID NO: 4050870 - DNA, 25 bp, Homo sapien
gctctcttggcagctcgtgcattgt

SEQ ID NO: 4050871 - DNA, 25 bp, Homo sapien
gcattgtgacgaatgaagtccaccc

SEQ ID NO: 4050872 - DNA, 25 bp, Homo sapien
ttctgcgtggcattgtagtgctcct

SEQ ID NO: 4050873 - DNA, 25 bp, Homo sapien
attatgttgtgtccctgaacacccc

SEQ ID NO: 4050874 - DNA, 25 bp, Homo sapien
tgcaggacacagcaagcgtgggtgg

SEQ ID NO: 4050875 - DNA, 25 bp, Homo sapien
gacagcattatgttgtgtccctgaa

SEQ ID NO: 4050876 - DNA, 25 bp, Homo sapien
gcagacagcattatgttgtgtccct

SEQ ID NO: 4050877 - DNA, 25 bp, Homo sapien
cgggagtgcgcccgcaggaagtggg

SEQ ID NO: 4050878 - DNA, 25 bp, Homo sapien
ggagtgcgcccgcaggaagtgggca

SEQ ID NO: 4050879 - DNA, 25 bp, Homo sapien
cgcagcgggagtgcgcccgcaggaa

SEQ ID NO: 4050880 - DNA, 25 bp, Homo sapien
ggccgcagcgggagtgcgcccgcag

SEQ ID NO: 4050881 - DNA, 25 bp, Homo sapien
cttggcccttctgacctttgcatcc

SEQ ID NO: 4050882 - DNA, 25 bp, Homo sapien
tggcccttctgacctttgcatccat

SEQ ID NO: 4050883 - DNA, 25 bp, Homo sapien
caagctgcaagaccctggccatctt

SEQ ID NO: 4050884 - DNA, 25 bp, Homo sapien
tgaggtctggggctcaagctgcaag

SEQ ID NO: 4050885 - DNA, 25 bp, Homo sapien
cagtgaactgtacctagcatctcca

SEQ ID NO: 4050886 - DNA, 25 bp, Homo sapien
caaatccaggcggtcaattccttgg

SEQ ID NO: 4050887 - DNA, 25 bp, Homo sapien
gatcgtcaataactcctaggtctca

SEQ ID NO: 4050888 - DNA, 25 bp, Homo sapien
ggacacttgtcctcatcagcacaca

SEQ ID NO: 4050889 - DNA, 25 bp, Homo sapien
cctgttctctgaagcgcttctgaat

SEQ ID NO: 4050890 - DNA, 25 bp, Homo sapien
tgacccgggactccaccttgtcgta

SEQ ID NO: 4050891 - DNA, 25 bp, Homo sapien
tgggtgagcgccacagagctttcag

SEQ ID NO: 4050892 - DNA, 25 bp, Homo sapien
tgaatctccctgatccgcctcaggt

SEQ ID NO: 4050893 - DNA, 25 bp, Homo sapien
aagtccagcttcagcgcgtttccct

SEQ ID NO: 4050894 - DNA, 25 bp, Homo sapien
gggagatcccctcgagttgcaacag

SEQ ID NO: 4050895 - DNA, 25 bp, Homo sapien
gcgtttccctcgaggcgcccttgag

SEQ ID NO: 4050896 - DNA, 25 bp, Homo sapien
cggtcggaagtcagcaagtccagct

SEQ ID NO: 4050897 - DNA, 25 bp, Homo sapien
ccctgagcctcgcaccaccgccaag

SEQ ID NO: 4050898 - DNA, 25 bp, Homo sapien
ctgagcctcgcaccaccgccaagcc

SEQ ID NO: 4050899 - DNA, 25 bp, Homo sapien
cctgagcctcgcaccaccgccaagc

SEQ ID NO: 4050900 - DNA, 25 bp, Homo sapien
cccctgagcctcgcaccaccgccaa

SEQ ID NO: 4050901 - DNA, 25 bp, Homo sapien
gtcaggacagagcgtcgggtctggg

SEQ ID NO: 4050902 - DNA, 25 bp, Homo sapien
tcggccgcctgtagttgtcaggaca

SEQ ID NO: 4050903 - DNA, 25 bp, Homo sapien
gggatgggccccgagatgcgggacg

SEQ ID NO: 4050904 - DNA, 25 bp, Homo sapien
agatgcgggacgggccctcgcacat

SEQ ID NO: 4050905 - DNA, 25 bp, Homo sapien
ttctcggtcccgctcgcggcctctc

SEQ ID NO: 4050906 - DNA, 25 bp, Homo sapien
gcccagcaacggtgccccgaggcct

SEQ ID NO: 4050907 - DNA, 25 bp, Homo sapien
tgcagggctgtttacctccctcccc

SEQ ID NO: 4050908 - DNA, 25 bp, Homo sapien
tcactcgagaggttttgccgccagc

SEQ ID NO: 4050909 - DNA, 25 bp, Homo sapien
catggtgaccgatggcctgtgtgtc

SEQ ID NO: 4050910 - DNA, 25 bp, Homo sapien
gaggtgaccgtcaggctgtttaacc

SEQ ID NO: 4050911 - DNA, 25 bp, Homo sapien
tcatctctagtgtccagtggcggga

SEQ ID NO: 4050912 - DNA, 25 bp, Homo sapien
ggtgttcagtgacggatccctatgt

SEQ ID NO: 4050913 - DNA, 25 bp, Homo sapien
ggtggataagtcaacccaggtggac

SEQ ID NO: 4050914 - DNA, 25 bp, Homo sapien
cctcagtacaagtgactgtcccgcc

SEQ ID NO: 4050915 - DNA, 25 bp, Homo sapien
gaccacaaggccgaggtggataagt

SEQ ID NO: 4050916 - DNA, 25 bp, Homo sapien
catcgacaagatgctgagtgtctgc

SEQ ID NO: 4050917 - DNA, 25 bp, Homo sapien
tttgccaccctgcaagtctgaggag

SEQ ID NO: 4050918 - DNA, 25 bp, Homo sapien
tcaccctgttaggactgcggatcag

SEQ ID NO: 4050919 - DNA, 25 bp, Homo sapien
ctgtgcacaccgtggtaacctggca

SEQ ID NO: 4050920 - DNA, 25 bp, Homo sapien
agggtgagcctttcctggtccgact

SEQ ID NO: 4050921 - DNA, 25 bp, Homo sapien
tgtacagcccatcctcgaaggaggc

SEQ ID NO: 4050922 - DNA, 25 bp, Homo sapien
ggatcggctcgacctcttgatggca

SEQ ID NO: 4050923 - DNA, 25 bp, Homo sapien
gcaaggcctgcaccatgtagaccat

SEQ ID NO: 4050924 - DNA, 25 bp, Homo sapien
ggttgttccgctgaagtgcctcaca

SEQ ID NO: 4050925 - DNA, 25 bp, Homo sapien
gcatccaccgatgttgctgccttct

SEQ ID NO: 4050926 - DNA, 25 bp, Homo sapien
caccgatgttgctgccttctcgcaa

SEQ ID NO: 4050927 - DNA, 25 bp, Homo sapien
gccttctcgcaaaccacattcttcc

SEQ ID NO: 4050928 - DNA, 25 bp, Homo sapien
ccggaaggcatccaccgatgttgct

SEQ ID NO: 4050929 - DNA, 25 bp, Homo sapien
tgggcacacttcatggacgtgtctc

SEQ ID NO: 4050930 - DNA, 25 bp, Homo sapien
tctgccttacaactgcacgaactaa

SEQ ID NO: 4050931 - DNA, 25 bp, Homo sapien
tgttgcctaggcagggcccaagtga

SEQ ID NO: 4050932 - DNA, 25 bp, Homo sapien
gggatggactattcataacttctac

SEQ ID NO: 4050933 - DNA, 25 bp, Homo sapien
tctccaatgtgcaatagcttctcgg

SEQ ID NO: 4050934 - DNA, 25 bp, Homo sapien
tagaacatgtttggctccggcagga

SEQ ID NO: 4050935 - DNA, 25 bp, Homo sapien
acccattctgggtacgctgcagcca

SEQ ID NO: 4050936 - DNA, 25 bp, Homo sapien
tgtggttcaagtcgaaggaaatcct

SEQ ID NO: 4050937 - DNA, 25 bp, Homo sapien
ccttctagttgaagcccatctgggc

SEQ ID NO: 4050938 - DNA, 25 bp, Homo sapien
tgaagcccatctgggcaatgtgtgc

SEQ ID NO: 4050939 - DNA, 25 bp, Homo sapien
tgggcaatgtgtgcacctgggcttc

SEQ ID NO: 4050940 - DNA, 25 bp, Homo sapien
ggcaatgtgtgcacctgggcttctc

SEQ ID NO: 4050941 - DNA, 25 bp, Homo sapien
gtcacaagaatgtgccttctccagg

SEQ ID NO: 4050942 - DNA, 25 bp, Homo sapien
gggcaaccggtcacaagaatgtgcc

SEQ ID NO: 4050943 - DNA, 25 bp, Homo sapien
gacctggggcaaccggtcacaagaa

SEQ ID NO: 4050944 - DNA, 25 bp, Homo sapien
aaccggtcacaagaatgtgccttct

SEQ ID NO: 4050945 - DNA, 25 bp, Homo sapien
tgcagtagcgggattctggttcact

SEQ ID NO: 4050946 - DNA, 25 bp, Homo sapien
gtgcagtagcgggattctggttcac

SEQ ID NO: 4050947 - DNA, 25 bp, Homo sapien
gcagtagcgggattctggttcactg

SEQ ID NO: 4050948 - DNA, 25 bp, Homo sapien
aaattggtgcctctggtcaaccctt

SEQ ID NO: 4050949 - DNA, 25 bp, Homo sapien
catcttacgtaggtctaaactccca

SEQ ID NO: 4050950 - DNA, 25 bp, Homo sapien
tattaggcctctccgagagtcaggc

SEQ ID NO: 4050951 - DNA, 25 bp, Homo sapien
caaggcatgtggattggtagtctat

SEQ ID NO: 4050952 - DNA, 25 bp, Homo sapien
gagtttatctagctctcctgccagg

SEQ ID NO: 4050953 - DNA, 25 bp, Homo sapien
gaattcctgtttcatgcctcaagag

SEQ ID NO: 4050954 - DNA, 25 bp, Homo sapien
tcacatacctgggatagggtggcca

SEQ ID NO: 4050955 - DNA, 25 bp, Homo sapien
gctgctgaacacatatggctgacca

SEQ ID NO: 4050956 - DNA, 25 bp, Homo sapien
cagacacagatagctggatcccaga

SEQ ID NO: 4050957 - DNA, 25 bp, Homo sapien
agtggctctcaatccttcatgtcca

SEQ ID NO: 4050958 - DNA, 25 bp, Homo sapien
ctgggcctcagtttaattcaaaatg

SEQ ID NO: 4050959 - DNA, 25 bp, Homo sapien
atcagtggctctcaatccttcatgt

SEQ ID NO: 4050960 - DNA, 25 bp, Homo sapien
ttcttcccgtatagcttggaaatgg

SEQ ID NO: 4050961 - DNA, 25 bp, Homo sapien
tctttcttcccgtatagcttggaaa

SEQ ID NO: 4050962 - DNA, 25 bp, Homo sapien
ttcccgtatagcttggaaatggtct

SEQ ID NO: 4050963 - DNA, 25 bp, Homo sapien
cccgtatagcttggaaatggtctct

SEQ ID NO: 4050964 - DNA, 25 bp, Homo sapien
ctccagagttctggctccggacaca

SEQ ID NO: 4050965 - DNA, 25 bp, Homo sapien
ggagtcaagtgaccaatagcggctt

SEQ ID NO: 4050966 - DNA, 25 bp, Homo sapien
cagcctgcattcaagccacaaggga

SEQ ID NO: 4050967 - DNA, 25 bp, Homo sapien
cacaagggatggcaaggagtcaagt

SEQ ID NO: 4050968 - DNA, 25 bp, Homo sapien
tgtaagcaggctgtcgacggatcct

SEQ ID NO: 4050969 - DNA, 25 bp, Homo sapien
tagtcaaacgctgacaaaacatggg

SEQ ID NO: 4050970 - DNA, 25 bp, Homo sapien
tgtcctccggcaatacaagactgca

SEQ ID NO: 4050971 - DNA, 25 bp, Homo sapien
gagagacatgatctgcccctgctgt

SEQ ID NO: 4050972 - DNA, 25 bp, Homo sapien
gatgtcatcagtccggctggtgtag

SEQ ID NO: 4050973 - DNA, 25 bp, Homo sapien
gatgttcatctcctcagcaagctgc

SEQ ID NO: 4050974 - DNA, 25 bp, Homo sapien
cagggcctcaacagtgaacccttct

SEQ ID NO: 4050975 - DNA, 25 bp, Homo sapien
ctagagccttcacggatatctgccg

SEQ ID NO: 4050976 - DNA, 25 bp, Homo sapien
ggatatgatcttccaaacgtcctgg

SEQ ID NO: 4050977 - DNA, 25 bp, Homo sapien
tccaaacgtcctggtcagacatggc

SEQ ID NO: 4050978 - DNA, 25 bp, Homo sapien
aagagcctctggcatggatatgatc

SEQ ID NO: 4050979 - DNA, 25 bp, Homo sapien
caactcatctcctcacaagagcctc

SEQ ID NO: 4050980 - DNA, 25 bp, Homo sapien
ctgaaagacattcaccacattgtca

SEQ ID NO: 4050981 - DNA, 25 bp, Homo sapien
agtagaaggccctcaataacctgaa

SEQ ID NO: 4050982 - DNA, 25 bp, Homo sapien
cctgaaagacattcaccacattgtc

SEQ ID NO: 4050983 - DNA, 25 bp, Homo sapien
gaagtagaaggccctcaataacctg

SEQ ID NO: 4050984 - DNA, 25 bp, Homo sapien
ccagctgagaacctctgaactatgt

SEQ ID NO: 4050985 - DNA, 25 bp, Homo sapien
gacaaatctgtcattaagagggaaa

SEQ ID NO: 4050986 - DNA, 25 bp, Homo sapien
ccaggtgatcctagtgtgcagccac

SEQ ID NO: 4050987 - DNA, 25 bp, Homo sapien
gaactatgtttaacgcatgtgaaaa

SEQ ID NO: 4050988 - DNA, 25 bp, Homo sapien
ggagtttcaggctatagtgggttat

SEQ ID NO: 4050989 - DNA, 25 bp, Homo sapien
ttcaggctatagtgggttatgatca

SEQ ID NO: 4050990 - DNA, 25 bp, Homo sapien
agtttcaggctatagtgggttatga

SEQ ID NO: 4050991 - DNA, 25 bp, Homo sapien
tatagtgggttatgatcatgccatt

SEQ ID NO: 4050992 - DNA, 25 bp, Homo sapien
cttttctgaggagctaacgagggag

SEQ ID NO: 4050993 - DNA, 25 bp, Homo sapien
actccgtcattgcacctagggtggg

SEQ ID NO: 4050994 - DNA, 25 bp, Homo sapien
gggtgctccactatcccttgtatgt

SEQ ID NO: 4050995 - DNA, 25 bp, Homo sapien
acactaccttgccagtccctgggtg

SEQ ID NO: 4050996 - DNA, 25 bp, Homo sapien
ttaaccctttgagtacactgactgt

SEQ ID NO: 4050997 - DNA, 25 bp, Homo sapien
caagtgcacacacagtcagaactga

SEQ ID NO: 4050998 - DNA, 25 bp, Homo sapien
tataggcacctgacgcagagttagg

SEQ ID NO: 4050999 - DNA, 25 bp, Homo sapien
tatatttggcactcccctcaaggtt

SEQ ID NO: 4051000 - DNA, 25 bp, Homo sapien
tatccacaaggccaacaaccagatg

SEQ ID NO: 4051001 - DNA, 25 bp, Homo sapien
gagggaatcgaacagaaagaggcac

SEQ ID NO: 4051002 - DNA, 25 bp, Homo sapien
gcaacactagtcagaaggcggcagt

SEQ ID NO: 4051003 - DNA, 25 bp, Homo sapien
gaggcacaaggctacattctagagt

SEQ ID NO: 4051004 - DNA, 25 bp, Homo sapien
cgcctagcctgtatgaatcttaaaa

SEQ ID NO: 4051005 - DNA, 25 bp, Homo sapien
tctgggtcaacgtgaaagtaatgaa

SEQ ID NO: 4051006 - DNA, 25 bp, Homo sapien
tcctctgggtcaacgtgaaagtaat

SEQ ID NO: 4051007 - DNA, 25 bp, Homo sapien
tgggtcaacgtgaaagtaatgaagg

SEQ ID NO: 4051008 - DNA, 25 bp, Homo sapien
cttcctctgggtcaacgtgaaagta

SEQ ID NO: 4051009 - DNA, 25 bp, Homo sapien
ctgcacagaacacaatgattttcat

SEQ ID NO: 4051010 - DNA, 25 bp, Homo sapien
cttttaagtgtgatagggccttgat

SEQ ID NO: 4051011 - DNA, 25 bp, Homo sapien
gccttgatgggaagacctcacttca

SEQ ID NO: 4051012 - DNA, 25 bp, Homo sapien
ttgatgggaagacctcacttcacct

SEQ ID NO: 4051013 - DNA, 25 bp, Homo sapien
tttaagtgtgatagggccttgatgg

SEQ ID NO: 4051014 - DNA, 25 bp, Homo sapien
ggagaaggccctgtcggcgcccgct

SEQ ID NO: 4051015 - DNA, 25 bp, Homo sapien
cgccgggccgcggagaaggccctgt

SEQ ID NO: 4051016 - DNA, 25 bp, Homo sapien
ggccgcggagaaggccctgtcggcg

SEQ ID NO: 4051017 - DNA, 25 bp, Homo sapien
gcggagaaggccctgtcggcgcccg

SEQ ID NO: 4051018 - DNA, 25 bp, Homo sapien
ccacccatccgccttaaggaaggct

SEQ ID NO: 4051019 - DNA, 25 bp, Homo sapien
cactggaaaccatgggtccgacggg

SEQ ID NO: 4051020 - DNA, 25 bp, Homo sapien
tccataacggggatgggcctgcgct

SEQ ID NO: 4051021 - DNA, 25 bp, Homo sapien
actccgcgctgcactggaaaccatg

SEQ ID NO: 4051022 - DNA, 25 bp, Homo sapien
gaaagccgtttcaagagagaactga

SEQ ID NO: 4051023 - DNA, 25 bp, Homo sapien
ggtgccaacctcagtaagactcaaa

SEQ ID NO: 4051024 - DNA, 25 bp, Homo sapien
tgtggcccacctttatttagttgaa

SEQ ID NO: 4051025 - DNA, 25 bp, Homo sapien
ccttgaagaaggcacctgagggcct

SEQ ID NO: 4051026 - DNA, 25 bp, Homo sapien
tcctaagagtggctagggcccagct

SEQ ID NO: 4051027 - DNA, 25 bp, Homo sapien
aagaaaacatggtgcctggacagcc

SEQ ID NO: 4051028 - DNA, 25 bp, Homo sapien
tctcaggacgaaggcaggtagtttc

SEQ ID NO: 4051029 - DNA, 25 bp, Homo sapien
catgtgtaaagctgatagagtccca

SEQ ID NO: 4051030 - DNA, 25 bp, Homo sapien
ggccatgagccggagacactcagat

SEQ ID NO: 4051031 - DNA, 25 bp, Homo sapien
caagtagtcatcaactctggcaaag

SEQ ID NO: 4051032 - DNA, 25 bp, Homo sapien
gagccggagacactcagatgcctgg

SEQ ID NO: 4051033 - DNA, 25 bp, Homo sapien
cctgctcgggccatgagccggagac

SEQ ID NO: 4051034 - DNA, 25 bp, Homo sapien
tgggcctactgccatggcctaggac

SEQ ID NO: 4051035 - DNA, 25 bp, Homo sapien
tggaacagagtgttcagtacctctg

SEQ ID NO: 4051036 - DNA, 25 bp, Homo sapien
ggaccttagccccatgtagagcgct

SEQ ID NO: 4051037 - DNA, 25 bp, Homo sapien
tctgtgtaagtgtgtcccagccacc

SEQ ID NO: 4051038 - DNA, 25 bp, Homo sapien
aaatggcgctgttgagggcagcaca

SEQ ID NO: 4051039 - DNA, 25 bp, Homo sapien
gcacacacaggttccctctggatgg

SEQ ID NO: 4051040 - DNA, 25 bp, Homo sapien
tggcgctgttgagggcagcacacac

SEQ ID NO: 4051041 - DNA, 25 bp, Homo sapien
cacacacaggttccctctggatggg

SEQ ID NO: 4051042 - DNA, 25 bp, Homo sapien
tcgcggccaaacagaatgatccttt

SEQ ID NO: 4051043 - DNA, 25 bp, Homo sapien
tcaatgcctgcaactcgcggccaaa

SEQ ID NO: 4051044 - DNA, 25 bp, Homo sapien
tcttgccgtactcccggcccaactg

SEQ ID NO: 4051045 - DNA, 25 bp, Homo sapien
aactgctcactcaatgcctgcaact

SEQ ID NO: 4051046 - DNA, 25 bp, Homo sapien
ctcatgcttgtaggcaccattaaca

SEQ ID NO: 4051047 - DNA, 25 bp, Homo sapien
catgctggactcatccgtctgcagg

SEQ ID NO: 4051048 - DNA, 25 bp, Homo sapien
caccattaacaatgcgtgtggacat

SEQ ID NO: 4051049 - DNA, 25 bp, Homo sapien
acatgcttcctagcacaccgttggg

SEQ ID NO: 4051050 - DNA, 25 bp, Homo sapien
cctttcaagctgtagccatgggttg

SEQ ID NO: 4051051 - DNA, 25 bp, Homo sapien
ggttgggcctcctttcaagctgtag

SEQ ID NO: 4051052 - DNA, 25 bp, Homo sapien
gcctcctttcaagctgtagccatgg

SEQ ID NO: 4051053 - DNA, 25 bp, Homo sapien
cctggttgggcctcctttcaagctg

SEQ ID NO: 4051054 - DNA, 25 bp, Homo sapien
tgaagggcagggcgctcaaaggaca

SEQ ID NO: 4051055 - DNA, 25 bp, Homo sapien
ggggtgaagggcagggcgctcaaag

SEQ ID NO: 4051056 - DNA, 25 bp, Homo sapien
gggtgaagggcagggcgctcaaagg

SEQ ID NO: 4051057 - DNA, 25 bp, Homo sapien
aagggcagggcgctcaaaggacaga

SEQ ID NO: 4051058 - DNA, 25 bp, Homo sapien
ctcctggttactggtactgctgtgg

SEQ ID NO: 4051059 - DNA, 25 bp, Homo sapien
tggtctcctggttactggtactgct

SEQ ID NO: 4051060 - DNA, 25 bp, Homo sapien
ctgtggtgctgggacttggtggagt

SEQ ID NO: 4051061 - DNA, 25 bp, Homo sapien
tggttactggtactgctgtggtgct

SEQ ID NO: 4051062 - DNA, 25 bp, Homo sapien
gactcggagtaattgacggaggatg

SEQ ID NO: 4051063 - DNA, 25 bp, Homo sapien
agttggactcggagtaattgacgga

SEQ ID NO: 4051064 - DNA, 25 bp, Homo sapien
tgttgagttggactcggagtaattg

SEQ ID NO: 4051065 - DNA, 25 bp, Homo sapien
ctcggagtaattgacggaggatggg

SEQ ID NO: 4051066 - DNA, 25 bp, Homo sapien
gacgccattgctacagctgggactg

SEQ ID NO: 4051067 - DNA, 25 bp, Homo sapien
cttggtggacgcgacgccattgcta

SEQ ID NO: 4051068 - DNA, 25 bp, Homo sapien
tggacgcgacgccattgctacagct

SEQ ID NO: 4051069 - DNA, 25 bp, Homo sapien
ttgctcttggtggacgcgacgccat

SEQ ID NO: 4051070 - DNA, 25 bp, Homo sapien
tgcatgtgggaactactggggccat

SEQ ID NO: 4051071 - DNA, 25 bp, Homo sapien
tcaaacttcggacctcactgtccgt

SEQ ID NO: 4051072 - DNA, 25 bp, Homo sapien
gggcttcgggagctcaaacttcgga

SEQ ID NO: 4051073 - DNA, 25 bp, Homo sapien
agccagggtagctgtcctgggactt

SEQ ID NO: 4051074 - DNA, 25 bp, Homo sapien
tggtctcgatggcctcgcccacacg

SEQ ID NO: 4051075 - DNA, 25 bp, Homo sapien
gggtggtctcgatggcctcgcccac

SEQ ID NO: 4051076 - DNA, 25 bp, Homo sapien
tgggtggtctcgatggcctcgccca

SEQ ID NO: 4051077 - DNA, 25 bp, Homo sapien
ggtggtctcgatggcctcgcccaca

SEQ ID NO: 4051078 - DNA, 25 bp, Homo sapien
aacatggcctcgagctgcaagctgg

SEQ ID NO: 4051079 - DNA, 25 bp, Homo sapien
taaccagggttgacatgagccagag

SEQ ID NO: 4051080 - DNA, 25 bp, Homo sapien
gacagacacgtgcacatacagaaga

SEQ ID NO: 4051081 - DNA, 25 bp, Homo sapien
gcatctcgctgggagcaacttcaga

SEQ ID NO: 4051082 - DNA, 25 bp, Homo sapien
aatcggggtttcagtcattcgagca

SEQ ID NO: 4051083 - DNA, 25 bp, Homo sapien
agccgtggctgtggcacaataccca

SEQ ID NO: 4051084 - DNA, 25 bp, Homo sapien
tacccatgatgcacgaggtaagatg

SEQ ID NO: 4051085 - DNA, 25 bp, Homo sapien
tgttctttatggacgcctgttcttc

SEQ ID NO: 4051086 - DNA, 25 bp, Homo sapien
gctgcccaaagttggcgtccacaat

SEQ ID NO: 4051087 - DNA, 25 bp, Homo sapien
ctcccgcatgtagtcctcaatgtca

SEQ ID NO: 4051088 - DNA, 25 bp, Homo sapien
gatggggaagcagtggaccgtgccc

SEQ ID NO: 4051089 - DNA, 25 bp, Homo sapien
ttggcacgccactcccgcatgtagt

SEQ ID NO: 4051090 - DNA, 25 bp, Homo sapien
tccatggctgctgctggcccatgct

SEQ ID NO: 4051091 - DNA, 25 bp, Homo sapien
ctccatggctgctgctggcccatgc

SEQ ID NO: 4051092 - DNA, 25 bp, Homo sapien
catggctgctgctggcccatgcttg

SEQ ID NO: 4051093 - DNA, 25 bp, Homo sapien
tggctgctgctggcccatgcttggg

SEQ ID NO: 4051094 - DNA, 25 bp, Homo sapien
tagaggctcgctaagaggatcttct

SEQ ID NO: 4051095 - DNA, 25 bp, Homo sapien
gggtgaagagaagctacccttcctg

SEQ ID NO: 4051096 - DNA, 25 bp, Homo sapien
actgcaactgtccagagcctcgcta

SEQ ID NO: 4051097 - DNA, 25 bp, Homo sapien
catggcaaaagggaaccggtggtct

SEQ ID NO: 4051098 - DNA, 25 bp, Homo sapien
accgcgctcggccaacttagtgatt

SEQ ID NO: 4051099 - DNA, 25 bp, Homo sapien
gacaagctcaactatacactgaagg

SEQ ID NO: 4051100 - DNA, 25 bp, Homo sapien
gatgtctaaaaacagcctaagggct

SEQ ID NO: 4051101 - DNA, 25 bp, Homo sapien
tgactgacaaagagttcatggccct

SEQ ID NO: 4051102 - DNA, 25 bp, Homo sapien
cagccaggtggtcatcaatttcaga

SEQ ID NO: 4051103 - DNA, 25 bp, Homo sapien
cccagagccaagaaatagcggaatc

SEQ ID NO: 4051104 - DNA, 25 bp, Homo sapien
cccatccgtgagcaaaatgtgggca

SEQ ID NO: 4051105 - DNA, 25 bp, Homo sapien
cagagggaacagtagagtctgcccc

SEQ ID NO: 4051106 - DNA, 25 bp, Homo sapien
gagcctccaaggtcccttatgcaca

SEQ ID NO: 4051107 - DNA, 25 bp, Homo sapien
taaccataggaatgtttgtcccaac

SEQ ID NO: 4051108 - DNA, 25 bp, Homo sapien
cagtccccgaggagcagaacgaatg

SEQ ID NO: 4051109 - DNA, 25 bp, Homo sapien
agcagccgatcacgtctcctgtggt

SEQ ID NO: 4051110 - DNA, 25 bp, Homo sapien
cattgatgaggttgacacagcagcc

SEQ ID NO: 4051111 - DNA, 25 bp, Homo sapien
ggcacgcgccactaccagcaggcta

SEQ ID NO: 4051112 - DNA, 25 bp, Homo sapien
gagaaagggtctcacactctctcgt

SEQ ID NO: 4051113 - DNA, 25 bp, Homo sapien
cacgcgccactaccagcaggctaat

SEQ ID NO: 4051114 - DNA, 25 bp, Homo sapien
agaaagggtctcacactctctcgtc

SEQ ID NO: 4051115 - DNA, 25 bp, Homo sapien
caagtggcatgggtagaggctctct

SEQ ID NO: 4051116 - DNA, 25 bp, Homo sapien
cagaagggttcgactgcctggctaa

SEQ ID NO: 4051117 - DNA, 25 bp, Homo sapien
tggctaaggagtagaaatggaaccc

SEQ ID NO: 4051118 - DNA, 25 bp, Homo sapien
tggaacccacagagccatgacaagc

SEQ ID NO: 4051119 - DNA, 25 bp, Homo sapien
ggaactgcctggctcagggaacatg

SEQ ID NO: 4051120 - DNA, 25 bp, Homo sapien
tggaactgcctggctcagggaacat

SEQ ID NO: 4051121 - DNA, 25 bp, Homo sapien
ggctcagggaacatgttgctgctct

SEQ ID NO: 4051122 - DNA, 25 bp, Homo sapien
tcagggaacatgttgctgctctgag

SEQ ID NO: 4051123 - DNA, 25 bp, Homo sapien
tgtcagctgtaacatgggtcccagg

SEQ ID NO: 4051124 - DNA, 25 bp, Homo sapien
taatggtggacactgcagggactgt

SEQ ID NO: 4051125 - DNA, 25 bp, Homo sapien
ccctgtgaagtactgtagatcccaa

SEQ ID NO: 4051126 - DNA, 25 bp, Homo sapien
caaggtgaaagatgctccagagaga

SEQ ID NO: 4051127 - DNA, 25 bp, Homo sapien
tgatgtctatttccccatatgacca

SEQ ID NO: 4051128 - DNA, 25 bp, Homo sapien
tgcaaatgcaggtggtatagctcca

SEQ ID NO: 4051129 - DNA, 25 bp, Homo sapien
ccatatgaccaaatgtgagtcagga

SEQ ID NO: 4051130 - DNA, 25 bp, Homo sapien
gagtcaggagtggattcaatgacac

SEQ ID NO: 4051131 - DNA, 25 bp, Homo sapien
cagagatggggaacacacgaggatc

SEQ ID NO: 4051132 - DNA, 25 bp, Homo sapien
ggcaagtgggttcacctctgttgga

SEQ ID NO: 4051133 - DNA, 25 bp, Homo sapien
acacacgaggatccggtttttgcag

SEQ ID NO: 4051134 - DNA, 25 bp, Homo sapien
aataaccccagtctggggcaagtgg

SEQ ID NO: 4051135 - DNA, 25 bp, Homo sapien
gtctgttcatgttgacgccttgagc

SEQ ID NO: 4051136 - DNA, 25 bp, Homo sapien
gagccgagagtcctattcccatgta

SEQ ID NO: 4051137 - DNA, 25 bp, Homo sapien
catgttgacgccttgagccgagagt

SEQ ID NO: 4051138 - DNA, 25 bp, Homo sapien
cgccttgagccgagagtcctattcc

SEQ ID NO: 4051139 - DNA, 25 bp, Homo sapien
agtaatgatgtgtgaggcccccaga

SEQ ID NO: 4051140 - DNA, 25 bp, Homo sapien
gaaccctgacttagttgtgatctca

SEQ ID NO: 4051141 - DNA, 25 bp, Homo sapien
cattggagtatgcaacctgggctcc

SEQ ID NO: 4051142 - DNA, 25 bp, Homo sapien
tgtgatctcattggagtatgcaacc

SEQ ID NO: 4051143 - DNA, 25 bp, Homo sapien
tctgttcactgattagaagactcac

SEQ ID NO: 4051144 - DNA, 25 bp, Homo sapien
tatacagattcaaggccatccctat

SEQ ID NO: 4051145 - DNA, 25 bp, Homo sapien
gatttcaacaaggatgctaagacca

SEQ ID NO: 4051146 - DNA, 25 bp, Homo sapien
tttaagactcgcataaagacagacc

SEQ ID NO: 4051147 - DNA, 25 bp, Homo sapien
taaaaaatgagagtggcaaaggcct

SEQ ID NO: 4051148 - DNA, 25 bp, Homo sapien
aaagaaggtgtacatgtggccagca

SEQ ID NO: 4051149 - DNA, 25 bp, Homo sapien
tgtttccctaaagaaggtgtacatg

SEQ ID NO: 4051150 - DNA, 25 bp, Homo sapien
caccatcactatcgttacggaaatg

SEQ ID NO: 4051151 - DNA, 25 bp, Homo sapien
aggtttttggctctcactcatcaga

SEQ ID NO: 4051152 - DNA, 25 bp, Homo sapien
tttaagagtaatggctacatactgc

SEQ ID NO: 4051153 - DNA, 25 bp, Homo sapien
ggtttttggctctcactcatcagac

SEQ ID NO: 4051154 - DNA, 25 bp, Homo sapien
taatggctacatactgcagaggttt

SEQ ID NO: 4051155 - DNA, 25 bp, Homo sapien
ttgttgctatcagaacctgccccag

SEQ ID NO: 4051156 - DNA, 25 bp, Homo sapien
taataccagcctttgataggccaag

SEQ ID NO: 4051157 - DNA, 25 bp, Homo sapien
taataccttagccacagttcagcag

SEQ ID NO: 4051158 - DNA, 25 bp, Homo sapien
gggaactctgggacctcagttacaa

SEQ ID NO: 4051159 - DNA, 25 bp, Homo sapien
cagcacacagcctattttgattttt

SEQ ID NO: 4051160 - DNA, 25 bp, Homo sapien
gggtgggtggcacgcactgaggccg

SEQ ID NO: 4051161 - DNA, 25 bp, Homo sapien
gggtggcacgcactgaggccgcatc

SEQ ID NO: 4051162 - DNA, 25 bp, Homo sapien
ttcctttgctgacaatcttcacttc

SEQ ID NO: 4051163 - DNA, 25 bp, Homo sapien
tggggtgggtggcacgcactgaggc

SEQ ID NO: 4051164 - DNA, 25 bp, Homo sapien
ccctgggagagaccaatgtagttgt

SEQ ID NO: 4051165 - DNA, 25 bp, Homo sapien
accgcgggatacaggcgctgcaagc

SEQ ID NO: 4051166 - DNA, 25 bp, Homo sapien
ggttgccctgggagagaccaatgta

SEQ ID NO: 4051167 - DNA, 25 bp, Homo sapien
cagcggagtctcttgctggttgacc

SEQ ID NO: 4051168 - DNA, 25 bp, Homo sapien
tccgagtccggcacccctctttgga

SEQ ID NO: 4051169 - DNA, 25 bp, Homo sapien
agccaatggcccgtgagcctccctg

SEQ ID NO: 4051170 - DNA, 25 bp, Homo sapien
gggaggagcgggaccagatccgccc

SEQ ID NO: 4051171 - DNA, 25 bp, Homo sapien
tggacactgacacgccttaccacat

SEQ ID NO: 4051172 - DNA, 25 bp, Homo sapien
tctcgtccgcgtcgaggtaggcgct

SEQ ID NO: 4051173 - DNA, 25 bp, Homo sapien
caggccgcgggtgctgattgcccgc

SEQ ID NO: 4051174 - DNA, 25 bp, Homo sapien
agtcgcggtaccacagcttctcgtc

SEQ ID NO: 4051175 - DNA, 25 bp, Homo sapien
gattgcccgcctgcccgtgggtcat

SEQ ID NO: 4051176 - DNA, 25 bp, Homo sapien
gggaaatggcacttgatccggacct

SEQ ID NO: 4051177 - DNA, 25 bp, Homo sapien
gaaatggcacttgatccggacctct

SEQ ID NO: 4051178 - DNA, 25 bp, Homo sapien
aaatggcacttgatccggacctctg

SEQ ID NO: 4051179 - DNA, 25 bp, Homo sapien
atggcacttgatccggacctctgca

SEQ ID NO: 4051180 - DNA, 25 bp, Homo sapien
ttttctggagaacggggtctcgcta

SEQ ID NO: 4051181 - DNA, 25 bp, Homo sapien
tcccgcctcttagcctccctgagag

SEQ ID NO: 4051182 - DNA, 25 bp, Homo sapien
caagctatcctcccgcctcttagcc

SEQ ID NO: 4051183 - DNA, 25 bp, Homo sapien
tttctggagaacggggtctcgctat

SEQ ID NO: 4051184 - DNA, 25 bp, Homo sapien
ttgcctttcctggtgcttccagcat

SEQ ID NO: 4051185 - DNA, 25 bp, Homo sapien
cttgcctttcctggtgcttccagca

SEQ ID NO: 4051186 - DNA, 25 bp, Homo sapien
gcacgctgaaggaacgggaccaatt

SEQ ID NO: 4051187 - DNA, 25 bp, Homo sapien
gcggcctgactggaccaagtgcaaa

SEQ ID NO: 4051188 - DNA, 25 bp, Homo sapien
gagccagctacgaggaggttcgcaa

SEQ ID NO: 4051189 - DNA, 25 bp, Homo sapien
caggtcctgcttacatgtgggccca

SEQ ID NO: 4051190 - DNA, 25 bp, Homo sapien
catgccattctccagactgtgctgg

SEQ ID NO: 4051191 - DNA, 25 bp, Homo sapien
tgggggggaatcagtccctgcctgg

SEQ ID NO: 4051192 - DNA, 25 bp, Homo sapien
aaagtgtttgtctgaatccatgcca

SEQ ID NO: 4051193 - DNA, 25 bp, Homo sapien
ccaggacatgcaccaaaatgcagaa

SEQ ID NO: 4051194 - DNA, 25 bp, Homo sapien
cctggagaaatatgtgggggcaaga

SEQ ID NO: 4051195 - DNA, 25 bp, Homo sapien
ggagaaatatgtgggggcaagagtc

SEQ ID NO: 4051196 - DNA, 25 bp, Homo sapien
atgacactttattgatgctgggggg

SEQ ID NO: 4051197 - DNA, 25 bp, Homo sapien
gaaatatgtgggggcaagagtcccc

SEQ ID NO: 4051198 - DNA, 25 bp, Homo sapien
ccactgtatgcacaggggatgagca

SEQ ID NO: 4051199 - DNA, 25 bp, Homo sapien
ggatgagcagctgccggtactccag

SEQ ID NO: 4051200 - DNA, 25 bp, Homo sapien
ctactgggcagggaagacagagttg

SEQ ID NO: 4051201 - DNA, 25 bp, Homo sapien
aagacagagttgccactgtatgcac

SEQ ID NO: 4051202 - DNA, 25 bp, Homo sapien
tagcacgtgcagtgagacttggtca

SEQ ID NO: 4051203 - DNA, 25 bp, Homo sapien
gccgctccactagcacgtgcagtga

SEQ ID NO: 4051204 - DNA, 25 bp, Homo sapien
gacttggtcagtgaccaggccctgc

SEQ ID NO: 4051205 - DNA, 25 bp, Homo sapien
gcaggtgccgctccactagcacgtg

SEQ ID NO: 4051206 - DNA, 25 bp, Homo sapien
agaagggacaggcagaatcagcacc

SEQ ID NO: 4051207 - DNA, 25 bp, Homo sapien
gcttcacagtcttgcggccagcatg

SEQ ID NO: 4051208 - DNA, 25 bp, Homo sapien
tggcttcacagtcttgcggccagca

SEQ ID NO: 4051209 - DNA, 25 bp, Homo sapien
cttcacagtcttgcggccagcatga

SEQ ID NO: 4051210 - DNA, 25 bp, Homo sapien
ctctggcttcacagtcttgcggcca

SEQ ID NO: 4051211 - DNA, 25 bp, Homo sapien
cttggcatagaagctaaagagtttc

SEQ ID NO: 4051212 - DNA, 25 bp, Homo sapien
catgggcatcttggcatagaagcta

SEQ ID NO: 4051213 - DNA, 25 bp, Homo sapien
cacatagtggctcagtccagccttg

SEQ ID NO: 4051214 - DNA, 25 bp, Homo sapien
aaagagtttcacatagtggctcagt

SEQ ID NO: 4051215 - DNA, 25 bp, Homo sapien
gggatgcctgaccaacagaggctct

SEQ ID NO: 4051216 - DNA, 25 bp, Homo sapien
ctagggggatgcctgaccaacagag

SEQ ID NO: 4051217 - DNA, 25 bp, Homo sapien
ctgaccaacagaggctctgcaggct

SEQ ID NO: 4051218 - DNA, 25 bp, Homo sapien
gatgcctgaccaacagaggctctgc

SEQ ID NO: 4051219 - DNA, 25 bp, Homo sapien
tacctgcttgggtccatgactccag

SEQ ID NO: 4051220 - DNA, 25 bp, Homo sapien
cagtcgactcgacatcctggttcag

SEQ ID NO: 4051221 - DNA, 25 bp, Homo sapien
gggccacatagaggccagtctttcc

SEQ ID NO: 4051222 - DNA, 25 bp, Homo sapien
caggccttagaatggatagtctctc

SEQ ID NO: 4051223 - DNA, 25 bp, Homo sapien
ggtgctcttggtgagctctccccag

SEQ ID NO: 4051224 - DNA, 25 bp, Homo sapien
ctaagccgtggaggcaggcaccagg

SEQ ID NO: 4051225 - DNA, 25 bp, Homo sapien
ggcaggcaccaggatggcaggggtg

SEQ ID NO: 4051226 - DNA, 25 bp, Homo sapien
agcccagctgaagctgccctgctgg

SEQ ID NO: 4051227 - DNA, 25 bp, Homo sapien
ctgatgatgtcgcctggcctggaga

SEQ ID NO: 4051228 - DNA, 25 bp, Homo sapien
gaaactgatgatgtcgcctggcctg

SEQ ID NO: 4051229 - DNA, 25 bp, Homo sapien
agaaactgatgatgtcgcctggcct

SEQ ID NO: 4051230 - DNA, 25 bp, Homo sapien
aaactgatgatgtcgcctggcctgg

SEQ ID NO: 4051231 - DNA, 25 bp, Homo sapien
gagcaaaggcattgacctcctctgc

SEQ ID NO: 4051232 - DNA, 25 bp, Homo sapien
caactccatcgtgtaagggctctac

SEQ ID NO: 4051233 - DNA, 25 bp, Homo sapien
ctcttcaactccatcgtgtaagggc

SEQ ID NO: 4051234 - DNA, 25 bp, Homo sapien
atcgtgtaagggctctacttcatct

SEQ ID NO: 4051235 - DNA, 25 bp, Homo sapien
gccagaaactgggctggtttcccag

SEQ ID NO: 4051236 - DNA, 25 bp, Homo sapien
ccagaaactgggctggtttcccagg

SEQ ID NO: 4051237 - DNA, 25 bp, Homo sapien
ctgccagaaactgggctggtttccc

SEQ ID NO: 4051238 - DNA, 25 bp, Homo sapien
cagaaactgggctggtttcccaggg

SEQ ID NO: 4051239 - DNA, 25 bp, Homo sapien
caacatggactctgctcttggatga

SEQ ID NO: 4051240 - DNA, 25 bp, Homo sapien
acagccagggtgctctaggggcaca

SEQ ID NO: 4051241 - DNA, 25 bp, Homo sapien
ggacatggatctgaagtctcctggc

SEQ ID NO: 4051242 - DNA, 25 bp, Homo sapien
gggagagaatacaggccggagacgc

SEQ ID NO: 4051243 - DNA, 25 bp, Homo sapien
aactaccattgtcaactctcaccca

SEQ ID NO: 4051244 - DNA, 25 bp, Homo sapien
actaccattgtcaactctcacccaa

SEQ ID NO: 4051245 - DNA, 25 bp, Homo sapien
aaactaccattgtcaactctcaccc

SEQ ID NO: 4051246 - DNA, 25 bp, Homo sapien
ctaccattgtcaactctcacccaag

SEQ ID NO: 4051247 - DNA, 25 bp, Homo sapien
aaatttggctccaggccaccagtgc

SEQ ID NO: 4051248 - DNA, 25 bp, Homo sapien
caggccaccagtgccacacactcac

SEQ ID NO: 4051249 - DNA, 25 bp, Homo sapien
ctaaatttggctccaggccaccagt

SEQ ID NO: 4051250 - DNA, 25 bp, Homo sapien
tccaggccaccagtgccacacactc

SEQ ID NO: 4051251 - DNA, 25 bp, Homo sapien
tgtgtcttgcgaccggcagcctgct

SEQ ID NO: 4051252 - DNA, 25 bp, Homo sapien
cagggcagggagtgatacacgttgg

SEQ ID NO: 4051253 - DNA, 25 bp, Homo sapien
ggagccaaccatgggctgagagaac

SEQ ID NO: 4051254 - DNA, 25 bp, Homo sapien
ctgagagaacggctgggtgtcctcc

SEQ ID NO: 4051255 - DNA, 25 bp, Homo sapien
gagtagtaacaggttctgaggctgt

SEQ ID NO: 4051256 - DNA, 25 bp, Homo sapien
agtagtaacaggttctgaggctgtc

SEQ ID NO: 4051257 - DNA, 25 bp, Homo sapien
gtagtaacaggttctgaggctgtca

SEQ ID NO: 4051258 - DNA, 25 bp, Homo sapien
tagtaacaggttctgaggctgtcac

SEQ ID NO: 4051259 - DNA, 25 bp, Homo sapien
gaccagagttgctcgctgtccttga

SEQ ID NO: 4051260 - DNA, 25 bp, Homo sapien
gtttgaattggccagctgatcctga

SEQ ID NO: 4051261 - DNA, 25 bp, Homo sapien
agaaagaagacgacctagcacgcga

SEQ ID NO: 4051262 - DNA, 25 bp, Homo sapien
gttttctgcaatcaggctcccaggt

SEQ ID NO: 4051263 - DNA, 25 bp, Homo sapien
ggaagtatctcgcagatcccgcaaa

SEQ ID NO: 4051264 - DNA, 25 bp, Homo sapien
agccagggaagtatctcgcagatcc

SEQ ID NO: 4051265 - DNA, 25 bp, Homo sapien
aggagccagggaagtatctcgcaga

SEQ ID NO: 4051266 - DNA, 25 bp, Homo sapien
tatctcgcagatcccgcaaaaaggc

SEQ ID NO: 4051267 - DNA, 25 bp, Homo sapien
ggtctgcgggccaagccaggcctct

SEQ ID NO: 4051268 - DNA, 25 bp, Homo sapien
agccaggcctctgcactgactgtgg

SEQ ID NO: 4051269 - DNA, 25 bp, Homo sapien
ggctggaggtctgcgggccaagcca

SEQ ID NO: 4051270 - DNA, 25 bp, Homo sapien
agctcggcgggctggaggtctgcgg

SEQ ID NO: 4051271 - DNA, 25 bp, Homo sapien
ctgaagaggtgtggcaaaggtcagg

SEQ ID NO: 4051272 - DNA, 25 bp, Homo sapien
tgtggcaaaggtcaggttgagggat

SEQ ID NO: 4051273 - DNA, 25 bp, Homo sapien
aggtgtggcaaaggtcaggttgagg

SEQ ID NO: 4051274 - DNA, 25 bp, Homo sapien
gaagaggtgtggcaaaggtcaggtt

SEQ ID NO: 4051275 - DNA, 25 bp, Homo sapien
tacctgagacccagtttgcccacag

SEQ ID NO: 4051276 - DNA, 25 bp, Homo sapien
taggaagtagtatgggcagattcca

SEQ ID NO: 4051277 - DNA, 25 bp, Homo sapien
acagaggaaagtcaggtacctgaga

SEQ ID NO: 4051278 - DNA, 25 bp, Homo sapien
aaactggtaggaagtagtatgggca

SEQ ID NO: 4051279 - DNA, 25 bp, Homo sapien
gaagaggcatcagcattcccttgag

SEQ ID NO: 4051280 - DNA, 25 bp, Homo sapien
gggaagaggcatcagcattcccttg

SEQ ID NO: 4051281 - DNA, 25 bp, Homo sapien
gagggaagaggcatcagcattccct

SEQ ID NO: 4051282 - DNA, 25 bp, Homo sapien
agaggcatcagcattcccttgaggc

SEQ ID NO: 4051283 - DNA, 25 bp, Homo sapien
ggtagcaaaagtggtgtccagggcc

SEQ ID NO: 4051284 - DNA, 25 bp, Homo sapien
agcaaccggcaagagaatgtaaaag

SEQ ID NO: 4051285 - DNA, 25 bp, Homo sapien
gagggccctctctcaggactcctca

SEQ ID NO: 4051286 - DNA, 25 bp, Homo sapien
ctgtcagcaaccggcaagagaatgt

SEQ ID NO: 4051287 - DNA, 25 bp, Homo sapien
tgaaacactgacagtctcagcctct

SEQ ID NO: 4051288 - DNA, 25 bp, Homo sapien
cctgctgaaacactgacagtctcag

SEQ ID NO: 4051289 - DNA, 25 bp, Homo sapien
tgggagagagacagcccctggtcca

SEQ ID NO: 4051290 - DNA, 25 bp, Homo sapien
gagacagcccctggtccactccctg

SEQ ID NO: 4051291 - DNA, 25 bp, Homo sapien
ccagcagacctggagccagggttgt

SEQ ID NO: 4051292 - DNA, 25 bp, Homo sapien
tcgagctcaggaagttgcagctcca

SEQ ID NO: 4051293 - DNA, 25 bp, Homo sapien
gttgtggggggctcgagctcaggaa

SEQ ID NO: 4051294 - DNA, 25 bp, Homo sapien
cagggttgtggggggctcgagctca

SEQ ID NO: 4051295 - DNA, 25 bp, Homo sapien
ggaccgcctgcggtgctggcactgg

SEQ ID NO: 4051296 - DNA, 25 bp, Homo sapien
caggcatcaggatggaagattctgg

SEQ ID NO: 4051297 - DNA, 25 bp, Homo sapien
tggagggttggaccgcctgcggtgc

SEQ ID NO: 4051298 - DNA, 25 bp, Homo sapien
actggcttcactaccgactcaggca

SEQ ID NO: 4051299 - DNA, 25 bp, Homo sapien
caagactggggttggactggtacct

SEQ ID NO: 4051300 - DNA, 25 bp, Homo sapien
tggtacctaactctgaccggcaggc

SEQ ID NO: 4051301 - DNA, 25 bp, Homo sapien
ggccaccctgaataaaagataccac

SEQ ID NO: 4051302 - DNA, 25 bp, Homo sapien
aagataccacaagactggggttgga

SEQ ID NO: 4051303 - DNA, 25 bp, Homo sapien
cagcagcgtccgaggtgtctgttcc

SEQ ID NO: 4051304 - DNA, 25 bp, Homo sapien
tgttcttcagcagcgtccgaggtgt

SEQ ID NO: 4051305 - DNA, 25 bp, Homo sapien
atgttcttcagcagcgtccgaggtg

SEQ ID NO: 4051306 - DNA, 25 bp, Homo sapien
tcttcagcagcgtccgaggtgtctg

SEQ ID NO: 4051307 - DNA, 25 bp, Homo sapien
agcaccaagcaaccagtctgtccgt

SEQ ID NO: 4051308 - DNA, 25 bp, Homo sapien
atcggcaaagcaccaagcaaccagt

SEQ ID NO: 4051309 - DNA, 25 bp, Homo sapien
ctatcggcaaagcaccaagcaacca

SEQ ID NO: 4051310 - DNA, 25 bp, Homo sapien
ggcaaagcaccaagcaaccagtctg

SEQ ID NO: 4051311 - DNA, 25 bp, Homo sapien
gccttgagatttcctcaaggtgggc

SEQ ID NO: 4051312 - DNA, 25 bp, Homo sapien
tgccttgagatttcctcaaggtggg

SEQ ID NO: 4051313 - DNA, 25 bp, Homo sapien
catgggaacgccctctggctatcgt

SEQ ID NO: 4051314 - DNA, 25 bp, Homo sapien
gccctctggctatcgtccttgtttg

SEQ ID NO: 4051315 - DNA, 25 bp, Homo sapien
ctggctccatgggaacgccctctgg

SEQ ID NO: 4051316 - DNA, 25 bp, Homo sapien
tcgtccttgtttggccactcaactt

SEQ ID NO: 4051317 - DNA, 25 bp, Homo sapien
agccgtttcaagcagggctctccgg

SEQ ID NO: 4051318 - DNA, 25 bp, Homo sapien
gaagccgtttcaagcagggctctcc

SEQ ID NO: 4051319 - DNA, 25 bp, Homo sapien
gggaagccgtttcaagcagggctct

SEQ ID NO: 4051320 - DNA, 25 bp, Homo sapien
ctgggggaagccgtttcaagcaggg

SEQ ID NO: 4051321 - DNA, 25 bp, Homo sapien
cgcggggtgcgcgggtccgctgtat

SEQ ID NO: 4051322 - DNA, 25 bp, Homo sapien
ccgcggggtgcgcgggtccgctgta

SEQ ID NO: 4051323 - DNA, 25 bp, Homo sapien
agcccgagcactccggggtcgccgc

SEQ ID NO: 4051324 - DNA, 25 bp, Homo sapien
cagcccgagcactccggggtcgccg

SEQ ID NO: 4051325 - DNA, 25 bp, Homo sapien
gcgtggagtcgctgtcagggttgtg

SEQ ID NO: 4051326 - DNA, 25 bp, Homo sapien
gcacgcgtcgcagcagcgtgcgcgg

SEQ ID NO: 4051327 - DNA, 25 bp, Homo sapien
gcgtgcgcggcgtggagtcgctgtc

SEQ ID NO: 4051328 - DNA, 25 bp, Homo sapien
cagcacgcgtcgcagcagcgtgcgc

SEQ ID NO: 4051329 - DNA, 25 bp, Homo sapien
taatgtaactctcgcgatgctcccg

SEQ ID NO: 4051330 - DNA, 25 bp, Homo sapien
aactccggatgctttggaggcagcc

SEQ ID NO: 4051331 - DNA, 25 bp, Homo sapien
cgcacagccccacgggaattgtagt

SEQ ID NO: 4051332 - DNA, 25 bp, Homo sapien
ttctcgcactatcgcagctcgcggg

SEQ ID NO: 4051333 - DNA, 25 bp, Homo sapien
tcggttaatgtaatgcaagcagccc

SEQ ID NO: 4051334 - DNA, 25 bp, Homo sapien
taatgtaatgcaagcagcccaagtc

SEQ ID NO: 4051335 - DNA, 25 bp, Homo sapien
gcaagcagcccaagtcttggcttct

SEQ ID NO: 4051336 - DNA, 25 bp, Homo sapien
ggtaaacctcggttaatgtaatgca

SEQ ID NO: 4051337 - DNA, 25 bp, Homo sapien
caccttaagttttcatggcaactga

SEQ ID NO: 4051338 - DNA, 25 bp, Homo sapien
ttttcactggttgacaatcctctca

SEQ ID NO: 4051339 - DNA, 25 bp, Homo sapien
acttggtttctgagtcttccgtgga

SEQ ID NO: 4051340 - DNA, 25 bp, Homo sapien
attctgttagtgttttcctccgtat

SEQ ID NO: 4051341 - DNA, 25 bp, Homo sapien
atcgagccacactactccagcttgg

SEQ ID NO: 4051342 - DNA, 25 bp, Homo sapien
agctgagatcgagccacactactcc

SEQ ID NO: 4051343 - DNA, 25 bp, Homo sapien
ctgagatcgagccacactactccag

SEQ ID NO: 4051344 - DNA, 25 bp, Homo sapien
gcagagctgagatcgagccacacta

SEQ ID NO: 4051345 - DNA, 25 bp, Homo sapien
cattcgtactccttgtcgtcaggca

SEQ ID NO: 4051346 - DNA, 25 bp, Homo sapien
tacaggctgctaccgcagggctgga

SEQ ID NO: 4051347 - DNA, 25 bp, Homo sapien
aagctgaatgagcagcgggacatcc

SEQ ID NO: 4051348 - DNA, 25 bp, Homo sapien
acatcctggctctgatggaagtgaa

SEQ ID NO: 4051349 - DNA, 25 bp, Homo sapien
ccaagctgcgcgaagaactgcgtga

SEQ ID NO: 4051350 - DNA, 25 bp, Homo sapien
aactgcgtgagaaggatcggctgct

SEQ ID NO: 4051351 - DNA, 25 bp, Homo sapien
cggaatgtgaactggtgccccggca

SEQ ID NO: 4051352 - DNA, 25 bp, Homo sapien
tgccatggctgtcatccgcaagaag

SEQ ID NO: 4051353 - DNA, 25 bp, Homo sapien
gactctcttgctggtgacctggcat

SEQ ID NO: 4051354 - DNA, 25 bp, Homo sapien
gctggactctcttgctggtgacctg

SEQ ID NO: 4051355 - DNA, 25 bp, Homo sapien
tggactctcttgctggtgacctggc

SEQ ID NO: 4051356 - DNA, 25 bp, Homo sapien
ggcagctggactctcttgctggtga

SEQ ID NO: 4051357 - DNA, 25 bp, Homo sapien
cctggtgacaccagcaattatgact

SEQ ID NO: 4051358 - DNA, 25 bp, Homo sapien
gaaacttaccctctagggatgcagg

SEQ ID NO: 4051359 - DNA, 25 bp, Homo sapien
ggtcagcagtcagacaactctaatg

SEQ ID NO: 4051360 - DNA, 25 bp, Homo sapien
gggccttagactctgccctggtgac

SEQ ID NO: 4051361 - DNA, 25 bp, Homo sapien
taggacttattttcccaggaggcca

SEQ ID NO: 4051362 - DNA, 25 bp, Homo sapien
ttctgtacaattagtcagactaaag

SEQ ID NO: 4051363 - DNA, 25 bp, Homo sapien
cagcttgccagggacttaggtttat

SEQ ID NO: 4051364 - DNA, 25 bp, Homo sapien
gatctggatgacctgctgatggaga

SEQ ID NO: 4051365 - DNA, 25 bp, Homo sapien
gcttttgtctatagctccaagtaat

SEQ ID NO: 4051366 - DNA, 25 bp, Homo sapien
gattacattgcttttgtctatagct

SEQ ID NO: 4051367 - DNA, 25 bp, Homo sapien
gggcaaggattacattgcttttgtc

SEQ ID NO: 4051368 - DNA, 25 bp, Homo sapien
gattgaatattgaaggggcaaggat

SEQ ID NO: 4051369 - DNA, 25 bp, Homo sapien
tctgacctagagactggccttacca

SEQ ID NO: 4051370 - DNA, 25 bp, Homo sapien
tctctttgccaagcacaggtctgac

SEQ ID NO: 4051371 - DNA, 25 bp, Homo sapien
aagtgtggtccggtcttaccagcca

SEQ ID NO: 4051372 - DNA, 25 bp, Homo sapien
tgtggtaccccaagttggctgcaga

SEQ ID NO: 4051373 - DNA, 25 bp, Homo sapien
cgaaaccagctttgggcccgactcg

SEQ ID NO: 4051374 - DNA, 25 bp, Homo sapien
ttgcaggagctgtgcgttccgcccg

SEQ ID NO: 4051375 - DNA, 25 bp, Homo sapien
caggcgcacgaatgttgggattgca

SEQ ID NO: 4051376 - DNA, 25 bp, Homo sapien
ggccacacagctcggaagagtaaca

SEQ ID NO: 4051377 - DNA, 25 bp, Homo sapien
ctacgaaggatccggggatgggcag

SEQ ID NO: 4051378 - DNA, 25 bp, Homo sapien
ggatccggggatgggcagcgccacc

SEQ ID NO: 4051379 - DNA, 25 bp, Homo sapien
tacgaaggatccggggatgggcagc

SEQ ID NO: 4051380 - DNA, 25 bp, Homo sapien
gaaggatccggggatgggcagcgcc

SEQ ID NO: 4051381 - DNA, 25 bp, Homo sapien
cactgttacgatgtggccaatctgg

SEQ ID NO: 4051382 - DNA, 25 bp, Homo sapien
ctcacccactgttacgatgtggcca

SEQ ID NO: 4051383 - DNA, 25 bp, Homo sapien
tacgatgtggccaatctggacgtcc

SEQ ID NO: 4051384 - DNA, 25 bp, Homo sapien
ctgttacgatgtggccaatctggac

SEQ ID NO: 4051385 - DNA, 25 bp, Homo sapien
aagaaggtggacaggtgtatggaca

SEQ ID NO: 4051386 - DNA, 25 bp, Homo sapien
agaaggtggacaggtgtatggacat

SEQ ID NO: 4051387 - DNA, 25 bp, Homo sapien
gttcttgtaacacctgattttgtca

SEQ ID NO: 4051388 - DNA, 25 bp, Homo sapien
tttgtcacttaggtgctttctgcta

SEQ ID NO: 4051389 - DNA, 25 bp, Homo sapien
ctgattttgtcacttaggtgctttc

SEQ ID NO: 4051390 - DNA, 25 bp, Homo sapien
cacttaggtgctttctgctactcca

SEQ ID NO: 4051391 - DNA, 25 bp, Homo sapien
gccctagtagcaggagagatgatcc

SEQ ID NO: 4051392 - DNA, 25 bp, Homo sapien
gctagcctctcagaagccgtgtagg

SEQ ID NO: 4051393 - DNA, 25 bp, Homo sapien
tctgctctgggtaggttcagggccc

SEQ ID NO: 4051394 - DNA, 25 bp, Homo sapien
cagggcgactggtctttggaaagca

SEQ ID NO: 4051395 - DNA, 25 bp, Homo sapien
cacatgggctccgttatggcccagg

SEQ ID NO: 4051396 - DNA, 25 bp, Homo sapien
gcctgaatcctctccctaattttct

SEQ ID NO: 4051397 - DNA, 25 bp, Homo sapien
gagcagtttgaagctgacgcccact

SEQ ID NO: 4051398 - DNA, 25 bp, Homo sapien
gccgtgatgcacctggaccacagtg

SEQ ID NO: 4051399 - DNA, 25 bp, Homo sapien
tgtcgtgctggatagcccgtctcca

SEQ ID NO: 4051400 - DNA, 25 bp, Homo sapien
ttcccggcgtccgagtctggactgg

SEQ ID NO: 4051401 - DNA, 25 bp, Homo sapien
cagccgaactgtggtcgtggtcgct

SEQ ID NO: 4051402 - DNA, 25 bp, Homo sapien
gtctggactggcctcggaacgtgct

SEQ ID NO: 4051403 - DNA, 25 bp, Homo sapien
gagtgctgccctgtcgcttaggctg

SEQ ID NO: 4051404 - DNA, 25 bp, Homo sapien
tgagacggagtgctgccctgtcgct

SEQ ID NO: 4051405 - DNA, 25 bp, Homo sapien
agacggagtgctgccctgtcgctta

SEQ ID NO: 4051406 - DNA, 25 bp, Homo sapien
gttggacaggtggtttcaaactcat

SEQ ID NO: 4051407 - DNA, 25 bp, Homo sapien
tcacagaggtggacagtgttggccc

SEQ ID NO: 4051408 - DNA, 25 bp, Homo sapien
ccagggtagctaagtacagggccaa

SEQ ID NO: 4051409 - DNA, 25 bp, Homo sapien
ggttcccagcagcaagtcagtatgc

SEQ ID NO: 4051410 - DNA, 25 bp, Homo sapien
tgttggccctgtcaaagccgggttc

SEQ ID NO: 4051411 - DNA, 25 bp, Homo sapien
ttgttaaaagcagacatcgctatgt

SEQ ID NO: 4051412 - DNA, 25 bp, Homo sapien
cagggctactccaggacattgttaa

SEQ ID NO: 4051413 - DNA, 25 bp, Homo sapien
tggcacaggcctattgcaaagcgag

SEQ ID NO: 4051414 - DNA, 25 bp, Homo sapien
tgcagcaggcttctaaatctggaac

SEQ ID NO: 4051415 - DNA, 25 bp, Homo sapien
tcgagtgtcagcctgggttctatcc

SEQ ID NO: 4051416 - DNA, 25 bp, Homo sapien
tgggagtgatcactgcacgcccatc

SEQ ID NO: 4051417 - DNA, 25 bp, Homo sapien
tcctttggtgcagccccattgcctt

SEQ ID NO: 4051418 - DNA, 25 bp, Homo sapien
gaaggcgccatctggtgtctgcatg

SEQ ID NO: 4051419 - DNA, 25 bp, Homo sapien
gccctggggcttacgttctctcttg

SEQ ID NO: 4051420 - DNA, 25 bp, Homo sapien
gagatgtgggcctttgatagaccca

SEQ ID NO: 4051421 - DNA, 25 bp, Homo sapien
aagagaccactctgtgccaagtcga

SEQ ID NO: 4051422 - DNA, 25 bp, Homo sapien
gactatgccttagacacatcctcct

SEQ ID NO: 4051423 - DNA, 25 bp, Homo sapien
tccaagtagggagtcggaccctcaa

SEQ ID NO: 4051424 - DNA, 25 bp, Homo sapien
tactcaaggagtcactcagcccctt

SEQ ID NO: 4051425 - DNA, 25 bp, Homo sapien
tcggcatggctactctaggaagagc

SEQ ID NO: 4051426 - DNA, 25 bp, Homo sapien
taggaagagccactgctactcaagg

SEQ ID NO: 4051427 - DNA, 25 bp, Homo sapien
ccaggaagacagacatgaatgcatg

SEQ ID NO: 4051428 - DNA, 25 bp, Homo sapien
ctgagccaggaagacagacatgaat

SEQ ID NO: 4051429 - DNA, 25 bp, Homo sapien
caggaagacagacatgaatgcatga

SEQ ID NO: 4051430 - DNA, 25 bp, Homo sapien
gaagacagacatgaatgcatgatgg

SEQ ID NO: 4051431 - DNA, 25 bp, Homo sapien
tgggtctttaatgggttgagctggg

SEQ ID NO: 4051432 - DNA, 25 bp, Homo sapien
ggtgccccaggagacaataccaata

SEQ ID NO: 4051433 - DNA, 25 bp, Homo sapien
caggtgcgcgcacattgcagttttt

SEQ ID NO: 4051434 - DNA, 25 bp, Homo sapien
gtgctgaacttgctaactcgagtat

SEQ ID NO: 4051435 - DNA, 25 bp, Homo sapien
catgtgtttcccttctggcagacaa

SEQ ID NO: 4051436 - DNA, 25 bp, Homo sapien
gggaggtataccacaggacagcgca

SEQ ID NO: 4051437 - DNA, 25 bp, Homo sapien
ggttggggaggtataccacaggaca

SEQ ID NO: 4051438 - DNA, 25 bp, Homo sapien
aggtataccacaggacagcgcagag

SEQ ID NO: 4051439 - DNA, 25 bp, Homo sapien
gaagagggagggagaattgagtagg

SEQ ID NO: 4051440 - DNA, 25 bp, Homo sapien
ggagtcagtgatacttgagccccag

SEQ ID NO: 4051441 - DNA, 25 bp, Homo sapien
ctggcacgaggaggcacctgcgcca

SEQ ID NO: 4051442 - DNA, 25 bp, Homo sapien
acctgcgccacctgcacagatcatg

SEQ ID NO: 4051443 - DNA, 25 bp, Homo sapien
cggcactgattcacagtgaccaggg

SEQ ID NO: 4051444 - DNA, 25 bp, Homo sapien
agcagcgtcacgtcattgttcatgg

SEQ ID NO: 4051445 - DNA, 25 bp, Homo sapien
ggtggtgacacacgtgaggccttca

SEQ ID NO: 4051446 - DNA, 25 bp, Homo sapien
aactggcgagatgcgtgttgtgtac

SEQ ID NO: 4051447 - DNA, 25 bp, Homo sapien
gtttgaggatgccaggcaaactggc

SEQ ID NO: 4051448 - DNA, 25 bp, Homo sapien
ggtcagaaacagtccatgttctgat

SEQ ID NO: 4051449 - DNA, 25 bp, Homo sapien
ctgtggggtcagaaacagtccatgt

SEQ ID NO: 4051450 - DNA, 25 bp, Homo sapien
gggtcagaaacagtccatgttctga

SEQ ID NO: 4051451 - DNA, 25 bp, Homo sapien
tggggtcagaaacagtccatgttct

SEQ ID NO: 4051452 - DNA, 25 bp, Homo sapien
tgcccacttttcctccgtgtctgca

SEQ ID NO: 4051453 - DNA, 25 bp, Homo sapien
cttttcctccgtgtctgcagcccag

SEQ ID NO: 4051454 - DNA, 25 bp, Homo sapien
cacttttcctccgtgtctgcagccc

SEQ ID NO: 4051455 - DNA, 25 bp, Homo sapien
gcactgcccacttttcctccgtgtc

SEQ ID NO: 4051456 - DNA, 25 bp, Homo sapien
tgatgatcggtcatactcgcccagg

SEQ ID NO: 4051457 - DNA, 25 bp, Homo sapien
caagggctctgcgtttgatgatcgg

SEQ ID NO: 4051458 - DNA, 25 bp, Homo sapien
ccgagagacggacagaacctgcaag

SEQ ID NO: 4051459 - DNA, 25 bp, Homo sapien
catactcgcccaggacaacaaaatg

SEQ ID NO: 4051460 - DNA, 25 bp, Homo sapien
gaggccagcgcgagagggggacagc

SEQ ID NO: 4051461 - DNA, 25 bp, Homo sapien
gggaggccagcgcgagagggggaca

SEQ ID NO: 4051462 - DNA, 25 bp, Homo sapien
ggaggccagcgcgagagggggacag

SEQ ID NO: 4051463 - DNA, 25 bp, Homo sapien
aggccagcgcgagagggggacagcc

SEQ ID NO: 4051464 - DNA, 25 bp, Homo sapien
ggcagcagtgaccacccaggactgg

SEQ ID NO: 4051465 - DNA, 25 bp, Homo sapien
agtgggcagcagtgaccacccagga

SEQ ID NO: 4051466 - DNA, 25 bp, Homo sapien
ctgacattgcagtgggcagcagtga

SEQ ID NO: 4051467 - DNA, 25 bp, Homo sapien
tgggcagcagtgaccacccaggact

SEQ ID NO: 4051468 - DNA, 25 bp, Homo sapien
atgagagaaccaccgcagaagtgga

SEQ ID NO: 4051469 - DNA, 25 bp, Homo sapien
ctgatgagagaaccaccgcagaagt

SEQ ID NO: 4051470 - DNA, 25 bp, Homo sapien
ccgcagaagtggaagccgctgctgt

SEQ ID NO: 4051471 - DNA, 25 bp, Homo sapien
cgcagaagtggaagccgctgctgtc

SEQ ID NO: 4051472 - DNA, 25 bp, Homo sapien
taggcatgacgtacccaggaccctg

SEQ ID NO: 4051473 - DNA, 25 bp, Homo sapien
tgaggctgcccctaggcatgacgta

SEQ ID NO: 4051474 - DNA, 25 bp, Homo sapien
aggctgcccctaggcatgacgtacc

SEQ ID NO: 4051475 - DNA, 25 bp, Homo sapien
tgcccctaggcatgacgtacccagg

SEQ ID NO: 4051476 - DNA, 25 bp, Homo sapien
gttgacaatcctctggctgaagctc

SEQ ID NO: 4051477 - DNA, 25 bp, Homo sapien
ggagcccaacactgcattctccccg

SEQ ID NO: 4051478 - DNA, 25 bp, Homo sapien
attctccccgttgacaatcctctgg

SEQ ID NO: 4051479 - DNA, 25 bp, Homo sapien
gctcagtgccggtttgatggcagga

SEQ ID NO: 4051480 - DNA, 25 bp, Homo sapien
gggctaatgaggacctgcttcccat

SEQ ID NO: 4051481 - DNA, 25 bp, Homo sapien
gccattgggctaatgaggacctgct

SEQ ID NO: 4051482 - DNA, 25 bp, Homo sapien
ctggccattgggctaatgaggacct

SEQ ID NO: 4051483 - DNA, 25 bp, Homo sapien
cattgggctaatgaggacctgcttc

SEQ ID NO: 4051484 - DNA, 25 bp, Homo sapien
aacagggtacatgcaagcaccttcg

SEQ ID NO: 4051485 - DNA, 25 bp, Homo sapien
tgcaccccagagaggtctgtcgaga

SEQ ID NO: 4051486 - DNA, 25 bp, Homo sapien
agttcatacccttcatgcagccaga

SEQ ID NO: 4051487 - DNA, 25 bp, Homo sapien
tctgtcgagagggtacagcactacc

SEQ ID NO: 4051488 - DNA, 25 bp, Homo sapien
ttagggtcaggctgagcagcaacat

SEQ ID NO: 4051489 - DNA, 25 bp, Homo sapien
ggaggagccgaggagaaccaggctt

SEQ ID NO: 4051490 - DNA, 25 bp, Homo sapien
agaaccaggcttagggtcaggctga

SEQ ID NO: 4051491 - DNA, 25 bp, Homo sapien
gccgaggagaaccaggcttagggtc

SEQ ID NO: 4051492 - DNA, 25 bp, Homo sapien
gggtcttctcgtccttgagctaaag

SEQ ID NO: 4051493 - DNA, 25 bp, Homo sapien
tctcgtccttgagctaaagctccag

SEQ ID NO: 4051494 - DNA, 25 bp, Homo sapien
gtctggctttatgggtcttctcgtc

SEQ ID NO: 4051495 - DNA, 25 bp, Homo sapien
gggtctggctttatgggtcttctcg

SEQ ID NO: 4051496 - DNA, 25 bp, Homo sapien
gagacctagacttatcagacagagc

SEQ ID NO: 4051497 - DNA, 25 bp, Homo sapien
tgctcactgcggtcaactttgctgt

SEQ ID NO: 4051498 - DNA, 25 bp, Homo sapien
ggctgggagtcctaacacatcatcg

SEQ ID NO: 4051499 - DNA, 25 bp, Homo sapien
tctgactggtggatggaatgctcac

SEQ ID NO: 4051500 - DNA, 25 bp, Homo sapien
ctcttggtgcctggccgaccgtgga

SEQ ID NO: 4051501 - DNA, 25 bp, Homo sapien
gatgatacttatgaagggcctggca

SEQ ID NO: 4051502 - DNA, 25 bp, Homo sapien
gaagcctccgctcttaacaatgaga

SEQ ID NO: 4051503 - DNA, 25 bp, Homo sapien
tgtacacaaactcgcatttgtctgg

SEQ ID NO: 4051504 - DNA, 25 bp, Homo sapien
cgttctcgctgaggacaggatgctc

SEQ ID NO: 4051505 - DNA, 25 bp, Homo sapien
tgcagggacgccttagctacagagc

SEQ ID NO: 4051506 - DNA, 25 bp, Homo sapien
tatggtaggtaatggcccctgcagg

SEQ ID NO: 4051507 - DNA, 25 bp, Homo sapien
caagtctccagtggactagagggca

SEQ ID NO: 4051508 - DNA, 25 bp, Homo sapien
ttattcccccttgttccaagctcta

SEQ ID NO: 4051509 - DNA, 25 bp, Homo sapien
ctgcacagtttcctccactagctcc

SEQ ID NO: 4051510 - DNA, 25 bp, Homo sapien
tgcacagtttcctccactagctcca

SEQ ID NO: 4051511 - DNA, 25 bp, Homo sapien
tccaggcacaaagtggtagcggcca

SEQ ID NO: 4051512 - DNA, 25 bp, Homo sapien
aggcacaaagtggtagcggccagac

SEQ ID NO: 4051513 - DNA, 25 bp, Homo sapien
gctgtggttccaggcacaaagtggt

SEQ ID NO: 4051514 - DNA, 25 bp, Homo sapien
gttccaggcacaaagtggtagcggc

SEQ ID NO: 4051515 - DNA, 25 bp, Homo sapien
tctgtgggtgagctcagtgtccgca

SEQ ID NO: 4051516 - DNA, 25 bp, Homo sapien
tggcgccagtctttgtgatcacaca

SEQ ID NO: 4051517 - DNA, 25 bp, Homo sapien
aagatcccggcggtgacggcttcca

SEQ ID NO: 4051518 - DNA, 25 bp, Homo sapien
tcttcacgggctctgtgggtgagct

SEQ ID NO: 4051519 - DNA, 25 bp, Homo sapien
taaagatcctctgtgagcttcgact

SEQ ID NO: 4051520 - DNA, 25 bp, Homo sapien
gacggtgttatgtcgggaccgcact

SEQ ID NO: 4051521 - DNA, 25 bp, Homo sapien
gacgttgatataagtaggaccctac

SEQ ID NO: 4051522 - DNA, 25 bp, Homo sapien
ggtgtgtgagacctaacgggctctc

SEQ ID NO: 4051523 - DNA, 25 bp, Homo sapien
cgaccacaaagtcggggacagaggc

SEQ ID NO: 4051524 - DNA, 25 bp, Homo sapien
agccttagccacccgcactgggcca

SEQ ID NO: 4051525 - DNA, 25 bp, Homo sapien
tgcacatcccaccagcgaccacaaa

SEQ ID NO: 4051526 - DNA, 25 bp, Homo sapien
acctcctccgacaagccttagccac

SEQ ID NO: 4051527 - DNA, 25 bp, Homo sapien
ggctggaaccggtcttctagcaccg

SEQ ID NO: 4051528 - DNA, 25 bp, Homo sapien
tgttcggctggaaccggtcttctag

SEQ ID NO: 4051529 - DNA, 25 bp, Homo sapien
cgtcatgttcggctggaaccggtct

SEQ ID NO: 4051530 - DNA, 25 bp, Homo sapien
aaccggtcttctagcaccgccaggg

SEQ ID NO: 4051531 - DNA, 25 bp, Homo sapien
caaccgctgcgacgccgtttggagt

SEQ ID NO: 4051532 - DNA, 25 bp, Homo sapien
ggagaagcatctgaagtcaaccgct

SEQ ID NO: 4051533 - DNA, 25 bp, Homo sapien
gcatctgaagtcaaccgctgcgacg

SEQ ID NO: 4051534 - DNA, 25 bp, Homo sapien
cgacgccgtttggagtgaggccaag

SEQ ID NO: 4051535 - DNA, 25 bp, Homo sapien
cacgatcagcgatgcacccacgtgg

SEQ ID NO: 4051536 - DNA, 25 bp, Homo sapien
aagggcagacggctgtaggagccat

SEQ ID NO: 4051537 - DNA, 25 bp, Homo sapien
ccatggggatgcacaccgtagagct

SEQ ID NO: 4051538 - DNA, 25 bp, Homo sapien
caccgtagagctgcggtccagtcag

SEQ ID NO: 4051539 - DNA, 25 bp, Homo sapien
ctcgaggatgggcggggtcggccac

SEQ ID NO: 4051540 - DNA, 25 bp, Homo sapien
cgaggatgggcggggtcggccacaa

SEQ ID NO: 4051541 - DNA, 25 bp, Homo sapien
aggatgggcggggtcggccacaagc

SEQ ID NO: 4051542 - DNA, 25 bp, Homo sapien
tgctcgaggatgggcggggtcggcc

SEQ ID NO: 4051543 - DNA, 25 bp, Homo sapien
aggatgcgagtgaccgtggccacgc

SEQ ID NO: 4051544 - DNA, 25 bp, Homo sapien
gtagctccatcttggacgccaccat

SEQ ID NO: 4051545 - DNA, 25 bp, Homo sapien
ggtcatctcggcgtccgcggctact

SEQ ID NO: 4051546 - DNA, 25 bp, Homo sapien
ggctcgcggcccgtagataacgcgt

SEQ ID NO: 4051547 - DNA, 25 bp, Homo sapien
caaaagggaggatcggtgtgggcag

SEQ ID NO: 4051548 - DNA, 25 bp, Homo sapien
gcagggctgggacgtgcggggaccg

SEQ ID NO: 4051549 - DNA, 25 bp, Homo sapien
acgggaactgggctcgggagtctca

SEQ ID NO: 4051550 - DNA, 25 bp, Homo sapien
ttgcgtacgggaactgggctcggga

SEQ ID NO: 4051551 - DNA, 25 bp, Homo sapien
gtatcggcgcccagaatgaccccgt

SEQ ID NO: 4051552 - DNA, 25 bp, Homo sapien
gaccgaatcgttagtggctcgcgta

SEQ ID NO: 4051553 - DNA, 25 bp, Homo sapien
tggctcgcgtatcggcgcccagaat

SEQ ID NO: 4051554 - DNA, 25 bp, Homo sapien
tcttgtccgccacgaccgaatcgtt

SEQ ID NO: 4051555 - DNA, 25 bp, Homo sapien
agtgcctgctcgatactctcggctc

SEQ ID NO: 4051556 - DNA, 25 bp, Homo sapien
ttcagtgcctgctcgatactctcgg

SEQ ID NO: 4051557 - DNA, 25 bp, Homo sapien
gcttcagtgcctgctcgatactctc

SEQ ID NO: 4051558 - DNA, 25 bp, Homo sapien
cagtgcctgctcgatactctcggct

SEQ ID NO: 4051559 - DNA, 25 bp, Homo sapien
tcttgcgtgcgtgagggaccttgag

SEQ ID NO: 4051560 - DNA, 25 bp, Homo sapien
ttgagccccgggaggacgcgttcca

SEQ ID NO: 4051561 - DNA, 25 bp, Homo sapien
cccgcgatggtggtcccggtcttgc

SEQ ID NO: 4051562 - DNA, 25 bp, Homo sapien
gaggacgcgttccaatgatgcattt

SEQ ID NO: 4051563 - DNA, 25 bp, Homo sapien
aggagggcgcccatgtttcggctct

SEQ ID NO: 4051564 - DNA, 25 bp, Homo sapien
agcctggaacccaagtcgaccaaca

SEQ ID NO: 4051565 - DNA, 25 bp, Homo sapien
aaaaaggccacgagcaagcagaggc

SEQ ID NO: 4051566 - DNA, 25 bp, Homo sapien
tctgctttcaagacccctgttgctt

SEQ ID NO: 4051567 - DNA, 25 bp, Homo sapien
ttggcagttctcgaaggagaagccc

SEQ ID NO: 4051568 - DNA, 25 bp, Homo sapien
ctttggcagttctcgaaggagaagc

SEQ ID NO: 4051569 - DNA, 25 bp, Homo sapien
gcagttctcgaaggagaagccccct

SEQ ID NO: 4051570 - DNA, 25 bp, Homo sapien
tggcagttctcgaaggagaagcccc

SEQ ID NO: 4051571 - DNA, 25 bp, Homo sapien
gaaccgggtgatgtcccttgctgtg

SEQ ID NO: 4051572 - DNA, 25 bp, Homo sapien
cactgggtactctgttggatagagg

SEQ ID NO: 4051573 - DNA, 25 bp, Homo sapien
tctgctaggcttcacgtctgtactt

SEQ ID NO: 4051574 - DNA, 25 bp, Homo sapien
tcaaaggcccgtggcggttttctgc

SEQ ID NO: 4051575 - DNA, 25 bp, Homo sapien
gctggtgaggagtgaaacctagtgt

SEQ ID NO: 4051576 - DNA, 25 bp, Homo sapien
ggtgaggagtgaaacctagtgtggg

SEQ ID NO: 4051577 - DNA, 25 bp, Homo sapien
actctagtgcctcccttcaacctga

SEQ ID NO: 4051578 - DNA, 25 bp, Homo sapien
gactctagtgcctcccttcaacctg

SEQ ID NO: 4051579 - DNA, 25 bp, Homo sapien
gaggcgggggctctgggctggcagt

SEQ ID NO: 4051580 - DNA, 25 bp, Homo sapien
aggaggcgggggctctgggctggca

SEQ ID NO: 4051581 - DNA, 25 bp, Homo sapien
ggcgggggctctgggctggcagtcg

SEQ ID NO: 4051582 - DNA, 25 bp, Homo sapien
ttattcaggaggcgggggctctggg

SEQ ID NO: 4051583 - DNA, 25 bp, Homo sapien
gaccctggcggtaggcacccagcag

SEQ ID NO: 4051584 - DNA, 25 bp, Homo sapien
gaagaccatgttgagatgctgtatc

SEQ ID NO: 4051585 - DNA, 25 bp, Homo sapien
ttgagatgctgtatcccgtgcaggg

SEQ ID NO: 4051586 - DNA, 25 bp, Homo sapien
catgttgagatgctgtatcccgtgc

SEQ ID NO: 4051587 - DNA, 25 bp, Homo sapien
cgccatgcgagagggaaacatccag

SEQ ID NO: 4051588 - DNA, 25 bp, Homo sapien
caggcccacgccgtaaagacagtat

SEQ ID NO: 4051589 - DNA, 25 bp, Homo sapien
caaagaagcgttggaagtcacggcc

SEQ ID NO: 4051590 - DNA, 25 bp, Homo sapien
tggaaatgaacacgtggtcctcagg

SEQ ID NO: 4051591 - DNA, 25 bp, Homo sapien
caggcctgatattcaatgatgctca

SEQ ID NO: 4051592 - DNA, 25 bp, Homo sapien
tggcccacaacctgctgagtgtagg

SEQ ID NO: 4051593 - DNA, 25 bp, Homo sapien
ttgtccctgcccaatctagacacag

SEQ ID NO: 4051594 - DNA, 25 bp, Homo sapien
tagacacagactctaagccacaggc

SEQ ID NO: 4051595 - DNA, 25 bp, Homo sapien
caatgagaagccctgataagacctc

SEQ ID NO: 4051596 - DNA, 25 bp, Homo sapien
gagaagccctgataagacctctgtt

SEQ ID NO: 4051597 - DNA, 25 bp, Homo sapien
gaagccctgataagacctctgttgg

SEQ ID NO: 4051598 - DNA, 25 bp, Homo sapien
tgagaagccctgataagacctctgt

SEQ ID NO: 4051599 - DNA, 25 bp, Homo sapien
ttgagactgcggctatgatcacgcc

SEQ ID NO: 4051600 - DNA, 25 bp, Homo sapien
attgagactgcggctatgatcacgc

SEQ ID NO: 4051601 - DNA, 25 bp, Homo sapien
gagattgagactgcggctatgatca

SEQ ID NO: 4051602 - DNA, 25 bp, Homo sapien
agggagattgagactgcggctatga

SEQ ID NO: 4051603 - DNA, 25 bp, Homo sapien
gagtaggtggtagctgtgtcagtgc

SEQ ID NO: 4051604 - DNA, 25 bp, Homo sapien
ttggtggtgtctgatgagcgtttct

SEQ ID NO: 4051605 - DNA, 25 bp, Homo sapien
tgtttattggtggtgtctgatgagc

SEQ ID NO: 4051606 - DNA, 25 bp, Homo sapien
tctgatgagcgtttctcttgtccag

SEQ ID NO: 4051607 - DNA, 25 bp, Homo sapien
tcctcagtgaagcacatccctgggc

SEQ ID NO: 4051608 - DNA, 25 bp, Homo sapien
agcaggtggggcctcggggggtctg

SEQ ID NO: 4051609 - DNA, 25 bp, Homo sapien
ctcagtgaagcacatccctgggcaa

SEQ ID NO: 4051610 - DNA, 25 bp, Homo sapien
cagtgaagcacatccctgggcaaag

SEQ ID NO: 4051611 - DNA, 25 bp, Homo sapien
agcttggtctcacccatcgctggac

SEQ ID NO: 4051612 - DNA, 25 bp, Homo sapien
gaaggagccaccctaattgctcagg

SEQ ID NO: 4051613 - DNA, 25 bp, Homo sapien
gagtggtagatagcacccctagagg

SEQ ID NO: 4051614 - DNA, 25 bp, Homo sapien
gacctaagtgttcgaggccttctca

SEQ ID NO: 4051615 - DNA, 25 bp, Homo sapien
tggcgcagcaggaaatagagcaagt

SEQ ID NO: 4051616 - DNA, 25 bp, Homo sapien
gatgaagccatcaataaagcggtcc

SEQ ID NO: 4051617 - DNA, 25 bp, Homo sapien
ccagggagccccaagagagatgaag

SEQ ID NO: 4051618 - DNA, 25 bp, Homo sapien
ggcttcccataggcagcgtgcatct

SEQ ID NO: 4051619 - DNA, 25 bp, Homo sapien
agtctcgtcccgcacgtagccattg

SEQ ID NO: 4051620 - DNA, 25 bp, Homo sapien
ggcggcgcgcacagtctcgtcccgc

SEQ ID NO: 4051621 - DNA, 25 bp, Homo sapien
cacgtagccattgttgaccaggttc

SEQ ID NO: 4051622 - DNA, 25 bp, Homo sapien
cgggctccagccgccagtcataggg

SEQ ID NO: 4051623 - DNA, 25 bp, Homo sapien
gaccagcagcaccgggggcttgggc

SEQ ID NO: 4051624 - DNA, 25 bp, Homo sapien
tgtggggggaccagcagcaccgggg

SEQ ID NO: 4051625 - DNA, 25 bp, Homo sapien
ggggaccagcagcaccgggggcttg

SEQ ID NO: 4051626 - DNA, 25 bp, Homo sapien
cagcagcaccgggggcttgggccat

SEQ ID NO: 4051627 - DNA, 25 bp, Homo sapien
caaagccagggacgcggatctggac

SEQ ID NO: 4051628 - DNA, 25 bp, Homo sapien
ttgccaaagccagggacgcggatct

SEQ ID NO: 4051629 - DNA, 25 bp, Homo sapien
ccagggacgcggatctggacaccag

SEQ ID NO: 4051630 - DNA, 25 bp, Homo sapien
cttgccaaagccagggacgcggatc

SEQ ID NO: 4051631 - DNA, 25 bp, Homo sapien
ttgcggtagcacatccagttcacca

SEQ ID NO: 4051632 - DNA, 25 bp, Homo sapien
tggtgttatcgatccagcagtctac

SEQ ID NO: 4051633 - DNA, 25 bp, Homo sapien
cacatctggtttgtccagcttggct

SEQ ID NO: 4051634 - DNA, 25 bp, Homo sapien
gaagtcctctgtcttgcggtagcac

SEQ ID NO: 4051635 - DNA, 25 bp, Homo sapien
tgagcagcagccctcactctggact

SEQ ID NO: 4051636 - DNA, 25 bp, Homo sapien
ccctcactctggactctggattccc

SEQ ID NO: 4051637 - DNA, 25 bp, Homo sapien
tggactctggattccccccgtgacc

SEQ ID NO: 4051638 - DNA, 25 bp, Homo sapien
cagccctcactctggactctggatt

SEQ ID NO: 4051639 - DNA, 25 bp, Homo sapien
gccaaagtccaaggtgggaacagat

SEQ ID NO: 4051640 - DNA, 25 bp, Homo sapien
tctggcgctcctttattgccaaagt

SEQ ID NO: 4051641 - DNA, 25 bp, Homo sapien
ccagtctggcgctcctttattgcca

SEQ ID NO: 4051642 - DNA, 25 bp, Homo sapien
tccaaggtgggaacagataggtctg

SEQ ID NO: 4051643 - DNA, 25 bp, Homo sapien
tgggagaagggacgtcattcctcta

SEQ ID NO: 4051644 - DNA, 25 bp, Homo sapien
acagcttgtgatgccccagccaaga

SEQ ID NO: 4051645 - DNA, 25 bp, Homo sapien
cctgggttagacaactgagagtcac

SEQ ID NO: 4051646 - DNA, 25 bp, Homo sapien
tcctctaagggacaagcttttggcc

SEQ ID NO: 4051647 - DNA, 25 bp, Homo sapien
cgaggatgacgggccgtgtgtggtt

SEQ ID NO: 4051648 - DNA, 25 bp, Homo sapien
ccgtgtgtggttactgagctcagcc

SEQ ID NO: 4051649 - DNA, 25 bp, Homo sapien
agagcacattgaggagccagaaggg

SEQ ID NO: 4051650 - DNA, 25 bp, Homo sapien
cgggccgtgtgtggttactgagctc

SEQ ID NO: 4051651 - DNA, 25 bp, Homo sapien
cagagaaagcggcactgggctgtcc

SEQ ID NO: 4051652 - DNA, 25 bp, Homo sapien
gagaaagcggcactgggctgtcctt

SEQ ID NO: 4051653 - DNA, 25 bp, Homo sapien
gaaagcggcactgggctgtccttat

SEQ ID NO: 4051654 - DNA, 25 bp, Homo sapien
ctgccagagaaagcggcactgggct

SEQ ID NO: 4051655 - DNA, 25 bp, Homo sapien
gttcagttccgccttcttctcttgg

SEQ ID NO: 4051656 - DNA, 25 bp, Homo sapien
ctagggccagtgggagggacggcct

SEQ ID NO: 4051657 - DNA, 25 bp, Homo sapien
tgtggccagagattgccggaaaggg

SEQ ID NO: 4051658 - DNA, 25 bp, Homo sapien
ttctcttggcgccaggggaaacaga

SEQ ID NO: 4051659 - DNA, 25 bp, Homo sapien
ccagaactacacaatgttttattga

SEQ ID NO: 4051660 - DNA, 25 bp, Homo sapien
atctccattttgaggcccaggcctg

SEQ ID NO: 4051661 - DNA, 25 bp, Homo sapien
catagtagactgagccagatcttcc

SEQ ID NO: 4051662 - DNA, 25 bp, Homo sapien
tatgcaataaatagcgctcctgggc

SEQ ID NO: 4051663 - DNA, 25 bp, Homo sapien
ttatgtcctggccaagacctcgact

SEQ ID NO: 4051664 - DNA, 25 bp, Homo sapien
ggtgctgggaagaggctgttacccc

SEQ ID NO: 4051665 - DNA, 25 bp, Homo sapien
acagcttgttatgtcctggccaaga

SEQ ID NO: 4051666 - DNA, 25 bp, Homo sapien
gaagaggctgttaccccagaccaca

SEQ ID NO: 4051667 - DNA, 25 bp, Homo sapien
gtagatggtgatgacttcacggcca

SEQ ID NO: 4051668 - DNA, 25 bp, Homo sapien
ggccctcggtcagcacctcgaggaa

SEQ ID NO: 4051669 - DNA, 25 bp, Homo sapien
gcgcaccaacagcacccgctcaagg

SEQ ID NO: 4051670 - DNA, 25 bp, Homo sapien
ggtgatgacttcacggccaccaccg

SEQ ID NO: 4051671 - DNA, 25 bp, Homo sapien
ggagagaagccgctggcttgacctc

SEQ ID NO: 4051672 - DNA, 25 bp, Homo sapien
aggcaacaacagaatcaacgggcaa

SEQ ID NO: 4051673 - DNA, 25 bp, Homo sapien
caacagaatcaacgggcaacccggg

SEQ ID NO: 4051674 - DNA, 25 bp, Homo sapien
agagaagccgctggcttgacctccc

SEQ ID NO: 4051675 - DNA, 25 bp, Homo sapien
tcccaactgcctgcctctccacaaa

SEQ ID NO: 4051676 - DNA, 25 bp, Homo sapien
actgcctgcctctccacaaagggat

SEQ ID NO: 4051677 - DNA, 25 bp, Homo sapien
tgcctgcctctccacaaagggatac

SEQ ID NO: 4051678 - DNA, 25 bp, Homo sapien
caactgcctgcctctccacaaaggg

SEQ ID NO: 4051679 - DNA, 25 bp, Homo sapien
ttaggagaaccaggcgggcgtcgtg

SEQ ID NO: 4051680 - DNA, 25 bp, Homo sapien
gggcgtcgtgggagcgcgtgacaat

SEQ ID NO: 4051681 - DNA, 25 bp, Homo sapien
tgggagcgcgtgacaatgacttcat

SEQ ID NO: 4051682 - DNA, 25 bp, Homo sapien
catgcgccgcacattggattggtcc

SEQ ID NO: 4051683 - DNA, 25 bp, Homo sapien
gccagtcacaggtcgccatgagcca

SEQ ID NO: 4051684 - DNA, 25 bp, Homo sapien
cagtcacaggtcgccatgagccatc

SEQ ID NO: 4051685 - DNA, 25 bp, Homo sapien
ccagtcacaggtcgccatgagccat

SEQ ID NO: 4051686 - DNA, 25 bp, Homo sapien
agccagtcacaggtcgccatgagcc

SEQ ID NO: 4051687 - DNA, 25 bp, Homo sapien
ggcccatctaacactacttgtctgc

SEQ ID NO: 4051688 - DNA, 25 bp, Homo sapien
cccctagattccagtgccgctgggg

SEQ ID NO: 4051689 - DNA, 25 bp, Homo sapien
cacccctggcccatctaacactact

SEQ ID NO: 4051690 - DNA, 25 bp, Homo sapien
ccctggcccatctaacactacttgt

SEQ ID NO: 4051691 - DNA, 25 bp, Homo sapien
agtgccgatccttgaccagctgggc

SEQ ID NO: 4051692 - DNA, 25 bp, Homo sapien
caggtctcagtcatgtacttgtccc

SEQ ID NO: 4051693 - DNA, 25 bp, Homo sapien
tcatcttcctcgtccgagtacaggc

SEQ ID NO: 4051694 - DNA, 25 bp, Homo sapien
caccagctcccggaaattgtcaggg

SEQ ID NO: 4051695 - DNA, 25 bp, Homo sapien
ccgctcgtaggtgtatgcagagatg

SEQ ID NO: 4051696 - DNA, 25 bp, Homo sapien
tccatcatcagcgtccgctcgtagg

SEQ ID NO: 4051697 - DNA, 25 bp, Homo sapien
tcttggtcagtctcatctgccgcag

SEQ ID NO: 4051698 - DNA, 25 bp, Homo sapien
ggtcagtctcatctgccgcagcatc

SEQ ID NO: 4051699 - DNA, 25 bp, Homo sapien
gacagggttggccgtgaggacccag

SEQ ID NO: 4051700 - DNA, 25 bp, Homo sapien
ggacagggttggccgtgaggaccca

SEQ ID NO: 4051701 - DNA, 25 bp, Homo sapien
ggccagggcagggcagagggctcac

SEQ ID NO: 4051702 - DNA, 25 bp, Homo sapien
ggggccagggcagggcagagggctc

SEQ ID NO: 4051703 - DNA, 25 bp, Homo sapien
gggccagggcagggcagagggctca

SEQ ID NO: 4051704 - DNA, 25 bp, Homo sapien
cggcctcaaggcgcagatggtacag

SEQ ID NO: 4051705 - DNA, 25 bp, Homo sapien
cctcaaggcgcagatggtacagaaa

SEQ ID NO: 4051706 - DNA, 25 bp, Homo sapien
gatggtacagaaagacagccaggtc

SEQ ID NO: 4051707 - DNA, 25 bp, Homo sapien
gcctcaaggcgcagatggtacagaa

SEQ ID NO: 4051708 - DNA, 25 bp, Homo sapien
atgttcttgggcacgagcagggcca

SEQ ID NO: 4051709 - DNA, 25 bp, Homo sapien
aggtgggcagccgtagtgcagcgca

SEQ ID NO: 4051710 - DNA, 25 bp, Homo sapien
tagaaggcgatgttcttgggcacga

SEQ ID NO: 4051711 - DNA, 25 bp, Homo sapien
acacgtctatgtggccctccaggta

SEQ ID NO: 4051712 - DNA, 25 bp, Homo sapien
aggaggagcacggctgaccaccagt

SEQ ID NO: 4051713 - DNA, 25 bp, Homo sapien
gaggaggagcacggctgaccaccag

SEQ ID NO: 4051714 - DNA, 25 bp, Homo sapien
ccagcaccacggagttatgccgcat

SEQ ID NO: 4051715 - DNA, 25 bp, Homo sapien
gctctgtcgccagccgtagggccag

SEQ ID NO: 4051716 - DNA, 25 bp, Homo sapien
caccttctcaatttccatcatgttc

SEQ ID NO: 4051717 - DNA, 25 bp, Homo sapien
ggagttatgccgcatgcctcccagg

SEQ ID NO: 4051718 - DNA, 25 bp, Homo sapien
gcggcctgagcctcgccatagctct

SEQ ID NO: 4051719 - DNA, 25 bp, Homo sapien
agcctcgccatagctctccaagaag

SEQ ID NO: 4051720 - DNA, 25 bp, Homo sapien
cctgagcctcgccatagctctccaa

SEQ ID NO: 4051721 - DNA, 25 bp, Homo sapien
gctcggcggcctgagcctcgccata

SEQ ID NO: 4051722 - DNA, 25 bp, Homo sapien
tcacgtggaggtcctcgtccagctt

SEQ ID NO: 4051723 - DNA, 25 bp, Homo sapien
cgcgggtacttcacgtggaggtcct

SEQ ID NO: 4051724 - DNA, 25 bp, Homo sapien
gcgaaggtgaggagccgcgggtact

SEQ ID NO: 4051725 - DNA, 25 bp, Homo sapien
aggagccgcgggtacttcacgtgga

SEQ ID NO: 4051726 - DNA, 25 bp, Homo sapien
tcctccagccgcaacagcgcgtagc

SEQ ID NO: 4051727 - DNA, 25 bp, Homo sapien
caacagcgcgtagcgggcagcgctc

SEQ ID NO: 4051728 - DNA, 25 bp, Homo sapien
caggcctcggatcccgtcaccccac

SEQ ID NO: 4051729 - DNA, 25 bp, Homo sapien
tccagccgcaacagcgcgtagcggg

SEQ ID NO: 4051730 - DNA, 25 bp, Homo sapien
ccttggtactcgatgtatttgtaga

SEQ ID NO: 4051731 - DNA, 25 bp, Homo sapien
gatcatgccggcgatgagcatggcc

SEQ ID NO: 4051732 - DNA, 25 bp, Homo sapien
catgccggcgatgagcatggccacc

SEQ ID NO: 4051733 - DNA, 25 bp, Homo sapien
tttgtagatcatgccggcgatgagc

SEQ ID NO: 4051734 - DNA, 25 bp, Homo sapien
aggagtgtctgcaccgcacaggcga

SEQ ID NO: 4051735 - DNA, 25 bp, Homo sapien
tgatagtacttgaaccggggccgcc

SEQ ID NO: 4051736 - DNA, 25 bp, Homo sapien
cgcacaggcgaggttcacgaacagg

SEQ ID NO: 4051737 - DNA, 25 bp, Homo sapien
gtctgcaccgcacaggcgaggttca

SEQ ID NO: 4051738 - DNA, 25 bp, Homo sapien
acagagggcggttggcgaagagcag

SEQ ID NO: 4051739 - DNA, 25 bp, Homo sapien
ggcacagagggcggttggcgaagag

SEQ ID NO: 4051740 - DNA, 25 bp, Homo sapien
ctgcggcacagagggcggttggcga

SEQ ID NO: 4051741 - DNA, 25 bp, Homo sapien
gcagctggggacctgatgtcaggct

SEQ ID NO: 4051742 - DNA, 25 bp, Homo sapien
ccaccatgtcgagggaggcgatgag

SEQ ID NO: 4051743 - DNA, 25 bp, Homo sapien
gaggatgcccagctcggcgatgagt

SEQ ID NO: 4051744 - DNA, 25 bp, Homo sapien
gtgccgtcaggaggagtgcccatgt

SEQ ID NO: 4051745 - DNA, 25 bp, Homo sapien
ccagctcggcgatgagtgccgtcag

SEQ ID NO: 4051746 - DNA, 25 bp, Homo sapien
cccctgtgtctatccctatgggtgt

SEQ ID NO: 4051747 - DNA, 25 bp, Homo sapien
cgcccctgtgtctatccctatgggt

SEQ ID NO: 4051748 - DNA, 25 bp, Homo sapien
aggccgcccctgtgtctatccctat

SEQ ID NO: 4051749 - DNA, 25 bp, Homo sapien
ctcaggccgcccctgtgtctatccc

SEQ ID NO: 4051750 - DNA, 25 bp, Homo sapien
gccagcgccacacgttgaaaagaag

SEQ ID NO: 4051751 - DNA, 25 bp, Homo sapien
aaggggatgatgttgtccttggcaa

SEQ ID NO: 4051752 - DNA, 25 bp, Homo sapien
ttggcaatggcctgcaataggcgtg

SEQ ID NO: 4051753 - DNA, 25 bp, Homo sapien
ggaggccagcgccacacgttgaaaa

SEQ ID NO: 4051754 - DNA, 25 bp, Homo sapien
tgcaggcaccaaagagaaccacact

SEQ ID NO: 4051755 - DNA, 25 bp, Homo sapien
atgcaggcaccaaagagaaccacac

SEQ ID NO: 4051756 - DNA, 25 bp, Homo sapien
tgtctgtgcatgtgacctggcaacg

SEQ ID NO: 4051757 - DNA, 25 bp, Homo sapien
gactaccaggacacctacagctggg

SEQ ID NO: 4051758 - DNA, 25 bp, Homo sapien
tgtccctgaatagtaccacgtgccc

SEQ ID NO: 4051759 - DNA, 25 bp, Homo sapien
ggcgtcaaggaaaactcggcctctg

SEQ ID NO: 4051760 - DNA, 25 bp, Homo sapien
agggaagttgtaatgatggccagaa

SEQ ID NO: 4051761 - DNA, 25 bp, Homo sapien
aatggtccccacagggatagacttc

SEQ ID NO: 4051762 - DNA, 25 bp, Homo sapien
ttctgggcgtcacgaaggtccccag

SEQ ID NO: 4051763 - DNA, 25 bp, Homo sapien
tgtaatgatggccagaatggtcccc

SEQ ID NO: 4051764 - DNA, 25 bp, Homo sapien
tccaggtaggcgctccacaggtttt

SEQ ID NO: 4051765 - DNA, 25 bp, Homo sapien
tgccgaccagcacggtgaaggatgt

SEQ ID NO: 4051766 - DNA, 25 bp, Homo sapien
atgtcagcgaccacgtacagaggca

SEQ ID NO: 4051767 - DNA, 25 bp, Homo sapien
ggcagcccatgcttctccacgatgt

SEQ ID NO: 4051768 - DNA, 25 bp, Homo sapien
aggggtagctgtgtcaccaccacag

SEQ ID NO: 4051769 - DNA, 25 bp, Homo sapien
gggtagctgtgtcaccaccacagct

SEQ ID NO: 4051770 - DNA, 25 bp, Homo sapien
tgcaggggtagctgtgtcaccacca

SEQ ID NO: 4051771 - DNA, 25 bp, Homo sapien
caggggtagctgtgtcaccaccaca

SEQ ID NO: 4051772 - DNA, 25 bp, Homo sapien
gctagaagtcgacagacaaaggtgg

SEQ ID NO: 4051773 - DNA, 25 bp, Homo sapien
gctgcccagctagaagtcgacagac

SEQ ID NO: 4051774 - DNA, 25 bp, Homo sapien
agcgtcagccacagggctaccctga

SEQ ID NO: 4051775 - DNA, 25 bp, Homo sapien
cagaggcgcagatgcagggcaactt

SEQ ID NO: 4051776 - DNA, 25 bp, Homo sapien
gcagaagaaactccatagctgggtg

SEQ ID NO: 4051777 - DNA, 25 bp, Homo sapien
tgtccactacagctgtcttggcaca

SEQ ID NO: 4051778 - DNA, 25 bp, Homo sapien
gatgtcaaactggtcccgggacagg

SEQ ID NO: 4051779 - DNA, 25 bp, Homo sapien
gatgccagggatctcggtcacattg

SEQ ID NO: 4051780 - DNA, 25 bp, Homo sapien
tgttcaaagtggcattcgacgtgtc

SEQ ID NO: 4051781 - DNA, 25 bp, Homo sapien
gacgtgtcatgagcacccgatgggt

SEQ ID NO: 4051782 - DNA, 25 bp, Homo sapien
gatggagatgatcacacaggccagg

SEQ ID NO: 4051783 - DNA, 25 bp, Homo sapien
ccaccagggtcatgaaggtcaggaa

SEQ ID NO: 4051784 - DNA, 25 bp, Homo sapien
ctcgtggagggagcgccgacctcca

SEQ ID NO: 4051785 - DNA, 25 bp, Homo sapien
ctcccactggtacggcagttcactg

SEQ ID NO: 4051786 - DNA, 25 bp, Homo sapien
ttctcccactggtacggcagttcac

SEQ ID NO: 4051787 - DNA, 25 bp, Homo sapien
ctcccatggggctcgtggagggagc

SEQ ID NO: 4051788 - DNA, 25 bp, Homo sapien
ttgttcccaggtagaagcacaggcc

SEQ ID NO: 4051789 - DNA, 25 bp, Homo sapien
cgagagatcatgaaataggagcccc

SEQ ID NO: 4051790 - DNA, 25 bp, Homo sapien
gtacatggctgctgcgaatgttgtt

SEQ ID NO: 4051791 - DNA, 25 bp, Homo sapien
ttctggccccagtgaacgagagatc

SEQ ID NO: 4051792 - DNA, 25 bp, Homo sapien
tcccaggtaggtcaaggcagatact

SEQ ID NO: 4051793 - DNA, 25 bp, Homo sapien
ctcctacgtgggcactgtcctggca

SEQ ID NO: 4051794 - DNA, 25 bp, Homo sapien
caggccttgggtggcgctcactgac

SEQ ID NO: 4051795 - DNA, 25 bp, Homo sapien
tgtcaagcaggaaagctcctacgtg

SEQ ID NO: 4051796 - DNA, 25 bp, Homo sapien
gaaccacaccgttggtggcgatggc

SEQ ID NO: 4051797 - DNA, 25 bp, Homo sapien
tggaaccacaccgttggtggcgatg

SEQ ID NO: 4051798 - DNA, 25 bp, Homo sapien
aaccacaccgttggtggcgatggca

SEQ ID NO: 4051799 - DNA, 25 bp, Homo sapien
ggaaccacaccgttggtggcgatgg

SEQ ID NO: 4051800 - DNA, 25 bp, Homo sapien
gagggcctgggtgagcggctcagct

SEQ ID NO: 4051801 - DNA, 25 bp, Homo sapien
gggcctgggtgagcggctcagctgg

SEQ ID NO: 4051802 - DNA, 25 bp, Homo sapien
gaaggagggcctgggtgagcggctc

SEQ ID NO: 4051803 - DNA, 25 bp, Homo sapien
aggagggcctgggtgagcggctcag

SEQ ID NO: 4051804 - DNA, 25 bp, Homo sapien
agcagcagataagcacgatgaggag

SEQ ID NO: 4051805 - DNA, 25 bp, Homo sapien
cagataagcacgatgaggagggcct

SEQ ID NO: 4051806 - DNA, 25 bp, Homo sapien
acagcagcagataagcacgatgagg

SEQ ID NO: 4051807 - DNA, 25 bp, Homo sapien
agcagataagcacgatgaggagggc

SEQ ID NO: 4051808 - DNA, 25 bp, Homo sapien
aggataaccccaaagatattctgca

SEQ ID NO: 4051809 - DNA, 25 bp, Homo sapien
gataaccccaaagatattctgcagg

SEQ ID NO: 4051810 - DNA, 25 bp, Homo sapien
taaccccaaagatattctgcaggca

SEQ ID NO: 4051811 - DNA, 25 bp, Homo sapien
cccaaagatattctgcaggcagggc

SEQ ID NO: 4051812 - DNA, 25 bp, Homo sapien
cctcctgagacaaggcattcagtgc

SEQ ID NO: 4051813 - DNA, 25 bp, Homo sapien
gatgacatatgagaacccaggcctg

SEQ ID NO: 4051814 - DNA, 25 bp, Homo sapien
ccggggggattctcattaggtcact

SEQ ID NO: 4051815 - DNA, 25 bp, Homo sapien
ggtacctcgcacacagtaaaggctg

SEQ ID NO: 4051816 - DNA, 25 bp, Homo sapien
tacctttgggcggatgtccagctct

SEQ ID NO: 4051817 - DNA, 25 bp, Homo sapien
ccagaagagacgatacctttgggcg

SEQ ID NO: 4051818 - DNA, 25 bp, Homo sapien
ctcatgctctttggcgccctgggtg

SEQ ID NO: 4051819 - DNA, 25 bp, Homo sapien
tagctgacgagctttcccagaagag

SEQ ID NO: 4051820 - DNA, 25 bp, Homo sapien
ccccgccttggctacaatcactgcc

SEQ ID NO: 4051821 - DNA, 25 bp, Homo sapien
ggggaagtccaagccatccaactgg

SEQ ID NO: 4051822 - DNA, 25 bp, Homo sapien
ctaccccgccttggctacaatcact

SEQ ID NO: 4051823 - DNA, 25 bp, Homo sapien
ctggggaagtccaagccatccaact

SEQ ID NO: 4051824 - DNA, 25 bp, Homo sapien
cagccttctcgaggctgtgcttcta

SEQ ID NO: 4051825 - DNA, 25 bp, Homo sapien
caatcgcggagatgggatcctgatc

SEQ ID NO: 4051826 - DNA, 25 bp, Homo sapien
gtctaggcgatgatccctgctcctg

SEQ ID NO: 4051827 - DNA, 25 bp, Homo sapien
aggccttcaccgcagaaccttgctg

SEQ ID NO: 4051828 - DNA, 25 bp, Homo sapien
cacatttagcttttccctctctgtc

SEQ ID NO: 4051829 - DNA, 25 bp, Homo sapien
ccacatttagcttttccctctctgt

SEQ ID NO: 4051830 - DNA, 25 bp, Homo sapien
catgtggagattaaggagcctcggc

SEQ ID NO: 4051831 - DNA, 25 bp, Homo sapien
tgaaagggccaagggaactgcagcc

SEQ ID NO: 4051832 - DNA, 25 bp, Homo sapien
gaatccatgggagagcgaagaacca

SEQ ID NO: 4051833 - DNA, 25 bp, Homo sapien
gagacgtatcccctaaagctgcaaa

SEQ ID NO: 4051834 - DNA, 25 bp, Homo sapien
agtagtcaattcctctggaagcctc

SEQ ID NO: 4051835 - DNA, 25 bp, Homo sapien
gccaggttcctgtcatagtagtcaa

SEQ ID NO: 4051836 - DNA, 25 bp, Homo sapien
cctgtcatagtagtcaattcctctg

SEQ ID NO: 4051837 - DNA, 25 bp, Homo sapien
aacagtgccaggttcctgtcatagt

SEQ ID NO: 4051838 - DNA, 25 bp, Homo sapien
cgcccccagatcgcctccacgcccc

SEQ ID NO: 4051839 - DNA, 25 bp, Homo sapien
ccgcccccagatcgcctccacgccc

SEQ ID NO: 4051840 - DNA, 25 bp, Homo sapien
atgccaagggttcggtgtcctcagg

SEQ ID NO: 4051841 - DNA, 25 bp, Homo sapien
ctccagatagacgaagccgcacaca

SEQ ID NO: 4051842 - DNA, 25 bp, Homo sapien
cagatagacgaagccgcacacagca

SEQ ID NO: 4051843 - DNA, 25 bp, Homo sapien
gtgccctccagatagacgaagccgc

SEQ ID NO: 4051844 - DNA, 25 bp, Homo sapien
tcccccatcctgtagacagccaagg

SEQ ID NO: 4051845 - DNA, 25 bp, Homo sapien
cccatcctgtagacagccaaggtct

SEQ ID NO: 4051846 - DNA, 25 bp, Homo sapien
catcctgtagacagccaaggtctgg

SEQ ID NO: 4051847 - DNA, 25 bp, Homo sapien
tgtcccccatcctgtagacagccaa

SEQ ID NO: 4051848 - DNA, 25 bp, Homo sapien
tcaaatcaccatcctcatcactgtc

SEQ ID NO: 4051849 - DNA, 25 bp, Homo sapien
aaatcaccatcctcatcactgtcaa

SEQ ID NO: 4051850 - DNA, 25 bp, Homo sapien
caaatcaccatcctcatcactgtca

SEQ ID NO: 4051851 - DNA, 25 bp, Homo sapien
atcaccatcctcatcactgtcaacc

SEQ ID NO: 4051852 - DNA, 25 bp, Homo sapien
acagacacatgtcctcagccgtgtt

SEQ ID NO: 4051853 - DNA, 25 bp, Homo sapien
gtgggccttaacaagaacagccctc

SEQ ID NO: 4051854 - DNA, 25 bp, Homo sapien
tcagccgtgttcgtgctccgagggt

SEQ ID NO: 4051855 - DNA, 25 bp, Homo sapien
tgctccgagggtgggccttaacaag

SEQ ID NO: 4051856 - DNA, 25 bp, Homo sapien
gctccccgtagtccacccaactgag

SEQ ID NO: 4051857 - DNA, 25 bp, Homo sapien
tccgagtcatccagctcggcgcgct

SEQ ID NO: 4051858 - DNA, 25 bp, Homo sapien
gaggttgtcatagtcgccgcgcctc

SEQ ID NO: 4051859 - DNA, 25 bp, Homo sapien
ctgagcccctcgaggttgtcatagt

SEQ ID NO: 4051860 - DNA, 25 bp, Homo sapien
cgtgcgggctcggccccgccgcacc

SEQ ID NO: 4051861 - DNA, 25 bp, Homo sapien
gccgtcccagccgcccgccgctgtc

SEQ ID NO: 4051862 - DNA, 25 bp, Homo sapien
cgccgctgtccccgccgctgtcccc

SEQ ID NO: 4051863 - DNA, 25 bp, Homo sapien
gccgctgtccccgccgctgtccccg

SEQ ID NO: 4051864 - DNA, 25 bp, Homo sapien
cgcgtggctcgggtggcgtcctctg

SEQ ID NO: 4051865 - DNA, 25 bp, Homo sapien
tggcgtcctctgactacgcctactg

SEQ ID NO: 4051866 - DNA, 25 bp, Homo sapien
tctccctcgcgtggctcgggtggcg

SEQ ID NO: 4051867 - DNA, 25 bp, Homo sapien
gactacgcctactgccagcctccag

SEQ ID NO: 4051868 - DNA, 25 bp, Homo sapien
gcttttagcttaagaatttcataag

SEQ ID NO: 4051869 - DNA, 25 bp, Homo sapien
aagcttttagcttaagaatttcata

SEQ ID NO: 4051870 - DNA, 25 bp, Homo sapien
aagaatttcataagatgcctctggc

SEQ ID NO: 4051871 - DNA, 25 bp, Homo sapien
tcaagcttttagcttaagaatttca

SEQ ID NO: 4051872 - DNA, 25 bp, Homo sapien
tttgtgaggctttgccacagtgacc

SEQ ID NO: 4051873 - DNA, 25 bp, Homo sapien
tattctcagcatatgcttgtgaatg

SEQ ID NO: 4051874 - DNA, 25 bp, Homo sapien
agtgacctctgcggggaccgactgt

SEQ ID NO: 4051875 - DNA, 25 bp, Homo sapien
tgaatgaactaggagagggggcttt

SEQ ID NO: 4051876 - DNA, 25 bp, Homo sapien
gggtgaaggttgggatggtggcagc

SEQ ID NO: 4051877 - DNA, 25 bp, Homo sapien
tggtcacctccagatgagtagcctg

SEQ ID NO: 4051878 - DNA, 25 bp, Homo sapien
tatggggaggcatttgaggacctcc

SEQ ID NO: 4051879 - DNA, 25 bp, Homo sapien
acccgattggttggctgcttggtca

SEQ ID NO: 4051880 - DNA, 25 bp, Homo sapien
tctgaggcacgaggtgggagtggca

SEQ ID NO: 4051881 - DNA, 25 bp, Homo sapien
cagcaggtttccacgaaggacacct

SEQ ID NO: 4051882 - DNA, 25 bp, Homo sapien
tttccacgaaggacaccttgaagct

SEQ ID NO: 4051883 - DNA, 25 bp, Homo sapien
tcagcaactcctctatcaggactgg

SEQ ID NO: 4051884 - DNA, 25 bp, Homo sapien
actcagcaactcctctatcaggact

SEQ ID NO: 4051885 - DNA, 25 bp, Homo sapien
cggccagtcccgtcataatttccac

SEQ ID NO: 4051886 - DNA, 25 bp, Homo sapien
atttccaccaatcccgatgaactca

SEQ ID NO: 4051887 - DNA, 25 bp, Homo sapien
cccgatgaactcagatccaatgact

SEQ ID NO: 4051888 - DNA, 25 bp, Homo sapien
gccagtcccgtcataatttccacca

SEQ ID NO: 4051889 - DNA, 25 bp, Homo sapien
gcaagcaggttgcactgcagcaccc

SEQ ID NO: 4051890 - DNA, 25 bp, Homo sapien
gacagtgtcaccatcacgatgccac

SEQ ID NO: 4051891 - DNA, 25 bp, Homo sapien
ctgccacagtggacacgttagcaag

SEQ ID NO: 4051892 - DNA, 25 bp, Homo sapien
atggacagtgtcaccatcacgatgc

SEQ ID NO: 4051893 - DNA, 25 bp, Homo sapien
tccgatgcataggacaaatctatca

SEQ ID NO: 4051894 - DNA, 25 bp, Homo sapien
tgcaggatatcatcgggaacattca

SEQ ID NO: 4051895 - DNA, 25 bp, Homo sapien
ccttcttatcaaggtgtccgatgca

SEQ ID NO: 4051896 - DNA, 25 bp, Homo sapien
tcaacaaattgtcacacacagctct

SEQ ID NO: 4051897 - DNA, 25 bp, Homo sapien
tggggtacaaaacaggagtcctcac

SEQ ID NO: 4051898 - DNA, 25 bp, Homo sapien
taggcagcaggtgggttggggtaca

SEQ ID NO: 4051899 - DNA, 25 bp, Homo sapien
ggcagcaggtgggttggggtacaaa

SEQ ID NO: 4051900 - DNA, 25 bp, Homo sapien
aggcagcaggtgggttggggtacaa

SEQ ID NO: 4051901 - DNA, 25 bp, Homo sapien
tggtgtctgaacttggtggaactct

SEQ ID NO: 4051902 - DNA, 25 bp, Homo sapien
atccgctgacgttggtgtacatgtg

SEQ ID NO: 4051903 - DNA, 25 bp, Homo sapien
tcaccaaagcttgtcaatccgctga

SEQ ID NO: 4051904 - DNA, 25 bp, Homo sapien
tctgaacttggtggaactctctgcc

SEQ ID NO: 4051905 - DNA, 25 bp, Homo sapien
aggtaagtgtcaggtagcgcacccc

SEQ ID NO: 4051906 - DNA, 25 bp, Homo sapien
atagaaactgcgcagcacagagagg

SEQ ID NO: 4051907 - DNA, 25 bp, Homo sapien
cctccacgccaatgaggcaggccag

SEQ ID NO: 4051908 - DNA, 25 bp, Homo sapien
ctgctgtccagtgagtgaccaccct

SEQ ID NO: 4051909 - DNA, 25 bp, Homo sapien
caagctcgagttcagagtaggaggc

SEQ ID NO: 4051910 - DNA, 25 bp, Homo sapien
ctgaggtcacaagctcgagttcaga

SEQ ID NO: 4051911 - DNA, 25 bp, Homo sapien
tcgagttcagagtaggaggcacaca

SEQ ID NO: 4051912 - DNA, 25 bp, Homo sapien
gtaggaggcacacatgcggtgaatg

SEQ ID NO: 4051913 - DNA, 25 bp, Homo sapien
ggcatgagacggaggctgaccagaa

SEQ ID NO: 4051914 - DNA, 25 bp, Homo sapien
tggcatgagacggaggctgaccaga

SEQ ID NO: 4051915 - DNA, 25 bp, Homo sapien
ctggcatgagacggaggctgaccag

SEQ ID NO: 4051916 - DNA, 25 bp, Homo sapien
gaggccgtctctaagcctgtccagg

SEQ ID NO: 4051917 - DNA, 25 bp, Homo sapien
ctgggcacccacgaggccgtctcta

SEQ ID NO: 4051918 - DNA, 25 bp, Homo sapien
gggcacccacgaggccgtctctaag

SEQ ID NO: 4051919 - DNA, 25 bp, Homo sapien
ggccgtctctaagcctgtccaggct

SEQ ID NO: 4051920 - DNA, 25 bp, Homo sapien
ctgaagcacattcttgtaacgctgt

SEQ ID NO: 4051921 - DNA, 25 bp, Homo sapien
catggctgaaatttcgcaggttaac

SEQ ID NO: 4051922 - DNA, 25 bp, Homo sapien
tcgcaggttaacatcctgaagcaca

SEQ ID NO: 4051923 - DNA, 25 bp, Homo sapien
acattcttgtaacgctgtctcagga

SEQ ID NO: 4051924 - DNA, 25 bp, Homo sapien
gttgcccaaacgctgcacctacata

SEQ ID NO: 4051925 - DNA, 25 bp, Homo sapien
cgcgttgcccaaacgctgcacctac

SEQ ID NO: 4051926 - DNA, 25 bp, Homo sapien
gcgttgcccaaacgctgcacctaca

SEQ ID NO: 4051927 - DNA, 25 bp, Homo sapien
cccgcgttgcccaaacgctgcacct

SEQ ID NO: 4051928 - DNA, 25 bp, Homo sapien
ccgtccacgagtgggaaactccgca

SEQ ID NO: 4051929 - DNA, 25 bp, Homo sapien
cgtccacgagtgggaaactccgcat

SEQ ID NO: 4051930 - DNA, 25 bp, Homo sapien
ttgggggtgcctggcgtagtgaggc

SEQ ID NO: 4051931 - DNA, 25 bp, Homo sapien
gcctgcgcgcgaccccgaaggtcca

SEQ ID NO: 4051932 - DNA, 25 bp, Homo sapien
ggcctgcgcgcgaccccgaaggtcc

SEQ ID NO: 4051933 - DNA, 25 bp, Homo sapien
gggggtgcctggcgtagtgaggcct

SEQ ID NO: 4051934 - DNA, 25 bp, Homo sapien
tggggacacccggcgtggtgaagag

SEQ ID NO: 4051935 - DNA, 25 bp, Homo sapien
ctggggacacccggcgtggtgaaga

SEQ ID NO: 4051936 - DNA, 25 bp, Homo sapien
cgcgcgggttacgggctgccgcagc

SEQ ID NO: 4051937 - DNA, 25 bp, Homo sapien
gcgcgggttacgggctgccgcagca

SEQ ID NO: 4051938 - DNA, 25 bp, Homo sapien
cgcgcgggaaccctcgcggcccgtg

SEQ ID NO: 4051939 - DNA, 25 bp, Homo sapien
tgagcgcgcgggaaccctcgcggcc

SEQ ID NO: 4051940 - DNA, 25 bp, Homo sapien
aaccctcgcggcccgtgggctgcat

SEQ ID NO: 4051941 - DNA, 25 bp, Homo sapien
ggctgagcgcgcgggaaccctcgcg

SEQ ID NO: 4051942 - DNA, 25 bp, Homo sapien
ttgcgcgggggtcggccgcgggagc

SEQ ID NO: 4051943 - DNA, 25 bp, Homo sapien
aggccgacaatggggtccggatcat

SEQ ID NO: 4051944 - DNA, 25 bp, Homo sapien
gggcagaggccgacaatggggtccg

SEQ ID NO: 4051945 - DNA, 25 bp, Homo sapien
gcagaggccgacaatggggtccgga

SEQ ID NO: 4051946 - DNA, 25 bp, Homo sapien
cagaggccgacaatggggtccggat

SEQ ID NO: 4051947 - DNA, 25 bp, Homo sapien
cacgcaagggggcgccacggctttt

SEQ ID NO: 4051948 - DNA, 25 bp, Homo sapien
ctgagaccgacgcgccacgcaaggg

SEQ ID NO: 4051949 - DNA, 25 bp, Homo sapien
gggttgaagtcacgcgactctgaga

SEQ ID NO: 4051950 - DNA, 25 bp, Homo sapien
gtcacgcgactctgagaccgacgcg

SEQ ID NO: 4051951 - DNA, 25 bp, Homo sapien
ggtctcttggtcctgagagcatgag

SEQ ID NO: 4051952 - DNA, 25 bp, Homo sapien
agggacaagatcagactaggtctct

SEQ ID NO: 4051953 - DNA, 25 bp, Homo sapien
gacaagatcagactaggtctcttgg

SEQ ID NO: 4051954 - DNA, 25 bp, Homo sapien
gggcttggtctgacacgttatttca

SEQ ID NO: 4051955 - DNA, 25 bp, Homo sapien
taaagacaatacaaggctagcttcc

SEQ ID NO: 4051956 - DNA, 25 bp, Homo sapien
ccttaaagacaatacaaggctagct

SEQ ID NO: 4051957 - DNA, 25 bp, Homo sapien
tcctccttaaagacaatacaaggct

SEQ ID NO: 4051958 - DNA, 25 bp, Homo sapien
aatcctccttaaagacaatacaagg

SEQ ID NO: 4051959 - DNA, 25 bp, Homo sapien
acatctggcaggactaactgggtca

SEQ ID NO: 4051960 - DNA, 25 bp, Homo sapien
gtctgtggcttgctacagtgacatc

SEQ ID NO: 4051961 - DNA, 25 bp, Homo sapien
aaatatttgtgcctgcacaacaggg

SEQ ID NO: 4051962 - DNA, 25 bp, Homo sapien
aggaaatatttgtgcctgcacaaca

SEQ ID NO: 4051963 - DNA, 25 bp, Homo sapien
aggtggccacaactgcaaggactgg

SEQ ID NO: 4051964 - DNA, 25 bp, Homo sapien
gggccatgtggggggaggactctga

SEQ ID NO: 4051965 - DNA, 25 bp, Homo sapien
tcagagccacagaataaggactggg

SEQ ID NO: 4051966 - DNA, 25 bp, Homo sapien
tgggaaggtggccacaactgcaagg

SEQ ID NO: 4051967 - DNA, 25 bp, Homo sapien
tgggaatctcagtgagttcctggcc

SEQ ID NO: 4051968 - DNA, 25 bp, Homo sapien
tgagaggtcggagtggcaggaactg

SEQ ID NO: 4051969 - DNA, 25 bp, Homo sapien
ccagtgtatgggaatctcagtgagt

SEQ ID NO: 4051970 - DNA, 25 bp, Homo sapien
tctctgacgcagacgtgagaggtcg

SEQ ID NO: 4051971 - DNA, 25 bp, Homo sapien
accgggtatgtggacacgtcttcca

SEQ ID NO: 4051972 - DNA, 25 bp, Homo sapien
ggaccgggtatgtggacacgtcttc

SEQ ID NO: 4051973 - DNA, 25 bp, Homo sapien
caggaccgggtatgtggacacgtct

SEQ ID NO: 4051974 - DNA, 25 bp, Homo sapien
cgggtatgtggacacgtcttccagc

SEQ ID NO: 4051975 - DNA, 25 bp, Homo sapien
tggccaccagctagtgggtttcaga

SEQ ID NO: 4051976 - DNA, 25 bp, Homo sapien
accagctagtgggtttcagacctga

SEQ ID NO: 4051977 - DNA, 25 bp, Homo sapien
gctagtgggtttcagacctgattcc

SEQ ID NO: 4051978 - DNA, 25 bp, Homo sapien
tgtggccaccagctagtgggtttca

SEQ ID NO: 4051979 - DNA, 25 bp, Homo sapien
gatcatgactcagaaccacagtcca

SEQ ID NO: 4051980 - DNA, 25 bp, Homo sapien
atgactcagaaccacagtccagggt

SEQ ID NO: 4051981 - DNA, 25 bp, Homo sapien
ctgatcatgactcagaaccacagtc

SEQ ID NO: 4051982 - DNA, 25 bp, Homo sapien
tcatgactcagaaccacagtccagg

SEQ ID NO: 4051983 - DNA, 25 bp, Homo sapien
atctccaccaatcccgatgaacttg

SEQ ID NO: 4051984 - DNA, 25 bp, Homo sapien
cggccccatcataatctccaccaat

SEQ ID NO: 4051985 - DNA, 25 bp, Homo sapien
ccaatgacagccttgatgtggtcga

SEQ ID NO: 4051986 - DNA, 25 bp, Homo sapien
acagccttgatgtggtcgaagtgat

SEQ ID NO: 4051987 - DNA, 25 bp, Homo sapien
gaaggtggacagtcagctgcgtagg

SEQ ID NO: 4051988 - DNA, 25 bp, Homo sapien
tggacagtcagctgcgtagggcttc

SEQ ID NO: 4051989 - DNA, 25 bp, Homo sapien
gggaaggtggacagtcagctgcgta

SEQ ID NO: 4051990 - DNA, 25 bp, Homo sapien
cagtcagctgcgtagggcttccagg

SEQ ID NO: 4051991 - DNA, 25 bp, Homo sapien
tggacaaagacaccatcacgacgcc

SEQ ID NO: 4051992 - DNA, 25 bp, Homo sapien
tcccatggacaaagacaccatcacg

SEQ ID NO: 4051993 - DNA, 25 bp, Homo sapien
cacattggctgatgggttgcactgt

SEQ ID NO: 4051994 - DNA, 25 bp, Homo sapien
ggttgcactgtattactcccatgga

SEQ ID NO: 4051995 - DNA, 25 bp, Homo sapien
gtcatcaggaacattccgagcactg

SEQ ID NO: 4051996 - DNA, 25 bp, Homo sapien
gaacattccgagcactgttgcacac

SEQ ID NO: 4051997 - DNA, 25 bp, Homo sapien
ctgttgcacacaccccgggcagccg

SEQ ID NO: 4051998 - DNA, 25 bp, Homo sapien
caggaacattccgagcactgttgca

SEQ ID NO: 4051999 - DNA, 25 bp, Homo sapien
tgggataagtctaccatcatgccca

SEQ ID NO: 4052000 - DNA, 25 bp, Homo sapien
gagacatgggataagtctaccatca

SEQ ID NO: 4052001 - DNA, 25 bp, Homo sapien
catgggataagtctaccatcatgcc

SEQ ID NO: 4052002 - DNA, 25 bp, Homo sapien
ctgagacatgggataagtctaccat

SEQ ID NO: 4052003 - DNA, 25 bp, Homo sapien
tggacgcccttagcggagctctctg

SEQ ID NO: 4052004 - DNA, 25 bp, Homo sapien
cagcccgctgatgttgttgtagaag

SEQ ID NO: 4052005 - DNA, 25 bp, Homo sapien
tcagtcagcccgctgatgttgttgt

SEQ ID NO: 4052006 - DNA, 25 bp, Homo sapien
ttgttgtagaaggagtggacgccct

SEQ ID NO: 4052007 - DNA, 25 bp, Homo sapien
ccagagtcagtgccacatcccatgg

SEQ ID NO: 4052008 - DNA, 25 bp, Homo sapien
catgggtaaagcttgttctgggccc

SEQ ID NO: 4052009 - DNA, 25 bp, Homo sapien
ggtcccacaccatctgcactaggct

SEQ ID NO: 4052010 - DNA, 25 bp, Homo sapien
ggtcaagtcgtattctgaaaaccag

SEQ ID NO: 4052011 - DNA, 25 bp, Homo sapien
ggtgagcgtcaggtagcgcactccc

SEQ ID NO: 4052012 - DNA, 25 bp, Homo sapien
atggagaggctattgtccagcgagt

SEQ ID NO: 4052013 - DNA, 25 bp, Homo sapien
ccagcatgtagaaggtaggtaagat

SEQ ID NO: 4052014 - DNA, 25 bp, Homo sapien
gtggccaccctctacaccgatgagg

SEQ ID NO: 4052015 - DNA, 25 bp, Homo sapien
taggtcaggtgattactttccaggg

SEQ ID NO: 4052016 - DNA, 25 bp, Homo sapien
caggtgattactttccagggctgga

SEQ ID NO: 4052017 - DNA, 25 bp, Homo sapien
ggtcaggtgattactttccagggct

SEQ ID NO: 4052018 - DNA, 25 bp, Homo sapien
ctggagtagctcaatcaagttccta

SEQ ID NO: 4052019 - DNA, 25 bp, Homo sapien
tggcatggcacataggctgaccaga

SEQ ID NO: 4052020 - DNA, 25 bp, Homo sapien
aagctccagctcagaataggaggca

SEQ ID NO: 4052021 - DNA, 25 bp, Homo sapien
ggtctggcatggcacataggctgac

SEQ ID NO: 4052022 - DNA, 25 bp, Homo sapien
aataggaggcacacatgcggcgtat

SEQ ID NO: 4052023 - DNA, 25 bp, Homo sapien
tgtagccctttctggtaaacctgcc

SEQ ID NO: 4052024 - DNA, 25 bp, Homo sapien
caggctggtctggccgtagctgaaa

SEQ ID NO: 4052025 - DNA, 25 bp, Homo sapien
ttctggtaaacctgccttaggacca

SEQ ID NO: 4052026 - DNA, 25 bp, Homo sapien
tgcgcaggttaacatcctgtagccc

SEQ ID NO: 4052027 - DNA, 25 bp, Homo sapien
catgcatgacgggagagagggcatc

SEQ ID NO: 4052028 - DNA, 25 bp, Homo sapien
cctgcatactctgggaccctccctt

SEQ ID NO: 4052029 - DNA, 25 bp, Homo sapien
catcgcccccttgcagcaattacgc

SEQ ID NO: 4052030 - DNA, 25 bp, Homo sapien
gtgtgctcagctcccatcgccccct

SEQ ID NO: 4052031 - DNA, 25 bp, Homo sapien
cgtccacgagcgggaagtcccgcat

SEQ ID NO: 4052032 - DNA, 25 bp, Homo sapien
cgggaagtcccgcatcagggcccgt

SEQ ID NO: 4052033 - DNA, 25 bp, Homo sapien
cacgagcgggaagtcccgcatcagg

SEQ ID NO: 4052034 - DNA, 25 bp, Homo sapien
ggaagtcccgcatcagggcccgtgc

SEQ ID NO: 4052035 - DNA, 25 bp, Homo sapien
tcgagggagcgtaggtgcccggcat

SEQ ID NO: 4052036 - DNA, 25 bp, Homo sapien
tactgagtgtggtcgagggagcgta

SEQ ID NO: 4052037 - DNA, 25 bp, Homo sapien
cctgggtgctgggactactgagtgt

SEQ ID NO: 4052038 - DNA, 25 bp, Homo sapien
ctgggactactgagtgtggtcgagg

SEQ ID NO: 4052039 - DNA, 25 bp, Homo sapien
ggtgtgggctctgggggcgcccagc

SEQ ID NO: 4052040 - DNA, 25 bp, Homo sapien
tgtgggctctgggggcgcccagcgt

SEQ ID NO: 4052041 - DNA, 25 bp, Homo sapien
tgggctctgggggcgcccagcgtgg

SEQ ID NO: 4052042 - DNA, 25 bp, Homo sapien
gggctctgggggcgcccagcgtggt

SEQ ID NO: 4052043 - DNA, 25 bp, Homo sapien
gggcctggcgtggtgtaggcacagg

SEQ ID NO: 4052044 - DNA, 25 bp, Homo sapien
agaggccaccgaccaaacgtgccgg

SEQ ID NO: 4052045 - DNA, 25 bp, Homo sapien
cagcagaggccaccgaccaaacgtg

SEQ ID NO: 4052046 - DNA, 25 bp, Homo sapien
cgtgccgggaccctcgaggccggag

SEQ ID NO: 4052047 - DNA, 25 bp, Homo sapien
agcagaggccaccgaccaaacgtgc

SEQ ID NO: 4052048 - DNA, 25 bp, Homo sapien
caggcaggcaggggtggcagtcaga

SEQ ID NO: 4052049 - DNA, 25 bp, Homo sapien
gttgtgcagggccgggcaggcaggc

SEQ ID NO: 4052050 - DNA, 25 bp, Homo sapien
ggcaggcaggggtggcagtcagaga

SEQ ID NO: 4052051 - DNA, 25 bp, Homo sapien
caggcaggggtggcagtcagagagc

SEQ ID NO: 4052052 - DNA, 25 bp, Homo sapien
tgcagccacactcctcttatcttgt

SEQ ID NO: 4052053 - DNA, 25 bp, Homo sapien
cctcttatcttgtggctcctgtggc

SEQ ID NO: 4052054 - DNA, 25 bp, Homo sapien
cccggcctcgtccaggtcaggagta

SEQ ID NO: 4052055 - DNA, 25 bp, Homo sapien
ggaaagccctgccacctgggttctg

SEQ ID NO: 4052056 - DNA, 25 bp, Homo sapien
tgcttcagagaacagtagggcgtgt

SEQ ID NO: 4052057 - DNA, 25 bp, Homo sapien
gctggtctccaggtcaaagatgtgg

SEQ ID NO: 4052058 - DNA, 25 bp, Homo sapien
cacccactggaatagtgagagggag

SEQ ID NO: 4052059 - DNA, 25 bp, Homo sapien
agggttctatagggaggcccactgc

SEQ ID NO: 4052060 - DNA, 25 bp, Homo sapien
taacagctgacagagtaggtgagga

SEQ ID NO: 4052061 - DNA, 25 bp, Homo sapien
gacagagtaggtgaggagaattcaa

SEQ ID NO: 4052062 - DNA, 25 bp, Homo sapien
gctgacagagtaggtgaggagaatt

SEQ ID NO: 4052063 - DNA, 25 bp, Homo sapien
ataacagctgacagagtaggtgagg

SEQ ID NO: 4052064 - DNA, 25 bp, Homo sapien
ttagctaatctggtggcgacgtgga

SEQ ID NO: 4052065 - DNA, 25 bp, Homo sapien
tatttagctaatctggtggcgacgt

SEQ ID NO: 4052066 - DNA, 25 bp, Homo sapien
ggacgtggacaatctttacgtctag

SEQ ID NO: 4052067 - DNA, 25 bp, Homo sapien
aatctttacgtctagctcaggattg

SEQ ID NO: 4052068 - DNA, 25 bp, Homo sapien
tccaaacatccaaacatcaaaagaa

SEQ ID NO: 4052069 - DNA, 25 bp, Homo sapien
actccaaacatccaaacatcaaaag

SEQ ID NO: 4052070 - DNA, 25 bp, Homo sapien
aaacatccaaacatcaaaagaaaca

SEQ ID NO: 4052071 - DNA, 25 bp, Homo sapien
aactccaaacatccaaacatcaaaa

SEQ ID NO: 4052072 - DNA, 25 bp, Homo sapien
taacaaagtctggtaggacatggtg

SEQ ID NO: 4052073 - DNA, 25 bp, Homo sapien
gacaagatttcactagtgtgtgctg

SEQ ID NO: 4052074 - DNA, 25 bp, Homo sapien
gagtgttcatgtgagcccacgatgc

SEQ ID NO: 4052075 - DNA, 25 bp, Homo sapien
ttccggacacactaagacaagattt

SEQ ID NO: 4052076 - DNA, 25 bp, Homo sapien
cttcctcttctatgcagtgtttgca

SEQ ID NO: 4052077 - DNA, 25 bp, Homo sapien
tctacttcctcttctatgcagtgtt

SEQ ID NO: 4052078 - DNA, 25 bp, Homo sapien
cctcttctatgcagtgtttgcataa

SEQ ID NO: 4052079 - DNA, 25 bp, Homo sapien
tccctctacttcctcttctatgcag

SEQ ID NO: 4052080 - DNA, 25 bp, Homo sapien
tggtcctggagactcatgcttccct

SEQ ID NO: 4052081 - DNA, 25 bp, Homo sapien
tccctttgatgtcgccctggatctg

SEQ ID NO: 4052082 - DNA, 25 bp, Homo sapien
tgatgtctgatacagacaattccca

SEQ ID NO: 4052083 - DNA, 25 bp, Homo sapien
tcagtatccagcagtgcccagatga

SEQ ID NO: 4052084 - DNA, 25 bp, Homo sapien
accatgttgatgaggctggattgtc

SEQ ID NO: 4052085 - DNA, 25 bp, Homo sapien
ttgatgaggctggattgtctcgaac

SEQ ID NO: 4052086 - DNA, 25 bp, Homo sapien
atgttgatgaggctggattgtctcg

SEQ ID NO: 4052087 - DNA, 25 bp, Homo sapien
tgatgaggctggattgtctcgaact

SEQ ID NO: 4052088 - DNA, 25 bp, Homo sapien
ttttcatctacggacagggcctcat

SEQ ID NO: 4052089 - DNA, 25 bp, Homo sapien
gcctgtattccatggcggcaacaaa

SEQ ID NO: 4052090 - DNA, 25 bp, Homo sapien
tggcggcaacaaagttttcatctac

SEQ ID NO: 4052091 - DNA, 25 bp, Homo sapien
gggacagcctgtattccatggcggc

SEQ ID NO: 4052092 - DNA, 25 bp, Homo sapien
tgcggccttagcctgttcttcaaaa

SEQ ID NO: 4052093 - DNA, 25 bp, Homo sapien
ctgcggccttagcctgttcttcaaa

SEQ ID NO: 4052094 - DNA, 25 bp, Homo sapien
cattgcttatcgctttctttatgac

SEQ ID NO: 4052095 - DNA, 25 bp, Homo sapien
gacaaatagcttaaagcgctgggtc

SEQ ID NO: 4052096 - DNA, 25 bp, Homo sapien
ccttttgagtagtgccatttagcca

SEQ ID NO: 4052097 - DNA, 25 bp, Homo sapien
tagatcagtgtaggcattgcttatc

SEQ ID NO: 4052098 - DNA, 25 bp, Homo sapien
cagatgaatgtagaattgttgcaaa

SEQ ID NO: 4052099 - DNA, 25 bp, Homo sapien
tgaatgtagaattgttgcaaatcac

SEQ ID NO: 4052100 - DNA, 25 bp, Homo sapien
tcacagatgaatgtagaattgttgc

SEQ ID NO: 4052101 - DNA, 25 bp, Homo sapien
ctgggggtgatcacagatgaatgta

SEQ ID NO: 4052102 - DNA, 25 bp, Homo sapien
cagatattatcaagaattttgccaa

SEQ ID NO: 4052103 - DNA, 25 bp, Homo sapien
cgcaatagcatttgcacgcagatat

SEQ ID NO: 4052104 - DNA, 25 bp, Homo sapien
ctaggtggagggcacgcaatagcat

SEQ ID NO: 4052105 - DNA, 25 bp, Homo sapien
catttgcacgcagatattatcaaga

SEQ ID NO: 4052106 - DNA, 25 bp, Homo sapien
tctctgaccataccttatttccttg

SEQ ID NO: 4052107 - DNA, 25 bp, Homo sapien
caagtatctctgaccataccttatt

SEQ ID NO: 4052108 - DNA, 25 bp, Homo sapien
tatctctgaccataccttatttcct

SEQ ID NO: 4052109 - DNA, 25 bp, Homo sapien
agtatctctgaccataccttatttc

SEQ ID NO: 4052110 - DNA, 25 bp, Homo sapien
tttcaggtatctcttcggcttgttc

SEQ ID NO: 4052111 - DNA, 25 bp, Homo sapien
taaccttggccccttgtactgcagt

SEQ ID NO: 4052112 - DNA, 25 bp, Homo sapien
tgctcagttttgactcaccaccatc

SEQ ID NO: 4052113 - DNA, 25 bp, Homo sapien
tctcttcggcttgttcttgctcagt

SEQ ID NO: 4052114 - DNA, 25 bp, Homo sapien
gctgctgatacaggcagacttggga

SEQ ID NO: 4052115 - DNA, 25 bp, Homo sapien
tgacagtgccgcctttttctgggct

SEQ ID NO: 4052116 - DNA, 25 bp, Homo sapien
tgctgggacccctaaggacaagtga

SEQ ID NO: 4052117 - DNA, 25 bp, Homo sapien
ggacaaacgtcatggtgtttcttct

SEQ ID NO: 4052118 - DNA, 25 bp, Homo sapien
gtaacagccagcacctcactaccat

SEQ ID NO: 4052119 - DNA, 25 bp, Homo sapien
tgcagagagagacagtccccctggt

SEQ ID NO: 4052120 - DNA, 25 bp, Homo sapien
agacagtccccctggtaacagccag

SEQ ID NO: 4052121 - DNA, 25 bp, Homo sapien
tggtaacagccagcacctcactacc

SEQ ID NO: 4052122 - DNA, 25 bp, Homo sapien
ttaaattgagcagtagggacctcac

SEQ ID NO: 4052123 - DNA, 25 bp, Homo sapien
tcttgctgtaggtggcaggtctccc

SEQ ID NO: 4052124 - DNA, 25 bp, Homo sapien
cctgctgtgactagccatgggctgc

SEQ ID NO: 4052125 - DNA, 25 bp, Homo sapien
cctcggctagcagagtgcagactat

SEQ ID NO: 4052126 - DNA, 25 bp, Homo sapien
ccagcaagcttctgtggggtcagtc

SEQ ID NO: 4052127 - DNA, 25 bp, Homo sapien
tcagccagcaagcttctgtggggtc

SEQ ID NO: 4052128 - DNA, 25 bp, Homo sapien
ttctgtggggtcagtctcctgccac

SEQ ID NO: 4052129 - DNA, 25 bp, Homo sapien
gcaagcttctgtggggtcagtctcc

SEQ ID NO: 4052130 - DNA, 25 bp, Homo sapien
gatgctccaagcgccgaattttggg

SEQ ID NO: 4052131 - DNA, 25 bp, Homo sapien
ttgacgtctcttgggagcacgcctg

SEQ ID NO: 4052132 - DNA, 25 bp, Homo sapien
ttctccacaccctcggtagagaaca

SEQ ID NO: 4052133 - DNA, 25 bp, Homo sapien
tatctgactctatcgtagcttgacg

SEQ ID NO: 4052134 - DNA, 25 bp, Homo sapien
gacatgttagagacaatatagagga

SEQ ID NO: 4052135 - DNA, 25 bp, Homo sapien
ggacatgttagagacaatatagagg

SEQ ID NO: 4052136 - DNA, 25 bp, Homo sapien
aggacatgttagagacaatatagag

SEQ ID NO: 4052137 - DNA, 25 bp, Homo sapien
acatgttagagacaatatagaggat

SEQ ID NO: 4052138 - DNA, 25 bp, Homo sapien
caaacagattggtatcttacagaga

SEQ ID NO: 4052139 - DNA, 25 bp, Homo sapien
tagtcacgctgccatggaaactttg

SEQ ID NO: 4052140 - DNA, 25 bp, Homo sapien
tctaggacgcaggtgtgtagtcacg

SEQ ID NO: 4052141 - DNA, 25 bp, Homo sapien
agaaatggtagggaggcttctctag

SEQ ID NO: 4052142 - DNA, 25 bp, Homo sapien
gtcatccttgcacaaggggctgtgc

SEQ ID NO: 4052143 - DNA, 25 bp, Homo sapien
tgtcatccttgcacaaggggctgtg

SEQ ID NO: 4052144 - DNA, 25 bp, Homo sapien
ttgcacaaggggctgtgctcatctt

SEQ ID NO: 4052145 - DNA, 25 bp, Homo sapien
atccttgcacaaggggctgtgctca

SEQ ID NO: 4052146 - DNA, 25 bp, Homo sapien
cgccccggtgctaattattcttagg

SEQ ID NO: 4052147 - DNA, 25 bp, Homo sapien
tccgccccggtgctaattattctta

SEQ ID NO: 4052148 - DNA, 25 bp, Homo sapien
attccgccccggtgctaattattct

SEQ ID NO: 4052149 - DNA, 25 bp, Homo sapien
ccgccccggtgctaattattcttag

SEQ ID NO: 4052150 - DNA, 25 bp, Homo sapien
caagtcacaaagcagttcatcccgc

SEQ ID NO: 4052151 - DNA, 25 bp, Homo sapien
tgacaagtgtggtcacccactcaag

SEQ ID NO: 4052152 - DNA, 25 bp, Homo sapien
ggccagcagcgtacctttccaagtc

SEQ ID NO: 4052153 - DNA, 25 bp, Homo sapien
ttgctaaagactacagaaagccatg

SEQ ID NO: 4052154 - DNA, 25 bp, Homo sapien
cacattttaatcagatttgtcaaaa

SEQ ID NO: 4052155 - DNA, 25 bp, Homo sapien
tagcatcacattttaatcagatttg

SEQ ID NO: 4052156 - DNA, 25 bp, Homo sapien
ctgttctagcatcacattttaatca

SEQ ID NO: 4052157 - DNA, 25 bp, Homo sapien
cctgttctagcatcacattttaatc

SEQ ID NO: 4052158 - DNA, 25 bp, Homo sapien
caaaactgatgacggtgcctggcac

SEQ ID NO: 4052159 - DNA, 25 bp, Homo sapien
ggaagacttctccttcggcgagccg

SEQ ID NO: 4052160 - DNA, 25 bp, Homo sapien
ttctgaaccaggctcacatcccagg

SEQ ID NO: 4052161 - DNA, 25 bp, Homo sapien
ggcaaaggctctttcaccgaggatg

SEQ ID NO: 4052162 - DNA, 25 bp, Homo sapien
tacaccttcgggaaatgtggctcct

SEQ ID NO: 4052163 - DNA, 25 bp, Homo sapien
tttctgcggcgcaaacgacatggcg

SEQ ID NO: 4052164 - DNA, 25 bp, Homo sapien
caaccgagtcacgagggaaaagagc

SEQ ID NO: 4052165 - DNA, 25 bp, Homo sapien
cacggttgtgggctgaacgacttca

SEQ ID NO: 4052166 - DNA, 25 bp, Homo sapien
ggtgctgcgaccctacaaagtgatc

SEQ ID NO: 4052167 - DNA, 25 bp, Homo sapien
gcttgtcccgtgctggtatccgagg

SEQ ID NO: 4052168 - DNA, 25 bp, Homo sapien
cattgccctgagatagcttgtcccg

SEQ ID NO: 4052169 - DNA, 25 bp, Homo sapien
gaagtcatagatctgggctcaaccc

SEQ ID NO: 4052170 - DNA, 25 bp, Homo sapien
tactgcttgtgccagatgctacgag

SEQ ID NO: 4052171 - DNA, 25 bp, Homo sapien
tgctacgagaacagctggagtcgcc

SEQ ID NO: 4052172 - DNA, 25 bp, Homo sapien
agagttgagtcttacgttgcccagg

SEQ ID NO: 4052173 - DNA, 25 bp, Homo sapien
tctcaggcggtgcagtatgacaacc

SEQ ID NO: 4052174 - DNA, 25 bp, Homo sapien
cattataataactctctaccgtcag

SEQ ID NO: 4052175 - DNA, 25 bp, Homo sapien
tagtgacgctaatgttaatacatta

SEQ ID NO: 4052176 - DNA, 25 bp, Homo sapien
aatacattataataactctctaccg

SEQ ID NO: 4052177 - DNA, 25 bp, Homo sapien
tagacagtcacatttagtagtgggg

SEQ ID NO: 4052178 - DNA, 25 bp, Homo sapien
tgtccggccccaacaacttgaacaa

SEQ ID NO: 4052179 - DNA, 25 bp, Homo sapien
ttgaacaaatgatttattatagacc

SEQ ID NO: 4052180 - DNA, 25 bp, Homo sapien
cagcagttgaagttgttctcatata

SEQ ID NO: 4052181 - DNA, 25 bp, Homo sapien
ggacttacttggtaggtactggaga

SEQ ID NO: 4052182 - DNA, 25 bp, Homo sapien
ccatggtgtttttagtattcagaac

SEQ ID NO: 4052183 - DNA, 25 bp, Homo sapien
tgtttccagtgtagacagaataggt

SEQ ID NO: 4052184 - DNA, 25 bp, Homo sapien
acatgcctgcttacatagtagttgc

SEQ ID NO: 4052185 - DNA, 25 bp, Homo sapien
cacaaagttagctccccaaaaatgg

SEQ ID NO: 4052186 - DNA, 25 bp, Homo sapien
tgagctgggcacagacgctccctca

SEQ ID NO: 4052187 - DNA, 25 bp, Homo sapien
ctgcagcctgtatgctatgagtatt

SEQ ID NO: 4052188 - DNA, 25 bp, Homo sapien
actgcagcctgtatgctatgagtat

SEQ ID NO: 4052189 - DNA, 25 bp, Homo sapien
agcctggccacacccctatatttcg

SEQ ID NO: 4052190 - DNA, 25 bp, Homo sapien
ccctatatttcggtgagttgatgga

SEQ ID NO: 4052191 - DNA, 25 bp, Homo sapien
gccacacccctatatttcggtgagt

SEQ ID NO: 4052192 - DNA, 25 bp, Homo sapien
tttcggtgagttgatggaaatggct

SEQ ID NO: 4052193 - DNA, 25 bp, Homo sapien
taggcgtataccaccacactcaatt

SEQ ID NO: 4052194 - DNA, 25 bp, Homo sapien
ttgttgcttaggctgatctcactcc

SEQ ID NO: 4052195 - DNA, 25 bp, Homo sapien
gttgcttaggctgatctcactcctg

SEQ ID NO: 4052196 - DNA, 25 bp, Homo sapien
cctcagtttgcaaagtgccaggatt

SEQ ID NO: 4052197 - DNA, 25 bp, Homo sapien
tacaaaccttaagttgtacaacgca

SEQ ID NO: 4052198 - DNA, 25 bp, Homo sapien
ccagtgttggacaatatgtataaag

SEQ ID NO: 4052199 - DNA, 25 bp, Homo sapien
taccacacaggttaacatgtagaat

SEQ ID NO: 4052200 - DNA, 25 bp, Homo sapien
aacattatgattgtgggattcatca

SEQ ID NO: 4052201 - DNA, 25 bp, Homo sapien
taatggttagagctgtgaaaaccta

SEQ ID NO: 4052202 - DNA, 25 bp, Homo sapien
caatgttctcccatgagaaaatcca

SEQ ID NO: 4052203 - DNA, 25 bp, Homo sapien
tttacaaaagtcctctaagtcttgc

SEQ ID NO: 4052204 - DNA, 25 bp, Homo sapien
gaggtatgagttgaatgtatccaga

SEQ ID NO: 4052205 - DNA, 25 bp, Homo sapien
tcacaatattgtataaccaccacca

SEQ ID NO: 4052206 - DNA, 25 bp, Homo sapien
tttctatttccagaagtttttcatc

SEQ ID NO: 4052207 - DNA, 25 bp, Homo sapien
gaagtttttcatcacccaaactaca

SEQ ID NO: 4052208 - DNA, 25 bp, Homo sapien
ccaccactttctatttccagaagtt

SEQ ID NO: 4052209 - DNA, 25 bp, Homo sapien
gaaaaataatttgggcctaggcaca

SEQ ID NO: 4052210 - DNA, 25 bp, Homo sapien
tattgtaagcatacggaggaataat

SEQ ID NO: 4052211 - DNA, 25 bp, Homo sapien
catacggaggaataatctattggaa

SEQ ID NO: 4052212 - DNA, 25 bp, Homo sapien
ttttgtgtacaccacatcttgttta

SEQ ID NO: 4052213 - DNA, 25 bp, Homo sapien
gagtctcacatcttaagccaaattg

SEQ ID NO: 4052214 - DNA, 25 bp, Homo sapien
gcgctggcccagatttacacatatt

SEQ ID NO: 4052215 - DNA, 25 bp, Homo sapien
tgttgaagaggttccagagcacagg

SEQ ID NO: 4052216 - DNA, 25 bp, Homo sapien
tagatttgggagtcaacaatggaca

SEQ ID NO: 4052217 - DNA, 25 bp, Homo sapien
tcagctaagtaaggtgaggcacacc

SEQ ID NO: 4052218 - DNA, 25 bp, Homo sapien
tatatgtaagcactagggattcagg

SEQ ID NO: 4052219 - DNA, 25 bp, Homo sapien
tagttgagtatagtccgcttgagca

SEQ ID NO: 4052220 - DNA, 25 bp, Homo sapien
tagagaaagtctgccccgttggaac

SEQ ID NO: 4052221 - DNA, 25 bp, Homo sapien
aggttcttgccttttgggagttcat

SEQ ID NO: 4052222 - DNA, 25 bp, Homo sapien
gagacataatgatgatgcctgatga

SEQ ID NO: 4052223 - DNA, 25 bp, Homo sapien
tagcctatttgggagacataatgat

SEQ ID NO: 4052224 - DNA, 25 bp, Homo sapien
gccttttgggagttcatagcctatt

SEQ ID NO: 4052225 - DNA, 25 bp, Homo sapien
ggatacagtagcaaaatcaccccca

SEQ ID NO: 4052226 - DNA, 25 bp, Homo sapien
ttaggatacagtagcaaaatcaccc

SEQ ID NO: 4052227 - DNA, 25 bp, Homo sapien
taggatacagtagcaaaatcacccc

SEQ ID NO: 4052228 - DNA, 25 bp, Homo sapien
tacagtagcaaaatcacccccacat

SEQ ID NO: 4052229 - DNA, 25 bp, Homo sapien
tttggcaaaagaacaggagcagcat

SEQ ID NO: 4052230 - DNA, 25 bp, Homo sapien
tctgatgggctctaacagtgcttac

SEQ ID NO: 4052231 - DNA, 25 bp, Homo sapien
aaaactagtaggctgtggagtgcgc

SEQ ID NO: 4052232 - DNA, 25 bp, Homo sapien
tgagcagtacatcagcatgggcaga

SEQ ID NO: 4052233 - DNA, 25 bp, Homo sapien
ccagaaggctctgagcacatccaga

SEQ ID NO: 4052234 - DNA, 25 bp, Homo sapien
tccagaagtgataacctgaccctcc

SEQ ID NO: 4052235 - DNA, 25 bp, Homo sapien
ggcctaccctgtcctgtctgtatga

SEQ ID NO: 4052236 - DNA, 25 bp, Homo sapien
atttatagcctgaaatgattctggc

SEQ ID NO: 4052237 - DNA, 25 bp, Homo sapien
tgttcctgggcccattacagagcct

SEQ ID NO: 4052238 - DNA, 25 bp, Homo sapien
tgcaggcccttgatgccaggactct

SEQ ID NO: 4052239 - DNA, 25 bp, Homo sapien
ggaaagggagctggcctattgccca

SEQ ID NO: 4052240 - DNA, 25 bp, Homo sapien
tactaaggccagttcaggtctggga

SEQ ID NO: 4052241 - DNA, 25 bp, Homo sapien
atgtggatagtgagatttgcttctg

SEQ ID NO: 4052242 - DNA, 25 bp, Homo sapien
aagtgagttgtgtcacagaatgtgg

SEQ ID NO: 4052243 - DNA, 25 bp, Homo sapien
ttcagcagatcactgtggcccctct

SEQ ID NO: 4052244 - DNA, 25 bp, Homo sapien
ctgggcctgtggttggacgcccaca

SEQ ID NO: 4052245 - DNA, 25 bp, Homo sapien
gctgctgcccgggtgtaaactatcc

SEQ ID NO: 4052246 - DNA, 25 bp, Homo sapien
tactctaactgtgctagctcttggg

SEQ ID NO: 4052247 - DNA, 25 bp, Homo sapien
aaaaccttttatgggagtgcagtgc

SEQ ID NO: 4052248 - DNA, 25 bp, Homo sapien
caatttctactagcagcactgagca

SEQ ID NO: 4052249 - DNA, 25 bp, Homo sapien
cattgggatctttactcagaggctc

SEQ ID NO: 4052250 - DNA, 25 bp, Homo sapien
tatcccctacaagagggacagggag

SEQ ID NO: 4052251 - DNA, 25 bp, Homo sapien
cacgatatctgtcggcatgggccac

SEQ ID NO: 4052252 - DNA, 25 bp, Homo sapien
tgcgtgcaaaggacattccatggtg

SEQ ID NO: 4052253 - DNA, 25 bp, Homo sapien
tcaggccatcaggagctggttagcc

SEQ ID NO: 4052254 - DNA, 25 bp, Homo sapien
tcaggagctggttagccccattcca

SEQ ID NO: 4052255 - DNA, 25 bp, Homo sapien
gccatcaggagctggttagccccat

SEQ ID NO: 4052256 - DNA, 25 bp, Homo sapien
cctgcatgcagggtccagccattgt

SEQ ID NO: 4052257 - DNA, 25 bp, Homo sapien
aagaagctaccaggttgagggtgct

SEQ ID NO: 4052258 - DNA, 25 bp, Homo sapien
tatcagctggctcttacctcctggc

SEQ ID NO: 4052259 - DNA, 25 bp, Homo sapien
catgttcgccgaggatatcagctgg

SEQ ID NO: 4052260 - DNA, 25 bp, Homo sapien
ggcttgggctcctctaggtaccttc

SEQ ID NO: 4052261 - DNA, 25 bp, Homo sapien
tccttgggggcttgtaacacagtgc

SEQ ID NO: 4052262 - DNA, 25 bp, Homo sapien
gcgaggtgggtcaccaacaggcatc

SEQ ID NO: 4052263 - DNA, 25 bp, Homo sapien
cagactggtgtagtcatcagcgggt

SEQ ID NO: 4052264 - DNA, 25 bp, Homo sapien
caggcatcagactggtgtagtcatc

SEQ ID NO: 4052265 - DNA, 25 bp, Homo sapien
gtatgggacaccctgcatgcggacc

SEQ ID NO: 4052266 - DNA, 25 bp, Homo sapien
ctggtaggcctggaagacgctgagc

SEQ ID NO: 4052267 - DNA, 25 bp, Homo sapien
ggtgtagtgaggtagcccacagtgg

SEQ ID NO: 4052268 - DNA, 25 bp, Homo sapien
gacgctgagcagatccttcatacca

SEQ ID NO: 4052269 - DNA, 25 bp, Homo sapien
gggtagtaggctgtgtagttcaggt

SEQ ID NO: 4052270 - DNA, 25 bp, Homo sapien
cttgggtagtaggctgtgtagttca

SEQ ID NO: 4052271 - DNA, 25 bp, Homo sapien
tgtgtagttcaggtagagttgagtg

SEQ ID NO: 4052272 - DNA, 25 bp, Homo sapien
tagttcaggtagagttgagtggctg

SEQ ID NO: 4052273 - DNA, 25 bp, Homo sapien
tatagagctgccgtctccgtgggaa

SEQ ID NO: 4052274 - DNA, 25 bp, Homo sapien
gggtatagagctgccgtctccgtgg

SEQ ID NO: 4052275 - DNA, 25 bp, Homo sapien
agagctgccgtctccgtgggaatga

SEQ ID NO: 4052276 - DNA, 25 bp, Homo sapien
aagaggggtatagagctgccgtctc

SEQ ID NO: 4052277 - DNA, 25 bp, Homo sapien
tggaacaggggaccacctccacgta

SEQ ID NO: 4052278 - DNA, 25 bp, Homo sapien
ggctcatctcctctgtggaacaggg

SEQ ID NO: 4052279 - DNA, 25 bp, Homo sapien
gaggggacatgccactgcggcccaa

SEQ ID NO: 4052280 - DNA, 25 bp, Homo sapien
ggacatgccactgcggcccaaggtg

SEQ ID NO: 4052281 - DNA, 25 bp, Homo sapien
agcagctagggctcgctctgctgat

SEQ ID NO: 4052282 - DNA, 25 bp, Homo sapien
cagcagctagggctcgctctgctga

SEQ ID NO: 4052283 - DNA, 25 bp, Homo sapien
cttatggcaacgctgagcagcagct

SEQ ID NO: 4052284 - DNA, 25 bp, Homo sapien
cttcttatggcaacgctgagcagca

SEQ ID NO: 4052285 - DNA, 25 bp, Homo sapien
aatgaaggcatcgcccgatggccgg

SEQ ID NO: 4052286 - DNA, 25 bp, Homo sapien
ctgaatgaaggcatcgcccgatggc

SEQ ID NO: 4052287 - DNA, 25 bp, Homo sapien
tgaaggcatcgcccgatggccggcc

SEQ ID NO: 4052288 - DNA, 25 bp, Homo sapien
atgaaggcatcgcccgatggccggc

SEQ ID NO: 4052289 - DNA, 25 bp, Homo sapien
ggccggatgcatagcggttcaagac

SEQ ID NO: 4052290 - DNA, 25 bp, Homo sapien
gcaggcctcggaggcgtacacagtc

SEQ ID NO: 4052291 - DNA, 25 bp, Homo sapien
ttgagcaccatgtgtacaccgtggg

SEQ ID NO: 4052292 - DNA, 25 bp, Homo sapien
accgtggggccgaatgtcagctgct

SEQ ID NO: 4052293 - DNA, 25 bp, Homo sapien
acagtacatctgggggtggggagcc

SEQ ID NO: 4052294 - DNA, 25 bp, Homo sapien
tgggggtggggagccctgggcgctc

SEQ ID NO: 4052295 - DNA, 25 bp, Homo sapien
tctgggggtggggagccctgggcgc

SEQ ID NO: 4052296 - DNA, 25 bp, Homo sapien
ggggtggggagccctgggcgctcac

SEQ ID NO: 4052297 - DNA, 25 bp, Homo sapien
tcacaagcaaagagggcgaaggcat

SEQ ID NO: 4052298 - DNA, 25 bp, Homo sapien
atcaggatggcgcacaaagagcagc

SEQ ID NO: 4052299 - DNA, 25 bp, Homo sapien
gagttcaatgtatcgcttacccagc

SEQ ID NO: 4052300 - DNA, 25 bp, Homo sapien
aagccaagcacgtccgttggcccag

SEQ ID NO: 4052301 - DNA, 25 bp, Homo sapien
aagaaacgagccacctctagtgatg

SEQ ID NO: 4052302 - DNA, 25 bp, Homo sapien
cgtgacaagaaacgagccacctcta

SEQ ID NO: 4052303 - DNA, 25 bp, Homo sapien
aaacgagccacctctagtgatgtgc

SEQ ID NO: 4052304 - DNA, 25 bp, Homo sapien
cttcccgtgacaagaaacgagccac

SEQ ID NO: 4052305 - DNA, 25 bp, Homo sapien
aaatggatcaagaaccaggggagcc

SEQ ID NO: 4052306 - DNA, 25 bp, Homo sapien
gaaatggatcaagaaccaggggagc

SEQ ID NO: 4052307 - DNA, 25 bp, Homo sapien
tgaaatggatcaagaaccaggggag

SEQ ID NO: 4052308 - DNA, 25 bp, Homo sapien
aactcctcccctgtcgctttataca

SEQ ID NO: 4052309 - DNA, 25 bp, Homo sapien
actcctcccctgtcgctttatacac

SEQ ID NO: 4052310 - DNA, 25 bp, Homo sapien
gggtctcaggcctgactcagattgg

SEQ ID NO: 4052311 - DNA, 25 bp, Homo sapien
ggcctgactcagattggccctgctc

SEQ ID NO: 4052312 - DNA, 25 bp, Homo sapien
tctcaggcctgactcagattggccc

SEQ ID NO: 4052313 - DNA, 25 bp, Homo sapien
tcaggcctgactcagattggccctg

SEQ ID NO: 4052314 - DNA, 25 bp, Homo sapien
gcttgtgtctctgcagcgctaggtc

SEQ ID NO: 4052315 - DNA, 25 bp, Homo sapien
tgagggcctcgccatttctgcggcc

SEQ ID NO: 4052316 - DNA, 25 bp, Homo sapien
gctgtccacaaagcggatgagggcc

SEQ ID NO: 4052317 - DNA, 25 bp, Homo sapien
cctgggcgttgaggcagagtgctac

SEQ ID NO: 4052318 - DNA, 25 bp, Homo sapien
cacgagcccgtaccacagtctcact

SEQ ID NO: 4052319 - DNA, 25 bp, Homo sapien
tgatgactgccacggcaacccacga

SEQ ID NO: 4052320 - DNA, 25 bp, Homo sapien
ccacgtcctggtctgatgactgcca

SEQ ID NO: 4052321 - DNA, 25 bp, Homo sapien
ggcaacccacgagcccgtaccacag

SEQ ID NO: 4052322 - DNA, 25 bp, Homo sapien
gtaggggcagggcacagtgctgtca

SEQ ID NO: 4052323 - DNA, 25 bp, Homo sapien
ggggcagggcacagtgctgtcagag

SEQ ID NO: 4052324 - DNA, 25 bp, Homo sapien
ctgtaggggcagggcacagtgctgt

SEQ ID NO: 4052325 - DNA, 25 bp, Homo sapien
taggggcagggcacagtgctgtcag

SEQ ID NO: 4052326 - DNA, 25 bp, Homo sapien
ccccagcccctgctcccacactcac

SEQ ID NO: 4052327 - DNA, 25 bp, Homo sapien
tattcagctgttgtcacccccagcc

SEQ ID NO: 4052328 - DNA, 25 bp, Homo sapien
ctattcagctgttgtcacccccagc

SEQ ID NO: 4052329 - DNA, 25 bp, Homo sapien
cacccccagcccctgctcccacact

SEQ ID NO: 4052330 - DNA, 25 bp, Homo sapien
tctgctttatcacctcgggcttcga

SEQ ID NO: 4052331 - DNA, 25 bp, Homo sapien
ggccccgtctcgtatttctgcttta

SEQ ID NO: 4052332 - DNA, 25 bp, Homo sapien
caaggccccgtctcgtatttctgct

SEQ ID NO: 4052333 - DNA, 25 bp, Homo sapien
cacctcgggcttcgaaaacaattga

SEQ ID NO: 4052334 - DNA, 25 bp, Homo sapien
agatggaggataacagctaccattg

SEQ ID NO: 4052335 - DNA, 25 bp, Homo sapien
ggataacagctaccattgtcttgac

SEQ ID NO: 4052336 - DNA, 25 bp, Homo sapien
agctaccattgtcttgacttcccag

SEQ ID NO: 4052337 - DNA, 25 bp, Homo sapien
ttgacttcccagaccccaaagtcat

SEQ ID NO: 4052338 - DNA, 25 bp, Homo sapien
gacacatgtacccacagtggcttct

SEQ ID NO: 4052339 - DNA, 25 bp, Homo sapien
gcacatactcagacacatgtaccca

SEQ ID NO: 4052340 - DNA, 25 bp, Homo sapien
tcagacacatgtacccacagtggct

SEQ ID NO: 4052341 - DNA, 25 bp, Homo sapien
tactcagacacatgtacccacagtg

SEQ ID NO: 4052342 - DNA, 25 bp, Homo sapien
tcttcggaggtcatagaaggagaag

SEQ ID NO: 4052343 - DNA, 25 bp, Homo sapien
tatggaattctcttcggaggtcata

SEQ ID NO: 4052344 - DNA, 25 bp, Homo sapien
ggtgcttggatgctgcatatggaat

SEQ ID NO: 4052345 - DNA, 25 bp, Homo sapien
agaagaacatgtcggggagcaccag

SEQ ID NO: 4052346 - DNA, 25 bp, Homo sapien
ggtgcaggacctgtcgcaatagctg

SEQ ID NO: 4052347 - DNA, 25 bp, Homo sapien
tgcccatcagtgcagagcatgtagg

SEQ ID NO: 4052348 - DNA, 25 bp, Homo sapien
ctgtcgcaatagctgctgcccatca

SEQ ID NO: 4052349 - DNA, 25 bp, Homo sapien
catccccgttcaccagctgtgagaa

SEQ ID NO: 4052350 - DNA, 25 bp, Homo sapien
ctgcgtcccgatcccttcggtagga

SEQ ID NO: 4052351 - DNA, 25 bp, Homo sapien
ttccggctgcggctcagggagacct

SEQ ID NO: 4052352 - DNA, 25 bp, Homo sapien
ggggatggatcccaaagcctgcgtc

SEQ ID NO: 4052353 - DNA, 25 bp, Homo sapien
caggtgacctatatgggcccctcga

SEQ ID NO: 4052354 - DNA, 25 bp, Homo sapien
cccgcgccaggctgtcggcgctcag

SEQ ID NO: 4052355 - DNA, 25 bp, Homo sapien
gcctcgcggcactgcgtactcagtg

SEQ ID NO: 4052356 - DNA, 25 bp, Homo sapien
cagcaccttgtccagcggctctgcc

SEQ ID NO: 4052357 - DNA, 25 bp, Homo sapien
gcctcggcacgaaccagcgatttgt

SEQ ID NO: 4052358 - DNA, 25 bp, Homo sapien
gctccgcggctcaaccacttgccaa

SEQ ID NO: 4052359 - DNA, 25 bp, Homo sapien
gattaagtcggtctcgtccgagccc

SEQ ID NO: 4052360 - DNA, 25 bp, Homo sapien
taggaggattaagtcggtctcgtcc

SEQ ID NO: 4052361 - DNA, 25 bp, Homo sapien
gccgtagccccgaagaggacgacca

SEQ ID NO: 4052362 - DNA, 25 bp, Homo sapien
aagaggacgaccagtgatccgggcc

SEQ ID NO: 4052363 - DNA, 25 bp, Homo sapien
gcggaccgacgaggcgcacgcacgc

SEQ ID NO: 4052364 - DNA, 25 bp, Homo sapien
acacgcggaccgacgaggcgcacgc

SEQ ID NO: 4052365 - DNA, 25 bp, Homo sapien
cgcggaccgacgaggcgcacgcacg

SEQ ID NO: 4052366 - DNA, 25 bp, Homo sapien
cagcttgggcgggacaccgtgtatc

SEQ ID NO: 4052367 - DNA, 25 bp, Homo sapien
acaccgtgtatcgggggcggcacct

SEQ ID NO: 4052368 - DNA, 25 bp, Homo sapien
accgcagacgcggatcagcttgggc

SEQ ID NO: 4052369 - DNA, 25 bp, Homo sapien
gaccgaccgcagacgcggatcagct

SEQ ID NO: 4052370 - DNA, 25 bp, Homo sapien
ctgccaagacccgcccgtggcgccc

SEQ ID NO: 4052371 - DNA, 25 bp, Homo sapien
tgccaagacccgcccgtggcgcccc

SEQ ID NO: 4052372 - DNA, 25 bp, Homo sapien
caagacccgcccgtggcgccccgcg

SEQ ID NO: 4052373 - DNA, 25 bp, Homo sapien
gccggccacgtgaccggggcggctc

SEQ ID NO: 4052374 - DNA, 25 bp, Homo sapien
cggccacgtgaccggggcggctccg

SEQ ID NO: 4052375 - DNA, 25 bp, Homo sapien
tggtcaccagggatcacagggaagg

SEQ ID NO: 4052376 - DNA, 25 bp, Homo sapien
tagggccgagcgctagcctggcact

SEQ ID NO: 4052377 - DNA, 25 bp, Homo sapien
cggcgggaacatcagcgttgttaga

SEQ ID NO: 4052378 - DNA, 25 bp, Homo sapien
ttgtccacgcagatgctagggccga

SEQ ID NO: 4052379 - DNA, 25 bp, Homo sapien
tctgggcgctactcggtctccttct

SEQ ID NO: 4052380 - DNA, 25 bp, Homo sapien
cccgaaggtctgggcgctactcggt

SEQ ID NO: 4052381 - DNA, 25 bp, Homo sapien
agggtcacagcgtccccgcccgaag

SEQ ID NO: 4052382 - DNA, 25 bp, Homo sapien
aaggtctgggcgctactcggtctcc

SEQ ID NO: 4052383 - DNA, 25 bp, Homo sapien
tttcccacggaagacgcgcttatgc

SEQ ID NO: 4052384 - DNA, 25 bp, Homo sapien
gactgctccattgtggcgtctctgg

SEQ ID NO: 4052385 - DNA, 25 bp, Homo sapien
gcgcttatgcgtgtccaagtcgccg

SEQ ID NO: 4052386 - DNA, 25 bp, Homo sapien
ggaagccaccttcgcgaggtgactg

SEQ ID NO: 4052387 - DNA, 25 bp, Homo sapien
accccactagccagcgcgttgggcc

SEQ ID NO: 4052388 - DNA, 25 bp, Homo sapien
caagaaagatctcgcagtggaagag

SEQ ID NO: 4052389 - DNA, 25 bp, Homo sapien
ggatcaccgcggagatccacactcg

SEQ ID NO: 4052390 - DNA, 25 bp, Homo sapien
tcagcgaccctccttatgtcccggg

SEQ ID NO: 4052391 - DNA, 25 bp, Homo sapien
gcatggaagcatccagagctcagga

SEQ ID NO: 4052392 - DNA, 25 bp, Homo sapien
ttctgacccttctccacagtgccag

SEQ ID NO: 4052393 - DNA, 25 bp, Homo sapien
ccttctccacagtgccagcatgggt

SEQ ID NO: 4052394 - DNA, 25 bp, Homo sapien
tttctgacccttctccacagtgcca

SEQ ID NO: 4052395 - DNA, 25 bp, Homo sapien
tctccacagtgccagcatgggtcat

SEQ ID NO: 4052396 - DNA, 25 bp, Homo sapien
gggcaggacaaatttcttgggacca

SEQ ID NO: 4052397 - DNA, 25 bp, Homo sapien
aggaaggggcaggacaaatttcttg

SEQ ID NO: 4052398 - DNA, 25 bp, Homo sapien
tcttgggaccaggtgggatgaccag

SEQ ID NO: 4052399 - DNA, 25 bp, Homo sapien
caaatttcttgggaccaggtgggat

SEQ ID NO: 4052400 - DNA, 25 bp, Homo sapien
tctcccggtcttgtccgttccagat

SEQ ID NO: 4052401 - DNA, 25 bp, Homo sapien
tttaaccggggtcgctcagcagcgg

SEQ ID NO: 4052402 - DNA, 25 bp, Homo sapien
agcccggagccaggcgatacctcga

SEQ ID NO: 4052403 - DNA, 25 bp, Homo sapien
tgcgcagcgtggatttcgggtaccc

SEQ ID NO: 4052404 - DNA, 25 bp, Homo sapien
tccctattggccagccatttgcggg

SEQ ID NO: 4052405 - DNA, 25 bp, Homo sapien
gtatatggcggcgagtccctattgg

SEQ ID NO: 4052406 - DNA, 25 bp, Homo sapien
cggcgagtccctattggccagccat

SEQ ID NO: 4052407 - DNA, 25 bp, Homo sapien
tattggccagccatttgcgggaggc

SEQ ID NO: 4052408 - DNA, 25 bp, Homo sapien
gccttgggtgcctcattgaggccgt

SEQ ID NO: 4052409 - DNA, 25 bp, Homo sapien
tggcaactctacaacggccactgta

SEQ ID NO: 4052410 - DNA, 25 bp, Homo sapien
gctccttgatcacaaccctggcaac

SEQ ID NO: 4052411 - DNA, 25 bp, Homo sapien
cgtcactcccatccagagctggtgt

SEQ ID NO: 4052412 - DNA, 25 bp, Homo sapien
ccttgactgtcagaagatcagaatc

SEQ ID NO: 4052413 - DNA, 25 bp, Homo sapien
gagcagggatctgaccttgactgtc

SEQ ID NO: 4052414 - DNA, 25 bp, Homo sapien
tgggcagttggataagcagctcctg

SEQ ID NO: 4052415 - DNA, 25 bp, Homo sapien
cagttggataagcagctcctgggca

SEQ ID NO: 4052416 - DNA, 25 bp, Homo sapien
cgactccgatgcgatgtgttgaaca

SEQ ID NO: 4052417 - DNA, 25 bp, Homo sapien
cattgaaggatgataacacagaggc

SEQ ID NO: 4052418 - DNA, 25 bp, Homo sapien
taatagggacatacgaatagaagcc

SEQ ID NO: 4052419 - DNA, 25 bp, Homo sapien
tattctgtagggaaagggcgactcc

SEQ ID NO: 4052420 - DNA, 25 bp, Homo sapien
ccccgagtcttggactgtgaagcat

SEQ ID NO: 4052421 - DNA, 25 bp, Homo sapien
gccccgagtcttggactgtgaagca

SEQ ID NO: 4052422 - DNA, 25 bp, Homo sapien
cccgagtcttggactgtgaagcatc

SEQ ID NO: 4052423 - DNA, 25 bp, Homo sapien
ggccccgagtcttggactgtgaagc

SEQ ID NO: 4052424 - DNA, 25 bp, Homo sapien
gcattcaagctctggattgggcagc

SEQ ID NO: 4052425 - DNA, 25 bp, Homo sapien
gggccctgatttcctcggatgtgct

SEQ ID NO: 4052426 - DNA, 25 bp, Homo sapien
tcggatgtgctattggccccaggac

SEQ ID NO: 4052427 - DNA, 25 bp, Homo sapien
caagctctggattgggcagcagatg

SEQ ID NO: 4052428 - DNA, 25 bp, Homo sapien
tctgagctgtgcgtgtgtttggaca

SEQ ID NO: 4052429 - DNA, 25 bp, Homo sapien
tcctagactgcgagtggcagtggcc

SEQ ID NO: 4052430 - DNA, 25 bp, Homo sapien
gcctcaagggctacgagtctgagct

SEQ ID NO: 4052431 - DNA, 25 bp, Homo sapien
cccaggtcaagtgcgagataggaac

SEQ ID NO: 4052432 - DNA, 25 bp, Homo sapien
tgtgactatctctcctgaatgtggg

SEQ ID NO: 4052433 - DNA, 25 bp, Homo sapien
ggctgtcgcaagaatgacgattatc

SEQ ID NO: 4052434 - DNA, 25 bp, Homo sapien
tcttttgagcgtccctatagcctgt

SEQ ID NO: 4052435 - DNA, 25 bp, Homo sapien
tataaataggaatcagggtgtcggc

SEQ ID NO: 4052436 - DNA, 25 bp, Homo sapien
atggcattatctcagctcatcgcaa

SEQ ID NO: 4052437 - DNA, 25 bp, Homo sapien
tcgcaacctcggcctcctgggttca

SEQ ID NO: 4052438 - DNA, 25 bp, Homo sapien
caatggcattatctcagctcatcgc

SEQ ID NO: 4052439 - DNA, 25 bp, Homo sapien
gtgatctgcccacccggcctcccaa

SEQ ID NO: 4052440 - DNA, 25 bp, Homo sapien
gtatatgtgctgctgaagtgagcac

SEQ ID NO: 4052441 - DNA, 25 bp, Homo sapien
ttagtatatgtgctgctgaagtgag

SEQ ID NO: 4052442 - DNA, 25 bp, Homo sapien
atcttctttgcgtcgttccaatttt

SEQ ID NO: 4052443 - DNA, 25 bp, Homo sapien
gctaatcttctttgcgtcgttccaa

SEQ ID NO: 4052444 - DNA, 25 bp, Homo sapien
tcacagatgctattacagtgcacta

SEQ ID NO: 4052445 - DNA, 25 bp, Homo sapien
ttttgtctaagctgcatgccctccc

SEQ ID NO: 4052446 - DNA, 25 bp, Homo sapien
tgttactaagggcttgtatgtgact

SEQ ID NO: 4052447 - DNA, 25 bp, Homo sapien
ttacagtgcactataggcccggact

SEQ ID NO: 4052448 - DNA, 25 bp, Homo sapien
tcaggtccagcaaggacagatgaac

SEQ ID NO: 4052449 - DNA, 25 bp, Homo sapien
ttacaagcacttggctcaggtccag

SEQ ID NO: 4052450 - DNA, 25 bp, Homo sapien
gcatacagatagatcatagatcacg

SEQ ID NO: 4052451 - DNA, 25 bp, Homo sapien
tacctgttacactttagcatacaga

SEQ ID NO: 4052452 - DNA, 25 bp, Homo sapien
gatcctctctttgggagcgaagcca

SEQ ID NO: 4052453 - DNA, 25 bp, Homo sapien
cacccggttgctgtatgagaatggc

SEQ ID NO: 4052454 - DNA, 25 bp, Homo sapien
agacactgtcatcctgggccgagaa

SEQ ID NO: 4052455 - DNA, 25 bp, Homo sapien
tgctagcttgacataccccatgggc

SEQ ID NO: 4052456 - DNA, 25 bp, Homo sapien
ggtacacccctagctgaatgttctg

SEQ ID NO: 4052457 - DNA, 25 bp, Homo sapien
tttggaaaggcatacggacagagtc

SEQ ID NO: 4052458 - DNA, 25 bp, Homo sapien
tcacttcggcaggttgaacaactcc

SEQ ID NO: 4052459 - DNA, 25 bp, Homo sapien
cagtctgtattgctacaagggaccc

SEQ ID NO: 4052460 - DNA, 25 bp, Homo sapien
gcagggcagttaactctggactcag

SEQ ID NO: 4052461 - DNA, 25 bp, Homo sapien
tggtgccgcccgatatgcttgatat

SEQ ID NO: 4052462 - DNA, 25 bp, Homo sapien
tgtaagtggaaaagactcactcccc

SEQ ID NO: 4052463 - DNA, 25 bp, Homo sapien
ggaaacctaacaggatgtcagcagg

SEQ ID NO: 4052464 - DNA, 25 bp, Homo sapien
aatccaggtcgtgggggctgtcata

SEQ ID NO: 4052465 - DNA, 25 bp, Homo sapien
tcgtgggggctgtcatagccgaact

SEQ ID NO: 4052466 - DNA, 25 bp, Homo sapien
tcatagccgaactccttctgcacat

SEQ ID NO: 4052467 - DNA, 25 bp, Homo sapien
tacttgctccacatccgctgtctgc

SEQ ID NO: 4052468 - DNA, 25 bp, Homo sapien
tgttcccgattgtaatgcaaaatcc

SEQ ID NO: 4052469 - DNA, 25 bp, Homo sapien
taaaccaagttccttcacactggag

SEQ ID NO: 4052470 - DNA, 25 bp, Homo sapien
gacaaacctccccaaaagaatatgc

SEQ ID NO: 4052471 - DNA, 25 bp, Homo sapien
gtcacttctcccctccgtataggat

SEQ ID NO: 4052472 - DNA, 25 bp, Homo sapien
gcccaagagccacagcaaagtaatg

SEQ ID NO: 4052473 - DNA, 25 bp, Homo sapien
gctgctggcgctcaatgacagagaa

SEQ ID NO: 4052474 - DNA, 25 bp, Homo sapien
tctttgggtctcctacagcatggct

SEQ ID NO: 4052475 - DNA, 25 bp, Homo sapien
tgcagaaccatctcatttggagaga

SEQ ID NO: 4052476 - DNA, 25 bp, Homo sapien
gggtactcattgcgccagttattct

SEQ ID NO: 4052477 - DNA, 25 bp, Homo sapien
ctcattgcgccagttattctcactg

SEQ ID NO: 4052478 - DNA, 25 bp, Homo sapien
gtactcattgcgccagttattctca

SEQ ID NO: 4052479 - DNA, 25 bp, Homo sapien
tgggtactcattgcgccagttattc

SEQ ID NO: 4052480 - DNA, 25 bp, Homo sapien
tcatcgtcgtaaatgtcctctggtt

SEQ ID NO: 4052481 - DNA, 25 bp, Homo sapien
cctctggttcttgatcatcattcac

SEQ ID NO: 4052482 - DNA, 25 bp, Homo sapien
catcgtcgtaaatgtcctctggttc

SEQ ID NO: 4052483 - DNA, 25 bp, Homo sapien
tgtcctctggttcttgatcatcatt

SEQ ID NO: 4052484 - DNA, 25 bp, Homo sapien
cccctaagaatggatagctataaac

SEQ ID NO: 4052485 - DNA, 25 bp, Homo sapien
cccagggaagcaaagcattctgatt

SEQ ID NO: 4052486 - DNA, 25 bp, Homo sapien
agcttaggatgcctcatgccccgtc

SEQ ID NO: 4052487 - DNA, 25 bp, Homo sapien
agtcaggttcctaaaaggcacttag

SEQ ID NO: 4052488 - DNA, 25 bp, Homo sapien
tcagacacagtcaatcgctcacgga

SEQ ID NO: 4052489 - DNA, 25 bp, Homo sapien
ccattcttggctgtagggctgcacg

SEQ ID NO: 4052490 - DNA, 25 bp, Homo sapien
gatcaactctacagaattgcagagg

SEQ ID NO: 4052491 - DNA, 25 bp, Homo sapien
ggccgtctccaagtagtaaatgtca

SEQ ID NO: 4052492 - DNA, 25 bp, Homo sapien
cctgagaagcccagcgaccaccttc

SEQ ID NO: 4052493 - DNA, 25 bp, Homo sapien
ctgagaagcccagcgaccaccttca

SEQ ID NO: 4052494 - DNA, 25 bp, Homo sapien
gaagcccagcgaccaccttcagggg

SEQ ID NO: 4052495 - DNA, 25 bp, Homo sapien
agcccagcgaccaccttcaggggca

SEQ ID NO: 4052496 - DNA, 25 bp, Homo sapien
gtgacgggcgcagaacttcccgcag

SEQ ID NO: 4052497 - DNA, 25 bp, Homo sapien
tcctcgtggacaaggtctaacaact

SEQ ID NO: 4052498 - DNA, 25 bp, Homo sapien
gcgtgtactcggactcctggccgct

SEQ ID NO: 4052499 - DNA, 25 bp, Homo sapien
ctgaaagcccgagttcccggcggct

SEQ ID NO: 4052500 - DNA, 25 bp, Homo sapien
caggagttcgcgagcgggtcaggga

SEQ ID NO: 4052501 - DNA, 25 bp, Homo sapien
ggatcgggtttcgtaccggctgcac

SEQ ID NO: 4052502 - DNA, 25 bp, Homo sapien
tttcgtaccggctgcacccgaagat

SEQ ID NO: 4052503 - DNA, 25 bp, Homo sapien
gggacggaggccagcgtaagcagga

SEQ ID NO: 4052504 - DNA, 25 bp, Homo sapien
gacgtcttctgtgccgctgactcga

SEQ ID NO: 4052505 - DNA, 25 bp, Homo sapien
tttacaagcgagcacaagagcctcc

SEQ ID NO: 4052506 - DNA, 25 bp, Homo sapien
gaagacattattctccgccgctctc

SEQ ID NO: 4052507 - DNA, 25 bp, Homo sapien
tgactcgaccgcgtcgctccggagg

SEQ ID NO: 4052508 - DNA, 25 bp, Homo sapien
gtacagcggtcctggcggcctccat

SEQ ID NO: 4052509 - DNA, 25 bp, Homo sapien
agcacgctcctcgacgctgcgaggt

SEQ ID NO: 4052510 - DNA, 25 bp, Homo sapien
gccccgcgtgctggccgcggtaaaa

SEQ ID NO: 4052511 - DNA, 25 bp, Homo sapien
gtgtgatgggatagctttccagttc

SEQ ID NO: 4052512 - DNA, 25 bp, Homo sapien
cggtaaaagtggtagcagcggaggc

SEQ ID NO: 4052513 - DNA, 25 bp, Homo sapien
gaggcacgtctgacacaggcacatg

SEQ ID NO: 4052514 - DNA, 25 bp, Homo sapien
cgtgccaatgtagtaaaggtttgag

SEQ ID NO: 4052515 - DNA, 25 bp, Homo sapien
tgggtaacgtgccaatgtagtaaag

SEQ ID NO: 4052516 - DNA, 25 bp, Homo sapien
agggaggcacgtctgacacaggcac

SEQ ID NO: 4052517 - DNA, 25 bp, Homo sapien
tcaactaccaataattacgccttgg

SEQ ID NO: 4052518 - DNA, 25 bp, Homo sapien
ttcaactaccaataattacgccttg

SEQ ID NO: 4052519 - DNA, 25 bp, Homo sapien
ctaccaataattacgccttggataa

SEQ ID NO: 4052520 - DNA, 25 bp, Homo sapien
aactaccaataattacgccttggat

SEQ ID NO: 4052521 - DNA, 25 bp, Homo sapien
gcttcctttgagactgggcctaggg

SEQ ID NO: 4052522 - DNA, 25 bp, Homo sapien
gatgccacagaatctgagatccagc

SEQ ID NO: 4052523 - DNA, 25 bp, Homo sapien
gaaaacccctaatgtcccatgaaga

SEQ ID NO: 4052524 - DNA, 25 bp, Homo sapien
gaacagagtcttggtatgggcctcg

SEQ ID NO: 4052525 - DNA, 25 bp, Homo sapien
gcccagtcgcttgtgtgagcagagt

SEQ ID NO: 4052526 - DNA, 25 bp, Homo sapien
tgagcagagtaccagctgcttctgg

SEQ ID NO: 4052527 - DNA, 25 bp, Homo sapien
gagtccataggcagccacaatgaga

SEQ ID NO: 4052528 - DNA, 25 bp, Homo sapien
cagaggcgaccttgtgatgacagaa

SEQ ID NO: 4052529 - DNA, 25 bp, Homo sapien
aaaccttcgctgcatgacaggagca

SEQ ID NO: 4052530 - DNA, 25 bp, Homo sapien
taattgcccttgaatgcgagaccct

SEQ ID NO: 4052531 - DNA, 25 bp, Homo sapien
gatacagagagtacacgaacccggt

SEQ ID NO: 4052532 - DNA, 25 bp, Homo sapien
tggtcccgaaccagagaggtgtccc

SEQ ID NO: 4052533 - DNA, 25 bp, Homo sapien
catcagtcgcatggctactggcagg

SEQ ID NO: 4052534 - DNA, 25 bp, Homo sapien
ctactggcaggtggtccgtcaggcc

SEQ ID NO: 4052535 - DNA, 25 bp, Homo sapien
cccgaagacaccatcagtcgcatgg

SEQ ID NO: 4052536 - DNA, 25 bp, Homo sapien
tcgcatggctactggcaggtggtcc

SEQ ID NO: 4052537 - DNA, 25 bp, Homo sapien
ctgcatgcagcatgtagtcgatgcg

SEQ ID NO: 4052538 - DNA, 25 bp, Homo sapien
gcagcatgtagtcgatgcgccggcc

SEQ ID NO: 4052539 - DNA, 25 bp, Homo sapien
tctggcccgagctcttgctggtggg

SEQ ID NO: 4052540 - DNA, 25 bp, Homo sapien
ggaaacgccaggtactccctgcggc

SEQ ID NO: 4052541 - DNA, 25 bp, Homo sapien
gtgcacacatcctcatcgtacaggc

SEQ ID NO: 4052542 - DNA, 25 bp, Homo sapien
ggttgtcgggggtgcacacatcctc

SEQ ID NO: 4052543 - DNA, 25 bp, Homo sapien
aggccgttcgtgtccagcagagtac

SEQ ID NO: 4052544 - DNA, 25 bp, Homo sapien
atcgtacaggccgttcgtgtccagc

SEQ ID NO: 4052545 - DNA, 25 bp, Homo sapien
tgggtgaacagggagtgttgctgct

SEQ ID NO: 4052546 - DNA, 25 bp, Homo sapien
ggtgaacagggagtgttgctgctcc

SEQ ID NO: 4052547 - DNA, 25 bp, Homo sapien
gggtgaacagggagtgttgctgctc

SEQ ID NO: 4052548 - DNA, 25 bp, Homo sapien
cgctggacgaggaggtagattttcg

SEQ ID NO: 4052549 - DNA, 25 bp, Homo sapien
ccagccagtcctgaagcaggtccag

SEQ ID NO: 4052550 - DNA, 25 bp, Homo sapien
tgaaatctccacagacgacgtcaaa

SEQ ID NO: 4052551 - DNA, 25 bp, Homo sapien
gaggagcagttatcaaagttgaaat

SEQ ID NO: 4052552 - DNA, 25 bp, Homo sapien
gtgtgcaggcgatgtacccgacgat

SEQ ID NO: 4052553 - DNA, 25 bp, Homo sapien
tacccgacgattctttggtcctgag

SEQ ID NO: 4052554 - DNA, 25 bp, Homo sapien
ggcgatgtacccgacgattctttgg

SEQ ID NO: 4052555 - DNA, 25 bp, Homo sapien
caggtgtgtgcaggcgatgtacccg

SEQ ID NO: 4052556 - DNA, 25 bp, Homo sapien
tttgttggtcttaaggcgtcagcct

SEQ ID NO: 4052557 - DNA, 25 bp, Homo sapien
tctaagaggcagcttccagtcggat

SEQ ID NO: 4052558 - DNA, 25 bp, Homo sapien
cagtcggatctgtttgtcgtgcgct

SEQ ID NO: 4052559 - DNA, 25 bp, Homo sapien
tcacaggctcacatggtctaagagg

SEQ ID NO: 4052560 - DNA, 25 bp, Homo sapien
cacttgattatttgctgggcctcat

SEQ ID NO: 4052561 - DNA, 25 bp, Homo sapien
tgattatttgctgggcctcattgat

SEQ ID NO: 4052562 - DNA, 25 bp, Homo sapien
caagatccacttgattatttgctgg

SEQ ID NO: 4052563 - DNA, 25 bp, Homo sapien
aatcacacgaaaggctgtgcctttg

SEQ ID NO: 4052564 - DNA, 25 bp, Homo sapien
aaagactgtcaacggaagaggtgtc

SEQ ID NO: 4052565 - DNA, 25 bp, Homo sapien
tggcgggcaaagactgtcaacggaa

SEQ ID NO: 4052566 - DNA, 25 bp, Homo sapien
cgggcaaagactgtcaacggaagag

SEQ ID NO: 4052567 - DNA, 25 bp, Homo sapien
gactgtcaacggaagaggtgtccag

SEQ ID NO: 4052568 - DNA, 25 bp, Homo sapien
ttccctgaaggctctgaagtcccat

SEQ ID NO: 4052569 - DNA, 25 bp, Homo sapien
tttccctgaaggctctgaagtccca

SEQ ID NO: 4052570 - DNA, 25 bp, Homo sapien
aaggcagccccacgtacttcacttc

SEQ ID NO: 4052571 - DNA, 25 bp, Homo sapien
agctctgctgtcctggtgctctgtc

SEQ ID NO: 4052572 - DNA, 25 bp, Homo sapien
tccgcgtgtgctgggcacaccacag

SEQ ID NO: 4052573 - DNA, 25 bp, Homo sapien
ctccgcgctgggatccgcgtgtgct

SEQ ID NO: 4052574 - DNA, 25 bp, Homo sapien
gaaaaccgtggaagcaccatgagcg

SEQ ID NO: 4052575 - DNA, 25 bp, Homo sapien
gcataagaggagtcacacctggcct

SEQ ID NO: 4052576 - DNA, 25 bp, Homo sapien
catgagcggcttttggatagagaac

SEQ ID NO: 4052577 - DNA, 25 bp, Homo sapien
tgaagacaagctctgccactcatgg

SEQ ID NO: 4052578 - DNA, 25 bp, Homo sapien
tgtactcgaagtagccgtgcagctg

SEQ ID NO: 4052579 - DNA, 25 bp, Homo sapien
agaggccagggcatcgtcgttacac

SEQ ID NO: 4052580 - DNA, 25 bp, Homo sapien
tgagaaacagagctcccttagaggc

SEQ ID NO: 4052581 - DNA, 25 bp, Homo sapien
aagaggaggccgctgttgagacact

SEQ ID NO: 4052582 - DNA, 25 bp, Homo sapien
tgcaactccggctggtcaatggcga

SEQ ID NO: 4052583 - DNA, 25 bp, Homo sapien
ccctactacatggtgtccgtggcag

SEQ ID NO: 4052584 - DNA, 25 bp, Homo sapien
gggtcacctcctggcgagatgcaac

SEQ ID NO: 4052585 - DNA, 25 bp, Homo sapien
tcaatggcgaatgttggccagccgg

SEQ ID NO: 4052586 - DNA, 25 bp, Homo sapien
tggagccggctgtcttcacactggc

SEQ ID NO: 4052587 - DNA, 25 bp, Homo sapien
gtggagccggctgtcttcacactgg

SEQ ID NO: 4052588 - DNA, 25 bp, Homo sapien
ggagccggctgtcttcacactggct

SEQ ID NO: 4052589 - DNA, 25 bp, Homo sapien
tgtggagccggctgtcttcacactg

SEQ ID NO: 4052590 - DNA, 25 bp, Homo sapien
gcaagtttgccaagtagagtccact

SEQ ID NO: 4052591 - DNA, 25 bp, Homo sapien
cattagaggctggtaacttttcaga

SEQ ID NO: 4052592 - DNA, 25 bp, Homo sapien
cctagttgggccattgagtgggccc

SEQ ID NO: 4052593 - DNA, 25 bp, Homo sapien
cctgcgctcctttggcctagttggg

SEQ ID NO: 4052594 - DNA, 25 bp, Homo sapien
ctgaggttgcccagaatgacatccc

SEQ ID NO: 4052595 - DNA, 25 bp, Homo sapien
tccatggatttgtcccctttgcgaa

SEQ ID NO: 4052596 - DNA, 25 bp, Homo sapien
tcctggtatgtagcttctgaggttg

SEQ ID NO: 4052597 - DNA, 25 bp, Homo sapien
ctttgcgaatcctggtatgtagctt

SEQ ID NO: 4052598 - DNA, 25 bp, Homo sapien
caggtcgtcataggtcctggcaggc

SEQ ID NO: 4052599 - DNA, 25 bp, Homo sapien
cgttgtctccaggtcgtcataggtc

SEQ ID NO: 4052600 - DNA, 25 bp, Homo sapien
cgtcataggtcctggcaggccccat

SEQ ID NO: 4052601 - DNA, 25 bp, Homo sapien
agttggagtcccgttgtctccaggt

SEQ ID NO: 4052602 - DNA, 25 bp, Homo sapien
ctgcttgtgcgagcccaaggcacag

SEQ ID NO: 4052603 - DNA, 25 bp, Homo sapien
ttgtgggctgcttgtgcgagcccaa

SEQ ID NO: 4052604 - DNA, 25 bp, Homo sapien
cagtgcaggggacgacgtcagggcc

SEQ ID NO: 4052605 - DNA, 25 bp, Homo sapien
gcaggaggttatcagagccatctgt

SEQ ID NO: 4052606 - DNA, 25 bp, Homo sapien
ggccactgggaccttgttgtccttc

SEQ ID NO: 4052607 - DNA, 25 bp, Homo sapien
agcagggcctgcaatgctgctctcc

SEQ ID NO: 4052608 - DNA, 25 bp, Homo sapien
tgcctgggccgagtcaggcctctgg

SEQ ID NO: 4052609 - DNA, 25 bp, Homo sapien
cagaagaacctttcatcccggctga

SEQ ID NO: 4052610 - DNA, 25 bp, Homo sapien
cagctggcttgtgcctgggccgagt

SEQ ID NO: 4052611 - DNA, 25 bp, Homo sapien
gtcagtttcctggatacctccacct

SEQ ID NO: 4052612 - DNA, 25 bp, Homo sapien
tggtcagtttcctggatacctccac

SEQ ID NO: 4052613 - DNA, 25 bp, Homo sapien
gatgtccctagatgcactgagcttg

SEQ ID NO: 4052614 - DNA, 25 bp, Homo sapien
tgtgcagctccacgggagatgtccc

SEQ ID NO: 4052615 - DNA, 25 bp, Homo sapien
ctcctctgtcccagagggattcaag

SEQ ID NO: 4052616 - DNA, 25 bp, Homo sapien
tcctctgtcccagagggattcaagg

SEQ ID NO: 4052617 - DNA, 25 bp, Homo sapien
cttgccagcatgacccatttgggct

SEQ ID NO: 4052618 - DNA, 25 bp, Homo sapien
taattatggattagcttggtgacca

SEQ ID NO: 4052619 - DNA, 25 bp, Homo sapien
gctgtaattttaaacgataattatg

SEQ ID NO: 4052620 - DNA, 25 bp, Homo sapien
ccagcatgacccatttgggctgtaa

SEQ ID NO: 4052621 - DNA, 25 bp, Homo sapien
ttttgggactgctggtagacaccta

SEQ ID NO: 4052622 - DNA, 25 bp, Homo sapien
caggtttcattaagagagatgcaca

SEQ ID NO: 4052623 - DNA, 25 bp, Homo sapien
atgcacaggccggacgtggttgctc

SEQ ID NO: 4052624 - DNA, 25 bp, Homo sapien
tggaccacacggttccatgactttg

SEQ ID NO: 4052625 - DNA, 25 bp, Homo sapien
ccagaaacaatgaggcgtaaaccag

SEQ ID NO: 4052626 - DNA, 25 bp, Homo sapien
taatatacacgtcaaccttctgaac

SEQ ID NO: 4052627 - DNA, 25 bp, Homo sapien
gacaataaatcacgaagctacttga

SEQ ID NO: 4052628 - DNA, 25 bp, Homo sapien
gaacatttagttatcacttagtacc

SEQ ID NO: 4052629 - DNA, 25 bp, Homo sapien
tgaggattgctgctgagccccaaat

SEQ ID NO: 4052630 - DNA, 25 bp, Homo sapien
cctcggtagcggcaggtccagctga

SEQ ID NO: 4052631 - DNA, 25 bp, Homo sapien
cgtgtccattcatcagactcagcat

SEQ ID NO: 4052632 - DNA, 25 bp, Homo sapien
agagggaagcctgtcgccctcggta

SEQ ID NO: 4052633 - DNA, 25 bp, Homo sapien
gagcctcgtaaaagctctagctggt

SEQ ID NO: 4052634 - DNA, 25 bp, Homo sapien
tgttccaggcaccattaggagacac

SEQ ID NO: 4052635 - DNA, 25 bp, Homo sapien
cagatgtttgcctttatcagacgcc

SEQ ID NO: 4052636 - DNA, 25 bp, Homo sapien
gctcaccgtagcgtggaggagacac

SEQ ID NO: 4052637 - DNA, 25 bp, Homo sapien
ttagggtagctatttaaagagttca

SEQ ID NO: 4052638 - DNA, 25 bp, Homo sapien
tcacatcagattcaaaccgacaaca

SEQ ID NO: 4052639 - DNA, 25 bp, Homo sapien
tatccattagggtagctatttaaag

SEQ ID NO: 4052640 - DNA, 25 bp, Homo sapien
ccgacaacatctgcgctgcaagggc

SEQ ID NO: 4052641 - DNA, 25 bp, Homo sapien
actcccccagtacacctgaagaagc

SEQ ID NO: 4052642 - DNA, 25 bp, Homo sapien
cactcccccagtacacctgaagaag

SEQ ID NO: 4052643 - DNA, 25 bp, Homo sapien
cccccagtacacctgaagaagccat

SEQ ID NO: 4052644 - DNA, 25 bp, Homo sapien
tcccccagtacacctgaagaagcca

SEQ ID NO: 4052645 - DNA, 25 bp, Homo sapien
ccagtggagtatggaagggtggaaa

SEQ ID NO: 4052646 - DNA, 25 bp, Homo sapien
cttgggacaaccacgttggagctgc

SEQ ID NO: 4052647 - DNA, 25 bp, Homo sapien
gacaaccacgttggagctgccagtg

SEQ ID NO: 4052648 - DNA, 25 bp, Homo sapien
cacgttggagctgccagtggagtat

SEQ ID NO: 4052649 - DNA, 25 bp, Homo sapien
tatcgtcataaccattccaggtggc

SEQ ID NO: 4052650 - DNA, 25 bp, Homo sapien
atttatcgtcataaccattccaggt

SEQ ID NO: 4052651 - DNA, 25 bp, Homo sapien
tcgtcataaccattccaggtggccc

SEQ ID NO: 4052652 - DNA, 25 bp, Homo sapien
ttatcgtcataaccattccaggtgg

SEQ ID NO: 4052653 - DNA, 25 bp, Homo sapien
gagtctgcccattgggggcgtcctc

SEQ ID NO: 4052654 - DNA, 25 bp, Homo sapien
ctcagactcagcacctggagcggcg

SEQ ID NO: 4052655 - DNA, 25 bp, Homo sapien
tggagcggcgaacagctccgcgctt

SEQ ID NO: 4052656 - DNA, 25 bp, Homo sapien
cgccggagccaatggtgacccggac

SEQ ID NO: 4052657 - DNA, 25 bp, Homo sapien
ctggatctcttgggcaatgagtttc

SEQ ID NO: 4052658 - DNA, 25 bp, Homo sapien
ccctggatctcttgggcaatgagtt

SEQ ID NO: 4052659 - DNA, 25 bp, Homo sapien
ggatctcttgggcaatgagtttctt

SEQ ID NO: 4052660 - DNA, 25 bp, Homo sapien
gatctcttgggcaatgagtttcttc

SEQ ID NO: 4052661 - DNA, 25 bp, Homo sapien
gaaataacacactaccttcgaacca

SEQ ID NO: 4052662 - DNA, 25 bp, Homo sapien
caacctgtaactgacagtgagcaat

SEQ ID NO: 4052663 - DNA, 25 bp, Homo sapien
tgcagtggcaagaagggggacagag

SEQ ID NO: 4052664 - DNA, 25 bp, Homo sapien
actgacagtgagcaatcaactgaaa

SEQ ID NO: 4052665 - DNA, 25 bp, Homo sapien
ttggaacttggcacgaaacatgcca

SEQ ID NO: 4052666 - DNA, 25 bp, Homo sapien
tttggaacttggcacgaaacatgcc

SEQ ID NO: 4052667 - DNA, 25 bp, Homo sapien
catccaacgtcggtttggaagccca

SEQ ID NO: 4052668 - DNA, 25 bp, Homo sapien
tatccgctgacaaaccatccaacgt

SEQ ID NO: 4052669 - DNA, 25 bp, Homo sapien
aaaaagacccgttgcgaaggctgcg

SEQ ID NO: 4052670 - DNA, 25 bp, Homo sapien
gtggaccaagaggacgcactcggat

SEQ ID NO: 4052671 - DNA, 25 bp, Homo sapien
tgcgaatgtgttgtccccacgcggt

SEQ ID NO: 4052672 - DNA, 25 bp, Homo sapien
gatacaccagctgggtcgccttggt

SEQ ID NO: 4052673 - DNA, 25 bp, Homo sapien
caggttccataagtgtccgctaggg

SEQ ID NO: 4052674 - DNA, 25 bp, Homo sapien
tacagaggccaggtaagagagccgc

SEQ ID NO: 4052675 - DNA, 25 bp, Homo sapien
tcttgagtagctagcagaacccgga

SEQ ID NO: 4052676 - DNA, 25 bp, Homo sapien
gctttgaggcaccacttgggcacgt

SEQ ID NO: 4052677 - DNA, 25 bp, Homo sapien
tgacgttaacgacgggtccctgatg

SEQ ID NO: 4052678 - DNA, 25 bp, Homo sapien
gactaggtcccgctgaatgcctcat

SEQ ID NO: 4052679 - DNA, 25 bp, Homo sapien
cagcagctggcttgcgatctcctag

SEQ ID NO: 4052680 - DNA, 25 bp, Homo sapien
cctagatctgcataggaggctgaag

SEQ ID NO: 4052681 - DNA, 25 bp, Homo sapien
aggctgaagccatcgcctggccgac

SEQ ID NO: 4052682 - DNA, 25 bp, Homo sapien
ctggccgacaccttgtaggtctctc

SEQ ID NO: 4052683 - DNA, 25 bp, Homo sapien
tctgcctaagtgaccctgccttaag

SEQ ID NO: 4052684 - DNA, 25 bp, Homo sapien
gattacctccttaacagagtacctg

SEQ ID NO: 4052685 - DNA, 25 bp, Homo sapien
ccagttcctcgcttgttaagagctg

SEQ ID NO: 4052686 - DNA, 25 bp, Homo sapien
tgtcagatgccccagacttgtagga

SEQ ID NO: 4052687 - DNA, 25 bp, Homo sapien
tgaggattcataagagaggcaaacc

SEQ ID NO: 4052688 - DNA, 25 bp, Homo sapien
ggagagaaaccctatcgatgtaatc

SEQ ID NO: 4052689 - DNA, 25 bp, Homo sapien
tagtcgatgttcttcccttgtccaa

SEQ ID NO: 4052690 - DNA, 25 bp, Homo sapien
aggtcctttaggcatggcacatccc

SEQ ID NO: 4052691 - DNA, 25 bp, Homo sapien
cacatcttcattgacagggagggag

SEQ ID NO: 4052692 - DNA, 25 bp, Homo sapien
gaattgtaaccaactgagtgctgcc

SEQ ID NO: 4052693 - DNA, 25 bp, Homo sapien
cacctatgggttggacactttgaga

SEQ ID NO: 4052694 - DNA, 25 bp, Homo sapien
ttttagggctacgtgaaatgcatcc

SEQ ID NO: 4052695 - DNA, 25 bp, Homo sapien
aaccacctgcttggtttccctcagg

SEQ ID NO: 4052696 - DNA, 25 bp, Homo sapien
gcttggtttccctcagggcataagc

SEQ ID NO: 4052697 - DNA, 25 bp, Homo sapien
tcttatctgattcctcctcccacac

SEQ ID NO: 4052698 - DNA, 25 bp, Homo sapien
cctcagggcataagcctggataact

SEQ ID NO: 4052699 - DNA, 25 bp, Homo sapien
tgctgataaagctcctaaggtgaaa

SEQ ID NO: 4052700 - DNA, 25 bp, Homo sapien
gaaatctggacctgaattataatgg

SEQ ID NO: 4052701 - DNA, 25 bp, Homo sapien
tggataaaggagtcaagaaatctgg

SEQ ID NO: 4052702 - DNA, 25 bp, Homo sapien
cacaggatcttgacagggacttttc

SEQ ID NO: 4052703 - DNA, 25 bp, Homo sapien
cagtcgcttttggtctgctcggcca

SEQ ID NO: 4052704 - DNA, 25 bp, Homo sapien
ttccctcgcagtcgcttttggtctg

SEQ ID NO: 4052705 - DNA, 25 bp, Homo sapien
tccacttctgggctgaacgtcttcc

SEQ ID NO: 4052706 - DNA, 25 bp, Homo sapien
tgaacgtcttccctcgcagtcgctt

SEQ ID NO: 4052707 - DNA, 25 bp, Homo sapien
gtgcagtgctgagttttcgcttcct

SEQ ID NO: 4052708 - DNA, 25 bp, Homo sapien
acagcgtgggtacaagcttggctgc

SEQ ID NO: 4052709 - DNA, 25 bp, Homo sapien
agtgctgagttttcgcttccttctg

SEQ ID NO: 4052710 - DNA, 25 bp, Homo sapien
tctgagtggcacagcgtgggtacaa

SEQ ID NO: 4052711 - DNA, 25 bp, Homo sapien
tctccaccactgagatcctcacagg

SEQ ID NO: 4052712 - DNA, 25 bp, Homo sapien
catcaacacctggagaccaagaaac

SEQ ID NO: 4052713 - DNA, 25 bp, Homo sapien
caggcagtgacctccgtgtcctaat

SEQ ID NO: 4052714 - DNA, 25 bp, Homo sapien
agtaaaaagccggagttgcccagca

SEQ ID NO: 4052715 - DNA, 25 bp, Homo sapien
tgctcttggcgacgtccatccacag

SEQ ID NO: 4052716 - DNA, 25 bp, Homo sapien
ctgctcttggcgacgtccatccaca

SEQ ID NO: 4052717 - DNA, 25 bp, Homo sapien
ggcagagctgatgagggttaagaga

SEQ ID NO: 4052718 - DNA, 25 bp, Homo sapien
ctggcagagctgatgagggttaaga

SEQ ID NO: 4052719 - DNA, 25 bp, Homo sapien
tggcagagctgatgagggttaagag

SEQ ID NO: 4052720 - DNA, 25 bp, Homo sapien
gcagagctgatgagggttaagagag

SEQ ID NO: 4052721 - DNA, 25 bp, Homo sapien
catcatctgagaagcgttttagcaa

SEQ ID NO: 4052722 - DNA, 25 bp, Homo sapien
agcgttttagcaaaattaagctgag

SEQ ID NO: 4052723 - DNA, 25 bp, Homo sapien
gggaccatcgaagattgttgaacac

SEQ ID NO: 4052724 - DNA, 25 bp, Homo sapien
ggactcaatacccaaagacaatggg

SEQ ID NO: 4052725 - DNA, 25 bp, Homo sapien
ctaagagtggacagtagacccagaa

SEQ ID NO: 4052726 - DNA, 25 bp, Homo sapien
agacaccgattcttcggctgggctg

SEQ ID NO: 4052727 - DNA, 25 bp, Homo sapien
gagtggacagtagacccagaaagac

SEQ ID NO: 4052728 - DNA, 25 bp, Homo sapien
gacaccgattcttcggctgggctga

SEQ ID NO: 4052729 - DNA, 25 bp, Homo sapien
ggctttgatcctccaaatgcttgaa

SEQ ID NO: 4052730 - DNA, 25 bp, Homo sapien
caagtggatctggtgccctctagca

SEQ ID NO: 4052731 - DNA, 25 bp, Homo sapien
tgcaagcgctgtgttctcgccaagg

SEQ ID NO: 4052732 - DNA, 25 bp, Homo sapien
ttcatccccatgactacacagtggg

SEQ ID NO: 4052733 - DNA, 25 bp, Homo sapien
tgaaagccaggactgctacagggac

SEQ ID NO: 4052734 - DNA, 25 bp, Homo sapien
tattgtgtatgagggtgtgaaagcc

SEQ ID NO: 4052735 - DNA, 25 bp, Homo sapien
ggtgtccttaactattgtgtatgag

SEQ ID NO: 4052736 - DNA, 25 bp, Homo sapien
aaagagggcaggcaaatgggctttg

SEQ ID NO: 4052737 - DNA, 25 bp, Homo sapien
cagaatctgatcatgggttttttaa

SEQ ID NO: 4052738 - DNA, 25 bp, Homo sapien
aaggaaatggtattgtcatcctgct

SEQ ID NO: 4052739 - DNA, 25 bp, Homo sapien
catccaatcttttggccaattttgt

SEQ ID NO: 4052740 - DNA, 25 bp, Homo sapien
tcatcctgctgattgctcgggccag

SEQ ID NO: 4052741 - DNA, 25 bp, Homo sapien
caaagctttgggataacagcgcctc

SEQ ID NO: 4052742 - DNA, 25 bp, Homo sapien
tgtatccaattcagaaacgcggtcc

SEQ ID NO: 4052743 - DNA, 25 bp, Homo sapien
tgctagttttataccccggaggatc

SEQ ID NO: 4052744 - DNA, 25 bp, Homo sapien
taacccagaactgcgagacagaggc

SEQ ID NO: 4052745 - DNA, 25 bp, Homo sapien
gacctctcgcgtctctcctccttct

SEQ ID NO: 4052746 - DNA, 25 bp, Homo sapien
aggtactccacagcctcgccgtggc

SEQ ID NO: 4052747 - DNA, 25 bp, Homo sapien
atggggctccctcgtggacctctcg

SEQ ID NO: 4052748 - DNA, 25 bp, Homo sapien
aagagctgagcggaacaccggcccg

SEQ ID NO: 4052749 - DNA, 25 bp, Homo sapien
ccttgtgggcagtagttggaattgt

SEQ ID NO: 4052750 - DNA, 25 bp, Homo sapien
ctgctctggttagcaccctgcaggt

SEQ ID NO: 4052751 - DNA, 25 bp, Homo sapien
tagcaccctgcaggtagcccatctg

SEQ ID NO: 4052752 - DNA, 25 bp, Homo sapien
agccctgttggccactgggccttgt

SEQ ID NO: 4052753 - DNA, 25 bp, Homo sapien
tgatggtcgagtggtccacgggggc

SEQ ID NO: 4052754 - DNA, 25 bp, Homo sapien
cgagtggtccacgggggcaggatat

SEQ ID NO: 4052755 - DNA, 25 bp, Homo sapien
gagtggtccacgggggcaggatatg

SEQ ID NO: 4052756 - DNA, 25 bp, Homo sapien
tggtccacgggggcaggatatggtt

SEQ ID NO: 4052757 - DNA, 25 bp, Homo sapien
gatgcctccttgtgccgtacatggt

SEQ ID NO: 4052758 - DNA, 25 bp, Homo sapien
tgcctccttgtgccgtacatggtca

SEQ ID NO: 4052759 - DNA, 25 bp, Homo sapien
atgcctccttgtgccgtacatggtc

SEQ ID NO: 4052760 - DNA, 25 bp, Homo sapien
gcagcccgatgacgcactggccggc

SEQ ID NO: 4052761 - DNA, 25 bp, Homo sapien
actggcttgcacatttgttggtgcc

SEQ ID NO: 4052762 - DNA, 25 bp, Homo sapien
ctggcttgcacatttgttggtgccc

SEQ ID NO: 4052763 - DNA, 25 bp, Homo sapien
cgcactggccggccttcatggtgtt

SEQ ID NO: 4052764 - DNA, 25 bp, Homo sapien
cgaagttttgctcctgcttctttga

SEQ ID NO: 4052765 - DNA, 25 bp, Homo sapien
ctagtcgaagttttgctcctgcttc

SEQ ID NO: 4052766 - DNA, 25 bp, Homo sapien
gttttgctcctgcttctttgagtac

SEQ ID NO: 4052767 - DNA, 25 bp, Homo sapien
aagttttgctcctgcttctttgagt

SEQ ID NO: 4052768 - DNA, 25 bp, Homo sapien
ttggccttccccgccagggcaagaa

SEQ ID NO: 4052769 - DNA, 25 bp, Homo sapien
tccccgccagggcaagaagagacac

SEQ ID NO: 4052770 - DNA, 25 bp, Homo sapien
ctgatgtccaccccgctctgcagcc

SEQ ID NO: 4052771 - DNA, 25 bp, Homo sapien
cttagtcttggccttccccgccagg

SEQ ID NO: 4052772 - DNA, 25 bp, Homo sapien
ctcaaacaggttactggcctcaaac

SEQ ID NO: 4052773 - DNA, 25 bp, Homo sapien
aaacaggttactggcctcaaacagg

SEQ ID NO: 4052774 - DNA, 25 bp, Homo sapien
aacaggttactggcctcaaacaggt

SEQ ID NO: 4052775 - DNA, 25 bp, Homo sapien
tcaaacaggttactggcctcaaaca

SEQ ID NO: 4052776 - DNA, 25 bp, Homo sapien
cgcctggccgaaagtgaccttattt

SEQ ID NO: 4052777 - DNA, 25 bp, Homo sapien
aaatgtactatgctgttgcattttt

SEQ ID NO: 4052778 - DNA, 25 bp, Homo sapien
gatctttgttctggcatggtccttg

SEQ ID NO: 4052779 - DNA, 25 bp, Homo sapien
agacccttaattgttaccacagctg

SEQ ID NO: 4052780 - DNA, 25 bp, Homo sapien
ctcaggttgatcactgggatctttg

SEQ ID NO: 4052781 - DNA, 25 bp, Homo sapien
aggatggtagccagtgagccagaca

SEQ ID NO: 4052782 - DNA, 25 bp, Homo sapien
cccattcggatggatctctgcgttt

SEQ ID NO: 4052783 - DNA, 25 bp, Homo sapien
actggccgtcctgcatttctggttt

SEQ ID NO: 4052784 - DNA, 25 bp, Homo sapien
tatactgagtgtgcctaggttgccc

SEQ ID NO: 4052785 - DNA, 25 bp, Homo sapien
tctgcgtttttatactgagtgtgcc

SEQ ID NO: 4052786 - DNA, 25 bp, Homo sapien
caggcgggagctaggagattcctct

SEQ ID NO: 4052787 - DNA, 25 bp, Homo sapien
tcagtccctgaggatgcggcagggc

SEQ ID NO: 4052788 - DNA, 25 bp, Homo sapien
ggtggctaagacagcagcccctaaa

SEQ ID NO: 4052789 - DNA, 25 bp, Homo sapien
tctgagagcgccctgtagtctggta

SEQ ID NO: 4052790 - DNA, 25 bp, Homo sapien
gtatggtgccggtttcccacagcct

SEQ ID NO: 4052791 - DNA, 25 bp, Homo sapien
gctggctgcgcccatgccagggacg

SEQ ID NO: 4052792 - DNA, 25 bp, Homo sapien
gacggtatggtgccggtttcccaca

SEQ ID NO: 4052793 - DNA, 25 bp, Homo sapien
cccatgccagggacggtatggtgcc

SEQ ID NO: 4052794 - DNA, 25 bp, Homo sapien
cactggggtggtttcccaggaagag

SEQ ID NO: 4052795 - DNA, 25 bp, Homo sapien
tcccaggaagagaagtaaaagctga

SEQ ID NO: 4052796 - DNA, 25 bp, Homo sapien
gaagagaagtaaaagctgaggggtg

SEQ ID NO: 4052797 - DNA, 25 bp, Homo sapien
cttctttgcctccccactggggtgg

SEQ ID NO: 4052798 - DNA, 25 bp, Homo sapien
taaaaggccgctaggacttgggatg

SEQ ID NO: 4052799 - DNA, 25 bp, Homo sapien
tatcagtccaatgtggagtcgcccc

SEQ ID NO: 4052800 - DNA, 25 bp, Homo sapien
gactctctttggacagtgcacggaa

SEQ ID NO: 4052801 - DNA, 25 bp, Homo sapien
gaagtgcccttctggtaaaatcaca

SEQ ID NO: 4052802 - DNA, 25 bp, Homo sapien
aggagtggtcagcttcacctgctgg

SEQ ID NO: 4052803 - DNA, 25 bp, Homo sapien
acctgctgggccttgatgagtaaga

SEQ ID NO: 4052804 - DNA, 25 bp, Homo sapien
gccaggagtggtcagcttcacctgc

SEQ ID NO: 4052805 - DNA, 25 bp, Homo sapien
agtaagagggtgtcttccatgcaag

SEQ ID NO: 4052806 - DNA, 25 bp, Homo sapien
ctgagtcaccgacattgagaggcct

SEQ ID NO: 4052807 - DNA, 25 bp, Homo sapien
tacgagtgttcctaggacctggtac

SEQ ID NO: 4052808 - DNA, 25 bp, Homo sapien
tcatcccttgaataagcagtgaggc

SEQ ID NO: 4052809 - DNA, 25 bp, Homo sapien
tgaggcaaacacctgggcacttact

SEQ ID NO: 4052810 - DNA, 25 bp, Homo sapien
cctgaccccatgatcctcccccact

SEQ ID NO: 4052811 - DNA, 25 bp, Homo sapien
gaccccatgatcctcccccactcag

SEQ ID NO: 4052812 - DNA, 25 bp, Homo sapien
tgaccccatgatcctcccccactca

SEQ ID NO: 4052813 - DNA, 25 bp, Homo sapien
accccatgatcctcccccactcagc

SEQ ID NO: 4052814 - DNA, 25 bp, Homo sapien
aagtttcgagttctgcaaaagccat

SEQ ID NO: 4052815 - DNA, 25 bp, Homo sapien
gggtgacctcagaggcagttgcaga

SEQ ID NO: 4052816 - DNA, 25 bp, Homo sapien
gcagaagtttcgagttctgcaaaag

SEQ ID NO: 4052817 - DNA, 25 bp, Homo sapien
cagttgcagaagtttcgagttctgc

SEQ ID NO: 4052818 - DNA, 25 bp, Homo sapien
tgggcaaaaaggttcaccctcaggc

SEQ ID NO: 4052819 - DNA, 25 bp, Homo sapien
gaacccagcgacatctgaagagccc

SEQ ID NO: 4052820 - DNA, 25 bp, Homo sapien
tgccttgggttccacctgcacagac

SEQ ID NO: 4052821 - DNA, 25 bp, Homo sapien
acctgaactggacccttttggatct

SEQ ID NO: 4052822 - DNA, 25 bp, Homo sapien
tgtaacttgcaatgggcagctatcc

SEQ ID NO: 4052823 - DNA, 25 bp, Homo sapien
gaatagtgcctaaagtgctgcagcc

SEQ ID NO: 4052824 - DNA, 25 bp, Homo sapien
caagatccgtggtttgtactcaaag

SEQ ID NO: 4052825 - DNA, 25 bp, Homo sapien
tgtctggccacatcttgactaggta

SEQ ID NO: 4052826 - DNA, 25 bp, Homo sapien
cagtcggagcggaaaggggtcaaag

SEQ ID NO: 4052827 - DNA, 25 bp, Homo sapien
agcagtcggagcggaaaggggtcaa

SEQ ID NO: 4052828 - DNA, 25 bp, Homo sapien
gcagtcggagcggaaaggggtcaaa

SEQ ID NO: 4052829 - DNA, 25 bp, Homo sapien
tctacccatggagcctttgccactg

SEQ ID NO: 4052830 - DNA, 25 bp, Homo sapien
gatccggtcatccaagaactcgctg

SEQ ID NO: 4052831 - DNA, 25 bp, Homo sapien
tatccaacacataccctgatccggt

SEQ ID NO: 4052832 - DNA, 25 bp, Homo sapien
gttgcctctgttggagaaggtatcc

SEQ ID NO: 4052833 - DNA, 25 bp, Homo sapien
agaggagagtctcaaccaactttga

SEQ ID NO: 4052834 - DNA, 25 bp, Homo sapien
ttttagcctaaagatatcccttgag

SEQ ID NO: 4052835 - DNA, 25 bp, Homo sapien
taaattgtcagcatgccagcctagc

SEQ ID NO: 4052836 - DNA, 25 bp, Homo sapien
tggaaaaagagagttagcttagagc

SEQ ID NO: 4052837 - DNA, 25 bp, Homo sapien
aagatgaaccggctacttcactgtt

SEQ ID NO: 4052838 - DNA, 25 bp, Homo sapien
atgtaagtaaaagatgaaccggcta

SEQ ID NO: 4052839 - DNA, 25 bp, Homo sapien
gtaaaagatgaaccggctacttcac

SEQ ID NO: 4052840 - DNA, 25 bp, Homo sapien
tgtaagtaaaagatgaaccggctac

SEQ ID NO: 4052841 - DNA, 25 bp, Homo sapien
gacatggggctttttaagccatctg

SEQ ID NO: 4052842 - DNA, 25 bp, Homo sapien
ctgcctaccttggctgaattatagt

SEQ ID NO: 4052843 - DNA, 25 bp, Homo sapien
tgacatggggctttttaagccatct

SEQ ID NO: 4052844 - DNA, 25 bp, Homo sapien
acatttcacgaatttgcctgtaatc

SEQ ID NO: 4052845 - DNA, 25 bp, Homo sapien
ggaacatttcacgaatttgcctgta

SEQ ID NO: 4052846 - DNA, 25 bp, Homo sapien
gaacatttcacgaatttgcctgtaa

SEQ ID NO: 4052847 - DNA, 25 bp, Homo sapien
atttcacgaatttgcctgtaatcct

SEQ ID NO: 4052848 - DNA, 25 bp, Homo sapien
ctcactgaaatctccgcctcacagg

SEQ ID NO: 4052849 - DNA, 25 bp, Homo sapien
gctaattttgtatctttagtagaga

SEQ ID NO: 4052850 - DNA, 25 bp, Homo sapien
tcactgaaatctccgcctcacaggt

SEQ ID NO: 4052851 - DNA, 25 bp, Homo sapien
agctaattttgtatctttagtagag

SEQ ID NO: 4052852 - DNA, 25 bp, Homo sapien
tactggagctgttgttaatagaata

SEQ ID NO: 4052853 - DNA, 25 bp, Homo sapien
ggcacatctcactccattgttattg

SEQ ID NO: 4052854 - DNA, 25 bp, Homo sapien
gaaaccagatcaaacattactcata

SEQ ID NO: 4052855 - DNA, 25 bp, Homo sapien
ccattaggttttgccatgagggtaa

SEQ ID NO: 4052856 - DNA, 25 bp, Homo sapien
tgagtgtccattttcacaaaagctt

SEQ ID NO: 4052857 - DNA, 25 bp, Homo sapien
ggcactgtacaggtcatagctcgca

SEQ ID NO: 4052858 - DNA, 25 bp, Homo sapien
gacacgagttcctacatctagaaag

SEQ ID NO: 4052859 - DNA, 25 bp, Homo sapien
tctctgtatgtggtattgtgtcatc

SEQ ID NO: 4052860 - DNA, 25 bp, Homo sapien
ttgtgtgtttcaggccaactggcgc

SEQ ID NO: 4052861 - DNA, 25 bp, Homo sapien
tcagtttgccaagcctcttctggtc

SEQ ID NO: 4052862 - DNA, 25 bp, Homo sapien
tctgagccacgtctaaccctaaaga

SEQ ID NO: 4052863 - DNA, 25 bp, Homo sapien
tcccttttcagtttgccaagcctct

SEQ ID NO: 4052864 - DNA, 25 bp, Homo sapien
tccaccttgccctggagtccttggg

SEQ ID NO: 4052865 - DNA, 25 bp, Homo sapien
tgaacagcaggtgtgctgaactcat

SEQ ID NO: 4052866 - DNA, 25 bp, Homo sapien
ggatgaacagcaggtgtgctgaact

SEQ ID NO: 4052867 - DNA, 25 bp, Homo sapien
gcctgatacagttgggggatgaaca

SEQ ID NO: 4052868 - DNA, 25 bp, Homo sapien
caaaaccagataagcttctgcagtc

SEQ ID NO: 4052869 - DNA, 25 bp, Homo sapien
caattgataagtcgagagatgagtc

SEQ ID NO: 4052870 - DNA, 25 bp, Homo sapien
gctggctacaacatgtgaaagtgga

SEQ ID NO: 4052871 - DNA, 25 bp, Homo sapien
gagatgagtcatctgacctgtgcaa

SEQ ID NO: 4052872 - DNA, 25 bp, Homo sapien
cactacattggcttatctgatgaga

SEQ ID NO: 4052873 - DNA, 25 bp, Homo sapien
aaaggcaccgatgggaatggcccct

SEQ ID NO: 4052874 - DNA, 25 bp, Homo sapien
tcaaagtctactgtgcaacaccctg

SEQ ID NO: 4052875 - DNA, 25 bp, Homo sapien
aaattgatctgggatgggttccagg

SEQ ID NO: 4052876 - DNA, 25 bp, Homo sapien
ggcaaatcctccctggcatagactg

SEQ ID NO: 4052877 - DNA, 25 bp, Homo sapien
ccccgtgaagggatgaatgcaaata

SEQ ID NO: 4052878 - DNA, 25 bp, Homo sapien
catagactgccataaaggtaaagac

SEQ ID NO: 4052879 - DNA, 25 bp, Homo sapien
tgcaaataggacaccacaaactgga

SEQ ID NO: 4052880 - DNA, 25 bp, Homo sapien
gtacagtggcataatcttggcccac

SEQ ID NO: 4052881 - DNA, 25 bp, Homo sapien
gagtacagtggcataatcttggccc

SEQ ID NO: 4052882 - DNA, 25 bp, Homo sapien
atcatagctcactgttgccttgacc

SEQ ID NO: 4052883 - DNA, 25 bp, Homo sapien
acagtggcataatcttggcccactg

SEQ ID NO: 4052884 - DNA, 25 bp, Homo sapien
gggtttgcacctgtccgggcaccaa

SEQ ID NO: 4052885 - DNA, 25 bp, Homo sapien
aggcgcccacgttcctgcgggttag

SEQ ID NO: 4052886 - DNA, 25 bp, Homo sapien
tgtccgggcaccaaggtaccaggcg

SEQ ID NO: 4052887 - DNA, 25 bp, Homo sapien
tcctgcgggttagccgggccgcggc

SEQ ID NO: 4052888 - DNA, 25 bp, Homo sapien
ttgggtcgtgggaaagcggcacgtg

SEQ ID NO: 4052889 - DNA, 25 bp, Homo sapien
gcctggtccgactgggatcccttgg

SEQ ID NO: 4052890 - DNA, 25 bp, Homo sapien
cgttcgcggctgctttgacctggtg

SEQ ID NO: 4052891 - DNA, 25 bp, Homo sapien
gatgagaagcgtggcgagtgcgttc

SEQ ID NO: 4052892 - DNA, 25 bp, Homo sapien
gcagaaactgcattcggtgggtctt

SEQ ID NO: 4052893 - DNA, 25 bp, Homo sapien
cccaggtcagagctacggaagcatg

SEQ ID NO: 4052894 - DNA, 25 bp, Homo sapien
ccaacgccacgtttctagagagcag

SEQ ID NO: 4052895 - DNA, 25 bp, Homo sapien
gactacatgtgaactgggacctgca

SEQ ID NO: 4052896 - DNA, 25 bp, Homo sapien
tctctcaagggcaggattattccca

SEQ ID NO: 4052897 - DNA, 25 bp, Homo sapien
aaataacatctcaccttcagtcaag

SEQ ID NO: 4052898 - DNA, 25 bp, Homo sapien
tgagcccaagctatgttcttcagac

SEQ ID NO: 4052899 - DNA, 25 bp, Homo sapien
gaggaaaagtccacaagaacaattc

SEQ ID NO: 4052900 - DNA, 25 bp, Homo sapien
gggcaacattccatttgggtacatt

SEQ ID NO: 4052901 - DNA, 25 bp, Homo sapien
aaatgggacgaaactcttgcctgca

SEQ ID NO: 4052902 - DNA, 25 bp, Homo sapien
gggtacattgcagccattggacccc

SEQ ID NO: 4052903 - DNA, 25 bp, Homo sapien
tccccactctaggaaatgggacgaa

SEQ ID NO: 4052904 - DNA, 25 bp, Homo sapien
ggccaattccccgagagctaggacc

SEQ ID NO: 4052905 - DNA, 25 bp, Homo sapien
attccccgagagctaggacccgagt

SEQ ID NO: 4052906 - DNA, 25 bp, Homo sapien
ctggaaggccaattccccgagagct

SEQ ID NO: 4052907 - DNA, 25 bp, Homo sapien
aagggcccagatgcccggcagctgg

SEQ ID NO: 4052908 - DNA, 25 bp, Homo sapien
ggttaacagaacaccggctctcagg

SEQ ID NO: 4052909 - DNA, 25 bp, Homo sapien
ggcctggaaacacacctgacctggg

SEQ ID NO: 4052910 - DNA, 25 bp, Homo sapien
gaggtccagccattcttaagttaag

SEQ ID NO: 4052911 - DNA, 25 bp, Homo sapien
taagttaagaccagatcctgtgccc

SEQ ID NO: 4052912 - DNA, 25 bp, Homo sapien
caccagccgggaaaggtgctggatt

SEQ ID NO: 4052913 - DNA, 25 bp, Homo sapien
tttgaagccaatgagcctgatgaag

SEQ ID NO: 4052914 - DNA, 25 bp, Homo sapien
cttgggtcacgagcaccagccggga

SEQ ID NO: 4052915 - DNA, 25 bp, Homo sapien
ggatttgaagccaatgagcctgatg

SEQ ID NO: 4052916 - DNA, 25 bp, Homo sapien
gggatccgagttcacacccagtggg

SEQ ID NO: 4052917 - DNA, 25 bp, Homo sapien
tccgagttcacacccagtgggtggc

SEQ ID NO: 4052918 - DNA, 25 bp, Homo sapien
ataaggaagggatccgagttcacac

SEQ ID NO: 4052919 - DNA, 25 bp, Homo sapien
gaagggatccgagttcacacccagt

SEQ ID NO: 4052920 - DNA, 25 bp, Homo sapien
ccgtcgagccgtcctcgaggtggca

SEQ ID NO: 4052921 - DNA, 25 bp, Homo sapien
aaccgtcgagccgtcctcgaggtgg

SEQ ID NO: 4052922 - DNA, 25 bp, Homo sapien
ccagggaaccgtcgagccgtcctcg

SEQ ID NO: 4052923 - DNA, 25 bp, Homo sapien
agggaaccgtcgagccgtcctcgag

SEQ ID NO: 4052924 - DNA, 25 bp, Homo sapien
gggacgctggtgataatgggcttgg

SEQ ID NO: 4052925 - DNA, 25 bp, Homo sapien
tttcttggggacgctggtgataatg

SEQ ID NO: 4052926 - DNA, 25 bp, Homo sapien
cttggggacgctggtgataatgggc

SEQ ID NO: 4052927 - DNA, 25 bp, Homo sapien
tggggacgctggtgataatgggctt

SEQ ID NO: 4052928 - DNA, 25 bp, Homo sapien
gtaccgggtgccagtctcgcggcca

SEQ ID NO: 4052929 - DNA, 25 bp, Homo sapien
tgccccacgatcagcacagggattc

SEQ ID NO: 4052930 - DNA, 25 bp, Homo sapien
cgggtgccagtctcgcggccaagct

SEQ ID NO: 4052931 - DNA, 25 bp, Homo sapien
gatgattttcccatacaggatatga

SEQ ID NO: 4052932 - DNA, 25 bp, Homo sapien
tttggcagaacaagaacgagattcc

SEQ ID NO: 4052933 - DNA, 25 bp, Homo sapien
gggcaaggccataacactcaggcgc

SEQ ID NO: 4052934 - DNA, 25 bp, Homo sapien
gcatcgcagattagctaggccttga

SEQ ID NO: 4052935 - DNA, 25 bp, Homo sapien
tcttggcaggctatgctggcacctc

SEQ ID NO: 4052936 - DNA, 25 bp, Homo sapien
gaggtttccagctaatccagtgctg

SEQ ID NO: 4052937 - DNA, 25 bp, Homo sapien
ctcagtggtgtaatgtaggtctccc

SEQ ID NO: 4052938 - DNA, 25 bp, Homo sapien
gtttccagctaatccagtgctgtag

SEQ ID NO: 4052939 - DNA, 25 bp, Homo sapien
tcccaggaggtttccagctaatcca

SEQ ID NO: 4052940 - DNA, 25 bp, Homo sapien
gctttctgtctttaaaaagcaagtg

SEQ ID NO: 4052941 - DNA, 25 bp, Homo sapien
tgtctttaaaaagcaagtgaaaaca

SEQ ID NO: 4052942 - DNA, 25 bp, Homo sapien
ttctgtctttaaaaagcaagtgaaa

SEQ ID NO: 4052943 - DNA, 25 bp, Homo sapien
gagctttctgtctttaaaaagcaag

SEQ ID NO: 4052944 - DNA, 25 bp, Homo sapien
gctcactgaggcctttactgcccgg

SEQ ID NO: 4052945 - DNA, 25 bp, Homo sapien
gcctttactgcccgggcttaagtga

SEQ ID NO: 4052946 - DNA, 25 bp, Homo sapien
tcactgaggcctttactgcccgggc

SEQ ID NO: 4052947 - DNA, 25 bp, Homo sapien
cactgaggcctttactgcccgggct

SEQ ID NO: 4052948 - DNA, 25 bp, Homo sapien
tggatctgcagccttatagtatgac

SEQ ID NO: 4052949 - DNA, 25 bp, Homo sapien
cctagagcaccaaacactttgggaa

SEQ ID NO: 4052950 - DNA, 25 bp, Homo sapien
tagtatgactctactcctagagcac

SEQ ID NO: 4052951 - DNA, 25 bp, Homo sapien
tggtcaactcactagactttttttg

SEQ ID NO: 4052952 - DNA, 25 bp, Homo sapien
ctactagtcaggaacgtagaggagg

SEQ ID NO: 4052953 - DNA, 25 bp, Homo sapien
cgtgggtgtatttactactagtcag

SEQ ID NO: 4052954 - DNA, 25 bp, Homo sapien
ggctacagttaggtaatttatacgc

SEQ ID NO: 4052955 - DNA, 25 bp, Homo sapien
taggtaatttatacgcacgtgggtg

SEQ ID NO: 4052956 - DNA, 25 bp, Homo sapien
tctttatgggccttcacgcagctaa

SEQ ID NO: 4052957 - DNA, 25 bp, Homo sapien
agaatcaatcctgacccacaatggg

SEQ ID NO: 4052958 - DNA, 25 bp, Homo sapien
gcgcccggctaactatctcttaaga

SEQ ID NO: 4052959 - DNA, 25 bp, Homo sapien
gagttcaaccccagatttggctagg

SEQ ID NO: 4052960 - DNA, 25 bp, Homo sapien
taacaatacactgggcataaacacc

SEQ ID NO: 4052961 - DNA, 25 bp, Homo sapien
tgacagtgggtagtttaacctcacg

SEQ ID NO: 4052962 - DNA, 25 bp, Homo sapien
gattttgccacctatcccatatgtg

SEQ ID NO: 4052963 - DNA, 25 bp, Homo sapien
cacctattttgaaaggctgttgcaa

SEQ ID NO: 4052964 - DNA, 25 bp, Homo sapien
tgtgcctttctaccaagtgaacaac

SEQ ID NO: 4052965 - DNA, 25 bp, Homo sapien
cgttttacatacaaccgaatacaga

SEQ ID NO: 4052966 - DNA, 25 bp, Homo sapien
tgttcaaaaacgtgtgtggatgcta

SEQ ID NO: 4052967 - DNA, 25 bp, Homo sapien
gggatcttgtctcttgaaaggctta

SEQ ID NO: 4052968 - DNA, 25 bp, Homo sapien
cctccgcccgcgctcggccaccctt

SEQ ID NO: 4052969 - DNA, 25 bp, Homo sapien
cccttctccgtcctccgcccgcgct

SEQ ID NO: 4052970 - DNA, 25 bp, Homo sapien
tcgagattccggccctcgccgcccc

SEQ ID NO: 4052971 - DNA, 25 bp, Homo sapien
ctcgagattccggccctcgccgccc

SEQ ID NO: 4052972 - DNA, 25 bp, Homo sapien
gcgcggccaacgggcgacaaccgaa

SEQ ID NO: 4052973 - DNA, 25 bp, Homo sapien
cgccgcgcggccaacgggcgacaac

SEQ ID NO: 4052974 - DNA, 25 bp, Homo sapien
cgccgccgcgagcactgcctgcgca

SEQ ID NO: 4052975 - DNA, 25 bp, Homo sapien
ccgccgccgcgagcactgcctgcgc

SEQ ID NO: 4052976 - DNA, 25 bp, Homo sapien
ttcaccacccgttggccatgctggt

SEQ ID NO: 4052977 - DNA, 25 bp, Homo sapien
ccaaagtgctgggtgctggcattac

SEQ ID NO: 4052978 - DNA, 25 bp, Homo sapien
gagtttcaccacccgttggccatgc

SEQ ID NO: 4052979 - DNA, 25 bp, Homo sapien
gcgattcctgtgcttcagtctcccg

SEQ ID NO: 4052980 - DNA, 25 bp, Homo sapien
taagcagtgtcttaggcctgaggaa

SEQ ID NO: 4052981 - DNA, 25 bp, Homo sapien
tcttttggcagtcagtccagatggg

SEQ ID NO: 4052982 - DNA, 25 bp, Homo sapien
gaattggctagctgcatcaggtacc

SEQ ID NO: 4052983 - DNA, 25 bp, Homo sapien
tggaccttctttacaggcgggatgg

SEQ ID NO: 4052984 - DNA, 25 bp, Homo sapien
tacagattccctggtttgtgttccc

SEQ ID NO: 4052985 - DNA, 25 bp, Homo sapien
cagaaaagtgattaggccagtattc

SEQ ID NO: 4052986 - DNA, 25 bp, Homo sapien
gaccctcatccggaagtatcattga

SEQ ID NO: 4052987 - DNA, 25 bp, Homo sapien
gccagtattcggaaggtgaccctca

SEQ ID NO: 4052988 - DNA, 25 bp, Homo sapien
gagtctagaaagcacagaccctgtg

SEQ ID NO: 4052989 - DNA, 25 bp, Homo sapien
gatgttgggctcaaaatgcactaca

SEQ ID NO: 4052990 - DNA, 25 bp, Homo sapien
gctgcatggagttaacaagctctct

SEQ ID NO: 4052991 - DNA, 25 bp, Homo sapien
tactgatgagacaggccagaagccg

SEQ ID NO: 4052992 - DNA, 25 bp, Homo sapien
cagacaccactttgccatccactgt

SEQ ID NO: 4052993 - DNA, 25 bp, Homo sapien
aatgcctcagaactttggtgtcgtt

SEQ ID NO: 4052994 - DNA, 25 bp, Homo sapien
cctcagaactttggtgtcgttggtc

SEQ ID NO: 4052995 - DNA, 25 bp, Homo sapien
ttaatgcctcagaactttggtgtcg

SEQ ID NO: 4052996 - DNA, 25 bp, Homo sapien
ttgctcaggggccacgttaatcttc

SEQ ID NO: 4052997 - DNA, 25 bp, Homo sapien
tccttgctcaggggccacgttaatc

SEQ ID NO: 4052998 - DNA, 25 bp, Homo sapien
tcatccttgctcaggggccacgtta

SEQ ID NO: 4052999 - DNA, 25 bp, Homo sapien
catccttgctcaggggccacgttaa

SEQ ID NO: 4053000 - DNA, 25 bp, Homo sapien
ccaccgggtcttgcaggcttgagaa

SEQ ID NO: 4053001 - DNA, 25 bp, Homo sapien
tactattgagcttaagtacagggcc

SEQ ID NO: 4053002 - DNA, 25 bp, Homo sapien
tgcaagaatgaacgtgccaccgggt

SEQ ID NO: 4053003 - DNA, 25 bp, Homo sapien
tgattttgctttccgtgcccgggca

SEQ ID NO: 4053004 - DNA, 25 bp, Homo sapien
cccctagggaagactcggctgagat

SEQ ID NO: 4053005 - DNA, 25 bp, Homo sapien
tcggcccgataagctgacactaaga

SEQ ID NO: 4053006 - DNA, 25 bp, Homo sapien
ttgcaggaaaagttgggcagccgcc

SEQ ID NO: 4053007 - DNA, 25 bp, Homo sapien
gagattgagtaaaaagcagctgcct

SEQ ID NO: 4053008 - DNA, 25 bp, Homo sapien
tcacactttcagggcctccaggggc

SEQ ID NO: 4053009 - DNA, 25 bp, Homo sapien
ggaaaattgcttcaggatatcagtc

SEQ ID NO: 4053010 - DNA, 25 bp, Homo sapien
tggaaaattgcttcaggatatcagt

SEQ ID NO: 4053011 - DNA, 25 bp, Homo sapien
gaaaattgcttcaggatatcagtct

SEQ ID NO: 4053012 - DNA, 25 bp, Homo sapien
gggctagagtttctggccctgtctc

SEQ ID NO: 4053013 - DNA, 25 bp, Homo sapien
aatgaaggggctagagtttctggcc

SEQ ID NO: 4053014 - DNA, 25 bp, Homo sapien
ctctgacttggaggctttctcattg

SEQ ID NO: 4053015 - DNA, 25 bp, Homo sapien
tgttcatgtgcttcctaactttcat

SEQ ID NO: 4053016 - DNA, 25 bp, Homo sapien
tcttgtccattgatccctggatttg

SEQ ID NO: 4053017 - DNA, 25 bp, Homo sapien
tgggcatgacataatggctttttct

SEQ ID NO: 4053018 - DNA, 25 bp, Homo sapien
tctggcatcctgtttagtgggcatg

SEQ ID NO: 4053019 - DNA, 25 bp, Homo sapien
ccttgtaaggcaagaataaaggtct

SEQ ID NO: 4053020 - DNA, 25 bp, Homo sapien
tagtatcagatctgccgtgggaagg

SEQ ID NO: 4053021 - DNA, 25 bp, Homo sapien
taagcatgccggatctggaaaacag

SEQ ID NO: 4053022 - DNA, 25 bp, Homo sapien
ggaagatcatccctctcaaaatgtg

SEQ ID NO: 4053023 - DNA, 25 bp, Homo sapien
tgaggactctggttcgccaaaacac

SEQ ID NO: 4053024 - DNA, 25 bp, Homo sapien
taaagaggtgaagcatattgcctgg

SEQ ID NO: 4053025 - DNA, 25 bp, Homo sapien
gatagcaggaacacgttgatcctac

SEQ ID NO: 4053026 - DNA, 25 bp, Homo sapien
ggctgaactcaacgccatgcttggg

SEQ ID NO: 4053027 - DNA, 25 bp, Homo sapien
gagctacattctcctgatagcagga

SEQ ID NO: 4053028 - DNA, 25 bp, Homo sapien
tttgctgctctatgactgtatgccg

SEQ ID NO: 4053029 - DNA, 25 bp, Homo sapien
tatgccgtggacaagagatgcctgg

SEQ ID NO: 4053030 - DNA, 25 bp, Homo sapien
tgtgactgagaaggatttgctgctc

SEQ ID NO: 4053031 - DNA, 25 bp, Homo sapien
caaaactagatggtggaagacagca

SEQ ID NO: 4053032 - DNA, 25 bp, Homo sapien
tcagggtggagacacatcgggatct

SEQ ID NO: 4053033 - DNA, 25 bp, Homo sapien
ttacatttgctaccaggacaggctc

SEQ ID NO: 4053034 - DNA, 25 bp, Homo sapien
ccaggatacttgttcagggttgcca

SEQ ID NO: 4053035 - DNA, 25 bp, Homo sapien
gacaggctctcgacagggcattgag

SEQ ID NO: 4053036 - DNA, 25 bp, Homo sapien
gaggctccagcagcatattgtaccg

SEQ ID NO: 4053037 - DNA, 25 bp, Homo sapien
tgttaaatggccaagaggtgaggct

SEQ ID NO: 4053038 - DNA, 25 bp, Homo sapien
catctcaagggaaaatggaggctcc

SEQ ID NO: 4053039 - DNA, 25 bp, Homo sapien
gatggcatccgaaatctatacttgg

SEQ ID NO: 4053040 - DNA, 25 bp, Homo sapien
gaagccgattgtatttgtgttgcac

SEQ ID NO: 4053041 - DNA, 25 bp, Homo sapien
tttttatcggccaaagtcactcgta

SEQ ID NO: 4053042 - DNA, 25 bp, Homo sapien
tatgggactgcttgtatgagcaaca

SEQ ID NO: 4053043 - DNA, 25 bp, Homo sapien
cctgcactcttgtccgaagccgatt

SEQ ID NO: 4053044 - DNA, 25 bp, Homo sapien
agagaacagtatacagtatcctttg

SEQ ID NO: 4053045 - DNA, 25 bp, Homo sapien
ccttatatacatggtagacggaata

SEQ ID NO: 4053046 - DNA, 25 bp, Homo sapien
tatcctttgtaagataaatcacaac

SEQ ID NO: 4053047 - DNA, 25 bp, Homo sapien
taaactatttaagcatttcatctgc

SEQ ID NO: 4053048 - DNA, 25 bp, Homo sapien
tgcttttgtgccatcaaggtagagt

SEQ ID NO: 4053049 - DNA, 25 bp, Homo sapien
tgagtcgttgctacagagattatct

SEQ ID NO: 4053050 - DNA, 25 bp, Homo sapien
catacgtgttactagagatgcggcg

SEQ ID NO: 4053051 - DNA, 25 bp, Homo sapien
gagattatctggctggcaaatccta

SEQ ID NO: 4053052 - DNA, 25 bp, Homo sapien
gccccagcacactcttaggtgtatt

SEQ ID NO: 4053053 - DNA, 25 bp, Homo sapien
tagacccaagcatgaagctacagag

SEQ ID NO: 4053054 - DNA, 25 bp, Homo sapien
tgtattactagaatttccaaaagga

SEQ ID NO: 4053055 - DNA, 25 bp, Homo sapien
cagtgctgctccttatgggacaaag

SEQ ID NO: 4053056 - DNA, 25 bp, Homo sapien
ccttgagccctgacctgagatatta

SEQ ID NO: 4053057 - DNA, 25 bp, Homo sapien
gatattaggtcaggtttccacttgc

SEQ ID NO: 4053058 - DNA, 25 bp, Homo sapien
ttgaggcagcagaatagaaagtccc

SEQ ID NO: 4053059 - DNA, 25 bp, Homo sapien
gaaggcctttctagccgatgttgaa

SEQ ID NO: 4053060 - DNA, 25 bp, Homo sapien
gtttaatctcacttgggaccctgcc

SEQ ID NO: 4053061 - DNA, 25 bp, Homo sapien
ggactctggttcttggagccacaaa

SEQ ID NO: 4053062 - DNA, 25 bp, Homo sapien
ccatcaggaggaggtgagtcttccc

SEQ ID NO: 4053063 - DNA, 25 bp, Homo sapien
gacttcaattcccaagaggtgcctg

SEQ ID NO: 4053064 - DNA, 25 bp, Homo sapien
acccagcccgagttctgaaggagcc

SEQ ID NO: 4053065 - DNA, 25 bp, Homo sapien
tgcaaatcatgagtcgctcggacca

SEQ ID NO: 4053066 - DNA, 25 bp, Homo sapien
gatgattgatgacctcctgactcca

SEQ ID NO: 4053067 - DNA, 25 bp, Homo sapien
gggtcgagcccctctgacactgagg

SEQ ID NO: 4053068 - DNA, 25 bp, Homo sapien
tcaagactgtgacgcagttgcaaag

SEQ ID NO: 4053069 - DNA, 25 bp, Homo sapien
tgtgcagctaagaaggctcctggcc

SEQ ID NO: 4053070 - DNA, 25 bp, Homo sapien
tgccatcctggcaagggtctgccct

SEQ ID NO: 4053071 - DNA, 25 bp, Homo sapien
tatgacgtcaatccatgggtttggc

SEQ ID NO: 4053072 - DNA, 25 bp, Homo sapien
tgcctcgagagggaagagggtccct

SEQ ID NO: 4053073 - DNA, 25 bp, Homo sapien
cctcagctgcgcctgttgtgtgctg

SEQ ID NO: 4053074 - DNA, 25 bp, Homo sapien
catctgagctgcctcgagagggaag

SEQ ID NO: 4053075 - DNA, 25 bp, Homo sapien
ggccttgaaggcaaacctcttccca

SEQ ID NO: 4053076 - DNA, 25 bp, Homo sapien
tgagagcagattggctgatgcccct

SEQ ID NO: 4053077 - DNA, 25 bp, Homo sapien
gaccgagtgacataagccattccca

SEQ ID NO: 4053078 - DNA, 25 bp, Homo sapien
ttagatcagggtaaggcagtcaggc

SEQ ID NO: 4053079 - DNA, 25 bp, Homo sapien
tgttcggcctacagatcagagactg

SEQ ID NO: 4053080 - DNA, 25 bp, Homo sapien
tgtcagcggccactaagtagaggct

SEQ ID NO: 4053081 - DNA, 25 bp, Homo sapien
taaattaggtaatgttgggcctgcg

SEQ ID NO: 4053082 - DNA, 25 bp, Homo sapien
aatgaagcttatagcctgcaaaggg

SEQ ID NO: 4053083 - DNA, 25 bp, Homo sapien
ggttacccctcaaccatagcagctg

SEQ ID NO: 4053084 - DNA, 25 bp, Homo sapien
ttcaaagtctggctgcacctagagc

SEQ ID NO: 4053085 - DNA, 25 bp, Homo sapien
ggtccatccctgtgctctagttaga

SEQ ID NO: 4053086 - DNA, 25 bp, Homo sapien
gttaacaggaaagggctcagtgcac

SEQ ID NO: 4053087 - DNA, 25 bp, Homo sapien
tctagttagagcgtgaagacacctg

SEQ ID NO: 4053088 - DNA, 25 bp, Homo sapien
gccaagtaagatttgcccagctcaa

SEQ ID NO: 4053089 - DNA, 25 bp, Homo sapien
tatgcgagccatccaagttgatgcc

SEQ ID NO: 4053090 - DNA, 25 bp, Homo sapien
tgcgtcttggtatccggaatcctca

SEQ ID NO: 4053091 - DNA, 25 bp, Homo sapien
gaggaactcgtgtctactgcagacg

SEQ ID NO: 4053092 - DNA, 25 bp, Homo sapien
cctgcaggtggtccatctcgtgctg

SEQ ID NO: 4053093 - DNA, 25 bp, Homo sapien
tttgtcaataaacaggcagccctgc

SEQ ID NO: 4053094 - DNA, 25 bp, Homo sapien
catctcgtgctggatgatgcgggct

SEQ ID NO: 4053095 - DNA, 25 bp, Homo sapien
cgtttgtgaacgtcctgctgtccat

SEQ ID NO: 4053096 - DNA, 25 bp, Homo sapien
tttctgaccatcttgaaccgacggg

SEQ ID NO: 4053097 - DNA, 25 bp, Homo sapien
aaccgacgggcttgctgtgcaggaa

SEQ ID NO: 4053098 - DNA, 25 bp, Homo sapien
tctgcagcttgagaccccacttgtt

SEQ ID NO: 4053099 - DNA, 25 bp, Homo sapien
tcccaactcctaacagaggttctgc

SEQ ID NO: 4053100 - DNA, 25 bp, Homo sapien
tcgcccctgcgtcctatctgagcgg

SEQ ID NO: 4053101 - DNA, 25 bp, Homo sapien
tgcgtcctatctgagcgggctctac

SEQ ID NO: 4053102 - DNA, 25 bp, Homo sapien
taacagcggaactaggggacctctc

SEQ ID NO: 4053103 - DNA, 25 bp, Homo sapien
tcaggtaacagcggaactaggggac

SEQ ID NO: 4053104 - DNA, 25 bp, Homo sapien
agcttctatccgtcctgaggcctct

SEQ ID NO: 4053105 - DNA, 25 bp, Homo sapien
gagcttctatccgtcctgaggcctc

SEQ ID NO: 4053106 - DNA, 25 bp, Homo sapien
aggcctctccgctcccgcatcccac

SEQ ID NO: 4053107 - DNA, 25 bp, Homo sapien
cctgaggcctctccgctcccgcatc

SEQ ID NO: 4053108 - DNA, 25 bp, Homo sapien
cgctcctgcgggaggtccggcgtat

SEQ ID NO: 4053109 - DNA, 25 bp, Homo sapien
cggagtcgggcagaagagacgcgcg

SEQ ID NO: 4053110 - DNA, 25 bp, Homo sapien
tatgaaccgcgaccacttctgcgct

SEQ ID NO: 4053111 - DNA, 25 bp, Homo sapien
acttctgcgctctcgcggagtcggg

SEQ ID NO: 4053112 - DNA, 25 bp, Homo sapien
acttggcacacgtgcgagaacggcg

SEQ ID NO: 4053113 - DNA, 25 bp, Homo sapien
gacgcctcaggtggcgccaatagga

SEQ ID NO: 4053114 - DNA, 25 bp, Homo sapien
gcggctgtcaagcactcgcaggctg

SEQ ID NO: 4053115 - DNA, 25 bp, Homo sapien
tctcgcagccctcgggaaaggtgac

SEQ ID NO: 4053116 - DNA, 25 bp, Homo sapien
ctcgacgccgtccggggcggccgtg

SEQ ID NO: 4053117 - DNA, 25 bp, Homo sapien
ctgcaagcccggacaccgacggctg

SEQ ID NO: 4053118 - DNA, 25 bp, Homo sapien
tgcaagcccggacaccgacggctgc

SEQ ID NO: 4053119 - DNA, 25 bp, Homo sapien
gtggccaaagactcagcgcgcccca

SEQ ID NO: 4053120 - DNA, 25 bp, Homo sapien
cacggccgcccacagtggccaaaga

SEQ ID NO: 4053121 - DNA, 25 bp, Homo sapien
gaccttccagggcgaggcagtcctg

SEQ ID NO: 4053122 - DNA, 25 bp, Homo sapien
gcgttctggaggcaggggacgccgg

SEQ ID NO: 4053123 - DNA, 25 bp, Homo sapien
cgcgttctggaggcaggggacgccg

SEQ ID NO: 4053124 - DNA, 25 bp, Homo sapien
cccagcgcctggtcatccagggtga

SEQ ID NO: 4053125 - DNA, 25 bp, Homo sapien
tccagggtgaaaagcgtctctctct

SEQ ID NO: 4053126 - DNA, 25 bp, Homo sapien
tgaatggcgccgatgttcacatgcc

SEQ ID NO: 4053127 - DNA, 25 bp, Homo sapien
tctctttggcaggataaaggcgagg

SEQ ID NO: 4053128 - DNA, 25 bp, Homo sapien
ttggagagctgagtgggaggaatgc

SEQ ID NO: 4053129 - DNA, 25 bp, Homo sapien
aaacactgacttacacaaatggatg

SEQ ID NO: 4053130 - DNA, 25 bp, Homo sapien
cagtaaggcagtttacagaattttc

SEQ ID NO: 4053131 - DNA, 25 bp, Homo sapien
agtatgtgaattacacatcagtaag

SEQ ID NO: 4053132 - DNA, 25 bp, Homo sapien
aaaaaacactgacttacacaaatgg

SEQ ID NO: 4053133 - DNA, 25 bp, Homo sapien
gacttggagacagcgatttaaatac

SEQ ID NO: 4053134 - DNA, 25 bp, Homo sapien
ctgtgctatctgagctggtggaaaa

SEQ ID NO: 4053135 - DNA, 25 bp, Homo sapien
ggcagcctcttcagcgcgatggaag

SEQ ID NO: 4053136 - DNA, 25 bp, Homo sapien
atacggaacaaggtcttccaggaag

SEQ ID NO: 4053137 - DNA, 25 bp, Homo sapien
tgcaattgcaaagaactgacccctg

SEQ ID NO: 4053138 - DNA, 25 bp, Homo sapien
tgtcctaggtcccatgaagggcaac

SEQ ID NO: 4053139 - DNA, 25 bp, Homo sapien
gcatgagtctgaaatggagccccaa

SEQ ID NO: 4053140 - DNA, 25 bp, Homo sapien
tgatggcaaccctgtaagaccctga

SEQ ID NO: 4053141 - DNA, 25 bp, Homo sapien
gaaatctaggagcaccatgggtggc

SEQ ID NO: 4053142 - DNA, 25 bp, Homo sapien
cattgaaggcaaccagaatattgtt

SEQ ID NO: 4053143 - DNA, 25 bp, Homo sapien
gcagcagaggcgcagatcattgaag

SEQ ID NO: 4053144 - DNA, 25 bp, Homo sapien
caagggcatcttccaaggccccagt

SEQ ID NO: 4053145 - DNA, 25 bp, Homo sapien
gaaggacagcccaaagtacatgcac

SEQ ID NO: 4053146 - DNA, 25 bp, Homo sapien
tgtgagaccttctgtagcacccagc

SEQ ID NO: 4053147 - DNA, 25 bp, Homo sapien
atcaaagagatggacacgggaggcc

SEQ ID NO: 4053148 - DNA, 25 bp, Homo sapien
gagccaagcatctcgggcctgaaga

SEQ ID NO: 4053149 - DNA, 25 bp, Homo sapien
tagggtcaggctattcatccggcgg

SEQ ID NO: 4053150 - DNA, 25 bp, Homo sapien
tcataataactgttccggacacagg

SEQ ID NO: 4053151 - DNA, 25 bp, Homo sapien
catccggcggttggagctgatctcc

SEQ ID NO: 4053152 - DNA, 25 bp, Homo sapien
gtcggcgtacgtaggctgcaagctc

SEQ ID NO: 4053153 - DNA, 25 bp, Homo sapien
tggattaataaagcgctcagcagag

SEQ ID NO: 4053154 - DNA, 25 bp, Homo sapien
gctttatgtgttagttatttctacc

SEQ ID NO: 4053155 - DNA, 25 bp, Homo sapien
taccatcgtaaatgtcagcttttac

SEQ ID NO: 4053156 - DNA, 25 bp, Homo sapien
cctggaacgtggtaaacgctttatg

SEQ ID NO: 4053157 - DNA, 25 bp, Homo sapien
cgccgcggatgaaggtcttgtagtt

SEQ ID NO: 4053158 - DNA, 25 bp, Homo sapien
ccgtggctaccgatgggatagtcgc

SEQ ID NO: 4053159 - DNA, 25 bp, Homo sapien
ccacgtcgccaaacaggcggtggat

SEQ ID NO: 4053160 - DNA, 25 bp, Homo sapien
tgtagttagcgaaggccaagtcgcg

SEQ ID NO: 4053161 - DNA, 25 bp, Homo sapien
cacaaggggcgctgactccgaactt

SEQ ID NO: 4053162 - DNA, 25 bp, Homo sapien
ttcccagcaacaacgtcacttccct

SEQ ID NO: 4053163 - DNA, 25 bp, Homo sapien
ccttccggaccacaaggggcgctga

SEQ ID NO: 4053164 - DNA, 25 bp, Homo sapien
cgtcacttcccttccggaccacaag

SEQ ID NO: 4053165 - DNA, 25 bp, Homo sapien
tatttttcttggatgggatgacgct

SEQ ID NO: 4053166 - DNA, 25 bp, Homo sapien
ttgactggattggactaaaagcact

SEQ ID NO: 4053167 - DNA, 25 bp, Homo sapien
cagaggccacgacataaaaattcag

SEQ ID NO: 4053168 - DNA, 25 bp, Homo sapien
gatgacgctaggctggaaagttttt

SEQ ID NO: 4053169 - DNA, 25 bp, Homo sapien
aagaaaacagccagggtgctatagt

SEQ ID NO: 4053170 - DNA, 25 bp, Homo sapien
caaagctgattcgactaagccccag

SEQ ID NO: 4053171 - DNA, 25 bp, Homo sapien
agctgattcgactaagccccagaag

SEQ ID NO: 4053172 - DNA, 25 bp, Homo sapien
ttacaaagctgattcgactaagccc

SEQ ID NO: 4053173 - DNA, 25 bp, Homo sapien
ctttgtatctgtagttgttggaaca

SEQ ID NO: 4053174 - DNA, 25 bp, Homo sapien
gaacattgaagagacgcttcaagaa

SEQ ID NO: 4053175 - DNA, 25 bp, Homo sapien
tgtagttgttggaacattgaagaga

SEQ ID NO: 4053176 - DNA, 25 bp, Homo sapien
agagacgcttcaagaaatacagttg

SEQ ID NO: 4053177 - DNA, 25 bp, Homo sapien
gtcagccattttcctcatccgggca

SEQ ID NO: 4053178 - DNA, 25 bp, Homo sapien
tgttctgcaccttttgtgtgccgtc

SEQ ID NO: 4053179 - DNA, 25 bp, Homo sapien
cacgtagttatagtttgattggata

SEQ ID NO: 4053180 - DNA, 25 bp, Homo sapien
gcaaagttgtagtatcgccacatgt

SEQ ID NO: 4053181 - DNA, 25 bp, Homo sapien
tagaagaccccaaagttgaggtaca

SEQ ID NO: 4053182 - DNA, 25 bp, Homo sapien
cccctcatagaagaccccaaagttg

SEQ ID NO: 4053183 - DNA, 25 bp, Homo sapien
ctcaattgcatccagagtatcattc

SEQ ID NO: 4053184 - DNA, 25 bp, Homo sapien
ttgcatccagagtatcattcagttg

SEQ ID NO: 4053185 - DNA, 25 bp, Homo sapien
cttgcacagaaccgaagtgattatg

SEQ ID NO: 4053186 - DNA, 25 bp, Homo sapien
tgattacttagacaaagctgataaa

SEQ ID NO: 4053187 - DNA, 25 bp, Homo sapien
gattacttagacaaagctgataaaa

SEQ ID NO: 4053188 - DNA, 25 bp, Homo sapien
ttacttagacaaagctgataaaaac

SEQ ID NO: 4053189 - DNA, 25 bp, Homo sapien
ctgattacttagacaaagctgataa

SEQ ID NO: 4053190 - DNA, 25 bp, Homo sapien
tccatactgggtagtggcaaacaat

SEQ ID NO: 4053191 - DNA, 25 bp, Homo sapien
gctagggacaccatcttgaacttga

SEQ ID NO: 4053192 - DNA, 25 bp, Homo sapien
tttttgacatggaagacacggacct

SEQ ID NO: 4053193 - DNA, 25 bp, Homo sapien
gatgcatagtgcatgaaagcagctc

SEQ ID NO: 4053194 - DNA, 25 bp, Homo sapien
gagaagttaatctggccccgaacac

SEQ ID NO: 4053195 - DNA, 25 bp, Homo sapien
tccctgtgggttatgtgccgtggca

SEQ ID NO: 4053196 - DNA, 25 bp, Homo sapien
cccgaacaccctgggaggtgtctat

SEQ ID NO: 4053197 - DNA, 25 bp, Homo sapien
gcaacatgccggtcatgtgacatcc

SEQ ID NO: 4053198 - DNA, 25 bp, Homo sapien
cagtctccaaagcaccattatccaa

SEQ ID NO: 4053199 - DNA, 25 bp, Homo sapien
gttcaccatccttggacagcatgat

SEQ ID NO: 4053200 - DNA, 25 bp, Homo sapien
aaacttgacctagtgaatctctgac

SEQ ID NO: 4053201 - DNA, 25 bp, Homo sapien
gacttgccagaattgctcctaaagg

SEQ ID NO: 4053202 - DNA, 25 bp, Homo sapien
aaatagaagtatccagtctggtggg

SEQ ID NO: 4053203 - DNA, 25 bp, Homo sapien
gtccccagagccacttagaggttct

SEQ ID NO: 4053204 - DNA, 25 bp, Homo sapien
tatcgatcagctccacggaagagtg

SEQ ID NO: 4053205 - DNA, 25 bp, Homo sapien
aaaagcattccgtgcctcctggagg

SEQ ID NO: 4053206 - DNA, 25 bp, Homo sapien
gtcactagattcagaacgaccagcc

SEQ ID NO: 4053207 - DNA, 25 bp, Homo sapien
actagattcagaacgaccagcccag

SEQ ID NO: 4053208 - DNA, 25 bp, Homo sapien
ctggcagacgtcactagattcagaa

SEQ ID NO: 4053209 - DNA, 25 bp, Homo sapien
gcagacgtcactagattcagaacga

SEQ ID NO: 4053210 - DNA, 25 bp, Homo sapien
tggagcctcctctgcaggtgaactg

SEQ ID NO: 4053211 - DNA, 25 bp, Homo sapien
tctggagcctcctctgcaggtgaac

SEQ ID NO: 4053212 - DNA, 25 bp, Homo sapien
gagcctcctctgcaggtgaactgct

SEQ ID NO: 4053213 - DNA, 25 bp, Homo sapien
gccgctttctggagcctcctctgca

SEQ ID NO: 4053214 - DNA, 25 bp, Homo sapien
aggcactgagctaagatttacctgc

SEQ ID NO: 4053215 - DNA, 25 bp, Homo sapien
ggacagtgtttctcattctcaagct

SEQ ID NO: 4053216 - DNA, 25 bp, Homo sapien
ccctgcaagggaggtattgtgagct

SEQ ID NO: 4053217 - DNA, 25 bp, Homo sapien
tgagttctgacactgcctaaccatt

SEQ ID NO: 4053218 - DNA, 25 bp, Homo sapien
tctacagaagctgtaagcatagttt

SEQ ID NO: 4053219 - DNA, 25 bp, Homo sapien
tagttctacagaagctgtaagcata

SEQ ID NO: 4053220 - DNA, 25 bp, Homo sapien
aacactgaattatgtgaaaaaatat

SEQ ID NO: 4053221 - DNA, 25 bp, Homo sapien
cagaagctgtaagcatagttttatc

SEQ ID NO: 4053222 - DNA, 25 bp, Homo sapien
cacgtcgaaggaggttgcccaaaat

SEQ ID NO: 4053223 - DNA, 25 bp, Homo sapien
tgtccgggagagacagcaagcacaa

SEQ ID NO: 4053224 - DNA, 25 bp, Homo sapien
aacaggtcatggagtcacaagtggc

SEQ ID NO: 4053225 - DNA, 25 bp, Homo sapien
acaggtctagggttgatgtcacgac

SEQ ID NO: 4053226 - DNA, 25 bp, Homo sapien
actcgctttcttctacagtccactt

SEQ ID NO: 4053227 - DNA, 25 bp, Homo sapien
cgccagcgatccttaatcatcacag

SEQ ID NO: 4053228 - DNA, 25 bp, Homo sapien
cagttcatgccaagtcttttcatgg

SEQ ID NO: 4053229 - DNA, 25 bp, Homo sapien
cagctgttcggttaacaaatgggta

SEQ ID NO: 4053230 - DNA, 25 bp, Homo sapien
cttttttgttatattggttgtactg

SEQ ID NO: 4053231 - DNA, 25 bp, Homo sapien
tttttgttatattggttgtactgtc

SEQ ID NO: 4053232 - DNA, 25 bp, Homo sapien
tgcttttttgttatattggttgtac

SEQ ID NO: 4053233 - DNA, 25 bp, Homo sapien
tagttcggagacaagcagcttctgg

SEQ ID NO: 4053234 - DNA, 25 bp, Homo sapien
tctggaatattaacatgacagtaac

SEQ ID NO: 4053235 - DNA, 25 bp, Homo sapien
gcatctgtacttcagcaagcatcaa

SEQ ID NO: 4053236 - DNA, 25 bp, Homo sapien
tgaactttttctagttcggagacaa

SEQ ID NO: 4053237 - DNA, 25 bp, Homo sapien
tcttcaaccccattagagctgttcc

SEQ ID NO: 4053238 - DNA, 25 bp, Homo sapien
accccattagagctgttccacttgc

SEQ ID NO: 4053239 - DNA, 25 bp, Homo sapien
aaccccattagagctgttccacttg

SEQ ID NO: 4053240 - DNA, 25 bp, Homo sapien
tcaaccccattagagctgttccact

SEQ ID NO: 4053241 - DNA, 25 bp, Homo sapien
cgttgtgaccacaatcgaggttcgc

SEQ ID NO: 4053242 - DNA, 25 bp, Homo sapien
tgtactccttcctgtcccgttgtga

SEQ ID NO: 4053243 - DNA, 25 bp, Homo sapien
tgtcccgttgtgaccacaatcgagg

SEQ ID NO: 4053244 - DNA, 25 bp, Homo sapien
acaatcgaggttcgcctgcatgcac

SEQ ID NO: 4053245 - DNA, 25 bp, Homo sapien
tcttgtgttaatgactattcataaa

SEQ ID NO: 4053246 - DNA, 25 bp, Homo sapien
caggatattcttgtgttaatgacta

SEQ ID NO: 4053247 - DNA, 25 bp, Homo sapien
ccttctcaggatattcttgtgttaa

SEQ ID NO: 4053248 - DNA, 25 bp, Homo sapien
gatattcttgtgttaatgactattc

SEQ ID NO: 4053249 - DNA, 25 bp, Homo sapien
tggtggtgatttcgcaagacctctg

SEQ ID NO: 4053250 - DNA, 25 bp, Homo sapien
tgttggcaagctacagtctggctgc

SEQ ID NO: 4053251 - DNA, 25 bp, Homo sapien
gctgctgcggcttgtgtaccatgaa

SEQ ID NO: 4053252 - DNA, 25 bp, Homo sapien
tggccgctcctcctaactgtaatgg

SEQ ID NO: 4053253 - DNA, 25 bp, Homo sapien
gtaaacacatgctatgtgcaaggtg

SEQ ID NO: 4053254 - DNA, 25 bp, Homo sapien
aataaatacctagtaaacacatgct

SEQ ID NO: 4053255 - DNA, 25 bp, Homo sapien
ggtgtcactccttaacatgcaagaa

SEQ ID NO: 4053256 - DNA, 25 bp, Homo sapien
tttgggtgtcactccttaacatgca

SEQ ID NO: 4053257 - DNA, 25 bp, Homo sapien
tgctccctggcagcggtctccagtc

SEQ ID NO: 4053258 - DNA, 25 bp, Homo sapien
ccctggcagcggtctccagtctcca

SEQ ID NO: 4053259 - DNA, 25 bp, Homo sapien
ctgctccctggcagcggtctccagt

SEQ ID NO: 4053260 - DNA, 25 bp, Homo sapien
gctccctggcagcggtctccagtct

SEQ ID NO: 4053261 - DNA, 25 bp, Homo sapien
agcttttcttcccataagtggccag

SEQ ID NO: 4053262 - DNA, 25 bp, Homo sapien
aaatctgagccacctaaaaccttgc

SEQ ID NO: 4053263 - DNA, 25 bp, Homo sapien
gggcacctcacacatacttctttag

SEQ ID NO: 4053264 - DNA, 25 bp, Homo sapien
tatgtaaggagctcccactgcgtag

SEQ ID NO: 4053265 - DNA, 25 bp, Homo sapien
taccaatgaacagaaagcagcccta

SEQ ID NO: 4053266 - DNA, 25 bp, Homo sapien
tactcaacaaactaccaatgaacag

SEQ ID NO: 4053267 - DNA, 25 bp, Homo sapien
ctctgctgtggctactcaacaaact

SEQ ID NO: 4053268 - DNA, 25 bp, Homo sapien
gcagccctagataatacattgatga

SEQ ID NO: 4053269 - DNA, 25 bp, Homo sapien
tgttcccgggagcaatacctatagt

SEQ ID NO: 4053270 - DNA, 25 bp, Homo sapien
tacaatgcatgccagaccacaggtc

SEQ ID NO: 4053271 - DNA, 25 bp, Homo sapien
tctagcagtctgagcaagccttggt

SEQ ID NO: 4053272 - DNA, 25 bp, Homo sapien
cttcagaaccggcagggatggctac

SEQ ID NO: 4053273 - DNA, 25 bp, Homo sapien
aaatttctacaaagaaggtcttcat

SEQ ID NO: 4053274 - DNA, 25 bp, Homo sapien
cagccccaaaatttctacaaagaag

SEQ ID NO: 4053275 - DNA, 25 bp, Homo sapien
aatttctacaaagaaggtcttcata

SEQ ID NO: 4053276 - DNA, 25 bp, Homo sapien
atttctacaaagaaggtcttcatac

SEQ ID NO: 4053277 - DNA, 25 bp, Homo sapien
tattgtcatgcgcttgttcttgggc

SEQ ID NO: 4053278 - DNA, 25 bp, Homo sapien
cagaatcctgtgcaccagacagagt

SEQ ID NO: 4053279 - DNA, 25 bp, Homo sapien
tgcgctgggctcagtactctggctg

SEQ ID NO: 4053280 - DNA, 25 bp, Homo sapien
gagcttgagtaggaagaaccagatc

SEQ ID NO: 4053281 - DNA, 25 bp, Homo sapien
gtggcttttccacaggccctggtgc

SEQ ID NO: 4053282 - DNA, 25 bp, Homo sapien
aggcagcggactcagatttcaaagc

SEQ ID NO: 4053283 - DNA, 25 bp, Homo sapien
ttgcgggttctctgggtggcttttc

SEQ ID NO: 4053284 - DNA, 25 bp, Homo sapien
ttccttccctgtacttgaggcagcg

SEQ ID NO: 4053285 - DNA, 25 bp, Homo sapien
tttttttgagagggagtcttgctct

SEQ ID NO: 4053286 - DNA, 25 bp, Homo sapien
ttcaaacttaagataactaatacat

SEQ ID NO: 4053287 - DNA, 25 bp, Homo sapien
ccaggctgcagcacagtggtgcaat

SEQ ID NO: 4053288 - DNA, 25 bp, Homo sapien
gtcgcccaggctgcagcacagtggt

SEQ ID NO: 4053289 - DNA, 25 bp, Homo sapien
cacatcaactcttttcacttcagat

SEQ ID NO: 4053290 - DNA, 25 bp, Homo sapien
acatcaactcttttcacttcagata

SEQ ID NO: 4053291 - DNA, 25 bp, Homo sapien
ttatgggagaagggccaaggcgcac

SEQ ID NO: 4053292 - DNA, 25 bp, Homo sapien
catggttatgggagaagggccaagg

SEQ ID NO: 4053293 - DNA, 25 bp, Homo sapien
gttatgggagaagggccaaggcgca

SEQ ID NO: 4053294 - DNA, 25 bp, Homo sapien
tggttatgggagaagggccaaggcg

SEQ ID NO: 4053295 - DNA, 25 bp, Homo sapien
tgctggaaggtctcatatgaaaagt

SEQ ID NO: 4053296 - DNA, 25 bp, Homo sapien
taatattcaggagatcatttctcag

SEQ ID NO: 4053297 - DNA, 25 bp, Homo sapien
aagttctggataacaggatgggcca

SEQ ID NO: 4053298 - DNA, 25 bp, Homo sapien
cgtcatccaggtggctctccaggaa

SEQ ID NO: 4053299 - DNA, 25 bp, Homo sapien
tgagttgtggggtccttggacatat

SEQ ID NO: 4053300 - DNA, 25 bp, Homo sapien
gagttgtggggtccttggacatatg

SEQ ID NO: 4053301 - DNA, 25 bp, Homo sapien
ctgagttgtggggtccttggacata

SEQ ID NO: 4053302 - DNA, 25 bp, Homo sapien
tccattctggaaaggcctaaggcca

SEQ ID NO: 4053303 - DNA, 25 bp, Homo sapien
gcacctagggaactactgaagccaa

SEQ ID NO: 4053304 - DNA, 25 bp, Homo sapien
taaccaatttcaatagggcctcctg

SEQ ID NO: 4053305 - DNA, 25 bp, Homo sapien
gcaacttcaattaaagcacctaggg

SEQ ID NO: 4053306 - DNA, 25 bp, Homo sapien
tttgtagacaccttttatcaggttg

SEQ ID NO: 4053307 - DNA, 25 bp, Homo sapien
tcttccggtatgatgttgaatacaa

SEQ ID NO: 4053308 - DNA, 25 bp, Homo sapien
tattgcactggttaggtcttccggt

SEQ ID NO: 4053309 - DNA, 25 bp, Homo sapien
agctgtgggctttttgtagacacct

SEQ ID NO: 4053310 - DNA, 25 bp, Homo sapien
ttaatatctggtttaatatagacga

SEQ ID NO: 4053311 - DNA, 25 bp, Homo sapien
caataaactaattacaaggtaacat

SEQ ID NO: 4053312 - DNA, 25 bp, Homo sapien
gtttaatgagaagggtgacatttgt

SEQ ID NO: 4053313 - DNA, 25 bp, Homo sapien
tccttatgaaaaattacggcattta

SEQ ID NO: 4053314 - DNA, 25 bp, Homo sapien
tctttcatccatggatgacttcata

SEQ ID NO: 4053315 - DNA, 25 bp, Homo sapien
tctatcttgtagtttaaatagatct

SEQ ID NO: 4053316 - DNA, 25 bp, Homo sapien
ctatcttgtagtttaaatagatctt

SEQ ID NO: 4053317 - DNA, 25 bp, Homo sapien
gtctatcttgtagtttaaatagatc

SEQ ID NO: 4053318 - DNA, 25 bp, Homo sapien
catgcactgagggttctaacttaac

SEQ ID NO: 4053319 - DNA, 25 bp, Homo sapien
tcatttaacaactaggagatcaagg

SEQ ID NO: 4053320 - DNA, 25 bp, Homo sapien
tactaccatcttgatcacgctaagg

SEQ ID NO: 4053321 - DNA, 25 bp, Homo sapien
ggctcactgaacctaggcgtctgta

SEQ ID NO: 4053322 - DNA, 25 bp, Homo sapien
tagggtacccaagtacaatgtacac

SEQ ID NO: 4053323 - DNA, 25 bp, Homo sapien
tttctactgtttgaagctacctgag

SEQ ID NO: 4053324 - DNA, 25 bp, Homo sapien
caaaagtagtatctgcccaaggtcc

SEQ ID NO: 4053325 - DNA, 25 bp, Homo sapien
atgtacacagccaagagacaggttt

SEQ ID NO: 4053326 - DNA, 25 bp, Homo sapien
agcttccttgaccagttttctactg

SEQ ID NO: 4053327 - DNA, 25 bp, Homo sapien
ctactggattcgaccactgcttctg

SEQ ID NO: 4053328 - DNA, 25 bp, Homo sapien
aattccgttttaatcatctccagca

SEQ ID NO: 4053329 - DNA, 25 bp, Homo sapien
gctgattccagtggtgtgagctcag

SEQ ID NO: 4053330 - DNA, 25 bp, Homo sapien
cagcaatcgggacacggtgtgctcc

SEQ ID NO: 4053331 - DNA, 25 bp, Homo sapien
acacggtgtgctccttccccaaggg

SEQ ID NO: 4053332 - DNA, 25 bp, Homo sapien
gacagacactgcataacccgcagca

SEQ ID NO: 4053333 - DNA, 25 bp, Homo sapien
cttcaatccgcgacagacactgcat

SEQ ID NO: 4053334 - DNA, 25 bp, Homo sapien
gctgggcgacccccagtcccgactc

SEQ ID NO: 4053335 - DNA, 25 bp, Homo sapien
tggctgggcgacccccagtcccgac

SEQ ID NO: 4053336 - DNA, 25 bp, Homo sapien
gagcacccagcgattgactgcctct

SEQ ID NO: 4053337 - DNA, 25 bp, Homo sapien
gcgcctcgtggaagtagaacttgag

SEQ ID NO: 4053338 - DNA, 25 bp, Homo sapien
gtcccggatctgtctgaagtccccg

SEQ ID NO: 4053339 - DNA, 25 bp, Homo sapien
atgtcccggatctgtctgaagtccc

SEQ ID NO: 4053340 - DNA, 25 bp, Homo sapien
ccgctgccgtcgctactcccgcctc

SEQ ID NO: 4053341 - DNA, 25 bp, Homo sapien
cccgcccgctactgcgggacgcccg

SEQ ID NO: 4053342 - DNA, 25 bp, Homo sapien
gctactgcgggacgcccgcctgcca

SEQ ID NO: 4053343 - DNA, 25 bp, Homo sapien
cgctgccgtcgctactcccgcctcc

SEQ ID NO: 4053344 - DNA, 25 bp, Homo sapien
gccgggccgcttcctcggctgtgac

SEQ ID NO: 4053345 - DNA, 25 bp, Homo sapien
ccggccgggccgcttcctcggctgt

SEQ ID NO: 4053346 - DNA, 25 bp, Homo sapien
cggccgggccgcttcctcggctgtg

SEQ ID NO: 4053347 - DNA, 25 bp, Homo sapien
ggccgggccgcttcctcggctgtga

SEQ ID NO: 4053348 - DNA, 25 bp, Homo sapien
ccatgatagaaacagcgttccgagc

SEQ ID NO: 4053349 - DNA, 25 bp, Homo sapien
ggctcccgcggccatgatagaaaca

SEQ ID NO: 4053350 - DNA, 25 bp, Homo sapien
gatagaaacagcgttccgagccgcc

SEQ ID NO: 4053351 - DNA, 25 bp, Homo sapien
cggctcccgcggccatgatagaaac

SEQ ID NO: 4053352 - DNA, 25 bp, Homo sapien
taatcacaggaagggtttcacatga

SEQ ID NO: 4053353 - DNA, 25 bp, Homo sapien
tcagcttctgagtcttggcatgagg

SEQ ID NO: 4053354 - DNA, 25 bp, Homo sapien
tcttctaaaagcgactgacaactca

SEQ ID NO: 4053355 - DNA, 25 bp, Homo sapien
gcatgagggcgtgtgaattcttcca

SEQ ID NO: 4053356 - DNA, 25 bp, Homo sapien
gcttctggaagccttccctgttgag

SEQ ID NO: 4053357 - DNA, 25 bp, Homo sapien
gagttttttcactttctcactgtgt

SEQ ID NO: 4053358 - DNA, 25 bp, Homo sapien
ctggaagccttccctgttgagtttt

SEQ ID NO: 4053359 - DNA, 25 bp, Homo sapien
ttctggaagccttccctgttgagtt

SEQ ID NO: 4053360 - DNA, 25 bp, Homo sapien
cctgaaatgattatctcttgacata

SEQ ID NO: 4053361 - DNA, 25 bp, Homo sapien
tcagaatgggattgtccaaaacagt

SEQ ID NO: 4053362 - DNA, 25 bp, Homo sapien
gatgcccatatgtgactcaagactg

SEQ ID NO: 4053363 - DNA, 25 bp, Homo sapien
ctatgcagctcatatcagaatggga

SEQ ID NO: 4053364 - DNA, 25 bp, Homo sapien
agaatttgattctgggaacgtatag

SEQ ID NO: 4053365 - DNA, 25 bp, Homo sapien
caagaatttgattctgggaacgtat

SEQ ID NO: 4053366 - DNA, 25 bp, Homo sapien
ccaagaatttgattctgggaacgta

SEQ ID NO: 4053367 - DNA, 25 bp, Homo sapien
ttccaagaatttgattctgggaacg

SEQ ID NO: 4053368 - DNA, 25 bp, Homo sapien
cagagttgggccattggtgtgtaac

SEQ ID NO: 4053369 - DNA, 25 bp, Homo sapien
tggtaccagaagaggcgtaggctca

SEQ ID NO: 4053370 - DNA, 25 bp, Homo sapien
tctacagtgagtggtctgcccgtgc

SEQ ID NO: 4053371 - DNA, 25 bp, Homo sapien
taaatgtgtagactgttaacagcca

SEQ ID NO: 4053372 - DNA, 25 bp, Homo sapien
aatgtctactagagttctttgcctt

SEQ ID NO: 4053373 - DNA, 25 bp, Homo sapien
gagtgtctttattgttaggttacag

SEQ ID NO: 4053374 - DNA, 25 bp, Homo sapien
cctttctgacagaattcatttcctg

SEQ ID NO: 4053375 - DNA, 25 bp, Homo sapien
gactactgatattgcacatcttttc

SEQ ID NO: 4053376 - DNA, 25 bp, Homo sapien
ctacatggccctttcgtgtcttggg

SEQ ID NO: 4053377 - DNA, 25 bp, Homo sapien
cctttcaagctagggcagcaggtag

SEQ ID NO: 4053378 - DNA, 25 bp, Homo sapien
tttccaaaagtaagagactccagca

SEQ ID NO: 4053379 - DNA, 25 bp, Homo sapien
tacaaagaatggtgtggccacctcc

SEQ ID NO: 4053380 - DNA, 25 bp, Homo sapien
gccaagcctgaagataacttgaatc

SEQ ID NO: 4053381 - DNA, 25 bp, Homo sapien
ttctgaactactgccgatgtgatgt

SEQ ID NO: 4053382 - DNA, 25 bp, Homo sapien
gaaatgttaaagaactaccatctta

SEQ ID NO: 4053383 - DNA, 25 bp, Homo sapien
tgtgttggcaatgtccgaaattgaa

SEQ ID NO: 4053384 - DNA, 25 bp, Homo sapien
acaaattaacagaggcttctttgta

SEQ ID NO: 4053385 - DNA, 25 bp, Homo sapien
ccttggctacattgggtcttgacat

SEQ ID NO: 4053386 - DNA, 25 bp, Homo sapien
ttctttgtaacattgagggtcctca

SEQ ID NO: 4053387 - DNA, 25 bp, Homo sapien
gagggtcctcattggaggatccttg

SEQ ID NO: 4053388 - DNA, 25 bp, Homo sapien
gcagcatggccatgcgggtagccat

SEQ ID NO: 4053389 - DNA, 25 bp, Homo sapien
tcattcactctctgaactatttaag

SEQ ID NO: 4053390 - DNA, 25 bp, Homo sapien
actctctgaactatttaagtcagac

SEQ ID NO: 4053391 - DNA, 25 bp, Homo sapien
ttcactctctgaactatttaagtca

SEQ ID NO: 4053392 - DNA, 25 bp, Homo sapien
tcactctctgaactatttaagtcag

SEQ ID NO: 4053393 - DNA, 25 bp, Homo sapien
ctcataggcttgagcacgaagctca

SEQ ID NO: 4053394 - DNA, 25 bp, Homo sapien
tcactcataggcttgagcacgaagc

SEQ ID NO: 4053395 - DNA, 25 bp, Homo sapien
ggtcactcataggcttgagcacgaa

SEQ ID NO: 4053396 - DNA, 25 bp, Homo sapien
cactcataggcttgagcacgaagct

SEQ ID NO: 4053397 - DNA, 25 bp, Homo sapien
gggatgttctgagcatccacggagc

SEQ ID NO: 4053398 - DNA, 25 bp, Homo sapien
tgttctgagcatccacggagctgct

SEQ ID NO: 4053399 - DNA, 25 bp, Homo sapien
tctgagcatccacggagctgcttct

SEQ ID NO: 4053400 - DNA, 25 bp, Homo sapien
gatgttctgagcatccacggagctg

SEQ ID NO: 4053401 - DNA, 25 bp, Homo sapien
agttctcatacccttggttccttct

SEQ ID NO: 4053402 - DNA, 25 bp, Homo sapien
cgttattttctacaacgatcatggc

SEQ ID NO: 4053403 - DNA, 25 bp, Homo sapien
caatcacactcgttattttctacaa

SEQ ID NO: 4053404 - DNA, 25 bp, Homo sapien
tctacaacgatcatggccatggcca

SEQ ID NO: 4053405 - DNA, 25 bp, Homo sapien
tattttctacaacgatcatggccat

SEQ ID NO: 4053406 - DNA, 25 bp, Homo sapien
tcctttctccaagatcatggcatac

SEQ ID NO: 4053407 - DNA, 25 bp, Homo sapien
ctctcctaaaggaacctgatgtctc

SEQ ID NO: 4053408 - DNA, 25 bp, Homo sapien
cctgtttatacagaattgtgtccat

SEQ ID NO: 4053409 - DNA, 25 bp, Homo sapien
tggcatacacctgtttatacagaat

SEQ ID NO: 4053410 - DNA, 25 bp, Homo sapien
tgcaggcaagttctgtccatgtttg

SEQ ID NO: 4053411 - DNA, 25 bp, Homo sapien
gcaggcaagttctgtccatgtttgg

SEQ ID NO: 4053412 - DNA, 25 bp, Homo sapien
tgcctggccatactttaggcccatt

SEQ ID NO: 4053413 - DNA, 25 bp, Homo sapien
ggaattatagacctcagccaccgtg

SEQ ID NO: 4053414 - DNA, 25 bp, Homo sapien
ctggccatactttaggcccatttat

SEQ ID NO: 4053415 - DNA, 25 bp, Homo sapien
tggaattatagacctcagccaccgt

SEQ ID NO: 4053416 - DNA, 25 bp, Homo sapien
aataaacgtgaagcaattttgactg

SEQ ID NO: 4053417 - DNA, 25 bp, Homo sapien
tacttagctcttttccattaggaaa

SEQ ID NO: 4053418 - DNA, 25 bp, Homo sapien
ctgcgattagtgagaataagtttcc

SEQ ID NO: 4053419 - DNA, 25 bp, Homo sapien
gactgtaatctgatatctcacacaa

SEQ ID NO: 4053420 - DNA, 25 bp, Homo sapien
tcaagtttcttacttcttcctccat

SEQ ID NO: 4053421 - DNA, 25 bp, Homo sapien
ttcaagtttcttacttcttcctcca

SEQ ID NO: 4053422 - DNA, 25 bp, Homo sapien
gatgacactccggtcccctgcgaga

SEQ ID NO: 4053423 - DNA, 25 bp, Homo sapien
cacactgctatgcaaaccccaaagg

SEQ ID NO: 4053424 - DNA, 25 bp, Homo sapien
gctgtccgggcgatgacactccggt

SEQ ID NO: 4053425 - DNA, 25 bp, Homo sapien
gggtttgacagtccctttgtacaca

SEQ ID NO: 4053426 - DNA, 25 bp, Homo sapien
gaagcgaggcccatgttgctgctgt

SEQ ID NO: 4053427 - DNA, 25 bp, Homo sapien
gggccgccacggctcttccgcgctc

SEQ ID NO: 4053428 - DNA, 25 bp, Homo sapien
gcgaggcccatgttgctgctgttcc

SEQ ID NO: 4053429 - DNA, 25 bp, Homo sapien
gaggcccatgttgctgctgttccct

SEQ ID NO: 4053430 - DNA, 25 bp, Homo sapien
cggtggcggcgaccgtcagttttcg

SEQ ID NO: 4053431 - DNA, 25 bp, Homo sapien
gaagtcactaccctcgaggaggagg

SEQ ID NO: 4053432 - DNA, 25 bp, Homo sapien
tcgagctgcgatgccctcggacttc

SEQ ID NO: 4053433 - DNA, 25 bp, Homo sapien
tttcctcggtcctcggcccagtgga

SEQ ID NO: 4053434 - DNA, 25 bp, Homo sapien
ggtcgagctgcgatgccctcggact

SEQ ID NO: 4053435 - DNA, 25 bp, Homo sapien
ctcattgctcagcgcggacctagac

SEQ ID NO: 4053436 - DNA, 25 bp, Homo sapien
caagcgggcggcgtggcctggagcc

SEQ ID NO: 4053437 - DNA, 25 bp, Homo sapien
ggcctggagccggttctgagtgcag

SEQ ID NO: 4053438 - DNA, 25 bp, Homo sapien
ggcgtggcctggagccggttctgag

SEQ ID NO: 4053439 - DNA, 25 bp, Homo sapien
ccggttctgagtgcagggtcaccat

SEQ ID NO: 4053440 - DNA, 25 bp, Homo sapien
caatgactttagttggcagccacca

SEQ ID NO: 4053441 - DNA, 25 bp, Homo sapien
tgagatggtttactctgaaaggtgc

SEQ ID NO: 4053442 - DNA, 25 bp, Homo sapien
tcctgtaggatgtttttcgggcaac

SEQ ID NO: 4053443 - DNA, 25 bp, Homo sapien
tagccactgtctgttgctccaatga

SEQ ID NO: 4053444 - DNA, 25 bp, Homo sapien
acattttgactgtcatgaacaatgc

SEQ ID NO: 4053445 - DNA, 25 bp, Homo sapien
ttgggtctgtctatacataggagtg

SEQ ID NO: 4053446 - DNA, 25 bp, Homo sapien
attttgactgtcatgaacaatgctg

SEQ ID NO: 4053447 - DNA, 25 bp, Homo sapien
atttctcttgggtctgtctatacat

SEQ ID NO: 4053448 - DNA, 25 bp, Homo sapien
tctaaaatcttgtgaacatgggaac

SEQ ID NO: 4053449 - DNA, 25 bp, Homo sapien
ttgactaaaatgtgtgctttacagg

SEQ ID NO: 4053450 - DNA, 25 bp, Homo sapien
gatacatggtacttagttgtcactg

SEQ ID NO: 4053451 - DNA, 25 bp, Homo sapien
gcgtgagcaccatgctcaatggtaa

SEQ ID NO: 4053452 - DNA, 25 bp, Homo sapien
cccctgtactggtatgagtactgtt

SEQ ID NO: 4053453 - DNA, 25 bp, Homo sapien
tgctgtcatgtttcaaggtgaatcc

SEQ ID NO: 4053454 - DNA, 25 bp, Homo sapien
gcatattattagataagaccacccc

SEQ ID NO: 4053455 - DNA, 25 bp, Homo sapien
gctaccatgccaatcaatgtggttt

SEQ ID NO: 4053456 - DNA, 25 bp, Homo sapien
aagttgggaccactcactgttctcg

SEQ ID NO: 4053457 - DNA, 25 bp, Homo sapien
ctctggaaagggctatatgatcaag

SEQ ID NO: 4053458 - DNA, 25 bp, Homo sapien
cagcccttggctattgtaggcagtt

SEQ ID NO: 4053459 - DNA, 25 bp, Homo sapien
ttctcgtctttaacctcttgcaagg

SEQ ID NO: 4053460 - DNA, 25 bp, Homo sapien
tcaccgacagcaaggctatgcaagt

SEQ ID NO: 4053461 - DNA, 25 bp, Homo sapien
ttttcaatgggactgctagccagca

SEQ ID NO: 4053462 - DNA, 25 bp, Homo sapien
agcatccatcaacaccgaagaggca

SEQ ID NO: 4053463 - DNA, 25 bp, Homo sapien
gttaaccagtaacacagttcagcag

SEQ ID NO: 4053464 - DNA, 25 bp, Homo sapien
tgacaaacttaatgtctggcctgga

SEQ ID NO: 4053465 - DNA, 25 bp, Homo sapien
tattgaattaacaagatggaacata

SEQ ID NO: 4053466 - DNA, 25 bp, Homo sapien
tatctgacaaacttaatgtctggcc

SEQ ID NO: 4053467 - DNA, 25 bp, Homo sapien
aaattggaacaaggccagatgtggt

SEQ ID NO: 4053468 - DNA, 25 bp, Homo sapien
tcaaattcagagtggtgtaagccct

SEQ ID NO: 4053469 - DNA, 25 bp, Homo sapien
caacaagttttagaggcacagcagc

SEQ ID NO: 4053470 - DNA, 25 bp, Homo sapien
gatggaatcttcagccgcaatggtg

SEQ ID NO: 4053471 - DNA, 25 bp, Homo sapien
tcagcaatcgccagtttaccagcag

SEQ ID NO: 4053472 - DNA, 25 bp, Homo sapien
cacaacgtggcgtctgataacagtg

SEQ ID NO: 4053473 - DNA, 25 bp, Homo sapien
tccttgatgtcagtagtgggctaaa

SEQ ID NO: 4053474 - DNA, 25 bp, Homo sapien
catctgtggccattccatcaggcag

SEQ ID NO: 4053475 - DNA, 25 bp, Homo sapien
tttcagtagtacaggcttcttgccg

SEQ ID NO: 4053476 - DNA, 25 bp, Homo sapien
caggctagagcagtgtgcgatctca

SEQ ID NO: 4053477 - DNA, 25 bp, Homo sapien
tcccaggtcccagtgctctagttac

SEQ ID NO: 4053478 - DNA, 25 bp, Homo sapien
gttttatccctaaccgagacagctg

SEQ ID NO: 4053479 - DNA, 25 bp, Homo sapien
gaaagttgtatctgagtccctccag

SEQ ID NO: 4053480 - DNA, 25 bp, Homo sapien
tgccattctagcctcatttattaat

SEQ ID NO: 4053481 - DNA, 25 bp, Homo sapien
cacatccggcctaattacttcttta

SEQ ID NO: 4053482 - DNA, 25 bp, Homo sapien
ttttatgccattctagcctcattta

SEQ ID NO: 4053483 - DNA, 25 bp, Homo sapien
tatgccattctagcctcatttatta

SEQ ID NO: 4053484 - DNA, 25 bp, Homo sapien
cagcttgctaacctacatgtttggg

SEQ ID NO: 4053485 - DNA, 25 bp, Homo sapien
agttctacctttgggatagggctgc

SEQ ID NO: 4053486 - DNA, 25 bp, Homo sapien
cagcaacaggtcaggatagttctac

SEQ ID NO: 4053487 - DNA, 25 bp, Homo sapien
ccacagcggtggtgcttaaagaaag

SEQ ID NO: 4053488 - DNA, 25 bp, Homo sapien
ggctttcatagttgggatttcagag

SEQ ID NO: 4053489 - DNA, 25 bp, Homo sapien
tgagcacactgatcaaccactgaac

SEQ ID NO: 4053490 - DNA, 25 bp, Homo sapien
taattgataagctccaagtagttgc

SEQ ID NO: 4053491 - DNA, 25 bp, Homo sapien
aagtggtttagctaccattctgcca

SEQ ID NO: 4053492 - DNA, 25 bp, Homo sapien
ccaaggtgttgcaagctatcacggc

SEQ ID NO: 4053493 - DNA, 25 bp, Homo sapien
aaggtgttgcaagctatcacggcaa

SEQ ID NO: 4053494 - DNA, 25 bp, Homo sapien
gtgttgcaagctatcacggcaaggg

SEQ ID NO: 4053495 - DNA, 25 bp, Homo sapien
ggtgttgcaagctatcacggcaagg

SEQ ID NO: 4053496 - DNA, 25 bp, Homo sapien
gtcagacgggaaatgtactgatgtc

SEQ ID NO: 4053497 - DNA, 25 bp, Homo sapien
tctttcaatgcaccacaagagggca

SEQ ID NO: 4053498 - DNA, 25 bp, Homo sapien
ggatactgtcgagagcaaaaaccac

SEQ ID NO: 4053499 - DNA, 25 bp, Homo sapien
cttggcaagtaagaggctgtctccc

SEQ ID NO: 4053500 - DNA, 25 bp, Homo sapien
taaagtagaagattgcaagggccag

SEQ ID NO: 4053501 - DNA, 25 bp, Homo sapien
caagcattagatggctaactaccaa

SEQ ID NO: 4053502 - DNA, 25 bp, Homo sapien
caagagtggtacttgtgctaggcat

SEQ ID NO: 4053503 - DNA, 25 bp, Homo sapien
gaatgatacctagccaaactgtacc

SEQ ID NO: 4053504 - DNA, 25 bp, Homo sapien
cccttagggcaggtagattcagtct

SEQ ID NO: 4053505 - DNA, 25 bp, Homo sapien
cctggaaagatacccagatttgata

SEQ ID NO: 4053506 - DNA, 25 bp, Homo sapien
agatacccagatttgataacatgtt

SEQ ID NO: 4053507 - DNA, 25 bp, Homo sapien
aaactaaagcaagtcagggaagcct

SEQ ID NO: 4053508 - DNA, 25 bp, Homo sapien
ctaaagcaagtcagggaagcctgga

SEQ ID NO: 4053509 - DNA, 25 bp, Homo sapien
tcagttgggatggacttgcccaagt

SEQ ID NO: 4053510 - DNA, 25 bp, Homo sapien
ctttgatctggttgtcagttgggat

SEQ ID NO: 4053511 - DNA, 25 bp, Homo sapien
ttgcccaagtgatggcccacagaaa

SEQ ID NO: 4053512 - DNA, 25 bp, Homo sapien
gatggacttgcccaagtgatggccc

SEQ ID NO: 4053513 - DNA, 25 bp, Homo sapien
gaggttctaagacttggaagccaca

SEQ ID NO: 4053514 - DNA, 25 bp, Homo sapien
gcccaatgctatatgtcagttgagg

SEQ ID NO: 4053515 - DNA, 25 bp, Homo sapien
cgtctgctggagtgtgcccaatgct

SEQ ID NO: 4053516 - DNA, 25 bp, Homo sapien
ccaggatttgaattcgggcgtctgc

SEQ ID NO: 4053517 - DNA, 25 bp, Homo sapien
catgcagttgtactataaacaacag

SEQ ID NO: 4053518 - DNA, 25 bp, Homo sapien
ggtaagtcaaccaattccatgcagt

SEQ ID NO: 4053519 - DNA, 25 bp, Homo sapien
aacagaagttggtctgggcttctca

SEQ ID NO: 4053520 - DNA, 25 bp, Homo sapien
gaaagcacagagaggtaagtcaacc

SEQ ID NO: 4053521 - DNA, 25 bp, Homo sapien
cccttgcagagagtacatggagcca

SEQ ID NO: 4053522 - DNA, 25 bp, Homo sapien
atgtccccgtggatcccttgcagag

SEQ ID NO: 4053523 - DNA, 25 bp, Homo sapien
ctgaattggccagagaatgacattc

SEQ ID NO: 4053524 - DNA, 25 bp, Homo sapien
tgccaccagtggtgatggaaagcac

SEQ ID NO: 4053525 - DNA, 25 bp, Homo sapien
catctcaaccaactgcaaactgtct

SEQ ID NO: 4053526 - DNA, 25 bp, Homo sapien
ccatctcaaccaactgcaaactgtc

SEQ ID NO: 4053527 - DNA, 25 bp, Homo sapien
tcgctcaaaccagcctttcagaatg

SEQ ID NO: 4053528 - DNA, 25 bp, Homo sapien
gcagcgtaagtgtaagcaaactctc

SEQ ID NO: 4053529 - DNA, 25 bp, Homo sapien
gcaaactctcctatgaacactcgct

SEQ ID NO: 4053530 - DNA, 25 bp, Homo sapien
cctttgtcatacatggcagcgtaag

SEQ ID NO: 4053531 - DNA, 25 bp, Homo sapien
gagatgcacgcacaatcccagcatt

SEQ ID NO: 4053532 - DNA, 25 bp, Homo sapien
tgattcttagcaacaggcctgtggg

SEQ ID NO: 4053533 - DNA, 25 bp, Homo sapien
ggaaagatcactgacgagatgcacg

SEQ ID NO: 4053534 - DNA, 25 bp, Homo sapien
gactggctggaattgtaaaagcaaa

SEQ ID NO: 4053535 - DNA, 25 bp, Homo sapien
caacagtaatacagccagattccca

SEQ ID NO: 4053536 - DNA, 25 bp, Homo sapien
aagtaatcacccttatttgcagaga

SEQ ID NO: 4053537 - DNA, 25 bp, Homo sapien
gtctaggacaataagcacgcaaatg

SEQ ID NO: 4053538 - DNA, 25 bp, Homo sapien
gggtaactgtttaagatctcatagc

SEQ ID NO: 4053539 - DNA, 25 bp, Homo sapien
tctttataagccagaacagactcgg

SEQ ID NO: 4053540 - DNA, 25 bp, Homo sapien
gccacaatatctgggctcagatggc

SEQ ID NO: 4053541 - DNA, 25 bp, Homo sapien
ctggaatatcacaaggtctgcggct

SEQ ID NO: 4053542 - DNA, 25 bp, Homo sapien
caggatactgaaagttcgcagggtc

SEQ ID NO: 4053543 - DNA, 25 bp, Homo sapien
attgaagttcatggcatagaggtcc

SEQ ID NO: 4053544 - DNA, 25 bp, Homo sapien
tggcatagttgaaggacgtcctctc

SEQ ID NO: 4053545 - DNA, 25 bp, Homo sapien
tgagtgagccagtacgatcagtgct

SEQ ID NO: 4053546 - DNA, 25 bp, Homo sapien
ttcttcttcaaagccgctgcagcag

SEQ ID NO: 4053547 - DNA, 25 bp, Homo sapien
tcagctacaggggagttgcagtctg

SEQ ID NO: 4053548 - DNA, 25 bp, Homo sapien
ttgcagtctgtaaaggagggggcgg

SEQ ID NO: 4053549 - DNA, 25 bp, Homo sapien
ggcggctttgtttgacattaggtta

SEQ ID NO: 4053550 - DNA, 25 bp, Homo sapien
gacattaggttattgcattccatct

SEQ ID NO: 4053551 - DNA, 25 bp, Homo sapien
tcacattgaactattaacagctcag

SEQ ID NO: 4053552 - DNA, 25 bp, Homo sapien
atttagtggatccttagtgctaggc

SEQ ID NO: 4053553 - DNA, 25 bp, Homo sapien
gaggcagcatgcttcaatttgcaag

SEQ ID NO: 4053554 - DNA, 25 bp, Homo sapien
tattaacaaggttgtcagaggcagc

SEQ ID NO: 4053555 - DNA, 25 bp, Homo sapien
aatacaaacaacagcgtacaagggc

SEQ ID NO: 4053556 - DNA, 25 bp, Homo sapien
ttgccagagaaaggacgcttacccc

SEQ ID NO: 4053557 - DNA, 25 bp, Homo sapien
cgtacaagggcatagagcgaattgc

SEQ ID NO: 4053558 - DNA, 25 bp, Homo sapien
catagagcgaattgccagagaaagg

SEQ ID NO: 4053559 - DNA, 25 bp, Homo sapien
tatatatcctgtccggcccgtttga

SEQ ID NO: 4053560 - DNA, 25 bp, Homo sapien
caaccttgtgggagtcgcgtgtgta

SEQ ID NO: 4053561 - DNA, 25 bp, Homo sapien
cgcgtgtgtagtgcacggtgcattc

SEQ ID NO: 4053562 - DNA, 25 bp, Homo sapien
cctggccggaactaggctctcggtg

SEQ ID NO: 4053563 - DNA, 25 bp, Homo sapien
caaaaacaaccgattggcaaaatgt

SEQ ID NO: 4053564 - DNA, 25 bp, Homo sapien
gaagtgagagatctctttagcccaa

SEQ ID NO: 4053565 - DNA, 25 bp, Homo sapien
tttagaggaaaattgcaaggcttac

SEQ ID NO: 4053566 - DNA, 25 bp, Homo sapien
caaaatgtatggtacatgggcattc

SEQ ID NO: 4053567 - DNA, 25 bp, Homo sapien
gactttgtatattagctcagagcca

SEQ ID NO: 4053568 - DNA, 25 bp, Homo sapien
ggcgaggacctcagagctataggaa

SEQ ID NO: 4053569 - DNA, 25 bp, Homo sapien
gaattaggccatcctttactgggct

SEQ ID NO: 4053570 - DNA, 25 bp, Homo sapien
ttttctgcacaaggagaagtcccca

SEQ ID NO: 4053571 - DNA, 25 bp, Homo sapien
tataaatctaaatgcatgatctctg

SEQ ID NO: 4053572 - DNA, 25 bp, Homo sapien
ataaatctaaatgcatgatctctgg

SEQ ID NO: 4053573 - DNA, 25 bp, Homo sapien
aatataaatctaaatgcatgatctc

SEQ ID NO: 4053574 - DNA, 25 bp, Homo sapien
taaatctaaatgcatgatctctggg

SEQ ID NO: 4053575 - DNA, 25 bp, Homo sapien
ttgcagccgcatttattagaaaaat

SEQ ID NO: 4053576 - DNA, 25 bp, Homo sapien
ttttatgcaattgcacttccttggc

SEQ ID NO: 4053577 - DNA, 25 bp, Homo sapien
gtttttatgcaattgcacttccttg

SEQ ID NO: 4053578 - DNA, 25 bp, Homo sapien
tgtttttatgcaattgcacttcctt

SEQ ID NO: 4053579 - DNA, 25 bp, Homo sapien
tttttatgcaattgcacttccttgg

SEQ ID NO: 4053580 - DNA, 25 bp, Homo sapien
ggcggccagacgcccatccaatttg

SEQ ID NO: 4053581 - DNA, 25 bp, Homo sapien
aatgggtcaccggaactccacggcg

SEQ ID NO: 4053582 - DNA, 25 bp, Homo sapien
tccaatttgcctgcgggaactcgct

SEQ ID NO: 4053583 - DNA, 25 bp, Homo sapien
agacgcccatccaatttgcctgcgg

SEQ ID NO: 4053584 - DNA, 25 bp, Homo sapien
ccttttgggagagtcgcagctgagg

SEQ ID NO: 4053585 - DNA, 25 bp, Homo sapien
ctggccttttgggagagtcgcagct

SEQ ID NO: 4053586 - DNA, 25 bp, Homo sapien
cctggccttttgggagagtcgcagc

SEQ ID NO: 4053587 - DNA, 25 bp, Homo sapien
ggccttttgggagagtcgcagctga

SEQ ID NO: 4053588 - DNA, 25 bp, Homo sapien
ttggggttgcgggagaagtgcatgt

SEQ ID NO: 4053589 - DNA, 25 bp, Homo sapien
cactcggctcatgtcagacgttgtc

SEQ ID NO: 4053590 - DNA, 25 bp, Homo sapien
tgcgggagaagtgcatgtgcagggt

SEQ ID NO: 4053591 - DNA, 25 bp, Homo sapien
gggttgcgggagaagtgcatgtgca

SEQ ID NO: 4053592 - DNA, 25 bp, Homo sapien
ggacaaacatttcggtatgtaccgc

SEQ ID NO: 4053593 - DNA, 25 bp, Homo sapien
actgttccagaacccatgtccctaa

SEQ ID NO: 4053594 - DNA, 25 bp, Homo sapien
tatgtaccgctaaagaatgaggctc

SEQ ID NO: 4053595 - DNA, 25 bp, Homo sapien
taaccccatgccactgagatacggt

SEQ ID NO: 4053596 - DNA, 25 bp, Homo sapien
agcgcaagatgtagctccgggcctc

SEQ ID NO: 4053597 - DNA, 25 bp, Homo sapien
ccatggcagcgcaagatgtagctcc

SEQ ID NO: 4053598 - DNA, 25 bp, Homo sapien
atggcagcgcaagatgtagctccgg

SEQ ID NO: 4053599 - DNA, 25 bp, Homo sapien
caagatgtagctccgggcctcacga

SEQ ID NO: 4053600 - DNA, 25 bp, Homo sapien
tgctggatctgcttgatgttactgg

SEQ ID NO: 4053601 - DNA, 25 bp, Homo sapien
cagccaacccgcacgtcctcgggga

SEQ ID NO: 4053602 - DNA, 25 bp, Homo sapien
gcagccaacccgcacgtcctcgggg

SEQ ID NO: 4053603 - DNA, 25 bp, Homo sapien
gcttgatgttactgggggttatcca

SEQ ID NO: 4053604 - DNA, 25 bp, Homo sapien
tcacttggaacgtcctcacctctgt

SEQ ID NO: 4053605 - DNA, 25 bp, Homo sapien
tcctcctcacttggaacgtcctcac

SEQ ID NO: 4053606 - DNA, 25 bp, Homo sapien
cctcctcctcacttggaacgtcctc

SEQ ID NO: 4053607 - DNA, 25 bp, Homo sapien
tcctcacttggaacgtcctcacctc

SEQ ID NO: 4053608 - DNA, 25 bp, Homo sapien
tgcagttcatgatcgatgttgggca

SEQ ID NO: 4053609 - DNA, 25 bp, Homo sapien
ctgcagttcatgatcgatgttgggc

SEQ ID NO: 4053610 - DNA, 25 bp, Homo sapien
tcaggctcacaagctgagtgtcctt

SEQ ID NO: 4053611 - DNA, 25 bp, Homo sapien
caggctcacaagctgagtgtccttt

SEQ ID NO: 4053612 - DNA, 25 bp, Homo sapien
ctcaggctcacaagctgagtgtcct

SEQ ID NO: 4053613 - DNA, 25 bp, Homo sapien
aattcatctgtagccacctctcagg

SEQ ID NO: 4053614 - DNA, 25 bp, Homo sapien
gaaaagagcatgaacggcctggctt

SEQ ID NO: 4053615 - DNA, 25 bp, Homo sapien
tatacaagtcagatcagacagggct

SEQ ID NO: 4053616 - DNA, 25 bp, Homo sapien
gacaaactatgttattggtccgcgt

SEQ ID NO: 4053617 - DNA, 25 bp, Homo sapien
tctgggtgctgaatcgatgagctca

SEQ ID NO: 4053618 - DNA, 25 bp, Homo sapien
ttctgggtgctgaatcgatgagctc

SEQ ID NO: 4053619 - DNA, 25 bp, Homo sapien
tttctgggtgctgaatcgatgagct

SEQ ID NO: 4053620 - DNA, 25 bp, Homo sapien
tgttttaggtgagacaccccaacaa

SEQ ID NO: 4053621 - DNA, 25 bp, Homo sapien
actctgcttccaactggtatgtgag

SEQ ID NO: 4053622 - DNA, 25 bp, Homo sapien
caaactctgcttccaactggtatgt

SEQ ID NO: 4053623 - DNA, 25 bp, Homo sapien
caagcacttggatgtccgtggcaga

SEQ ID NO: 4053624 - DNA, 25 bp, Homo sapien
caccaagattcatgccagttagatt

SEQ ID NO: 4053625 - DNA, 25 bp, Homo sapien
gatcactatgtcatgaaaaacctta

SEQ ID NO: 4053626 - DNA, 25 bp, Homo sapien
gttagaggtaaaaagccatatgacc

SEQ ID NO: 4053627 - DNA, 25 bp, Homo sapien
gaccttttcctactcgcagttgaga

SEQ ID NO: 4053628 - DNA, 25 bp, Homo sapien
cgtgtggccttgtcccgaatctcag

SEQ ID NO: 4053629 - DNA, 25 bp, Homo sapien
cacgtattccggtaagggctccttg

SEQ ID NO: 4053630 - DNA, 25 bp, Homo sapien
ctcccggatggtgtaaatgttcttc

SEQ ID NO: 4053631 - DNA, 25 bp, Homo sapien
tccttgaaccgcagctcgtagggca

SEQ ID NO: 4053632 - DNA, 25 bp, Homo sapien
agacccacccgcaccaagcaacgct

SEQ ID NO: 4053633 - DNA, 25 bp, Homo sapien
aacgctccgcgcgactccacgcact

SEQ ID NO: 4053634 - DNA, 25 bp, Homo sapien
gatctctctcgtcccggagggagct

SEQ ID NO: 4053635 - DNA, 25 bp, Homo sapien
tgcggacagaacgccccagctcaga

SEQ ID NO: 4053636 - DNA, 25 bp, Homo sapien
ctgcagagccgcatgccgcaggaaa

SEQ ID NO: 4053637 - DNA, 25 bp, Homo sapien
agcatccgccacaacgtgctccact

SEQ ID NO: 4053638 - DNA, 25 bp, Homo sapien
gcagagccgcatgccgcaggaaagc

SEQ ID NO: 4053639 - DNA, 25 bp, Homo sapien
gccacaacgtgctccactggagcca

SEQ ID NO: 4053640 - DNA, 25 bp, Homo sapien
gcacagcatgactacctaagatagg

SEQ ID NO: 4053641 - DNA, 25 bp, Homo sapien
cctaagataggcgagtctaagagct

SEQ ID NO: 4053642 - DNA, 25 bp, Homo sapien
gactacctaagataggcgagtctaa

SEQ ID NO: 4053643 - DNA, 25 bp, Homo sapien
catgactacctaagataggcgagtc

SEQ ID NO: 4053644 - DNA, 25 bp, Homo sapien
ggatataatagaaccgtatgtacgt

SEQ ID NO: 4053645 - DNA, 25 bp, Homo sapien
atataatagaaccgtatgtacgttg

SEQ ID NO: 4053646 - DNA, 25 bp, Homo sapien
gatataatagaaccgtatgtacgtt

SEQ ID NO: 4053647 - DNA, 25 bp, Homo sapien
acttcaggaatgcaccacacagaac

SEQ ID NO: 4053648 - DNA, 25 bp, Homo sapien
ttcaggaatgcaccacacagaactg

SEQ ID NO: 4053649 - DNA, 25 bp, Homo sapien
cttcaggaatgcaccacacagaact

SEQ ID NO: 4053650 - DNA, 25 bp, Homo sapien
tgcctccagcatactccctagagta

SEQ ID NO: 4053651 - DNA, 25 bp, Homo sapien
tagagtagtacaggcagggtagatc

SEQ ID NO: 4053652 - DNA, 25 bp, Homo sapien
ggcagggtagatctaactattggaa

SEQ ID NO: 4053653 - DNA, 25 bp, Homo sapien
ggttttgagaaactagacactgcaa

SEQ ID NO: 4053654 - DNA, 25 bp, Homo sapien
cggcatcatagtggcaggtcctgga

SEQ ID NO: 4053655 - DNA, 25 bp, Homo sapien
gtagcagcctgaccaaagcgttcag

SEQ ID NO: 4053656 - DNA, 25 bp, Homo sapien
gagctccagttgctttcgtttttgc

SEQ ID NO: 4053657 - DNA, 25 bp, Homo sapien
gaaggttcccttgaatccttcctgc

SEQ ID NO: 4053658 - DNA, 25 bp, Homo sapien
tccgaagttcttcttggcgcctcat

SEQ ID NO: 4053659 - DNA, 25 bp, Homo sapien
ctccgaagttcttcttggcgcctca

SEQ ID NO: 4053660 - DNA, 25 bp, Homo sapien
cctccgaagttcttcttggcgcctc

SEQ ID NO: 4053661 - DNA, 25 bp, Homo sapien
ggtgcttatggcgtgcagcctccat

SEQ ID NO: 4053662 - DNA, 25 bp, Homo sapien
tttgatgttgcggtccacttggtcc

SEQ ID NO: 4053663 - DNA, 25 bp, Homo sapien
atctcaatgagtgccttccagcgca

SEQ ID NO: 4053664 - DNA, 25 bp, Homo sapien
cttctcacgagcctctttgatgttg

SEQ ID NO: 4053665 - DNA, 25 bp, Homo sapien
tcatactcaaaggagccaggctgtg

SEQ ID NO: 4053666 - DNA, 25 bp, Homo sapien
gcatattcatactcaaaggagccag

SEQ ID NO: 4053667 - DNA, 25 bp, Homo sapien
atctgggtggttgctctcgttcctt

SEQ ID NO: 4053668 - DNA, 25 bp, Homo sapien
gttgctctcgttccttgtgaaattg

SEQ ID NO: 4053669 - DNA, 25 bp, Homo sapien
tggacacatactgaggaaggtttcg

SEQ ID NO: 4053670 - DNA, 25 bp, Homo sapien
gagtggcatattgtccagctccact

SEQ ID NO: 4053671 - DNA, 25 bp, Homo sapien
ttcgaactgtaagggatgcactatg

SEQ ID NO: 4053672 - DNA, 25 bp, Homo sapien
gggccttcctcgatcatccacaatg

SEQ ID NO: 4053673 - DNA, 25 bp, Homo sapien
gtttccaagcggataaagccaaatc

SEQ ID NO: 4053674 - DNA, 25 bp, Homo sapien
gttcgtgtttccaagcggataaagc

SEQ ID NO: 4053675 - DNA, 25 bp, Homo sapien
gtgtttccaagcggataaagccaaa

SEQ ID NO: 4053676 - DNA, 25 bp, Homo sapien
ctagggttcgtgtttccaagcggat

SEQ ID NO: 4053677 - DNA, 25 bp, Homo sapien
aggccaaatagtcaaagccttcatt

SEQ ID NO: 4053678 - DNA, 25 bp, Homo sapien
ggccaaatagtcaaagccttcattt

SEQ ID NO: 4053679 - DNA, 25 bp, Homo sapien
caggccaaatagtcaaagccttcat

SEQ ID NO: 4053680 - DNA, 25 bp, Homo sapien
ccaaatagtcaaagccttcattttg

SEQ ID NO: 4053681 - DNA, 25 bp, Homo sapien
cttttagcaaggattactgtcagat

SEQ ID NO: 4053682 - DNA, 25 bp, Homo sapien
gaggtgtttgcagcaaacttgctct

SEQ ID NO: 4053683 - DNA, 25 bp, Homo sapien
tgtcagattctactcatttggccag

SEQ ID NO: 4053684 - DNA, 25 bp, Homo sapien
gcaaacttgctctacagctagcaca

SEQ ID NO: 4053685 - DNA, 25 bp, Homo sapien
caatggcaggacaacctaatgtatg

SEQ ID NO: 4053686 - DNA, 25 bp, Homo sapien
tggtaagaggtacacgacataactt

SEQ ID NO: 4053687 - DNA, 25 bp, Homo sapien
tggccaactccacattaagcagatg

SEQ ID NO: 4053688 - DNA, 25 bp, Homo sapien
caaacttagtatccccaatggcagg

SEQ ID NO: 4053689 - DNA, 25 bp, Homo sapien
tatttgtagacgtatattgatgttt

SEQ ID NO: 4053690 - DNA, 25 bp, Homo sapien
gcaccactatacctgactactgtta

SEQ ID NO: 4053691 - DNA, 25 bp, Homo sapien
ggcgtgcaccactatacctgactac

SEQ ID NO: 4053692 - DNA, 25 bp, Homo sapien
cactatacctgactactgttaacat

SEQ ID NO: 4053693 - DNA, 25 bp, Homo sapien
aatttctggtttgtattgtaccttg

SEQ ID NO: 4053694 - DNA, 25 bp, Homo sapien
taaatacttatgagacctgtacaat

SEQ ID NO: 4053695 - DNA, 25 bp, Homo sapien
cctgtacaatttaccttcccatcag

SEQ ID NO: 4053696 - DNA, 25 bp, Homo sapien
tttctggtttgtattgtaccttggc

SEQ ID NO: 4053697 - DNA, 25 bp, Homo sapien
ctggcaccagccgtagcacgttgtg

SEQ ID NO: 4053698 - DNA, 25 bp, Homo sapien
tggtattggttgtagctattgctgc

SEQ ID NO: 4053699 - DNA, 25 bp, Homo sapien
ccagccgtagcacgttgtgcatgtg

SEQ ID NO: 4053700 - DNA, 25 bp, Homo sapien
gttgctggcaccagccgtagcacgt

SEQ ID NO: 4053701 - DNA, 25 bp, Homo sapien
ccctgggtggacttggacattggct

SEQ ID NO: 4053702 - DNA, 25 bp, Homo sapien
cacggacagaattcgttctttcatt

SEQ ID NO: 4053703 - DNA, 25 bp, Homo sapien
tccacggacagaattcgttctttca

SEQ ID NO: 4053704 - DNA, 25 bp, Homo sapien
ctcttccacggacagaattcgttct

SEQ ID NO: 4053705 - DNA, 25 bp, Homo sapien
tggcggatggtcaacctgggctgac

SEQ ID NO: 4053706 - DNA, 25 bp, Homo sapien
tctgaggggacattcgccctggcca

SEQ ID NO: 4053707 - DNA, 25 bp, Homo sapien
ggatggtcaacctgggctgacttct

SEQ ID NO: 4053708 - DNA, 25 bp, Homo sapien
cagtggcggatggtcaacctgggct

SEQ ID NO: 4053709 - DNA, 25 bp, Homo sapien
accctggtgccttcaacaggcttca

SEQ ID NO: 4053710 - DNA, 25 bp, Homo sapien
gaccctggtgccttcaacaggcttc

SEQ ID NO: 4053711 - DNA, 25 bp, Homo sapien
aagacagctacagaccctggtgcct

SEQ ID NO: 4053712 - DNA, 25 bp, Homo sapien
cagaccctggtgccttcaacaggct

SEQ ID NO: 4053713 - DNA, 25 bp, Homo sapien
ctaaatgaacacctgctgcaggccg

SEQ ID NO: 4053714 - DNA, 25 bp, Homo sapien
taaatgaacacctgctgcaggccgg

SEQ ID NO: 4053715 - DNA, 25 bp, Homo sapien
gctgcaggccgggaatggtggcctt

SEQ ID NO: 4053716 - DNA, 25 bp, Homo sapien
gcaggccgggaatggtggccttgac

SEQ ID NO: 4053717 - DNA, 25 bp, Homo sapien
caaggtgaaccaccaagagtgtgct

SEQ ID NO: 4053718 - DNA, 25 bp, Homo sapien
tgctggtttacgttccctggcgcct

SEQ ID NO: 4053719 - DNA, 25 bp, Homo sapien
cctggcgccttgactcctgagatgc

SEQ ID NO: 4053720 - DNA, 25 bp, Homo sapien
tatcacagccgccttgtgcttgcaa

SEQ ID NO: 4053721 - DNA, 25 bp, Homo sapien
aataagacaacatgaagttcacagc

SEQ ID NO: 4053722 - DNA, 25 bp, Homo sapien
ataagacaacatgaagttcacagca

SEQ ID NO: 4053723 - DNA, 25 bp, Homo sapien
agacaacatgaagttcacagcatca

SEQ ID NO: 4053724 - DNA, 25 bp, Homo sapien
acagcattttagcaacagtagaaaa

SEQ ID NO: 4053725 - DNA, 25 bp, Homo sapien
gttgtgttgatatgttgacctcctc

SEQ ID NO: 4053726 - DNA, 25 bp, Homo sapien
catctagaatggtgagtccttttta

SEQ ID NO: 4053727 - DNA, 25 bp, Homo sapien
ctagaatggtgagtcctttttagtt

SEQ ID NO: 4053728 - DNA, 25 bp, Homo sapien
ctgttgtgttgatatgttgacctcc

SEQ ID NO: 4053729 - DNA, 25 bp, Homo sapien
gcacatgtgacctttactacgtacg

SEQ ID NO: 4053730 - DNA, 25 bp, Homo sapien
caaaaatcttttatcggaaggcaca

SEQ ID NO: 4053731 - DNA, 25 bp, Homo sapien
tcaaacctggagagaattggcagga

SEQ ID NO: 4053732 - DNA, 25 bp, Homo sapien
tgtgtccagctactccctatagaga

SEQ ID NO: 4053733 - DNA, 25 bp, Homo sapien
ccccagggacctcgaagcagaattt

SEQ ID NO: 4053734 - DNA, 25 bp, Homo sapien
ccccttccccgcaggatatgagaat

SEQ ID NO: 4053735 - DNA, 25 bp, Homo sapien
caggatatgagaatgcctggtccac

SEQ ID NO: 4053736 - DNA, 25 bp, Homo sapien
tctaatgtaaacagtgaccctgaag

SEQ ID NO: 4053737 - DNA, 25 bp, Homo sapien
tgccctgtcttgtaaaaggagagcc

SEQ ID NO: 4053738 - DNA, 25 bp, Homo sapien
catagataccaggtaaggcagagag

SEQ ID NO: 4053739 - DNA, 25 bp, Homo sapien
tgcagctcgagtcttggagtcagga

SEQ ID NO: 4053740 - DNA, 25 bp, Homo sapien
aaatttcagtcgagtcatagatacc

SEQ ID NO: 4053741 - DNA, 25 bp, Homo sapien
gcacagcagcaggtatcggaatgtt

SEQ ID NO: 4053742 - DNA, 25 bp, Homo sapien
tcttcctaggacgaagcaaggttcc

SEQ ID NO: 4053743 - DNA, 25 bp, Homo sapien
tgagaaatcgcatgaacccctgaac

SEQ ID NO: 4053744 - DNA, 25 bp, Homo sapien
gacacttgtctaacccggagctggc

SEQ ID NO: 4053745 - DNA, 25 bp, Homo sapien
tcgtccccaagcctggcagaatgag

SEQ ID NO: 4053746 - DNA, 25 bp, Homo sapien
cattctgcataggtgtgaggcttta

SEQ ID NO: 4053747 - DNA, 25 bp, Homo sapien
tagccttgccgccttcaatagagaa

SEQ ID NO: 4053748 - DNA, 25 bp, Homo sapien
gttggtcccctgttcagaatggagt

SEQ ID NO: 4053749 - DNA, 25 bp, Homo sapien
gctagatgtagtcgctgccgctgtc

SEQ ID NO: 4053750 - DNA, 25 bp, Homo sapien
ccaccgaagtgggacagaagctgcc

SEQ ID NO: 4053751 - DNA, 25 bp, Homo sapien
gctgccacctgtgcaagctagatgt

SEQ ID NO: 4053752 - DNA, 25 bp, Homo sapien
gctggcacagaagctacaattggca

SEQ ID NO: 4053753 - DNA, 25 bp, Homo sapien
aggggaataagaagacattcgggag

SEQ ID NO: 4053754 - DNA, 25 bp, Homo sapien
atggacaaaattaccgccaccaaca

SEQ ID NO: 4053755 - DNA, 25 bp, Homo sapien
tggacaaaattaccgccaccaacac

SEQ ID NO: 4053756 - DNA, 25 bp, Homo sapien
tgttgctggtgatagatttttgcac

SEQ ID NO: 4053757 - DNA, 25 bp, Homo sapien
atatcacccttccactgagtactgc

SEQ ID NO: 4053758 - DNA, 25 bp, Homo sapien
ttctgttgctggtgatagatttttg

SEQ ID NO: 4053759 - DNA, 25 bp, Homo sapien
tgctggtgatagatttttgcacctt

SEQ ID NO: 4053760 - DNA, 25 bp, Homo sapien
ttcactcccaggtaataccaaattg

SEQ ID NO: 4053761 - DNA, 25 bp, Homo sapien
ctcccaggtaataccaaattgtaag

SEQ ID NO: 4053762 - DNA, 25 bp, Homo sapien
tcactcccaggtaataccaaattgt

SEQ ID NO: 4053763 - DNA, 25 bp, Homo sapien
cactcccaggtaataccaaattgta

SEQ ID NO: 4053764 - DNA, 25 bp, Homo sapien
atttggaattgtccctgtgggtaat

SEQ ID NO: 4053765 - DNA, 25 bp, Homo sapien
ttgtccctgtgggtaataagttaca

SEQ ID NO: 4053766 - DNA, 25 bp, Homo sapien
ggtaataagttacattcactcttca

SEQ ID NO: 4053767 - DNA, 25 bp, Homo sapien
cctgtgggtaataagttacattcac

SEQ ID NO: 4053768 - DNA, 25 bp, Homo sapien
ccagttgcaaagaggctttcttgca

SEQ ID NO: 4053769 - DNA, 25 bp, Homo sapien
caaagaggctttcttgcagaggggg

SEQ ID NO: 4053770 - DNA, 25 bp, Homo sapien
aagaggctttcttgcagagggggtg

SEQ ID NO: 4053771 - DNA, 25 bp, Homo sapien
gaggctttcttgcagagggggtgat

SEQ ID NO: 4053772 - DNA, 25 bp, Homo sapien
accgcaactcttgcgcacgttgaaa

SEQ ID NO: 4053773 - DNA, 25 bp, Homo sapien
atttgtggtagtcctctgcccgcca

SEQ ID NO: 4053774 - DNA, 25 bp, Homo sapien
gccaccgcaactcttgcgcacgttg

SEQ ID NO: 4053775 - DNA, 25 bp, Homo sapien
gcccgccaccgcaactcttgcgcac

SEQ ID NO: 4053776 - DNA, 25 bp, Homo sapien
tttcctaaggatgacaacaactcac

SEQ ID NO: 4053777 - DNA, 25 bp, Homo sapien
gggtcaggagaccttttgctgcttc

SEQ ID NO: 4053778 - DNA, 25 bp, Homo sapien
ggctggtatgaaccgagtttctaca

SEQ ID NO: 4053779 - DNA, 25 bp, Homo sapien
tctctcacgatatgtcttctgacca

SEQ ID NO: 4053780 - DNA, 25 bp, Homo sapien
cttttctgcatgctcacattctttc

SEQ ID NO: 4053781 - DNA, 25 bp, Homo sapien
tccttttctgcatgctcacattctt

SEQ ID NO: 4053782 - DNA, 25 bp, Homo sapien
ctctccttttctgcatgctcacatt

SEQ ID NO: 4053783 - DNA, 25 bp, Homo sapien
ttctgcatgctcacattctttcatg

SEQ ID NO: 4053784 - DNA, 25 bp, Homo sapien
gcttctacgaggtgcaactatgtgt

SEQ ID NO: 4053785 - DNA, 25 bp, Homo sapien
aaaagcttctacgaggtgcaactat

SEQ ID NO: 4053786 - DNA, 25 bp, Homo sapien
ttctacgaggtgcaactatgtgtgt

SEQ ID NO: 4053787 - DNA, 25 bp, Homo sapien
agcttctacgaggtgcaactatgtg

SEQ ID NO: 4053788 - DNA, 25 bp, Homo sapien
tatggtgtcattaaccccgcagttc

SEQ ID NO: 4053789 - DNA, 25 bp, Homo sapien
atggtgtcattaaccccgcagttca

SEQ ID NO: 4053790 - DNA, 25 bp, Homo sapien
gaatatggtgtcattaaccccgcag

SEQ ID NO: 4053791 - DNA, 25 bp, Homo sapien
aatatggtgtcattaaccccgcagt

SEQ ID NO: 4053792 - DNA, 25 bp, Homo sapien
aaggcaatctgaatgccgggcacat

SEQ ID NO: 4053793 - DNA, 25 bp, Homo sapien
gagaggaaaggcaatctgaatgccg

SEQ ID NO: 4053794 - DNA, 25 bp, Homo sapien
aggaaaggcaatctgaatgccgggc

SEQ ID NO: 4053795 - DNA, 25 bp, Homo sapien
gaaaggcaatctgaatgccgggcac

SEQ ID NO: 4053796 - DNA, 25 bp, Homo sapien
tgcactgatgaccttaattgcagcc

SEQ ID NO: 4053797 - DNA, 25 bp, Homo sapien
tgatgaccttaattgcagcctgtat

SEQ ID NO: 4053798 - DNA, 25 bp, Homo sapien
cactgatgaccttaattgcagcctg

SEQ ID NO: 4053799 - DNA, 25 bp, Homo sapien
ctgatgaccttaattgcagcctgta

SEQ ID NO: 4053800 - DNA, 25 bp, Homo sapien
cgagccaagattccaccatagcact

SEQ ID NO: 4053801 - DNA, 25 bp, Homo sapien
aaaaaactggccgaatatggtggca

SEQ ID NO: 4053802 - DNA, 25 bp, Homo sapien
aaaactggccgaatatggtggcaca

SEQ ID NO: 4053803 - DNA, 25 bp, Homo sapien
agcgagccaagattccaccatagca

SEQ ID NO: 4053804 - DNA, 25 bp, Homo sapien
ttccgcctgtttccataaagtacag

SEQ ID NO: 4053805 - DNA, 25 bp, Homo sapien
taatgatggttgactttctttgtga

SEQ ID NO: 4053806 - DNA, 25 bp, Homo sapien
tagcttgaacttttgtttccgcctg

SEQ ID NO: 4053807 - DNA, 25 bp, Homo sapien
tgtttccgcctgtttccataaagta

SEQ ID NO: 4053808 - DNA, 25 bp, Homo sapien
tctttgtgtgcatacaaatggacct

SEQ ID NO: 4053809 - DNA, 25 bp, Homo sapien
tttgtgtgcatacaaatggacctca

SEQ ID NO: 4053810 - DNA, 25 bp, Homo sapien
tttctttgtgtgcatacaaatggac

SEQ ID NO: 4053811 - DNA, 25 bp, Homo sapien
tcttttctttgtgtgcatacaaatg

SEQ ID NO: 4053812 - DNA, 25 bp, Homo sapien
gatctatcatgtccatttcgagacc

SEQ ID NO: 4053813 - DNA, 25 bp, Homo sapien
tccctggatctatcatgtccatttc

SEQ ID NO: 4053814 - DNA, 25 bp, Homo sapien
ctatcatgtccatttcgagaccaga

SEQ ID NO: 4053815 - DNA, 25 bp, Homo sapien
ctggatctatcatgtccatttcgag

SEQ ID NO: 4053816 - DNA, 25 bp, Homo sapien
ctctacagaaagttagtatactcac

SEQ ID NO: 4053817 - DNA, 25 bp, Homo sapien
cctctacagaaagttagtatactca

SEQ ID NO: 4053818 - DNA, 25 bp, Homo sapien
gtatacctctacagaaagttagtat

SEQ ID NO: 4053819 - DNA, 25 bp, Homo sapien
tacctctacagaaagttagtatact

SEQ ID NO: 4053820 - DNA, 25 bp, Homo sapien
caataatgataattatccaaggact

SEQ ID NO: 4053821 - DNA, 25 bp, Homo sapien
acaaaggtaaattgtgcagaagaga

SEQ ID NO: 4053822 - DNA, 25 bp, Homo sapien
atttgtaacgtcccagaaacacaat

SEQ ID NO: 4053823 - DNA, 25 bp, Homo sapien
cagaagagaatggtaaatttgtaac

SEQ ID NO: 4053824 - DNA, 25 bp, Homo sapien
tttcactcagaaagaatcatcctta

SEQ ID NO: 4053825 - DNA, 25 bp, Homo sapien
ttccgctccactcagtcgcccaggc

SEQ ID NO: 4053826 - DNA, 25 bp, Homo sapien
aggtctctgccaccaggctcgacta

SEQ ID NO: 4053827 - DNA, 25 bp, Homo sapien
gtctctgccaccaggctcgactaat

SEQ ID NO: 4053828 - DNA, 25 bp, Homo sapien
tacaggtctctgccaccaggctcga

SEQ ID NO: 4053829 - DNA, 25 bp, Homo sapien
tcaagagatggagactatcctggcg

SEQ ID NO: 4053830 - DNA, 25 bp, Homo sapien
cttaaggttatatattttggccagg

SEQ ID NO: 4053831 - DNA, 25 bp, Homo sapien
tttggccaggcgcgatggttcacgc

SEQ ID NO: 4053832 - DNA, 25 bp, Homo sapien
agagatggagactatcctggcgaac

SEQ ID NO: 4053833 - DNA, 25 bp, Homo sapien
gaagaggagccaaaagcgcagccac

SEQ ID NO: 4053834 - DNA, 25 bp, Homo sapien
gctgataaatcccagcaggagccag

SEQ ID NO: 4053835 - DNA, 25 bp, Homo sapien
gccagaagaggagccaaaagcgcag

SEQ ID NO: 4053836 - DNA, 25 bp, Homo sapien
tgataaatcccagcaggagccagaa

SEQ ID NO: 4053837 - DNA, 25 bp, Homo sapien
gggatgggaccggggccagatctga

SEQ ID NO: 4053838 - DNA, 25 bp, Homo sapien
tgggaccggggccagatctgagttg

SEQ ID NO: 4053839 - DNA, 25 bp, Homo sapien
aggggatgggaccggggccagatct

SEQ ID NO: 4053840 - DNA, 25 bp, Homo sapien
ggaccggggccagatctgagttggg

SEQ ID NO: 4053841 - DNA, 25 bp, Homo sapien
tgatttctggtcctccccaaccagc

SEQ ID NO: 4053842 - DNA, 25 bp, Homo sapien
gagctcccagggttcctcaaggtca

SEQ ID NO: 4053843 - DNA, 25 bp, Homo sapien
ctgggcgctccttccttcctgagct

SEQ ID NO: 4053844 - DNA, 25 bp, Homo sapien
gcttctgggcgctccttccttcctg

SEQ ID NO: 4053845 - DNA, 25 bp, Homo sapien
ataaaaaacaaatgatggcaggatg

SEQ ID NO: 4053846 - DNA, 25 bp, Homo sapien
aaaaaacaaatgatggcaggatggc

SEQ ID NO: 4053847 - DNA, 25 bp, Homo sapien
taaaaaacaaatgatggcaggatgg

SEQ ID NO: 4053848 - DNA, 25 bp, Homo sapien
taagcatacatggtacatttgcaaa

SEQ ID NO: 4053849 - DNA, 25 bp, Homo sapien
aagcatacatggtacatttgcaaaa

SEQ ID NO: 4053850 - DNA, 25 bp, Homo sapien
agcatacatggtacatttgcaaaaa

SEQ ID NO: 4053851 - DNA, 25 bp, Homo sapien
gcatacatggtacatttgcaaaaat

SEQ ID NO: 4053852 - DNA, 25 bp, Homo sapien
ggccttctgcccgatcacacagagt

SEQ ID NO: 4053853 - DNA, 25 bp, Homo sapien
ccctttacatttactatcacataag

SEQ ID NO: 4053854 - DNA, 25 bp, Homo sapien
acagagtgtgcccaaactcactcag

SEQ ID NO: 4053855 - DNA, 25 bp, Homo sapien
ggcctctggcggctgaaaaccactg

SEQ ID NO: 4053856 - DNA, 25 bp, Homo sapien
gggatgctgagttatccactggagc

SEQ ID NO: 4053857 - DNA, 25 bp, Homo sapien
gatgctgagttatccactggagcat

SEQ ID NO: 4053858 - DNA, 25 bp, Homo sapien
ctgggatgctgagttatccactgga

SEQ ID NO: 4053859 - DNA, 25 bp, Homo sapien
gggacagctgagtggtaggactcct

SEQ ID NO: 4053860 - DNA, 25 bp, Homo sapien
atgcacagaatacatgcacgacaca

SEQ ID NO: 4053861 - DNA, 25 bp, Homo sapien
gcacagaatacatgcacgacacagg

SEQ ID NO: 4053862 - DNA, 25 bp, Homo sapien
cacagaatacatgcacgacacaggg

SEQ ID NO: 4053863 - DNA, 25 bp, Homo sapien
acagaatacatgcacgacacagggg

SEQ ID NO: 4053864 - DNA, 25 bp, Homo sapien
ttcatcatgctggtgatgattttgt

SEQ ID NO: 4053865 - DNA, 25 bp, Homo sapien
tgaagtctactctgtttcatcatgc

SEQ ID NO: 4053866 - DNA, 25 bp, Homo sapien
ttacatctgaccaaactgctttttc

SEQ ID NO: 4053867 - DNA, 25 bp, Homo sapien
gtgatgattttgtgcagctctggga

SEQ ID NO: 4053868 - DNA, 25 bp, Homo sapien
acctccacctcctgaatctaagcaa

SEQ ID NO: 4053869 - DNA, 25 bp, Homo sapien
tagtagggacgaggttttgccatat

SEQ ID NO: 4053870 - DNA, 25 bp, Homo sapien
ccacctcctgaatctaagcaattct

SEQ ID NO: 4053871 - DNA, 25 bp, Homo sapien
tggcgtgatctcggcccactaaaac

SEQ ID NO: 4053872 - DNA, 25 bp, Homo sapien
ccaggccccatctgtctgcactcac

SEQ ID NO: 4053873 - DNA, 25 bp, Homo sapien
gccccatctgtctgcactcactcac

SEQ ID NO: 4053874 - DNA, 25 bp, Homo sapien
ggcaccaggccccatctgtctgcac

SEQ ID NO: 4053875 - DNA, 25 bp, Homo sapien
accaggccccatctgtctgcactca

SEQ ID NO: 4053876 - DNA, 25 bp, Homo sapien
ggcatgtcactgactttacgtgctg

SEQ ID NO: 4053877 - DNA, 25 bp, Homo sapien
tgggcatgtcactgactttacgtgc

SEQ ID NO: 4053878 - DNA, 25 bp, Homo sapien
catgtcactgactttacgtgctgct

SEQ ID NO: 4053879 - DNA, 25 bp, Homo sapien
gcatgggcatgtcactgactttacg

SEQ ID NO: 4053880 - DNA, 25 bp, Homo sapien
tgcagaatgagaacaggggctcatc

SEQ ID NO: 4053881 - DNA, 25 bp, Homo sapien
acaggggctcatcatgagtgccaac

SEQ ID NO: 4053882 - DNA, 25 bp, Homo sapien
agaacaggggctcatcatgagtgcc

SEQ ID NO: 4053883 - DNA, 25 bp, Homo sapien
cagaatgagaacaggggctcatcat

SEQ ID NO: 4053884 - DNA, 25 bp, Homo sapien
tactttgaatttctacttcatgcca

SEQ ID NO: 4053885 - DNA, 25 bp, Homo sapien
ccaagttcaaattcctgtactttga

SEQ ID NO: 4053886 - DNA, 25 bp, Homo sapien
ttgaatttctacttcatgccatgca

SEQ ID NO: 4053887 - DNA, 25 bp, Homo sapien
gatgtttgagtctatagtggtcaag

SEQ ID NO: 4053888 - DNA, 25 bp, Homo sapien
tgtgaaacaggaacaatagtttcat

SEQ ID NO: 4053889 - DNA, 25 bp, Homo sapien
gtgtgaaacaggaacaatagtttca

SEQ ID NO: 4053890 - DNA, 25 bp, Homo sapien
tgaaacaggaacaatagtttcattc

SEQ ID NO: 4053891 - DNA, 25 bp, Homo sapien
tgtgtgaaacaggaacaatagtttc

SEQ ID NO: 4053892 - DNA, 25 bp, Homo sapien
gaatccttagctcattcggttgtgg

SEQ ID NO: 4053893 - DNA, 25 bp, Homo sapien
ccctatttaatcacacaaggccttg

SEQ ID NO: 4053894 - DNA, 25 bp, Homo sapien
ccggagccacactgtttagattcta

SEQ ID NO: 4053895 - DNA, 25 bp, Homo sapien
gtcgaatcaatgcatgtgggctccg

SEQ ID NO: 4053896 - DNA, 25 bp, Homo sapien
atggggttcaggctgccggacacag

SEQ ID NO: 4053897 - DNA, 25 bp, Homo sapien
cagatggggttcaggctgccggaca

SEQ ID NO: 4053898 - DNA, 25 bp, Homo sapien
cccacagatggggttcaggctgccg

SEQ ID NO: 4053899 - DNA, 25 bp, Homo sapien
atccccacagatggggttcaggctg

SEQ ID NO: 4053900 - DNA, 25 bp, Homo sapien
ggaataacgtgacataagtattgtg

SEQ ID NO: 4053901 - DNA, 25 bp, Homo sapien
taacgtgacataagtattgtgacaa

SEQ ID NO: 4053902 - DNA, 25 bp, Homo sapien
gtattgtgacaatacttcttgcatg

SEQ ID NO: 4053903 - DNA, 25 bp, Homo sapien
attgtgacaatacttcttgcatgta

SEQ ID NO: 4053904 - DNA, 25 bp, Homo sapien
gtggagtgcagtggggcgatcttgg

SEQ ID NO: 4053905 - DNA, 25 bp, Homo sapien
tgggttcaggccactctcctgcctc

SEQ ID NO: 4053906 - DNA, 25 bp, Homo sapien
gtctccctctgtcagccagggtgga

SEQ ID NO: 4053907 - DNA, 25 bp, Homo sapien
ggctcacttcaagctccacctcctg

SEQ ID NO: 4053908 - DNA, 25 bp, Homo sapien
tctggtaagttacatgggaatgcta

SEQ ID NO: 4053909 - DNA, 25 bp, Homo sapien
gctaatctacctaaatttagcccaa

SEQ ID NO: 4053910 - DNA, 25 bp, Homo sapien
gaaaatgcccctccaaaaagagctg

SEQ ID NO: 4053911 - DNA, 25 bp, Homo sapien
catgcccggccaattcaggtgactt

SEQ ID NO: 4053912 - DNA, 25 bp, Homo sapien
aaagcaagggatgtccaccgagcct

SEQ ID NO: 4053913 - DNA, 25 bp, Homo sapien
caaaagcaagggatgtccaccgagc

SEQ ID NO: 4053914 - DNA, 25 bp, Homo sapien
aagcaagggatgtccaccgagcctg

SEQ ID NO: 4053915 - DNA, 25 bp, Homo sapien
aaaagcaagggatgtccaccgagcc

SEQ ID NO: 4053916 - DNA, 25 bp, Homo sapien
gggctgaaccgcaaacacgtgccct

SEQ ID NO: 4053917 - DNA, 25 bp, Homo sapien
tcaaagggctgaaccgcaaacacgt

SEQ ID NO: 4053918 - DNA, 25 bp, Homo sapien
ctgctgcggtcatcaaagggctgaa

SEQ ID NO: 4053919 - DNA, 25 bp, Homo sapien
gtcatcaaagggctgaaccgcaaac

SEQ ID NO: 4053920 - DNA, 25 bp, Homo sapien
caggtcggatggtgatggacgggga

SEQ ID NO: 4053921 - DNA, 25 bp, Homo sapien
aggtcggatggtgatggacggggac

SEQ ID NO: 4053922 - DNA, 25 bp, Homo sapien
gcaggtcggatggtgatggacgggg

SEQ ID NO: 4053923 - DNA, 25 bp, Homo sapien
ttcagcgcatcacacgagtgcctct

SEQ ID NO: 4053924 - DNA, 25 bp, Homo sapien
gagattcagcgcatcacacgagtgc

SEQ ID NO: 4053925 - DNA, 25 bp, Homo sapien
ccagagattcagcgcatcacacgag

SEQ ID NO: 4053926 - DNA, 25 bp, Homo sapien
cacgagtgcctctcccggccgactg

SEQ ID NO: 4053927 - DNA, 25 bp, Homo sapien
tgggcactgggacggctttaaacac

SEQ ID NO: 4053928 - DNA, 25 bp, Homo sapien
tgttgggcactgggacggctttaaa

SEQ ID NO: 4053929 - DNA, 25 bp, Homo sapien
atgttgggcactgggacggctttaa

SEQ ID NO: 4053930 - DNA, 25 bp, Homo sapien
ttgggcactgggacggctttaaaca

SEQ ID NO: 4053931 - DNA, 25 bp, Homo sapien
accactggggagctgagctcatctt

SEQ ID NO: 4053932 - DNA, 25 bp, Homo sapien
gagcctggtaattcttggaaaaatc

SEQ ID NO: 4053933 - DNA, 25 bp, Homo sapien
ctgagcctggtaattcttggaaaaa

SEQ ID NO: 4053934 - DNA, 25 bp, Homo sapien
gaaaaatctgaacaccaccactggg

SEQ ID NO: 4053935 - DNA, 25 bp, Homo sapien
taaaaaataactatgagccagcctt

SEQ ID NO: 4053936 - DNA, 25 bp, Homo sapien
cagccttgagagtacactgtgaatt

SEQ ID NO: 4053937 - DNA, 25 bp, Homo sapien
aatttcagttgctagagaaaaatca

SEQ ID NO: 4053938 - DNA, 25 bp, Homo sapien
caagtaacattaaactccagacgcc

SEQ ID NO: 4053939 - DNA, 25 bp, Homo sapien
cattctaaagttctaaaatcattct

SEQ ID NO: 4053940 - DNA, 25 bp, Homo sapien
gaaaacagatgaaattatataccat

SEQ ID NO: 4053941 - DNA, 25 bp, Homo sapien
cattctaagttgctgaagttcaaaa

SEQ ID NO: 4053942 - DNA, 25 bp, Homo sapien
gttctaaaatcattctaagttgctg

SEQ ID NO: 4053943 - DNA, 25 bp, Homo sapien
tcttcaaactttcctgcaaccattg

SEQ ID NO: 4053944 - DNA, 25 bp, Homo sapien
gatgtaattcactttcttcaaactt

SEQ ID NO: 4053945 - DNA, 25 bp, Homo sapien
caagattttgatgtaattcactttc

SEQ ID NO: 4053946 - DNA, 25 bp, Homo sapien
tcaaactttcctgcaaccattgact

SEQ ID NO: 4053947 - DNA, 25 bp, Homo sapien
gcctgacactgaggtgaatgctcaa

SEQ ID NO: 4053948 - DNA, 25 bp, Homo sapien
taatgtctcaatcccaggtccctca

SEQ ID NO: 4053949 - DNA, 25 bp, Homo sapien
cacctgcaggaccacggataagtca

SEQ ID NO: 4053950 - DNA, 25 bp, Homo sapien
tactggacagtagaaagcccctcaa

SEQ ID NO: 4053951 - DNA, 25 bp, Homo sapien
tgtccatgcagtttaacacatgcat

SEQ ID NO: 4053952 - DNA, 25 bp, Homo sapien
taacacatgcattgattagcctttg

SEQ ID NO: 4053953 - DNA, 25 bp, Homo sapien
attagcctttgagtcagcagtagga

SEQ ID NO: 4053954 - DNA, 25 bp, Homo sapien
gacagcattcaaatcctcaggagta

SEQ ID NO: 4053955 - DNA, 25 bp, Homo sapien
tgcccaagccatctctaaactaagt

SEQ ID NO: 4053956 - DNA, 25 bp, Homo sapien
caagggtctggtagttaatggcatc

SEQ ID NO: 4053957 - DNA, 25 bp, Homo sapien
cagagctgtgctgacctcaagggtc

SEQ ID NO: 4053958 - DNA, 25 bp, Homo sapien
gaaattgaaaaaatctcccgagtgc

SEQ ID NO: 4053959 - DNA, 25 bp, Homo sapien
tcccatgctgacagtggtgttcctt

SEQ ID NO: 4053960 - DNA, 25 bp, Homo sapien
cccatgctgacagtggtgttccttt

SEQ ID NO: 4053961 - DNA, 25 bp, Homo sapien
gatcccatgctgacagtggtgttcc

SEQ ID NO: 4053962 - DNA, 25 bp, Homo sapien
ccatgctgacagtggtgttcctttt

SEQ ID NO: 4053963 - DNA, 25 bp, Homo sapien
catcaagtcccaagtattgtaaaga

SEQ ID NO: 4053964 - DNA, 25 bp, Homo sapien
ttgtaaagataaccacagaggcagg

SEQ ID NO: 4053965 - DNA, 25 bp, Homo sapien
gcacggagtttgtctgtgggcttat

SEQ ID NO: 4053966 - DNA, 25 bp, Homo sapien
cagttgacaggcatgcttgatcctc

SEQ ID NO: 4053967 - DNA, 25 bp, Homo sapien
tcgtgtttatacagtgtcaccgcag

SEQ ID NO: 4053968 - DNA, 25 bp, Homo sapien
gtgtttatacagtgtcaccgcagga

SEQ ID NO: 4053969 - DNA, 25 bp, Homo sapien
tgtttatacagtgtcaccgcaggaa

SEQ ID NO: 4053970 - DNA, 25 bp, Homo sapien
gtttatacagtgtcaccgcaggaac

SEQ ID NO: 4053971 - DNA, 25 bp, Homo sapien
gtcatgctatcacatttggctgcag

SEQ ID NO: 4053972 - DNA, 25 bp, Homo sapien
tcatgctatcacatttggctgcagc

SEQ ID NO: 4053973 - DNA, 25 bp, Homo sapien
caggagggattgagtgattttaaat

SEQ ID NO: 4053974 - DNA, 25 bp, Homo sapien
tgtgaagagccaggagggattgagt

SEQ ID NO: 4053975 - DNA, 25 bp, Homo sapien
cattcttaaaaacaccaatattcag

SEQ ID NO: 4053976 - DNA, 25 bp, Homo sapien
agaacaactctttgttagattatca

SEQ ID NO: 4053977 - DNA, 25 bp, Homo sapien
agcactgatgaggagacataaccca

SEQ ID NO: 4053978 - DNA, 25 bp, Homo sapien
acataacccagagccaatgttgcca

SEQ ID NO: 4053979 - DNA, 25 bp, Homo sapien
cagagccaatgttgccagattcaca

SEQ ID NO: 4053980 - DNA, 25 bp, Homo sapien
cactgatgaggagacataacccaga

SEQ ID NO: 4053981 - DNA, 25 bp, Homo sapien
taattatttaatgttgcttactcac

SEQ ID NO: 4053982 - DNA, 25 bp, Homo sapien
tatttaatgttgcttactcaccatg

SEQ ID NO: 4053983 - DNA, 25 bp, Homo sapien
aacaccagtctaagaactaattatt

SEQ ID NO: 4053984 - DNA, 25 bp, Homo sapien
taatgttgcttactcaccatgtact

SEQ ID NO: 4053985 - DNA, 25 bp, Homo sapien
cacatgaagccatatgccatactgc

SEQ ID NO: 4053986 - DNA, 25 bp, Homo sapien
aagccatatgccatactgctcacag

SEQ ID NO: 4053987 - DNA, 25 bp, Homo sapien
cctccacatgaagccatatgccata

SEQ ID NO: 4053988 - DNA, 25 bp, Homo sapien
ctcccaatcttgtctgtgtgtccta

SEQ ID NO: 4053989 - DNA, 25 bp, Homo sapien
tatagagcatgtaaccatcaacaca

SEQ ID NO: 4053990 - DNA, 25 bp, Homo sapien
ggccctggaaaatcctgatctgctt

SEQ ID NO: 4053991 - DNA, 25 bp, Homo sapien
ccatgctcggcctattgtagtatga

SEQ ID NO: 4053992 - DNA, 25 bp, Homo sapien
catgtaagtatacggtccaatgagt

SEQ ID NO: 4053993 - DNA, 25 bp, Homo sapien
tgtagagatttcctagggctttcgc

SEQ ID NO: 4053994 - DNA, 25 bp, Homo sapien
agagatttcctagggctttcgccat

SEQ ID NO: 4053995 - DNA, 25 bp, Homo sapien
tagagatttcctagggctttcgcca

SEQ ID NO: 4053996 - DNA, 25 bp, Homo sapien
tttgtagagatttcctagggctttc

SEQ ID NO: 4053997 - DNA, 25 bp, Homo sapien
gcaacaggggcagtcttcctcgctc

SEQ ID NO: 4053998 - DNA, 25 bp, Homo sapien
tgcgacaagcaacaggggcagtctt

SEQ ID NO: 4053999 - DNA, 25 bp, Homo sapien
gtcttcctcgctctatatcatcttt

SEQ ID NO: 4054000 - DNA, 25 bp, Homo sapien
tgcatttgcgacaagcaacaggggc

SEQ ID NO: 4054001 - DNA, 25 bp, Homo sapien
tgttacagggtacacggcacaagca

SEQ ID NO: 4054002 - DNA, 25 bp, Homo sapien
agtgttacagggtacacggcacaag

SEQ ID NO: 4054003 - DNA, 25 bp, Homo sapien
ttacagggtacacggcacaagcagg

SEQ ID NO: 4054004 - DNA, 25 bp, Homo sapien
gtgttacagggtacacggcacaagc

SEQ ID NO: 4054005 - DNA, 25 bp, Homo sapien
gattacaaaggtattggcccaggcc

SEQ ID NO: 4054006 - DNA, 25 bp, Homo sapien
gcagcagcactaagatatatgacag

SEQ ID NO: 4054007 - DNA, 25 bp, Homo sapien
tcctcttcgtggaaataagcacacc

SEQ ID NO: 4054008 - DNA, 25 bp, Homo sapien
gaagccatccactacgaagtcttca

SEQ ID NO: 4054009 - DNA, 25 bp, Homo sapien
taaaaagatgggtgcctctgtactg

SEQ ID NO: 4054010 - DNA, 25 bp, Homo sapien
gacatgtgccaattagataccccac

SEQ ID NO: 4054011 - DNA, 25 bp, Homo sapien
caaggacacccaaggataagggaca

SEQ ID NO: 4054012 - DNA, 25 bp, Homo sapien
acagacattgagaggttaaacaccc

SEQ ID NO: 4054013 - DNA, 25 bp, Homo sapien
agcttctcttcgtccagagtcaaaa

SEQ ID NO: 4054014 - DNA, 25 bp, Homo sapien
cttctcttcgtccagagtcaaaata

SEQ ID NO: 4054015 - DNA, 25 bp, Homo sapien
cagcttctcttcgtccagagtcaaa

SEQ ID NO: 4054016 - DNA, 25 bp, Homo sapien
gcttctcttcgtccagagtcaaaat

SEQ ID NO: 4054017 - DNA, 25 bp, Homo sapien
ctgaactaactggaggatgctcacc

SEQ ID NO: 4054018 - DNA, 25 bp, Homo sapien
tgaactaactggaggatgctcacca

SEQ ID NO: 4054019 - DNA, 25 bp, Homo sapien
gaactaactggaggatgctcaccat

SEQ ID NO: 4054020 - DNA, 25 bp, Homo sapien
ttgatgggctgatgggaacagcaca

SEQ ID NO: 4054021 - DNA, 25 bp, Homo sapien
gttgatgggctgatgggaacagcac

SEQ ID NO: 4054022 - DNA, 25 bp, Homo sapien
acagcacacatcccccgccactctc

SEQ ID NO: 4054023 - DNA, 25 bp, Homo sapien
cctcattcaactggcgttgcttcaa

SEQ ID NO: 4054024 - DNA, 25 bp, Homo sapien
tcaactggcgttgcttcaagttttt

SEQ ID NO: 4054025 - DNA, 25 bp, Homo sapien
cattcaactggcgttgcttcaagtt

SEQ ID NO: 4054026 - DNA, 25 bp, Homo sapien
ccctcattcaactggcgttgcttca

SEQ ID NO: 4054027 - DNA, 25 bp, Homo sapien
tatctctggatatgagcttctttcc

SEQ ID NO: 4054028 - DNA, 25 bp, Homo sapien
tggaatatctctggatatgagcttc

SEQ ID NO: 4054029 - DNA, 25 bp, Homo sapien
gaatatctctggatatgagcttctt

SEQ ID NO: 4054030 - DNA, 25 bp, Homo sapien
ctggaatatctctggatatgagctt

SEQ ID NO: 4054031 - DNA, 25 bp, Homo sapien
cccatttcagctaacgtggggtctg

SEQ ID NO: 4054032 - DNA, 25 bp, Homo sapien
ttcccatttcagctaacgtggggtc

SEQ ID NO: 4054033 - DNA, 25 bp, Homo sapien
tcccatttcagctaacgtggggtct

SEQ ID NO: 4054034 - DNA, 25 bp, Homo sapien
aattttagtgccatgtgtacaccta

SEQ ID NO: 4054035 - DNA, 25 bp, Homo sapien
atgtgtacacctatctcccatccaa

SEQ ID NO: 4054036 - DNA, 25 bp, Homo sapien
gtgccatgtgtacacctatctccca

SEQ ID NO: 4054037 - DNA, 25 bp, Homo sapien
tagtgccatgtgtacacctatctcc

SEQ ID NO: 4054038 - DNA, 25 bp, Homo sapien
aggctacagtaagctatgattgtgt

SEQ ID NO: 4054039 - DNA, 25 bp, Homo sapien
ggctacagtaagctatgattgtgtc

SEQ ID NO: 4054040 - DNA, 25 bp, Homo sapien
ctccagcctggaacagagtaaaacc

SEQ ID NO: 4054041 - DNA, 25 bp, Homo sapien
gcactccagcctggaacagagtaaa

SEQ ID NO: 4054042 - DNA, 25 bp, Homo sapien
cagggacgcgtccatggctgaggcg

SEQ ID NO: 4054043 - DNA, 25 bp, Homo sapien
agggacgcgtccatggctgaggcgg

SEQ ID NO: 4054044 - DNA, 25 bp, Homo sapien
ccaggcggcgccgccggctgccgaa

SEQ ID NO: 4054045 - DNA, 25 bp, Homo sapien
caggcggcgccgccggctgccgaac

SEQ ID NO: 4054046 - DNA, 25 bp, Homo sapien
tgccaggcggcgccgccggctgccg

SEQ ID NO: 4054047 - DNA, 25 bp, Homo sapien
ctgccaggcggcgccgccggctgcc

SEQ ID NO: 4054048 - DNA, 25 bp, Homo sapien
cattcgccaaggaggcggtgagcga

SEQ ID NO: 4054049 - DNA, 25 bp, Homo sapien
ccgccggcatccctcgagaatggaa

SEQ ID NO: 4054050 - DNA, 25 bp, Homo sapien
tggaacaggccattcgccaaggagg

SEQ ID NO: 4054051 - DNA, 25 bp, Homo sapien
gagaatggaacaggccattcgccaa

SEQ ID NO: 4054052 - DNA, 25 bp, Homo sapien
tctccagacaaaccgttccttcacg

SEQ ID NO: 4054053 - DNA, 25 bp, Homo sapien
tccagacaaaccgttccttcacgta

SEQ ID NO: 4054054 - DNA, 25 bp, Homo sapien
cagacaaaccgttccttcacgtagc

SEQ ID NO: 4054055 - DNA, 25 bp, Homo sapien
gtctccagacaaaccgttccttcac

SEQ ID NO: 4054056 - DNA, 25 bp, Homo sapien
ttctgccaggtctgggtacttagga

SEQ ID NO: 4054057 - DNA, 25 bp, Homo sapien
caggtctgggtacttaggaaggtgg

SEQ ID NO: 4054058 - DNA, 25 bp, Homo sapien
tgggtacttaggaaggtggacatcc

SEQ ID NO: 4054059 - DNA, 25 bp, Homo sapien
gccttcatgatgtaaaggttgggca

SEQ ID NO: 4054060 - DNA, 25 bp, Homo sapien
ttggtggctgcagggcccagttccg

SEQ ID NO: 4054061 - DNA, 25 bp, Homo sapien
cttggtggctgcagggcccagttcc

SEQ ID NO: 4054062 - DNA, 25 bp, Homo sapien
gtggctgcagggcccagttccgggg

SEQ ID NO: 4054063 - DNA, 25 bp, Homo sapien
tggtggctgcagggcccagttccgg

SEQ ID NO: 4054064 - DNA, 25 bp, Homo sapien
tcagagaacaaccaggatcaggcca

SEQ ID NO: 4054065 - DNA, 25 bp, Homo sapien
caacagccccaggtagcagtaggtg

SEQ ID NO: 4054066 - DNA, 25 bp, Homo sapien
caggatcaggccatagaactgagct

SEQ ID NO: 4054067 - DNA, 25 bp, Homo sapien
aggccatagaactgagctgcaccca

SEQ ID NO: 4054068 - DNA, 25 bp, Homo sapien
cccatggtgtgaatgagaacatccc

SEQ ID NO: 4054069 - DNA, 25 bp, Homo sapien
tgtgaatgagaacatccctgctttc

SEQ ID NO: 4054070 - DNA, 25 bp, Homo sapien
tctcttcccatggtgtgaatgagaa

SEQ ID NO: 4054071 - DNA, 25 bp, Homo sapien
atgagaacatccctgctttccacac

SEQ ID NO: 4054072 - DNA, 25 bp, Homo sapien
gagaagcatgccaggtgtcaggtcc

SEQ ID NO: 4054073 - DNA, 25 bp, Homo sapien
aaacacaggctctcaagcacacgag

SEQ ID NO: 4054074 - DNA, 25 bp, Homo sapien
tgtcaggtcctttctgtgaagtcgg

SEQ ID NO: 4054075 - DNA, 25 bp, Homo sapien
aagtcggttgtaggcagatgtccag

SEQ ID NO: 4054076 - DNA, 25 bp, Homo sapien
cagggaggtaagataaacgcctgca

SEQ ID NO: 4054077 - DNA, 25 bp, Homo sapien
agggaggtaagataaacgcctgcat

SEQ ID NO: 4054078 - DNA, 25 bp, Homo sapien
ctgcagggaggtaagataaacgcct

SEQ ID NO: 4054079 - DNA, 25 bp, Homo sapien
tgcagggaggtaagataaacgcctg

SEQ ID NO: 4054080 - DNA, 25 bp, Homo sapien
cgatgtgtgatacctcggatttgaa

SEQ ID NO: 4054081 - DNA, 25 bp, Homo sapien
gggccgatgtgtgatacctcggatt

SEQ ID NO: 4054082 - DNA, 25 bp, Homo sapien
tgtgatacctcggatttgaatcaag

SEQ ID NO: 4054083 - DNA, 25 bp, Homo sapien
gatacctcggatttgaatcaagaat

SEQ ID NO: 4054084 - DNA, 25 bp, Homo sapien
ggagatgtggtcacgtaactgtata

SEQ ID NO: 4054085 - DNA, 25 bp, Homo sapien
taactgtataatctttaggtgacag

SEQ ID NO: 4054086 - DNA, 25 bp, Homo sapien
gctctgaaaacagttacagaagagg

SEQ ID NO: 4054087 - DNA, 25 bp, Homo sapien
gaccagttctcttgagtgatttgta

SEQ ID NO: 4054088 - DNA, 25 bp, Homo sapien
gacctcctggcattggagcagagca

SEQ ID NO: 4054089 - DNA, 25 bp, Homo sapien
taagccagattggtttgacatcgtg

SEQ ID NO: 4054090 - DNA, 25 bp, Homo sapien
cgtggactacactaaactctacagg

SEQ ID NO: 4054091 - DNA, 25 bp, Homo sapien
gagcaagactttctataagccagat

SEQ ID NO: 4054092 - DNA, 25 bp, Homo sapien
ctcttttctgtacacagagtaactt

SEQ ID NO: 4054093 - DNA, 25 bp, Homo sapien
tggcctcttttctgtacacagagta

SEQ ID NO: 4054094 - DNA, 25 bp, Homo sapien
tgtggcctcttttctgtacacagag

SEQ ID NO: 4054095 - DNA, 25 bp, Homo sapien
gcctcttttctgtacacagagtaac

SEQ ID NO: 4054096 - DNA, 25 bp, Homo sapien
gaagctgctgattagagagggccaa

SEQ ID NO: 4054097 - DNA, 25 bp, Homo sapien
gagggccaaacggacagacatcttg

SEQ ID NO: 4054098 - DNA, 25 bp, Homo sapien
tctccgaggcaaagtgaaagcaaca

SEQ ID NO: 4054099 - DNA, 25 bp, Homo sapien
tcatcttttgtatggcaggcggcca

SEQ ID NO: 4054100 - DNA, 25 bp, Homo sapien
gagatggtaacagtagcaagcagag

SEQ ID NO: 4054101 - DNA, 25 bp, Homo sapien
tgagatggtaacagtagcaagcaga

SEQ ID NO: 4054102 - DNA, 25 bp, Homo sapien
tgatgagcatgacgcacacaggaga

SEQ ID NO: 4054103 - DNA, 25 bp, Homo sapien
agtgtgggctatgcaaatgggatcc

SEQ ID NO: 4054104 - DNA, 25 bp, Homo sapien
tctacatccccatagaggtgagagg

SEQ ID NO: 4054105 - DNA, 25 bp, Homo sapien
tgacaagtaatgtgagtgcccaggc

SEQ ID NO: 4054106 - DNA, 25 bp, Homo sapien
ccagcactggcaggtttggagagct

SEQ ID NO: 4054107 - DNA, 25 bp, Homo sapien
agtgctcccagcagcgcgttcacca

SEQ ID NO: 4054108 - DNA, 25 bp, Homo sapien
ctgtatctgattgggccttgggagc

SEQ ID NO: 4054109 - DNA, 25 bp, Homo sapien
tttggagagctgtatctgattgggc

SEQ ID NO: 4054110 - DNA, 25 bp, Homo sapien
gacaggtagcaatcaatgattgtag

SEQ ID NO: 4054111 - DNA, 25 bp, Homo sapien
tgttctattgtgacaggtagcaatc

SEQ ID NO: 4054112 - DNA, 25 bp, Homo sapien
tccttcctttgttctattgtgacag

SEQ ID NO: 4054113 - DNA, 25 bp, Homo sapien
gcacccgggcccatagtctttcttc

SEQ ID NO: 4054114 - DNA, 25 bp, Homo sapien
ccacagatgcccagctatcttttat

SEQ ID NO: 4054115 - DNA, 25 bp, Homo sapien
tgagccactaccccgaccttattta

SEQ ID NO: 4054116 - DNA, 25 bp, Homo sapien
tgtttttagacggagcctcccactg

SEQ ID NO: 4054117 - DNA, 25 bp, Homo sapien
gagtagataggaccacagatgccca

SEQ ID NO: 4054118 - DNA, 25 bp, Homo sapien
ccctgggctgttcccattcttatga

SEQ ID NO: 4054119 - DNA, 25 bp, Homo sapien
tgtgagaaaaacgagtaaatggtgg

SEQ ID NO: 4054120 - DNA, 25 bp, Homo sapien
tcacctgggtgcttgtggtcaaacc

SEQ ID NO: 4054121 - DNA, 25 bp, Homo sapien
gcagcttcatccttgcttggaggcc

SEQ ID NO: 4054122 - DNA, 25 bp, Homo sapien
agttgtcttgatcatagtggtctgt

SEQ ID NO: 4054123 - DNA, 25 bp, Homo sapien
gatcatagtggtctgtttggtagat

SEQ ID NO: 4054124 - DNA, 25 bp, Homo sapien
aagctggttctttgctacgtcttgc

SEQ ID NO: 4054125 - DNA, 25 bp, Homo sapien
tgcctgttcagctacagtggtgcag

SEQ ID NO: 4054126 - DNA, 25 bp, Homo sapien
ggtattacgctcttcgcagtctccg

SEQ ID NO: 4054127 - DNA, 25 bp, Homo sapien
tgcactagactaggaagaagaactg

SEQ ID NO: 4054128 - DNA, 25 bp, Homo sapien
gtgttggccagaaatacggaatccg

SEQ ID NO: 4054129 - DNA, 25 bp, Homo sapien
gaatccggaatgctgggtattacgc

SEQ ID NO: 4054130 - DNA, 25 bp, Homo sapien
tacgttgcataaggctagagaccgc

SEQ ID NO: 4054131 - DNA, 25 bp, Homo sapien
tctgagtccaaagggtgtacgttgc

SEQ ID NO: 4054132 - DNA, 25 bp, Homo sapien
gaggtgacccacgttagtccactga

SEQ ID NO: 4054133 - DNA, 25 bp, Homo sapien
cagttggcccataaagtcatgtttc

SEQ ID NO: 4054134 - DNA, 25 bp, Homo sapien
accaccggtgtcagatatcagagca

SEQ ID NO: 4054135 - DNA, 25 bp, Homo sapien
ccagcaggaataaggagggacaacc

SEQ ID NO: 4054136 - DNA, 25 bp, Homo sapien
ggagagggcagcataacttcctgac

SEQ ID NO: 4054137 - DNA, 25 bp, Homo sapien
tttgtgctcaccacgaaggatggtc

SEQ ID NO: 4054138 - DNA, 25 bp, Homo sapien
ccacgtgtgacttctgttcttagca

SEQ ID NO: 4054139 - DNA, 25 bp, Homo sapien
gttcttagcactgccagggtcattg

SEQ ID NO: 4054140 - DNA, 25 bp, Homo sapien
tcatcgtcaggccacgtgtgacttc

SEQ ID NO: 4054141 - DNA, 25 bp, Homo sapien
gtgacttctgttcttagcactgcca

SEQ ID NO: 4054142 - DNA, 25 bp, Homo sapien
ctaagcttgcatcaggaagatgttc

SEQ ID NO: 4054143 - DNA, 25 bp, Homo sapien
ccagaaaagctctcattcaggaact

SEQ ID NO: 4054144 - DNA, 25 bp, Homo sapien
caggaagatgttccttctgtgatca

SEQ ID NO: 4054145 - DNA, 25 bp, Homo sapien
tctgtgatcattggtactgaagcca

SEQ ID NO: 4054146 - DNA, 25 bp, Homo sapien
ggcatttgcctgagtctacaccact

SEQ ID NO: 4054147 - DNA, 25 bp, Homo sapien
catgcatttgaaagttagcctcctc

SEQ ID NO: 4054148 - DNA, 25 bp, Homo sapien
aatgatgggagctttccgagagcgt

SEQ ID NO: 4054149 - DNA, 25 bp, Homo sapien
gaagacaggacccatagccttcatt

SEQ ID NO: 4054150 - DNA, 25 bp, Homo sapien
cacttcaggccaacaatttaaggtg

SEQ ID NO: 4054151 - DNA, 25 bp, Homo sapien
tccattgtcagtacagggctcgcct

SEQ ID NO: 4054152 - DNA, 25 bp, Homo sapien
cccaggccttgtgtacacgcaataa

SEQ ID NO: 4054153 - DNA, 25 bp, Homo sapien
gagttgtaaggctcctccattgtca

SEQ ID NO: 4054154 - DNA, 25 bp, Homo sapien
agttcatctcggtgtgtgggttccc

SEQ ID NO: 4054155 - DNA, 25 bp, Homo sapien
tccttcttcggaacaatgggcgtgg

SEQ ID NO: 4054156 - DNA, 25 bp, Homo sapien
gtgtagttacaatctggccctgaag

SEQ ID NO: 4054157 - DNA, 25 bp, Homo sapien
cacagggtgaccgagcatttctgcc

SEQ ID NO: 4054158 - DNA, 25 bp, Homo sapien
aaaagtaaccactggcgccttggtg

SEQ ID NO: 4054159 - DNA, 25 bp, Homo sapien
tggagtccccaagtgccactagtgc

SEQ ID NO: 4054160 - DNA, 25 bp, Homo sapien
actccaggtgcatgcggtgagttaa

SEQ ID NO: 4054161 - DNA, 25 bp, Homo sapien
cgccttggtgcagatggaactccag

SEQ ID NO: 4054162 - DNA, 25 bp, Homo sapien
agctcactctggtgggatcacgcca

SEQ ID NO: 4054163 - DNA, 25 bp, Homo sapien
tgtcctttgccctggttgaataacc

SEQ ID NO: 4054164 - DNA, 25 bp, Homo sapien
gacgtagttggtttgcaaggctgtc

SEQ ID NO: 4054165 - DNA, 25 bp, Homo sapien
caaactccagaaggaggacgtagtt

SEQ ID NO: 4054166 - DNA, 25 bp, Homo sapien
ggtccgcaggccacacccagagaaa

SEQ ID NO: 4054167 - DNA, 25 bp, Homo sapien
ctggtgcgggacgacctgctcccga

SEQ ID NO: 4054168 - DNA, 25 bp, Homo sapien
tttgaccccctgaatcagcgtcggg

SEQ ID NO: 4054169 - DNA, 25 bp, Homo sapien
acccagagaaactggggcgcctcca

SEQ ID NO: 4054170 - DNA, 25 bp, Homo sapien
caatgggattagctgtcttgccagg

SEQ ID NO: 4054171 - DNA, 25 bp, Homo sapien
tttaagctatgtggcgctgttagca

SEQ ID NO: 4054172 - DNA, 25 bp, Homo sapien
tgcccagcagatcttgacttcagtg

SEQ ID NO: 4054173 - DNA, 25 bp, Homo sapien
ggcacactcgggttttctaaccata

SEQ ID NO: 4054174 - DNA, 25 bp, Homo sapien
actcatcaaaccatacacttagaat

SEQ ID NO: 4054175 - DNA, 25 bp, Homo sapien
caaaccatacacttagaatgtgtaa

SEQ ID NO: 4054176 - DNA, 25 bp, Homo sapien
cacacaagtgaagacatgttagaac

SEQ ID NO: 4054177 - DNA, 25 bp, Homo sapien
atcgtattggtggtcacacaagtga

SEQ ID NO: 4054178 - DNA, 25 bp, Homo sapien
catgctgtttacatgaacgtaaagc

SEQ ID NO: 4054179 - DNA, 25 bp, Homo sapien
tcatgctgtttacatgaacgtaaag

SEQ ID NO: 4054180 - DNA, 25 bp, Homo sapien
caccgaagagtggaataagacagtc

SEQ ID NO: 4054181 - DNA, 25 bp, Homo sapien
tcaccgaagagtggaataagacagt

SEQ ID NO: 4054182 - DNA, 25 bp, Homo sapien
gcctaaaggaactgtctttacatac

SEQ ID NO: 4054183 - DNA, 25 bp, Homo sapien
tttgccatccttgcgattatctcag

SEQ ID NO: 4054184 - DNA, 25 bp, Homo sapien
taaggtctttgttctacagtaatga

SEQ ID NO: 4054185 - DNA, 25 bp, Homo sapien
tctggatttaccagcttgcccaact

SEQ ID NO: 4054186 - DNA, 25 bp, Homo sapien
gatgcgggatgtttgcttcaagtac

SEQ ID NO: 4054187 - DNA, 25 bp, Homo sapien
gatcttgttctatcgggtttaaagc

SEQ ID NO: 4054188 - DNA, 25 bp, Homo sapien
cttctgatcttgttctatcgggttt

SEQ ID NO: 4054189 - DNA, 25 bp, Homo sapien
ttctatcgggtttaaagcagttgcc

SEQ ID NO: 4054190 - DNA, 25 bp, Homo sapien
aagcagttgccaaacaaacagaact

SEQ ID NO: 4054191 - DNA, 25 bp, Homo sapien
cagcaagtagattgatattttctcc

SEQ ID NO: 4054192 - DNA, 25 bp, Homo sapien
cctccagcaagtagattgatatttt

SEQ ID NO: 4054193 - DNA, 25 bp, Homo sapien
atattttctcctggtaacaattcta

SEQ ID NO: 4054194 - DNA, 25 bp, Homo sapien
tgatattttctcctggtaacaattc

SEQ ID NO: 4054195 - DNA, 25 bp, Homo sapien
tattggttagcttgtattcctacgc

SEQ ID NO: 4054196 - DNA, 25 bp, Homo sapien
aatattggttagcttgtattcctac

SEQ ID NO: 4054197 - DNA, 25 bp, Homo sapien
taaaatattggttagcttgtattcc

SEQ ID NO: 4054198 - DNA, 25 bp, Homo sapien
tggttagcttgtattcctacgcagc

SEQ ID NO: 4054199 - DNA, 25 bp, Homo sapien
ctttcactgctggcatccctccatc

SEQ ID NO: 4054200 - DNA, 25 bp, Homo sapien
tatgaaaaataatgacacctctgaa

SEQ ID NO: 4054201 - DNA, 25 bp, Homo sapien
tcactgctggcatccctccatctct

SEQ ID NO: 4054202 - DNA, 25 bp, Homo sapien
taatcttgtatctcagtcctggctt

SEQ ID NO: 4054203 - DNA, 25 bp, Homo sapien
acaggcctcccagctatttccagaa

SEQ ID NO: 4054204 - DNA, 25 bp, Homo sapien
tgtgtgctcctactccagttaatag

SEQ ID NO: 4054205 - DNA, 25 bp, Homo sapien
gtttaaggtgctcctaaacacacag

SEQ ID NO: 4054206 - DNA, 25 bp, Homo sapien
ttcagtcttactagaataacagcca

SEQ ID NO: 4054207 - DNA, 25 bp, Homo sapien
ggaagtgctactggtactctttttc

SEQ ID NO: 4054208 - DNA, 25 bp, Homo sapien
agtgctactggtactctttttcaag

SEQ ID NO: 4054209 - DNA, 25 bp, Homo sapien
tactggtactctttttcaagtcatg

SEQ ID NO: 4054210 - DNA, 25 bp, Homo sapien
gctactggtactctttttcaagtca

SEQ ID NO: 4054211 - DNA, 25 bp, Homo sapien
acagcagcgcaatcggcaattgaga

SEQ ID NO: 4054212 - DNA, 25 bp, Homo sapien
ctgcacagcagcgcaatcggcaatt

SEQ ID NO: 4054213 - DNA, 25 bp, Homo sapien
tgcacagcagcgcaatcggcaattg

SEQ ID NO: 4054214 - DNA, 25 bp, Homo sapien
tcggcaattgagatgtagcactcac

SEQ ID NO: 4054215 - DNA, 25 bp, Homo sapien
ataatttataacctcaggggaagag

SEQ ID NO: 4054216 - DNA, 25 bp, Homo sapien
ggaagagtcagtcggtttggacagc

SEQ ID NO: 4054217 - DNA, 25 bp, Homo sapien
agagtcagtcggtttggacagcaca

SEQ ID NO: 4054218 - DNA, 25 bp, Homo sapien
taacctcaggggaagagtcagtcgg

SEQ ID NO: 4054219 - DNA, 25 bp, Homo sapien
tggcactgttacacccagcattggc

SEQ ID NO: 4054220 - DNA, 25 bp, Homo sapien
cagacaatgtttcgggctggcactg

SEQ ID NO: 4054221 - DNA, 25 bp, Homo sapien
tgagcaccaatttgtcaaagctgga

SEQ ID NO: 4054222 - DNA, 25 bp, Homo sapien
gatgcagcaatcaacacctgtcatg

SEQ ID NO: 4054223 - DNA, 25 bp, Homo sapien
tgttgagccactgagttaatccaca

SEQ ID NO: 4054224 - DNA, 25 bp, Homo sapien
ttttccaacaatagatgatgaccag

SEQ ID NO: 4054225 - DNA, 25 bp, Homo sapien
atagcttcaggacaatgaagttcac

SEQ ID NO: 4054226 - DNA, 25 bp, Homo sapien
gatgatgaccagacagcaattccct

SEQ ID NO: 4054227 - DNA, 25 bp, Homo sapien
caggctggcctgccaacaatcctac

SEQ ID NO: 4054228 - DNA, 25 bp, Homo sapien
tcaaagccatgtctcactgtcactg

SEQ ID NO: 4054229 - DNA, 25 bp, Homo sapien
gatggagagtcgaatccgcgttagc

SEQ ID NO: 4054230 - DNA, 25 bp, Homo sapien
cctcatgatggagagtcgaatccgc

SEQ ID NO: 4054231 - DNA, 25 bp, Homo sapien
ggagagtcgaatccgcgttagccag

SEQ ID NO: 4054232 - DNA, 25 bp, Homo sapien
catgatggagagtcgaatccgcgtt

SEQ ID NO: 4054233 - DNA, 25 bp, Homo sapien
agaagaagaacaagtctaagttggt

SEQ ID NO: 4054234 - DNA, 25 bp, Homo sapien
taacatcctgatcagggtttaatgt

SEQ ID NO: 4054235 - DNA, 25 bp, Homo sapien
gcagttgtccactgactaacatcct

SEQ ID NO: 4054236 - DNA, 25 bp, Homo sapien
tgtctgcagttgtccactgactaac

SEQ ID NO: 4054237 - DNA, 25 bp, Homo sapien
ctgactaacatcctgatcagggttt

SEQ ID NO: 4054238 - DNA, 25 bp, Homo sapien
agattgcgtggaattgttgactggt

SEQ ID NO: 4054239 - DNA, 25 bp, Homo sapien
cccagtggggttctcagcttagaaa

SEQ ID NO: 4054240 - DNA, 25 bp, Homo sapien
gcatctgtcttcaggagattgcgtg

SEQ ID NO: 4054241 - DNA, 25 bp, Homo sapien
acagtgaattgtgcagcttcccata

SEQ ID NO: 4054242 - DNA, 25 bp, Homo sapien
ctcatgtgacttcttaatgctaaag

SEQ ID NO: 4054243 - DNA, 25 bp, Homo sapien
tgtgacttcttaatgctaaagaaat

SEQ ID NO: 4054244 - DNA, 25 bp, Homo sapien
cttggtgctttactcatgtgacttc

SEQ ID NO: 4054245 - DNA, 25 bp, Homo sapien
acttggtgctttactcatgtgactt

SEQ ID NO: 4054246 - DNA, 25 bp, Homo sapien
aatcattatgcttatgtattacaaa

SEQ ID NO: 4054247 - DNA, 25 bp, Homo sapien
tgagggaggcatatcaaacatgtga

SEQ ID NO: 4054248 - DNA, 25 bp, Homo sapien
agttttccaaatgcttgtcgaatac

SEQ ID NO: 4054249 - DNA, 25 bp, Homo sapien
cagttttccaaatgcttgtcgaata

SEQ ID NO: 4054250 - DNA, 25 bp, Homo sapien
gcatgcctgcagacagatattcaca

SEQ ID NO: 4054251 - DNA, 25 bp, Homo sapien
ctaaaaggcctttgcaaaatttatg

SEQ ID NO: 4054252 - DNA, 25 bp, Homo sapien
tccaaagcccaagtcattaacagtt

SEQ ID NO: 4054253 - DNA, 25 bp, Homo sapien
ctcgtgtcctggttaaggttatctt

SEQ ID NO: 4054254 - DNA, 25 bp, Homo sapien
attcttactcagaagtgcaaagaca

SEQ ID NO: 4054255 - DNA, 25 bp, Homo sapien
aagacagttggagatagcgcccaca

SEQ ID NO: 4054256 - DNA, 25 bp, Homo sapien
tgaacagccaggtcactgtgcacaa

SEQ ID NO: 4054257 - DNA, 25 bp, Homo sapien
gtgtagagcacagcatactgaatgg

SEQ ID NO: 4054258 - DNA, 25 bp, Homo sapien
taaagcctttgcgtgcaatatagca

SEQ ID NO: 4054259 - DNA, 25 bp, Homo sapien
gatctagtacactacacctgggaca

SEQ ID NO: 4054260 - DNA, 25 bp, Homo sapien
ttaaaattacagactggaagggatc

SEQ ID NO: 4054261 - DNA, 25 bp, Homo sapien
tacagagtttatccttcaaaacagg

SEQ ID NO: 4054262 - DNA, 25 bp, Homo sapien
atatcgatttaagggcctgaataaa

SEQ ID NO: 4054263 - DNA, 25 bp, Homo sapien
gcctgaataaaccaacacattaaaa

SEQ ID NO: 4054264 - DNA, 25 bp, Homo sapien
taagggcctgaataaaccaacacat

SEQ ID NO: 4054265 - DNA, 25 bp, Homo sapien
tcgatttaagggcctgaataaacca

SEQ ID NO: 4054266 - DNA, 25 bp, Homo sapien
aaaaacacctggtttgcagccgtca

SEQ ID NO: 4054267 - DNA, 25 bp, Homo sapien
caatgtatagtcatgctaggatcca

SEQ ID NO: 4054268 - DNA, 25 bp, Homo sapien
taggatccaagctgccgagcaaaac

SEQ ID NO: 4054269 - DNA, 25 bp, Homo sapien
ggtaccacaagtctggcaattctcc

SEQ ID NO: 4054270 - DNA, 25 bp, Homo sapien
ctgaagcgttccccaatgctcctca

SEQ ID NO: 4054271 - DNA, 25 bp, Homo sapien
tcagctttggtaatgacactgatgg

SEQ ID NO: 4054272 - DNA, 25 bp, Homo sapien
tactaaatacccggagaagcgcagt

SEQ ID NO: 4054273 - DNA, 25 bp, Homo sapien
cactgatggaggagggacgtcttca

SEQ ID NO: 4054274 - DNA, 25 bp, Homo sapien
gaggagggacgtcttcatccactga

SEQ ID NO: 4054275 - DNA, 25 bp, Homo sapien
aaatgcaagatcagctacccaaaat

SEQ ID NO: 4054276 - DNA, 25 bp, Homo sapien
ctgctgcgtgagcgaaggtttctga

SEQ ID NO: 4054277 - DNA, 25 bp, Homo sapien
cgtgagcgaaggtttctgagtatga

SEQ ID NO: 4054278 - DNA, 25 bp, Homo sapien
gagcgaaggtttctgagtatgatct

SEQ ID NO: 4054279 - DNA, 25 bp, Homo sapien
ctgcgtgagcgaaggtttctgagta

SEQ ID NO: 4054280 - DNA, 25 bp, Homo sapien
gaaaagcgaaatgaggaattcaccc

SEQ ID NO: 4054281 - DNA, 25 bp, Homo sapien
cacgttagcaaaccaaaaggctcag

SEQ ID NO: 4054282 - DNA, 25 bp, Homo sapien
ttaatacctgcaggcccgacaaagg

SEQ ID NO: 4054283 - DNA, 25 bp, Homo sapien
tctggccagctcgatgaaactccgt

SEQ ID NO: 4054284 - DNA, 25 bp, Homo sapien
aatgctacagcattatccagggccg

SEQ ID NO: 4054285 - DNA, 25 bp, Homo sapien
actcaatcgaccctgaatgctacag

SEQ ID NO: 4054286 - DNA, 25 bp, Homo sapien
caattcgatgtccttaagtccgcca

SEQ ID NO: 4054287 - DNA, 25 bp, Homo sapien
aatcaagaaatttactcagctgggc

SEQ ID NO: 4054288 - DNA, 25 bp, Homo sapien
cggcttgcgtccgtagttgctcagg

SEQ ID NO: 4054289 - DNA, 25 bp, Homo sapien
tcttttcgtggacggcggcagcacg

SEQ ID NO: 4054290 - DNA, 25 bp, Homo sapien
aattctcgacgcaaactggaggccg

SEQ ID NO: 4054291 - DNA, 25 bp, Homo sapien
cggcagcacggtcctcggcttgcgt

SEQ ID NO: 4054292 - DNA, 25 bp, Homo sapien
tcagggctgggcggcggcgcccctg

SEQ ID NO: 4054293 - DNA, 25 bp, Homo sapien
ctgggcggcggcgcccctgcggcgg

SEQ ID NO: 4054294 - DNA, 25 bp, Homo sapien
gggctgggcggcggcgcccctgcgg

SEQ ID NO: 4054295 - DNA, 25 bp, Homo sapien
agggctgggcggcggcgcccctgcg

SEQ ID NO: 4054296 - DNA, 25 bp, Homo sapien
ggggtagaggcgctggcagccctcg

SEQ ID NO: 4054297 - DNA, 25 bp, Homo sapien
cagcacggggtagaggcgctggcag

SEQ ID NO: 4054298 - DNA, 25 bp, Homo sapien
gcacggggtagaggcgctggcagcc

SEQ ID NO: 4054299 - DNA, 25 bp, Homo sapien
ggtagaggcgctggcagccctcgag

SEQ ID NO: 4054300 - DNA, 25 bp, Homo sapien
gcgccacggtgaggccggcggcggc

SEQ ID NO: 4054301 - DNA, 25 bp, Homo sapien
tctctgtcaggccgccctcgccgct

SEQ ID NO: 4054302 - DNA, 25 bp, Homo sapien
ccagctctctgtcaggccgccctcg

SEQ ID NO: 4054303 - DNA, 25 bp, Homo sapien
agcacaggcatgagcgccacggtga

SEQ ID NO: 4054304 - DNA, 25 bp, Homo sapien
ccgacacctcgagctgcgcgcgcgg

SEQ ID NO: 4054305 - DNA, 25 bp, Homo sapien
ggcccaggcgcacagccggctccag

SEQ ID NO: 4054306 - DNA, 25 bp, Homo sapien
tgcgcgcgcgggtagcggcccaggc

SEQ ID NO: 4054307 - DNA, 25 bp, Homo sapien
agcagcgccgacacctcgagctgcg

SEQ ID NO: 4054308 - DNA, 25 bp, Homo sapien
gcagcgccagcgccagctcacgctc

SEQ ID NO: 4054309 - DNA, 25 bp, Homo sapien
tgcagcgccagcgccagctcacgct

SEQ ID NO: 4054310 - DNA, 25 bp, Homo sapien
ctgcagcgccagcgccagctcacgc

SEQ ID NO: 4054311 - DNA, 25 bp, Homo sapien
ggtgcgcggcggaagtcgcagagca

SEQ ID NO: 4054312 - DNA, 25 bp, Homo sapien
tcgcagagcaggcgaccgcgcagcg

SEQ ID NO: 4054313 - DNA, 25 bp, Homo sapien
cctcggcctgtcgcgggcccgacac

SEQ ID NO: 4054314 - DNA, 25 bp, Homo sapien
gcctgtcgcgggcccgacacggcac

SEQ ID NO: 4054315 - DNA, 25 bp, Homo sapien
tgcgattcttcagggccgcggatgc

SEQ ID NO: 4054316 - DNA, 25 bp, Homo sapien
cgtacacgggccgtagccgcgttgg

SEQ ID NO: 4054317 - DNA, 25 bp, Homo sapien
tcgtcggccgcgtacagctgcggcg

SEQ ID NO: 4054318 - DNA, 25 bp, Homo sapien
gcggatgcggcggtgatccccaggc

SEQ ID NO: 4054319 - DNA, 25 bp, Homo sapien
gcatttattctacagacgccaaagg

SEQ ID NO: 4054320 - DNA, 25 bp, Homo sapien
gaagagggatagagatcatgcggca

SEQ ID NO: 4054321 - DNA, 25 bp, Homo sapien
tacagacgccaaaggctgtcaaaag

SEQ ID NO: 4054322 - DNA, 25 bp, Homo sapien
gccaaaggctgtcaaaagagccagc

SEQ ID NO: 4054323 - DNA, 25 bp, Homo sapien
aaacgattcctacttgctgacgcgg

SEQ ID NO: 4054324 - DNA, 25 bp, Homo sapien
tgagacataggactgctcccaagtg

SEQ ID NO: 4054325 - DNA, 25 bp, Homo sapien
ttctagaccgatggcactgacgtgg

SEQ ID NO: 4054326 - DNA, 25 bp, Homo sapien
gcgtgacgatcaacagcaatgcggg

SEQ ID NO: 4054327 - DNA, 25 bp, Homo sapien
gcaggcagccaacgttcttgcctgt

SEQ ID NO: 4054328 - DNA, 25 bp, Homo sapien
tgggcgaaggaagtggccagctgca

SEQ ID NO: 4054329 - DNA, 25 bp, Homo sapien
tgcacccactcgctggcttttaagc

SEQ ID NO: 4054330 - DNA, 25 bp, Homo sapien
ggcctgtgcagacacatccttgcca

SEQ ID NO: 4054331 - DNA, 25 bp, Homo sapien
acttgacacaggcacgtgatcttgc

SEQ ID NO: 4054332 - DNA, 25 bp, Homo sapien
gacacaggcacgtgatcttgccagc

SEQ ID NO: 4054333 - DNA, 25 bp, Homo sapien
ctggggaacttgacacaggcacgtg

SEQ ID NO: 4054334 - DNA, 25 bp, Homo sapien
gggaacttgacacaggcacgtgatc

SEQ ID NO: 4054335 - DNA, 25 bp, Homo sapien
accctcactagtgtgagcatttgca

SEQ ID NO: 4054336 - DNA, 25 bp, Homo sapien
cagggaccctcactagtgtgagcat

SEQ ID NO: 4054337 - DNA, 25 bp, Homo sapien
gagcagggaccctcactagtgtgag

SEQ ID NO: 4054338 - DNA, 25 bp, Homo sapien
ggaccctcactagtgtgagcatttg

SEQ ID NO: 4054339 - DNA, 25 bp, Homo sapien
cccttaggcaaccacttcgctcaga

SEQ ID NO: 4054340 - DNA, 25 bp, Homo sapien
tgggcccttaggcaaccacttcgct

SEQ ID NO: 4054341 - DNA, 25 bp, Homo sapien
cgtgggcccttaggcaaccacttcg

SEQ ID NO: 4054342 - DNA, 25 bp, Homo sapien
ggcccttaggcaaccacttcgctca

SEQ ID NO: 4054343 - DNA, 25 bp, Homo sapien
agagctgatgagccctaggggaggg

SEQ ID NO: 4054344 - DNA, 25 bp, Homo sapien
cttggctgaggcgccgctctccatc

SEQ ID NO: 4054345 - DNA, 25 bp, Homo sapien
cgccgctctccatctccaggatgac

SEQ ID NO: 4054346 - DNA, 25 bp, Homo sapien
aggcgccgctctccatctccaggat

SEQ ID NO: 4054347 - DNA, 25 bp, Homo sapien
ttggctgaggcgccgctctccatct

SEQ ID NO: 4054348 - DNA, 25 bp, Homo sapien
ttggggttgctgtcgatgaactgct

SEQ ID NO: 4054349 - DNA, 25 bp, Homo sapien
gggttgctgtcgatgaactgcttcg

SEQ ID NO: 4054350 - DNA, 25 bp, Homo sapien
tgctgtcgatgaactgcttcgtctt

SEQ ID NO: 4054351 - DNA, 25 bp, Homo sapien
tgtcgatgaactgcttcgtcttctc

SEQ ID NO: 4054352 - DNA, 25 bp, Homo sapien
gagtctcccgcaattcatccttctg

SEQ ID NO: 4054353 - DNA, 25 bp, Homo sapien
tcgtttctggacatcggctttgctg

SEQ ID NO: 4054354 - DNA, 25 bp, Homo sapien
tggctcggtccaagtcatccatgac

SEQ ID NO: 4054355 - DNA, 25 bp, Homo sapien
catgaccttctttagggatttgaga

SEQ ID NO: 4054356 - DNA, 25 bp, Homo sapien
gaccatctcaatctgggccacaact

SEQ ID NO: 4054357 - DNA, 25 bp, Homo sapien
tagacgaccatctcaatctgggcca

SEQ ID NO: 4054358 - DNA, 25 bp, Homo sapien
ctggaaccaatagacgaccatctca

SEQ ID NO: 4054359 - DNA, 25 bp, Homo sapien
caatagacgaccatctcaatctggg

SEQ ID NO: 4054360 - DNA, 25 bp, Homo sapien
ggatgtcagggtccagcccacccca

SEQ ID NO: 4054361 - DNA, 25 bp, Homo sapien
tgggatgtcagggtccagcccaccc

SEQ ID NO: 4054362 - DNA, 25 bp, Homo sapien
ccgaacccaagtcctccctgactag

SEQ ID NO: 4054363 - DNA, 25 bp, Homo sapien
aacccaagtcctccctgactagtgt

SEQ ID NO: 4054364 - DNA, 25 bp, Homo sapien
agggaatgtccagggtccaaggaca

SEQ ID NO: 4054365 - DNA, 25 bp, Homo sapien
tctgcacatccttgtttggagcagt

SEQ ID NO: 4054366 - DNA, 25 bp, Homo sapien
tctccaaggtcagcgatctccctct

SEQ ID NO: 4054367 - DNA, 25 bp, Homo sapien
cacatccttgtttggagcagtctga

SEQ ID NO: 4054368 - DNA, 25 bp, Homo sapien
tccttgtttggagcagtctgagcct

SEQ ID NO: 4054369 - DNA, 25 bp, Homo sapien
ggaagccccggcggtaggccttgca

SEQ ID NO: 4054370 - DNA, 25 bp, Homo sapien
gaagccccggcggtaggccttgcag

SEQ ID NO: 4054371 - DNA, 25 bp, Homo sapien
gcggtaggccttgcagcaacatacc

SEQ ID NO: 4054372 - DNA, 25 bp, Homo sapien
gtaggccttgcagcaacatacccca

SEQ ID NO: 4054373 - DNA, 25 bp, Homo sapien
gcgtccggcctgattcacatatatt

SEQ ID NO: 4054374 - DNA, 25 bp, Homo sapien
gagatcttgtgtggtggcaggtttc

SEQ ID NO: 4054375 - DNA, 25 bp, Homo sapien
caggtttcttctgccactcaggggt

SEQ ID NO: 4054376 - DNA, 25 bp, Homo sapien
aaagactaaacataggaaagctagg

SEQ ID NO: 4054377 - DNA, 25 bp, Homo sapien
caatcctccggatacccttggcaat

SEQ ID NO: 4054378 - DNA, 25 bp, Homo sapien
caaaagctcctgcatgactcgagtt

SEQ ID NO: 4054379 - DNA, 25 bp, Homo sapien
gcaatggcttcttccgtcacgatca

SEQ ID NO: 4054380 - DNA, 25 bp, Homo sapien
tgcatgactcgagttccgcaggtgc

SEQ ID NO: 4054381 - DNA, 25 bp, Homo sapien
actgagctgagtcaaccacgtggcc

SEQ ID NO: 4054382 - DNA, 25 bp, Homo sapien
tccaaattggcagaagtggctatcc

SEQ ID NO: 4054383 - DNA, 25 bp, Homo sapien
tcaagagctcaacaagcactccagg

SEQ ID NO: 4054384 - DNA, 25 bp, Homo sapien
gctatcccaagccaaactgagctga

SEQ ID NO: 4054385 - DNA, 25 bp, Homo sapien
atcaaacacagcccgtaggccctgg

SEQ ID NO: 4054386 - DNA, 25 bp, Homo sapien
aatggagacgactcgcacagggtca

SEQ ID NO: 4054387 - DNA, 25 bp, Homo sapien
ccagggggcaatcctgggtatagac

SEQ ID NO: 4054388 - DNA, 25 bp, Homo sapien
ggtcatccagcaactcggacaccgg

SEQ ID NO: 4054389 - DNA, 25 bp, Homo sapien
agagtgagagcaccgcactgctaag

SEQ ID NO: 4054390 - DNA, 25 bp, Homo sapien
actgctaagactgtggacagacagt

SEQ ID NO: 4054391 - DNA, 25 bp, Homo sapien
gctttaagcaaatctacgtgcagga

SEQ ID NO: 4054392 - DNA, 25 bp, Homo sapien
cgtgcaggacgaatctgatacaaca

SEQ ID NO: 4054393 - DNA, 25 bp, Homo sapien
ggagcaaccaatgagcctttctggt

SEQ ID NO: 4054394 - DNA, 25 bp, Homo sapien
agcactgagcgcagggcgaagttca

SEQ ID NO: 4054395 - DNA, 25 bp, Homo sapien
tcttgatctgttgggtggacatggc

SEQ ID NO: 4054396 - DNA, 25 bp, Homo sapien
aaatctgaggcggtcaggagcaacc

SEQ ID NO: 4054397 - DNA, 25 bp, Homo sapien
ggttccaatgtgtagcacataccct

SEQ ID NO: 4054398 - DNA, 25 bp, Homo sapien
acataccctcctcggacctgagcat

SEQ ID NO: 4054399 - DNA, 25 bp, Homo sapien
cactttcaggtcaccgtagatggtt

SEQ ID NO: 4054400 - DNA, 25 bp, Homo sapien
gcattcttcactgtaaactctgttt

SEQ ID NO: 4054401 - DNA, 25 bp, Homo sapien
accttcaccaggtagccttcgtcat

SEQ ID NO: 4054402 - DNA, 25 bp, Homo sapien
aaacaggtcttgtccagcaccactc

SEQ ID NO: 4054403 - DNA, 25 bp, Homo sapien
gccttcgtcatagatctggcctcct

SEQ ID NO: 4054404 - DNA, 25 bp, Homo sapien
tggcctgtggacacctcttccacga

SEQ ID NO: 4054405 - DNA, 25 bp, Homo sapien
tactttggggaatcatctgtgacct

SEQ ID NO: 4054406 - DNA, 25 bp, Homo sapien
tccagcataatgaggtcttccccac

SEQ ID NO: 4054407 - DNA, 25 bp, Homo sapien
cgtgcccggagctcttcgatagcgt

SEQ ID NO: 4054408 - DNA, 25 bp, Homo sapien
gagtccaaatggtaattgtactttg

SEQ ID NO: 4054409 - DNA, 25 bp, Homo sapien
aagtacgtgacagcaggatctgccc

SEQ ID NO: 4054410 - DNA, 25 bp, Homo sapien
gaaacttctcttgcagtgtgggatg

SEQ ID NO: 4054411 - DNA, 25 bp, Homo sapien
ttatcgccaattactccctggaagg

SEQ ID NO: 4054412 - DNA, 25 bp, Homo sapien
taatggaaggaaactcatgctcagt

SEQ ID NO: 4054413 - DNA, 25 bp, Homo sapien
atcagtccagtcagatccactggaa

SEQ ID NO: 4054414 - DNA, 25 bp, Homo sapien
gaaacccataggtgtcatagaggag

SEQ ID NO: 4054415 - DNA, 25 bp, Homo sapien
ccatccatgtctaccaccaggccct

SEQ ID NO: 4054416 - DNA, 25 bp, Homo sapien
acccataggtgtcatagaggagcca

SEQ ID NO: 4054417 - DNA, 25 bp, Homo sapien
ctgaattttcctgtccaggatgcga

SEQ ID NO: 4054418 - DNA, 25 bp, Homo sapien
tttcctgtccaggatgcgacgccct

SEQ ID NO: 4054419 - DNA, 25 bp, Homo sapien
gatgcgacgccctctgctgagagtc

SEQ ID NO: 4054420 - DNA, 25 bp, Homo sapien
ttcttcattaatgatgtccttcacc

SEQ ID NO: 4054421 - DNA, 25 bp, Homo sapien
gacaacatccactaacgtagcaaag

SEQ ID NO: 4054422 - DNA, 25 bp, Homo sapien
cagggactggacgacaacatccact

SEQ ID NO: 4054423 - DNA, 25 bp, Homo sapien
ggcattgagcttttcatgggcgtat

SEQ ID NO: 4054424 - DNA, 25 bp, Homo sapien
acagctcggcggagaatccgtctca

SEQ ID NO: 4054425 - DNA, 25 bp, Homo sapien
taggccatgtcaatcccatcggcat

SEQ ID NO: 4054426 - DNA, 25 bp, Homo sapien
ccagtgccacagtgatggtccgagc

SEQ ID NO: 4054427 - DNA, 25 bp, Homo sapien
atggtccgagcgtggtcagccagca

SEQ ID NO: 4054428 - DNA, 25 bp, Homo sapien
ctttcccagtgtatggtcgggcacc

SEQ ID NO: 4054429 - DNA, 25 bp, Homo sapien
ttctgcagcacagataccagtcgtt

SEQ ID NO: 4054430 - DNA, 25 bp, Homo sapien
catagttggacatcttattctgcag

SEQ ID NO: 4054431 - DNA, 25 bp, Homo sapien
agataccagtcgttccaggcccatc

SEQ ID NO: 4054432 - DNA, 25 bp, Homo sapien
caaaaaggtcagtgtcatagttgga

SEQ ID NO: 4054433 - DNA, 25 bp, Homo sapien
aagaaaagaaaaagactgggcatgg

SEQ ID NO: 4054434 - DNA, 25 bp, Homo sapien
ggctcacgcctgtaataccagcatt

SEQ ID NO: 4054435 - DNA, 25 bp, Homo sapien
tgatgaaaccccatccctgccaaaa

SEQ ID NO: 4054436 - DNA, 25 bp, Homo sapien
ttgggaggccgaggcgggggaatca

SEQ ID NO: 4054437 - DNA, 25 bp, Homo sapien
gaacacaaggttccagatctccagc

SEQ ID NO: 4054438 - DNA, 25 bp, Homo sapien
gttgacaagatgtgcggcgtcccga

SEQ ID NO: 4054439 - DNA, 25 bp, Homo sapien
gatctccagcacattagggtcgtcc

SEQ ID NO: 4054440 - DNA, 25 bp, Homo sapien
gaagttatccttcatgttgcctggg

SEQ ID NO: 4054441 - DNA, 25 bp, Homo sapien
gcttcatccccgccaaagtaagtaa

SEQ ID NO: 4054442 - DNA, 25 bp, Homo sapien
tgtttgcattccagatctgcttcta

SEQ ID NO: 4054443 - DNA, 25 bp, Homo sapien
tgccaaactcttgggtgaggagttc

SEQ ID NO: 4054444 - DNA, 25 bp, Homo sapien
cataaagtctttcaatgggaatgcc

SEQ ID NO: 4054445 - DNA, 25 bp, Homo sapien
tgatagacatccttgcccacatcgt

SEQ ID NO: 4054446 - DNA, 25 bp, Homo sapien
ccggatgcacttctgggtattggca

SEQ ID NO: 4054447 - DNA, 25 bp, Homo sapien
tcgtccaggtcattatgtttgcccc

SEQ ID NO: 4054448 - DNA, 25 bp, Homo sapien
cccagcatctcgaagaaggtgtgat

SEQ ID NO: 4054449 - DNA, 25 bp, Homo sapien
gggtgagatgggtcaattgtgttca

SEQ ID NO: 4054450 - DNA, 25 bp, Homo sapien
gtgagatgggtcaattgtgttcagg

SEQ ID NO: 4054451 - DNA, 25 bp, Homo sapien
ggtgagatgggtcaattgtgttcag

SEQ ID NO: 4054452 - DNA, 25 bp, Homo sapien
tgagatgggtcaattgtgttcagga

SEQ ID NO: 4054453 - DNA, 25 bp, Homo sapien
cagccacaggttgatgtggtaaaac

SEQ ID NO: 4054454 - DNA, 25 bp, Homo sapien
ggcctgccagatctaacagccacag

SEQ ID NO: 4054455 - DNA, 25 bp, Homo sapien
taaaacgtgggcttcttcaccagtc

SEQ ID NO: 4054456 - DNA, 25 bp, Homo sapien
ggaaaggcctgccagatctaacagc

SEQ ID NO: 4054457 - DNA, 25 bp, Homo sapien
tggcagacgagtgaacatacgtatg

SEQ ID NO: 4054458 - DNA, 25 bp, Homo sapien
aagaaatctataaatcgctgccgga

SEQ ID NO: 4054459 - DNA, 25 bp, Homo sapien
catccaatgggatggtggcagacga

SEQ ID NO: 4054460 - DNA, 25 bp, Homo sapien
cacttgctgttagagtagagtccat

SEQ ID NO: 4054461 - DNA, 25 bp, Homo sapien
caaccgtgaggtattggtgctcagc

SEQ ID NO: 4054462 - DNA, 25 bp, Homo sapien
ttaagatgacggtctcggtgcgcct

SEQ ID NO: 4054463 - DNA, 25 bp, Homo sapien
tacagcaggattgcacccagctggc

SEQ ID NO: 4054464 - DNA, 25 bp, Homo sapien
tttaagaaatcaaggaatggctggc

SEQ ID NO: 4054465 - DNA, 25 bp, Homo sapien
ctctcctagggtcgccgtccccagc

SEQ ID NO: 4054466 - DNA, 25 bp, Homo sapien
gacgcgcagctgtaccggcctcaga

SEQ ID NO: 4054467 - DNA, 25 bp, Homo sapien
ctattcccgcagacgcgcagctgta

SEQ ID NO: 4054468 - DNA, 25 bp, Homo sapien
aagggcccgctgcacctattcccgc

SEQ ID NO: 4054469 - DNA, 25 bp, Homo sapien
tatctgcgagggtagaagccagacc

SEQ ID NO: 4054470 - DNA, 25 bp, Homo sapien
ctgcctgtgggcgacgtgagtatct

SEQ ID NO: 4054471 - DNA, 25 bp, Homo sapien
cagcggttgttggagtgtaactgcc

SEQ ID NO: 4054472 - DNA, 25 bp, Homo sapien
ttggccagtgccaagagcagcggtt

SEQ ID NO: 4054473 - DNA, 25 bp, Homo sapien
acctcccgatcttgggatccgccca

SEQ ID NO: 4054474 - DNA, 25 bp, Homo sapien
gtctcgacctcccgatcttgggatc

SEQ ID NO: 4054475 - DNA, 25 bp, Homo sapien
tcgacctcccgatcttgggatccgc

SEQ ID NO: 4054476 - DNA, 25 bp, Homo sapien
tctcgacctcccgatcttgggatcc

SEQ ID NO: 4054477 - DNA, 25 bp, Homo sapien
cagagctgtcttaattgttccagca

SEQ ID NO: 4054478 - DNA, 25 bp, Homo sapien
cagacaataccctgtacggctttca

SEQ ID NO: 4054479 - DNA, 25 bp, Homo sapien
tggaagctgtaaacacatgagtggg

SEQ ID NO: 4054480 - DNA, 25 bp, Homo sapien
tgtctgtaatccttgcttggccact

SEQ ID NO: 4054481 - DNA, 25 bp, Homo sapien
cactgatggttggtgtattcagaag

SEQ ID NO: 4054482 - DNA, 25 bp, Homo sapien
gcagttactccctgtttccctacaa

SEQ ID NO: 4054483 - DNA, 25 bp, Homo sapien
tggacatatagtttcaatactcggg

SEQ ID NO: 4054484 - DNA, 25 bp, Homo sapien
gaacatacggtatgtgatcctttgt

SEQ ID NO: 4054485 - DNA, 25 bp, Homo sapien
gatactggtaccatttgatttgtaa

SEQ ID NO: 4054486 - DNA, 25 bp, Homo sapien
gcattggcagatactggtaccattt

SEQ ID NO: 4054487 - DNA, 25 bp, Homo sapien
ggattgtatgaccaaagtgttttta

SEQ ID NO: 4054488 - DNA, 25 bp, Homo sapien
aatcaacaaactggattgtatgacc

SEQ ID NO: 4054489 - DNA, 25 bp, Homo sapien
caaactcccctctgtactcggtgaa

SEQ ID NO: 4054490 - DNA, 25 bp, Homo sapien
tgaattagagtaaacgcctggtagg

SEQ ID NO: 4054491 - DNA, 25 bp, Homo sapien
tcaacaagctgatcagaagcaacct

SEQ ID NO: 4054492 - DNA, 25 bp, Homo sapien
tagataactgcaggaaaagagggct

SEQ ID NO: 4054493 - DNA, 25 bp, Homo sapien
agccgagactgcacctttgcactgc

SEQ ID NO: 4054494 - DNA, 25 bp, Homo sapien
gcagcctgggcaatagatcgagact

SEQ ID NO: 4054495 - DNA, 25 bp, Homo sapien
gccgagactgcacctttgcactgca

SEQ ID NO: 4054496 - DNA, 25 bp, Homo sapien
actgcagcctgggcaatagatcgag

SEQ ID NO: 4054497 - DNA, 25 bp, Homo sapien
cattttgcacagaccagactagttg

SEQ ID NO: 4054498 - DNA, 25 bp, Homo sapien
aaatattctacattctggccgggcg

SEQ ID NO: 4054499 - DNA, 25 bp, Homo sapien
tttttcgaccaagatcaagttagcg

SEQ ID NO: 4054500 - DNA, 25 bp, Homo sapien
cacctcatgaggacattctttgcca

SEQ ID NO: 4054501 - DNA, 25 bp, Homo sapien
acaaaaattctacattctagatttg

SEQ ID NO: 4054502 - DNA, 25 bp, Homo sapien
cagagctagcagtgagctgaaatag

SEQ ID NO: 4054503 - DNA, 25 bp, Homo sapien
aattctacattctagatttgtttat

SEQ ID NO: 4054504 - DNA, 25 bp, Homo sapien
agagctagcagtgagctgaaatagc

SEQ ID NO: 4054505 - DNA, 25 bp, Homo sapien
tggtctagaactccaagtctcaagc

SEQ ID NO: 4054506 - DNA, 25 bp, Homo sapien
ctcctgcctcgtcccctcaaagtga

SEQ ID NO: 4054507 - DNA, 25 bp, Homo sapien
tctagaactccaagtctcaagcaat

SEQ ID NO: 4054508 - DNA, 25 bp, Homo sapien
tgcctcgtcccctcaaagtgatggg

SEQ ID NO: 4054509 - DNA, 25 bp, Homo sapien
tgctaatctagatgctgtggctgat

SEQ ID NO: 4054510 - DNA, 25 bp, Homo sapien
tcatgctaatctagatgctgtggct

SEQ ID NO: 4054511 - DNA, 25 bp, Homo sapien
aatctagatgctgtggctgattact

SEQ ID NO: 4054512 - DNA, 25 bp, Homo sapien
taatctagatgctgtggctgattac

SEQ ID NO: 4054513 - DNA, 25 bp, Homo sapien
tcatagagaagttggttgtcctgtg

SEQ ID NO: 4054514 - DNA, 25 bp, Homo sapien
cagatgctgggctatgtcatagaga

SEQ ID NO: 4054515 - DNA, 25 bp, Homo sapien
tcagatgctgggctatgtcatagag

SEQ ID NO: 4054516 - DNA, 25 bp, Homo sapien
tccactattgcaggactttcctcag

SEQ ID NO: 4054517 - DNA, 25 bp, Homo sapien
cagttccacttcgtagagctcagac

SEQ ID NO: 4054518 - DNA, 25 bp, Homo sapien
tgttcaaagccctacagttcagaga

SEQ ID NO: 4054519 - DNA, 25 bp, Homo sapien
tgttatcgcgttcctaacagtagaa

SEQ ID NO: 4054520 - DNA, 25 bp, Homo sapien
tgaagtaaggcaataaacggagggc

SEQ ID NO: 4054521 - DNA, 25 bp, Homo sapien
ttaaccactgatgaattgtcctctg

SEQ ID NO: 4054522 - DNA, 25 bp, Homo sapien
gacgtgagctctcagtttaaccact

SEQ ID NO: 4054523 - DNA, 25 bp, Homo sapien
tagagtgacagtttgctcctccaag

SEQ ID NO: 4054524 - DNA, 25 bp, Homo sapien
ttgtcctctgtaaaagacaggttct

SEQ ID NO: 4054525 - DNA, 25 bp, Homo sapien
gaaagtaatttgtgctcaatggaga

SEQ ID NO: 4054526 - DNA, 25 bp, Homo sapien
tgttcttccttgatccagcccacag

SEQ ID NO: 4054527 - DNA, 25 bp, Homo sapien
cccagtctcagtctggcactggtaa

SEQ ID NO: 4054528 - DNA, 25 bp, Homo sapien
cacagaatctgattgcccagtctca

SEQ ID NO: 4054529 - DNA, 25 bp, Homo sapien
tacatagcctaaagatagagcccct

SEQ ID NO: 4054530 - DNA, 25 bp, Homo sapien
agtttgcccagaaagtggtcccaga

SEQ ID NO: 4054531 - DNA, 25 bp, Homo sapien
cagcagcatttgtttgacgggccat

SEQ ID NO: 4054532 - DNA, 25 bp, Homo sapien
aaactgaagcgtgaggaagagaccc

SEQ ID NO: 4054533 - DNA, 25 bp, Homo sapien
gattgagcgcttccgagagggcaaa

SEQ ID NO: 4054534 - DNA, 25 bp, Homo sapien
tatacagggaagtcggatggtctca

SEQ ID NO: 4054535 - DNA, 25 bp, Homo sapien
tggtgaccaccaacgtgtgtgcccg

SEQ ID NO: 4054536 - DNA, 25 bp, Homo sapien
ggtcccaggcccaattagagccaga

SEQ ID NO: 4054537 - DNA, 25 bp, Homo sapien
gcagacttgcatatccctgatgagc

SEQ ID NO: 4054538 - DNA, 25 bp, Homo sapien
caccgctgtgcatcgaatgagggaa

SEQ ID NO: 4054539 - DNA, 25 bp, Homo sapien
gaatcctgaccccttgagagagagt

SEQ ID NO: 4054540 - DNA, 25 bp, Homo sapien
ggtgagtttctgagcgcatacgtag

SEQ ID NO: 4054541 - DNA, 25 bp, Homo sapien
tcctttctgcgtgtagctgtcccgg

SEQ ID NO: 4054542 - DNA, 25 bp, Homo sapien
tggttcctctagtgacaggcatggg

SEQ ID NO: 4054543 - DNA, 25 bp, Homo sapien
tgggatcctgattcctggcagcttg

SEQ ID NO: 4054544 - DNA, 25 bp, Homo sapien
ggataaattgtagcgtatgcaccat

SEQ ID NO: 4054545 - DNA, 25 bp, Homo sapien
ccttaagggcagagtagctacctac

SEQ ID NO: 4054546 - DNA, 25 bp, Homo sapien
gtattagactggtgatgtaccttga

SEQ ID NO: 4054547 - DNA, 25 bp, Homo sapien
gaagttacatgctctccttaagggc

SEQ ID NO: 4054548 - DNA, 25 bp, Homo sapien
cctggcctgtatcctactctttgaa

SEQ ID NO: 4054549 - DNA, 25 bp, Homo sapien
aaaagatatcgcaggaaggccctcc

SEQ ID NO: 4054550 - DNA, 25 bp, Homo sapien
tgcggtgcccgtggtaacagcgttt

SEQ ID NO: 4054551 - DNA, 25 bp, Homo sapien
tttcatggtctccagtgcggtgccc

SEQ ID NO: 4054552 - DNA, 25 bp, Homo sapien
ggttgttacccaggcatagacttgc
